United States Patent Application Publication US 2005/0244851 A1 - sequence listing, part 79

SEQ ID NO: 3075128 - DNA, 25 bp, Homo sapien
tcttactaatgagtaacctggaaat

SEQ ID NO: 3075129 - DNA, 25 bp, Homo sapien
aattcagctcgtccctgggccttca

SEQ ID NO: 3075130 - DNA, 25 bp, Homo sapien
taattttcctggctctccaaacatg

SEQ ID NO: 3075131 - DNA, 25 bp, Homo sapien
tactgaatggctcatttgctgcagc

SEQ ID NO: 3075132 - DNA, 25 bp, Homo sapien
gctggtaattcagctcgtccctggg

SEQ ID NO: 3075133 - DNA, 25 bp, Homo sapien
ccttgctatggaatatgtaacgcat

SEQ ID NO: 3075134 - DNA, 25 bp, Homo sapien
tgccttgctatggaatatgtaacgc

SEQ ID NO: 3075135 - DNA, 25 bp, Homo sapien
gctatggaatatgtaacgcattttc

SEQ ID NO: 3075136 - DNA, 25 bp, Homo sapien
gcctgccttgctatggaatatgtaa

SEQ ID NO: 3075137 - DNA, 25 bp, Homo sapien
caattcaaagcgttgtctctgcggg

SEQ ID NO: 3075138 - DNA, 25 bp, Homo sapien
cttcatgctccagcaattcaaagcg

SEQ ID NO: 3075139 - DNA, 25 bp, Homo sapien
atacctggtaaaataactgaccact

SEQ ID NO: 3075140 - DNA, 25 bp, Homo sapien
ttgtctctgcgggacatacctggta

SEQ ID NO: 3075141 - DNA, 25 bp, Homo sapien
tcaggttggttcttcctctgtttgc

SEQ ID NO: 3075142 - DNA, 25 bp, Homo sapien
ggttggttcttcctctgtttgcctg

SEQ ID NO: 3075143 - DNA, 25 bp, Homo sapien
gttggttcttcctctgtttgcctgt

SEQ ID NO: 3075144 - DNA, 25 bp, Homo sapien
caggttggttcttcctctgtttgcc

SEQ ID NO: 3075145 - DNA, 25 bp, Homo sapien
atggccactggcccatcttggctgt

SEQ ID NO: 3075146 - DNA, 25 bp, Homo sapien
ggccactggcccatcttggctgtcc

SEQ ID NO: 3075147 - DNA, 25 bp, Homo sapien
ccactggcccatcttggctgtccca

SEQ ID NO: 3075148 - DNA, 25 bp, Homo sapien
tggccactggcccatcttggctgtc

SEQ ID NO: 3075149 - DNA, 25 bp, Homo sapien
cctttcctgataatccagagtaatt

SEQ ID NO: 3075150 - DNA, 25 bp, Homo sapien
tcactggctgttcgttagaagcaca

SEQ ID NO: 3075151 - DNA, 25 bp, Homo sapien
ttgggctgccaagccataaatcttc

SEQ ID NO: 3075152 - DNA, 25 bp, Homo sapien
gagtaattgttatgaaatatgggct

SEQ ID NO: 3075153 - DNA, 25 bp, Homo sapien
ttaccaaaaacgtgacatcccgatg

SEQ ID NO: 3075154 - DNA, 25 bp, Homo sapien
ccaaaaacgtgacatcccgatgaaa

SEQ ID NO: 3075155 - DNA, 25 bp, Homo sapien
tgttaccaaaaacgtgacatcccga

SEQ ID NO: 3075156 - DNA, 25 bp, Homo sapien
taccaaaaacgtgacatcccgatga

SEQ ID NO: 3075157 - DNA, 25 bp, Homo sapien
tcttcgtactgagcaatcttgatca

SEQ ID NO: 3075158 - DNA, 25 bp, Homo sapien
ttctaagagtaagcagcagaagtca

SEQ ID NO: 3075159 - DNA, 25 bp, Homo sapien
aggctgtttctaagagtaagcagca

SEQ ID NO: 3075160 - DNA, 25 bp, Homo sapien
tcagtgtcttcttcgtactgagcaa

SEQ ID NO: 3075161 - DNA, 25 bp, Homo sapien
gaagcccagccggtggaaactaaca

SEQ ID NO: 3075162 - DNA, 25 bp, Homo sapien
cagccggtggaaactaacagcccca

SEQ ID NO: 3075163 - DNA, 25 bp, Homo sapien
gggagctatcgaacacggataatga

SEQ ID NO: 3075164 - DNA, 25 bp, Homo sapien
ataaacgagtcggtgttcatctggg

SEQ ID NO: 3075165 - DNA, 25 bp, Homo sapien
gacccagcggatataacctgcaggg

SEQ ID NO: 3075166 - DNA, 25 bp, Homo sapien
gggaactgccacatggagcgagacc

SEQ ID NO: 3075167 - DNA, 25 bp, Homo sapien
gggcacccacggctccattaatggt

SEQ ID NO: 3075168 - DNA, 25 bp, Homo sapien
tctgacactgcgtgagcccttgatg

SEQ ID NO: 3075169 - DNA, 25 bp, Homo sapien
ctgaaacttggcataggaggaacct

SEQ ID NO: 3075170 - DNA, 25 bp, Homo sapien
gacagtctgagtagtggctttccga

SEQ ID NO: 3075171 - DNA, 25 bp, Homo sapien
gctttccgagacttggacagctttc

SEQ ID NO: 3075172 - DNA, 25 bp, Homo sapien
gagctggccagttaacaggttgaca

SEQ ID NO: 3075173 - DNA, 25 bp, Homo sapien
tgctggcgtcggccacagaattctt

SEQ ID NO: 3075174 - DNA, 25 bp, Homo sapien
tggctgctggcgtcggccacagaat

SEQ ID NO: 3075175 - DNA, 25 bp, Homo sapien
cttttgctgactttagacttggtgt

SEQ ID NO: 3075176 - DNA, 25 bp, Homo sapien
gctgctggcgtcggccacagaattc

SEQ ID NO: 3075177 - DNA, 25 bp, Homo sapien
accctgaatgcgctggcaaagagga

SEQ ID NO: 3075178 - DNA, 25 bp, Homo sapien
gcttcacacctaattctcccagatg

SEQ ID NO: 3075179 - DNA, 25 bp, Homo sapien
gggacacaacagtaggagacacaaa

SEQ ID NO: 3075180 - DNA, 25 bp, Homo sapien
gcaaagaggaggcttcacacctaat

SEQ ID NO: 3075181 - DNA, 25 bp, Homo sapien
tataggagtatagggtgttctgttc

SEQ ID NO: 3075182 - DNA, 25 bp, Homo sapien
ggtgttctgttctgtaacaatgtcc

SEQ ID NO: 3075183 - DNA, 25 bp, Homo sapien
gaatgttctttcgttgagtatagga

SEQ ID NO: 3075184 - DNA, 25 bp, Homo sapien
tgtcctggtttttagccctgcaagg

SEQ ID NO: 3075185 - DNA, 25 bp, Homo sapien
tgggctgttacagtagcttcctggc

SEQ ID NO: 3075186 - DNA, 25 bp, Homo sapien
cagttttaaggtagctagtggctgc

SEQ ID NO: 3075187 - DNA, 25 bp, Homo sapien
cattgactccaccacggctaatgtg

SEQ ID NO: 3075188 - DNA, 25 bp, Homo sapien
tagtggctgcgatattaagtgactg

SEQ ID NO: 3075189 - DNA, 25 bp, Homo sapien
gataagccctcgtagaaacttccaa

SEQ ID NO: 3075190 - DNA, 25 bp, Homo sapien
aaacttccaatctacccatttcaag

SEQ ID NO: 3075191 - DNA, 25 bp, Homo sapien
tgccagccctgataagccctcgtag

SEQ ID NO: 3075192 - DNA, 25 bp, Homo sapien
tggcttgtggctagtcctgcttact

SEQ ID NO: 3075193 - DNA, 25 bp, Homo sapien
ctgaagaaaccaggtgggatattgc

SEQ ID NO: 3075194 - DNA, 25 bp, Homo sapien
tatgttgtcgcttacactcccaagt

SEQ ID NO: 3075195 - DNA, 25 bp, Homo sapien
tattaaattatgttgtcgcttacac

SEQ ID NO: 3075196 - DNA, 25 bp, Homo sapien
tatcatagatataacctttatctcc

SEQ ID NO: 3075197 - DNA, 25 bp, Homo sapien
gtcgcttacactcccaagtaggaca

SEQ ID NO: 3075198 - DNA, 25 bp, Homo sapien
tttaagcattgatttgctcctggct

SEQ ID NO: 3075199 - DNA, 25 bp, Homo sapien
tgcacgtaatgatttaagcattgat

SEQ ID NO: 3075200 - DNA, 25 bp, Homo sapien
agcattgatttgctcctggctttct

SEQ ID NO: 3075201 - DNA, 25 bp, Homo sapien
tactggagctatgcacgtaatgatt

SEQ ID NO: 3075202 - DNA, 25 bp, Homo sapien
gctacatttatcagggacagtgggt

SEQ ID NO: 3075203 - DNA, 25 bp, Homo sapien
cacaaatctgtagacagcgccacca

SEQ ID NO: 3075204 - DNA, 25 bp, Homo sapien
cagtttgctgacagacgtgtggtga

SEQ ID NO: 3075205 - DNA, 25 bp, Homo sapien
tcttgttagccatctctgagcgcta

SEQ ID NO: 3075206 - DNA, 25 bp, Homo sapien
actaaagtactttggcatgcatcca

SEQ ID NO: 3075207 - DNA, 25 bp, Homo sapien
gacttctagaactattgggtgatgg

SEQ ID NO: 3075208 - DNA, 25 bp, Homo sapien
catgcaccagtctacacaggcacta

SEQ ID NO: 3075209 - DNA, 25 bp, Homo sapien
tactttttgcctgcaggtggacttc

SEQ ID NO: 3075210 - DNA, 25 bp, Homo sapien
agcatgttctagtcgtttacaaggg

SEQ ID NO: 3075211 - DNA, 25 bp, Homo sapien
gaaccacctatctgtgttggaggag

SEQ ID NO: 3075212 - DNA, 25 bp, Homo sapien
tgcagggactttgatcagaaccacc

SEQ ID NO: 3075213 - DNA, 25 bp, Homo sapien
tcagattgcacaaggttgagcatgt

SEQ ID NO: 3075214 - DNA, 25 bp, Homo sapien
ctggcatggcaatcctgttctccat

SEQ ID NO: 3075215 - DNA, 25 bp, Homo sapien
tcactttataccctcggatgaccat

SEQ ID NO: 3075216 - DNA, 25 bp, Homo sapien
atcagggattagctggacctcaggg

SEQ ID NO: 3075217 - DNA, 25 bp, Homo sapien
ctatcagggattagctggacctcag

SEQ ID NO: 3075218 - DNA, 25 bp, Homo sapien
gctgctcatcactttataccctcgg

SEQ ID NO: 3075219 - DNA, 25 bp, Homo sapien
taactattggacaagccacactgga

SEQ ID NO: 3075220 - DNA, 25 bp, Homo sapien
ccagttcagactgccaaaattataa

SEQ ID NO: 3075221 - DNA, 25 bp, Homo sapien
tcaggataatgcatcaatttgtttc

SEQ ID NO: 3075222 - DNA, 25 bp, Homo sapien
tctgtcagttgaaaatacttgatgg

SEQ ID NO: 3075223 - DNA, 25 bp, Homo sapien
tcatatctagaatatcgatagacat

SEQ ID NO: 3075224 - DNA, 25 bp, Homo sapien
gtcatatctagaatatcgatagaca

SEQ ID NO: 3075225 - DNA, 25 bp, Homo sapien
tttggataattgtcatatctagaat

SEQ ID NO: 3075226 - DNA, 25 bp, Homo sapien
acttgatcccttatttcgaatatcg

SEQ ID NO: 3075227 - DNA, 25 bp, Homo sapien
aaagtctgtacttgatcccttattt

SEQ ID NO: 3075228 - DNA, 25 bp, Homo sapien
tctgtacttgatcccttatttcgaa

SEQ ID NO: 3075229 - DNA, 25 bp, Homo sapien
tcccttatttcgaatatcgttggcc

SEQ ID NO: 3075230 - DNA, 25 bp, Homo sapien
catggcccacgctggatgcctggtt

SEQ ID NO: 3075231 - DNA, 25 bp, Homo sapien
aaacatggcccacgctggatgcctg

SEQ ID NO: 3075232 - DNA, 25 bp, Homo sapien
tggcccacgctggatgcctggtttt

SEQ ID NO: 3075233 - DNA, 25 bp, Homo sapien
tagaaacatggcccacgctggatgc

SEQ ID NO: 3075234 - DNA, 25 bp, Homo sapien
tcattttctgctccaatggcggcta

SEQ ID NO: 3075235 - DNA, 25 bp, Homo sapien
cagatgtgacaaagcgatttcgaac

SEQ ID NO: 3075236 - DNA, 25 bp, Homo sapien
tgtgacaaagcgatttcgaacacag

SEQ ID NO: 3075237 - DNA, 25 bp, Homo sapien
tgcagatgtgacaaagcgatttcga

SEQ ID NO: 3075238 - DNA, 25 bp, Homo sapien
gacaaagcgatttcgaacacagtta

SEQ ID NO: 3075239 - DNA, 25 bp, Homo sapien
catgttttctgtctccaagattgga

SEQ ID NO: 3075240 - DNA, 25 bp, Homo sapien
atgttttctgtctccaagattggac

SEQ ID NO: 3075241 - DNA, 25 bp, Homo sapien
cagactgtttcttgtttaacggcat

SEQ ID NO: 3075242 - DNA, 25 bp, Homo sapien
cacagactgtttcttgtttaacggc

SEQ ID NO: 3075243 - DNA, 25 bp, Homo sapien
acagactgtttcttgtttaacggca

SEQ ID NO: 3075244 - DNA, 25 bp, Homo sapien
gtcacagactgtttcttgtttaacg

SEQ ID NO: 3075245 - DNA, 25 bp, Homo sapien
ctcatgatacagagtatgagaagcc

SEQ ID NO: 3075246 - DNA, 25 bp, Homo sapien
tgatacagagtatgagaagccttgg

SEQ ID NO: 3075247 - DNA, 25 bp, Homo sapien
catgatacagagtatgagaagcctt

SEQ ID NO: 3075248 - DNA, 25 bp, Homo sapien
tcatgatacagagtatgagaagcct

SEQ ID NO: 3075249 - DNA, 25 bp, Homo sapien
tagccaggatgtcccagtatgtcct

SEQ ID NO: 3075250 - DNA, 25 bp, Homo sapien
tgactgtgcttcctttccatagcca

SEQ ID NO: 3075251 - DNA, 25 bp, Homo sapien
agtatgtcctttcccttggttctag

SEQ ID NO: 3075252 - DNA, 25 bp, Homo sapien
ggcatttccagcagtctaatttccc

SEQ ID NO: 3075253 - DNA, 25 bp, Homo sapien
catcatgagtctgtatgctgcttca

SEQ ID NO: 3075254 - DNA, 25 bp, Homo sapien
gaatcatcatgagtctgtatgctgc

SEQ ID NO: 3075255 - DNA, 25 bp, Homo sapien
gttgttgaatcatcatgagtctgta

SEQ ID NO: 3075256 - DNA, 25 bp, Homo sapien
gagtctgtatgctgcttcaacctga

SEQ ID NO: 3075257 - DNA, 25 bp, Homo sapien
gcatgtcacatttctgtaaccatag

SEQ ID NO: 3075258 - DNA, 25 bp, Homo sapien
tacaagggcatccaaagcatgggaa

SEQ ID NO: 3075259 - DNA, 25 bp, Homo sapien
gacattcttattggatagatccgag

SEQ ID NO: 3075260 - DNA, 25 bp, Homo sapien
tagatccgagtcacatacaagggca

SEQ ID NO: 3075261 - DNA, 25 bp, Homo sapien
ctctcctccaattttttctcatcca

SEQ ID NO: 3075262 - DNA, 25 bp, Homo sapien
tctcctccaattttttctcatccat

SEQ ID NO: 3075263 - DNA, 25 bp, Homo sapien
tctgagaagctaaggaccgtgcctg

SEQ ID NO: 3075264 - DNA, 25 bp, Homo sapien
tcttgtgtctgtgttgggtctccag

SEQ ID NO: 3075265 - DNA, 25 bp, Homo sapien
tggaagaaatggaatgtccactctt

SEQ ID NO: 3075266 - DNA, 25 bp, Homo sapien
aaataaacttgctctaccaagagtg

SEQ ID NO: 3075267 - DNA, 25 bp, Homo sapien
ggagctgctggcggtttaactgttt

SEQ ID NO: 3075268 - DNA, 25 bp, Homo sapien
gctgctggcggtttaactgtttctg

SEQ ID NO: 3075269 - DNA, 25 bp, Homo sapien
ctggcggtttaactgtttctgttgc

SEQ ID NO: 3075270 - DNA, 25 bp, Homo sapien
ggcggtttaactgtttctgttgctc

SEQ ID NO: 3075271 - DNA, 25 bp, Homo sapien
tgcatcagctccacgttgttagcca

SEQ ID NO: 3075272 - DNA, 25 bp, Homo sapien
tggagttgtttgacctgcatcagct

SEQ ID NO: 3075273 - DNA, 25 bp, Homo sapien
tctcagccataagaggggatatctg

SEQ ID NO: 3075274 - DNA, 25 bp, Homo sapien
gggatatctggagttgtttgacctg

SEQ ID NO: 3075275 - DNA, 25 bp, Homo sapien
agatgacatgactgcatatctagaa

SEQ ID NO: 3075276 - DNA, 25 bp, Homo sapien
gcatgtaaacagaaccaaagacgaa

SEQ ID NO: 3075277 - DNA, 25 bp, Homo sapien
ttgcagatgacatgactgcatatct

SEQ ID NO: 3075278 - DNA, 25 bp, Homo sapien
cagaaccaaagacgaaaaccacgtg

SEQ ID NO: 3075279 - DNA, 25 bp, Homo sapien
catttcaaccactaactgagcagta

SEQ ID NO: 3075280 - DNA, 25 bp, Homo sapien
gcgtgaaattcctgtctaccgtaga

SEQ ID NO: 3075281 - DNA, 25 bp, Homo sapien
tttggttccatcgaagagctgatag

SEQ ID NO: 3075282 - DNA, 25 bp, Homo sapien
tggtttctgagaggcagtatggaca

SEQ ID NO: 3075283 - DNA, 25 bp, Homo sapien
taatggtcttcaggcaacaagctct

SEQ ID NO: 3075284 - DNA, 25 bp, Homo sapien
aatgtaatgacccagctaagccagg

SEQ ID NO: 3075285 - DNA, 25 bp, Homo sapien
tagcatgtggcttctatctccaagg

SEQ ID NO: 3075286 - DNA, 25 bp, Homo sapien
gagggaatccttttattggtagcca

SEQ ID NO: 3075287 - DNA, 25 bp, Homo sapien
ggccatgataatctcgcgtcttcct

SEQ ID NO: 3075288 - DNA, 25 bp, Homo sapien
tcaccaagttgcacccaggagcttg

SEQ ID NO: 3075289 - DNA, 25 bp, Homo sapien
tgtctttggtgcattgctgcatgcg

SEQ ID NO: 3075290 - DNA, 25 bp, Homo sapien
tgcatgcacgtttaaatgtctttgg

SEQ ID NO: 3075291 - DNA, 25 bp, Homo sapien
ttcgggatgcgttttgtgttattgt

SEQ ID NO: 3075292 - DNA, 25 bp, Homo sapien
tgggagctacgtagatgacattgaa

SEQ ID NO: 3075293 - DNA, 25 bp, Homo sapien
tcagaatgtttctattttcgggatg

SEQ ID NO: 3075294 - DNA, 25 bp, Homo sapien
cataggttgtgggagctacgtagat

SEQ ID NO: 3075295 - DNA, 25 bp, Homo sapien
tgagggcttcctcacggggaccagg

SEQ ID NO: 3075296 - DNA, 25 bp, Homo sapien
ccaactgctgccttaggacttgatc

SEQ ID NO: 3075297 - DNA, 25 bp, Homo sapien
aggagccaggcccaactgctgcctt

SEQ ID NO: 3075298 - DNA, 25 bp, Homo sapien
gccaggcccaactgctgccttagga

SEQ ID NO: 3075299 - DNA, 25 bp, Homo sapien
gataatttgtaccatattgactggg

SEQ ID NO: 3075300 - DNA, 25 bp, Homo sapien
cctggattgcaccaagagcacagta

SEQ ID NO: 3075301 - DNA, 25 bp, Homo sapien
taagaccttattggccctggattgc

SEQ ID NO: 3075302 - DNA, 25 bp, Homo sapien
ctgggttacttatcatttgcaaaca

SEQ ID NO: 3075303 - DNA, 25 bp, Homo sapien
ctcagcctcatcatgcatgcagctc

SEQ ID NO: 3075304 - DNA, 25 bp, Homo sapien
ctcattgccttgctaaaggtaaaga

SEQ ID NO: 3075305 - DNA, 25 bp, Homo sapien
cattgccttgctaaaggtaaagacc

SEQ ID NO: 3075306 - DNA, 25 bp, Homo sapien
ttgccttgctaaaggtaaagacctc

SEQ ID NO: 3075307 - DNA, 25 bp, Homo sapien
agtgcatactgaatggaggcgtctg

SEQ ID NO: 3075308 - DNA, 25 bp, Homo sapien
cagcccctctgcgtgtttgggtaaa

SEQ ID NO: 3075309 - DNA, 25 bp, Homo sapien
gaggcgtctgcagaccttctgggct

SEQ ID NO: 3075310 - DNA, 25 bp, Homo sapien
gaaatatgcagcttgagctgtggtc

SEQ ID NO: 3075311 - DNA, 25 bp, Homo sapien
gactgtttgcagacaccgcactgta

SEQ ID NO: 3075312 - DNA, 25 bp, Homo sapien
ttgaaaggccctaattgcagttgta

SEQ ID NO: 3075313 - DNA, 25 bp, Homo sapien
tgagaccggtcagactttgaatgtg

SEQ ID NO: 3075314 - DNA, 25 bp, Homo sapien
tatgaatttcatgggtgagaccggt

SEQ ID NO: 3075315 - DNA, 25 bp, Homo sapien
tcgccctggagtaatttcggatgcc

SEQ ID NO: 3075316 - DNA, 25 bp, Homo sapien
gcggtcgccctggagtaatttcgga

SEQ ID NO: 3075317 - DNA, 25 bp, Homo sapien
ccgcggtcgccctggagtaatttcg

SEQ ID NO: 3075318 - DNA, 25 bp, Homo sapien
ctggagtaatttcggatgcccagcc

SEQ ID NO: 3075319 - DNA, 25 bp, Homo sapien
ctctcccggcggctcatgctgccgg

SEQ ID NO: 3075320 - DNA, 25 bp, Homo sapien
tctcccggcggctcatgctgccggc

SEQ ID NO: 3075321 - DNA, 25 bp, Homo sapien
tcattgtaaattaagagtatctgct

SEQ ID NO: 3075322 - DNA, 25 bp, Homo sapien
tattccagtgcccttcgcatggcga

SEQ ID NO: 3075323 - DNA, 25 bp, Homo sapien
tgttaacctgctatttatattccag

SEQ ID NO: 3075324 - DNA, 25 bp, Homo sapien
agagaacaaatggaatgactaatca

SEQ ID NO: 3075325 - DNA, 25 bp, Homo sapien
cctgacaaggccacataccaatggg

SEQ ID NO: 3075326 - DNA, 25 bp, Homo sapien
tggaatcttaaaccctgacaaggcc

SEQ ID NO: 3075327 - DNA, 25 bp, Homo sapien
aaatggaatcttaaaccctgacaag

SEQ ID NO: 3075328 - DNA, 25 bp, Homo sapien
caaggccacataccaatgggagtta

SEQ ID NO: 3075329 - DNA, 25 bp, Homo sapien
aggctgctcatgataggtggccctg

SEQ ID NO: 3075330 - DNA, 25 bp, Homo sapien
ttgcaactctgcaaattgccagcaa

SEQ ID NO: 3075331 - DNA, 25 bp, Homo sapien
caaggctgctcatgataggtggccc

SEQ ID NO: 3075332 - DNA, 25 bp, Homo sapien
ctttaccccttgcaactctgcaaat

SEQ ID NO: 3075333 - DNA, 25 bp, Homo sapien
tggcatctggatgctaccatcgcca

SEQ ID NO: 3075334 - DNA, 25 bp, Homo sapien
tctggatgctaccatcgccaaacac

SEQ ID NO: 3075335 - DNA, 25 bp, Homo sapien
gcatctggatgctaccatcgccaaa

SEQ ID NO: 3075336 - DNA, 25 bp, Homo sapien
catctggatgctaccatcgccaaac

SEQ ID NO: 3075337 - DNA, 25 bp, Homo sapien
aaatgatgcttttattaaaggaact

SEQ ID NO: 3075338 - DNA, 25 bp, Homo sapien
gtgttggtttataaattggcagcaa

SEQ ID NO: 3075339 - DNA, 25 bp, Homo sapien
taagtgttggtttataaattggcag

SEQ ID NO: 3075340 - DNA, 25 bp, Homo sapien
tgaaggatttaagtgttggtttata

SEQ ID NO: 3075341 - DNA, 25 bp, Homo sapien
tgccattaacaggaatggtacccag

SEQ ID NO: 3075342 - DNA, 25 bp, Homo sapien
aacaggaatggtacccagggcctgg

SEQ ID NO: 3075343 - DNA, 25 bp, Homo sapien
taacaggaatggtacccagggcctg

SEQ ID NO: 3075344 - DNA, 25 bp, Homo sapien
cattaacaggaatggtacccagggc

SEQ ID NO: 3075345 - DNA, 25 bp, Homo sapien
ccacatttcaaagcggagccggagg

SEQ ID NO: 3075346 - DNA, 25 bp, Homo sapien
taaatcatcgctggcgtccacattt

SEQ ID NO: 3075347 - DNA, 25 bp, Homo sapien
tcccaagctctgatctatggattgt

SEQ ID NO: 3075348 - DNA, 25 bp, Homo sapien
gaggagtgccggtgatttctgggtg

SEQ ID NO: 3075349 - DNA, 25 bp, Homo sapien
tgtgcccctaattagaacaagtcgc

SEQ ID NO: 3075350 - DNA, 25 bp, Homo sapien
gcgctgtgcccctaattagaacaag

SEQ ID NO: 3075351 - DNA, 25 bp, Homo sapien
taattagaacaagtcgcacagacat

SEQ ID NO: 3075352 - DNA, 25 bp, Homo sapien
ctcagcagcgctgtgcccctaatta

SEQ ID NO: 3075353 - DNA, 25 bp, Homo sapien
tgtgtttttgatttggggctttgta

SEQ ID NO: 3075354 - DNA, 25 bp, Homo sapien
ttggactgtgtttttgatttggggc

SEQ ID NO: 3075355 - DNA, 25 bp, Homo sapien
ttactctttggactgtgtttttgat

SEQ ID NO: 3075356 - DNA, 25 bp, Homo sapien
tactctttggactgtgtttttgatt

SEQ ID NO: 3075357 - DNA, 25 bp, Homo sapien
ccattcactggagacttcttttgca

SEQ ID NO: 3075358 - DNA, 25 bp, Homo sapien
gcagccaagcctctgcggattggaa

SEQ ID NO: 3075359 - DNA, 25 bp, Homo sapien
acttagtaatacacgcggctgcagg

SEQ ID NO: 3075360 - DNA, 25 bp, Homo sapien
gattttggacaccacttagtaatac

SEQ ID NO: 3075361 - DNA, 25 bp, Homo sapien
gtcttcaagatgactcttggcaggt

SEQ ID NO: 3075362 - DNA, 25 bp, Homo sapien
caggtagcgactggtaggtcttcaa

SEQ ID NO: 3075363 - DNA, 25 bp, Homo sapien
caaaagcaggtagcgactggtaggt

SEQ ID NO: 3075364 - DNA, 25 bp, Homo sapien
gactggtaggtcttcaagatgactc

SEQ ID NO: 3075365 - DNA, 25 bp, Homo sapien
tttgtttgctgccagagtggattct

SEQ ID NO: 3075366 - DNA, 25 bp, Homo sapien
tgctgccagagtggattctagttga

SEQ ID NO: 3075367 - DNA, 25 bp, Homo sapien
gccagagtggattctagttgaccac

SEQ ID NO: 3075368 - DNA, 25 bp, Homo sapien
tgtttgctgccagagtggattctag

SEQ ID NO: 3075369 - DNA, 25 bp, Homo sapien
agtttgacaaatgaaagcctgggac

SEQ ID NO: 3075370 - DNA, 25 bp, Homo sapien
ttatacctcgttcagcctctggcaa

SEQ ID NO: 3075371 - DNA, 25 bp, Homo sapien
gcctgggaccgaggacaggagggat

SEQ ID NO: 3075372 - DNA, 25 bp, Homo sapien
ggaaggtcatcctactgcctcctcg

SEQ ID NO: 3075373 - DNA, 25 bp, Homo sapien
tctccctagaagacctgtgaggagt

SEQ ID NO: 3075374 - DNA, 25 bp, Homo sapien
tcctcggccaagctaaaacccaaga

SEQ ID NO: 3075375 - DNA, 25 bp, Homo sapien
tcactgctagggcttaggatatcac

SEQ ID NO: 3075376 - DNA, 25 bp, Homo sapien
gtgtgtcataaaccttcagcttcag

SEQ ID NO: 3075377 - DNA, 25 bp, Homo sapien
tggtggactctataagggatgccac

SEQ ID NO: 3075378 - DNA, 25 bp, Homo sapien
gggacatggtctcagcgaccagctt

SEQ ID NO: 3075379 - DNA, 25 bp, Homo sapien
tgaacctgtgtcctaatggtggact

SEQ ID NO: 3075380 - DNA, 25 bp, Homo sapien
tctacggcaaatgatgacatgaacc

SEQ ID NO: 3075381 - DNA, 25 bp, Homo sapien
ggcccctgtgcattcctggtgacgt

SEQ ID NO: 3075382 - DNA, 25 bp, Homo sapien
ctggtgacgtcacccagctgtgctc

SEQ ID NO: 3075383 - DNA, 25 bp, Homo sapien
taggaccatattgtctctacggcaa

SEQ ID NO: 3075384 - DNA, 25 bp, Homo sapien
tgaacatgttgtttgcaccaagaga

SEQ ID NO: 3075385 - DNA, 25 bp, Homo sapien
ttttccagaagggtcacatgaatta

SEQ ID NO: 3075386 - DNA, 25 bp, Homo sapien
ggtcacatgaattatcccgtaagta

SEQ ID NO: 3075387 - DNA, 25 bp, Homo sapien
cccgtaagtataaggtgaacatgtt

SEQ ID NO: 3075388 - DNA, 25 bp, Homo sapien
gcacatcctagaccatacaccaaag

SEQ ID NO: 3075389 - DNA, 25 bp, Homo sapien
tcctagaccatacaccaaagctttc

SEQ ID NO: 3075390 - DNA, 25 bp, Homo sapien
cttccctagcacatcctagaccata

SEQ ID NO: 3075391 - DNA, 25 bp, Homo sapien
tagcacatcctagaccatacaccaa

SEQ ID NO: 3075392 - DNA, 25 bp, Homo sapien
cttctcgtggaagatcctaggagtt

SEQ ID NO: 3075393 - DNA, 25 bp, Homo sapien
aggtagcagggcgtattcttctcgt

SEQ ID NO: 3075394 - DNA, 25 bp, Homo sapien
tctgtgtcactcttgggtgtctgag

SEQ ID NO: 3075395 - DNA, 25 bp, Homo sapien
catacctatgcgtgtgtctgcacct

SEQ ID NO: 3075396 - DNA, 25 bp, Homo sapien
ggacaagtcagactcggttgggaga

SEQ ID NO: 3075397 - DNA, 25 bp, Homo sapien
gaaaaggtgtgtcccacgaagattc

SEQ ID NO: 3075398 - DNA, 25 bp, Homo sapien
gtgtgtcccacgaagattccctgca

SEQ ID NO: 3075399 - DNA, 25 bp, Homo sapien
cgtctgggaaaaggtgtgtcccacg

SEQ ID NO: 3075400 - DNA, 25 bp, Homo sapien
aagtcctccactgggacgtggccag

SEQ ID NO: 3075401 - DNA, 25 bp, Homo sapien
gagtttattcacgtccatcactagg

SEQ ID NO: 3075402 - DNA, 25 bp, Homo sapien
cggaagtttggtcggcacagctgaa

SEQ ID NO: 3075403 - DNA, 25 bp, Homo sapien
tcactaggcccaaagcggcgttgtt

SEQ ID NO: 3075404 - DNA, 25 bp, Homo sapien
tccagccgcccttgctctccaccca

SEQ ID NO: 3075405 - DNA, 25 bp, Homo sapien
ccactatctggtagttcttgactct

SEQ ID NO: 3075406 - DNA, 25 bp, Homo sapien
ctttgcaatgatgcattgttccact

SEQ ID NO: 3075407 - DNA, 25 bp, Homo sapien
gatgcattgttccactatctggtag

SEQ ID NO: 3075408 - DNA, 25 bp, Homo sapien
tagttcttgactcttgctcttcctc

SEQ ID NO: 3075409 - DNA, 25 bp, Homo sapien
taaggacatgaaggtaggtgcactg

SEQ ID NO: 3075410 - DNA, 25 bp, Homo sapien
aatcacttccatccagtttaacctg

SEQ ID NO: 3075411 - DNA, 25 bp, Homo sapien
ggtgcactgctctggaatcacttcc

SEQ ID NO: 3075412 - DNA, 25 bp, Homo sapien
ttctcctggatgccacctctgtgct

SEQ ID NO: 3075413 - DNA, 25 bp, Homo sapien
cattcattaatctctccattcacaa

SEQ ID NO: 3075414 - DNA, 25 bp, Homo sapien
ctccattcacaaatatctgttttct

SEQ ID NO: 3075415 - DNA, 25 bp, Homo sapien
tccaccgcagtgtgagggctttcag

SEQ ID NO: 3075416 - DNA, 25 bp, Homo sapien
tcaggtctagaagtttcattcagaa

SEQ ID NO: 3075417 - DNA, 25 bp, Homo sapien
cctgcacatttagtgacccccggag

SEQ ID NO: 3075418 - DNA, 25 bp, Homo sapien
tgcacatttagtgacccccggagac

SEQ ID NO: 3075419 - DNA, 25 bp, Homo sapien
ttcctgcacatttagtgacccccgg

SEQ ID NO: 3075420 - DNA, 25 bp, Homo sapien
ctgattcctgcacatttagtgaccc

SEQ ID NO: 3075421 - DNA, 25 bp, Homo sapien
gaatggtaaatatatcctcagactc

SEQ ID NO: 3075422 - DNA, 25 bp, Homo sapien
caagtaaatagtccgtggcatgtaa

SEQ ID NO: 3075423 - DNA, 25 bp, Homo sapien
tcagactccaagtaaatagtccgtg

SEQ ID NO: 3075424 - DNA, 25 bp, Homo sapien
ggtaaatatatcctcagactccaag

SEQ ID NO: 3075425 - DNA, 25 bp, Homo sapien
gtagtcgggccccatggagatccat

SEQ ID NO: 3075426 - DNA, 25 bp, Homo sapien
gacagtccagtttagcaagcagtag

SEQ ID NO: 3075427 - DNA, 25 bp, Homo sapien
gactcagactactgccctaatttgg

SEQ ID NO: 3075428 - DNA, 25 bp, Homo sapien
caagcagtagagttggaattttcac

SEQ ID NO: 3075429 - DNA, 25 bp, Homo sapien
tccgggcggccagagtcgcagtcaa

SEQ ID NO: 3075430 - DNA, 25 bp, Homo sapien
ggccagagtcgcagtcaagtcgctc

SEQ ID NO: 3075431 - DNA, 25 bp, Homo sapien
cagtcaagtcgctctttgcacagag

SEQ ID NO: 3075432 - DNA, 25 bp, Homo sapien
ccaacgcaagcacgcgcgcacatac

SEQ ID NO: 3075433 - DNA, 25 bp, Homo sapien
aaaacaactcagcaaccccaagtgg

SEQ ID NO: 3075434 - DNA, 25 bp, Homo sapien
tgcccacagttcacgaggtctgaag

SEQ ID NO: 3075435 - DNA, 25 bp, Homo sapien
caggtaagattctggttgttcccac

SEQ ID NO: 3075436 - DNA, 25 bp, Homo sapien
tgttcccactcttgcaaactgatgg

SEQ ID NO: 3075437 - DNA, 25 bp, Homo sapien
tcagcgcgatgctccagggcgagca

SEQ ID NO: 3075438 - DNA, 25 bp, Homo sapien
tttgcagtgagggttcagccagtgc

SEQ ID NO: 3075439 - DNA, 25 bp, Homo sapien
ccaggaactgctcctcagcgcgatg

SEQ ID NO: 3075440 - DNA, 25 bp, Homo sapien
gcagtgagggttcagccagtgctcc

SEQ ID NO: 3075441 - DNA, 25 bp, Homo sapien
acagtgacagccaagggatcaatat

SEQ ID NO: 3075442 - DNA, 25 bp, Homo sapien
tcaatatgcgtggtgtggctctggc

SEQ ID NO: 3075443 - DNA, 25 bp, Homo sapien
gacagccaagggatcaatatgcgtg

SEQ ID NO: 3075444 - DNA, 25 bp, Homo sapien
gccaagggatcaatatgcgtggtgt

SEQ ID NO: 3075445 - DNA, 25 bp, Homo sapien
ttcctcctcgaagccttcaccagtg

SEQ ID NO: 3075446 - DNA, 25 bp, Homo sapien
cctcctcgaagccttcaccagtgct

SEQ ID NO: 3075447 - DNA, 25 bp, Homo sapien
ccttcctcctcgaagccttcaccag

SEQ ID NO: 3075448 - DNA, 25 bp, Homo sapien
cttcctcctcgaagccttcaccagt

SEQ ID NO: 3075449 - DNA, 25 bp, Homo sapien
ctgcaaggagtcagcatctgcctct

SEQ ID NO: 3075450 - DNA, 25 bp, Homo sapien
agcatctgcctctacccacgggttt

SEQ ID NO: 3075451 - DNA, 25 bp, Homo sapien
ctctacccacgggttttgtctgtgg

SEQ ID NO: 3075452 - DNA, 25 bp, Homo sapien
tctgcctctacccacgggttttgtc

SEQ ID NO: 3075453 - DNA, 25 bp, Homo sapien
gacagcacaaataacagagggccat

SEQ ID NO: 3075454 - DNA, 25 bp, Homo sapien
tgtgctaccaccagagaagggagca

SEQ ID NO: 3075455 - DNA, 25 bp, Homo sapien
aggtgtgctaccaccagagaaggga

SEQ ID NO: 3075456 - DNA, 25 bp, Homo sapien
gggagcagacagcacaaataacaga

SEQ ID NO: 3075457 - DNA, 25 bp, Homo sapien
tgtgttccatgtcaaatgccaacta

SEQ ID NO: 3075458 - DNA, 25 bp, Homo sapien
tggctgagttagaaatggcccaaca

SEQ ID NO: 3075459 - DNA, 25 bp, Homo sapien
ggaaaacgaatatgccacaaaggct

SEQ ID NO: 3075460 - DNA, 25 bp, Homo sapien
ggcccaacattaaggataatctcaa

SEQ ID NO: 3075461 - DNA, 25 bp, Homo sapien
taacctccaggttttacagcagagc

SEQ ID NO: 3075462 - DNA, 25 bp, Homo sapien
aacctccaggttttacagcagagct

SEQ ID NO: 3075463 - DNA, 25 bp, Homo sapien
gaatccgggtttgcttggtctatcc

SEQ ID NO: 3075464 - DNA, 25 bp, Homo sapien
cgcattggctcatcggggaatccgg

SEQ ID NO: 3075465 - DNA, 25 bp, Homo sapien
gcttctctgtcaaaatcggggaggt

SEQ ID NO: 3075466 - DNA, 25 bp, Homo sapien
tcgccgagatcttaggagctgtttg

SEQ ID NO: 3075467 - DNA, 25 bp, Homo sapien
aggtaagagacagcacgagcacagg

SEQ ID NO: 3075468 - DNA, 25 bp, Homo sapien
gagacagcacgagcacaggcaatgt

SEQ ID NO: 3075469 - DNA, 25 bp, Homo sapien
gagaagacagtcagtaaggtaagag

SEQ ID NO: 3075470 - DNA, 25 bp, Homo sapien
cagtaaggtaagagacagcacgagc

SEQ ID NO: 3075471 - DNA, 25 bp, Homo sapien
gactctgagcgttttagtaatgacc

SEQ ID NO: 3075472 - DNA, 25 bp, Homo sapien
tatgctttgactaacgggacttacg

SEQ ID NO: 3075473 - DNA, 25 bp, Homo sapien
gatgctgaatgtatctgactctgag

SEQ ID NO: 3075474 - DNA, 25 bp, Homo sapien
gaatcctcccagactgagtcagcca

SEQ ID NO: 3075475 - DNA, 25 bp, Homo sapien
taaaatccctaccaagcacaacagg

SEQ ID NO: 3075476 - DNA, 25 bp, Homo sapien
taaagcataaggcaacctctggtgg

SEQ ID NO: 3075477 - DNA, 25 bp, Homo sapien
gagagagtcggagcctgtatcacac

SEQ ID NO: 3075478 - DNA, 25 bp, Homo sapien
caggtgtgatactggcagggccatc

SEQ ID NO: 3075479 - DNA, 25 bp, Homo sapien
tcatcacactgaactatagaaactt

SEQ ID NO: 3075480 - DNA, 25 bp, Homo sapien
actttagagacaagagaacttcgtt

SEQ ID NO: 3075481 - DNA, 25 bp, Homo sapien
cacagatatttaagtgtcattgaca

SEQ ID NO: 3075482 - DNA, 25 bp, Homo sapien
cattgacaaatgacaaacccaacat

SEQ ID NO: 3075483 - DNA, 25 bp, Homo sapien
tgctgggaaccttcacatatcaatg

SEQ ID NO: 3075484 - DNA, 25 bp, Homo sapien
ttactgctatttcccaaaagggcca

SEQ ID NO: 3075485 - DNA, 25 bp, Homo sapien
caaaactgtatcattcagggatacc

SEQ ID NO: 3075486 - DNA, 25 bp, Homo sapien
tcacatatcaatgatttactgctat

SEQ ID NO: 3075487 - DNA, 25 bp, Homo sapien
tcagataaacctaagttcaaagccc

SEQ ID NO: 3075488 - DNA, 25 bp, Homo sapien
ccctaaatggttgaagagcatcaca

SEQ ID NO: 3075489 - DNA, 25 bp, Homo sapien
gctgatgcaggtgattcaaaatcca

SEQ ID NO: 3075490 - DNA, 25 bp, Homo sapien
tcctgactgtgtgatatcaagcagg

SEQ ID NO: 3075491 - DNA, 25 bp, Homo sapien
tgctaaataagagccagatagacac

SEQ ID NO: 3075492 - DNA, 25 bp, Homo sapien
ccaaaatgttcaaacacagggtgtc

SEQ ID NO: 3075493 - DNA, 25 bp, Homo sapien
catagaatggagtataatgtagcca

SEQ ID NO: 3075494 - DNA, 25 bp, Homo sapien
actaatttaagcgttctgcatcagc

SEQ ID NO: 3075495 - DNA, 25 bp, Homo sapien
gatgcccactgctgattgagtacag

SEQ ID NO: 3075496 - DNA, 25 bp, Homo sapien
gatctcagtcccactattggccgtg

SEQ ID NO: 3075497 - DNA, 25 bp, Homo sapien
tggaccctggactgaaccctgggaa

SEQ ID NO: 3075498 - DNA, 25 bp, Homo sapien
aatccatggttactaggcagagccc

SEQ ID NO: 3075499 - DNA, 25 bp, Homo sapien
gaactactatcctaactttcgtggc

SEQ ID NO: 3075500 - DNA, 25 bp, Homo sapien
catgtaacatacgaaaagcagcttg

SEQ ID NO: 3075501 - DNA, 25 bp, Homo sapien
taaggtgaacagcaccaacgcaatg

SEQ ID NO: 3075502 - DNA, 25 bp, Homo sapien
gtcaacctgttaggaatcgactcca

SEQ ID NO: 3075503 - DNA, 25 bp, Homo sapien
taatctcctaggtgaacaatttcta

SEQ ID NO: 3075504 - DNA, 25 bp, Homo sapien
tttaagtcataagttaaagcaccat

SEQ ID NO: 3075505 - DNA, 25 bp, Homo sapien
tctagagttatagtcccaacaattt

SEQ ID NO: 3075506 - DNA, 25 bp, Homo sapien
caatactttcggtactcaactgcaa

SEQ ID NO: 3075507 - DNA, 25 bp, Homo sapien
catctcctctcaattagccaccacg

SEQ ID NO: 3075508 - DNA, 25 bp, Homo sapien
agaaatccccttggacaacattggg

SEQ ID NO: 3075509 - DNA, 25 bp, Homo sapien
ggtatgtaagagagatacctgacaa

SEQ ID NO: 3075510 - DNA, 25 bp, Homo sapien
gagagatacctgacaaaagtaacct

SEQ ID NO: 3075511 - DNA, 25 bp, Homo sapien
tacgtacgactgatgaagatcccct

SEQ ID NO: 3075512 - DNA, 25 bp, Homo sapien
ggaacaggaccttttgacactagag

SEQ ID NO: 3075513 - DNA, 25 bp, Homo sapien
tgcagaatccgtataagacagcctc

SEQ ID NO: 3075514 - DNA, 25 bp, Homo sapien
ccaaacacgtgtctatgcaggtcca

SEQ ID NO: 3075515 - DNA, 25 bp, Homo sapien
gataggaccctgactcccataacag

SEQ ID NO: 3075516 - DNA, 25 bp, Homo sapien
caaagttcagttccgttcacgaggt

SEQ ID NO: 3075517 - DNA, 25 bp, Homo sapien
gaagcaaagggcctatctcccagtt

SEQ ID NO: 3075518 - DNA, 25 bp, Homo sapien
cagttactgtgggaggataggaccc

SEQ ID NO: 3075519 - DNA, 25 bp, Homo sapien
tggtcccttgcttcggtgtgtgttt

SEQ ID NO: 3075520 - DNA, 25 bp, Homo sapien
gaagtccgcaagcaacaagtggtcc

SEQ ID NO: 3075521 - DNA, 25 bp, Homo sapien
tcttttatgctagaggaagtccgca

SEQ ID NO: 3075522 - DNA, 25 bp, Homo sapien
gttatgtcttctctaatcgtttgga

SEQ ID NO: 3075523 - DNA, 25 bp, Homo sapien
tccgtgttgggctggtaggactcca

SEQ ID NO: 3075524 - DNA, 25 bp, Homo sapien
gcagcggtgcttccgcgtccgcgtt

SEQ ID NO: 3075525 - DNA, 25 bp, Homo sapien
cgttctccgggtagctgatgtgctg

SEQ ID NO: 3075526 - DNA, 25 bp, Homo sapien
tatgtagtaggaaggaagccgctga

SEQ ID NO: 3075527 - DNA, 25 bp, Homo sapien
acagcagcaggaggcgtgctcccat

SEQ ID NO: 3075528 - DNA, 25 bp, Homo sapien
gacagcagcaggaggcgtgctccca

SEQ ID NO: 3075529 - DNA, 25 bp, Homo sapien
gacgacagcagcaggaggcgtgctc

SEQ ID NO: 3075530 - DNA, 25 bp, Homo sapien
ctggacgacagcagcaggaggcgtg

SEQ ID NO: 3075531 - DNA, 25 bp, Homo sapien
ctgcgaggaggatcctcgtggcctt

SEQ ID NO: 3075532 - DNA, 25 bp, Homo sapien
tacgattacgaagttttggcattca

SEQ ID NO: 3075533 - DNA, 25 bp, Homo sapien
tcaagtcgggggcactcgtgtctgc

SEQ ID NO: 3075534 - DNA, 25 bp, Homo sapien
tcggctagaggttcggctcaagtcg

SEQ ID NO: 3075535 - DNA, 25 bp, Homo sapien
gagagctattgtgaccaggtaattt

SEQ ID NO: 3075536 - DNA, 25 bp, Homo sapien
cagaaccctgttctagtgaatctta

SEQ ID NO: 3075537 - DNA, 25 bp, Homo sapien
tataaatactactgcacaagaacgg

SEQ ID NO: 3075538 - DNA, 25 bp, Homo sapien
gatggcagacatatttgcagtttgc

SEQ ID NO: 3075539 - DNA, 25 bp, Homo sapien
tccgtcgctgtttagaatgtggcca

SEQ ID NO: 3075540 - DNA, 25 bp, Homo sapien
aaaatgccatcctctaatacagacg

SEQ ID NO: 3075541 - DNA, 25 bp, Homo sapien
tgtggccctgtgtagtcagtgcatg

SEQ ID NO: 3075542 - DNA, 25 bp, Homo sapien
gcttgcatagcccagaaaggtacat

SEQ ID NO: 3075543 - DNA, 25 bp, Homo sapien
gcagagcttgcagggaggcggagct

SEQ ID NO: 3075544 - DNA, 25 bp, Homo sapien
gcctgggcaacagagcaagactcca

SEQ ID NO: 3075545 - DNA, 25 bp, Homo sapien
gcaagactccatctcaaaaaaaaaa

SEQ ID NO: 3075546 - DNA, 25 bp, Homo sapien
gcggagatcacatgactgcactcca

SEQ ID NO: 3075547 - DNA, 25 bp, Homo sapien
gatttggctgagaaaaaccctagag

SEQ ID NO: 3075548 - DNA, 25 bp, Homo sapien
tatcagatatcagaccaagaacact

SEQ ID NO: 3075549 - DNA, 25 bp, Homo sapien
taaaggacgacatcaacacagaatg

SEQ ID NO: 3075550 - DNA, 25 bp, Homo sapien
cagtctctctaaggatgccctgagc

SEQ ID NO: 3075551 - DNA, 25 bp, Homo sapien
ctaggactagggcttatgcggctgt

SEQ ID NO: 3075552 - DNA, 25 bp, Homo sapien
tgttctgagcactaggactagggct

SEQ ID NO: 3075553 - DNA, 25 bp, Homo sapien
ttaaatattggcagacgtgtcattg

SEQ ID NO: 3075554 - DNA, 25 bp, Homo sapien
gcagacgtgtcattgttctgagcac

SEQ ID NO: 3075555 - DNA, 25 bp, Homo sapien
taaaatcagtagtagttgtaggcca

SEQ ID NO: 3075556 - DNA, 25 bp, Homo sapien
aaaatcagtagtagttgtaggccat

SEQ ID NO: 3075557 - DNA, 25 bp, Homo sapien
gataaaatcagtagtagttgtaggc

SEQ ID NO: 3075558 - DNA, 25 bp, Homo sapien
aaatcagtagtagttgtaggccatt

SEQ ID NO: 3075559 - DNA, 25 bp, Homo sapien
cagctgtcctaaatatagcagcagc

SEQ ID NO: 3075560 - DNA, 25 bp, Homo sapien
agctgtcctaaatatagcagcagca

SEQ ID NO: 3075561 - DNA, 25 bp, Homo sapien
agcagctgtcctaaatatagcagca

SEQ ID NO: 3075562 - DNA, 25 bp, Homo sapien
tggccaagctggaggtacacatatg

SEQ ID NO: 3075563 - DNA, 25 bp, Homo sapien
gcagagactataccctaggtgcccg

SEQ ID NO: 3075564 - DNA, 25 bp, Homo sapien
catctgagagatacaagtggtgcct

SEQ ID NO: 3075565 - DNA, 25 bp, Homo sapien
gcagctgccaatagccacaaaaggg

SEQ ID NO: 3075566 - DNA, 25 bp, Homo sapien
tggtcacaaacactgtgcatctggg

SEQ ID NO: 3075567 - DNA, 25 bp, Homo sapien
catcatcatcagacaggccagcatc

SEQ ID NO: 3075568 - DNA, 25 bp, Homo sapien
caggctggcattgggaggctcatca

SEQ ID NO: 3075569 - DNA, 25 bp, Homo sapien
gcacagtgaggagtggcgggtcggg

SEQ ID NO: 3075570 - DNA, 25 bp, Homo sapien
ctaaatgcagggaggatagcaagtc

SEQ ID NO: 3075571 - DNA, 25 bp, Homo sapien
tggatgagctcatgacctttcacat

SEQ ID NO: 3075572 - DNA, 25 bp, Homo sapien
gatgagctcatgacctttcacattt

SEQ ID NO: 3075573 - DNA, 25 bp, Homo sapien
ggatgagctcatgacctttcacatt

SEQ ID NO: 3075574 - DNA, 25 bp, Homo sapien
acagaacgaatgaacaagtagcaaa

SEQ ID NO: 3075575 - DNA, 25 bp, Homo sapien
gacagaacgaatgaacaagtagcaa

SEQ ID NO: 3075576 - DNA, 25 bp, Homo sapien
agaacgaatgaacaagtagcaaata

SEQ ID NO: 3075577 - DNA, 25 bp, Homo sapien
cagaacgaatgaacaagtagcaaat

SEQ ID NO: 3075578 - DNA, 25 bp, Homo sapien
tccccggacagttgaagagtcatct

SEQ ID NO: 3075579 - DNA, 25 bp, Homo sapien
caattctaacaacgaccagcagagt

SEQ ID NO: 3075580 - DNA, 25 bp, Homo sapien
gttagatcagatgccaccagcgaag

SEQ ID NO: 3075581 - DNA, 25 bp, Homo sapien
tccaacaggctggtcgagaagggct

SEQ ID NO: 3075582 - DNA, 25 bp, Homo sapien
gaagggtcttgagcacagtgctccc

SEQ ID NO: 3075583 - DNA, 25 bp, Homo sapien
gtcttgagcacagtgctcccatgcc

SEQ ID NO: 3075584 - DNA, 25 bp, Homo sapien
ctggaagggtcttgagcacagtgct

SEQ ID NO: 3075585 - DNA, 25 bp, Homo sapien
gggtcttgagcacagtgctcccatg

SEQ ID NO: 3075586 - DNA, 25 bp, Homo sapien
gctatgctgagctttagtgtccaga

SEQ ID NO: 3075587 - DNA, 25 bp, Homo sapien
tccactgaacatggagggcccattg

SEQ ID NO: 3075588 - DNA, 25 bp, Homo sapien
aagcagggacaaaggccagttcaat

SEQ ID NO: 3075589 - DNA, 25 bp, Homo sapien
gatgtactgattaaagcactggcca

SEQ ID NO: 3075590 - DNA, 25 bp, Homo sapien
aactgattatccgtgtgtggcttac

SEQ ID NO: 3075591 - DNA, 25 bp, Homo sapien
taagtgtgctggctataggtctgca

SEQ ID NO: 3075592 - DNA, 25 bp, Homo sapien
tgtagtgggcggctcatctgctgac

SEQ ID NO: 3075593 - DNA, 25 bp, Homo sapien
ggaactctatatagggcaggactaa

SEQ ID NO: 3075594 - DNA, 25 bp, Homo sapien
gaatatcaagtgttctgagcctgcc

SEQ ID NO: 3075595 - DNA, 25 bp, Homo sapien
tccttgttaggagatgacaccgatc

SEQ ID NO: 3075596 - DNA, 25 bp, Homo sapien
caagagtggtgaacagagcgatcct

SEQ ID NO: 3075597 - DNA, 25 bp, Homo sapien
tatttatcatgccacacggactgag

SEQ ID NO: 3075598 - DNA, 25 bp, Homo sapien
catgaggtttgctaaaagacccctt

SEQ ID NO: 3075599 - DNA, 25 bp, Homo sapien
aggcagccgcatagcctgtctgcat

SEQ ID NO: 3075600 - DNA, 25 bp, Homo sapien
ggtaggttgacaccccagcaagtgg

SEQ ID NO: 3075601 - DNA, 25 bp, Homo sapien
agcaagtggcctagcatggtccgag

SEQ ID NO: 3075602 - DNA, 25 bp, Homo sapien
gcaaggcctccagcaaagctcatgg

SEQ ID NO: 3075603 - DNA, 25 bp, Homo sapien
cttgactgtgctagcctcggtggta

SEQ ID NO: 3075604 - DNA, 25 bp, Homo sapien
ggctatcaccgagaagagttgtcag

SEQ ID NO: 3075605 - DNA, 25 bp, Homo sapien
gagatcaagccccaacatgcgggta

SEQ ID NO: 3075606 - DNA, 25 bp, Homo sapien
gcaaaggggcagccttcagatccaa

SEQ ID NO: 3075607 - DNA, 25 bp, Homo sapien
caaaggggcagccttcagatccaag

SEQ ID NO: 3075608 - DNA, 25 bp, Homo sapien
aaaggggcagccttcagatccaagt

SEQ ID NO: 3075609 - DNA, 25 bp, Homo sapien
aaggggcagccttcagatccaagtg

SEQ ID NO: 3075610 - DNA, 25 bp, Homo sapien
tttctctaagaggaatcgggcactc

SEQ ID NO: 3075611 - DNA, 25 bp, Homo sapien
cagaacaatggggagtaggtcaccc

SEQ ID NO: 3075612 - DNA, 25 bp, Homo sapien
gaatcgggcactcatgacttcactt

SEQ ID NO: 3075613 - DNA, 25 bp, Homo sapien
tgcaggcagtcagcccaagtgccta

SEQ ID NO: 3075614 - DNA, 25 bp, Homo sapien
tggtcacagttgagaagcacgccca

SEQ ID NO: 3075615 - DNA, 25 bp, Homo sapien
ggaccttgtcggcaacagcgaagaa

SEQ ID NO: 3075616 - DNA, 25 bp, Homo sapien
gaacttatacatcaggtggaccttg

SEQ ID NO: 3075617 - DNA, 25 bp, Homo sapien
gcgaagaagatgacaaagccgtggt

SEQ ID NO: 3075618 - DNA, 25 bp, Homo sapien
cacctgagagcagtatgtgaacctc

SEQ ID NO: 3075619 - DNA, 25 bp, Homo sapien
ggatgcggccggtagttctgaggca

SEQ ID NO: 3075620 - DNA, 25 bp, Homo sapien
tgacagagccactttgttgtgggcg

SEQ ID NO: 3075621 - DNA, 25 bp, Homo sapien
tactgtatagcactctgacagagcc

SEQ ID NO: 3075622 - DNA, 25 bp, Homo sapien
gatgagaactagacagaggagaaca

SEQ ID NO: 3075623 - DNA, 25 bp, Homo sapien
tctgccaaaagggtaagcacacact

SEQ ID NO: 3075624 - DNA, 25 bp, Homo sapien
accagattctggcacaagatgcaca

SEQ ID NO: 3075625 - DNA, 25 bp, Homo sapien
gagttcacactccaacaagcaaggc

SEQ ID NO: 3075626 - DNA, 25 bp, Homo sapien
tgagagtgaagccacggagtgccaa

SEQ ID NO: 3075627 - DNA, 25 bp, Homo sapien
gcagctcctgaaagacgtggctcag

SEQ ID NO: 3075628 - DNA, 25 bp, Homo sapien
tggctcagggcatgacacttttcac

SEQ ID NO: 3075629 - DNA, 25 bp, Homo sapien
tactttccctgtttatgcggctgcc

SEQ ID NO: 3075630 - DNA, 25 bp, Homo sapien
gagctcaggtctggacttggccagg

SEQ ID NO: 3075631 - DNA, 25 bp, Homo sapien
ggagctcaggtctggacttggccag

SEQ ID NO: 3075632 - DNA, 25 bp, Homo sapien
ttgagagatgttgagttcggatgtg

SEQ ID NO: 3075633 - DNA, 25 bp, Homo sapien
tgagagatgttgagttcggatgtga

SEQ ID NO: 3075634 - DNA, 25 bp, Homo sapien
cttgagagatgttgagttcggatgt

SEQ ID NO: 3075635 - DNA, 25 bp, Homo sapien
cctccaagccagcttgttttaaatc

SEQ ID NO: 3075636 - DNA, 25 bp, Homo sapien
ggctccaaacgtgggaagcttgctg

SEQ ID NO: 3075637 - DNA, 25 bp, Homo sapien
ccaagccagcttgttttaaatccac

SEQ ID NO: 3075638 - DNA, 25 bp, Homo sapien
aagcttgctgggtaaggcagggaca

SEQ ID NO: 3075639 - DNA, 25 bp, Homo sapien
tctacaaacacacgcctgaacagca

SEQ ID NO: 3075640 - DNA, 25 bp, Homo sapien
aagggaaatatgatacagagcaacg

SEQ ID NO: 3075641 - DNA, 25 bp, Homo sapien
agagcaacgggatggcctctactcc

SEQ ID NO: 3075642 - DNA, 25 bp, Homo sapien
acttctacaaacacacgcctgaaca

SEQ ID NO: 3075643 - DNA, 25 bp, Homo sapien
tttagttctgtgctcgggcagtctc

SEQ ID NO: 3075644 - DNA, 25 bp, Homo sapien
ggaatcatatagaacccatcacaga

SEQ ID NO: 3075645 - DNA, 25 bp, Homo sapien
gaggtcgactctcactaccagcatt

SEQ ID NO: 3075646 - DNA, 25 bp, Homo sapien
catcacagaaccctgatgagagagg

SEQ ID NO: 3075647 - DNA, 25 bp, Homo sapien
cagaaggagtcagcaggcaaaatga

SEQ ID NO: 3075648 - DNA, 25 bp, Homo sapien
cacatttaagatttactgcagggaa

SEQ ID NO: 3075649 - DNA, 25 bp, Homo sapien
caagcgttagaaactagcatgggca

SEQ ID NO: 3075650 - DNA, 25 bp, Homo sapien
gcatgaatttgacccagacaaataa

SEQ ID NO: 3075651 - DNA, 25 bp, Homo sapien
cccagcaatctgtgatgtacaagcc

SEQ ID NO: 3075652 - DNA, 25 bp, Homo sapien
aaaatatctggagtgtctacctaca

SEQ ID NO: 3075653 - DNA, 25 bp, Homo sapien
tccaggtgagtccaaagtccactca

SEQ ID NO: 3075654 - DNA, 25 bp, Homo sapien
ctgcaatgagttctgttcgcaccac

SEQ ID NO: 3075655 - DNA, 25 bp, Homo sapien
cagtgactcgggatgggccggaagt

SEQ ID NO: 3075656 - DNA, 25 bp, Homo sapien
gtgactcgggatgggccggaagtga

SEQ ID NO: 3075657 - DNA, 25 bp, Homo sapien
acagtgactcgggatgggccggaag

SEQ ID NO: 3075658 - DNA, 25 bp, Homo sapien
ccacagtgactcgggatgggccgga

SEQ ID NO: 3075659 - DNA, 25 bp, Homo sapien
ttcacagggcgtgtggatttgtgtg

SEQ ID NO: 3075660 - DNA, 25 bp, Homo sapien
cttcacagggcgtgtggatttgtgt

SEQ ID NO: 3075661 - DNA, 25 bp, Homo sapien
tcacagggcgtgtggatttgtgtgt

SEQ ID NO: 3075662 - DNA, 25 bp, Homo sapien
tggagccgcccgatgcactgcttca

SEQ ID NO: 3075663 - DNA, 25 bp, Homo sapien
tgagattcctcgcagttttgatgct

SEQ ID NO: 3075664 - DNA, 25 bp, Homo sapien
ctgcttcagctcgtttttgaggtct

SEQ ID NO: 3075665 - DNA, 25 bp, Homo sapien
gcttgtggttcagttccacctcggg

SEQ ID NO: 3075666 - DNA, 25 bp, Homo sapien
tctgttcaatctcctccttcaaggt

SEQ ID NO: 3075667 - DNA, 25 bp, Homo sapien
tctctgaggcgtccaagagagcctt

SEQ ID NO: 3075668 - DNA, 25 bp, Homo sapien
gaaactcgaactcatccctcttggt

SEQ ID NO: 3075669 - DNA, 25 bp, Homo sapien
tcttccttgtcgaggtggtctctga

SEQ ID NO: 3075670 - DNA, 25 bp, Homo sapien
gctccacctttctgtttgcagtcat

SEQ ID NO: 3075671 - DNA, 25 bp, Homo sapien
tgctccacctttctgtttgcagtca

SEQ ID NO: 3075672 - DNA, 25 bp, Homo sapien
ctgctccacctttctgtttgcagtc

SEQ ID NO: 3075673 - DNA, 25 bp, Homo sapien
agtgctctcgacgccccgttgatct

SEQ ID NO: 3075674 - DNA, 25 bp, Homo sapien
atcatccagtgctctcgacgccccg

SEQ ID NO: 3075675 - DNA, 25 bp, Homo sapien
tgctctcgacgccccgttgatctga

SEQ ID NO: 3075676 - DNA, 25 bp, Homo sapien
atccagtgctctcgacgccccgttg

SEQ ID NO: 3075677 - DNA, 25 bp, Homo sapien
cagttagtttgtgcctcagggtggc

SEQ ID NO: 3075678 - DNA, 25 bp, Homo sapien
gacagttagtttgtgcctcagggtg

SEQ ID NO: 3075679 - DNA, 25 bp, Homo sapien
acagttagtttgtgcctcagggtgg

SEQ ID NO: 3075680 - DNA, 25 bp, Homo sapien
ccaacgttcatagttgacattcaaa

SEQ ID NO: 3075681 - DNA, 25 bp, Homo sapien
aggtaacctccaacgttcatagttg

SEQ ID NO: 3075682 - DNA, 25 bp, Homo sapien
caccaggacttcgtgagggaacaga

SEQ ID NO: 3075683 - DNA, 25 bp, Homo sapien
agtggtgcacgcctttaaagacctc

SEQ ID NO: 3075684 - DNA, 25 bp, Homo sapien
gctgggaacatttgcggcgcaacag

SEQ ID NO: 3075685 - DNA, 25 bp, Homo sapien
gatgtggcagatgcactcgctgtgc

SEQ ID NO: 3075686 - DNA, 25 bp, Homo sapien
gaaaaattcccgcagccgattgtgc

SEQ ID NO: 3075687 - DNA, 25 bp, Homo sapien
attcaggcacgacccgcagaagttg

SEQ ID NO: 3075688 - DNA, 25 bp, Homo sapien
gcgctcccaggggtcgggacacaac

SEQ ID NO: 3075689 - DNA, 25 bp, Homo sapien
aggggtcgggacacaactgctgcac

SEQ ID NO: 3075690 - DNA, 25 bp, Homo sapien
cccaggggtcgggacacaactgctg

SEQ ID NO: 3075691 - DNA, 25 bp, Homo sapien
gctcccaggggtcgggacacaactg

SEQ ID NO: 3075692 - DNA, 25 bp, Homo sapien
gtttgggttatagtcactttcacaa

SEQ ID NO: 3075693 - DNA, 25 bp, Homo sapien
ttgagacaagatacgcagcacattc

SEQ ID NO: 3075694 - DNA, 25 bp, Homo sapien
agtttgggttatagtcactttcaca

SEQ ID NO: 3075695 - DNA, 25 bp, Homo sapien
cttattgagacaagatacgcagcac

SEQ ID NO: 3075696 - DNA, 25 bp, Homo sapien
tgtacttgatgtgttacttggagat

SEQ ID NO: 3075697 - DNA, 25 bp, Homo sapien
acttgatgtgttacttggagattca

SEQ ID NO: 3075698 - DNA, 25 bp, Homo sapien
tctgtacttgatgtgttacttggag

SEQ ID NO: 3075699 - DNA, 25 bp, Homo sapien
ggttctgtacttgatgtgttacttg

SEQ ID NO: 3075700 - DNA, 25 bp, Homo sapien
tgtcacagcgtactccactacctcg

SEQ ID NO: 3075701 - DNA, 25 bp, Homo sapien
gctgaaaccacgcaaaacaatctta

SEQ ID NO: 3075702 - DNA, 25 bp, Homo sapien
gtaacttacaatacagagcaagcat

SEQ ID NO: 3075703 - DNA, 25 bp, Homo sapien
gagtacactgtaattacattaggaa

SEQ ID NO: 3075704 - DNA, 25 bp, Homo sapien
tacattaggaacactaagaactaac

SEQ ID NO: 3075705 - DNA, 25 bp, Homo sapien
gctgggtctctggattgtggcttaa

SEQ ID NO: 3075706 - DNA, 25 bp, Homo sapien
ctatatctacttgctgggtctctgg

SEQ ID NO: 3075707 - DNA, 25 bp, Homo sapien
ggattgtggcttaatattcttcctt

SEQ ID NO: 3075708 - DNA, 25 bp, Homo sapien
gtctctggattgtggcttaatattc

SEQ ID NO: 3075709 - DNA, 25 bp, Homo sapien
aaccagactcaacagggaatcaggg

SEQ ID NO: 3075710 - DNA, 25 bp, Homo sapien
ttgaggtcaaagcaaaaaagtagga

SEQ ID NO: 3075711 - DNA, 25 bp, Homo sapien
gggtatatactgagaggccaagcaa

SEQ ID NO: 3075712 - DNA, 25 bp, Homo sapien
gatgatcaagctggataactgcgtt

SEQ ID NO: 3075713 - DNA, 25 bp, Homo sapien
gccaatataaagactcatacagata

SEQ ID NO: 3075714 - DNA, 25 bp, Homo sapien
agtaagtaaattccacggataatat

SEQ ID NO: 3075715 - DNA, 25 bp, Homo sapien
tttactgaactatgaaaaacctcac

SEQ ID NO: 3075716 - DNA, 25 bp, Homo sapien
tgactgagtcaagcttttactgaac

SEQ ID NO: 3075717 - DNA, 25 bp, Homo sapien
ggagagtaactggatgttagctcca

SEQ ID NO: 3075718 - DNA, 25 bp, Homo sapien
aggggaatgaaccttttttgctgtg

SEQ ID NO: 3075719 - DNA, 25 bp, Homo sapien
gaatgaaccttttttgctgtgactg

SEQ ID NO: 3075720 - DNA, 25 bp, Homo sapien
acaaacacatttaacctgattttct

SEQ ID NO: 3075721 - DNA, 25 bp, Homo sapien
cacatttaacctgattttctaagta

SEQ ID NO: 3075722 - DNA, 25 bp, Homo sapien
tccttcttgggtgtctctactggat

SEQ ID NO: 3075723 - DNA, 25 bp, Homo sapien
ccttcttgggtgtctctactggatt

SEQ ID NO: 3075724 - DNA, 25 bp, Homo sapien
cagtgttagtcatgtgacatcatca

SEQ ID NO: 3075725 - DNA, 25 bp, Homo sapien
ggtgagaaaatgtgaatccatgaca

SEQ ID NO: 3075726 - DNA, 25 bp, Homo sapien
tggtgagaaaatgtgaatccatgac

SEQ ID NO: 3075727 - DNA, 25 bp, Homo sapien
ctgaaaaacagtgttagtcatgtga

SEQ ID NO: 3075728 - DNA, 25 bp, Homo sapien
taatagtagatgaattttttaccac

SEQ ID NO: 3075729 - DNA, 25 bp, Homo sapien
tttttaccacgtcatttaattgctg

SEQ ID NO: 3075730 - DNA, 25 bp, Homo sapien
ctgttgcctctggttgtcagtgctt

SEQ ID NO: 3075731 - DNA, 25 bp, Homo sapien
ctggataatagtagatgaatttttt

SEQ ID NO: 3075732 - DNA, 25 bp, Homo sapien
aggatgccctcgtcctcgacctctc

SEQ ID NO: 3075733 - DNA, 25 bp, Homo sapien
cccgcatgccccgtcccttagctcc

SEQ ID NO: 3075734 - DNA, 25 bp, Homo sapien
aggaaacaggatgccctcgtcctcg

SEQ ID NO: 3075735 - DNA, 25 bp, Homo sapien
acaggaaacaggatgccctcgtcct

SEQ ID NO: 3075736 - DNA, 25 bp, Homo sapien
aaggttctcttctctaccccatcct

SEQ ID NO: 3075737 - DNA, 25 bp, Homo sapien
aggttctcttctctaccccatcctc

SEQ ID NO: 3075738 - DNA, 25 bp, Homo sapien
ttctcttctctaccccatcctcttc

SEQ ID NO: 3075739 - DNA, 25 bp, Homo sapien
ggttctcttctctaccccatcctct

SEQ ID NO: 3075740 - DNA, 25 bp, Homo sapien
tttgagccagaacgcctccatccag

SEQ ID NO: 3075741 - DNA, 25 bp, Homo sapien
tgtccaccaccatttgagccagaac

SEQ ID NO: 3075742 - DNA, 25 bp, Homo sapien
taaactagcagggagagacacactg

SEQ ID NO: 3075743 - DNA, 25 bp, Homo sapien
ggagaagcaccaggagcctgtccac

SEQ ID NO: 3075744 - DNA, 25 bp, Homo sapien
ctgcagtctgtgatgacagccctgg

SEQ ID NO: 3075745 - DNA, 25 bp, Homo sapien
agtctgtgatgacagccctgggcct

SEQ ID NO: 3075746 - DNA, 25 bp, Homo sapien
tggacgacctcttcctgcaaaaagg

SEQ ID NO: 3075747 - DNA, 25 bp, Homo sapien
tgggcctggacgacctcttcctgca

SEQ ID NO: 3075748 - DNA, 25 bp, Homo sapien
atcacccactgtgccacaggttgct

SEQ ID NO: 3075749 - DNA, 25 bp, Homo sapien
tgttctctcgactcttccaatgctt

SEQ ID NO: 3075750 - DNA, 25 bp, Homo sapien
tttggcctcttcgttatcatcaccc

SEQ ID NO: 3075751 - DNA, 25 bp, Homo sapien
tctttcactgcctgtactttcggag

SEQ ID NO: 3075752 - DNA, 25 bp, Homo sapien
tgatgactacagaattctcagcaac

SEQ ID NO: 3075753 - DNA, 25 bp, Homo sapien
gactacagaattctcagcaactcct

SEQ ID NO: 3075754 - DNA, 25 bp, Homo sapien
atgtcaccattactgatgactacag

SEQ ID NO: 3075755 - DNA, 25 bp, Homo sapien
ctaagagataaattaatgtcaccat

SEQ ID NO: 3075756 - DNA, 25 bp, Homo sapien
tataacgatgtaatacgtatttaca

SEQ ID NO: 3075757 - DNA, 25 bp, Homo sapien
cctgggattctttttataacgatgt

SEQ ID NO: 3075758 - DNA, 25 bp, Homo sapien
ctcggctggcatcatagaccacgaa

SEQ ID NO: 3075759 - DNA, 25 bp, Homo sapien
ggctggcatcatagaccacgaagaa

SEQ ID NO: 3075760 - DNA, 25 bp, Homo sapien
gactcggcatctgttcaagtcgacc

SEQ ID NO: 3075761 - DNA, 25 bp, Homo sapien
agccgtagcctaaccgtctcggaag

SEQ ID NO: 3075762 - DNA, 25 bp, Homo sapien
cccagaactgaagccgaagcgctgg

SEQ ID NO: 3075763 - DNA, 25 bp, Homo sapien
gaggcagtcgttgtctctcacaagg

SEQ ID NO: 3075764 - DNA, 25 bp, Homo sapien
gcctccatgcaaaaagaaacctgtt

SEQ ID NO: 3075765 - DNA, 25 bp, Homo sapien
caatggagtcgagtctagaattcac

SEQ ID NO: 3075766 - DNA, 25 bp, Homo sapien
gagatcccacgtgtctgcttgcaga

SEQ ID NO: 3075767 - DNA, 25 bp, Homo sapien
taaaagcactcccacgtctacaatg

SEQ ID NO: 3075768 - DNA, 25 bp, Homo sapien
tagagacctatagctgattacaaac

SEQ ID NO: 3075769 - DNA, 25 bp, Homo sapien
gaacacctgttagagacctatagct

SEQ ID NO: 3075770 - DNA, 25 bp, Homo sapien
ttagagacctatagctgattacaaa

SEQ ID NO: 3075771 - DNA, 25 bp, Homo sapien
gttagagacctatagctgattacaa

SEQ ID NO: 3075772 - DNA, 25 bp, Homo sapien
gccgcagggctacggacagtttgct

SEQ ID NO: 3075773 - DNA, 25 bp, Homo sapien
ggcatctttgacgacagcttcgaga

SEQ ID NO: 3075774 - DNA, 25 bp, Homo sapien
cgtctgattttatcgaggagcttcc

SEQ ID NO: 3075775 - DNA, 25 bp, Homo sapien
gcctatcggattatatctgcccaag

SEQ ID NO: 3075776 - DNA, 25 bp, Homo sapien
gaactgtaagccaggaaactacctc

SEQ ID NO: 3075777 - DNA, 25 bp, Homo sapien
tgttctcaaaccatgaaagtgctgg

SEQ ID NO: 3075778 - DNA, 25 bp, Homo sapien
tggagaaaggctgatcaagcccagc

SEQ ID NO: 3075779 - DNA, 25 bp, Homo sapien
taatcacaggctagaggaatgaggc

SEQ ID NO: 3075780 - DNA, 25 bp, Homo sapien
tgtgcgcagccaagagcgatataag

SEQ ID NO: 3075781 - DNA, 25 bp, Homo sapien
tctaagaatttatctggagaggctc

SEQ ID NO: 3075782 - DNA, 25 bp, Homo sapien
taaaggctataagttttctccatga

SEQ ID NO: 3075783 - DNA, 25 bp, Homo sapien
ttaagtaatgtaagcctaggactgt

SEQ ID NO: 3075784 - DNA, 25 bp, Homo sapien
aactccctgtgggttaatgccggca

SEQ ID NO: 3075785 - DNA, 25 bp, Homo sapien
aataactccctgtgggttaatgccg

SEQ ID NO: 3075786 - DNA, 25 bp, Homo sapien
actccctgtgggttaatgccggcat

SEQ ID NO: 3075787 - DNA, 25 bp, Homo sapien
acaataactccctgtgggttaatgc

SEQ ID NO: 3075788 - DNA, 25 bp, Homo sapien
tcacagcccccggatggggctcctg

SEQ ID NO: 3075789 - DNA, 25 bp, Homo sapien
acagcccccggatggggctcctgcc

SEQ ID NO: 3075790 - DNA, 25 bp, Homo sapien
cacagcccccggatggggctcctgc

SEQ ID NO: 3075791 - DNA, 25 bp, Homo sapien
ccaattttctgtcgtcacatggtgc

SEQ ID NO: 3075792 - DNA, 25 bp, Homo sapien
taatccaattttctgtcgtcacatg

SEQ ID NO: 3075793 - DNA, 25 bp, Homo sapien
agttctagtgggaagaagtccaaat

SEQ ID NO: 3075794 - DNA, 25 bp, Homo sapien
tattaatccaattttctgtcgtcac

SEQ ID NO: 3075795 - DNA, 25 bp, Homo sapien
gaaaatcttgccatcgctcttgtgt

SEQ ID NO: 3075796 - DNA, 25 bp, Homo sapien
catgggttccaagtcagatggcttg

SEQ ID NO: 3075797 - DNA, 25 bp, Homo sapien
gatttgcctccagtggcagttggtt

SEQ ID NO: 3075798 - DNA, 25 bp, Homo sapien
aagtcagatggcttgggtgaaaatc

SEQ ID NO: 3075799 - DNA, 25 bp, Homo sapien
ccttgcatcgggtatgactgacata

SEQ ID NO: 3075800 - DNA, 25 bp, Homo sapien
tagtattccagttaacacactcctc

SEQ ID NO: 3075801 - DNA, 25 bp, Homo sapien
ccttttttctggcaggctgtgccca

SEQ ID NO: 3075802 - DNA, 25 bp, Homo sapien
ccctttgacttgtatcttgcacttt

SEQ ID NO: 3075803 - DNA, 25 bp, Homo sapien
gctctccgtcccgaggcaggagatg

SEQ ID NO: 3075804 - DNA, 25 bp, Homo sapien
atggcctggttgacccttcgagaca

SEQ ID NO: 3075805 - DNA, 25 bp, Homo sapien
gagacaaggcggcaaaaccggtgct

SEQ ID NO: 3075806 - DNA, 25 bp, Homo sapien
ctccgccttttccagggcgctctcc

SEQ ID NO: 3075807 - DNA, 25 bp, Homo sapien
ttgcggggcagggaatcaaggttcc

SEQ ID NO: 3075808 - DNA, 25 bp, Homo sapien
tcaaggttcctccggttgctgtacc

SEQ ID NO: 3075809 - DNA, 25 bp, Homo sapien
gcggggcagggaatcaaggttcctc

SEQ ID NO: 3075810 - DNA, 25 bp, Homo sapien
tcctccggttgctgtaccgtcccgc

SEQ ID NO: 3075811 - DNA, 25 bp, Homo sapien
tacttttcaaaggtcgtgtgtacac

SEQ ID NO: 3075812 - DNA, 25 bp, Homo sapien
ctgcgaggctgacccgagcgcgtcc

SEQ ID NO: 3075813 - DNA, 25 bp, Homo sapien
aacttaaccggagcgtgcacacccg

SEQ ID NO: 3075814 - DNA, 25 bp, Homo sapien
tctctgcacctcaacttaaccggag

SEQ ID NO: 3075815 - DNA, 25 bp, Homo sapien
aactgggaagatgggccgggacatc

SEQ ID NO: 3075816 - DNA, 25 bp, Homo sapien
ggacatcggccggttgtgatccaac

SEQ ID NO: 3075817 - DNA, 25 bp, Homo sapien
agcccctgggagttccgtgcggcga

SEQ ID NO: 3075818 - DNA, 25 bp, Homo sapien
tccaaccgtgtttcgggctgaggga

SEQ ID NO: 3075819 - DNA, 25 bp, Homo sapien
tctgccagttgggagtggacgaaca

SEQ ID NO: 3075820 - DNA, 25 bp, Homo sapien
ttgggagtggacgaacagttttgaa

SEQ ID NO: 3075821 - DNA, 25 bp, Homo sapien
cagtttgagtgaggaccttcagaaa

SEQ ID NO: 3075822 - DNA, 25 bp, Homo sapien
ttgaaacagtttgagtgaggacctt

SEQ ID NO: 3075823 - DNA, 25 bp, Homo sapien
ccagacccatttcaagactcctagg

SEQ ID NO: 3075824 - DNA, 25 bp, Homo sapien
tggccccataacttcatttttgtgt

SEQ ID NO: 3075825 - DNA, 25 bp, Homo sapien
cctggccccataacttcatttttgt

SEQ ID NO: 3075826 - DNA, 25 bp, Homo sapien
acccatttcaagactcctaggctca

SEQ ID NO: 3075827 - DNA, 25 bp, Homo sapien
gattcctctggcttaaaccaaaatg

SEQ ID NO: 3075828 - DNA, 25 bp, Homo sapien
ctaaaggctggccactaaatggaca

SEQ ID NO: 3075829 - DNA, 25 bp, Homo sapien
ggtgagaattctttactgtgatgac

SEQ ID NO: 3075830 - DNA, 25 bp, Homo sapien
gcatggccatagacccccggtgaga

SEQ ID NO: 3075831 - DNA, 25 bp, Homo sapien
tggagagccctttttctgagagcca

SEQ ID NO: 3075832 - DNA, 25 bp, Homo sapien
tgaagtcagcagacaactaggcctg

SEQ ID NO: 3075833 - DNA, 25 bp, Homo sapien
tgtggctccacataccaggtactcg

SEQ ID NO: 3075834 - DNA, 25 bp, Homo sapien
tttgttaaatgactggccctgagag

SEQ ID NO: 3075835 - DNA, 25 bp, Homo sapien
cttcacccctaacagggcacttcca

SEQ ID NO: 3075836 - DNA, 25 bp, Homo sapien
ttcacccctaacagggcacttccat

SEQ ID NO: 3075837 - DNA, 25 bp, Homo sapien
gaaacctggcggaattcacttgtaa

SEQ ID NO: 3075838 - DNA, 25 bp, Homo sapien
taagtcaggttgttgtcagattgcc

SEQ ID NO: 3075839 - DNA, 25 bp, Homo sapien
cgtagttcactgtctgccattagga

SEQ ID NO: 3075840 - DNA, 25 bp, Homo sapien
caagactgaaagtgcctcgagggca

SEQ ID NO: 3075841 - DNA, 25 bp, Homo sapien
ccccaaaatgaagtgattaggaaga

SEQ ID NO: 3075842 - DNA, 25 bp, Homo sapien
acgaaaagaggcatgtgacttggac

SEQ ID NO: 3075843 - DNA, 25 bp, Homo sapien
taggaagacctttgtaggaggtgct

SEQ ID NO: 3075844 - DNA, 25 bp, Homo sapien
ttcacgaaaagaggcatgtgacttg

SEQ ID NO: 3075845 - DNA, 25 bp, Homo sapien
cgggtactaagttttccagagcagg

SEQ ID NO: 3075846 - DNA, 25 bp, Homo sapien
taacttttagttgggctggcggagc

SEQ ID NO: 3075847 - DNA, 25 bp, Homo sapien
gagactgggcagttcaacctcgggt

SEQ ID NO: 3075848 - DNA, 25 bp, Homo sapien
ctggcggagctcttactttgaggcc

SEQ ID NO: 3075849 - DNA, 25 bp, Homo sapien
ctagagcacctggtagtggattcag

SEQ ID NO: 3075850 - DNA, 25 bp, Homo sapien
tactgggttaagcttctggccttcc

SEQ ID NO: 3075851 - DNA, 25 bp, Homo sapien
ttcattttggccgtagaaggctttg

SEQ ID NO: 3075852 - DNA, 25 bp, Homo sapien
aagcaggtactcagacactactggg

SEQ ID NO: 3075853 - DNA, 25 bp, Homo sapien
gctgggaaagtgtcccgagttcctg

SEQ ID NO: 3075854 - DNA, 25 bp, Homo sapien
aagtgtcccgagttcctgacagctg

SEQ ID NO: 3075855 - DNA, 25 bp, Homo sapien
gaattgggctgggaaagtgtcccga

SEQ ID NO: 3075856 - DNA, 25 bp, Homo sapien
tgtgaattgggctgggaaagtgtcc

SEQ ID NO: 3075857 - DNA, 25 bp, Homo sapien
gctaatttgggatctctagggtacc

SEQ ID NO: 3075858 - DNA, 25 bp, Homo sapien
tactgtgacttacacaggcccctga

SEQ ID NO: 3075859 - DNA, 25 bp, Homo sapien
tgttggcggctgcagcatgtatcca

SEQ ID NO: 3075860 - DNA, 25 bp, Homo sapien
cttggtggcagaaccgagcactacc

SEQ ID NO: 3075861 - DNA, 25 bp, Homo sapien
ttagcagaaggctgtagcctgcagt

SEQ ID NO: 3075862 - DNA, 25 bp, Homo sapien
gcagaaggctgtagcctgcagttac

SEQ ID NO: 3075863 - DNA, 25 bp, Homo sapien
ttgttttcttgtttagcagaaggct

SEQ ID NO: 3075864 - DNA, 25 bp, Homo sapien
tgttttcttgtttagcagaaggctg

SEQ ID NO: 3075865 - DNA, 25 bp, Homo sapien
gagtgaggccattacttttctgagg

SEQ ID NO: 3075866 - DNA, 25 bp, Homo sapien
caggtttgtcagctgagttgagagt

SEQ ID NO: 3075867 - DNA, 25 bp, Homo sapien
gagttgagagtgaggccattacttt

SEQ ID NO: 3075868 - DNA, 25 bp, Homo sapien
agctgagttgagagtgaggccatta

SEQ ID NO: 3075869 - DNA, 25 bp, Homo sapien
ttacgtatccaggtgattttttcca

SEQ ID NO: 3075870 - DNA, 25 bp, Homo sapien
tacgtatccaggtgattttttccat

SEQ ID NO: 3075871 - DNA, 25 bp, Homo sapien
tatacctttagtgagtgttaactgc

SEQ ID NO: 3075872 - DNA, 25 bp, Homo sapien
caaataaggtgtaattcagcttgtc

SEQ ID NO: 3075873 - DNA, 25 bp, Homo sapien
cagagtcctagagtagtggttccca

SEQ ID NO: 3075874 - DNA, 25 bp, Homo sapien
gtgttctagaataagcccatcatat

SEQ ID NO: 3075875 - DNA, 25 bp, Homo sapien
caggtcgtgtgtgtcaggccagtca

SEQ ID NO: 3075876 - DNA, 25 bp, Homo sapien
accagaaaactgtcttgggcccaga

SEQ ID NO: 3075877 - DNA, 25 bp, Homo sapien
gatctcagaagcaaccgaacaggtg

SEQ ID NO: 3075878 - DNA, 25 bp, Homo sapien
aaatgaggagattaagcgggctgcc

SEQ ID NO: 3075879 - DNA, 25 bp, Homo sapien
tcttcgcaaagccaaaggatagtgt

SEQ ID NO: 3075880 - DNA, 25 bp, Homo sapien
acattgtcctctccagaaagtcctt

SEQ ID NO: 3075881 - DNA, 25 bp, Homo sapien
gaagacatttcgtctctgagaaaaa

SEQ ID NO: 3075882 - DNA, 25 bp, Homo sapien
tccatactgtagtcctattgagaag

SEQ ID NO: 3075883 - DNA, 25 bp, Homo sapien
ggaactggtatcctgccaagcctgg

SEQ ID NO: 3075884 - DNA, 25 bp, Homo sapien
cctgtaggtagaagtaaactctgca

SEQ ID NO: 3075885 - DNA, 25 bp, Homo sapien
gacatgaactgactaattggtatcc

SEQ ID NO: 3075886 - DNA, 25 bp, Homo sapien
tacaagatacactggagaacaaagg

SEQ ID NO: 3075887 - DNA, 25 bp, Homo sapien
gcgagagaggctcatttcgagttct

SEQ ID NO: 3075888 - DNA, 25 bp, Homo sapien
tatgcaccaattaaactgagaaggc

SEQ ID NO: 3075889 - DNA, 25 bp, Homo sapien
gccttgcggtcgtaggatatgcacc

SEQ ID NO: 3075890 - DNA, 25 bp, Homo sapien
ttttgacagctgctcgccttgcggt

SEQ ID NO: 3075891 - DNA, 25 bp, Homo sapien
acagatcgggcttcattgggaaaca

SEQ ID NO: 3075892 - DNA, 25 bp, Homo sapien
ttaatgaatacacagatcgggcttc

SEQ ID NO: 3075893 - DNA, 25 bp, Homo sapien
ccctgatgtggcattctcattttct

SEQ ID NO: 3075894 - DNA, 25 bp, Homo sapien
gaaacagaggctcctagccaaggcc

SEQ ID NO: 3075895 - DNA, 25 bp, Homo sapien
cattcctattaatcttggtgtctgg

SEQ ID NO: 3075896 - DNA, 25 bp, Homo sapien
gaagccattcctattaatcttggtg

SEQ ID NO: 3075897 - DNA, 25 bp, Homo sapien
taattccaagaagccattcctatta

SEQ ID NO: 3075898 - DNA, 25 bp, Homo sapien
tccaagaagccattcctattaatct

SEQ ID NO: 3075899 - DNA, 25 bp, Homo sapien
ctgatcgcgtcccatgtagatttcg

SEQ ID NO: 3075900 - DNA, 25 bp, Homo sapien
gatttcgccggcagcaatattgatg

SEQ ID NO: 3075901 - DNA, 25 bp, Homo sapien
cgccggcagcaatattgatgagggc

SEQ ID NO: 3075902 - DNA, 25 bp, Homo sapien
cccatgtagatttcgccggcagcaa

SEQ ID NO: 3075903 - DNA, 25 bp, Homo sapien
gcatctggaagtgggcattattttc

SEQ ID NO: 3075904 - DNA, 25 bp, Homo sapien
gcaatctgtccttcaagtgcatctg

SEQ ID NO: 3075905 - DNA, 25 bp, Homo sapien
tccagaatctttaaccctttctgct

SEQ ID NO: 3075906 - DNA, 25 bp, Homo sapien
cacaattgcaatcccatcctaagca

SEQ ID NO: 3075907 - DNA, 25 bp, Homo sapien
tgaaaatgtatttcttgttatattg

SEQ ID NO: 3075908 - DNA, 25 bp, Homo sapien
gaaaatgtatttcttgttatattgt

SEQ ID NO: 3075909 - DNA, 25 bp, Homo sapien
gaatgtctttgctgaagcacccttg

SEQ ID NO: 3075910 - DNA, 25 bp, Homo sapien
tctcgcacgcagaccaacaagacta

SEQ ID NO: 3075911 - DNA, 25 bp, Homo sapien
tcagctgcctcaagtctcatggcag

SEQ ID NO: 3075912 - DNA, 25 bp, Homo sapien
acaagactactgatgccttgagatc

SEQ ID NO: 3075913 - DNA, 25 bp, Homo sapien
tcaacccacgaaatgtctatcccag

SEQ ID NO: 3075914 - DNA, 25 bp, Homo sapien
aagatctctggcacagctgatccag

SEQ ID NO: 3075915 - DNA, 25 bp, Homo sapien
cctgaagagatctacgagcattaaa

SEQ ID NO: 3075916 - DNA, 25 bp, Homo sapien
cagacccagacaatttacctgcaaa

SEQ ID NO: 3075917 - DNA, 25 bp, Homo sapien
tatctatggtacagtcagttgccac

SEQ ID NO: 3075918 - DNA, 25 bp, Homo sapien
taccaagtttctgctcagcaccggg

SEQ ID NO: 3075919 - DNA, 25 bp, Homo sapien
ttattcaccaaacaagcaccgaccg

SEQ ID NO: 3075920 - DNA, 25 bp, Homo sapien
aaattagcagaaacttgtggagcac

SEQ ID NO: 3075921 - DNA, 25 bp, Homo sapien
gcaccacccagcttcgaggagatgg

SEQ ID NO: 3075922 - DNA, 25 bp, Homo sapien
gacttagctgatgaagtgctctgca

SEQ ID NO: 3075923 - DNA, 25 bp, Homo sapien
cacaatgcatggtctgggacttagc

SEQ ID NO: 3075924 - DNA, 25 bp, Homo sapien
cccatagagggagaattgcggcgaa

SEQ ID NO: 3075925 - DNA, 25 bp, Homo sapien
caggccgcatatggacacacatgag

SEQ ID NO: 3075926 - DNA, 25 bp, Homo sapien
cacacatgaggtcgctcggcatgct

SEQ ID NO: 3075927 - DNA, 25 bp, Homo sapien
tcggcatgctcttaggcccagagga

SEQ ID NO: 3075928 - DNA, 25 bp, Homo sapien
aatcttgagagagaggagatcctcc

SEQ ID NO: 3075929 - DNA, 25 bp, Homo sapien
gcttctcggaggtgaccacgtcatt

SEQ ID NO: 3075930 - DNA, 25 bp, Homo sapien
taattgctcatcatcgagtcctggc

SEQ ID NO: 3075931 - DNA, 25 bp, Homo sapien
cacgtcattggtatccgggctccat

SEQ ID NO: 3075932 - DNA, 25 bp, Homo sapien
gacggtcgctaataagaactgctgg

SEQ ID NO: 3075933 - DNA, 25 bp, Homo sapien
ggttgaaaccttcgcaaactgcaca

SEQ ID NO: 3075934 - DNA, 25 bp, Homo sapien
gaaatcagagtcctgtgctggcaat

SEQ ID NO: 3075935 - DNA, 25 bp, Homo sapien
ccggcctggcagtcaaatggattcc

SEQ ID NO: 3075936 - DNA, 25 bp, Homo sapien
caatgccattgtgcgtaaggagtgc

SEQ ID NO: 3075937 - DNA, 25 bp, Homo sapien
agcaatccctccctggttgtgacag

SEQ ID NO: 3075938 - DNA, 25 bp, Homo sapien
cacagtcacccttagatgagagtca

SEQ ID NO: 3075939 - DNA, 25 bp, Homo sapien
gaaagtgcctggagagatcacctgg

SEQ ID NO: 3075940 - DNA, 25 bp, Homo sapien
tagcaattgccacgtgtctcctggg

SEQ ID NO: 3075941 - DNA, 25 bp, Homo sapien
catgtgccttagacctggtgactcc

SEQ ID NO: 3075942 - DNA, 25 bp, Homo sapien
cagagtgagtatgaaaggaggaggg

SEQ ID NO: 3075943 - DNA, 25 bp, Homo sapien
ccttagacctggtgactccagtggg

SEQ ID NO: 3075944 - DNA, 25 bp, Homo sapien
ctcccatgtgccttagacctggtga

SEQ ID NO: 3075945 - DNA, 25 bp, Homo sapien
atctgggtgctgtttgagcatctgg

SEQ ID NO: 3075946 - DNA, 25 bp, Homo sapien
ctgggtgctgtttgagcatctggct

SEQ ID NO: 3075947 - DNA, 25 bp, Homo sapien
gggccgtggcagatgaacgagatgt

SEQ ID NO: 3075948 - DNA, 25 bp, Homo sapien
tcagggggccgtggcagatgaacga

SEQ ID NO: 3075949 - DNA, 25 bp, Homo sapien
taccatgcaagaatcaactccaagg

SEQ ID NO: 3075950 - DNA, 25 bp, Homo sapien
gaaggacttggcgacttggctaaca

SEQ ID NO: 3075951 - DNA, 25 bp, Homo sapien
tacaacagccacaagtcagtcgatc

SEQ ID NO: 3075952 - DNA, 25 bp, Homo sapien
tgtgtttgtgctcccgaaggacttg

SEQ ID NO: 3075953 - DNA, 25 bp, Homo sapien
tccagtgcaaactgggtcctggggt

SEQ ID NO: 3075954 - DNA, 25 bp, Homo sapien
actatgtccagatttatcagaggaa

SEQ ID NO: 3075955 - DNA, 25 bp, Homo sapien
agggcttcctttcactatgtccaga

SEQ ID NO: 3075956 - DNA, 25 bp, Homo sapien
cctttcactatgtccagatttatca

SEQ ID NO: 3075957 - DNA, 25 bp, Homo sapien
gggcttcctttcactatgtccagat

SEQ ID NO: 3075958 - DNA, 25 bp, Homo sapien
aggtggtagtaagtactgagcaccc

SEQ ID NO: 3075959 - DNA, 25 bp, Homo sapien
gattttgtgtctccttgatagaagt

SEQ ID NO: 3075960 - DNA, 25 bp, Homo sapien
tgattttgtgtctccttgatagaag

SEQ ID NO: 3075961 - DNA, 25 bp, Homo sapien
aaaaggtggtagtaagtactgagca

SEQ ID NO: 3075962 - DNA, 25 bp, Homo sapien
caaggtcccagaaggacagtgatgg

SEQ ID NO: 3075963 - DNA, 25 bp, Homo sapien
taggtttctttagagcggatgcaag

SEQ ID NO: 3075964 - DNA, 25 bp, Homo sapien
agaagtaggtttctttagagcggat

SEQ ID NO: 3075965 - DNA, 25 bp, Homo sapien
tctttagagcggatgcaaggtccca

SEQ ID NO: 3075966 - DNA, 25 bp, Homo sapien
gtcttagggtatctacaacttcagg

SEQ ID NO: 3075967 - DNA, 25 bp, Homo sapien
tgctctgcatccttatagacagttg

SEQ ID NO: 3075968 - DNA, 25 bp, Homo sapien
tcaaatcagggtcatcgagacatct

SEQ ID NO: 3075969 - DNA, 25 bp, Homo sapien
caggttaactagaaactgcattgca

SEQ ID NO: 3075970 - DNA, 25 bp, Homo sapien
ttgggcaggactgctggagcacagg

SEQ ID NO: 3075971 - DNA, 25 bp, Homo sapien
aatgagggacccattggccagggag

SEQ ID NO: 3075972 - DNA, 25 bp, Homo sapien
aggattccctgtccggtgttcacgg

SEQ ID NO: 3075973 - DNA, 25 bp, Homo sapien
actgctggagcacaggattccctgt

SEQ ID NO: 3075974 - DNA, 25 bp, Homo sapien
ttaacacttgggggagagaagctgc

SEQ ID NO: 3075975 - DNA, 25 bp, Homo sapien
tgtgtgccgacttaacggttgggat

SEQ ID NO: 3075976 - DNA, 25 bp, Homo sapien
gatgtttgaccctgcttttcccctg

SEQ ID NO: 3075977 - DNA, 25 bp, Homo sapien
tcagcttttgcttggtatggacagg

SEQ ID NO: 3075978 - DNA, 25 bp, Homo sapien
caggtgtatacttccctaccacagg

SEQ ID NO: 3075979 - DNA, 25 bp, Homo sapien
tttcctggtgagttttattgttcat

SEQ ID NO: 3075980 - DNA, 25 bp, Homo sapien
cttgagaaggtacaacccccctcat

SEQ ID NO: 3075981 - DNA, 25 bp, Homo sapien
tcatttccacttccacgttgtcctt

SEQ ID NO: 3075982 - DNA, 25 bp, Homo sapien
ccacttccacgttgtccttgaggag

SEQ ID NO: 3075983 - DNA, 25 bp, Homo sapien
aggcgagggtacagttgggctattt

SEQ ID NO: 3075984 - DNA, 25 bp, Homo sapien
cacaggcgagggtacagttgggcta

SEQ ID NO: 3075985 - DNA, 25 bp, Homo sapien
ccacaggcgagggtacagttgggct

SEQ ID NO: 3075986 - DNA, 25 bp, Homo sapien
caggcgagggtacagttgggctatt

SEQ ID NO: 3075987 - DNA, 25 bp, Homo sapien
cagttactcgtgcaaggccacagag

SEQ ID NO: 3075988 - DNA, 25 bp, Homo sapien
agttcagttactcgtgcaaggccac

SEQ ID NO: 3075989 - DNA, 25 bp, Homo sapien
aactgagttcagttactcgtgcaag

SEQ ID NO: 3075990 - DNA, 25 bp, Homo sapien
ggaaactgagttcagttactcgtgc

SEQ ID NO: 3075991 - DNA, 25 bp, Homo sapien
tcttgtcctggtgtcctttgcctgg

SEQ ID NO: 3075992 - DNA, 25 bp, Homo sapien
tgttgcatgcaccagataagctctc

SEQ ID NO: 3075993 - DNA, 25 bp, Homo sapien
cgagtaaaggagaaacacaggccca

SEQ ID NO: 3075994 - DNA, 25 bp, Homo sapien
tcgactcaaggaccacagacgtggg

SEQ ID NO: 3075995 - DNA, 25 bp, Homo sapien
attgagtctacaaagacccaggtct

SEQ ID NO: 3075996 - DNA, 25 bp, Homo sapien
acacagattgagtctacaaagaccc

SEQ ID NO: 3075997 - DNA, 25 bp, Homo sapien
cagattgagtctacaaagacccagg

SEQ ID NO: 3075998 - DNA, 25 bp, Homo sapien
gattgagtctacaaagacccaggtc

SEQ ID NO: 3075999 - DNA, 25 bp, Homo sapien
agctccgtggaggagcagttgccta

SEQ ID NO: 3076000 - DNA, 25 bp, Homo sapien
atctgcctgtgctgcgctgccaagc

SEQ ID NO: 3076001 - DNA, 25 bp, Homo sapien
cattccagtggaagcctttgccctc

SEQ ID NO: 3076002 - DNA, 25 bp, Homo sapien
ggattgggctccagagggcctgcat

SEQ ID NO: 3076003 - DNA, 25 bp, Homo sapien
cactggggcagggactgactgggcc

SEQ ID NO: 3076004 - DNA, 25 bp, Homo sapien
agatttgcttctttgagccactggg

SEQ ID NO: 3076005 - DNA, 25 bp, Homo sapien
cagatttgcttctttgagccactgg

SEQ ID NO: 3076006 - DNA, 25 bp, Homo sapien
cagggactgactgggccacatgcac

SEQ ID NO: 3076007 - DNA, 25 bp, Homo sapien
ctgactgctgaactttgccaacctg

SEQ ID NO: 3076008 - DNA, 25 bp, Homo sapien
gactgctgaactttgccaacctgct

SEQ ID NO: 3076009 - DNA, 25 bp, Homo sapien
tgaactttgccaacctgcttgtgag

SEQ ID NO: 3076010 - DNA, 25 bp, Homo sapien
tgctgaactttgccaacctgcttgt

SEQ ID NO: 3076011 - DNA, 25 bp, Homo sapien
cttctggctgtcacagttggaatag

SEQ ID NO: 3076012 - DNA, 25 bp, Homo sapien
tgtcacagttggaatagaactgctc

SEQ ID NO: 3076013 - DNA, 25 bp, Homo sapien
gagagtgtttttgatagggtgataa

SEQ ID NO: 3076014 - DNA, 25 bp, Homo sapien
gttggaatagaactgctcatctgag

SEQ ID NO: 3076015 - DNA, 25 bp, Homo sapien
catccactggaagtaatagctgtct

SEQ ID NO: 3076016 - DNA, 25 bp, Homo sapien
tccactggaagtaatagctgtcttc

SEQ ID NO: 3076017 - DNA, 25 bp, Homo sapien
ccactggaagtaatagctgtcttca

SEQ ID NO: 3076018 - DNA, 25 bp, Homo sapien
accatccactggaagtaatagctgt

SEQ ID NO: 3076019 - DNA, 25 bp, Homo sapien
tgatgatggcaaaatgctgataaaa

SEQ ID NO: 3076020 - DNA, 25 bp, Homo sapien
ctactctttgatgatggcaaaatgc

SEQ ID NO: 3076021 - DNA, 25 bp, Homo sapien
ctttgatgatggcaaaatgctgata

SEQ ID NO: 3076022 - DNA, 25 bp, Homo sapien
tactctttgatgatggcaaaatgct

SEQ ID NO: 3076023 - DNA, 25 bp, Homo sapien
aactggcagcgttggtttgggctgc

SEQ ID NO: 3076024 - DNA, 25 bp, Homo sapien
agaactggcagcgttggtttgggct

SEQ ID NO: 3076025 - DNA, 25 bp, Homo sapien
gaactggcagcgttggtttgggctg

SEQ ID NO: 3076026 - DNA, 25 bp, Homo sapien
tccacttgcgtgatgctttctcttc

SEQ ID NO: 3076027 - DNA, 25 bp, Homo sapien
gacttgccctgctgtcgtggatgat

SEQ ID NO: 3076028 - DNA, 25 bp, Homo sapien
gtggcacggacttgccctgctgtcg

SEQ ID NO: 3076029 - DNA, 25 bp, Homo sapien
ggacttgccctgctgtcgtggatga

SEQ ID NO: 3076030 - DNA, 25 bp, Homo sapien
cacggacttgccctgctgtcgtgga

SEQ ID NO: 3076031 - DNA, 25 bp, Homo sapien
gggaccacgcaggtacactctctgc

SEQ ID NO: 3076032 - DNA, 25 bp, Homo sapien
ggtacactctctgccgatttccagc

SEQ ID NO: 3076033 - DNA, 25 bp, Homo sapien
ccagcgtgccagacattcttatcag

SEQ ID NO: 3076034 - DNA, 25 bp, Homo sapien
ttatcagcgcatctgagcccagcag

SEQ ID NO: 3076035 - DNA, 25 bp, Homo sapien
agaggccaccccctgagattttggt

SEQ ID NO: 3076036 - DNA, 25 bp, Homo sapien
cttcctggttgaacgctctgagagg

SEQ ID NO: 3076037 - DNA, 25 bp, Homo sapien
gtctgtgcctggatgaagaaagcca

SEQ ID NO: 3076038 - DNA, 25 bp, Homo sapien
tggttgaacgctctgagaggccacc

SEQ ID NO: 3076039 - DNA, 25 bp, Homo sapien
tacttaagaagatgaacagatcacc

SEQ ID NO: 3076040 - DNA, 25 bp, Homo sapien
gcttagcaagcagatacacttcaaa

SEQ ID NO: 3076041 - DNA, 25 bp, Homo sapien
acattagtcatggtaagcttagcaa

SEQ ID NO: 3076042 - DNA, 25 bp, Homo sapien
caggagtcaagttggtgcactgcac

SEQ ID NO: 3076043 - DNA, 25 bp, Homo sapien
gaaacacttggagtactggatggcc

SEQ ID NO: 3076044 - DNA, 25 bp, Homo sapien
gccaattttcggtttgtgcaaggaa

SEQ ID NO: 3076045 - DNA, 25 bp, Homo sapien
gacatggtgctctggaatagccgtt

SEQ ID NO: 3076046 - DNA, 25 bp, Homo sapien
gagaccgcccattgcctcaggataa

SEQ ID NO: 3076047 - DNA, 25 bp, Homo sapien
gaatagaggactcgatgtttgttcc

SEQ ID NO: 3076048 - DNA, 25 bp, Homo sapien
tagatgtctgaatagaggactcgat

SEQ ID NO: 3076049 - DNA, 25 bp, Homo sapien
tctgaatagaggactcgatgtttgt

SEQ ID NO: 3076050 - DNA, 25 bp, Homo sapien
taggggaggaaataggactctaaga

SEQ ID NO: 3076051 - DNA, 25 bp, Homo sapien
caaaggtctgtgattttaggaggag

SEQ ID NO: 3076052 - DNA, 25 bp, Homo sapien
gctcacaaaggtctgtgattttagg

SEQ ID NO: 3076053 - DNA, 25 bp, Homo sapien
tcacacactgagcagctctgtgttt

SEQ ID NO: 3076054 - DNA, 25 bp, Homo sapien
tcttccatgctcacaaaggtctgtg

SEQ ID NO: 3076055 - DNA, 25 bp, Homo sapien
cagctccctatccaggcctttgtgg

SEQ ID NO: 3076056 - DNA, 25 bp, Homo sapien
cagtgtgcttgccagggcgaggaga

SEQ ID NO: 3076057 - DNA, 25 bp, Homo sapien
ggagagctttgcataggccgctgct

SEQ ID NO: 3076058 - DNA, 25 bp, Homo sapien
ggccgctgctgcttacttattaacg

SEQ ID NO: 3076059 - DNA, 25 bp, Homo sapien
tagtgacttgatcatccagccagga

SEQ ID NO: 3076060 - DNA, 25 bp, Homo sapien
ctttgaccttagtgacttgatcatc

SEQ ID NO: 3076061 - DNA, 25 bp, Homo sapien
tgaccttagtgacttgatcatccag

SEQ ID NO: 3076062 - DNA, 25 bp, Homo sapien
tccagccaggatctctgtacagccc

SEQ ID NO: 3076063 - DNA, 25 bp, Homo sapien
cctttctgaggtcttgtggtcacac

SEQ ID NO: 3076064 - DNA, 25 bp, Homo sapien
ctcctttctgaggtcttgtggtcac

SEQ ID NO: 3076065 - DNA, 25 bp, Homo sapien
tttctgaggtcttgtggtcacacac

SEQ ID NO: 3076066 - DNA, 25 bp, Homo sapien
tctgaggtcttgtggtcacacacat

SEQ ID NO: 3076067 - DNA, 25 bp, Homo sapien
tatttgaggcaccacacttggcagg

SEQ ID NO: 3076068 - DNA, 25 bp, Homo sapien
tcccacggggagttgcaaagcttgc

SEQ ID NO: 3076069 - DNA, 25 bp, Homo sapien
tcttgaatgatactcagtgaacccc

SEQ ID NO: 3076070 - DNA, 25 bp, Homo sapien
caaagcttgcagttatagaccttgg

SEQ ID NO: 3076071 - DNA, 25 bp, Homo sapien
ttaaggttctgcttctctaatgggc

SEQ ID NO: 3076072 - DNA, 25 bp, Homo sapien
tctctaatgggcttgtgtttaagcc

SEQ ID NO: 3076073 - DNA, 25 bp, Homo sapien
ccatacaataaccatcacctccagg

SEQ ID NO: 3076074 - DNA, 25 bp, Homo sapien
ctaatgggcttgtgtttaagcccgt

SEQ ID NO: 3076075 - DNA, 25 bp, Homo sapien
attccttctttacaccatctatcaa

SEQ ID NO: 3076076 - DNA, 25 bp, Homo sapien
cattccttctttacaccatctatca

SEQ ID NO: 3076077 - DNA, 25 bp, Homo sapien
ttccttctttacaccatctatcaac

SEQ ID NO: 3076078 - DNA, 25 bp, Homo sapien
ccgccaccccaatgagaatgaggac

SEQ ID NO: 3076079 - DNA, 25 bp, Homo sapien
tttcctgccaagagggatcgatcgt

SEQ ID NO: 3076080 - DNA, 25 bp, Homo sapien
ccaagagggatcgatcgtattgatt

SEQ ID NO: 3076081 - DNA, 25 bp, Homo sapien
ctgaatgtgatttgaaatccgccac

SEQ ID NO: 3076082 - DNA, 25 bp, Homo sapien
tctcttctgtcatctggaagtcccc

SEQ ID NO: 3076083 - DNA, 25 bp, Homo sapien
gtctcttctgtcatctggaagtccc

SEQ ID NO: 3076084 - DNA, 25 bp, Homo sapien
tcttctgtcatctggaagtccccac

SEQ ID NO: 3076085 - DNA, 25 bp, Homo sapien
tgtctcttctgtcatctggaagtcc

SEQ ID NO: 3076086 - DNA, 25 bp, Homo sapien
ggttcagaaccacagccgcactgtc

SEQ ID NO: 3076087 - DNA, 25 bp, Homo sapien
agctgccaggttcagaaccacagcc

SEQ ID NO: 3076088 - DNA, 25 bp, Homo sapien
caggttcagaaccacagccgcactg

SEQ ID NO: 3076089 - DNA, 25 bp, Homo sapien
tgccaggttcagaaccacagccgca

SEQ ID NO: 3076090 - DNA, 25 bp, Homo sapien
gccactgtcctgctgtgatctccag

SEQ ID NO: 3076091 - DNA, 25 bp, Homo sapien
aggaagttacttctcggattggctt

SEQ ID NO: 3076092 - DNA, 25 bp, Homo sapien
gaagttacttctcggattggcttct

SEQ ID NO: 3076093 - DNA, 25 bp, Homo sapien
agttacttctcggattggcttctcc

SEQ ID NO: 3076094 - DNA, 25 bp, Homo sapien
tacttctcggattggcttctcctcc

SEQ ID NO: 3076095 - DNA, 25 bp, Homo sapien
gtcccctcttgaaacaggcagaggc

SEQ ID NO: 3076096 - DNA, 25 bp, Homo sapien
acagtcccctcttgaaacaggcaga

SEQ ID NO: 3076097 - DNA, 25 bp, Homo sapien
aggctggcgataaggggcctgctgg

SEQ ID NO: 3076098 - DNA, 25 bp, Homo sapien
ggctggcgataaggggcctgctgga

SEQ ID NO: 3076099 - DNA, 25 bp, Homo sapien
cagcaaagtttttatacactcgctc

SEQ ID NO: 3076100 - DNA, 25 bp, Homo sapien
gtggacaggtcacccctgtggctgc

SEQ ID NO: 3076101 - DNA, 25 bp, Homo sapien
ttaggatattactctctgatagtaa

SEQ ID NO: 3076102 - DNA, 25 bp, Homo sapien
tctctgatagtaatctgtggacagg

SEQ ID NO: 3076103 - DNA, 25 bp, Homo sapien
atattactctctgatagtaatctgt

SEQ ID NO: 3076104 - DNA, 25 bp, Homo sapien
tccatttggcagtcatgctggcagc

SEQ ID NO: 3076105 - DNA, 25 bp, Homo sapien
cagtccatttggcagtcatgctggc

SEQ ID NO: 3076106 - DNA, 25 bp, Homo sapien
gtaaatcacttccatttcccccagc

SEQ ID NO: 3076107 - DNA, 25 bp, Homo sapien
ccagcatgcccctggcgggagaggt

SEQ ID NO: 3076108 - DNA, 25 bp, Homo sapien
cccatgggctatctggaagggtcac

SEQ ID NO: 3076109 - DNA, 25 bp, Homo sapien
ggtacaattgcctccgcaaacgcag

SEQ ID NO: 3076110 - DNA, 25 bp, Homo sapien
taatgataacaagctgttggcctcc

SEQ ID NO: 3076111 - DNA, 25 bp, Homo sapien
gcaaacgcagtaacaaggcggcctg

SEQ ID NO: 3076112 - DNA, 25 bp, Homo sapien
tcttcttctggagatcctttgaaag

SEQ ID NO: 3076113 - DNA, 25 bp, Homo sapien
ttcttctggagatcctttgaaagtt

SEQ ID NO: 3076114 - DNA, 25 bp, Homo sapien
catagctccagaagttggaaaacag

SEQ ID NO: 3076115 - DNA, 25 bp, Homo sapien
ttctcatagctccagaagttggaaa

SEQ ID NO: 3076116 - DNA, 25 bp, Homo sapien
ccttgcattgtgagtgtccatgctt

SEQ ID NO: 3076117 - DNA, 25 bp, Homo sapien
tgtccttgcattgtgagtgtccatg

SEQ ID NO: 3076118 - DNA, 25 bp, Homo sapien
ttagatgttaaatgggtcgcaggtg

SEQ ID NO: 3076119 - DNA, 25 bp, Homo sapien
gatgttaaatgggtcgcaggtgaaa

SEQ ID NO: 3076120 - DNA, 25 bp, Homo sapien
gccttctggaagacttgattgtggt

SEQ ID NO: 3076121 - DNA, 25 bp, Homo sapien
ccttctggaagacttgattgtggtg

SEQ ID NO: 3076122 - DNA, 25 bp, Homo sapien
tgaattattggggacatgcctggag

SEQ ID NO: 3076123 - DNA, 25 bp, Homo sapien
ggggatgatggttggcaataggatg

SEQ ID NO: 3076124 - DNA, 25 bp, Homo sapien
gggttgaattattggggacatgcct

SEQ ID NO: 3076125 - DNA, 25 bp, Homo sapien
gatggttggcaataggatggattgg

SEQ ID NO: 3076126 - DNA, 25 bp, Homo sapien
ccgatgctggggtttgaaggtgaaa

SEQ ID NO: 3076127 - DNA, 25 bp, Homo sapien
gacattgaagtcagatgctgagctg

SEQ ID NO: 3076128 - DNA, 25 bp, Homo sapien
ttatgtgacattgaagtcagatgct

SEQ ID NO: 3076129 - DNA, 25 bp, Homo sapien
tgtgacattgaagtcagatgctgag

SEQ ID NO: 3076130 - DNA, 25 bp, Homo sapien
aagtgtgccccgttctatgtgcttc

SEQ ID NO: 3076131 - DNA, 25 bp, Homo sapien
aggtgtctccccgaattccaaagtg

SEQ ID NO: 3076132 - DNA, 25 bp, Homo sapien
tcagaatatggaacgctattctagg

SEQ ID NO: 3076133 - DNA, 25 bp, Homo sapien
ccccgttctatgtgcttcctgggct

SEQ ID NO: 3076134 - DNA, 25 bp, Homo sapien
tgctgtaggaacatcattgactctg

SEQ ID NO: 3076135 - DNA, 25 bp, Homo sapien
gaacatcattgactctgaatggctc

SEQ ID NO: 3076136 - DNA, 25 bp, Homo sapien
catcattgactctgaatggctccat

SEQ ID NO: 3076137 - DNA, 25 bp, Homo sapien
atgctgtaggaacatcattgactct

SEQ ID NO: 3076138 - DNA, 25 bp, Homo sapien
tggaatgacacgtttgatcatcgct

SEQ ID NO: 3076139 - DNA, 25 bp, Homo sapien
tgacacgtttgatcatcgctgtctt

SEQ ID NO: 3076140 - DNA, 25 bp, Homo sapien
gaatgacacgtttgatcatcgctgt

SEQ ID NO: 3076141 - DNA, 25 bp, Homo sapien
aatgacacgtttgatcatcgctgtc

SEQ ID NO: 3076142 - DNA, 25 bp, Homo sapien
ctggccaccacccttgatcttattt

SEQ ID NO: 3076143 - DNA, 25 bp, Homo sapien
ttctgtgcatttatacactcttctg

SEQ ID NO: 3076144 - DNA, 25 bp, Homo sapien
gttttctcaggctgtccaccctcct

SEQ ID NO: 3076145 - DNA, 25 bp, Homo sapien
cactcttctgtatactcagagaaaa

SEQ ID NO: 3076146 - DNA, 25 bp, Homo sapien
aacatgctgatcagcccatcgtggg

SEQ ID NO: 3076147 - DNA, 25 bp, Homo sapien
tcctgtgacatttctgcagcttcag

SEQ ID NO: 3076148 - DNA, 25 bp, Homo sapien
cagaggcctcgtagctgttgctgga

SEQ ID NO: 3076149 - DNA, 25 bp, Homo sapien
ggcatggcatctctgaacagtgaga

SEQ ID NO: 3076150 - DNA, 25 bp, Homo sapien
gctgctgtctgagatttaaggtggg

SEQ ID NO: 3076151 - DNA, 25 bp, Homo sapien
tggagctgcagattttgagaaagcc

SEQ ID NO: 3076152 - DNA, 25 bp, Homo sapien
ggagctgcagattttgagaaagcca

SEQ ID NO: 3076153 - DNA, 25 bp, Homo sapien
ctgctgtctgagatttaaggtggga

SEQ ID NO: 3076154 - DNA, 25 bp, Homo sapien
agtgaggagtagctctcccatgtcc

SEQ ID NO: 3076155 - DNA, 25 bp, Homo sapien
tcatccctcaggctccagtgagaag

SEQ ID NO: 3076156 - DNA, 25 bp, Homo sapien
tctttctttagtgaggagtagctct

SEQ ID NO: 3076157 - DNA, 25 bp, Homo sapien
catccctcaggctccagtgagaaga

SEQ ID NO: 3076158 - DNA, 25 bp, Homo sapien
ctgctgctcctgtcgcaggcgtgga

SEQ ID NO: 3076159 - DNA, 25 bp, Homo sapien
gaagacctggctggaaccctattcc

SEQ ID NO: 3076160 - DNA, 25 bp, Homo sapien
ctggctggaaccctattcctgccat

SEQ ID NO: 3076161 - DNA, 25 bp, Homo sapien
tgctcctgtcgcaggcgtggaagac

SEQ ID NO: 3076162 - DNA, 25 bp, Homo sapien
gctgtggtcacagtcggaccacttg

SEQ ID NO: 3076163 - DNA, 25 bp, Homo sapien
cacagtcggaccacttggcagccat

SEQ ID NO: 3076164 - DNA, 25 bp, Homo sapien
ggagctgtggtcacagtcggaccac

SEQ ID NO: 3076165 - DNA, 25 bp, Homo sapien
tggtcacagtcggaccacttggcag

SEQ ID NO: 3076166 - DNA, 25 bp, Homo sapien
ggactttctagaaaaaggcatcacg

SEQ ID NO: 3076167 - DNA, 25 bp, Homo sapien
actttctagaaaaaggcatcacgcg

SEQ ID NO: 3076168 - DNA, 25 bp, Homo sapien
tcagtcggactttctagaaaaaggc

SEQ ID NO: 3076169 - DNA, 25 bp, Homo sapien
tttctagaaaaaggcatcacgcggc

SEQ ID NO: 3076170 - DNA, 25 bp, Homo sapien
tggcctttaaaaggccagggcctga

SEQ ID NO: 3076171 - DNA, 25 bp, Homo sapien
tgtgggttctttacacttgctggta

SEQ ID NO: 3076172 - DNA, 25 bp, Homo sapien
tggggaggcttctgactggaatttc

SEQ ID NO: 3076173 - DNA, 25 bp, Homo sapien
gacccaacgtttagtggcaatgact

SEQ ID NO: 3076174 - DNA, 25 bp, Homo sapien
ctactgaaagttgtgggactgacat

SEQ ID NO: 3076175 - DNA, 25 bp, Homo sapien
gaaagttgtgggactgacatctctt

SEQ ID NO: 3076176 - DNA, 25 bp, Homo sapien
actgaaagttgtgggactgacatct

SEQ ID NO: 3076177 - DNA, 25 bp, Homo sapien
tgaaagttgtgggactgacatctct

SEQ ID NO: 3076178 - DNA, 25 bp, Homo sapien
tgagctctgttgtaaagagcagctg

SEQ ID NO: 3076179 - DNA, 25 bp, Homo sapien
ggctgcccagaacgcgggtctcttg

SEQ ID NO: 3076180 - DNA, 25 bp, Homo sapien
catccgggcatcctgtgagctctgt

SEQ ID NO: 3076181 - DNA, 25 bp, Homo sapien
cagtcggtgtggtagagtggctgcc

SEQ ID NO: 3076182 - DNA, 25 bp, Homo sapien
caggggtcaccttttggcttcaaag

SEQ ID NO: 3076183 - DNA, 25 bp, Homo sapien
cttcaaagctctgttaatcttcagg

SEQ ID NO: 3076184 - DNA, 25 bp, Homo sapien
gtcaccttttggcttcaaagctctg

SEQ ID NO: 3076185 - DNA, 25 bp, Homo sapien
agctctgttaatcttcaggccctgg

SEQ ID NO: 3076186 - DNA, 25 bp, Homo sapien
ctggacttctttgcttctccagcac

SEQ ID NO: 3076187 - DNA, 25 bp, Homo sapien
ggacttctttgcttctccagcacta

SEQ ID NO: 3076188 - DNA, 25 bp, Homo sapien
tggacttctttgcttctccagcact

SEQ ID NO: 3076189 - DNA, 25 bp, Homo sapien
acttctttgcttctccagcactaac

SEQ ID NO: 3076190 - DNA, 25 bp, Homo sapien
tcttgtggacccctgatgatgccat

SEQ ID NO: 3076191 - DNA, 25 bp, Homo sapien
catgagtagaattcattgacggcaa

SEQ ID NO: 3076192 - DNA, 25 bp, Homo sapien
tagaattcattgacggcaaaaagaa

SEQ ID NO: 3076193 - DNA, 25 bp, Homo sapien
cctgacatggggcatttccgtcggg

SEQ ID NO: 3076194 - DNA, 25 bp, Homo sapien
ttgccatgagtagaattcattgacg

SEQ ID NO: 3076195 - DNA, 25 bp, Homo sapien
ctgcagaatggtgtgtaatctttgt

SEQ ID NO: 3076196 - DNA, 25 bp, Homo sapien
cagtttagccggcatcttgtaggag

SEQ ID NO: 3076197 - DNA, 25 bp, Homo sapien
ggtttgtcatgcaaacggttagtgc

SEQ ID NO: 3076198 - DNA, 25 bp, Homo sapien
gttttattgttgtcagcgctgcaga

SEQ ID NO: 3076199 - DNA, 25 bp, Homo sapien
ctcccgcaagcaaagtgatgtcgat

SEQ ID NO: 3076200 - DNA, 25 bp, Homo sapien
tcccgcaagcaaagtgatgtcgatg

SEQ ID NO: 3076201 - DNA, 25 bp, Homo sapien
cccgcaagcaaagtgatgtcgatgt

SEQ ID NO: 3076202 - DNA, 25 bp, Homo sapien
gggtaaattaagcatgtagagagca

SEQ ID NO: 3076203 - DNA, 25 bp, Homo sapien
agagggtaaattaagcatgtagaga

SEQ ID NO: 3076204 - DNA, 25 bp, Homo sapien
cggcctgctcctgagaagactcgcc

SEQ ID NO: 3076205 - DNA, 25 bp, Homo sapien
taaattaagcatgtagagagcacag

SEQ ID NO: 3076206 - DNA, 25 bp, Homo sapien
agaagctctcgggtcatctcctcac

SEQ ID NO: 3076207 - DNA, 25 bp, Homo sapien
cagagaagctctcgggtcatctcct

SEQ ID NO: 3076208 - DNA, 25 bp, Homo sapien
ccagagaagctctcgggtcatctcc

SEQ ID NO: 3076209 - DNA, 25 bp, Homo sapien
gagaagctctcgggtcatctcctca

SEQ ID NO: 3076210 - DNA, 25 bp, Homo sapien
gggcacattgatggcgggcccactg

SEQ ID NO: 3076211 - DNA, 25 bp, Homo sapien
tagtctcttagcagacggtatgcca

SEQ ID NO: 3076212 - DNA, 25 bp, Homo sapien
agcagacggtatgccacactgggca

SEQ ID NO: 3076213 - DNA, 25 bp, Homo sapien
gctctgtagtctcttagcagacggt

SEQ ID NO: 3076214 - DNA, 25 bp, Homo sapien
tttagctctgggggagtttgacctc

SEQ ID NO: 3076215 - DNA, 25 bp, Homo sapien
ctgggggagtttgacctctgctgat

SEQ ID NO: 3076216 - DNA, 25 bp, Homo sapien
ttcatccagaggccccctctttagc

SEQ ID NO: 3076217 - DNA, 25 bp, Homo sapien
tgcaggccaaaagccaatagacagt

SEQ ID NO: 3076218 - DNA, 25 bp, Homo sapien
agccatctcagggtttgagtcagaa

SEQ ID NO: 3076219 - DNA, 25 bp, Homo sapien
atttcttggaagagacccagccatc

SEQ ID NO: 3076220 - DNA, 25 bp, Homo sapien
aagagatatctcacagtggctaaca

SEQ ID NO: 3076221 - DNA, 25 bp, Homo sapien
aaccttcggccacatgataaattgc

SEQ ID NO: 3076222 - DNA, 25 bp, Homo sapien
ggccaagtctgtcattcgtgtacat

SEQ ID NO: 3076223 - DNA, 25 bp, Homo sapien
tttgtagtccttctctacccgtgta

SEQ ID NO: 3076224 - DNA, 25 bp, Homo sapien
tgtacttacgaaatatattgccatg

SEQ ID NO: 3076225 - DNA, 25 bp, Homo sapien
ccttctctacccgtgtacaatttga

SEQ ID NO: 3076226 - DNA, 25 bp, Homo sapien
catttgtcccgacgatcatgctggt

SEQ ID NO: 3076227 - DNA, 25 bp, Homo sapien
gtcccgacgatcatgctggtcccag

SEQ ID NO: 3076228 - DNA, 25 bp, Homo sapien
ttcatttgtcccgacgatcatgctg

SEQ ID NO: 3076229 - DNA, 25 bp, Homo sapien
tttgtcccgacgatcatgctggtcc

SEQ ID NO: 3076230 - DNA, 25 bp, Homo sapien
ccaagtgtcttgaagtggctacagt

SEQ ID NO: 3076231 - DNA, 25 bp, Homo sapien
tctgcagacattctctaatcggagt

SEQ ID NO: 3076232 - DNA, 25 bp, Homo sapien
tgattagtcccactgaaggtagacc

SEQ ID NO: 3076233 - DNA, 25 bp, Homo sapien
gctgacacctgatgaaatttgccaa

SEQ ID NO: 3076234 - DNA, 25 bp, Homo sapien
tatgtcctttgcattgtccgaagaa

SEQ ID NO: 3076235 - DNA, 25 bp, Homo sapien
tctacctgtggttgcctttcagcag

SEQ ID NO: 3076236 - DNA, 25 bp, Homo sapien
caccttggagacgtgaggagcaatc

SEQ ID NO: 3076237 - DNA, 25 bp, Homo sapien
aggctctaaaggacaggtgggcacc

SEQ ID NO: 3076238 - DNA, 25 bp, Homo sapien
tgttccattgattgtccccagttgg

SEQ ID NO: 3076239 - DNA, 25 bp, Homo sapien
gaatcttgttcctattacaatggag

SEQ ID NO: 3076240 - DNA, 25 bp, Homo sapien
taattcatgcacattcaccaggcct

SEQ ID NO: 3076241 - DNA, 25 bp, Homo sapien
tataaatcacagttcaggggtggct

SEQ ID NO: 3076242 - DNA, 25 bp, Homo sapien
tccaaggaatgaaagagagctgatg

SEQ ID NO: 3076243 - DNA, 25 bp, Homo sapien
gctgatggggagttttgttatattc

SEQ ID NO: 3076244 - DNA, 25 bp, Homo sapien
agagctgatggggagttttgttata

SEQ ID NO: 3076245 - DNA, 25 bp, Homo sapien
ctgatacgagtccaaggaatgaaag

SEQ ID NO: 3076246 - DNA, 25 bp, Homo sapien
agcaagtagtcattgagtcctgggt

SEQ ID NO: 3076247 - DNA, 25 bp, Homo sapien
cagcaagtagtcattgagtcctggg

SEQ ID NO: 3076248 - DNA, 25 bp, Homo sapien
gtcagcaagtagtcattgagtcctg

SEQ ID NO: 3076249 - DNA, 25 bp, Homo sapien
cagtcagcaagtagtcattgagtcc

SEQ ID NO: 3076250 - DNA, 25 bp, Homo sapien
agtggataaacatcgcttctttctc

SEQ ID NO: 3076251 - DNA, 25 bp, Homo sapien
cctgggaacgttcgcagtcatctca

SEQ ID NO: 3076252 - DNA, 25 bp, Homo sapien
ttctggtgtgctcctgatgccatgt

SEQ ID NO: 3076253 - DNA, 25 bp, Homo sapien
tgtgctcctgatgccatgttccctg

SEQ ID NO: 3076254 - DNA, 25 bp, Homo sapien
tgcctcgtcttccagaaccgttcaa

SEQ ID NO: 3076255 - DNA, 25 bp, Homo sapien
cctggccttccgagggagtagggag

SEQ ID NO: 3076256 - DNA, 25 bp, Homo sapien
caaacatctggatgtgtttagccct

SEQ ID NO: 3076257 - DNA, 25 bp, Homo sapien
ttgattcgagttgagcaaatctgga

SEQ ID NO: 3076258 - DNA, 25 bp, Homo sapien
ccccttagggtgttgtgtggctcag

SEQ ID NO: 3076259 - DNA, 25 bp, Homo sapien
taaatgaaagacaggcctaatggct

SEQ ID NO: 3076260 - DNA, 25 bp, Homo sapien
aaatctatcaggcaccatgggtacc

SEQ ID NO: 3076261 - DNA, 25 bp, Homo sapien
tctcagggtcaacagaaggaatgcc

SEQ ID NO: 3076262 - DNA, 25 bp, Homo sapien
cctaaatgatttgcctctctcctct

SEQ ID NO: 3076263 - DNA, 25 bp, Homo sapien
gctcccctaaatgatttgcctctct

SEQ ID NO: 3076264 - DNA, 25 bp, Homo sapien
tgggcctttttcatggtaggtgagg

SEQ ID NO: 3076265 - DNA, 25 bp, Homo sapien
tcagtgctcccctaaatgatttgcc

SEQ ID NO: 3076266 - DNA, 25 bp, Homo sapien
cctcacacgagaggccgttaggcca

SEQ ID NO: 3076267 - DNA, 25 bp, Homo sapien
agcagccgccacttgaaggagcctc

SEQ ID NO: 3076268 - DNA, 25 bp, Homo sapien
gagaggccgttaggccagatgccat

SEQ ID NO: 3076269 - DNA, 25 bp, Homo sapien
gccacttgaaggagcctcacacgag

SEQ ID NO: 3076270 - DNA, 25 bp, Homo sapien
tatactaacacttggagcgtttgag

SEQ ID NO: 3076271 - DNA, 25 bp, Homo sapien
gagtccatgttagcattccaggcag

SEQ ID NO: 3076272 - DNA, 25 bp, Homo sapien
gatcatctgaagtgccgtttcctgc

SEQ ID NO: 3076273 - DNA, 25 bp, Homo sapien
tatccccagaggagtaggacatttc

SEQ ID NO: 3076274 - DNA, 25 bp, Homo sapien
tgtcctcagatcagttcagcttcac

SEQ ID NO: 3076275 - DNA, 25 bp, Homo sapien
gtgtcctcagatcagttcagcttca

SEQ ID NO: 3076276 - DNA, 25 bp, Homo sapien
ttgagtggtaattattgctgatttt

SEQ ID NO: 3076277 - DNA, 25 bp, Homo sapien
tgagtggtaattattgctgattttc

SEQ ID NO: 3076278 - DNA, 25 bp, Homo sapien
gtggtaattattgctgattttcacg

SEQ ID NO: 3076279 - DNA, 25 bp, Homo sapien
gtaattattgctgattttcacggtg

SEQ ID NO: 3076280 - DNA, 25 bp, Homo sapien
taagtattttgcaattgctgaaaag

SEQ ID NO: 3076281 - DNA, 25 bp, Homo sapien
ttctgccagatttccatcgcattga

SEQ ID NO: 3076282 - DNA, 25 bp, Homo sapien
gatggcttctctgaattaataagta

SEQ ID NO: 3076283 - DNA, 25 bp, Homo sapien
taataagtattttgcaattgctgaa

SEQ ID NO: 3076284 - DNA, 25 bp, Homo sapien
gaggacaaacacctgtgctaaagat

SEQ ID NO: 3076285 - DNA, 25 bp, Homo sapien
tgcgtagctgaagggtgaggacaaa

SEQ ID NO: 3076286 - DNA, 25 bp, Homo sapien
ctcccccggtgcgtagctgaagggt

SEQ ID NO: 3076287 - DNA, 25 bp, Homo sapien
aggacaaacacctgtgctaaagatg

SEQ ID NO: 3076288 - DNA, 25 bp, Homo sapien
gtagcacaaagagttccagtactgg

SEQ ID NO: 3076289 - DNA, 25 bp, Homo sapien
taacctcggcactaagcgatccaag

SEQ ID NO: 3076290 - DNA, 25 bp, Homo sapien
gaactcctgtttagttatgcagcca

SEQ ID NO: 3076291 - DNA, 25 bp, Homo sapien
gatctttattcacggagagtcccag

SEQ ID NO: 3076292 - DNA, 25 bp, Homo sapien
cttcacctcctcggttcctgctgtc

SEQ ID NO: 3076293 - DNA, 25 bp, Homo sapien
ggaactgggcttaacatctgatgag

SEQ ID NO: 3076294 - DNA, 25 bp, Homo sapien
cccaggaattttgacagctacctgt

SEQ ID NO: 3076295 - DNA, 25 bp, Homo sapien
tgctcggggataaccacagggaact

SEQ ID NO: 3076296 - DNA, 25 bp, Homo sapien
tgtcctcagactcctagcccagccc

SEQ ID NO: 3076297 - DNA, 25 bp, Homo sapien
cagcttgtatctcccatccacagga

SEQ ID NO: 3076298 - DNA, 25 bp, Homo sapien
atggcggcagcttgtatctcccatc

SEQ ID NO: 3076299 - DNA, 25 bp, Homo sapien
ggcggcagcttgtatctcccatcca

SEQ ID NO: 3076300 - DNA, 25 bp, Homo sapien
ggcagcttgtatctcccatccacag

SEQ ID NO: 3076301 - DNA, 25 bp, Homo sapien
acactgggctgatcgtcaatggatt

SEQ ID NO: 3076302 - DNA, 25 bp, Homo sapien
gcattaagtattgatcccaagtggg

SEQ ID NO: 3076303 - DNA, 25 bp, Homo sapien
tcaatggatttaatcattaggaggg

SEQ ID NO: 3076304 - DNA, 25 bp, Homo sapien
tggcattaagtattgatcccaagtg

SEQ ID NO: 3076305 - DNA, 25 bp, Homo sapien
ctcctgggttcatcccctcttttct

SEQ ID NO: 3076306 - DNA, 25 bp, Homo sapien
cgctgcaggtagcccagcgaatctt

SEQ ID NO: 3076307 - DNA, 25 bp, Homo sapien
tgcaggtagcccagcgaatcttgct

SEQ ID NO: 3076308 - DNA, 25 bp, Homo sapien
atgcacggggtagggcgctgcaggt

SEQ ID NO: 3076309 - DNA, 25 bp, Homo sapien
agcccagcgaatcttgctgctgcca

SEQ ID NO: 3076310 - DNA, 25 bp, Homo sapien
tgataatgttcgcaggctccgggcc

SEQ ID NO: 3076311 - DNA, 25 bp, Homo sapien
tctagggagccttccgtcttattaa

SEQ ID NO: 3076312 - DNA, 25 bp, Homo sapien
tgcttccaagtgataatgttcgcag

SEQ ID NO: 3076313 - DNA, 25 bp, Homo sapien
tgtcaggatttctgccttgcttcca

SEQ ID NO: 3076314 - DNA, 25 bp, Homo sapien
tggtgtagtgagctgtaaacactag

SEQ ID NO: 3076315 - DNA, 25 bp, Homo sapien
gaaacagggagtagggacagctcgg

SEQ ID NO: 3076316 - DNA, 25 bp, Homo sapien
tttgtggtgtagtgagctgtaaaca

SEQ ID NO: 3076317 - DNA, 25 bp, Homo sapien
ggagtagggacagctcgggccagtg

SEQ ID NO: 3076318 - DNA, 25 bp, Homo sapien
gttgctcactaccatgaccctgttg

SEQ ID NO: 3076319 - DNA, 25 bp, Homo sapien
tgctgtccggcaactaaagtcgtgg

SEQ ID NO: 3076320 - DNA, 25 bp, Homo sapien
tacctaatgggtgactgatactcag

SEQ ID NO: 3076321 - DNA, 25 bp, Homo sapien
ccgtttagctttgcagattaggagc

SEQ ID NO: 3076322 - DNA, 25 bp, Homo sapien
ttttctgtcaggtttgaagccgggc

SEQ ID NO: 3076323 - DNA, 25 bp, Homo sapien
gggttagacagttcgcacatccaag

SEQ ID NO: 3076324 - DNA, 25 bp, Homo sapien
cacaggagaatttttcaggagccat

SEQ ID NO: 3076325 - DNA, 25 bp, Homo sapien
cacagggaaagaacacgatgtctct

SEQ ID NO: 3076326 - DNA, 25 bp, Homo sapien
actcctggcttggtgtgagcctcgg

SEQ ID NO: 3076327 - DNA, 25 bp, Homo sapien
ggattgctgccggagggagggcgga

SEQ ID NO: 3076328 - DNA, 25 bp, Homo sapien
ctggagaatcagcttggccacagac

SEQ ID NO: 3076329 - DNA, 25 bp, Homo sapien
tgagcctcggggattgctgccggag

SEQ ID NO: 3076330 - DNA, 25 bp, Homo sapien
tgcagcggtctaattgaagttcaga

SEQ ID NO: 3076331 - DNA, 25 bp, Homo sapien
tctgtaattcctgactcccttcctg

SEQ ID NO: 3076332 - DNA, 25 bp, Homo sapien
gctaacgggacagagtaacgcacat

SEQ ID NO: 3076333 - DNA, 25 bp, Homo sapien
ggccatctggtcgtgaggtttttac

SEQ ID NO: 3076334 - DNA, 25 bp, Homo sapien
tctacaaccagaaggtgattctctg

SEQ ID NO: 3076335 - DNA, 25 bp, Homo sapien
catctgccgccagttgctccagtga

SEQ ID NO: 3076336 - DNA, 25 bp, Homo sapien
gaacagctgagagccgccagcatct

SEQ ID NO: 3076337 - DNA, 25 bp, Homo sapien
tggggtgttgcgtcctgagacacca

SEQ ID NO: 3076338 - DNA, 25 bp, Homo sapien
gagagccttgttacttgcaaagtca

SEQ ID NO: 3076339 - DNA, 25 bp, Homo sapien
caggaagcaataagaattgtttgcc

SEQ ID NO: 3076340 - DNA, 25 bp, Homo sapien
tgtgctaatgaggaaacatgggcca

SEQ ID NO: 3076341 - DNA, 25 bp, Homo sapien
gaattgtttgcccagttgctgcttt

SEQ ID NO: 3076342 - DNA, 25 bp, Homo sapien
aggctgtgctaatgaggaaacatgg

SEQ ID NO: 3076343 - DNA, 25 bp, Homo sapien
cctgtgcagaagtcatcatagctta

SEQ ID NO: 3076344 - DNA, 25 bp, Homo sapien
cacatgttggtgttctcaggcattg

SEQ ID NO: 3076345 - DNA, 25 bp, Homo sapien
cattggggcccggtatttcctgcgt

SEQ ID NO: 3076346 - DNA, 25 bp, Homo sapien
tgcgtttacctgtgcagaagtcatc

SEQ ID NO: 3076347 - DNA, 25 bp, Homo sapien
gaaacaatgtaaggaggagtgttca

SEQ ID NO: 3076348 - DNA, 25 bp, Homo sapien
acaatgtaaggaggagtgttcagag

SEQ ID NO: 3076349 - DNA, 25 bp, Homo sapien
gtaaggaggagtgttcagaggcgca

SEQ ID NO: 3076350 - DNA, 25 bp, Homo sapien
tgtaaggaggagtgttcagaggcgc

SEQ ID NO: 3076351 - DNA, 25 bp, Homo sapien
caagggcctcgtacagccaattagg

SEQ ID NO: 3076352 - DNA, 25 bp, Homo sapien
gagtgtgaaagccaggggcttggca

SEQ ID NO: 3076353 - DNA, 25 bp, Homo sapien
gtgtggatgttctggcatagcgagt

SEQ ID NO: 3076354 - DNA, 25 bp, Homo sapien
ggcatagcgagtgtgaaagccaggg

SEQ ID NO: 3076355 - DNA, 25 bp, Homo sapien
tgtggatgttctggcatagcgagtg

SEQ ID NO: 3076356 - DNA, 25 bp, Homo sapien
tggcagcttgcgagtgtcattcata

SEQ ID NO: 3076357 - DNA, 25 bp, Homo sapien
gcagcttgcgagtgtcattcataat

SEQ ID NO: 3076358 - DNA, 25 bp, Homo sapien
ggcagcttgcgagtgtcattcataa

SEQ ID NO: 3076359 - DNA, 25 bp, Homo sapien
gagggcatggacagtgacttgactt

SEQ ID NO: 3076360 - DNA, 25 bp, Homo sapien
cctcatttgtctaactgggataaca

SEQ ID NO: 3076361 - DNA, 25 bp, Homo sapien
agctcagcgactccctgatggaagg

SEQ ID NO: 3076362 - DNA, 25 bp, Homo sapien
gacagacctgggcttacatcccagc

SEQ ID NO: 3076363 - DNA, 25 bp, Homo sapien
tttgacatggtttataggaagcctg

SEQ ID NO: 3076364 - DNA, 25 bp, Homo sapien
caacaggtgatggagctgctaagga

SEQ ID NO: 3076365 - DNA, 25 bp, Homo sapien
tatttggttgcactgctcagacccc

SEQ ID NO: 3076366 - DNA, 25 bp, Homo sapien
ctaaggacgccaccacaaagggaag

SEQ ID NO: 3076367 - DNA, 25 bp, Homo sapien
ctgtattgtcaagtgcaataaagtg

SEQ ID NO: 3076368 - DNA, 25 bp, Homo sapien
ttagagcatatggtatgtgattatc

SEQ ID NO: 3076369 - DNA, 25 bp, Homo sapien
ggtatgtgattatctgtattgtcaa

SEQ ID NO: 3076370 - DNA, 25 bp, Homo sapien
tgattatctgtattgtcaagtgcaa

SEQ ID NO: 3076371 - DNA, 25 bp, Homo sapien
taagaggcaacttcagaaccagagt

SEQ ID NO: 3076372 - DNA, 25 bp, Homo sapien
aaaccagcatttcgtaagtcgtcgc

SEQ ID NO: 3076373 - DNA, 25 bp, Homo sapien
tgaagagtgaacctccccaatgcct

SEQ ID NO: 3076374 - DNA, 25 bp, Homo sapien
caaagcactttctctacggtaccag

SEQ ID NO: 3076375 - DNA, 25 bp, Homo sapien
ccctgagttgagaatccttgaaggc

SEQ ID NO: 3076376 - DNA, 25 bp, Homo sapien
gacattaagtagattgaaactccct

SEQ ID NO: 3076377 - DNA, 25 bp, Homo sapien
gagtcatgcagccagttgtgctaga

SEQ ID NO: 3076378 - DNA, 25 bp, Homo sapien
gcttgtgtgttgctcgctgcatgga

SEQ ID NO: 3076379 - DNA, 25 bp, Homo sapien
ggcaaactgcccatacctctgggag

SEQ ID NO: 3076380 - DNA, 25 bp, Homo sapien
taaggatttgattcgggcaaactgc

SEQ ID NO: 3076381 - DNA, 25 bp, Homo sapien
aaaatctcctagtgcctgatgcctg

SEQ ID NO: 3076382 - DNA, 25 bp, Homo sapien
tttagtctgaatgggtgcctgaacc

SEQ ID NO: 3076383 - DNA, 25 bp, Homo sapien
tccatggaactagattggaaatctg

SEQ ID NO: 3076384 - DNA, 25 bp, Homo sapien
tgccgccaacgtagcttaatattaa

SEQ ID NO: 3076385 - DNA, 25 bp, Homo sapien
taatttagggaatgcagtcttgtgc

SEQ ID NO: 3076386 - DNA, 25 bp, Homo sapien
tccagttgagaaattggctcccctc

SEQ ID NO: 3076387 - DNA, 25 bp, Homo sapien
cagtgcgggtgcagctaataatgcc

SEQ ID NO: 3076388 - DNA, 25 bp, Homo sapien
cagagagaggttaagcagtttgccc

SEQ ID NO: 3076389 - DNA, 25 bp, Homo sapien
ggtagagcctttcctcacgcctgat

SEQ ID NO: 3076390 - DNA, 25 bp, Homo sapien
cagtcagctatgtcgtggcccatgt

SEQ ID NO: 3076391 - DNA, 25 bp, Homo sapien
ggattagctccgagagccctatggg

SEQ ID NO: 3076392 - DNA, 25 bp, Homo sapien
actttgtaggattagctccgagagc

SEQ ID NO: 3076393 - DNA, 25 bp, Homo sapien
gagagggcaaggtgtgactcaacca

SEQ ID NO: 3076394 - DNA, 25 bp, Homo sapien
aactttatccagtgcaagcactttg

SEQ ID NO: 3076395 - DNA, 25 bp, Homo sapien
cagttcagcgggttgtacaggcatg

SEQ ID NO: 3076396 - DNA, 25 bp, Homo sapien
catggtgccaacatcgctaggcttc

SEQ ID NO: 3076397 - DNA, 25 bp, Homo sapien
caaagtaggaacaggcacgtcgctt

SEQ ID NO: 3076398 - DNA, 25 bp, Homo sapien
gccagattgaaggaccagggcttcc

SEQ ID NO: 3076399 - DNA, 25 bp, Homo sapien
tggctctctgaagctcacgcaggag

SEQ ID NO: 3076400 - DNA, 25 bp, Homo sapien
ctgaagctcacgcaggagtgatggt

SEQ ID NO: 3076401 - DNA, 25 bp, Homo sapien
tctctgaagctcacgcaggagtgat

SEQ ID NO: 3076402 - DNA, 25 bp, Homo sapien
gctctctgaagctcacgcaggagtg

SEQ ID NO: 3076403 - DNA, 25 bp, Homo sapien
tgggtccccaaagcctagcacttgc

SEQ ID NO: 3076404 - DNA, 25 bp, Homo sapien
tccgcatctgcgtcattgaattaag

SEQ ID NO: 3076405 - DNA, 25 bp, Homo sapien
caggttccctgctgttaactgttac

SEQ ID NO: 3076406 - DNA, 25 bp, Homo sapien
ctggagagtgtatgcgccatggccc

SEQ ID NO: 3076407 - DNA, 25 bp, Homo sapien
tgcctaggaacaggcagcaggtttt

SEQ ID NO: 3076408 - DNA, 25 bp, Homo sapien
ccgttgatcgggttgcctaggaaca

SEQ ID NO: 3076409 - DNA, 25 bp, Homo sapien
actcagacagtcattgctgcccaaa

SEQ ID NO: 3076410 - DNA, 25 bp, Homo sapien
gaaaattgtataaacctgagatttc

SEQ ID NO: 3076411 - DNA, 25 bp, Homo sapien
ggtgtttagtctgtttgcagacctc

SEQ ID NO: 3076412 - DNA, 25 bp, Homo sapien
ctcatggagccgatgaggtgcccca

SEQ ID NO: 3076413 - DNA, 25 bp, Homo sapien
caaagcatctttgtagactttagcc

SEQ ID NO: 3076414 - DNA, 25 bp, Homo sapien
tagccttcgcgtccttgcctaggaa

SEQ ID NO: 3076415 - DNA, 25 bp, Homo sapien
tcaaagcgaaagtcacgttctcggt

SEQ ID NO: 3076416 - DNA, 25 bp, Homo sapien
cgaaagtcacgttctcggtggttgg

SEQ ID NO: 3076417 - DNA, 25 bp, Homo sapien
aaagtcaaagcgaaagtcacgttct

SEQ ID NO: 3076418 - DNA, 25 bp, Homo sapien
cgttctcggtggttgggtggccgtg

SEQ ID NO: 3076419 - DNA, 25 bp, Homo sapien
caagcctgtctgtcttcgagaaggg

SEQ ID NO: 3076420 - DNA, 25 bp, Homo sapien
ggagcacccgtgtcttacgatggac

SEQ ID NO: 3076421 - DNA, 25 bp, Homo sapien
tagtttgtgagaagtgacccgcacg

SEQ ID NO: 3076422 - DNA, 25 bp, Homo sapien
tgaatgcactgaataaccagcaccg

SEQ ID NO: 3076423 - DNA, 25 bp, Homo sapien
gagcaagtcatgtatccctccaagc

SEQ ID NO: 3076424 - DNA, 25 bp, Homo sapien
cccatgagggatctgtcatcagtga

SEQ ID NO: 3076425 - DNA, 25 bp, Homo sapien
caggattcctacgtgaagctagaga

SEQ ID NO: 3076426 - DNA, 25 bp, Homo sapien
gaatgttcttggatatgaagccgga

SEQ ID NO: 3076427 - DNA, 25 bp, Homo sapien
gggatctgctagctcagggatatcc

SEQ ID NO: 3076428 - DNA, 25 bp, Homo sapien
gccgctgtagtccattgtctgtagg

SEQ ID NO: 3076429 - DNA, 25 bp, Homo sapien
agggaagccgctgtagtccattgtc

SEQ ID NO: 3076430 - DNA, 25 bp, Homo sapien
tgaggagagggatctgctagctcag

SEQ ID NO: 3076431 - DNA, 25 bp, Homo sapien
cagatctgtctggtcattgacattt

SEQ ID NO: 3076432 - DNA, 25 bp, Homo sapien
gatctgtctggtcattgacattttg

SEQ ID NO: 3076433 - DNA, 25 bp, Homo sapien
agatctgtctggtcattgacatttt

SEQ ID NO: 3076434 - DNA, 25 bp, Homo sapien
cataggaggctgttccccgactggg

SEQ ID NO: 3076435 - DNA, 25 bp, Homo sapien
ggaatcccggacacatgctttgtga

SEQ ID NO: 3076436 - DNA, 25 bp, Homo sapien
ctgaccccacctgtgccataggagg

SEQ ID NO: 3076437 - DNA, 25 bp, Homo sapien
gctgagacagctggacaataggttt

SEQ ID NO: 3076438 - DNA, 25 bp, Homo sapien
tcggtgaagcaacattgggtttagc

SEQ ID NO: 3076439 - DNA, 25 bp, Homo sapien
caaactctcgtaggacatgtttcct

SEQ ID NO: 3076440 - DNA, 25 bp, Homo sapien
agatggcggtgtttccaaactctcg

SEQ ID NO: 3076441 - DNA, 25 bp, Homo sapien
tgaaccatctatagaaattgctgct

SEQ ID NO: 3076442 - DNA, 25 bp, Homo sapien
ttgggacagagagaaataacttgac

SEQ ID NO: 3076443 - DNA, 25 bp, Homo sapien
ttgctcttaacagcagcagaagcct

SEQ ID NO: 3076444 - DNA, 25 bp, Homo sapien
aagaccctcatcttcagaaatctag

SEQ ID NO: 3076445 - DNA, 25 bp, Homo sapien
ttcagcaatttctgccaagaccctc

SEQ ID NO: 3076446 - DNA, 25 bp, Homo sapien
tcccagcagcggcttatggaccagt

SEQ ID NO: 3076447 - DNA, 25 bp, Homo sapien
gatcaggtaggaaggtgtatgggac

SEQ ID NO: 3076448 - DNA, 25 bp, Homo sapien
tatgggacaggcgactcccaggcat

SEQ ID NO: 3076449 - DNA, 25 bp, Homo sapien
gcggcagcaagaggatcaggtagga

SEQ ID NO: 3076450 - DNA, 25 bp, Homo sapien
catgcattgttgagttgatattaca

SEQ ID NO: 3076451 - DNA, 25 bp, Homo sapien
aatgcatgcaccgtagtagatgtac

SEQ ID NO: 3076452 - DNA, 25 bp, Homo sapien
gatgtactggtagccgtagctgtag

SEQ ID NO: 3076453 - DNA, 25 bp, Homo sapien
tattacagggtctttgacggctcgg

SEQ ID NO: 3076454 - DNA, 25 bp, Homo sapien
tctgggggctgtggacccaagatgg

SEQ ID NO: 3076455 - DNA, 25 bp, Homo sapien
cccaagatggtccatttgtgggtaa

SEQ ID NO: 3076456 - DNA, 25 bp, Homo sapien
gacccaagatggtccatttgtgggt

SEQ ID NO: 3076457 - DNA, 25 bp, Homo sapien
tggacccaagatggtccatttgtgg

SEQ ID NO: 3076458 - DNA, 25 bp, Homo sapien
caggacaccgggcacaagcaggaat

SEQ ID NO: 3076459 - DNA, 25 bp, Homo sapien
gccccccaggacaccgggcacaagc

SEQ ID NO: 3076460 - DNA, 25 bp, Homo sapien
ggacaccgggcacaagcaggaataa

SEQ ID NO: 3076461 - DNA, 25 bp, Homo sapien
cccaggacaccgggcacaagcagga

SEQ ID NO: 3076462 - DNA, 25 bp, Homo sapien
aggagcttctactccaaggctggag

SEQ ID NO: 3076463 - DNA, 25 bp, Homo sapien
tgccagggagctcccaatttggaaa

SEQ ID NO: 3076464 - DNA, 25 bp, Homo sapien
tctgtgtccttgaatttgcagtttc

SEQ ID NO: 3076465 - DNA, 25 bp, Homo sapien
caacagggtccaagcccttaggagc

SEQ ID NO: 3076466 - DNA, 25 bp, Homo sapien
tctgaagcgctttagagactcaggg

SEQ ID NO: 3076467 - DNA, 25 bp, Homo sapien
tgaagcatccgttcacggtggagag

SEQ ID NO: 3076468 - DNA, 25 bp, Homo sapien
caccatcctgcgtttgagactcgaa

SEQ ID NO: 3076469 - DNA, 25 bp, Homo sapien
cttgcaaattctaacctgtgtgggc

SEQ ID NO: 3076470 - DNA, 25 bp, Homo sapien
tgctcaaccgaattttggcgcgccc

SEQ ID NO: 3076471 - DNA, 25 bp, Homo sapien
tgtaatgaccggtgcatgcctggct

SEQ ID NO: 3076472 - DNA, 25 bp, Homo sapien
tcggccacggcatagctgtaagtac

SEQ ID NO: 3076473 - DNA, 25 bp, Homo sapien
ggaattacataagtgcggccagccc

SEQ ID NO: 3076474 - DNA, 25 bp, Homo sapien
ctgtgggtgtgccaggaaagcccaa

SEQ ID NO: 3076475 - DNA, 25 bp, Homo sapien
tgggtgtgccaggaaagcccaacat

SEQ ID NO: 3076476 - DNA, 25 bp, Homo sapien
gtgggtgtgccaggaaagcccaaca

SEQ ID NO: 3076477 - DNA, 25 bp, Homo sapien
tgtgggtgtgccaggaaagcccaac

SEQ ID NO: 3076478 - DNA, 25 bp, Homo sapien
ccatttgcgttccttagctgcagcc

SEQ ID NO: 3076479 - DNA, 25 bp, Homo sapien
tgatctaaggtccagtggcagcgct

SEQ ID NO: 3076480 - DNA, 25 bp, Homo sapien
gagtagcagccttagtcaatagagc

SEQ ID NO: 3076481 - DNA, 25 bp, Homo sapien
ttgatccccgctttctggacactgt

SEQ ID NO: 3076482 - DNA, 25 bp, Homo sapien
gccttccctgccctgcagagcatac

SEQ ID NO: 3076483 - DNA, 25 bp, Homo sapien
ctggccttccctgccctgcagagca

SEQ ID NO: 3076484 - DNA, 25 bp, Homo sapien
tggacatcctggccttccctgccct

SEQ ID NO: 3076485 - DNA, 25 bp, Homo sapien
cctggccttccctgccctgcagagc

SEQ ID NO: 3076486 - DNA, 25 bp, Homo sapien
gcaagactgggcgaagtttctgagt

SEQ ID NO: 3076487 - DNA, 25 bp, Homo sapien
cggatcgagggttgactacatctca

SEQ ID NO: 3076488 - DNA, 25 bp, Homo sapien
cagagatggctcacttcggatcgag

SEQ ID NO: 3076489 - DNA, 25 bp, Homo sapien
tgtttaggtgatgtcctcagacctg

SEQ ID NO: 3076490 - DNA, 25 bp, Homo sapien
tttgagtgtcctccttttctataag

SEQ ID NO: 3076491 - DNA, 25 bp, Homo sapien
tcggcaataaggtaaggacgacagt

SEQ ID NO: 3076492 - DNA, 25 bp, Homo sapien
taatctgagtctatctattttcggc

SEQ ID NO: 3076493 - DNA, 25 bp, Homo sapien
tgtgatgtctctttgttaatctgag

SEQ ID NO: 3076494 - DNA, 25 bp, Homo sapien
caaaggtccctaggacactttgcct

SEQ ID NO: 3076495 - DNA, 25 bp, Homo sapien
tgtccaatcatttcagcacctccaa

SEQ ID NO: 3076496 - DNA, 25 bp, Homo sapien
ctccaaaggtccctaggacactttg

SEQ ID NO: 3076497 - DNA, 25 bp, Homo sapien
tctattgtccaatcatttcagcacc

SEQ ID NO: 3076498 - DNA, 25 bp, Homo sapien
gcccatgggccaggagtggataagc

SEQ ID NO: 3076499 - DNA, 25 bp, Homo sapien
cccatgggccaggagtggataagcc

SEQ ID NO: 3076500 - DNA, 25 bp, Homo sapien
catgggccaggagtggataagcctg

SEQ ID NO: 3076501 - DNA, 25 bp, Homo sapien
ccatgggccaggagtggataagcct

SEQ ID NO: 3076502 - DNA, 25 bp, Homo sapien
taaggcacagccagtatgagacact

SEQ ID NO: 3076503 - DNA, 25 bp, Homo sapien
taagcgtgctgtcctggtactagtg

SEQ ID NO: 3076504 - DNA, 25 bp, Homo sapien
taaaatggctatcttgtaagcgtgc

SEQ ID NO: 3076505 - DNA, 25 bp, Homo sapien
tgctgcaagtatcaccagagaggct

SEQ ID NO: 3076506 - DNA, 25 bp, Homo sapien
ccttttgaagagacccagtagccca

SEQ ID NO: 3076507 - DNA, 25 bp, Homo sapien
ccatgttaaaatgccggcggactct

SEQ ID NO: 3076508 - DNA, 25 bp, Homo sapien
tcaatggcgaacatgggaaccacct

SEQ ID NO: 3076509 - DNA, 25 bp, Homo sapien
agtagcccatagcacaaatcttgtg

SEQ ID NO: 3076510 - DNA, 25 bp, Homo sapien
gagtgtcctcttaagtagcgtgggc

SEQ ID NO: 3076511 - DNA, 25 bp, Homo sapien
gaatgtgcttcgcaagccaggctat

SEQ ID NO: 3076512 - DNA, 25 bp, Homo sapien
gacaggatttcagttccgggaggca

SEQ ID NO: 3076513 - DNA, 25 bp, Homo sapien
caagtctaagcgtttcatgtggaca

SEQ ID NO: 3076514 - DNA, 25 bp, Homo sapien
gtggatggcagtctctcacatcaca

SEQ ID NO: 3076515 - DNA, 25 bp, Homo sapien
aaaaattactatgtggatggcagtc

SEQ ID NO: 3076516 - DNA, 25 bp, Homo sapien
agtttgtgaaaggtttccatcctct

SEQ ID NO: 3076517 - DNA, 25 bp, Homo sapien
catcctctactgtggtccagaaatc

SEQ ID NO: 3076518 - DNA, 25 bp, Homo sapien
tgtggcaccatttttatgaagtggc

SEQ ID NO: 3076519 - DNA, 25 bp, Homo sapien
tcagcatgaatgctggccgtgggcc

SEQ ID NO: 3076520 - DNA, 25 bp, Homo sapien
gcctccagcagcgaagaagtccctg

SEQ ID NO: 3076521 - DNA, 25 bp, Homo sapien
cgtgggcctccagcagcgaagaagt

SEQ ID NO: 3076522 - DNA, 25 bp, Homo sapien
tggtgatgacggctacagcatgctc

SEQ ID NO: 3076523 - DNA, 25 bp, Homo sapien
cagtggattcctcagctttgaagcc

SEQ ID NO: 3076524 - DNA, 25 bp, Homo sapien
ctgaatcagtggattcctcagcttt

SEQ ID NO: 3076525 - DNA, 25 bp, Homo sapien
tgatgacggctacagcatgctctga

SEQ ID NO: 3076526 - DNA, 25 bp, Homo sapien
gccacgtgactatctacattgtaat

SEQ ID NO: 3076527 - DNA, 25 bp, Homo sapien
tgccacgtgactatctacattgtaa

SEQ ID NO: 3076528 - DNA, 25 bp, Homo sapien
ctgtgccacgtgactatctacattg

SEQ ID NO: 3076529 - DNA, 25 bp, Homo sapien
gtgccacgtgactatctacattgta

SEQ ID NO: 3076530 - DNA, 25 bp, Homo sapien
tacaggtgtacgtgcacatgaagtg

SEQ ID NO: 3076531 - DNA, 25 bp, Homo sapien
cccaagagccccagacagagtttaa

SEQ ID NO: 3076532 - DNA, 25 bp, Homo sapien
gaagatgagaattgtcctccccgga

SEQ ID NO: 3076533 - DNA, 25 bp, Homo sapien
tatgagacctaagaagcccgcatgc

SEQ ID NO: 3076534 - DNA, 25 bp, Homo sapien
catgccagctgtcccattgccaggt

SEQ ID NO: 3076535 - DNA, 25 bp, Homo sapien
cacatgccagctgtcccattgccag

SEQ ID NO: 3076536 - DNA, 25 bp, Homo sapien
atgccagctgtcccattgccaggtc

SEQ ID NO: 3076537 - DNA, 25 bp, Homo sapien
acatgccagctgtcccattgccagg

SEQ ID NO: 3076538 - DNA, 25 bp, Homo sapien
tattacaattaaccatgggtcacgg

SEQ ID NO: 3076539 - DNA, 25 bp, Homo sapien
agaggagaatccctgctgcatggca

SEQ ID NO: 3076540 - DNA, 25 bp, Homo sapien
gatatggaatctgctgtaagcccag

SEQ ID NO: 3076541 - DNA, 25 bp, Homo sapien
cttgactttctgttgaggcactggc

SEQ ID NO: 3076542 - DNA, 25 bp, Homo sapien
aaaaatcttcaacttggtgcttggc

SEQ ID NO: 3076543 - DNA, 25 bp, Homo sapien
tctcagcaaggtgttatttaggcag

SEQ ID NO: 3076544 - DNA, 25 bp, Homo sapien
gagcaatagtaccattacaaacagg

SEQ ID NO: 3076545 - DNA, 25 bp, Homo sapien
gtgcttggctagtgccacccacgag

SEQ ID NO: 3076546 - DNA, 25 bp, Homo sapien
ttcttggtggcacgcagggcgtcac

SEQ ID NO: 3076547 - DNA, 25 bp, Homo sapien
ggagctgtttctcgcgcggcaacag

SEQ ID NO: 3076548 - DNA, 25 bp, Homo sapien
tgagaaccttgttgcgcacgatgcc

SEQ ID NO: 3076549 - DNA, 25 bp, Homo sapien
ctcgcagaaggcgtcttcaaggtaa

SEQ ID NO: 3076550 - DNA, 25 bp, Homo sapien
tggaggccactctctatcatttttt

SEQ ID NO: 3076551 - DNA, 25 bp, Homo sapien
ttcccctgtagggtattcaccgtca

SEQ ID NO: 3076552 - DNA, 25 bp, Homo sapien
tcaccgtcatgagaatggacccagc

SEQ ID NO: 3076553 - DNA, 25 bp, Homo sapien
cagactggaggccactctctatcat

SEQ ID NO: 3076554 - DNA, 25 bp, Homo sapien
cagcctcctcatgtctcaggatgtt

SEQ ID NO: 3076555 - DNA, 25 bp, Homo sapien
cctcctcatgtctcaggatgttggg

SEQ ID NO: 3076556 - DNA, 25 bp, Homo sapien
atcccagtaccacccttgagaatca

SEQ ID NO: 3076557 - DNA, 25 bp, Homo sapien
agagatcccagtaccacccttgaga

SEQ ID NO: 3076558 - DNA, 25 bp, Homo sapien
tgcaagaatcggactcatccgcagt

SEQ ID NO: 3076559 - DNA, 25 bp, Homo sapien
cagccagctggtcctcggaaaccat

SEQ ID NO: 3076560 - DNA, 25 bp, Homo sapien
cactgctaaggagtgtccacagggc

SEQ ID NO: 3076561 - DNA, 25 bp, Homo sapien
acagggccgtgcgtctgcaagaatc

SEQ ID NO: 3076562 - DNA, 25 bp, Homo sapien
tccctgagcccagccaatgtgccta

SEQ ID NO: 3076563 - DNA, 25 bp, Homo sapien
atccctgagcccagccaatgtgcct

SEQ ID NO: 3076564 - DNA, 25 bp, Homo sapien
ctcccatccctgagcccagccaatg

SEQ ID NO: 3076565 - DNA, 25 bp, Homo sapien
ccatccctgagcccagccaatgtgc

SEQ ID NO: 3076566 - DNA, 25 bp, Homo sapien
agagcaggaggagcgcatcgctgga

SEQ ID NO: 3076567 - DNA, 25 bp, Homo sapien
ctgccactgcctgccggttcgcagc

SEQ ID NO: 3076568 - DNA, 25 bp, Homo sapien
ggaggagcgcatcgctggatgccat

SEQ ID NO: 3076569 - DNA, 25 bp, Homo sapien
cactgcctgccggttcgcagctcct

SEQ ID NO: 3076570 - DNA, 25 bp, Homo sapien
ggcctagatgccaaatggtcccgct

SEQ ID NO: 3076571 - DNA, 25 bp, Homo sapien
tggtcccgctcgtacaatagttgag

SEQ ID NO: 3076572 - DNA, 25 bp, Homo sapien
catttaaggctatgtgatggtcatg

SEQ ID NO: 3076573 - DNA, 25 bp, Homo sapien
cagtggtcgagctaactcatgattc

SEQ ID NO: 3076574 - DNA, 25 bp, Homo sapien
cgttggtagttggtgcagaatgatg

SEQ ID NO: 3076575 - DNA, 25 bp, Homo sapien
tcctcagcaggttttgtttgggctc

SEQ ID NO: 3076576 - DNA, 25 bp, Homo sapien
tttgctagcagggaggttcctcagc

SEQ ID NO: 3076577 - DNA, 25 bp, Homo sapien
gagatccaagtcaacctcccttacg

SEQ ID NO: 3076578 - DNA, 25 bp, Homo sapien
cattcgcccgcttgatgctgatggt

SEQ ID NO: 3076579 - DNA, 25 bp, Homo sapien
gatgatgctcccattcatgataagg

SEQ ID NO: 3076580 - DNA, 25 bp, Homo sapien
gatagtggaacatggtcagctctct

SEQ ID NO: 3076581 - DNA, 25 bp, Homo sapien
tcatttgcaaggagacgcggagaga

SEQ ID NO: 3076582 - DNA, 25 bp, Homo sapien
tctctgggaaagtgcgtggatattg

SEQ ID NO: 3076583 - DNA, 25 bp, Homo sapien
tattgggccgccagctggcttcatt

SEQ ID NO: 3076584 - DNA, 25 bp, Homo sapien
catagcctcttgatgagtagcctca

SEQ ID NO: 3076585 - DNA, 25 bp, Homo sapien
tttccaccaaaccatagcctcttga

SEQ ID NO: 3076586 - DNA, 25 bp, Homo sapien
tgcagcaaccctatttgtttgggct

SEQ ID NO: 3076587 - DNA, 25 bp, Homo sapien
cagcaaccctatttgtttgggcttc

SEQ ID NO: 3076588 - DNA, 25 bp, Homo sapien
gcaaccctatttgtttgggcttctc

SEQ ID NO: 3076589 - DNA, 25 bp, Homo sapien
caaccctatttgtttgggcttctct

SEQ ID NO: 3076590 - DNA, 25 bp, Homo sapien
tactgaactccccacgtatttggat

SEQ ID NO: 3076591 - DNA, 25 bp, Homo sapien
tcccttgagggtgaggtgcttcctt

SEQ ID NO: 3076592 - DNA, 25 bp, Homo sapien
taattaatcacaaagggacctgtga

SEQ ID NO: 3076593 - DNA, 25 bp, Homo sapien
gagattgatacttgtcgcactttga

SEQ ID NO: 3076594 - DNA, 25 bp, Homo sapien
gatgccaggacactggttgcttcct

SEQ ID NO: 3076595 - DNA, 25 bp, Homo sapien
gtgggtggagggcaacgcgatgctg

SEQ ID NO: 3076596 - DNA, 25 bp, Homo sapien
gcaacgcgatgctgtcaaatcaggg

SEQ ID NO: 3076597 - DNA, 25 bp, Homo sapien
ggtgatgccaggacactggttgctt

SEQ ID NO: 3076598 - DNA, 25 bp, Homo sapien
ccccagtatagtcacagctccaacc

SEQ ID NO: 3076599 - DNA, 25 bp, Homo sapien
cacagctccaacctaccagtctcat

SEQ ID NO: 3076600 - DNA, 25 bp, Homo sapien
tcacagctccaacctaccagtctca

SEQ ID NO: 3076601 - DNA, 25 bp, Homo sapien
gaggccattgcaggtcctttcggaa

SEQ ID NO: 3076602 - DNA, 25 bp, Homo sapien
gccattgcaggtcctttcggaatgg

SEQ ID NO: 3076603 - DNA, 25 bp, Homo sapien
ggaggccattgcaggtcctttcgga

SEQ ID NO: 3076604 - DNA, 25 bp, Homo sapien
ctggaggccattgcaggtcctttcg

SEQ ID NO: 3076605 - DNA, 25 bp, Homo sapien
tacacactcactcacaacgtgggag

SEQ ID NO: 3076606 - DNA, 25 bp, Homo sapien
tctttagggataatgctggtccagg

SEQ ID NO: 3076607 - DNA, 25 bp, Homo sapien
cctaaacactgcgttgtggtagaaa

SEQ ID NO: 3076608 - DNA, 25 bp, Homo sapien
tttagccagcttactttccacagag

SEQ ID NO: 3076609 - DNA, 25 bp, Homo sapien
tggaggcttcatcgtcccttaggac

SEQ ID NO: 3076610 - DNA, 25 bp, Homo sapien
tcgctgtcccagacgctatcatgag

SEQ ID NO: 3076611 - DNA, 25 bp, Homo sapien
tcccagagatttaggctcagagact

SEQ ID NO: 3076612 - DNA, 25 bp, Homo sapien
taggagcaggataaaagggcctccc

SEQ ID NO: 3076613 - DNA, 25 bp, Homo sapien
ttctctagtgtccaccttcccggtc

SEQ ID NO: 3076614 - DNA, 25 bp, Homo sapien
ctttctctagtgtccaccttcccgg

SEQ ID NO: 3076615 - DNA, 25 bp, Homo sapien
tctctagtgtccaccttcccggtcc

SEQ ID NO: 3076616 - DNA, 25 bp, Homo sapien
gcatgggataagttccaaaagcgga

SEQ ID NO: 3076617 - DNA, 25 bp, Homo sapien
gataagttccaaaagcggatagttc

SEQ ID NO: 3076618 - DNA, 25 bp, Homo sapien
caaaagcggatagttcccaagatgt

SEQ ID NO: 3076619 - DNA, 25 bp, Homo sapien
ggatagttcccaagatgttctctag

SEQ ID NO: 3076620 - DNA, 25 bp, Homo sapien
gggtgccacgtctggattccccgga

SEQ ID NO: 3076621 - DNA, 25 bp, Homo sapien
ggtcacaaatgaaagctgaggatgg

SEQ ID NO: 3076622 - DNA, 25 bp, Homo sapien
tgccagcttgcgttgactaccagca

SEQ ID NO: 3076623 - DNA, 25 bp, Homo sapien
tcttctggctgaggccgtgccagct

SEQ ID NO: 3076624 - DNA, 25 bp, Homo sapien
tcctccatgtagttgtcaaggccac

SEQ ID NO: 3076625 - DNA, 25 bp, Homo sapien
caaatcttgcccctgtagacaccta

SEQ ID NO: 3076626 - DNA, 25 bp, Homo sapien
ctacaagaagaatcaggctagcctt

SEQ ID NO: 3076627 - DNA, 25 bp, Homo sapien
tcaggcctacccaataaaggcagag

SEQ ID NO: 3076628 - DNA, 25 bp, Homo sapien
tcagcaaatccgtaggagggtctgc

SEQ ID NO: 3076629 - DNA, 25 bp, Homo sapien
cagacagcatttgaaaacggcacgg

SEQ ID NO: 3076630 - DNA, 25 bp, Homo sapien
tatgtattttccgagcacagacagc

SEQ ID NO: 3076631 - DNA, 25 bp, Homo sapien
taggccaggtagaccaacagcagtg

SEQ ID NO: 3076632 - DNA, 25 bp, Homo sapien
taagcacaatttctatggacgaaga

SEQ ID NO: 3076633 - DNA, 25 bp, Homo sapien
tttaaagccaagaatgcggtcatgc

SEQ ID NO: 3076634 - DNA, 25 bp, Homo sapien
gatccagcatcccataactctagca

SEQ ID NO: 3076635 - DNA, 25 bp, Homo sapien
catccagatatttgctatacaggga

SEQ ID NO: 3076636 - DNA, 25 bp, Homo sapien
ggcacatgcctatagtcctagctat

SEQ ID NO: 3076637 - DNA, 25 bp, Homo sapien
aaaaaatgttaaagagccaggcgtg

SEQ ID NO: 3076638 - DNA, 25 bp, Homo sapien
gtggcacatgcctatagtcctagct

SEQ ID NO: 3076639 - DNA, 25 bp, Homo sapien
cacatgcctatagtcctagctattc

SEQ ID NO: 3076640 - DNA, 25 bp, Homo sapien
taaaatagggaatttctgaagcagc

SEQ ID NO: 3076641 - DNA, 25 bp, Homo sapien
aaaccactggcttgaccacatatac

SEQ ID NO: 3076642 - DNA, 25 bp, Homo sapien
ctaacagctaaaaaccactggcttg

SEQ ID NO: 3076643 - DNA, 25 bp, Homo sapien
cactggcttgaccacatatacaaag

SEQ ID NO: 3076644 - DNA, 25 bp, Homo sapien
gctaaaaaccactggcttgaccaca

SEQ ID NO: 3076645 - DNA, 25 bp, Homo sapien
tgtgtatcagcaatgacaggtcctc

SEQ ID NO: 3076646 - DNA, 25 bp, Homo sapien
gcaagcctagtcagattgagtccca

SEQ ID NO: 3076647 - DNA, 25 bp, Homo sapien
tgtaggcacactttggccccaggga

SEQ ID NO: 3076648 - DNA, 25 bp, Homo sapien
tacccgggaatcagatgtagccagc

SEQ ID NO: 3076649 - DNA, 25 bp, Homo sapien
tgaatgccagcatacacagtataca

SEQ ID NO: 3076650 - DNA, 25 bp, Homo sapien
aatagctcaacattcagccagtgag

SEQ ID NO: 3076651 - DNA, 25 bp, Homo sapien
gcttctgtcaaaccatgatactgag

SEQ ID NO: 3076652 - DNA, 25 bp, Homo sapien
cataataccttagagatcaagaaac

SEQ ID NO: 3076653 - DNA, 25 bp, Homo sapien
gcaagagacctttcgactggtctgc

SEQ ID NO: 3076654 - DNA, 25 bp, Homo sapien
tctcgttttcttccaacgcagtctg

SEQ ID NO: 3076655 - DNA, 25 bp, Homo sapien
gacctttcgactggtctgcaggtgc

SEQ ID NO: 3076656 - DNA, 25 bp, Homo sapien
gtctcgttttcttccaacgcagtct

SEQ ID NO: 3076657 - DNA, 25 bp, Homo sapien
ccttgcttcgcctactcgtcttaaa

SEQ ID NO: 3076658 - DNA, 25 bp, Homo sapien
gcttcgcctactcgtcttaaaatga

SEQ ID NO: 3076659 - DNA, 25 bp, Homo sapien
tcgcctactcgtcttaaaatgacac

SEQ ID NO: 3076660 - DNA, 25 bp, Homo sapien
gcctactcgtcttaaaatgacacct

SEQ ID NO: 3076661 - DNA, 25 bp, Homo sapien
cagacccatacactgaataaaactt

SEQ ID NO: 3076662 - DNA, 25 bp, Homo sapien
ggtagacttgaagtttggattgaat

SEQ ID NO: 3076663 - DNA, 25 bp, Homo sapien
ttgaccagacccatacactgaataa

SEQ ID NO: 3076664 - DNA, 25 bp, Homo sapien
acttgaagtttggattgaatagatc

SEQ ID NO: 3076665 - DNA, 25 bp, Homo sapien
tcctcgtggtaccagatgtcttgga

SEQ ID NO: 3076666 - DNA, 25 bp, Homo sapien
tttggctttgccatatcgcactcga

SEQ ID NO: 3076667 - DNA, 25 bp, Homo sapien
gcgtcatatacgtcaaaccacaggg

SEQ ID NO: 3076668 - DNA, 25 bp, Homo sapien
tctaatccgatcctcgtggtaccag

SEQ ID NO: 3076669 - DNA, 25 bp, Homo sapien
agagaagatgctccctacggtttcc

SEQ ID NO: 3076670 - DNA, 25 bp, Homo sapien
tgctccctacggtttccagccggct

SEQ ID NO: 3076671 - DNA, 25 bp, Homo sapien
agatgctccctacggtttccagccg

SEQ ID NO: 3076672 - DNA, 25 bp, Homo sapien
gaagatgctccctacggtttccagc

SEQ ID NO: 3076673 - DNA, 25 bp, Homo sapien
ctgcgcctggtaccgagcgtgacta

SEQ ID NO: 3076674 - DNA, 25 bp, Homo sapien
gcctggtaccgagcgtgactagctg

SEQ ID NO: 3076675 - DNA, 25 bp, Homo sapien
gatctgcgcctggtaccgagcgtga

SEQ ID NO: 3076676 - DNA, 25 bp, Homo sapien
ggtaccgagcgtgactagctgctac

SEQ ID NO: 3076677 - DNA, 25 bp, Homo sapien
taaagggcgcataagttgctggccg

SEQ ID NO: 3076678 - DNA, 25 bp, Homo sapien
aggatcgctgggctttcaccgcagc

SEQ ID NO: 3076679 - DNA, 25 bp, Homo sapien
agttgctggccgagccaaggatcgc

SEQ ID NO: 3076680 - DNA, 25 bp, Homo sapien
gctccaggtaaagggcgcataagtt

SEQ ID NO: 3076681 - DNA, 25 bp, Homo sapien
ctcgatagccgagccaaaagggcag

SEQ ID NO: 3076682 - DNA, 25 bp, Homo sapien
ggagcactcgatagccgagccaaaa

SEQ ID NO: 3076683 - DNA, 25 bp, Homo sapien
gttcaggcaggagcactcgatagcc

SEQ ID NO: 3076684 - DNA, 25 bp, Homo sapien
caggagcgagccaaagccggacaga

SEQ ID NO: 3076685 - DNA, 25 bp, Homo sapien
tggctgcaactcgtgtttcccgcgg

SEQ ID NO: 3076686 - DNA, 25 bp, Homo sapien
tcgaaaagtgaaagtgtccggaaca

SEQ ID NO: 3076687 - DNA, 25 bp, Homo sapien
caaacagacgccgagagggaaacga

SEQ ID NO: 3076688 - DNA, 25 bp, Homo sapien
tcctccttggaactcgaaaagtgaa

SEQ ID NO: 3076689 - DNA, 25 bp, Homo sapien
gatttcactgctgcctccagaccct

SEQ ID NO: 3076690 - DNA, 25 bp, Homo sapien
ctgaggtggatttcactgctgcctc

SEQ ID NO: 3076691 - DNA, 25 bp, Homo sapien
gtggatttcactgctgcctccagac

SEQ ID NO: 3076692 - DNA, 25 bp, Homo sapien
tgaggtggatttcactgctgcctcc

SEQ ID NO: 3076693 - DNA, 25 bp, Homo sapien
aataccacgcagagaaccagggctg

SEQ ID NO: 3076694 - DNA, 25 bp, Homo sapien
gaattggcatttggaacagcttccc

SEQ ID NO: 3076695 - DNA, 25 bp, Homo sapien
tactggcctggtaccatggttccca

SEQ ID NO: 3076696 - DNA, 25 bp, Homo sapien
tcccaaactgtggtgtgcatcagaa

SEQ ID NO: 3076697 - DNA, 25 bp, Homo sapien
caagcggtttacagtcctgggccaa

SEQ ID NO: 3076698 - DNA, 25 bp, Homo sapien
aggtggccgtctggagctttctcaa

SEQ ID NO: 3076699 - DNA, 25 bp, Homo sapien
catggtgtttcccttgcctgataca

SEQ ID NO: 3076700 - DNA, 25 bp, Homo sapien
tgtcacctcgagagtgcagtcggag

SEQ ID NO: 3076701 - DNA, 25 bp, Homo sapien
tggtcagtgccgtgtaagcgttcct

SEQ ID NO: 3076702 - DNA, 25 bp, Homo sapien
tttccaaacttggtcacgctcggcg

SEQ ID NO: 3076703 - DNA, 25 bp, Homo sapien
cagatgctttgcagtagcccatagc

SEQ ID NO: 3076704 - DNA, 25 bp, Homo sapien
tgctgccaaattaaagaccctgcct

SEQ ID NO: 3076705 - DNA, 25 bp, Homo sapien
atcaccgggcctcggttctcaagca

SEQ ID NO: 3076706 - DNA, 25 bp, Homo sapien
tgtggctggaggatcaccgggcctc

SEQ ID NO: 3076707 - DNA, 25 bp, Homo sapien
tggaggatcaccgggcctcggttct

SEQ ID NO: 3076708 - DNA, 25 bp, Homo sapien
ggatcaccgggcctcggttctcaag

SEQ ID NO: 3076709 - DNA, 25 bp, Homo sapien
atcatctctggcaaggaagagctgc

SEQ ID NO: 3076710 - DNA, 25 bp, Homo sapien
cgggtcagatcatctctggcaagga

SEQ ID NO: 3076711 - DNA, 25 bp, Homo sapien
tcagatcatctctggcaaggaagag

SEQ ID NO: 3076712 - DNA, 25 bp, Homo sapien
gatcatctctggcaaggaagagctg

SEQ ID NO: 3076713 - DNA, 25 bp, Homo sapien
ggagcccaatggtctttcctggtca

SEQ ID NO: 3076714 - DNA, 25 bp, Homo sapien
aaggagcccaatggtctttcctggt

SEQ ID NO: 3076715 - DNA, 25 bp, Homo sapien
aggagcccaatggtctttcctggtc

SEQ ID NO: 3076716 - DNA, 25 bp, Homo sapien
aaaggagcccaatggtctttcctgg

SEQ ID NO: 3076717 - DNA, 25 bp, Homo sapien
gcccattctaatacgtcatagctca

SEQ ID NO: 3076718 - DNA, 25 bp, Homo sapien
cattctaatacgtcatagctcaggg

SEQ ID NO: 3076719 - DNA, 25 bp, Homo sapien
gctcaggggagctaggccacaaaga

SEQ ID NO: 3076720 - DNA, 25 bp, Homo sapien
ctggcccattctaatacgtcatagc

SEQ ID NO: 3076721 - DNA, 25 bp, Homo sapien
ctcctgacgcctgccccggaagtct

SEQ ID NO: 3076722 - DNA, 25 bp, Homo sapien
tcctgacgcctgccccggaagtctt

SEQ ID NO: 3076723 - DNA, 25 bp, Homo sapien
cctgacgcctgccccggaagtcttc

SEQ ID NO: 3076724 - DNA, 25 bp, Homo sapien
cctcctgacgcctgccccggaagtc

SEQ ID NO: 3076725 - DNA, 25 bp, Homo sapien
tcctgaccctcgaatgtggcatgag

SEQ ID NO: 3076726 - DNA, 25 bp, Homo sapien
gggaagcaatgtcgaccaagtcagg

SEQ ID NO: 3076727 - DNA, 25 bp, Homo sapien
ccaggtagacgatgcatgggtccag

SEQ ID NO: 3076728 - DNA, 25 bp, Homo sapien
tgggcaagagagctgacccgactct

SEQ ID NO: 3076729 - DNA, 25 bp, Homo sapien
ccaggggacagggcgggtgctccca

SEQ ID NO: 3076730 - DNA, 25 bp, Homo sapien
cctcagtgtgttcctccaggggaca

SEQ ID NO: 3076731 - DNA, 25 bp, Homo sapien
ggggacagggcgggtgctcccatga

SEQ ID NO: 3076732 - DNA, 25 bp, Homo sapien
ggacagggcgggtgctcccatgaaa

SEQ ID NO: 3076733 - DNA, 25 bp, Homo sapien
acacgcgtggccctccacatcatcc

SEQ ID NO: 3076734 - DNA, 25 bp, Homo sapien
tggccctccacatcatccaggaggt

SEQ ID NO: 3076735 - DNA, 25 bp, Homo sapien
caggaggttggctgttgacgcggca

SEQ ID NO: 3076736 - DNA, 25 bp, Homo sapien
ggaggttggctgttgacgcggcagc

SEQ ID NO: 3076737 - DNA, 25 bp, Homo sapien
agtggtatggccaggccctgacact

SEQ ID NO: 3076738 - DNA, 25 bp, Homo sapien
tcaggaaaaccgtcccagggatgag

SEQ ID NO: 3076739 - DNA, 25 bp, Homo sapien
aaagctctggaggtacctgacacac

SEQ ID NO: 3076740 - DNA, 25 bp, Homo sapien
gggacactgccctagtcctcccagt

SEQ ID NO: 3076741 - DNA, 25 bp, Homo sapien
gaaggctcgggcaagttcaaacagt

SEQ ID NO: 3076742 - DNA, 25 bp, Homo sapien
tcttctctgagaaggctcgggcaag

SEQ ID NO: 3076743 - DNA, 25 bp, Homo sapien
tctgagaaggctcgggcaagttcaa

SEQ ID NO: 3076744 - DNA, 25 bp, Homo sapien
ttggtcttctctgagaaggctcggg

SEQ ID NO: 3076745 - DNA, 25 bp, Homo sapien
acaggaatcgcagacccctgaggac

SEQ ID NO: 3076746 - DNA, 25 bp, Homo sapien
gatgacaggaatcgcagacccctga

SEQ ID NO: 3076747 - DNA, 25 bp, Homo sapien
gagagatgacaggaatcgcagaccc

SEQ ID NO: 3076748 - DNA, 25 bp, Homo sapien
tcagcagccagcacaccagatggcc

SEQ ID NO: 3076749 - DNA, 25 bp, Homo sapien
ttcagacacagcggggttggcgtcg

SEQ ID NO: 3076750 - DNA, 25 bp, Homo sapien
cacagcggggttggcgtcgccagtt

SEQ ID NO: 3076751 - DNA, 25 bp, Homo sapien
agacacagcggggttggcgtcgcca

SEQ ID NO: 3076752 - DNA, 25 bp, Homo sapien
acacagcggggttggcgtcgccagt

SEQ ID NO: 3076753 - DNA, 25 bp, Homo sapien
gactagaagcacaggccaatatgcc

SEQ ID NO: 3076754 - DNA, 25 bp, Homo sapien
tgagagttcagccagcctatgttac

SEQ ID NO: 3076755 - DNA, 25 bp, Homo sapien
cacctggccatgtgtcattgactag

SEQ ID NO: 3076756 - DNA, 25 bp, Homo sapien
cattgactagcctacactcgaggca

SEQ ID NO: 3076757 - DNA, 25 bp, Homo sapien
gtttccgacagccacgctgctggat

SEQ ID NO: 3076758 - DNA, 25 bp, Homo sapien
tagatttctgggattcgtatttcaa

SEQ ID NO: 3076759 - DNA, 25 bp, Homo sapien
aagccaaagtcgtttccgacagcca

SEQ ID NO: 3076760 - DNA, 25 bp, Homo sapien
cacgctgctggatttagatttctgg

SEQ ID NO: 3076761 - DNA, 25 bp, Homo sapien
ctcgtctcctctaccccaaacgcac

SEQ ID NO: 3076762 - DNA, 25 bp, Homo sapien
tctcctctaccccaaacgcactccc

SEQ ID NO: 3076763 - DNA, 25 bp, Homo sapien
tcacgctgtggccgtcacagggaca

SEQ ID NO: 3076764 - DNA, 25 bp, Homo sapien
tctcacgctgtggccgtcacaggga

SEQ ID NO: 3076765 - DNA, 25 bp, Homo sapien
cctcgttctgcaggaaaagcgcgat

SEQ ID NO: 3076766 - DNA, 25 bp, Homo sapien
aggaagtcgcggttccgttgcagct

SEQ ID NO: 3076767 - DNA, 25 bp, Homo sapien
caggaaaagcgcgatcctctcgtcc

SEQ ID NO: 3076768 - DNA, 25 bp, Homo sapien
gctccttcatgaactcctcgttctg

SEQ ID NO: 3076769 - DNA, 25 bp, Homo sapien
agtggtgggttccagttccgatagc

SEQ ID NO: 3076770 - DNA, 25 bp, Homo sapien
caggatgcggagaaagtcatccgga

SEQ ID NO: 3076771 - DNA, 25 bp, Homo sapien
tccgatagcgtctctggcttgtagg

SEQ ID NO: 3076772 - DNA, 25 bp, Homo sapien
atccggaaggttgcccagcagtggt

SEQ ID NO: 3076773 - DNA, 25 bp, Homo sapien
tggcaaccgcaggacacgtgttccg

SEQ ID NO: 3076774 - DNA, 25 bp, Homo sapien
agcctgcagcgtggcaaccgcagga

SEQ ID NO: 3076775 - DNA, 25 bp, Homo sapien
gcgtggcaaccgcaggacacgtgtt

SEQ ID NO: 3076776 - DNA, 25 bp, Homo sapien
gcagcgtggcaaccgcaggacacgt

SEQ ID NO: 3076777 - DNA, 25 bp, Homo sapien
tagggccggtcgaacacgtgcatgt

SEQ ID NO: 3076778 - DNA, 25 bp, Homo sapien
tcgaacacgtgcatgtggtaggctg

SEQ ID NO: 3076779 - DNA, 25 bp, Homo sapien
tccgagctatcaggttccaaagtcc

SEQ ID NO: 3076780 - DNA, 25 bp, Homo sapien
ggctcttcatccgagctatcaggtt

SEQ ID NO: 3076781 - DNA, 25 bp, Homo sapien
gggaacatggtcttgaagtcgtcca

SEQ ID NO: 3076782 - DNA, 25 bp, Homo sapien
tggtggcgtccacagcgccgctgtt

SEQ ID NO: 3076783 - DNA, 25 bp, Homo sapien
tgttggcgcgcagcacgcattcgat

SEQ ID NO: 3076784 - DNA, 25 bp, Homo sapien
cgatgatgtcgtaatccatgttggg

SEQ ID NO: 3076785 - DNA, 25 bp, Homo sapien
ggcgggcaggccggctgttgttgag

SEQ ID NO: 3076786 - DNA, 25 bp, Homo sapien
gctgctccggcggaacaggctggtc

SEQ ID NO: 3076787 - DNA, 25 bp, Homo sapien
ctgctgctccggcggaacaggctgg

SEQ ID NO: 3076788 - DNA, 25 bp, Homo sapien
tgctccggcggaacaggctggtcat

SEQ ID NO: 3076789 - DNA, 25 bp, Homo sapien
cgctgctgctccggcggaacaggct

SEQ ID NO: 3076790 - DNA, 25 bp, Homo sapien
caagagctccgggttaggagagtac

SEQ ID NO: 3076791 - DNA, 25 bp, Homo sapien
ggaaaatgtttctagccggccgcaa

SEQ ID NO: 3076792 - DNA, 25 bp, Homo sapien
atgggctgccaagagctccgggtta

SEQ ID NO: 3076793 - DNA, 25 bp, Homo sapien
cttacttgccctgcggtctcgggca

SEQ ID NO: 3076794 - DNA, 25 bp, Homo sapien
tggcatgcgggaccgggccgtgctg

SEQ ID NO: 3076795 - DNA, 25 bp, Homo sapien
agcccttggagagcggtcctcgcgg

SEQ ID NO: 3076796 - DNA, 25 bp, Homo sapien
ctggcaccggtttcacggatggtcc

SEQ ID NO: 3076797 - DNA, 25 bp, Homo sapien
tgcatcctggcaccggtttcacgga

SEQ ID NO: 3076798 - DNA, 25 bp, Homo sapien
tgtgggccaactcatgacaatactg

SEQ ID NO: 3076799 - DNA, 25 bp, Homo sapien
gttctttactagcacaggacagcca

SEQ ID NO: 3076800 - DNA, 25 bp, Homo sapien
taaggtatgtgctagtatgcccatg

SEQ ID NO: 3076801 - DNA, 25 bp, Homo sapien
gaatctgggacatatggccctcaag

SEQ ID NO: 3076802 - DNA, 25 bp, Homo sapien
gattctaggggggtcttccccagca

SEQ ID NO: 3076803 - DNA, 25 bp, Homo sapien
atgtcaatccctggaattctttcag

SEQ ID NO: 3076804 - DNA, 25 bp, Homo sapien
ctggatgtcaatccctggaattctt

SEQ ID NO: 3076805 - DNA, 25 bp, Homo sapien
caatccctggaattctttcagccct

SEQ ID NO: 3076806 - DNA, 25 bp, Homo sapien
tcaatccctggaattctttcagccc

SEQ ID NO: 3076807 - DNA, 25 bp, Homo sapien
gacagcatggtagcaaggtctcttg

SEQ ID NO: 3076808 - DNA, 25 bp, Homo sapien
cagacctctcggaggctgactcaaa

SEQ ID NO: 3076809 - DNA, 25 bp, Homo sapien
tcaaaggctcccctgaactcatggt

SEQ ID NO: 3076810 - DNA, 25 bp, Homo sapien
tcctagcataagcacgcagccaagg

SEQ ID NO: 3076811 - DNA, 25 bp, Homo sapien
tcaatcctaagaatcccaacccaat

SEQ ID NO: 3076812 - DNA, 25 bp, Homo sapien
aactgaattgtggtagaaaaaatct

SEQ ID NO: 3076813 - DNA, 25 bp, Homo sapien
gctctgatcatttaggcaggctttc

SEQ ID NO: 3076814 - DNA, 25 bp, Homo sapien
aatcttaagaaagcaaaccccagag

SEQ ID NO: 3076815 - DNA, 25 bp, Homo sapien
tctgcacctctgcatgggacaaaga

SEQ ID NO: 3076816 - DNA, 25 bp, Homo sapien
cgttgagtgcgtgggtgcagtgggc

SEQ ID NO: 3076817 - DNA, 25 bp, Homo sapien
tggtctgggttctcctcgagttgta

SEQ ID NO: 3076818 - DNA, 25 bp, Homo sapien
atcctggaggaggagcgaagccact

SEQ ID NO: 3076819 - DNA, 25 bp, Homo sapien
ataaacagagtcaagcggccaagat

SEQ ID NO: 3076820 - DNA, 25 bp, Homo sapien
gctgattatacagtttacggatttt

SEQ ID NO: 3076821 - DNA, 25 bp, Homo sapien
attatacagtttacggattttccag

SEQ ID NO: 3076822 - DNA, 25 bp, Homo sapien
aaacagagtcaagcggccaagatgc

SEQ ID NO: 3076823 - DNA, 25 bp, Homo sapien
cttaagtgattcctcattaaccagg

SEQ ID NO: 3076824 - DNA, 25 bp, Homo sapien
cacaaacagacttctaattattcac

SEQ ID NO: 3076825 - DNA, 25 bp, Homo sapien
gacttctaattattcactcgctcat

SEQ ID NO: 3076826 - DNA, 25 bp, Homo sapien
gtgcccgtccctatcagctcttaag

SEQ ID NO: 3076827 - DNA, 25 bp, Homo sapien
gctccatcccgatggccttgtgatg

SEQ ID NO: 3076828 - DNA, 25 bp, Homo sapien
agcacacttgctccatcccgatggc

SEQ ID NO: 3076829 - DNA, 25 bp, Homo sapien
ctggtgccagctctccgactcctac

SEQ ID NO: 3076830 - DNA, 25 bp, Homo sapien
agctctccgactcctacccagcaac

SEQ ID NO: 3076831 - DNA, 25 bp, Homo sapien
ttggcatcgatttgcccaaagcaaa

SEQ ID NO: 3076832 - DNA, 25 bp, Homo sapien
tggcatcgatttgcccaaagcaaag

SEQ ID NO: 3076833 - DNA, 25 bp, Homo sapien
gcatcgatttgcccaaagcaaaggc

SEQ ID NO: 3076834 - DNA, 25 bp, Homo sapien
ggcatcgatttgcccaaagcaaagg

SEQ ID NO: 3076835 - DNA, 25 bp, Homo sapien
gttacatgaatctctgtccagccag

SEQ ID NO: 3076836 - DNA, 25 bp, Homo sapien
gacctcagattagggcatgaagact

SEQ ID NO: 3076837 - DNA, 25 bp, Homo sapien
aaactcaaggtgttgggcagatggc

SEQ ID NO: 3076838 - DNA, 25 bp, Homo sapien
gagctgcagacaagtgtggccacaa

SEQ ID NO: 3076839 - DNA, 25 bp, Homo sapien
aatggaacttacacaggacagagcc

SEQ ID NO: 3076840 - DNA, 25 bp, Homo sapien
tgtaactaaagcctgtccaatactt

SEQ ID NO: 3076841 - DNA, 25 bp, Homo sapien
caatactgactggacacctactatg

SEQ ID NO: 3076842 - DNA, 25 bp, Homo sapien
aacaggctcgatggataagtaacaa

SEQ ID NO: 3076843 - DNA, 25 bp, Homo sapien
gcgttcacctgaccgcctgtcctct

SEQ ID NO: 3076844 - DNA, 25 bp, Homo sapien
cagcaaagatgctctcgagctcagc

SEQ ID NO: 3076845 - DNA, 25 bp, Homo sapien
aagatgctctcgagctcagcgttca

SEQ ID NO: 3076846 - DNA, 25 bp, Homo sapien
tgctctcgagctcagcgttcacctg

SEQ ID NO: 3076847 - DNA, 25 bp, Homo sapien
tactgggaagtcctcatcctagggt

SEQ ID NO: 3076848 - DNA, 25 bp, Homo sapien
catggggataactagagaacttcct

SEQ ID NO: 3076849 - DNA, 25 bp, Homo sapien
cgtattcatccctcaaagttgcgag

SEQ ID NO: 3076850 - DNA, 25 bp, Homo sapien
gtgcagaggtgagaaatgccagttc

SEQ ID NO: 3076851 - DNA, 25 bp, Homo sapien
catagcaaggagctcaagttcacca

SEQ ID NO: 3076852 - DNA, 25 bp, Homo sapien
ctcatagcaaggagctcaagttcac

SEQ ID NO: 3076853 - DNA, 25 bp, Homo sapien
ccatcaccaaaggtgcctctgcatg

SEQ ID NO: 3076854 - DNA, 25 bp, Homo sapien
cactcatagcaaggagctcaagttc

SEQ ID NO: 3076855 - DNA, 25 bp, Homo sapien
ctgaccccagttaacactcctggta

SEQ ID NO: 3076856 - DNA, 25 bp, Homo sapien
cccagttaacactcctggtaattgc

SEQ ID NO: 3076857 - DNA, 25 bp, Homo sapien
gttaacactcctggtaattgctggg

SEQ ID NO: 3076858 - DNA, 25 bp, Homo sapien
ctgccattgccctgaccccagttaa

SEQ ID NO: 3076859 - DNA, 25 bp, Homo sapien
cagggctctccatgcctgaagccaa

SEQ ID NO: 3076860 - DNA, 25 bp, Homo sapien
ttcaaggaagctcccaaggcagggc

SEQ ID NO: 3076861 - DNA, 25 bp, Homo sapien
tggaaattactgaataggagcagct

SEQ ID NO: 3076862 - DNA, 25 bp, Homo sapien
gtttagcaggcttctaggagccctg

SEQ ID NO: 3076863 - DNA, 25 bp, Homo sapien
gacaaaagcggctgaggacatggca

SEQ ID NO: 3076864 - DNA, 25 bp, Homo sapien
cagaggccttgtgacccaaggacaa

SEQ ID NO: 3076865 - DNA, 25 bp, Homo sapien
gacccacccgctgctaatgagaatg

SEQ ID NO: 3076866 - DNA, 25 bp, Homo sapien
cattcattatcgctatgtcctggag

SEQ ID NO: 3076867 - DNA, 25 bp, Homo sapien
acagagaggcttccccttaacagag

SEQ ID NO: 3076868 - DNA, 25 bp, Homo sapien
aagacttccctagctcgaggctcag

SEQ ID NO: 3076869 - DNA, 25 bp, Homo sapien
gaaaatgctgcaccgtagaggctga

SEQ ID NO: 3076870 - DNA, 25 bp, Homo sapien
gatcaccctacatgaccacagagag

SEQ ID NO: 3076871 - DNA, 25 bp, Homo sapien
aaactcttgatgtctcttatgtctc

SEQ ID NO: 3076872 - DNA, 25 bp, Homo sapien
ggtataatatctcataggtcctgtg

SEQ ID NO: 3076873 - DNA, 25 bp, Homo sapien
gtttctctaagggtgtgggcctgca

SEQ ID NO: 3076874 - DNA, 25 bp, Homo sapien
tcaacgagctaatccatgtgaagta

SEQ ID NO: 3076875 - DNA, 25 bp, Homo sapien
tggggttacaagtacgcaccaccat

SEQ ID NO: 3076876 - DNA, 25 bp, Homo sapien
gcccagcctaaacatttttatctta

SEQ ID NO: 3076877 - DNA, 25 bp, Homo sapien
ggggttacaagtacgcaccaccatg

SEQ ID NO: 3076878 - DNA, 25 bp, Homo sapien
cacgcccagcctaaacatttttatc

SEQ ID NO: 3076879 - DNA, 25 bp, Homo sapien
taagacatttagctgcatcatcaag

SEQ ID NO: 3076880 - DNA, 25 bp, Homo sapien
caaggactgttatcacatttatcat

SEQ ID NO: 3076881 - DNA, 25 bp, Homo sapien
gaattcctcaaagacccttggtgct

SEQ ID NO: 3076882 - DNA, 25 bp, Homo sapien
caagagtctgtgataatgcgctgac

SEQ ID NO: 3076883 - DNA, 25 bp, Homo sapien
cgcgcccggggcccgggatgaggtg

SEQ ID NO: 3076884 - DNA, 25 bp, Homo sapien
ggatgaggtgggggctcgggaagga

SEQ ID NO: 3076885 - DNA, 25 bp, Homo sapien
atgaggtgggggctcgggaaggaag

SEQ ID NO: 3076886 - DNA, 25 bp, Homo sapien
cgggatgaggtgggggctcgggaag

SEQ ID NO: 3076887 - DNA, 25 bp, Homo sapien
gccacgcgcgtccgctccgcgcggg

SEQ ID NO: 3076888 - DNA, 25 bp, Homo sapien
ccacgcgcgtccgctccgcgcgggc

SEQ ID NO: 3076889 - DNA, 25 bp, Homo sapien
tcacattatcgtggcaggttgagaa

SEQ ID NO: 3076890 - DNA, 25 bp, Homo sapien
atggtagcatagaggggcacatctc

SEQ ID NO: 3076891 - DNA, 25 bp, Homo sapien
gaagcacagcaggagatggtagcat

SEQ ID NO: 3076892 - DNA, 25 bp, Homo sapien
tcgtggcaggttgagaagcacagca

SEQ ID NO: 3076893 - DNA, 25 bp, Homo sapien
tggatatgcgatacaataaacggac

SEQ ID NO: 3076894 - DNA, 25 bp, Homo sapien
ctgggtatgcaaaacgcagccccca

SEQ ID NO: 3076895 - DNA, 25 bp, Homo sapien
caataaacggacagattcagccatc

SEQ ID NO: 3076896 - DNA, 25 bp, Homo sapien
gactcgtacagctgtgatttggata

SEQ ID NO: 3076897 - DNA, 25 bp, Homo sapien
tctgccttttcgtagagcagtggct

SEQ ID NO: 3076898 - DNA, 25 bp, Homo sapien
tcattcaggagcacaccgtaggagg

SEQ ID NO: 3076899 - DNA, 25 bp, Homo sapien
ggctgtcgtgccttcaacacctggt

SEQ ID NO: 3076900 - DNA, 25 bp, Homo sapien
cctagagcgtaacaggctggatgtc

SEQ ID NO: 3076901 - DNA, 25 bp, Homo sapien
tgtgaattatgactgccagcccacc

SEQ ID NO: 3076902 - DNA, 25 bp, Homo sapien
gagataacagatcccagcaggcaga

SEQ ID NO: 3076903 - DNA, 25 bp, Homo sapien
tgggctttccctacacgagtccttc

SEQ ID NO: 3076904 - DNA, 25 bp, Homo sapien
tctgcatgccaggaaatgtgaactt

SEQ ID NO: 3076905 - DNA, 25 bp, Homo sapien
tgaataatcccagccaaattggaga

SEQ ID NO: 3076906 - DNA, 25 bp, Homo sapien
ggagcttgcctgtccacacacttga

SEQ ID NO: 3076907 - DNA, 25 bp, Homo sapien
gctttaaaaacaatgcgtggcatga

SEQ ID NO: 3076908 - DNA, 25 bp, Homo sapien
aatcagccatccaccttgtataggg

SEQ ID NO: 3076909 - DNA, 25 bp, Homo sapien
gacatagtcccagacgacacagagg

SEQ ID NO: 3076910 - DNA, 25 bp, Homo sapien
ggcaagaaaggcatgctctctacag

SEQ ID NO: 3076911 - DNA, 25 bp, Homo sapien
cataggtgtgggtagattcattgga

SEQ ID NO: 3076912 - DNA, 25 bp, Homo sapien
gccactgtgactgggtttgacatag

SEQ ID NO: 3076913 - DNA, 25 bp, Homo sapien
tagcagccgtggaggtttggcacag

SEQ ID NO: 3076914 - DNA, 25 bp, Homo sapien
ccgtggaggtttggcacaggttagc

SEQ ID NO: 3076915 - DNA, 25 bp, Homo sapien
gaggtttggcacaggttagcagctt

SEQ ID NO: 3076916 - DNA, 25 bp, Homo sapien
tcacaggtgtcgtagcagccgtgga

SEQ ID NO: 3076917 - DNA, 25 bp, Homo sapien
tatcaagcggtcaacagaacagagg

SEQ ID NO: 3076918 - DNA, 25 bp, Homo sapien
cagggatcccagtgtatgaatcacc

SEQ ID NO: 3076919 - DNA, 25 bp, Homo sapien
caatgcagggctaagtgttctcact

SEQ ID NO: 3076920 - DNA, 25 bp, Homo sapien
tgatgctatacctcctgcaaggact

SEQ ID NO: 3076921 - DNA, 25 bp, Homo sapien
tacaatgtaactttggcacacacca

SEQ ID NO: 3076922 - DNA, 25 bp, Homo sapien
gctgtgacttggctatcaaaatgga

SEQ ID NO: 3076923 - DNA, 25 bp, Homo sapien
tgtgagccaggtctagacacttctt

SEQ ID NO: 3076924 - DNA, 25 bp, Homo sapien
aaatgatgggtaggctagctgtgac

SEQ ID NO: 3076925 - DNA, 25 bp, Homo sapien
cccacagtctcagtgtttctacttg

SEQ ID NO: 3076926 - DNA, 25 bp, Homo sapien
ttgctttaacagcttcttcccacag

SEQ ID NO: 3076927 - DNA, 25 bp, Homo sapien
tcttccttgctttaacagcttcttc

SEQ ID NO: 3076928 - DNA, 25 bp, Homo sapien
cttcccacagtctcagtgtttctac

SEQ ID NO: 3076929 - DNA, 25 bp, Homo sapien
gccagcttgtcacatgttgttgttg

SEQ ID NO: 3076930 - DNA, 25 bp, Homo sapien
ccagcttgtcacatgttgttgttgt

SEQ ID NO: 3076931 - DNA, 25 bp, Homo sapien
ctggccagcttgtcacatgttgttg

SEQ ID NO: 3076932 - DNA, 25 bp, Homo sapien
tggccagcttgtcacatgttgttgt

SEQ ID NO: 3076933 - DNA, 25 bp, Homo sapien
gcttttggttactggtctcttcact

SEQ ID NO: 3076934 - DNA, 25 bp, Homo sapien
tggttactggtctcttcactcatgc

SEQ ID NO: 3076935 - DNA, 25 bp, Homo sapien
ttttggttactggtctcttcactca

SEQ ID NO: 3076936 - DNA, 25 bp, Homo sapien
gctgctgcttttggttactggtctc

SEQ ID NO: 3076937 - DNA, 25 bp, Homo sapien
taagtggctggtgatgtatgctgca

SEQ ID NO: 3076938 - DNA, 25 bp, Homo sapien
tggcgcaccatgtgtgtccgcagtc

SEQ ID NO: 3076939 - DNA, 25 bp, Homo sapien
caccatgtgtgtccgcagtctgtct

SEQ ID NO: 3076940 - DNA, 25 bp, Homo sapien
catgagtctttaagtggctggtgat

SEQ ID NO: 3076941 - DNA, 25 bp, Homo sapien
gggtctttctgttgaatggacatgt

SEQ ID NO: 3076942 - DNA, 25 bp, Homo sapien
tttctgttgaatggacatgttttac

SEQ ID NO: 3076943 - DNA, 25 bp, Homo sapien
gttgaatggacatgttttacatgac

SEQ ID NO: 3076944 - DNA, 25 bp, Homo sapien
gaatggacatgttttacatgacagc

SEQ ID NO: 3076945 - DNA, 25 bp, Homo sapien
tgagtccaccgaggcacttgttaag

SEQ ID NO: 3076946 - DNA, 25 bp, Homo sapien
ggaaagctagcagaattaccaacct

SEQ ID NO: 3076947 - DNA, 25 bp, Homo sapien
taacacttgccagaaacagctacca

SEQ ID NO: 3076948 - DNA, 25 bp, Homo sapien
gaacaaagtcttaggcctctacctg

SEQ ID NO: 3076949 - DNA, 25 bp, Homo sapien
ccacaaacactgcaagtatagggtt

SEQ ID NO: 3076950 - DNA, 25 bp, Homo sapien
ttcccacaaacactgcaagtatagg

SEQ ID NO: 3076951 - DNA, 25 bp, Homo sapien
acaaacactgcaagtatagggtttg

SEQ ID NO: 3076952 - DNA, 25 bp, Homo sapien
tcccacaaacactgcaagtataggg

SEQ ID NO: 3076953 - DNA, 25 bp, Homo sapien
tattggtattggaagcaatggtttc

SEQ ID NO: 3076954 - DNA, 25 bp, Homo sapien
caccctgaggtttctgagttattgg

SEQ ID NO: 3076955 - DNA, 25 bp, Homo sapien
gtaagtgcacacaaatgaagttttg

SEQ ID NO: 3076956 - DNA, 25 bp, Homo sapien
cctgctgttggtgatgggaagcttc

SEQ ID NO: 3076957 - DNA, 25 bp, Homo sapien
tataaattcaacaggatgctccagg

SEQ ID NO: 3076958 - DNA, 25 bp, Homo sapien
tccagtgccagagggtaaaagattt

SEQ ID NO: 3076959 - DNA, 25 bp, Homo sapien
caacaggccagtctacacagtaggt

SEQ ID NO: 3076960 - DNA, 25 bp, Homo sapien
cccagggtagtaggatatggcacca

SEQ ID NO: 3076961 - DNA, 25 bp, Homo sapien
gtggtgacagcgaccggcctcctcc

SEQ ID NO: 3076962 - DNA, 25 bp, Homo sapien
cgggccggcacgcaatggcccagca

SEQ ID NO: 3076963 - DNA, 25 bp, Homo sapien
ctgggccgcggggtggtgacagcga

SEQ ID NO: 3076964 - DNA, 25 bp, Homo sapien
cagcagcccgcgctatccagcggcc

SEQ ID NO: 3076965 - DNA, 25 bp, Homo sapien
acaggaacgcggtccagttggcctc

SEQ ID NO: 3076966 - DNA, 25 bp, Homo sapien
aacaggaacgcggtccagttggcct

SEQ ID NO: 3076967 - DNA, 25 bp, Homo sapien
ctggaacaggaacgcggtccagttg

SEQ ID NO: 3076968 - DNA, 25 bp, Homo sapien
ggaacgcggtccagttggcctccat

SEQ ID NO: 3076969 - DNA, 25 bp, Homo sapien
gctgcggcggccgacccccctcctc

SEQ ID NO: 3076970 - DNA, 25 bp, Homo sapien
cggaggaggcgacaacaaagcggcg

SEQ ID NO: 3076971 - DNA, 25 bp, Homo sapien
gcctcctcagccggaggaggcgaca

SEQ ID NO: 3076972 - DNA, 25 bp, Homo sapien
ggaggaggcgacaacaaagcggcgg

SEQ ID NO: 3076973 - DNA, 25 bp, Homo sapien
gttccaagtcttccgtgtaggcgtc

SEQ ID NO: 3076974 - DNA, 25 bp, Homo sapien
actggaactttgtagatgaggagcc

SEQ ID NO: 3076975 - DNA, 25 bp, Homo sapien
aaatcgaacttctggttggacagcg

SEQ ID NO: 3076976 - DNA, 25 bp, Homo sapien
tgaggtgaccccagcctgtttgcag

SEQ ID NO: 3076977 - DNA, 25 bp, Homo sapien
taaacaagtgtctctagtccaagac

SEQ ID NO: 3076978 - DNA, 25 bp, Homo sapien
aatatggctggagaattctactgta

SEQ ID NO: 3076979 - DNA, 25 bp, Homo sapien
tcagatggacgcattattttaagac

SEQ ID NO: 3076980 - DNA, 25 bp, Homo sapien
cagacacttctaatcaaggtcacca

SEQ ID NO: 3076981 - DNA, 25 bp, Homo sapien
agcaggtaacacatcagggaaccgg

SEQ ID NO: 3076982 - DNA, 25 bp, Homo sapien
aatgagaagttctgcagtttggatc

SEQ ID NO: 3076983 - DNA, 25 bp, Homo sapien
ggtaacacatcagggaaccggtcag

SEQ ID NO: 3076984 - DNA, 25 bp, Homo sapien
tgcagtttggatcagtagcagaagc

SEQ ID NO: 3076985 - DNA, 25 bp, Homo sapien
tctaatgacaatatcgctggactct

SEQ ID NO: 3076986 - DNA, 25 bp, Homo sapien
tcattcagtggatagcaaatctgct

SEQ ID NO: 3076987 - DNA, 25 bp, Homo sapien
tgttatgctgggatctagaaaccct

SEQ ID NO: 3076988 - DNA, 25 bp, Homo sapien
gagcttccacagactatatactggg

SEQ ID NO: 3076989 - DNA, 25 bp, Homo sapien
aaattagaacaaaatatctacctca

SEQ ID NO: 3076990 - DNA, 25 bp, Homo sapien
tcagatgccccaggacagggtaatg

SEQ ID NO: 3076991 - DNA, 25 bp, Homo sapien
tgaactggataagcacactaagggc

SEQ ID NO: 3076992 - DNA, 25 bp, Homo sapien
gaaacctatgcagtatactccctgg

SEQ ID NO: 3076993 - DNA, 25 bp, Homo sapien
taacagatggcaacacaaggcctag

SEQ ID NO: 3076994 - DNA, 25 bp, Homo sapien
tgtgattagtcttctcccgagagaa

SEQ ID NO: 3076995 - DNA, 25 bp, Homo sapien
catttgtacaaagtgcgtaacgagc

SEQ ID NO: 3076996 - DNA, 25 bp, Homo sapien
taaatgccaggagctgtactgtcac

SEQ ID NO: 3076997 - DNA, 25 bp, Homo sapien
gcttgaagagccctggtaaacaccc

SEQ ID NO: 3076998 - DNA, 25 bp, Homo sapien
tagaacaaccctcagcacacagggt

SEQ ID NO: 3076999 - DNA, 25 bp, Homo sapien
gaaagccaaggagctaggcatccct

SEQ ID NO: 3077000 - DNA, 25 bp, Homo sapien
catggccactgtgactagatgtagt

SEQ ID NO: 3077001 - DNA, 25 bp, Homo sapien
gatgtagtcctactctagaacaacc

SEQ ID NO: 3077002 - DNA, 25 bp, Homo sapien
tgatctgactaaagaacacagtgtc

SEQ ID NO: 3077003 - DNA, 25 bp, Homo sapien
ccacagtatcaggactgggcgcagt

SEQ ID NO: 3077004 - DNA, 25 bp, Homo sapien
gctatgtggcacacctgcctaagat

SEQ ID NO: 3077005 - DNA, 25 bp, Homo sapien
catttattaaggtgcaggtactagc

SEQ ID NO: 3077006 - DNA, 25 bp, Homo sapien
tacactgcgaaccaacattttacat

SEQ ID NO: 3077007 - DNA, 25 bp, Homo sapien
gccttaagttgtggatgtcagccag

SEQ ID NO: 3077008 - DNA, 25 bp, Homo sapien
ttgttacactgcgaaccaacatttt

SEQ ID NO: 3077009 - DNA, 25 bp, Homo sapien
cattttacatttctagccttaagtt

SEQ ID NO: 3077010 - DNA, 25 bp, Homo sapien
tagttagtgccctttcagctgtcaa

SEQ ID NO: 3077011 - DNA, 25 bp, Homo sapien
tactgagaagatcatcacacctgaa

SEQ ID NO: 3077012 - DNA, 25 bp, Homo sapien
ttaaggccagttgtcccacacctgt

SEQ ID NO: 3077013 - DNA, 25 bp, Homo sapien
tacttagtgttaccttagcaggcag

SEQ ID NO: 3077014 - DNA, 25 bp, Homo sapien
gctgatacagaggatcaaggtagtt

SEQ ID NO: 3077015 - DNA, 25 bp, Homo sapien
tacccaaaccatctaactttagagc

SEQ ID NO: 3077016 - DNA, 25 bp, Homo sapien
tctaactttagagctgatacagagg

SEQ ID NO: 3077017 - DNA, 25 bp, Homo sapien
aggtagttagctggtctctactttg

SEQ ID NO: 3077018 - DNA, 25 bp, Homo sapien
tttgttcaaagtgcatttggtggag

SEQ ID NO: 3077019 - DNA, 25 bp, Homo sapien
cactatcttcatgtccacagttcta

SEQ ID NO: 3077020 - DNA, 25 bp, Homo sapien
cacagttctaccaatagttggcact

SEQ ID NO: 3077021 - DNA, 25 bp, Homo sapien
gagtatagcatcctagagaagctgt

SEQ ID NO: 3077022 - DNA, 25 bp, Homo sapien
aagacaccccagttacagacaaaag

SEQ ID NO: 3077023 - DNA, 25 bp, Homo sapien
taccaagaagcaccgtgaaggtctc

SEQ ID NO: 3077024 - DNA, 25 bp, Homo sapien
ccctcagggttgttaggcattagct

SEQ ID NO: 3077025 - DNA, 25 bp, Homo sapien
tgtattgtacactctaggatgcctg

SEQ ID NO: 3077026 - DNA, 25 bp, Homo sapien
caaaaaatggataagagactgtaat

SEQ ID NO: 3077027 - DNA, 25 bp, Homo sapien
tggtcagggttcacatttaattagc

SEQ ID NO: 3077028 - DNA, 25 bp, Homo sapien
aagagactgtaatctgttttctgcg

SEQ ID NO: 3077029 - DNA, 25 bp, Homo sapien
tgcgtttgcagtcttcatactgtga

SEQ ID NO: 3077030 - DNA, 25 bp, Homo sapien
gaaatccaccttgaccacagaaatg

SEQ ID NO: 3077031 - DNA, 25 bp, Homo sapien
taattgccaatacggatagagacct

SEQ ID NO: 3077032 - DNA, 25 bp, Homo sapien
taaaagttctacaggctgagcatgg

SEQ ID NO: 3077033 - DNA, 25 bp, Homo sapien
taaacgcaagcactatgatgcacag

SEQ ID NO: 3077034 - DNA, 25 bp, Homo sapien
tagacccagttagaatcttacatga

SEQ ID NO: 3077035 - DNA, 25 bp, Homo sapien
cacattaacacaagagtcaaaatct

SEQ ID NO: 3077036 - DNA, 25 bp, Homo sapien
taatttgctaacacattaacacaag

SEQ ID NO: 3077037 - DNA, 25 bp, Homo sapien
ttaaagattaactgatagacccagt

SEQ ID NO: 3077038 - DNA, 25 bp, Homo sapien
caaagaaaacggcaatagccaattg

SEQ ID NO: 3077039 - DNA, 25 bp, Homo sapien
tagccaattggaaacctacttattc

SEQ ID NO: 3077040 - DNA, 25 bp, Homo sapien
catctactcgtgctgaatccttcca

SEQ ID NO: 3077041 - DNA, 25 bp, Homo sapien
tccttccaaggagattgctccagcg

SEQ ID NO: 3077042 - DNA, 25 bp, Homo sapien
aaaaatccacacgaatgcggtttgg

SEQ ID NO: 3077043 - DNA, 25 bp, Homo sapien
tctgatcccgctccatgaatcctgg

SEQ ID NO: 3077044 - DNA, 25 bp, Homo sapien
ttccatcgtgcatcttaagggctcc

SEQ ID NO: 3077045 - DNA, 25 bp, Homo sapien
taagggctccaatcgtcaaaaatag

SEQ ID NO: 3077046 - DNA, 25 bp, Homo sapien
acagcaggtcacacattaacagttg

SEQ ID NO: 3077047 - DNA, 25 bp, Homo sapien
cgtattacaggtttcgtggttgcaa

SEQ ID NO: 3077048 - DNA, 25 bp, Homo sapien
ggcattgctacccacctaagtctaa

SEQ ID NO: 3077049 - DNA, 25 bp, Homo sapien
tagcaacgctctatcagtcacacag

SEQ ID NO: 3077050 - DNA, 25 bp, Homo sapien
attgcctccattattgatctgatcc

SEQ ID NO: 3077051 - DNA, 25 bp, Homo sapien
ctccattattgatctgatcctcctc

SEQ ID NO: 3077052 - DNA, 25 bp, Homo sapien
tgatcctcctcaatcctccttttga

SEQ ID NO: 3077053 - DNA, 25 bp, Homo sapien
tgcctccattattgatctgatcctc

SEQ ID NO: 3077054 - DNA, 25 bp, Homo sapien
cacaatccttaatccaaagcattct

SEQ ID NO: 3077055 - DNA, 25 bp, Homo sapien
tcttaatccatctcttcagatatgt

SEQ ID NO: 3077056 - DNA, 25 bp, Homo sapien
ctaaaatgattgaaatgtgctccac

SEQ ID NO: 3077057 - DNA, 25 bp, Homo sapien
tgtgctccacaatccttaatccaaa

SEQ ID NO: 3077058 - DNA, 25 bp, Homo sapien
taaacaatcctgtctatgacatcac

SEQ ID NO: 3077059 - DNA, 25 bp, Homo sapien
ccagttcacacaaaccagggcagat

SEQ ID NO: 3077060 - DNA, 25 bp, Homo sapien
caaagacacgaagggaatgtagatg

SEQ ID NO: 3077061 - DNA, 25 bp, Homo sapien
tccccaggtaagataaccacaaaca

SEQ ID NO: 3077062 - DNA, 25 bp, Homo sapien
tctacaaaaagtgtcaccaatcatc

SEQ ID NO: 3077063 - DNA, 25 bp, Homo sapien
tttagcccattctgaacaaaacagt

SEQ ID NO: 3077064 - DNA, 25 bp, Homo sapien
aaactgtatacaacatgggttctac

SEQ ID NO: 3077065 - DNA, 25 bp, Homo sapien
catgggttctacaaaaagtgtcacc

SEQ ID NO: 3077066 - DNA, 25 bp, Homo sapien
tgctacggcttctgctacgactacg

SEQ ID NO: 3077067 - DNA, 25 bp, Homo sapien
gagaatagcgtggtgatcctctgct

SEQ ID NO: 3077068 - DNA, 25 bp, Homo sapien
tacgactacggcttcgagatcgaga

SEQ ID NO: 3077069 - DNA, 25 bp, Homo sapien
taacccggatgtaggcagtttctcc

SEQ ID NO: 3077070 - DNA, 25 bp, Homo sapien
gaaagatctaagctttcatctatct

SEQ ID NO: 3077071 - DNA, 25 bp, Homo sapien
ctttccattgaaagatctaagcttt

SEQ ID NO: 3077072 - DNA, 25 bp, Homo sapien
aatctggcaatttacttggacaacc

SEQ ID NO: 3077073 - DNA, 25 bp, Homo sapien
ccttgcctgaatccttaccttgaaa

SEQ ID NO: 3077074 - DNA, 25 bp, Homo sapien
tcaaagaaaagaatacgtgtataac

SEQ ID NO: 3077075 - DNA, 25 bp, Homo sapien
tatccaattctggtcaaagaaaaga

SEQ ID NO: 3077076 - DNA, 25 bp, Homo sapien
ctgtatccaattctggtcaaagaaa

SEQ ID NO: 3077077 - DNA, 25 bp, Homo sapien
ttaagaccactgtatccaattctgg

SEQ ID NO: 3077078 - DNA, 25 bp, Homo sapien
tagtgttatccagttttcgaactgc

SEQ ID NO: 3077079 - DNA, 25 bp, Homo sapien
gcataggtcatatcttctttccgta

SEQ ID NO: 3077080 - DNA, 25 bp, Homo sapien
tcacgcatgtgatcctttaaatcct

SEQ ID NO: 3077081 - DNA, 25 bp, Homo sapien
agtgccatctcggtaaacatcagca

SEQ ID NO: 3077082 - DNA, 25 bp, Homo sapien
caggtaaagagagctggtaagattc

SEQ ID NO: 3077083 - DNA, 25 bp, Homo sapien
tcacgttaagctggtaaggtacatt

SEQ ID NO: 3077084 - DNA, 25 bp, Homo sapien
gtacttaagtgataccaggtaaaga

SEQ ID NO: 3077085 - DNA, 25 bp, Homo sapien
aacgatcttcgtatctagtaccgca

SEQ ID NO: 3077086 - DNA, 25 bp, Homo sapien
tagcatgaaaaatttgcaattatta

SEQ ID NO: 3077087 - DNA, 25 bp, Homo sapien
ctagcatgaaaaatttgcaattatt

SEQ ID NO: 3077088 - DNA, 25 bp, Homo sapien
catgaaaaatttgcaattattaaac

SEQ ID NO: 3077089 - DNA, 25 bp, Homo sapien
gcatgaaaaatttgcaattattaaa

SEQ ID NO: 3077090 - DNA, 25 bp, Homo sapien
tgtcacgcaagagaaaaattttagg

SEQ ID NO: 3077091 - DNA, 25 bp, Homo sapien
ctgtcacgcaagagaaaaattttag

SEQ ID NO: 3077092 - DNA, 25 bp, Homo sapien
caatccacacaaccagtacactcac

SEQ ID NO: 3077093 - DNA, 25 bp, Homo sapien
tcaatccacacaaccagtacactca

SEQ ID NO: 3077094 - DNA, 25 bp, Homo sapien
acccgcagacggtacccatcgtaat

SEQ ID NO: 3077095 - DNA, 25 bp, Homo sapien
taatcatagccgtcgcgaccataca

SEQ ID NO: 3077096 - DNA, 25 bp, Homo sapien
tctgttttcagaccgcctggatggg

SEQ ID NO: 3077097 - DNA, 25 bp, Homo sapien
ttccacggccgcttcgaggaaactc

SEQ ID NO: 3077098 - DNA, 25 bp, Homo sapien
aaggctgcaagccccatgccgcctc

SEQ ID NO: 3077099 - DNA, 25 bp, Homo sapien
aggctgcaagccccatgccgcctca

SEQ ID NO: 3077100 - DNA, 25 bp, Homo sapien
taagttacccacgtagatgcggcaa

SEQ ID NO: 3077101 - DNA, 25 bp, Homo sapien
tcgaactcaacgaaggcgaagggcg

SEQ ID NO: 3077102 - DNA, 25 bp, Homo sapien
ggatagcgccgtatttgtagaacac

SEQ ID NO: 3077103 - DNA, 25 bp, Homo sapien
tcttgaggtcgatgtcgcggatagc

SEQ ID NO: 3077104 - DNA, 25 bp, Homo sapien
aaaagcgcggactcgagaacaggcc

SEQ ID NO: 3077105 - DNA, 25 bp, Homo sapien
tgacgaaaagcgcggactcgagaac

SEQ ID NO: 3077106 - DNA, 25 bp, Homo sapien
ggcggtgacgaaaagcgcggactcg

SEQ ID NO: 3077107 - DNA, 25 bp, Homo sapien
acgaaaagcgcggactcgagaacag

SEQ ID NO: 3077108 - DNA, 25 bp, Homo sapien
ccgcagcggcaccacgtctcccgcg

SEQ ID NO: 3077109 - DNA, 25 bp, Homo sapien
cggcaccacgtctcccgcggcccct

SEQ ID NO: 3077110 - DNA, 25 bp, Homo sapien
gagcccgcagcggcaccacgtctcc

SEQ ID NO: 3077111 - DNA, 25 bp, Homo sapien
ggcaccacgtctcccgcggcccctc

SEQ ID NO: 3077112 - DNA, 25 bp, Homo sapien
ttatcagctcggcgcacggatatgg

SEQ ID NO: 3077113 - DNA, 25 bp, Homo sapien
ctttatcagctcggcgcacggatat

SEQ ID NO: 3077114 - DNA, 25 bp, Homo sapien
tttatcagctcggcgcacggatatg

SEQ ID NO: 3077115 - DNA, 25 bp, Homo sapien
ttactgtatggattttcctttgctt

SEQ ID NO: 3077116 - DNA, 25 bp, Homo sapien
tactgtatggattttcctttgctta

SEQ ID NO: 3077117 - DNA, 25 bp, Homo sapien
actgtatggattttcctttgcttat

SEQ ID NO: 3077118 - DNA, 25 bp, Homo sapien
gagactatgtataaatagaatgtga

SEQ ID NO: 3077119 - DNA, 25 bp, Homo sapien
cagaacatatcagaatgcattgcac

SEQ ID NO: 3077120 - DNA, 25 bp, Homo sapien
gtgagagatgaaagctaagtcacct

SEQ ID NO: 3077121 - DNA, 25 bp, Homo sapien
tttaggaacagaggcttttaatcca

SEQ ID NO: 3077122 - DNA, 25 bp, Homo sapien
gaactgacactgctaaggcagaccc

SEQ ID NO: 3077123 - DNA, 25 bp, Homo sapien
ttccataggcgtggagaaaggagtt

SEQ ID NO: 3077124 - DNA, 25 bp, Homo sapien
ccctgagagctggttccataggcgt

SEQ ID NO: 3077125 - DNA, 25 bp, Homo sapien
gttcacactgaactgacactgctaa

SEQ ID NO: 3077126 - DNA, 25 bp, Homo sapien
ggagcactcgttagaggtctggcaa

SEQ ID NO: 3077127 - DNA, 25 bp, Homo sapien
gctttgccatcgcagaatatgctgc

SEQ ID NO: 3077128 - DNA, 25 bp, Homo sapien
ggtctggcaagcttttccttcgact

SEQ ID NO: 3077129 - DNA, 25 bp, Homo sapien
tgagcaatcgcagcctgctggcggt

SEQ ID NO: 3077130 - DNA, 25 bp, Homo sapien
ccatctccaggctgaatctcggctc

SEQ ID NO: 3077131 - DNA, 25 bp, Homo sapien
ctccaggctgaatctcggctcattg

SEQ ID NO: 3077132 - DNA, 25 bp, Homo sapien
gaattacccacgtgagccaccaagc

SEQ ID NO: 3077133 - DNA, 25 bp, Homo sapien
tgcacctggcctggggtacagaatt

SEQ ID NO: 3077134 - DNA, 25 bp, Homo sapien
gtggcagaaaggtcaggcaagttca

SEQ ID NO: 3077135 - DNA, 25 bp, Homo sapien
tctccacgctgtaggctcaggaaca

SEQ ID NO: 3077136 - DNA, 25 bp, Homo sapien
ggaacaggaaggcacagtctggtct

SEQ ID NO: 3077137 - DNA, 25 bp, Homo sapien
tcagattctccacgctgtaggctca

SEQ ID NO: 3077138 - DNA, 25 bp, Homo sapien
gggcttagagggcttgggctgccag

SEQ ID NO: 3077139 - DNA, 25 bp, Homo sapien
tctttgcctgaggttcttgaactcc

SEQ ID NO: 3077140 - DNA, 25 bp, Homo sapien
ggcaggtgttctttgcctgaggttc

SEQ ID NO: 3077141 - DNA, 25 bp, Homo sapien
tccatggaagagtgtcaggaagtcc

SEQ ID NO: 3077142 - DNA, 25 bp, Homo sapien
tactttccagaagggatgaacatat

SEQ ID NO: 3077143 - DNA, 25 bp, Homo sapien
gtatatgaccctctaaacccatctg

SEQ ID NO: 3077144 - DNA, 25 bp, Homo sapien
gatcttagagggtggataaacctat

SEQ ID NO: 3077145 - DNA, 25 bp, Homo sapien
catcagacaggatgactagtccttt

SEQ ID NO: 3077146 - DNA, 25 bp, Homo sapien
ctgccaagttggcaggagaacagag

SEQ ID NO: 3077147 - DNA, 25 bp, Homo sapien
tgatagtaacagcagcgatgagctg

SEQ ID NO: 3077148 - DNA, 25 bp, Homo sapien
tggctctgacatgaatttgctgcac

SEQ ID NO: 3077149 - DNA, 25 bp, Homo sapien
aaggctggctctgacatgaatttgc

SEQ ID NO: 3077150 - DNA, 25 bp, Homo sapien
gccaggagcccagattactgactgc

SEQ ID NO: 3077151 - DNA, 25 bp, Homo sapien
gcccgaattcttccctgggacgatg

SEQ ID NO: 3077152 - DNA, 25 bp, Homo sapien
tgtcagctgcgagatagccaaacca

SEQ ID NO: 3077153 - DNA, 25 bp, Homo sapien
actgactgctccctaggcccgaatt

SEQ ID NO: 3077154 - DNA, 25 bp, Homo sapien
ttgttttgcacttgatgacatcttt

SEQ ID NO: 3077155 - DNA, 25 bp, Homo sapien
ctttgctctcagtcttccccactcc

SEQ ID NO: 3077156 - DNA, 25 bp, Homo sapien
ccccactcccaaagaggatcgagga

SEQ ID NO: 3077157 - DNA, 25 bp, Homo sapien
caaagaggatcgaggaggttctgct

SEQ ID NO: 3077158 - DNA, 25 bp, Homo sapien
gatctccacatggagcagcccaggg

SEQ ID NO: 3077159 - DNA, 25 bp, Homo sapien
agaggacctgaagtgtgggcctcat

SEQ ID NO: 3077160 - DNA, 25 bp, Homo sapien
ggcagtgtcaattcaccgggaaacc

SEQ ID NO: 3077161 - DNA, 25 bp, Homo sapien
gctggacccttttgggagcaggatc

SEQ ID NO: 3077162 - DNA, 25 bp, Homo sapien
ctttcctccttatctccttcctcca

SEQ ID NO: 3077163 - DNA, 25 bp, Homo sapien
tttcctccttatctccttcctccat

SEQ ID NO: 3077164 - DNA, 25 bp, Homo sapien
tctttcctccttatctccttcctcc

SEQ ID NO: 3077165 - DNA, 25 bp, Homo sapien
tccagcaagaatcctcaatatggct

SEQ ID NO: 3077166 - DNA, 25 bp, Homo sapien
aatgtggggtaaacgccagggtgct

SEQ ID NO: 3077167 - DNA, 25 bp, Homo sapien
tcctcaatatggctcttgctgaaaa

SEQ ID NO: 3077168 - DNA, 25 bp, Homo sapien
tccaccccactcttaagatgctcat

SEQ ID NO: 3077169 - DNA, 25 bp, Homo sapien
ctgaacaccatgacttccactgggc

SEQ ID NO: 3077170 - DNA, 25 bp, Homo sapien
tgaacaccatgacttccactgggca

SEQ ID NO: 3077171 - DNA, 25 bp, Homo sapien
gaacaccatgacttccactgggcat

SEQ ID NO: 3077172 - DNA, 25 bp, Homo sapien
cagcctggaaatgagcaagctctta

SEQ ID NO: 3077173 - DNA, 25 bp, Homo sapien
gcttgtaccgtgacacacaggctag

SEQ ID NO: 3077174 - DNA, 25 bp, Homo sapien
gatactcttgcgcagtgaatgacct

SEQ ID NO: 3077175 - DNA, 25 bp, Homo sapien
gctagctcatagtaacccttgggaa

SEQ ID NO: 3077176 - DNA, 25 bp, Homo sapien
cgcggcagggagcgatcggcctcgg

SEQ ID NO: 3077177 - DNA, 25 bp, Homo sapien
ggcagggagcgatcggcctcgggct

SEQ ID NO: 3077178 - DNA, 25 bp, Homo sapien
gcagggagcgatcggcctcgggctg

SEQ ID NO: 3077179 - DNA, 25 bp, Homo sapien
agggagcgatcggcctcgggctgcg

SEQ ID NO: 3077180 - DNA, 25 bp, Homo sapien
taaaaggcccaccatagagactagg

SEQ ID NO: 3077181 - DNA, 25 bp, Homo sapien
cagtgttgggattgtcaaggaaaaa

SEQ ID NO: 3077182 - DNA, 25 bp, Homo sapien
gatctagtaccagggagaatattcc

SEQ ID NO: 3077183 - DNA, 25 bp, Homo sapien
gaactaaaactgtgcagctgcctct

SEQ ID NO: 3077184 - DNA, 25 bp, Homo sapien
tctggagttctcttagagcagcccc

SEQ ID NO: 3077185 - DNA, 25 bp, Homo sapien
aaaccaaattgatgtctcccttgac

SEQ ID NO: 3077186 - DNA, 25 bp, Homo sapien
ccttagttaggtcttagcaatcaaa

SEQ ID NO: 3077187 - DNA, 25 bp, Homo sapien
cccttgactcttctgtgtatatgtg

SEQ ID NO: 3077188 - DNA, 25 bp, Homo sapien
agacctgggtggtgactgagttccc

SEQ ID NO: 3077189 - DNA, 25 bp, Homo sapien
tcccagactgtgtggccagttgaaa

SEQ ID NO: 3077190 - DNA, 25 bp, Homo sapien
tgctctgcatccacgcctcttttgg

SEQ ID NO: 3077191 - DNA, 25 bp, Homo sapien
cccttagtgtgtgccgagcttgctt

SEQ ID NO: 3077192 - DNA, 25 bp, Homo sapien
gtattgggaacgtacaatattctcc

SEQ ID NO: 3077193 - DNA, 25 bp, Homo sapien
tgctgtgatggtgctagtacactcc

SEQ ID NO: 3077194 - DNA, 25 bp, Homo sapien
taattatacgttttcatggagtaca

SEQ ID NO: 3077195 - DNA, 25 bp, Homo sapien
caggtggatcaattgcactcaggaa

SEQ ID NO: 3077196 - DNA, 25 bp, Homo sapien
tcactcggcaaataatctgtgagtt

SEQ ID NO: 3077197 - DNA, 25 bp, Homo sapien
ttctctctgttcattgttggaatag

SEQ ID NO: 3077198 - DNA, 25 bp, Homo sapien
tcattgttggaatagaaagactttg

SEQ ID NO: 3077199 - DNA, 25 bp, Homo sapien
cactcggcaaataatctgtgagttc

SEQ ID NO: 3077200 - DNA, 25 bp, Homo sapien
ccaactacagtggtgataggagagg

SEQ ID NO: 3077201 - DNA, 25 bp, Homo sapien
gagtaccttgtaaccattacctgta

SEQ ID NO: 3077202 - DNA, 25 bp, Homo sapien
tcttgaacaattggtagatccagaa

SEQ ID NO: 3077203 - DNA, 25 bp, Homo sapien
taggtactttcatcctcacagattg

SEQ ID NO: 3077204 - DNA, 25 bp, Homo sapien
tactttttaacatgtccagggcaga

SEQ ID NO: 3077205 - DNA, 25 bp, Homo sapien
aagccatcatggcaactctgaactt

SEQ ID NO: 3077206 - DNA, 25 bp, Homo sapien
ctccttgtttccgtttcacacattt

SEQ ID NO: 3077207 - DNA, 25 bp, Homo sapien
gccatcatggcaactctgaacttat

SEQ ID NO: 3077208 - DNA, 25 bp, Homo sapien
ttgtttccgtttcacacatttctcc

SEQ ID NO: 3077209 - DNA, 25 bp, Homo sapien
cggaatcataaagaattaatccagg

SEQ ID NO: 3077210 - DNA, 25 bp, Homo sapien
taacattaacaaggcctgtgcccat

SEQ ID NO: 3077211 - DNA, 25 bp, Homo sapien
tgaaagctaaatcggaatcataaag

SEQ ID NO: 3077212 - DNA, 25 bp, Homo sapien
taatccaggtaattcaaaatcaccc

SEQ ID NO: 3077213 - DNA, 25 bp, Homo sapien
tcaagcagcgagactgcgagtgacc

SEQ ID NO: 3077214 - DNA, 25 bp, Homo sapien
gggaaggagatatcgctttctcttt

SEQ ID NO: 3077215 - DNA, 25 bp, Homo sapien
ccatgggctgttaggcctggcccca

SEQ ID NO: 3077216 - DNA, 25 bp, Homo sapien
cagccctccaggaactcggaagtgg

SEQ ID NO: 3077217 - DNA, 25 bp, Homo sapien
acttggagtcgaatgtaagaagggc

SEQ ID NO: 3077218 - DNA, 25 bp, Homo sapien
ggaagaagtgttagagagcagagtc

SEQ ID NO: 3077219 - DNA, 25 bp, Homo sapien
ctaaataggacagtcttaaaaactg

SEQ ID NO: 3077220 - DNA, 25 bp, Homo sapien
aaaagtgtataggactggactgagc

SEQ ID NO: 3077221 - DNA, 25 bp, Homo sapien
agcttgacaaacgttcccctgcctt

SEQ ID NO: 3077222 - DNA, 25 bp, Homo sapien
catctgtaagcttgacaaacgttcc

SEQ ID NO: 3077223 - DNA, 25 bp, Homo sapien
tataagcttagtccaaagtcctggt

SEQ ID NO: 3077224 - DNA, 25 bp, Homo sapien
gccttcgtataagcttagtccaaag

SEQ ID NO: 3077225 - DNA, 25 bp, Homo sapien
tgcagccagtgcggcctgtcagact

SEQ ID NO: 3077226 - DNA, 25 bp, Homo sapien
cagctgcagagtcagtacaattggt

SEQ ID NO: 3077227 - DNA, 25 bp, Homo sapien
cagagtcagtacaattggtgcagcc

SEQ ID NO: 3077228 - DNA, 25 bp, Homo sapien
gtcagtacaattggtgcagccagtg

SEQ ID NO: 3077229 - DNA, 25 bp, Homo sapien
ttcaggccccgcactttggccagtc

SEQ ID NO: 3077230 - DNA, 25 bp, Homo sapien
tgaaaatagggccaaggacctcatt

SEQ ID NO: 3077231 - DNA, 25 bp, Homo sapien
cctgctgtctcagttggggccgttg

SEQ ID NO: 3077232 - DNA, 25 bp, Homo sapien
ggacctcattctcaggaagccctgg

SEQ ID NO: 3077233 - DNA, 25 bp, Homo sapien
tttcctcctgtgtagcttggtcttg

SEQ ID NO: 3077234 - DNA, 25 bp, Homo sapien
ttcattcccagtctccaagcagcct

SEQ ID NO: 3077235 - DNA, 25 bp, Homo sapien
ctcctgtcgccccaagagcagtctt

SEQ ID NO: 3077236 - DNA, 25 bp, Homo sapien
ttctggtgggtctcattacaaacat

SEQ ID NO: 3077237 - DNA, 25 bp, Homo sapien
ctggcttatcaaggtcaaaaccctg

SEQ ID NO: 3077238 - DNA, 25 bp, Homo sapien
tggcttatcaaggtcaaaaccctgg

SEQ ID NO: 3077239 - DNA, 25 bp, Homo sapien
gcttatcaaggtcaaaaccctggga

SEQ ID NO: 3077240 - DNA, 25 bp, Homo sapien
cagatgtcgacgtggaccactgtga

SEQ ID NO: 3077241 - DNA, 25 bp, Homo sapien
actgtgagacatggcgagcaccctg

SEQ ID NO: 3077242 - DNA, 25 bp, Homo sapien
ggaaaaagcagatgtcgacgtggac

SEQ ID NO: 3077243 - DNA, 25 bp, Homo sapien
gacgtggaccactgtgagacatggc

SEQ ID NO: 3077244 - DNA, 25 bp, Homo sapien
ggcactccggaaacctgagcttctt

SEQ ID NO: 3077245 - DNA, 25 bp, Homo sapien
tgccggagagctgagatcgctagcc

SEQ ID NO: 3077246 - DNA, 25 bp, Homo sapien
tttcttaaacttgggcgctcctggc

SEQ ID NO: 3077247 - DNA, 25 bp, Homo sapien
tcagagacagctagtaatttgccca

SEQ ID NO: 3077248 - DNA, 25 bp, Homo sapien
taagagaagtgctgttaacacgcaa

SEQ ID NO: 3077249 - DNA, 25 bp, Homo sapien
ttaacacgcaagctggcacaaccat

SEQ ID NO: 3077250 - DNA, 25 bp, Homo sapien
gctttgctccagatgtttaagagaa

SEQ ID NO: 3077251 - DNA, 25 bp, Homo sapien
caagctggcacaaccatctaagcct

SEQ ID NO: 3077252 - DNA, 25 bp, Homo sapien
aaacacagtaaaagataccacccag

SEQ ID NO: 3077253 - DNA, 25 bp, Homo sapien
ccagctagcagaaaggactcagcac

SEQ ID NO: 3077254 - DNA, 25 bp, Homo sapien
tagcagaaaggactcagcactgcct

SEQ ID NO: 3077255 - DNA, 25 bp, Homo sapien
acccagctagcagaaaggactcagc

SEQ ID NO: 3077256 - DNA, 25 bp, Homo sapien
agcagtagaatgaggcttccctgga

SEQ ID NO: 3077257 - DNA, 25 bp, Homo sapien
ggatttaagaccctctcaccgtcca

SEQ ID NO: 3077258 - DNA, 25 bp, Homo sapien
tcacttactcagaaataactcatat

SEQ ID NO: 3077259 - DNA, 25 bp, Homo sapien
caagccccaagcagtagaatgaggc

SEQ ID NO: 3077260 - DNA, 25 bp, Homo sapien
gcagatcccctgctactgtgagaca

SEQ ID NO: 3077261 - DNA, 25 bp, Homo sapien
gctttatttccacagggtagggaga

SEQ ID NO: 3077262 - DNA, 25 bp, Homo sapien
tgtgagacaagccagaaaagtgagt

SEQ ID NO: 3077263 - DNA, 25 bp, Homo sapien
gaccaacgtggtctctaatcagaaa

SEQ ID NO: 3077264 - DNA, 25 bp, Homo sapien
gggctcactaggtcctgcgggaggc

SEQ ID NO: 3077265 - DNA, 25 bp, Homo sapien
cggcgccgggctcgacggaaggcct

SEQ ID NO: 3077266 - DNA, 25 bp, Homo sapien
cgggcctcctgcatgcggcgccggg

SEQ ID NO: 3077267 - DNA, 25 bp, Homo sapien
agaggggctcactaggtcctgcggg

SEQ ID NO: 3077268 - DNA, 25 bp, Homo sapien
aggagatatgctatttggctgccat

SEQ ID NO: 3077269 - DNA, 25 bp, Homo sapien
gaaaggagatatgctatttggctgc

SEQ ID NO: 3077270 - DNA, 25 bp, Homo sapien
ctgtaaggaaaggagatatgctatt

SEQ ID NO: 3077271 - DNA, 25 bp, Homo sapien
aaggaaaggagatatgctatttggc

SEQ ID NO: 3077272 - DNA, 25 bp, Homo sapien
ggtggccagctgggggaggggacat

SEQ ID NO: 3077273 - DNA, 25 bp, Homo sapien
gtggccagctgggggaggggacata

SEQ ID NO: 3077274 - DNA, 25 bp, Homo sapien
tggccagctgggggaggggacatac

SEQ ID NO: 3077275 - DNA, 25 bp, Homo sapien
gctggctgaacccttccagacggtc

SEQ ID NO: 3077276 - DNA, 25 bp, Homo sapien
gcacattgtgaatggaactctgctg

SEQ ID NO: 3077277 - DNA, 25 bp, Homo sapien
aagggagctcgattccatgaaggcc

SEQ ID NO: 3077278 - DNA, 25 bp, Homo sapien
aacacactccgcatccttttctgaa

SEQ ID NO: 3077279 - DNA, 25 bp, Homo sapien
agtccaaagcggctcaggcgttccc

SEQ ID NO: 3077280 - DNA, 25 bp, Homo sapien
tctgtgcggagtccaaagcggctca

SEQ ID NO: 3077281 - DNA, 25 bp, Homo sapien
tgctgcagacagtgcaagcggaagg

SEQ ID NO: 3077282 - DNA, 25 bp, Homo sapien
gcagacagtgcaagcggaaggtgac

SEQ ID NO: 3077283 - DNA, 25 bp, Homo sapien
ccagagaaccgccaatgaaaaacct

SEQ ID NO: 3077284 - DNA, 25 bp, Homo sapien
tccgtacataggagaggtcctccag

SEQ ID NO: 3077285 - DNA, 25 bp, Homo sapien
tgaaggatcctggtatccgtacata

SEQ ID NO: 3077286 - DNA, 25 bp, Homo sapien
caggtctccacgtggagactgtcag

SEQ ID NO: 3077287 - DNA, 25 bp, Homo sapien
gcttctcaccctgagtccaatcaga

SEQ ID NO: 3077288 - DNA, 25 bp, Homo sapien
tccaatcagaggagcatgaagcaca

SEQ ID NO: 3077289 - DNA, 25 bp, Homo sapien
acacatatgctatgagccaattttg

SEQ ID NO: 3077290 - DNA, 25 bp, Homo sapien
catatgctatgagccaattttgcca

SEQ ID NO: 3077291 - DNA, 25 bp, Homo sapien
actctttcaagccaaacatttccaa

SEQ ID NO: 3077292 - DNA, 25 bp, Homo sapien
caggaactctttcaagccaaacatt

SEQ ID NO: 3077293 - DNA, 25 bp, Homo sapien
aggaacaggaactctttcaagccaa

SEQ ID NO: 3077294 - DNA, 25 bp, Homo sapien
atttccaattcccaattatctccac

SEQ ID NO: 3077295 - DNA, 25 bp, Homo sapien
tagtcttgttcttagggcctagggc

SEQ ID NO: 3077296 - DNA, 25 bp, Homo sapien
tagggcctagggcatgtgggccaca

SEQ ID NO: 3077297 - DNA, 25 bp, Homo sapien
cattcgagtgttagtcttgttctta

SEQ ID NO: 3077298 - DNA, 25 bp, Homo sapien
ccctcaccagaagcattcgagtgtt

SEQ ID NO: 3077299 - DNA, 25 bp, Homo sapien
cagtagagcacaggccactccggga

SEQ ID NO: 3077300 - DNA, 25 bp, Homo sapien
tacctctgccagaagtccagcgaga

SEQ ID NO: 3077301 - DNA, 25 bp, Homo sapien
gcgagaggacctcacagtagagcac

SEQ ID NO: 3077302 - DNA, 25 bp, Homo sapien
atagccttccacacggtacctctgc

SEQ ID NO: 3077303 - DNA, 25 bp, Homo sapien
aggcttcaaacgtgaatgggtagga

SEQ ID NO: 3077304 - DNA, 25 bp, Homo sapien
aagaaggcttcaaacgtgaatgggt

SEQ ID NO: 3077305 - DNA, 25 bp, Homo sapien
cttcaaacgtgaatgggtaggagaa

SEQ ID NO: 3077306 - DNA, 25 bp, Homo sapien
tcaaacgtgaatgggtaggagaagt

SEQ ID NO: 3077307 - DNA, 25 bp, Homo sapien
ggcaaggcctcccttggaatctgtt

SEQ ID NO: 3077308 - DNA, 25 bp, Homo sapien
ctataaaaaggagtgtcatagggtg

SEQ ID NO: 3077309 - DNA, 25 bp, Homo sapien
tataaaaaggagtgtcatagggtgg

SEQ ID NO: 3077310 - DNA, 25 bp, Homo sapien
aaggcctcccttggaatctgttctc

SEQ ID NO: 3077311 - DNA, 25 bp, Homo sapien
gtctgtgttactcctgagagctgct

SEQ ID NO: 3077312 - DNA, 25 bp, Homo sapien
tgctggaatgctgggcttgaccagt

SEQ ID NO: 3077313 - DNA, 25 bp, Homo sapien
gtggtgcaggtctgtgttactcctg

SEQ ID NO: 3077314 - DNA, 25 bp, Homo sapien
gcaggtctgtgttactcctgagagc

SEQ ID NO: 3077315 - DNA, 25 bp, Homo sapien
caaagaccaaatatagtaagctcgc

SEQ ID NO: 3077316 - DNA, 25 bp, Homo sapien
ccaaagaccaaatatagtaagctcg

SEQ ID NO: 3077317 - DNA, 25 bp, Homo sapien
caattctacaaagaagtggacgtag

SEQ ID NO: 3077318 - DNA, 25 bp, Homo sapien
agcagttggcaattctacaaagaag

SEQ ID NO: 3077319 - DNA, 25 bp, Homo sapien
acgtagagattgtcatactcatagc

SEQ ID NO: 3077320 - DNA, 25 bp, Homo sapien
caaagaagtggacgtagagattgtc

SEQ ID NO: 3077321 - DNA, 25 bp, Homo sapien
cgacctctccatttacaaagagccg

SEQ ID NO: 3077322 - DNA, 25 bp, Homo sapien
tacaaagagccggagggcacctggg

SEQ ID NO: 3077323 - DNA, 25 bp, Homo sapien
tctccatttacaaagagccggaggg

SEQ ID NO: 3077324 - DNA, 25 bp, Homo sapien
catttacaaagagccggagggcacc

SEQ ID NO: 3077325 - DNA, 25 bp, Homo sapien
ctgctgagatactccttgtgccggc

SEQ ID NO: 3077326 - DNA, 25 bp, Homo sapien
gatactccttgtgccggccataaag

SEQ ID NO: 3077327 - DNA, 25 bp, Homo sapien
tgcctacgaggctgctgagatactc

SEQ ID NO: 3077328 - DNA, 25 bp, Homo sapien
tctcaaagtcggtgcctacgaggct

SEQ ID NO: 3077329 - DNA, 25 bp, Homo sapien
tggggggaaacattgtcgatcgtat

SEQ ID NO: 3077330 - DNA, 25 bp, Homo sapien
tccttgaacactcgccgttcccgct

SEQ ID NO: 3077331 - DNA, 25 bp, Homo sapien
ttgtcgatcgtatatttccacagct

SEQ ID NO: 3077332 - DNA, 25 bp, Homo sapien
aaacattgtcgatcgtatatttcca

SEQ ID NO: 3077333 - DNA, 25 bp, Homo sapien
gggtcctttgaggcccgtgaagtca

SEQ ID NO: 3077334 - DNA, 25 bp, Homo sapien
gtacacaggacatgttcatacttct

SEQ ID NO: 3077335 - DNA, 25 bp, Homo sapien
cattgctatccaccttcagagtaca

SEQ ID NO: 3077336 - DNA, 25 bp, Homo sapien
tttgaggcccgtgaagtcaggcttt

SEQ ID NO: 3077337 - DNA, 25 bp, Homo sapien
caggaaaacaccaaggttgaggtca

SEQ ID NO: 3077338 - DNA, 25 bp, Homo sapien
gaaaacaccaaggttgaggtcaatg

SEQ ID NO: 3077339 - DNA, 25 bp, Homo sapien
atcaggaaaacaccaaggttgaggt

SEQ ID NO: 3077340 - DNA, 25 bp, Homo sapien
aacaccaaggttgaggtcaatggtc

SEQ ID NO: 3077341 - DNA, 25 bp, Homo sapien
ttgttcctgacaaactcttctgagg

SEQ ID NO: 3077342 - DNA, 25 bp, Homo sapien
catgatgtgcattgtctgaagaggg

SEQ ID NO: 3077343 - DNA, 25 bp, Homo sapien
tgacgatgcgtgacttgaggatgcc

SEQ ID NO: 3077344 - DNA, 25 bp, Homo sapien
tgttaatgacgtggttgttcctgac

SEQ ID NO: 3077345 - DNA, 25 bp, Homo sapien
tgggagacaccacagaaaggtcact

SEQ ID NO: 3077346 - DNA, 25 bp, Homo sapien
gagacaccacagaaaggtcacttcc

SEQ ID NO: 3077347 - DNA, 25 bp, Homo sapien
ctgggagacaccacagaaaggtcac

SEQ ID NO: 3077348 - DNA, 25 bp, Homo sapien
gggagacaccacagaaaggtcactt

SEQ ID NO: 3077349 - DNA, 25 bp, Homo sapien
tgtcctgccggcgacgcctgacatt

SEQ ID NO: 3077350 - DNA, 25 bp, Homo sapien
aatgaaggcacctcgctggctgcag

SEQ ID NO: 3077351 - DNA, 25 bp, Homo sapien
gacgcctgacatttgccattcgctc

SEQ ID NO: 3077352 - DNA, 25 bp, Homo sapien
cattcgctcgaccaagaatgaaggc

SEQ ID NO: 3077353 - DNA, 25 bp, Homo sapien
tgtgtacgccatctggtcagggcca

SEQ ID NO: 3077354 - DNA, 25 bp, Homo sapien
cagccctgtgtacgccatctggtca

SEQ ID NO: 3077355 - DNA, 25 bp, Homo sapien
agcaagcagccctgtgtacgccatc

SEQ ID NO: 3077356 - DNA, 25 bp, Homo sapien
tacctgaagggaagtcttcctcctg

SEQ ID NO: 3077357 - DNA, 25 bp, Homo sapien
cacatggtaactgagcactaactgc

SEQ ID NO: 3077358 - DNA, 25 bp, Homo sapien
gatggaagctatgagaccctagaaa

SEQ ID NO: 3077359 - DNA, 25 bp, Homo sapien
cagtggttacttctcccagtatgca

SEQ ID NO: 3077360 - DNA, 25 bp, Homo sapien
aaaaataggctctaccctcgaggag

SEQ ID NO: 3077361 - DNA, 25 bp, Homo sapien
tttttcttgccacccgaattctcca

SEQ ID NO: 3077362 - DNA, 25 bp, Homo sapien
tcagtgtaggtaaagattcgtcggt

SEQ ID NO: 3077363 - DNA, 25 bp, Homo sapien
caggatctcctgacggtactgataa

SEQ ID NO: 3077364 - DNA, 25 bp, Homo sapien
ccaaattggtgtatctatcagagtc

SEQ ID NO: 3077365 - DNA, 25 bp, Homo sapien
tcgtcttcctctgggcggtgtccac

SEQ ID NO: 3077366 - DNA, 25 bp, Homo sapien
ttcgtcttcctctgggcggtgtcca

SEQ ID NO: 3077367 - DNA, 25 bp, Homo sapien
tctcctgccacccaatcacaatctc

SEQ ID NO: 3077368 - DNA, 25 bp, Homo sapien
gtgaatcaaatgcttgagccaaacc

SEQ ID NO: 3077369 - DNA, 25 bp, Homo sapien
tcaaatgcttgagccaaaccagcac

SEQ ID NO: 3077370 - DNA, 25 bp, Homo sapien
cagagtgaatcaaatgcttgagcca

SEQ ID NO: 3077371 - DNA, 25 bp, Homo sapien
gacaacagagtgaatcaaatgcttg

SEQ ID NO: 3077372 - DNA, 25 bp, Homo sapien
caggctgataatgaagaaagttgct

SEQ ID NO: 3077373 - DNA, 25 bp, Homo sapien
aggtccttcccgagctcggcagcag

SEQ ID NO: 3077374 - DNA, 25 bp, Homo sapien
gttggctgaggcctaaaagtggcca

SEQ ID NO: 3077375 - DNA, 25 bp, Homo sapien
aaagtggccaagtctatgaggtcct

SEQ ID NO: 3077376 - DNA, 25 bp, Homo sapien
caaaacagaggaggtagggttgcca

SEQ ID NO: 3077377 - DNA, 25 bp, Homo sapien
cagacacgcaaccaggagatgaaca

SEQ ID NO: 3077378 - DNA, 25 bp, Homo sapien
tgaacacaaagcaaggatgggggaa

SEQ ID NO: 3077379 - DNA, 25 bp, Homo sapien
tgggtgcagacaacggagaggaggt

SEQ ID NO: 3077380 - DNA, 25 bp, Homo sapien
atgacagctgcgacgcgccgcgact

SEQ ID NO: 3077381 - DNA, 25 bp, Homo sapien
gccggaaagcgcgccgctctgtttt

SEQ ID NO: 3077382 - DNA, 25 bp, Homo sapien
cagacggtctccgccatgacagctg

SEQ ID NO: 3077383 - DNA, 25 bp, Homo sapien
gatacactgcctccccggtgtcagt

SEQ ID NO: 3077384 - DNA, 25 bp, Homo sapien
gcgggacctcgtgcgctgtgcaaat

SEQ ID NO: 3077385 - DNA, 25 bp, Homo sapien
agcgggacctcgtgcgctgtgcaaa

SEQ ID NO: 3077386 - DNA, 25 bp, Homo sapien
aaagcgggacctcgtgcgctgtgca

SEQ ID NO: 3077387 - DNA, 25 bp, Homo sapien
cgaaagcgggacctcgtgcgctgtg

SEQ ID NO: 3077388 - DNA, 25 bp, Homo sapien
caacgcgtgaaaactttggcctgaa

SEQ ID NO: 3077389 - DNA, 25 bp, Homo sapien
tgatggcccttagccagacaagaaa

SEQ ID NO: 3077390 - DNA, 25 bp, Homo sapien
aaggtgatggcccttagccagacaa

SEQ ID NO: 3077391 - DNA, 25 bp, Homo sapien
cgggtgatgtgactgtaagaaatgc

SEQ ID NO: 3077392 - DNA, 25 bp, Homo sapien
tatgttagttttggatcattaagcc

SEQ ID NO: 3077393 - DNA, 25 bp, Homo sapien
cttgtgtatgttagttttggatcat

SEQ ID NO: 3077394 - DNA, 25 bp, Homo sapien
ttttggatcattaagccactttgtt

SEQ ID NO: 3077395 - DNA, 25 bp, Homo sapien
tgttagttttggatcattaagccac

SEQ ID NO: 3077396 - DNA, 25 bp, Homo sapien
gattatcttttgttagaggcatatc

SEQ ID NO: 3077397 - DNA, 25 bp, Homo sapien
caatactatattaaatgcgcatggt

SEQ ID NO: 3077398 - DNA, 25 bp, Homo sapien
taaacaggtaatcatgtaatatgcc

SEQ ID NO: 3077399 - DNA, 25 bp, Homo sapien
ggcattctgctgtagattacttgga

SEQ ID NO: 3077400 - DNA, 25 bp, Homo sapien
gccttattacgtggcaattcctgga

SEQ ID NO: 3077401 - DNA, 25 bp, Homo sapien
tgtgaacaggaagtccccgggatga

SEQ ID NO: 3077402 - DNA, 25 bp, Homo sapien
cacagccgcagacactagaggagtt

SEQ ID NO: 3077403 - DNA, 25 bp, Homo sapien
cagcagatccgtgatggagacaggc

SEQ ID NO: 3077404 - DNA, 25 bp, Homo sapien
gacccctgacaacatcgacatctgg

SEQ ID NO: 3077405 - DNA, 25 bp, Homo sapien
ctttattatcataaacattgggagc

SEQ ID NO: 3077406 - DNA, 25 bp, Homo sapien
tatcataaacattgggagcaaataa

SEQ ID NO: 3077407 - DNA, 25 bp, Homo sapien
gctggctgggcccataagtcaacca

SEQ ID NO: 3077408 - DNA, 25 bp, Homo sapien
cccatcagcggtgcctttattatca

SEQ ID NO: 3077409 - DNA, 25 bp, Homo sapien
tgagcacacaaatgaacgtctagtc

SEQ ID NO: 3077410 - DNA, 25 bp, Homo sapien
tccagctctgctaaccaggacacag

SEQ ID NO: 3077411 - DNA, 25 bp, Homo sapien
gaaccagaggatacaagtgggccct

SEQ ID NO: 3077412 - DNA, 25 bp, Homo sapien
ggagatctccgtggttccaactggc

SEQ ID NO: 3077413 - DNA, 25 bp, Homo sapien
catgaagatgttgttcttagacacg

SEQ ID NO: 3077414 - DNA, 25 bp, Homo sapien
gtactgcagttgacaaagtcccggg

SEQ ID NO: 3077415 - DNA, 25 bp, Homo sapien
ccaggaagccaggttcaatgcagga

SEQ ID NO: 3077416 - DNA, 25 bp, Homo sapien
tgcctgtgttgtcgcagatgatccg

SEQ ID NO: 3077417 - DNA, 25 bp, Homo sapien
catgctgaacacaccctcgttctcc

SEQ ID NO: 3077418 - DNA, 25 bp, Homo sapien
gaacacaccctcgttctcccaccaa

SEQ ID NO: 3077419 - DNA, 25 bp, Homo sapien
agggcctgtcgctgctgcatgctga

SEQ ID NO: 3077420 - DNA, 25 bp, Homo sapien
gccagggcctgtcgctgctgcatgc

SEQ ID NO: 3077421 - DNA, 25 bp, Homo sapien
catggacactgtgcccaaggatatt

SEQ ID NO: 3077422 - DNA, 25 bp, Homo sapien
tgcatggggaacacccatggacact

SEQ ID NO: 3077423 - DNA, 25 bp, Homo sapien
ttgtgctgctcccaggatataacaa

SEQ ID NO: 3077424 - DNA, 25 bp, Homo sapien
ggatataacaaagccacaacaaatg

SEQ ID NO: 3077425 - DNA, 25 bp, Homo sapien
acagtttcaggctgcgggagcccac

SEQ ID NO: 3077426 - DNA, 25 bp, Homo sapien
cctttgcgcttcagaggctcggaca

SEQ ID NO: 3077427 - DNA, 25 bp, Homo sapien
tgttgggcgtgccatactgctccat

SEQ ID NO: 3077428 - DNA, 25 bp, Homo sapien
gagcttcctgaactgggtaccgatg

SEQ ID NO: 3077429 - DNA, 25 bp, Homo sapien
aggtggctatgggcaggtctctctg

SEQ ID NO: 3077430 - DNA, 25 bp, Homo sapien
caggtggctatgggcaggtctctct

SEQ ID NO: 3077431 - DNA, 25 bp, Homo sapien
tgagcatcaggggagactcctgcag

SEQ ID NO: 3077432 - DNA, 25 bp, Homo sapien
ggtgagcatcaggggagactcctgc

SEQ ID NO: 3077433 - DNA, 25 bp, Homo sapien
aggtgagcatcaggggagactcctg

SEQ ID NO: 3077434 - DNA, 25 bp, Homo sapien
gtgagcatcaggggagactcctgca

SEQ ID NO: 3077435 - DNA, 25 bp, Homo sapien
tgctgcgctgcatgttcagagcagg

SEQ ID NO: 3077436 - DNA, 25 bp, Homo sapien
cctgctgcgctgcatgttcagagca

SEQ ID NO: 3077437 - DNA, 25 bp, Homo sapien
tccctgctgcgctgcatgttcagag

SEQ ID NO: 3077438 - DNA, 25 bp, Homo sapien
tgcgctgcatgttcagagcaggcag

SEQ ID NO: 3077439 - DNA, 25 bp, Homo sapien
ggttctgacgattcagcttggcagg

SEQ ID NO: 3077440 - DNA, 25 bp, Homo sapien
tgctcaaacaatcgctcccggatct

SEQ ID NO: 3077441 - DNA, 25 bp, Homo sapien
caatttggttctgacgattcagctt

SEQ ID NO: 3077442 - DNA, 25 bp, Homo sapien
ccggatctcatccactgcaatttgg

SEQ ID NO: 3077443 - DNA, 25 bp, Homo sapien
tggtaccgattgtccaggcggaaca

SEQ ID NO: 3077444 - DNA, 25 bp, Homo sapien
aagacgttggcgatgcgtgggtcca

SEQ ID NO: 3077445 - DNA, 25 bp, Homo sapien
caggtacttcctcatggccgttggc

SEQ ID NO: 3077446 - DNA, 25 bp, Homo sapien
tcattgtaggaacggtacgtgggca

SEQ ID NO: 3077447 - DNA, 25 bp, Homo sapien
tcaggagcgttaggaacttgcccaa

SEQ ID NO: 3077448 - DNA, 25 bp, Homo sapien
gacacatctggatcccgtgtgcccg

SEQ ID NO: 3077449 - DNA, 25 bp, Homo sapien
tgggcgctaaaccaaacattcaacc

SEQ ID NO: 3077450 - DNA, 25 bp, Homo sapien
tactgaacagctacttgggcgctaa

SEQ ID NO: 3077451 - DNA, 25 bp, Homo sapien
catcccacctagggttcaggctctt

SEQ ID NO: 3077452 - DNA, 25 bp, Homo sapien
ggcatctcactggaacgggtgtccc

SEQ ID NO: 3077453 - DNA, 25 bp, Homo sapien
catggaggtgagctcgggcatctca

SEQ ID NO: 3077454 - DNA, 25 bp, Homo sapien
cagccggttgtgctcccgaagtaag

SEQ ID NO: 3077455 - DNA, 25 bp, Homo sapien
gctccaacagggaacatctcctatg

SEQ ID NO: 3077456 - DNA, 25 bp, Homo sapien
ccaacagggaacatctcctatgcca

SEQ ID NO: 3077457 - DNA, 25 bp, Homo sapien
tgtggctccaacagggaacatctcc

SEQ ID NO: 3077458 - DNA, 25 bp, Homo sapien
ggctccaacagggaacatctcctat

SEQ ID NO: 3077459 - DNA, 25 bp, Homo sapien
ggatgcagtcggcttggttcttgat

SEQ ID NO: 3077460 - DNA, 25 bp, Homo sapien
ggcaggagcggaagaacgggatgca

SEQ ID NO: 3077461 - DNA, 25 bp, Homo sapien
tggttgcggatggtgatgttgctcc

SEQ ID NO: 3077462 - DNA, 25 bp, Homo sapien
gttggacatgttgcgcaggttcctg

SEQ ID NO: 3077463 - DNA, 25 bp, Homo sapien
agggccagccttcctcagcgtctgg

SEQ ID NO: 3077464 - DNA, 25 bp, Homo sapien
acccaggcagtgggcgggaagcagg

SEQ ID NO: 3077465 - DNA, 25 bp, Homo sapien
ctcagcgtctgggaaaggaaacctg

SEQ ID NO: 3077466 - DNA, 25 bp, Homo sapien
cagaagggagatggccccttccaga

SEQ ID NO: 3077467 - DNA, 25 bp, Homo sapien
acgatctcgttggagaccgcgcgag

SEQ ID NO: 3077468 - DNA, 25 bp, Homo sapien
tgcatgaacatgagtgagcgctcct

SEQ ID NO: 3077469 - DNA, 25 bp, Homo sapien
tctcgcagttgacgccagtgacgaa

SEQ ID NO: 3077470 - DNA, 25 bp, Homo sapien
gctgaacgcagctggtctcgcagtt

SEQ ID NO: 3077471 - DNA, 25 bp, Homo sapien
tgcgggacacggagatcagctggcg

SEQ ID NO: 3077472 - DNA, 25 bp, Homo sapien
ctgcgggacacggagatcagctggc

SEQ ID NO: 3077473 - DNA, 25 bp, Homo sapien
gcgggacacggagatcagctggcgc

SEQ ID NO: 3077474 - DNA, 25 bp, Homo sapien
aagccgtcctcatactccgccggca

SEQ ID NO: 3077475 - DNA, 25 bp, Homo sapien
gcgtccagccgtagggaagagagaa

SEQ ID NO: 3077476 - DNA, 25 bp, Homo sapien
ccagcgcacaaaggcacggttggag

SEQ ID NO: 3077477 - DNA, 25 bp, Homo sapien
agccgttgcgcttgaccccgggcgt

SEQ ID NO: 3077478 - DNA, 25 bp, Homo sapien
agggcgctgacaccgggaggcttgt

SEQ ID NO: 3077479 - DNA, 25 bp, Homo sapien
ggacgcctctctgagcccggttcct

SEQ ID NO: 3077480 - DNA, 25 bp, Homo sapien
ctgacaccgggaggcttgtggcgtc

SEQ ID NO: 3077481 - DNA, 25 bp, Homo sapien
ggcttgtggcgtccgggacgcctct

SEQ ID NO: 3077482 - DNA, 25 bp, Homo sapien
tgttgttgcacatcccggtgatggt

SEQ ID NO: 3077483 - DNA, 25 bp, Homo sapien
ggtgatggtgcggtatttgtcctgc

SEQ ID NO: 3077484 - DNA, 25 bp, Homo sapien
ttgacttggacaacacattcagctg

SEQ ID NO: 3077485 - DNA, 25 bp, Homo sapien
cacgtcctggtaggcgcagccgctt

SEQ ID NO: 3077486 - DNA, 25 bp, Homo sapien
tgggggagctgagccgcctcacttc

SEQ ID NO: 3077487 - DNA, 25 bp, Homo sapien
gccgcctcacttcctatcccaggca

SEQ ID NO: 3077488 - DNA, 25 bp, Homo sapien
cgcctcacttcctatcccaggcaac

SEQ ID NO: 3077489 - DNA, 25 bp, Homo sapien
gggaaagaacaatgggggagctgag

SEQ ID NO: 3077490 - DNA, 25 bp, Homo sapien
gaggagtcactagtggagcagggac

SEQ ID NO: 3077491 - DNA, 25 bp, Homo sapien
tgagagacggctggggtccctagga

SEQ ID NO: 3077492 - DNA, 25 bp, Homo sapien
ctggggtccctaggaggagtcacta

SEQ ID NO: 3077493 - DNA, 25 bp, Homo sapien
gagacggctggggtccctaggagga

SEQ ID NO: 3077494 - DNA, 25 bp, Homo sapien
cattgaatggccttcgccacaggga

SEQ ID NO: 3077495 - DNA, 25 bp, Homo sapien
acgtgcaggtagtcagcggccctca

SEQ ID NO: 3077496 - DNA, 25 bp, Homo sapien
cagcaggtctagagccacgtgcagg

SEQ ID NO: 3077497 - DNA, 25 bp, Homo sapien
gcttgaagtaggataggagttccat

SEQ ID NO: 3077498 - DNA, 25 bp, Homo sapien
tctgaaaggcctgggacatccttgc

SEQ ID NO: 3077499 - DNA, 25 bp, Homo sapien
tgaaaggcctgggacatccttgccc

SEQ ID NO: 3077500 - DNA, 25 bp, Homo sapien
gagctgggcagtgcctcgtgcccca

SEQ ID NO: 3077501 - DNA, 25 bp, Homo sapien
cctgctgcttctctgaaaggcctgg

SEQ ID NO: 3077502 - DNA, 25 bp, Homo sapien
gagctcagcaccaacgaggtgtcca

SEQ ID NO: 3077503 - DNA, 25 bp, Homo sapien
ggagctcagcaccaacgaggtgtcc

SEQ ID NO: 3077504 - DNA, 25 bp, Homo sapien
tggagctcagcaccaacgaggtgtc

SEQ ID NO: 3077505 - DNA, 25 bp, Homo sapien
agctcagcaccaacgaggtgtccac

SEQ ID NO: 3077506 - DNA, 25 bp, Homo sapien
gggcgtggccagaatggccaggagc

SEQ ID NO: 3077507 - DNA, 25 bp, Homo sapien
ctggagcagcaccttcagagggctg

SEQ ID NO: 3077508 - DNA, 25 bp, Homo sapien
agcaccttcagagggctggggcgtg

SEQ ID NO: 3077509 - DNA, 25 bp, Homo sapien
caggagccctgctagggccagaagc

SEQ ID NO: 3077510 - DNA, 25 bp, Homo sapien
ccagcccagcaaggtcctaagtcca

SEQ ID NO: 3077511 - DNA, 25 bp, Homo sapien
acccccagcccagcaaggtcctaag

SEQ ID NO: 3077512 - DNA, 25 bp, Homo sapien
ccagcaaggtcctaagtccaccatg

SEQ ID NO: 3077513 - DNA, 25 bp, Homo sapien
cagcaaggtcctaagtccaccatgc

SEQ ID NO: 3077514 - DNA, 25 bp, Homo sapien
tgagagaagagaagaagggaacccc

SEQ ID NO: 3077515 - DNA, 25 bp, Homo sapien
ctgagagaagagaagaagggaaccc

SEQ ID NO: 3077516 - DNA, 25 bp, Homo sapien
ctcagagggccctgtctatggataa

SEQ ID NO: 3077517 - DNA, 25 bp, Homo sapien
gggctcactgctctcttatcccctt

SEQ ID NO: 3077518 - DNA, 25 bp, Homo sapien
ctgtctatggataaagccagacctc

SEQ ID NO: 3077519 - DNA, 25 bp, Homo sapien
taaagccagacctccttgagggagg

SEQ ID NO: 3077520 - DNA, 25 bp, Homo sapien
ttagctcaatctgcgcttttatgtc

SEQ ID NO: 3077521 - DNA, 25 bp, Homo sapien
aatctgcgcttttatgtcctctaag

SEQ ID NO: 3077522 - DNA, 25 bp, Homo sapien
agctcaatctgcgcttttatgtcct

SEQ ID NO: 3077523 - DNA, 25 bp, Homo sapien
tcaatctgcgcttttatgtcctcta

SEQ ID NO: 3077524 - DNA, 25 bp, Homo sapien
gaaggtctgatcctggagactgaac

SEQ ID NO: 3077525 - DNA, 25 bp, Homo sapien
ctgatcctggagactgaactctttc

SEQ ID NO: 3077526 - DNA, 25 bp, Homo sapien
ggtgaggtagaggaaggtctgatcc

SEQ ID NO: 3077527 - DNA, 25 bp, Homo sapien
tagaggaaggtctgatcctggagac

SEQ ID NO: 3077528 - DNA, 25 bp, Homo sapien
ctggggttggaaggtacacacagag

SEQ ID NO: 3077529 - DNA, 25 bp, Homo sapien
tggggttggaaggtacacacagagg

SEQ ID NO: 3077530 - DNA, 25 bp, Homo sapien
gatacacacaactaacccctctgaa

SEQ ID NO: 3077531 - DNA, 25 bp, Homo sapien
cattgtgtgcctataccagtgcttg

SEQ ID NO: 3077532 - DNA, 25 bp, Homo sapien
cccctctgaaattctggttacactg

SEQ ID NO: 3077533 - DNA, 25 bp, Homo sapien
tccccaggggatacacacaactaac

SEQ ID NO: 3077534 - DNA, 25 bp, Homo sapien
ctgctctggttgcagtgtggacagt

SEQ ID NO: 3077535 - DNA, 25 bp, Homo sapien
ctctggttgcagtgtggacagtgcg

SEQ ID NO: 3077536 - DNA, 25 bp, Homo sapien
gctctggttgcagtgtggacagtgc

SEQ ID NO: 3077537 - DNA, 25 bp, Homo sapien
tgctctggttgcagtgtggacagtg

SEQ ID NO: 3077538 - DNA, 25 bp, Homo sapien
aggcaggcccagacacagagacctg

SEQ ID NO: 3077539 - DNA, 25 bp, Homo sapien
aaggcaggcccagacacagagacct

SEQ ID NO: 3077540 - DNA, 25 bp, Homo sapien
gcaggcccagacacagagacctggc

SEQ ID NO: 3077541 - DNA, 25 bp, Homo sapien
gaaaggcaggcccagacacagagac

SEQ ID NO: 3077542 - DNA, 25 bp, Homo sapien
acaagcacggagcacaggcttagta

SEQ ID NO: 3077543 - DNA, 25 bp, Homo sapien
gagcacaggcttagtatcaacctga

SEQ ID NO: 3077544 - DNA, 25 bp, Homo sapien
tcaataccaatcacccagacccaga

SEQ ID NO: 3077545 - DNA, 25 bp, Homo sapien
caggcttagtatcaacctgattgtg

SEQ ID NO: 3077546 - DNA, 25 bp, Homo sapien
tgctgacacctctgcaactgagcgt

SEQ ID NO: 3077547 - DNA, 25 bp, Homo sapien
ccatacggcatcttctacagaaaca

SEQ ID NO: 3077548 - DNA, 25 bp, Homo sapien
tactgttccaattctccatacggca

SEQ ID NO: 3077549 - DNA, 25 bp, Homo sapien
gagcgttagcatccatactgttcca

SEQ ID NO: 3077550 - DNA, 25 bp, Homo sapien
ttgccattgtggttgggagtctttg

SEQ ID NO: 3077551 - DNA, 25 bp, Homo sapien
gccattgtggttgggagtctttgct

SEQ ID NO: 3077552 - DNA, 25 bp, Homo sapien
ctttactctgttcttgccattgtgg

SEQ ID NO: 3077553 - DNA, 25 bp, Homo sapien
ttactctgttcttgccattgtggtt

SEQ ID NO: 3077554 - DNA, 25 bp, Homo sapien
agcaaaggaaacatgcaaagacaca

SEQ ID NO: 3077555 - DNA, 25 bp, Homo sapien
cacccctggagaccaaggtcaaggt

SEQ ID NO: 3077556 - DNA, 25 bp, Homo sapien
ccaccattccacacccctggagacc

SEQ ID NO: 3077557 - DNA, 25 bp, Homo sapien
ggttcagtcaaactatctcccacca

SEQ ID NO: 3077558 - DNA, 25 bp, Homo sapien
aactatgcaaaagaacttgaatcca

SEQ ID NO: 3077559 - DNA, 25 bp, Homo sapien
aaaatagctgcataaatctgtcctt

SEQ ID NO: 3077560 - DNA, 25 bp, Homo sapien
ccccactctgaacagggaatgtatg

SEQ ID NO: 3077561 - DNA, 25 bp, Homo sapien
gatggagtggatcgggtaacggcgg

SEQ ID NO: 3077562 - DNA, 25 bp, Homo sapien
cactgtgggacactagtagacgagg

SEQ ID NO: 3077563 - DNA, 25 bp, Homo sapien
tcaagttacatactcactgtgggct

SEQ ID NO: 3077564 - DNA, 25 bp, Homo sapien
gcagaagggactagcgcagcactgt

SEQ ID NO: 3077565 - DNA, 25 bp, Homo sapien
gggctccaataaaatccagtgcaaa

SEQ ID NO: 3077566 - DNA, 25 bp, Homo sapien
cacgttcaatcctgggggcgctgcc

SEQ ID NO: 3077567 - DNA, 25 bp, Homo sapien
cccacgttcaatcctgggggcgctg

SEQ ID NO: 3077568 - DNA, 25 bp, Homo sapien
gctccccacgttcaatcctgggggc

SEQ ID NO: 3077569 - DNA, 25 bp, Homo sapien
ccagagctgggggtacaaggcccac

SEQ ID NO: 3077570 - DNA, 25 bp, Homo sapien
gggacccttgtgtggtgcagcccca

SEQ ID NO: 3077571 - DNA, 25 bp, Homo sapien
ctggggacccttgtgtggtgcagcc

SEQ ID NO: 3077572 - DNA, 25 bp, Homo sapien
ccctggggacccttgtgtggtgcag

SEQ ID NO: 3077573 - DNA, 25 bp, Homo sapien
acccttgtgtggtgcagccccagtc

SEQ ID NO: 3077574 - DNA, 25 bp, Homo sapien
gaaccatggctgacgctgagaacca

SEQ ID NO: 3077575 - DNA, 25 bp, Homo sapien
aacatggagcgcaaggacaaggact

SEQ ID NO: 3077576 - DNA, 25 bp, Homo sapien
catgtaatcctatgacagctggcac

SEQ ID NO: 3077577 - DNA, 25 bp, Homo sapien
tcatagacagaaagagcgtctcccc

SEQ ID NO: 3077578 - DNA, 25 bp, Homo sapien
tgctctctctacatatatctatctc

SEQ ID NO: 3077579 - DNA, 25 bp, Homo sapien
atgttgctctctctacatatatcta

SEQ ID NO: 3077580 - DNA, 25 bp, Homo sapien
tctctctacatatatctatctccat

SEQ ID NO: 3077581 - DNA, 25 bp, Homo sapien
tgttgctctctctacatatatctat

SEQ ID NO: 3077582 - DNA, 25 bp, Homo sapien
gcactggactcttctcctcctcgtt

SEQ ID NO: 3077583 - DNA, 25 bp, Homo sapien
tagcactggactcttctcctcctcg

SEQ ID NO: 3077584 - DNA, 25 bp, Homo sapien
ctagcactggactcttctcctcctc

SEQ ID NO: 3077585 - DNA, 25 bp, Homo sapien
actggactcttctcctcctcgttct

SEQ ID NO: 3077586 - DNA, 25 bp, Homo sapien
gttgtattccactcaccccaaggag

SEQ ID NO: 3077587 - DNA, 25 bp, Homo sapien
aacagggactttgattggccacagg

SEQ ID NO: 3077588 - DNA, 25 bp, Homo sapien
ggagatgggttaccgacagacccgc

SEQ ID NO: 3077589 - DNA, 25 bp, Homo sapien
tcaaggaacgagaacccaggaagct

SEQ ID NO: 3077590 - DNA, 25 bp, Homo sapien
tgagggtcagggtcacagctatcat

SEQ ID NO: 3077591 - DNA, 25 bp, Homo sapien
ctgagggtcagggtcacagctatca

SEQ ID NO: 3077592 - DNA, 25 bp, Homo sapien
gcgtcagccaccaggtgttggcagc

SEQ ID NO: 3077593 - DNA, 25 bp, Homo sapien
ctgcgtcagccaccaggtgttggca

SEQ ID NO: 3077594 - DNA, 25 bp, Homo sapien
ccctctggtggtcaattagcggctg

SEQ ID NO: 3077595 - DNA, 25 bp, Homo sapien
ctctggtggtcaattagcggctgca

SEQ ID NO: 3077596 - DNA, 25 bp, Homo sapien
ggtggtcaattagcggctgcacgct

SEQ ID NO: 3077597 - DNA, 25 bp, Homo sapien
tctggtggtcaattagcggctgcac

SEQ ID NO: 3077598 - DNA, 25 bp, Homo sapien
accaccccaccagtagggtagactg

SEQ ID NO: 3077599 - DNA, 25 bp, Homo sapien
acccctgccgcaacactgccctggc

SEQ ID NO: 3077600 - DNA, 25 bp, Homo sapien
gtagactgccctgccaagctgggag

SEQ ID NO: 3077601 - DNA, 25 bp, Homo sapien
cagctgcacccctgccgcaacactg

SEQ ID NO: 3077602 - DNA, 25 bp, Homo sapien
ggtgtcctgggttccctgtccaggc

SEQ ID NO: 3077603 - DNA, 25 bp, Homo sapien
caggaagttggatggaaccaggccc

SEQ ID NO: 3077604 - DNA, 25 bp, Homo sapien
tggatggaaccaggcccctttgtcc

SEQ ID NO: 3077605 - DNA, 25 bp, Homo sapien
ggccctccaggaagttggatggaac

SEQ ID NO: 3077606 - DNA, 25 bp, Homo sapien
gctgggatatggtacaccctcccca

SEQ ID NO: 3077607 - DNA, 25 bp, Homo sapien
tggccctgcccctcgactctgatgc

SEQ ID NO: 3077608 - DNA, 25 bp, Homo sapien
tccattcctccggacttcctgaggg

SEQ ID NO: 3077609 - DNA, 25 bp, Homo sapien
ttcctgagggttccttgcctatccc

SEQ ID NO: 3077610 - DNA, 25 bp, Homo sapien
atagtagaaaccgtcatcgtccatg

SEQ ID NO: 3077611 - DNA, 25 bp, Homo sapien
aaaccgtcatcgtccatgcccccaa

SEQ ID NO: 3077612 - DNA, 25 bp, Homo sapien
gaaaccgtcatcgtccatgccccca

SEQ ID NO: 3077613 - DNA, 25 bp, Homo sapien
gtagaaaccgtcatcgtccatgccc

SEQ ID NO: 3077614 - DNA, 25 bp, Homo sapien
tccatattgggggaactctcctggg

SEQ ID NO: 3077615 - DNA, 25 bp, Homo sapien
ctccacgtccatattgggggaactc

SEQ ID NO: 3077616 - DNA, 25 bp, Homo sapien
caaatgcagccaccatggagtgggg

SEQ ID NO: 3077617 - DNA, 25 bp, Homo sapien
tgggggttgtagtcaaatgcagcca

SEQ ID NO: 3077618 - DNA, 25 bp, Homo sapien
gggctgggcagggccttccgactca

SEQ ID NO: 3077619 - DNA, 25 bp, Homo sapien
agggctgggcagggccttccgactc

SEQ ID NO: 3077620 - DNA, 25 bp, Homo sapien
ggctgggcagggccttccgactcag

SEQ ID NO: 3077621 - DNA, 25 bp, Homo sapien
gtgtgggctgtggagtacacaaacg

SEQ ID NO: 3077622 - DNA, 25 bp, Homo sapien
tgggctgtggagtacacaaacggac

SEQ ID NO: 3077623 - DNA, 25 bp, Homo sapien
gtggagtacacaaacggaccattcc

SEQ ID NO: 3077624 - DNA, 25 bp, Homo sapien
gctgtggagtacacaaacggaccat

SEQ ID NO: 3077625 - DNA, 25 bp, Homo sapien
accttcgccctggtagaagccatcg

SEQ ID NO: 3077626 - DNA, 25 bp, Homo sapien
tggggacaaataaccccgctggagc

SEQ ID NO: 3077627 - DNA, 25 bp, Homo sapien
tggtagaagccatcggcatccttgt

SEQ ID NO: 3077628 - DNA, 25 bp, Homo sapien
gccctggtagaagccatcggcatcc

SEQ ID NO: 3077629 - DNA, 25 bp, Homo sapien
tctgctctagaagccatgttctcca

SEQ ID NO: 3077630 - DNA, 25 bp, Homo sapien
gattgtgctgcctatgtctcaggca

SEQ ID NO: 3077631 - DNA, 25 bp, Homo sapien
gtcaggtccaaacccatgtcatctg

SEQ ID NO: 3077632 - DNA, 25 bp, Homo sapien
ggcctaggtaatctactcaaggtta

SEQ ID NO: 3077633 - DNA, 25 bp, Homo sapien
tgagccctgatggcgaatcagtcac

SEQ ID NO: 3077634 - DNA, 25 bp, Homo sapien
ctgagccctgatggcgaatcagtca

SEQ ID NO: 3077635 - DNA, 25 bp, Homo sapien
ggagggaagacccagctggtgtttg

SEQ ID NO: 3077636 - DNA, 25 bp, Homo sapien
ggaggagggaagacccagctggtgt

SEQ ID NO: 3077637 - DNA, 25 bp, Homo sapien
tcaggattgggcgacattgacacgg

SEQ ID NO: 3077638 - DNA, 25 bp, Homo sapien
ggggtcatagtcaaacagagccaca

SEQ ID NO: 3077639 - DNA, 25 bp, Homo sapien
gatctgaccctctcggaagggaagc

SEQ ID NO: 3077640 - DNA, 25 bp, Homo sapien
ttgacacggggtcatagtcaaacag

SEQ ID NO: 3077641 - DNA, 25 bp, Homo sapien
aggtgctggtaagccagtgtttctg

SEQ ID NO: 3077642 - DNA, 25 bp, Homo sapien
ctgacgggtaggtgctggtaagcca

SEQ ID NO: 3077643 - DNA, 25 bp, Homo sapien
gtaggtgctggtaagccagtgtttc

SEQ ID NO: 3077644 - DNA, 25 bp, Homo sapien
cgggtaggtgctggtaagccagtgt

SEQ ID NO: 3077645 - DNA, 25 bp, Homo sapien
ctctggcctctccggtctctgttgc

SEQ ID NO: 3077646 - DNA, 25 bp, Homo sapien
gaggactcggacacctctcttctgg

SEQ ID NO: 3077647 - DNA, 25 bp, Homo sapien
cctgaggactcggacacctctcttc

SEQ ID NO: 3077648 - DNA, 25 bp, Homo sapien
tgaggactcggacacctctcttctg

SEQ ID NO: 3077649 - DNA, 25 bp, Homo sapien
ctctggtgggctcgtgctcccccag

SEQ ID NO: 3077650 - DNA, 25 bp, Homo sapien
gatggcaaaagtaacacaccatccc

SEQ ID NO: 3077651 - DNA, 25 bp, Homo sapien
aagtaacacaccatccctctggtgg

SEQ ID NO: 3077652 - DNA, 25 bp, Homo sapien
caacagatggcaaaagtaacacacc

SEQ ID NO: 3077653 - DNA, 25 bp, Homo sapien
ggagctgctggtgggcagcaagcag

SEQ ID NO: 3077654 - DNA, 25 bp, Homo sapien
ggcaggcagcgtggaatgggagctg

SEQ ID NO: 3077655 - DNA, 25 bp, Homo sapien
tctgctgatggaggcaggcagcgtg

SEQ ID NO: 3077656 - DNA, 25 bp, Homo sapien
cccagggcggggagtgagcacggac

SEQ ID NO: 3077657 - DNA, 25 bp, Homo sapien
gcactgcggcctctccgctctggtt

SEQ ID NO: 3077658 - DNA, 25 bp, Homo sapien
ttggctctgcccgtcgcactgcggc

SEQ ID NO: 3077659 - DNA, 25 bp, Homo sapien
ttcctacagttgctgtgccccaggc

SEQ ID NO: 3077660 - DNA, 25 bp, Homo sapien
tgctcatcctccgaatcatattcaa

SEQ ID NO: 3077661 - DNA, 25 bp, Homo sapien
cggccacgggagcacctccgggaag

SEQ ID NO: 3077662 - DNA, 25 bp, Homo sapien
cagtcctggggccctcaattacggg

SEQ ID NO: 3077663 - DNA, 25 bp, Homo sapien
tctcccgctagcctctagtccagtc

SEQ ID NO: 3077664 - DNA, 25 bp, Homo sapien
gtgtggggcccagtcgtccagaggc

SEQ ID NO: 3077665 - DNA, 25 bp, Homo sapien
ggcatgtcttccaggcagtctccag

SEQ ID NO: 3077666 - DNA, 25 bp, Homo sapien
tgagaagtcggctgcagtgttctcg

SEQ ID NO: 3077667 - DNA, 25 bp, Homo sapien
tgcttccaccaactaatccaggcat

SEQ ID NO: 3077668 - DNA, 25 bp, Homo sapien
ctgagaagtcggctgcagtgttctc

SEQ ID NO: 3077669 - DNA, 25 bp, Homo sapien
ctggccaggtcttcggggctgacca

SEQ ID NO: 3077670 - DNA, 25 bp, Homo sapien
gactcaggagacaagggacactggc

SEQ ID NO: 3077671 - DNA, 25 bp, Homo sapien
acaagggacactggccaggtcttcg

SEQ ID NO: 3077672 - DNA, 25 bp, Homo sapien
gagacaagggacactggccaggtct

SEQ ID NO: 3077673 - DNA, 25 bp, Homo sapien
cccagcaatgcaggttcaggcgggc

SEQ ID NO: 3077674 - DNA, 25 bp, Homo sapien
cagggtctcgggaagaacagcctgc

SEQ ID NO: 3077675 - DNA, 25 bp, Homo sapien
tcctcatcgctgtcagtctcacaaa

SEQ ID NO: 3077676 - DNA, 25 bp, Homo sapien
tccgggatgctaaagagcttcttgc

SEQ ID NO: 3077677 - DNA, 25 bp, Homo sapien
cacacatatccagtgagagccaaag

SEQ ID NO: 3077678 - DNA, 25 bp, Homo sapien
gcccaaattcacacacatatccagt

SEQ ID NO: 3077679 - DNA, 25 bp, Homo sapien
gagccaaaggaagaattagggaaca

SEQ ID NO: 3077680 - DNA, 25 bp, Homo sapien
tagggaacacactctaggaaccatc

SEQ ID NO: 3077681 - DNA, 25 bp, Homo sapien
cctgatgctgttgccagcaacctgc

SEQ ID NO: 3077682 - DNA, 25 bp, Homo sapien
cttcctcttcctcctggatgtctga

SEQ ID NO: 3077683 - DNA, 25 bp, Homo sapien
cctcttcctcttcctcctggatgtc

SEQ ID NO: 3077684 - DNA, 25 bp, Homo sapien
ttcctcttcctcctggatgtctgac

SEQ ID NO: 3077685 - DNA, 25 bp, Homo sapien
ctggaacccagctcctcttcctcct

SEQ ID NO: 3077686 - DNA, 25 bp, Homo sapien
tgcggccgtggtccacgagggagtt

SEQ ID NO: 3077687 - DNA, 25 bp, Homo sapien
ggtccacgagggagttcaccagatg

SEQ ID NO: 3077688 - DNA, 25 bp, Homo sapien
gccgtggtccacgagggagttcacc

SEQ ID NO: 3077689 - DNA, 25 bp, Homo sapien
cgtggtccacgagggagttcaccag

SEQ ID NO: 3077690 - DNA, 25 bp, Homo sapien
tccttggcacatctcggtatttggc

SEQ ID NO: 3077691 - DNA, 25 bp, Homo sapien
catctcggtatttggcgcctgctgg

SEQ ID NO: 3077692 - DNA, 25 bp, Homo sapien
ggcacatctcggtatttggcgcctg

SEQ ID NO: 3077693 - DNA, 25 bp, Homo sapien
ctcctccttggcacatctcggtatt

SEQ ID NO: 3077694 - DNA, 25 bp, Homo sapien
gtcctctcctctgaggtgcccagca

SEQ ID NO: 3077695 - DNA, 25 bp, Homo sapien
ccagggtagatgtgctggctgtcct

SEQ ID NO: 3077696 - DNA, 25 bp, Homo sapien
tctcctctgaggtgcccagcactgc

SEQ ID NO: 3077697 - DNA, 25 bp, Homo sapien
tggctgtcctctcctctgaggtgcc

SEQ ID NO: 3077698 - DNA, 25 bp, Homo sapien
tgaggaaggacccaagcccaggtcc

SEQ ID NO: 3077699 - DNA, 25 bp, Homo sapien
tgctcccctctccccagacagggta

SEQ ID NO: 3077700 - DNA, 25 bp, Homo sapien
cccaggtccctctgccagcctgcac

SEQ ID NO: 3077701 - DNA, 25 bp, Homo sapien
aggtccctctgccagcctgcacctg

SEQ ID NO: 3077702 - DNA, 25 bp, Homo sapien
tcctggaggctcttgagttccaagg

SEQ ID NO: 3077703 - DNA, 25 bp, Homo sapien
aggtgctggagggtcctcgtgggac

SEQ ID NO: 3077704 - DNA, 25 bp, Homo sapien
aggctcttgagttccaaggggagca

SEQ ID NO: 3077705 - DNA, 25 bp, Homo sapien
ggacccttttgccatctctctggaa

SEQ ID NO: 3077706 - DNA, 25 bp, Homo sapien
gataggagccgggatggagtccgcc

SEQ ID NO: 3077707 - DNA, 25 bp, Homo sapien
atggagtccgccgactccccgtggg

SEQ ID NO: 3077708 - DNA, 25 bp, Homo sapien
gagccagggcgggagtgataggagc

SEQ ID NO: 3077709 - DNA, 25 bp, Homo sapien
gggcgacatggtgcgcacgaccacc

SEQ ID NO: 3077710 - DNA, 25 bp, Homo sapien
actccaccagtacactgcctgccgt

SEQ ID NO: 3077711 - DNA, 25 bp, Homo sapien
aactccaccagtacactgcctgccg

SEQ ID NO: 3077712 - DNA, 25 bp, Homo sapien
ctccaccagtacactgcctgccgtg

SEQ ID NO: 3077713 - DNA, 25 bp, Homo sapien
gatgtgccagcagcatcgatggtga

SEQ ID NO: 3077714 - DNA, 25 bp, Homo sapien
atggcatagcctgtgacccggacac

SEQ ID NO: 3077715 - DNA, 25 bp, Homo sapien
gactgggagccaactgatgatcaag

SEQ ID NO: 3077716 - DNA, 25 bp, Homo sapien
acccggacaccgttggatgtgccag

SEQ ID NO: 3077717 - DNA, 25 bp, Homo sapien
cacttgggcctgatagggtgtgcca

SEQ ID NO: 3077718 - DNA, 25 bp, Homo sapien
gatgtggctgtcaaccgatggaccc

SEQ ID NO: 3077719 - DNA, 25 bp, Homo sapien
acagatatggaagccgtgtagctcc

SEQ ID NO: 3077720 - DNA, 25 bp, Homo sapien
gacacacgctctacaaaattggaag

SEQ ID NO: 3077721 - DNA, 25 bp, Homo sapien
gtgaacagcagacatccacagaggg

SEQ ID NO: 3077722 - DNA, 25 bp, Homo sapien
cagggtgcccctcaacttctctttg

SEQ ID NO: 3077723 - DNA, 25 bp, Homo sapien
gacaaccaactcagcagggtaaagg

SEQ ID NO: 3077724 - DNA, 25 bp, Homo sapien
gagagagagacaaccaactcagcag

SEQ ID NO: 3077725 - DNA, 25 bp, Homo sapien
taagtgctagtgaaatagtcacttg

SEQ ID NO: 3077726 - DNA, 25 bp, Homo sapien
gctagtgaaatagtcacttgtaagt

SEQ ID NO: 3077727 - DNA, 25 bp, Homo sapien
aagtaagtgctagtgaaatagtcac

SEQ ID NO: 3077728 - DNA, 25 bp, Homo sapien
tgaagtaagtgctagtgaaatagtc

SEQ ID NO: 3077729 - DNA, 25 bp, Homo sapien
gacttgacaagagagtattttaaaa

SEQ ID NO: 3077730 - DNA, 25 bp, Homo sapien
agcttccagggttacagattcagag

SEQ ID NO: 3077731 - DNA, 25 bp, Homo sapien
caaagccaggtaccatgggtctcag

SEQ ID NO: 3077732 - DNA, 25 bp, Homo sapien
gatggactcagcctggtggtaccca

SEQ ID NO: 3077733 - DNA, 25 bp, Homo sapien
taaatctctacacacagctgcggct

SEQ ID NO: 3077734 - DNA, 25 bp, Homo sapien
ccagctgtcagcggaagctctgctt

SEQ ID NO: 3077735 - DNA, 25 bp, Homo sapien
ctggattctcattgggaccctcaaa

SEQ ID NO: 3077736 - DNA, 25 bp, Homo sapien
catagatgtagatgtactcgccagc

SEQ ID NO: 3077737 - DNA, 25 bp, Homo sapien
ctgcttctggattctcattgggacc

SEQ ID NO: 3077738 - DNA, 25 bp, Homo sapien
taacgtgctaggaagacctggatcc

SEQ ID NO: 3077739 - DNA, 25 bp, Homo sapien
tataacgtgctaggaagacctggat

SEQ ID NO: 3077740 - DNA, 25 bp, Homo sapien
acgtgctaggaagacctggatcctg

SEQ ID NO: 3077741 - DNA, 25 bp, Homo sapien
ctataacgtgctaggaagacctgga

SEQ ID NO: 3077742 - DNA, 25 bp, Homo sapien
ctgggggcaaacagaaagggctggt

SEQ ID NO: 3077743 - DNA, 25 bp, Homo sapien
gaccagcgtgagaagcataacaaaa

SEQ ID NO: 3077744 - DNA, 25 bp, Homo sapien
tccctgcttctagccgagtgacagt

SEQ ID NO: 3077745 - DNA, 25 bp, Homo sapien
gaactcagaacttcccgtctacttg

SEQ ID NO: 3077746 - DNA, 25 bp, Homo sapien
gcaaagcaccccaactgtaaatcgc

SEQ ID NO: 3077747 - DNA, 25 bp, Homo sapien
ttggggctgttgtggatggactcgg

SEQ ID NO: 3077748 - DNA, 25 bp, Homo sapien
caggtgtagggcatgacttggggct

SEQ ID NO: 3077749 - DNA, 25 bp, Homo sapien
gatggactcggagtgggaggagttg

SEQ ID NO: 3077750 - DNA, 25 bp, Homo sapien
tgttgtggatggactcggagtggga

SEQ ID NO: 3077751 - DNA, 25 bp, Homo sapien
caggctcggaagactttggggtgca

SEQ ID NO: 3077752 - DNA, 25 bp, Homo sapien
caggggcaggctcggaagactttgg

SEQ ID NO: 3077753 - DNA, 25 bp, Homo sapien
gcaggggcaggctcggaagactttg

SEQ ID NO: 3077754 - DNA, 25 bp, Homo sapien
tcggaagactttggggtgcagcgcc

SEQ ID NO: 3077755 - DNA, 25 bp, Homo sapien
gtggtgggcagtctccaaggctccc

SEQ ID NO: 3077756 - DNA, 25 bp, Homo sapien
ctggggaatggagcagcagcagggg

SEQ ID NO: 3077757 - DNA, 25 bp, Homo sapien
tggtgggcagtctccaaggctccca

SEQ ID NO: 3077758 - DNA, 25 bp, Homo sapien
ggggtggtgggcagtctccaaggct

SEQ ID NO: 3077759 - DNA, 25 bp, Homo sapien
tgttcttcgagctctcgaacccggg

SEQ ID NO: 3077760 - DNA, 25 bp, Homo sapien
tgcaggcggaaagcctggagttcct

SEQ ID NO: 3077761 - DNA, 25 bp, Homo sapien
tttggctgcggcactgttcttcgag

SEQ ID NO: 3077762 - DNA, 25 bp, Homo sapien
tgccaggaggctgaactgctcggtt

SEQ ID NO: 3077763 - DNA, 25 bp, Homo sapien
cagcagctgcacggctccttcatgt

SEQ ID NO: 3077764 - DNA, 25 bp, Homo sapien
tccagcagctgcacggctccttcat

SEQ ID NO: 3077765 - DNA, 25 bp, Homo sapien
agctgcacggctccttcatgttccc

SEQ ID NO: 3077766 - DNA, 25 bp, Homo sapien
gcagctgcacggctccttcatgttc

SEQ ID NO: 3077767 - DNA, 25 bp, Homo sapien
tctcccgtaggctgagccgagcctg

SEQ ID NO: 3077768 - DNA, 25 bp, Homo sapien
tgcttctcccgtaggctgagccgag

SEQ ID NO: 3077769 - DNA, 25 bp, Homo sapien
gcagtctccggacctcctcctgctt

SEQ ID NO: 3077770 - DNA, 25 bp, Homo sapien
ctgcagtctccggacctcctcctgc

SEQ ID NO: 3077771 - DNA, 25 bp, Homo sapien
ccctggctcttgcgaagggctgagt

SEQ ID NO: 3077772 - DNA, 25 bp, Homo sapien
tggctcttgcgaagggctgagtccc

SEQ ID NO: 3077773 - DNA, 25 bp, Homo sapien
ctggctcttgcgaagggctgagtcc

SEQ ID NO: 3077774 - DNA, 25 bp, Homo sapien
cctggctcttgcgaagggctgagtc

SEQ ID NO: 3077775 - DNA, 25 bp, Homo sapien
cattctgcgcttgtctcagctgcag

SEQ ID NO: 3077776 - DNA, 25 bp, Homo sapien
caggcgggcattctcattctgcgct

SEQ ID NO: 3077777 - DNA, 25 bp, Homo sapien
cattctcattctgcgcttgtctcag

SEQ ID NO: 3077778 - DNA, 25 bp, Homo sapien
ctctcccactgagccgggagttctc

SEQ ID NO: 3077779 - DNA, 25 bp, Homo sapien
aggagggagcccagcacccacattc

SEQ ID NO: 3077780 - DNA, 25 bp, Homo sapien
ggagctctcaggagggagcccagca

SEQ ID NO: 3077781 - DNA, 25 bp, Homo sapien
caaggccttcctcccctgctggaac

SEQ ID NO: 3077782 - DNA, 25 bp, Homo sapien
ccctcctcccaggcaaggccttcct

SEQ ID NO: 3077783 - DNA, 25 bp, Homo sapien
tccgcttcttgctgagctccgattc

SEQ ID NO: 3077784 - DNA, 25 bp, Homo sapien
catcgcctctgctttttccgggctt

SEQ ID NO: 3077785 - DNA, 25 bp, Homo sapien
tccaggctctcgcatttcttccgct

SEQ ID NO: 3077786 - DNA, 25 bp, Homo sapien
acatcgcctctgctttttccgggct

SEQ ID NO: 3077787 - DNA, 25 bp, Homo sapien
ctagaatcacgggtaggttgtccgc

SEQ ID NO: 3077788 - DNA, 25 bp, Homo sapien
gaatcacgggtaggttgtccgcatc

SEQ ID NO: 3077789 - DNA, 25 bp, Homo sapien
tggctcccctagaatcacgggtagg

SEQ ID NO: 3077790 - DNA, 25 bp, Homo sapien
cgggtaggttgtccgcatcctcctg

SEQ ID NO: 3077791 - DNA, 25 bp, Homo sapien
aatgcccaggggcaaggggctggca

SEQ ID NO: 3077792 - DNA, 25 bp, Homo sapien
ctggaaatgcccaggggcaaggggc

SEQ ID NO: 3077793 - DNA, 25 bp, Homo sapien
gaaatgcccaggggcaaggggctgg

SEQ ID NO: 3077794 - DNA, 25 bp, Homo sapien
atgcccaggggcaaggggctggcac

SEQ ID NO: 3077795 - DNA, 25 bp, Homo sapien
tgtaagtacaaaggctgcacccctg

SEQ ID NO: 3077796 - DNA, 25 bp, Homo sapien
tccaaatctgggcttggcctagagc

SEQ ID NO: 3077797 - DNA, 25 bp, Homo sapien
tctgcactcaataactgtcctgggt

SEQ ID NO: 3077798 - DNA, 25 bp, Homo sapien
tgggtgtccttcagcgactggcaga

SEQ ID NO: 3077799 - DNA, 25 bp, Homo sapien
ttggggttctgagcacggtgcaggg

SEQ ID NO: 3077800 - DNA, 25 bp, Homo sapien
ccttggggttctgagcacggtgcag

SEQ ID NO: 3077801 - DNA, 25 bp, Homo sapien
ggggttctgagcacggtgcagggga

SEQ ID NO: 3077802 - DNA, 25 bp, Homo sapien
gcaggggagatcccggtggtcgttc

SEQ ID NO: 3077803 - DNA, 25 bp, Homo sapien
gagcgtctcccgctggttgcgcagc

SEQ ID NO: 3077804 - DNA, 25 bp, Homo sapien
tgcgcagcgcgatctgcctctgcag

SEQ ID NO: 3077805 - DNA, 25 bp, Homo sapien
agcagccgatcgaagtcccgcacgt

SEQ ID NO: 3077806 - DNA, 25 bp, Homo sapien
aagtcccgcacgtggagccactggg

SEQ ID NO: 3077807 - DNA, 25 bp, Homo sapien
cgggctagggccttccgacacaact

SEQ ID NO: 3077808 - DNA, 25 bp, Homo sapien
gcaaggcagcaatctgcttgtcctt

SEQ ID NO: 3077809 - DNA, 25 bp, Homo sapien
gctccctgcactcccgctgcaaggc

SEQ ID NO: 3077810 - DNA, 25 bp, Homo sapien
tgtctcactgaggtcccgggctcgc

SEQ ID NO: 3077811 - DNA, 25 bp, Homo sapien
tcaggttcgtttcctgcagctttcg

SEQ ID NO: 3077812 - DNA, 25 bp, Homo sapien
gtttcctgcagctttcgggccctct

SEQ ID NO: 3077813 - DNA, 25 bp, Homo sapien
ttcagcctccgcaccttctcttctg

SEQ ID NO: 3077814 - DNA, 25 bp, Homo sapien
ctccaggcgcttggcaatgaccgcc

SEQ ID NO: 3077815 - DNA, 25 bp, Homo sapien
gagcccccacttggaaagatgttca

SEQ ID NO: 3077816 - DNA, 25 bp, Homo sapien
ttgagcccccacttggaaagatgtt

SEQ ID NO: 3077817 - DNA, 25 bp, Homo sapien
cctggctccagccagaacgcagcac

SEQ ID NO: 3077818 - DNA, 25 bp, Homo sapien
ccattgagcccccacttggaaagat

SEQ ID NO: 3077819 - DNA, 25 bp, Homo sapien
tccagattgggcctgtccccaaagc

SEQ ID NO: 3077820 - DNA, 25 bp, Homo sapien
ccagattgggcctgtccccaaagct

SEQ ID NO: 3077821 - DNA, 25 bp, Homo sapien
gctccagattgggcctgtccccaaa

SEQ ID NO: 3077822 - DNA, 25 bp, Homo sapien
cagattgggcctgtccccaaagctc

SEQ ID NO: 3077823 - DNA, 25 bp, Homo sapien
aggctgggcagacaagcctctgctc

SEQ ID NO: 3077824 - DNA, 25 bp, Homo sapien
tcagacctcagttcttgaagctgca

SEQ ID NO: 3077825 - DNA, 25 bp, Homo sapien
ctcagacctcagttcttgaagctgc

SEQ ID NO: 3077826 - DNA, 25 bp, Homo sapien
tgggcagacaagcctctgctccttc

SEQ ID NO: 3077827 - DNA, 25 bp, Homo sapien
tgccggaggagtatcagcgatgctt

SEQ ID NO: 3077828 - DNA, 25 bp, Homo sapien
tggagtccagctatgccaggtgggc

SEQ ID NO: 3077829 - DNA, 25 bp, Homo sapien
cttggggctgcactgctaggttcac

SEQ ID NO: 3077830 - DNA, 25 bp, Homo sapien
gttcaccccctcgacctggagtcca

SEQ ID NO: 3077831 - DNA, 25 bp, Homo sapien
tccccaggccgtgggagggttgtca

SEQ ID NO: 3077832 - DNA, 25 bp, Homo sapien
cccaggccgtgggagggttgtcagt

SEQ ID NO: 3077833 - DNA, 25 bp, Homo sapien
cgtgggagggttgtcagttgctcca

SEQ ID NO: 3077834 - DNA, 25 bp, Homo sapien
ggccgtgggagggttgtcagttgct

SEQ ID NO: 3077835 - DNA, 25 bp, Homo sapien
tgggctgcttgcctcatagtctcag

SEQ ID NO: 3077836 - DNA, 25 bp, Homo sapien
tggcagtatgtgatgctgtccctgg

SEQ ID NO: 3077837 - DNA, 25 bp, Homo sapien
catcggtgtcgttgtgtgtctgtca

SEQ ID NO: 3077838 - DNA, 25 bp, Homo sapien
caatgctgtctcatgtgttgggaag

SEQ ID NO: 3077839 - DNA, 25 bp, Homo sapien
caataggaagtcggctgctggtttc

SEQ ID NO: 3077840 - DNA, 25 bp, Homo sapien
ataggaagtcggctgctggtttcca

SEQ ID NO: 3077841 - DNA, 25 bp, Homo sapien
aataggaagtcggctgctggtttcc

SEQ ID NO: 3077842 - DNA, 25 bp, Homo sapien
atctcataggcagggccaaacccgt

SEQ ID NO: 3077843 - DNA, 25 bp, Homo sapien
cataggcagggccaaacccgtatct

SEQ ID NO: 3077844 - DNA, 25 bp, Homo sapien
gccctcttctgatctcataggcagg

SEQ ID NO: 3077845 - DNA, 25 bp, Homo sapien
tcttctgatctcataggcagggcca

SEQ ID NO: 3077846 - DNA, 25 bp, Homo sapien
gtctttattagcattgggtccctgg

SEQ ID NO: 3077847 - DNA, 25 bp, Homo sapien
cacagtccagtctttattagcattg

SEQ ID NO: 3077848 - DNA, 25 bp, Homo sapien
tccagtctttattagcattgggtcc

SEQ ID NO: 3077849 - DNA, 25 bp, Homo sapien
tttattagcattgggtccctggtcc

SEQ ID NO: 3077850 - DNA, 25 bp, Homo sapien
ttcctcgtccttgacgctgcggctg

SEQ ID NO: 3077851 - DNA, 25 bp, Homo sapien
tgcatcagggttccacatgtccagc

SEQ ID NO: 3077852 - DNA, 25 bp, Homo sapien
atcagggttccacatgtccagccct

SEQ ID NO: 3077853 - DNA, 25 bp, Homo sapien
acgctgcggctgcatcagggttcca

SEQ ID NO: 3077854 - DNA, 25 bp, Homo sapien
tccccgagcgccgaggaagatggtg

SEQ ID NO: 3077855 - DNA, 25 bp, Homo sapien
tagggaggggccgtaaggtgctcac

SEQ ID NO: 3077856 - DNA, 25 bp, Homo sapien
cacgaggtccccgagcgccgaggaa

SEQ ID NO: 3077857 - DNA, 25 bp, Homo sapien
gccatggaggcctttcaggcatctg

SEQ ID NO: 3077858 - DNA, 25 bp, Homo sapien
tttctactttatgggtgactgcact

SEQ ID NO: 3077859 - DNA, 25 bp, Homo sapien
tccataaagtaggaaacactacacc

SEQ ID NO: 3077860 - DNA, 25 bp, Homo sapien
ccagtgctgttagtagtgctttcta

SEQ ID NO: 3077861 - DNA, 25 bp, Homo sapien
tgctttctactttatgggtgactgc

SEQ ID NO: 3077862 - DNA, 25 bp, Homo sapien
ggtgactcagcatggcgccagactt

SEQ ID NO: 3077863 - DNA, 25 bp, Homo sapien
tgtccgtcggcgtgtactcttcagg

SEQ ID NO: 3077864 - DNA, 25 bp, Homo sapien
cctgggccttgtgggcggtgactca

SEQ ID NO: 3077865 - DNA, 25 bp, Homo sapien
gtttcagagacactcaggtagagac

SEQ ID NO: 3077866 - DNA, 25 bp, Homo sapien
gcccaaggctatcccaacaaaaatg

SEQ ID NO: 3077867 - DNA, 25 bp, Homo sapien
aggctggcgccccttgagacactgg

SEQ ID NO: 3077868 - DNA, 25 bp, Homo sapien
ttgaacacaccagggcctcaattcc

SEQ ID NO: 3077869 - DNA, 25 bp, Homo sapien
aaatggtggccatgttgggcggagg

SEQ ID NO: 3077870 - DNA, 25 bp, Homo sapien
cttccttcactagagagggtttcaa

SEQ ID NO: 3077871 - DNA, 25 bp, Homo sapien
gggcttgcacccaagctcctcgaca

SEQ ID NO: 3077872 - DNA, 25 bp, Homo sapien
ccccgagctgaggagccccagttgg

SEQ ID NO: 3077873 - DNA, 25 bp, Homo sapien
ggtttcaaggcgctttgccctgagc

SEQ ID NO: 3077874 - DNA, 25 bp, Homo sapien
tgcatgaagggcgtccatggagact

SEQ ID NO: 3077875 - DNA, 25 bp, Homo sapien
aagggcgtccatggagactgttgtc

SEQ ID NO: 3077876 - DNA, 25 bp, Homo sapien
ccatggaggtgctgatgcatgaagg

SEQ ID NO: 3077877 - DNA, 25 bp, Homo sapien
gcgtccatggagactgttgtcctca

SEQ ID NO: 3077878 - DNA, 25 bp, Homo sapien
atgccacccccgatttccccatggg

SEQ ID NO: 3077879 - DNA, 25 bp, Homo sapien
catgccacccccgatttccccatgg

SEQ ID NO: 3077880 - DNA, 25 bp, Homo sapien
gcatgccacccccgatttccccatg

SEQ ID NO: 3077881 - DNA, 25 bp, Homo sapien
ctgcatgccacccccgatttcccca

SEQ ID NO: 3077882 - DNA, 25 bp, Homo sapien
gtagagagaaaaccacccagtgact

SEQ ID NO: 3077883 - DNA, 25 bp, Homo sapien
gtaggagcggtagagagaaaaccac

SEQ ID NO: 3077884 - DNA, 25 bp, Homo sapien
gagcggtagagagaaaaccacccag

SEQ ID NO: 3077885 - DNA, 25 bp, Homo sapien
ctctccatgggcttggctctggaag

SEQ ID NO: 3077886 - DNA, 25 bp, Homo sapien
gacattcagattcttgctcagagga

SEQ ID NO: 3077887 - DNA, 25 bp, Homo sapien
ggaacagcccttcatcaggatagag

SEQ ID NO: 3077888 - DNA, 25 bp, Homo sapien
tagtaacggcaacaggcacaaggcc

SEQ ID NO: 3077889 - DNA, 25 bp, Homo sapien
gctgtagtagcaaccttagagtcac

SEQ ID NO: 3077890 - DNA, 25 bp, Homo sapien
cctaaggtataggaagagccgtgaa

SEQ ID NO: 3077891 - DNA, 25 bp, Homo sapien
tcaccttggccgaaaaatgggatgt

SEQ ID NO: 3077892 - DNA, 25 bp, Homo sapien
aacaggcagggtgcaatcattctct

SEQ ID NO: 3077893 - DNA, 25 bp, Homo sapien
ctaggactcaatggtcgcccaaggc

SEQ ID NO: 3077894 - DNA, 25 bp, Homo sapien
agcaccctccgataggaagcaagga

SEQ ID NO: 3077895 - DNA, 25 bp, Homo sapien
atggtcaaggagcactctacaaagc

SEQ ID NO: 3077896 - DNA, 25 bp, Homo sapien
ctctggatcagcaccctccgatagg

SEQ ID NO: 3077897 - DNA, 25 bp, Homo sapien
gatcagcaccctccgataggaagca

SEQ ID NO: 3077898 - DNA, 25 bp, Homo sapien
tctgggaaggttcttatagggcaaa

SEQ ID NO: 3077899 - DNA, 25 bp, Homo sapien
taagctattactgtgcctaagagaa

SEQ ID NO: 3077900 - DNA, 25 bp, Homo sapien
aaataagctattactgtgcctaaga

SEQ ID NO: 3077901 - DNA, 25 bp, Homo sapien
aataagctattactgtgcctaagag

SEQ ID NO: 3077902 - DNA, 25 bp, Homo sapien
gacatttgacctagagtccttggca

SEQ ID NO: 3077903 - DNA, 25 bp, Homo sapien
tttattgacatttgacctagagtcc

SEQ ID NO: 3077904 - DNA, 25 bp, Homo sapien
catttgacctagagtccttggcatg

SEQ ID NO: 3077905 - DNA, 25 bp, Homo sapien
ttgacatttgacctagagtccttgg

SEQ ID NO: 3077906 - DNA, 25 bp, Homo sapien
gataaaatgatgtgctgctctctca

SEQ ID NO: 3077907 - DNA, 25 bp, Homo sapien
cagtcagctgagtctgaattggagg

SEQ ID NO: 3077908 - DNA, 25 bp, Homo sapien
gggccacgggtaggaaaatcagcat

SEQ ID NO: 3077909 - DNA, 25 bp, Homo sapien
caccccacctgtagtccaaagaaga

SEQ ID NO: 3077910 - DNA, 25 bp, Homo sapien
ggtctttatagctgtgtctctggat

SEQ ID NO: 3077911 - DNA, 25 bp, Homo sapien
taggccactcctcgacttttcagct

SEQ ID NO: 3077912 - DNA, 25 bp, Homo sapien
tctggatttgtaggccactcctcga

SEQ ID NO: 3077913 - DNA, 25 bp, Homo sapien
gatttgtaggccactcctcgacttt

SEQ ID NO: 3077914 - DNA, 25 bp, Homo sapien
caaactggagttcctagactactta

SEQ ID NO: 3077915 - DNA, 25 bp, Homo sapien
aacagttctgtgaggtaagattcag

SEQ ID NO: 3077916 - DNA, 25 bp, Homo sapien
acttatcaatcgtctgcttggccag

SEQ ID NO: 3077917 - DNA, 25 bp, Homo sapien
agaagggtaagataggccactcagc

SEQ ID NO: 3077918 - DNA, 25 bp, Homo sapien
aggcgaccagtgactgacaccgcat

SEQ ID NO: 3077919 - DNA, 25 bp, Homo sapien
tgtcctctggactcatcatcgcaat

SEQ ID NO: 3077920 - DNA, 25 bp, Homo sapien
ctctggactcatcatcgcaatgatt

SEQ ID NO: 3077921 - DNA, 25 bp, Homo sapien
gtcctctggactcatcatcgcaatg

SEQ ID NO: 3077922 - DNA, 25 bp, Homo sapien
tcctctggactcatcatcgcaatga

SEQ ID NO: 3077923 - DNA, 25 bp, Homo sapien
tagtgcagtcatataccatctctcg

SEQ ID NO: 3077924 - DNA, 25 bp, Homo sapien
ccatcaaaggaagagctagtgcagt

SEQ ID NO: 3077925 - DNA, 25 bp, Homo sapien
gcagtcatataccatctctcggtta

SEQ ID NO: 3077926 - DNA, 25 bp, Homo sapien
gaagagctagtgcagtcatatacca

SEQ ID NO: 3077927 - DNA, 25 bp, Homo sapien
acttttctctttactgtcccacagc

SEQ ID NO: 3077928 - DNA, 25 bp, Homo sapien
tctgagttctgagacttaacttttc

SEQ ID NO: 3077929 - DNA, 25 bp, Homo sapien
cacagccccattccgccctctttcc

SEQ ID NO: 3077930 - DNA, 25 bp, Homo sapien
cccacagccccattccgccctcttt

SEQ ID NO: 3077931 - DNA, 25 bp, Homo sapien
cgcagatgccgcaggtccttcggca

SEQ ID NO: 3077932 - DNA, 25 bp, Homo sapien
gcagatgccgcaggtccttcggcac

SEQ ID NO: 3077933 - DNA, 25 bp, Homo sapien
caacagggagatagacgaccacagc

SEQ ID NO: 3077934 - DNA, 25 bp, Homo sapien
acaacagggagatagacgaccacag

SEQ ID NO: 3077935 - DNA, 25 bp, Homo sapien
atagctcgttacccagaatgcccac

SEQ ID NO: 3077936 - DNA, 25 bp, Homo sapien
acttccggcgcttagacttcctctt

SEQ ID NO: 3077937 - DNA, 25 bp, Homo sapien
cctcttccggtgtgggcggacgcca

SEQ ID NO: 3077938 - DNA, 25 bp, Homo sapien
cccccgccagaggagatggtttctc

SEQ ID NO: 3077939 - DNA, 25 bp, Homo sapien
gagacttcacgccaatggagcacca

SEQ ID NO: 3077940 - DNA, 25 bp, Homo sapien
tgaggaagcgacaaaggccccttct

SEQ ID NO: 3077941 - DNA, 25 bp, Homo sapien
tataaatagtttcaggccccgctgc

SEQ ID NO: 3077942 - DNA, 25 bp, Homo sapien
agtgcaggcagaacgcagtcatttg

SEQ ID NO: 3077943 - DNA, 25 bp, Homo sapien
tgaatgtcaccctgatgaggcccat

SEQ ID NO: 3077944 - DNA, 25 bp, Homo sapien
cacactcttggttggagctaggcct

SEQ ID NO: 3077945 - DNA, 25 bp, Homo sapien
ggtagggcccaaacacatctggagc

SEQ ID NO: 3077946 - DNA, 25 bp, Homo sapien
taacatagtgcctgattcaagcgtc

SEQ ID NO: 3077947 - DNA, 25 bp, Homo sapien
acagcctgttcacacagctcctcga

SEQ ID NO: 3077948 - DNA, 25 bp, Homo sapien
gcctgttcacacagctcctcgagtt

SEQ ID NO: 3077949 - DNA, 25 bp, Homo sapien
cagctcctcgagttcctcctctgag

SEQ ID NO: 3077950 - DNA, 25 bp, Homo sapien
acagctcctcgagttcctcctctga

SEQ ID NO: 3077951 - DNA, 25 bp, Homo sapien
gggaggaaagaggtcattgagggtc

SEQ ID NO: 3077952 - DNA, 25 bp, Homo sapien
agcggggaggaaagaggtcattgag

SEQ ID NO: 3077953 - DNA, 25 bp, Homo sapien
aaagaggtcattgagggtcaggcca

SEQ ID NO: 3077954 - DNA, 25 bp, Homo sapien
ggaaagaggtcattgagggtcaggc

SEQ ID NO: 3077955 - DNA, 25 bp, Homo sapien
tgggctacaggaactacaagaattg

SEQ ID NO: 3077956 - DNA, 25 bp, Homo sapien
ccattacgccagtgggacaggacag

SEQ ID NO: 3077957 - DNA, 25 bp, Homo sapien
tgggacatactggatgggcagcact

SEQ ID NO: 3077958 - DNA, 25 bp, Homo sapien
ccagtttggctaaagcatgggcctg

SEQ ID NO: 3077959 - DNA, 25 bp, Homo sapien
gctagccaagatacagttaacagaa

SEQ ID NO: 3077960 - DNA, 25 bp, Homo sapien
gaggctcctgcatggatctttaggg

SEQ ID NO: 3077961 - DNA, 25 bp, Homo sapien
catcagtactggacttgaaaagaac

SEQ ID NO: 3077962 - DNA, 25 bp, Homo sapien
tttagggtatacctaagacactggc

SEQ ID NO: 3077963 - DNA, 25 bp, Homo sapien
ccggccttccaagtgcctttctgat

SEQ ID NO: 3077964 - DNA, 25 bp, Homo sapien
tcacacccggccttccaagtgcctt

SEQ ID NO: 3077965 - DNA, 25 bp, Homo sapien
ttccaagtgcctttctgatgcctca

SEQ ID NO: 3077966 - DNA, 25 bp, Homo sapien
atcacacccggccttccaagtgcct

SEQ ID NO: 3077967 - DNA, 25 bp, Homo sapien
tccctgtgatctgccaactaaaggg

SEQ ID NO: 3077968 - DNA, 25 bp, Homo sapien
cctgtgatctgccaactaaaggggt

SEQ ID NO: 3077969 - DNA, 25 bp, Homo sapien
tgtgatctgccaactaaaggggtag

SEQ ID NO: 3077970 - DNA, 25 bp, Homo sapien
gtgatctgccaactaaaggggtagc

SEQ ID NO: 3077971 - DNA, 25 bp, Homo sapien
ctgtcccgatggttaagtattttgg

SEQ ID NO: 3077972 - DNA, 25 bp, Homo sapien
tgcactctagccagcatgatacgct

SEQ ID NO: 3077973 - DNA, 25 bp, Homo sapien
cctttgttggctgacttcacctgtc

SEQ ID NO: 3077974 - DNA, 25 bp, Homo sapien
tcagcttccatcaaccctttgttgg

SEQ ID NO: 3077975 - DNA, 25 bp, Homo sapien
gggaccaaggatatgccacactggg

SEQ ID NO: 3077976 - DNA, 25 bp, Homo sapien
tgccctctgcggtgtcagaactcca

SEQ ID NO: 3077977 - DNA, 25 bp, Homo sapien
gggtttctggtagcagcctcttgtc

SEQ ID NO: 3077978 - DNA, 25 bp, Homo sapien
agttgaacagactgctggtactggg

SEQ ID NO: 3077979 - DNA, 25 bp, Homo sapien
tcagtccccagccttgtgcataggg

SEQ ID NO: 3077980 - DNA, 25 bp, Homo sapien
gaggtcacactaggctgcatgtcca

SEQ ID NO: 3077981 - DNA, 25 bp, Homo sapien
ttcttggtaagatcgagagggtccc

SEQ ID NO: 3077982 - DNA, 25 bp, Homo sapien
ggtcaaagtcactgcttagggagct

SEQ ID NO: 3077983 - DNA, 25 bp, Homo sapien
gggcaagtccgatgctgatgtaacc

SEQ ID NO: 3077984 - DNA, 25 bp, Homo sapien
gggtccacacagttacgatggaact

SEQ ID NO: 3077985 - DNA, 25 bp, Homo sapien
atggaactcatggaggcaggaaatg

SEQ ID NO: 3077986 - DNA, 25 bp, Homo sapien
aagtccgatgctgatgtaaccaggg

SEQ ID NO: 3077987 - DNA, 25 bp, Homo sapien
agctggctgatggcccaggctgttc

SEQ ID NO: 3077988 - DNA, 25 bp, Homo sapien
cagctggctgatggcccaggctgtt

SEQ ID NO: 3077989 - DNA, 25 bp, Homo sapien
gccgccaaagaccccacactgctca

SEQ ID NO: 3077990 - DNA, 25 bp, Homo sapien
ccgccgccaaagaccccacactgct

SEQ ID NO: 3077991 - DNA, 25 bp, Homo sapien
tcaccgccgccaaagaccccacact

SEQ ID NO: 3077992 - DNA, 25 bp, Homo sapien
gttcaccgccgccaaagaccccaca

SEQ ID NO: 3077993 - DNA, 25 bp, Homo sapien
gcggcaccggatgcgcagcaccgaa

SEQ ID NO: 3077994 - DNA, 25 bp, Homo sapien
gatggtgcccaccactgtcattagg

SEQ ID NO: 3077995 - DNA, 25 bp, Homo sapien
agcaccgaagccaggatgatcacaa

SEQ ID NO: 3077996 - DNA, 25 bp, Homo sapien
ttaggatccacacatcataatctgg

SEQ ID NO: 3077997 - DNA, 25 bp, Homo sapien
taagtgcagggcaaggtctggaggt

SEQ ID NO: 3077998 - DNA, 25 bp, Homo sapien
agctccaggagtctaagggcttttg

SEQ ID NO: 3077999 - DNA, 25 bp, Homo sapien
tccaggagtctaagggcttttggtg

SEQ ID NO: 3078000 - DNA, 25 bp, Homo sapien
acaaagtagggctaagtgcagggca

SEQ ID NO: 3078001 - DNA, 25 bp, Homo sapien
cagatcaacaccactggccaggtca

SEQ ID NO: 3078002 - DNA, 25 bp, Homo sapien
tcagcgtcattaccccagatcaaca

SEQ ID NO: 3078003 - DNA, 25 bp, Homo sapien
gcttctcagcgtcattaccccagat

SEQ ID NO: 3078004 - DNA, 25 bp, Homo sapien
tccttcagctcaatcctcacatggg

SEQ ID NO: 3078005 - DNA, 25 bp, Homo sapien
tgaacacgcaaatgtccctgggtac

SEQ ID NO: 3078006 - DNA, 25 bp, Homo sapien
cttgaacacgcaaatgtccctgggt

SEQ ID NO: 3078007 - DNA, 25 bp, Homo sapien
ttgaacacgcaaatgtccctgggta

SEQ ID NO: 3078008 - DNA, 25 bp, Homo sapien
gctcgatcctcagtgatgtcaaaga

SEQ ID NO: 3078009 - DNA, 25 bp, Homo sapien
agcagctcgatcctcagtgatgtca

SEQ ID NO: 3078010 - DNA, 25 bp, Homo sapien
gcagctcgatcctcagtgatgtcaa

SEQ ID NO: 3078011 - DNA, 25 bp, Homo sapien
cagctcgatcctcagtgatgtcaaa

SEQ ID NO: 3078012 - DNA, 25 bp, Homo sapien
gacgatgctgatgaatccaggctcc

SEQ ID NO: 3078013 - DNA, 25 bp, Homo sapien
cattgcacaggtacagcgggtggga

SEQ ID NO: 3078014 - DNA, 25 bp, Homo sapien
gggcccgtcgaggactctccagctt

SEQ ID NO: 3078015 - DNA, 25 bp, Homo sapien
gattgtcgtcatcactggcattgca

SEQ ID NO: 3078016 - DNA, 25 bp, Homo sapien
gccccaggctaagagaatatccatg

SEQ ID NO: 3078017 - DNA, 25 bp, Homo sapien
ccaagccccaggctaagagaatatc

SEQ ID NO: 3078018 - DNA, 25 bp, Homo sapien
gagaatatccatgtgtgcctgcatc

SEQ ID NO: 3078019 - DNA, 25 bp, Homo sapien
ttcagaatgcccatgggcagtgctg

SEQ ID NO: 3078020 - DNA, 25 bp, Homo sapien
ggaatgatgccgtggaggtggagcc

SEQ ID NO: 3078021 - DNA, 25 bp, Homo sapien
ccatctgctctaagggcagatcctg

SEQ ID NO: 3078022 - DNA, 25 bp, Homo sapien
cctggtcccaggaatgatgccgtgg

SEQ ID NO: 3078023 - DNA, 25 bp, Homo sapien
catctgctctaagggcagatcctgt

SEQ ID NO: 3078024 - DNA, 25 bp, Homo sapien
gtgagtgtcctgaaggcagaagggc

SEQ ID NO: 3078025 - DNA, 25 bp, Homo sapien
aagtgtgagtgtcctgaaggcagaa

SEQ ID NO: 3078026 - DNA, 25 bp, Homo sapien
tgtgagtgtcctgaaggcagaaggg

SEQ ID NO: 3078027 - DNA, 25 bp, Homo sapien
gaggaagtgtgagtgtcctgaaggc

SEQ ID NO: 3078028 - DNA, 25 bp, Homo sapien
gtcaaagtctcagaaccaggagggc

SEQ ID NO: 3078029 - DNA, 25 bp, Homo sapien
ggaggggtcaaagtctcagaaccag

SEQ ID NO: 3078030 - DNA, 25 bp, Homo sapien
ggtcaaagtctcagaaccaggaggg

SEQ ID NO: 3078031 - DNA, 25 bp, Homo sapien
ggggtcaaagtctcagaaccaggag

SEQ ID NO: 3078032 - DNA, 25 bp, Homo sapien
caaatgtctatgcagctaatgggat

SEQ ID NO: 3078033 - DNA, 25 bp, Homo sapien
ggactcagttcagcacctagcaaga

SEQ ID NO: 3078034 - DNA, 25 bp, Homo sapien
aagaaacatatctgtggtggccagc

SEQ ID NO: 3078035 - DNA, 25 bp, Homo sapien
gacttttgtgctactctatgaggag

SEQ ID NO: 3078036 - DNA, 25 bp, Homo sapien
tattgctcgtctttggaatgggaac

SEQ ID NO: 3078037 - DNA, 25 bp, Homo sapien
caagcacgagttgggtcattctgac

SEQ ID NO: 3078038 - DNA, 25 bp, Homo sapien
catgtgaactgtccttcggtggtgt

SEQ ID NO: 3078039 - DNA, 25 bp, Homo sapien
gccaggagttaggacaccactgtct

SEQ ID NO: 3078040 - DNA, 25 bp, Homo sapien
cagtgcaagagtgcgaaatagcttc

SEQ ID NO: 3078041 - DNA, 25 bp, Homo sapien
tatgaagcttgctcggctagtccca

SEQ ID NO: 3078042 - DNA, 25 bp, Homo sapien
gactaccggcagagctacttgagca

SEQ ID NO: 3078043 - DNA, 25 bp, Homo sapien
caaatgggctggctcaatgaaatct

SEQ ID NO: 3078044 - DNA, 25 bp, Homo sapien
ggagcaggttccattgtgtgtccct

SEQ ID NO: 3078045 - DNA, 25 bp, Homo sapien
cctggcttctgagcaagagagatga

SEQ ID NO: 3078046 - DNA, 25 bp, Homo sapien
tgtgcacagagtaccatggctccag

SEQ ID NO: 3078047 - DNA, 25 bp, Homo sapien
taatgtaataactgacggcctctca

SEQ ID NO: 3078048 - DNA, 25 bp, Homo sapien
ctgacttcagagatatgttcctgat

SEQ ID NO: 3078049 - DNA, 25 bp, Homo sapien
gcatggtggtctgacttcagagata

SEQ ID NO: 3078050 - DNA, 25 bp, Homo sapien
tggtctgacttcagagatatgttcc

SEQ ID NO: 3078051 - DNA, 25 bp, Homo sapien
ttaggaactttgcatggtggtctga

SEQ ID NO: 3078052 - DNA, 25 bp, Homo sapien
tccttcatgctcactagatgcagca

SEQ ID NO: 3078053 - DNA, 25 bp, Homo sapien
gaacttgacttttgattccattgtc

SEQ ID NO: 3078054 - DNA, 25 bp, Homo sapien
aacttgacttttgattccattgtct

SEQ ID NO: 3078055 - DNA, 25 bp, Homo sapien
agaacttgacttttgattccattgt

SEQ ID NO: 3078056 - DNA, 25 bp, Homo sapien
gacctgagttcaggccctcagggtg

SEQ ID NO: 3078057 - DNA, 25 bp, Homo sapien
ttctttgatgtccaacaactaagga

SEQ ID NO: 3078058 - DNA, 25 bp, Homo sapien
tctttgcagggcgtgaacagcagga

SEQ ID NO: 3078059 - DNA, 25 bp, Homo sapien
tccaacaactaaggacaaggatctt

SEQ ID NO: 3078060 - DNA, 25 bp, Homo sapien
tgaagtgcaaactagttggaaaccc

SEQ ID NO: 3078061 - DNA, 25 bp, Homo sapien
tgcctcccagattcaagcgattctc

SEQ ID NO: 3078062 - DNA, 25 bp, Homo sapien
gcactaccacacccagctaattttt

SEQ ID NO: 3078063 - DNA, 25 bp, Homo sapien
tcttggctcactacaacctctgcct

SEQ ID NO: 3078064 - DNA, 25 bp, Homo sapien
gtcacccaggcagaaatacagtggc

SEQ ID NO: 3078065 - DNA, 25 bp, Homo sapien
gccatagcattcaagcttgactgaa

SEQ ID NO: 3078066 - DNA, 25 bp, Homo sapien
cacacgtggtgtaaggccagccata

SEQ ID NO: 3078067 - DNA, 25 bp, Homo sapien
gctgctgaccattaaaatcaacctt

SEQ ID NO: 3078068 - DNA, 25 bp, Homo sapien
ttagcaatagggtgccacacgtggt

SEQ ID NO: 3078069 - DNA, 25 bp, Homo sapien
ctggagttatttcagcaacaccagc

SEQ ID NO: 3078070 - DNA, 25 bp, Homo sapien
tccttctgctggagttatttcagca

SEQ ID NO: 3078071 - DNA, 25 bp, Homo sapien
aattttccttctgctggagttattt

SEQ ID NO: 3078072 - DNA, 25 bp, Homo sapien
tctgctggagttatttcagcaacac

SEQ ID NO: 3078073 - DNA, 25 bp, Homo sapien
gtcctgtgcgtccaaagcctgcctg

SEQ ID NO: 3078074 - DNA, 25 bp, Homo sapien
tcactctgataatagctttctgttc

SEQ ID NO: 3078075 - DNA, 25 bp, Homo sapien
tgccagtaccagtcctgtgcgtcca

SEQ ID NO: 3078076 - DNA, 25 bp, Homo sapien
gctgatctttcagactccaccgctg

SEQ ID NO: 3078077 - DNA, 25 bp, Homo sapien
aaagaacatttatgcttccgtttca

SEQ ID NO: 3078078 - DNA, 25 bp, Homo sapien
tacatactgcttccactagctaata

SEQ ID NO: 3078079 - DNA, 25 bp, Homo sapien
tgcagcaatgcacttcaaccataca

SEQ ID NO: 3078080 - DNA, 25 bp, Homo sapien
ttatgcttccgtttcagaaagccaa

SEQ ID NO: 3078081 - DNA, 25 bp, Homo sapien
cttccatatgcatcaagttgccagg

SEQ ID NO: 3078082 - DNA, 25 bp, Homo sapien
ccaactttgcttgtgattgaatgtc

SEQ ID NO: 3078083 - DNA, 25 bp, Homo sapien
tattatgtcagatcacttggcattg

SEQ ID NO: 3078084 - DNA, 25 bp, Homo sapien
cactgtgactagtaaagatctcacc

SEQ ID NO: 3078085 - DNA, 25 bp, Homo sapien
tcaggccacacgttgatgtccaaag

SEQ ID NO: 3078086 - DNA, 25 bp, Homo sapien
gccatgcatcaaaggtgagcgtgaa

SEQ ID NO: 3078087 - DNA, 25 bp, Homo sapien
cagggaggcgattaaccacaggctc

SEQ ID NO: 3078088 - DNA, 25 bp, Homo sapien
tttattctccagctcggaaatgccg

SEQ ID NO: 3078089 - DNA, 25 bp, Homo sapien
tgtcgggcccactggaatccacggg

SEQ ID NO: 3078090 - DNA, 25 bp, Homo sapien
caagtgccccatactacaggtaggt

SEQ ID NO: 3078091 - DNA, 25 bp, Homo sapien
ttactctgcaaccaaaccaagtgcc

SEQ ID NO: 3078092 - DNA, 25 bp, Homo sapien
caggtaggtgccgagaaattccgca

SEQ ID NO: 3078093 - DNA, 25 bp, Homo sapien
ggatgagagatgctgtcccctagaa

SEQ ID NO: 3078094 - DNA, 25 bp, Homo sapien
cagaaatttactccgggatgagaga

SEQ ID NO: 3078095 - DNA, 25 bp, Homo sapien
tgctgtcccctagaactaaattaaa

SEQ ID NO: 3078096 - DNA, 25 bp, Homo sapien
ataatccatgcaggtcaaaggcaga

SEQ ID NO: 3078097 - DNA, 25 bp, Homo sapien
tatctctgaatcatggatggacttg

SEQ ID NO: 3078098 - DNA, 25 bp, Homo sapien
gaagcaaagtagcaaatacatcaac

SEQ ID NO: 3078099 - DNA, 25 bp, Homo sapien
gaaggattccgagtgcttcctttca

SEQ ID NO: 3078100 - DNA, 25 bp, Homo sapien
gacaattctggatcaactccctaga

SEQ ID NO: 3078101 - DNA, 25 bp, Homo sapien
gaccctactggctaattcacaggaa

SEQ ID NO: 3078102 - DNA, 25 bp, Homo sapien
tacaaggcgtgtaaggatagcagga

SEQ ID NO: 3078103 - DNA, 25 bp, Homo sapien
aatactgaggtactagtcaggaacc

SEQ ID NO: 3078104 - DNA, 25 bp, Homo sapien
tgcttaaggtgctgaaatactgagg

SEQ ID NO: 3078105 - DNA, 25 bp, Homo sapien
gttacatccacaacggctagcatag

SEQ ID NO: 3078106 - DNA, 25 bp, Homo sapien
gataatctgaactgaaccactgtag

SEQ ID NO: 3078107 - DNA, 25 bp, Homo sapien
tgaattccccactaaagttgtgctg

SEQ ID NO: 3078108 - DNA, 25 bp, Homo sapien
cagctacagctagtgcacaatgtca

SEQ ID NO: 3078109 - DNA, 25 bp, Homo sapien
ctgcttgcaggccacgtccaccagc

SEQ ID NO: 3078110 - DNA, 25 bp, Homo sapien
tcctcctttggaaagcgctcctgct

SEQ ID NO: 3078111 - DNA, 25 bp, Homo sapien
gccacgtccaccagcagatgaagat

SEQ ID NO: 3078112 - DNA, 25 bp, Homo sapien
tcctttggaaagcgctcctgcttgc

SEQ ID NO: 3078113 - DNA, 25 bp, Homo sapien
ttctagagcaacatgaccagggagc

SEQ ID NO: 3078114 - DNA, 25 bp, Homo sapien
gcaaattaggtactaggttctgtaa

SEQ ID NO: 3078115 - DNA, 25 bp, Homo sapien
gctaaaacgtctatagaggaacaca

SEQ ID NO: 3078116 - DNA, 25 bp, Homo sapien
taatgtgcttacaacttctagagca

SEQ ID NO: 3078117 - DNA, 25 bp, Homo sapien
ggaagccaacatcaattaagactca

SEQ ID NO: 3078118 - DNA, 25 bp, Homo sapien
tgtcataatgatgccaagatttcac

SEQ ID NO: 3078119 - DNA, 25 bp, Homo sapien
cacttataaccataacatgtagtga

SEQ ID NO: 3078120 - DNA, 25 bp, Homo sapien
attaagactcatctattaactgcac

SEQ ID NO: 3078121 - DNA, 25 bp, Homo sapien
catttctacaggagagattcccagg

SEQ ID NO: 3078122 - DNA, 25 bp, Homo sapien
caattgtcctttatagggctatacg

SEQ ID NO: 3078123 - DNA, 25 bp, Homo sapien
aatgtatctggttccccactgtcag

SEQ ID NO: 3078124 - DNA, 25 bp, Homo sapien
gattcccaggagtagagttcctgag

SEQ ID NO: 3078125 - DNA, 25 bp, Homo sapien
tatttcttgacacattcagcaaagc

SEQ ID NO: 3078126 - DNA, 25 bp, Homo sapien
ctatttcttgacacattcagcaaag

SEQ ID NO: 3078127 - DNA, 25 bp, Homo sapien
atttcttgacacattcagcaaagcc

SEQ ID NO: 3078128 - DNA, 25 bp, Homo sapien
gccttgtatttgaggctacttttac

SEQ ID NO: 3078129 - DNA, 25 bp, Homo sapien
cagagagtaagccttgtatttgagg

SEQ ID NO: 3078130 - DNA, 25 bp, Homo sapien
tccagagagtaagccttgtatttga

SEQ ID NO: 3078131 - DNA, 25 bp, Homo sapien
gagtaagccttgtatttgaggctac

SEQ ID NO: 3078132 - DNA, 25 bp, Homo sapien
tgagaggctgagctttgccttttgg

SEQ ID NO: 3078133 - DNA, 25 bp, Homo sapien
tctgtaggagattgagaggctgagc

SEQ ID NO: 3078134 - DNA, 25 bp, Homo sapien
atctgtaggagattgagaggctgag

SEQ ID NO: 3078135 - DNA, 25 bp, Homo sapien
ctgtaggagattgagaggctgagct

SEQ ID NO: 3078136 - DNA, 25 bp, Homo sapien
tattctcacgtgaactggtctggca

SEQ ID NO: 3078137 - DNA, 25 bp, Homo sapien
ttcactaggcttgctagcaggcccc

SEQ ID NO: 3078138 - DNA, 25 bp, Homo sapien
tggctggagtggctaaacctgtgtc

SEQ ID NO: 3078139 - DNA, 25 bp, Homo sapien
aggaatcccatctgttctgacggca

SEQ ID NO: 3078140 - DNA, 25 bp, Homo sapien
aattcaactggataggaggactgca

SEQ ID NO: 3078141 - DNA, 25 bp, Homo sapien
cagtagtactgcagggccaattgga

SEQ ID NO: 3078142 - DNA, 25 bp, Homo sapien
gagtaagtggctccagctggctagc

SEQ ID NO: 3078143 - DNA, 25 bp, Homo sapien
ggctagcctgacttgcagaacatgg

SEQ ID NO: 3078144 - DNA, 25 bp, Homo sapien
tgcagtgtgcataggaagaggcatt

SEQ ID NO: 3078145 - DNA, 25 bp, Homo sapien
aggcattgggagtgacacaactact

SEQ ID NO: 3078146 - DNA, 25 bp, Homo sapien
ttgcagtgtgcataggaagaggcat

SEQ ID NO: 3078147 - DNA, 25 bp, Homo sapien
gtgacacaactacttagagcatcca

SEQ ID NO: 3078148 - DNA, 25 bp, Homo sapien
gtaggagaacagcactgtagcacag

SEQ ID NO: 3078149 - DNA, 25 bp, Homo sapien
tgggtaggagaacagcactgtagca

SEQ ID NO: 3078150 - DNA, 25 bp, Homo sapien
gtgggtaggagaacagcactgtagc

SEQ ID NO: 3078151 - DNA, 25 bp, Homo sapien
ggtaggagaacagcactgtagcaca

SEQ ID NO: 3078152 - DNA, 25 bp, Homo sapien
tgacaaatgttgttatccaaaaatg

SEQ ID NO: 3078153 - DNA, 25 bp, Homo sapien
tgaacgctttgtcaaatccattcca

SEQ ID NO: 3078154 - DNA, 25 bp, Homo sapien
ttgaacgctttgtcaaatccattcc

SEQ ID NO: 3078155 - DNA, 25 bp, Homo sapien
tccaaaaatgtgggattttggcgat

SEQ ID NO: 3078156 - DNA, 25 bp, Homo sapien
ggcggagtttgttatatttctgttc

SEQ ID NO: 3078157 - DNA, 25 bp, Homo sapien
aaatggttggcggagtttgttatat

SEQ ID NO: 3078158 - DNA, 25 bp, Homo sapien
ggagtttgttatatttctgttctac

SEQ ID NO: 3078159 - DNA, 25 bp, Homo sapien
tggcggagtttgttatatttctgtt

SEQ ID NO: 3078160 - DNA, 25 bp, Homo sapien
ggacgcccatgtggcacggttggga

SEQ ID NO: 3078161 - DNA, 25 bp, Homo sapien
cgcccatgtggcacggttgggagac

SEQ ID NO: 3078162 - DNA, 25 bp, Homo sapien
ttactgattttggcagcggacgccc

SEQ ID NO: 3078163 - DNA, 25 bp, Homo sapien
ctgattttggcagcggacgcccatg

SEQ ID NO: 3078164 - DNA, 25 bp, Homo sapien
cctgacgacaggtatgggctaggga

SEQ ID NO: 3078165 - DNA, 25 bp, Homo sapien
gacaggtatgggctagggatatata

SEQ ID NO: 3078166 - DNA, 25 bp, Homo sapien
cctcacggcacacgcgcgggcgctt

SEQ ID NO: 3078167 - DNA, 25 bp, Homo sapien
cctcgcggcctgacgacaggtatgg

SEQ ID NO: 3078168 - DNA, 25 bp, Homo sapien
ctgttggatagtaggcttgcgagta

SEQ ID NO: 3078169 - DNA, 25 bp, Homo sapien
gctgagggtgtgtagttactgtatt

SEQ ID NO: 3078170 - DNA, 25 bp, Homo sapien
tagtaggcttgcgagtactgtgctg

SEQ ID NO: 3078171 - DNA, 25 bp, Homo sapien
actgtgctgagggtgtgtagttact

SEQ ID NO: 3078172 - DNA, 25 bp, Homo sapien
gttgaacatgtacagatgtggtgct

SEQ ID NO: 3078173 - DNA, 25 bp, Homo sapien
ttgaacatgtacagatgtggtgctg

SEQ ID NO: 3078174 - DNA, 25 bp, Homo sapien
tggaaacctctggagtacaggaaac

SEQ ID NO: 3078175 - DNA, 25 bp, Homo sapien
ctcagttggaaacctctggagtaca

SEQ ID NO: 3078176 - DNA, 25 bp, Homo sapien
gttggaaacctctggagtacaggaa

SEQ ID NO: 3078177 - DNA, 25 bp, Homo sapien
cagttggaaacctctggagtacagg

SEQ ID NO: 3078178 - DNA, 25 bp, Homo sapien
gatgcattccaagggagttctgcca

SEQ ID NO: 3078179 - DNA, 25 bp, Homo sapien
ctgaaaatgtgggagatgtctccac

SEQ ID NO: 3078180 - DNA, 25 bp, Homo sapien
tccgatctaaacctttcagagggta

SEQ ID NO: 3078181 - DNA, 25 bp, Homo sapien
gaaatgaccggtgaaattgtcctac

SEQ ID NO: 3078182 - DNA, 25 bp, Homo sapien
gaccgccagtctcgggaagcacagc

SEQ ID NO: 3078183 - DNA, 25 bp, Homo sapien
tggtgccgctgagaacggcggcggt

SEQ ID NO: 3078184 - DNA, 25 bp, Homo sapien
gtgaggacgtgcgaaaatgcgccct

SEQ ID NO: 3078185 - DNA, 25 bp, Homo sapien
ctttccgacgcccatagcgtgagga

SEQ ID NO: 3078186 - DNA, 25 bp, Homo sapien
ctggaagcggttgggcgggcggcag

SEQ ID NO: 3078187 - DNA, 25 bp, Homo sapien
tggtgctgcagtggcgcggtggcgg

SEQ ID NO: 3078188 - DNA, 25 bp, Homo sapien
ctggtgctgcagtggcgcggtggcg

SEQ ID NO: 3078189 - DNA, 25 bp, Homo sapien
gaggtgatgagcagccgctggaagc

SEQ ID NO: 3078190 - DNA, 25 bp, Homo sapien
gcgcttgaggtgcacgagcagctgt

SEQ ID NO: 3078191 - DNA, 25 bp, Homo sapien
ttgttggcgctggtgaggcgcttga

SEQ ID NO: 3078192 - DNA, 25 bp, Homo sapien
gagcggcccattgcctgccggtttg

SEQ ID NO: 3078193 - DNA, 25 bp, Homo sapien
gcagctgtggctggtcgcggcggaa

SEQ ID NO: 3078194 - DNA, 25 bp, Homo sapien
cttgcggaagccgtagaggttgagc

SEQ ID NO: 3078195 - DNA, 25 bp, Homo sapien
gctggcggatgaagctggtgaagct

SEQ ID NO: 3078196 - DNA, 25 bp, Homo sapien
cggaagccgtagaggttgagctggc

SEQ ID NO: 3078197 - DNA, 25 bp, Homo sapien
tagaggttgagctggcggatgaagc

SEQ ID NO: 3078198 - DNA, 25 bp, Homo sapien
ggctgatcgataagcagcccctcgc

SEQ ID NO: 3078199 - DNA, 25 bp, Homo sapien
cccagcggatggagcggtagcgcgg

SEQ ID NO: 3078200 - DNA, 25 bp, Homo sapien
gatggagcggtagcgcgggctgttc

SEQ ID NO: 3078201 - DNA, 25 bp, Homo sapien
cagctcggcctcgaagagcggctga

SEQ ID NO: 3078202 - DNA, 25 bp, Homo sapien
cctccccggccttcgcctcgccctg

SEQ ID NO: 3078203 - DNA, 25 bp, Homo sapien
ccgagcctagctctcccacaccgtt

SEQ ID NO: 3078204 - DNA, 25 bp, Homo sapien
cagcgcctccatcgccccgccgggc

SEQ ID NO: 3078205 - DNA, 25 bp, Homo sapien
cacaccgttctcgatccctccccgg

SEQ ID NO: 3078206 - DNA, 25 bp, Homo sapien
tgtttgtcacaacgcaactgcacag

SEQ ID NO: 3078207 - DNA, 25 bp, Homo sapien
tccaaggccatgcagtttgttcact

SEQ ID NO: 3078208 - DNA, 25 bp, Homo sapien
ggtttcattataggccaaggagact

SEQ ID NO: 3078209 - DNA, 25 bp, Homo sapien
tcttactccccttgaaaacaggcag

SEQ ID NO: 3078210 - DNA, 25 bp, Homo sapien
tgccaggaccgaacatcagcagagt

SEQ ID NO: 3078211 - DNA, 25 bp, Homo sapien
cactgtgtaacagagacgactgcct

SEQ ID NO: 3078212 - DNA, 25 bp, Homo sapien
caaagagtagggcacaatcagcaga

SEQ ID NO: 3078213 - DNA, 25 bp, Homo sapien
taagaagcaatgtgacccagaggag

SEQ ID NO: 3078214 - DNA, 25 bp, Homo sapien
taatctgcttttgtcaaggtggagg

SEQ ID NO: 3078215 - DNA, 25 bp, Homo sapien
gggcactttgcaccaggcaacatct

SEQ ID NO: 3078216 - DNA, 25 bp, Homo sapien
gatgggtctggttatcacttggagt

SEQ ID NO: 3078217 - DNA, 25 bp, Homo sapien
gagtttggttatacatatgcctttc

SEQ ID NO: 3078218 - DNA, 25 bp, Homo sapien
tgctaaaattggacaggtttctccc

SEQ ID NO: 3078219 - DNA, 25 bp, Homo sapien
tcatgataccaaggaggatttctca

SEQ ID NO: 3078220 - DNA, 25 bp, Homo sapien
tagaggacctcctgctaaattgcaa

SEQ ID NO: 3078221 - DNA, 25 bp, Homo sapien
gatttcatgagccacaccaaggaac

SEQ ID NO: 3078222 - DNA, 25 bp, Homo sapien
tgttggctcatgagttccctggcac

SEQ ID NO: 3078223 - DNA, 25 bp, Homo sapien
aagctgtagcaatgggtttcttcag

SEQ ID NO: 3078224 - DNA, 25 bp, Homo sapien
tccctggcacgagagacttgaatgt

SEQ ID NO: 3078225 - DNA, 25 bp, Homo sapien
tgaatgtgttcgtaacatgagttac

SEQ ID NO: 3078226 - DNA, 25 bp, Homo sapien
tcacagtcacagttatagcagtgtg

SEQ ID NO: 3078227 - DNA, 25 bp, Homo sapien
tagcagtgtgatgccatatggtctg

SEQ ID NO: 3078228 - DNA, 25 bp, Homo sapien
ggtgtcttcgtttggccaaccagaa

SEQ ID NO: 3078229 - DNA, 25 bp, Homo sapien
tatggtctggaacccagcgagtcac

SEQ ID NO: 3078230 - DNA, 25 bp, Homo sapien
tcatctctggaaaatatgatgactc

SEQ ID NO: 3078231 - DNA, 25 bp, Homo sapien
tctctggaaaatatgatgactcact

SEQ ID NO: 3078232 - DNA, 25 bp, Homo sapien
tacccaccacatatgtgcctaaaca

SEQ ID NO: 3078233 - DNA, 25 bp, Homo sapien
tgactcactggctcacgtaagtacc

SEQ ID NO: 3078234 - DNA, 25 bp, Homo sapien
gtctctttcttatcaacaggttccc

SEQ ID NO: 3078235 - DNA, 25 bp, Homo sapien
ctctttcttatcaacaggttcccag

SEQ ID NO: 3078236 - DNA, 25 bp, Homo sapien
tctttcttatcaacaggttcccagc

SEQ ID NO: 3078237 - DNA, 25 bp, Homo sapien
tctctttcttatcaacaggttccca

SEQ ID NO: 3078238 - DNA, 25 bp, Homo sapien
gactcttgttatgttctaaaccagg

SEQ ID NO: 3078239 - DNA, 25 bp, Homo sapien
tgctaagtgcattacacacatgaac

SEQ ID NO: 3078240 - DNA, 25 bp, Homo sapien
cgcttactgtttaccatgtgtcagg

SEQ ID NO: 3078241 - DNA, 25 bp, Homo sapien
tcttaccgatatgctacaccacagc

SEQ ID NO: 3078242 - DNA, 25 bp, Homo sapien
tccagcctcatctgaagctcacgca

SEQ ID NO: 3078243 - DNA, 25 bp, Homo sapien
cagtgacggatgtccagcctcatct

SEQ ID NO: 3078244 - DNA, 25 bp, Homo sapien
catcctcatagtccatggggggctc

SEQ ID NO: 3078245 - DNA, 25 bp, Homo sapien
ggcacagcagtgacggatgtccagc

SEQ ID NO: 3078246 - DNA, 25 bp, Homo sapien
tcagatccggcacagaactcagttg

SEQ ID NO: 3078247 - DNA, 25 bp, Homo sapien
tccattggaatgactagaacagaca

SEQ ID NO: 3078248 - DNA, 25 bp, Homo sapien
ggagatacttgccacagaccctgag

SEQ ID NO: 3078249 - DNA, 25 bp, Homo sapien
gctttggatgactggacaaccacat

SEQ ID NO: 3078250 - DNA, 25 bp, Homo sapien
cactcggtgggttgcaaacggtgct

SEQ ID NO: 3078251 - DNA, 25 bp, Homo sapien
tttcaggacaatgttcaggtggctc

SEQ ID NO: 3078252 - DNA, 25 bp, Homo sapien
gggcacacctagcatggagtctggc

SEQ ID NO: 3078253 - DNA, 25 bp, Homo sapien
aagaacacacttggagggcacacct

SEQ ID NO: 3078254 - DNA, 25 bp, Homo sapien
tcccgaggcactgcggtattaagca

SEQ ID NO: 3078255 - DNA, 25 bp, Homo sapien
gatccctcaggattgctgtgccagg

SEQ ID NO: 3078256 - DNA, 25 bp, Homo sapien
gaggtgttgctcttcatttcccgag

SEQ ID NO: 3078257 - DNA, 25 bp, Homo sapien
tagggtcactggatgtacgagtcag

SEQ ID NO: 3078258 - DNA, 25 bp, Homo sapien
cagttcagcctatgcggaaaaattc

SEQ ID NO: 3078259 - DNA, 25 bp, Homo sapien
tggagtcccataggcagggttcaaa

SEQ ID NO: 3078260 - DNA, 25 bp, Homo sapien
ccaaaggcagttacaacgcagctta

SEQ ID NO: 3078261 - DNA, 25 bp, Homo sapien
taatgcagttcaaagtccttagagc

SEQ ID NO: 3078262 - DNA, 25 bp, Homo sapien
cccaagtgtgcatggagatgatgct

SEQ ID NO: 3078263 - DNA, 25 bp, Homo sapien
gataaacagctgtccagaggtgcag

SEQ ID NO: 3078264 - DNA, 25 bp, Homo sapien
cccggacatgacaaacaggatgcag

SEQ ID NO: 3078265 - DNA, 25 bp, Homo sapien
gagagcggccagagaactcctggct

SEQ ID NO: 3078266 - DNA, 25 bp, Homo sapien
tgttgcgcttctctcgctcacaggg

SEQ ID NO: 3078267 - DNA, 25 bp, Homo sapien
agtttttattgccagctcgaaggag

SEQ ID NO: 3078268 - DNA, 25 bp, Homo sapien
cacacagagcaggtccgcttgtaga

SEQ ID NO: 3078269 - DNA, 25 bp, Homo sapien
tgtgtagaggaagttatgaaagttt

SEQ ID NO: 3078270 - DNA, 25 bp, Homo sapien
cttggtggccacagcgatctccaaa

SEQ ID NO: 3078271 - DNA, 25 bp, Homo sapien
cttgtgcccaaaatccagccagtca

SEQ ID NO: 3078272 - DNA, 25 bp, Homo sapien
tgcttaagcaactgatgaacagaat

SEQ ID NO: 3078273 - DNA, 25 bp, Homo sapien
tgttcgttttggtcctccacattct

SEQ ID NO: 3078274 - DNA, 25 bp, Homo sapien
gccaccaatgtcctctactgaaaga

SEQ ID NO: 3078275 - DNA, 25 bp, Homo sapien
aggacagatccagagggctcaacac

SEQ ID NO: 3078276 - DNA, 25 bp, Homo sapien
gaaaaataggactggacctagaaga

SEQ ID NO: 3078277 - DNA, 25 bp, Homo sapien
gactcaaagccaccaattttccaag

SEQ ID NO: 3078278 - DNA, 25 bp, Homo sapien
ccaacgtcctgtaatatgggtccag

SEQ ID NO: 3078279 - DNA, 25 bp, Homo sapien
catttggtactctccagtgccgaca

SEQ ID NO: 3078280 - DNA, 25 bp, Homo sapien
tgagcagtgtaccagcacaggccgg

SEQ ID NO: 3078281 - DNA, 25 bp, Homo sapien
gcacagctgcttttagcatcaccga

SEQ ID NO: 3078282 - DNA, 25 bp, Homo sapien
ctaggatccggcatctggctacaca

SEQ ID NO: 3078283 - DNA, 25 bp, Homo sapien
cacacagcccggaggtactgaaagc

SEQ ID NO: 3078284 - DNA, 25 bp, Homo sapien
tactgaaagctgttccggatggcat

SEQ ID NO: 3078285 - DNA, 25 bp, Homo sapien
catgaacacgacctcacagttggga

SEQ ID NO: 3078286 - DNA, 25 bp, Homo sapien
tgcagacactgggataacagcaata

SEQ ID NO: 3078287 - DNA, 25 bp, Homo sapien
ctgcagacactgggataacagcaat

SEQ ID NO: 3078288 - DNA, 25 bp, Homo sapien
gcagacactgggataacagcaatac

SEQ ID NO: 3078289 - DNA, 25 bp, Homo sapien
cgcatccaggatcagcagcttttga

SEQ ID NO: 3078290 - DNA, 25 bp, Homo sapien
ccagagcacgcagtcagagaagaat

SEQ ID NO: 3078291 - DNA, 25 bp, Homo sapien
cactccagagcacgcagtcagagaa

SEQ ID NO: 3078292 - DNA, 25 bp, Homo sapien
gccactgctgccgtgtaggatcgcg

SEQ ID NO: 3078293 - DNA, 25 bp, Homo sapien
acacgcctcgctggtatcattattc

SEQ ID NO: 3078294 - DNA, 25 bp, Homo sapien
tcacacgcctcgctggtatcattat

SEQ ID NO: 3078295 - DNA, 25 bp, Homo sapien
agcatcacacgcctcgctggtatca

SEQ ID NO: 3078296 - DNA, 25 bp, Homo sapien
catcacacgcctcgctggtatcatt

SEQ ID NO: 3078297 - DNA, 25 bp, Homo sapien
gcaatggacgtgaccaggtactcat

SEQ ID NO: 3078298 - DNA, 25 bp, Homo sapien
ctttagcaatggacgtgaccaggta

SEQ ID NO: 3078299 - DNA, 25 bp, Homo sapien
aatggacgtgaccaggtactcatca

SEQ ID NO: 3078300 - DNA, 25 bp, Homo sapien
tagcaatggacgtgaccaggtactc

SEQ ID NO: 3078301 - DNA, 25 bp, Homo sapien
tctcagtcaaccaggttacccaaaa

SEQ ID NO: 3078302 - DNA, 25 bp, Homo sapien
agttatttcatacttccccatagag

SEQ ID NO: 3078303 - DNA, 25 bp, Homo sapien
gaatgaataaactccctaatagcct

SEQ ID NO: 3078304 - DNA, 25 bp, Homo sapien
catagagtgtcaattctcagtcaac

SEQ ID NO: 3078305 - DNA, 25 bp, Homo sapien
ctatacacaaccacgggaatccgct

SEQ ID NO: 3078306 - DNA, 25 bp, Homo sapien
tttgtcagtgatccacacaggaacc

SEQ ID NO: 3078307 - DNA, 25 bp, Homo sapien
gcggaaggaagccacgttctccagc

SEQ ID NO: 3078308 - DNA, 25 bp, Homo sapien
gaatccgcttccaggagcggaagga

SEQ ID NO: 3078309 - DNA, 25 bp, Homo sapien
ccaaacacggaagtagtttggtgtg

SEQ ID NO: 3078310 - DNA, 25 bp, Homo sapien
atccaaacacggaagtagtttggtg

SEQ ID NO: 3078311 - DNA, 25 bp, Homo sapien
cactttatccaaacacggaagtagt

SEQ ID NO: 3078312 - DNA, 25 bp, Homo sapien
ccacactttatccaaacacggaagt

SEQ ID NO: 3078313 - DNA, 25 bp, Homo sapien
tccgcctcctgtcgacaacgtatgt

SEQ ID NO: 3078314 - DNA, 25 bp, Homo sapien
tgtagttgctgttgatgtgtgagac

SEQ ID NO: 3078315 - DNA, 25 bp, Homo sapien
tcctgtcgacaacgtatgtgctcac

SEQ ID NO: 3078316 - DNA, 25 bp, Homo sapien
ctctccagacgttctgcaggtcaaa

SEQ ID NO: 3078317 - DNA, 25 bp, Homo sapien
tgcaacagagcccccacgatggtta

SEQ ID NO: 3078318 - DNA, 25 bp, Homo sapien
gcaacagagcccccacgatggttag

SEQ ID NO: 3078319 - DNA, 25 bp, Homo sapien
ctgcaacagagcccccacgatggtt

SEQ ID NO: 3078320 - DNA, 25 bp, Homo sapien
gccactcttggcactgcttaaaagt

SEQ ID NO: 3078321 - DNA, 25 bp, Homo sapien
gcaggtcttgctgtggctcggctta

SEQ ID NO: 3078322 - DNA, 25 bp, Homo sapien
gcttagccgtgagagccactcttgg

SEQ ID NO: 3078323 - DNA, 25 bp, Homo sapien
ccaggcatggtaggcaaaggcaaag

SEQ ID NO: 3078324 - DNA, 25 bp, Homo sapien
gctatcagggccaaaaacacagcca

SEQ ID NO: 3078325 - DNA, 25 bp, Homo sapien
tgcagttgtgccatggggctatcag

SEQ ID NO: 3078326 - DNA, 25 bp, Homo sapien
ggagagaaggctgcaaagcaagagg

SEQ ID NO: 3078327 - DNA, 25 bp, Homo sapien
acaggcctaggtgaggcaaagtgca

SEQ ID NO: 3078328 - DNA, 25 bp, Homo sapien
tcttccagcagctagagtttagcct

SEQ ID NO: 3078329 - DNA, 25 bp, Homo sapien
aatcctcacaaatcagtcccctgag

SEQ ID NO: 3078330 - DNA, 25 bp, Homo sapien
tctcatctgggtaactgcaatagct

SEQ ID NO: 3078331 - DNA, 25 bp, Homo sapien
ttttcccatagcatattgccacatg

SEQ ID NO: 3078332 - DNA, 25 bp, Homo sapien
tatgggtcagtaaactgacctccca

SEQ ID NO: 3078333 - DNA, 25 bp, Homo sapien
cagagaactggacaagactagggcc

SEQ ID NO: 3078334 - DNA, 25 bp, Homo sapien
cctgagtgaggctccgttgttctca

SEQ ID NO: 3078335 - DNA, 25 bp, Homo sapien
tcaggtcaagatcctatgggtcagt

SEQ ID NO: 3078336 - DNA, 25 bp, Homo sapien
agtccttgcaggaaatgtgcaactg

SEQ ID NO: 3078337 - DNA, 25 bp, Homo sapien
gcaactggaacatatcacggctctc

SEQ ID NO: 3078338 - DNA, 25 bp, Homo sapien
cactgtcaatcatccggagggggac

SEQ ID NO: 3078339 - DNA, 25 bp, Homo sapien
tatcacggctctccacactgtcaat

SEQ ID NO: 3078340 - DNA, 25 bp, Homo sapien
tatgcagccggtagttagagatggc

SEQ ID NO: 3078341 - DNA, 25 bp, Homo sapien
aggaactctactccctcaccctgca

SEQ ID NO: 3078342 - DNA, 25 bp, Homo sapien
gagtccttgaatttgatatgcagcc

SEQ ID NO: 3078343 - DNA, 25 bp, Homo sapien
caatgagggcatcggctgcccggcc

SEQ ID NO: 3078344 - DNA, 25 bp, Homo sapien
gagagttctctccacggtaacagca

SEQ ID NO: 3078345 - DNA, 25 bp, Homo sapien
ggtaacagcaccaggcaacagctgt

SEQ ID NO: 3078346 - DNA, 25 bp, Homo sapien
aagccagagctctggtaccagatgc

SEQ ID NO: 3078347 - DNA, 25 bp, Homo sapien
tctacagcccctgatctgtgggatc

SEQ ID NO: 3078348 - DNA, 25 bp, Homo sapien
cttcctccttcactagttccttggg

SEQ ID NO: 3078349 - DNA, 25 bp, Homo sapien
tccttggcttggatgtactccaggc

SEQ ID NO: 3078350 - DNA, 25 bp, Homo sapien
tgggggggaacagatccttggcttg

SEQ ID NO: 3078351 - DNA, 25 bp, Homo sapien
ttggcttggatgtactccaggctgg

SEQ ID NO: 3078352 - DNA, 25 bp, Homo sapien
gaggaccgggaatgatgcagaggta

SEQ ID NO: 3078353 - DNA, 25 bp, Homo sapien
gaggggaggaccgggaatgatgcag

SEQ ID NO: 3078354 - DNA, 25 bp, Homo sapien
ggggaggaccgggaatgatgcagag

SEQ ID NO: 3078355 - DNA, 25 bp, Homo sapien
aggaggggaggaccgggaatgatgc

SEQ ID NO: 3078356 - DNA, 25 bp, Homo sapien
aacatcccattcagcctactagcca

SEQ ID NO: 3078357 - DNA, 25 bp, Homo sapien
tcccattcagcctactagccacatc

SEQ ID NO: 3078358 - DNA, 25 bp, Homo sapien
ctcctaacatcccattcagcctact

SEQ ID NO: 3078359 - DNA, 25 bp, Homo sapien
ccattcagcctactagccacatccc

SEQ ID NO: 3078360 - DNA, 25 bp, Homo sapien
tggagcaggagacgcgggcggtcag

SEQ ID NO: 3078361 - DNA, 25 bp, Homo sapien
aggagacgcgggcggtcaggctcat

SEQ ID NO: 3078362 - DNA, 25 bp, Homo sapien
agcatggagcaggagacgcgggcgg

SEQ ID NO: 3078363 - DNA, 25 bp, Homo sapien
catggagcaggagacgcgggcggtc

SEQ ID NO: 3078364 - DNA, 25 bp, Homo sapien
acatgtccccggagccgctgcgctg

SEQ ID NO: 3078365 - DNA, 25 bp, Homo sapien
tgggccagcgcacatgtccccggag

SEQ ID NO: 3078366 - DNA, 25 bp, Homo sapien
cacatgtccccggagccgctgcgct

SEQ ID NO: 3078367 - DNA, 25 bp, Homo sapien
ggcggtctgggccagcgcacatgtc

SEQ ID NO: 3078368 - DNA, 25 bp, Homo sapien
gccaagaggctagggcgctggtggc

SEQ ID NO: 3078369 - DNA, 25 bp, Homo sapien
cggcggccaagaggctagggcgctg

SEQ ID NO: 3078370 - DNA, 25 bp, Homo sapien
tgcggggctcgccaggtgcagccgc

SEQ ID NO: 3078371 - DNA, 25 bp, Homo sapien
ggctcgccaggtgcagccgcggcgg

SEQ ID NO: 3078372 - DNA, 25 bp, Homo sapien
tccttcaatcccgtgacttcgttaa

SEQ ID NO: 3078373 - DNA, 25 bp, Homo sapien
ctttccccttagaatggtgccaggt

SEQ ID NO: 3078374 - DNA, 25 bp, Homo sapien
ggtgccaggttagtcattccacgct

SEQ ID NO: 3078375 - DNA, 25 bp, Homo sapien
tcagggtccttcaatcccgtgactt

SEQ ID NO: 3078376 - DNA, 25 bp, Homo sapien
tcactcctgatatagcatccacaat

SEQ ID NO: 3078377 - DNA, 25 bp, Homo sapien
agagaagccccacagttttggtgga

SEQ ID NO: 3078378 - DNA, 25 bp, Homo sapien
tccacaatattcaaaggacccacca

SEQ ID NO: 3078379 - DNA, 25 bp, Homo sapien
aaggacccaccagaagtccaaagat

SEQ ID NO: 3078380 - DNA, 25 bp, Homo sapien
ataaagaaggcccagcttttcagac

SEQ ID NO: 3078381 - DNA, 25 bp, Homo sapien
cttgagataaagaaggcccagcttt

SEQ ID NO: 3078382 - DNA, 25 bp, Homo sapien
aagaaggcccagcttttcagaccag

SEQ ID NO: 3078383 - DNA, 25 bp, Homo sapien
gaaggcccagcttttcagaccagaa

SEQ ID NO: 3078384 - DNA, 25 bp, Homo sapien
tctaccgtggcaagggtactggctg

SEQ ID NO: 3078385 - DNA, 25 bp, Homo sapien
ccgcgctcttgccacttccgtctcc

SEQ ID NO: 3078386 - DNA, 25 bp, Homo sapien
ggcggcgtccgcccgaccctctgag

SEQ ID NO: 3078387 - DNA, 25 bp, Homo sapien
cgcccgaccctctgaggccgcgctc

SEQ ID NO: 3078388 - DNA, 25 bp, Homo sapien
cggcgtccgcccgaccctctgaggc

SEQ ID NO: 3078389 - DNA, 25 bp, Homo sapien
tgcggcagccaataggagagcagta

SEQ ID NO: 3078390 - DNA, 25 bp, Homo sapien
tgggaaatcacagcgcgtccttgcg

SEQ ID NO: 3078391 - DNA, 25 bp, Homo sapien
agccaataggagagcagtaaagagg

SEQ ID NO: 3078392 - DNA, 25 bp, Homo sapien
gggagacgcgaccaatgggaaatca

SEQ ID NO: 3078393 - DNA, 25 bp, Homo sapien
tggggaccggaagtggaggcggctc

SEQ ID NO: 3078394 - DNA, 25 bp, Homo sapien
accggaagtggaggcggctcgtcgc

SEQ ID NO: 3078395 - DNA, 25 bp, Homo sapien
ggaagtggaggcggctcgtcgccta

SEQ ID NO: 3078396 - DNA, 25 bp, Homo sapien
ggaccggaagtggaggcggctcgtc

SEQ ID NO: 3078397 - DNA, 25 bp, Homo sapien
ctaaagccacttccggtgatggccc

SEQ ID NO: 3078398 - DNA, 25 bp, Homo sapien
gatggccccgcccaggaggtacttc

SEQ ID NO: 3078399 - DNA, 25 bp, Homo sapien
acttccggtgatggccccgcccagg

SEQ ID NO: 3078400 - DNA, 25 bp, Homo sapien
gtgatggccccgcccaggaggtact

SEQ ID NO: 3078401 - DNA, 25 bp, Homo sapien
ggtcccaacgccagaataggagaaa

SEQ ID NO: 3078402 - DNA, 25 bp, Homo sapien
tggtttcgcagctgtcatccggtcc

SEQ ID NO: 3078403 - DNA, 25 bp, Homo sapien
gttttggtttcgcagctgtcatccg

SEQ ID NO: 3078404 - DNA, 25 bp, Homo sapien
gtcatccggtcccaacgccagaata

SEQ ID NO: 3078405 - DNA, 25 bp, Homo sapien
taaacgaccctgcagttcttcacga

SEQ ID NO: 3078406 - DNA, 25 bp, Homo sapien
tggatctgagactgccagctagctg

SEQ ID NO: 3078407 - DNA, 25 bp, Homo sapien
gcgctggcagtcctgagtgaagaac

SEQ ID NO: 3078408 - DNA, 25 bp, Homo sapien
tgccagctagctgcggcctcctagt

SEQ ID NO: 3078409 - DNA, 25 bp, Homo sapien
agaggaggagatttaaatatccagg

SEQ ID NO: 3078410 - DNA, 25 bp, Homo sapien
aaggcgaagtggcagtagctgaagg

SEQ ID NO: 3078411 - DNA, 25 bp, Homo sapien
ggatgtaaggcgaagtggcagtagc

SEQ ID NO: 3078412 - DNA, 25 bp, Homo sapien
agtcagcagggatgtaaggcgaagt

SEQ ID NO: 3078413 - DNA, 25 bp, Homo sapien
tgtagcatctcctgcatccgccgca

SEQ ID NO: 3078414 - DNA, 25 bp, Homo sapien
gtagcatctcctgcatccgccgcag

SEQ ID NO: 3078415 - DNA, 25 bp, Homo sapien
tttggagagtcctttagtattggga

SEQ ID NO: 3078416 - DNA, 25 bp, Homo sapien
ggtgatcaaacaggagacctcccct

SEQ ID NO: 3078417 - DNA, 25 bp, Homo sapien
aagccagaaccttggtagccgtgag

SEQ ID NO: 3078418 - DNA, 25 bp, Homo sapien
ggacagaaccacctattgacctatc

SEQ ID NO: 3078419 - DNA, 25 bp, Homo sapien
cctcatctttctctcggataagctt

SEQ ID NO: 3078420 - DNA, 25 bp, Homo sapien
ctggtgggacagcagggatggggaa

SEQ ID NO: 3078421 - DNA, 25 bp, Homo sapien
cagggatggggaagtcggtaccact

SEQ ID NO: 3078422 - DNA, 25 bp, Homo sapien
cagcagggatggggaagtcggtacc

SEQ ID NO: 3078423 - DNA, 25 bp, Homo sapien
agtcggtaccactttcccgagtcag

SEQ ID NO: 3078424 - DNA, 25 bp, Homo sapien
agcacccgcttagattgagcccagg

SEQ ID NO: 3078425 - DNA, 25 bp, Homo sapien
gggcttggtctcacccaaggctagg

SEQ ID NO: 3078426 - DNA, 25 bp, Homo sapien
ttggtctcacccaaggctaggcttg

SEQ ID NO: 3078427 - DNA, 25 bp, Homo sapien
aagtagggcttggtctcacccaagg

SEQ ID NO: 3078428 - DNA, 25 bp, Homo sapien
caaaagtagggcttggtctcaccca

SEQ ID NO: 3078429 - DNA, 25 bp, Homo sapien
cagctttgtcctggcttctggtcat

SEQ ID NO: 3078430 - DNA, 25 bp, Homo sapien
ccagctttgtcctggcttctggtca

SEQ ID NO: 3078431 - DNA, 25 bp, Homo sapien
agctttgtcctggcttctggtcata

SEQ ID NO: 3078432 - DNA, 25 bp, Homo sapien
gctttgtcctggcttctggtcatac

SEQ ID NO: 3078433 - DNA, 25 bp, Homo sapien
gcactgtgcccggtagttctcataa

SEQ ID NO: 3078434 - DNA, 25 bp, Homo sapien
cacaaagtcgcagtgccctgggttt

SEQ ID NO: 3078435 - DNA, 25 bp, Homo sapien
aggtcctgcatgtgggtacgtacca

SEQ ID NO: 3078436 - DNA, 25 bp, Homo sapien
ttctcataatgtgtctcccgtgtca

SEQ ID NO: 3078437 - DNA, 25 bp, Homo sapien
gggtcagccagaggcataggtaggg

SEQ ID NO: 3078438 - DNA, 25 bp, Homo sapien
gataccctggtcacaggctcagtgc

SEQ ID NO: 3078439 - DNA, 25 bp, Homo sapien
aggcataggtaggggagagccactg

SEQ ID NO: 3078440 - DNA, 25 bp, Homo sapien
ccactgagggcaaggagataccctg

SEQ ID NO: 3078441 - DNA, 25 bp, Homo sapien
tagagtcgaccccgaactcgccgcc

SEQ ID NO: 3078442 - DNA, 25 bp, Homo sapien
ccaattactgcaaatgggatgcttt

SEQ ID NO: 3078443 - DNA, 25 bp, Homo sapien
gtagagtcgaccccgaactcgccgc

SEQ ID NO: 3078444 - DNA, 25 bp, Homo sapien
ctgccaattactgcaaatgggatgc

SEQ ID NO: 3078445 - DNA, 25 bp, Homo sapien
gtcagcaccctctgttctcacctct

SEQ ID NO: 3078446 - DNA, 25 bp, Homo sapien
tatagaattctactccctttttcta

SEQ ID NO: 3078447 - DNA, 25 bp, Homo sapien
agataggaatgggatgccctagagt

SEQ ID NO: 3078448 - DNA, 25 bp, Homo sapien
atgggatgccctagagtggccccac

SEQ ID NO: 3078449 - DNA, 25 bp, Homo sapien
ctttagggcttggtcctgcaatttg

SEQ ID NO: 3078450 - DNA, 25 bp, Homo sapien
agagtcacagtctgggaattgatag

SEQ ID NO: 3078451 - DNA, 25 bp, Homo sapien
cacagtctgggaattgatagatctt

SEQ ID NO: 3078452 - DNA, 25 bp, Homo sapien
gcttggtcctgcaatttgaagtcct

SEQ ID NO: 3078453 - DNA, 25 bp, Homo sapien
ctgacaaacagatgaggggcccaca

SEQ ID NO: 3078454 - DNA, 25 bp, Homo sapien
gatcccctcccaccaccagcttccc

SEQ ID NO: 3078455 - DNA, 25 bp, Homo sapien
ctgatcccctcccaccaccagcttc

SEQ ID NO: 3078456 - DNA, 25 bp, Homo sapien
ccctcccaccaccagcttccctcac

SEQ ID NO: 3078457 - DNA, 25 bp, Homo sapien
tcccctcccaccaccagcttccctc

SEQ ID NO: 3078458 - DNA, 25 bp, Homo sapien
cttgtggtccacttcgggaggtgtc

SEQ ID NO: 3078459 - DNA, 25 bp, Homo sapien
ggcacgatgttgacccgctgatgca

SEQ ID NO: 3078460 - DNA, 25 bp, Homo sapien
tgccttagccaggataggcacgatg

SEQ ID NO: 3078461 - DNA, 25 bp, Homo sapien
tgacccgctgatgcagggccttcat

SEQ ID NO: 3078462 - DNA, 25 bp, Homo sapien
ctggggaacaggaacctgtgaccac

SEQ ID NO: 3078463 - DNA, 25 bp, Homo sapien
tggggaacaggaacctgtgaccacc

SEQ ID NO: 3078464 - DNA, 25 bp, Homo sapien
gggaacaggaacctgtgaccacctg

SEQ ID NO: 3078465 - DNA, 25 bp, Homo sapien
ccctgcccctggtgctcttggcctg

SEQ ID NO: 3078466 - DNA, 25 bp, Homo sapien
tgcccctggtgctcttggcctgttc

SEQ ID NO: 3078467 - DNA, 25 bp, Homo sapien
ctgcccctggtgctcttggcctgtt

SEQ ID NO: 3078468 - DNA, 25 bp, Homo sapien
agccctgcccctggtgctcttggcc

SEQ ID NO: 3078469 - DNA, 25 bp, Homo sapien
tgccaggagcctcaggcttggacca

SEQ ID NO: 3078470 - DNA, 25 bp, Homo sapien
ccaggagcctcaggcttggaccata

SEQ ID NO: 3078471 - DNA, 25 bp, Homo sapien
ggtggtgccaggagcctcaggcttg

SEQ ID NO: 3078472 - DNA, 25 bp, Homo sapien
ccggtggtgccaggagcctcaggct

SEQ ID NO: 3078473 - DNA, 25 bp, Homo sapien
ccactctcgtctcggaaatactgct

SEQ ID NO: 3078474 - DNA, 25 bp, Homo sapien
gttcaggccactctcgtctcggaaa

SEQ ID NO: 3078475 - DNA, 25 bp, Homo sapien
tgaagtacaggcagcagtgcaccct

SEQ ID NO: 3078476 - DNA, 25 bp, Homo sapien
tcaggccactctcgtctcggaaata

SEQ ID NO: 3078477 - DNA, 25 bp, Homo sapien
tccttcaaggccctaagaaccatct

SEQ ID NO: 3078478 - DNA, 25 bp, Homo sapien
cctaagaaccatctcttccacgaag

SEQ ID NO: 3078479 - DNA, 25 bp, Homo sapien
tctcctttgactataccaatacaca

SEQ ID NO: 3078480 - DNA, 25 bp, Homo sapien
gactataccaatacacactgctctc

SEQ ID NO: 3078481 - DNA, 25 bp, Homo sapien
tgtccagtaagggaagtcacatgct

SEQ ID NO: 3078482 - DNA, 25 bp, Homo sapien
atatatctgggcctacgtgtgtacc

SEQ ID NO: 3078483 - DNA, 25 bp, Homo sapien
ggtcatagaccgcttcctcctgata

SEQ ID NO: 3078484 - DNA, 25 bp, Homo sapien
taccccattatagaatcatagggca

SEQ ID NO: 3078485 - DNA, 25 bp, Homo sapien
ttgttgactgcatccccaaaacctg

SEQ ID NO: 3078486 - DNA, 25 bp, Homo sapien
ccttctcttctatgtccactgcatg

SEQ ID NO: 3078487 - DNA, 25 bp, Homo sapien
cactctgtgttgttgactgcatccc

SEQ ID NO: 3078488 - DNA, 25 bp, Homo sapien
ccactgcatgcttagtgatctccac

SEQ ID NO: 3078489 - DNA, 25 bp, Homo sapien
tcagtctctctaggaggccatggtt

SEQ ID NO: 3078490 - DNA, 25 bp, Homo sapien
ttcagcacccaaatctttagggagc

SEQ ID NO: 3078491 - DNA, 25 bp, Homo sapien
gcagttaggcctatggagagctgct

SEQ ID NO: 3078492 - DNA, 25 bp, Homo sapien
ccagcaaggagtacatttcccaaca

SEQ ID NO: 3078493 - DNA, 25 bp, Homo sapien
tattgacaagtgtggatttgcccag

SEQ ID NO: 3078494 - DNA, 25 bp, Homo sapien
tccggtcccggtacagatcagtgag

SEQ ID NO: 3078495 - DNA, 25 bp, Homo sapien
gatcagtgaggaagaggctattgac

SEQ ID NO: 3078496 - DNA, 25 bp, Homo sapien
tttccggtcccggtacagatcagtg

SEQ ID NO: 3078497 - DNA, 25 bp, Homo sapien
tgccaccatgagggtaaagtcaaag

SEQ ID NO: 3078498 - DNA, 25 bp, Homo sapien
ctgccaccatgagggtaaagtcaaa

SEQ ID NO: 3078499 - DNA, 25 bp, Homo sapien
cacggactttcggtggacttggttg

SEQ ID NO: 3078500 - DNA, 25 bp, Homo sapien
ctctccctttcaggcctttgcccca

SEQ ID NO: 3078501 - DNA, 25 bp, Homo sapien
cagaatgcatcacggtgaggagcca

SEQ ID NO: 3078502 - DNA, 25 bp, Homo sapien
cccggcacccagcgccaatcttctc

SEQ ID NO: 3078503 - DNA, 25 bp, Homo sapien
cacccagcgccaatcttctctccct

SEQ ID NO: 3078504 - DNA, 25 bp, Homo sapien
cctgcccttgctgaaactgcaaatt

SEQ ID NO: 3078505 - DNA, 25 bp, Homo sapien
tatcttggagctagggctgacacag

SEQ ID NO: 3078506 - DNA, 25 bp, Homo sapien
cacaggactgaaataggtcccagat

SEQ ID NO: 3078507 - DNA, 25 bp, Homo sapien
caaatttccagtgcccttgggggca

SEQ ID NO: 3078508 - DNA, 25 bp, Homo sapien
aaggcaaaggcagggctggaggctc

SEQ ID NO: 3078509 - DNA, 25 bp, Homo sapien
tgaaaggcaaaggcagggctggagg

SEQ ID NO: 3078510 - DNA, 25 bp, Homo sapien
gcaaaggcagggctggaggctctac

SEQ ID NO: 3078511 - DNA, 25 bp, Homo sapien
aaaggcaaaggcagggctggaggct

SEQ ID NO: 3078512 - DNA, 25 bp, Homo sapien
cagaggaatcatagggatcaagctt

SEQ ID NO: 3078513 - DNA, 25 bp, Homo sapien
agaggaatcatagggatcaagcttg

SEQ ID NO: 3078514 - DNA, 25 bp, Homo sapien
tcagaggaatcatagggatcaagct

SEQ ID NO: 3078515 - DNA, 25 bp, Homo sapien
ctcagaggaatcatagggatcaagc

SEQ ID NO: 3078516 - DNA, 25 bp, Homo sapien
ctggatgcccaggtcttagcctctg

SEQ ID NO: 3078517 - DNA, 25 bp, Homo sapien
ggggggtctgaactccaggtcatca

SEQ ID NO: 3078518 - DNA, 25 bp, Homo sapien
gcccaggtcttagcctctggtgggt

SEQ ID NO: 3078519 - DNA, 25 bp, Homo sapien
ggcagctcgcatttcctgagaaatc

SEQ ID NO: 3078520 - DNA, 25 bp, Homo sapien
cagttctccatcatccgtggtgtcc

SEQ ID NO: 3078521 - DNA, 25 bp, Homo sapien
gaaagcacttgtggttagaagaaaa

SEQ ID NO: 3078522 - DNA, 25 bp, Homo sapien
agaggaagtgctcaccatccctccc

SEQ ID NO: 3078523 - DNA, 25 bp, Homo sapien
gaggaagtgctcaccatccctccct

SEQ ID NO: 3078524 - DNA, 25 bp, Homo sapien
cagaggaagtgctcaccatccctcc

SEQ ID NO: 3078525 - DNA, 25 bp, Homo sapien
gcaactgctcttgggaactaaggaa

SEQ ID NO: 3078526 - DNA, 25 bp, Homo sapien
tgcccagcgctcagtatagttgatc

SEQ ID NO: 3078527 - DNA, 25 bp, Homo sapien
cccaaaaggagagtacagtgcatca

SEQ ID NO: 3078528 - DNA, 25 bp, Homo sapien
taaacccgccagtggatgctgactg

SEQ ID NO: 3078529 - DNA, 25 bp, Homo sapien
gtagaagcctgttctaccccatcct

SEQ ID NO: 3078530 - DNA, 25 bp, Homo sapien
tctcattgtcagctctagaccctaa

SEQ ID NO: 3078531 - DNA, 25 bp, Homo sapien
aatggactgactcctctgtagaagc

SEQ ID NO: 3078532 - DNA, 25 bp, Homo sapien
atcctcagctcagaagaggaactgt

SEQ ID NO: 3078533 - DNA, 25 bp, Homo sapien
tctctgagggttagccaagccagtg

SEQ ID NO: 3078534 - DNA, 25 bp, Homo sapien
agctagagtgaggaagataagatag

SEQ ID NO: 3078535 - DNA, 25 bp, Homo sapien
actgtggagtcccagctagagtgag

SEQ ID NO: 3078536 - DNA, 25 bp, Homo sapien
ggactaccccagaccactgtggagt

SEQ ID NO: 3078537 - DNA, 25 bp, Homo sapien
aaaagtctgctaggagctactgcca

SEQ ID NO: 3078538 - DNA, 25 bp, Homo sapien
ggaggcagatatgcatactgccagg

SEQ ID NO: 3078539 - DNA, 25 bp, Homo sapien
tactgccaggtgtatgccagaggga

SEQ ID NO: 3078540 - DNA, 25 bp, Homo sapien
gagggaaaagtctgctaggagctac

SEQ ID NO: 3078541 - DNA, 25 bp, Homo sapien
tatagccatagtctccagtgctcgc

SEQ ID NO: 3078542 - DNA, 25 bp, Homo sapien
ctgcttatagccatagtctccagtg

SEQ ID NO: 3078543 - DNA, 25 bp, Homo sapien
gcttatagccatagtctccagtgct

SEQ ID NO: 3078544 - DNA, 25 bp, Homo sapien
ttatagccatagtctccagtgctcg

SEQ ID NO: 3078545 - DNA, 25 bp, Homo sapien
cacctatgacatttgtgaggtccag

SEQ ID NO: 3078546 - DNA, 25 bp, Homo sapien
gctgggtgaccagaagaggctatcc

SEQ ID NO: 3078547 - DNA, 25 bp, Homo sapien
caaaactagaaccagcagatggagg

SEQ ID NO: 3078548 - DNA, 25 bp, Homo sapien
tgaggcaagcctaacccaaggcttt

SEQ ID NO: 3078549 - DNA, 25 bp, Homo sapien
tcccttgccatcccagtgaacggtc

SEQ ID NO: 3078550 - DNA, 25 bp, Homo sapien
ccttgccatcccagtgaacggtcca

SEQ ID NO: 3078551 - DNA, 25 bp, Homo sapien
cccttgccatcccagtgaacggtcc

SEQ ID NO: 3078552 - DNA, 25 bp, Homo sapien
cttgccatcccagtgaacggtccat

SEQ ID NO: 3078553 - DNA, 25 bp, Homo sapien
tctggcaggggccaaaaaagcctgt

SEQ ID NO: 3078554 - DNA, 25 bp, Homo sapien
cacgcttcagactccctgtcagaaa

SEQ ID NO: 3078555 - DNA, 25 bp, Homo sapien
cagaaagctctaggtctaattttat

SEQ ID NO: 3078556 - DNA, 25 bp, Homo sapien
atctcccaggcaaagttcctcacac

SEQ ID NO: 3078557 - DNA, 25 bp, Homo sapien
gcaccaacctcccaatgtctgtttg

SEQ ID NO: 3078558 - DNA, 25 bp, Homo sapien
caatgtctgtttgcagccaggcttt

SEQ ID NO: 3078559 - DNA, 25 bp, Homo sapien
tgtttgcagccaggcttttgatcca

SEQ ID NO: 3078560 - DNA, 25 bp, Homo sapien
gcacagcaccaacctcccaatgtct

SEQ ID NO: 3078561 - DNA, 25 bp, Homo sapien
ttcagaaatctgctcctaaatttcc

SEQ ID NO: 3078562 - DNA, 25 bp, Homo sapien
cactgtttcagaaatctgctcctaa

SEQ ID NO: 3078563 - DNA, 25 bp, Homo sapien
tcactgtttcagaaatctgctccta

SEQ ID NO: 3078564 - DNA, 25 bp, Homo sapien
tgtttcagaaatctgctcctaaatt

SEQ ID NO: 3078565 - DNA, 25 bp, Homo sapien
catggcttccatagtgtcaacaggg

SEQ ID NO: 3078566 - DNA, 25 bp, Homo sapien
gagagaaagcactcccagatgatag

SEQ ID NO: 3078567 - DNA, 25 bp, Homo sapien
gagaaggtgcatcccaagtcacagg

SEQ ID NO: 3078568 - DNA, 25 bp, Homo sapien
tctctgaggagcacgggttcaaggc

SEQ ID NO: 3078569 - DNA, 25 bp, Homo sapien
cttgagagacaagagcccaaaaggt

SEQ ID NO: 3078570 - DNA, 25 bp, Homo sapien
tgagagacaagagcccaaaaggttg

SEQ ID NO: 3078571 - DNA, 25 bp, Homo sapien
gagacaagagcccaaaaggttggcc

SEQ ID NO: 3078572 - DNA, 25 bp, Homo sapien
acagcttgagagacaagagcccaaa

SEQ ID NO: 3078573 - DNA, 25 bp, Homo sapien
tgaaagcttctgatcccagggggcc

SEQ ID NO: 3078574 - DNA, 25 bp, Homo sapien
tgacacccttacgttatttgtggca

SEQ ID NO: 3078575 - DNA, 25 bp, Homo sapien
gtggcctagaggtcctgacaccctt

SEQ ID NO: 3078576 - DNA, 25 bp, Homo sapien
cctgctgtaaacagtttgtgtcccc

SEQ ID NO: 3078577 - DNA, 25 bp, Homo sapien
ctggcaacaatgtcaggagaagaga

SEQ ID NO: 3078578 - DNA, 25 bp, Homo sapien
ggcaacaatgtcaggagaagagatt

SEQ ID NO: 3078579 - DNA, 25 bp, Homo sapien
tggcaacaatgtcaggagaagagat

SEQ ID NO: 3078580 - DNA, 25 bp, Homo sapien
gcaacaatgtcaggagaagagatta

SEQ ID NO: 3078581 - DNA, 25 bp, Homo sapien
tagctaatcccaccgggcaggatgg

SEQ ID NO: 3078582 - DNA, 25 bp, Homo sapien
ggcagaaggatatagctaatcccac

SEQ ID NO: 3078583 - DNA, 25 bp, Homo sapien
aggaagctttcccatggttcctgtc

SEQ ID NO: 3078584 - DNA, 25 bp, Homo sapien
gagggagcgggtagatgcagcagga

SEQ ID NO: 3078585 - DNA, 25 bp, Homo sapien
ttccaaatgaagttggtactggccc

SEQ ID NO: 3078586 - DNA, 25 bp, Homo sapien
cagtgtttgtgggcctcctctgcgt

SEQ ID NO: 3078587 - DNA, 25 bp, Homo sapien
tttccaaatgaagttggtactggcc

SEQ ID NO: 3078588 - DNA, 25 bp, Homo sapien
gcagtgtttgtgggcctcctctgcg

SEQ ID NO: 3078589 - DNA, 25 bp, Homo sapien
gagcgaccggccctgcgcaccccag

SEQ ID NO: 3078590 - DNA, 25 bp, Homo sapien
tgcggtgccgcgggtccccttgcag

SEQ ID NO: 3078591 - DNA, 25 bp, Homo sapien
tccccttgcagccgcccgggagcga

SEQ ID NO: 3078592 - DNA, 25 bp, Homo sapien
gcacagccgcggctgcggtgccgcg

SEQ ID NO: 3078593 - DNA, 25 bp, Homo sapien
gcagcccgggcggggccggctccgc

SEQ ID NO: 3078594 - DNA, 25 bp, Homo sapien
tgcagcccgggcggggccggctccg

SEQ ID NO: 3078595 - DNA, 25 bp, Homo sapien
ggctgcagcccgggcggggccggct

SEQ ID NO: 3078596 - DNA, 25 bp, Homo sapien
gctgcagcccgggcggggccggctc

SEQ ID NO: 3078597 - DNA, 25 bp, Homo sapien
gagctgcgcgccgacctcgcagcac

SEQ ID NO: 3078598 - DNA, 25 bp, Homo sapien
tgcgcgccgacctcgcagcaccgcc

SEQ ID NO: 3078599 - DNA, 25 bp, Homo sapien
gctgcgcgccgacctcgcagcaccg

SEQ ID NO: 3078600 - DNA, 25 bp, Homo sapien
cggagctgcgcgccgacctcgcagc

SEQ ID NO: 3078601 - DNA, 25 bp, Homo sapien
tccagagagtcagagaagaccagca

SEQ ID NO: 3078602 - DNA, 25 bp, Homo sapien
ctccagagagtcagagaagaccagc

SEQ ID NO: 3078603 - DNA, 25 bp, Homo sapien
ccagagagtcagagaagaccagcag

SEQ ID NO: 3078604 - DNA, 25 bp, Homo sapien
gaggacccaaatagtgtgtaaccca

SEQ ID NO: 3078605 - DNA, 25 bp, Homo sapien
ttgaggacccaaatagtgtgtaacc

SEQ ID NO: 3078606 - DNA, 25 bp, Homo sapien
ttccaagttgaggacccaaatagtg

SEQ ID NO: 3078607 - DNA, 25 bp, Homo sapien
aagttgaggacccaaatagtgtgta

SEQ ID NO: 3078608 - DNA, 25 bp, Homo sapien
gccatgaggcttaaattattctcca

SEQ ID NO: 3078609 - DNA, 25 bp, Homo sapien
tcatgtgatagatgaccaactaagc

SEQ ID NO: 3078610 - DNA, 25 bp, Homo sapien
gccccaaagaaatgactctaatggt

SEQ ID NO: 3078611 - DNA, 25 bp, Homo sapien
caactaagctgaaaaggccatgagg

SEQ ID NO: 3078612 - DNA, 25 bp, Homo sapien
tatctcctaaacgacccagctctgt

SEQ ID NO: 3078613 - DNA, 25 bp, Homo sapien
gacccagctctgtagatacatagat

SEQ ID NO: 3078614 - DNA, 25 bp, Homo sapien
taaacgacccagctctgtagataca

SEQ ID NO: 3078615 - DNA, 25 bp, Homo sapien
tagatacatagatgccactcctcac

SEQ ID NO: 3078616 - DNA, 25 bp, Homo sapien
tcccacagtgggcccataggaggga

SEQ ID NO: 3078617 - DNA, 25 bp, Homo sapien
tgggcccataggagggaaaagcaca

SEQ ID NO: 3078618 - DNA, 25 bp, Homo sapien
cacagtgggcccataggagggaaaa

SEQ ID NO: 3078619 - DNA, 25 bp, Homo sapien
aagctcccacagtgggcccatagga

SEQ ID NO: 3078620 - DNA, 25 bp, Homo sapien
cgattgtacatttcctcagagacat

SEQ ID NO: 3078621 - DNA, 25 bp, Homo sapien
cacgattgtacatttcctcagagac

SEQ ID NO: 3078622 - DNA, 25 bp, Homo sapien
acgattgtacatttcctcagagaca

SEQ ID NO: 3078623 - DNA, 25 bp, Homo sapien
caacttggaaactcctttggtggtg

SEQ ID NO: 3078624 - DNA, 25 bp, Homo sapien
ggtctgtggcacttcactcagtggt

SEQ ID NO: 3078625 - DNA, 25 bp, Homo sapien
ggtgtttcaacttcaggattcagca

SEQ ID NO: 3078626 - DNA, 25 bp, Homo sapien
caaaatccggtgttgtcagctggct

SEQ ID NO: 3078627 - DNA, 25 bp, Homo sapien
tggctctactgactgtacccctggg

SEQ ID NO: 3078628 - DNA, 25 bp, Homo sapien
tgatgaagcatgatggccgacctcg

SEQ ID NO: 3078629 - DNA, 25 bp, Homo sapien
aaacatggatgacttgtgggagccc

SEQ ID NO: 3078630 - DNA, 25 bp, Homo sapien
gatactaagacctttgcggagggct

SEQ ID NO: 3078631 - DNA, 25 bp, Homo sapien
gacagatcgagggtagtctgatgct

SEQ ID NO: 3078632 - DNA, 25 bp, Homo sapien
tgtgcagcttctgatcttcggtggg

SEQ ID NO: 3078633 - DNA, 25 bp, Homo sapien
tctgatcttcggtgggaagggttca

SEQ ID NO: 3078634 - DNA, 25 bp, Homo sapien
tcagggagactgcagcacttcgatg

SEQ ID NO: 3078635 - DNA, 25 bp, Homo sapien
tctgtgctgaaaccgctaccttggc

SEQ ID NO: 3078636 - DNA, 25 bp, Homo sapien
gccccaggtttatttgtcttgacca

SEQ ID NO: 3078637 - DNA, 25 bp, Homo sapien
ttagtagtaacctcagaccctctct

SEQ ID NO: 3078638 - DNA, 25 bp, Homo sapien
ttgaggcaagaacgtacccatgtcc

SEQ ID NO: 3078639 - DNA, 25 bp, Homo sapien
cctaatgatgcctgaatatttaccc

SEQ ID NO: 3078640 - DNA, 25 bp, Homo sapien
aataatccccttagctacctctctg

SEQ ID NO: 3078641 - DNA, 25 bp, Homo sapien
tagatcccgtattttactggctggc

SEQ ID NO: 3078642 - DNA, 25 bp, Homo sapien
gggctcccacaaaagtggctgttgt

SEQ ID NO: 3078643 - DNA, 25 bp, Homo sapien
aaagccattctaggcacaaccaaaa

SEQ ID NO: 3078644 - DNA, 25 bp, Homo sapien
gccattctaggcacaaccaaaaatt

SEQ ID NO: 3078645 - DNA, 25 bp, Homo sapien
gatgatgtctattgtggcagctgaa

SEQ ID NO: 3078646 - DNA, 25 bp, Homo sapien
gggccaaacgatgatgtctattgtg

SEQ ID NO: 3078647 - DNA, 25 bp, Homo sapien
aactggaactgctgccctgacagca

SEQ ID NO: 3078648 - DNA, 25 bp, Homo sapien
agaactggaactgctgccctgacag

SEQ ID NO: 3078649 - DNA, 25 bp, Homo sapien
actggaactgctgccctgacagcaa

SEQ ID NO: 3078650 - DNA, 25 bp, Homo sapien
gaactggaactgctgccctgacagc

SEQ ID NO: 3078651 - DNA, 25 bp, Homo sapien
gagtccgtctatgatccaattccaa

SEQ ID NO: 3078652 - DNA, 25 bp, Homo sapien
ggccaggagtccgtctatgatccaa

SEQ ID NO: 3078653 - DNA, 25 bp, Homo sapien
aggagcttacaaccaggacactcaa

SEQ ID NO: 3078654 - DNA, 25 bp, Homo sapien
agaagaaaggagcttacaaccagga

SEQ ID NO: 3078655 - DNA, 25 bp, Homo sapien
tctgacaagtcactctgatccagca

SEQ ID NO: 3078656 - DNA, 25 bp, Homo sapien
cagtctgacaagtcactctgatcca

SEQ ID NO: 3078657 - DNA, 25 bp, Homo sapien
gacaagtcactctgatccagcacga

SEQ ID NO: 3078658 - DNA, 25 bp, Homo sapien
tcagtctgacaagtcactctgatcc

SEQ ID NO: 3078659 - DNA, 25 bp, Homo sapien
aaaggaagtttcgagttggtatgtg

SEQ ID NO: 3078660 - DNA, 25 bp, Homo sapien
ggaagtttcgagttggtatgtgtgt

SEQ ID NO: 3078661 - DNA, 25 bp, Homo sapien
aaggaagtttcgagttggtatgtgt

SEQ ID NO: 3078662 - DNA, 25 bp, Homo sapien
aggaagtttcgagttggtatgtgtg

SEQ ID NO: 3078663 - DNA, 25 bp, Homo sapien
ctggatgattcggaccaacctagtc

SEQ ID NO: 3078664 - DNA, 25 bp, Homo sapien
gatgattcggaccaacctagtcgct

SEQ ID NO: 3078665 - DNA, 25 bp, Homo sapien
caacctagtcgcttccaaaaacagg

SEQ ID NO: 3078666 - DNA, 25 bp, Homo sapien
tcggaccaacctagtcgcttccaaa

SEQ ID NO: 3078667 - DNA, 25 bp, Homo sapien
ctatgattggcaattaacagaaaac

SEQ ID NO: 3078668 - DNA, 25 bp, Homo sapien
caattaacagaaaacctgagctgaa

SEQ ID NO: 3078669 - DNA, 25 bp, Homo sapien
ggcaattaacagaaaacctgagctg

SEQ ID NO: 3078670 - DNA, 25 bp, Homo sapien
ttggcaattaacagaaaacctgagc

SEQ ID NO: 3078671 - DNA, 25 bp, Homo sapien
tttctcttcaccaactttttgatct

SEQ ID NO: 3078672 - DNA, 25 bp, Homo sapien
tttctggtgtaatgctatcttccct

SEQ ID NO: 3078673 - DNA, 25 bp, Homo sapien
tccttctttctggtgtaatgctatc

SEQ ID NO: 3078674 - DNA, 25 bp, Homo sapien
tctttctggtgtaatgctatcttcc

SEQ ID NO: 3078675 - DNA, 25 bp, Homo sapien
aggtcctcatccagagtagagtgag

SEQ ID NO: 3078676 - DNA, 25 bp, Homo sapien
ggtcctcatccagagtagagtgagc

SEQ ID NO: 3078677 - DNA, 25 bp, Homo sapien
gtcctcatccagagtagagtgagct

SEQ ID NO: 3078678 - DNA, 25 bp, Homo sapien
caggtcctcatccagagtagagtga

SEQ ID NO: 3078679 - DNA, 25 bp, Homo sapien
gatctcaaagagatatccgtacact

SEQ ID NO: 3078680 - DNA, 25 bp, Homo sapien
gcaggatctcaaagagatatccgta

SEQ ID NO: 3078681 - DNA, 25 bp, Homo sapien
tctcaaagagatatccgtacactca

SEQ ID NO: 3078682 - DNA, 25 bp, Homo sapien
ggatctcaaagagatatccgtacac

SEQ ID NO: 3078683 - DNA, 25 bp, Homo sapien
ttggacaaaagcatactactatctt

SEQ ID NO: 3078684 - DNA, 25 bp, Homo sapien
gacaaaagcatactactatcttctt

SEQ ID NO: 3078685 - DNA, 25 bp, Homo sapien
aagcatactactatcttctttttta

SEQ ID NO: 3078686 - DNA, 25 bp, Homo sapien
aaagcatactactatcttctttttt

SEQ ID NO: 3078687 - DNA, 25 bp, Homo sapien
cttgctgtgttctcatgcaacaccg

SEQ ID NO: 3078688 - DNA, 25 bp, Homo sapien
tgttctcatgcaacaccgtggatga

SEQ ID NO: 3078689 - DNA, 25 bp, Homo sapien
gcaacaccgtggatgagccctgctg

SEQ ID NO: 3078690 - DNA, 25 bp, Homo sapien
catgcaacaccgtggatgagccctg

SEQ ID NO: 3078691 - DNA, 25 bp, Homo sapien
taattcccataagtgaaatgaggga

SEQ ID NO: 3078692 - DNA, 25 bp, Homo sapien
gaaacctggtccagataattcccat

SEQ ID NO: 3078693 - DNA, 25 bp, Homo sapien
ccaggacaaagtctggtaacacagc

SEQ ID NO: 3078694 - DNA, 25 bp, Homo sapien
caggacaaagtctggtaacacagct

SEQ ID NO: 3078695 - DNA, 25 bp, Homo sapien
caaagaggaggaatttgcaaggact

SEQ ID NO: 3078696 - DNA, 25 bp, Homo sapien
ctcagcagttctgttattttaagaa

SEQ ID NO: 3078697 - DNA, 25 bp, Homo sapien
catgtgtggggtgacctccactctc

SEQ ID NO: 3078698 - DNA, 25 bp, Homo sapien
ctgttattttaagaagagcaaccaa

SEQ ID NO: 3078699 - DNA, 25 bp, Homo sapien
catcaagtagctcctgagatggtgg

SEQ ID NO: 3078700 - DNA, 25 bp, Homo sapien
atcaagtagctcctgagatggtggt

SEQ ID NO: 3078701 - DNA, 25 bp, Homo sapien
tgatgagtcacatgccttaacaagg

SEQ ID NO: 3078702 - DNA, 25 bp, Homo sapien
agtcacatgccttaacaaggctggg

SEQ ID NO: 3078703 - DNA, 25 bp, Homo sapien
ctgggggatccagccccaataaatg

SEQ ID NO: 3078704 - DNA, 25 bp, Homo sapien
gtggtgatgagtcacatgccttaac

SEQ ID NO: 3078705 - DNA, 25 bp, Homo sapien
gctctctctcggacacttataaagt

SEQ ID NO: 3078706 - DNA, 25 bp, Homo sapien
tcttgactgttccagcaagaggcaa

SEQ ID NO: 3078707 - DNA, 25 bp, Homo sapien
gaggcaaactctgtcttaacctgaa

SEQ ID NO: 3078708 - DNA, 25 bp, Homo sapien
taaggagagaatccagtttctttgc

SEQ ID NO: 3078709 - DNA, 25 bp, Homo sapien
cataggagatactagacaggtcttg

SEQ ID NO: 3078710 - DNA, 25 bp, Homo sapien
gctgagtggagtgctgacactggta

SEQ ID NO: 3078711 - DNA, 25 bp, Homo sapien
acaggtcttgaatatccgtcaatga

SEQ ID NO: 3078712 - DNA, 25 bp, Homo sapien
cactggtaggtgcatggtttatttt

SEQ ID NO: 3078713 - DNA, 25 bp, Homo sapien
gtgactcctttgatgtctcttcttg

SEQ ID NO: 3078714 - DNA, 25 bp, Homo sapien
actcctttgatgtctcttcttgttc

SEQ ID NO: 3078715 - DNA, 25 bp, Homo sapien
tgactcctttgatgtctcttcttgt

SEQ ID NO: 3078716 - DNA, 25 bp, Homo sapien
tggtgactcctttgatgtctcttct

SEQ ID NO: 3078717 - DNA, 25 bp, Homo sapien
cttcgtacaggttgaaattgagacc

SEQ ID NO: 3078718 - DNA, 25 bp, Homo sapien
aaaatctcagcattctttccaagaa

SEQ ID NO: 3078719 - DNA, 25 bp, Homo sapien
tcgtacaggttgaaattgagacctg

SEQ ID NO: 3078720 - DNA, 25 bp, Homo sapien
tgagacctgggcaaaatctcagcat

SEQ ID NO: 3078721 - DNA, 25 bp, Homo sapien
gagacttgaggttgggcaaatgcac

SEQ ID NO: 3078722 - DNA, 25 bp, Homo sapien
cagagacttgaggttgggcaaatgc

SEQ ID NO: 3078723 - DNA, 25 bp, Homo sapien
agagacttgaggttgggcaaatgca

SEQ ID NO: 3078724 - DNA, 25 bp, Homo sapien
tcaaagtcctcttctatgggactcg

SEQ ID NO: 3078725 - DNA, 25 bp, Homo sapien
cttcaaagtcctcttctatgggact

SEQ ID NO: 3078726 - DNA, 25 bp, Homo sapien
aaagtcctcttctatgggactcgag

SEQ ID NO: 3078727 - DNA, 25 bp, Homo sapien
agtcctcttctatgggactcgaggt

SEQ ID NO: 3078728 - DNA, 25 bp, Homo sapien
tcttgagcagtcgaggagtaaaaat

SEQ ID NO: 3078729 - DNA, 25 bp, Homo sapien
tgttatatcctcagaagactctggt

SEQ ID NO: 3078730 - DNA, 25 bp, Homo sapien
gactctggtgaacaagttgattgca

SEQ ID NO: 3078731 - DNA, 25 bp, Homo sapien
gagtaaaaatattcaccgtctggag

SEQ ID NO: 3078732 - DNA, 25 bp, Homo sapien
ggcttcactatgctctggttgctcc

SEQ ID NO: 3078733 - DNA, 25 bp, Homo sapien
tcagaacttgcttggaaggcttcac

SEQ ID NO: 3078734 - DNA, 25 bp, Homo sapien
ccttttgtctgggagatgggtgcct

SEQ ID NO: 3078735 - DNA, 25 bp, Homo sapien
taagatttctctacagccaccaatg

SEQ ID NO: 3078736 - DNA, 25 bp, Homo sapien
tatgatactcaataactcgctgcca

SEQ ID NO: 3078737 - DNA, 25 bp, Homo sapien
gtcacagtcattgttgcccgtcttg

SEQ ID NO: 3078738 - DNA, 25 bp, Homo sapien
ccaaggaggtactgtgagctgtcca

SEQ ID NO: 3078739 - DNA, 25 bp, Homo sapien
ccaatccgtgttttctgggctccta

SEQ ID NO: 3078740 - DNA, 25 bp, Homo sapien
tccattttaagtgtacctttccatc

SEQ ID NO: 3078741 - DNA, 25 bp, Homo sapien
ccattttaagtgtacctttccatca

SEQ ID NO: 3078742 - DNA, 25 bp, Homo sapien
attttaagtgtacctttccatcatc

SEQ ID NO: 3078743 - DNA, 25 bp, Homo sapien
cattttaagtgtacctttccatcat

SEQ ID NO: 3078744 - DNA, 25 bp, Homo sapien
ctgggtgatgcagaaggtccctgcc

SEQ ID NO: 3078745 - DNA, 25 bp, Homo sapien
gcttgacagagtgaagagtgcacta

SEQ ID NO: 3078746 - DNA, 25 bp, Homo sapien
ttggcttgggcagtggactctctag

SEQ ID NO: 3078747 - DNA, 25 bp, Homo sapien
gagtgcactattaaactgtgtggct

SEQ ID NO: 3078748 - DNA, 25 bp, Homo sapien
ctccttgagtgcactgaaattgttc

SEQ ID NO: 3078749 - DNA, 25 bp, Homo sapien
tccttgagtgcactgaaattgttca

SEQ ID NO: 3078750 - DNA, 25 bp, Homo sapien
tgggctggcctcgtgaatttcttcg

SEQ ID NO: 3078751 - DNA, 25 bp, Homo sapien
tagattgtttccagcagtggccgcc

SEQ ID NO: 3078752 - DNA, 25 bp, Homo sapien
tgggcaaacactccttagcagaagc

SEQ ID NO: 3078753 - DNA, 25 bp, Homo sapien
gaagtataagatccagaggcctttg

SEQ ID NO: 3078754 - DNA, 25 bp, Homo sapien
tccaccatggaggactgatttccca

SEQ ID NO: 3078755 - DNA, 25 bp, Homo sapien
tgtcagtccctccacataggttagg

SEQ ID NO: 3078756 - DNA, 25 bp, Homo sapien
taagttgagccatgcaaaattgcca

SEQ ID NO: 3078757 - DNA, 25 bp, Homo sapien
gagagtatctacgttggaattccac

SEQ ID NO: 3078758 - DNA, 25 bp, Homo sapien
tcttttgccaaaatgtcccccttga

SEQ ID NO: 3078759 - DNA, 25 bp, Homo sapien
actgatccccagtgtttactttgga

SEQ ID NO: 3078760 - DNA, 25 bp, Homo sapien
ctgatggcttatctctgactgatcc

SEQ ID NO: 3078761 - DNA, 25 bp, Homo sapien
ctggatcttttgccaaaatgtcccc

SEQ ID NO: 3078762 - DNA, 25 bp, Homo sapien
gagatactcctcagtcgtggacatg

SEQ ID NO: 3078763 - DNA, 25 bp, Homo sapien
gaaccgttttgccagtcccagtcat

SEQ ID NO: 3078764 - DNA, 25 bp, Homo sapien
tgatttcgaaactgcagaggcttgg

SEQ ID NO: 3078765 - DNA, 25 bp, Homo sapien
ggttaggtccgtctgcctccaaaga

SEQ ID NO: 3078766 - DNA, 25 bp, Homo sapien
gcatcttgattctgagtctccctgg

SEQ ID NO: 3078767 - DNA, 25 bp, Homo sapien
tcttctgccataaatggagcagggc

SEQ ID NO: 3078768 - DNA, 25 bp, Homo sapien
cctggccatcagacatggatctggg

SEQ ID NO: 3078769 - DNA, 25 bp, Homo sapien
gaggatctagtgtcccctcagtgaa

SEQ ID NO: 3078770 - DNA, 25 bp, Homo sapien
atttccatgtcaggtgtctctctgg

SEQ ID NO: 3078771 - DNA, 25 bp, Homo sapien
catcgggatggagtccgtatctctg

SEQ ID NO: 3078772 - DNA, 25 bp, Homo sapien
tctgaagtcagtcctagatagacat

SEQ ID NO: 3078773 - DNA, 25 bp, Homo sapien
gctctcggttggttgagttctctgg

SEQ ID NO: 3078774 - DNA, 25 bp, Homo sapien
taggtaagcagaaataaactcccaa

SEQ ID NO: 3078775 - DNA, 25 bp, Homo sapien
ttaggtaagcagaaataaactccca

SEQ ID NO: 3078776 - DNA, 25 bp, Homo sapien
ttcttcagaatataccggatatctt

SEQ ID NO: 3078777 - DNA, 25 bp, Homo sapien
tataccggatatcttgaaggttcat

SEQ ID NO: 3078778 - DNA, 25 bp, Homo sapien
cagaatataccggatatcttgaagg

SEQ ID NO: 3078779 - DNA, 25 bp, Homo sapien
aatataccggatatcttgaaggttc

SEQ ID NO: 3078780 - DNA, 25 bp, Homo sapien
gcttctaaataattccccgagacta

SEQ ID NO: 3078781 - DNA, 25 bp, Homo sapien
atatcatagtaaggtttcggaagcc

SEQ ID NO: 3078782 - DNA, 25 bp, Homo sapien
gccatctaagcccttccagggtatg

SEQ ID NO: 3078783 - DNA, 25 bp, Homo sapien
tacggcttttttaacaactgagcca

SEQ ID NO: 3078784 - DNA, 25 bp, Homo sapien
agaaaagctgtagatgtctgatttc

SEQ ID NO: 3078785 - DNA, 25 bp, Homo sapien
cccagttgtatagctgcgtaggaag

SEQ ID NO: 3078786 - DNA, 25 bp, Homo sapien
ggcactcgagtcaggtccctctgta

SEQ ID NO: 3078787 - DNA, 25 bp, Homo sapien
tctgtaagatcacttctggtgcggc

SEQ ID NO: 3078788 - DNA, 25 bp, Homo sapien
tgatatggacagcataggagctgag

SEQ ID NO: 3078789 - DNA, 25 bp, Homo sapien
atctcagggcatcagatatctggag

SEQ ID NO: 3078790 - DNA, 25 bp, Homo sapien
agcggtggataaacccctggaaatg

SEQ ID NO: 3078791 - DNA, 25 bp, Homo sapien
tccaggttggtcagcctcgcttcac

SEQ ID NO: 3078792 - DNA, 25 bp, Homo sapien
gcaatggaaaatccacggaaacagc

SEQ ID NO: 3078793 - DNA, 25 bp, Homo sapien
tgccgatagtgatgcgctcgtacac

SEQ ID NO: 3078794 - DNA, 25 bp, Homo sapien
actgaacaatgtgccgatagtgatg

SEQ ID NO: 3078795 - DNA, 25 bp, Homo sapien
caactgtagcaagtaggggtgccgc

SEQ ID NO: 3078796 - DNA, 25 bp, Homo sapien
gctcgtacacaaggcgggttttctc

SEQ ID NO: 3078797 - DNA, 25 bp, Homo sapien
caattaacaagtcggccagccgcag

SEQ ID NO: 3078798 - DNA, 25 bp, Homo sapien
gctgtgttcctgctcggcaattaac

SEQ ID NO: 3078799 - DNA, 25 bp, Homo sapien
gttcctgctcggcaattaacaagtc

SEQ ID NO: 3078800 - DNA, 25 bp, Homo sapien
gctcggcaattaacaagtcggccag

SEQ ID NO: 3078801 - DNA, 25 bp, Homo sapien
tgaccctgctcccattccacactag

SEQ ID NO: 3078802 - DNA, 25 bp, Homo sapien
gaccctgctcccattccacactagg

SEQ ID NO: 3078803 - DNA, 25 bp, Homo sapien
ttcagctctttcactgtgaccctgc

SEQ ID NO: 3078804 - DNA, 25 bp, Homo sapien
gtggggagattcagctctttcactg

SEQ ID NO: 3078805 - DNA, 25 bp, Homo sapien
agagaaggtgggctcatcatcagct

SEQ ID NO: 3078806 - DNA, 25 bp, Homo sapien
tcatgaccatgtaggggccgctgaa

SEQ ID NO: 3078807 - DNA, 25 bp, Homo sapien
catcatcagcttgaatcacttcctt

SEQ ID NO: 3078808 - DNA, 25 bp, Homo sapien
ccaatgaccggaagagatcctagat

SEQ ID NO: 3078809 - DNA, 25 bp, Homo sapien
gatattttgagcagaaatgactcca

SEQ ID NO: 3078810 - DNA, 25 bp, Homo sapien
taagcagtcggttaggagagccatt

SEQ ID NO: 3078811 - DNA, 25 bp, Homo sapien
gctttaagcagtcggttaggagagc

SEQ ID NO: 3078812 - DNA, 25 bp, Homo sapien
cagaaatgactccagctttaagcag

SEQ ID NO: 3078813 - DNA, 25 bp, Homo sapien
caagaaaccgtaagttaagcatttg

SEQ ID NO: 3078814 - DNA, 25 bp, Homo sapien
ccgtaagttaagcatttgtggtctt

SEQ ID NO: 3078815 - DNA, 25 bp, Homo sapien
catccagctggcagcaagtctctcg

SEQ ID NO: 3078816 - DNA, 25 bp, Homo sapien
gtctctcgtatcagctgaaaatagc

SEQ ID NO: 3078817 - DNA, 25 bp, Homo sapien
tttccaagcacacccctttggatgg

SEQ ID NO: 3078818 - DNA, 25 bp, Homo sapien
acccctttggatgggccagatgcca

SEQ ID NO: 3078819 - DNA, 25 bp, Homo sapien
gagagagagggcgaaaggtgatcct

SEQ ID NO: 3078820 - DNA, 25 bp, Homo sapien
ctgaggcaacccatgctgcagggct

SEQ ID NO: 3078821 - DNA, 25 bp, Homo sapien
acgggctgtagacaagccgctgcgg

SEQ ID NO: 3078822 - DNA, 25 bp, Homo sapien
cgctgcggggagtctatcttcttca

SEQ ID NO: 3078823 - DNA, 25 bp, Homo sapien
tgaggcacagcgctgcatgaactcc

SEQ ID NO: 3078824 - DNA, 25 bp, Homo sapien
tcaggaggtcgtaagagaagccctg

SEQ ID NO: 3078825 - DNA, 25 bp, Homo sapien
ggttttgacccctctcatcgtggag

SEQ ID NO: 3078826 - DNA, 25 bp, Homo sapien
tgggtgctacgctcctttcctgctg

SEQ ID NO: 3078827 - DNA, 25 bp, Homo sapien
gatccactgattgcccgaaaatgct

SEQ ID NO: 3078828 - DNA, 25 bp, Homo sapien
gctgtcaaagcccaagtcttcgggt

SEQ ID NO: 3078829 - DNA, 25 bp, Homo sapien
tttcctaaggcccaataacgccgca

SEQ ID NO: 3078830 - DNA, 25 bp, Homo sapien
tgtttggcccaaggagttaactgca

SEQ ID NO: 3078831 - DNA, 25 bp, Homo sapien
tccaccagaacatcaacgaatttcc

SEQ ID NO: 3078832 - DNA, 25 bp, Homo sapien
taacgccgcaacaaaaagtgctgtt

SEQ ID NO: 3078833 - DNA, 25 bp, Homo sapien
tactcctcgagaaacacactataga

SEQ ID NO: 3078834 - DNA, 25 bp, Homo sapien
gaagaacggtcaccaacagcaaaca

SEQ ID NO: 3078835 - DNA, 25 bp, Homo sapien
cactgctatcccactcgtgagagaa

SEQ ID NO: 3078836 - DNA, 25 bp, Homo sapien
aatatctccctctcgcggtttccag

SEQ ID NO: 3078837 - DNA, 25 bp, Homo sapien
actgatgatcggaagcaagaaggcc

SEQ ID NO: 3078838 - DNA, 25 bp, Homo sapien
gccagaaaccgtcagggaaactgcc

SEQ ID NO: 3078839 - DNA, 25 bp, Homo sapien
taacgctgacgactataaagcgcgc

SEQ ID NO: 3078840 - DNA, 25 bp, Homo sapien
gaaactgcccggtttggactgatga

SEQ ID NO: 3078841 - DNA, 25 bp, Homo sapien
aagagtgaagggaaagcgataattc

SEQ ID NO: 3078842 - DNA, 25 bp, Homo sapien
ccaaagagtgaagggaaagcgataa

SEQ ID NO: 3078843 - DNA, 25 bp, Homo sapien
accaaagagtgaagggaaagcgata

SEQ ID NO: 3078844 - DNA, 25 bp, Homo sapien
gagtgaagggaaagcgataattcaa

SEQ ID NO: 3078845 - DNA, 25 bp, Homo sapien
tcttcctctgatctcaacgctgttt

SEQ ID NO: 3078846 - DNA, 25 bp, Homo sapien
ctcaacgctgtttgtggcaactcca

SEQ ID NO: 3078847 - DNA, 25 bp, Homo sapien
gcaatgctctgttaattctcctcct

SEQ ID NO: 3078848 - DNA, 25 bp, Homo sapien
caggccgattccaatttcttccctc

SEQ ID NO: 3078849 - DNA, 25 bp, Homo sapien
cttttcctctgaacgctattcagaa

SEQ ID NO: 3078850 - DNA, 25 bp, Homo sapien
tgtgtaccaaggtgcatctgccatc

SEQ ID NO: 3078851 - DNA, 25 bp, Homo sapien
gaaatgtgtaccaaggtgcatctgc

SEQ ID NO: 3078852 - DNA, 25 bp, Homo sapien
ccaaggtgcatctgccatctcaaca

SEQ ID NO: 3078853 - DNA, 25 bp, Homo sapien
ccttgtttgacatactcatgaagct

SEQ ID NO: 3078854 - DNA, 25 bp, Homo sapien
ctggaagacgaacagcccgagacat

SEQ ID NO: 3078855 - DNA, 25 bp, Homo sapien
taaggtaccaagttgaacaggacag

SEQ ID NO: 3078856 - DNA, 25 bp, Homo sapien
cagggagtcatttcttaaggtacca

SEQ ID NO: 3078857 - DNA, 25 bp, Homo sapien
gaagacgtaaggtcataaccacaac

SEQ ID NO: 3078858 - DNA, 25 bp, Homo sapien
caggtgcgtaccacatcagtctggc

SEQ ID NO: 3078859 - DNA, 25 bp, Homo sapien
aactgaactacaagggatgaggtac

SEQ ID NO: 3078860 - DNA, 25 bp, Homo sapien
tagggtctctatcgctcagacagga

SEQ ID NO: 3078861 - DNA, 25 bp, Homo sapien
ttatcaggaccaacagcgtctctcc

SEQ ID NO: 3078862 - DNA, 25 bp, Homo sapien
ccacaagttatgcagccgagttttc

SEQ ID NO: 3078863 - DNA, 25 bp, Homo sapien
tcgcgggagcaaacacatagtaaaa

SEQ ID NO: 3078864 - DNA, 25 bp, Homo sapien
agaaaagcgcaaaagcagtccccca

SEQ ID NO: 3078865 - DNA, 25 bp, Homo sapien
gctgccgctcccaaggattcaaaag

SEQ ID NO: 3078866 - DNA, 25 bp, Homo sapien
ggatcggttcgctctagctgccgct

SEQ ID NO: 3078867 - DNA, 25 bp, Homo sapien
gatcggttcgctctagctgccgctc

SEQ ID NO: 3078868 - DNA, 25 bp, Homo sapien
ctagctgccgctcccaaggattcaa

SEQ ID NO: 3078869 - DNA, 25 bp, Homo sapien
tgccgtagcccctagggtgggtgtc

SEQ ID NO: 3078870 - DNA, 25 bp, Homo sapien
ctggtaacactccatgtttctgatg

SEQ ID NO: 3078871 - DNA, 25 bp, Homo sapien
tggtaacactccatgtttctgatgt

SEQ ID NO: 3078872 - DNA, 25 bp, Homo sapien
tctggtaacactccatgtttctgat

SEQ ID NO: 3078873 - DNA, 25 bp, Homo sapien
catggaagccagacttggatagcca

SEQ ID NO: 3078874 - DNA, 25 bp, Homo sapien
ttttataaagtgttcgcgagcctgc

SEQ ID NO: 3078875 - DNA, 25 bp, Homo sapien
tgtttgctggaatcgaacagctcgg

SEQ ID NO: 3078876 - DNA, 25 bp, Homo sapien
ggcaggaactcgtcttcagcagctg

SEQ ID NO: 3078877 - DNA, 25 bp, Homo sapien
cgtagatttctaacaaccagtctga

SEQ ID NO: 3078878 - DNA, 25 bp, Homo sapien
aaggctgatgcgaaatgttgattcc

SEQ ID NO: 3078879 - DNA, 25 bp, Homo sapien
ttcctttctggacacacgtaaagat

SEQ ID NO: 3078880 - DNA, 25 bp, Homo sapien
cgtaaagattctggcgtagatttct

SEQ ID NO: 3078881 - DNA, 25 bp, Homo sapien
accctgagttgtggggagccaaatc

SEQ ID NO: 3078882 - DNA, 25 bp, Homo sapien
acaccctgagttgtggggagccaaa

SEQ ID NO: 3078883 - DNA, 25 bp, Homo sapien
aacaccctgagttgtggggagccaa

SEQ ID NO: 3078884 - DNA, 25 bp, Homo sapien
tcaacaccctgagttgtggggagcc

SEQ ID NO: 3078885 - DNA, 25 bp, Homo sapien
caaagtgcaacgaataagccacaca

SEQ ID NO: 3078886 - DNA, 25 bp, Homo sapien
aatcgtagggatcagcacaaagtgc

SEQ ID NO: 3078887 - DNA, 25 bp, Homo sapien
gctaccacaaattatacactgtagt

SEQ ID NO: 3078888 - DNA, 25 bp, Homo sapien
caagtgcgaacgcaatctcccgcta

SEQ ID NO: 3078889 - DNA, 25 bp, Homo sapien
tggtcagggtatcttccctgcccgg

SEQ ID NO: 3078890 - DNA, 25 bp, Homo sapien
tgtggtcagggtatcttccctgccc

SEQ ID NO: 3078891 - DNA, 25 bp, Homo sapien
aaacacagaatgcaatgagtgaacc

SEQ ID NO: 3078892 - DNA, 25 bp, Homo sapien
gggccagcaaacacagaatgcaatg

SEQ ID NO: 3078893 - DNA, 25 bp, Homo sapien
aaatccacctttaatgatcatgtta

SEQ ID NO: 3078894 - DNA, 25 bp, Homo sapien
agagaaccaacatagtccccactac

SEQ ID NO: 3078895 - DNA, 25 bp, Homo sapien
caatgcaagagacaaacctcaccct

SEQ ID NO: 3078896 - DNA, 25 bp, Homo sapien
gatcatgttatttcccttgccagtt

SEQ ID NO: 3078897 - DNA, 25 bp, Homo sapien
agtaacctccatgctcgggatacga

SEQ ID NO: 3078898 - DNA, 25 bp, Homo sapien
gccatgaagaaataacggtctcagt

SEQ ID NO: 3078899 - DNA, 25 bp, Homo sapien
tgctcgggatacgactcccgggaag

SEQ ID NO: 3078900 - DNA, 25 bp, Homo sapien
gctactgcttaagctaggcaggcca

SEQ ID NO: 3078901 - DNA, 25 bp, Homo sapien
caggattttgtgtaggactagagac

SEQ ID NO: 3078902 - DNA, 25 bp, Homo sapien
taggagaactgtggtcgtgaaaaca

SEQ ID NO: 3078903 - DNA, 25 bp, Homo sapien
tgtttacagcgtgaaagagctcctc

SEQ ID NO: 3078904 - DNA, 25 bp, Homo sapien
gctcctcgactccacttacaagttg

SEQ ID NO: 3078905 - DNA, 25 bp, Homo sapien
taagtgtcccatttcgctgatgacc

SEQ ID NO: 3078906 - DNA, 25 bp, Homo sapien
tgaaagccctttggaccctagcaga

SEQ ID NO: 3078907 - DNA, 25 bp, Homo sapien
gaccagcatggttactgaaagccct

SEQ ID NO: 3078908 - DNA, 25 bp, Homo sapien
ttttcatggaggtactaagtgtccc

SEQ ID NO: 3078909 - DNA, 25 bp, Homo sapien
caccttgctcttggttgtgaatccc

SEQ ID NO: 3078910 - DNA, 25 bp, Homo sapien
tggcctgccattagtaagaatcctg

SEQ ID NO: 3078911 - DNA, 25 bp, Homo sapien
tcggtcagtttagcaagaatttccc

SEQ ID NO: 3078912 - DNA, 25 bp, Homo sapien
tgtgaatccccagttgtccttgtat

SEQ ID NO: 3078913 - DNA, 25 bp, Homo sapien
tactcttattatctcccattgccca

SEQ ID NO: 3078914 - DNA, 25 bp, Homo sapien
actcttattatctcccattgcccaa

SEQ ID NO: 3078915 - DNA, 25 bp, Homo sapien
tgtactcttattatctcccattgcc

SEQ ID NO: 3078916 - DNA, 25 bp, Homo sapien
tctgtactcttattatctcccattg

SEQ ID NO: 3078917 - DNA, 25 bp, Homo sapien
agtatttttgtcaatacttagaata

SEQ ID NO: 3078918 - DNA, 25 bp, Homo sapien
tttcatatttagttgactgtttcat

SEQ ID NO: 3078919 - DNA, 25 bp, Homo sapien
gaagttttcatatttagttgactgt

SEQ ID NO: 3078920 - DNA, 25 bp, Homo sapien
tgaagttttcatatttagttgactg

SEQ ID NO: 3078921 - DNA, 25 bp, Homo sapien
ctttgtgaagttttcatatttagtt

SEQ ID NO: 3078922 - DNA, 25 bp, Homo sapien
cttctgaagtaataacgaagacctt

SEQ ID NO: 3078923 - DNA, 25 bp, Homo sapien
cagagaagtccgtaactccaaaaag

SEQ ID NO: 3078924 - DNA, 25 bp, Homo sapien
gaccttttattagtgtctcagagaa

SEQ ID NO: 3078925 - DNA, 25 bp, Homo sapien
ttgtataggaataccacatcctacc

SEQ ID NO: 3078926 - DNA, 25 bp, Homo sapien
taaagttacctgagttgtgaatgca

SEQ ID NO: 3078927 - DNA, 25 bp, Homo sapien
gctagggctcttgcactaaagttac

SEQ ID NO: 3078928 - DNA, 25 bp, Homo sapien
gagtttgtgaccagtgctggcaaca

SEQ ID NO: 3078929 - DNA, 25 bp, Homo sapien
ccctacaatgggctaaacgttcaag

SEQ ID NO: 3078930 - DNA, 25 bp, Homo sapien
gcttcaagtccgatgacattattgc

SEQ ID NO: 3078931 - DNA, 25 bp, Homo sapien
tcaagcttggacatgagagtctctc

SEQ ID NO: 3078932 - DNA, 25 bp, Homo sapien
ggtcacaactatccctggtgttgct

SEQ ID NO: 3078933 - DNA, 25 bp, Homo sapien
agagtctctcttgattgtgaacccc

SEQ ID NO: 3078934 - DNA, 25 bp, Homo sapien
taatgtctccatacgactgctgtga

SEQ ID NO: 3078935 - DNA, 25 bp, Homo sapien
gatgtcttacgctactccctgcaga

SEQ ID NO: 3078936 - DNA, 25 bp, Homo sapien
aatctagaaagattgcagtgttgcc

SEQ ID NO: 3078937 - DNA, 25 bp, Homo sapien
tgttgccctacatgcctactttgga

SEQ ID NO: 3078938 - DNA, 25 bp, Homo sapien
ctcacgtctgtgacaaatggttgaa

SEQ ID NO: 3078939 - DNA, 25 bp, Homo sapien
cccatcaggtgcagtgtcagtttca

SEQ ID NO: 3078940 - DNA, 25 bp, Homo sapien
catggtcctcactcatatctgtcac

SEQ ID NO: 3078941 - DNA, 25 bp, Homo sapien
tgaaaaggagtcaacatggccccaa

SEQ ID NO: 3078942 - DNA, 25 bp, Homo sapien
aaaaatggctggatagaactgggac

SEQ ID NO: 3078943 - DNA, 25 bp, Homo sapien
tgtaggtccgactacacagcagtgt

SEQ ID NO: 3078944 - DNA, 25 bp, Homo sapien
aaaggcagcagactattggtacaca

SEQ ID NO: 3078945 - DNA, 25 bp, Homo sapien
ttatagtccaaagtgcttagcgaag

SEQ ID NO: 3078946 - DNA, 25 bp, Homo sapien
aactaatggtatctacatatttctg

SEQ ID NO: 3078947 - DNA, 25 bp, Homo sapien
taaagagtggcagtatccctttttc

SEQ ID NO: 3078948 - DNA, 25 bp, Homo sapien
tttaacatggtctgcatcaatctgt

SEQ ID NO: 3078949 - DNA, 25 bp, Homo sapien
agttctacactcaatccttaaagag

SEQ ID NO: 3078950 - DNA, 25 bp, Homo sapien
tggtgaaagttctacactcaatcct

SEQ ID NO: 3078951 - DNA, 25 bp, Homo sapien
ttagaactctgcatctaaccaagct

SEQ ID NO: 3078952 - DNA, 25 bp, Homo sapien
tgcatctaaccaagctttccccttt

SEQ ID NO: 3078953 - DNA, 25 bp, Homo sapien
tcccctttcgcttagcctctttgag

SEQ ID NO: 3078954 - DNA, 25 bp, Homo sapien
aactctgcatctaaccaagctttcc

SEQ ID NO: 3078955 - DNA, 25 bp, Homo sapien
gcagcctttcccaaatgcacaccag

SEQ ID NO: 3078956 - DNA, 25 bp, Homo sapien
cagcctttcccaaatgcacaccagg

SEQ ID NO: 3078957 - DNA, 25 bp, Homo sapien
gaaggtctcgggcaaggactctggc

SEQ ID NO: 3078958 - DNA, 25 bp, Homo sapien
ctgaaggtctcgggcaaggactctg

SEQ ID NO: 3078959 - DNA, 25 bp, Homo sapien
aggtctcgggcaaggactctggccc

SEQ ID NO: 3078960 - DNA, 25 bp, Homo sapien
tctcgggcaaggactctggcccgca

SEQ ID NO: 3078961 - DNA, 25 bp, Homo sapien
gaatggaagggagactcccggtcaa

SEQ ID NO: 3078962 - DNA, 25 bp, Homo sapien
agagcaggaatggaagggagactcc

SEQ ID NO: 3078963 - DNA, 25 bp, Homo sapien
tggaagggagactcccggtcaacat

SEQ ID NO: 3078964 - DNA, 25 bp, Homo sapien
gcaggaatggaagggagactcccgg

SEQ ID NO: 3078965 - DNA, 25 bp, Homo sapien
tgaggctgtatgagccaacatcgca

SEQ ID NO: 3078966 - DNA, 25 bp, Homo sapien
aattatcccagtgtgactgcgcatg

SEQ ID NO: 3078967 - DNA, 25 bp, Homo sapien
gaacccaagaactcaagaactccat

SEQ ID NO: 3078968 - DNA, 25 bp, Homo sapien
ggcacatgcctctatcgcagcactt

SEQ ID NO: 3078969 - DNA, 25 bp, Homo sapien
agacagtagagcaccaatgccgggc

SEQ ID NO: 3078970 - DNA, 25 bp, Homo sapien
cagggccaggaacgtaatgaatcca

SEQ ID NO: 3078971 - DNA, 25 bp, Homo sapien
taccatgcggttgaacagtgtgcct

SEQ ID NO: 3078972 - DNA, 25 bp, Homo sapien
tcttacacgtgtctacagggccagg

SEQ ID NO: 3078973 - DNA, 25 bp, Homo sapien
ctatttgttcaccatcaggaaaact

SEQ ID NO: 3078974 - DNA, 25 bp, Homo sapien
attttcatctgtattgaagctgaga

SEQ ID NO: 3078975 - DNA, 25 bp, Homo sapien
gggcctatttgttcaccatcaggaa

SEQ ID NO: 3078976 - DNA, 25 bp, Homo sapien
cttcagggcctatttgttcaccatc

SEQ ID NO: 3078977 - DNA, 25 bp, Homo sapien
taaagatgtgctgggttgtgaacaa

SEQ ID NO: 3078978 - DNA, 25 bp, Homo sapien
caaaatgtgtaatagacacccacaa

SEQ ID NO: 3078979 - DNA, 25 bp, Homo sapien
tctgagtcaggtataagcaaacaca

SEQ ID NO: 3078980 - DNA, 25 bp, Homo sapien
caagaagcaatggtgtatattctca

SEQ ID NO: 3078981 - DNA, 25 bp, Homo sapien
aaacccgcccacactggtatgctct

SEQ ID NO: 3078982 - DNA, 25 bp, Homo sapien
atgaaggagtcgtgaaacccgccca

SEQ ID NO: 3078983 - DNA, 25 bp, Homo sapien
catccgggggctgtgtcatgaccat

SEQ ID NO: 3078984 - DNA, 25 bp, Homo sapien
ttcaatgtcactgtcgctactcatt

SEQ ID NO: 3078985 - DNA, 25 bp, Homo sapien
ggcaggaaggaaggagaacatgttt

SEQ ID NO: 3078986 - DNA, 25 bp, Homo sapien
ctggcaggaaggaaggagaacatgt

SEQ ID NO: 3078987 - DNA, 25 bp, Homo sapien
tggcaggaaggaaggagaacatgtt

SEQ ID NO: 3078988 - DNA, 25 bp, Homo sapien
tcagcatcagatcattaaaccagcg

SEQ ID NO: 3078989 - DNA, 25 bp, Homo sapien
caagaaataaactggcctacctaca

SEQ ID NO: 3078990 - DNA, 25 bp, Homo sapien
caaaggttgtcccatatggttccag

SEQ ID NO: 3078991 - DNA, 25 bp, Homo sapien
aaggtttttaacaggcatgccaagg

SEQ ID NO: 3078992 - DNA, 25 bp, Homo sapien
aggtagtacaggctgtaactctcca

SEQ ID NO: 3078993 - DNA, 25 bp, Homo sapien
atactgccatgtatcaaggctcggg

SEQ ID NO: 3078994 - DNA, 25 bp, Homo sapien
gaatccaaagctttacactgccggt

SEQ ID NO: 3078995 - DNA, 25 bp, Homo sapien
cagaatatcaccgatactgccatgt

SEQ ID NO: 3078996 - DNA, 25 bp, Homo sapien
ttttctcaaccgcaggcaagccact

SEQ ID NO: 3078997 - DNA, 25 bp, Homo sapien
tacactggatcgagctggcttgggc

SEQ ID NO: 3078998 - DNA, 25 bp, Homo sapien
tcttcgaagtgatagactacctgct

SEQ ID NO: 3078999 - DNA, 25 bp, Homo sapien
tccagggtccactgctcttcgaagt

SEQ ID NO: 3079000 - DNA, 25 bp, Homo sapien
ttgaacgactattttctccagggtc

SEQ ID NO: 3079001 - DNA, 25 bp, Homo sapien
aaagacatttaagaacacctctgaa

SEQ ID NO: 3079002 - DNA, 25 bp, Homo sapien
tgcaaagacatttaagaacacctct

SEQ ID NO: 3079003 - DNA, 25 bp, Homo sapien
acatttaagaacacctctgaatagg

SEQ ID NO: 3079004 - DNA, 25 bp, Homo sapien
ctgcaaagacatttaagaacacctc

SEQ ID NO: 3079005 - DNA, 25 bp, Homo sapien
cggtatggaaaacctggagccctca

SEQ ID NO: 3079006 - DNA, 25 bp, Homo sapien
gagagtctagaaacaaacccttata

SEQ ID NO: 3079007 - DNA, 25 bp, Homo sapien
tgccaagacaatgcaatgggcaagg

SEQ ID NO: 3079008 - DNA, 25 bp, Homo sapien
taatcaagactatgtggtactgcca

SEQ ID NO: 3079009 - DNA, 25 bp, Homo sapien
gacaagagattaatgaccaggatct

SEQ ID NO: 3079010 - DNA, 25 bp, Homo sapien
gttaacaacccatatgcacaagaag

SEQ ID NO: 3079011 - DNA, 25 bp, Homo sapien
tagtaactgacttaagtagcagcag

SEQ ID NO: 3079012 - DNA, 25 bp, Homo sapien
tagcaaatcccttgagcaggtcaaa

SEQ ID NO: 3079013 - DNA, 25 bp, Homo sapien
aaaaaggcttgtctgcatgtctcca

SEQ ID NO: 3079014 - DNA, 25 bp, Homo sapien
gttttcatacatcgaacttcggcca

SEQ ID NO: 3079015 - DNA, 25 bp, Homo sapien
gagggcactcgccacattgcctgtt

SEQ ID NO: 3079016 - DNA, 25 bp, Homo sapien
gactttgccaggagttccattccca

SEQ ID NO: 3079017 - DNA, 25 bp, Homo sapien
tcttgatattctactactggaaccc

SEQ ID NO: 3079018 - DNA, 25 bp, Homo sapien
gtagcagcggagcataaatgtgttc

SEQ ID NO: 3079019 - DNA, 25 bp, Homo sapien
ggatcaatgtctagtaaactactgg

SEQ ID NO: 3079020 - DNA, 25 bp, Homo sapien
tatactgctccggtccttaaggtcc

SEQ ID NO: 3079021 - DNA, 25 bp, Homo sapien
ccatgttgttatattccacatcatt

SEQ ID NO: 3079022 - DNA, 25 bp, Homo sapien
tgttgttatattccacatcattttc

SEQ ID NO: 3079023 - DNA, 25 bp, Homo sapien
gcatcttccatgagttctccctctt

SEQ ID NO: 3079024 - DNA, 25 bp, Homo sapien
ctgcatcttccatgagttctccctc

SEQ ID NO: 3079025 - DNA, 25 bp, Homo sapien
gctgccatcgagctgatttacttca

SEQ ID NO: 3079026 - DNA, 25 bp, Homo sapien
ctgtattacttgttgctgtggaact

SEQ ID NO: 3079027 - DNA, 25 bp, Homo sapien
gctgtggaactagcagaggaactgc

SEQ ID NO: 3079028 - DNA, 25 bp, Homo sapien
cttcatcctcataaacaagatccag

SEQ ID NO: 3079029 - DNA, 25 bp, Homo sapien
ttaacatttacataagggcatacat

SEQ ID NO: 3079030 - DNA, 25 bp, Homo sapien
tatttttagcctactgttttagcac

SEQ ID NO: 3079031 - DNA, 25 bp, Homo sapien
aatccacaatgtatggtagtttagg

SEQ ID NO: 3079032 - DNA, 25 bp, Homo sapien
ttactaatggaaatcaatggacaat

SEQ ID NO: 3079033 - DNA, 25 bp, Homo sapien
ttcattctgaatcttctcctcatct

SEQ ID NO: 3079034 - DNA, 25 bp, Homo sapien
caccttcgagaagcatgtcagagca

SEQ ID NO: 3079035 - DNA, 25 bp, Homo sapien
gacttcttagctcgtgtctccagag

SEQ ID NO: 3079036 - DNA, 25 bp, Homo sapien
gaagctgtagtaggaccaccttcga

SEQ ID NO: 3079037 - DNA, 25 bp, Homo sapien
cttgacttctgagttcgagacagct

SEQ ID NO: 3079038 - DNA, 25 bp, Homo sapien
cttccaactgagtaatgtaccaatg

SEQ ID NO: 3079039 - DNA, 25 bp, Homo sapien
tgctggtcccgggatttttgaaaga

SEQ ID NO: 3079040 - DNA, 25 bp, Homo sapien
ggatataactagtctgtgcagcttc

SEQ ID NO: 3079041 - DNA, 25 bp, Homo sapien
tttgttggatataactagtctgtgc

SEQ ID NO: 3079042 - DNA, 25 bp, Homo sapien
tccaaacggaaaaatctattatagc

SEQ ID NO: 3079043 - DNA, 25 bp, Homo sapien
tacaggactggtgaaccatctctac

SEQ ID NO: 3079044 - DNA, 25 bp, Homo sapien
cttcaaagtcagatgcaaattctcg

SEQ ID NO: 3079045 - DNA, 25 bp, Homo sapien
gattcaagtatccttcatttgcgag

SEQ ID NO: 3079046 - DNA, 25 bp, Homo sapien
taagtagtaacctcgcacaactcca

SEQ ID NO: 3079047 - DNA, 25 bp, Homo sapien
aacacagataagtagtaacctcgca

SEQ ID NO: 3079048 - DNA, 25 bp, Homo sapien
tagtaacctcgcacaactccatttc

SEQ ID NO: 3079049 - DNA, 25 bp, Homo sapien
cagataagtagtaacctcgcacaac

SEQ ID NO: 3079050 - DNA, 25 bp, Homo sapien
gaagaggtggactgtaaacaggatc

SEQ ID NO: 3079051 - DNA, 25 bp, Homo sapien
tttaacctccagcaaagtcctgaaa

SEQ ID NO: 3079052 - DNA, 25 bp, Homo sapien
tcctgaaacttgaagaggtggactg

SEQ ID NO: 3079053 - DNA, 25 bp, Homo sapien
aggatctgctctctgacgcaaagtg

SEQ ID NO: 3079054 - DNA, 25 bp, Homo sapien
ttaacatacaactgacaaagcctac

SEQ ID NO: 3079055 - DNA, 25 bp, Homo sapien
tccatgctgccctcaaagacaaatt

SEQ ID NO: 3079056 - DNA, 25 bp, Homo sapien
catgccctgcccagtgtggccttat

SEQ ID NO: 3079057 - DNA, 25 bp, Homo sapien
gctaagaacctttgcatgttacgat

SEQ ID NO: 3079058 - DNA, 25 bp, Homo sapien
tctggctcttccttatatacacata

SEQ ID NO: 3079059 - DNA, 25 bp, Homo sapien
ctaagacttctaaagtgagtgacac

SEQ ID NO: 3079060 - DNA, 25 bp, Homo sapien
cagtctaaagatacaatataatcca

SEQ ID NO: 3079061 - DNA, 25 bp, Homo sapien
gacacagttcactagattactgtct

SEQ ID NO: 3079062 - DNA, 25 bp, Homo sapien
ctgaatcgtaagatggcactaattc

SEQ ID NO: 3079063 - DNA, 25 bp, Homo sapien
gctgaatcgtaagatggcactaatt

SEQ ID NO: 3079064 - DNA, 25 bp, Homo sapien
tgaatcgtaagatggcactaattca

SEQ ID NO: 3079065 - DNA, 25 bp, Homo sapien
ctctgtctcagtcaaccaataaatc

SEQ ID NO: 3079066 - DNA, 25 bp, Homo sapien
actctgtctcagtcaaccaataaat

SEQ ID NO: 3079067 - DNA, 25 bp, Homo sapien
tctgtctcagtcaaccaataaatca

SEQ ID NO: 3079068 - DNA, 25 bp, Homo sapien
taacttaatgtcacgaatgctgatc

SEQ ID NO: 3079069 - DNA, 25 bp, Homo sapien
taaaggcaatagaaacaccactgct

SEQ ID NO: 3079070 - DNA, 25 bp, Homo sapien
atgcagcacctacaacaatactggg

SEQ ID NO: 3079071 - DNA, 25 bp, Homo sapien
ggtagtgagcattactggagaaaga

SEQ ID NO: 3079072 - DNA, 25 bp, Homo sapien
gagctcttagatatcaactcactct

SEQ ID NO: 3079073 - DNA, 25 bp, Homo sapien
gaacaggagtggtaacaaaagatgc

SEQ ID NO: 3079074 - DNA, 25 bp, Homo sapien
catgggcttccgatgaacttgctga

SEQ ID NO: 3079075 - DNA, 25 bp, Homo sapien
gaaacatcataaggatctctgagct

SEQ ID NO: 3079076 - DNA, 25 bp, Homo sapien
tatatccttccttgacaccatttct

SEQ ID NO: 3079077 - DNA, 25 bp, Homo sapien
ccttccttgacaccatttcttccaa

SEQ ID NO: 3079078 - DNA, 25 bp, Homo sapien
tccttgacaccatttcttccaaaag

SEQ ID NO: 3079079 - DNA, 25 bp, Homo sapien
ccttgacaccatttcttccaaaagc

SEQ ID NO: 3079080 - DNA, 25 bp, Homo sapien
tggtgctccacctcctgaagtaagg

SEQ ID NO: 3079081 - DNA, 25 bp, Homo sapien
ccacctcctgaagtaaggattccaa

SEQ ID NO: 3079082 - DNA, 25 bp, Homo sapien
aggattccaaaagctctgtttcttg

SEQ ID NO: 3079083 - DNA, 25 bp, Homo sapien
tctgtttcttgggttagagatgtct

SEQ ID NO: 3079084 - DNA, 25 bp, Homo sapien
tccactgcattcctaatttcccgaa

SEQ ID NO: 3079085 - DNA, 25 bp, Homo sapien
cagctgtgtgtctaaccgtgcaatc

SEQ ID NO: 3079086 - DNA, 25 bp, Homo sapien
cgtgcaatcatcatctccactgcat

SEQ ID NO: 3079087 - DNA, 25 bp, Homo sapien
cagtgttataagcttattcttcagc

SEQ ID NO: 3079088 - DNA, 25 bp, Homo sapien
gacgccgacgaagtttggctacctc

SEQ ID NO: 3079089 - DNA, 25 bp, Homo sapien
tgatcagttccatgagacgccgacg

SEQ ID NO: 3079090 - DNA, 25 bp, Homo sapien
aaggtttaaaggtatgtccgccatg

SEQ ID NO: 3079091 - DNA, 25 bp, Homo sapien
tgctcataaatttctgccaaaggtt

SEQ ID NO: 3079092 - DNA, 25 bp, Homo sapien
cctacaacgaaaagatctgcaaatg

SEQ ID NO: 3079093 - DNA, 25 bp, Homo sapien
taagatctagataggcgtactcatg

SEQ ID NO: 3079094 - DNA, 25 bp, Homo sapien
aaaagtgacctagatcctacaacga

SEQ ID NO: 3079095 - DNA, 25 bp, Homo sapien
acaagtgtctaagttcgtgctccat

SEQ ID NO: 3079096 - DNA, 25 bp, Homo sapien
caagtccagcaaaatacactaagtt

SEQ ID NO: 3079097 - DNA, 25 bp, Homo sapien
gatacacttcttacaagtccagcaa

SEQ ID NO: 3079098 - DNA, 25 bp, Homo sapien
agatacacttcttacaagtccagca

SEQ ID NO: 3079099 - DNA, 25 bp, Homo sapien
cttacaagtccagcaaaatacacta

SEQ ID NO: 3079100 - DNA, 25 bp, Homo sapien
ctatcatctagcaaagtactttctg

SEQ ID NO: 3079101 - DNA, 25 bp, Homo sapien
tcataaataactaaaaggcaactac

SEQ ID NO: 3079102 - DNA, 25 bp, Homo sapien
aaaggcaactaccaatatagtgtca

SEQ ID NO: 3079103 - DNA, 25 bp, Homo sapien
acttaacagtaacagcgcatgactg

SEQ ID NO: 3079104 - DNA, 25 bp, Homo sapien
tcaagctgttgtgttacttcttctg

SEQ ID NO: 3079105 - DNA, 25 bp, Homo sapien
gactgcagagttgaagagtatcaag

SEQ ID NO: 3079106 - DNA, 25 bp, Homo sapien
aacgacaatttactagttctcgtag

SEQ ID NO: 3079107 - DNA, 25 bp, Homo sapien
tctgcccaacgacaatttactagtt

SEQ ID NO: 3079108 - DNA, 25 bp, Homo sapien
acgccattgcactccggcctggacg

SEQ ID NO: 3079109 - DNA, 25 bp, Homo sapien
gaaatcacgccattgcactccggcc

SEQ ID NO: 3079110 - DNA, 25 bp, Homo sapien
aatcacgccattgcactccggcctg

SEQ ID NO: 3079111 - DNA, 25 bp, Homo sapien
tcacgccattgcactccggcctgga

SEQ ID NO: 3079112 - DNA, 25 bp, Homo sapien
caatgaggacattgagctctctgct

SEQ ID NO: 3079113 - DNA, 25 bp, Homo sapien
atgaggacattgagctctctgctct

SEQ ID NO: 3079114 - DNA, 25 bp, Homo sapien
tgaggacattgagctctctgctctg

SEQ ID NO: 3079115 - DNA, 25 bp, Homo sapien
aattggaactctcataaacttctgg

SEQ ID NO: 3079116 - DNA, 25 bp, Homo sapien
cattaatgtggaggaattggaactc

SEQ ID NO: 3079117 - DNA, 25 bp, Homo sapien
cacaccaactgttagcattaatgtg

SEQ ID NO: 3079118 - DNA, 25 bp, Homo sapien
tggctaaaattcacaaaaccgaaca

SEQ ID NO: 3079119 - DNA, 25 bp, Homo sapien
atacagctgaaacaacacagtttgg

SEQ ID NO: 3079120 - DNA, 25 bp, Homo sapien
gcatcccgcaatttctccatacaaa

SEQ ID NO: 3079121 - DNA, 25 bp, Homo sapien
aatgaaacatcggaaaacctcagca

SEQ ID NO: 3079122 - DNA, 25 bp, Homo sapien
aatgaggacacaggcgtgcatcccg

SEQ ID NO: 3079123 - DNA, 25 bp, Homo sapien
cttgaaaactccaggatacgcacca

SEQ ID NO: 3079124 - DNA, 25 bp, Homo sapien
gccaagacatccttgaaaactccag

SEQ ID NO: 3079125 - DNA, 25 bp, Homo sapien
ctgtgccaagacatccttgaaaact

SEQ ID NO: 3079126 - DNA, 25 bp, Homo sapien
aaaactccaggatacgcaccacctg

SEQ ID NO: 3079127 - DNA, 25 bp, Homo sapien
tgcggaacagtgagcacaagacacc

SEQ ID NO: 3079128 - DNA, 25 bp, Homo sapien
ctgcggaacagtgagcacaagacac

SEQ ID NO: 3079129 - DNA, 25 bp, Homo sapien
gcccgaggtcgccagatcaaatcgc

SEQ ID NO: 3079130 - DNA, 25 bp, Homo sapien
cgcagtctgacctcttaggcgccgg

SEQ ID NO: 3079131 - DNA, 25 bp, Homo sapien
caggctccgcagtctgacctcttag

SEQ ID NO: 3079132 - DNA, 25 bp, Homo sapien
caaatcgccgataaaagcccggcgc

SEQ ID NO: 3079133 - DNA, 25 bp, Homo sapien
aacctcggcccacgtgacgcgggcg

SEQ ID NO: 3079134 - DNA, 25 bp, Homo sapien
cagaagtagggcgaacggtggccgc

SEQ ID NO: 3079135 - DNA, 25 bp, Homo sapien
gcgggcgcgcgcctatggaactgac

SEQ ID NO: 3079136 - DNA, 25 bp, Homo sapien
catttcgccatttttaccggcgcgc

SEQ ID NO: 3079137 - DNA, 25 bp, Homo sapien
accaaccgtaaccagagcagctggg

SEQ ID NO: 3079138 - DNA, 25 bp, Homo sapien
agaagctgcgaagcgcatgcgcgca

SEQ ID NO: 3079139 - DNA, 25 bp, Homo sapien
agttcagcgaagaaggtgccgcaga

SEQ ID NO: 3079140 - DNA, 25 bp, Homo sapien
gagaattcgcaaacaccaaccgtaa

SEQ ID NO: 3079141 - DNA, 25 bp, Homo sapien
caaagctaatcgagttagaaggctc

SEQ ID NO: 3079142 - DNA, 25 bp, Homo sapien
catttctcattacggtggtgagagg

SEQ ID NO: 3079143 - DNA, 25 bp, Homo sapien
gtgagaggacgggaccacacactgt

SEQ ID NO: 3079144 - DNA, 25 bp, Homo sapien
gctccaaactgaggtgtcatttctc

SEQ ID NO: 3079145 - DNA, 25 bp, Homo sapien
cagtaagtattctggacatgtttaa

SEQ ID NO: 3079146 - DNA, 25 bp, Homo sapien
tacaggttttaattccagacaacag

SEQ ID NO: 3079147 - DNA, 25 bp, Homo sapien
aagaggattgtaggttttattgact

SEQ ID NO: 3079148 - DNA, 25 bp, Homo sapien
ttgactaagaagataaagggatgca

SEQ ID NO: 3079149 - DNA, 25 bp, Homo sapien
agttaagtgatctgcacagggtcat

SEQ ID NO: 3079150 - DNA, 25 bp, Homo sapien
ggaaatacggatctagagctagtgg

SEQ ID NO: 3079151 - DNA, 25 bp, Homo sapien
taggagtcatccacaaagaggcttg

SEQ ID NO: 3079152 - DNA, 25 bp, Homo sapien
taactgaagctgttctcacaaccct

SEQ ID NO: 3079153 - DNA, 25 bp, Homo sapien
agtaataatttattggcaacttgac

SEQ ID NO: 3079154 - DNA, 25 bp, Homo sapien
aatttattggcaacttgacctctta

SEQ ID NO: 3079155 - DNA, 25 bp, Homo sapien
taacagtaataatttattggcaact

SEQ ID NO: 3079156 - DNA, 25 bp, Homo sapien
ataatttattggcaacttgacctct

SEQ ID NO: 3079157 - DNA, 25 bp, Homo sapien
caaccctgtgattaacatctttcta

SEQ ID NO: 3079158 - DNA, 25 bp, Homo sapien
gcctctactttgaacagtttcctta

SEQ ID NO: 3079159 - DNA, 25 bp, Homo sapien
gggaaattgacacatacatataaca

SEQ ID NO: 3079160 - DNA, 25 bp, Homo sapien
cctagtactagccaaatgtgtatgt

SEQ ID NO: 3079161 - DNA, 25 bp, Homo sapien
aatttcagtttcctagctttcatgt

SEQ ID NO: 3079162 - DNA, 25 bp, Homo sapien
gataagtgctcttctaatttcagtt

SEQ ID NO: 3079163 - DNA, 25 bp, Homo sapien
tcagtttcctagctttcatgtagaa

SEQ ID NO: 3079164 - DNA, 25 bp, Homo sapien
gcaaaactggcaagtagcagataag

SEQ ID NO: 3079165 - DNA, 25 bp, Homo sapien
cagggacagtctaaaacagcatcag

SEQ ID NO: 3079166 - DNA, 25 bp, Homo sapien
tctgtgggagactacaggtcacata

SEQ ID NO: 3079167 - DNA, 25 bp, Homo sapien
gctgttcaacattagcaggcaaggg

SEQ ID NO: 3079168 - DNA, 25 bp, Homo sapien
cgcaaacgtggctatcacagaaaag

SEQ ID NO: 3079169 - DNA, 25 bp, Homo sapien
ctggcctgaaattacaagactaagt

SEQ ID NO: 3079170 - DNA, 25 bp, Homo sapien
taaacattcttttatgatagaccag

SEQ ID NO: 3079171 - DNA, 25 bp, Homo sapien
gccacataccgaatgactgaaatgt

SEQ ID NO: 3079172 - DNA, 25 bp, Homo sapien
ttctggcctgaaattacaagactaa

SEQ ID NO: 3079173 - DNA, 25 bp, Homo sapien
tccttttggctgaactttattcata

SEQ ID NO: 3079174 - DNA, 25 bp, Homo sapien
actttattcatatattatctgccct

SEQ ID NO: 3079175 - DNA, 25 bp, Homo sapien
ttaacaagacatcttcctaaatttc

SEQ ID NO: 3079176 - DNA, 25 bp, Homo sapien
tctagacatcaagggttaacaagac

SEQ ID NO: 3079177 - DNA, 25 bp, Homo sapien
tctgccgcagttttctcttctttag

SEQ ID NO: 3079178 - DNA, 25 bp, Homo sapien
atttgaattgctctgccgcagtttt

SEQ ID NO: 3079179 - DNA, 25 bp, Homo sapien
gctctgccgcagttttctcttcttt

SEQ ID NO: 3079180 - DNA, 25 bp, Homo sapien
ttgaattgctctgccgcagttttct

SEQ ID NO: 3079181 - DNA, 25 bp, Homo sapien
aacagccacagaacctatatgattc

SEQ ID NO: 3079182 - DNA, 25 bp, Homo sapien
cgttatgtaaataggacagcccaaa

SEQ ID NO: 3079183 - DNA, 25 bp, Homo sapien
cactgatcaacatttgcccaacatg

SEQ ID NO: 3079184 - DNA, 25 bp, Homo sapien
catacgtcttactacaacccagtta

SEQ ID NO: 3079185 - DNA, 25 bp, Homo sapien
ccccagcctcggcgacagagggaga

SEQ ID NO: 3079186 - DNA, 25 bp, Homo sapien
tgcaccccagcctcggcgacagagg

SEQ ID NO: 3079187 - DNA, 25 bp, Homo sapien
accccagcctcggcgacagagggag

SEQ ID NO: 3079188 - DNA, 25 bp, Homo sapien
gcaccccagcctcggcgacagaggg

SEQ ID NO: 3079189 - DNA, 25 bp, Homo sapien
catcccctaagaaagattatgaaat

SEQ ID NO: 3079190 - DNA, 25 bp, Homo sapien
ttatagcaagataatacctgaacag

SEQ ID NO: 3079191 - DNA, 25 bp, Homo sapien
tttagtattatcaattcaggtgttc

SEQ ID NO: 3079192 - DNA, 25 bp, Homo sapien
aacatagcactattggttccaatga

SEQ ID NO: 3079193 - DNA, 25 bp, Homo sapien
tgtgcccagcatactacctcatttt

SEQ ID NO: 3079194 - DNA, 25 bp, Homo sapien
ttaaagcagtaggtacaagactcac

SEQ ID NO: 3079195 - DNA, 25 bp, Homo sapien
gccataacttgatccaaagtaaaag

SEQ ID NO: 3079196 - DNA, 25 bp, Homo sapien
tcagcctttgacataagtattgttc

SEQ ID NO: 3079197 - DNA, 25 bp, Homo sapien
gcaacactcagagctaaagctaaac

SEQ ID NO: 3079198 - DNA, 25 bp, Homo sapien
aacactcagagctaaagctaaacaa

SEQ ID NO: 3079199 - DNA, 25 bp, Homo sapien
caacactcagagctaaagctaaaca

SEQ ID NO: 3079200 - DNA, 25 bp, Homo sapien
taaagcgggcatacaaagtttgata

SEQ ID NO: 3079201 - DNA, 25 bp, Homo sapien
caactggtttaaagcgggcatacaa

SEQ ID NO: 3079202 - DNA, 25 bp, Homo sapien
tctgctcaacagcaactggtttaaa

SEQ ID NO: 3079203 - DNA, 25 bp, Homo sapien
gagactttatcactgacaattcctt

SEQ ID NO: 3079204 - DNA, 25 bp, Homo sapien
ctgtatttccacctacgcaggagac

SEQ ID NO: 3079205 - DNA, 25 bp, Homo sapien
gtatttccacctacgcaggagactg

SEQ ID NO: 3079206 - DNA, 25 bp, Homo sapien
tttccacctacgcaggagactgagg

SEQ ID NO: 3079207 - DNA, 25 bp, Homo sapien
tatttccacctacgcaggagactga

SEQ ID NO: 3079208 - DNA, 25 bp, Homo sapien
gggcagctacccataatacatgttt

SEQ ID NO: 3079209 - DNA, 25 bp, Homo sapien
gttggtatataaagcataagaaata

SEQ ID NO: 3079210 - DNA, 25 bp, Homo sapien
cattagctcgatcaataagactgac

SEQ ID NO: 3079211 - DNA, 25 bp, Homo sapien
tggccatagagctaaaagagaggac

SEQ ID NO: 3079212 - DNA, 25 bp, Homo sapien
taaacctaggaattggagttcagcc

SEQ ID NO: 3079213 - DNA, 25 bp, Homo sapien
gctatcaggtataaggacacgtgcc

SEQ ID NO: 3079214 - DNA, 25 bp, Homo sapien
agctgctaaggatattgaggccaga

SEQ ID NO: 3079215 - DNA, 25 bp, Homo sapien
tagttaatgccagtgaactgttcac

SEQ ID NO: 3079216 - DNA, 25 bp, Homo sapien
tttaaactgataaaaacagatacta

SEQ ID NO: 3079217 - DNA, 25 bp, Homo sapien
cacttgatcttagccaaaaggctga

SEQ ID NO: 3079218 - DNA, 25 bp, Homo sapien
tcttagccaaaaggctgagaagaaa

SEQ ID NO: 3079219 - DNA, 25 bp, Homo sapien
tgatcttagccaaaaggctgagaag

SEQ ID NO: 3079220 - DNA, 25 bp, Homo sapien
tagccacaaatttcacggactattg

SEQ ID NO: 3079221 - DNA, 25 bp, Homo sapien
tactgaagaacaactgccctagagg

SEQ ID NO: 3079222 - DNA, 25 bp, Homo sapien
aatattaattaagcctgatacctgg

SEQ ID NO: 3079223 - DNA, 25 bp, Homo sapien
taatgttaacagacgatgcttggag

SEQ ID NO: 3079224 - DNA, 25 bp, Homo sapien
tgatttcatattccagcctgtattg

SEQ ID NO: 3079225 - DNA, 25 bp, Homo sapien
gaatgtaatccagatcagactcagc

SEQ ID NO: 3079226 - DNA, 25 bp, Homo sapien
cacttgctgaatcaggatgattagt

SEQ ID NO: 3079227 - DNA, 25 bp, Homo sapien
gctgaatcaggatgattagtcttga

SEQ ID NO: 3079228 - DNA, 25 bp, Homo sapien
ctaaaaggctagttttatcagtcaa

SEQ ID NO: 3079229 - DNA, 25 bp, Homo sapien
tttatcagtcaaagtagactactta

SEQ ID NO: 3079230 - DNA, 25 bp, Homo sapien
ttttatcagtcaaagtagactactt

SEQ ID NO: 3079231 - DNA, 25 bp, Homo sapien
tctgaaattcaatgcgtttagaacc

SEQ ID NO: 3079232 - DNA, 25 bp, Homo sapien
ctgaaattcaatgcgtttagaaccc

SEQ ID NO: 3079233 - DNA, 25 bp, Homo sapien
gaaattcaatgcgtttagaacccat

SEQ ID NO: 3079234 - DNA, 25 bp, Homo sapien
tgaaattcaatgcgtttagaaccca

SEQ ID NO: 3079235 - DNA, 25 bp, Homo sapien
tgacaatactattgcactgctagct

SEQ ID NO: 3079236 - DNA, 25 bp, Homo sapien
taaagtcagagcattcgttagcagt

SEQ ID NO: 3079237 - DNA, 25 bp, Homo sapien
tacagtagtgcaataaagtcagagc

SEQ ID NO: 3079238 - DNA, 25 bp, Homo sapien
gctagctgtaaagtacagtagtgca

SEQ ID NO: 3079239 - DNA, 25 bp, Homo sapien
taaactacccagtagatctccttca

SEQ ID NO: 3079240 - DNA, 25 bp, Homo sapien
agtttccggcgactccaaattgtgc

SEQ ID NO: 3079241 - DNA, 25 bp, Homo sapien
cgaggcggtttagacaccagacggt

SEQ ID NO: 3079242 - DNA, 25 bp, Homo sapien
gaggagggaactcgactctggtcca

SEQ ID NO: 3079243 - DNA, 25 bp, Homo sapien
agttccagcttatcgacctccgcct

SEQ ID NO: 3079244 - DNA, 25 bp, Homo sapien
gttccagcttatcgacctccgcctc

SEQ ID NO: 3079245 - DNA, 25 bp, Homo sapien
cagttccagcttatcgacctccgcc

SEQ ID NO: 3079246 - DNA, 25 bp, Homo sapien
tgaatagttgacattccgcagaccg

SEQ ID NO: 3079247 - DNA, 25 bp, Homo sapien
atagttgacattccgcagaccgcgg

SEQ ID NO: 3079248 - DNA, 25 bp, Homo sapien
aatagttgacattccgcagaccgcg

SEQ ID NO: 3079249 - DNA, 25 bp, Homo sapien
gttgaatagttgacattccgcagac

SEQ ID NO: 3079250 - DNA, 25 bp, Homo sapien
tggacagctgtcactcaacatctcg

SEQ ID NO: 3079251 - DNA, 25 bp, Homo sapien
caggaggattggctgctgtgcaaat

SEQ ID NO: 3079252 - DNA, 25 bp, Homo sapien
ccattggagactgggtaacgcccct

SEQ ID NO: 3079253 - DNA, 25 bp, Homo sapien
aaaggcacaaaacgccgcaggagga

SEQ ID NO: 3079254 - DNA, 25 bp, Homo sapien
ccttcctggtgtctgtcattagcaa

SEQ ID NO: 3079255 - DNA, 25 bp, Homo sapien
ctgctgaaaattcacatctcccctg

SEQ ID NO: 3079256 - DNA, 25 bp, Homo sapien
aaaattcacatctcccctggatccg

SEQ ID NO: 3079257 - DNA, 25 bp, Homo sapien
tagcaatggaataaagttcctgctg

SEQ ID NO: 3079258 - DNA, 25 bp, Homo sapien
gccggcgcggctaaaatatgctatg

SEQ ID NO: 3079259 - DNA, 25 bp, Homo sapien
tattgccgggagaagaggccggcgc

SEQ ID NO: 3079260 - DNA, 25 bp, Homo sapien
taaatgaatgcattggtattgccgg

SEQ ID NO: 3079261 - DNA, 25 bp, Homo sapien
aggccggcgcggctaaaatatgcta

SEQ ID NO: 3079262 - DNA, 25 bp, Homo sapien
aaggtcggatgcaaatccgagaagc

SEQ ID NO: 3079263 - DNA, 25 bp, Homo sapien
gaaggtcggatgcaaatccgagaag

SEQ ID NO: 3079264 - DNA, 25 bp, Homo sapien
caaatctttgtcccaggcgaggaag

SEQ ID NO: 3079265 - DNA, 25 bp, Homo sapien
acctcaaatctttgtcccaggcgag

SEQ ID NO: 3079266 - DNA, 25 bp, Homo sapien
aatctttgtcccaggcgaggaagct

SEQ ID NO: 3079267 - DNA, 25 bp, Homo sapien
caacctcaaatctttgtcccaggcg

SEQ ID NO: 3079268 - DNA, 25 bp, Homo sapien
gagcacgggtgacactcgccattgc

SEQ ID NO: 3079269 - DNA, 25 bp, Homo sapien
gggagcacgggtgacactcgccatt

SEQ ID NO: 3079270 - DNA, 25 bp, Homo sapien
cagggagcacgggtgacactcgcca

SEQ ID NO: 3079271 - DNA, 25 bp, Homo sapien
cacgggtgacactcgccattgcttc

SEQ ID NO: 3079272 - DNA, 25 bp, Homo sapien
ctctggctcctcctccgatgactcc

SEQ ID NO: 3079273 - DNA, 25 bp, Homo sapien
ttctctggctcctcctccgatgact

SEQ ID NO: 3079274 - DNA, 25 bp, Homo sapien
cttctctggctcctcctccgatgac

SEQ ID NO: 3079275 - DNA, 25 bp, Homo sapien
tccttctctggctcctcctccgatg

SEQ ID NO: 3079276 - DNA, 25 bp, Homo sapien
ttttccagcaaagggacccacacag

SEQ ID NO: 3079277 - DNA, 25 bp, Homo sapien
ttccagcaaagggacccacacaggg

SEQ ID NO: 3079278 - DNA, 25 bp, Homo sapien
ccagcaaagggacccacacaggggg

SEQ ID NO: 3079279 - DNA, 25 bp, Homo sapien
agcaaagggacccacacagggggct

SEQ ID NO: 3079280 - DNA, 25 bp, Homo sapien
ttgaactccttagagccagacccaa

SEQ ID NO: 3079281 - DNA, 25 bp, Homo sapien
gaactccttagagccagacccaaaa

SEQ ID NO: 3079282 - DNA, 25 bp, Homo sapien
tgaactccttagagccagacccaaa

SEQ ID NO: 3079283 - DNA, 25 bp, Homo sapien
attgaactccttagagccagaccca

SEQ ID NO: 3079284 - DNA, 25 bp, Homo sapien
aagaacaggattggaggtgctctct

SEQ ID NO: 3079285 - DNA, 25 bp, Homo sapien
aaagaacaggattggaggtgctctc

SEQ ID NO: 3079286 - DNA, 25 bp, Homo sapien
cgaatgacactagccgttgcttcag

SEQ ID NO: 3079287 - DNA, 25 bp, Homo sapien
gcacgaatgacactagccgttgctt

SEQ ID NO: 3079288 - DNA, 25 bp, Homo sapien
gctcagggagcacgaatgacactag

SEQ ID NO: 3079289 - DNA, 25 bp, Homo sapien
gggagcacgaatgacactagccgtt

SEQ ID NO: 3079290 - DNA, 25 bp, Homo sapien
cctccgatgactcctcagattggtc

SEQ ID NO: 3079291 - DNA, 25 bp, Homo sapien
ccgatgactcctcagattggtccga

SEQ ID NO: 3079292 - DNA, 25 bp, Homo sapien
cgatgactcctcagattggtccgac

SEQ ID NO: 3079293 - DNA, 25 bp, Homo sapien
tccgatgactcctcagattggtccg

SEQ ID NO: 3079294 - DNA, 25 bp, Homo sapien
cctgaggtgctcagctgggggctct

SEQ ID NO: 3079295 - DNA, 25 bp, Homo sapien
gctctgctcctcatcctgggggtgc

SEQ ID NO: 3079296 - DNA, 25 bp, Homo sapien
tctgctcctcatcctgggggtgcgg

SEQ ID NO: 3079297 - DNA, 25 bp, Homo sapien
tgctcctcatcctgggggtgcggtt

SEQ ID NO: 3079298 - DNA, 25 bp, Homo sapien
caagaaactgaaatggtagaatcac

SEQ ID NO: 3079299 - DNA, 25 bp, Homo sapien
taaatacatgagtagggccaggcac

SEQ ID NO: 3079300 - DNA, 25 bp, Homo sapien
gaaataatatgaacacagcattcac

SEQ ID NO: 3079301 - DNA, 25 bp, Homo sapien
tggcacctggcttgtttgtacattt

SEQ ID NO: 3079302 - DNA, 25 bp, Homo sapien
tgtactgtataggtgcagttatgac

SEQ ID NO: 3079303 - DNA, 25 bp, Homo sapien
tttgcatgatgattaagagaaccag

SEQ ID NO: 3079304 - DNA, 25 bp, Homo sapien
aaaaaatagcctcttggctcatacc

SEQ ID NO: 3079305 - DNA, 25 bp, Homo sapien
tatcctggaattacccaatttagat

SEQ ID NO: 3079306 - DNA, 25 bp, Homo sapien
atcaaagacagtaatacagcctggg

SEQ ID NO: 3079307 - DNA, 25 bp, Homo sapien
caatgccttgccaaggaatctctga

SEQ ID NO: 3079308 - DNA, 25 bp, Homo sapien
tgtcactgacctatgtaatcaaaga

SEQ ID NO: 3079309 - DNA, 25 bp, Homo sapien
gacctagttccctgttgtcactgac

SEQ ID NO: 3079310 - DNA, 25 bp, Homo sapien
tgtaaagtcatcagactagaaagca

SEQ ID NO: 3079311 - DNA, 25 bp, Homo sapien
gtaaagtcatcagactagaaagcag

SEQ ID NO: 3079312 - DNA, 25 bp, Homo sapien
ttgtaaagtcatcagactagaaagc

SEQ ID NO: 3079313 - DNA, 25 bp, Homo sapien
tgagccgagattgcaacactgccac

SEQ ID NO: 3079314 - DNA, 25 bp, Homo sapien
cagtgagccgagattgcaacactgc

SEQ ID NO: 3079315 - DNA, 25 bp, Homo sapien
agccgagattgcaacactgccactc

SEQ ID NO: 3079316 - DNA, 25 bp, Homo sapien
agtgagccgagattgcaacactgcc

SEQ ID NO: 3079317 - DNA, 25 bp, Homo sapien
gagatatatatcagcttctagtaaa

SEQ ID NO: 3079318 - DNA, 25 bp, Homo sapien
taatattgtaaaccactgtgtactc

SEQ ID NO: 3079319 - DNA, 25 bp, Homo sapien
gaccattcttgtgggataagagatc

SEQ ID NO: 3079320 - DNA, 25 bp, Homo sapien
taaatgggtagtgacgttaagagat

SEQ ID NO: 3079321 - DNA, 25 bp, Homo sapien
atcacttgaacgatggaagtggagg

SEQ ID NO: 3079322 - DNA, 25 bp, Homo sapien
tagagcaagggataagacgcgccct

SEQ ID NO: 3079323 - DNA, 25 bp, Homo sapien
ggctgcccgtgaatagtcttttctg

SEQ ID NO: 3079324 - DNA, 25 bp, Homo sapien
gaaaggctgcccgtgaatagtcttt

SEQ ID NO: 3079325 - DNA, 25 bp, Homo sapien
taagacgcgccctggaatctttcct

SEQ ID NO: 3079326 - DNA, 25 bp, Homo sapien
atgagggtccgtccacagagctagg

SEQ ID NO: 3079327 - DNA, 25 bp, Homo sapien
ctgcgcgtcggagcctctttgttgc

SEQ ID NO: 3079328 - DNA, 25 bp, Homo sapien
ggtgacaaacgctcagtccaggatc

SEQ ID NO: 3079329 - DNA, 25 bp, Homo sapien
ttcctacacgggagccggagagcgc

SEQ ID NO: 3079330 - DNA, 25 bp, Homo sapien
aaagaagcagcgattcctcagtaaa

SEQ ID NO: 3079331 - DNA, 25 bp, Homo sapien
aagaagcagcgattcctcagtaaac

SEQ ID NO: 3079332 - DNA, 25 bp, Homo sapien
gaaagaagcagcgattcctcagtaa

SEQ ID NO: 3079333 - DNA, 25 bp, Homo sapien
gagaaagaagcagcgattcctcagt

SEQ ID NO: 3079334 - DNA, 25 bp, Homo sapien
tccccagaacccgatgacggaggtg

SEQ ID NO: 3079335 - DNA, 25 bp, Homo sapien
gccgggtgccaatccctgagagttt

SEQ ID NO: 3079336 - DNA, 25 bp, Homo sapien
catgaagctggacgagctgtaaccc

SEQ ID NO: 3079337 - DNA, 25 bp, Homo sapien
gcaaggtcccttcctagcagcaaga

SEQ ID NO: 3079338 - DNA, 25 bp, Homo sapien
gcagagccaatgattgacagtccca

SEQ ID NO: 3079339 - DNA, 25 bp, Homo sapien
gagatgaactcttggcagcttgtac

SEQ ID NO: 3079340 - DNA, 25 bp, Homo sapien
agaggcttctctcccagtgtccata

SEQ ID NO: 3079341 - DNA, 25 bp, Homo sapien
tatgcttaacaggttagactggtca

SEQ ID NO: 3079342 - DNA, 25 bp, Homo sapien
ggcaagttatacataatcagcagca

SEQ ID NO: 3079343 - DNA, 25 bp, Homo sapien
catttttggcactgactaactgagc

SEQ ID NO: 3079344 - DNA, 25 bp, Homo sapien
tatctgaggtgacttcgtgtacatc

SEQ ID NO: 3079345 - DNA, 25 bp, Homo sapien
caatgaaactgctatgaagaatgac

SEQ ID NO: 3079346 - DNA, 25 bp, Homo sapien
tgatggcagacatattgtgaagatt

SEQ ID NO: 3079347 - DNA, 25 bp, Homo sapien
tggagatggcgactagtaggcaaca

SEQ ID NO: 3079348 - DNA, 25 bp, Homo sapien
taggcaacagaacaatattggaatg

SEQ ID NO: 3079349 - DNA, 25 bp, Homo sapien
tattggaatggacgtaatatgagga

SEQ ID NO: 3079350 - DNA, 25 bp, Homo sapien
cttctggagcgccagaaactcatct

SEQ ID NO: 3079351 - DNA, 25 bp, Homo sapien
ttcccaacctggcaaaatgcatatg

SEQ ID NO: 3079352 - DNA, 25 bp, Homo sapien
ttacaccgagcttctggagcgccag

SEQ ID NO: 3079353 - DNA, 25 bp, Homo sapien
gagcgccagaaactcatcttatcca

SEQ ID NO: 3079354 - DNA, 25 bp, Homo sapien
aaacagtaaatttgttgtgcaaatt

SEQ ID NO: 3079355 - DNA, 25 bp, Homo sapien
tattcatcttgaacgttttattgac

SEQ ID NO: 3079356 - DNA, 25 bp, Homo sapien
cttgaacgttttattgaccaagatc

SEQ ID NO: 3079357 - DNA, 25 bp, Homo sapien
aatgccctaagcaattccggtagcc

SEQ ID NO: 3079358 - DNA, 25 bp, Homo sapien
tgtttttgaggtaagtaactggcca

SEQ ID NO: 3079359 - DNA, 25 bp, Homo sapien
ggcaaagccttgtcacatggaatag

SEQ ID NO: 3079360 - DNA, 25 bp, Homo sapien
gtcacttatcattgtaaactggcat

SEQ ID NO: 3079361 - DNA, 25 bp, Homo sapien
gctaaactggatgttacagaattga

SEQ ID NO: 3079362 - DNA, 25 bp, Homo sapien
tcagctgcatcaaacaaacgcacca

SEQ ID NO: 3079363 - DNA, 25 bp, Homo sapien
cagctgcatcaaacaaacgcaccat

SEQ ID NO: 3079364 - DNA, 25 bp, Homo sapien
ccattccaaataccctgaacttcag

SEQ ID NO: 3079365 - DNA, 25 bp, Homo sapien
tccaaataccctgaacttcagctgc

SEQ ID NO: 3079366 - DNA, 25 bp, Homo sapien
aaattagcagcaatggggcggtctt

SEQ ID NO: 3079367 - DNA, 25 bp, Homo sapien
aattagcagcaatggggcggtcttc

SEQ ID NO: 3079368 - DNA, 25 bp, Homo sapien
aatggggcggtcttcaattccacta

SEQ ID NO: 3079369 - DNA, 25 bp, Homo sapien
agcaatggggcggtcttcaattcca

SEQ ID NO: 3079370 - DNA, 25 bp, Homo sapien
tgacgccgcgtttccctcggagagt

SEQ ID NO: 3079371 - DNA, 25 bp, Homo sapien
tcgaggtaaccgcagccgagttcct

SEQ ID NO: 3079372 - DNA, 25 bp, Homo sapien
aaatttctcggagcgcgtcgtctgc

SEQ ID NO: 3079373 - DNA, 25 bp, Homo sapien
tgtccggaagattgctacctctgcc

SEQ ID NO: 3079374 - DNA, 25 bp, Homo sapien
gagaactgctccgaagctttgctgg

SEQ ID NO: 3079375 - DNA, 25 bp, Homo sapien
caggtgagcgagtgtcttgttttcc

SEQ ID NO: 3079376 - DNA, 25 bp, Homo sapien
tttgctgtccttgcaacttgggagg

SEQ ID NO: 3079377 - DNA, 25 bp, Homo sapien
gaatctgaaggctaacgagacagct

SEQ ID NO: 3079378 - DNA, 25 bp, Homo sapien
caacagcattggtcttctgtgggct

SEQ ID NO: 3079379 - DNA, 25 bp, Homo sapien
caggaaactccaagcagggtacttg

SEQ ID NO: 3079380 - DNA, 25 bp, Homo sapien
accttacctgctacccagagtgtgc

SEQ ID NO: 3079381 - DNA, 25 bp, Homo sapien
cctttctatctgtaacactctggca

SEQ ID NO: 3079382 - DNA, 25 bp, Homo sapien
cgtgcgacccatcctgtgggagtgc

SEQ ID NO: 3079383 - DNA, 25 bp, Homo sapien
caagatcgaagactttccaggcata

SEQ ID NO: 3079384 - DNA, 25 bp, Homo sapien
tgtgtcttccggtgtttcccgtgcg

SEQ ID NO: 3079385 - DNA, 25 bp, Homo sapien
tggtgaagatgacaagatcgaagac

SEQ ID NO: 3079386 - DNA, 25 bp, Homo sapien
gaacccgttcaggatgaaaagagcc

SEQ ID NO: 3079387 - DNA, 25 bp, Homo sapien
gagattgaacccgttcaggatgaaa

SEQ ID NO: 3079388 - DNA, 25 bp, Homo sapien
ttgaacccgttcaggatgaaaagag

SEQ ID NO: 3079389 - DNA, 25 bp, Homo sapien
cctccataggggcagagattgaacc

SEQ ID NO: 3079390 - DNA, 25 bp, Homo sapien
cagggacactggtaatcaagcttgt

SEQ ID NO: 3079391 - DNA, 25 bp, Homo sapien
gacactggtaatcaagcttgtgttc

SEQ ID NO: 3079392 - DNA, 25 bp, Homo sapien
tggtaatcaagcttgtgttcccagt

SEQ ID NO: 3079393 - DNA, 25 bp, Homo sapien
tcagcagggacactggtaatcaagc

SEQ ID NO: 3079394 - DNA, 25 bp, Homo sapien
cccactccgttgcccaagctgcagt

SEQ ID NO: 3079395 - DNA, 25 bp, Homo sapien
tgcagcctccgccttttgggttcga

SEQ ID NO: 3079396 - DNA, 25 bp, Homo sapien
agcctccgccttttgggttcgagca

SEQ ID NO: 3079397 - DNA, 25 bp, Homo sapien
ccactccgttgcccaagctgcagtg

SEQ ID NO: 3079398 - DNA, 25 bp, Homo sapien
ttccttatcccagggggaccagcag

SEQ ID NO: 3079399 - DNA, 25 bp, Homo sapien
tcaggaggtgatgaaatagcagcag

SEQ ID NO: 3079400 - DNA, 25 bp, Homo sapien
tgttccttatcccagggggaccagc

SEQ ID NO: 3079401 - DNA, 25 bp, Homo sapien
tcgcttgttccttatcccaggggga

SEQ ID NO: 3079402 - DNA, 25 bp, Homo sapien
tgccagctttatccacagctggcct

SEQ ID NO: 3079403 - DNA, 25 bp, Homo sapien
atgccaaatgttccaaacgacaggt

SEQ ID NO: 3079404 - DNA, 25 bp, Homo sapien
tgaaagctgccagctttatccacag

SEQ ID NO: 3079405 - DNA, 25 bp, Homo sapien
gccaaatgttccaaacgacaggtac

SEQ ID NO: 3079406 - DNA, 25 bp, Homo sapien
acatggcaccccagattgcttcggc

SEQ ID NO: 3079407 - DNA, 25 bp, Homo sapien
gaaatagcagcaaaacggtctgtca

SEQ ID NO: 3079408 - DNA, 25 bp, Homo sapien
tctcagggtctaccattaagtgctg

SEQ ID NO: 3079409 - DNA, 25 bp, Homo sapien
ttacactgggaccaaacatggcacc

SEQ ID NO: 3079410 - DNA, 25 bp, Homo sapien
ttagctttcccaccggctgcttgca

SEQ ID NO: 3079411 - DNA, 25 bp, Homo sapien
caaggtgccctttcggcttagcttt

SEQ ID NO: 3079412 - DNA, 25 bp, Homo sapien
ttcggcttagctttcccaccggctg

SEQ ID NO: 3079413 - DNA, 25 bp, Homo sapien
gtgccctttcggcttagctttccca

SEQ ID NO: 3079414 - DNA, 25 bp, Homo sapien
tgcagctccccagtatcgtgttgga

SEQ ID NO: 3079415 - DNA, 25 bp, Homo sapien
ccttgggctgggttgaactgagaca

SEQ ID NO: 3079416 - DNA, 25 bp, Homo sapien
gggcacaatcgtacatatgctccgg

SEQ ID NO: 3079417 - DNA, 25 bp, Homo sapien
taagtgttgagaggcaagcaaactc

SEQ ID NO: 3079418 - DNA, 25 bp, Homo sapien
tgaaagccctctgctgtgatcagcc

SEQ ID NO: 3079419 - DNA, 25 bp, Homo sapien
gtgatcagccctcctacagcgctct

SEQ ID NO: 3079420 - DNA, 25 bp, Homo sapien
ctcctacagcgctctcatctcctcc

SEQ ID NO: 3079421 - DNA, 25 bp, Homo sapien
agccctcctacagcgctctcatctc

SEQ ID NO: 3079422 - DNA, 25 bp, Homo sapien
tccttctggacgaggcatacttccc

SEQ ID NO: 3079423 - DNA, 25 bp, Homo sapien
gactccctgaacagacctggtgagg

SEQ ID NO: 3079424 - DNA, 25 bp, Homo sapien
taatggctgactgcccttgcatcct

SEQ ID NO: 3079425 - DNA, 25 bp, Homo sapien
gcttatatttgaactgcagagggcc

SEQ ID NO: 3079426 - DNA, 25 bp, Homo sapien
ctatcactttaatctggatcaaggc

SEQ ID NO: 3079427 - DNA, 25 bp, Homo sapien
cattaatcaggttgagaattgaaat

SEQ ID NO: 3079428 - DNA, 25 bp, Homo sapien
ggctttgaagcaatgcctctctgca

SEQ ID NO: 3079429 - DNA, 25 bp, Homo sapien
gactctgcagtacattaatcaggtt

SEQ ID NO: 3079430 - DNA, 25 bp, Homo sapien
cgtttttagttgtgcgtgtgcgcgc

SEQ ID NO: 3079431 - DNA, 25 bp, Homo sapien
ttaatcacgtatcgcagggctccag

SEQ ID NO: 3079432 - DNA, 25 bp, Homo sapien
taactacagtttacacctcgggcgc

SEQ ID NO: 3079433 - DNA, 25 bp, Homo sapien
gctccagctgttttagaagccacat

SEQ ID NO: 3079434 - DNA, 25 bp, Homo sapien
tgggcccagctacacttgactttta

SEQ ID NO: 3079435 - DNA, 25 bp, Homo sapien
cattctgggcccagctacacttgac

SEQ ID NO: 3079436 - DNA, 25 bp, Homo sapien
gggcccagctacacttgacttttat

SEQ ID NO: 3079437 - DNA, 25 bp, Homo sapien
tctgggcccagctacacttgacttt

SEQ ID NO: 3079438 - DNA, 25 bp, Homo sapien
tctaatgctaaagcacgtttagctt

SEQ ID NO: 3079439 - DNA, 25 bp, Homo sapien
atgatctaatgctaaagcacgttta

SEQ ID NO: 3079440 - DNA, 25 bp, Homo sapien
ctaatgctaaagcacgtttagcttg

SEQ ID NO: 3079441 - DNA, 25 bp, Homo sapien
gatctaatgctaaagcacgtttagc

SEQ ID NO: 3079442 - DNA, 25 bp, Homo sapien
tatatcaagtctctagttgactcct

SEQ ID NO: 3079443 - DNA, 25 bp, Homo sapien
ttaatatatcaagtctctagttgac

SEQ ID NO: 3079444 - DNA, 25 bp, Homo sapien
atcaagtctctagttgactccttac

SEQ ID NO: 3079445 - DNA, 25 bp, Homo sapien
aatatatcaagtctctagttgactc

SEQ ID NO: 3079446 - DNA, 25 bp, Homo sapien
cgttgctgggcaaaggaatctgcag

SEQ ID NO: 3079447 - DNA, 25 bp, Homo sapien
attttttccgggtgtgctgggcagc

SEQ ID NO: 3079448 - DNA, 25 bp, Homo sapien
gacaagctgcttgccgataggccct

SEQ ID NO: 3079449 - DNA, 25 bp, Homo sapien
gcagttagtctctgtccgggagtcg

SEQ ID NO: 3079450 - DNA, 25 bp, Homo sapien
caccccaacagacccagtgctccat

SEQ ID NO: 3079451 - DNA, 25 bp, Homo sapien
acaccaccccaacagacccagtgct

SEQ ID NO: 3079452 - DNA, 25 bp, Homo sapien
accccaacagacccagtgctccatg

SEQ ID NO: 3079453 - DNA, 25 bp, Homo sapien
accaccccaacagacccagtgctcc

SEQ ID NO: 3079454 - DNA, 25 bp, Homo sapien
acagctgcagatcctacaatacctc

SEQ ID NO: 3079455 - DNA, 25 bp, Homo sapien
gatcctacaatacctctgcctgcaa

SEQ ID NO: 3079456 - DNA, 25 bp, Homo sapien
gactcaatagtgctgttcctggcac

SEQ ID NO: 3079457 - DNA, 25 bp, Homo sapien
ccagctagaggcgaaggcaaacaat

SEQ ID NO: 3079458 - DNA, 25 bp, Homo sapien
agcaaggtgccattcccaggagacc

SEQ ID NO: 3079459 - DNA, 25 bp, Homo sapien
cgtggttacctacaagcatacagca

SEQ ID NO: 3079460 - DNA, 25 bp, Homo sapien
cattcaggctgttaccaacttgcct

SEQ ID NO: 3079461 - DNA, 25 bp, Homo sapien
caacttgccttttatctgacaaagg

SEQ ID NO: 3079462 - DNA, 25 bp, Homo sapien
cctctttataataagtccttcttga

SEQ ID NO: 3079463 - DNA, 25 bp, Homo sapien
tgctctatcccttgtggttgtccag

SEQ ID NO: 3079464 - DNA, 25 bp, Homo sapien
gctgaaggctttagcctgaactccc

SEQ ID NO: 3079465 - DNA, 25 bp, Homo sapien
taccaggtctgtctactgctgaagg

SEQ ID NO: 3079466 - DNA, 25 bp, Homo sapien
cagctcttacccattgcaagactca

SEQ ID NO: 3079467 - DNA, 25 bp, Homo sapien
ccctgctactgtggtggtaaatttc

SEQ ID NO: 3079468 - DNA, 25 bp, Homo sapien
cactatccctgctactgtggtggta

SEQ ID NO: 3079469 - DNA, 25 bp, Homo sapien
ttacccattgcaagactcaccactg

SEQ ID NO: 3079470 - DNA, 25 bp, Homo sapien
gagacgtagggacaggaagaggaaa

SEQ ID NO: 3079471 - DNA, 25 bp, Homo sapien
gggacaggaagaggaaatggttgat

SEQ ID NO: 3079472 - DNA, 25 bp, Homo sapien
tgagacgtagggacaggaagaggaa

SEQ ID NO: 3079473 - DNA, 25 bp, Homo sapien
cgtagggacaggaagaggaaatggt

SEQ ID NO: 3079474 - DNA, 25 bp, Homo sapien
aagatccttgatgggcaaagtatga

SEQ ID NO: 3079475 - DNA, 25 bp, Homo sapien
tcaaagatccttgatgggcaaagta

SEQ ID NO: 3079476 - DNA, 25 bp, Homo sapien
ccttgatgggcaaagtatgatgaag

SEQ ID NO: 3079477 - DNA, 25 bp, Homo sapien
atgggcaaagtatgatgaagtggaa

SEQ ID NO: 3079478 - DNA, 25 bp, Homo sapien
gccaaatgcctaacagaacagggtg

SEQ ID NO: 3079479 - DNA, 25 bp, Homo sapien
attcacccacaaagacgtagtcagc

SEQ ID NO: 3079480 - DNA, 25 bp, Homo sapien
actgggctcagtccatccaagtgcc

SEQ ID NO: 3079481 - DNA, 25 bp, Homo sapien
gtcagcaaccaggtcatgccaagca

SEQ ID NO: 3079482 - DNA, 25 bp, Homo sapien
gggatgccaacatgaacaagatggt

SEQ ID NO: 3079483 - DNA, 25 bp, Homo sapien
ttatttggtcatggggatgccaaca

SEQ ID NO: 3079484 - DNA, 25 bp, Homo sapien
catgaacaagatggtccttgtcctc

SEQ ID NO: 3079485 - DNA, 25 bp, Homo sapien
gatgccaacatgaacaagatggtcc

SEQ ID NO: 3079486 - DNA, 25 bp, Homo sapien
tgcagactaacagccaccatagctt

SEQ ID NO: 3079487 - DNA, 25 bp, Homo sapien
tcccacctctagagcgcttgctgct

SEQ ID NO: 3079488 - DNA, 25 bp, Homo sapien
tccatgcagcttgcaaatatctgtc

SEQ ID NO: 3079489 - DNA, 25 bp, Homo sapien
ttatctcttactatgggcccatgtc

SEQ ID NO: 3079490 - DNA, 25 bp, Homo sapien
gaggacaatattgtctgtcactcca

SEQ ID NO: 3079491 - DNA, 25 bp, Homo sapien
caatattgtctgtcactccaactgg

SEQ ID NO: 3079492 - DNA, 25 bp, Homo sapien
tattgtctgtcactccaactggact

SEQ ID NO: 3079493 - DNA, 25 bp, Homo sapien
ctccaactggactctggggctttct

SEQ ID NO: 3079494 - DNA, 25 bp, Homo sapien
tccccaaccatgacgtttcattagg

SEQ ID NO: 3079495 - DNA, 25 bp, Homo sapien
tgctggttcatggacacgaagaatt

SEQ ID NO: 3079496 - DNA, 25 bp, Homo sapien
gggcaggagccatattttatagttc

SEQ ID NO: 3079497 - DNA, 25 bp, Homo sapien
ttcattagggcaacctcttgcagcc

SEQ ID NO: 3079498 - DNA, 25 bp, Homo sapien
taacagtaatacccaaaagttgctg

SEQ ID NO: 3079499 - DNA, 25 bp, Homo sapien
gatgtaatttcctagacagccactg

SEQ ID NO: 3079500 - DNA, 25 bp, Homo sapien
tctgccttgccacgttcggggaagt

SEQ ID NO: 3079501 - DNA, 25 bp, Homo sapien
ctggcttttactcccaggcgaatct

SEQ ID NO: 3079502 - DNA, 25 bp, Homo sapien
cctgaagcagcaaactctcagtcat

SEQ ID NO: 3079503 - DNA, 25 bp, Homo sapien
agaggatgctgccatcaggcccaga

SEQ ID NO: 3079504 - DNA, 25 bp, Homo sapien
catcaggcccagagcattcctgaag

SEQ ID NO: 3079505 - DNA, 25 bp, Homo sapien
caggcccagagcattcctgaagcag

SEQ ID NO: 3079506 - DNA, 25 bp, Homo sapien
ccagggttagtggtactgccatgag

SEQ ID NO: 3079507 - DNA, 25 bp, Homo sapien
gtgaccagggttagtggtactgcca

SEQ ID NO: 3079508 - DNA, 25 bp, Homo sapien
gttagtggtactgccatgaggctcc

SEQ ID NO: 3079509 - DNA, 25 bp, Homo sapien
gtattcatgtggtgaccagggttag

SEQ ID NO: 3079510 - DNA, 25 bp, Homo sapien
catttgatccatagatcttccctag

SEQ ID NO: 3079511 - DNA, 25 bp, Homo sapien
tcttccctaggattcgatgtgtaca

SEQ ID NO: 3079512 - DNA, 25 bp, Homo sapien
ggaactaactcttacccatttgatc

SEQ ID NO: 3079513 - DNA, 25 bp, Homo sapien
taactcttacccatttgatccatag

SEQ ID NO: 3079514 - DNA, 25 bp, Homo sapien
tagcagtaatagcacctcggataaa

SEQ ID NO: 3079515 - DNA, 25 bp, Homo sapien
agcagtaatagcacctcggataaac

SEQ ID NO: 3079516 - DNA, 25 bp, Homo sapien
ttagcagtaatagcacctcggataa

SEQ ID NO: 3079517 - DNA, 25 bp, Homo sapien
gcaagaacaggtctgaataagaagg

SEQ ID NO: 3079518 - DNA, 25 bp, Homo sapien
tgcagaatacgttatcagaaaatgg

SEQ ID NO: 3079519 - DNA, 25 bp, Homo sapien
tgacattgattactagcgaactcta

SEQ ID NO: 3079520 - DNA, 25 bp, Homo sapien
catagacgacagaaagaaaatggat

SEQ ID NO: 3079521 - DNA, 25 bp, Homo sapien
gaatagggcaggttattgagttacc

SEQ ID NO: 3079522 - DNA, 25 bp, Homo sapien
gaattaattgagaaggatttggact

SEQ ID NO: 3079523 - DNA, 25 bp, Homo sapien
tgtgcctcctgtttgaagaagatag

SEQ ID NO: 3079524 - DNA, 25 bp, Homo sapien
taagggtattggttggcctgtgcct

SEQ ID NO: 3079525 - DNA, 25 bp, Homo sapien
gtaagagacttgttacccaagttgc

SEQ ID NO: 3079526 - DNA, 25 bp, Homo sapien
gaattgtatgcccaatccgttatga

SEQ ID NO: 3079527 - DNA, 25 bp, Homo sapien
tccgttatgaatgggtaagagactt

SEQ ID NO: 3079528 - DNA, 25 bp, Homo sapien
tggttaccaccaaagtctacgcaag

SEQ ID NO: 3079529 - DNA, 25 bp, Homo sapien
gctagttagtatcacactcaggcca

SEQ ID NO: 3079530 - DNA, 25 bp, Homo sapien
caaattggaaccttgaggctagtta

SEQ ID NO: 3079531 - DNA, 25 bp, Homo sapien
gatagtactttcaaacagcgcctcc

SEQ ID NO: 3079532 - DNA, 25 bp, Homo sapien
tgggattttcgaagcagacaacact

SEQ ID NO: 3079533 - DNA, 25 bp, Homo sapien
gaaactgatcactgagctaggccga

SEQ ID NO: 3079534 - DNA, 25 bp, Homo sapien
ttctagttagaatccgcgcgtcagg

SEQ ID NO: 3079535 - DNA, 25 bp, Homo sapien
tctccaacagtcagaagggcttgtg

SEQ ID NO: 3079536 - DNA, 25 bp, Homo sapien
tatctaacacccgaagagagtgcca

SEQ ID NO: 3079537 - DNA, 25 bp, Homo sapien
caggagacgccgcatttccttaaaa

SEQ ID NO: 3079538 - DNA, 25 bp, Homo sapien
cgccgcatttccttaaaacgagctc

SEQ ID NO: 3079539 - DNA, 25 bp, Homo sapien
agcctcttcactcccaggagacgcc

SEQ ID NO: 3079540 - DNA, 25 bp, Homo sapien
ttcactcccaggagacgccgcattt

SEQ ID NO: 3079541 - DNA, 25 bp, Homo sapien
cccatcagtatcacgtgcacctgga

SEQ ID NO: 3079542 - DNA, 25 bp, Homo sapien
ctaaagcgcccacggaagtgacgtc

SEQ ID NO: 3079543 - DNA, 25 bp, Homo sapien
tgcacctggaagtacgtgggtggga

SEQ ID NO: 3079544 - DNA, 25 bp, Homo sapien
aagtgacgtcggtcgccccgagtcg

SEQ ID NO: 3079545 - DNA, 25 bp, Homo sapien
tgtttccccccatgtggcgtcagga

SEQ ID NO: 3079546 - DNA, 25 bp, Homo sapien
gtcaggaagcgaggcaccgggcgca

SEQ ID NO: 3079547 - DNA, 25 bp, Homo sapien
gatgagtctaaaaaagtagtccctc

SEQ ID NO: 3079548 - DNA, 25 bp, Homo sapien
gaaagagaagactggcgaaagtgat

SEQ ID NO: 3079549 - DNA, 25 bp, Homo sapien
ccccgacccgagctctttcgtctgc

SEQ ID NO: 3079550 - DNA, 25 bp, Homo sapien
ggttccgccattgcggctctcctgg

SEQ ID NO: 3079551 - DNA, 25 bp, Homo sapien
agccgtttccggagtctgcgctgcg

SEQ ID NO: 3079552 - DNA, 25 bp, Homo sapien
agtttcctgcgtccccggagaggat

SEQ ID NO: 3079553 - DNA, 25 bp, Homo sapien
tccttaagaagcagctcctttacta

SEQ ID NO: 3079554 - DNA, 25 bp, Homo sapien
ttactaggagattacagtaattcag

SEQ ID NO: 3079555 - DNA, 25 bp, Homo sapien
aagtcttttctcaatgtcgatggct

SEQ ID NO: 3079556 - DNA, 25 bp, Homo sapien
agcacctttaccagcagtagatttt

SEQ ID NO: 3079557 - DNA, 25 bp, Homo sapien
gcttgctcttcataccattttgagg

SEQ ID NO: 3079558 - DNA, 25 bp, Homo sapien
ggatctgttgtctaaggaatgtata

SEQ ID NO: 3079559 - DNA, 25 bp, Homo sapien
aaaacgctcagctttgtgacacatt

SEQ ID NO: 3079560 - DNA, 25 bp, Homo sapien
ctattgtaggcaaagggatctgttg

SEQ ID NO: 3079561 - DNA, 25 bp, Homo sapien
aagaggtcaattctctactgatgag

SEQ ID NO: 3079562 - DNA, 25 bp, Homo sapien
cacaggtgaatccaagtcgacttcc

SEQ ID NO: 3079563 - DNA, 25 bp, Homo sapien
aacttgattcttgttgtaagaggtc

SEQ ID NO: 3079564 - DNA, 25 bp, Homo sapien
tctttttaaccacaggtgaatccaa

SEQ ID NO: 3079565 - DNA, 25 bp, Homo sapien
cctgtgttgcttatgaacgtggcca

SEQ ID NO: 3079566 - DNA, 25 bp, Homo sapien
catagttagcatgtcaagagtgtgt

SEQ ID NO: 3079567 - DNA, 25 bp, Homo sapien
tattaatgtgagtactgctagctga

SEQ ID NO: 3079568 - DNA, 25 bp, Homo sapien
tactatgacagtcgcgttgttggaa

SEQ ID NO: 3079569 - DNA, 25 bp, Homo sapien
tacaggagacccctaattgaccagg

SEQ ID NO: 3079570 - DNA, 25 bp, Homo sapien
tacgtcgaaaggatccagaattgtg

SEQ ID NO: 3079571 - DNA, 25 bp, Homo sapien
ctttaggtttgcaatgagaattccc

SEQ ID NO: 3079572 - DNA, 25 bp, Homo sapien
caaaagtctttctcgctacctggta

SEQ ID NO: 3079573 - DNA, 25 bp, Homo sapien
tatcagaagtttctctagagcacag

SEQ ID NO: 3079574 - DNA, 25 bp, Homo sapien
tttctctagagcacagaatcttgcc

SEQ ID NO: 3079575 - DNA, 25 bp, Homo sapien
gagttttatcagaagtttctctaga

SEQ ID NO: 3079576 - DNA, 25 bp, Homo sapien
cgcatgcagatctgtactgctgcca

SEQ ID NO: 3079577 - DNA, 25 bp, Homo sapien
aaaacatgttgccttatcttagcca

SEQ ID NO: 3079578 - DNA, 25 bp, Homo sapien
taatgccaacttgtgagacctgtct

SEQ ID NO: 3079579 - DNA, 25 bp, Homo sapien
ggagggtgaagaagcgctaccaaca

SEQ ID NO: 3079580 - DNA, 25 bp, Homo sapien
tagaggatccttttcgtcaaagcaa

SEQ ID NO: 3079581 - DNA, 25 bp, Homo sapien
tgtaataaggcatacctctgaagct

SEQ ID NO: 3079582 - DNA, 25 bp, Homo sapien
gctgcttccgaagagactttcctca

SEQ ID NO: 3079583 - DNA, 25 bp, Homo sapien
gagccaagcttgctataattgttgc

SEQ ID NO: 3079584 - DNA, 25 bp, Homo sapien
agtagatacgagagatactagctgc

SEQ ID NO: 3079585 - DNA, 25 bp, Homo sapien
gaagacagctttggttgttaaccac

SEQ ID NO: 3079586 - DNA, 25 bp, Homo sapien
gacatgaagtcctttgtgtaggaga

SEQ ID NO: 3079587 - DNA, 25 bp, Homo sapien
tacttgttttcgctctctaagccaa

SEQ ID NO: 3079588 - DNA, 25 bp, Homo sapien
taagccaagttctctacaggtcatg

SEQ ID NO: 3079589 - DNA, 25 bp, Homo sapien
taaaaggccctctaacctatgcagg

SEQ ID NO: 3079590 - DNA, 25 bp, Homo sapien
tatacagagtgtcaggcatacggtg

SEQ ID NO: 3079591 - DNA, 25 bp, Homo sapien
tggttataccgcaccaccgtatgga

SEQ ID NO: 3079592 - DNA, 25 bp, Homo sapien
tgtgggaccattccattcaggagca

SEQ ID NO: 3079593 - DNA, 25 bp, Homo sapien
tgaggattgagacatgtgaagacat

SEQ ID NO: 3079594 - DNA, 25 bp, Homo sapien
tagtctaaagaaccagagtcactac

SEQ ID NO: 3079595 - DNA, 25 bp, Homo sapien
aacaaggtacatgcaatagtctaaa

SEQ ID NO: 3079596 - DNA, 25 bp, Homo sapien
gcattatatcaatgtgcattcctgt

SEQ ID NO: 3079597 - DNA, 25 bp, Homo sapien
cctgtgctgtcatatgcctgtgcga

SEQ ID NO: 3079598 - DNA, 25 bp, Homo sapien
gatatgccatgacagttacttagcc

SEQ ID NO: 3079599 - DNA, 25 bp, Homo sapien
tataagatcctagctgctactcagg

SEQ ID NO: 3079600 - DNA, 25 bp, Homo sapien
atattttaaccaagtgacaccgagg

SEQ ID NO: 3079601 - DNA, 25 bp, Homo sapien
taaaccatgggactccattgagggt

SEQ ID NO: 3079602 - DNA, 25 bp, Homo sapien
gatgactatcaggaagctatgtggc

SEQ ID NO: 3079603 - DNA, 25 bp, Homo sapien
ttaacctttggccagtatgggtcag

SEQ ID NO: 3079604 - DNA, 25 bp, Homo sapien
cattgagggtggctgtatcagtcac

SEQ ID NO: 3079605 - DNA, 25 bp, Homo sapien
caaacacttgtgatggaggggttgt

SEQ ID NO: 3079606 - DNA, 25 bp, Homo sapien
tcatctcaagaacatttaagttggg

SEQ ID NO: 3079607 - DNA, 25 bp, Homo sapien
agcttttgttgttagaatctgacag

SEQ ID NO: 3079608 - DNA, 25 bp, Homo sapien
tgttgttagaatctgacaggcttca

SEQ ID NO: 3079609 - DNA, 25 bp, Homo sapien
catgggccaataatgcaatcagggt

SEQ ID NO: 3079610 - DNA, 25 bp, Homo sapien
agcctggtgcaatctgagtacgtcc

SEQ ID NO: 3079611 - DNA, 25 bp, Homo sapien
gagtacgtccagcatcttgaattaa

SEQ ID NO: 3079612 - DNA, 25 bp, Homo sapien
gagcatcccaaagcatactcgaagg

SEQ ID NO: 3079613 - DNA, 25 bp, Homo sapien
tatccggcagtaacaacttacagag

SEQ ID NO: 3079614 - DNA, 25 bp, Homo sapien
cactgtcacattaatgggcctggag

SEQ ID NO: 3079615 - DNA, 25 bp, Homo sapien
gatgttccgttttaccaagatgcct

SEQ ID NO: 3079616 - DNA, 25 bp, Homo sapien
cccattggacgtgagtgcagctgaa

SEQ ID NO: 3079617 - DNA, 25 bp, Homo sapien
aacgtgtaggccactgctgatagca

SEQ ID NO: 3079618 - DNA, 25 bp, Homo sapien
gattgccaaagtcctaactcacgtg

SEQ ID NO: 3079619 - DNA, 25 bp, Homo sapien
tatatgtaggatcactggcacggtc

SEQ ID NO: 3079620 - DNA, 25 bp, Homo sapien
tgacgccttttgaagcgctggaacc

SEQ ID NO: 3079621 - DNA, 25 bp, Homo sapien
gcatagatgacagccctggaagtac

SEQ ID NO: 3079622 - DNA, 25 bp, Homo sapien
caatggatataaggcgacacagagg

SEQ ID NO: 3079623 - DNA, 25 bp, Homo sapien
tatatcagtctacaaatgaggctgc

SEQ ID NO: 3079624 - DNA, 25 bp, Homo sapien
taggtccacggatttgaaggcagga

SEQ ID NO: 3079625 - DNA, 25 bp, Homo sapien
ttgacatgatagaccatgcaacctg

SEQ ID NO: 3079626 - DNA, 25 bp, Homo sapien
caagtttaaattatgccaggagcac

SEQ ID NO: 3079627 - DNA, 25 bp, Homo sapien
caagacacagtggtacaagggaatt

SEQ ID NO: 3079628 - DNA, 25 bp, Homo sapien
ctggaaagacttagagcgatgcata

SEQ ID NO: 3079629 - DNA, 25 bp, Homo sapien
taagtggtcgtcttaatccagagcc

SEQ ID NO: 3079630 - DNA, 25 bp, Homo sapien
tgaggtacacaagttatagcttgcc

SEQ ID NO: 3079631 - DNA, 25 bp, Homo sapien
taaccccaccctaagttgagaagca

SEQ ID NO: 3079632 - DNA, 25 bp, Homo sapien
atgatccccatttttcggatgtaga

SEQ ID NO: 3079633 - DNA, 25 bp, Homo sapien
agaaaccaattctttccacgcagag

SEQ ID NO: 3079634 - DNA, 25 bp, Homo sapien
gatattcataagtgcccagctgagg

SEQ ID NO: 3079635 - DNA, 25 bp, Homo sapien
ttttatcaatttcggagagagcgca

SEQ ID NO: 3079636 - DNA, 25 bp, Homo sapien
ggtatgaggcctgctcgctatttta

SEQ ID NO: 3079637 - DNA, 25 bp, Homo sapien
tgggtgacaagttccggatcaagaa

SEQ ID NO: 3079638 - DNA, 25 bp, Homo sapien
tatcgcgtgagctacctcttccggg

SEQ ID NO: 3079639 - DNA, 25 bp, Homo sapien
ggatcaagaatcacaaagcgagcag

SEQ ID NO: 3079640 - DNA, 25 bp, Homo sapien
ccttcttctgggcagcgaacacgtt

SEQ ID NO: 3079641 - DNA, 25 bp, Homo sapien
gggcccgcactaagagcctaactga

SEQ ID NO: 3079642 - DNA, 25 bp, Homo sapien
atcaaccgagctcgccgaaaggagg

SEQ ID NO: 3079643 - DNA, 25 bp, Homo sapien
tgaaatcccgcgaggatcaaccgag

SEQ ID NO: 3079644 - DNA, 25 bp, Homo sapien
ggaggaacgtatcccttctggaggc

SEQ ID NO: 3079645 - DNA, 25 bp, Homo sapien
gcccagcggcgggtgtgagagtccg

SEQ ID NO: 3079646 - DNA, 25 bp, Homo sapien
cagcggcgggtgtgagagtccgtaa

SEQ ID NO: 3079647 - DNA, 25 bp, Homo sapien
gagcgggttccggttgtctggagcc

SEQ ID NO: 3079648 - DNA, 25 bp, Homo sapien
gttccggttgtctggagcccagcgg

SEQ ID NO: 3079649 - DNA, 25 bp, Homo sapien
agcttggcgtcttccggagctctcc

SEQ ID NO: 3079650 - DNA, 25 bp, Homo sapien
ctcagggaattggggaccgaagcct

SEQ ID NO: 3079651 - DNA, 25 bp, Homo sapien
ttccggagctctcccacttaggcat

SEQ ID NO: 3079652 - DNA, 25 bp, Homo sapien
tcctcagagcttggcgtcttccgga

SEQ ID NO: 3079653 - DNA, 25 bp, Homo sapien
tagagaacctcttagtcccgggatg

SEQ ID NO: 3079654 - DNA, 25 bp, Homo sapien
catggttggtcacccggacattgaa

SEQ ID NO: 3079655 - DNA, 25 bp, Homo sapien
ggacattgaacccagacaccgggct

SEQ ID NO: 3079656 - DNA, 25 bp, Homo sapien
tccgcgtacttggaagccttgctag

SEQ ID NO: 3079657 - DNA, 25 bp, Homo sapien
taatacacgtagactggccactgtt

SEQ ID NO: 3079658 - DNA, 25 bp, Homo sapien
aaatctaataatacacgtagactgg

SEQ ID NO: 3079659 - DNA, 25 bp, Homo sapien
ctgcaactccatgtaaaaatctaat

SEQ ID NO: 3079660 - DNA, 25 bp, Homo sapien
taataatacacgtagactggccact

SEQ ID NO: 3079661 - DNA, 25 bp, Homo sapien
cctggactcaggcagtcctctggtc

SEQ ID NO: 3079662 - DNA, 25 bp, Homo sapien
acccaggttgaggtgcagtgccaca

SEQ ID NO: 3079663 - DNA, 25 bp, Homo sapien
ctttctcttaacacggtcttactct

SEQ ID NO: 3079664 - DNA, 25 bp, Homo sapien
actcaggcagtcctctggtctcagc

SEQ ID NO: 3079665 - DNA, 25 bp, Homo sapien
aaacccactgttttagatgatagtg

SEQ ID NO: 3079666 - DNA, 25 bp, Homo sapien
aacccactgttttagatgatagtga

SEQ ID NO: 3079667 - DNA, 25 bp, Homo sapien
cagttttcagctcagtacctagtaa

SEQ ID NO: 3079668 - DNA, 25 bp, Homo sapien
ggcctcttcagagtaaaacagctag

SEQ ID NO: 3079669 - DNA, 25 bp, Homo sapien
caatgatgactaggcaatttggacc

SEQ ID NO: 3079670 - DNA, 25 bp, Homo sapien
tagctggtcttaacaaattaggaac

SEQ ID NO: 3079671 - DNA, 25 bp, Homo sapien
aataccataccctcaggagaagcag

SEQ ID NO: 3079672 - DNA, 25 bp, Homo sapien
aatttattatactagttgcatatgc

SEQ ID NO: 3079673 - DNA, 25 bp, Homo sapien
cagttaagtgttagcaattgtgttc

SEQ ID NO: 3079674 - DNA, 25 bp, Homo sapien
aagattatggaacagatcacttaca

SEQ ID NO: 3079675 - DNA, 25 bp, Homo sapien
tcttaaagagcataaccaaatctaa

SEQ ID NO: 3079676 - DNA, 25 bp, Homo sapien
catatttcttaaagagcataaccaa

SEQ ID NO: 3079677 - DNA, 25 bp, Homo sapien
taaagttatgattaaaatgacatgt

SEQ ID NO: 3079678 - DNA, 25 bp, Homo sapien
ttaaagagcataaccaaatctaact

SEQ ID NO: 3079679 - DNA, 25 bp, Homo sapien
tttgctgtctcctatttctgagcta

SEQ ID NO: 3079680 - DNA, 25 bp, Homo sapien
tacagaatgttccatgctcttcttt

SEQ ID NO: 3079681 - DNA, 25 bp, Homo sapien
tctgagctaacttgatgcttgacct

SEQ ID NO: 3079682 - DNA, 25 bp, Homo sapien
gagctaacttgatgcttgacctcag

SEQ ID NO: 3079683 - DNA, 25 bp, Homo sapien
ctgtcctttcattttagaggataaa

SEQ ID NO: 3079684 - DNA, 25 bp, Homo sapien
ggaaccccagcatttgtattatctg

SEQ ID NO: 3079685 - DNA, 25 bp, Homo sapien
aagttatggaagtgtggaaccccag

SEQ ID NO: 3079686 - DNA, 25 bp, Homo sapien
aaaatggtccatgtatttgattctc

SEQ ID NO: 3079687 - DNA, 25 bp, Homo sapien
caaaaggaatcaattaagtatttgg

SEQ ID NO: 3079688 - DNA, 25 bp, Homo sapien
aatagcaaaaactcttctattcctg

SEQ ID NO: 3079689 - DNA, 25 bp, Homo sapien
cagccagaagttagggatatgttag

SEQ ID NO: 3079690 - DNA, 25 bp, Homo sapien
gaagttagggatatgttagcatctg

SEQ ID NO: 3079691 - DNA, 25 bp, Homo sapien
gacgcacagattgtcctaataagga

SEQ ID NO: 3079692 - DNA, 25 bp, Homo sapien
gacttagattgagaaagaccgcccc

SEQ ID NO: 3079693 - DNA, 25 bp, Homo sapien
taaggacttagattgagaaagaccg

SEQ ID NO: 3079694 - DNA, 25 bp, Homo sapien
tctttttggataaggatgacgcaca

SEQ ID NO: 3079695 - DNA, 25 bp, Homo sapien
tcagctgagctgaccttactctgag

SEQ ID NO: 3079696 - DNA, 25 bp, Homo sapien
ttggtttctcccagacatgttggtg

SEQ ID NO: 3079697 - DNA, 25 bp, Homo sapien
tctgaggactaactcttttgctgga

SEQ ID NO: 3079698 - DNA, 25 bp, Homo sapien
ttgctggaagcggtttctgatttac

SEQ ID NO: 3079699 - DNA, 25 bp, Homo sapien
caaatgtgtctttttctttgggcta

SEQ ID NO: 3079700 - DNA, 25 bp, Homo sapien
ccaaatgtgtctttttctttgggct

SEQ ID NO: 3079701 - DNA, 25 bp, Homo sapien
aatgtgtctttttctttgggctact

SEQ ID NO: 3079702 - DNA, 25 bp, Homo sapien
cccggcataggtccatctctgcaga

SEQ ID NO: 3079703 - DNA, 25 bp, Homo sapien
caccacaaaagcgaaatgggcacac

SEQ ID NO: 3079704 - DNA, 25 bp, Homo sapien
tgctgtccccggcataggtccatct

SEQ ID NO: 3079705 - DNA, 25 bp, Homo sapien
gcagaagcttcaccacaaaagcgaa

SEQ ID NO: 3079706 - DNA, 25 bp, Homo sapien
taaaccaaggctcttaccatagctg

SEQ ID NO: 3079707 - DNA, 25 bp, Homo sapien
aatgggaaactcgagggaagcacag

SEQ ID NO: 3079708 - DNA, 25 bp, Homo sapien
tggtttgccagtgttccttgacaga

SEQ ID NO: 3079709 - DNA, 25 bp, Homo sapien
tgtaaacgattctgaggcaaaggga

SEQ ID NO: 3079710 - DNA, 25 bp, Homo sapien
taactgtcttgacaatactcatgag

SEQ ID NO: 3079711 - DNA, 25 bp, Homo sapien
cacttcaagcattatagatgatcct

SEQ ID NO: 3079712 - DNA, 25 bp, Homo sapien
gagtatctgcatggcgacttcagag

SEQ ID NO: 3079713 - DNA, 25 bp, Homo sapien
ggtcctagtagaagagctaacctca

SEQ ID NO: 3079714 - DNA, 25 bp, Homo sapien
aagttatgccaaacgaatccagcag

SEQ ID NO: 3079715 - DNA, 25 bp, Homo sapien
ggtaaggtatccaccctcgatgcaa

SEQ ID NO: 3079716 - DNA, 25 bp, Homo sapien
gcagcaaacttgcaacagactggcc

SEQ ID NO: 3079717 - DNA, 25 bp, Homo sapien
aatccagcagcggttgaactcagag

SEQ ID NO: 3079718 - DNA, 25 bp, Homo sapien
ttatgatgcattgcacaccctctgg

SEQ ID NO: 3079719 - DNA, 25 bp, Homo sapien
attgcacaccctctggggaaattga

SEQ ID NO: 3079720 - DNA, 25 bp, Homo sapien
gatgcattgcacaccctctggggaa

SEQ ID NO: 3079721 - DNA, 25 bp, Homo sapien
gcattgcacaccctctggggaaatt

SEQ ID NO: 3079722 - DNA, 25 bp, Homo sapien
tccatggctgtaccaccttgtcggg

SEQ ID NO: 3079723 - DNA, 25 bp, Homo sapien
tgtcgggtagcttatcagactgatg

SEQ ID NO: 3079724 - DNA, 25 bp, Homo sapien
acaccagtcgatgggctgtctgaca

SEQ ID NO: 3079725 - DNA, 25 bp, Homo sapien
gactgatgttgactgttgaatctca

SEQ ID NO: 3079726 - DNA, 25 bp, Homo sapien
tctgaccatccatatccaatgttct

SEQ ID NO: 3079727 - DNA, 25 bp, Homo sapien
catctgaccatccatatccaatgtt

SEQ ID NO: 3079728 - DNA, 25 bp, Homo sapien
tcatctgaccatccatatccaatgt

SEQ ID NO: 3079729 - DNA, 25 bp, Homo sapien
ctgaccatccatatccaatgttctc

SEQ ID NO: 3079730 - DNA, 25 bp, Homo sapien
cagcagtatggagggaggattttat

SEQ ID NO: 3079731 - DNA, 25 bp, Homo sapien
agctgtggcatgctcagaggttcct

SEQ ID NO: 3079732 - DNA, 25 bp, Homo sapien
taagtcagcctctagtcgtggttca

SEQ ID NO: 3079733 - DNA, 25 bp, Homo sapien
tcagggacttttctagctgtatgac

SEQ ID NO: 3079734 - DNA, 25 bp, Homo sapien
gggagtgaggcagttagggatttga

SEQ ID NO: 3079735 - DNA, 25 bp, Homo sapien
gtggggaatgacttagatcactgtc

SEQ ID NO: 3079736 - DNA, 25 bp, Homo sapien
cagggatggtgccgcctgaaggtgg

SEQ ID NO: 3079737 - DNA, 25 bp, Homo sapien
gagtgaggcagttagggatttgaaa

SEQ ID NO: 3079738 - DNA, 25 bp, Homo sapien
ggaaacgaaaagcagctcaagttca

SEQ ID NO: 3079739 - DNA, 25 bp, Homo sapien
tcctcttggcagtagtgcagaagcc

SEQ ID NO: 3079740 - DNA, 25 bp, Homo sapien
aagcctggcttgccacggccctgga

SEQ ID NO: 3079741 - DNA, 25 bp, Homo sapien
aagcagctcaagttcactcctcttg

SEQ ID NO: 3079742 - DNA, 25 bp, Homo sapien
gtatattgttccaattttggtgtat

SEQ ID NO: 3079743 - DNA, 25 bp, Homo sapien
tctgtatattgttccaattttggtg

SEQ ID NO: 3079744 - DNA, 25 bp, Homo sapien
cttctgtatattgttccaattttgg

SEQ ID NO: 3079745 - DNA, 25 bp, Homo sapien
acacaaatttgagtgtcattcttgt

SEQ ID NO: 3079746 - DNA, 25 bp, Homo sapien
gccaggatggagaactttgaaaact

SEQ ID NO: 3079747 - DNA, 25 bp, Homo sapien
gctgcttagagtggaaacttgccct

SEQ ID NO: 3079748 - DNA, 25 bp, Homo sapien
ccctcctgtggttcaaagcattcat

SEQ ID NO: 3079749 - DNA, 25 bp, Homo sapien
ggctagttccagagtcccaacattt

SEQ ID NO: 3079750 - DNA, 25 bp, Homo sapien
aacctgctctaatgacgtgaaactg

SEQ ID NO: 3079751 - DNA, 25 bp, Homo sapien
aaagtcctcttcttcgattccaaat

SEQ ID NO: 3079752 - DNA, 25 bp, Homo sapien
caacaacctgctctaatgacgtgaa

SEQ ID NO: 3079753 - DNA, 25 bp, Homo sapien
gctctaatgacgtgaaactgtctaa

SEQ ID NO: 3079754 - DNA, 25 bp, Homo sapien
aagatcacacaatcgttcagaagtc

SEQ ID NO: 3079755 - DNA, 25 bp, Homo sapien
tgtttactccaaagattagtgaact

SEQ ID NO: 3079756 - DNA, 25 bp, Homo sapien
caataaacagaccttttctagctga

SEQ ID NO: 3079757 - DNA, 25 bp, Homo sapien
tcgttcagaagtcttacatttgctt

SEQ ID NO: 3079758 - DNA, 25 bp, Homo sapien
ccaggaagtatacagagctggatct

SEQ ID NO: 3079759 - DNA, 25 bp, Homo sapien
tttgaagcaaacatattccatgcct

SEQ ID NO: 3079760 - DNA, 25 bp, Homo sapien
catatttgctaaaggcccgctgggt

SEQ ID NO: 3079761 - DNA, 25 bp, Homo sapien
gctgggttttccacacgttgaaagc

SEQ ID NO: 3079762 - DNA, 25 bp, Homo sapien
cccacgaagaatgaccaagttagca

SEQ ID NO: 3079763 - DNA, 25 bp, Homo sapien
gaagaatgaccaagttagcaatgga

SEQ ID NO: 3079764 - DNA, 25 bp, Homo sapien
ctttcccacgaagaatgaccaagtt

SEQ ID NO: 3079765 - DNA, 25 bp, Homo sapien
aatgaccaagttagcaatggaagtg

SEQ ID NO: 3079766 - DNA, 25 bp, Homo sapien
gataaaggaggccatacatgcctat

SEQ ID NO: 3079767 - DNA, 25 bp, Homo sapien
ctgataaaggaggccatacatgcct

SEQ ID NO: 3079768 - DNA, 25 bp, Homo sapien
ataaaggaggccatacatgcctatc

SEQ ID NO: 3079769 - DNA, 25 bp, Homo sapien
tgataaaggaggccatacatgccta

SEQ ID NO: 3079770 - DNA, 25 bp, Homo sapien
gcctactccactagactttgttggg

SEQ ID NO: 3079771 - DNA, 25 bp, Homo sapien
gagggtctaccaattctcctatgcc

SEQ ID NO: 3079772 - DNA, 25 bp, Homo sapien
tatactcaagaaatcttaggatggg

SEQ ID NO: 3079773 - DNA, 25 bp, Homo sapien
aaattgtactcaaagggctatactc

SEQ ID NO: 3079774 - DNA, 25 bp, Homo sapien
gaccgatgtgctaatgggatgtaac

SEQ ID NO: 3079775 - DNA, 25 bp, Homo sapien
ggtgacagtgcgagaaataccactt

SEQ ID NO: 3079776 - DNA, 25 bp, Homo sapien
caagcccttgggcagtatgctctca

SEQ ID NO: 3079777 - DNA, 25 bp, Homo sapien
tagggacagcgcagagaacagtagt

SEQ ID NO: 3079778 - DNA, 25 bp, Homo sapien
ggaatgttacgaacactcagcatct

SEQ ID NO: 3079779 - DNA, 25 bp, Homo sapien
ggtgtatgccaatgaattctcagac

SEQ ID NO: 3079780 - DNA, 25 bp, Homo sapien
gtctcaaatgcttgaggaggccagc

SEQ ID NO: 3079781 - DNA, 25 bp, Homo sapien
ggaggccagcccaagtaaatgtggt

SEQ ID NO: 3079782 - DNA, 25 bp, Homo sapien
gtctgtagtgaaatgagctttctgc

SEQ ID NO: 3079783 - DNA, 25 bp, Homo sapien
ctagtggatttcgtctgtagtgaaa

SEQ ID NO: 3079784 - DNA, 25 bp, Homo sapien
ctttctgcagaataagtaggctgga

SEQ ID NO: 3079785 - DNA, 25 bp, Homo sapien
gcagaataagtaggctggaacacac

SEQ ID NO: 3079786 - DNA, 25 bp, Homo sapien
cagttttgcacagatcttatggatg

SEQ ID NO: 3079787 - DNA, 25 bp, Homo sapien
ggcgtctgaagatcggtacaagtga

SEQ ID NO: 3079788 - DNA, 25 bp, Homo sapien
gatatcactaaaggagatctgcttg

SEQ ID NO: 3079789 - DNA, 25 bp, Homo sapien
cccagctgatgtgcgaggacttgat

SEQ ID NO: 3079790 - DNA, 25 bp, Homo sapien
gagaataatggttaagattacagat

SEQ ID NO: 3079791 - DNA, 25 bp, Homo sapien
cttggacaagttttttaatctctat

SEQ ID NO: 3079792 - DNA, 25 bp, Homo sapien
aaggcatcctggcagggttcaaatc

SEQ ID NO: 3079793 - DNA, 25 bp, Homo sapien
aagattacagattctcaaggcatcc

SEQ ID NO: 3079794 - DNA, 25 bp, Homo sapien
tcttctaaattctgtgtaacgaaag

SEQ ID NO: 3079795 - DNA, 25 bp, Homo sapien
tgtaacgaaagctcctaatcctgat

SEQ ID NO: 3079796 - DNA, 25 bp, Homo sapien
aaagctcctaatcctgatcctgtgc

SEQ ID NO: 3079797 - DNA, 25 bp, Homo sapien
ttcaatgagtttgagtactgatctt

SEQ ID NO: 3079798 - DNA, 25 bp, Homo sapien
aaaaccactgaaagagtcacatttc

SEQ ID NO: 3079799 - DNA, 25 bp, Homo sapien
ccacttccttccggattatgttcat

SEQ ID NO: 3079800 - DNA, 25 bp, Homo sapien
ctgggaccacaggcacaggccgcca

SEQ ID NO: 3079801 - DNA, 25 bp, Homo sapien
ccacaggcacaggccgccacgccca

SEQ ID NO: 3079802 - DNA, 25 bp, Homo sapien
gggaccacaggcacaggccgccacg

SEQ ID NO: 3079803 - DNA, 25 bp, Homo sapien
gaccacaggcacaggccgccacgcc

SEQ ID NO: 3079804 - DNA, 25 bp, Homo sapien
gagccactgcaacaggcctaatttt

SEQ ID NO: 3079805 - DNA, 25 bp, Homo sapien
gtgagccactgcaacaggcctaatt

SEQ ID NO: 3079806 - DNA, 25 bp, Homo sapien
cgtgagccactgcaacaggcctaat

SEQ ID NO: 3079807 - DNA, 25 bp, Homo sapien
ggcgtgagccactgcaacaggccta

SEQ ID NO: 3079808 - DNA, 25 bp, Homo sapien
ggtaacatgctgaatccttgtctct

SEQ ID NO: 3079809 - DNA, 25 bp, Homo sapien
tgggtaacatgctgaatccttgtct

SEQ ID NO: 3079810 - DNA, 25 bp, Homo sapien
tctgggtaacatgctgaatccttgt

SEQ ID NO: 3079811 - DNA, 25 bp, Homo sapien
agtctgggtaacatgctgaatcctt

SEQ ID NO: 3079812 - DNA, 25 bp, Homo sapien
catttgattgataactttgggttcc

SEQ ID NO: 3079813 - DNA, 25 bp, Homo sapien
ccatatgcccagttgtttccagaac

SEQ ID NO: 3079814 - DNA, 25 bp, Homo sapien
catgtcaacaagaacagcccgggca

SEQ ID NO: 3079815 - DNA, 25 bp, Homo sapien
gcagcctttgacagcatttgattga

SEQ ID NO: 3079816 - DNA, 25 bp, Homo sapien
tcctcctcactgaagaatctttctt

SEQ ID NO: 3079817 - DNA, 25 bp, Homo sapien
cattctctctcatagagcagagtcc

SEQ ID NO: 3079818 - DNA, 25 bp, Homo sapien
tgcaagatgcttgatatgcctcatt

SEQ ID NO: 3079819 - DNA, 25 bp, Homo sapien
tcatagagcagagtccctgggaact

SEQ ID NO: 3079820 - DNA, 25 bp, Homo sapien
tctgattgccacactgaccaagttg

SEQ ID NO: 3079821 - DNA, 25 bp, Homo sapien
tgattgccacactgaccaagttgca

SEQ ID NO: 3079822 - DNA, 25 bp, Homo sapien
ctgattgccacactgaccaagttgc

SEQ ID NO: 3079823 - DNA, 25 bp, Homo sapien
ctgagccacaaactaggtgtattac

SEQ ID NO: 3079824 - DNA, 25 bp, Homo sapien
gccagacgccgaccagcgcttctgt

SEQ ID NO: 3079825 - DNA, 25 bp, Homo sapien
ttcaaacttcggaccaacctactca

SEQ ID NO: 3079826 - DNA, 25 bp, Homo sapien
aacctactcaccatgcgcatgctca

SEQ ID NO: 3079827 - DNA, 25 bp, Homo sapien
caccatgcgcatgctcactttcaaa

SEQ ID NO: 3079828 - DNA, 25 bp, Homo sapien
caatttcaatttacgaacttcagat

SEQ ID NO: 3079829 - DNA, 25 bp, Homo sapien
cataaacggagagttttgttgtgta

SEQ ID NO: 3079830 - DNA, 25 bp, Homo sapien
caaatgcgcatgttccataaacgga

SEQ ID NO: 3079831 - DNA, 25 bp, Homo sapien
cagaaagattaattacgcatgttca

SEQ ID NO: 3079832 - DNA, 25 bp, Homo sapien
ggcttcacggaaccctgtacgcatg

SEQ ID NO: 3079833 - DNA, 25 bp, Homo sapien
tgtttgacatagacctggaccagcc

SEQ ID NO: 3079834 - DNA, 25 bp, Homo sapien
cactgagcctaagcagccggtgatg

SEQ ID NO: 3079835 - DNA, 25 bp, Homo sapien
tgtacgcatgctcctacgctgaact

SEQ ID NO: 3079836 - DNA, 25 bp, Homo sapien
ttatttcgggagcaagggggctctg

SEQ ID NO: 3079837 - DNA, 25 bp, Homo sapien
atttcgggagcaagggggctctgct

SEQ ID NO: 3079838 - DNA, 25 bp, Homo sapien
tatttcgggagcaagggggctctgc

SEQ ID NO: 3079839 - DNA, 25 bp, Homo sapien
tctaagggtcaggttataagatacc

SEQ ID NO: 3079840 - DNA, 25 bp, Homo sapien
acaaagttcctatttcctatgggat

SEQ ID NO: 3079841 - DNA, 25 bp, Homo sapien
gaccaatggcagtttagcatattct

SEQ ID NO: 3079842 - DNA, 25 bp, Homo sapien
tagcttaattcctacacagacagaa

SEQ ID NO: 3079843 - DNA, 25 bp, Homo sapien
taggaataactgtatactaaaatct

SEQ ID NO: 3079844 - DNA, 25 bp, Homo sapien
ttgaagatgtaatttgactcagtac

SEQ ID NO: 3079845 - DNA, 25 bp, Homo sapien
tttaataggaataactgtatactaa

SEQ ID NO: 3079846 - DNA, 25 bp, Homo sapien
gatgtaatttgactcagtactttcc

SEQ ID NO: 3079847 - DNA, 25 bp, Homo sapien
tgtgaagaaagccagacaacttctg

SEQ ID NO: 3079848 - DNA, 25 bp, Homo sapien
taaaatgcgaaattattggttggtg

SEQ ID NO: 3079849 - DNA, 25 bp, Homo sapien
acagctgtggctcgtttgagggatt

SEQ ID NO: 3079850 - DNA, 25 bp, Homo sapien
ttggttggtgtgaagaaagccagac

SEQ ID NO: 3079851 - DNA, 25 bp, Homo sapien
aactggaagccttggaatgggcata

SEQ ID NO: 3079852 - DNA, 25 bp, Homo sapien
attgtcccgggcctgcattgcactg

SEQ ID NO: 3079853 - DNA, 25 bp, Homo sapien
gacaccaaatgtcttcagcccatgg

SEQ ID NO: 3079854 - DNA, 25 bp, Homo sapien
tacatactgtggtcggcaaggtgag

SEQ ID NO: 3079855 - DNA, 25 bp, Homo sapien
taacaaggggagaaagtgcttcatt

SEQ ID NO: 3079856 - DNA, 25 bp, Homo sapien
ttcagattcctccttagaggtaaca

SEQ ID NO: 3079857 - DNA, 25 bp, Homo sapien
agatttcagattcctccttagaggt

SEQ ID NO: 3079858 - DNA, 25 bp, Homo sapien
agattcctccttagaggtaacaagg

SEQ ID NO: 3079859 - DNA, 25 bp, Homo sapien
tacttcgagatactccatggtacta

SEQ ID NO: 3079860 - DNA, 25 bp, Homo sapien
catgaacattaaagctgatggcagg

SEQ ID NO: 3079861 - DNA, 25 bp, Homo sapien
gaagaatttatgacgtccagagaca

SEQ ID NO: 3079862 - DNA, 25 bp, Homo sapien
atggtactatacaaaaagcatgatc

SEQ ID NO: 3079863 - DNA, 25 bp, Homo sapien
cttattactaatcttactacagaga

SEQ ID NO: 3079864 - DNA, 25 bp, Homo sapien
ttttggtgaattggatcataagtcc

SEQ ID NO: 3079865 - DNA, 25 bp, Homo sapien
caatactataatgtatcatcctcag

SEQ ID NO: 3079866 - DNA, 25 bp, Homo sapien
tggatcataagtcctacattctaaa

SEQ ID NO: 3079867 - DNA, 25 bp, Homo sapien
ttgataatcattttaaatccatcac

SEQ ID NO: 3079868 - DNA, 25 bp, Homo sapien
ctgtaatggaattaagaattagatt

SEQ ID NO: 3079869 - DNA, 25 bp, Homo sapien
tggaattaagaattagatttgatat

SEQ ID NO: 3079870 - DNA, 25 bp, Homo sapien
aattagatttgatatttgataatca

SEQ ID NO: 3079871 - DNA, 25 bp, Homo sapien
tgtccagcctgaaagggattttgaa

SEQ ID NO: 3079872 - DNA, 25 bp, Homo sapien
gaacgtatgagacattcaagaagac

SEQ ID NO: 3079873 - DNA, 25 bp, Homo sapien
ctccgcccccgactggttcaagtga

SEQ ID NO: 3079874 - DNA, 25 bp, Homo sapien
aaatggagaacgtatgagacattca

SEQ ID NO: 3079875 - DNA, 25 bp, Homo sapien
cttttgcaagtcacagagaactgtt

SEQ ID NO: 3079876 - DNA, 25 bp, Homo sapien
tgcaagtcacagagaactgttgtat

SEQ ID NO: 3079877 - DNA, 25 bp, Homo sapien
tttgcaagtcacagagaactgttgt

SEQ ID NO: 3079878 - DNA, 25 bp, Homo sapien
gcaagtcacagagaactgttgtatt

SEQ ID NO: 3079879 - DNA, 25 bp, Homo sapien
caaatgagaagaattggcttctgaa

SEQ ID NO: 3079880 - DNA, 25 bp, Homo sapien
gaaattcagcttgacatattgaaca

SEQ ID NO: 3079881 - DNA, 25 bp, Homo sapien
acatctgaacactgtctcttgctgg

SEQ ID NO: 3079882 - DNA, 25 bp, Homo sapien
attgaacaaatatcatccacatctg

SEQ ID NO: 3079883 - DNA, 25 bp, Homo sapien
tatgaagaagacttagggaccactg

SEQ ID NO: 3079884 - DNA, 25 bp, Homo sapien
gaaaggtctccaagtgagtgcaata

SEQ ID NO: 3079885 - DNA, 25 bp, Homo sapien
caatatcaattcactaggaccagac

SEQ ID NO: 3079886 - DNA, 25 bp, Homo sapien
gaccagacatattgggatgtgaccc

SEQ ID NO: 3079887 - DNA, 25 bp, Homo sapien
atattcgtaaaacctgtctgaaagt

SEQ ID NO: 3079888 - DNA, 25 bp, Homo sapien
aatattcgtaaaacctgtctgaaag

SEQ ID NO: 3079889 - DNA, 25 bp, Homo sapien
tgaggatgggtatgttctattccac

SEQ ID NO: 3079890 - DNA, 25 bp, Homo sapien
taatccacgctatgtgaaggtcgac

SEQ ID NO: 3079891 - DNA, 25 bp, Homo sapien
taatgtgaatcatgcagtgacaaga

SEQ ID NO: 3079892 - DNA, 25 bp, Homo sapien
gaaacctgaggaccgctggattaag

SEQ ID NO: 3079893 - DNA, 25 bp, Homo sapien
gagtaaagccagcagtatcccaaga

SEQ ID NO: 3079894 - DNA, 25 bp, Homo sapien
tgaggtagagtaaagccagcagtat

SEQ ID NO: 3079895 - DNA, 25 bp, Homo sapien
ttttaatatgaggtagagtaaagcc

SEQ ID NO: 3079896 - DNA, 25 bp, Homo sapien
taatatgaggtagagtaaagccagc

SEQ ID NO: 3079897 - DNA, 25 bp, Homo sapien
taccaaactccccatagcttataag

SEQ ID NO: 3079898 - DNA, 25 bp, Homo sapien
ttaccaaactccccatagcttataa

SEQ ID NO: 3079899 - DNA, 25 bp, Homo sapien
aaactccccatagcttataaggtag

SEQ ID NO: 3079900 - DNA, 25 bp, Homo sapien
ccaaactccccatagcttataaggt

SEQ ID NO: 3079901 - DNA, 25 bp, Homo sapien
ttcccagaagctcaaatggtccaaa

SEQ ID NO: 3079902 - DNA, 25 bp, Homo sapien
acttcccagaagctcaaatggtcca

SEQ ID NO: 3079903 - DNA, 25 bp, Homo sapien
tacttcccagaagctcaaatggtcc

SEQ ID NO: 3079904 - DNA, 25 bp, Homo sapien
gcatgatgaaagaaggcaccaataa

SEQ ID NO: 3079905 - DNA, 25 bp, Homo sapien
aatttatcagagcaacatacaaaga

SEQ ID NO: 3079906 - DNA, 25 bp, Homo sapien
aaatttatcagagcaacatacaaag

SEQ ID NO: 3079907 - DNA, 25 bp, Homo sapien
catcaaaatttatcagagcaacata

SEQ ID NO: 3079908 - DNA, 25 bp, Homo sapien
tcaaaatttatcagagcaacataca

SEQ ID NO: 3079909 - DNA, 25 bp, Homo sapien
gttcacaataatggaatggaggatc

SEQ ID NO: 3079910 - DNA, 25 bp, Homo sapien
tggaatggaggatcattttgcttaa

SEQ ID NO: 3079911 - DNA, 25 bp, Homo sapien
ggatgtcagagttcacaataatgga

SEQ ID NO: 3079912 - DNA, 25 bp, Homo sapien
aaaaatatgagtttggcaggatgtc

SEQ ID NO: 3079913 - DNA, 25 bp, Homo sapien
gaaaaagtcttcacggtttgtcata

SEQ ID NO: 3079914 - DNA, 25 bp, Homo sapien
ttgtcatagttgacacctttctagc

SEQ ID NO: 3079915 - DNA, 25 bp, Homo sapien
gtttggattttagatcttcccttca

SEQ ID NO: 3079916 - DNA, 25 bp, Homo sapien
ctgtttggattttagatcttccctt

SEQ ID NO: 3079917 - DNA, 25 bp, Homo sapien
taattgtggtcatgtccagtactgg

SEQ ID NO: 3079918 - DNA, 25 bp, Homo sapien
ccagtactgggctctctatctacac

SEQ ID NO: 3079919 - DNA, 25 bp, Homo sapien
tcttaaccaattccaatcaggattc

SEQ ID NO: 3079920 - DNA, 25 bp, Homo sapien
catcaactccctctgtatggctaaa

SEQ ID NO: 3079921 - DNA, 25 bp, Homo sapien
agcacactgaatctttgaggacctt

SEQ ID NO: 3079922 - DNA, 25 bp, Homo sapien
tgctaagaataccagtaaccaagca

SEQ ID NO: 3079923 - DNA, 25 bp, Homo sapien
tgactgagaatgaaaggtgtaatat

SEQ ID NO: 3079924 - DNA, 25 bp, Homo sapien
tataaaagaacagaagatcctgcta

SEQ ID NO: 3079925 - DNA, 25 bp, Homo sapien
tgacataaaggacccacccaggacg

SEQ ID NO: 3079926 - DNA, 25 bp, Homo sapien
tacaagctgacataaaggacccacc

SEQ ID NO: 3079927 - DNA, 25 bp, Homo sapien
ggtcttctacaagctgacataaagg

SEQ ID NO: 3079928 - DNA, 25 bp, Homo sapien
aagccaggtcttctacaagctgaca

SEQ ID NO: 3079929 - DNA, 25 bp, Homo sapien
agccatttaaagttgccttaaggtg

SEQ ID NO: 3079930 - DNA, 25 bp, Homo sapien
tgcatgatactttacacagacatag

SEQ ID NO: 3079931 - DNA, 25 bp, Homo sapien
gccatttaaagttgccttaaggtga

SEQ ID NO: 3079932 - DNA, 25 bp, Homo sapien
atgcatgatactttacacagacata

SEQ ID NO: 3079933 - DNA, 25 bp, Homo sapien
agaaggtaaggtgaaggaattcagc

SEQ ID NO: 3079934 - DNA, 25 bp, Homo sapien
aagaaggtaaggtgaaggaattcag

SEQ ID NO: 3079935 - DNA, 25 bp, Homo sapien
gaaggtaaggtgaaggaattcagca

SEQ ID NO: 3079936 - DNA, 25 bp, Homo sapien
tgttacaatatatcctattacttcc

SEQ ID NO: 3079937 - DNA, 25 bp, Homo sapien
taggagagataatttattccaggat

SEQ ID NO: 3079938 - DNA, 25 bp, Homo sapien
ggagagataatttattccaggattt

SEQ ID NO: 3079939 - DNA, 25 bp, Homo sapien
acaaatttaacataacgtggatgtt

SEQ ID NO: 3079940 - DNA, 25 bp, Homo sapien
tgcatacataaaagttgttagcagc

SEQ ID NO: 3079941 - DNA, 25 bp, Homo sapien
acataaaagttgttagcagcccaat

SEQ ID NO: 3079942 - DNA, 25 bp, Homo sapien
aacctgatttacaatgcttttgttt

SEQ ID NO: 3079943 - DNA, 25 bp, Homo sapien
aagttgttagcagcccaattccaag

SEQ ID NO: 3079944 - DNA, 25 bp, Homo sapien
cttgaagagatagcggaattctgag

SEQ ID NO: 3079945 - DNA, 25 bp, Homo sapien
aagagatagcggaattctgagaagg

SEQ ID NO: 3079946 - DNA, 25 bp, Homo sapien
gtgaccccgtaagcgactgtgtaca

SEQ ID NO: 3079947 - DNA, 25 bp, Homo sapien
agccacttgaagagatagcggaatt

SEQ ID NO: 3079948 - DNA, 25 bp, Homo sapien
cattctttaggtatggagtttatct

SEQ ID NO: 3079949 - DNA, 25 bp, Homo sapien
tttaggtatggagtttatctggata

SEQ ID NO: 3079950 - DNA, 25 bp, Homo sapien
aggtatggagtttatctggatatga

SEQ ID NO: 3079951 - DNA, 25 bp, Homo sapien
ttctttaggtatggagtttatctgg

SEQ ID NO: 3079952 - DNA, 25 bp, Homo sapien
aatactttttctctgacccagatgt

SEQ ID NO: 3079953 - DNA, 25 bp, Homo sapien
tctctgacccagatgtctttgcttc

SEQ ID NO: 3079954 - DNA, 25 bp, Homo sapien
acccagatgtctttgcttcaggcct

SEQ ID NO: 3079955 - DNA, 25 bp, Homo sapien
tactttttctctgacccagatgtct

SEQ ID NO: 3079956 - DNA, 25 bp, Homo sapien
gcgacagcaagaacagcggcataca

SEQ ID NO: 3079957 - DNA, 25 bp, Homo sapien
aagctcttctctcagcccggcggca

SEQ ID NO: 3079958 - DNA, 25 bp, Homo sapien
ttcagtcggggccatcaaccgcaaa

SEQ ID NO: 3079959 - DNA, 25 bp, Homo sapien
gcggacggaggtgtcgggagcgaca

SEQ ID NO: 3079960 - DNA, 25 bp, Homo sapien
taaacagaaaacatgcacacgagct

SEQ ID NO: 3079961 - DNA, 25 bp, Homo sapien
aaacagaaaacatgcacacgagctg

SEQ ID NO: 3079962 - DNA, 25 bp, Homo sapien
aacagaaaacatgcacacgagctgt

SEQ ID NO: 3079963 - DNA, 25 bp, Homo sapien
ttaaacagaaaacatgcacacgagc

SEQ ID NO: 3079964 - DNA, 25 bp, Homo sapien
ttggtgactttgatggccagttggg

SEQ ID NO: 3079965 - DNA, 25 bp, Homo sapien
gactttgatggccagttgggcagct

SEQ ID NO: 3079966 - DNA, 25 bp, Homo sapien
tgactttgatggccagttgggcagc

SEQ ID NO: 3079967 - DNA, 25 bp, Homo sapien
ggtgactttgatggccagttgggca

SEQ ID NO: 3079968 - DNA, 25 bp, Homo sapien
cggcacagtaagatttgttgcacat

SEQ ID NO: 3079969 - DNA, 25 bp, Homo sapien
ctcggcacagtaagatttgttgcac

SEQ ID NO: 3079970 - DNA, 25 bp, Homo sapien
tcggcacagtaagatttgttgcaca

SEQ ID NO: 3079971 - DNA, 25 bp, Homo sapien
caacggagtcttactttgtgaccca

SEQ ID NO: 3079972 - DNA, 25 bp, Homo sapien
tgcaacggagtcttactttgtgacc

SEQ ID NO: 3079973 - DNA, 25 bp, Homo sapien
tttgcaacggagtcttactttgtga

SEQ ID NO: 3079974 - DNA, 25 bp, Homo sapien
ttatatttttgcaacggagtcttac

SEQ ID NO: 3079975 - DNA, 25 bp, Homo sapien
tgagcttccacacgaaatgcagaaa

SEQ ID NO: 3079976 - DNA, 25 bp, Homo sapien
ttccacacgaaatgcagaaaataag

SEQ ID NO: 3079977 - DNA, 25 bp, Homo sapien
tctcgaagttgagcttccacacgaa

SEQ ID NO: 3079978 - DNA, 25 bp, Homo sapien
gcttcctgattagttctcgaagttg

SEQ ID NO: 3079979 - DNA, 25 bp, Homo sapien
tgatttgcattgttcaaagatgaca

SEQ ID NO: 3079980 - DNA, 25 bp, Homo sapien
atttgcattgttcaaagatgacagc

SEQ ID NO: 3079981 - DNA, 25 bp, Homo sapien
ttagctgccaattctcgatgtctct

SEQ ID NO: 3079982 - DNA, 25 bp, Homo sapien
gctgccaattctcgatgtctctgtt

SEQ ID NO: 3079983 - DNA, 25 bp, Homo sapien
ctatcacagctagatctagcagagg

SEQ ID NO: 3079984 - DNA, 25 bp, Homo sapien
gcatttactatagaatacgatgtga

SEQ ID NO: 3079985 - DNA, 25 bp, Homo sapien
agctagatctagcagaggcacaatg

SEQ ID NO: 3079986 - DNA, 25 bp, Homo sapien
cagaggcacaatgttgcctgaatcc

SEQ ID NO: 3079987 - DNA, 25 bp, Homo sapien
caacattgctgctattggaagtagt

SEQ ID NO: 3079988 - DNA, 25 bp, Homo sapien
caaaggaaactccaccatagacaaa

SEQ ID NO: 3079989 - DNA, 25 bp, Homo sapien
tagacaaacccaatctggtgacatg

SEQ ID NO: 3079990 - DNA, 25 bp, Homo sapien
ggtctaatgaagacgttttccacag

SEQ ID NO: 3079991 - DNA, 25 bp, Homo sapien
aagtctctcattaggtggatccaaa

SEQ ID NO: 3079992 - DNA, 25 bp, Homo sapien
aaataagtctctcattaggtggatc

SEQ ID NO: 3079993 - DNA, 25 bp, Homo sapien
cattaggtggatccaaatagggaaa

SEQ ID NO: 3079994 - DNA, 25 bp, Homo sapien
tctcattaggtggatccaaataggg

SEQ ID NO: 3079995 - DNA, 25 bp, Homo sapien
gagatctaccatacctaagtaccat

SEQ ID NO: 3079996 - DNA, 25 bp, Homo sapien
tgtaaccaaagtctatgccagtgga

SEQ ID NO: 3079997 - DNA, 25 bp, Homo sapien
agtttgccacccttgtgctagagca

SEQ ID NO: 3079998 - DNA, 25 bp, Homo sapien
gagtgaccaacacataacaggaatg

SEQ ID NO: 3079999 - DNA, 25 bp, Homo sapien
gcacccggcctacaatacatatttg

SEQ ID NO: 3080000 - DNA, 25 bp, Homo sapien
taattcccctaccatgtatgataga

SEQ ID NO: 3080001 - DNA, 25 bp, Homo sapien
cattccaaggcaattaagaccaaaa

SEQ ID NO: 3080002 - DNA, 25 bp, Homo sapien
gatagtactttcctccattaattcc

SEQ ID NO: 3080003 - DNA, 25 bp, Homo sapien
tactatagatccgaaagcattttcc

SEQ ID NO: 3080004 - DNA, 25 bp, Homo sapien
ggcaaggcactttaaggtcagaact

SEQ ID NO: 3080005 - DNA, 25 bp, Homo sapien
ggccacttcgctgtaatgcctcgct

SEQ ID NO: 3080006 - DNA, 25 bp, Homo sapien
tatgacatcgtgtatggcaaggcac

SEQ ID NO: 3080007 - DNA, 25 bp, Homo sapien
tggggttgtgatttaactgcttcac

SEQ ID NO: 3080008 - DNA, 25 bp, Homo sapien
acctccaggatgtccaaccctaatc

SEQ ID NO: 3080009 - DNA, 25 bp, Homo sapien
taatctggggttgtgatttaactgc

SEQ ID NO: 3080010 - DNA, 25 bp, Homo sapien
ccaggatgtccaaccctaatctggg

SEQ ID NO: 3080011 - DNA, 25 bp, Homo sapien
gaaatattggtggatatgacacatt

SEQ ID NO: 3080012 - DNA, 25 bp, Homo sapien
tgtcaaagacgttgcagaaatattg

SEQ ID NO: 3080013 - DNA, 25 bp, Homo sapien
gcagaaatattggtggatatgacac

SEQ ID NO: 3080014 - DNA, 25 bp, Homo sapien
tattgtcaaagacgttgcagaaata

SEQ ID NO: 3080015 - DNA, 25 bp, Homo sapien
cggcaatattaacaagccatcgagg

SEQ ID NO: 3080016 - DNA, 25 bp, Homo sapien
gttgtcattgatccataacacggca

SEQ ID NO: 3080017 - DNA, 25 bp, Homo sapien
cataatcataatcaacagactctgc

SEQ ID NO: 3080018 - DNA, 25 bp, Homo sapien
tggtatcttgaacatcataatcata

SEQ ID NO: 3080019 - DNA, 25 bp, Homo sapien
aaccaagatgtctccagccatttca

SEQ ID NO: 3080020 - DNA, 25 bp, Homo sapien
accaagatgtctccagccatttcat

SEQ ID NO: 3080021 - DNA, 25 bp, Homo sapien
aaaccaagatgtctccagccatttc

SEQ ID NO: 3080022 - DNA, 25 bp, Homo sapien
ggataaagccttccaggtatatcaa

SEQ ID NO: 3080023 - DNA, 25 bp, Homo sapien
tccaaagaatgcagagagcttggct

SEQ ID NO: 3080024 - DNA, 25 bp, Homo sapien
tcgtggaccaatcaaattgcagaat

SEQ ID NO: 3080025 - DNA, 25 bp, Homo sapien
tcaaatattggacaatttccaaaga

SEQ ID NO: 3080026 - DNA, 25 bp, Homo sapien
taaatgctccttcctattagcagac

SEQ ID NO: 3080027 - DNA, 25 bp, Homo sapien
gaaatagcttcttcaatagaccaaa

SEQ ID NO: 3080028 - DNA, 25 bp, Homo sapien
gcagacttctcctgaaatagcttct

SEQ ID NO: 3080029 - DNA, 25 bp, Homo sapien
tcttcaatagaccaaataagatatc

SEQ ID NO: 3080030 - DNA, 25 bp, Homo sapien
agtaaacatccatcagtcatatatt

SEQ ID NO: 3080031 - DNA, 25 bp, Homo sapien
tcagtaaacatccatcagtcatata

SEQ ID NO: 3080032 - DNA, 25 bp, Homo sapien
aaacatccatcagtcatatatttga

SEQ ID NO: 3080033 - DNA, 25 bp, Homo sapien
taaacatccatcagtcatatatttg

SEQ ID NO: 3080034 - DNA, 25 bp, Homo sapien
ttatccccacagcgcagaagcacag

SEQ ID NO: 3080035 - DNA, 25 bp, Homo sapien
gttatccccacagcgcagaagcaca

SEQ ID NO: 3080036 - DNA, 25 bp, Homo sapien
tatccccacagcgcagaagcacagc

SEQ ID NO: 3080037 - DNA, 25 bp, Homo sapien
tctccgttaccagagcagtctccgt

SEQ ID NO: 3080038 - DNA, 25 bp, Homo sapien
ttaccagagcagtctccgttcccga

SEQ ID NO: 3080039 - DNA, 25 bp, Homo sapien
gcagtctccgttcccgaacgtgctg

SEQ ID NO: 3080040 - DNA, 25 bp, Homo sapien
catctctccgttaccagagcagtct

SEQ ID NO: 3080041 - DNA, 25 bp, Homo sapien
aggcagctcagcctgaacttgttca

SEQ ID NO: 3080042 - DNA, 25 bp, Homo sapien
ctccaggcagctcagcctgaacttg

SEQ ID NO: 3080043 - DNA, 25 bp, Homo sapien
ggcagctcagcctgaacttgttcat

SEQ ID NO: 3080044 - DNA, 25 bp, Homo sapien
ccaggcagctcagcctgaacttgtt

SEQ ID NO: 3080045 - DNA, 25 bp, Homo sapien
attgaggtagacataagccttcagc

SEQ ID NO: 3080046 - DNA, 25 bp, Homo sapien
gacagcattgaggtagacataagcc

SEQ ID NO: 3080047 - DNA, 25 bp, Homo sapien
acagcgaacgcggacagcattgagg

SEQ ID NO: 3080048 - DNA, 25 bp, Homo sapien
cgaacgcggacagcattgaggtaga

SEQ ID NO: 3080049 - DNA, 25 bp, Homo sapien
tgctgttcgtccctagctctgaagg

SEQ ID NO: 3080050 - DNA, 25 bp, Homo sapien
tcagaattcagaacgatggtcgtgg

SEQ ID NO: 3080051 - DNA, 25 bp, Homo sapien
gggaaattatccagccatgagccct

SEQ ID NO: 3080052 - DNA, 25 bp, Homo sapien
gagaactttccaagtggaggccgca

SEQ ID NO: 3080053 - DNA, 25 bp, Homo sapien
ggtgtggaagaacgaggtgcccgtg

SEQ ID NO: 3080054 - DNA, 25 bp, Homo sapien
ggcacaggcctggatgccgacgacc

SEQ ID NO: 3080055 - DNA, 25 bp, Homo sapien
aggcggggcatggagttccactgca

SEQ ID NO: 3080056 - DNA, 25 bp, Homo sapien
tggaagaacgaggtgcccgtggcgg

SEQ ID NO: 3080057 - DNA, 25 bp, Homo sapien
ggtggcaggtccccctgctttcttg

SEQ ID NO: 3080058 - DNA, 25 bp, Homo sapien
tggcaggtccccctgctttcttgtt

SEQ ID NO: 3080059 - DNA, 25 bp, Homo sapien
caggtccccctgctttcttgttagt

SEQ ID NO: 3080060 - DNA, 25 bp, Homo sapien
gcaggtccccctgctttcttgttag

SEQ ID NO: 3080061 - DNA, 25 bp, Homo sapien
tagaggccctaagatgcttgagcac

SEQ ID NO: 3080062 - DNA, 25 bp, Homo sapien
gcgattcttgttatcggcatcaacg

SEQ ID NO: 3080063 - DNA, 25 bp, Homo sapien
gattcttgttatcggcatcaacgcc

SEQ ID NO: 3080064 - DNA, 25 bp, Homo sapien
ggcgattcttgttatcggcatcaac

SEQ ID NO: 3080065 - DNA, 25 bp, Homo sapien
cgattcttgttatcggcatcaacgc

SEQ ID NO: 3080066 - DNA, 25 bp, Homo sapien
ggcagcctaaggacgaacactgccc

SEQ ID NO: 3080067 - DNA, 25 bp, Homo sapien
gatgaggcagcctaaggacgaacac

SEQ ID NO: 3080068 - DNA, 25 bp, Homo sapien
atgaggcagcctaaggacgaacact

SEQ ID NO: 3080069 - DNA, 25 bp, Homo sapien
gcctaaggacgaacactgcccacat

SEQ ID NO: 3080070 - DNA, 25 bp, Homo sapien
tgccacatggtgttgggtagtgacg

SEQ ID NO: 3080071 - DNA, 25 bp, Homo sapien
ccacatggtgttgggtagtgacgtg

SEQ ID NO: 3080072 - DNA, 25 bp, Homo sapien
acatggtgttgggtagtgacgtggc

SEQ ID NO: 3080073 - DNA, 25 bp, Homo sapien
atgccacatggtgttgggtagtgac

SEQ ID NO: 3080074 - DNA, 25 bp, Homo sapien
taaaggaggaacaaggcggcgatgt

SEQ ID NO: 3080075 - DNA, 25 bp, Homo sapien
aagataaaggaggaacaaggcggcg

SEQ ID NO: 3080076 - DNA, 25 bp, Homo sapien
gcatcctcctcaggaagataaagga

SEQ ID NO: 3080077 - DNA, 25 bp, Homo sapien
aaggaggaacaaggcggcgatgtgg

SEQ ID NO: 3080078 - DNA, 25 bp, Homo sapien
caggaggacggcgtcatttcttgtt

SEQ ID NO: 3080079 - DNA, 25 bp, Homo sapien
ccaggaggacggcgtcatttcttgt

SEQ ID NO: 3080080 - DNA, 25 bp, Homo sapien
cccaggaggacggcgtcatttcttg

SEQ ID NO: 3080081 - DNA, 25 bp, Homo sapien
cctcatacgccaggaggatgtaaag

SEQ ID NO: 3080082 - DNA, 25 bp, Homo sapien
catacgccaggaggatgtaaagtag

SEQ ID NO: 3080083 - DNA, 25 bp, Homo sapien
tcatacgccaggaggatgtaaagta

SEQ ID NO: 3080084 - DNA, 25 bp, Homo sapien
tacgccaggaggatgtaaagtagtt

SEQ ID NO: 3080085 - DNA, 25 bp, Homo sapien
gtcccgcttacgtccaggtccatct

SEQ ID NO: 3080086 - DNA, 25 bp, Homo sapien
gcccctgacacggcctgtcctgttg

SEQ ID NO: 3080087 - DNA, 25 bp, Homo sapien
cccctgacacggcctgtcctgttgg

SEQ ID NO: 3080088 - DNA, 25 bp, Homo sapien
cctgacacggcctgtcctgttggtt

SEQ ID NO: 3080089 - DNA, 25 bp, Homo sapien
ccctgacacggcctgtcctgttggt

SEQ ID NO: 3080090 - DNA, 25 bp, Homo sapien
ggaattccctggtacgctcgatcta

SEQ ID NO: 3080091 - DNA, 25 bp, Homo sapien
ttccctggtacgctcgatctatgag

SEQ ID NO: 3080092 - DNA, 25 bp, Homo sapien
tgttcatgggaattccctggtacgc

SEQ ID NO: 3080093 - DNA, 25 bp, Homo sapien
catgggaattccctggtacgctcga

SEQ ID NO: 3080094 - DNA, 25 bp, Homo sapien
ttctgctgtttttgtaggtgtccca

SEQ ID NO: 3080095 - DNA, 25 bp, Homo sapien
tttttgtaggtgtcccattctccca

SEQ ID NO: 3080096 - DNA, 25 bp, Homo sapien
gctgtttttgtaggtgtcccattct

SEQ ID NO: 3080097 - DNA, 25 bp, Homo sapien
tgtttttgtaggtgtcccattctcc

SEQ ID NO: 3080098 - DNA, 25 bp, Homo sapien
tgctctttcggctgatctcccgccg

SEQ ID NO: 3080099 - DNA, 25 bp, Homo sapien
ctttcggctgatctcccgccgaatt

SEQ ID NO: 3080100 - DNA, 25 bp, Homo sapien
tctttcggctgatctcccgccgaat

SEQ ID NO: 3080101 - DNA, 25 bp, Homo sapien
gctctttcggctgatctcccgccga

SEQ ID NO: 3080102 - DNA, 25 bp, Homo sapien
catgttggagttagcggagctgcca

SEQ ID NO: 3080103 - DNA, 25 bp, Homo sapien
ccagagccgcccgcggatgctgggt

SEQ ID NO: 3080104 - DNA, 25 bp, Homo sapien
ttcccagagccgcccgcggatgctg

SEQ ID NO: 3080105 - DNA, 25 bp, Homo sapien
agccgcccgcggatgctgggtcttg

SEQ ID NO: 3080106 - DNA, 25 bp, Homo sapien
cttcacctcccgcgcagtcagagga

SEQ ID NO: 3080107 - DNA, 25 bp, Homo sapien
tcacctcccgcgcagtcagaggagg

SEQ ID NO: 3080108 - DNA, 25 bp, Homo sapien
agtcagaggaggcagctccgtctca

SEQ ID NO: 3080109 - DNA, 25 bp, Homo sapien
acctcccgcgcagtcagaggaggca

SEQ ID NO: 3080110 - DNA, 25 bp, Homo sapien
cagcccccattgtcaccatgccttt

SEQ ID NO: 3080111 - DNA, 25 bp, Homo sapien
cctagggctacagcccccattgtca

SEQ ID NO: 3080112 - DNA, 25 bp, Homo sapien
gctacagcccccattgtcaccatgc

SEQ ID NO: 3080113 - DNA, 25 bp, Homo sapien
gttctcctagggctacagcccccat

SEQ ID NO: 3080114 - DNA, 25 bp, Homo sapien
cgacagaactgctgagcgcccaggg

SEQ ID NO: 3080115 - DNA, 25 bp, Homo sapien
gccgacagaactgctgagcgcccag

SEQ ID NO: 3080116 - DNA, 25 bp, Homo sapien
tgccgacagaactgctgagcgccca

SEQ ID NO: 3080117 - DNA, 25 bp, Homo sapien
ttgccgacagaactgctgagcgccc

SEQ ID NO: 3080118 - DNA, 25 bp, Homo sapien
agctccctagatgggccccacacct

SEQ ID NO: 3080119 - DNA, 25 bp, Homo sapien
ctggcctaacaacaacctcgggctg

SEQ ID NO: 3080120 - DNA, 25 bp, Homo sapien
acctctggcctaacaacaacctcgg

SEQ ID NO: 3080121 - DNA, 25 bp, Homo sapien
ctaacaacaacctcgggctggacct

SEQ ID NO: 3080122 - DNA, 25 bp, Homo sapien
caaatgatcgacgttgttgttgtag

SEQ ID NO: 3080123 - DNA, 25 bp, Homo sapien
aatccccaaatgatcgacgttgttg

SEQ ID NO: 3080124 - DNA, 25 bp, Homo sapien
ccccaaatgatcgacgttgttgttg

SEQ ID NO: 3080125 - DNA, 25 bp, Homo sapien
tgtacaatccccaaatgatcgacgt

SEQ ID NO: 3080126 - DNA, 25 bp, Homo sapien
caaggtaaagggtgcaagggcctgg

SEQ ID NO: 3080127 - DNA, 25 bp, Homo sapien
tgaggggtccaaggtaaagggtgca

SEQ ID NO: 3080128 - DNA, 25 bp, Homo sapien
ggcctgggggcattggccacccgtc

SEQ ID NO: 3080129 - DNA, 25 bp, Homo sapien
gtagcccagagggagccttggtgag

SEQ ID NO: 3080130 - DNA, 25 bp, Homo sapien
taatgatgtcctctcgctcttgtgc

SEQ ID NO: 3080131 - DNA, 25 bp, Homo sapien
atgatgtcctctcgctcttgtgccc

SEQ ID NO: 3080132 - DNA, 25 bp, Homo sapien
cctctcgctcttgtgcccaccaact

SEQ ID NO: 3080133 - DNA, 25 bp, Homo sapien
tcctctcgctcttgtgcccaccaac

SEQ ID NO: 3080134 - DNA, 25 bp, Homo sapien
ctggagtctcaagtcccaagcaggg

SEQ ID NO: 3080135 - DNA, 25 bp, Homo sapien
ctgaaccgctctcgccgggctccca

SEQ ID NO: 3080136 - DNA, 25 bp, Homo sapien
ggagaacacctgaaccgctctcgcc

SEQ ID NO: 3080137 - DNA, 25 bp, Homo sapien
acacctgaaccgctctcgccgggct

SEQ ID NO: 3080138 - DNA, 25 bp, Homo sapien
aggcaggccagagagcggataggtg

SEQ ID NO: 3080139 - DNA, 25 bp, Homo sapien
ctgaggtcatggcacgcatcacaat

SEQ ID NO: 3080140 - DNA, 25 bp, Homo sapien
tgaggtcatggcacgcatcacaatg

SEQ ID NO: 3080141 - DNA, 25 bp, Homo sapien
gaggtcatggcacgcatcacaatgg

SEQ ID NO: 3080142 - DNA, 25 bp, Homo sapien
cagggccagcatcagagcgcccagg

SEQ ID NO: 3080143 - DNA, 25 bp, Homo sapien
gcatcagagcgcccagggccagcat

SEQ ID NO: 3080144 - DNA, 25 bp, Homo sapien
agggccagcatcagagcgcccaggg

SEQ ID NO: 3080145 - DNA, 25 bp, Homo sapien
gccagcatcagagcgcccagggcca

SEQ ID NO: 3080146 - DNA, 25 bp, Homo sapien
gacttctggagcctggatctggaca

SEQ ID NO: 3080147 - DNA, 25 bp, Homo sapien
ctaggagacttctggagcctggatc

SEQ ID NO: 3080148 - DNA, 25 bp, Homo sapien
cttctggagcctggatctggacagc

SEQ ID NO: 3080149 - DNA, 25 bp, Homo sapien
gagacttctggagcctggatctgga

SEQ ID NO: 3080150 - DNA, 25 bp, Homo sapien
tgcagtgccttccactcactaggct

SEQ ID NO: 3080151 - DNA, 25 bp, Homo sapien
tgggtacatgatgggactctgcttc

SEQ ID NO: 3080152 - DNA, 25 bp, Homo sapien
gcttgcacacttggcttgggcccca

SEQ ID NO: 3080153 - DNA, 25 bp, Homo sapien
tcaaggatccatcaaaaactgatgc

SEQ ID NO: 3080154 - DNA, 25 bp, Homo sapien
agcatttacaccagcggttcccaac

SEQ ID NO: 3080155 - DNA, 25 bp, Homo sapien
acctttttgctacctgagaccagtt

SEQ ID NO: 3080156 - DNA, 25 bp, Homo sapien
tgtaaaccttaagctgcttaactat

SEQ ID NO: 3080157 - DNA, 25 bp, Homo sapien
gatgatgtggagatgattcaagccc

SEQ ID NO: 3080158 - DNA, 25 bp, Homo sapien
tttgtttagtgacccgatgatgtgg

SEQ ID NO: 3080159 - DNA, 25 bp, Homo sapien
ctgtccaagcagcagcgattcccaa

SEQ ID NO: 3080160 - DNA, 25 bp, Homo sapien
agcgattcccaaccgagttctgttt

SEQ ID NO: 3080161 - DNA, 25 bp, Homo sapien
ggatttgtttagtgacccgatgatg

SEQ ID NO: 3080162 - DNA, 25 bp, Homo sapien
cgcttgtcccgagggagtgcgcgca

SEQ ID NO: 3080163 - DNA, 25 bp, Homo sapien
agagcgaacggagccccgcatgtgc

SEQ ID NO: 3080164 - DNA, 25 bp, Homo sapien
agtgagtgtgcgatccgtgggtccc

SEQ ID NO: 3080165 - DNA, 25 bp, Homo sapien
gatgcttccactacgtgtctgcaca

SEQ ID NO: 3080166 - DNA, 25 bp, Homo sapien
tcgcgctggccttcgcggaggcccc

SEQ ID NO: 3080167 - DNA, 25 bp, Homo sapien
ggcggcgaggcgctgcctgtatgac

SEQ ID NO: 3080168 - DNA, 25 bp, Homo sapien
catgccgggcctgctgagccgcccc

SEQ ID NO: 3080169 - DNA, 25 bp, Homo sapien
gccccgccgcgccatgccgggcctg

SEQ ID NO: 3080170 - DNA, 25 bp, Homo sapien
gaccgtttgcatccaggagcatgtg

SEQ ID NO: 3080171 - DNA, 25 bp, Homo sapien
gggaaaaggcgaccgtttgcatcca

SEQ ID NO: 3080172 - DNA, 25 bp, Homo sapien
atgtggccatcgacgtgtgccccgg

SEQ ID NO: 3080173 - DNA, 25 bp, Homo sapien
gagcatgtggccatcgacgtgtgcc

SEQ ID NO: 3080174 - DNA, 25 bp, Homo sapien
cgcgaccacgacaaggatggcgacc

SEQ ID NO: 3080175 - DNA, 25 bp, Homo sapien
ccgcgaccacgacaaggatggcgac

SEQ ID NO: 3080176 - DNA, 25 bp, Homo sapien
gcgaccacgacaaggatggcgacca

SEQ ID NO: 3080177 - DNA, 25 bp, Homo sapien
cgaccacgacaaggatggcgaccat

SEQ ID NO: 3080178 - DNA, 25 bp, Homo sapien
gccagaggaccagccgaacgccaaa

SEQ ID NO: 3080179 - DNA, 25 bp, Homo sapien
ccagccgaacgccaaaggctaggag

SEQ ID NO: 3080180 - DNA, 25 bp, Homo sapien
cttcggaagcctaacgatccagcac

SEQ ID NO: 3080181 - DNA, 25 bp, Homo sapien
gaagcctaacgatccagcacaggtc

SEQ ID NO: 3080182 - DNA, 25 bp, Homo sapien
ccccgagggtgcatgtccggccggg

SEQ ID NO: 3080183 - DNA, 25 bp, Homo sapien
ctttgcccaccggttgcgcccgctg

SEQ ID NO: 3080184 - DNA, 25 bp, Homo sapien
gccgaggcccgaccggcggacgctc

SEQ ID NO: 3080185 - DNA, 25 bp, Homo sapien
gttgcgcccgctgccccgggcagaa

SEQ ID NO: 3080186 - DNA, 25 bp, Homo sapien
gtgagagtcccgctcggatttcccc

SEQ ID NO: 3080187 - DNA, 25 bp, Homo sapien
cttgcctggtgagagtcccgctcgg

SEQ ID NO: 3080188 - DNA, 25 bp, Homo sapien
cctggtgagagtcccgctcggattt

SEQ ID NO: 3080189 - DNA, 25 bp, Homo sapien
gagagtcccgctcggatttccccag

SEQ ID NO: 3080190 - DNA, 25 bp, Homo sapien
tctacccgggacctgaagcccatgg

SEQ ID NO: 3080191 - DNA, 25 bp, Homo sapien
gctggcagacccctgtgtcaagctg

SEQ ID NO: 3080192 - DNA, 25 bp, Homo sapien
cattcacaccctttgctgttctcta

SEQ ID NO: 3080193 - DNA, 25 bp, Homo sapien
gggccatgaatgcacccagccagga

SEQ ID NO: 3080194 - DNA, 25 bp, Homo sapien
actgttggcagtggtgaacagacac

SEQ ID NO: 3080195 - DNA, 25 bp, Homo sapien
tggcatactgttggcagtggtgaac

SEQ ID NO: 3080196 - DNA, 25 bp, Homo sapien
catactgttggcagtggtgaacaga

SEQ ID NO: 3080197 - DNA, 25 bp, Homo sapien
ctggcatactgttggcagtggtgaa

SEQ ID NO: 3080198 - DNA, 25 bp, Homo sapien
tgtagcctaggttagaaggccctgc

SEQ ID NO: 3080199 - DNA, 25 bp, Homo sapien
gcagctttatggaggcacgtgccca

SEQ ID NO: 3080200 - DNA, 25 bp, Homo sapien
tggaagacacctgcctttacacgtg

SEQ ID NO: 3080201 - DNA, 25 bp, Homo sapien
gaagttccaagattcatcacagggt

SEQ ID NO: 3080202 - DNA, 25 bp, Homo sapien
tcctcgcgtcctgtgcggctgtgag

SEQ ID NO: 3080203 - DNA, 25 bp, Homo sapien
agcatcctcgcgtcctgtgcggctg

SEQ ID NO: 3080204 - DNA, 25 bp, Homo sapien
gtcagcatcctcgcgtcctgtgtgg

SEQ ID NO: 3080205 - DNA, 25 bp, Homo sapien
cgtcagcatcctcgcgtcctgtgcg

SEQ ID NO: 3080206 - DNA, 25 bp, Homo sapien
gtcagcatcctcgcgtcctgtgtgg

SEQ ID NO: 3080207 - DNA, 25 bp, Homo sapien
gcatcctcggtcctgtgcggctgtg

SEQ ID NO: 3080208 - DNA, 25 bp, Homo sapien
agcatcctcggtcctgtgcggctgt

SEQ ID NO: 3080209 - DNA, 25 bp, Homo sapien
gtcagcatcctcgcgtcctgtgtgg

SEQ ID NO: 3080210 - DNA, 25 bp, Homo sapien
atcctcggtcctgtgcggctgtgag

SEQ ID NO: 3080211 - DNA, 25 bp, Homo sapien
atcctcggtcctgtgcggctgtgag

SEQ ID NO: 3080212 - DNA, 25 bp, Homo sapien
cctgtgcggctgtgaggcactgtca

SEQ ID NO: 3080213 - DNA, 25 bp, Homo sapien
gtcagcatcctcgcgtcctgtgtgg

SEQ ID NO: 3080214 - DNA, 25 bp, Homo sapien
agcatcctcggtcctgtgcggctgt

SEQ ID NO: 3080215 - DNA, 25 bp, Homo sapien
aaactggctgaactgcagctctgct

SEQ ID NO: 3080216 - DNA, 25 bp, Homo sapien
tgggccaggacaaactggctgaact

SEQ ID NO: 3080217 - DNA, 25 bp, Homo sapien
actggctgaactgcagctctgcttg

SEQ ID NO: 3080218 - DNA, 25 bp, Homo sapien
gctgggccaggacaaactggctgaa

SEQ ID NO: 3080219 - DNA, 25 bp, Homo sapien
agaaatacaacttggtaacaacagg

SEQ ID NO: 3080220 - DNA, 25 bp, Homo sapien
tagaaatacaacttggtaacaacag

SEQ ID NO: 3080221 - DNA, 25 bp, Homo sapien
gaaatacaacttggtaacaacagga

SEQ ID NO: 3080222 - DNA, 25 bp, Homo sapien
ctagaaatacaacttggtaacaaca

SEQ ID NO: 3080223 - DNA, 25 bp, Homo sapien
tactgccgccttcgacatctagaaa

SEQ ID NO: 3080224 - DNA, 25 bp, Homo sapien
tgtattacaacctgactcctcggct

SEQ ID NO: 3080225 - DNA, 25 bp, Homo sapien
gaacggattgtttctgcccctaaga

SEQ ID NO: 3080226 - DNA, 25 bp, Homo sapien
gatgttccaacaaccctgaccatgg

SEQ ID NO: 3080227 - DNA, 25 bp, Homo sapien
tcactgatttgttaaccctgggagt

SEQ ID NO: 3080228 - DNA, 25 bp, Homo sapien
tgatttgttaaccctgggagtgccc

SEQ ID NO: 3080229 - DNA, 25 bp, Homo sapien
gccccttgtgatccagatgagtcaa

SEQ ID NO: 3080230 - DNA, 25 bp, Homo sapien
actgatttgttaaccctgggagtgc

SEQ ID NO: 3080231 - DNA, 25 bp, Homo sapien
tctttcatacaagggaggtccgagg

SEQ ID NO: 3080232 - DNA, 25 bp, Homo sapien
agatttgggtccgtaggctgacaca

SEQ ID NO: 3080233 - DNA, 25 bp, Homo sapien
catgatgtcacgaccgatgtcaggg

SEQ ID NO: 3080234 - DNA, 25 bp, Homo sapien
tcaagaggtgaatcagtgcctggca

SEQ ID NO: 3080235 - DNA, 25 bp, Homo sapien
aggaacacatccttaggtctcagat

SEQ ID NO: 3080236 - DNA, 25 bp, Homo sapien
ctctccaggaacacatccttaggtc

SEQ ID NO: 3080237 - DNA, 25 bp, Homo sapien
ccaggaacacatccttaggtctcag

SEQ ID NO: 3080238 - DNA, 25 bp, Homo sapien
ctccaggaacacatccttaggtctc

SEQ ID NO: 3080239 - DNA, 25 bp, Homo sapien
tactggtcctgaatgacatatcaag

SEQ ID NO: 3080240 - DNA, 25 bp, Homo sapien
gagatgcaataaagcgaacgctggc

SEQ ID NO: 3080241 - DNA, 25 bp, Homo sapien
gatccatacacctaagcagctactg

SEQ ID NO: 3080242 - DNA, 25 bp, Homo sapien
gaggtttggaggctccgatccatac

SEQ ID NO: 3080243 - DNA, 25 bp, Homo sapien
ccattgcataacaagcattccatcg

SEQ ID NO: 3080244 - DNA, 25 bp, Homo sapien
gcataacaagcattccatcggactt

SEQ ID NO: 3080245 - DNA, 25 bp, Homo sapien
caagcattccatcggactttcatgg

SEQ ID NO: 3080246 - DNA, 25 bp, Homo sapien
ttccatcggactttcatggcagctt

SEQ ID NO: 3080247 - DNA, 25 bp, Homo sapien
gaacagtagaaattagggcctggat

SEQ ID NO: 3080248 - DNA, 25 bp, Homo sapien
atgagagggttgcagaaaatgaagc

SEQ ID NO: 3080249 - DNA, 25 bp, Homo sapien
gggcctggatagactcctcaatgat

SEQ ID NO: 3080250 - DNA, 25 bp, Homo sapien
caagggcccggactgcattgctttt

SEQ ID NO: 3080251 - DNA, 25 bp, Homo sapien
agctgatcgtaacattttcaagagc

SEQ ID NO: 3080252 - DNA, 25 bp, Homo sapien
cttgtctttatccttggatgcttct

SEQ ID NO: 3080253 - DNA, 25 bp, Homo sapien
tatccttggatgcttctatagctga

SEQ ID NO: 3080254 - DNA, 25 bp, Homo sapien
gatgcttctatagctgatcgtaaca

SEQ ID NO: 3080255 - DNA, 25 bp, Homo sapien
ttgctgcgtctgcaacaaatatgac

SEQ ID NO: 3080256 - DNA, 25 bp, Homo sapien
gaccaggctgctttggctcgaacat

SEQ ID NO: 3080257 - DNA, 25 bp, Homo sapien
tgttgacaatcagagtgtctgtcag

SEQ ID NO: 3080258 - DNA, 25 bp, Homo sapien
tggctcgaacattcagagacttgtc

SEQ ID NO: 3080259 - DNA, 25 bp, Homo sapien
cactaagcgattcttgctgtcattc

SEQ ID NO: 3080260 - DNA, 25 bp, Homo sapien
gagacagggaaaaagcacatagact

SEQ ID NO: 3080261 - DNA, 25 bp, Homo sapien
gggaaaaagcacatagactcccagg

SEQ ID NO: 3080262 - DNA, 25 bp, Homo sapien
tgcagctttcactaagcgattcttg

SEQ ID NO: 3080263 - DNA, 25 bp, Homo sapien
ggctctgggtaaaggaccgttcagc

SEQ ID NO: 3080264 - DNA, 25 bp, Homo sapien
ctggagagttgggtgttctgaattc

SEQ ID NO: 3080265 - DNA, 25 bp, Homo sapien
tggaagacagggcatcacaggcgct

SEQ ID NO: 3080266 - DNA, 25 bp, Homo sapien
aggcctctggcaagatggaagacag

SEQ ID NO: 3080267 - DNA, 25 bp, Homo sapien
gactggtgctctctgatcaggtgct

SEQ ID NO: 3080268 - DNA, 25 bp, Homo sapien
tggtgctctctgatcaggtgctgca

SEQ ID NO: 3080269 - DNA, 25 bp, Homo sapien
tctggtttatactgctgtattaagc

SEQ ID NO: 3080270 - DNA, 25 bp, Homo sapien
tgctgtattaagcctgtgcccagtt

SEQ ID NO: 3080271 - DNA, 25 bp, Homo sapien
tcattgaaaagtagccccttgccag

SEQ ID NO: 3080272 - DNA, 25 bp, Homo sapien
ccatcaagtaggcttgagtcattga

SEQ ID NO: 3080273 - DNA, 25 bp, Homo sapien
tagccccttgccagaagagtcaata

SEQ ID NO: 3080274 - DNA, 25 bp, Homo sapien
ccatgcacttgcaaatcacctctcc

SEQ ID NO: 3080275 - DNA, 25 bp, Homo sapien
taactgacgtttcttccagagaggg

SEQ ID NO: 3080276 - DNA, 25 bp, Homo sapien
gaattgctattaccgagtccagaag

SEQ ID NO: 3080277 - DNA, 25 bp, Homo sapien
cagagtcgaatgagccagcagggct

SEQ ID NO: 3080278 - DNA, 25 bp, Homo sapien
ggaatcctccttgggcagtacgaca

SEQ ID NO: 3080279 - DNA, 25 bp, Homo sapien
agcaggctgagttttagacgatcat

SEQ ID NO: 3080280 - DNA, 25 bp, Homo sapien
tctggttccagactttggtcagcag

SEQ ID NO: 3080281 - DNA, 25 bp, Homo sapien
ctttgtggcgaatataaggctttat

SEQ ID NO: 3080282 - DNA, 25 bp, Homo sapien
tcataaggtgcatttgatactaaat

SEQ ID NO: 3080283 - DNA, 25 bp, Homo sapien
taacggtctgtgaggatgactccgc

SEQ ID NO: 3080284 - DNA, 25 bp, Homo sapien
cagataaaacttgcagagcacaggc

SEQ ID NO: 3080285 - DNA, 25 bp, Homo sapien
aagaaactgctttgagccttccaag

SEQ ID NO: 3080286 - DNA, 25 bp, Homo sapien
tgcaagcgatcattacggagaaggg

SEQ ID NO: 3080287 - DNA, 25 bp, Homo sapien
tgaccagtagccataaagaactttt

SEQ ID NO: 3080288 - DNA, 25 bp, Homo sapien
caaactaaggctccttggcgaactt

SEQ ID NO: 3080289 - DNA, 25 bp, Homo sapien
aagagtcatcaaggacactgactgt

SEQ ID NO: 3080290 - DNA, 25 bp, Homo sapien
ccaagttcaggcgtatcaggaataa

SEQ ID NO: 3080291 - DNA, 25 bp, Homo sapien
ctcattttactctgcatgcctcctt

SEQ ID NO: 3080292 - DNA, 25 bp, Homo sapien
cattttactctgcatgcctccttca

SEQ ID NO: 3080293 - DNA, 25 bp, Homo sapien
tttactctgcatgcctccttcagca

SEQ ID NO: 3080294 - DNA, 25 bp, Homo sapien
ttttactctgcatgcctccttcagc

SEQ ID NO: 3080295 - DNA, 25 bp, Homo sapien
gctccacttccatctaaaggcaaac

SEQ ID NO: 3080296 - DNA, 25 bp, Homo sapien
atgaggagactccatctttttctgc

SEQ ID NO: 3080297 - DNA, 25 bp, Homo sapien
tgaaggatgaggagactccatcttt

SEQ ID NO: 3080298 - DNA, 25 bp, Homo sapien
gcagctccacttccatctaaaggca

SEQ ID NO: 3080299 - DNA, 25 bp, Homo sapien
cttcatgcaggttcactctgcctgt

SEQ ID NO: 3080300 - DNA, 25 bp, Homo sapien
ggagggacaccaagtgttcccttca

SEQ ID NO: 3080301 - DNA, 25 bp, Homo sapien
gtgccagtgactggggctgcctcta

SEQ ID NO: 3080302 - DNA, 25 bp, Homo sapien
gctgcctctatttcaccactggatt

SEQ ID NO: 3080303 - DNA, 25 bp, Homo sapien
ggtgttcgcccatcatactgaggaa

SEQ ID NO: 3080304 - DNA, 25 bp, Homo sapien
gggtataacaccgtgggcatctcta

SEQ ID NO: 3080305 - DNA, 25 bp, Homo sapien
ggcatctctatgtttagtccaggga

SEQ ID NO: 3080306 - DNA, 25 bp, Homo sapien
tgctgtggtttgataggtgttcgcc

SEQ ID NO: 3080307 - DNA, 25 bp, Homo sapien
ctttagcacagctaaaagtgctcca

SEQ ID NO: 3080308 - DNA, 25 bp, Homo sapien
tttagaagtgactgtatacctttta

SEQ ID NO: 3080309 - DNA, 25 bp, Homo sapien
tttagcacagctaaaagtgctccaa

SEQ ID NO: 3080310 - DNA, 25 bp, Homo sapien
tagggctcctccaaatacggctgtc

SEQ ID NO: 3080311 - DNA, 25 bp, Homo sapien
gtgatatcatccatatcagatgatt

SEQ ID NO: 3080312 - DNA, 25 bp, Homo sapien
acagacattttggtagggctcctcc

SEQ ID NO: 3080313 - DNA, 25 bp, Homo sapien
tatcagatgattttggagactgtaa

SEQ ID NO: 3080314 - DNA, 25 bp, Homo sapien
aactcagtctcctttaaaatgaggc

SEQ ID NO: 3080315 - DNA, 25 bp, Homo sapien
tcaaactcagtctcctttaaaatga

SEQ ID NO: 3080316 - DNA, 25 bp, Homo sapien
cctttaaaatgaggcttgcaaaaga

SEQ ID NO: 3080317 - DNA, 25 bp, Homo sapien
ctaaacgcatacagagaaaacaact

SEQ ID NO: 3080318 - DNA, 25 bp, Homo sapien
tgacttcaggatcagactgagccaa

SEQ ID NO: 3080319 - DNA, 25 bp, Homo sapien
catacaatgtactgcagctctcctg

SEQ ID NO: 3080320 - DNA, 25 bp, Homo sapien
ttgccatacaatgtactgcagctct

SEQ ID NO: 3080321 - DNA, 25 bp, Homo sapien
tcagactgagccaagtcactcaact

SEQ ID NO: 3080322 - DNA, 25 bp, Homo sapien
aagagtccggtgttgcctagcagct

SEQ ID NO: 3080323 - DNA, 25 bp, Homo sapien
agagtccggtgttgcctagcagctc

SEQ ID NO: 3080324 - DNA, 25 bp, Homo sapien
taagagtccggtgttgcctagcagc

SEQ ID NO: 3080325 - DNA, 25 bp, Homo sapien
gagtccggtgttgcctagcagctct

SEQ ID NO: 3080326 - DNA, 25 bp, Homo sapien
gtgtccaggaactacactgatgaat

SEQ ID NO: 3080327 - DNA, 25 bp, Homo sapien
gaactacactgatgaatagccgaaa

SEQ ID NO: 3080328 - DNA, 25 bp, Homo sapien
cattgcagtacaccagagctgccag

SEQ ID NO: 3080329 - DNA, 25 bp, Homo sapien
gccgaaatagtatatgccaacagga

SEQ ID NO: 3080330 - DNA, 25 bp, Homo sapien
taaagggttataggtgccacaggtg

SEQ ID NO: 3080331 - DNA, 25 bp, Homo sapien
gaaaacagccttactccatgcagca

SEQ ID NO: 3080332 - DNA, 25 bp, Homo sapien
gagggcatatccctgctgtcaagga

SEQ ID NO: 3080333 - DNA, 25 bp, Homo sapien
cacaggtgatcaggaacatctccaa

SEQ ID NO: 3080334 - DNA, 25 bp, Homo sapien
tatgacctaagtctctccagcaaga

SEQ ID NO: 3080335 - DNA, 25 bp, Homo sapien
taacccacatgctgaggacggtgaa

SEQ ID NO: 3080336 - DNA, 25 bp, Homo sapien
gacatgctagctgaggataacccac

SEQ ID NO: 3080337 - DNA, 25 bp, Homo sapien
tcatttctttggcatgggatgtcca

SEQ ID NO: 3080338 - DNA, 25 bp, Homo sapien
ctgttaagtaaatggtggataagct

SEQ ID NO: 3080339 - DNA, 25 bp, Homo sapien
gttaagtaaatggtggataagctgg

SEQ ID NO: 3080340 - DNA, 25 bp, Homo sapien
atctgttaagtaaatggtggataag

SEQ ID NO: 3080341 - DNA, 25 bp, Homo sapien
taagtaaatggtggataagctggct

SEQ ID NO: 3080342 - DNA, 25 bp, Homo sapien
taccagtcggcaagcctggacaaga

SEQ ID NO: 3080343 - DNA, 25 bp, Homo sapien
ttaagaggtaccagtcggcaagcct

SEQ ID NO: 3080344 - DNA, 25 bp, Homo sapien
ttctgattaagaggtaccagtcggc

SEQ ID NO: 3080345 - DNA, 25 bp, Homo sapien
caagatgattctgattaagaggtac

SEQ ID NO: 3080346 - DNA, 25 bp, Homo sapien
cagttcttccggaggtcaaagcggg

SEQ ID NO: 3080347 - DNA, 25 bp, Homo sapien
tcttccggaggtcaaagcgggagga

SEQ ID NO: 3080348 - DNA, 25 bp, Homo sapien
cccagttcttccggaggtcaaagcg

SEQ ID NO: 3080349 - DNA, 25 bp, Homo sapien
gaagtgatagcacaaaaacagcatg

SEQ ID NO: 3080350 - DNA, 25 bp, Homo sapien
ggggccagcagggcgcgccgcctac

SEQ ID NO: 3080351 - DNA, 25 bp, Homo sapien
cggggccagcagggcgcgccgccta

SEQ ID NO: 3080352 - DNA, 25 bp, Homo sapien
gagcaggtggatctcggtgcgggcg

SEQ ID NO: 3080353 - DNA, 25 bp, Homo sapien
gagctgctgtcatccgggcgcaggg

SEQ ID NO: 3080354 - DNA, 25 bp, Homo sapien
tcggagatgagctgatcgaagagca

SEQ ID NO: 3080355 - DNA, 25 bp, Homo sapien
actgccctcgctgtagttctcggag

SEQ ID NO: 3080356 - DNA, 25 bp, Homo sapien
gaaacccattgcctcgctcagggat

SEQ ID NO: 3080357 - DNA, 25 bp, Homo sapien
tggcagacaagaggcgaaacccatt

SEQ ID NO: 3080358 - DNA, 25 bp, Homo sapien
tcagggattgcttcccgcggtgcct

SEQ ID NO: 3080359 - DNA, 25 bp, Homo sapien
cgcggctgcacggaaggccacgaac

SEQ ID NO: 3080360 - DNA, 25 bp, Homo sapien
ggtttccatgactacgggactcctc

SEQ ID NO: 3080361 - DNA, 25 bp, Homo sapien
tttccatgactacgggactcctccg

SEQ ID NO: 3080362 - DNA, 25 bp, Homo sapien
tttttagaccggactggggctcaga

SEQ ID NO: 3080363 - DNA, 25 bp, Homo sapien
tttagaccggactggggctcagagg

SEQ ID NO: 3080364 - DNA, 25 bp, Homo sapien
atcctctcatggatcatgaggcacc

SEQ ID NO: 3080365 - DNA, 25 bp, Homo sapien
ctctcatggatcatgaggcacctcg

SEQ ID NO: 3080366 - DNA, 25 bp, Homo sapien
tcatggatcatgaggcacctcgccc

SEQ ID NO: 3080367 - DNA, 25 bp, Homo sapien
tctcatggatcatgaggcacctcgc

SEQ ID NO: 3080368 - DNA, 25 bp, Homo sapien
cgatcttagggaaagatgatcctta

SEQ ID NO: 3080369 - DNA, 25 bp, Homo sapien
ctagtcaaggaactccagacagtca

SEQ ID NO: 3080370 - DNA, 25 bp, Homo sapien
tttcatccatcttcctagtcaagga

SEQ ID NO: 3080371 - DNA, 25 bp, Homo sapien
ccatatcccctgtagtctccatcca

SEQ ID NO: 3080372 - DNA, 25 bp, Homo sapien
aaaaaattttgcccgagacctgctg

SEQ ID NO: 3080373 - DNA, 25 bp, Homo sapien
ttcccaatttgggaaatcaatcaca

SEQ ID NO: 3080374 - DNA, 25 bp, Homo sapien
gaatacaatcaagaggcaacagttc

SEQ ID NO: 3080375 - DNA, 25 bp, Homo sapien
caggccctaagcagtccaaggattg

SEQ ID NO: 3080376 - DNA, 25 bp, Homo sapien
tagactgaacaacgtttcagaaagc

SEQ ID NO: 3080377 - DNA, 25 bp, Homo sapien
ctagactgaacaacgtttcagaaag

SEQ ID NO: 3080378 - DNA, 25 bp, Homo sapien
ctgaacaacgtttcagaaagcaggg

SEQ ID NO: 3080379 - DNA, 25 bp, Homo sapien
gactgaacaacgtttcagaaagcag

SEQ ID NO: 3080380 - DNA, 25 bp, Homo sapien
actcatggccacacccattgctgac

SEQ ID NO: 3080381 - DNA, 25 bp, Homo sapien
ctgcaacacactcatggccacaccc

SEQ ID NO: 3080382 - DNA, 25 bp, Homo sapien
cctgcaacacactcatggccacacc

SEQ ID NO: 3080383 - DNA, 25 bp, Homo sapien
cacactcatggccacacccattgct

SEQ ID NO: 3080384 - DNA, 25 bp, Homo sapien
cctgtgcagagctcgacgcaggtac

SEQ ID NO: 3080385 - DNA, 25 bp, Homo sapien
acctgtgcagagctcgacgcaggta

SEQ ID NO: 3080386 - DNA, 25 bp, Homo sapien
ttcattcaatatgcaatatgattta

SEQ ID NO: 3080387 - DNA, 25 bp, Homo sapien
agatgctagggagaacagcccttga

SEQ ID NO: 3080388 - DNA, 25 bp, Homo sapien
cccttgattaagaagtcagttctac

SEQ ID NO: 3080389 - DNA, 25 bp, Homo sapien
accaccgtacttttgggacagatgc

SEQ ID NO: 3080390 - DNA, 25 bp, Homo sapien
ctgattatgtctctgggtctttctg

SEQ ID NO: 3080391 - DNA, 25 bp, Homo sapien
tatgtctctgggtctttctggaact

SEQ ID NO: 3080392 - DNA, 25 bp, Homo sapien
tggaacttttctcatctgtaaaaag

SEQ ID NO: 3080393 - DNA, 25 bp, Homo sapien
ttatgtctctgggtctttctggaac

SEQ ID NO: 3080394 - DNA, 25 bp, Homo sapien
caatagaggtggctgtctgatgctg

SEQ ID NO: 3080395 - DNA, 25 bp, Homo sapien
cttcagtcaatagaggtggctgtct

SEQ ID NO: 3080396 - DNA, 25 bp, Homo sapien
caggggtaatgagttttattctcca

SEQ ID NO: 3080397 - DNA, 25 bp, Homo sapien
ttgtcaacttcagtcaatagaggtg

SEQ ID NO: 3080398 - DNA, 25 bp, Homo sapien
aaagagaaagagtgctaggactgat

SEQ ID NO: 3080399 - DNA, 25 bp, Homo sapien
tcaaagagaaagagtgctaggactg

SEQ ID NO: 3080400 - DNA, 25 bp, Homo sapien
caaagagaaagagtgctaggactga

SEQ ID NO: 3080401 - DNA, 25 bp, Homo sapien
ttcaaagagaaagagtgctaggact

SEQ ID NO: 3080402 - DNA, 25 bp, Homo sapien
gacactacagaggttaaagacttgg

SEQ ID NO: 3080403 - DNA, 25 bp, Homo sapien
gagtcatgagatttgtccacaggat

SEQ ID NO: 3080404 - DNA, 25 bp, Homo sapien
ggaggtggcgagcagtgtcggacac

SEQ ID NO: 3080405 - DNA, 25 bp, Homo sapien
cagtgtcggacactacagaggttaa

SEQ ID NO: 3080406 - DNA, 25 bp, Homo sapien
aagatgatgaggatcacaggaggag

SEQ ID NO: 3080407 - DNA, 25 bp, Homo sapien
gatgatgaggatcacaggaggagga

SEQ ID NO: 3080408 - DNA, 25 bp, Homo sapien
gaagatgatgaggatcacaggagga

SEQ ID NO: 3080409 - DNA, 25 bp, Homo sapien
gaaatttataccttccacccgctga

SEQ ID NO: 3080410 - DNA, 25 bp, Homo sapien
gggtgggactagggactgcagacac

SEQ ID NO: 3080411 - DNA, 25 bp, Homo sapien
ctgaaatttataccttccacccgct

SEQ ID NO: 3080412 - DNA, 25 bp, Homo sapien
tttataccttccacccgctgagctg

SEQ ID NO: 3080413 - DNA, 25 bp, Homo sapien
tctccaatggcaaggatgcagggag

SEQ ID NO: 3080414 - DNA, 25 bp, Homo sapien
ttccctctccaatggcaaggatgca

SEQ ID NO: 3080415 - DNA, 25 bp, Homo sapien
tgcagggagacatgtataacttttg

SEQ ID NO: 3080416 - DNA, 25 bp, Homo sapien
gggagacatgtataacttttggcca

SEQ ID NO: 3080417 - DNA, 25 bp, Homo sapien
aatattaatattacagggctcaggt

SEQ ID NO: 3080418 - DNA, 25 bp, Homo sapien
tcttggcctaggaacaaggactggc

SEQ ID NO: 3080419 - DNA, 25 bp, Homo sapien
aatattacagggctcaggtcttggc

SEQ ID NO: 3080420 - DNA, 25 bp, Homo sapien
cagggctcaggtcttggcctaggaa

SEQ ID NO: 3080421 - DNA, 25 bp, Homo sapien
gagtgacagagaagtaatttaacct

SEQ ID NO: 3080422 - DNA, 25 bp, Homo sapien
ttagaactgttccacacagacttag

SEQ ID NO: 3080423 - DNA, 25 bp, Homo sapien
gacttagagtgacagagaagtaatt

SEQ ID NO: 3080424 - DNA, 25 bp, Homo sapien
ccacacagacttagagtgacagaga

SEQ ID NO: 3080425 - DNA, 25 bp, Homo sapien
ttagacatgcaaggaaagctatttc

SEQ ID NO: 3080426 - DNA, 25 bp, Homo sapien
tacagcttagcacaaggcatccaac

SEQ ID NO: 3080427 - DNA, 25 bp, Homo sapien
taaagcaagcagctgtatacagaca

SEQ ID NO: 3080428 - DNA, 25 bp, Homo sapien
gtatacagacagcaaaagaagcaac

SEQ ID NO: 3080429 - DNA, 25 bp, Homo sapien
ctcttgctgtgatacatagtctctg

SEQ ID NO: 3080430 - DNA, 25 bp, Homo sapien
gaaactcttgctgtgatacatagtc

SEQ ID NO: 3080431 - DNA, 25 bp, Homo sapien
gcctgctcaattgctttaaggacat

SEQ ID NO: 3080432 - DNA, 25 bp, Homo sapien
cttgctgtgatacatagtctctgtt

SEQ ID NO: 3080433 - DNA, 25 bp, Homo sapien
tgtcctgatcctcaatagcacagca

SEQ ID NO: 3080434 - DNA, 25 bp, Homo sapien
gatctcgccactcaaggaagctgca

SEQ ID NO: 3080435 - DNA, 25 bp, Homo sapien
taccatttttgcagtcgaagctttc

SEQ ID NO: 3080436 - DNA, 25 bp, Homo sapien
gctaaaacggtctgaacaagttctc

SEQ ID NO: 3080437 - DNA, 25 bp, Homo sapien
ggcggccgcgggccgcgggcgcggc

SEQ ID NO: 3080438 - DNA, 25 bp, Homo sapien
gcggccgcgggccgcgggcgcggcg

SEQ ID NO: 3080439 - DNA, 25 bp, Homo sapien
ggccgcgggccgcgggcgcggcgga

SEQ ID NO: 3080440 - DNA, 25 bp, Homo sapien
gccgcgggccgcgggcgcggcggag

SEQ ID NO: 3080441 - DNA, 25 bp, Homo sapien
tgtttgttcccacagtgactgtatg

SEQ ID NO: 3080442 - DNA, 25 bp, Homo sapien
tgaaaatccctagcaagcagcaggt

SEQ ID NO: 3080443 - DNA, 25 bp, Homo sapien
aatccctagcaagcagcaggtactc

SEQ ID NO: 3080444 - DNA, 25 bp, Homo sapien
gtactcagggtggtgtttgttccca

SEQ ID NO: 3080445 - DNA, 25 bp, Homo sapien
acttgggtctgaggtctgaacttga

SEQ ID NO: 3080446 - DNA, 25 bp, Homo sapien
tcttgtggatcacgagtgatcctgt

SEQ ID NO: 3080447 - DNA, 25 bp, Homo sapien
gatcctgtagtaagtgagggttttg

SEQ ID NO: 3080448 - DNA, 25 bp, Homo sapien
ggatcacgagtgatcctgtagtaag

SEQ ID NO: 3080449 - DNA, 25 bp, Homo sapien
cagggtcttgtggatcacgagtgat

SEQ ID NO: 3080450 - DNA, 25 bp, Homo sapien
tcactgagctcccgcattgggcaca

SEQ ID NO: 3080451 - DNA, 25 bp, Homo sapien
cccgcattgggcacacttccctggt

SEQ ID NO: 3080452 - DNA, 25 bp, Homo sapien
tgagctcccgcattgggcacacttc

SEQ ID NO: 3080453 - DNA, 25 bp, Homo sapien
ccgcattgggcacacttccctggtt

SEQ ID NO: 3080454 - DNA, 25 bp, Homo sapien
cttggctctcacatccctgagctcc

SEQ ID NO: 3080455 - DNA, 25 bp, Homo sapien
ttggctctcacatccctgagctcca

SEQ ID NO: 3080456 - DNA, 25 bp, Homo sapien
tcttggctctcacatccctgagctc

SEQ ID NO: 3080457 - DNA, 25 bp, Homo sapien
tggctctcacatccctgagctccac

SEQ ID NO: 3080458 - DNA, 25 bp, Homo sapien
ctgcagcataaggacacccaggcct

SEQ ID NO: 3080459 - DNA, 25 bp, Homo sapien
cctggtgcggggagccatttcttcc

SEQ ID NO: 3080460 - DNA, 25 bp, Homo sapien
tggggcactgccgtgtctcctacag

SEQ ID NO: 3080461 - DNA, 25 bp, Homo sapien
ccagagaaggcgcaatgttcccttc

SEQ ID NO: 3080462 - DNA, 25 bp, Homo sapien
catttaggtccccaagtcaactcag

SEQ ID NO: 3080463 - DNA, 25 bp, Homo sapien
tacacatttaggtccccaagtcaac

SEQ ID NO: 3080464 - DNA, 25 bp, Homo sapien
taggtccccaagtcaactcagactc

SEQ ID NO: 3080465 - DNA, 25 bp, Homo sapien
ccaggcatacacatttaggtcccca

SEQ ID NO: 3080466 - DNA, 25 bp, Homo sapien
gtttgcacatcatagtaacctccag

SEQ ID NO: 3080467 - DNA, 25 bp, Homo sapien
ggcaagcctgggtgaaactccctca

SEQ ID NO: 3080468 - DNA, 25 bp, Homo sapien
tcctcagcttgcttgggctctgagg

SEQ ID NO: 3080469 - DNA, 25 bp, Homo sapien
ggtaggtaacgctggaaggcatccc

SEQ ID NO: 3080470 - DNA, 25 bp, Homo sapien
tcctggccgcaggtgcagcttgaca

SEQ ID NO: 3080471 - DNA, 25 bp, Homo sapien
ggtctgccagcccattgtggtccat

SEQ ID NO: 3080472 - DNA, 25 bp, Homo sapien
cagcttgacacaggggtctgccagc

SEQ ID NO: 3080473 - DNA, 25 bp, Homo sapien
gctcctggccgcaggtgcagcttga

SEQ ID NO: 3080474 - DNA, 25 bp, Homo sapien
ggcttcaggtcccgggtagagaaca

SEQ ID NO: 3080475 - DNA, 25 bp, Homo sapien
gggaaatcgggggatggagctgcca

SEQ ID NO: 3080476 - DNA, 25 bp, Homo sapien
cttcaggtcccgggtagagaacagc

SEQ ID NO: 3080477 - DNA, 25 bp, Homo sapien
gcttcaggtcccgggtagagaacag

SEQ ID NO: 3080478 - DNA, 25 bp, Homo sapien
cctccagacacagggagtgagggtg

SEQ ID NO: 3080479 - DNA, 25 bp, Homo sapien
ccccacacctccagacacagggagt

SEQ ID NO: 3080480 - DNA, 25 bp, Homo sapien
acacctccagacacagggagtgagg

SEQ ID NO: 3080481 - DNA, 25 bp, Homo sapien
cagacacagggagtgagggtggcat

SEQ ID NO: 3080482 - DNA, 25 bp, Homo sapien
cagagctccgggggatcggggggct

SEQ ID NO: 3080483 - DNA, 25 bp, Homo sapien
tctggagatgggttgcacacagtgt

SEQ ID NO: 3080484 - DNA, 25 bp, Homo sapien
aaggaagcagaaaggcggttgccag

SEQ ID NO: 3080485 - DNA, 25 bp, Homo sapien
tccagtttcaattttgcaggatgaa

SEQ ID NO: 3080486 - DNA, 25 bp, Homo sapien
gttgcacacagtgtgaaggtagaag

SEQ ID NO: 3080487 - DNA, 25 bp, Homo sapien
gcacggcctggcccggagcgacccc

SEQ ID NO: 3080488 - DNA, 25 bp, Homo sapien
tcatacaggcagcgcctcgccgccc

SEQ ID NO: 3080489 - DNA, 25 bp, Homo sapien
gccgggggcggctcagcaggcccgg

SEQ ID NO: 3080490 - DNA, 25 bp, Homo sapien
cccccgcacggcctggcccggagcg

SEQ ID NO: 3080491 - DNA, 25 bp, Homo sapien
gaaccgctggtgtaaatgcttcaag

SEQ ID NO: 3080492 - DNA, 25 bp, Homo sapien
tggtccaaggagttttaagcattct

SEQ ID NO: 3080493 - DNA, 25 bp, Homo sapien
tggtctcaggtagcaaaaaggttgg

SEQ ID NO: 3080494 - DNA, 25 bp, Homo sapien
ttcaaacgctaataaaaatgggtgc

SEQ ID NO: 3080495 - DNA, 25 bp, Homo sapien
tgtttcctgcccttatcctgggaga

SEQ ID NO: 3080496 - DNA, 25 bp, Homo sapien
cctgtttcctgcccttatcctggga

SEQ ID NO: 3080497 - DNA, 25 bp, Homo sapien
tcactcaagcaacaagaagggcaag

SEQ ID NO: 3080498 - DNA, 25 bp, Homo sapien
tatcctgggagaacttggccagggc

SEQ ID NO: 3080499 - DNA, 25 bp, Homo sapien
gccctccccttggatgttcatttta

SEQ ID NO: 3080500 - DNA, 25 bp, Homo sapien
cccttggatgttcattttatcccaa

SEQ ID NO: 3080501 - DNA, 25 bp, Homo sapien
cctccccttggatgttcattttatc

SEQ ID NO: 3080502 - DNA, 25 bp, Homo sapien
aaagccctccccttggatgttcatt

SEQ ID NO: 3080503 - DNA, 25 bp, Homo sapien
gacagatgaaccaggttttagataa

SEQ ID NO: 3080504 - DNA, 25 bp, Homo sapien
ccccacaggatcctctagctagaat

SEQ ID NO: 3080505 - DNA, 25 bp, Homo sapien
cacaggatcctctagctagaatatc

SEQ ID NO: 3080506 - DNA, 25 bp, Homo sapien
taacacgtctagaagagtgagcccc

SEQ ID NO: 3080507 - DNA, 25 bp, Homo sapien
agcaggaggctaggactggaaattc

SEQ ID NO: 3080508 - DNA, 25 bp, Homo sapien
gctaggactggaaattctgcagact

SEQ ID NO: 3080509 - DNA, 25 bp, Homo sapien
ggcacaggagcccaggttcacacca

SEQ ID NO: 3080510 - DNA, 25 bp, Homo sapien
tctgcagactttccaagcgtgttta

SEQ ID NO: 3080511 - DNA, 25 bp, Homo sapien
tcagggtcaacagggtatctatcac

SEQ ID NO: 3080512 - DNA, 25 bp, Homo sapien
ggtcaacagggtatctatcacctca

SEQ ID NO: 3080513 - DNA, 25 bp, Homo sapien
tttatgcccatgagttgaattgttt

SEQ ID NO: 3080514 - DNA, 25 bp, Homo sapien
tatgcccatgagttgaattgtttta

SEQ ID NO: 3080515 - DNA, 25 bp, Homo sapien
tcctatggagttatctgagcttcag

SEQ ID NO: 3080516 - DNA, 25 bp, Homo sapien
tccagaggtcaggtcatctccgtct

SEQ ID NO: 3080517 - DNA, 25 bp, Homo sapien
tgttagagacagaactccagaggtc

SEQ ID NO: 3080518 - DNA, 25 bp, Homo sapien
gctagtgttctggtatctcctctga

SEQ ID NO: 3080519 - DNA, 25 bp, Homo sapien
tataaaatggactaatactttcaac

SEQ ID NO: 3080520 - DNA, 25 bp, Homo sapien
gacttggctaagtcacgtgatctct

SEQ ID NO: 3080521 - DNA, 25 bp, Homo sapien
cttggctaagtcacgtgatctctct

SEQ ID NO: 3080522 - DNA, 25 bp, Homo sapien
ggtggacttggctaagtcacgtgat

SEQ ID NO: 3080523 - DNA, 25 bp, Homo sapien
accatatcagccctaaagccatggc

SEQ ID NO: 3080524 - DNA, 25 bp, Homo sapien
tgaaggaggttgctctatcaatgcc

SEQ ID NO: 3080525 - DNA, 25 bp, Homo sapien
cacaattctgcatgactagggaggt

SEQ ID NO: 3080526 - DNA, 25 bp, Homo sapien
tgatttcctgagaactcacacacta

SEQ ID NO: 3080527 - DNA, 25 bp, Homo sapien
tttctctaagcacagggcggtggcg

SEQ ID NO: 3080528 - DNA, 25 bp, Homo sapien
gaagagttactcagtcaagggcgac

SEQ ID NO: 3080529 - DNA, 25 bp, Homo sapien
tactggacgacacacagaagactgc

SEQ ID NO: 3080530 - DNA, 25 bp, Homo sapien
gaaagacggcaatactcaggctagg

SEQ ID NO: 3080531 - DNA, 25 bp, Homo sapien
cagaaacggtccatggcttccgtcc

SEQ ID NO: 3080532 - DNA, 25 bp, Homo sapien
cggtccatggcttccgtcccggtca

SEQ ID NO: 3080533 - DNA, 25 bp, Homo sapien
ggtccatggcttccgtcccggtcat

SEQ ID NO: 3080534 - DNA, 25 bp, Homo sapien
tcccagaaacggtccatggcttccg

SEQ ID NO: 3080535 - DNA, 25 bp, Homo sapien
ggctttccggggcacagaagctgca

SEQ ID NO: 3080536 - DNA, 25 bp, Homo sapien
tcgggaggccgaaacgctgtgctca

SEQ ID NO: 3080537 - DNA, 25 bp, Homo sapien
catcgccacgaggagttggcaggct

SEQ ID NO: 3080538 - DNA, 25 bp, Homo sapien
ctagctgtcagacatcgccacgagg

SEQ ID NO: 3080539 - DNA, 25 bp, Homo sapien
tctctgggaacacaaaagctggaat

SEQ ID NO: 3080540 - DNA, 25 bp, Homo sapien
gaatctctgcaaacctttccctgaa

SEQ ID NO: 3080541 - DNA, 25 bp, Homo sapien
tgtggatttaatctcactctctggg

SEQ ID NO: 3080542 - DNA, 25 bp, Homo sapien
tgaataatctgcgagtcagcggaga

SEQ ID NO: 3080543 - DNA, 25 bp, Homo sapien
gtccaccaccccatcgccaatgtgc

SEQ ID NO: 3080544 - DNA, 25 bp, Homo sapien
ccaccaccccatcgccaatgtgcag

SEQ ID NO: 3080545 - DNA, 25 bp, Homo sapien
cctgtgtaaccttgaagttagagat

SEQ ID NO: 3080546 - DNA, 25 bp, Homo sapien
tgtgtaaccttgaagttagagatgg

SEQ ID NO: 3080547 - DNA, 25 bp, Homo sapien
ttccaagtgtcagctgcggcaaggc

SEQ ID NO: 3080548 - DNA, 25 bp, Homo sapien
ggttgttccaagtgtcagctgcggc

SEQ ID NO: 3080549 - DNA, 25 bp, Homo sapien
tgttccaagtgtcagctgcggcaag

SEQ ID NO: 3080550 - DNA, 25 bp, Homo sapien
gttgttccaagtgtcagctgcggca

SEQ ID NO: 3080551 - DNA, 25 bp, Homo sapien
tttgtatactagttacagataaaca

SEQ ID NO: 3080552 - DNA, 25 bp, Homo sapien
gtttgtatactagttacagataaac

SEQ ID NO: 3080553 - DNA, 25 bp, Homo sapien
ttttgttccagtcttgattagagaa

SEQ ID NO: 3080554 - DNA, 25 bp, Homo sapien
tgcaaatattggcaactgctcccct

SEQ ID NO: 3080555 - DNA, 25 bp, Homo sapien
aattcttatttggtcccaggtggct

SEQ ID NO: 3080556 - DNA, 25 bp, Homo sapien
catgtgaagatggtgcaaatattgg

SEQ ID NO: 3080557 - DNA, 25 bp, Homo sapien
ttaagagagcctccctttcagactg

SEQ ID NO: 3080558 - DNA, 25 bp, Homo sapien
ttcagtgacgcttttgccaaatgtc

SEQ ID NO: 3080559 - DNA, 25 bp, Homo sapien
gcctttcagtgacgcttttgccaaa

SEQ ID NO: 3080560 - DNA, 25 bp, Homo sapien
ctttcagtgacgcttttgccaaatg

SEQ ID NO: 3080561 - DNA, 25 bp, Homo sapien
tttcagtgacgcttttgccaaatgt

SEQ ID NO: 3080562 - DNA, 25 bp, Homo sapien
cacacagtactttttgtaatcagac

SEQ ID NO: 3080563 - DNA, 25 bp, Homo sapien
aattgtgcatagtctatcccctgct

SEQ ID NO: 3080564 - DNA, 25 bp, Homo sapien
tatcccctgctgctcatagaaaaga

SEQ ID NO: 3080565 - DNA, 25 bp, Homo sapien
ggcagagtcggtgtcaatttcatcc

SEQ ID NO: 3080566 - DNA, 25 bp, Homo sapien
ctgctgtcattgtaacagtaccact

SEQ ID NO: 3080567 - DNA, 25 bp, Homo sapien
cttacagctgctgtcattgtaacag

SEQ ID NO: 3080568 - DNA, 25 bp, Homo sapien
cagctgctgtcattgtaacagtacc

SEQ ID NO: 3080569 - DNA, 25 bp, Homo sapien
tacagctgctgtcattgtaacagta

SEQ ID NO: 3080570 - DNA, 25 bp, Homo sapien
ttcatgctcataaaggaatccattg

SEQ ID NO: 3080571 - DNA, 25 bp, Homo sapien
gcttcatgctcataaaggaatccat

SEQ ID NO: 3080572 - DNA, 25 bp, Homo sapien
atgcttcatgctcataaaggaatcc

SEQ ID NO: 3080573 - DNA, 25 bp, Homo sapien
tgcttcatgctcataaaggaatcca

SEQ ID NO: 3080574 - DNA, 25 bp, Homo sapien
tcatccccctggggtgtgagtggtt

SEQ ID NO: 3080575 - DNA, 25 bp, Homo sapien
tagcgctgagtgaggatgggctttt

SEQ ID NO: 3080576 - DNA, 25 bp, Homo sapien
tgttagcgctgagtgaggatgggct

SEQ ID NO: 3080577 - DNA, 25 bp, Homo sapien
tgatgttagcgctgagtgaggatgg

SEQ ID NO: 3080578 - DNA, 25 bp, Homo sapien
cacggagacagctgtccaggttgat

SEQ ID NO: 3080579 - DNA, 25 bp, Homo sapien
gaaagcacggagacagctgtccagg

SEQ ID NO: 3080580 - DNA, 25 bp, Homo sapien
agcacggagacagctgtccaggttg

SEQ ID NO: 3080581 - DNA, 25 bp, Homo sapien
agtgggtcttacacttggaacagta

SEQ ID NO: 3080582 - DNA, 25 bp, Homo sapien
taaagtggtgatctaggtatgcatc

SEQ ID NO: 3080583 - DNA, 25 bp, Homo sapien
tggtcactcacccttattttactct

SEQ ID NO: 3080584 - DNA, 25 bp, Homo sapien
ggaaggcatttaaagtggtgatcta

SEQ ID NO: 3080585 - DNA, 25 bp, Homo sapien
ggtatgcatcaacctcttggtcact

SEQ ID NO: 3080586 - DNA, 25 bp, Homo sapien
tttggggtcctgttaatcagcatgt

SEQ ID NO: 3080587 - DNA, 25 bp, Homo sapien
gggtcctgttaatcagcatgttagg

SEQ ID NO: 3080588 - DNA, 25 bp, Homo sapien
tggggtcctgttaatcagcatgtta

SEQ ID NO: 3080589 - DNA, 25 bp, Homo sapien
acctttggggtcctgttaatcagca

SEQ ID NO: 3080590 - DNA, 25 bp, Homo sapien
aaggataagagtgattgcctctgtt

SEQ ID NO: 3080591 - DNA, 25 bp, Homo sapien
aaaggataagagtgattgcctctgt

SEQ ID NO: 3080592 - DNA, 25 bp, Homo sapien
aggataagagtgattgcctctgttt

SEQ ID NO: 3080593 - DNA, 25 bp, Homo sapien
gagatttaacaggtcacgtaggccg

SEQ ID NO: 3080594 - DNA, 25 bp, Homo sapien
gagcttttccgattgcacactggat

SEQ ID NO: 3080595 - DNA, 25 bp, Homo sapien
gcaggatgtcctaaagagcttttcc

SEQ ID NO: 3080596 - DNA, 25 bp, Homo sapien
cgtaggccgtttcctataagcagga

SEQ ID NO: 3080597 - DNA, 25 bp, Homo sapien
ctgtgggatcccaatccacagcgat

SEQ ID NO: 3080598 - DNA, 25 bp, Homo sapien
tgggatcccaatccacagcgatata

SEQ ID NO: 3080599 - DNA, 25 bp, Homo sapien
tgtgggatcccaatccacagcgata

SEQ ID NO: 3080600 - DNA, 25 bp, Homo sapien
ggatcccaatccacagcgatatagg

SEQ ID NO: 3080601 - DNA, 25 bp, Homo sapien
tagagtgaatggatattgatagccc

SEQ ID NO: 3080602 - DNA, 25 bp, Homo sapien
caccaagcacaggagttcccatctt

SEQ ID NO: 3080603 - DNA, 25 bp, Homo sapien
gcacaactcgtagagtgaatggata

SEQ ID NO: 3080604 - DNA, 25 bp, Homo sapien
tcccatctttctgcacaactcgtag

SEQ ID NO: 3080605 - DNA, 25 bp, Homo sapien
gagtgggctcgctaaccgggatact

SEQ ID NO: 3080606 - DNA, 25 bp, Homo sapien
gtgggctcgctaaccgggatacttg

SEQ ID NO: 3080607 - DNA, 25 bp, Homo sapien
gggagtgggctcgctaaccgggata

SEQ ID NO: 3080608 - DNA, 25 bp, Homo sapien
tgggctcgctaaccgggatacttga

SEQ ID NO: 3080609 - DNA, 25 bp, Homo sapien
caagactggcagtgagttgcctaac

SEQ ID NO: 3080610 - DNA, 25 bp, Homo sapien
cctgttgcctcttaatatacggata

SEQ ID NO: 3080611 - DNA, 25 bp, Homo sapien
tcagatgcactgactatcctgttgc

SEQ ID NO: 3080612 - DNA, 25 bp, Homo sapien
catgagtaatactaaatcctggctc

SEQ ID NO: 3080613 - DNA, 25 bp, Homo sapien
gtggactgcaatgatgtaacctgta

SEQ ID NO: 3080614 - DNA, 25 bp, Homo sapien
gtaacctgtaaaggggctgtcagga

SEQ ID NO: 3080615 - DNA, 25 bp, Homo sapien
gagatggcatgtgaccattaaccat

SEQ ID NO: 3080616 - DNA, 25 bp, Homo sapien
aaccattccatttgtgaagttcttc

SEQ ID NO: 3080617 - DNA, 25 bp, Homo sapien
atcataagcttgtggtattttcatc

SEQ ID NO: 3080618 - DNA, 25 bp, Homo sapien
ggacagtgatgctctaaactaaaac

SEQ ID NO: 3080619 - DNA, 25 bp, Homo sapien
taaaaggactcagtgagtgaccaca

SEQ ID NO: 3080620 - DNA, 25 bp, Homo sapien
aaagcatactagtggctaaaaggac

SEQ ID NO: 3080621 - DNA, 25 bp, Homo sapien
atggcaaagatcacagaagtttcca

SEQ ID NO: 3080622 - DNA, 25 bp, Homo sapien
acagggacaggaatttcaaatgcac

SEQ ID NO: 3080623 - DNA, 25 bp, Homo sapien
gagtcgtactttttggttgtcctga

SEQ ID NO: 3080624 - DNA, 25 bp, Homo sapien
atgcacacaaaaatccactcactga

SEQ ID NO: 3080625 - DNA, 25 bp, Homo sapien
tgtgttggactagaagctgaaattg

SEQ ID NO: 3080626 - DNA, 25 bp, Homo sapien
cagtcttagtccataccgtacaggg

SEQ ID NO: 3080627 - DNA, 25 bp, Homo sapien
cctgtgtacttttcatccatattca

SEQ ID NO: 3080628 - DNA, 25 bp, Homo sapien
gatttgttctgaattaagtccacag

SEQ ID NO: 3080629 - DNA, 25 bp, Homo sapien
ggggtagtaccatctaacttaatca

SEQ ID NO: 3080630 - DNA, 25 bp, Homo sapien
aatgctgtgtacagatatatctgac

SEQ ID NO: 3080631 - DNA, 25 bp, Homo sapien
aaatgctgtgtacagatatatctga

SEQ ID NO: 3080632 - DNA, 25 bp, Homo sapien
taaatgctgtgtacagatatatctg

SEQ ID NO: 3080633 - DNA, 25 bp, Homo sapien
cttaaatgctgtgtacagatatatc

SEQ ID NO: 3080634 - DNA, 25 bp, Homo sapien
atggagtcaagtaatttttcagaac

SEQ ID NO: 3080635 - DNA, 25 bp, Homo sapien
tggagtcaagtaatttttcagaact

SEQ ID NO: 3080636 - DNA, 25 bp, Homo sapien
ggacacttatatgcccacatgtctt

SEQ ID NO: 3080637 - DNA, 25 bp, Homo sapien
aattgaaagggtcaaatcggacact

SEQ ID NO: 3080638 - DNA, 25 bp, Homo sapien
tccattggtagtggcaaagacaaaa

SEQ ID NO: 3080639 - DNA, 25 bp, Homo sapien
taactgtccattggtagtggcaaag

SEQ ID NO: 3080640 - DNA, 25 bp, Homo sapien
tccacaacaattgatctatttcttc

SEQ ID NO: 3080641 - DNA, 25 bp, Homo sapien
ggaacaaatccacaacaattgatct

SEQ ID NO: 3080642 - DNA, 25 bp, Homo sapien
ctgcccatggaacaaatccacaaca

SEQ ID NO: 3080643 - DNA, 25 bp, Homo sapien
ttcttcttagatggttgtcccaggc

SEQ ID NO: 3080644 - DNA, 25 bp, Homo sapien
ctctgcagctacttcccagtctggt

SEQ ID NO: 3080645 - DNA, 25 bp, Homo sapien
gttcctgcactaaatcaccatagca

SEQ ID NO: 3080646 - DNA, 25 bp, Homo sapien
tagccatatgccccttcataccaat

SEQ ID NO: 3080647 - DNA, 25 bp, Homo sapien
gcatttagccatatgccccttcata

SEQ ID NO: 3080648 - DNA, 25 bp, Homo sapien
atttagccatatgccccttcatacc

SEQ ID NO: 3080649 - DNA, 25 bp, Homo sapien
ctgtgtcagtggctgtgtgttacta

SEQ ID NO: 3080650 - DNA, 25 bp, Homo sapien
gtgtcagtggctgtgtgttactaac

SEQ ID NO: 3080651 - DNA, 25 bp, Homo sapien
tgtgtcagtggctgtgtgttactaa

SEQ ID NO: 3080652 - DNA, 25 bp, Homo sapien
cactggatgcttgagttcatgaagc

SEQ ID NO: 3080653 - DNA, 25 bp, Homo sapien
tcctcaggccaactcatatctttgt

SEQ ID NO: 3080654 - DNA, 25 bp, Homo sapien
catctcctcaggccaactcatatct

SEQ ID NO: 3080655 - DNA, 25 bp, Homo sapien
tctcctcaggccaactcatatcttt

SEQ ID NO: 3080656 - DNA, 25 bp, Homo sapien
cctcaggccaactcatatctttgtt

SEQ ID NO: 3080657 - DNA, 25 bp, Homo sapien
tcaaatattccaatttatgatcctc

SEQ ID NO: 3080658 - DNA, 25 bp, Homo sapien
ttcaaatattccaatttatgatcct

SEQ ID NO: 3080659 - DNA, 25 bp, Homo sapien
tttcaaatattccaatttatgatcc

SEQ ID NO: 3080660 - DNA, 25 bp, Homo sapien
caaatattccaatttatgatcctca

SEQ ID NO: 3080661 - DNA, 25 bp, Homo sapien
ggctaatacccgctttaaaggtgca

SEQ ID NO: 3080662 - DNA, 25 bp, Homo sapien
cactgttgtatagccacaggcgcat

SEQ ID NO: 3080663 - DNA, 25 bp, Homo sapien
gcgcagcctttgagatagatattcg

SEQ ID NO: 3080664 - DNA, 25 bp, Homo sapien
tgcattcgactaaaacagcctgtat

SEQ ID NO: 3080665 - DNA, 25 bp, Homo sapien
agtgagtccaaagcctcaactttga

SEQ ID NO: 3080666 - DNA, 25 bp, Homo sapien
tttaaagtgagtccaaagcctcaac

SEQ ID NO: 3080667 - DNA, 25 bp, Homo sapien
aagcacccctctcagcaatggggac

SEQ ID NO: 3080668 - DNA, 25 bp, Homo sapien
taaagtgagtccaaagcctcaactt

SEQ ID NO: 3080669 - DNA, 25 bp, Homo sapien
aaggaaatgcatggtattcttgctg

SEQ ID NO: 3080670 - DNA, 25 bp, Homo sapien
tattcttgctgcattcttaagttac

SEQ ID NO: 3080671 - DNA, 25 bp, Homo sapien
ttaaggaaatgcatggtattcttgc

SEQ ID NO: 3080672 - DNA, 25 bp, Homo sapien
ggtattcttgctgcattcttaagtt

SEQ ID NO: 3080673 - DNA, 25 bp, Homo sapien
ctcggtaaatgctgaggaaacattc

SEQ ID NO: 3080674 - DNA, 25 bp, Homo sapien
ctctcggtaaatgctgaggaaacat

SEQ ID NO: 3080675 - DNA, 25 bp, Homo sapien
tctcggtaaatgctgaggaaacatt

SEQ ID NO: 3080676 - DNA, 25 bp, Homo sapien
ctgtgtccgagtggcaggctgctgt

SEQ ID NO: 3080677 - DNA, 25 bp, Homo sapien
gttagactgctgtgtccgagtggca

SEQ ID NO: 3080678 - DNA, 25 bp, Homo sapien
aagatagcggggaaataattccagc

SEQ ID NO: 3080679 - DNA, 25 bp, Homo sapien
gaagagaagatagcggggaaataat

SEQ ID NO: 3080680 - DNA, 25 bp, Homo sapien
taactccttgtagatatcttctccc

SEQ ID NO: 3080681 - DNA, 25 bp, Homo sapien
catttcctaagattataactccttg

SEQ ID NO: 3080682 - DNA, 25 bp, Homo sapien
gatctgattactgttaaaattcctg

SEQ ID NO: 3080683 - DNA, 25 bp, Homo sapien
gtccaacaagttcactagctacatt

SEQ ID NO: 3080684 - DNA, 25 bp, Homo sapien
tactacgttctacttgcgtaaccag

SEQ ID NO: 3080685 - DNA, 25 bp, Homo sapien
cattagctatatagtcatgctgcca

SEQ ID NO: 3080686 - DNA, 25 bp, Homo sapien
ctagtagtgaggatgcaactgttcc

SEQ ID NO: 3080687 - DNA, 25 bp, Homo sapien
taaaaccttatcactggacatcatt

SEQ ID NO: 3080688 - DNA, 25 bp, Homo sapien
ccatgaatcagctgtggagttcgtt

SEQ ID NO: 3080689 - DNA, 25 bp, Homo sapien
aatcgtcctccttctagtgttaatg

SEQ ID NO: 3080690 - DNA, 25 bp, Homo sapien
cataccagtgataaagtgctctcca

SEQ ID NO: 3080691 - DNA, 25 bp, Homo sapien
gttctgggaccatttcatagtctct

SEQ ID NO: 3080692 - DNA, 25 bp, Homo sapien
caaaagtttttgggtctcagcaata

SEQ ID NO: 3080693 - DNA, 25 bp, Homo sapien
acaaaagtttttgggtctcagcaat

SEQ ID NO: 3080694 - DNA, 25 bp, Homo sapien
tgattatcaatagcccctggtttct

SEQ ID NO: 3080695 - DNA, 25 bp, Homo sapien
cagaagtgttatgttgtcgagcaaa

SEQ ID NO: 3080696 - DNA, 25 bp, Homo sapien
ggtttctgagggttaaggtgcaaca

SEQ ID NO: 3080697 - DNA, 25 bp, Homo sapien
tactggttcttgagttactaatggc

SEQ ID NO: 3080698 - DNA, 25 bp, Homo sapien
gatggctcaattaccacagggttgg

SEQ ID NO: 3080699 - DNA, 25 bp, Homo sapien
ggctgcttccaattctatcttcgac

SEQ ID NO: 3080700 - DNA, 25 bp, Homo sapien
tcgacctgctccataggatgggctg

SEQ ID NO: 3080701 - DNA, 25 bp, Homo sapien
tattcacgtaactgaggctgcttcc

SEQ ID NO: 3080702 - DNA, 25 bp, Homo sapien
ccatcacatttttggcaaggtaatc

SEQ ID NO: 3080703 - DNA, 25 bp, Homo sapien
tagttttgctataagtgatcttaaa

SEQ ID NO: 3080704 - DNA, 25 bp, Homo sapien
cacatttttggcaaggtaatccgtt

SEQ ID NO: 3080705 - DNA, 25 bp, Homo sapien
ttgctataagtgatcttaaatgatg

SEQ ID NO: 3080706 - DNA, 25 bp, Homo sapien
taaatcctcatataactactgctac

SEQ ID NO: 3080707 - DNA, 25 bp, Homo sapien
tttaaatcctcatataactactgct

SEQ ID NO: 3080708 - DNA, 25 bp, Homo sapien
cattattacctttaaccttatatag

SEQ ID NO: 3080709 - DNA, 25 bp, Homo sapien
gaaatttaaatcctcatataactac

SEQ ID NO: 3080710 - DNA, 25 bp, Homo sapien
tgataaaccagttgtgtcctgcttg

SEQ ID NO: 3080711 - DNA, 25 bp, Homo sapien
cactgttgccaccactgcatggaga

SEQ ID NO: 3080712 - DNA, 25 bp, Homo sapien
tgcttgcagaccatacctgctctct

SEQ ID NO: 3080713 - DNA, 25 bp, Homo sapien
gaccatacctgctctctcgttctaa

SEQ ID NO: 3080714 - DNA, 25 bp, Homo sapien
tgtctggacctattgacttgcctgt

SEQ ID NO: 3080715 - DNA, 25 bp, Homo sapien
gaccttaacaaccaccagtctgctg

SEQ ID NO: 3080716 - DNA, 25 bp, Homo sapien
gctgtgtgaccacctcttattaagt

SEQ ID NO: 3080717 - DNA, 25 bp, Homo sapien
cagtggtactatgaaagttgtgttc

SEQ ID NO: 3080718 - DNA, 25 bp, Homo sapien
tcttcagagttccaacagagttgaa

SEQ ID NO: 3080719 - DNA, 25 bp, Homo sapien
ggctcttagagctacccactacata

SEQ ID NO: 3080720 - DNA, 25 bp, Homo sapien
aatgctctctcttgaaactcaaacg

SEQ ID NO: 3080721 - DNA, 25 bp, Homo sapien
caatgtttctgtggagagacaggct

SEQ ID NO: 3080722 - DNA, 25 bp, Homo sapien
gtatggatatccaaattctcctgca

SEQ ID NO: 3080723 - DNA, 25 bp, Homo sapien
cacaggtgtgatcactgcatactca

SEQ ID NO: 3080724 - DNA, 25 bp, Homo sapien
tctgatgtttaggtatagggaatcc

SEQ ID NO: 3080725 - DNA, 25 bp, Homo sapien
tgcatactcacactaaagccgtgaa

SEQ ID NO: 3080726 - DNA, 25 bp, Homo sapien
aagtcagtctaaatctttggctttt

SEQ ID NO: 3080727 - DNA, 25 bp, Homo sapien
caagtcagtctaaatctttggcttt

SEQ ID NO: 3080728 - DNA, 25 bp, Homo sapien
aacaagtcagtctaaatctttggct

SEQ ID NO: 3080729 - DNA, 25 bp, Homo sapien
acaagtcagtctaaatctttggctt

SEQ ID NO: 3080730 - DNA, 25 bp, Homo sapien
tcagcacacttgttgcacgtcagca

SEQ ID NO: 3080731 - DNA, 25 bp, Homo sapien
cacacttgttgcacgtcagcagcac

SEQ ID NO: 3080732 - DNA, 25 bp, Homo sapien
cagcacacttgttgcacgtcagcag

SEQ ID NO: 3080733 - DNA, 25 bp, Homo sapien
gcacacttgttgcacgtcagcagca

SEQ ID NO: 3080734 - DNA, 25 bp, Homo sapien
tacaagcagtctacagatcactggg

SEQ ID NO: 3080735 - DNA, 25 bp, Homo sapien
gactgacagcccatgcagacttgct

SEQ ID NO: 3080736 - DNA, 25 bp, Homo sapien
tgagcctaacttactggtcagccaa

SEQ ID NO: 3080737 - DNA, 25 bp, Homo sapien
caatgactgctgagaggttgtgctc

SEQ ID NO: 3080738 - DNA, 25 bp, Homo sapien
atttcttgtatatatttggtcagtt

SEQ ID NO: 3080739 - DNA, 25 bp, Homo sapien
caatttcttgtatatatttggtcag

SEQ ID NO: 3080740 - DNA, 25 bp, Homo sapien
aatttcttgtatatatttggtcagt

SEQ ID NO: 3080741 - DNA, 25 bp, Homo sapien
gagtagctggtcttaaccccagaac

SEQ ID NO: 3080742 - DNA, 25 bp, Homo sapien
ggtcttaaccccagaactatgtgac

SEQ ID NO: 3080743 - DNA, 25 bp, Homo sapien
cggagtagctggtcttaaccccaga

SEQ ID NO: 3080744 - DNA, 25 bp, Homo sapien
agctggtcttaaccccagaactatg

SEQ ID NO: 3080745 - DNA, 25 bp, Homo sapien
aaatagtgccactccaagtccttag

SEQ ID NO: 3080746 - DNA, 25 bp, Homo sapien
agttcgtacactcaacatgtgattg

SEQ ID NO: 3080747 - DNA, 25 bp, Homo sapien
tgagagctacaagatgactcagaca

SEQ ID NO: 3080748 - DNA, 25 bp, Homo sapien
tcaaaatgctatactctgtgagagc

SEQ ID NO: 3080749 - DNA, 25 bp, Homo sapien
ctctggctactatatgatggaaaag

SEQ ID NO: 3080750 - DNA, 25 bp, Homo sapien
gtactactaccctctgttgctgtca

SEQ ID NO: 3080751 - DNA, 25 bp, Homo sapien
tatatggttttgcagcctagataca

SEQ ID NO: 3080752 - DNA, 25 bp, Homo sapien
gcctagatacaacaactctggctac

SEQ ID NO: 3080753 - DNA, 25 bp, Homo sapien
ggttcaaaaactcattggcaagaac

SEQ ID NO: 3080754 - DNA, 25 bp, Homo sapien
ttttcacactccagatctgatagtc

SEQ ID NO: 3080755 - DNA, 25 bp, Homo sapien
aaggaggttcaaaaactcattggca

SEQ ID NO: 3080756 - DNA, 25 bp, Homo sapien
tgatagtcttccagagtaagatgac

SEQ ID NO: 3080757 - DNA, 25 bp, Homo sapien
acactcatgttaggaacatcttttt

SEQ ID NO: 3080758 - DNA, 25 bp, Homo sapien
cactcatgttaggaacatctttttt

SEQ ID NO: 3080759 - DNA, 25 bp, Homo sapien
tctaaattgtcccactgtagtgtgg

SEQ ID NO: 3080760 - DNA, 25 bp, Homo sapien
aattgtcccactgtagtgtggtatc

SEQ ID NO: 3080761 - DNA, 25 bp, Homo sapien
gttaacaggagtgtctaaattgtcc

SEQ ID NO: 3080762 - DNA, 25 bp, Homo sapien
aggttaacaggagtgtctaaattgt

SEQ ID NO: 3080763 - DNA, 25 bp, Homo sapien
aaagttccatctcatgcagcatata

SEQ ID NO: 3080764 - DNA, 25 bp, Homo sapien
aaaatgaaatgactctggaaggttt

SEQ ID NO: 3080765 - DNA, 25 bp, Homo sapien
taatgcaagagaacacttcgctgtt

SEQ ID NO: 3080766 - DNA, 25 bp, Homo sapien
tttacagtcatattctggcagtttg

SEQ ID NO: 3080767 - DNA, 25 bp, Homo sapien
ccttctacaatatcagagagatcca

SEQ ID NO: 3080768 - DNA, 25 bp, Homo sapien
gtcatgtgcattcagtatgccttct

SEQ ID NO: 3080769 - DNA, 25 bp, Homo sapien
caatatcagagagatccatatgtaa

SEQ ID NO: 3080770 - DNA, 25 bp, Homo sapien
ctttgtggtgtcatgtgcattcagt

SEQ ID NO: 3080771 - DNA, 25 bp, Homo sapien
tccatcacggtcaacatcaaatacc

SEQ ID NO: 3080772 - DNA, 25 bp, Homo sapien
tcaaccctggagagaactccatcac

SEQ ID NO: 3080773 - DNA, 25 bp, Homo sapien
catcagtgcggttgtccttccagac

SEQ ID NO: 3080774 - DNA, 25 bp, Homo sapien
aggaatatcatcagtgcggttgtcc

SEQ ID NO: 3080775 - DNA, 25 bp, Homo sapien
aaatctatgtgattgtcacgatttt

SEQ ID NO: 3080776 - DNA, 25 bp, Homo sapien
aatctatgtgattgtcacgattttc

SEQ ID NO: 3080777 - DNA, 25 bp, Homo sapien
atctatgtgattgtcacgattttca

SEQ ID NO: 3080778 - DNA, 25 bp, Homo sapien
aaaatctatgtgattgtcacgattt

SEQ ID NO: 3080779 - DNA, 25 bp, Homo sapien
tgagccttcaataaccaatagcgtt

SEQ ID NO: 3080780 - DNA, 25 bp, Homo sapien
gaataggtggtgaaaccaatgggcc

SEQ ID NO: 3080781 - DNA, 25 bp, Homo sapien
cttcacttagagatggacgaatagg

SEQ ID NO: 3080782 - DNA, 25 bp, Homo sapien
aaatcaaatcgtccagtccgggatt

SEQ ID NO: 3080783 - DNA, 25 bp, Homo sapien
gtgacacgatcatagttccctacag

SEQ ID NO: 3080784 - DNA, 25 bp, Homo sapien
aaagtttctatgtacagcttctctc

SEQ ID NO: 3080785 - DNA, 25 bp, Homo sapien
ctctatcttggatttaaagtttcta

SEQ ID NO: 3080786 - DNA, 25 bp, Homo sapien
gacacgatcatagttccctacagcc

SEQ ID NO: 3080787 - DNA, 25 bp, Homo sapien
tacatcaaaaatcgcaaataggctc

SEQ ID NO: 3080788 - DNA, 25 bp, Homo sapien
tataatggagtaactagcaccagac

SEQ ID NO: 3080789 - DNA, 25 bp, Homo sapien
gcgtacataggacatttattctcaa

SEQ ID NO: 3080790 - DNA, 25 bp, Homo sapien
ttcacctcctaccacaaattactag

SEQ ID NO: 3080791 - DNA, 25 bp, Homo sapien
atgatgatttatcttggtccttctc

SEQ ID NO: 3080792 - DNA, 25 bp, Homo sapien
gccaaacatagtctacttttatgag

SEQ ID NO: 3080793 - DNA, 25 bp, Homo sapien
gttaaaccttatttaaacatgatga

SEQ ID NO: 3080794 - DNA, 25 bp, Homo sapien
tagtctacttttatgagaacatccc

SEQ ID NO: 3080795 - DNA, 25 bp, Homo sapien
tcaaaggaataggacctgagccata

SEQ ID NO: 3080796 - DNA, 25 bp, Homo sapien
tttccaacagacttagagatagggc

SEQ ID NO: 3080797 - DNA, 25 bp, Homo sapien
catctcaattgtcaagggctgaaag

SEQ ID NO: 3080798 - DNA, 25 bp, Homo sapien
atataaaagttcatggtgtggtcac

SEQ ID NO: 3080799 - DNA, 25 bp, Homo sapien
gaaggtcattattgtaggtgaaaca

SEQ ID NO: 3080800 - DNA, 25 bp, Homo sapien
gaatattaggaaactacaatgtttc

SEQ ID NO: 3080801 - DNA, 25 bp, Homo sapien
aactcgtaagaaataagaagaatat

SEQ ID NO: 3080802 - DNA, 25 bp, Homo sapien
tgttaggaggtacatgaaactaaaa

SEQ ID NO: 3080803 - DNA, 25 bp, Homo sapien
catcagtgagggtaacatacacacc

SEQ ID NO: 3080804 - DNA, 25 bp, Homo sapien
ccatcgagagaaagtaaaagcatct

SEQ ID NO: 3080805 - DNA, 25 bp, Homo sapien
catacacacctccagatagaagcca

SEQ ID NO: 3080806 - DNA, 25 bp, Homo sapien
gtttggtagaaagtaggagtatcac

SEQ ID NO: 3080807 - DNA, 25 bp, Homo sapien
tcagatacctcaattggactcagtt

SEQ ID NO: 3080808 - DNA, 25 bp, Homo sapien
tgaccattggtaatcatgaccctca

SEQ ID NO: 3080809 - DNA, 25 bp, Homo sapien
tcacatagtccataatcaatacgag

SEQ ID NO: 3080810 - DNA, 25 bp, Homo sapien
aaattctaggccaactctacctttg

SEQ ID NO: 3080811 - DNA, 25 bp, Homo sapien
gagaaacacttcctgagtgtatctg

SEQ ID NO: 3080812 - DNA, 25 bp, Homo sapien
aacacttcctgagtgtatctgggac

SEQ ID NO: 3080813 - DNA, 25 bp, Homo sapien
gaaacacttcctgagtgtatctggg

SEQ ID NO: 3080814 - DNA, 25 bp, Homo sapien
ctctgagaaacacttcctgagtgta

SEQ ID NO: 3080815 - DNA, 25 bp, Homo sapien
ttcccgtataacatagttcccagat

SEQ ID NO: 3080816 - DNA, 25 bp, Homo sapien
caccacgtggagcattctttccatt

SEQ ID NO: 3080817 - DNA, 25 bp, Homo sapien
ccaccacgtggagcattctttccat

SEQ ID NO: 3080818 - DNA, 25 bp, Homo sapien
catttcttcccgtataacatagttc

SEQ ID NO: 3080819 - DNA, 25 bp, Homo sapien
taagctcctagccttaaaaagatcc

SEQ ID NO: 3080820 - DNA, 25 bp, Homo sapien
gctgcctggggccaatttatatttc

SEQ ID NO: 3080821 - DNA, 25 bp, Homo sapien
tatttctgctggtgaagaaatgcta

SEQ ID NO: 3080822 - DNA, 25 bp, Homo sapien
gtactgttaccttaagctcctagcc

SEQ ID NO: 3080823 - DNA, 25 bp, Homo sapien
gctgggaagtacaccatcaattcgg

SEQ ID NO: 3080824 - DNA, 25 bp, Homo sapien
gatggcactcctgtgataagaagct

SEQ ID NO: 3080825 - DNA, 25 bp, Homo sapien
tgcatccggcaaaaggaccttcttg

SEQ ID NO: 3080826 - DNA, 25 bp, Homo sapien
tcccatagcggaaagcagaagagca

SEQ ID NO: 3080827 - DNA, 25 bp, Homo sapien
gtcaattcaaatcctctacctgtca

SEQ ID NO: 3080828 - DNA, 25 bp, Homo sapien
aattattctgtacatagacgaatta

SEQ ID NO: 3080829 - DNA, 25 bp, Homo sapien
atgtcaattcaaatcctctacctgt

SEQ ID NO: 3080830 - DNA, 25 bp, Homo sapien
tcaaatcctctacctgtcatcagaa

SEQ ID NO: 3080831 - DNA, 25 bp, Homo sapien
gcctcttgtaaggaggacaagtcca

SEQ ID NO: 3080832 - DNA, 25 bp, Homo sapien
tgaagtgcagccctttggatgttcc

SEQ ID NO: 3080833 - DNA, 25 bp, Homo sapien
aggaggacaagtccaactattaaat

SEQ ID NO: 3080834 - DNA, 25 bp, Homo sapien
aaattattgaagtgcagccctttgg

SEQ ID NO: 3080835 - DNA, 25 bp, Homo sapien
aagccaaccttaggaggcatttcag

SEQ ID NO: 3080836 - DNA, 25 bp, Homo sapien
ggcatttcagttgttgaggaatctg

SEQ ID NO: 3080837 - DNA, 25 bp, Homo sapien
gatgataaagccaaccttaggaggc

SEQ ID NO: 3080838 - DNA, 25 bp, Homo sapien
ctggaaaaagatgataaagccaacc

SEQ ID NO: 3080839 - DNA, 25 bp, Homo sapien
taaaacacgtaacaatagcacagag

SEQ ID NO: 3080840 - DNA, 25 bp, Homo sapien
aactagcagtctacatcagtaagag

SEQ ID NO: 3080841 - DNA, 25 bp, Homo sapien
caccaggaaattacgtgaccttagt

SEQ ID NO: 3080842 - DNA, 25 bp, Homo sapien
caagaaagtacctcaggctggagga

SEQ ID NO: 3080843 - DNA, 25 bp, Homo sapien
cttggctctctgcaaactcaacctc

SEQ ID NO: 3080844 - DNA, 25 bp, Homo sapien
gatcttggctctctgcaaactcaac

SEQ ID NO: 3080845 - DNA, 25 bp, Homo sapien
tcgatcttggctctctgcaaactca

SEQ ID NO: 3080846 - DNA, 25 bp, Homo sapien
tggctctctgcaaactcaacctccc

SEQ ID NO: 3080847 - DNA, 25 bp, Homo sapien
gacaggagaattgctctaaacccag

SEQ ID NO: 3080848 - DNA, 25 bp, Homo sapien
aaaataaaactaggctggatgcggt

SEQ ID NO: 3080849 - DNA, 25 bp, Homo sapien
ggataactatacgcagaaaaataaa

SEQ ID NO: 3080850 - DNA, 25 bp, Homo sapien
gaaaaataaaactaggctggatgcg

SEQ ID NO: 3080851 - DNA, 25 bp, Homo sapien
cctcccaagagtccttgggagtctg

SEQ ID NO: 3080852 - DNA, 25 bp, Homo sapien
ctcccaagagtccttgggagtctga

SEQ ID NO: 3080853 - DNA, 25 bp, Homo sapien
atttatcctgactgacacagagtta

SEQ ID NO: 3080854 - DNA, 25 bp, Homo sapien
tatcctgactgacacagagttaaaa

SEQ ID NO: 3080855 - DNA, 25 bp, Homo sapien
caggctggagaatacagtggcattg

SEQ ID NO: 3080856 - DNA, 25 bp, Homo sapien
gctggagaatacagtggcattgatc

SEQ ID NO: 3080857 - DNA, 25 bp, Homo sapien
ggctggagaatacagtggcattgat

SEQ ID NO: 3080858 - DNA, 25 bp, Homo sapien
tggagaatacagtggcattgatctt

SEQ ID NO: 3080859 - DNA, 25 bp, Homo sapien
taagtctctatagcatggcctgtac

SEQ ID NO: 3080860 - DNA, 25 bp, Homo sapien
taaagcacccacgaagtaactagcc

SEQ ID NO: 3080861 - DNA, 25 bp, Homo sapien
tctagcacctttagctcactgagct

SEQ ID NO: 3080862 - DNA, 25 bp, Homo sapien
cacaagagtgcaccctctattggag

SEQ ID NO: 3080863 - DNA, 25 bp, Homo sapien
ctggtctggtactctgtgacactga

SEQ ID NO: 3080864 - DNA, 25 bp, Homo sapien
tgcttccagaatacagttactggtg

SEQ ID NO: 3080865 - DNA, 25 bp, Homo sapien
actgaaccttatcacaagtccactg

SEQ ID NO: 3080866 - DNA, 25 bp, Homo sapien
catctgatatgggacttcaaaacag

SEQ ID NO: 3080867 - DNA, 25 bp, Homo sapien
tttgcaataaagtgcccatagctgg

SEQ ID NO: 3080868 - DNA, 25 bp, Homo sapien
ctagatacaaaataggcccactgtt

SEQ ID NO: 3080869 - DNA, 25 bp, Homo sapien
acataagactcaacatgctggttct

SEQ ID NO: 3080870 - DNA, 25 bp, Homo sapien
gctggcattcaatgactgttgagaa

SEQ ID NO: 3080871 - DNA, 25 bp, Homo sapien
aacatacggtagtcatgaaggtaaa

SEQ ID NO: 3080872 - DNA, 25 bp, Homo sapien
ctaactctaaaggtgattcattgtg

SEQ ID NO: 3080873 - DNA, 25 bp, Homo sapien
cattgtggtctggtgacctataaac

SEQ ID NO: 3080874 - DNA, 25 bp, Homo sapien
cagttcctacattcaggtccaaggt

SEQ ID NO: 3080875 - DNA, 25 bp, Homo sapien
tcccaactgtttttatcgtctacta

SEQ ID NO: 3080876 - DNA, 25 bp, Homo sapien
caactgtttttatcgtctactacac

SEQ ID NO: 3080877 - DNA, 25 bp, Homo sapien
ttttatcgtctactacactagtcat

SEQ ID NO: 3080878 - DNA, 25 bp, Homo sapien
ctgtttttatcgtctactacactag

SEQ ID NO: 3080879 - DNA, 25 bp, Homo sapien
catccttcagtcgttttagctctac

SEQ ID NO: 3080880 - DNA, 25 bp, Homo sapien
ctggcccatgtaatatgagagtcca

SEQ ID NO: 3080881 - DNA, 25 bp, Homo sapien
catgtaatatgagagtccacaggtc

SEQ ID NO: 3080882 - DNA, 25 bp, Homo sapien
ccttcagtcgttttagctctacatc

SEQ ID NO: 3080883 - DNA, 25 bp, Homo sapien
tctatccatatggagaacagtcttc

SEQ ID NO: 3080884 - DNA, 25 bp, Homo sapien
tataggcatacaaattttaggcagg

SEQ ID NO: 3080885 - DNA, 25 bp, Homo sapien
tatattatttgtactccttgagcac

SEQ ID NO: 3080886 - DNA, 25 bp, Homo sapien
caaattagcaggtaagctaaatgcc

SEQ ID NO: 3080887 - DNA, 25 bp, Homo sapien
caaaatgaacaaggatatgctggtc

SEQ ID NO: 3080888 - DNA, 25 bp, Homo sapien
tagcaaacgataaacctagagaggc

SEQ ID NO: 3080889 - DNA, 25 bp, Homo sapien
gtatcttactacagcaaagcacgga

SEQ ID NO: 3080890 - DNA, 25 bp, Homo sapien
gagactctgtcctgtcataaggaag

SEQ ID NO: 3080891 - DNA, 25 bp, Homo sapien
aaaggctcagaaatggatggtacca

SEQ ID NO: 3080892 - DNA, 25 bp, Homo sapien
gagacacgagaacctaagagacagt

SEQ ID NO: 3080893 - DNA, 25 bp, Homo sapien
gaagcaaacgaatttaccctgtcca

SEQ ID NO: 3080894 - DNA, 25 bp, Homo sapien
cagcacaaggcaatcaggcaccaat

SEQ ID NO: 3080895 - DNA, 25 bp, Homo sapien
tattaaatgtctacttatctcagtc

SEQ ID NO: 3080896 - DNA, 25 bp, Homo sapien
tcaagatgagtaatacatagtctcc

SEQ ID NO: 3080897 - DNA, 25 bp, Homo sapien
gaaatattaaactggaggtattcaa

SEQ ID NO: 3080898 - DNA, 25 bp, Homo sapien
tcaatggagttccaaaatagggaat

SEQ ID NO: 3080899 - DNA, 25 bp, Homo sapien
cacctggcacttagatatacaatgg

SEQ ID NO: 3080900 - DNA, 25 bp, Homo sapien
catacagtaaggatggcgaggtcaa

SEQ ID NO: 3080901 - DNA, 25 bp, Homo sapien
gtttcccttgcaactagaaatggcc

SEQ ID NO: 3080902 - DNA, 25 bp, Homo sapien
gcctagatgaccatggaactgccat

SEQ ID NO: 3080903 - DNA, 25 bp, Homo sapien
tgtctacaccagtagttattaacct

SEQ ID NO: 3080904 - DNA, 25 bp, Homo sapien
gtgtctacaccagtagttattaacc

SEQ ID NO: 3080905 - DNA, 25 bp, Homo sapien
cgtgtctacaccagtagttattaac

SEQ ID NO: 3080906 - DNA, 25 bp, Homo sapien
tgattctcgtgcactattattcccc

SEQ ID NO: 3080907 - DNA, 25 bp, Homo sapien
aagtaatcagtgatgattctcgtgc

SEQ ID NO: 3080908 - DNA, 25 bp, Homo sapien
tcagcttccctaaagtaatcagtga

SEQ ID NO: 3080909 - DNA, 25 bp, Homo sapien
agacaaggttacaagttttcagctt

SEQ ID NO: 3080910 - DNA, 25 bp, Homo sapien
aattccaaccttcccgcagaaagag

SEQ ID NO: 3080911 - DNA, 25 bp, Homo sapien
taacaggaggctctgcttaggttac

SEQ ID NO: 3080912 - DNA, 25 bp, Homo sapien
cctgtccttcaaagagccatataag

SEQ ID NO: 3080913 - DNA, 25 bp, Homo sapien
tgtaacagccatttacacggcactt

SEQ ID NO: 3080914 - DNA, 25 bp, Homo sapien
tcccacagtgttgggttacaagcgt

SEQ ID NO: 3080915 - DNA, 25 bp, Homo sapien
gaccaagtcttgctttgacacccag

SEQ ID NO: 3080916 - DNA, 25 bp, Homo sapien
atgcccagccagcttactgtaactt

SEQ ID NO: 3080917 - DNA, 25 bp, Homo sapien
ccatgcccagccagcttactgtaac

SEQ ID NO: 3080918 - DNA, 25 bp, Homo sapien
gaaggacttgcctaaggctgttaca

SEQ ID NO: 3080919 - DNA, 25 bp, Homo sapien
aaggacttgcctaaggctgttacag

SEQ ID NO: 3080920 - DNA, 25 bp, Homo sapien
aggacttgcctaaggctgttacagt

SEQ ID NO: 3080921 - DNA, 25 bp, Homo sapien
gacaacatcgaataaaaacgcacaa

SEQ ID NO: 3080922 - DNA, 25 bp, Homo sapien
tggctgacaacatcgaataaaaacg

SEQ ID NO: 3080923 - DNA, 25 bp, Homo sapien
ttctgaagaggtattagatgaatgg

SEQ ID NO: 3080924 - DNA, 25 bp, Homo sapien
atgaatggctgacaacatcgaataa

SEQ ID NO: 3080925 - DNA, 25 bp, Homo sapien
gcaaatgtcaaagtagcactggcat

SEQ ID NO: 3080926 - DNA, 25 bp, Homo sapien
caagaggcactagtgaagaacagac

SEQ ID NO: 3080927 - DNA, 25 bp, Homo sapien
tgtgtagtgcagtcctctgagacct

SEQ ID NO: 3080928 - DNA, 25 bp, Homo sapien
aaagtttagcttatctctgccagga

SEQ ID NO: 3080929 - DNA, 25 bp, Homo sapien
aaggctcaccttcaaaaccaggtgg

SEQ ID NO: 3080930 - DNA, 25 bp, Homo sapien
accaggtgggcacccaaattataat

SEQ ID NO: 3080931 - DNA, 25 bp, Homo sapien
gcctgggtggcataaaaaagtcatt

SEQ ID NO: 3080932 - DNA, 25 bp, Homo sapien
gcttgtccttgcatataaggctgtg

SEQ ID NO: 3080933 - DNA, 25 bp, Homo sapien
tggtttgaagtcagtcgtttcagca

SEQ ID NO: 3080934 - DNA, 25 bp, Homo sapien
cttcagtggaaggtacgtatgccct

SEQ ID NO: 3080935 - DNA, 25 bp, Homo sapien
tggaaggtacgtatgccctatggtt

SEQ ID NO: 3080936 - DNA, 25 bp, Homo sapien
acgtatgccctatggtttgaagtca

SEQ ID NO: 3080937 - DNA, 25 bp, Homo sapien
gataggagattaagcaggctagagc

SEQ ID NO: 3080938 - DNA, 25 bp, Homo sapien
tcaatgccaggtacatcactagtat

SEQ ID NO: 3080939 - DNA, 25 bp, Homo sapien
cgtaccatcttagtttgataggaga

SEQ ID NO: 3080940 - DNA, 25 bp, Homo sapien
tgtaaatcagtttgactaatgtcct

SEQ ID NO: 3080941 - DNA, 25 bp, Homo sapien
caattattatactgttccacaaggg

SEQ ID NO: 3080942 - DNA, 25 bp, Homo sapien
taattgaggccagacctgtcaggct

SEQ ID NO: 3080943 - DNA, 25 bp, Homo sapien
gcatcccggaaatgactagcctact

SEQ ID NO: 3080944 - DNA, 25 bp, Homo sapien
cataaaaggcatatctgtgttattc

SEQ ID NO: 3080945 - DNA, 25 bp, Homo sapien
tcagccgctcaaacggtgaagggtg

SEQ ID NO: 3080946 - DNA, 25 bp, Homo sapien
tggcagaagcggatggccacagccc

SEQ ID NO: 3080947 - DNA, 25 bp, Homo sapien
gcagggactccccagatacgaaggg

SEQ ID NO: 3080948 - DNA, 25 bp, Homo sapien
ggcttccagtagcagagaggagcgc

SEQ ID NO: 3080949 - DNA, 25 bp, Homo sapien
gaatccgatccgtgactccttggca

SEQ ID NO: 3080950 - DNA, 25 bp, Homo sapien
gaggaatccgatccgtgactccttg

SEQ ID NO: 3080951 - DNA, 25 bp, Homo sapien
tagctgaggaatccgatccgtgact

SEQ ID NO: 3080952 - DNA, 25 bp, Homo sapien
tcgtagctgaggaatccgatccgtg

SEQ ID NO: 3080953 - DNA, 25 bp, Homo sapien
ggcggggggtcggagcctgatctcg

SEQ ID NO: 3080954 - DNA, 25 bp, Homo sapien
gggggtcggagcctgatctcgcccc

SEQ ID NO: 3080955 - DNA, 25 bp, Homo sapien
ggtcggagcctgatctcgcccccac

SEQ ID NO: 3080956 - DNA, 25 bp, Homo sapien
cggggggtcggagcctgatctcgcc

SEQ ID NO: 3080957 - DNA, 25 bp, Homo sapien
catgccggatcacgtgactcttccg

SEQ ID NO: 3080958 - DNA, 25 bp, Homo sapien
caccgcctccatgccggatcacgtg

SEQ ID NO: 3080959 - DNA, 25 bp, Homo sapien
taacaagtgcggcttctgccccggc

SEQ ID NO: 3080960 - DNA, 25 bp, Homo sapien
acaagtgcggcttctgccccggcgg

SEQ ID NO: 3080961 - DNA, 25 bp, Homo sapien
ggacgcatctccgcacgtaacgcat

SEQ ID NO: 3080962 - DNA, 25 bp, Homo sapien
cgcacgtaacgcatcgtcccatctt

SEQ ID NO: 3080963 - DNA, 25 bp, Homo sapien
gagggggacgcatctccgcacgtaa

SEQ ID NO: 3080964 - DNA, 25 bp, Homo sapien
gcatctccgcacgtaacgcatcgtc

SEQ ID NO: 3080965 - DNA, 25 bp, Homo sapien
gatgagacaccatgcatagtcaccc

SEQ ID NO: 3080966 - DNA, 25 bp, Homo sapien
cattagagtcttaaaaggacctagg

SEQ ID NO: 3080967 - DNA, 25 bp, Homo sapien
gatgggcctgcctacgtataggtat

SEQ ID NO: 3080968 - DNA, 25 bp, Homo sapien
cttttgctgaaatactggtctgctg

SEQ ID NO: 3080969 - DNA, 25 bp, Homo sapien
gacgcacagattggagttcatggaa

SEQ ID NO: 3080970 - DNA, 25 bp, Homo sapien
caattggcagtgcagaactgacgtc

SEQ ID NO: 3080971 - DNA, 25 bp, Homo sapien
tctgccatacacacctaggaagcta

SEQ ID NO: 3080972 - DNA, 25 bp, Homo sapien
tgtggcaatctcactgaggacgcac

SEQ ID NO: 3080973 - DNA, 25 bp, Homo sapien
gctggcatagaggacaagttaaaaa

SEQ ID NO: 3080974 - DNA, 25 bp, Homo sapien
acaagacgtttgctgaacatgctgg

SEQ ID NO: 3080975 - DNA, 25 bp, Homo sapien
gctacccctacttgaagccgctatg

SEQ ID NO: 3080976 - DNA, 25 bp, Homo sapien
ccgcactgtcgcgaaggcaggcgaa

SEQ ID NO: 3080977 - DNA, 25 bp, Homo sapien
tctgacagtattcttgggagaaggg

SEQ ID NO: 3080978 - DNA, 25 bp, Homo sapien
gcatctgacagtattcttgggagaa

SEQ ID NO: 3080979 - DNA, 25 bp, Homo sapien
gatcagcatctgacagtattcttgg

SEQ ID NO: 3080980 - DNA, 25 bp, Homo sapien
caggatcagcatctgacagtattct

SEQ ID NO: 3080981 - DNA, 25 bp, Homo sapien
ttttttttcactagttgtcaaatga

SEQ ID NO: 3080982 - DNA, 25 bp, Homo sapien
gggtggcggccatcaacattacaac

SEQ ID NO: 3080983 - DNA, 25 bp, Homo sapien
catcaacattacaacccacagagac

SEQ ID NO: 3080984 - DNA, 25 bp, Homo sapien
ttttttcactagttgtcaaatgatc

SEQ ID NO: 3080985 - DNA, 25 bp, Homo sapien
gtccccaggatctctttaatggttc

SEQ ID NO: 3080986 - DNA, 25 bp, Homo sapien
tgggcagtccccaggatctctttaa

SEQ ID NO: 3080987 - DNA, 25 bp, Homo sapien
tctttaatggttccagagagttctc

SEQ ID NO: 3080988 - DNA, 25 bp, Homo sapien
ctttaatggttccagagagttctct

SEQ ID NO: 3080989 - DNA, 25 bp, Homo sapien
tcggtgctccatctgtcgagcaagg

SEQ ID NO: 3080990 - DNA, 25 bp, Homo sapien
tgtctctggtggttccttgagggct

SEQ ID NO: 3080991 - DNA, 25 bp, Homo sapien
ctgtctctggtggttccttgagggc

SEQ ID NO: 3080992 - DNA, 25 bp, Homo sapien
cttgagggctttgatgatcagggca

SEQ ID NO: 3080993 - DNA, 25 bp, Homo sapien
tgatcagggcagaggcagaaggcac

SEQ ID NO: 3080994 - DNA, 25 bp, Homo sapien
agaagtggcatctccggtgcacctc

SEQ ID NO: 3080995 - DNA, 25 bp, Homo sapien
cagaagtggcatctccggtgcacct

SEQ ID NO: 3080996 - DNA, 25 bp, Homo sapien
gcagaagtggcatctccggtgcacc

SEQ ID NO: 3080997 - DNA, 25 bp, Homo sapien
gaagtggcatctccggtgcacctca

SEQ ID NO: 3080998 - DNA, 25 bp, Homo sapien
cagatgaacccggattcgggacaac

SEQ ID NO: 3080999 - DNA, 25 bp, Homo sapien
ttcgggacaaccgaagaaagttgca

SEQ ID NO: 3081000 - DNA, 25 bp, Homo sapien
aggcggctggtgtcagatgaacccg

SEQ ID NO: 3081001 - DNA, 25 bp, Homo sapien
tggtgtcagatgaacccggattcgg

SEQ ID NO: 3081002 - DNA, 25 bp, Homo sapien
tcggagtcattctattagtgacgta

SEQ ID NO: 3081003 - DNA, 25 bp, Homo sapien
ttcggagtcattctattagtgacgt

SEQ ID NO: 3081004 - DNA, 25 bp, Homo sapien
cggagtcattctattagtgacgtat

SEQ ID NO: 3081005 - DNA, 25 bp, Homo sapien
ttcattttctgcagggctattccct

SEQ ID NO: 3081006 - DNA, 25 bp, Homo sapien
tttctgcagggctattccctccttg

SEQ ID NO: 3081007 - DNA, 25 bp, Homo sapien
cttgggctccggctttggaaaagca

SEQ ID NO: 3081008 - DNA, 25 bp, Homo sapien
gcttgggctccggctttggaaaagc

SEQ ID NO: 3081009 - DNA, 25 bp, Homo sapien
tcagagaaggatgagaccaaaggcc

SEQ ID NO: 3081010 - DNA, 25 bp, Homo sapien
gttacacaaacggtacctgcaatgg

SEQ ID NO: 3081011 - DNA, 25 bp, Homo sapien
aactggagtagcaccgaactttagg

SEQ ID NO: 3081012 - DNA, 25 bp, Homo sapien
gacacatgcgagtgctgacggagct

SEQ ID NO: 3081013 - DNA, 25 bp, Homo sapien
tgtactcaatgtggcagacagctta

SEQ ID NO: 3081014 - DNA, 25 bp, Homo sapien
gaagcatcagatgggctactacagt

SEQ ID NO: 3081015 - DNA, 25 bp, Homo sapien
catcttagggtgtgggtttgcttca

SEQ ID NO: 3081016 - DNA, 25 bp, Homo sapien
tatataggcccatgaggatagagct

SEQ ID NO: 3081017 - DNA, 25 bp, Homo sapien
tacacatgcggtacatgctgaatat

SEQ ID NO: 3081018 - DNA, 25 bp, Homo sapien
tgaatatatgcttattcctacagac

SEQ ID NO: 3081019 - DNA, 25 bp, Homo sapien
tcctacagacattctgcaagatagg

SEQ ID NO: 3081020 - DNA, 25 bp, Homo sapien
gaaaatgtgggccagactacttaca

SEQ ID NO: 3081021 - DNA, 25 bp, Homo sapien
aaaacaacatggttttgatttcaca

SEQ ID NO: 3081022 - DNA, 25 bp, Homo sapien
gatttcacagtatgaattccctgga

SEQ ID NO: 3081023 - DNA, 25 bp, Homo sapien
gactggaccagtgtttcaatgcaaa

SEQ ID NO: 3081024 - DNA, 25 bp, Homo sapien
ggaccagtgtttcaatgcaaattcc

SEQ ID NO: 3081025 - DNA, 25 bp, Homo sapien
ggtccctcgacattctgagaaatca

SEQ ID NO: 3081026 - DNA, 25 bp, Homo sapien
cactttctcgtaatttccaatggag

SEQ ID NO: 3081027 - DNA, 25 bp, Homo sapien
ccagttagacagaacattgtgatat

SEQ ID NO: 3081028 - DNA, 25 bp, Homo sapien
gaatattgccgatctcgcaaccggt

SEQ ID NO: 3081029 - DNA, 25 bp, Homo sapien
acttcataatcttcttgaccaagaa

SEQ ID NO: 3081030 - DNA, 25 bp, Homo sapien
aatctgaattgctttgatgtgcatt

SEQ ID NO: 3081031 - DNA, 25 bp, Homo sapien
gatcgcaaataaagtttctcagcat

SEQ ID NO: 3081032 - DNA, 25 bp, Homo sapien
agatgtcccactgaaagggctactt

SEQ ID NO: 3081033 - DNA, 25 bp, Homo sapien
aatacattgaagttagtcatattta

SEQ ID NO: 3081034 - DNA, 25 bp, Homo sapien
cattgaagttagtcatatttattgc

SEQ ID NO: 3081035 - DNA, 25 bp, Homo sapien
cattctgctaagagctatacttagt

SEQ ID NO: 3081036 - DNA, 25 bp, Homo sapien
tcttatctcaagtactactttcata

SEQ ID NO: 3081037 - DNA, 25 bp, Homo sapien
gacaggtgcaaatcatgagcttctt

SEQ ID NO: 3081038 - DNA, 25 bp, Homo sapien
aagtcttccaaggtttccatagtgt

SEQ ID NO: 3081039 - DNA, 25 bp, Homo sapien
tccatagtgttttgcagtctgtaca

SEQ ID NO: 3081040 - DNA, 25 bp, Homo sapien
ttgaagcagcctctgttcagtttcc

SEQ ID NO: 3081041 - DNA, 25 bp, Homo sapien
tcatgaaactgtgtcaaggagtacc

SEQ ID NO: 3081042 - DNA, 25 bp, Homo sapien
gatttcctcctactcatctgaccaa

SEQ ID NO: 3081043 - DNA, 25 bp, Homo sapien
gactgctatactttgctgatgtgaa

SEQ ID NO: 3081044 - DNA, 25 bp, Homo sapien
caaattaaacggaagcacaaggcaa

SEQ ID NO: 3081045 - DNA, 25 bp, Homo sapien
ggtaggatgtgggtaatgataccaa

SEQ ID NO: 3081046 - DNA, 25 bp, Homo sapien
gatcttcaggtaggatgtgggtaat

SEQ ID NO: 3081047 - DNA, 25 bp, Homo sapien
ggatgtgggtaatgataccaatagc

SEQ ID NO: 3081048 - DNA, 25 bp, Homo sapien
tcaggtaggatgtgggtaatgatac

SEQ ID NO: 3081049 - DNA, 25 bp, Homo sapien
taggcattctgataaagctccagga

SEQ ID NO: 3081050 - DNA, 25 bp, Homo sapien
ggtgtgaatatgcttcgctgcatcc

SEQ ID NO: 3081051 - DNA, 25 bp, Homo sapien
ggcatgcaccaaaacgtccatctag

SEQ ID NO: 3081052 - DNA, 25 bp, Homo sapien
cccggccgggttgcagtcttgactt

SEQ ID NO: 3081053 - DNA, 25 bp, Homo sapien
aagagtaggccaaatcttcatgagc

SEQ ID NO: 3081054 - DNA, 25 bp, Homo sapien
tttgccaccaaacactgactgtcta

SEQ ID NO: 3081055 - DNA, 25 bp, Homo sapien
ctgactgtctaatgtcaagggctgc

SEQ ID NO: 3081056 - DNA, 25 bp, Homo sapien
catgagctgttgctacgtggatatt

SEQ ID NO: 3081057 - DNA, 25 bp, Homo sapien
tgatgcaacctatattggtgggcgg

SEQ ID NO: 3081058 - DNA, 25 bp, Homo sapien
agtatgccttgtctacagcaatggc

SEQ ID NO: 3081059 - DNA, 25 bp, Homo sapien
tcaaaagtgaaccttaggccaggcg

SEQ ID NO: 3081060 - DNA, 25 bp, Homo sapien
tggaaaactactcccacatatgagc

SEQ ID NO: 3081061 - DNA, 25 bp, Homo sapien
gataaattgcaacagactgacagat

SEQ ID NO: 3081062 - DNA, 25 bp, Homo sapien
gcagtgtatcagaatattttgggtg

SEQ ID NO: 3081063 - DNA, 25 bp, Homo sapien
agtagaacccataatctagcagtgt

SEQ ID NO: 3081064 - DNA, 25 bp, Homo sapien
tgggtgtttggatccaaaatgatcc

SEQ ID NO: 3081065 - DNA, 25 bp, Homo sapien
aaattattaggatataaagtataga

SEQ ID NO: 3081066 - DNA, 25 bp, Homo sapien
ttattaggatataaagtatagagac

SEQ ID NO: 3081067 - DNA, 25 bp, Homo sapien
attattaggatataaagtatagaga

SEQ ID NO: 3081068 - DNA, 25 bp, Homo sapien
aattattaggatataaagtatagag

SEQ ID NO: 3081069 - DNA, 25 bp, Homo sapien
taattaactgttctgccttcttaaa

SEQ ID NO: 3081070 - DNA, 25 bp, Homo sapien
cgtgccaaatacactgcatgtttaa

SEQ ID NO: 3081071 - DNA, 25 bp, Homo sapien
taaattcacgttttactacacaagc

SEQ ID NO: 3081072 - DNA, 25 bp, Homo sapien
tcttaaattcacgttttactacaca

SEQ ID NO: 3081073 - DNA, 25 bp, Homo sapien
tctcaaacagttcattagtgtgcta

SEQ ID NO: 3081074 - DNA, 25 bp, Homo sapien
taaacagatctgtatataagctggg

SEQ ID NO: 3081075 - DNA, 25 bp, Homo sapien
cagtcagtcctagtacaaatctgtc

SEQ ID NO: 3081076 - DNA, 25 bp, Homo sapien
taaggtccttatatcccagtcctgg

SEQ ID NO: 3081077 - DNA, 25 bp, Homo sapien
tgtcttaagacatccaccacaactt

SEQ ID NO: 3081078 - DNA, 25 bp, Homo sapien
taagacatccaccacaactttcact

SEQ ID NO: 3081079 - DNA, 25 bp, Homo sapien
cttagaagcttgtcttaagacatcc

SEQ ID NO: 3081080 - DNA, 25 bp, Homo sapien
caactttcactggtaagcctgctgt

SEQ ID NO: 3081081 - DNA, 25 bp, Homo sapien
aaaagtccaagagccggcagtactt

SEQ ID NO: 3081082 - DNA, 25 bp, Homo sapien
gtccaagagccggcagtacttctcc

SEQ ID NO: 3081083 - DNA, 25 bp, Homo sapien
aaacaaagacaagtgtggccatgtg

SEQ ID NO: 3081084 - DNA, 25 bp, Homo sapien
acaaagacaagtgtggccatgtgat

SEQ ID NO: 3081085 - DNA, 25 bp, Homo sapien
cagtttccatttcgcacatgaagca

SEQ ID NO: 3081086 - DNA, 25 bp, Homo sapien
acacagttctccatagagtgcagct

SEQ ID NO: 3081087 - DNA, 25 bp, Homo sapien
catagtgactttttgcaaataggag

SEQ ID NO: 3081088 - DNA, 25 bp, Homo sapien
cagctttatttgcttgctggccatg

SEQ ID NO: 3081089 - DNA, 25 bp, Homo sapien
tcatttccacaatgctaagaatttc

SEQ ID NO: 3081090 - DNA, 25 bp, Homo sapien
catttccacaatgctaagaatttcc

SEQ ID NO: 3081091 - DNA, 25 bp, Homo sapien
gacctcagatgatctctctgcctca

SEQ ID NO: 3081092 - DNA, 25 bp, Homo sapien
tcagatgatctctctgcctcaaact

SEQ ID NO: 3081093 - DNA, 25 bp, Homo sapien
tgacctcagatgatctctctgcctc

SEQ ID NO: 3081094 - DNA, 25 bp, Homo sapien
cctcagatgatctctctgcctcaaa

SEQ ID NO: 3081095 - DNA, 25 bp, Homo sapien
tggtagtaatgttccaagtcccatt

SEQ ID NO: 3081096 - DNA, 25 bp, Homo sapien
tcactagtgaagtcttcagtcctgg

SEQ ID NO: 3081097 - DNA, 25 bp, Homo sapien
tgttcataggattcaccttaaatcc

SEQ ID NO: 3081098 - DNA, 25 bp, Homo sapien
gttataggtctcgtaagattttcta

SEQ ID NO: 3081099 - DNA, 25 bp, Homo sapien
atcccatatgggataatgtagtctc

SEQ ID NO: 3081100 - DNA, 25 bp, Homo sapien
cccaaatcccatatgggataatgta

SEQ ID NO: 3081101 - DNA, 25 bp, Homo sapien
tatgggataatgtagtctcctattc

SEQ ID NO: 3081102 - DNA, 25 bp, Homo sapien
ccatatgggataatgtagtctccta

SEQ ID NO: 3081103 - DNA, 25 bp, Homo sapien
tctactgcacgaaaccaatgaagca

SEQ ID NO: 3081104 - DNA, 25 bp, Homo sapien
tctcatcgtgtagagtacacaactg

SEQ ID NO: 3081105 - DNA, 25 bp, Homo sapien
cagcctgcatctgaaagaaagccac

SEQ ID NO: 3081106 - DNA, 25 bp, Homo sapien
tgaagcatctcatcgtgtagagtac

SEQ ID NO: 3081107 - DNA, 25 bp, Homo sapien
tagccatccaggttgctcctcctag

SEQ ID NO: 3081108 - DNA, 25 bp, Homo sapien
tgctagctggctccgtttggctcag

SEQ ID NO: 3081109 - DNA, 25 bp, Homo sapien
tgactggaagagcaatggacactct

SEQ ID NO: 3081110 - DNA, 25 bp, Homo sapien
tttggctcagcgaataggaggcact

SEQ ID NO: 3081111 - DNA, 25 bp, Homo sapien
ttggttccccaagccataggtatgg

SEQ ID NO: 3081112 - DNA, 25 bp, Homo sapien
gaggcaccagtaacagcctagcagt

SEQ ID NO: 3081113 - DNA, 25 bp, Homo sapien
tatggtagccaattctcacagctgc

SEQ ID NO: 3081114 - DNA, 25 bp, Homo sapien
gcctagcagtatcccagcttcatgg

SEQ ID NO: 3081115 - DNA, 25 bp, Homo sapien
gtgtcatgtagttctcgcgccatgg

SEQ ID NO: 3081116 - DNA, 25 bp, Homo sapien
tgaagcatgtgcatgtgtcatgtag

SEQ ID NO: 3081117 - DNA, 25 bp, Homo sapien
gagctgcaatcccttggaggagaaa

SEQ ID NO: 3081118 - DNA, 25 bp, Homo sapien
ttggagaagtctgttattaccaacc

SEQ ID NO: 3081119 - DNA, 25 bp, Homo sapien
gatttaattctgagtccatcacagg

SEQ ID NO: 3081120 - DNA, 25 bp, Homo sapien
agatttaattctgagtccatcacag

SEQ ID NO: 3081121 - DNA, 25 bp, Homo sapien
tctcataaccttcttacgtagactt

SEQ ID NO: 3081122 - DNA, 25 bp, Homo sapien
gggttaagtggttctgatgttcttc

SEQ ID NO: 3081123 - DNA, 25 bp, Homo sapien
gattctgctatataagagcaccgcc

SEQ ID NO: 3081124 - DNA, 25 bp, Homo sapien
gactgaagcaactttaacaccatga

SEQ ID NO: 3081125 - DNA, 25 bp, Homo sapien
ctttttcctttactgcagcatctga

SEQ ID NO: 3081126 - DNA, 25 bp, Homo sapien
tactgaatgagtaggccaagactga

SEQ ID NO: 3081127 - DNA, 25 bp, Homo sapien
ggatttggacttggtgaaagataac

SEQ ID NO: 3081128 - DNA, 25 bp, Homo sapien
cacaggccacatttcaaagttaccc

SEQ ID NO: 3081129 - DNA, 25 bp, Homo sapien
gagtcactgctttgggtaaaggaaa

SEQ ID NO: 3081130 - DNA, 25 bp, Homo sapien
taagagatgaaaaagaggtattcca

SEQ ID NO: 3081131 - DNA, 25 bp, Homo sapien
tcactgcccagttgacataagcgtc

SEQ ID NO: 3081132 - DNA, 25 bp, Homo sapien
cagtactttagcaaaaacttccaat

SEQ ID NO: 3081133 - DNA, 25 bp, Homo sapien
tgacataagcgtccctgttggtaaa

SEQ ID NO: 3081134 - DNA, 25 bp, Homo sapien
tatccaaagctctcagtactttagc

SEQ ID NO: 3081135 - DNA, 25 bp, Homo sapien
cagccccagatagtagctggtacta

SEQ ID NO: 3081136 - DNA, 25 bp, Homo sapien
actggtaacatgattctttgcctgg

SEQ ID NO: 3081137 - DNA, 25 bp, Homo sapien
ggtgccacttgggatcactacctct

SEQ ID NO: 3081138 - DNA, 25 bp, Homo sapien
tgttaaactttctcatgacacactg

SEQ ID NO: 3081139 - DNA, 25 bp, Homo sapien
cacagtctctactctggagtttata

SEQ ID NO: 3081140 - DNA, 25 bp, Homo sapien
tttggatggaactcagaacctcaga

SEQ ID NO: 3081141 - DNA, 25 bp, Homo sapien
cttaattactttggatggaactcag

SEQ ID NO: 3081142 - DNA, 25 bp, Homo sapien
ctctggagtttataattagggaatc

SEQ ID NO: 3081143 - DNA, 25 bp, Homo sapien
ctattccgtgggtgctataacaggt

SEQ ID NO: 3081144 - DNA, 25 bp, Homo sapien
tattccgtgggtgctataacaggtt

SEQ ID NO: 3081145 - DNA, 25 bp, Homo sapien
attccgtgggtgctataacaggttc

SEQ ID NO: 3081146 - DNA, 25 bp, Homo sapien
tgatgctgtgcagcgcctgaaaccc

SEQ ID NO: 3081147 - DNA, 25 bp, Homo sapien
tatttgctacagtaacctcatcagc

SEQ ID NO: 3081148 - DNA, 25 bp, Homo sapien
ctgaaacccagcgagctcggaaggt

SEQ ID NO: 3081149 - DNA, 25 bp, Homo sapien
ctcggaaggtgtccagaagaatttc

SEQ ID NO: 3081150 - DNA, 25 bp, Homo sapien
ccctggccttccaaagtgctgggat

SEQ ID NO: 3081151 - DNA, 25 bp, Homo sapien
caggcgatccacccaccctggcctt

SEQ ID NO: 3081152 - DNA, 25 bp, Homo sapien
ctaccatgcccagccgtgtgtgcgt

SEQ ID NO: 3081153 - DNA, 25 bp, Homo sapien
ggtgtatgtcgccatgcctagctta

SEQ ID NO: 3081154 - DNA, 25 bp, Homo sapien
gtatgtcgccatgcctagcttattt

SEQ ID NO: 3081155 - DNA, 25 bp, Homo sapien
tttttggttgagacaccattttgcc

SEQ ID NO: 3081156 - DNA, 25 bp, Homo sapien
atgaagcttgcccaatgcacagcca

SEQ ID NO: 3081157 - DNA, 25 bp, Homo sapien
taaagtttcagtcaacaaccgactg

SEQ ID NO: 3081158 - DNA, 25 bp, Homo sapien
caaaaagttcctattgcctagagac

SEQ ID NO: 3081159 - DNA, 25 bp, Homo sapien
gactgcatataaaaaggtggcccca

SEQ ID NO: 3081160 - DNA, 25 bp, Homo sapien
ggacacccctggtttagatacacaa

SEQ ID NO: 3081161 - DNA, 25 bp, Homo sapien
tgagacccaacagaaattcgttaac

SEQ ID NO: 3081162 - DNA, 25 bp, Homo sapien
cacatgactgtattgtgtagggttc

SEQ ID NO: 3081163 - DNA, 25 bp, Homo sapien
ctctgatgttcccacaagcatgaaa

SEQ ID NO: 3081164 - DNA, 25 bp, Homo sapien
tagttgtccacgacagcggagatgg

SEQ ID NO: 3081165 - DNA, 25 bp, Homo sapien
atggcggtgttatagagagtctctg

SEQ ID NO: 3081166 - DNA, 25 bp, Homo sapien
gggatccactctagttccacggccg

SEQ ID NO: 3081167 - DNA, 25 bp, Homo sapien
caaactggatgttctcgggcaagga

SEQ ID NO: 3081168 - DNA, 25 bp, Homo sapien
tcctccgcctcctcctcccgaaggc

SEQ ID NO: 3081169 - DNA, 25 bp, Homo sapien
tccttccctcctcctccgcctcctc

SEQ ID NO: 3081170 - DNA, 25 bp, Homo sapien
ctcctccgcctcctcctcccgaagg

SEQ ID NO: 3081171 - DNA, 25 bp, Homo sapien
cgcctcctccgcctcctcctcccga

SEQ ID NO: 3081172 - DNA, 25 bp, Homo sapien
ggcaaactgagggacggcggcagcg

SEQ ID NO: 3081173 - DNA, 25 bp, Homo sapien
tctgcggccccggaggattcggagg

SEQ ID NO: 3081174 - DNA, 25 bp, Homo sapien
cggacgcaggcccgagtaaaaagtg

SEQ ID NO: 3081175 - DNA, 25 bp, Homo sapien
tcacaatcccggttcgagaggaacc

SEQ ID NO: 3081176 - DNA, 25 bp, Homo sapien
aagtctagcccctgccgggaaatag

SEQ ID NO: 3081177 - DNA, 25 bp, Homo sapien
aaagcgctaatatgcatagacacag

SEQ ID NO: 3081178 - DNA, 25 bp, Homo sapien
tgcatcccttagaccagccagtttc

SEQ ID NO: 3081179 - DNA, 25 bp, Homo sapien
cacagccgtagatttgggagcaact

SEQ ID NO: 3081180 - DNA, 25 bp, Homo sapien
gttgtgatttagttcaacattgtta

SEQ ID NO: 3081181 - DNA, 25 bp, Homo sapien
gtgatttagttcaacattgttattc

SEQ ID NO: 3081182 - DNA, 25 bp, Homo sapien
gatttagttcaacattgttattcat

SEQ ID NO: 3081183 - DNA, 25 bp, Homo sapien
tgtgatttagttcaacattgttatt

SEQ ID NO: 3081184 - DNA, 25 bp, Homo sapien
tgtgacaggccggtggtcgttgttg

SEQ ID NO: 3081185 - DNA, 25 bp, Homo sapien
cgttgttggattgttggaatcaata

SEQ ID NO: 3081186 - DNA, 25 bp, Homo sapien
tggtcgttgttggattgttggaatc

SEQ ID NO: 3081187 - DNA, 25 bp, Homo sapien
caggccggtggtcgttgttggattg

SEQ ID NO: 3081188 - DNA, 25 bp, Homo sapien
tactttggtgtacaaacactagacc

SEQ ID NO: 3081189 - DNA, 25 bp, Homo sapien
tcagcaccctctactgaggaaaaaa

SEQ ID NO: 3081190 - DNA, 25 bp, Homo sapien
taggtgtaaggaccactgagtgtct

SEQ ID NO: 3081191 - DNA, 25 bp, Homo sapien
tagttaaaggcccaattctgatcct

SEQ ID NO: 3081192 - DNA, 25 bp, Homo sapien
tgttgctactgatttgagctcctta

SEQ ID NO: 3081193 - DNA, 25 bp, Homo sapien
gcctatctttttgatgcaagtggtt

SEQ ID NO: 3081194 - DNA, 25 bp, Homo sapien
tactgttcttcgtagtggctgctct

SEQ ID NO: 3081195 - DNA, 25 bp, Homo sapien
accagcatctgtagttgcctatctt

SEQ ID NO: 3081196 - DNA, 25 bp, Homo sapien
gaaatagggaacgcttcatgaattt

SEQ ID NO: 3081197 - DNA, 25 bp, Homo sapien
ggggccatgctaatcttctttgtat

SEQ ID NO: 3081198 - DNA, 25 bp, Homo sapien
catgaatttgtgtcatctttgcaca

SEQ ID NO: 3081199 - DNA, 25 bp, Homo sapien
gtatatgtgctgctgtagtaagcac

SEQ ID NO: 3081200 - DNA, 25 bp, Homo sapien
catggccaagggtgaattctaagga

SEQ ID NO: 3081201 - DNA, 25 bp, Homo sapien
gaatgtccaaggtgtagtcataccc

SEQ ID NO: 3081202 - DNA, 25 bp, Homo sapien
tacctgccctggttcgtagcaatgc

SEQ ID NO: 3081203 - DNA, 25 bp, Homo sapien
tcactggaggaggatccatggccaa

SEQ ID NO: 3081204 - DNA, 25 bp, Homo sapien
tagatttaaaaggtatgctcttatg

SEQ ID NO: 3081205 - DNA, 25 bp, Homo sapien
tgttctggcttgtctcttaacatta

SEQ ID NO: 3081206 - DNA, 25 bp, Homo sapien
tgtctcttaacattatgactgtaag

SEQ ID NO: 3081207 - DNA, 25 bp, Homo sapien
aaaggtatgctcttatgttctggct

SEQ ID NO: 3081208 - DNA, 25 bp, Homo sapien
tgaatgaccaccatcctcttggatc

SEQ ID NO: 3081209 - DNA, 25 bp, Homo sapien
tctctgaatgaccaccatcctcttg

SEQ ID NO: 3081210 - DNA, 25 bp, Homo sapien
atctctgaatgaccaccatcctctt

SEQ ID NO: 3081211 - DNA, 25 bp, Homo sapien
tctgaatgaccaccatcctcttgga

SEQ ID NO: 3081212 - DNA, 25 bp, Homo sapien
aactggccttctctgcccaccatag

SEQ ID NO: 3081213 - DNA, 25 bp, Homo sapien
cttcaggaaaactggccttctctgc

SEQ ID NO: 3081214 - DNA, 25 bp, Homo sapien
cttcttcaggaaaactggccttctc

SEQ ID NO: 3081215 - DNA, 25 bp, Homo sapien
aaactggccttctctgcccaccata

SEQ ID NO: 3081216 - DNA, 25 bp, Homo sapien
ggcatacaaggaatccttgctctta

SEQ ID NO: 3081217 - DNA, 25 bp, Homo sapien
caaggaatccttgctcttatactgt

SEQ ID NO: 3081218 - DNA, 25 bp, Homo sapien
cgatcatagcgcctctttccctggg

SEQ ID NO: 3081219 - DNA, 25 bp, Homo sapien
cttgctcttatactgtgtcactttg

SEQ ID NO: 3081220 - DNA, 25 bp, Homo sapien
tgtaaacaatcaagaactcactacc

SEQ ID NO: 3081221 - DNA, 25 bp, Homo sapien
ctgtaaacaatcaagaactcactac

SEQ ID NO: 3081222 - DNA, 25 bp, Homo sapien
actgtaaacaatcaagaactcacta

SEQ ID NO: 3081223 - DNA, 25 bp, Homo sapien
tccataggcagcaaagtagatttat

SEQ ID NO: 3081224 - DNA, 25 bp, Homo sapien
attatctccataggcagcaaagtag

SEQ ID NO: 3081225 - DNA, 25 bp, Homo sapien
tcagttgtgtttgcgagttctgacc

SEQ ID NO: 3081226 - DNA, 25 bp, Homo sapien
cgagttctgaccgatattatctcca

SEQ ID NO: 3081227 - DNA, 25 bp, Homo sapien
tgattatgctctcatctgttgatgg

SEQ ID NO: 3081228 - DNA, 25 bp, Homo sapien
cattgtattcaagtccgtatagaca

SEQ ID NO: 3081229 - DNA, 25 bp, Homo sapien
tacaagtggtgtatgaaatttccag

SEQ ID NO: 3081230 - DNA, 25 bp, Homo sapien
cctacaagtagaatggttagatcac

SEQ ID NO: 3081231 - DNA, 25 bp, Homo sapien
gacattgtaacgaggcttgaggaag

SEQ ID NO: 3081232 - DNA, 25 bp, Homo sapien
aatgttaatagatcaacttatttgc

SEQ ID NO: 3081233 - DNA, 25 bp, Homo sapien
ccaaatgttaatagatcaacttatt

SEQ ID NO: 3081234 - DNA, 25 bp, Homo sapien
gttaatagatcaacttatttgcttt

SEQ ID NO: 3081235 - DNA, 25 bp, Homo sapien
gccccaaatgttaatagatcaactt

SEQ ID NO: 3081236 - DNA, 25 bp, Homo sapien
tgtcattacctaaaggagtatcatt

SEQ ID NO: 3081237 - DNA, 25 bp, Homo sapien
acctaaaggagtatcatttcatcat

SEQ ID NO: 3081238 - DNA, 25 bp, Homo sapien
cattacctaaaggagtatcatttca

SEQ ID NO: 3081239 - DNA, 25 bp, Homo sapien
actgtcattacctaaaggagtatca

SEQ ID NO: 3081240 - DNA, 25 bp, Homo sapien
tttcacccagcaaatcgatgggcgg

SEQ ID NO: 3081241 - DNA, 25 bp, Homo sapien
cggaacatccaggtcatggtttgca

SEQ ID NO: 3081242 - DNA, 25 bp, Homo sapien
tgtggctgctatcttcggaacatcc

SEQ ID NO: 3081243 - DNA, 25 bp, Homo sapien
taagcaaagttaaacctcctccaca

SEQ ID NO: 3081244 - DNA, 25 bp, Homo sapien
atctcacgcgcagcaggttccttac

SEQ ID NO: 3081245 - DNA, 25 bp, Homo sapien
tcctttatgctaacactggcagtca

SEQ ID NO: 3081246 - DNA, 25 bp, Homo sapien
tttacttggtaatgggatctcacgc

SEQ ID NO: 3081247 - DNA, 25 bp, Homo sapien
cagacatgagccctttctcttgtta

SEQ ID NO: 3081248 - DNA, 25 bp, Homo sapien
cctactatgtgtgaggcagttctga

SEQ ID NO: 3081249 - DNA, 25 bp, Homo sapien
tagactttgctctcaagttatgaaa

SEQ ID NO: 3081250 - DNA, 25 bp, Homo sapien
gtcagtggagggttataaattgaac

SEQ ID NO: 3081251 - DNA, 25 bp, Homo sapien
taatcaatagttggcagtcttgctc

SEQ ID NO: 3081252 - DNA, 25 bp, Homo sapien
tccatctcttcgcatagatcttcag

SEQ ID NO: 3081253 - DNA, 25 bp, Homo sapien
gacctgtacaatagagttcattgag

SEQ ID NO: 3081254 - DNA, 25 bp, Homo sapien
cttcagacctgtacaatagagttca

SEQ ID NO: 3081255 - DNA, 25 bp, Homo sapien
cgcatagatcttcagacctgtacaa

SEQ ID NO: 3081256 - DNA, 25 bp, Homo sapien
ccatcactacggttaattgctaata

SEQ ID NO: 3081257 - DNA, 25 bp, Homo sapien
gcaggagcttgtgggttgatgtggc

SEQ ID NO: 3081258 - DNA, 25 bp, Homo sapien
taatgggttgatattggcaggagct

SEQ ID NO: 3081259 - DNA, 25 bp, Homo sapien
tgatgtggcatcacttccatcacta

SEQ ID NO: 3081260 - DNA, 25 bp, Homo sapien
ttaggaggaatgctacaactgtctg

SEQ ID NO: 3081261 - DNA, 25 bp, Homo sapien
atttaggaggaatgctacaactgtc

SEQ ID NO: 3081262 - DNA, 25 bp, Homo sapien
ctgggaatttaggaggaatgctaca

SEQ ID NO: 3081263 - DNA, 25 bp, Homo sapien
gaatttaggaggaatgctacaactg

SEQ ID NO: 3081264 - DNA, 25 bp, Homo sapien
tcataggataggagacttttggcca

SEQ ID NO: 3081265 - DNA, 25 bp, Homo sapien
cagtaaccgaggcataaggttggtg

SEQ ID NO: 3081266 - DNA, 25 bp, Homo sapien
ttttggccatatgattctgtggaac

SEQ ID NO: 3081267 - DNA, 25 bp, Homo sapien
tgaaagtaaccagcccagtaaccga

SEQ ID NO: 3081268 - DNA, 25 bp, Homo sapien
atgtgaagcttccttcaatgtctgt

SEQ ID NO: 3081269 - DNA, 25 bp, Homo sapien
gaagcttccttcaatgtctgtaacc

SEQ ID NO: 3081270 - DNA, 25 bp, Homo sapien
gcttccttcaatgtctgtaaccttg

SEQ ID NO: 3081271 - DNA, 25 bp, Homo sapien
ccttcaatgtctgtaaccttgtgtt

SEQ ID NO: 3081272 - DNA, 25 bp, Homo sapien
gaaacgttagacgtacatagtacac

SEQ ID NO: 3081273 - DNA, 25 bp, Homo sapien
gcccggccaccagacctaaatgtat

SEQ ID NO: 3081274 - DNA, 25 bp, Homo sapien
tctgcaggtcaagaaatggttgttc

SEQ ID NO: 3081275 - DNA, 25 bp, Homo sapien
tattccacaccctagccaagaagag

SEQ ID NO: 3081276 - DNA, 25 bp, Homo sapien
aaaagaagaagatccgcacgtcacc

SEQ ID NO: 3081277 - DNA, 25 bp, Homo sapien
cagccaaatcatgcacttcaagatg

SEQ ID NO: 3081278 - DNA, 25 bp, Homo sapien
gcagttcatacttggcatttcaggc

SEQ ID NO: 3081279 - DNA, 25 bp, Homo sapien
tgggtagtcctacatagcagtgatc

SEQ ID NO: 3081280 - DNA, 25 bp, Homo sapien
taatcagtattttcaccttccggta

SEQ ID NO: 3081281 - DNA, 25 bp, Homo sapien
taattgattgttgtatgctagttgg

SEQ ID NO: 3081282 - DNA, 25 bp, Homo sapien
ctcggcatttggcatttatatgttt

SEQ ID NO: 3081283 - DNA, 25 bp, Homo sapien
gcacgtttactgaggttctaattga

SEQ ID NO: 3081284 - DNA, 25 bp, Homo sapien
taatgcagctagaaagagacactcg

SEQ ID NO: 3081285 - DNA, 25 bp, Homo sapien
aattaattctaatctttcgactatc

SEQ ID NO: 3081286 - DNA, 25 bp, Homo sapien
tcgactatctgctgtctatataaaa

SEQ ID NO: 3081287 - DNA, 25 bp, Homo sapien
ctatctgctgtctatataaaatcaa

SEQ ID NO: 3081288 - DNA, 25 bp, Homo sapien
taatctttcgactatctgctgtcta

SEQ ID NO: 3081289 - DNA, 25 bp, Homo sapien
gaagtctcatattttaaggcctcca

SEQ ID NO: 3081290 - DNA, 25 bp, Homo sapien
gcaaaccctgtcacttcgaagaaaa

SEQ ID NO: 3081291 - DNA, 25 bp, Homo sapien
tgcatttgtacgaacataccagtgg

SEQ ID NO: 3081292 - DNA, 25 bp, Homo sapien
caattgtgggtaaaactggtggcct

SEQ ID NO: 3081293 - DNA, 25 bp, Homo sapien
agagttgcaatttcaacagttagat

SEQ ID NO: 3081294 - DNA, 25 bp, Homo sapien
tctcttttcagcatacagagttgca

SEQ ID NO: 3081295 - DNA, 25 bp, Homo sapien
tcaacagttagatttacctcattgg

SEQ ID NO: 3081296 - DNA, 25 bp, Homo sapien
ggttacgttacatgctttctgagag

SEQ ID NO: 3081297 - DNA, 25 bp, Homo sapien
taaatgaaggtatactgaacttgga

SEQ ID NO: 3081298 - DNA, 25 bp, Homo sapien
gagcttctttagataggaagccatg

SEQ ID NO: 3081299 - DNA, 25 bp, Homo sapien
tcagcatttggctggaagagctgtt

SEQ ID NO: 3081300 - DNA, 25 bp, Homo sapien
tgagggaattctctgagtacatgca

SEQ ID NO: 3081301 - DNA, 25 bp, Homo sapien
atgagaatacgtctgagatggtctg

SEQ ID NO: 3081302 - DNA, 25 bp, Homo sapien
ggaatgagaatacgtctgagatggt

SEQ ID NO: 3081303 - DNA, 25 bp, Homo sapien
caggaatgagaatacgtctgagatg

SEQ ID NO: 3081304 - DNA, 25 bp, Homo sapien
gaatgagaatacgtctgagatggtc

SEQ ID NO: 3081305 - DNA, 25 bp, Homo sapien
aacttccagggccttcggcatcctt

SEQ ID NO: 3081306 - DNA, 25 bp, Homo sapien
catagaaggctttgctgcccttggc

SEQ ID NO: 3081307 - DNA, 25 bp, Homo sapien
tttcaacttccagggccttcggcat

SEQ ID NO: 3081308 - DNA, 25 bp, Homo sapien
tccttttggctctgtaaacatagaa

SEQ ID NO: 3081309 - DNA, 25 bp, Homo sapien
aagtcagcgtcaagaaatattggtc

SEQ ID NO: 3081310 - DNA, 25 bp, Homo sapien
gaagtcagcgtcaagaaatattggt

SEQ ID NO: 3081311 - DNA, 25 bp, Homo sapien
tagtttagctgggctccaaccagtt

SEQ ID NO: 3081312 - DNA, 25 bp, Homo sapien
ttttagtttagctgggctccaacca

SEQ ID NO: 3081313 - DNA, 25 bp, Homo sapien
gcagaaacactcatgaaggagccct

SEQ ID NO: 3081314 - DNA, 25 bp, Homo sapien
tttcagagggagttgagagaaaacc

SEQ ID NO: 3081315 - DNA, 25 bp, Homo sapien
taaaaagagtggtaatgaagacaaa

SEQ ID NO: 3081316 - DNA, 25 bp, Homo sapien
tagtggtagccaaaggaaatatttc

SEQ ID NO: 3081317 - DNA, 25 bp, Homo sapien
attctttcctaatgtggcatacaaa

SEQ ID NO: 3081318 - DNA, 25 bp, Homo sapien
tctttcctaatgtggcatacaaagc

SEQ ID NO: 3081319 - DNA, 25 bp, Homo sapien
tttcctaatgtggcatacaaagcct

SEQ ID NO: 3081320 - DNA, 25 bp, Homo sapien
ctttcctaatgtggcatacaaagcc

SEQ ID NO: 3081321 - DNA, 25 bp, Homo sapien
agtttctcagtctgtcgagagagca

SEQ ID NO: 3081322 - DNA, 25 bp, Homo sapien
gtttctcagtctgtcgagagagcat

SEQ ID NO: 3081323 - DNA, 25 bp, Homo sapien
ggctgcaccctgtgcattctgggca

SEQ ID NO: 3081324 - DNA, 25 bp, Homo sapien
gctgcaccctgtgcattctgggcac

SEQ ID NO: 3081325 - DNA, 25 bp, Homo sapien
cctgtgcattctgggcacacatcat

SEQ ID NO: 3081326 - DNA, 25 bp, Homo sapien
caccctgtgcattctgggcacacat

SEQ ID NO: 3081327 - DNA, 25 bp, Homo sapien
catttagaccataacaactgttaga

SEQ ID NO: 3081328 - DNA, 25 bp, Homo sapien
agataacaactccaggccagctgtc

SEQ ID NO: 3081329 - DNA, 25 bp, Homo sapien
tcatttagaccataacaactgttag

SEQ ID NO: 3081330 - DNA, 25 bp, Homo sapien
aacaagataacaactccaggccagc

SEQ ID NO: 3081331 - DNA, 25 bp, Homo sapien
tgccgtcttcacctttgctgatggt

SEQ ID NO: 3081332 - DNA, 25 bp, Homo sapien
ccgtcttcacctttgctgatggttc

SEQ ID NO: 3081333 - DNA, 25 bp, Homo sapien
ctgccgtcttcacctttgctgatgg

SEQ ID NO: 3081334 - DNA, 25 bp, Homo sapien
gtcttcacctttgctgatggttctg

SEQ ID NO: 3081335 - DNA, 25 bp, Homo sapien
tgagctcttaggagtgtttctgccc

SEQ ID NO: 3081336 - DNA, 25 bp, Homo sapien
tgtgtaccagtttgggtcactctga

SEQ ID NO: 3081337 - DNA, 25 bp, Homo sapien
tgtaagcgactatccagccaaggtc

SEQ ID NO: 3081338 - DNA, 25 bp, Homo sapien
ccaaggtcgcttacttgtgtaccag

SEQ ID NO: 3081339 - DNA, 25 bp, Homo sapien
ttcataatttactcccctgtctgtc

SEQ ID NO: 3081340 - DNA, 25 bp, Homo sapien
agaaccttcataatttactcccctg

SEQ ID NO: 3081341 - DNA, 25 bp, Homo sapien
gcagctcaaaagaaccttcataatt

SEQ ID NO: 3081342 - DNA, 25 bp, Homo sapien
gcttgctgcagctcaaaagaacctt

SEQ ID NO: 3081343 - DNA, 25 bp, Homo sapien
tatccttttgatcaaatgcaactgg

SEQ ID NO: 3081344 - DNA, 25 bp, Homo sapien
tatagatgagatctctctacattgc

SEQ ID NO: 3081345 - DNA, 25 bp, Homo sapien
cagcctcagagggattttgttcttg

SEQ ID NO: 3081346 - DNA, 25 bp, Homo sapien
ttcttgagaactaaaacgtgacttc

SEQ ID NO: 3081347 - DNA, 25 bp, Homo sapien
tactgattatagtggaccacactat

SEQ ID NO: 3081348 - DNA, 25 bp, Homo sapien
gtaaggaaggccctacttgtggcag

SEQ ID NO: 3081349 - DNA, 25 bp, Homo sapien
tatggtcactctagttaaaactgtg

SEQ ID NO: 3081350 - DNA, 25 bp, Homo sapien
taaggaaggccctacttgtggcagc

SEQ ID NO: 3081351 - DNA, 25 bp, Homo sapien
gtggaggggagtagccagcgcccct

SEQ ID NO: 3081352 - DNA, 25 bp, Homo sapien
ggaaaggtgatgtcaacggagggta

SEQ ID NO: 3081353 - DNA, 25 bp, Homo sapien
tcaacggagggtagggtggttgctg

SEQ ID NO: 3081354 - DNA, 25 bp, Homo sapien
aaagatagacgatgtctttatttta

SEQ ID NO: 3081355 - DNA, 25 bp, Homo sapien
gaaggtaacattttatgtgcccagt

SEQ ID NO: 3081356 - DNA, 25 bp, Homo sapien
tgtaaattgctacccttaagcccac

SEQ ID NO: 3081357 - DNA, 25 bp, Homo sapien
tggcaaatcatattaagcttaacag

SEQ ID NO: 3081358 - DNA, 25 bp, Homo sapien
tgtatgtggataacctagctgtgca

SEQ ID NO: 3081359 - DNA, 25 bp, Homo sapien
tgtgccaacatgtcccaacaatttt

SEQ ID NO: 3081360 - DNA, 25 bp, Homo sapien
agtcatgtgccaacatgtcccaaca

SEQ ID NO: 3081361 - DNA, 25 bp, Homo sapien
caacatgtcccaacaatttttgaaa

SEQ ID NO: 3081362 - DNA, 25 bp, Homo sapien
acagggtcccactgtatagtgccca

SEQ ID NO: 3081363 - DNA, 25 bp, Homo sapien
tgtaagcttgattacctcctaaccc

SEQ ID NO: 3081364 - DNA, 25 bp, Homo sapien
gctttactaaggcttaatctgtaag

SEQ ID NO: 3081365 - DNA, 25 bp, Homo sapien
ggctttatggtggtattagtggcat

SEQ ID NO: 3081366 - DNA, 25 bp, Homo sapien
ttttgcccaacattggctttaggga

SEQ ID NO: 3081367 - DNA, 25 bp, Homo sapien
ggtcaggcacgatggctcacacctg

SEQ ID NO: 3081368 - DNA, 25 bp, Homo sapien
aggcacgatggctcacacctgtaat

SEQ ID NO: 3081369 - DNA, 25 bp, Homo sapien
tcaggcacgatggctcacacctgta

SEQ ID NO: 3081370 - DNA, 25 bp, Homo sapien
tctaaggtcaggcacgatggctcac

SEQ ID NO: 3081371 - DNA, 25 bp, Homo sapien
tgtggccattgctttatgcttgaga

SEQ ID NO: 3081372 - DNA, 25 bp, Homo sapien
aaaaatgctgtctcatagtatccag

SEQ ID NO: 3081373 - DNA, 25 bp, Homo sapien
caccatttttgagaggcatctaaac

SEQ ID NO: 3081374 - DNA, 25 bp, Homo sapien
taaattttgtgaaagcatcccacca

SEQ ID NO: 3081375 - DNA, 25 bp, Homo sapien
cgagaccaaaagctcaatcagtgtc

SEQ ID NO: 3081376 - DNA, 25 bp, Homo sapien
tatacgagtgtcctctccttggcac

SEQ ID NO: 3081377 - DNA, 25 bp, Homo sapien
ggaactttcagccttgtccccgaga

SEQ ID NO: 3081378 - DNA, 25 bp, Homo sapien
taactgcattgctatcagagctctg

SEQ ID NO: 3081379 - DNA, 25 bp, Homo sapien
tgtagagtggttttgttgctaagag

SEQ ID NO: 3081380 - DNA, 25 bp, Homo sapien
gcaaacttgcagtgcaagtctatga

SEQ ID NO: 3081381 - DNA, 25 bp, Homo sapien
ggaaaaggtctgcttagctgtcttt

SEQ ID NO: 3081382 - DNA, 25 bp, Homo sapien
gcccctgcagtagagcccttgtcag

SEQ ID NO: 3081383 - DNA, 25 bp, Homo sapien
gctgtggctgtacagagaccattgt

SEQ ID NO: 3081384 - DNA, 25 bp, Homo sapien
ctatttatccgaaatgtcaagggca

SEQ ID NO: 3081385 - DNA, 25 bp, Homo sapien
tatgagggggtgtctttgtccaaag

SEQ ID NO: 3081386 - DNA, 25 bp, Homo sapien
tggtttgtgcccattcttggcgtgg

SEQ ID NO: 3081387 - DNA, 25 bp, Homo sapien
cttttaggtggcttccctggatcat

SEQ ID NO: 3081388 - DNA, 25 bp, Homo sapien
ccttttaggtggcttccctggatca

SEQ ID NO: 3081389 - DNA, 25 bp, Homo sapien
caggcatagacttggagagcaagct

SEQ ID NO: 3081390 - DNA, 25 bp, Homo sapien
ggcatagacttggagagcaagctgc

SEQ ID NO: 3081391 - DNA, 25 bp, Homo sapien
catagacttggagagcaagctgccc

SEQ ID NO: 3081392 - DNA, 25 bp, Homo sapien
atagacttggagagcaagctgccca

SEQ ID NO: 3081393 - DNA, 25 bp, Homo sapien
gggccttagcataaagttaatatcg

SEQ ID NO: 3081394 - DNA, 25 bp, Homo sapien
gttaatatcgtcaaagatctgacta

SEQ ID NO: 3081395 - DNA, 25 bp, Homo sapien
tgtgggtgtttctacaatgtgggaa

SEQ ID NO: 3081396 - DNA, 25 bp, Homo sapien
ctgaatattttgtaaggatgtgaag

SEQ ID NO: 3081397 - DNA, 25 bp, Homo sapien
gctgctgcttgtttagatggccgcc

SEQ ID NO: 3081398 - DNA, 25 bp, Homo sapien
cttcctggtgacaagcacttcttat

SEQ ID NO: 3081399 - DNA, 25 bp, Homo sapien
gacttgaattccagagatgagattg

SEQ ID NO: 3081400 - DNA, 25 bp, Homo sapien
gctgagcagtactaggacttgaatt

SEQ ID NO: 3081401 - DNA, 25 bp, Homo sapien
gaatgaactgattttggctagagcc

SEQ ID NO: 3081402 - DNA, 25 bp, Homo sapien
tacgcggttagccagaatgaactga

SEQ ID NO: 3081403 - DNA, 25 bp, Homo sapien
aactgattttggctagagccttttc

SEQ ID NO: 3081404 - DNA, 25 bp, Homo sapien
ttaagctgatgttacgcggttagcc

SEQ ID NO: 3081405 - DNA, 25 bp, Homo sapien
tacacacattcctgcatactcctgc

SEQ ID NO: 3081406 - DNA, 25 bp, Homo sapien
gcatctggttttcctaagaaggccc

SEQ ID NO: 3081407 - DNA, 25 bp, Homo sapien
acacattcctgcatactcctgcttc

SEQ ID NO: 3081408 - DNA, 25 bp, Homo sapien
ccagcacaggttttgcatctggttt

SEQ ID NO: 3081409 - DNA, 25 bp, Homo sapien
tcttcatggtccatgttctagtcct

SEQ ID NO: 3081410 - DNA, 25 bp, Homo sapien
tccaggaccggtgttctctttctta

SEQ ID NO: 3081411 - DNA, 25 bp, Homo sapien
gatccaggaccggtgttctctttct

SEQ ID NO: 3081412 - DNA, 25 bp, Homo sapien
tcatggtccatgttctagtcctgct

SEQ ID NO: 3081413 - DNA, 25 bp, Homo sapien
cttgctttttctgagcgacacattt

SEQ ID NO: 3081414 - DNA, 25 bp, Homo sapien
ctttttctgagcgacacatttgcta

SEQ ID NO: 3081415 - DNA, 25 bp, Homo sapien
tgctttttctgagcgacacatttgc

SEQ ID NO: 3081416 - DNA, 25 bp, Homo sapien
tttttctgagcgacacatttgctac

SEQ ID NO: 3081417 - DNA, 25 bp, Homo sapien
tccacggggtgtcttcaccgtattc

SEQ ID NO: 3081418 - DNA, 25 bp, Homo sapien
gatatactctgttattgtaagccag

SEQ ID NO: 3081419 - DNA, 25 bp, Homo sapien
tcctgtcctctttgatatactctgt

SEQ ID NO: 3081420 - DNA, 25 bp, Homo sapien
ttcaccgtattcttatcctctgctg

SEQ ID NO: 3081421 - DNA, 25 bp, Homo sapien
caagtacccacgtcttcctttggct

SEQ ID NO: 3081422 - DNA, 25 bp, Homo sapien
caccaagtacccacgtcttcctttg

SEQ ID NO: 3081423 - DNA, 25 bp, Homo sapien
taagaagacttagaattgagtacag

SEQ ID NO: 3081424 - DNA, 25 bp, Homo sapien
tttgattgaatcaagggtaatcacc

SEQ ID NO: 3081425 - DNA, 25 bp, Homo sapien
gctggtatgaccataggtctctgca

SEQ ID NO: 3081426 - DNA, 25 bp, Homo sapien
tatccatcatggacgaagtgactgc

SEQ ID NO: 3081427 - DNA, 25 bp, Homo sapien
gtcaagaacatgtcacaagccagcc

SEQ ID NO: 3081428 - DNA, 25 bp, Homo sapien
ggccagcttggcacggctgctttca

SEQ ID NO: 3081429 - DNA, 25 bp, Homo sapien
ccagcttcttgaccacacagtacgt

SEQ ID NO: 3081430 - DNA, 25 bp, Homo sapien
aatggctgccaggtcaggaagctga

SEQ ID NO: 3081431 - DNA, 25 bp, Homo sapien
cagatgctgaggttgtctaagtcgt

SEQ ID NO: 3081432 - DNA, 25 bp, Homo sapien
cgtggtctcttcttaggttactggc

SEQ ID NO: 3081433 - DNA, 25 bp, Homo sapien
gactttaatagcacagtaactgcca

SEQ ID NO: 3081434 - DNA, 25 bp, Homo sapien
tactggctggtatgtgaactgctac

SEQ ID NO: 3081435 - DNA, 25 bp, Homo sapien
tttcaagaagaggctcatgttctgg

SEQ ID NO: 3081436 - DNA, 25 bp, Homo sapien
tcaagaagaggctcatgttctggtt

SEQ ID NO: 3081437 - DNA, 25 bp, Homo sapien
aagaagaggctcatgttctggttcc

SEQ ID NO: 3081438 - DNA, 25 bp, Homo sapien
agaagaggctcatgttctggttcca

SEQ ID NO: 3081439 - DNA, 25 bp, Homo sapien
gagccaccaggcatggccttctgcc

SEQ ID NO: 3081440 - DNA, 25 bp, Homo sapien
gtgagccaccaggcatggccttctg

SEQ ID NO: 3081441 - DNA, 25 bp, Homo sapien
tgagccaccaggcatggccttctgc

SEQ ID NO: 3081442 - DNA, 25 bp, Homo sapien
agtaaagcctatttctgataccact

SEQ ID NO: 3081443 - DNA, 25 bp, Homo sapien
aaaactgtcgtgttgggatgtccat

SEQ ID NO: 3081444 - DNA, 25 bp, Homo sapien
tatttctgataccactcaggtcaaa

SEQ ID NO: 3081445 - DNA, 25 bp, Homo sapien
taccactcaggtcaaaaaactgtcg

SEQ ID NO: 3081446 - DNA, 25 bp, Homo sapien
tatttggaggaatttctctaaacac

SEQ ID NO: 3081447 - DNA, 25 bp, Homo sapien
cttgggtcaaaggaggatatttgga

SEQ ID NO: 3081448 - DNA, 25 bp, Homo sapien
tggttaccatgggtcttgggtcaaa

SEQ ID NO: 3081449 - DNA, 25 bp, Homo sapien
gaatttctgcagctaaagtggttac

SEQ ID NO: 3081450 - DNA, 25 bp, Homo sapien
acttctgcagattgttgtggcttct

SEQ ID NO: 3081451 - DNA, 25 bp, Homo sapien
ggctgtacttctgcagattgttgtg

SEQ ID NO: 3081452 - DNA, 25 bp, Homo sapien
ttctgcagattgttgtggcttctgg

SEQ ID NO: 3081453 - DNA, 25 bp, Homo sapien
tcaggctgtacttctgcagattgtt

SEQ ID NO: 3081454 - DNA, 25 bp, Homo sapien
tggctggcacaaacaggcttttctt

SEQ ID NO: 3081455 - DNA, 25 bp, Homo sapien
ggactttcaggatggactctccgaa

SEQ ID NO: 3081456 - DNA, 25 bp, Homo sapien
tctccgaacaatcttgccactgtgg

SEQ ID NO: 3081457 - DNA, 25 bp, Homo sapien
gacgttcatgtcttcttgctccaac

SEQ ID NO: 3081458 - DNA, 25 bp, Homo sapien
cttgaacaaacatatgtattgtggc

SEQ ID NO: 3081459 - DNA, 25 bp, Homo sapien
ttgaacaaacatatgtattgtggcc

SEQ ID NO: 3081460 - DNA, 25 bp, Homo sapien
tgaacaaacatatgtattgtggcca

SEQ ID NO: 3081461 - DNA, 25 bp, Homo sapien
ctgtcctggaacaatagtctagtgt

SEQ ID NO: 3081462 - DNA, 25 bp, Homo sapien
tcctggaacaatagtctagtgtacc

SEQ ID NO: 3081463 - DNA, 25 bp, Homo sapien
ggaacaatagtctagtgtaccaggg

SEQ ID NO: 3081464 - DNA, 25 bp, Homo sapien
tctagtgtaccaggggccctcggga

SEQ ID NO: 3081465 - DNA, 25 bp, Homo sapien
gacagagcttggactcgggtccagc

SEQ ID NO: 3081466 - DNA, 25 bp, Homo sapien
tgggccagacaatgtaggggattta

SEQ ID NO: 3081467 - DNA, 25 bp, Homo sapien
gagaggcctggctgaacggggattt

SEQ ID NO: 3081468 - DNA, 25 bp, Homo sapien
gaacggggatttgtgtgggccagac

SEQ ID NO: 3081469 - DNA, 25 bp, Homo sapien
aagaggtacagcatctggaggagga

SEQ ID NO: 3081470 - DNA, 25 bp, Homo sapien
ctgaagaggtacagcatctggagga

SEQ ID NO: 3081471 - DNA, 25 bp, Homo sapien
tgaagaggtacagcatctggaggag

SEQ ID NO: 3081472 - DNA, 25 bp, Homo sapien
gaggtacagcatctggaggaggact

SEQ ID NO: 3081473 - DNA, 25 bp, Homo sapien
ccatcgatgcttccccatgtgggtc

SEQ ID NO: 3081474 - DNA, 25 bp, Homo sapien
aggctgactgaccccccgtttcatg

SEQ ID NO: 3081475 - DNA, 25 bp, Homo sapien
ccgtttcatgccccacgcctttgct

SEQ ID NO: 3081476 - DNA, 25 bp, Homo sapien
atgccccacgcctttgctggtactg

SEQ ID NO: 3081477 - DNA, 25 bp, Homo sapien
gcagggctttgctgcacttatccat

SEQ ID NO: 3081478 - DNA, 25 bp, Homo sapien
ctgcagggctttgctgcacttatcc

SEQ ID NO: 3081479 - DNA, 25 bp, Homo sapien
tgcagggctttgctgcacttatcca

SEQ ID NO: 3081480 - DNA, 25 bp, Homo sapien
caggatatgatcactggagcttcca

SEQ ID NO: 3081481 - DNA, 25 bp, Homo sapien
gaaacagtagcagccctagaagcct

SEQ ID NO: 3081482 - DNA, 25 bp, Homo sapien
tgtcctgcgttctgggagcttccaa

SEQ ID NO: 3081483 - DNA, 25 bp, Homo sapien
aaagcatataagaccatgtcctgcg

SEQ ID NO: 3081484 - DNA, 25 bp, Homo sapien
ctttctcatagaccccagcaaggtg

SEQ ID NO: 3081485 - DNA, 25 bp, Homo sapien
acctttattggcaggtgggtcagag

SEQ ID NO: 3081486 - DNA, 25 bp, Homo sapien
agcctggaggttccacaagcccttt

SEQ ID NO: 3081487 - DNA, 25 bp, Homo sapien
cactcacacctatttctggaccttt

SEQ ID NO: 3081488 - DNA, 25 bp, Homo sapien
tccactaggttcttggctgaaacct

SEQ ID NO: 3081489 - DNA, 25 bp, Homo sapien
ggttcttggctgaaacctttcagca

SEQ ID NO: 3081490 - DNA, 25 bp, Homo sapien
tctagccttaaagtgtccactaggt

SEQ ID NO: 3081491 - DNA, 25 bp, Homo sapien
ggtcgtttctgatctactccctctc

SEQ ID NO: 3081492 - DNA, 25 bp, Homo sapien
gggtagcagatgttgttctggcatt

SEQ ID NO: 3081493 - DNA, 25 bp, Homo sapien
ttctggcattgtttgccgagtggag

SEQ ID NO: 3081494 - DNA, 25 bp, Homo sapien
agatgttgttctggcattgtttgcc

SEQ ID NO: 3081495 - DNA, 25 bp, Homo sapien
cattgtttgccgagtggaggtaggg

SEQ ID NO: 3081496 - DNA, 25 bp, Homo sapien
gggtggcaccaaatgcctctatcat

SEQ ID NO: 3081497 - DNA, 25 bp, Homo sapien
cctgggccaccgaggagggtcaatt

SEQ ID NO: 3081498 - DNA, 25 bp, Homo sapien
atggctcttcataagcacgttggcc

SEQ ID NO: 3081499 - DNA, 25 bp, Homo sapien
gcacgttggccaaggctgttgccac

SEQ ID NO: 3081500 - DNA, 25 bp, Homo sapien
tgcagcccccatggcgacaccctct

SEQ ID NO: 3081501 - DNA, 25 bp, Homo sapien
cccccatggcgacaccctctctctt

SEQ ID NO: 3081502 - DNA, 25 bp, Homo sapien
acaccctctctctttggaccacctc

SEQ ID NO: 3081503 - DNA, 25 bp, Homo sapien
cctctctctttggaccacctcctcc

SEQ ID NO: 3081504 - DNA, 25 bp, Homo sapien
tgggcttgggtagagttggccagat

SEQ ID NO: 3081505 - DNA, 25 bp, Homo sapien
ttgggtagagttggccagatgaaat

SEQ ID NO: 3081506 - DNA, 25 bp, Homo sapien
atgtgggcttgggtagagttggcca

SEQ ID NO: 3081507 - DNA, 25 bp, Homo sapien
gcttgggtagagttggccagatgaa

SEQ ID NO: 3081508 - DNA, 25 bp, Homo sapien
cttcaaccaagtctctgggtcttct

SEQ ID NO: 3081509 - DNA, 25 bp, Homo sapien
cagcttcatcttcacggggactttc

SEQ ID NO: 3081510 - DNA, 25 bp, Homo sapien
tctgggtcttcttgtcaagactaat

SEQ ID NO: 3081511 - DNA, 25 bp, Homo sapien
ttttgtcagagacatgggcctcttc

SEQ ID NO: 3081512 - DNA, 25 bp, Homo sapien
gatgtgtggactgctgaatctttaa

SEQ ID NO: 3081513 - DNA, 25 bp, Homo sapien
gaatctcagaggcagttagttggca

SEQ ID NO: 3081514 - DNA, 25 bp, Homo sapien
ttttgtgcttgtcactcccgccctg

SEQ ID NO: 3081515 - DNA, 25 bp, Homo sapien
cccgccctgggtcacttttaggatg

SEQ ID NO: 3081516 - DNA, 25 bp, Homo sapien
tgggtcaggtatcaaacgggtcaac

SEQ ID NO: 3081517 - DNA, 25 bp, Homo sapien
gaggaacaaatagcccctggctcca

SEQ ID NO: 3081518 - DNA, 25 bp, Homo sapien
ctccagatcagagccagtgtgccca

SEQ ID NO: 3081519 - DNA, 25 bp, Homo sapien
cagagagttcgcactctgaggaaac

SEQ ID NO: 3081520 - DNA, 25 bp, Homo sapien
tgcctgatgcaaagtggacacccga

SEQ ID NO: 3081521 - DNA, 25 bp, Homo sapien
gatcctaatcctgactgtacccttg

SEQ ID NO: 3081522 - DNA, 25 bp, Homo sapien
tgtataaagtagctatgcctgatgc

SEQ ID NO: 3081523 - DNA, 25 bp, Homo sapien
gagccaaatgaacctaggatcctaa

SEQ ID NO: 3081524 - DNA, 25 bp, Homo sapien
ctgggttcaagaaatctcctgtcag

SEQ ID NO: 3081525 - DNA, 25 bp, Homo sapien
gttcaagaaatctcctgtcagcctc

SEQ ID NO: 3081526 - DNA, 25 bp, Homo sapien
gggttcaagaaatctcctgtcagcc

SEQ ID NO: 3081527 - DNA, 25 bp, Homo sapien
gatgcacgccaccacacccggataa

SEQ ID NO: 3081528 - DNA, 25 bp, Homo sapien
caggagtaccagtgtccaagggcag

SEQ ID NO: 3081529 - DNA, 25 bp, Homo sapien
tgggaattggaaatggaggtcaaga

SEQ ID NO: 3081530 - DNA, 25 bp, Homo sapien
tcaagaagtcccactgtctgttgtc

SEQ ID NO: 3081531 - DNA, 25 bp, Homo sapien
gaagaaccaagaaggctggtggtat

SEQ ID NO: 3081532 - DNA, 25 bp, Homo sapien
gctctctctgccgtcctagacagat

SEQ ID NO: 3081533 - DNA, 25 bp, Homo sapien
ctgccgtcctagacagattgttttg

SEQ ID NO: 3081534 - DNA, 25 bp, Homo sapien
tctctgccgtcctagacagattgtt

SEQ ID NO: 3081535 - DNA, 25 bp, Homo sapien
gccgtcctagacagattgttttgtt

SEQ ID NO: 3081536 - DNA, 25 bp, Homo sapien
tgcaaacagcctgcgctaagtgagc

SEQ ID NO: 3081537 - DNA, 25 bp, Homo sapien
cagtgctcgactcatatcatagtgg

SEQ ID NO: 3081538 - DNA, 25 bp, Homo sapien
gctcatctgatggagtgtccctggg

SEQ ID NO: 3081539 - DNA, 25 bp, Homo sapien
tgtaatgggactcaaagggccagct

SEQ ID NO: 3081540 - DNA, 25 bp, Homo sapien
tcaacttcctagctgtgcgcatgcg

SEQ ID NO: 3081541 - DNA, 25 bp, Homo sapien
tgcgcatgcgaagagagaacagacc

SEQ ID NO: 3081542 - DNA, 25 bp, Homo sapien
tcctgtgtgccatcccgtaaacatg

SEQ ID NO: 3081543 - DNA, 25 bp, Homo sapien
tctctatgacgtctcaggacggtag

SEQ ID NO: 3081544 - DNA, 25 bp, Homo sapien
ttctgacggctgatcaaagaggaga

SEQ ID NO: 3081545 - DNA, 25 bp, Homo sapien
gagaagcaaggcctgataaagagtg

SEQ ID NO: 3081546 - DNA, 25 bp, Homo sapien
gagtgcgtgtttcgtgtacttttaa

SEQ ID NO: 3081547 - DNA, 25 bp, Homo sapien
aagatagtttctgacggctgatcaa

SEQ ID NO: 3081548 - DNA, 25 bp, Homo sapien
tccatcttgggccataacttctctg

SEQ ID NO: 3081549 - DNA, 25 bp, Homo sapien
taattccctggttgttcatatgccc

SEQ ID NO: 3081550 - DNA, 25 bp, Homo sapien
ccaggtagtgaagtagaacgtgttc

SEQ ID NO: 3081551 - DNA, 25 bp, Homo sapien
gagttcttggacctcgtctgccaca

SEQ ID NO: 3081552 - DNA, 25 bp, Homo sapien
ggagttttcctccttctacagcatc

SEQ ID NO: 3081553 - DNA, 25 bp, Homo sapien
tgtcttctcttaatgacctcatcag

SEQ ID NO: 3081554 - DNA, 25 bp, Homo sapien
agtggcccaacgtgttctttctgtg

SEQ ID NO: 3081555 - DNA, 25 bp, Homo sapien
gggtctccatcggtatctgccagtt

SEQ ID NO: 3081556 - DNA, 25 bp, Homo sapien
gtcttgacccactactggttctttg

SEQ ID NO: 3081557 - DNA, 25 bp, Homo sapien
ttgaactgagtctgaaccatctttg

SEQ ID NO: 3081558 - DNA, 25 bp, Homo sapien
cacgagtgtcttgacccactactgg

SEQ ID NO: 3081559 - DNA, 25 bp, Homo sapien
acccatactcccacgagtgtcttga

SEQ ID NO: 3081560 - DNA, 25 bp, Homo sapien
gaacaaagttgaacgcggtcatgga

SEQ ID NO: 3081561 - DNA, 25 bp, Homo sapien
tctgtgaggcgtgagattctgaaca

SEQ ID NO: 3081562 - DNA, 25 bp, Homo sapien
cggtcatggatggttaaattcccac

SEQ ID NO: 3081563 - DNA, 25 bp, Homo sapien
tctgccttctcgaaacatggcccga

SEQ ID NO: 3081564 - DNA, 25 bp, Homo sapien
ggatgccggctttctctctacatca

SEQ ID NO: 3081565 - DNA, 25 bp, Homo sapien
ctggtttctaaatccacggaagctg

SEQ ID NO: 3081566 - DNA, 25 bp, Homo sapien
ggttacccaggatgccggctttctc

SEQ ID NO: 3081567 - DNA, 25 bp, Homo sapien
tctaaatccacggaagctgagagga

SEQ ID NO: 3081568 - DNA, 25 bp, Homo sapien
tgttttggtatgtaacgtcctatct

SEQ ID NO: 3081569 - DNA, 25 bp, Homo sapien
tgagagacacgtggcagtgaagtgt

SEQ ID NO: 3081570 - DNA, 25 bp, Homo sapien
cacagcccttgacgtagcagtaaaa

SEQ ID NO: 3081571 - DNA, 25 bp, Homo sapien
ttggtatgtaacgtcctatctttgc

SEQ ID NO: 3081572 - DNA, 25 bp, Homo sapien
cagggaggtcactaggctctaatgc

SEQ ID NO: 3081573 - DNA, 25 bp, Homo sapien
taatgcatttaccattgactgcccc

SEQ ID NO: 3081574 - DNA, 25 bp, Homo sapien
gaaattttcggactctgctgtgcag

SEQ ID NO: 3081575 - DNA, 25 bp, Homo sapien
tgactgcccctcttgtagtgcgtct

SEQ ID NO: 3081576 - DNA, 25 bp, Homo sapien
ggctaccagacgctaaatgccaccg

SEQ ID NO: 3081577 - DNA, 25 bp, Homo sapien
taaatgccaccgagaagttaaatct

SEQ ID NO: 3081578 - DNA, 25 bp, Homo sapien
cactgatgtcaaggctaccagacgc

SEQ ID NO: 3081579 - DNA, 25 bp, Homo sapien
gaagttaaatctattactaaactca

SEQ ID NO: 3081580 - DNA, 25 bp, Homo sapien
cagtgacattgggattggttggttc

SEQ ID NO: 3081581 - DNA, 25 bp, Homo sapien
cagcattcttcagcacgcagatgcc

SEQ ID NO: 3081582 - DNA, 25 bp, Homo sapien
cattgggattggttggttcacacca

SEQ ID NO: 3081583 - DNA, 25 bp, Homo sapien
ccagcattcttcagcacgcagatgc

SEQ ID NO: 3081584 - DNA, 25 bp, Homo sapien
gtctgtgggcctggcagccagctct

SEQ ID NO: 3081585 - DNA, 25 bp, Homo sapien
gcagccagctctgaagcctgaggga

SEQ ID NO: 3081586 - DNA, 25 bp, Homo sapien
tggtaggcaaagaggacccctggtc

SEQ ID NO: 3081587 - DNA, 25 bp, Homo sapien
ggaggggagccccacactgcagggt

SEQ ID NO: 3081588 - DNA, 25 bp, Homo sapien
ggcaaaggggccacaacactgcact

SEQ ID NO: 3081589 - DNA, 25 bp, Homo sapien
gagtctgctgcccgtcaactcacag

SEQ ID NO: 3081590 - DNA, 25 bp, Homo sapien
gcctcctcacagacaaagagtgacc

SEQ ID NO: 3081591 - DNA, 25 bp, Homo sapien
ccagctcaggagtaggacaaggtgt

SEQ ID NO: 3081592 - DNA, 25 bp, Homo sapien
gcagctgcgggtaacaggcccattt

SEQ ID NO: 3081593 - DNA, 25 bp, Homo sapien
gggccggtcttagtgatgccggagc

SEQ ID NO: 3081594 - DNA, 25 bp, Homo sapien
tccaatatgagccaacagggaatgg

SEQ ID NO: 3081595 - DNA, 25 bp, Homo sapien
tggcccgcaccagcacccgttcttt

SEQ ID NO: 3081596 - DNA, 25 bp, Homo sapien
aagaaccagagctagtggttgcttc

SEQ ID NO: 3081597 - DNA, 25 bp, Homo sapien
tgggtatatagctcccaccacccag

SEQ ID NO: 3081598 - DNA, 25 bp, Homo sapien
tagtggttgcttcgtcttccttggt

SEQ ID NO: 3081599 - DNA, 25 bp, Homo sapien
ttggttttgctctctgcaatgtggg

SEQ ID NO: 3081600 - DNA, 25 bp, Homo sapien
gcactctctttcgggccctggcagg

SEQ ID NO: 3081601 - DNA, 25 bp, Homo sapien
gactgggtctagccacttgcctgga

SEQ ID NO: 3081602 - DNA, 25 bp, Homo sapien
agagcccccagcactctctttcggg

SEQ ID NO: 3081603 - DNA, 25 bp, Homo sapien
accagaatctccacacctctaaggg

SEQ ID NO: 3081604 - DNA, 25 bp, Homo sapien
cagacctggaggtcttgggagtggg

SEQ ID NO: 3081605 - DNA, 25 bp, Homo sapien
ccaggagttgggccactgagtcaga

SEQ ID NO: 3081606 - DNA, 25 bp, Homo sapien
agttgggccactgagtcagaaggtc

SEQ ID NO: 3081607 - DNA, 25 bp, Homo sapien
aagggcatccctgaaaactgcagtc

SEQ ID NO: 3081608 - DNA, 25 bp, Homo sapien
catggggtcccatctggcactgcat

SEQ ID NO: 3081609 - DNA, 25 bp, Homo sapien
actgcatgggccgtaggtccccagc

SEQ ID NO: 3081610 - DNA, 25 bp, Homo sapien
aagacagattggtccccagccccta

SEQ ID NO: 3081611 - DNA, 25 bp, Homo sapien
cagccctcccacttcctaaaactgt

SEQ ID NO: 3081612 - DNA, 25 bp, Homo sapien
tggcccccaagaacaggacattcat

SEQ ID NO: 3081613 - DNA, 25 bp, Homo sapien
aagggaaaatgcgagcaaggcgctc

SEQ ID NO: 3081614 - DNA, 25 bp, Homo sapien
aactggcaaagggaaaatgcgagca

SEQ ID NO: 3081615 - DNA, 25 bp, Homo sapien
gcaaggcgctcaggttgtccctggc

SEQ ID NO: 3081616 - DNA, 25 bp, Homo sapien
tcattggtgggaccaccgaggctgc

SEQ ID NO: 3081617 - DNA, 25 bp, Homo sapien
gctcccgtttcctggcttccttggc

SEQ ID NO: 3081618 - DNA, 25 bp, Homo sapien
aaggccgttaaagctgcccctgagc

SEQ ID NO: 3081619 - DNA, 25 bp, Homo sapien
tgcatccacgaagactcattggtgg

SEQ ID NO: 3081620 - DNA, 25 bp, Homo sapien
tgcacagggtggcataagccagtcc

SEQ ID NO: 3081621 - DNA, 25 bp, Homo sapien
taagctgagaagacgatcctgcaca

SEQ ID NO: 3081622 - DNA, 25 bp, Homo sapien
tcacactaggctctgtaagctgaga

SEQ ID NO: 3081623 - DNA, 25 bp, Homo sapien
gaaacgttgagttcacaaacaggac

SEQ ID NO: 3081624 - DNA, 25 bp, Homo sapien
caatcaaaaagggacaaggaggaga

SEQ ID NO: 3081625 - DNA, 25 bp, Homo sapien
tgaattattgatgggcctggcactg

SEQ ID NO: 3081626 - DNA, 25 bp, Homo sapien
tgaggcatgcttgcgaacactagcc

SEQ ID NO: 3081627 - DNA, 25 bp, Homo sapien
aaggaggagagtgctaccaggctac

SEQ ID NO: 3081628 - DNA, 25 bp, Homo sapien
cagctgccctaggaagcatgagccc

SEQ ID NO: 3081629 - DNA, 25 bp, Homo sapien
atgggttcagctgccctaggaagca

SEQ ID NO: 3081630 - DNA, 25 bp, Homo sapien
ggttcagctgccctaggaagcatga

SEQ ID NO: 3081631 - DNA, 25 bp, Homo sapien
gctgccctaggaagcatgagcccct

SEQ ID NO: 3081632 - DNA, 25 bp, Homo sapien
taacatccagggcaatctgggactc

SEQ ID NO: 3081633 - DNA, 25 bp, Homo sapien
ttggggaccttactggccactggcc

SEQ ID NO: 3081634 - DNA, 25 bp, Homo sapien
cagcagacctaatggtggcatcatc

SEQ ID NO: 3081635 - DNA, 25 bp, Homo sapien
gaacatgaatcaaactgtggctgat

SEQ ID NO: 3081636 - DNA, 25 bp, Homo sapien
ggacttcctctcaatttgatgaagg

SEQ ID NO: 3081637 - DNA, 25 bp, Homo sapien
gattctctcggcactacctggtcaa

SEQ ID NO: 3081638 - DNA, 25 bp, Homo sapien
ccttcatgatctggaaagaggccgg

SEQ ID NO: 3081639 - DNA, 25 bp, Homo sapien
gcagctttactacggacttcctctc

SEQ ID NO: 3081640 - DNA, 25 bp, Homo sapien
ggcctgaggccaattcaagcacaca

SEQ ID NO: 3081641 - DNA, 25 bp, Homo sapien
tacctgagagttctgttcgagcctc

SEQ ID NO: 3081642 - DNA, 25 bp, Homo sapien
gcctgggctgagagactgaatttgc

SEQ ID NO: 3081643 - DNA, 25 bp, Homo sapien
tagagggacccaaatccgaactgac

SEQ ID NO: 3081644 - DNA, 25 bp, Homo sapien
agctcagcagcaccggcttcttagg

SEQ ID NO: 3081645 - DNA, 25 bp, Homo sapien
ggcagctcagcagcaccggcttctt

SEQ ID NO: 3081646 - DNA, 25 bp, Homo sapien
ggtaggcagctcagcagcaccggct

SEQ ID NO: 3081647 - DNA, 25 bp, Homo sapien
gggtaggcagctcagcagcaccggc

SEQ ID NO: 3081648 - DNA, 25 bp, Homo sapien
ctttgttgtggagcctcggccgcct

SEQ ID NO: 3081649 - DNA, 25 bp, Homo sapien
ggacctggccgatgcgaagtgacag

SEQ ID NO: 3081650 - DNA, 25 bp, Homo sapien
ctggccggagaccgcctgcgagagg

SEQ ID NO: 3081651 - DNA, 25 bp, Homo sapien
gcctgtctgcgggacctggccgatg

SEQ ID NO: 3081652 - DNA, 25 bp, Homo sapien
ttcctggccccgaggatccgctcct

SEQ ID NO: 3081653 - DNA, 25 bp, Homo sapien
cccgcgtttccccagcgcaaggccg

SEQ ID NO: 3081654 - DNA, 25 bp, Homo sapien
gtttccccagcgcaaggccgcgtcc

SEQ ID NO: 3081655 - DNA, 25 bp, Homo sapien
tcccggccgctggaaagctcagggc

SEQ ID NO: 3081656 - DNA, 25 bp, Homo sapien
ctcggggtcgtgtcaatgctttgca

SEQ ID NO: 3081657 - DNA, 25 bp, Homo sapien
gcctgctgtctctttccggggcgca

SEQ ID NO: 3081658 - DNA, 25 bp, Homo sapien
acccggagctgggtcggaggccagg

SEQ ID NO: 3081659 - DNA, 25 bp, Homo sapien
gtgcggctgcgggtccttccccaag

SEQ ID NO: 3081660 - DNA, 25 bp, Homo sapien
tgtgggaccagttccacaagctagg

SEQ ID NO: 3081661 - DNA, 25 bp, Homo sapien
tctgcgctccctcaagagcctggag

SEQ ID NO: 3081662 - DNA, 25 bp, Homo sapien
aggacgaccccaaggtgacgctgga

SEQ ID NO: 3081663 - DNA, 25 bp, Homo sapien
atggtcatcaccaagtccgggaggt

SEQ ID NO: 3081664 - DNA, 25 bp, Homo sapien
gccgctgacgattgccgctataagt

SEQ ID NO: 3081665 - DNA, 25 bp, Homo sapien
gatgttcccccccttcaaggtgcga

SEQ ID NO: 3081666 - DNA, 25 bp, Homo sapien
cttcaaggtgcgagtcagcggcctg

SEQ ID NO: 3081667 - DNA, 25 bp, Homo sapien
gccaagtatatcctgctgatggaca

SEQ ID NO: 3081668 - DNA, 25 bp, Homo sapien
gcgcgccgaagctcggaggaaggac

SEQ ID NO: 3081669 - DNA, 25 bp, Homo sapien
cagcagttctttgggccgctgggag

SEQ ID NO: 3081670 - DNA, 25 bp, Homo sapien
ggacagttcaccatgggccctggcg

SEQ ID NO: 3081671 - DNA, 25 bp, Homo sapien
ctggtggtgcagacagacagtgcgt

SEQ ID NO: 3081672 - DNA, 25 bp, Homo sapien
tgcccgagctggctctccgcaaagt

SEQ ID NO: 3081673 - DNA, 25 bp, Homo sapien
gtttcagcccctatcagatcccggt

SEQ ID NO: 3081674 - DNA, 25 bp, Homo sapien
caaggaggcggccaatgaactgcag

SEQ ID NO: 3081675 - DNA, 25 bp, Homo sapien
gctccaaggccgctggtggaaacag

SEQ ID NO: 3081676 - DNA, 25 bp, Homo sapien
cgtggtcaacggagggagtggcact

SEQ ID NO: 3081677 - DNA, 25 bp, Homo sapien
tgataaaactgggttgagggatgct

SEQ ID NO: 3081678 - DNA, 25 bp, Homo sapien
accttgggcctagaccgcgtgataa

SEQ ID NO: 3081679 - DNA, 25 bp, Homo sapien
gaaccagttacgactgaagtcagtg

SEQ ID NO: 3081680 - DNA, 25 bp, Homo sapien
gagagaggggcccatctgacttaat

SEQ ID NO: 3081681 - DNA, 25 bp, Homo sapien
tgacttaatgcactgcctttccagg

SEQ ID NO: 3081682 - DNA, 25 bp, Homo sapien
ggggcccatctgacttaatgcactg

SEQ ID NO: 3081683 - DNA, 25 bp, Homo sapien
atctgacttaatgcactgcctttcc

SEQ ID NO: 3081684 - DNA, 25 bp, Homo sapien
taaaggcttattaaaagcttctgca

SEQ ID NO: 3081685 - DNA, 25 bp, Homo sapien
tggcctgaaaactcaacgctaaccc

SEQ ID NO: 3081686 - DNA, 25 bp, Homo sapien
tactgatcctttgcgtagatggtat

SEQ ID NO: 3081687 - DNA, 25 bp, Homo sapien
catctttcagaagcgtaaaggctta

SEQ ID NO: 3081688 - DNA, 25 bp, Homo sapien
tcagtgatggtcctaacaaattgta

SEQ ID NO: 3081689 - DNA, 25 bp, Homo sapien
aaagcctctagagaatgattcttcc

SEQ ID NO: 3081690 - DNA, 25 bp, Homo sapien
gtaagcacaaccctttcagtgatgg

SEQ ID NO: 3081691 - DNA, 25 bp, Homo sapien
tctgggtgtaaaaatatcacaactg

SEQ ID NO: 3081692 - DNA, 25 bp, Homo sapien
tccctggtttgagactccatgagag

SEQ ID NO: 3081693 - DNA, 25 bp, Homo sapien
cattccaggagtccgcaggtttggg

SEQ ID NO: 3081694 - DNA, 25 bp, Homo sapien
gggacctggtactgcaatggtgata

SEQ ID NO: 3081695 - DNA, 25 bp, Homo sapien
gacagcagcagcgactggcttttct

SEQ ID NO: 3081696 - DNA, 25 bp, Homo sapien
ctccgcatgcggcaccgcaattagg

SEQ ID NO: 3081697 - DNA, 25 bp, Homo sapien
caattagggtgagtgtgggttccag

SEQ ID NO: 3081698 - DNA, 25 bp, Homo sapien
tgagtgtgggttccagccgagtggg

SEQ ID NO: 3081699 - DNA, 25 bp, Homo sapien
cagcggcgcggagtcggagccccgg

SEQ ID NO: 3081700 - DNA, 25 bp, Homo sapien
catagaaatatcgacagcgccagca

SEQ ID NO: 3081701 - DNA, 25 bp, Homo sapien
gatgaattgggtctagagatccaag

SEQ ID NO: 3081702 - DNA, 25 bp, Homo sapien
aagagcatagaaatatcgacagcgc

SEQ ID NO: 3081703 - DNA, 25 bp, Homo sapien
ctcctctctgagtaacgcgatgaat

SEQ ID NO: 3081704 - DNA, 25 bp, Homo sapien
cggtggcctggaaattggtgtttgc

SEQ ID NO: 3081705 - DNA, 25 bp, Homo sapien
tggtgtttgcagaatatgcaaggcc

SEQ ID NO: 3081706 - DNA, 25 bp, Homo sapien
cagaatatgcaaggccaaggaagag

SEQ ID NO: 3081707 - DNA, 25 bp, Homo sapien
ctaagaacaaggccgtgacaggcgg

SEQ ID NO: 3081708 - DNA, 25 bp, Homo sapien
gtgaaggacgagagcggaccgctat

SEQ ID NO: 3081709 - DNA, 25 bp, Homo sapien
tctggatgtggcttcgtggcggaga

SEQ ID NO: 3081710 - DNA, 25 bp, Homo sapien
ctgagtgcgggaccccgcggtgctg

SEQ ID NO: 3081711 - DNA, 25 bp, Homo sapien
gcaagctgtcccgaggtctggatgt

SEQ ID NO: 3081712 - DNA, 25 bp, Homo sapien
ctgcacggctccgggtgtgacaaga

SEQ ID NO: 3081713 - DNA, 25 bp, Homo sapien
ggctgagcgcgtaggactgagagcg

SEQ ID NO: 3081714 - DNA, 25 bp, Homo sapien
cggctccgggtgtgacaagagccca

SEQ ID NO: 3081715 - DNA, 25 bp, Homo sapien
gggcgcgagccgcagggctccgctg

SEQ ID NO: 3081716 - DNA, 25 bp, Homo sapien
ggccatgcgggccaagcgcgagacg

SEQ ID NO: 3081717 - DNA, 25 bp, Homo sapien
ccctccttgcgaccccgcaggccgc

SEQ ID NO: 3081718 - DNA, 25 bp, Homo sapien
gcgagacggcccctccttgcgaccc

SEQ ID NO: 3081719 - DNA, 25 bp, Homo sapien
ccaagcgcgagacggcccctccttg

SEQ ID NO: 3081720 - DNA, 25 bp, Homo sapien
acagacagcttgtagccccggtgtc

SEQ ID NO: 3081721 - DNA, 25 bp, Homo sapien
tcttcgtaaagaggaggagcccgga

SEQ ID NO: 3081722 - DNA, 25 bp, Homo sapien
gacttggtgtctcacgtgcagggcc

SEQ ID NO: 3081723 - DNA, 25 bp, Homo sapien
gattcgtgttactccaccagaagac

SEQ ID NO: 3081724 - DNA, 25 bp, Homo sapien
ccagtaaattcagccggtgagctca

SEQ ID NO: 3081725 - DNA, 25 bp, Homo sapien
ttttagcattgaataccaccaggcc

SEQ ID NO: 3081726 - DNA, 25 bp, Homo sapien
aattatgaaacacgcctcagctggc

SEQ ID NO: 3081727 - DNA, 25 bp, Homo sapien
agaattctccagtgtggcgctcaca

SEQ ID NO: 3081728 - DNA, 25 bp, Homo sapien
cacaactgtacctgggatggctcac

SEQ ID NO: 3081729 - DNA, 25 bp, Homo sapien
catgaactgccgttatgaggacacc

SEQ ID NO: 3081730 - DNA, 25 bp, Homo sapien
gatgcagtttccataagagtgggca

SEQ ID NO: 3081731 - DNA, 25 bp, Homo sapien
gaacatggctgtcgtgaagaccaca

SEQ ID NO: 3081732 - DNA, 25 bp, Homo sapien
gaacatgtccaattccacaatgaga

SEQ ID NO: 3081733 - DNA, 25 bp, Homo sapien
gaaagtttcatcacaccataggaga

SEQ ID NO: 3081734 - DNA, 25 bp, Homo sapien
gagatggtcaacacatactttttta

SEQ ID NO: 3081735 - DNA, 25 bp, Homo sapien
gaaaatgaagagttaatgttgatga

SEQ ID NO: 3081736 - DNA, 25 bp, Homo sapien
ctactggcttaggtccagatttggg

SEQ ID NO: 3081737 - DNA, 25 bp, Homo sapien
acattcccagatcctactggcttag

SEQ ID NO: 3081738 - DNA, 25 bp, Homo sapien
ccagatcctactggcttaggtccag

SEQ ID NO: 3081739 - DNA, 25 bp, Homo sapien
tttggggactggaaattcaatcaga

SEQ ID NO: 3081740 - DNA, 25 bp, Homo sapien
atttatgatagaaacagtacaaatt

SEQ ID NO: 3081741 - DNA, 25 bp, Homo sapien
tttatgatagaaacagtacaaattt

SEQ ID NO: 3081742 - DNA, 25 bp, Homo sapien
tatttatgatagaaacagtacaaat

SEQ ID NO: 3081743 - DNA, 25 bp, Homo sapien
aaaaactatgtaggcatccgaagca

SEQ ID NO: 3081744 - DNA, 25 bp, Homo sapien
ccactatcagatgctgttccagacc

SEQ ID NO: 3081745 - DNA, 25 bp, Homo sapien
ctcttgtagacgtccagttttgtga

SEQ ID NO: 3081746 - DNA, 25 bp, Homo sapien
gacatgaccaatttcacgtctttaa

SEQ ID NO: 3081747 - DNA, 25 bp, Homo sapien
ttgtgcagggaacgcggaagcaaga

SEQ ID NO: 3081748 - DNA, 25 bp, Homo sapien
atggcggcagaaagagcgcgagcga

SEQ ID NO: 3081749 - DNA, 25 bp, Homo sapien
agagcgcgagcgagagcgtgaccca

SEQ ID NO: 3081750 - DNA, 25 bp, Homo sapien
tttgtgcagggaacgcggaagcaag

SEQ ID NO: 3081751 - DNA, 25 bp, Homo sapien
aagggaaggtttcacaatggagatg

SEQ ID NO: 3081752 - DNA, 25 bp, Homo sapien
taagggaaggtttcacaatggagat

SEQ ID NO: 3081753 - DNA, 25 bp, Homo sapien
cagtgcatttgcataataataaggc

SEQ ID NO: 3081754 - DNA, 25 bp, Homo sapien
agtgcatttgcataataataaggcc

SEQ ID NO: 3081755 - DNA, 25 bp, Homo sapien
catttgcataataataaggcccaat

SEQ ID NO: 3081756 - DNA, 25 bp, Homo sapien
ttacagtgcatttgcataataataa

SEQ ID NO: 3081757 - DNA, 25 bp, Homo sapien
cactgaagtctgatacaccattaat

SEQ ID NO: 3081758 - DNA, 25 bp, Homo sapien
tgaagtctgatacaccattaatgtg

SEQ ID NO: 3081759 - DNA, 25 bp, Homo sapien
ttcactgaagtctgatacaccatta

SEQ ID NO: 3081760 - DNA, 25 bp, Homo sapien
actgaagtctgatacaccattaatg

SEQ ID NO: 3081761 - DNA, 25 bp, Homo sapien
tgctctatatactttcagtccttga

SEQ ID NO: 3081762 - DNA, 25 bp, Homo sapien
taaacccatgtaataactaagtgca

SEQ ID NO: 3081763 - DNA, 25 bp, Homo sapien
acaacaaagccttatagaaacttag

SEQ ID NO: 3081764 - DNA, 25 bp, Homo sapien
agccctgtctctaactggtagtttt

SEQ ID NO: 3081765 - DNA, 25 bp, Homo sapien
taatgaataacttgcaatgtgccag

SEQ ID NO: 3081766 - DNA, 25 bp, Homo sapien
ttactaaagggttgtgacacatctc

SEQ ID NO: 3081767 - DNA, 25 bp, Homo sapien
tcatgatctgaggagaatatacacc

SEQ ID NO: 3081768 - DNA, 25 bp, Homo sapien
tagagcaagggtgcactccagatat

SEQ ID NO: 3081769 - DNA, 25 bp, Homo sapien
atatctagctttccaagttattatg

SEQ ID NO: 3081770 - DNA, 25 bp, Homo sapien
gcattgcgaaaataaatatctagct

SEQ ID NO: 3081771 - DNA, 25 bp, Homo sapien
tatctagctttccaagttattatgc

SEQ ID NO: 3081772 - DNA, 25 bp, Homo sapien
ttgtagcattgcgaaaataaatatc

SEQ ID NO: 3081773 - DNA, 25 bp, Homo sapien
ggtgatctctgaaaaagtcttggac

SEQ ID NO: 3081774 - DNA, 25 bp, Homo sapien
caaaaagtcccaatgcccagtgaat

SEQ ID NO: 3081775 - DNA, 25 bp, Homo sapien
gcttatgctagaacaataccagagg

SEQ ID NO: 3081776 - DNA, 25 bp, Homo sapien
tatttacgtgaaactagaagtgccc

SEQ ID NO: 3081777 - DNA, 25 bp, Homo sapien
gttccagttcatttatccaagttgt

SEQ ID NO: 3081778 - DNA, 25 bp, Homo sapien
atttcatgagtttttcccagttcca

SEQ ID NO: 3081779 - DNA, 25 bp, Homo sapien
atttctatttcatgagtttttccca

SEQ ID NO: 3081780 - DNA, 25 bp, Homo sapien
ccagttcatttatccaagttgtttt

SEQ ID NO: 3081781 - DNA, 25 bp, Homo sapien
caggatcataaagttcaggtgtaaa

SEQ ID NO: 3081782 - DNA, 25 bp, Homo sapien
actttgtatctatgcaatcctcagc

SEQ ID NO: 3081783 - DNA, 25 bp, Homo sapien
tagagacaattcaatgtctggatcc

SEQ ID NO: 3081784 - DNA, 25 bp, Homo sapien
tcctctatcagtttcagctaggtca

SEQ ID NO: 3081785 - DNA, 25 bp, Homo sapien
actattctctgatgacccgagctca

SEQ ID NO: 3081786 - DNA, 25 bp, Homo sapien
tgagggcatgatccaaacgatgtgt

SEQ ID NO: 3081787 - DNA, 25 bp, Homo sapien
tttctagtaagggtggcatcaatct

SEQ ID NO: 3081788 - DNA, 25 bp, Homo sapien
tcccaaagaattaaagcttgaccag

SEQ ID NO: 3081789 - DNA, 25 bp, Homo sapien
gcaaagccagttagtggaaaaccag

SEQ ID NO: 3081790 - DNA, 25 bp, Homo sapien
taatgtatctgttgcgactactcaa

SEQ ID NO: 3081791 - DNA, 25 bp, Homo sapien
gacttctctatcaaaggtaaatggg

SEQ ID NO: 3081792 - DNA, 25 bp, Homo sapien
tatatccaatggaatagaccagagt

SEQ ID NO: 3081793 - DNA, 25 bp, Homo sapien
tttctcctttctggagataatgcta

SEQ ID NO: 3081794 - DNA, 25 bp, Homo sapien
ttctcctttctggagataatgctac

SEQ ID NO: 3081795 - DNA, 25 bp, Homo sapien
gaggtactgtactttaaagaggtca

SEQ ID NO: 3081796 - DNA, 25 bp, Homo sapien
caagtgtagactcattgtcctgtat

SEQ ID NO: 3081797 - DNA, 25 bp, Homo sapien
caaaattttctggtgatagatgact

SEQ ID NO: 3081798 - DNA, 25 bp, Homo sapien
gcttccagtaaataaggtgaggtac

SEQ ID NO: 3081799 - DNA, 25 bp, Homo sapien
tggtgctgaatctgctgccgtaccc

SEQ ID NO: 3081800 - DNA, 25 bp, Homo sapien
gattccagtgcactttcaaaggttg

SEQ ID NO: 3081801 - DNA, 25 bp, Homo sapien
tgctgaatctgctgccgtacccatt

SEQ ID NO: 3081802 - DNA, 25 bp, Homo sapien
agccaaggattccagtgcactttca

SEQ ID NO: 3081803 - DNA, 25 bp, Homo sapien
gggttattcctaaagcgatcatcca

SEQ ID NO: 3081804 - DNA, 25 bp, Homo sapien
cagatatatagcgacttgggttatt

SEQ ID NO: 3081805 - DNA, 25 bp, Homo sapien
taagagctccccaatcatttctgtg

SEQ ID NO: 3081806 - DNA, 25 bp, Homo sapien
tcatccactagaataagagctcccc

SEQ ID NO: 3081807 - DNA, 25 bp, Homo sapien
tataccacttatctatcccagaaca

SEQ ID NO: 3081808 - DNA, 25 bp, Homo sapien
tgcaatggtttgtggtatatttaca

SEQ ID NO: 3081809 - DNA, 25 bp, Homo sapien
tacaaggctgtataacctataccac

SEQ ID NO: 3081810 - DNA, 25 bp, Homo sapien
tgtgcccactaattgttactccaaa

SEQ ID NO: 3081811 - DNA, 25 bp, Homo sapien
gccacatagaatgagttggtaaata

SEQ ID NO: 3081812 - DNA, 25 bp, Homo sapien
tatcaggtaatactggccacataga

SEQ ID NO: 3081813 - DNA, 25 bp, Homo sapien
tgagaagatcgtgtggttttagtct

SEQ ID NO: 3081814 - DNA, 25 bp, Homo sapien
cagtcttggattgctgggatcaatc

SEQ ID NO: 3081815 - DNA, 25 bp, Homo sapien
gattgcaggcagaatggcactttta

SEQ ID NO: 3081816 - DNA, 25 bp, Homo sapien
ttgcagacagcatatatcacattgt

SEQ ID NO: 3081817 - DNA, 25 bp, Homo sapien
cagccaaactttgcctttagattgg

SEQ ID NO: 3081818 - DNA, 25 bp, Homo sapien
gataaggtaggatttactcagctat

SEQ ID NO: 3081819 - DNA, 25 bp, Homo sapien
gtcaatttaagttccttatggattc

SEQ ID NO: 3081820 - DNA, 25 bp, Homo sapien
cattctgtggtttgtctttactctg

SEQ ID NO: 3081821 - DNA, 25 bp, Homo sapien
acattttctcgcattctgtggtttg

SEQ ID NO: 3081822 - DNA, 25 bp, Homo sapien
tgtctttactctgctgatagtttct

SEQ ID NO: 3081823 - DNA, 25 bp, Homo sapien
atgttgcggcaaggacatgatttca

SEQ ID NO: 3081824 - DNA, 25 bp, Homo sapien
ttcattccctagtgtctatgttccc

SEQ ID NO: 3081825 - DNA, 25 bp, Homo sapien
agcaagcatagaacacaataggtag

SEQ ID NO: 3081826 - DNA, 25 bp, Homo sapien
gtacaattgaacctgttacccagaa

SEQ ID NO: 3081827 - DNA, 25 bp, Homo sapien
cttgagttggctaataatgttgctc

SEQ ID NO: 3081828 - DNA, 25 bp, Homo sapien
tgttgctcaagtcatctatatcttt

SEQ ID NO: 3081829 - DNA, 25 bp, Homo sapien
ggctaataatgttgctcaagtcatc

SEQ ID NO: 3081830 - DNA, 25 bp, Homo sapien
agagaacatactggacttgagttgg

SEQ ID NO: 3081831 - DNA, 25 bp, Homo sapien
tttcttgaaattcaaggcattgctt

SEQ ID NO: 3081832 - DNA, 25 bp, Homo sapien
cttgaaattcaaggcattgcttata

SEQ ID NO: 3081833 - DNA, 25 bp, Homo sapien
ggtttcttgaaattcaaggcattgc

SEQ ID NO: 3081834 - DNA, 25 bp, Homo sapien
atggtttcttgaaattcaaggcatt

SEQ ID NO: 3081835 - DNA, 25 bp, Homo sapien
gatacacagattccgtactgaaagt

SEQ ID NO: 3081836 - DNA, 25 bp, Homo sapien
tgtgcaactacagaagctcactggg

SEQ ID NO: 3081837 - DNA, 25 bp, Homo sapien
cacactggctggtatatcaattttc

SEQ ID NO: 3081838 - DNA, 25 bp, Homo sapien
aatagaatatctcctcacactggct

SEQ ID NO: 3081839 - DNA, 25 bp, Homo sapien
tttaaggccctgtatgcttgaattt

SEQ ID NO: 3081840 - DNA, 25 bp, Homo sapien
cattgtattgtcgttttagttcaac

SEQ ID NO: 3081841 - DNA, 25 bp, Homo sapien
ggccaggtagaagacctctcaattt

SEQ ID NO: 3081842 - DNA, 25 bp, Homo sapien
cctctcaattttgaatggtggtcat

SEQ ID NO: 3081843 - DNA, 25 bp, Homo sapien
ggtggtcattgtattgtcgttttag

SEQ ID NO: 3081844 - DNA, 25 bp, Homo sapien
gaacttacattcattaaatccacac

SEQ ID NO: 3081845 - DNA, 25 bp, Homo sapien
atgcatataactaatcagctgtgtg

SEQ ID NO: 3081846 - DNA, 25 bp, Homo sapien
gtacaagtaggtgagttttgacata

SEQ ID NO: 3081847 - DNA, 25 bp, Homo sapien
agctgtgtgatctcaagcagtttta

SEQ ID NO: 3081848 - DNA, 25 bp, Homo sapien
gtaacacaccagtcttataaatgga

SEQ ID NO: 3081849 - DNA, 25 bp, Homo sapien
gaaatcacccataatgatgctctga

SEQ ID NO: 3081850 - DNA, 25 bp, Homo sapien
ggtattgactgctatattctgggca

SEQ ID NO: 3081851 - DNA, 25 bp, Homo sapien
tataaaaactgcatgcgtatactct

SEQ ID NO: 3081852 - DNA, 25 bp, Homo sapien
cagccttagtgcaataatgtagagc

SEQ ID NO: 3081853 - DNA, 25 bp, Homo sapien
gacaataccagtaccaacagcagtg

SEQ ID NO: 3081854 - DNA, 25 bp, Homo sapien
atgtagagctagagtaaaatgataa

SEQ ID NO: 3081855 - DNA, 25 bp, Homo sapien
aacaaagcagccttagtgcaataat

SEQ ID NO: 3081856 - DNA, 25 bp, Homo sapien
cagccattttagaataggagaccca

SEQ ID NO: 3081857 - DNA, 25 bp, Homo sapien
ttagtgccctcagcagtagcactgg

SEQ ID NO: 3081858 - DNA, 25 bp, Homo sapien
cagctttgggcatagccattagtgc

SEQ ID NO: 3081859 - DNA, 25 bp, Homo sapien
tcttgggtagatgtcaactgtttca

SEQ ID NO: 3081860 - DNA, 25 bp, Homo sapien
tggagaaaggtagtagaaaccacca

SEQ ID NO: 3081861 - DNA, 25 bp, Homo sapien
attcctattgttatgacagcacggg

SEQ ID NO: 3081862 - DNA, 25 bp, Homo sapien
taccacgacaaactgctaccaggag

SEQ ID NO: 3081863 - DNA, 25 bp, Homo sapien
tcactcactttaccacgacaaactg

SEQ ID NO: 3081864 - DNA, 25 bp, Homo sapien
tgttatgacagcacgggcattgtca

SEQ ID NO: 3081865 - DNA, 25 bp, Homo sapien
cagtagagagccaacgttcttttaa

SEQ ID NO: 3081866 - DNA, 25 bp, Homo sapien
ccaactccagattatgccataaacc

SEQ ID NO: 3081867 - DNA, 25 bp, Homo sapien
tccctgtggttctacaatgactgtc

SEQ ID NO: 3081868 - DNA, 25 bp, Homo sapien
gattgcgtcatagtacacctgcagt

SEQ ID NO: 3081869 - DNA, 25 bp, Homo sapien
aacaaagtggcaacctacagattgg

SEQ ID NO: 3081870 - DNA, 25 bp, Homo sapien
cagaggggggaaaactacataacat

SEQ ID NO: 3081871 - DNA, 25 bp, Homo sapien
tatatccaataaggagttaatgtcc

SEQ ID NO: 3081872 - DNA, 25 bp, Homo sapien
tttacaagctatatatccaataagg

SEQ ID NO: 3081873 - DNA, 25 bp, Homo sapien
tggctcacagtctggcacacagata

SEQ ID NO: 3081874 - DNA, 25 bp, Homo sapien
cacagataacaaaagtgctcccact

SEQ ID NO: 3081875 - DNA, 25 bp, Homo sapien
cacttcatcttggaactcaaatgtt

SEQ ID NO: 3081876 - DNA, 25 bp, Homo sapien
gtagcacagagattccgacccttgg

SEQ ID NO: 3081877 - DNA, 25 bp, Homo sapien
aaaatcttaaatcataggactcata

SEQ ID NO: 3081878 - DNA, 25 bp, Homo sapien
ctaaataccagctattaatctaggc

SEQ ID NO: 3081879 - DNA, 25 bp, Homo sapien
aaatcttaaatcataggactcataa

SEQ ID NO: 3081880 - DNA, 25 bp, Homo sapien
cttgctaaataccagctattaatct

SEQ ID NO: 3081881 - DNA, 25 bp, Homo sapien
caccaagttctgacgaaaaggattt

SEQ ID NO: 3081882 - DNA, 25 bp, Homo sapien
gattagcctccagctggatagtaaa

SEQ ID NO: 3081883 - DNA, 25 bp, Homo sapien
caaaacaatggtctgaactttgcca

SEQ ID NO: 3081884 - DNA, 25 bp, Homo sapien
aatgatatgattagcctccagctgg

SEQ ID NO: 3081885 - DNA, 25 bp, Homo sapien
gttgaatcgcaattttataatcatc

SEQ ID NO: 3081886 - DNA, 25 bp, Homo sapien
tccaggagtaagtctgttgaatcgc

SEQ ID NO: 3081887 - DNA, 25 bp, Homo sapien
ctgcagttttctgtcgtgaacgttt

SEQ ID NO: 3081888 - DNA, 25 bp, Homo sapien
gcagttttctgtcgtgaacgtttct

SEQ ID NO: 3081889 - DNA, 25 bp, Homo sapien
tattttgcctaaaaagatagtcaag

SEQ ID NO: 3081890 - DNA, 25 bp, Homo sapien
gatagtcaagtaccataaaaagtcc

SEQ ID NO: 3081891 - DNA, 25 bp, Homo sapien
tttgagttgatgcactaataacagg

SEQ ID NO: 3081892 - DNA, 25 bp, Homo sapien
taataacaggtacttctcttgcctc

SEQ ID NO: 3081893 - DNA, 25 bp, Homo sapien
gcttacctacacattggcagctggg

SEQ ID NO: 3081894 - DNA, 25 bp, Homo sapien
catcagtggaagcaggctaaggtcc

SEQ ID NO: 3081895 - DNA, 25 bp, Homo sapien
tataaactactaaaggtgaggcgct

SEQ ID NO: 3081896 - DNA, 25 bp, Homo sapien
taaggtcctcaaaattagatgctgg

SEQ ID NO: 3081897 - DNA, 25 bp, Homo sapien
aatcataatgatgaatgtcttagcc

SEQ ID NO: 3081898 - DNA, 25 bp, Homo sapien
caactagaattagggcaaatttcct

SEQ ID NO: 3081899 - DNA, 25 bp, Homo sapien
gaatgtcttagccaactagaattag

SEQ ID NO: 3081900 - DNA, 25 bp, Homo sapien
tctataggtatactactttggtaaa

SEQ ID NO: 3081901 - DNA, 25 bp, Homo sapien
tgtgtaaagttaagagcatttcatt

SEQ ID NO: 3081902 - DNA, 25 bp, Homo sapien
tgcaaaatgggaaaagtagcagtgg

SEQ ID NO: 3081903 - DNA, 25 bp, Homo sapien
tttgtgtaaagttaagagcatttca

SEQ ID NO: 3081904 - DNA, 25 bp, Homo sapien
aatgggaaaagtagcagtggtgata

SEQ ID NO: 3081905 - DNA, 25 bp, Homo sapien
gtgatccccatctactacccttgcc

SEQ ID NO: 3081906 - DNA, 25 bp, Homo sapien
acatgggagtatagctatacctttg

SEQ ID NO: 3081907 - DNA, 25 bp, Homo sapien
acatagtgacttccaattttatcca

SEQ ID NO: 3081908 - DNA, 25 bp, Homo sapien
cagcaaacatgggagtatagctata

SEQ ID NO: 3081909 - DNA, 25 bp, Homo sapien
gttcatcccgagcaaaccgaagctg

SEQ ID NO: 3081910 - DNA, 25 bp, Homo sapien
cagtcctcgatgttatgagcttcat

SEQ ID NO: 3081911 - DNA, 25 bp, Homo sapien
aggctacagcacacagctcgtaggg

SEQ ID NO: 3081912 - DNA, 25 bp, Homo sapien
tacactgtaacttgctgattcccga

SEQ ID NO: 3081913 - DNA, 25 bp, Homo sapien
cagcatcttgtattagttctcgggc

SEQ ID NO: 3081914 - DNA, 25 bp, Homo sapien
gtaatatggacaggcctttagtttc

SEQ ID NO: 3081915 - DNA, 25 bp, Homo sapien
gggacaaaatatgatgtcagcatct

SEQ ID NO: 3081916 - DNA, 25 bp, Homo sapien
gacaagttcttctatatcccaggct

SEQ ID NO: 3081917 - DNA, 25 bp, Homo sapien
gaagaaactaagatgtctgactaca

SEQ ID NO: 3081918 - DNA, 25 bp, Homo sapien
gatatcaatactagcagttaatttg

SEQ ID NO: 3081919 - DNA, 25 bp, Homo sapien
tgattttccgaagttgattatcact

SEQ ID NO: 3081920 - DNA, 25 bp, Homo sapien
catatgatatcatccaagtttgact

SEQ ID NO: 3081921 - DNA, 25 bp, Homo sapien
gaagttaccgactacctcaggatgg

SEQ ID NO: 3081922 - DNA, 25 bp, Homo sapien
gacacaagtatgatccctgctggaa

SEQ ID NO: 3081923 - DNA, 25 bp, Homo sapien
gaaagaatagtcattggaacccctg

SEQ ID NO: 3081924 - DNA, 25 bp, Homo sapien
tgaatatgccgtcctccggagctct

SEQ ID NO: 3081925 - DNA, 25 bp, Homo sapien
taaaaggttcactgatgtgccaaat

SEQ ID NO: 3081926 - DNA, 25 bp, Homo sapien
gataaaaggttcactgatgtgccaa

SEQ ID NO: 3081927 - DNA, 25 bp, Homo sapien
tgggataaaaggttcactgatgtgc

SEQ ID NO: 3081928 - DNA, 25 bp, Homo sapien
gttcactgatgtgccaaataaacag

SEQ ID NO: 3081929 - DNA, 25 bp, Homo sapien
ctctcaggttgccagtaacagcaga

SEQ ID NO: 3081930 - DNA, 25 bp, Homo sapien
tcaggttgccagtaacagcagattt

SEQ ID NO: 3081931 - DNA, 25 bp, Homo sapien
cattctcctctcaggttgccagtaa

SEQ ID NO: 3081932 - DNA, 25 bp, Homo sapien
tctcctctcaggttgccagtaacag

SEQ ID NO: 3081933 - DNA, 25 bp, Homo sapien
taaaactgaacaatggcattaatac

SEQ ID NO: 3081934 - DNA, 25 bp, Homo sapien
ttaaaactgaacaatggcattaata

SEQ ID NO: 3081935 - DNA, 25 bp, Homo sapien
aaactgaacaatggcattaatacat

SEQ ID NO: 3081936 - DNA, 25 bp, Homo sapien
actgaacaatggcattaatacatac

SEQ ID NO: 3081937 - DNA, 25 bp, Homo sapien
gcatccaaattgtgtacttctgttc

SEQ ID NO: 3081938 - DNA, 25 bp, Homo sapien
caacttttgcatccaaattgtgtac

SEQ ID NO: 3081939 - DNA, 25 bp, Homo sapien
ttctgttccaaagcaatgacgtttt

SEQ ID NO: 3081940 - DNA, 25 bp, Homo sapien
tctgtggcgaaaaggagtttatctt

SEQ ID NO: 3081941 - DNA, 25 bp, Homo sapien
ggaaatagaacatagtagtgactca

SEQ ID NO: 3081942 - DNA, 25 bp, Homo sapien
gcaaataagcacctcattacaacac

SEQ ID NO: 3081943 - DNA, 25 bp, Homo sapien
gttgttctcaaaggccaaaacagct

SEQ ID NO: 3081944 - DNA, 25 bp, Homo sapien
gactatttctaacaggcaataataa

SEQ ID NO: 3081945 - DNA, 25 bp, Homo sapien
tctctgtatatggatgcctgtttct

SEQ ID NO: 3081946 - DNA, 25 bp, Homo sapien
tagcagataactttgcagccagagt

SEQ ID NO: 3081947 - DNA, 25 bp, Homo sapien
tgctgtgtagtttctaagggtcgaa

SEQ ID NO: 3081948 - DNA, 25 bp, Homo sapien
cagccagagtggttttttcagggga

SEQ ID NO: 3081949 - DNA, 25 bp, Homo sapien
gcatccagtgcataaaggccagaag

SEQ ID NO: 3081950 - DNA, 25 bp, Homo sapien
taaacatctcacaagggagagctcc

SEQ ID NO: 3081951 - DNA, 25 bp, Homo sapien
catgtgccaaataagggtaacccca

SEQ ID NO: 3081952 - DNA, 25 bp, Homo sapien
tattaagagggtagggaatgtccac

SEQ ID NO: 3081953 - DNA, 25 bp, Homo sapien
tggtgtgcttggatagttgaaatga

SEQ ID NO: 3081954 - DNA, 25 bp, Homo sapien
gcttggatagttgaaatgacgtgaa

SEQ ID NO: 3081955 - DNA, 25 bp, Homo sapien
gatagttgaaatgacgtgaagttcc

SEQ ID NO: 3081956 - DNA, 25 bp, Homo sapien
aaatgacgtgaagttccttggttca

SEQ ID NO: 3081957 - DNA, 25 bp, Homo sapien
tcagctttttcacttacgccctcat

SEQ ID NO: 3081958 - DNA, 25 bp, Homo sapien
acttacgccctcatctgctggtttc

SEQ ID NO: 3081959 - DNA, 25 bp, Homo sapien
gcatgcacaacaacatgacaattgt

SEQ ID NO: 3081960 - DNA, 25 bp, Homo sapien
ttcacttacgccctcatctgctggt

SEQ ID NO: 3081961 - DNA, 25 bp, Homo sapien
gggactctccaacaaacaatgttgc

SEQ ID NO: 3081962 - DNA, 25 bp, Homo sapien
agagattgttgccatgctaaagcag

SEQ ID NO: 3081963 - DNA, 25 bp, Homo sapien
gcagaacaaagtaaggctaagcttt

SEQ ID NO: 3081964 - DNA, 25 bp, Homo sapien
ctgtgggactctccaacaaacaatg

SEQ ID NO: 3081965 - DNA, 25 bp, Homo sapien
tcttcaccccaccaattgtatattc

SEQ ID NO: 3081966 - DNA, 25 bp, Homo sapien
tgtgacgggtaagctttataaggaa

SEQ ID NO: 3081967 - DNA, 25 bp, Homo sapien
tcatcatagcaagctgtgacgggta

SEQ ID NO: 3081968 - DNA, 25 bp, Homo sapien
ccaccaattgtatattcagaccaca

SEQ ID NO: 3081969 - DNA, 25 bp, Homo sapien
tttcctgtttatttcagattcctaa

SEQ ID NO: 3081970 - DNA, 25 bp, Homo sapien
agtgctttcctgtttatttcagatt

SEQ ID NO: 3081971 - DNA, 25 bp, Homo sapien
gctttcctgtttatttcagattcct

SEQ ID NO: 3081972 - DNA, 25 bp, Homo sapien
tgctttcctgtttatttcagattcc

SEQ ID NO: 3081973 - DNA, 25 bp, Homo sapien
tggagggaaaccgaagcaacgctct

SEQ ID NO: 3081974 - DNA, 25 bp, Homo sapien
tgagagcaaataaagcggagccctg

SEQ ID NO: 3081975 - DNA, 25 bp, Homo sapien
aacgctctgagctccgattcactga

SEQ ID NO: 3081976 - DNA, 25 bp, Homo sapien
ggaaaggaaaccgacttctgagagc

SEQ ID NO: 3081977 - DNA, 25 bp, Homo sapien
tttacaagtgaagcggtctggccag

SEQ ID NO: 3081978 - DNA, 25 bp, Homo sapien
cacaaaatatcgcaaggcctcagtt

SEQ ID NO: 3081979 - DNA, 25 bp, Homo sapien
tcaatggaagttactgacagaggac

SEQ ID NO: 3081980 - DNA, 25 bp, Homo sapien
gacagaggactgcaaaatccttcgg

SEQ ID NO: 3081981 - DNA, 25 bp, Homo sapien
ggcatggcagtcttcacttcaaaag

SEQ ID NO: 3081982 - DNA, 25 bp, Homo sapien
caaagtagatccaaagatgtgccaa

SEQ ID NO: 3081983 - DNA, 25 bp, Homo sapien
gctcagctgctacaatagaaacata

SEQ ID NO: 3081984 - DNA, 25 bp, Homo sapien
cagattcatgttgggtatatgcagc

SEQ ID NO: 3081985 - DNA, 25 bp, Homo sapien
tgtccctggatccatttttataaga

SEQ ID NO: 3081986 - DNA, 25 bp, Homo sapien
ccagtgtccctggatccatttttat

SEQ ID NO: 3081987 - DNA, 25 bp, Homo sapien
gacagagctgtacatcaggatccat

SEQ ID NO: 3081988 - DNA, 25 bp, Homo sapien
acagtgacagagctgtacatcagga

SEQ ID NO: 3081989 - DNA, 25 bp, Homo sapien
caaacttgccctatttggatcagca

SEQ ID NO: 3081990 - DNA, 25 bp, Homo sapien
tctgagtggcaacatcagaggcaca

SEQ ID NO: 3081991 - DNA, 25 bp, Homo sapien
caaacttggcagagttggcataaaa

SEQ ID NO: 3081992 - DNA, 25 bp, Homo sapien
tcatacaatggaggaaatgctcgac

SEQ ID NO: 3081993 - DNA, 25 bp, Homo sapien
taagtgactttggtaatgcatattg

SEQ ID NO: 3081994 - DNA, 25 bp, Homo sapien
ttcccatgacattgacagctaaacg

SEQ ID NO: 3081995 - DNA, 25 bp, Homo sapien
tgcatattgtatacacaagtgagaa

SEQ ID NO: 3081996 - DNA, 25 bp, Homo sapien
gctaaacgagccacactaagtgact

SEQ ID NO: 3081997 - DNA, 25 bp, Homo sapien
catgtttctcaagaatatctttagg

SEQ ID NO: 3081998 - DNA, 25 bp, Homo sapien
gatcaattgtcctaaagctccaaaa

SEQ ID NO: 3081999 - DNA, 25 bp, Homo sapien
ttgtataactagtaagactggagag

SEQ ID NO: 3082000 - DNA, 25 bp, Homo sapien
ctgcaatacaaaatccagttattac

SEQ ID NO: 3082001 - DNA, 25 bp, Homo sapien
caagttctggctgtgcaataagctc

SEQ ID NO: 3082002 - DNA, 25 bp, Homo sapien
cctgcgaccgtcagaggcaaaagtt

SEQ ID NO: 3082003 - DNA, 25 bp, Homo sapien
acagatgtgcatagatggaatacct

SEQ ID NO: 3082004 - DNA, 25 bp, Homo sapien
gctcaggtatgaaatctagacagat

SEQ ID NO: 3082005 - DNA, 25 bp, Homo sapien
cctgttaatatagtattcaaagccc

SEQ ID NO: 3082006 - DNA, 25 bp, Homo sapien
caaaagcccatggatcatttgtgtt

SEQ ID NO: 3082007 - DNA, 25 bp, Homo sapien
gaaggctatagtgccccatatgtaa

SEQ ID NO: 3082008 - DNA, 25 bp, Homo sapien
tctgatgcactagaatagagattaa

SEQ ID NO: 3082009 - DNA, 25 bp, Homo sapien
taacaagctatctggattgacacca

SEQ ID NO: 3082010 - DNA, 25 bp, Homo sapien
tctaagagaatctggacagctgcac

SEQ ID NO: 3082011 - DNA, 25 bp, Homo sapien
taaggcactgaacttctcgaaggtt

SEQ ID NO: 3082012 - DNA, 25 bp, Homo sapien
cccttatttggagcgctggtggtaa

SEQ ID NO: 3082013 - DNA, 25 bp, Homo sapien
ttcagttacatccaaaacaggccct

SEQ ID NO: 3082014 - DNA, 25 bp, Homo sapien
tcattgctcagtctacaggcttgag

SEQ ID NO: 3082015 - DNA, 25 bp, Homo sapien
ggccctaggcaaaaatgacttctac

SEQ ID NO: 3082016 - DNA, 25 bp, Homo sapien
gaaagagtctaccttaccatccatt

SEQ ID NO: 3082017 - DNA, 25 bp, Homo sapien
tacaacatatctgatactcagaagc

SEQ ID NO: 3082018 - DNA, 25 bp, Homo sapien
gaaatgcacaatatgtcaccaatgt

SEQ ID NO: 3082019 - DNA, 25 bp, Homo sapien
gtacatggagcgcacaatgtgccat

SEQ ID NO: 3082020 - DNA, 25 bp, Homo sapien
ctcagaagcaaaggtaacatcattg

SEQ ID NO: 3082021 - DNA, 25 bp, Homo sapien
taacttccggagcatcagtttgtcc

SEQ ID NO: 3082022 - DNA, 25 bp, Homo sapien
taaggtaggctttagatgcaagaag

SEQ ID NO: 3082023 - DNA, 25 bp, Homo sapien
ttcaacatgtgtagggtaatatcca

SEQ ID NO: 3082024 - DNA, 25 bp, Homo sapien
gggaaggcctatcttgctctgtttc

SEQ ID NO: 3082025 - DNA, 25 bp, Homo sapien
ctgtacctgattatgatcaatcagt

SEQ ID NO: 3082026 - DNA, 25 bp, Homo sapien
tacctgattatgatcaatcagttgt

SEQ ID NO: 3082027 - DNA, 25 bp, Homo sapien
atctgtacctgattatgatcaatca

SEQ ID NO: 3082028 - DNA, 25 bp, Homo sapien
gtacctgattatgatcaatcagttg

SEQ ID NO: 3082029 - DNA, 25 bp, Homo sapien
cttaggacaatgagaggatctatca

SEQ ID NO: 3082030 - DNA, 25 bp, Homo sapien
catcaggtcattctgagtatacttt

SEQ ID NO: 3082031 - DNA, 25 bp, Homo sapien
tattgaaggctgaagtgcattaacc

SEQ ID NO: 3082032 - DNA, 25 bp, Homo sapien
tgcattaaccgtcattacccatagc

SEQ ID NO: 3082033 - DNA, 25 bp, Homo sapien
tcactggcagagagtagagtcaagt

SEQ ID NO: 3082034 - DNA, 25 bp, Homo sapien
gcagaattctccgtggaacccctga

SEQ ID NO: 3082035 - DNA, 25 bp, Homo sapien
ccgcatatggtataagttcactggc

SEQ ID NO: 3082036 - DNA, 25 bp, Homo sapien
gaacccctgaattcaatagctggct

SEQ ID NO: 3082037 - DNA, 25 bp, Homo sapien
atttgaaaggctcaaacttgaaact

SEQ ID NO: 3082038 - DNA, 25 bp, Homo sapien
tatttgaaaggctcaaacttgaaac

SEQ ID NO: 3082039 - DNA, 25 bp, Homo sapien
caaatccagtcatccacaatacata

SEQ ID NO: 3082040 - DNA, 25 bp, Homo sapien
gatttttagcattattagtcaggag

SEQ ID NO: 3082041 - DNA, 25 bp, Homo sapien
tagttagtagcaaggagacgtagta

SEQ ID NO: 3082042 - DNA, 25 bp, Homo sapien
cattcgccgtagcagggcatcagtc

SEQ ID NO: 3082043 - DNA, 25 bp, Homo sapien
cccttgagcctgtcgaataaggaat

SEQ ID NO: 3082044 - DNA, 25 bp, Homo sapien
gctgcagcccttgagcctgtcgaat

SEQ ID NO: 3082045 - DNA, 25 bp, Homo sapien
gataggaatctgatccattaaagaa

SEQ ID NO: 3082046 - DNA, 25 bp, Homo sapien
taaggaatttgataggaatctgatc

SEQ ID NO: 3082047 - DNA, 25 bp, Homo sapien
gatcacacagagtaaaggtccttgc

SEQ ID NO: 3082048 - DNA, 25 bp, Homo sapien
tacaccacaggaatatatgagaatc

SEQ ID NO: 3082049 - DNA, 25 bp, Homo sapien
ccagcattccaaagtacaggcgtga

SEQ ID NO: 3082050 - DNA, 25 bp, Homo sapien
caacctgcggccatagtcatcttat

SEQ ID NO: 3082051 - DNA, 25 bp, Homo sapien
aagctgtgctgtgatactgaaacgc

SEQ ID NO: 3082052 - DNA, 25 bp, Homo sapien
tatagtagagcaccaaaagctgtgc

SEQ ID NO: 3082053 - DNA, 25 bp, Homo sapien
tactgaaacgctgattaaggcggat

SEQ ID NO: 3082054 - DNA, 25 bp, Homo sapien
cgtgtttgctagaagagcctcttca

SEQ ID NO: 3082055 - DNA, 25 bp, Homo sapien
tgctcctaactcaggtaaaacagga

SEQ ID NO: 3082056 - DNA, 25 bp, Homo sapien
gacaggagtcccaagtattatatga

SEQ ID NO: 3082057 - DNA, 25 bp, Homo sapien
catgagagatgaaaggcaacatgct

SEQ ID NO: 3082058 - DNA, 25 bp, Homo sapien
gaaaagacttcagctactactcaat

SEQ ID NO: 3082059 - DNA, 25 bp, Homo sapien
ggcttctggattagatttcgacgca

SEQ ID NO: 3082060 - DNA, 25 bp, Homo sapien
tcgacgcaggagtaagtatagaatt

SEQ ID NO: 3082061 - DNA, 25 bp, Homo sapien
catcaatcaaaggaagtaattgagg

SEQ ID NO: 3082062 - DNA, 25 bp, Homo sapien
tattgagtatctcctgttctgtgac

SEQ ID NO: 3082063 - DNA, 25 bp, Homo sapien
ctggtaaatacaatgaataggcaaa

SEQ ID NO: 3082064 - DNA, 25 bp, Homo sapien
taatgttggcactcaggttgctggt

SEQ ID NO: 3082065 - DNA, 25 bp, Homo sapien
tgcttggtaaaggaacggctcctga

SEQ ID NO: 3082066 - DNA, 25 bp, Homo sapien
cccgaactgcatgagctgtgacaac

SEQ ID NO: 3082067 - DNA, 25 bp, Homo sapien
gaggaaatgtacatttagggattta

SEQ ID NO: 3082068 - DNA, 25 bp, Homo sapien
aatgtacatttagggatttatataa

SEQ ID NO: 3082069 - DNA, 25 bp, Homo sapien
aaattttgaagcatacaatctgggc

SEQ ID NO: 3082070 - DNA, 25 bp, Homo sapien
attttgaagcatacaatctgggctc

SEQ ID NO: 3082071 - DNA, 25 bp, Homo sapien
gaagattgtcttcatcctgctcaag

SEQ ID NO: 3082072 - DNA, 25 bp, Homo sapien
cctgctcaaggagcttggcttaatt

SEQ ID NO: 3082073 - DNA, 25 bp, Homo sapien
ctcaaggagcttggcttaattacaa

SEQ ID NO: 3082074 - DNA, 25 bp, Homo sapien
aatttcctgtgtgaagattgtcttc

SEQ ID NO: 3082075 - DNA, 25 bp, Homo sapien
acagaccaagtcaatgatagcacta

SEQ ID NO: 3082076 - DNA, 25 bp, Homo sapien
agaccaagtcaatgatagcactaag

SEQ ID NO: 3082077 - DNA, 25 bp, Homo sapien
gaacagaccaagtcaatgatagcac

SEQ ID NO: 3082078 - DNA, 25 bp, Homo sapien
gtggaacagaccaagtcaatgatag

SEQ ID NO: 3082079 - DNA, 25 bp, Homo sapien
caccaataataacatctccccaaaa

SEQ ID NO: 3082080 - DNA, 25 bp, Homo sapien
ctgtgaaagtacatagccaccaata

SEQ ID NO: 3082081 - DNA, 25 bp, Homo sapien
atctccccaaaagaagcagagacgc

SEQ ID NO: 3082082 - DNA, 25 bp, Homo sapien
tgaaagtacatagccaccaataata

SEQ ID NO: 3082083 - DNA, 25 bp, Homo sapien
tttatcatccaacttagccacacca

SEQ ID NO: 3082084 - DNA, 25 bp, Homo sapien
tctcaaaatacgcttcttcttttat

SEQ ID NO: 3082085 - DNA, 25 bp, Homo sapien
ctctcaaaatacgcttcttctttta

SEQ ID NO: 3082086 - DNA, 25 bp, Homo sapien
tcaagaagatgaaactcacagactg

SEQ ID NO: 3082087 - DNA, 25 bp, Homo sapien
ccacgcctgggtaatatgatgatat

SEQ ID NO: 3082088 - DNA, 25 bp, Homo sapien
caatcccaggatgagagctttatac

SEQ ID NO: 3082089 - DNA, 25 bp, Homo sapien
tggtaaccattccagaccaaaatgc

SEQ ID NO: 3082090 - DNA, 25 bp, Homo sapien
gccagtagcatacaaaaggaaagtg

SEQ ID NO: 3082091 - DNA, 25 bp, Homo sapien
gacggctcgtcatcaactgcagtaa

SEQ ID NO: 3082092 - DNA, 25 bp, Homo sapien
gacaagtgtagaaaaggccagtagc

SEQ ID NO: 3082093 - DNA, 25 bp, Homo sapien
accccagctggcgtagcaggaggac

SEQ ID NO: 3082094 - DNA, 25 bp, Homo sapien
ttggaatataatgttccaaaaactg

SEQ ID NO: 3082095 - DNA, 25 bp, Homo sapien
tgtttttggaatataatgttccaaa

SEQ ID NO: 3082096 - DNA, 25 bp, Homo sapien
catcagcttcttccacaattcgggt

SEQ ID NO: 3082097 - DNA, 25 bp, Homo sapien
aatacacagacacattgggctccat

SEQ ID NO: 3082098 - DNA, 25 bp, Homo sapien
taagagtgcactggctttcacaaca

SEQ ID NO: 3082099 - DNA, 25 bp, Homo sapien
aattcgggtgcttcttactgtggga

SEQ ID NO: 3082100 - DNA, 25 bp, Homo sapien
tgtccatttcggataaaagttccaa

SEQ ID NO: 3082101 - DNA, 25 bp, Homo sapien
catttttagtatgatccaatgtcaa

SEQ ID NO: 3082102 - DNA, 25 bp, Homo sapien
ccggactttcgcatttgttccaaga

SEQ ID NO: 3082103 - DNA, 25 bp, Homo sapien
gttccaagaagcaaaccacttacaa

SEQ ID NO: 3082104 - DNA, 25 bp, Homo sapien
tacacaagaagcgtaaggcatctgt

SEQ ID NO: 3082105 - DNA, 25 bp, Homo sapien
tttcttcatcttgtcgttctccatt

SEQ ID NO: 3082106 - DNA, 25 bp, Homo sapien
tgtcctgcgccttcctccaagactt

SEQ ID NO: 3082107 - DNA, 25 bp, Homo sapien
accatgcctcggaccttgagggcct

SEQ ID NO: 3082108 - DNA, 25 bp, Homo sapien
tgtagcaaagcttcagctacatcaa

SEQ ID NO: 3082109 - DNA, 25 bp, Homo sapien
ctaacatgtagcaaagcttcagcta

SEQ ID NO: 3082110 - DNA, 25 bp, Homo sapien
tatcaggaacattggccaccaagag

SEQ ID NO: 3082111 - DNA, 25 bp, Homo sapien
tcattaaaactatcaggaacattgg

SEQ ID NO: 3082112 - DNA, 25 bp, Homo sapien
aaaattctccgttggactcagacac

SEQ ID NO: 3082113 - DNA, 25 bp, Homo sapien
aaaaattctccgttggactcagaca

SEQ ID NO: 3082114 - DNA, 25 bp, Homo sapien
cactaagcacaagacgcaatcgacg

SEQ ID NO: 3082115 - DNA, 25 bp, Homo sapien
gaatcactgtgttcaaactctaacg

SEQ ID NO: 3082116 - DNA, 25 bp, Homo sapien
cgcaatcgacgaggtgaatcactgt

SEQ ID NO: 3082117 - DNA, 25 bp, Homo sapien
tgctgaagctgtgataccaggatgc

SEQ ID NO: 3082118 - DNA, 25 bp, Homo sapien
taccaaacagggcagaagaagtctt

SEQ ID NO: 3082119 - DNA, 25 bp, Homo sapien
tctggtcagcaggtgcacaaagtgc

SEQ ID NO: 3082120 - DNA, 25 bp, Homo sapien
tctaaagcatgaaagtccacggaca

SEQ ID NO: 3082121 - DNA, 25 bp, Homo sapien
gatgagtttcttatcctgagcccag

SEQ ID NO: 3082122 - DNA, 25 bp, Homo sapien
cctcaaaagcaaaagggctgacaaa

SEQ ID NO: 3082123 - DNA, 25 bp, Homo sapien
tgcctcaaaagcaaaagggctgaca

SEQ ID NO: 3082124 - DNA, 25 bp, Homo sapien
gcctcaaaagcaaaagggctgacaa

SEQ ID NO: 3082125 - DNA, 25 bp, Homo sapien
gacgcgtctcattagcgcacttctc

SEQ ID NO: 3082126 - DNA, 25 bp, Homo sapien
tctcattagcgcacttctctgtctc

SEQ ID NO: 3082127 - DNA, 25 bp, Homo sapien
gctatgtgagaaagacgcgtctcat

SEQ ID NO: 3082128 - DNA, 25 bp, Homo sapien
tgagaaagacgcgtctcattagcgc

SEQ ID NO: 3082129 - DNA, 25 bp, Homo sapien
gcagaaatcgagagcgcggtccgat

SEQ ID NO: 3082130 - DNA, 25 bp, Homo sapien
ttgggcctaggcgatatccggaacc

SEQ ID NO: 3082131 - DNA, 25 bp, Homo sapien
gactcggacaccaagaactcagacg

SEQ ID NO: 3082132 - DNA, 25 bp, Homo sapien
aaaccctagttgtgcctcgagtcga

SEQ ID NO: 3082133 - DNA, 25 bp, Homo sapien
cacacaaaggcagaaccgggactgt

SEQ ID NO: 3082134 - DNA, 25 bp, Homo sapien
acaaaggcagaaccgggactgtagg

SEQ ID NO: 3082135 - DNA, 25 bp, Homo sapien
gcagaaccgggactgtaggaacgga

SEQ ID NO: 3082136 - DNA, 25 bp, Homo sapien
gaaggatgggggcaccacacaaagg

SEQ ID NO: 3082137 - DNA, 25 bp, Homo sapien
cgtctgactcccgtcggccaccgta

SEQ ID NO: 3082138 - DNA, 25 bp, Homo sapien
tcggccaccgtactggtctgagagg

SEQ ID NO: 3082139 - DNA, 25 bp, Homo sapien
ggccaccgtactggtctgagaggaa

SEQ ID NO: 3082140 - DNA, 25 bp, Homo sapien
ccgtcggccaccgtactggtctgag

SEQ ID NO: 3082141 - DNA, 25 bp, Homo sapien
tcattcttgacggttctgttgggtt

SEQ ID NO: 3082142 - DNA, 25 bp, Homo sapien
cattcttgacggttctgttgggttg

SEQ ID NO: 3082143 - DNA, 25 bp, Homo sapien
attcttgacggttctgttgggttgc

SEQ ID NO: 3082144 - DNA, 25 bp, Homo sapien
ttcttgacggttctgttgggttgct

SEQ ID NO: 3082145 - DNA, 25 bp, Homo sapien
caactcagtgttatggcattcggca

SEQ ID NO: 3082146 - DNA, 25 bp, Homo sapien
tcatgaatacatcaacctgaggagt

SEQ ID NO: 3082147 - DNA, 25 bp, Homo sapien
gagagggttgatgctgacatgtcca

SEQ ID NO: 3082148 - DNA, 25 bp, Homo sapien
aacgccccttcataaagtgaccaag

SEQ ID NO: 3082149 - DNA, 25 bp, Homo sapien
tcagcaatgcaggtaggaggcgaac

SEQ ID NO: 3082150 - DNA, 25 bp, Homo sapien
tagactcggcgactgtgaattcaag

SEQ ID NO: 3082151 - DNA, 25 bp, Homo sapien
tccaagaaagctaggtagactcggc

SEQ ID NO: 3082152 - DNA, 25 bp, Homo sapien
tgagaacctccttggcatatgccct

SEQ ID NO: 3082153 - DNA, 25 bp, Homo sapien
gctgtgttatagaaaagtacagact

SEQ ID NO: 3082154 - DNA, 25 bp, Homo sapien
ctgagctgtgttatagaaaagtaca

SEQ ID NO: 3082155 - DNA, 25 bp, Homo sapien
tgttatagaaaagtacagactctgg

SEQ ID NO: 3082156 - DNA, 25 bp, Homo sapien
tgtgttatagaaaagtacagactct

SEQ ID NO: 3082157 - DNA, 25 bp, Homo sapien
accacagtttgattgcgcgcacaca

SEQ ID NO: 3082158 - DNA, 25 bp, Homo sapien
tgtaaatcctccacacacaatggta

SEQ ID NO: 3082159 - DNA, 25 bp, Homo sapien
tatccccgttaaactgtacatcgag

SEQ ID NO: 3082160 - DNA, 25 bp, Homo sapien
cctagagctgggctaaatttcaacc

SEQ ID NO: 3082161 - DNA, 25 bp, Homo sapien
tcttgcacagttccatcaaatgaag

SEQ ID NO: 3082162 - DNA, 25 bp, Homo sapien
tgaaaaatagcagggttatagcccc

SEQ ID NO: 3082163 - DNA, 25 bp, Homo sapien
tttaacatgactgggtactatggct

SEQ ID NO: 3082164 - DNA, 25 bp, Homo sapien
taattgtaacttaatcctgcagcga

SEQ ID NO: 3082165 - DNA, 25 bp, Homo sapien
taaagttatataactgattcagcac

SEQ ID NO: 3082166 - DNA, 25 bp, Homo sapien
aattgggagacatgagcgtctgtcc

SEQ ID NO: 3082167 - DNA, 25 bp, Homo sapien
cgtctgtcctgggttgcagggtcac

SEQ ID NO: 3082168 - DNA, 25 bp, Homo sapien
ttgcagggtcacaggttagccagga

SEQ ID NO: 3082169 - DNA, 25 bp, Homo sapien
ggagagtgcattgtactgttccaaa

SEQ ID NO: 3082170 - DNA, 25 bp, Homo sapien
ctgtgaagcagctcgtcagattgca

SEQ ID NO: 3082171 - DNA, 25 bp, Homo sapien
actgtgaagcagctcgtcagattgc

SEQ ID NO: 3082172 - DNA, 25 bp, Homo sapien
aagtctgatttgagtcaagtgggtg

SEQ ID NO: 3082173 - DNA, 25 bp, Homo sapien
tgggtgggagtgtttactgtgaagc

SEQ ID NO: 3082174 - DNA, 25 bp, Homo sapien
tgaaggcacgtggaggtgcaaagag

SEQ ID NO: 3082175 - DNA, 25 bp, Homo sapien
aaggcacgtggaggtgcaaagaggc

SEQ ID NO: 3082176 - DNA, 25 bp, Homo sapien
gaaggcacgtggaggtgcaaagagg

SEQ ID NO: 3082177 - DNA, 25 bp, Homo sapien
ctgaaggcacgtggaggtgcaaaga

SEQ ID NO: 3082178 - DNA, 25 bp, Homo sapien
agtagttaaacctgagtagtctgtc

SEQ ID NO: 3082179 - DNA, 25 bp, Homo sapien
tatgactacgcagacatacctacgt

SEQ ID NO: 3082180 - DNA, 25 bp, Homo sapien
tcggttgaactgagaacactctaag

SEQ ID NO: 3082181 - DNA, 25 bp, Homo sapien
tctaagtaatacagtgcacagatgc

SEQ ID NO: 3082182 - DNA, 25 bp, Homo sapien
aaaaaggggacactgatattgtgct

SEQ ID NO: 3082183 - DNA, 25 bp, Homo sapien
taagaaaaaggggacactgatattg

SEQ ID NO: 3082184 - DNA, 25 bp, Homo sapien
acactgatattgtgcttgaggacat

SEQ ID NO: 3082185 - DNA, 25 bp, Homo sapien
gggacactgatattgtgcttgagga

SEQ ID NO: 3082186 - DNA, 25 bp, Homo sapien
atggttgctgaagaatattaggtac

SEQ ID NO: 3082187 - DNA, 25 bp, Homo sapien
gatagtagccgatcagtactctgac

SEQ ID NO: 3082188 - DNA, 25 bp, Homo sapien
gaatattaggtacttcctcatgagg

SEQ ID NO: 3082189 - DNA, 25 bp, Homo sapien
catgaggttctgttgatagtagccg

SEQ ID NO: 3082190 - DNA, 25 bp, Homo sapien
caaatcaaagatacccattccatct

SEQ ID NO: 3082191 - DNA, 25 bp, Homo sapien
gatattaatgatatcagggtcaaga

SEQ ID NO: 3082192 - DNA, 25 bp, Homo sapien
gggtcaagatcatctcctgtgtcta

SEQ ID NO: 3082193 - DNA, 25 bp, Homo sapien
tgcccgcatcacctccatgggggta

SEQ ID NO: 3082194 - DNA, 25 bp, Homo sapien
cacatgttatcgcattaagggccca

SEQ ID NO: 3082195 - DNA, 25 bp, Homo sapien
tctatgtagtcaaacctccttctgc

SEQ ID NO: 3082196 - DNA, 25 bp, Homo sapien
taagggcccacctgcgtaattgagg

SEQ ID NO: 3082197 - DNA, 25 bp, Homo sapien
tctttggctcatgggctctttcacc

SEQ ID NO: 3082198 - DNA, 25 bp, Homo sapien
tattcttcagactaccaaaatggaa

SEQ ID NO: 3082199 - DNA, 25 bp, Homo sapien
tcttcagactaccaaaatggaacaa

SEQ ID NO: 3082200 - DNA, 25 bp, Homo sapien
gtattcttcagactaccaaaatgga

SEQ ID NO: 3082201 - DNA, 25 bp, Homo sapien
cagactaccaaaatggaacaaatta

SEQ ID NO: 3082202 - DNA, 25 bp, Homo sapien
tatttagagtcgtgcttcttccaaa

SEQ ID NO: 3082203 - DNA, 25 bp, Homo sapien
cagtggtataagtagctgaagctac

SEQ ID NO: 3082204 - DNA, 25 bp, Homo sapien
gaaagctaaatccaaattttcagtg

SEQ ID NO: 3082205 - DNA, 25 bp, Homo sapien
ggaaacacaagtatatgagtacatg

SEQ ID NO: 3082206 - DNA, 25 bp, Homo sapien
ttagagactgcaagtttcgacgact

SEQ ID NO: 3082207 - DNA, 25 bp, Homo sapien
tctgcagcagatataccacacattc

SEQ ID NO: 3082208 - DNA, 25 bp, Homo sapien
taacaaaagagccttgcggctccat

SEQ ID NO: 3082209 - DNA, 25 bp, Homo sapien
tccattgccaccaagcaagcactga

SEQ ID NO: 3082210 - DNA, 25 bp, Homo sapien
cactcccaaagtttctgtagaccaa

SEQ ID NO: 3082211 - DNA, 25 bp, Homo sapien
catttgtacaagtcctaagcaccac

SEQ ID NO: 3082212 - DNA, 25 bp, Homo sapien
gacgaccaattacaactctccatgg

SEQ ID NO: 3082213 - DNA, 25 bp, Homo sapien
tgaccaatccttcctagacgaccaa

SEQ ID NO: 3082214 - DNA, 25 bp, Homo sapien
tataaaacacctcaattcatcagca

SEQ ID NO: 3082215 - DNA, 25 bp, Homo sapien
cgtaagtcctaagcgagaatattca

SEQ ID NO: 3082216 - DNA, 25 bp, Homo sapien
gtgccatcccgacattttaagagag

SEQ ID NO: 3082217 - DNA, 25 bp, Homo sapien
cagcaatactgctctacgccaggga

SEQ ID NO: 3082218 - DNA, 25 bp, Homo sapien
ttaaagagccaatacttcaaatgga

SEQ ID NO: 3082219 - DNA, 25 bp, Homo sapien
tgtccttcactagccaaatatgcaa

SEQ ID NO: 3082220 - DNA, 25 bp, Homo sapien
taagcactctttggctgagcaacag

SEQ ID NO: 3082221 - DNA, 25 bp, Homo sapien
agcaatccctgttctatactataag

SEQ ID NO: 3082222 - DNA, 25 bp, Homo sapien
gcttttcaggttctcctgtacagcg

SEQ ID NO: 3082223 - DNA, 25 bp, Homo sapien
ggttctcctgtacagcgttcactag

SEQ ID NO: 3082224 - DNA, 25 bp, Homo sapien
gaaaacatgtttcaagtctctacta

SEQ ID NO: 3082225 - DNA, 25 bp, Homo sapien
cagcgttcactagccttgaaaacat

SEQ ID NO: 3082226 - DNA, 25 bp, Homo sapien
gacacagaagttagtgaccttaatc

SEQ ID NO: 3082227 - DNA, 25 bp, Homo sapien
aataattgcctcaagctttatgaca

SEQ ID NO: 3082228 - DNA, 25 bp, Homo sapien
tgttctatagatactttactagacc

SEQ ID NO: 3082229 - DNA, 25 bp, Homo sapien
tgttacaaatggaatgatatgatat

SEQ ID NO: 3082230 - DNA, 25 bp, Homo sapien
gaatccacctttgatcatgtgataa

SEQ ID NO: 3082231 - DNA, 25 bp, Homo sapien
tctgtgcaagatgcaagaatccacc

SEQ ID NO: 3082232 - DNA, 25 bp, Homo sapien
taaacagtatcccacaaaaagaaca

SEQ ID NO: 3082233 - DNA, 25 bp, Homo sapien
gccagaataaaaggaggtgcataaa

SEQ ID NO: 3082234 - DNA, 25 bp, Homo sapien
tcacaggttgcaacaggtactgaca

SEQ ID NO: 3082235 - DNA, 25 bp, Homo sapien
tggaccaaagccagtcaatgttttc

SEQ ID NO: 3082236 - DNA, 25 bp, Homo sapien
gatgttggaagtggcctccgacact

SEQ ID NO: 3082237 - DNA, 25 bp, Homo sapien
ggcagtttccatggctaaacctgga

SEQ ID NO: 3082238 - DNA, 25 bp, Homo sapien
caacaattgcaggtggatacgtgac

SEQ ID NO: 3082239 - DNA, 25 bp, Homo sapien
tctagaaagcatcgaagtagcccca

SEQ ID NO: 3082240 - DNA, 25 bp, Homo sapien
gatacgtgactgcatgtgaatcacc

SEQ ID NO: 3082241 - DNA, 25 bp, Homo sapien
gtagccccaatgtccacacactaga

SEQ ID NO: 3082242 - DNA, 25 bp, Homo sapien
cactgtcatagtgctgctcgctgca

SEQ ID NO: 3082243 - DNA, 25 bp, Homo sapien
gctgggaaagtagagagctgtccaa

SEQ ID NO: 3082244 - DNA, 25 bp, Homo sapien
gtagatatggcaacacctgaagtca

SEQ ID NO: 3082245 - DNA, 25 bp, Homo sapien
gtctgtagagctgatgtctgttgcc

SEQ ID NO: 3082246 - DNA, 25 bp, Homo sapien
tataagcaatacagttaggcacggg

SEQ ID NO: 3082247 - DNA, 25 bp, Homo sapien
taggcacgggtagaatgaaagaaaa

SEQ ID NO: 3082248 - DNA, 25 bp, Homo sapien
tgctaatggtgtgacctacacttgc

SEQ ID NO: 3082249 - DNA, 25 bp, Homo sapien
ttaaaacatcagaccctacagaggc

SEQ ID NO: 3082250 - DNA, 25 bp, Homo sapien
ttatacaataaatacaaattcaata

SEQ ID NO: 3082251 - DNA, 25 bp, Homo sapien
tatacaataaatacaaattcaatac

SEQ ID NO: 3082252 - DNA, 25 bp, Homo sapien
aaaatgcttcattgttaccgtcagc

SEQ ID NO: 3082253 - DNA, 25 bp, Homo sapien
tgttaacagtcgagaaacaggtcta

SEQ ID NO: 3082254 - DNA, 25 bp, Homo sapien
gcagacttgtgcataaagcttgagt

SEQ ID NO: 3082255 - DNA, 25 bp, Homo sapien
gtctatgttgacctaatcgacagga

SEQ ID NO: 3082256 - DNA, 25 bp, Homo sapien
ttctggacacagtacaacataggct

SEQ ID NO: 3082257 - DNA, 25 bp, Homo sapien
ggagaaagcaccagataatcataat

SEQ ID NO: 3082258 - DNA, 25 bp, Homo sapien
tctctttgagatccatagggttcca

SEQ ID NO: 3082259 - DNA, 25 bp, Homo sapien
taagtctctcccaataaggaagagc

SEQ ID NO: 3082260 - DNA, 25 bp, Homo sapien
cagaatattagttttgtaatgagat

SEQ ID NO: 3082261 - DNA, 25 bp, Homo sapien
tacggcccacctttcagagacaatc

SEQ ID NO: 3082262 - DNA, 25 bp, Homo sapien
ggaaaatataggcaaatctactact

SEQ ID NO: 3082263 - DNA, 25 bp, Homo sapien
aaagtcaaagatttcaagacgtatc

SEQ ID NO: 3082264 - DNA, 25 bp, Homo sapien
caagtgagaggaccctgaacacccc

SEQ ID NO: 3082265 - DNA, 25 bp, Homo sapien
cctgaacaccccaaggtcttactgt

SEQ ID NO: 3082266 - DNA, 25 bp, Homo sapien
aagagcctcggccagccattttatg

SEQ ID NO: 3082267 - DNA, 25 bp, Homo sapien
tctgaatggcatcctgaagaactgg

SEQ ID NO: 3082268 - DNA, 25 bp, Homo sapien
ggagcattcgaagtatatcctgtga

SEQ ID NO: 3082269 - DNA, 25 bp, Homo sapien
gagagaggagcattcgaagtatatc

SEQ ID NO: 3082270 - DNA, 25 bp, Homo sapien
tgaagagagaggagcattcgaagta

SEQ ID NO: 3082271 - DNA, 25 bp, Homo sapien
gaagtatatcctgtgagcactgcat

SEQ ID NO: 3082272 - DNA, 25 bp, Homo sapien
aaacctggcacatgtacccataacc

SEQ ID NO: 3082273 - DNA, 25 bp, Homo sapien
aaaggagtgatcatggaggataatc

SEQ ID NO: 3082274 - DNA, 25 bp, Homo sapien
taatctgtatgctgacccccaggac

SEQ ID NO: 3082275 - DNA, 25 bp, Homo sapien
ccatgatagcgtaacactgcacttc

SEQ ID NO: 3082276 - DNA, 25 bp, Homo sapien
atctcgggctcactgcaatatccac

SEQ ID NO: 3082277 - DNA, 25 bp, Homo sapien
aatatccacctcatggggtcaagca

SEQ ID NO: 3082278 - DNA, 25 bp, Homo sapien
gcaatatccacctcatggggtcaag

SEQ ID NO: 3082279 - DNA, 25 bp, Homo sapien
ctgcaatatccacctcatggggtca

SEQ ID NO: 3082280 - DNA, 25 bp, Homo sapien
tttccacacaatagcaacagagtgt

SEQ ID NO: 3082281 - DNA, 25 bp, Homo sapien
tccacacaatagcaacagagtgtct

SEQ ID NO: 3082282 - DNA, 25 bp, Homo sapien
ttccacacaatagcaacagagtgtc

SEQ ID NO: 3082283 - DNA, 25 bp, Homo sapien
ggtgcactgctaggaggcatcccaa

SEQ ID NO: 3082284 - DNA, 25 bp, Homo sapien
ccgctgttactaggaggtgcactgc

SEQ ID NO: 3082285 - DNA, 25 bp, Homo sapien
tgttatccatgaactgacgcccatg

SEQ ID NO: 3082286 - DNA, 25 bp, Homo sapien
ggtctgctgctccaaagggtgaaaa

SEQ ID NO: 3082287 - DNA, 25 bp, Homo sapien
gagatgctcatgtgtaaaaagggaa

SEQ ID NO: 3082288 - DNA, 25 bp, Homo sapien
tgctaccacttataagacatctcag

SEQ ID NO: 3082289 - DNA, 25 bp, Homo sapien
tagccttgagttgaaactgaccaag

SEQ ID NO: 3082290 - DNA, 25 bp, Homo sapien
aaggtgcttcggaatacaaatcaag

SEQ ID NO: 3082291 - DNA, 25 bp, Homo sapien
actctgacggtaaatacactcttct

SEQ ID NO: 3082292 - DNA, 25 bp, Homo sapien
tctttgatgaatggcattgaaggcc

SEQ ID NO: 3082293 - DNA, 25 bp, Homo sapien
ttttccaacagtccaactctgacgg

SEQ ID NO: 3082294 - DNA, 25 bp, Homo sapien
acactcttctggcaatttgataggg

SEQ ID NO: 3082295 - DNA, 25 bp, Homo sapien
tctagaacagttcctccaggtgttg

SEQ ID NO: 3082296 - DNA, 25 bp, Homo sapien
cctccaggtgttgtatccatactac

SEQ ID NO: 3082297 - DNA, 25 bp, Homo sapien
gggctacagaatccctcatcaacct

SEQ ID NO: 3082298 - DNA, 25 bp, Homo sapien
tttgaactgcgctcctatactagaa

SEQ ID NO: 3082299 - DNA, 25 bp, Homo sapien
taataaaaacatacattttaacatg

SEQ ID NO: 3082300 - DNA, 25 bp, Homo sapien
aataaaaacatacattttaacatga

SEQ ID NO: 3082301 - DNA, 25 bp, Homo sapien
agataacgggtccagatttcctgtc

SEQ ID NO: 3082302 - DNA, 25 bp, Homo sapien
tatgcaagataacgggtccagattt

SEQ ID NO: 3082303 - DNA, 25 bp, Homo sapien
gcaagataacgggtccagatttcct

SEQ ID NO: 3082304 - DNA, 25 bp, Homo sapien
ttatgcaagataacgggtccagatt

SEQ ID NO: 3082305 - DNA, 25 bp, Homo sapien
gacactatggcaagactactcaaac

SEQ ID NO: 3082306 - DNA, 25 bp, Homo sapien
acaaattcaaaagagctggtattcc

SEQ ID NO: 3082307 - DNA, 25 bp, Homo sapien
catacggcagagctcaaattaaggt

SEQ ID NO: 3082308 - DNA, 25 bp, Homo sapien
ccagagtcatttctcaaactacaga

SEQ ID NO: 3082309 - DNA, 25 bp, Homo sapien
ggtcagtataagagacagccaggtc

SEQ ID NO: 3082310 - DNA, 25 bp, Homo sapien
gaagagattatcaaggtcagtataa

SEQ ID NO: 3082311 - DNA, 25 bp, Homo sapien
cttgttgatggaggacgggcatgac

SEQ ID NO: 3082312 - DNA, 25 bp, Homo sapien
gagtcataaatcaaacttgttgatg

SEQ ID NO: 3082313 - DNA, 25 bp, Homo sapien
gcacgtgaccctatgcccagttaat

SEQ ID NO: 3082314 - DNA, 25 bp, Homo sapien
aggcacgtgaccctatgcccagtta

SEQ ID NO: 3082315 - DNA, 25 bp, Homo sapien
tgtctctgtgcctcaataccaagaa

SEQ ID NO: 3082316 - DNA, 25 bp, Homo sapien
tgtgcttcgcccagtactaggtgct

SEQ ID NO: 3082317 - DNA, 25 bp, Homo sapien
cactaacagtatgaccctcgacaaa

SEQ ID NO: 3082318 - DNA, 25 bp, Homo sapien
cagaacaatgatcaagagctgactc

SEQ ID NO: 3082319 - DNA, 25 bp, Homo sapien
ctggcctatttattgtttttacaca

SEQ ID NO: 3082320 - DNA, 25 bp, Homo sapien
ggtctcactacgttggccaaggtgg

SEQ ID NO: 3082321 - DNA, 25 bp, Homo sapien
ggcctatttattgtttttacacaga

SEQ ID NO: 3082322 - DNA, 25 bp, Homo sapien
tattgtttttacacagatagggtct

SEQ ID NO: 3082323 - DNA, 25 bp, Homo sapien
gctggaaccataggcgcgtgcctcc

SEQ ID NO: 3082324 - DNA, 25 bp, Homo sapien
attgtgcccagcccaacttggctca

SEQ ID NO: 3082325 - DNA, 25 bp, Homo sapien
ctgcctcggccttacaggtgtaagc

SEQ ID NO: 3082326 - DNA, 25 bp, Homo sapien
cccagcccaacttggctcaccacaa

SEQ ID NO: 3082327 - DNA, 25 bp, Homo sapien
gggactaaataatgacatagcatct

SEQ ID NO: 3082328 - DNA, 25 bp, Homo sapien
tagagggactaaataatgacatagc

SEQ ID NO: 3082329 - DNA, 25 bp, Homo sapien
ttgcttgatagagggactaaataat

SEQ ID NO: 3082330 - DNA, 25 bp, Homo sapien
gatagagggactaaataatgacata

SEQ ID NO: 3082331 - DNA, 25 bp, Homo sapien
aggctgatctcgctctcctgatctc

SEQ ID NO: 3082332 - DNA, 25 bp, Homo sapien
gccaggctgatctcgctctcctgat

SEQ ID NO: 3082333 - DNA, 25 bp, Homo sapien
ctgatctcgctctcctgatctcagg

SEQ ID NO: 3082334 - DNA, 25 bp, Homo sapien
caggctgatctcgctctcctgatct

SEQ ID NO: 3082335 - DNA, 25 bp, Homo sapien
cagtgacctaagatcataactttgc

SEQ ID NO: 3082336 - DNA, 25 bp, Homo sapien
gacctaagatcataactttgcactc

SEQ ID NO: 3082337 - DNA, 25 bp, Homo sapien
aactcacacgtattattggatcctt

SEQ ID NO: 3082338 - DNA, 25 bp, Homo sapien
aaaaaactcacacgtattattggat

SEQ ID NO: 3082339 - DNA, 25 bp, Homo sapien
tcaggaaaaaggaattcctcatctc

SEQ ID NO: 3082340 - DNA, 25 bp, Homo sapien
ggttcttgttctgcatcagatgcta

SEQ ID NO: 3082341 - DNA, 25 bp, Homo sapien
gatattgctgcactaattcatcaga

SEQ ID NO: 3082342 - DNA, 25 bp, Homo sapien
gctattgctgaaagacactggtttt

SEQ ID NO: 3082343 - DNA, 25 bp, Homo sapien
ccaaggtcactgtcaaaggaaagct

SEQ ID NO: 3082344 - DNA, 25 bp, Homo sapien
gaatcaatccctaaactgagccaag

SEQ ID NO: 3082345 - DNA, 25 bp, Homo sapien
tggtataccactaacacaacatagg

SEQ ID NO: 3082346 - DNA, 25 bp, Homo sapien
aagatcaggtacagccatgaacagg

SEQ ID NO: 3082347 - DNA, 25 bp, Homo sapien
taatgctatactagttaggtagcca

SEQ ID NO: 3082348 - DNA, 25 bp, Homo sapien
ggtagccatcaccacctgaaactgc

SEQ ID NO: 3082349 - DNA, 25 bp, Homo sapien
aaggtagtagcatcaccggagacca

SEQ ID NO: 3082350 - DNA, 25 bp, Homo sapien
ttagccaagcggtattgtcacatgt

SEQ ID NO: 3082351 - DNA, 25 bp, Homo sapien
tggttcctcatctacatacagagct

SEQ ID NO: 3082352 - DNA, 25 bp, Homo sapien
gccagaccttcattatttagcaaga

SEQ ID NO: 3082353 - DNA, 25 bp, Homo sapien
gagcttctcatatcagcctatacag

SEQ ID NO: 3082354 - DNA, 25 bp, Homo sapien
agacatgatcccaaccgcctgatgg

SEQ ID NO: 3082355 - DNA, 25 bp, Homo sapien
tcatgacacaccaaactactaagga

SEQ ID NO: 3082356 - DNA, 25 bp, Homo sapien
tacctcatgaactaaatacgcttgg

SEQ ID NO: 3082357 - DNA, 25 bp, Homo sapien
tatagtcctacgcttttcaggtctc

SEQ ID NO: 3082358 - DNA, 25 bp, Homo sapien
tacttctaatttcccagtgtcggcc

SEQ ID NO: 3082359 - DNA, 25 bp, Homo sapien
gaggctggcttagacttatactaca

SEQ ID NO: 3082360 - DNA, 25 bp, Homo sapien
gacaagagtccttgccctcatagag

SEQ ID NO: 3082361 - DNA, 25 bp, Homo sapien
ccctcactgctgtgtagagaataca

SEQ ID NO: 3082362 - DNA, 25 bp, Homo sapien
caaggatgctggtgtagctaaatca

SEQ ID NO: 3082363 - DNA, 25 bp, Homo sapien
tgatgcagacacttaatcggcatag

SEQ ID NO: 3082364 - DNA, 25 bp, Homo sapien
caccagtcgtcaggcaacctggagg

SEQ ID NO: 3082365 - DNA, 25 bp, Homo sapien
cccatttccatcctaggctggttca

SEQ ID NO: 3082366 - DNA, 25 bp, Homo sapien
gaacttgatgcagacacttaatcgg

SEQ ID NO: 3082367 - DNA, 25 bp, Homo sapien
tagtaacaatcaagtcgggcgtggt

SEQ ID NO: 3082368 - DNA, 25 bp, Homo sapien
tattgaatgagcaaggaccaccagt

SEQ ID NO: 3082369 - DNA, 25 bp, Homo sapien
aaatacgtctagacaggccaggtgt

SEQ ID NO: 3082370 - DNA, 25 bp, Homo sapien
tgagaatcccctgagaaaacagagc

SEQ ID NO: 3082371 - DNA, 25 bp, Homo sapien
gtgagcagggatcgcgcaactgtac

SEQ ID NO: 3082372 - DNA, 25 bp, Homo sapien
gcagggatcgcgcaactgtactcca

SEQ ID NO: 3082373 - DNA, 25 bp, Homo sapien
gagcagggatcgcgcaactgtactc

SEQ ID NO: 3082374 - DNA, 25 bp, Homo sapien
agtgagcagggatcgcgcaactgta

SEQ ID NO: 3082375 - DNA, 25 bp, Homo sapien
aaaactaatgcaggattaataccca

SEQ ID NO: 3082376 - DNA, 25 bp, Homo sapien
ccagagcatgcaaataatacatcag

SEQ ID NO: 3082377 - DNA, 25 bp, Homo sapien
catagaaagtcaagggatacctgga

SEQ ID NO: 3082378 - DNA, 25 bp, Homo sapien
cattaatacagtggacaaagaaggc

SEQ ID NO: 3082379 - DNA, 25 bp, Homo sapien
ctccactttttgtggctaaagttat

SEQ ID NO: 3082380 - DNA, 25 bp, Homo sapien
taaagttatttcataatgaagaagt

SEQ ID NO: 3082381 - DNA, 25 bp, Homo sapien
tattttctccactttttgtggctaa

SEQ ID NO: 3082382 - DNA, 25 bp, Homo sapien
agttatttcataatgaagaagttcc

SEQ ID NO: 3082383 - DNA, 25 bp, Homo sapien
atgaatttattcttgtaaatcctac

SEQ ID NO: 3082384 - DNA, 25 bp, Homo sapien
aatgaatttattcttgtaaatccta

SEQ ID NO: 3082385 - DNA, 25 bp, Homo sapien
tgaatttattcttgtaaatcctacc

SEQ ID NO: 3082386 - DNA, 25 bp, Homo sapien
tactgagtcctagtattaagaactt

SEQ ID NO: 3082387 - DNA, 25 bp, Homo sapien
tcctagtattaagaacttgcatcac

SEQ ID NO: 3082388 - DNA, 25 bp, Homo sapien
gaatccaatactgagtcctagtatt

SEQ ID NO: 3082389 - DNA, 25 bp, Homo sapien
gtattaagaacttgcatcacttcca

SEQ ID NO: 3082390 - DNA, 25 bp, Homo sapien
taaattataatggtgactattaaaa

SEQ ID NO: 3082391 - DNA, 25 bp, Homo sapien
gctgacctaaagatggtgcctgtcc

SEQ ID NO: 3082392 - DNA, 25 bp, Homo sapien
tcctgtccaaaaggtccaactggat

SEQ ID NO: 3082393 - DNA, 25 bp, Homo sapien
catttcggtgccatgcatctgagga

SEQ ID NO: 3082394 - DNA, 25 bp, Homo sapien
tgctgtaccaacatatactgtaggt

SEQ ID NO: 3082395 - DNA, 25 bp, Homo sapien
gacaacatgattctagacctggaaa

SEQ ID NO: 3082396 - DNA, 25 bp, Homo sapien
gactagggatgtcaaggccattact

SEQ ID NO: 3082397 - DNA, 25 bp, Homo sapien
tggcacaagataagaatgcctcctc

SEQ ID NO: 3082398 - DNA, 25 bp, Homo sapien
caaaagtaaccctgttggcagacaa

SEQ ID NO: 3082399 - DNA, 25 bp, Homo sapien
tagtgccattgaggaaggaatgctt

SEQ ID NO: 3082400 - DNA, 25 bp, Homo sapien
cataagcattcagtggcgtaacaaa

SEQ ID NO: 3082401 - DNA, 25 bp, Homo sapien
cacataggcatcaatcgatcgggaa

SEQ ID NO: 3082402 - DNA, 25 bp, Homo sapien
caaaactttcagagtctgcctctgg

SEQ ID NO: 3082403 - DNA, 25 bp, Homo sapien
agcagctgtcgcttcttcgcataga

SEQ ID NO: 3082404 - DNA, 25 bp, Homo sapien
catagaccacctgatgaagcagaat

SEQ ID NO: 3082405 - DNA, 25 bp, Homo sapien
ctttgtgtggcttcaacaaaatccc

SEQ ID NO: 3082406 - DNA, 25 bp, Homo sapien
aaatcccaggatgccactttagcag

SEQ ID NO: 3082407 - DNA, 25 bp, Homo sapien
tctgggtattttcccaccatggtgg

SEQ ID NO: 3082408 - DNA, 25 bp, Homo sapien
ttgccaaactctatccaccacatga

SEQ ID NO: 3082409 - DNA, 25 bp, Homo sapien
tgacccacttctggacagactgagg

SEQ ID NO: 3082410 - DNA, 25 bp, Homo sapien
tactatcggagttgaagccatcaga

SEQ ID NO: 3082411 - DNA, 25 bp, Homo sapien
ctgatgagacaaattactgctatac

SEQ ID NO: 3082412 - DNA, 25 bp, Homo sapien
gagctgatgagacaaattactgcta

SEQ ID NO: 3082413 - DNA, 25 bp, Homo sapien
cagagctgatgagacaaattactgc

SEQ ID NO: 3082414 - DNA, 25 bp, Homo sapien
gctgatgagacaaattactgctata

SEQ ID NO: 3082415 - DNA, 25 bp, Homo sapien
catgctgggtagatcattcggacac

SEQ ID NO: 3082416 - DNA, 25 bp, Homo sapien
gacttcctcaggagacgtaggtggt

SEQ ID NO: 3082417 - DNA, 25 bp, Homo sapien
tctcttgtggaagcaggcacttggt

SEQ ID NO: 3082418 - DNA, 25 bp, Homo sapien
tgagggactagaacaaagcatgctg

SEQ ID NO: 3082419 - DNA, 25 bp, Homo sapien
cacaataagctgtcagtggtggtta

SEQ ID NO: 3082420 - DNA, 25 bp, Homo sapien
ttaacaaaggtaatctggacactag

SEQ ID NO: 3082421 - DNA, 25 bp, Homo sapien
tcacaactgctctagtagtaatggg

SEQ ID NO: 3082422 - DNA, 25 bp, Homo sapien
tggtggttatctttgctgagagaga

SEQ ID NO: 3082423 - DNA, 25 bp, Homo sapien
taagcatgtgatataagccacatcc

SEQ ID NO: 3082424 - DNA, 25 bp, Homo sapien
ccctgaatgagaggacatagagaat

SEQ ID NO: 3082425 - DNA, 25 bp, Homo sapien
tctgctatgagattaacatgtccca

SEQ ID NO: 3082426 - DNA, 25 bp, Homo sapien
tgtcttcactccattgtcaggctgt

SEQ ID NO: 3082427 - DNA, 25 bp, Homo sapien
tttgtagctgaatcagacatcttga

SEQ ID NO: 3082428 - DNA, 25 bp, Homo sapien
ctgtgagagtgccatttagtccaaa

SEQ ID NO: 3082429 - DNA, 25 bp, Homo sapien
tactgcagctaaagaatcatcttcc

SEQ ID NO: 3082430 - DNA, 25 bp, Homo sapien
catgagataggatagaactgtttcc

SEQ ID NO: 3082431 - DNA, 25 bp, Homo sapien
ttcactgacttaacactgtaatggg

SEQ ID NO: 3082432 - DNA, 25 bp, Homo sapien
atcatcattaggctaaagatcaggg

SEQ ID NO: 3082433 - DNA, 25 bp, Homo sapien
tatggcttatatgacctgacataca

SEQ ID NO: 3082434 - DNA, 25 bp, Homo sapien
tccattatgctatctaaaagaacac

SEQ ID NO: 3082435 - DNA, 25 bp, Homo sapien
gttggttaatttccacactggtaca

SEQ ID NO: 3082436 - DNA, 25 bp, Homo sapien
gactgttgagcaagggtgatatgct

SEQ ID NO: 3082437 - DNA, 25 bp, Homo sapien
gatatgctcttcactgagaaggtat

SEQ ID NO: 3082438 - DNA, 25 bp, Homo sapien
cactgagaaggtatacaggttgatg

SEQ ID NO: 3082439 - DNA, 25 bp, Homo sapien
gaaattcaggtatggctgggtatac

SEQ ID NO: 3082440 - DNA, 25 bp, Homo sapien
caaatgtaactgacagaggctagtc

SEQ ID NO: 3082441 - DNA, 25 bp, Homo sapien
ccaaggacatcagaggtatcttcaa

SEQ ID NO: 3082442 - DNA, 25 bp, Homo sapien
taaaggcggacaacagaattaacag

SEQ ID NO: 3082443 - DNA, 25 bp, Homo sapien
tcgcttgaatccacgatgtggaggc

SEQ ID NO: 3082444 - DNA, 25 bp, Homo sapien
tgtgactagtctaaaaaatgctttt

SEQ ID NO: 3082445 - DNA, 25 bp, Homo sapien
ttccactactgcatatgtgactagt

SEQ ID NO: 3082446 - DNA, 25 bp, Homo sapien
catatgtgactagtctaaaaaatgc

SEQ ID NO: 3082447 - DNA, 25 bp, Homo sapien
ctattcacaggcacagtcgcggagc

SEQ ID NO: 3082448 - DNA, 25 bp, Homo sapien
gccactgtgccggcctgaaattttt

SEQ ID NO: 3082449 - DNA, 25 bp, Homo sapien
ttcacaggcacagtcgcggagcact

SEQ ID NO: 3082450 - DNA, 25 bp, Homo sapien
ttttaagagatggcagtctccctat

SEQ ID NO: 3082451 - DNA, 25 bp, Homo sapien
ttctagacagacaaagtagaatggt

SEQ ID NO: 3082452 - DNA, 25 bp, Homo sapien
tgagtacacattcagtttgggatga

SEQ ID NO: 3082453 - DNA, 25 bp, Homo sapien
gcaatagtcaagtttctagacagac

SEQ ID NO: 3082454 - DNA, 25 bp, Homo sapien
gattttatgcttactgaaataaccc

SEQ ID NO: 3082455 - DNA, 25 bp, Homo sapien
tttgccttttcggagacagtgagaa

SEQ ID NO: 3082456 - DNA, 25 bp, Homo sapien
agcaatagctcctagcttctctaga

SEQ ID NO: 3082457 - DNA, 25 bp, Homo sapien
aaggacatcctaacgctactaatgg

SEQ ID NO: 3082458 - DNA, 25 bp, Homo sapien
tctactggacagtacattagatgac

SEQ ID NO: 3082459 - DNA, 25 bp, Homo sapien
ttcataaggctttacaaaccacttg

SEQ ID NO: 3082460 - DNA, 25 bp, Homo sapien
tgccaatacgtacaaaattcctgtt

SEQ ID NO: 3082461 - DNA, 25 bp, Homo sapien
tcctgttcattaaacaccgttccaa

SEQ ID NO: 3082462 - DNA, 25 bp, Homo sapien
gagtacggcattcataggaaagtcc

SEQ ID NO: 3082463 - DNA, 25 bp, Homo sapien
gttgtaacacttgttctacataaga

SEQ ID NO: 3082464 - DNA, 25 bp, Homo sapien
tggttgtaacacttgttctacataa

SEQ ID NO: 3082465 - DNA, 25 bp, Homo sapien
ggttgtaacacttgttctacataag

SEQ ID NO: 3082466 - DNA, 25 bp, Homo sapien
atggttgtaacacttgttctacata

SEQ ID NO: 3082467 - DNA, 25 bp, Homo sapien
tccacttaattcctgtcaagtcagc

SEQ ID NO: 3082468 - DNA, 25 bp, Homo sapien
accaagtacatctgccttaaggcag

SEQ ID NO: 3082469 - DNA, 25 bp, Homo sapien
aggtctttgatctcgccgccaaaca

SEQ ID NO: 3082470 - DNA, 25 bp, Homo sapien
ataagtcatggtgaataaggtcagc

SEQ ID NO: 3082471 - DNA, 25 bp, Homo sapien
caggctggccccgttcggcacgaag

SEQ ID NO: 3082472 - DNA, 25 bp, Homo sapien
tacagtgacaatcttccaggctggc

SEQ ID NO: 3082473 - DNA, 25 bp, Homo sapien
cgttcggcacgaaggaggcactcat

SEQ ID NO: 3082474 - DNA, 25 bp, Homo sapien
ggcagaagaggttacagtgacaatc

SEQ ID NO: 3082475 - DNA, 25 bp, Homo sapien
acaacccaccatccgccattaccgc

SEQ ID NO: 3082476 - DNA, 25 bp, Homo sapien
ccaccatccgccattaccgccgcct

SEQ ID NO: 3082477 - DNA, 25 bp, Homo sapien
cacaacccaccatccgccattaccg

SEQ ID NO: 3082478 - DNA, 25 bp, Homo sapien
catccgccattaccgccgcctccga

SEQ ID NO: 3082479 - DNA, 25 bp, Homo sapien
ggcagcggcgatgtccttaagccca

SEQ ID NO: 3082480 - DNA, 25 bp, Homo sapien
ttcgtgtcgttcctgggccaagccg

SEQ ID NO: 3082481 - DNA, 25 bp, Homo sapien
taatcaaaatcaagtccgagacggc

SEQ ID NO: 3082482 - DNA, 25 bp, Homo sapien
cggcctaaagtttgccctcctgtgg

SEQ ID NO: 3082483 - DNA, 25 bp, Homo sapien
gaaaaatctgcaaggtctagagcag

SEQ ID NO: 3082484 - DNA, 25 bp, Homo sapien
aaaaatctgcaaggtctagagcagc

SEQ ID NO: 3082485 - DNA, 25 bp, Homo sapien
tgaaaaatctgcaaggtctagagca

SEQ ID NO: 3082486 - DNA, 25 bp, Homo sapien
gatggcccaaagtcagtcttttttg

SEQ ID NO: 3082487 - DNA, 25 bp, Homo sapien
gaagtgcacaagaggcttcccctac

SEQ ID NO: 3082488 - DNA, 25 bp, Homo sapien
ctgcacgccggatgtgactggtgat

SEQ ID NO: 3082489 - DNA, 25 bp, Homo sapien
tgataagagtcaggaagtagccact

SEQ ID NO: 3082490 - DNA, 25 bp, Homo sapien
ccgtatatccttgagagatacagaa

SEQ ID NO: 3082491 - DNA, 25 bp, Homo sapien
ggtccgtagtatccaattgtactgc

SEQ ID NO: 3082492 - DNA, 25 bp, Homo sapien
gtgttaatgacctccttgtaagggc

SEQ ID NO: 3082493 - DNA, 25 bp, Homo sapien
ccttgtaagggctgctatggtccgt

SEQ ID NO: 3082494 - DNA, 25 bp, Homo sapien
ctacaatccagctggatctatacat

SEQ ID NO: 3082495 - DNA, 25 bp, Homo sapien
tctgtggctctacaatccagctgga

SEQ ID NO: 3082496 - DNA, 25 bp, Homo sapien
ggctctacaatccagctggatctat

SEQ ID NO: 3082497 - DNA, 25 bp, Homo sapien
ggatctgtggctctacaatccagct

SEQ ID NO: 3082498 - DNA, 25 bp, Homo sapien
caataaagggtggtggaagtctgca

SEQ ID NO: 3082499 - DNA, 25 bp, Homo sapien
cggccagcttgggagtcttataaag

SEQ ID NO: 3082500 - DNA, 25 bp, Homo sapien
taccctggttgctctaggatgccac

SEQ ID NO: 3082501 - DNA, 25 bp, Homo sapien
ggacagtaaggacaacaggcaccct

SEQ ID NO: 3082502 - DNA, 25 bp, Homo sapien
gtaaatcccccatgggcagtcctca

SEQ ID NO: 3082503 - DNA, 25 bp, Homo sapien
tgtgtcgttgatagaaagagaggac

SEQ ID NO: 3082504 - DNA, 25 bp, Homo sapien
gcatggatctgatgagtaaatcccc

SEQ ID NO: 3082505 - DNA, 25 bp, Homo sapien
catagccttcccagttaataaaaca

SEQ ID NO: 3082506 - DNA, 25 bp, Homo sapien
tttcgtgacagttttagtcagcctc

SEQ ID NO: 3082507 - DNA, 25 bp, Homo sapien
gcagctgtcattgaccccctccttt

SEQ ID NO: 3082508 - DNA, 25 bp, Homo sapien
agctgtcattgaccccctccttttc

SEQ ID NO: 3082509 - DNA, 25 bp, Homo sapien
tcgtgacagttttagtcagcctctc

SEQ ID NO: 3082510 - DNA, 25 bp, Homo sapien
tttcagcttattcccgttgcccctg

SEQ ID NO: 3082511 - DNA, 25 bp, Homo sapien
caccctctctggaccagccttttca

SEQ ID NO: 3082512 - DNA, 25 bp, Homo sapien
ttcagcttattcccgttgcccctgg

SEQ ID NO: 3082513 - DNA, 25 bp, Homo sapien
aagagctttatttacacactggcac

SEQ ID NO: 3082514 - DNA, 25 bp, Homo sapien
tttatttacacactggcacaaggct

SEQ ID NO: 3082515 - DNA, 25 bp, Homo sapien
tatttacacactggcacaaggctcg

SEQ ID NO: 3082516 - DNA, 25 bp, Homo sapien
tacacactggcacaaggctcgtggg

SEQ ID NO: 3082517 - DNA, 25 bp, Homo sapien
tgaagaagtaggtggaacgcttcac

SEQ ID NO: 3082518 - DNA, 25 bp, Homo sapien
gctgaagaagtaggtggaacgcttc

SEQ ID NO: 3082519 - DNA, 25 bp, Homo sapien
agctgaagaagtaggtggaacgctt

SEQ ID NO: 3082520 - DNA, 25 bp, Homo sapien
gaagaagtaggtggaacgcttcacc

SEQ ID NO: 3082521 - DNA, 25 bp, Homo sapien
ttgggcaccgcctgcagtgtctcct

SEQ ID NO: 3082522 - DNA, 25 bp, Homo sapien
tcagctggctggcctaaaagatctt

SEQ ID NO: 3082523 - DNA, 25 bp, Homo sapien
agagcagaaccgcttgaccaggaac

SEQ ID NO: 3082524 - DNA, 25 bp, Homo sapien
ctggcctaaaagatcttctggggct

SEQ ID NO: 3082525 - DNA, 25 bp, Homo sapien
gctgtgcaagcggacaaactgctcc

SEQ ID NO: 3082526 - DNA, 25 bp, Homo sapien
tgcaagcggacaaactgctcccggc

SEQ ID NO: 3082527 - DNA, 25 bp, Homo sapien
aggatgggctcgctgtgcaagcgga

SEQ ID NO: 3082528 - DNA, 25 bp, Homo sapien
gatgggctcgctgtgcaagcggaca

SEQ ID NO: 3082529 - DNA, 25 bp, Homo sapien
tgacaagagacatcagctgcgtgcg

SEQ ID NO: 3082530 - DNA, 25 bp, Homo sapien
gacaagagacatcagctgcgtgcgt

SEQ ID NO: 3082531 - DNA, 25 bp, Homo sapien
ctggttcatgacaagagacatcagc

SEQ ID NO: 3082532 - DNA, 25 bp, Homo sapien
tcatgacaagagacatcagctgcgt

SEQ ID NO: 3082533 - DNA, 25 bp, Homo sapien
gtcgtgcacagagacgaaggtcagg

SEQ ID NO: 3082534 - DNA, 25 bp, Homo sapien
cccggaggcgcttctcaatctgcag

SEQ ID NO: 3082535 - DNA, 25 bp, Homo sapien
accacctcgcgggtgatgaaacctt

SEQ ID NO: 3082536 - DNA, 25 bp, Homo sapien
tacaccatggtcatcaccgtctgct

SEQ ID NO: 3082537 - DNA, 25 bp, Homo sapien
gctgggcgtcttgcctacggaacac

SEQ ID NO: 3082538 - DNA, 25 bp, Homo sapien
cctcgcgggtgatgaaaccttccag

SEQ ID NO: 3082539 - DNA, 25 bp, Homo sapien
gcataatgctgcaggccgttgcaag

SEQ ID NO: 3082540 - DNA, 25 bp, Homo sapien
cataatgctgcaggccgttgcaaga

SEQ ID NO: 3082541 - DNA, 25 bp, Homo sapien
cacgtcgctgcccaggtggttgaag

SEQ ID NO: 3082542 - DNA, 25 bp, Homo sapien
accgcctcgaaggtcagcgtgggct

SEQ ID NO: 3082543 - DNA, 25 bp, Homo sapien
cagaagacgcggtcccgcaggtgct

SEQ ID NO: 3082544 - DNA, 25 bp, Homo sapien
cgcgccaggcgcagttgcccagttg

SEQ ID NO: 3082545 - DNA, 25 bp, Homo sapien
ctgctggacgttgcggaaggaatac

SEQ ID NO: 3082546 - DNA, 25 bp, Homo sapien
caggctgcatggcatctgcgtagcc

SEQ ID NO: 3082547 - DNA, 25 bp, Homo sapien
atctgcgtagcctgcaccagcatct

SEQ ID NO: 3082548 - DNA, 25 bp, Homo sapien
tgcatggcatctgcgtagcctgcac

SEQ ID NO: 3082549 - DNA, 25 bp, Homo sapien
cgatgcggcttgtccaggctgcatg

SEQ ID NO: 3082550 - DNA, 25 bp, Homo sapien
ctgccgcggcaagcaaggctcgggc

SEQ ID NO: 3082551 - DNA, 25 bp, Homo sapien
gccgcggcaagcaaggctcgggcac

SEQ ID NO: 3082552 - DNA, 25 bp, Homo sapien
tgccgcggcaagcaaggctcgggca

SEQ ID NO: 3082553 - DNA, 25 bp, Homo sapien
cgtcggaggccagcaggcataggta

SEQ ID NO: 3082554 - DNA, 25 bp, Homo sapien
tcggcgtcggaggccagcaggcata

SEQ ID NO: 3082555 - DNA, 25 bp, Homo sapien
ctcggcgtcggaggccagcaggcat

SEQ ID NO: 3082556 - DNA, 25 bp, Homo sapien
ggcgtcggaggccagcaggcatagg

SEQ ID NO: 3082557 - DNA, 25 bp, Homo sapien
tctgcaccacgtgccggctgaaagt

SEQ ID NO: 3082558 - DNA, 25 bp, Homo sapien
tgaaagtgcgcgcactcagctcccg

SEQ ID NO: 3082559 - DNA, 25 bp, Homo sapien
gccggctgaaagtgcgcgcactcag

SEQ ID NO: 3082560 - DNA, 25 bp, Homo sapien
gactcaccttgggcgggcagcgcct

SEQ ID NO: 3082561 - DNA, 25 bp, Homo sapien
gcggttcttggtctcccgtagctcc

SEQ ID NO: 3082562 - DNA, 25 bp, Homo sapien
gtacacctggcgctctaggcggttc

SEQ ID NO: 3082563 - DNA, 25 bp, Homo sapien
gtacagtgagaaccggccctcgtac

SEQ ID NO: 3082564 - DNA, 25 bp, Homo sapien
acctcgcactcgtccagcaggcaca

SEQ ID NO: 3082565 - DNA, 25 bp, Homo sapien
ttcagaacagtggcccgatcctcct

SEQ ID NO: 3082566 - DNA, 25 bp, Homo sapien
caggtgcagcttcgggtaggacaca

SEQ ID NO: 3082567 - DNA, 25 bp, Homo sapien
gcttctcaaagaggcactgcagggt

SEQ ID NO: 3082568 - DNA, 25 bp, Homo sapien
cgtgggcttctccacggacaccacg

SEQ ID NO: 3082569 - DNA, 25 bp, Homo sapien
gcttcagcccctcctggctcatctg

SEQ ID NO: 3082570 - DNA, 25 bp, Homo sapien
ctcctggctcatctgttccagacac

SEQ ID NO: 3082571 - DNA, 25 bp, Homo sapien
ccctcctggctcatctgttccagac

SEQ ID NO: 3082572 - DNA, 25 bp, Homo sapien
gcccctcctggctcatctgttccag

SEQ ID NO: 3082573 - DNA, 25 bp, Homo sapien
ggagggcagccgcataggacagcag

SEQ ID NO: 3082574 - DNA, 25 bp, Homo sapien
tccagcgtgagcagcttccgcttct

SEQ ID NO: 3082575 - DNA, 25 bp, Homo sapien
tacatgtccagcgtgagcagcttcc

SEQ ID NO: 3082576 - DNA, 25 bp, Homo sapien
gcccagccaagcatcacggcgttgt

SEQ ID NO: 3082577 - DNA, 25 bp, Homo sapien
ccagccaagcatcacggcgttgtac

SEQ ID NO: 3082578 - DNA, 25 bp, Homo sapien
agctgctcctcccaggggctctcgg

SEQ ID NO: 3082579 - DNA, 25 bp, Homo sapien
ccagctgctcctcccaggggctctc

SEQ ID NO: 3082580 - DNA, 25 bp, Homo sapien
ctgctcctcccaggggctctcgggg

SEQ ID NO: 3082581 - DNA, 25 bp, Homo sapien
gccagctgctcctcccaggggctct

SEQ ID NO: 3082582 - DNA, 25 bp, Homo sapien
ctggcgcgtgcagtgctccaggcac

SEQ ID NO: 3082583 - DNA, 25 bp, Homo sapien
tctgcttgctcaggagccggggctc

SEQ ID NO: 3082584 - DNA, 25 bp, Homo sapien
ccggccatctgcttgctcaggagcc

SEQ ID NO: 3082585 - DNA, 25 bp, Homo sapien
gcttgctcaggagccggggctccac

SEQ ID NO: 3082586 - DNA, 25 bp, Homo sapien
gccatctgcttgctcaggagccggg

SEQ ID NO: 3082587 - DNA, 25 bp, Homo sapien
cagcttcgccttcaaccgctgcata

SEQ ID NO: 3082588 - DNA, 25 bp, Homo sapien
tgaactccccgctctggaatggcat

SEQ ID NO: 3082589 - DNA, 25 bp, Homo sapien
ctgcaggcgcctggtcagcgccttg

SEQ ID NO: 3082590 - DNA, 25 bp, Homo sapien
gctgcatacgcatctgctgggtccg

SEQ ID NO: 3082591 - DNA, 25 bp, Homo sapien
ccacctccgacacgctcccagcctg

SEQ ID NO: 3082592 - DNA, 25 bp, Homo sapien
caccacctccgacacgctcccagcc

SEQ ID NO: 3082593 - DNA, 25 bp, Homo sapien
cagcctgcagctgccgcacccgcgc

SEQ ID NO: 3082594 - DNA, 25 bp, Homo sapien
acctccgacacgctcccagcctgca

SEQ ID NO: 3082595 - DNA, 25 bp, Homo sapien
acgtggccccagtccttcctgcggt

SEQ ID NO: 3082596 - DNA, 25 bp, Homo sapien
gccgcagacgccaccgacggtccct

SEQ ID NO: 3082597 - DNA, 25 bp, Homo sapien
tccttcctgcggtcttggtcttgct

SEQ ID NO: 3082598 - DNA, 25 bp, Homo sapien
ggccgcagacgccaccgacggtccc

SEQ ID NO: 3082599 - DNA, 25 bp, Homo sapien
gcagggcccgtttgagccccgccgc

SEQ ID NO: 3082600 - DNA, 25 bp, Homo sapien
cgggcggccgcaaggccgcagggcc

SEQ ID NO: 3082601 - DNA, 25 bp, Homo sapien
gccgcagggcccgtttgagccccgc

SEQ ID NO: 3082602 - DNA, 25 bp, Homo sapien
ccgcaaggccgcagggcccgtttga

SEQ ID NO: 3082603 - DNA, 25 bp, Homo sapien
gagataactatcctaaagctcactt

SEQ ID NO: 3082604 - DNA, 25 bp, Homo sapien
taactatcctaaagctcacttgtag

SEQ ID NO: 3082605 - DNA, 25 bp, Homo sapien
gataactatcctaaagctcacttgt

SEQ ID NO: 3082606 - DNA, 25 bp, Homo sapien
cccagagataactatcctaaagctc

SEQ ID NO: 3082607 - DNA, 25 bp, Homo sapien
gtcttgtggaagaacattttgggat

SEQ ID NO: 3082608 - DNA, 25 bp, Homo sapien
caaaagtgggttgggctgcctctca

SEQ ID NO: 3082609 - DNA, 25 bp, Homo sapien
tcaaacaagctacccatctctggag

SEQ ID NO: 3082610 - DNA, 25 bp, Homo sapien
gaagttgctgaagatattaactcaa

SEQ ID NO: 3082611 - DNA, 25 bp, Homo sapien
gaacaattggctttttggctgctcc

SEQ ID NO: 3082612 - DNA, 25 bp, Homo sapien
ctttccatctggcacttttattgtt

SEQ ID NO: 3082613 - DNA, 25 bp, Homo sapien
cttctggttgtacatattgaacaat

SEQ ID NO: 3082614 - DNA, 25 bp, Homo sapien
tccatcgatcttgcccccgggaata

SEQ ID NO: 3082615 - DNA, 25 bp, Homo sapien
gattgaacccagtgtcttgcttgta

SEQ ID NO: 3082616 - DNA, 25 bp, Homo sapien
taatgcaggtgcacgattgaaccca

SEQ ID NO: 3082617 - DNA, 25 bp, Homo sapien
tgtgaggatttgctcaggtaatgca

SEQ ID NO: 3082618 - DNA, 25 bp, Homo sapien
tattaaggggctcgacaggatgtga

SEQ ID NO: 3082619 - DNA, 25 bp, Homo sapien
cactcgtgtactgtgtattctcttc

SEQ ID NO: 3082620 - DNA, 25 bp, Homo sapien
tggcctgcacgctgcatgtccacac

SEQ ID NO: 3082621 - DNA, 25 bp, Homo sapien
tcagatctgctggtccctttgccgg

SEQ ID NO: 3082622 - DNA, 25 bp, Homo sapien
tctgcgccctctctcaggagtgtgg

SEQ ID NO: 3082623 - DNA, 25 bp, Homo sapien
tcatgtgcgcatttgctgtaatgtt

SEQ ID NO: 3082624 - DNA, 25 bp, Homo sapien
tgcgcatttgctgtaatgttttaga

SEQ ID NO: 3082625 - DNA, 25 bp, Homo sapien
catgtgcgcatttgctgtaatgttt

SEQ ID NO: 3082626 - DNA, 25 bp, Homo sapien
tgtgcgcatttgctgtaatgtttta

SEQ ID NO: 3082627 - DNA, 25 bp, Homo sapien
gtctgacgtgtaaacttggaatcaa

SEQ ID NO: 3082628 - DNA, 25 bp, Homo sapien
tcgacaggtgtctgacgtgtaaact

SEQ ID NO: 3082629 - DNA, 25 bp, Homo sapien
aaactgacttacatcctcttcagat

SEQ ID NO: 3082630 - DNA, 25 bp, Homo sapien
catctgggctgtcgacaggtgtctg

SEQ ID NO: 3082631 - DNA, 25 bp, Homo sapien
acattatgctccatgaccaaaaaat

SEQ ID NO: 3082632 - DNA, 25 bp, Homo sapien
tcacattatgctccatgaccaaaaa

SEQ ID NO: 3082633 - DNA, 25 bp, Homo sapien
ggtcacattatgctccatgaccaaa

SEQ ID NO: 3082634 - DNA, 25 bp, Homo sapien
gggtcacattatgctccatgaccaa

SEQ ID NO: 3082635 - DNA, 25 bp, Homo sapien
tcccagttaatgtgtctaaagaatg

SEQ ID NO: 3082636 - DNA, 25 bp, Homo sapien
ttcccagttaatgtgtctaaagaat

SEQ ID NO: 3082637 - DNA, 25 bp, Homo sapien
cccagttaatgtgtctaaagaatgg

SEQ ID NO: 3082638 - DNA, 25 bp, Homo sapien
ggcttcttgtgtgaggtagggaggc

SEQ ID NO: 3082639 - DNA, 25 bp, Homo sapien
cttgtgtgaggtagggaggcaaatt

SEQ ID NO: 3082640 - DNA, 25 bp, Homo sapien
tcttgtgtgaggtagggaggcaaat

SEQ ID NO: 3082641 - DNA, 25 bp, Homo sapien
ttcttgtgtgaggtagggaggcaaa

SEQ ID NO: 3082642 - DNA, 25 bp, Homo sapien
ctactgctccagtcagcatgtcata

SEQ ID NO: 3082643 - DNA, 25 bp, Homo sapien
tactgctccagtcagcatgtcatac

SEQ ID NO: 3082644 - DNA, 25 bp, Homo sapien
acttctcatcaagatttcaggggcc

SEQ ID NO: 3082645 - DNA, 25 bp, Homo sapien
ccacttctcatcaagatttcagggg

SEQ ID NO: 3082646 - DNA, 25 bp, Homo sapien
cacttctcatcaagatttcaggggc

SEQ ID NO: 3082647 - DNA, 25 bp, Homo sapien
ctattgttccacaaaatgtgtgtgt

SEQ ID NO: 3082648 - DNA, 25 bp, Homo sapien
atgtattctattgttccacaaaatg

SEQ ID NO: 3082649 - DNA, 25 bp, Homo sapien
gtattctattgttccacaaaatgtg

SEQ ID NO: 3082650 - DNA, 25 bp, Homo sapien
attctattgttccacaaaatgtgtg

SEQ ID NO: 3082651 - DNA, 25 bp, Homo sapien
catgaatagattctttgcgtagtcc

SEQ ID NO: 3082652 - DNA, 25 bp, Homo sapien
aatagattctttgcgtagtccaaag

SEQ ID NO: 3082653 - DNA, 25 bp, Homo sapien
cgtagtccaaagtctgttagtttca

SEQ ID NO: 3082654 - DNA, 25 bp, Homo sapien
ttccatcatgaatagattctttgcg

SEQ ID NO: 3082655 - DNA, 25 bp, Homo sapien
tctgtatatgatccccttttgatgt

SEQ ID NO: 3082656 - DNA, 25 bp, Homo sapien
taagaatgatattctccggcttcag

SEQ ID NO: 3082657 - DNA, 25 bp, Homo sapien
ccggcttcaggtctctgtatatgat

SEQ ID NO: 3082658 - DNA, 25 bp, Homo sapien
tgatgtaaatgtcccaaagccatgg

SEQ ID NO: 3082659 - DNA, 25 bp, Homo sapien
caaaagaataaagggctgaatcaac

SEQ ID NO: 3082660 - DNA, 25 bp, Homo sapien
gtctggattcgaaaagcacaaggca

SEQ ID NO: 3082661 - DNA, 25 bp, Homo sapien
gcactgcaatactggctgcataaca

SEQ ID NO: 3082662 - DNA, 25 bp, Homo sapien
gcacaaggcactgcaatactggctg

SEQ ID NO: 3082663 - DNA, 25 bp, Homo sapien
aatattccctctctttctaactgca

SEQ ID NO: 3082664 - DNA, 25 bp, Homo sapien
cagtgtcttccataaatattccctc

SEQ ID NO: 3082665 - DNA, 25 bp, Homo sapien
gtgtcttccataaatattccctctc

SEQ ID NO: 3082666 - DNA, 25 bp, Homo sapien
cataaatattccctctctttctaac

SEQ ID NO: 3082667 - DNA, 25 bp, Homo sapien
tgtatgagctgtatctttagcattt

SEQ ID NO: 3082668 - DNA, 25 bp, Homo sapien
gtatgagctgtatctttagcatttc

SEQ ID NO: 3082669 - DNA, 25 bp, Homo sapien
ttttgtatgagctgtatctttagca

SEQ ID NO: 3082670 - DNA, 25 bp, Homo sapien
tttgtatgagctgtatctttagcat

SEQ ID NO: 3082671 - DNA, 25 bp, Homo sapien
gcccagtgtccccatcccgcggagt

SEQ ID NO: 3082672 - DNA, 25 bp, Homo sapien
gcatctgaccaggagtagctattcc

SEQ ID NO: 3082673 - DNA, 25 bp, Homo sapien
caggagtagctattcctggtgctat

SEQ ID NO: 3082674 - DNA, 25 bp, Homo sapien
gttgagctcatgagggcatctgacc

SEQ ID NO: 3082675 - DNA, 25 bp, Homo sapien
caaggctttgttgcgtgttctcttt

SEQ ID NO: 3082676 - DNA, 25 bp, Homo sapien
cccagtgtcccaaggctttgttgcg

SEQ ID NO: 3082677 - DNA, 25 bp, Homo sapien
agtgtcccaaggctttgttgcgtgt

SEQ ID NO: 3082678 - DNA, 25 bp, Homo sapien
tcccaaggctttgttgcgtgttctc

SEQ ID NO: 3082679 - DNA, 25 bp, Homo sapien
aacctttctgctgtatcctctcgac

SEQ ID NO: 3082680 - DNA, 25 bp, Homo sapien
cctttctgctgtatcctctcgacac

SEQ ID NO: 3082681 - DNA, 25 bp, Homo sapien
gcaacctttctgctgtatcctctcg

SEQ ID NO: 3082682 - DNA, 25 bp, Homo sapien
ctccctggcaacctttctgctgtat

SEQ ID NO: 3082683 - DNA, 25 bp, Homo sapien
tgctgttcgtccctagctctgaagg

SEQ ID NO: 3082684 - DNA, 25 bp, Homo sapien
gggaaattatccagccatgagccct

SEQ ID NO: 3082685 - DNA, 25 bp, Homo sapien
tcagaattcagaacgatggtcgtgg

SEQ ID NO: 3082686 - DNA, 25 bp, Homo sapien
gagaactttccaagtggaggccgca

SEQ ID NO: 3082687 - DNA, 25 bp, Homo sapien
ccatgcccacgttgtggctcagtgc

SEQ ID NO: 3082688 - DNA, 25 bp, Homo sapien
atgcccacgttgtggctcagtgcag

SEQ ID NO: 3082689 - DNA, 25 bp, Homo sapien
tgcccacgttgtggctcagtgcagt

SEQ ID NO: 3082690 - DNA, 25 bp, Homo sapien
catgcccacgttgtggctcagtgca

SEQ ID NO: 3082691 - DNA, 25 bp, Homo sapien
ggtgtggaagaacgaggtgcccgtg

SEQ ID NO: 3082692 - DNA, 25 bp, Homo sapien
aggcggggcatggagttccactgca

SEQ ID NO: 3082693 - DNA, 25 bp, Homo sapien
ggcacaggcctggatgccgacgacc

SEQ ID NO: 3082694 - DNA, 25 bp, Homo sapien
tggaagaacgaggtgcccgtggcgg

SEQ ID NO: 3082695 - DNA, 25 bp, Homo sapien
agcatctccagtgagcccacgcagg

SEQ ID NO: 3082696 - DNA, 25 bp, Homo sapien
gaaaggaaaacagacgcggtcagca

SEQ ID NO: 3082697 - DNA, 25 bp, Homo sapien
ctgtcgtggcatggcgggtggctcc

SEQ ID NO: 3082698 - DNA, 25 bp, Homo sapien
aaaacagacgcggtcagcatctcca

SEQ ID NO: 3082699 - DNA, 25 bp, Homo sapien
tgcgccctctccctgaaagctccgt

SEQ ID NO: 3082700 - DNA, 25 bp, Homo sapien
cacttctggctgaacgcttggctct

SEQ ID NO: 3082701 - DNA, 25 bp, Homo sapien
gaaagctccgtgggtcagggacacc

SEQ ID NO: 3082702 - DNA, 25 bp, Homo sapien
agctccgtgggtcagggacaccgat

SEQ ID NO: 3082703 - DNA, 25 bp, Homo sapien
gcaggtccccctgctttcttgttag

SEQ ID NO: 3082704 - DNA, 25 bp, Homo sapien
tggcaggtccccctgctttcttgtt

SEQ ID NO: 3082705 - DNA, 25 bp, Homo sapien
caggtccccctgctttcttgttagt

SEQ ID NO: 3082706 - DNA, 25 bp, Homo sapien
ggtggcaggtccccctgctttcttg

SEQ ID NO: 3082707 - DNA, 25 bp, Homo sapien
tagaggccctaagatgcttgagcac

SEQ ID NO: 3082708 - DNA, 25 bp, Homo sapien
cgattttgttatcggcatgaacgcc

SEQ ID NO: 3082709 - DNA, 25 bp, Homo sapien
ggcgattttgttatcggcatgaacg

SEQ ID NO: 3082710 - DNA, 25 bp, Homo sapien
gcgattttgttatcggcatgaacgc

SEQ ID NO: 3082711 - DNA, 25 bp, Homo sapien
gattttgttatcggcatgaacgcct

SEQ ID NO: 3082712 - DNA, 25 bp, Homo sapien
ctgcgcacactggggcttcagtctc

SEQ ID NO: 3082713 - DNA, 25 bp, Homo sapien
acagcaggtgtgaaagaacctggtc

SEQ ID NO: 3082714 - DNA, 25 bp, Homo sapien
gggacagcaggtgtgaaagaacctg

SEQ ID NO: 3082715 - DNA, 25 bp, Homo sapien
tgcgcacactggggcttcagtctcc

SEQ ID NO: 3082716 - DNA, 25 bp, Homo sapien
tcaatcaatatccggatgaggcagc

SEQ ID NO: 3082717 - DNA, 25 bp, Homo sapien
cgaacactgcccacatagatctttc

SEQ ID NO: 3082718 - DNA, 25 bp, Homo sapien
acgaacactgcccacatagatcttt

SEQ ID NO: 3082719 - DNA, 25 bp, Homo sapien
aggacgaacactgcccacatagatc

SEQ ID NO: 3082720 - DNA, 25 bp, Homo sapien
ctaaggacgaacactgcccacatag

SEQ ID NO: 3082721 - DNA, 25 bp, Homo sapien
atggaagcaacagaggtgctcaggc

SEQ ID NO: 3082722 - DNA, 25 bp, Homo sapien
gaagcaacagaggtgctcaggccac

SEQ ID NO: 3082723 - DNA, 25 bp, Homo sapien
agcaacagaggtgctcaggccactg

SEQ ID NO: 3082724 - DNA, 25 bp, Homo sapien
tggaagcaacagaggtgctcaggcc

SEQ ID NO: 3082725 - DNA, 25 bp, Homo sapien
tagtgacgtggctaccacatgctcc

SEQ ID NO: 3082726 - DNA, 25 bp, Homo sapien
gtagtgacgtggctaccacatgctc

SEQ ID NO: 3082727 - DNA, 25 bp, Homo sapien
atggtcttgggtagtgacgtggcta

SEQ ID NO: 3082728 - DNA, 25 bp, Homo sapien
cttgggtagtgacgtggctaccaca

SEQ ID NO: 3082729 - DNA, 25 bp, Homo sapien
ccattcgtgggcaccgatggcggca

SEQ ID NO: 3082730 - DNA, 25 bp, Homo sapien
gtgggcaccgatggcggcaggagcc

SEQ ID NO: 3082731 - DNA, 25 bp, Homo sapien
ttcctggtcatctcctggtagtggg

SEQ ID NO: 3082732 - DNA, 25 bp, Homo sapien
acagggcagccggaactgggtgggt

SEQ ID NO: 3082733 - DNA, 25 bp, Homo sapien
taaaggaggaacaaggcggcgatgt

SEQ ID NO: 3082734 - DNA, 25 bp, Homo sapien
aagataaaggaggaacaaggcggcg

SEQ ID NO: 3082735 - DNA, 25 bp, Homo sapien
gcatcctcctcaggaagataaagga

SEQ ID NO: 3082736 - DNA, 25 bp, Homo sapien
aaggaggaacaaggcggcgatgtgg

SEQ ID NO: 3082737 - DNA, 25 bp, Homo sapien
catacgccaggaggatgtaaagtag

SEQ ID NO: 3082738 - DNA, 25 bp, Homo sapien
cctcatacgccaggaggatgtaaag

SEQ ID NO: 3082739 - DNA, 25 bp, Homo sapien
tcatacgccaggaggatgtaaagta

SEQ ID NO: 3082740 - DNA, 25 bp, Homo sapien
tacgccaggaggatgtaaagtagtt

SEQ ID NO: 3082741 - DNA, 25 bp, Homo sapien
gaggtgctcggttcatggtgccggc

SEQ ID NO: 3082742 - DNA, 25 bp, Homo sapien
ggtgctcggttcatggtgccggctg

SEQ ID NO: 3082743 - DNA, 25 bp, Homo sapien
ggaggtgctcggttcatggtgccgg

SEQ ID NO: 3082744 - DNA, 25 bp, Homo sapien
aggtgctcggttcatggtgccggct

SEQ ID NO: 3082745 - DNA, 25 bp, Homo sapien
aagaatatatgcctccttaatgtcc

SEQ ID NO: 3082746 - DNA, 25 bp, Homo sapien
tatgcctccttaatgtcccgcttac

SEQ ID NO: 3082747 - DNA, 25 bp, Homo sapien
gatccctgaagaatatatgcctcct

SEQ ID NO: 3082748 - DNA, 25 bp, Homo sapien
tcgatccctgaagaatatatgcctc

SEQ ID NO: 3082749 - DNA, 25 bp, Homo sapien
catctgctggatgtgttcagatgac

SEQ ID NO: 3082750 - DNA, 25 bp, Homo sapien
gtccatctgctggatgtgttcagat

SEQ ID NO: 3082751 - DNA, 25 bp, Homo sapien
tccaggtccatctgctggatgtgtt

SEQ ID NO: 3082752 - DNA, 25 bp, Homo sapien
caggtccatctgctggatgtgttca

SEQ ID NO: 3082753 - DNA, 25 bp, Homo sapien
gcccctgacacggcctgtcctgttg

SEQ ID NO: 3082754 - DNA, 25 bp, Homo sapien
cctgacacggcctgtcctgttggtt

SEQ ID NO: 3082755 - DNA, 25 bp, Homo sapien
cccctgacacggcctgtcctgttgg

SEQ ID NO: 3082756 - DNA, 25 bp, Homo sapien
ccctgacacggcctgtcctgttggt

SEQ ID NO: 3082757 - DNA, 25 bp, Homo sapien
ttccctggtacgctcgatctatgag

SEQ ID NO: 3082758 - DNA, 25 bp, Homo sapien
ggaattccctggtacgctcgatcta

SEQ ID NO: 3082759 - DNA, 25 bp, Homo sapien
tgttcatgggaattccctggtacgc

SEQ ID NO: 3082760 - DNA, 25 bp, Homo sapien
catgggaattccctggtacgctcga

SEQ ID NO: 3082761 - DNA, 25 bp, Homo sapien
tgtttttgtaggtgtcccattctcc

SEQ ID NO: 3082762 - DNA, 25 bp, Homo sapien
ttctgctgtttttgtaggtgtccca

SEQ ID NO: 3082763 - DNA, 25 bp, Homo sapien
gctgtttttgtaggtgtcccattct

SEQ ID NO: 3082764 - DNA, 25 bp, Homo sapien
tttttgtaggtgtcccattctccca

SEQ ID NO: 3082765 - DNA, 25 bp, Homo sapien
tgctctttcggctgatctcccgccg

SEQ ID NO: 3082766 - DNA, 25 bp, Homo sapien
ctttcggctgatctcccgccgaatt

SEQ ID NO: 3082767 - DNA, 25 bp, Homo sapien
tctttcggctgatctcccgccgaat

SEQ ID NO: 3082768 - DNA, 25 bp, Homo sapien
gctctttcggctgatctcccgccga

SEQ ID NO: 3082769 - DNA, 25 bp, Homo sapien
caaatgaggcatgttggagttagca

SEQ ID NO: 3082770 - DNA, 25 bp, Homo sapien
agccgcccgcggatgctgggtcttg

SEQ ID NO: 3082771 - DNA, 25 bp, Homo sapien
gcatgttggagttagcagagctgcc

SEQ ID NO: 3082772 - DNA, 25 bp, Homo sapien
aatgaggcatgttggagttagcaga

SEQ ID NO: 3082773 - DNA, 25 bp, Homo sapien
acctcccgcgcagtcagaggaggca

SEQ ID NO: 3082774 - DNA, 25 bp, Homo sapien
agtcagaggaggcagctccgtctca

SEQ ID NO: 3082775 - DNA, 25 bp, Homo sapien
tcacctcccgcgcagtcagaggagg

SEQ ID NO: 3082776 - DNA, 25 bp, Homo sapien
cttcacctcccgcgcagtcagagga

SEQ ID NO: 3082777 - DNA, 25 bp, Homo sapien
tttagccgcgagccctgctgcctcc

SEQ ID NO: 3082778 - DNA, 25 bp, Homo sapien
atgcccagagcggggccctgcccat

SEQ ID NO: 3082779 - DNA, 25 bp, Homo sapien
cgtgagatgcccagagcggggccct

SEQ ID NO: 3082780 - DNA, 25 bp, Homo sapien
gagatgcccagagcggggccctgcc

SEQ ID NO: 3082781 - DNA, 25 bp, Homo sapien
tgagatgcccagagcggggccctgc

SEQ ID NO: 3082782 - DNA, 25 bp, Homo sapien
cagcccccattgtcaccatgccttt

SEQ ID NO: 3082783 - DNA, 25 bp, Homo sapien
cctagggctacagcccccattgtca

SEQ ID NO: 3082784 - DNA, 25 bp, Homo sapien
gctacagcccccattgtcaccatgc

SEQ ID NO: 3082785 - DNA, 25 bp, Homo sapien
gttctcctagggctacagcccccat

SEQ ID NO: 3082786 - DNA, 25 bp, Homo sapien
cgacagaactgctgagcgcccaggg

SEQ ID NO: 3082787 - DNA, 25 bp, Homo sapien
gccgacagaactgctgagcgcccag

SEQ ID NO: 3082788 - DNA, 25 bp, Homo sapien
tgccgacagaactgctgagcgccca

SEQ ID NO: 3082789 - DNA, 25 bp, Homo sapien
ttgccgacagaactgctgagcgccc

SEQ ID NO: 3082790 - DNA, 25 bp, Homo sapien
aggttgacccgacctggtgagacat

SEQ ID NO: 3082791 - DNA, 25 bp, Homo sapien
gaggttgacccgacctggtgagaca

SEQ ID NO: 3082792 - DNA, 25 bp, Homo sapien
ggaggttgacccgacctggtgagac

SEQ ID NO: 3082793 - DNA, 25 bp, Homo sapien
gctgcatcccaaagtgatcgatgtt

SEQ ID NO: 3082794 - DNA, 25 bp, Homo sapien
tcccaaagtgatcgatgttgttgtt

SEQ ID NO: 3082795 - DNA, 25 bp, Homo sapien
tgctgcatcccaaagtgatcgatgt

SEQ ID NO: 3082796 - DNA, 25 bp, Homo sapien
gcatcccaaagtgatcgatgttgtt

SEQ ID NO: 3082797 - DNA, 25 bp, Homo sapien
taatgatgtcctctcgctcttgtgc

SEQ ID NO: 3082798 - DNA, 25 bp, Homo sapien
atgatgtcctctcgctcttgtgccc

SEQ ID NO: 3082799 - DNA, 25 bp, Homo sapien
cctctcgctcttgtgcccaccaact

SEQ ID NO: 3082800 - DNA, 25 bp, Homo sapien
tcctctcgctcttgtgcccaccaac

SEQ ID NO: 3082801 - DNA, 25 bp, Homo sapien
ctggagtctcaagtcccaagcaggg

SEQ ID NO: 3082802 - DNA, 25 bp, Homo sapien
ggagaacacctgaaccgctctcgcc

SEQ ID NO: 3082803 - DNA, 25 bp, Homo sapien
ctgaaccgctctcgccgggctccca

SEQ ID NO: 3082804 - DNA, 25 bp, Homo sapien
acacctgaaccgctctcgccgggct

SEQ ID NO: 3082805 - DNA, 25 bp, Homo sapien
gctcacagataccactgcctgtgtg

SEQ ID NO: 3082806 - DNA, 25 bp, Homo sapien
agataccactgcctgtgtgtaactg

SEQ ID NO: 3082807 - DNA, 25 bp, Homo sapien
tctgatgaatcagctggcctgggtc

SEQ ID NO: 3082808 - DNA, 25 bp, Homo sapien
gaaaacctttgagtccacagagctg

SEQ ID NO: 3082809 - DNA, 25 bp, Homo sapien
aggcaggccagagagcggataggtg

SEQ ID NO: 3082810 - DNA, 25 bp, Homo sapien
ctaagcaccagtgacattctgaggt

SEQ ID NO: 3082811 - DNA, 25 bp, Homo sapien
taagcaccagtgacattctgaggtc

SEQ ID NO: 3082812 - DNA, 25 bp, Homo sapien
agcaccagtgacattctgaggtcat

SEQ ID NO: 3082813 - DNA, 25 bp, Homo sapien
aagcaccagtgacattctgaggtca

SEQ ID NO: 3082814 - DNA, 25 bp, Homo sapien
ccccgaggcccagggccagcatcag

SEQ ID NO: 3082815 - DNA, 25 bp, Homo sapien
cgaggcccagggccagcatcagagc

SEQ ID NO: 3082816 - DNA, 25 bp, Homo sapien
ccagggccagcatcagagcatccat

SEQ ID NO: 3082817 - DNA, 25 bp, Homo sapien
ggcccagggccagcatcagagcatc

SEQ ID NO: 3082818 - DNA, 25 bp, Homo sapien
gtaacctgtaaaggggctgtcagga

SEQ ID NO: 3082819 - DNA, 25 bp, Homo sapien
gtggactgcaatgatgtaacctgta

SEQ ID NO: 3082820 - DNA, 25 bp, Homo sapien
gagatggcatgtgaccattaaccat

SEQ ID NO: 3082821 - DNA, 25 bp, Homo sapien
aaccattccatttgtgaagttcttc

SEQ ID NO: 3082822 - DNA, 25 bp, Homo sapien
atcataagcttgtggtattttcatc

SEQ ID NO: 3082823 - DNA, 25 bp, Homo sapien
ggacagtgatgctctaaactaaaac

SEQ ID NO: 3082824 - DNA, 25 bp, Homo sapien
taaaaggactcagtgagtgaccaca

SEQ ID NO: 3082825 - DNA, 25 bp, Homo sapien
aaagcatactagtggctaaaaggac

SEQ ID NO: 3082826 - DNA, 25 bp, Homo sapien
atggcaaagatcacagaagtttcca

SEQ ID NO: 3082827 - DNA, 25 bp, Homo sapien
aaaatccactcactgagagtcgtac

SEQ ID NO: 3082828 - DNA, 25 bp, Homo sapien
gagtcgtactttttggttgtcctga

SEQ ID NO: 3082829 - DNA, 25 bp, Homo sapien
aaattggagacgcagggacaggaat

SEQ ID NO: 3082830 - DNA, 25 bp, Homo sapien
tgtgttggactagaagctgaaattg

SEQ ID NO: 3082831 - DNA, 25 bp, Homo sapien
cagtcttagtccataccgtacaggg

SEQ ID NO: 3082832 - DNA, 25 bp, Homo sapien
ggggtagtaccatctaacttaatca

SEQ ID NO: 3082833 - DNA, 25 bp, Homo sapien
gatttgttctgaattaagtccacag

SEQ ID NO: 3082834 - DNA, 25 bp, Homo sapien
cctgtgtacttttcatccatattca

SEQ ID NO: 3082835 - DNA, 25 bp, Homo sapien
aatgctgtgtacagatatatctgac

SEQ ID NO: 3082836 - DNA, 25 bp, Homo sapien
aaatgctgtgtacagatatatctga

SEQ ID NO: 3082837 - DNA, 25 bp, Homo sapien
taaatgctgtgtacagatatatctg

SEQ ID NO: 3082838 - DNA, 25 bp, Homo sapien
cttaaatgctgtgtacagatatatc

SEQ ID NO: 3082839 - DNA, 25 bp, Homo sapien
ggacacttatatgcccacatgtctt

SEQ ID NO: 3082840 - DNA, 25 bp, Homo sapien
aattgaaagggtcaaatcggacact

SEQ ID NO: 3082841 - DNA, 25 bp, Homo sapien
tccattggtagtggcaaagacaaaa

SEQ ID NO: 3082842 - DNA, 25 bp, Homo sapien
taactgtccattggtagtggcaaag

SEQ ID NO: 3082843 - DNA, 25 bp, Homo sapien
tccacaacaattgatctatttcttc

SEQ ID NO: 3082844 - DNA, 25 bp, Homo sapien
ggaacaaatccacaacaattgatct

SEQ ID NO: 3082845 - DNA, 25 bp, Homo sapien
ttcttcttagatggttgtctcaggc

SEQ ID NO: 3082846 - DNA, 25 bp, Homo sapien
ctgcccatggaacaaatccacaaca

SEQ ID NO: 3082847 - DNA, 25 bp, Homo sapien
ctctgcagctacttcccagtctggt

SEQ ID NO: 3082848 - DNA, 25 bp, Homo sapien
gttcctgcactaaatcaccatagca

SEQ ID NO: 3082849 - DNA, 25 bp, Homo sapien
tagccatatgccccttcataccaat

SEQ ID NO: 3082850 - DNA, 25 bp, Homo sapien
gcatttagccatatgccccttcata

SEQ ID NO: 3082851 - DNA, 25 bp, Homo sapien
atttagccatatgccccttcatacc

SEQ ID NO: 3082852 - DNA, 25 bp, Homo sapien
gtgtcagtggctgtgtgttactaac

SEQ ID NO: 3082853 - DNA, 25 bp, Homo sapien
tgtgtcagtggctgtgtgttactaa

SEQ ID NO: 3082854 - DNA, 25 bp, Homo sapien
ctgtgtcagtggctgtgtgttacta

SEQ ID NO: 3082855 - DNA, 25 bp, Homo sapien
cactggatgcttgagttcatgaagc

SEQ ID NO: 3082856 - DNA, 25 bp, Homo sapien
catctcctcaggccaactcatatct

SEQ ID NO: 3082857 - DNA, 25 bp, Homo sapien
tcctcaggccaactcatatctttgt

SEQ ID NO: 3082858 - DNA, 25 bp, Homo sapien
tctcctcaggccaactcatatcttt

SEQ ID NO: 3082859 - DNA, 25 bp, Homo sapien
cctcaggccaactcatatctttgtt

SEQ ID NO: 3082860 - DNA, 25 bp, Homo sapien
tcaaatattccaatttatgatcctc

SEQ ID NO: 3082861 - DNA, 25 bp, Homo sapien
ttcaaatattccaatttatgatcct

SEQ ID NO: 3082862 - DNA, 25 bp, Homo sapien
caaatattccaatttatgatcctca

SEQ ID NO: 3082863 - DNA, 25 bp, Homo sapien
tttcaaatattccaatttatgatcc

SEQ ID NO: 3082864 - DNA, 25 bp, Homo sapien
ggctaatacccgctttaaaggtgca

SEQ ID NO: 3082865 - DNA, 25 bp, Homo sapien
cactgttgtatagccacaggcgcat

SEQ ID NO: 3082866 - DNA, 25 bp, Homo sapien
gcgcagcctttgagatagatattcg

SEQ ID NO: 3082867 - DNA, 25 bp, Homo sapien
tgcattcgactaaaacagcctgtat

SEQ ID NO: 3082868 - DNA, 25 bp, Homo sapien
aaagtgcaacaacacatcttgcctc

SEQ ID NO: 3082869 - DNA, 25 bp, Homo sapien
tgcaacaacacatcttgcctctcat

SEQ ID NO: 3082870 - DNA, 25 bp, Homo sapien
agtgcaacaacacatcttgcctctc

SEQ ID NO: 3082871 - DNA, 25 bp, Homo sapien
taaaagtgcaacaacacatcttgcc

SEQ ID NO: 3082872 - DNA, 25 bp, Homo sapien
aaggaaatgcatggtattcttgctg

SEQ ID NO: 3082873 - DNA, 25 bp, Homo sapien
ggtattcttgctgcattcttaagtt

SEQ ID NO: 3082874 - DNA, 25 bp, Homo sapien
ttaaggaaatgcatggtattcttgc

SEQ ID NO: 3082875 - DNA, 25 bp, Homo sapien
tattcttgctgcattcttaagttac

SEQ ID NO: 3082876 - DNA, 25 bp, Homo sapien
aacattctcaggctcatcataccca

SEQ ID NO: 3082877 - DNA, 25 bp, Homo sapien
aagatagcggggaaataattccagc

SEQ ID NO: 3082878 - DNA, 25 bp, Homo sapien
gttagactgctgtgtccgagtggca

SEQ ID NO: 3082879 - DNA, 25 bp, Homo sapien
ctctcggtaaatgctgaggaaacat

SEQ ID NO: 3082880 - DNA, 25 bp, Homo sapien
tcccttaggatagtagactggatac

SEQ ID NO: 3082881 - DNA, 25 bp, Homo sapien
gaggatctcagtggccaacattttc

SEQ ID NO: 3082882 - DNA, 25 bp, Homo sapien
gagatgctacagtcattccagtaag

SEQ ID NO: 3082883 - DNA, 25 bp, Homo sapien
aactcaaggctgagaattggagcca

SEQ ID NO: 3082884 - DNA, 25 bp, Homo sapien
tggttctcaagggttgcccacagag

SEQ ID NO: 3082885 - DNA, 25 bp, Homo sapien
tggcatgggagaacttcaaggcgtt

SEQ ID NO: 3082886 - DNA, 25 bp, Homo sapien
cactgtgccccgctgtaaaattata

SEQ ID NO: 3082887 - DNA, 25 bp, Homo sapien
ggtgtgtgggtgcaaaccagtccat

SEQ ID NO: 3082888 - DNA, 25 bp, Homo sapien
tttttgatgtacccacactgttctc

SEQ ID NO: 3082889 - DNA, 25 bp, Homo sapien
ggctgcatgtaaatgggttgcctta

SEQ ID NO: 3082890 - DNA, 25 bp, Homo sapien
cttggtcgccttgtgtgatgtagac

SEQ ID NO: 3082891 - DNA, 25 bp, Homo sapien
gatttgtttggtcattagctcttaa

SEQ ID NO: 3082892 - DNA, 25 bp, Homo sapien
ggaacgtagcaatatctgctccttt

SEQ ID NO: 3082893 - DNA, 25 bp, Homo sapien
tcactccctgagtttagtatggctg

SEQ ID NO: 3082894 - DNA, 25 bp, Homo sapien
ggctattttttcagtgtatatccac

SEQ ID NO: 3082895 - DNA, 25 bp, Homo sapien
tgtgttggaagtgtccttggtcgcc

SEQ ID NO: 3082896 - DNA, 25 bp, Homo sapien
ggggatgtacatattctctgaaact

SEQ ID NO: 3082897 - DNA, 25 bp, Homo sapien
aaatctattctaacgcaaaaccact

SEQ ID NO: 3082898 - DNA, 25 bp, Homo sapien
atctgctccttttcgagttgtttga

SEQ ID NO: 3082899 - DNA, 25 bp, Homo sapien
tcaaacaactcgaaaaggagcagat

SEQ ID NO: 3082900 - DNA, 25 bp, Homo sapien
cagccatactaaactcagggagtga

SEQ ID NO: 3082901 - DNA, 25 bp, Homo sapien
taaggcaacccatttacatgcagcc

SEQ ID NO: 3082902 - DNA, 25 bp, Homo sapien
aaaggagcagatattgctacgttcc

SEQ ID NO: 3082903 - DNA, 25 bp, Homo sapien
gtctacatcacacaaggcgaccaag

SEQ ID NO: 3082904 - DNA, 25 bp, Homo sapien
ttaagagctaatgaccaaacaaatc

SEQ ID NO: 3082905 - DNA, 25 bp, Homo sapien
agtttcagagaatatgtacatcccc

SEQ ID NO: 3082906 - DNA, 25 bp, Homo sapien
agtggttttgcgttagaatagattt

SEQ ID NO: 3082907 - DNA, 25 bp, Homo sapien
ggcgaccaaggacacttccaacaca

SEQ ID NO: 3082908 - DNA, 25 bp, Homo sapien
gagaacagtgtgggtacatcaaaaa

SEQ ID NO: 3082909 - DNA, 25 bp, Homo sapien
gtggatatacactgaaaaaatagcc

SEQ ID NO: 3082910 - DNA, 25 bp, Homo sapien
gataagtcacctagcagaacccact

SEQ ID NO: 3082911 - DNA, 25 bp, Homo sapien
gctcaggtctaatgatgcaggcaga

SEQ ID NO: 3082912 - DNA, 25 bp, Homo sapien
tgctcaggattcagctcagccacag

SEQ ID NO: 3082913 - DNA, 25 bp, Homo sapien
aagtctcagttactctgcggcccag

SEQ ID NO: 3082914 - DNA, 25 bp, Homo sapien
ggctcaggtgattctcccaccccag

SEQ ID NO: 3082915 - DNA, 25 bp, Homo sapien
gaatgcagcagcacgatcactgctc

SEQ ID NO: 3082916 - DNA, 25 bp, Homo sapien
ctggaatgcagcagcacgatcactg

SEQ ID NO: 3082917 - DNA, 25 bp, Homo sapien
gctcaggtgattctcccaccccagc

SEQ ID NO: 3082918 - DNA, 25 bp, Homo sapien
agtgagcagagattgcacaccagcc

SEQ ID NO: 3082919 - DNA, 25 bp, Homo sapien
cagcctgggtgacagagcaagactc

SEQ ID NO: 3082920 - DNA, 25 bp, Homo sapien
cctgggtgacagagcaagactccat

SEQ ID NO: 3082921 - DNA, 25 bp, Homo sapien
gtgagcagagattgcacaccagcct

SEQ ID NO: 3082922 - DNA, 25 bp, Homo sapien
ggcgatggacctcaaaacctgcaga

SEQ ID NO: 3082923 - DNA, 25 bp, Homo sapien
ggaaagacaagttttgccactcgat

SEQ ID NO: 3082924 - DNA, 25 bp, Homo sapien
aaacagcagggctggcgatggacct

SEQ ID NO: 3082925 - DNA, 25 bp, Homo sapien
taagtgttccttctaagccacgcat

SEQ ID NO: 3082926 - DNA, 25 bp, Homo sapien
tctggatagtaagcgctggggagct

SEQ ID NO: 3082927 - DNA, 25 bp, Homo sapien
gcaggatctggatagtaagcgctgg

SEQ ID NO: 3082928 - DNA, 25 bp, Homo sapien
ccccgcccttgtccaggtgaatgga

SEQ ID NO: 3082929 - DNA, 25 bp, Homo sapien
cttgtccaggtgaatggagaaggcc

SEQ ID NO: 3082930 - DNA, 25 bp, Homo sapien
caccacaaattgtccacttacaagc

SEQ ID NO: 3082931 - DNA, 25 bp, Homo sapien
tattcccttggttccaggtctcctc

SEQ ID NO: 3082932 - DNA, 25 bp, Homo sapien
ggtgtgtttgcgtacaggctgtggg

SEQ ID NO: 3082933 - DNA, 25 bp, Homo sapien
acacaccacaccacaaattgtccac

SEQ ID NO: 3082934 - DNA, 25 bp, Homo sapien
acttttatttgagagggcgtctagc

SEQ ID NO: 3082935 - DNA, 25 bp, Homo sapien
tacttttatttgagagggcgtctag

SEQ ID NO: 3082936 - DNA, 25 bp, Homo sapien
tagaagacggaagtttgcatgttgc

SEQ ID NO: 3082937 - DNA, 25 bp, Homo sapien
taaaaagatcctctagcccaaatcc

SEQ ID NO: 3082938 - DNA, 25 bp, Homo sapien
gataggcccatgtggcttgtctgtg

SEQ ID NO: 3082939 - DNA, 25 bp, Homo sapien
gaagtttgaaaaggttagatgatag

SEQ ID NO: 3082940 - DNA, 25 bp, Homo sapien
gagctaggctgcaagacacctctga

SEQ ID NO: 3082941 - DNA, 25 bp, Homo sapien
gccttggaccggctcttaggttcta

SEQ ID NO: 3082942 - DNA, 25 bp, Homo sapien
catgtccaacttcccaagcagtctg

SEQ ID NO: 3082943 - DNA, 25 bp, Homo sapien
catgtgccccaagggtttggaaggt

SEQ ID NO: 3082944 - DNA, 25 bp, Homo sapien
tctgggatctggagtaagatgactc

SEQ ID NO: 3082945 - DNA, 25 bp, Homo sapien
gaagccctccttgcccgctagatag

SEQ ID NO: 3082946 - DNA, 25 bp, Homo sapien
ggaagccctccttgcccgctagata

SEQ ID NO: 3082947 - DNA, 25 bp, Homo sapien
gcccgctagatagttctcattcctc

SEQ ID NO: 3082948 - DNA, 25 bp, Homo sapien
ctccttgcccgctagatagttctca

SEQ ID NO: 3082949 - DNA, 25 bp, Homo sapien
gcctgaggagcctgcgacctgggcc

SEQ ID NO: 3082950 - DNA, 25 bp, Homo sapien
ttggcctgaggagcctgcgacctgg

SEQ ID NO: 3082951 - DNA, 25 bp, Homo sapien
aggcctggggcattaaccgtcctgg

SEQ ID NO: 3082952 - DNA, 25 bp, Homo sapien
gcctggctctgtacgcgagcccggg

SEQ ID NO: 3082953 - DNA, 25 bp, Homo sapien
ctgcctataagtggttggcattggc

SEQ ID NO: 3082954 - DNA, 25 bp, Homo sapien
tcctgcctataagtggttggcattg

SEQ ID NO: 3082955 - DNA, 25 bp, Homo sapien
ccttcctgcctataagtggttggca

SEQ ID NO: 3082956 - DNA, 25 bp, Homo sapien
cttccttcctgcctataagtggttg

SEQ ID NO: 3082957 - DNA, 25 bp, Homo sapien
tcgtaactccatgcccattaaataa

SEQ ID NO: 3082958 - DNA, 25 bp, Homo sapien
atcgtaactccatgcccattaaata

SEQ ID NO: 3082959 - DNA, 25 bp, Homo sapien
tagcacagcactcctcatatacaga

SEQ ID NO: 3082960 - DNA, 25 bp, Homo sapien
ggtagcacagcactcctcatataca

SEQ ID NO: 3082961 - DNA, 25 bp, Homo sapien
accaggtagcacagcactcctcata

SEQ ID NO: 3082962 - DNA, 25 bp, Homo sapien
caggtagcacagcactcctcatata

SEQ ID NO: 3082963 - DNA, 25 bp, Homo sapien
gtgttctttcacgtagcctcggcac

SEQ ID NO: 3082964 - DNA, 25 bp, Homo sapien
gcaaagtgttctttcacgtagcctc

SEQ ID NO: 3082965 - DNA, 25 bp, Homo sapien
aaagtgttctttcacgtagcctcgg

SEQ ID NO: 3082966 - DNA, 25 bp, Homo sapien
aagtgttctttcacgtagcctcggc

SEQ ID NO: 3082967 - DNA, 25 bp, Homo sapien
aggagttcataaatggcaatccagt

SEQ ID NO: 3082968 - DNA, 25 bp, Homo sapien
aaggagttcataaatggcaatccag

SEQ ID NO: 3082969 - DNA, 25 bp, Homo sapien
ttcataaatggcaatccagttcttc

SEQ ID NO: 3082970 - DNA, 25 bp, Homo sapien
taaatggcaatccagttcttcttag

SEQ ID NO: 3082971 - DNA, 25 bp, Homo sapien
taggagacaagatgcccagaaacac

SEQ ID NO: 3082972 - DNA, 25 bp, Homo sapien
tacccacagggaatgaagcattagg

SEQ ID NO: 3082973 - DNA, 25 bp, Homo sapien
tgttccaccagttgcacgatcctca

SEQ ID NO: 3082974 - DNA, 25 bp, Homo sapien
catatcggtttttccctgttggcca

SEQ ID NO: 3082975 - DNA, 25 bp, Homo sapien
tccagccatcatctatgtaagttaa

SEQ ID NO: 3082976 - DNA, 25 bp, Homo sapien
tgtcaaagcctgaacccacaatggg

SEQ ID NO: 3082977 - DNA, 25 bp, Homo sapien
ggcattctcacagcaagttactggt

SEQ ID NO: 3082978 - DNA, 25 bp, Homo sapien
aaaatagagtctccgagttccagcc

SEQ ID NO: 3082979 - DNA, 25 bp, Homo sapien
gcctgacttccacagccttctacat

SEQ ID NO: 3082980 - DNA, 25 bp, Homo sapien
cgtgcctgacttccacagccttcta

SEQ ID NO: 3082981 - DNA, 25 bp, Homo sapien
ccaccgtgcctgacttccacagcct

SEQ ID NO: 3082982 - DNA, 25 bp, Homo sapien
ctccttctaattgttacagctaaaa

SEQ ID NO: 3082983 - DNA, 25 bp, Homo sapien
cttaaagtggccctgcatggtttgt

SEQ ID NO: 3082984 - DNA, 25 bp, Homo sapien
gttgaaacgtaagtccagtcatgcc

SEQ ID NO: 3082985 - DNA, 25 bp, Homo sapien
gagataactggacccattgctttga

SEQ ID NO: 3082986 - DNA, 25 bp, Homo sapien
catcagattccatgcacgctagcca

SEQ ID NO: 3082987 - DNA, 25 bp, Homo sapien
aaaatagaacatgcacatgacccgc

SEQ ID NO: 3082988 - DNA, 25 bp, Homo sapien
catgacccgcaagaaattgaggaga

SEQ ID NO: 3082989 - DNA, 25 bp, Homo sapien
tatttggactcacagtctagtgctc

SEQ ID NO: 3082990 - DNA, 25 bp, Homo sapien
tagctcccagtatgaagactatctg

SEQ ID NO: 3082991 - DNA, 25 bp, Homo sapien
ttcagggtctctgtgctattcatgt

SEQ ID NO: 3082992 - DNA, 25 bp, Homo sapien
gggtctctgtgctattcatgtttct

SEQ ID NO: 3082993 - DNA, 25 bp, Homo sapien
aaagccattagatagtttcagggtc

SEQ ID NO: 3082994 - DNA, 25 bp, Homo sapien
ccattagatagtttcagggtctctg

SEQ ID NO: 3082995 - DNA, 25 bp, Homo sapien
ggtttctcttaccatgtgtacctag

SEQ ID NO: 3082996 - DNA, 25 bp, Homo sapien
cattaaggcagagtaaggactgggt

SEQ ID NO: 3082997 - DNA, 25 bp, Homo sapien
tatgctcttttagcacttatcctaa

SEQ ID NO: 3082998 - DNA, 25 bp, Homo sapien
gaccctctaaattaggttatgtgcc

SEQ ID NO: 3082999 - DNA, 25 bp, Homo sapien
gactgggccactttactactgtccg

SEQ ID NO: 3083000 - DNA, 25 bp, Homo sapien
cggagcctcatttactgaacagtgg

SEQ ID NO: 3083001 - DNA, 25 bp, Homo sapien
tgaacagtggacagatggttatgct

SEQ ID NO: 3083002 - DNA, 25 bp, Homo sapien
tagagataagagcatgcaagaccgc

SEQ ID NO: 3083003 - DNA, 25 bp, Homo sapien
ttggccccgaacctgtttcagacag

SEQ ID NO: 3083004 - DNA, 25 bp, Homo sapien
caaaaccattggcttaggagtgata

SEQ ID NO: 3083005 - DNA, 25 bp, Homo sapien
taagcaattgctatctggtgtcctg

SEQ ID NO: 3083006 - DNA, 25 bp, Homo sapien
gacttggctcttactttgaccagaa

SEQ ID NO: 3083007 - DNA, 25 bp, Homo sapien
tgtatgtttctagcccttctgtaaa

SEQ ID NO: 3083008 - DNA, 25 bp, Homo sapien
tgaagaaaagtgctcttagcactct

SEQ ID NO: 3083009 - DNA, 25 bp, Homo sapien
atctgtatgtttctagcccttctgt

SEQ ID NO: 3083010 - DNA, 25 bp, Homo sapien
gctcttagcactctgtgtaaaactg

SEQ ID NO: 3083011 - DNA, 25 bp, Homo sapien
caatggcttggtagattccagtgga

SEQ ID NO: 3083012 - DNA, 25 bp, Homo sapien
aatgacccctttgatgttacccgag

SEQ ID NO: 3083013 - DNA, 25 bp, Homo sapien
tatgatgtatcagctttagaggagg

SEQ ID NO: 3083014 - DNA, 25 bp, Homo sapien
gaaaagggttgacatccattcactt

SEQ ID NO: 3083015 - DNA, 25 bp, Homo sapien
tattagcaagtacgtggcaatgttc

SEQ ID NO: 3083016 - DNA, 25 bp, Homo sapien
ttctcattgaggagaaaccttgggc

SEQ ID NO: 3083017 - DNA, 25 bp, Homo sapien
catccatagagcatgacagcatcga

SEQ ID NO: 3083018 - DNA, 25 bp, Homo sapien
gaaaatacagactgggctagtccag

SEQ ID NO: 3083019 - DNA, 25 bp, Homo sapien
gcaagaccttcttccgaggcatgga

SEQ ID NO: 3083020 - DNA, 25 bp, Homo sapien
taaagatgtagtattccggcctgtg

SEQ ID NO: 3083021 - DNA, 25 bp, Homo sapien
aatgcaaggaagtcaaccccagagg

SEQ ID NO: 3083022 - DNA, 25 bp, Homo sapien
gaagttcatgggtaggtatcgtcct

SEQ ID NO: 3083023 - DNA, 25 bp, Homo sapien
gggaatacaagagggctattgtgct

SEQ ID NO: 3083024 - DNA, 25 bp, Homo sapien
aatacaagagggctattgtgctggg

SEQ ID NO: 3083025 - DNA, 25 bp, Homo sapien
gcagggaatacaagagggctattgt

SEQ ID NO: 3083026 - DNA, 25 bp, Homo sapien
gggcagggaatacaagagggctatt

SEQ ID NO: 3083027 - DNA, 25 bp, Homo sapien
caacctagccatatgcaaggtaggg

SEQ ID NO: 3083028 - DNA, 25 bp, Homo sapien
tggcttccccatgtgtcatccaagg

SEQ ID NO: 3083029 - DNA, 25 bp, Homo sapien
aagtttcgcggctgtgttgcttcac

SEQ ID NO: 3083030 - DNA, 25 bp, Homo sapien
accctgaaagctgcttggagaggga

SEQ ID NO: 3083031 - DNA, 25 bp, Homo sapien
aaaagtgctacactcctgcaccggg

SEQ ID NO: 3083032 - DNA, 25 bp, Homo sapien
gctccgcacacgtaacaagggctct

SEQ ID NO: 3083033 - DNA, 25 bp, Homo sapien
caccacgccgtgaagtttgcggaaa

SEQ ID NO: 3083034 - DNA, 25 bp, Homo sapien
cagagacctgttgcgtaacactgag

SEQ ID NO: 3083035 - DNA, 25 bp, Homo sapien
tcatagagggggctggaagtgcctg

SEQ ID NO: 3083036 - DNA, 25 bp, Homo sapien
acaaggacgcctggagtgtccctcc

SEQ ID NO: 3083037 - DNA, 25 bp, Homo sapien
gtgagaggcccggtcagggaggaca

SEQ ID NO: 3083038 - DNA, 25 bp, Homo sapien
cagggaggacaaggacgcctggagt

SEQ ID NO: 3083039 - DNA, 25 bp, Homo sapien
ttgaccacaccctgaggaggcttgg

SEQ ID NO: 3083040 - DNA, 25 bp, Homo sapien
acagagtgcgcttgcccctgccctg

SEQ ID NO: 3083041 - DNA, 25 bp, Homo sapien
gccgaattccttgcccgaagagctg

SEQ ID NO: 3083042 - DNA, 25 bp, Homo sapien
tccactgggccctaccctgggaagc

SEQ ID NO: 3083043 - DNA, 25 bp, Homo sapien
agagaccaaatagcccaggaaatgc

SEQ ID NO: 3083044 - DNA, 25 bp, Homo sapien
tgaattacgttgttgttgggaggaa

SEQ ID NO: 3083045 - DNA, 25 bp, Homo sapien
cagcaccagagaccaaatagcccag

SEQ ID NO: 3083046 - DNA, 25 bp, Homo sapien
ctggtgaattacgttgttgttggga

SEQ ID NO: 3083047 - DNA, 25 bp, Homo sapien
tcttggtgcgtgatggtggaatcca

SEQ ID NO: 3083048 - DNA, 25 bp, Homo sapien
gaaggagtcctctttgttagttgcc

SEQ ID NO: 3083049 - DNA, 25 bp, Homo sapien
cccgcggagactgtcactggaagga

SEQ ID NO: 3083050 - DNA, 25 bp, Homo sapien
cgcatttctggagcatgcagtttgc

SEQ ID NO: 3083051 - DNA, 25 bp, Homo sapien
ctccagggatcaagtctcaaggcca

SEQ ID NO: 3083052 - DNA, 25 bp, Homo sapien
aatgaggggatagttgctgggaaag

SEQ ID NO: 3083053 - DNA, 25 bp, Homo sapien
gaggaatgaggggatagttgctggg

SEQ ID NO: 3083054 - DNA, 25 bp, Homo sapien
gggagctccagggatcaagtctcaa

SEQ ID NO: 3083055 - DNA, 25 bp, Homo sapien
gctccctacacttctggcccagctt

SEQ ID NO: 3083056 - DNA, 25 bp, Homo sapien
agctgtggctagtgctgggatcctg

SEQ ID NO: 3083057 - DNA, 25 bp, Homo sapien
cagcttctgctgagtcgtggggttc

SEQ ID NO: 3083058 - DNA, 25 bp, Homo sapien
tgtgagtcatcagggcccaggaggt

SEQ ID NO: 3083059 - DNA, 25 bp, Homo sapien
gagggatggagcgatggcacccacg

SEQ ID NO: 3083060 - DNA, 25 bp, Homo sapien
tggtgggcgccgtgctgggtcctgt

SEQ ID NO: 3083061 - DNA, 25 bp, Homo sapien
tgctggcagtagctcttcggcacct

SEQ ID NO: 3083062 - DNA, 25 bp, Homo sapien
tgggtcctgtgctggcagtagctct

SEQ ID NO: 3083063 - DNA, 25 bp, Homo sapien
tgataggaagcgtgtcttcctgttc

SEQ ID NO: 3083064 - DNA, 25 bp, Homo sapien
tttcccacgcctgggtcctgtgaat

SEQ ID NO: 3083065 - DNA, 25 bp, Homo sapien
cctgagcactgctgataggaagcgt

SEQ ID NO: 3083066 - DNA, 25 bp, Homo sapien
tcctgttcaggcctacgtgagatgg

SEQ ID NO: 3083067 - DNA, 25 bp, Homo sapien
gcagctggatgagggctgtccagtg

SEQ ID NO: 3083068 - DNA, 25 bp, Homo sapien
agtaaacggcagctggatgagggct

SEQ ID NO: 3083069 - DNA, 25 bp, Homo sapien
cagtaaacggcagctggatgagggc

SEQ ID NO: 3083070 - DNA, 25 bp, Homo sapien
ctggatgagggctgtccagtggcac

SEQ ID NO: 3083071 - DNA, 25 bp, Homo sapien
agtgacccttccttcgagactcaag

SEQ ID NO: 3083072 - DNA, 25 bp, Homo sapien
ctttctctgactgtgcattctgccc

SEQ ID NO: 3083073 - DNA, 25 bp, Homo sapien
tgggcaccagcctcttggctctgca

SEQ ID NO: 3083074 - DNA, 25 bp, Homo sapien
tgtggcccctcgtggaattccaccg

SEQ ID NO: 3083075 - DNA, 25 bp, Homo sapien
tctgagtcccaactcacacctgtga

SEQ ID NO: 3083076 - DNA, 25 bp, Homo sapien
ttctgattaccctcagctggaagaa

SEQ ID NO: 3083077 - DNA, 25 bp, Homo sapien
tagctcccagtactgcccaacccgg

SEQ ID NO: 3083078 - DNA, 25 bp, Homo sapien
tttctctccacggctgctctagcat

SEQ ID NO: 3083079 - DNA, 25 bp, Homo sapien
gatgagcatgtgactcctcactgcc

SEQ ID NO: 3083080 - DNA, 25 bp, Homo sapien
cagtaccgtcctgtaattggtcaga

SEQ ID NO: 3083081 - DNA, 25 bp, Homo sapien
catgttcgtatcttgggccatggag

SEQ ID NO: 3083082 - DNA, 25 bp, Homo sapien
tgtgatcagtcagtcacgtgacccc

SEQ ID NO: 3083083 - DNA, 25 bp, Homo sapien
tgaggatttgccttcccagagaacc

SEQ ID NO: 3083084 - DNA, 25 bp, Homo sapien
ccctgccagagtgtgatttaatgtc

SEQ ID NO: 3083085 - DNA, 25 bp, Homo sapien
ccgcgggaaaggtgacagtcgcctt

SEQ ID NO: 3083086 - DNA, 25 bp, Homo sapien
ggatatcacagtctgcagcacagag

SEQ ID NO: 3083087 - DNA, 25 bp, Homo sapien
gcctggcctggaggttaagcagctc

SEQ ID NO: 3083088 - DNA, 25 bp, Homo sapien
tggcggccctttcaggcggcctctg

SEQ ID NO: 3083089 - DNA, 25 bp, Homo sapien
gggcagcttggaccgccttccttgt

SEQ ID NO: 3083090 - DNA, 25 bp, Homo sapien
gtgcctttcagggttttatgtgaca

SEQ ID NO: 3083091 - DNA, 25 bp, Homo sapien
agataacgtcctcttgggctattgt

SEQ ID NO: 3083092 - DNA, 25 bp, Homo sapien
tttccagtcgtatctctgagaaaca

SEQ ID NO: 3083093 - DNA, 25 bp, Homo sapien
tgggctcacgtgaagttttgggctt

SEQ ID NO: 3083094 - DNA, 25 bp, Homo sapien
ttgggcttcgttttccagtcgtatc

SEQ ID NO: 3083095 - DNA, 25 bp, Homo sapien
ctagtaaagtcagaaaggaggaaag

SEQ ID NO: 3083096 - DNA, 25 bp, Homo sapien
aaagactttggtctgtaactgacta

SEQ ID NO: 3083097 - DNA, 25 bp, Homo sapien
gactagtaaagtcagaaaggaggaa

SEQ ID NO: 3083098 - DNA, 25 bp, Homo sapien
taagactagtaaagtcagaaaggag

SEQ ID NO: 3083099 - DNA, 25 bp, Homo sapien
gaacctgaaaggcatggaaatcggg

SEQ ID NO: 3083100 - DNA, 25 bp, Homo sapien
gaatcctgcccgagcatgacactgt

SEQ ID NO: 3083101 - DNA, 25 bp, Homo sapien
tcttgccaagaccaagtaagggctt

SEQ ID NO: 3083102 - DNA, 25 bp, Homo sapien
tagtggctcaaggtcccgtttccca

SEQ ID NO: 3083103 - DNA, 25 bp, Homo sapien
ctcaccctgtgtccgtaggaaggcc

SEQ ID NO: 3083104 - DNA, 25 bp, Homo sapien
catccatctgcaagaaggcaggcca

SEQ ID NO: 3083105 - DNA, 25 bp, Homo sapien
tgtaaccagtccttgccatccatct

SEQ ID NO: 3083106 - DNA, 25 bp, Homo sapien
taggaaggccgctggaacgacagtc

SEQ ID NO: 3083107 - DNA, 25 bp, Homo sapien
taagtcccgagaggcctgaatgaaa

SEQ ID NO: 3083108 - DNA, 25 bp, Homo sapien
cctcaacgctgtatcgatgggtcaa

SEQ ID NO: 3083109 - DNA, 25 bp, Homo sapien
tccaggaggccgagtacaagttctt

SEQ ID NO: 3083110 - DNA, 25 bp, Homo sapien
gttctttgagcaccactccacgtgg

SEQ ID NO: 3083111 - DNA, 25 bp, Homo sapien
acaccacatggctctcctggaacgg

SEQ ID NO: 3083112 - DNA, 25 bp, Homo sapien
agaattgcgacttgagggaggaccc

SEQ ID NO: 3083113 - DNA, 25 bp, Homo sapien
ttcttgtcgcgccagagatggcctc

SEQ ID NO: 3083114 - DNA, 25 bp, Homo sapien
gcctcctcgaaggtgtgctggcaga

SEQ ID NO: 3083115 - DNA, 25 bp, Homo sapien
gatgttccggacaggcctgattttc

SEQ ID NO: 3083116 - DNA, 25 bp, Homo sapien
cagatgaaagtaccgagatgttccg

SEQ ID NO: 3083117 - DNA, 25 bp, Homo sapien
gaaccagcaccatttgagggacaga

SEQ ID NO: 3083118 - DNA, 25 bp, Homo sapien
gagggacagatttcaatccttcctt

SEQ ID NO: 3083119 - DNA, 25 bp, Homo sapien
aatgaatacatggctcgagtccatt

SEQ ID NO: 3083120 - DNA, 25 bp, Homo sapien
tgaatgaatacatggctcgagtcca

SEQ ID NO: 3083121 - DNA, 25 bp, Homo sapien
gaatgaatacatggctcgagtccat

SEQ ID NO: 3083122 - DNA, 25 bp, Homo sapien
aagagagtggcacgaggtgaaaatc

SEQ ID NO: 3083123 - DNA, 25 bp, Homo sapien
gaaaatctaactgtgaacgctttgg

SEQ ID NO: 3083124 - DNA, 25 bp, Homo sapien
gctgtggctgcccatagatgctcaa

SEQ ID NO: 3083125 - DNA, 25 bp, Homo sapien
tgctgtctgggactagactggtcgc

SEQ ID NO: 3083126 - DNA, 25 bp, Homo sapien
ctagacgacctggctttgagaaatg

SEQ ID NO: 3083127 - DNA, 25 bp, Homo sapien
agacgacctggctttgagaaatgct

SEQ ID NO: 3083128 - DNA, 25 bp, Homo sapien
aaatgctgccttcatttccatctcc

SEQ ID NO: 3083129 - DNA, 25 bp, Homo sapien
cttcatttccatctcccaactccga

SEQ ID NO: 3083130 - DNA, 25 bp, Homo sapien
cacagtgcctggaaccgtgtgggga

SEQ ID NO: 3083131 - DNA, 25 bp, Homo sapien
acagtgcctggaaccgtgtggggaa

SEQ ID NO: 3083132 - DNA, 25 bp, Homo sapien
ccacatagcctggtgcagaacttgt

SEQ ID NO: 3083133 - DNA, 25 bp, Homo sapien
ttggtcatctccacgtccccacata

SEQ ID NO: 3083134 - DNA, 25 bp, Homo sapien
tggtgcagaacttgttttcaggctg

SEQ ID NO: 3083135 - DNA, 25 bp, Homo sapien
ggaatccacagactgccccattggg

SEQ ID NO: 3083136 - DNA, 25 bp, Homo sapien
ggaccaagggagtgtggcctatggg

SEQ ID NO: 3083137 - DNA, 25 bp, Homo sapien
aaagtgctgccaaccaggcgagtca

SEQ ID NO: 3083138 - DNA, 25 bp, Homo sapien
accaggcgagtcatgccaggatgcc

SEQ ID NO: 3083139 - DNA, 25 bp, Homo sapien
attaacaaagtgctgccaaccaggc

SEQ ID NO: 3083140 - DNA, 25 bp, Homo sapien
tcgagcccgcctgctttattaagca

SEQ ID NO: 3083141 - DNA, 25 bp, Homo sapien
cgagcccgcctgctttattaagcac

SEQ ID NO: 3083142 - DNA, 25 bp, Homo sapien
gagcccgcctgctttattaagcacg

SEQ ID NO: 3083143 - DNA, 25 bp, Homo sapien
ttcgagcccgcctgctttattaagc

SEQ ID NO: 3083144 - DNA, 25 bp, Homo sapien
agagagccgtcttgcccgctttgag

SEQ ID NO: 3083145 - DNA, 25 bp, Homo sapien
aacaccctcaaaatggcaggactgg

SEQ ID NO: 3083146 - DNA, 25 bp, Homo sapien
tgtttgctgcggctgactttcccaa

SEQ ID NO: 3083147 - DNA, 25 bp, Homo sapien
gaacaaatcttatctcatgccggaa

SEQ ID NO: 3083148 - DNA, 25 bp, Homo sapien
tcctctgttctgggttgtgggtaat

SEQ ID NO: 3083149 - DNA, 25 bp, Homo sapien
cctctgttctgggttgtgggtaatt

SEQ ID NO: 3083150 - DNA, 25 bp, Homo sapien
acgagagctgcagccataacctggg

SEQ ID NO: 3083151 - DNA, 25 bp, Homo sapien
tataacctcctagtcgcagcaacgt

SEQ ID NO: 3083152 - DNA, 25 bp, Homo sapien
gcagcaacgttctaggaatccctta

SEQ ID NO: 3083153 - DNA, 25 bp, Homo sapien
ctcagcctcatcctgacgagagctg

SEQ ID NO: 3083154 - DNA, 25 bp, Homo sapien
tgtctcgggcttctaaatttggcag

SEQ ID NO: 3083155 - DNA, 25 bp, Homo sapien
ggtgaaggccgtgctaattggccac

SEQ ID NO: 3083156 - DNA, 25 bp, Homo sapien
aatttggcagcgagaacagactcgc

SEQ ID NO: 3083157 - DNA, 25 bp, Homo sapien
gatggtccgaatcacatttacaggc

SEQ ID NO: 3083158 - DNA, 25 bp, Homo sapien
aagcagcagacccatcaaggccctg

SEQ ID NO: 3083159 - DNA, 25 bp, Homo sapien
gaagcagcagacccatcaaggccct

SEQ ID NO: 3083160 - DNA, 25 bp, Homo sapien
taagaaacactgtgtactccgtggg

SEQ ID NO: 3083161 - DNA, 25 bp, Homo sapien
tgggagcccattgtgccaggctgca

SEQ ID NO: 3083162 - DNA, 25 bp, Homo sapien
ttctgactttatggcattttatgcc

SEQ ID NO: 3083163 - DNA, 25 bp, Homo sapien
ctgcaaggatgtgggctccggtgca

SEQ ID NO: 3083164 - DNA, 25 bp, Homo sapien
attggcacgtgtccgcgaagagcct

SEQ ID NO: 3083165 - DNA, 25 bp, Homo sapien
cgtgtccgcgaagagcctagctgga

SEQ ID NO: 3083166 - DNA, 25 bp, Homo sapien
cagaagcattggcacgtgtccgcga

SEQ ID NO: 3083167 - DNA, 25 bp, Homo sapien
agcattggcacgtgtccgcgaagag

SEQ ID NO: 3083168 - DNA, 25 bp, Homo sapien
ctgaattcatcagctcgttttgtgc

SEQ ID NO: 3083169 - DNA, 25 bp, Homo sapien
tggttgagcctcatgagttctgcaa

SEQ ID NO: 3083170 - DNA, 25 bp, Homo sapien
tcatgagttctgcaaacctctgctc

SEQ ID NO: 3083171 - DNA, 25 bp, Homo sapien
tttccacctggttgtggttgagcct

SEQ ID NO: 3083172 - DNA, 25 bp, Homo sapien
taaacagctccagtacaagctggat

SEQ ID NO: 3083173 - DNA, 25 bp, Homo sapien
caagctggatgtgtcgggtgctaca

SEQ ID NO: 3083174 - DNA, 25 bp, Homo sapien
cacagatgtccccttgtgaaaggct

SEQ ID NO: 3083175 - DNA, 25 bp, Homo sapien
caggccttgtccataacgttctcag

SEQ ID NO: 3083176 - DNA, 25 bp, Homo sapien
cctgttagcacctgtgagcagcatc

SEQ ID NO: 3083177 - DNA, 25 bp, Homo sapien
tcagtgccctgttagcacctgtgag

SEQ ID NO: 3083178 - DNA, 25 bp, Homo sapien
gaccttgggcctcatactagaataa

SEQ ID NO: 3083179 - DNA, 25 bp, Homo sapien
gaataatccgagttcagtgccctgt

SEQ ID NO: 3083180 - DNA, 25 bp, Homo sapien
ggacgagctgagtttcagtgacgtt

SEQ ID NO: 3083181 - DNA, 25 bp, Homo sapien
agctgagtttcagtgacgttgtaga

SEQ ID NO: 3083182 - DNA, 25 bp, Homo sapien
cgcctcggggacgagctgagtttca

SEQ ID NO: 3083183 - DNA, 25 bp, Homo sapien
cctcggggacgagctgagtttcagt

SEQ ID NO: 3083184 - DNA, 25 bp, Homo sapien
gtcttcacggcaccaagatctgctc

SEQ ID NO: 3083185 - DNA, 25 bp, Homo sapien
cagcaggccttgcttacacatctca

SEQ ID NO: 3083186 - DNA, 25 bp, Homo sapien
tattttcactttcagccactttttc

SEQ ID NO: 3083187 - DNA, 25 bp, Homo sapien
tgaacaaactgcaggcttcccacac

SEQ ID NO: 3083188 - DNA, 25 bp, Homo sapien
ccccggctatctgacagatgcgaca

SEQ ID NO: 3083189 - DNA, 25 bp, Homo sapien
acacagccgcaaggctccaggaggg

SEQ ID NO: 3083190 - DNA, 25 bp, Homo sapien
gtctccctcctcctcggagtcctcc

SEQ ID NO: 3083191 - DNA, 25 bp, Homo sapien
caagtctccctcctcctcggagtcc

SEQ ID NO: 3083192 - DNA, 25 bp, Homo sapien
ctcctcggagtcctcctccaggaga

SEQ ID NO: 3083193 - DNA, 25 bp, Homo sapien
cctcctcggagtcctcctccaggag

SEQ ID NO: 3083194 - DNA, 25 bp, Homo sapien
agcaatgctaattttggccttggga

SEQ ID NO: 3083195 - DNA, 25 bp, Homo sapien
caaggaaggacccatttatgactta

SEQ ID NO: 3083196 - DNA, 25 bp, Homo sapien
tctctaacgaaagcaatgctaattt

SEQ ID NO: 3083197 - DNA, 25 bp, Homo sapien
cgaaagcaatgctaattttggcctt

SEQ ID NO: 3083198 - DNA, 25 bp, Homo sapien
tccttttcatctgtgaaaccagagg

SEQ ID NO: 3083199 - DNA, 25 bp, Homo sapien
cagggtctgcctttatcttactggt

SEQ ID NO: 3083200 - DNA, 25 bp, Homo sapien
ttttcatctgtgaaaccagaggctg

SEQ ID NO: 3083201 - DNA, 25 bp, Homo sapien
tcagggtctgcctttatcttactgg

SEQ ID NO: 3083202 - DNA, 25 bp, Homo sapien
ttgccctgtggatttagtaagagat

SEQ ID NO: 3083203 - DNA, 25 bp, Homo sapien
taaggacaaattgccctgtggattt

SEQ ID NO: 3083204 - DNA, 25 bp, Homo sapien
aagaatccactaaggacaaattgcc

SEQ ID NO: 3083205 - DNA, 25 bp, Homo sapien
aagtaaatggtgtattttcttgcag

SEQ ID NO: 3083206 - DNA, 25 bp, Homo sapien
tgtatatagtggagccccctgaggc

SEQ ID NO: 3083207 - DNA, 25 bp, Homo sapien
gcttccctgacagcaaattcgtgtg

SEQ ID NO: 3083208 - DNA, 25 bp, Homo sapien
aattcgtgtgcactgtttactggga

SEQ ID NO: 3083209 - DNA, 25 bp, Homo sapien
aataattatggttttcggcactggc

SEQ ID NO: 3083210 - DNA, 25 bp, Homo sapien
caccaacctcttgtctgggctcgga

SEQ ID NO: 3083211 - DNA, 25 bp, Homo sapien
gggctcggatttggtgtcccacgaa

SEQ ID NO: 3083212 - DNA, 25 bp, Homo sapien
ttggtctgccagaaataaagtagtc

SEQ ID NO: 3083213 - DNA, 25 bp, Homo sapien
tccttcagaatcatgggtgccaggc

SEQ ID NO: 3083214 - DNA, 25 bp, Homo sapien
tcaatacttgaggactattttttcc

SEQ ID NO: 3083215 - DNA, 25 bp, Homo sapien
caatacttgaggactattttttcct

SEQ ID NO: 3083216 - DNA, 25 bp, Homo sapien
tagtgttacacatcaggccttcttg

SEQ ID NO: 3083217 - DNA, 25 bp, Homo sapien
tctgggaaggagcactcgggtctcc

SEQ ID NO: 3083218 - DNA, 25 bp, Homo sapien
cattggctgtgacgatgggaccaag

SEQ ID NO: 3083219 - DNA, 25 bp, Homo sapien
tggcctcttcagcttagtgttacac

SEQ ID NO: 3083220 - DNA, 25 bp, Homo sapien
tgccctttaaatgcaacagacaaga

SEQ ID NO: 3083221 - DNA, 25 bp, Homo sapien
gaaaagacacatttatcgttccagt

SEQ ID NO: 3083222 - DNA, 25 bp, Homo sapien
aaagggcccatggatgaaaggcctc

SEQ ID NO: 3083223 - DNA, 25 bp, Homo sapien
gcctctagcaccaagtgcaaaattg

SEQ ID NO: 3083224 - DNA, 25 bp, Homo sapien
ctctcgggctgtgcgattctgggct

SEQ ID NO: 3083225 - DNA, 25 bp, Homo sapien
tcttaataaaaccattggtgcttgg

SEQ ID NO: 3083226 - DNA, 25 bp, Homo sapien
tccccagatgctctcgggctgtgcg

SEQ ID NO: 3083227 - DNA, 25 bp, Homo sapien
gctgactgtaaatctcctcaggttt

SEQ ID NO: 3083228 - DNA, 25 bp, Homo sapien
ttctgacgggccccaggagggcatg

SEQ ID NO: 3083229 - DNA, 25 bp, Homo sapien
ctgacgggccccaggagggcatggc

SEQ ID NO: 3083230 - DNA, 25 bp, Homo sapien
ggccccaggagggcatggcagtggg

SEQ ID NO: 3083231 - DNA, 25 bp, Homo sapien
ccccaggagggcatggcagtgggtc

SEQ ID NO: 3083232 - DNA, 25 bp, Homo sapien
gctgctggtggtgtcggagcaactt

SEQ ID NO: 3083233 - DNA, 25 bp, Homo sapien
gagcccagagaagttgtaggtgtga

SEQ ID NO: 3083234 - DNA, 25 bp, Homo sapien
tgctggtggtgtcggagcaacttgg

SEQ ID NO: 3083235 - DNA, 25 bp, Homo sapien
cccagagaagttgtaggtgtgaaag

SEQ ID NO: 3083236 - DNA, 25 bp, Homo sapien
gctcatgggacctttcttccccaga

SEQ ID NO: 3083237 - DNA, 25 bp, Homo sapien
tattccaccaagtcggctctgactc

SEQ ID NO: 3083238 - DNA, 25 bp, Homo sapien
cggtttattccaccaagtcggctct

SEQ ID NO: 3083239 - DNA, 25 bp, Homo sapien
gccagaaggtcctccgaggtctgtt

SEQ ID NO: 3083240 - DNA, 25 bp, Homo sapien
ctttggcgctagaaggtgcagcccc

SEQ ID NO: 3083241 - DNA, 25 bp, Homo sapien
tccccgactgcgctgtgctgtgtgc

SEQ ID NO: 3083242 - DNA, 25 bp, Homo sapien
gatgggattttattggtcgctcgct

SEQ ID NO: 3083243 - DNA, 25 bp, Homo sapien
accacgccgcctggtattgttcttg

SEQ ID NO: 3083244 - DNA, 25 bp, Homo sapien
tgtgaaggagggaacggtaaccaga

SEQ ID NO: 3083245 - DNA, 25 bp, Homo sapien
cagcagtaattggtattgggctgca

SEQ ID NO: 3083246 - DNA, 25 bp, Homo sapien
aggtaaatcctactgggccttctgg

SEQ ID NO: 3083247 - DNA, 25 bp, Homo sapien
ggagaaagcaaagacggagcagtaa

SEQ ID NO: 3083248 - DNA, 25 bp, Homo sapien
aagcctttctctggcttggtgaatg

SEQ ID NO: 3083249 - DNA, 25 bp, Homo sapien
cacgtctttctggagataaagcctt

SEQ ID NO: 3083250 - DNA, 25 bp, Homo sapien
ggtgaatgctgtctgattcttcatc

SEQ ID NO: 3083251 - DNA, 25 bp, Homo sapien
gcctgaattttccacgtctttctgg

SEQ ID NO: 3083252 - DNA, 25 bp, Homo sapien
ctcagagtgttgtaaaagtagttgt

SEQ ID NO: 3083253 - DNA, 25 bp, Homo sapien
actcagagtgttgtaaaagtagttg

SEQ ID NO: 3083254 - DNA, 25 bp, Homo sapien
aactcagagtgttgtaaaagtagtt

SEQ ID NO: 3083255 - DNA, 25 bp, Homo sapien
cagattgctgcacaactgattccac

SEQ ID NO: 3083256 - DNA, 25 bp, Homo sapien
tttttagccagattgctgcacaact

SEQ ID NO: 3083257 - DNA, 25 bp, Homo sapien
tagccagattgctgcacaactgatt

SEQ ID NO: 3083258 - DNA, 25 bp, Homo sapien
aacacatcgatgctttgtttttagc

SEQ ID NO: 3083259 - DNA, 25 bp, Homo sapien
cctgctgacgtctgcatgggtcttg

SEQ ID NO: 3083260 - DNA, 25 bp, Homo sapien
agccctgctgacgtctgcatgggtc

SEQ ID NO: 3083261 - DNA, 25 bp, Homo sapien
gctgacgtctgcatgggtcttggac

SEQ ID NO: 3083262 - DNA, 25 bp, Homo sapien
cacagccctgctgacgtctgcatgg

SEQ ID NO: 3083263 - DNA, 25 bp, Homo sapien
cagagtttgctcagtctgaagtaca

SEQ ID NO: 3083264 - DNA, 25 bp, Homo sapien
ctagggccagaacgcagtgatgaag

SEQ ID NO: 3083265 - DNA, 25 bp, Homo sapien
tcctcctttttgtcagtgctataag

SEQ ID NO: 3083266 - DNA, 25 bp, Homo sapien
tgccaacttggctctgtcactgaaa

SEQ ID NO: 3083267 - DNA, 25 bp, Homo sapien
tgcttgactgatgtttggtcaattg

SEQ ID NO: 3083268 - DNA, 25 bp, Homo sapien
tttctgcttgactgatgtttggtca

SEQ ID NO: 3083269 - DNA, 25 bp, Homo sapien
ccttacagtcatggtacttttatgt

SEQ ID NO: 3083270 - DNA, 25 bp, Homo sapien
ttcgctggggtccactttctctgct

SEQ ID NO: 3083271 - DNA, 25 bp, Homo sapien
ggaagtttggagtcacacttaaatg

SEQ ID NO: 3083272 - DNA, 25 bp, Homo sapien
tggttcagttagagcatcctcctca

SEQ ID NO: 3083273 - DNA, 25 bp, Homo sapien
ggagtcacacttaaatgcagatatc

SEQ ID NO: 3083274 - DNA, 25 bp, Homo sapien
tgaccttggttcagttagagcatcc

SEQ ID NO: 3083275 - DNA, 25 bp, Homo sapien
ttccaaatactagggacacctgtct

SEQ ID NO: 3083276 - DNA, 25 bp, Homo sapien
ccaaatactagggacacctgtctgt

SEQ ID NO: 3083277 - DNA, 25 bp, Homo sapien
tccaaatactagggacacctgtctg

SEQ ID NO: 3083278 - DNA, 25 bp, Homo sapien
caaatactagggacacctgtctgta

SEQ ID NO: 3083279 - DNA, 25 bp, Homo sapien
ggctccagatgctgcgtgcagagct

SEQ ID NO: 3083280 - DNA, 25 bp, Homo sapien
gctgcgtgcagagctgcgttcttac

SEQ ID NO: 3083281 - DNA, 25 bp, Homo sapien
cagatgctgcgtgcagagctgcgtt

SEQ ID NO: 3083282 - DNA, 25 bp, Homo sapien
caggctccagatgctgcgtgcagag

SEQ ID NO: 3083283 - DNA, 25 bp, Homo sapien
gggcgcagaatctgagctagagtca

SEQ ID NO: 3083284 - DNA, 25 bp, Homo sapien
aatctgagctagagtcaagagggcg

SEQ ID NO: 3083285 - DNA, 25 bp, Homo sapien
ccagtgcacctcgagggcgcagaat

SEQ ID NO: 3083286 - DNA, 25 bp, Homo sapien
acctcgagggcgcagaatctgagct

SEQ ID NO: 3083287 - DNA, 25 bp, Homo sapien
tgcttctcggtatcaggttcactgc

SEQ ID NO: 3083288 - DNA, 25 bp, Homo sapien
tccgatgtaaccttgagtcctggtg

SEQ ID NO: 3083289 - DNA, 25 bp, Homo sapien
ttgcttgctggtacagtcaagtgac

SEQ ID NO: 3083290 - DNA, 25 bp, Homo sapien
attgatgtgaacagcacactgggcc

SEQ ID NO: 3083291 - DNA, 25 bp, Homo sapien
ggaacgacgtcctttccagtgagga

SEQ ID NO: 3083292 - DNA, 25 bp, Homo sapien
tgttgctttctagaagcttgcggct

SEQ ID NO: 3083293 - DNA, 25 bp, Homo sapien
tctcagtccttgaggcttgtgcatt

SEQ ID NO: 3083294 - DNA, 25 bp, Homo sapien
cagtgaggatacaggatcttggaaa

SEQ ID NO: 3083295 - DNA, 25 bp, Homo sapien
gacctgctagaaaaccgggatctct

SEQ ID NO: 3083296 - DNA, 25 bp, Homo sapien
ctgtttggaagatgacctgctagaa

SEQ ID NO: 3083297 - DNA, 25 bp, Homo sapien
tatattcctgtcgtctcagacaagc

SEQ ID NO: 3083298 - DNA, 25 bp, Homo sapien
aactgatcgcgtttcttctcatttg

SEQ ID NO: 3083299 - DNA, 25 bp, Homo sapien
gaacattctcccctttcaattgcac

SEQ ID NO: 3083300 - DNA, 25 bp, Homo sapien
aagaacattctcccctttcaattgc

SEQ ID NO: 3083301 - DNA, 25 bp, Homo sapien
taagaacattctcccctttcaattg

SEQ ID NO: 3083302 - DNA, 25 bp, Homo sapien
agaacattctcccctttcaattgca

SEQ ID NO: 3083303 - DNA, 25 bp, Homo sapien
tacagcatacgtagtcgggctgcct

SEQ ID NO: 3083304 - DNA, 25 bp, Homo sapien
aataagtctctgatcatgtggcaaa

SEQ ID NO: 3083305 - DNA, 25 bp, Homo sapien
aaaactggccgagggcagtcttgaa

SEQ ID NO: 3083306 - DNA, 25 bp, Homo sapien
tgtcaggattcggatggctataaat

SEQ ID NO: 3083307 - DNA, 25 bp, Homo sapien
atagcatgcaatatgccaaatagat

SEQ ID NO: 3083308 - DNA, 25 bp, Homo sapien
tagcatgcaatatgccaaatagatg

SEQ ID NO: 3083309 - DNA, 25 bp, Homo sapien
actcagagtccaccttatgctgcat

SEQ ID NO: 3083310 - DNA, 25 bp, Homo sapien
tgcctgtcccttgcgtcatgcaaca

SEQ ID NO: 3083311 - DNA, 25 bp, Homo sapien
cccgcagatactgaacatcgctgaa

SEQ ID NO: 3083312 - DNA, 25 bp, Homo sapien
tgcatgtcccgcagatactgaacat

SEQ ID NO: 3083313 - DNA, 25 bp, Homo sapien
atattggcagagtcaggccgccccg

SEQ ID NO: 3083314 - DNA, 25 bp, Homo sapien
cttcaggtgtatacgttctgcggca

SEQ ID NO: 3083315 - DNA, 25 bp, Homo sapien
cgtctggtctggtagttatgaaatc

SEQ ID NO: 3083316 - DNA, 25 bp, Homo sapien
ccggactcatggtgacccagcgtct

SEQ ID NO: 3083317 - DNA, 25 bp, Homo sapien
ccatattaagtagggagagagaaag

SEQ ID NO: 3083318 - DNA, 25 bp, Homo sapien
ctttagaaatcaacataagaagcca

SEQ ID NO: 3083319 - DNA, 25 bp, Homo sapien
cactcatggttatgcacacttctgt

SEQ ID NO: 3083320 - DNA, 25 bp, Homo sapien
gataatgtcttgtgccaaatctgtg

SEQ ID NO: 3083321 - DNA, 25 bp, Homo sapien
cccgaggctgctttccgcggcgccg

SEQ ID NO: 3083322 - DNA, 25 bp, Homo sapien
aattgcgcggggacggccctgagct

SEQ ID NO: 3083323 - DNA, 25 bp, Homo sapien
ggcgcaggagccgcccattaattgc

SEQ ID NO: 3083324 - DNA, 25 bp, Homo sapien
gggcgggccggtccagggcgcagga

SEQ ID NO: 3083325 - DNA, 25 bp, Homo sapien
ctctggataaactcgagctgtgcat

SEQ ID NO: 3083326 - DNA, 25 bp, Homo sapien
aaggaagaatttgacttctgtccag

SEQ ID NO: 3083327 - DNA, 25 bp, Homo sapien
ctgtccagaaggagtatctgatttg

SEQ ID NO: 3083328 - DNA, 25 bp, Homo sapien
ggactctggataaactcgagctgtg

SEQ ID NO: 3083329 - DNA, 25 bp, Homo sapien
aaacattgaagtgattctggtccgg

SEQ ID NO: 3083330 - DNA, 25 bp, Homo sapien
cattgaagtgattctggtccgggac

SEQ ID NO: 3083331 - DNA, 25 bp, Homo sapien
aatcttcagatcagtgaaaacattg

SEQ ID NO: 3083332 - DNA, 25 bp, Homo sapien
tgaagtgattctggtccgggaccat

SEQ ID NO: 3083333 - DNA, 25 bp, Homo sapien
ctattagaggtagttgctataagtg

SEQ ID NO: 3083334 - DNA, 25 bp, Homo sapien
gcttctctgtaactattagaggtag

SEQ ID NO: 3083335 - DNA, 25 bp, Homo sapien
gaggtagttgctataagtgtatcac

SEQ ID NO: 3083336 - DNA, 25 bp, Homo sapien
tataagtgtatcacttgttaaatgg

SEQ ID NO: 3083337 - DNA, 25 bp, Homo sapien
gattgtacgtgtaagtgtgtgtatg

SEQ ID NO: 3083338 - DNA, 25 bp, Homo sapien
ctctgtagtctttcatggctcactg

SEQ ID NO: 3083339 - DNA, 25 bp, Homo sapien
aaagaaggcatcagattgattgtac

SEQ ID NO: 3083340 - DNA, 25 bp, Homo sapien
ttttttaaggcagactctgcttata

SEQ ID NO: 3083341 - DNA, 25 bp, Homo sapien
tcctccttcgttctggagacattta

SEQ ID NO: 3083342 - DNA, 25 bp, Homo sapien
ggtcctccttcgttctggagacatt

SEQ ID NO: 3083343 - DNA, 25 bp, Homo sapien
tcaaggtcctccttcgttctggaga

SEQ ID NO: 3083344 - DNA, 25 bp, Homo sapien
aaggtcctccttcgttctggagaca

SEQ ID NO: 3083345 - DNA, 25 bp, Homo sapien
tttctctgaaggcacgtcctccccc

SEQ ID NO: 3083346 - DNA, 25 bp, Homo sapien
gtcttttgagctgtggtgtttgccc

SEQ ID NO: 3083347 - DNA, 25 bp, Homo sapien
ggcactgggtctgtctcctggaaga

SEQ ID NO: 3083348 - DNA, 25 bp, Homo sapien
cctccttgccttgtggcactgggtc

SEQ ID NO: 3083349 - DNA, 25 bp, Homo sapien
ccctttggagttgtggcaatggaag

SEQ ID NO: 3083350 - DNA, 25 bp, Homo sapien
caccctttggagttgtggcaatgga

SEQ ID NO: 3083351 - DNA, 25 bp, Homo sapien
caaaagtgttgggcagagcaccctt

SEQ ID NO: 3083352 - DNA, 25 bp, Homo sapien
agttgtggcaatggaaggaatttgt

SEQ ID NO: 3083353 - DNA, 25 bp, Homo sapien
aaaggagccctggattcattctctg

SEQ ID NO: 3083354 - DNA, 25 bp, Homo sapien
caaaaggagccctggattcattctc

SEQ ID NO: 3083355 - DNA, 25 bp, Homo sapien
ggagccctggattcattctctgccc

SEQ ID NO: 3083356 - DNA, 25 bp, Homo sapien
ctcaaaaggagccctggattcattc

SEQ ID NO: 3083357 - DNA, 25 bp, Homo sapien
tatactgggacatgtgatgtctgaa

SEQ ID NO: 3083358 - DNA, 25 bp, Homo sapien
cttgatgaagctgtctttcctgacc

SEQ ID NO: 3083359 - DNA, 25 bp, Homo sapien
gatgaagctgtctttcctgaccaag

SEQ ID NO: 3083360 - DNA, 25 bp, Homo sapien
gttgttaccaacagatactgggtcc

SEQ ID NO: 3083361 - DNA, 25 bp, Homo sapien
ctactgtgtgctcacatcggaaacc

SEQ ID NO: 3083362 - DNA, 25 bp, Homo sapien
gaactctcccacaaaggtgacccca

SEQ ID NO: 3083363 - DNA, 25 bp, Homo sapien
gcaagtgggtaattcattattctgc

SEQ ID NO: 3083364 - DNA, 25 bp, Homo sapien
gctgcccagctgttggtggctgaac

SEQ ID NO: 3083365 - DNA, 25 bp, Homo sapien
aattcattattctgctcctgtcctg

SEQ ID NO: 3083366 - DNA, 25 bp, Homo sapien
attgaacagccagggcatttaggac

SEQ ID NO: 3083367 - DNA, 25 bp, Homo sapien
gatgcattgaacagccagggcattt

SEQ ID NO: 3083368 - DNA, 25 bp, Homo sapien
catttaggacctcatcttgatttgt

SEQ ID NO: 3083369 - DNA, 25 bp, Homo sapien
atagatgcattgaacagccagggca

SEQ ID NO: 3083370 - DNA, 25 bp, Homo sapien
agggtgggtgggtacataggctcca

SEQ ID NO: 3083371 - DNA, 25 bp, Homo sapien
gggtgggtgggtacataggctccat

SEQ ID NO: 3083372 - DNA, 25 bp, Homo sapien
attgaattaacttgggagaggattc

SEQ ID NO: 3083373 - DNA, 25 bp, Homo sapien
tgaattaacttgggagaggattctg

SEQ ID NO: 3083374 - DNA, 25 bp, Homo sapien
ttgaattaacttgggagaggattct

SEQ ID NO: 3083375 - DNA, 25 bp, Homo sapien
aattgaattaacttgggagaggatt

SEQ ID NO: 3083376 - DNA, 25 bp, Homo sapien
tctgtcttgagtagggctaaaatgg

SEQ ID NO: 3083377 - DNA, 25 bp, Homo sapien
tccagcataggcaaagctatagagc

SEQ ID NO: 3083378 - DNA, 25 bp, Homo sapien
cgatcaggttggcaggaattatccc

SEQ ID NO: 3083379 - DNA, 25 bp, Homo sapien
ttgtgacagcagttacacagctctg

SEQ ID NO: 3083380 - DNA, 25 bp, Homo sapien
tgtggctgattgagaacatacatcc

SEQ ID NO: 3083381 - DNA, 25 bp, Homo sapien
gtggctgattgagaacatacatcca

SEQ ID NO: 3083382 - DNA, 25 bp, Homo sapien
cctgtggctgattgagaacatacat

SEQ ID NO: 3083383 - DNA, 25 bp, Homo sapien
tcctgtggctgattgagaacataca

SEQ ID NO: 3083384 - DNA, 25 bp, Homo sapien
gaaactcttcgttctcctcatatcc

SEQ ID NO: 3083385 - DNA, 25 bp, Homo sapien
tatccctcaaccggccctttagcac

SEQ ID NO: 3083386 - DNA, 25 bp, Homo sapien
ctcatatccctcaaccggcccttta

SEQ ID NO: 3083387 - DNA, 25 bp, Homo sapien
tcagaaactcttcgttctcctcata

SEQ ID NO: 3083388 - DNA, 25 bp, Homo sapien
caggtgcaagttatcagccacctcc

SEQ ID NO: 3083389 - DNA, 25 bp, Homo sapien
gtcaggtgcaagttatcagccacct

SEQ ID NO: 3083390 - DNA, 25 bp, Homo sapien
tcaggtgcaagttatcagccacctc

SEQ ID NO: 3083391 - DNA, 25 bp, Homo sapien
ttgggtatcataggtgccacgaagt

SEQ ID NO: 3083392 - DNA, 25 bp, Homo sapien
ccttgggtatcataggtgccacgaa

SEQ ID NO: 3083393 - DNA, 25 bp, Homo sapien
tgccacgaagtgggggttgaactcc

SEQ ID NO: 3083394 - DNA, 25 bp, Homo sapien
tccaccttgggtatcataggtgcca

SEQ ID NO: 3083395 - DNA, 25 bp, Homo sapien
tatgtgtctgtaagcacagatacac

SEQ ID NO: 3083396 - DNA, 25 bp, Homo sapien
tgatatcatactctattggtccact

SEQ ID NO: 3083397 - DNA, 25 bp, Homo sapien
catgctaccccatagcagtttttta

SEQ ID NO: 3083398 - DNA, 25 bp, Homo sapien
ccccaacacatgcaagctcagtaga

SEQ ID NO: 3083399 - DNA, 25 bp, Homo sapien
aagctgtggttggtgaattttcagc

SEQ ID NO: 3083400 - DNA, 25 bp, Homo sapien
catggtcgaagtgttattagcgata

SEQ ID NO: 3083401 - DNA, 25 bp, Homo sapien
cagaacgagttgcaaaatgtgcccc

SEQ ID NO: 3083402 - DNA, 25 bp, Homo sapien
aaaagtagttgcgaaatgtgccagg

SEQ ID NO: 3083403 - DNA, 25 bp, Homo sapien
gctggcctctgtggcgttgaaattc

SEQ ID NO: 3083404 - DNA, 25 bp, Homo sapien
catatgtactgccaccccctactgt

SEQ ID NO: 3083405 - DNA, 25 bp, Homo sapien
gagaattctgttgggtcttcctgtt

SEQ ID NO: 3083406 - DNA, 25 bp, Homo sapien
cctgttttgttctgactgtaagcca

SEQ ID NO: 3083407 - DNA, 25 bp, Homo sapien
ttctgactgtaagccatatgtactg

SEQ ID NO: 3083408 - DNA, 25 bp, Homo sapien
tattccttttcgtagatatcagcca

SEQ ID NO: 3083409 - DNA, 25 bp, Homo sapien
tagttcaaaaacatatgtaccatac

SEQ ID NO: 3083410 - DNA, 25 bp, Homo sapien
ttactactattgtctttgacttggg

SEQ ID NO: 3083411 - DNA, 25 bp, Homo sapien
ccctgaagttcagtaagccaatgat

SEQ ID NO: 3083412 - DNA, 25 bp, Homo sapien
gacctcgttactggccattggttgc

SEQ ID NO: 3083413 - DNA, 25 bp, Homo sapien
gctgggaaagagactgggatggatg

SEQ ID NO: 3083414 - DNA, 25 bp, Homo sapien
ggtgatatccagttcagggctggta

SEQ ID NO: 3083415 - DNA, 25 bp, Homo sapien
ttggttgccaaagcttagtatgttg

SEQ ID NO: 3083416 - DNA, 25 bp, Homo sapien
gattactttgggcttgaggagcacc

SEQ ID NO: 3083417 - DNA, 25 bp, Homo sapien
cctttttggcctctgtataggtgct

SEQ ID NO: 3083418 - DNA, 25 bp, Homo sapien
ctgtataggtgctcattgccttgga

SEQ ID NO: 3083419 - DNA, 25 bp, Homo sapien
tgttggcctgaatcttttcgaggac

SEQ ID NO: 3083420 - DNA, 25 bp, Homo sapien
gagtgaaatttggttatccagatga

SEQ ID NO: 3083421 - DNA, 25 bp, Homo sapien
gaggcctggagtgaaatttggttat

SEQ ID NO: 3083422 - DNA, 25 bp, Homo sapien
tatgagaggcctggagtgaaatttg

SEQ ID NO: 3083423 - DNA, 25 bp, Homo sapien
ttggttatccagatgatagatgaca

SEQ ID NO: 3083424 - DNA, 25 bp, Homo sapien
cacttggtatctccggcagcttcag

SEQ ID NO: 3083425 - DNA, 25 bp, Homo sapien
ggtatctccggcagcttcagctttc

SEQ ID NO: 3083426 - DNA, 25 bp, Homo sapien
cttggtatctccggcagcttcagct

SEQ ID NO: 3083427 - DNA, 25 bp, Homo sapien
tcacttggtatctccggcagcttca

SEQ ID NO: 3083428 - DNA, 25 bp, Homo sapien
ggctttatctcgtttagtatctatc

SEQ ID NO: 3083429 - DNA, 25 bp, Homo sapien
tcaatccttctcgtgggcatggtgg

SEQ ID NO: 3083430 - DNA, 25 bp, Homo sapien
ccttcaatccttctcgtgggcatgg

SEQ ID NO: 3083431 - DNA, 25 bp, Homo sapien
gtttagtatctatccccttcaatcc

SEQ ID NO: 3083432 - DNA, 25 bp, Homo sapien
tgtcttccggttgtggacgccttct

SEQ ID NO: 3083433 - DNA, 25 bp, Homo sapien
tcataatgtcttccggttgtggacg

SEQ ID NO: 3083434 - DNA, 25 bp, Homo sapien
tccggttgtggacgccttcttcatt

SEQ ID NO: 3083435 - DNA, 25 bp, Homo sapien
gttgtggacgccttcttcattttta

SEQ ID NO: 3083436 - DNA, 25 bp, Homo sapien
caaaatggtgcagcacgtacagggc

SEQ ID NO: 3083437 - DNA, 25 bp, Homo sapien
aatggtgcagcacgtacagggcttg

SEQ ID NO: 3083438 - DNA, 25 bp, Homo sapien
aagataaccgtcaatatgatccaga

SEQ ID NO: 3083439 - DNA, 25 bp, Homo sapien
accgtcaatatgatccagaggtgag

SEQ ID NO: 3083440 - DNA, 25 bp, Homo sapien
tgctcttattggcattaagtgtatc

SEQ ID NO: 3083441 - DNA, 25 bp, Homo sapien
attaagtgtatccagttcttgcaga

SEQ ID NO: 3083442 - DNA, 25 bp, Homo sapien
ggcattaagtgtatccagttcttgc

SEQ ID NO: 3083443 - DNA, 25 bp, Homo sapien
tattggcattaagtgtatccagttc

SEQ ID NO: 3083444 - DNA, 25 bp, Homo sapien
tttctccgcaatttgccagtatcta

SEQ ID NO: 3083445 - DNA, 25 bp, Homo sapien
cattaccttttctccgcaatttgcc

SEQ ID NO: 3083446 - DNA, 25 bp, Homo sapien
accttttctccgcaatttgccagta

SEQ ID NO: 3083447 - DNA, 25 bp, Homo sapien
tctccgcaatttgccagtatctatc

SEQ ID NO: 3083448 - DNA, 25 bp, Homo sapien
aagatccaaaaactgttccactgcc

SEQ ID NO: 3083449 - DNA, 25 bp, Homo sapien
gagttcttaactaaggtgtcttcca

SEQ ID NO: 3083450 - DNA, 25 bp, Homo sapien
cactaccttttcacgattttctcta

SEQ ID NO: 3083451 - DNA, 25 bp, Homo sapien
tccaaaaactgttccactgccacta

SEQ ID NO: 3083452 - DNA, 25 bp, Homo sapien
ttttcttgttagagcagcttttttc

SEQ ID NO: 3083453 - DNA, 25 bp, Homo sapien
tcttttcttgttagagcagcttttt

SEQ ID NO: 3083454 - DNA, 25 bp, Homo sapien
tcttgttagagcagcttttttcttg

SEQ ID NO: 3083455 - DNA, 25 bp, Homo sapien
ttgttagagcagcttttttcttgaa

SEQ ID NO: 3083456 - DNA, 25 bp, Homo sapien
gcaccattcatcagctctggacctg

SEQ ID NO: 3083457 - DNA, 25 bp, Homo sapien
taatataaattgttcccagaatcca

SEQ ID NO: 3083458 - DNA, 25 bp, Homo sapien
catgtcacagatccttatatggtgc

SEQ ID NO: 3083459 - DNA, 25 bp, Homo sapien
gctgcactgctagccttccttgtta

SEQ ID NO: 3083460 - DNA, 25 bp, Homo sapien
gagatgctgcagtaagtccttttat

SEQ ID NO: 3083461 - DNA, 25 bp, Homo sapien
ggctaatgtaaaatccactatagac

SEQ ID NO: 3083462 - DNA, 25 bp, Homo sapien
taatccctattatgctgatttggtg

SEQ ID NO: 3083463 - DNA, 25 bp, Homo sapien
cactatagacctccctattttaaga

SEQ ID NO: 3083464 - DNA, 25 bp, Homo sapien
tgagccgtgattacttcattgcatt

SEQ ID NO: 3083465 - DNA, 25 bp, Homo sapien
agccgtgattacttcattgcattcc

SEQ ID NO: 3083466 - DNA, 25 bp, Homo sapien
tgaggctgggaaggtaaagttgtag

SEQ ID NO: 3083467 - DNA, 25 bp, Homo sapien
cgtgattacttcattgcattccagc

SEQ ID NO: 3083468 - DNA, 25 bp, Homo sapien
gggatctgggatgtagcctgaagtg

SEQ ID NO: 3083469 - DNA, 25 bp, Homo sapien
ggatctgggatgtagcctgaagtgg

SEQ ID NO: 3083470 - DNA, 25 bp, Homo sapien
aagggatctgggatgtagcctgaag

SEQ ID NO: 3083471 - DNA, 25 bp, Homo sapien
caaagggatctgggatgtagcctga

SEQ ID NO: 3083472 - DNA, 25 bp, Homo sapien
agatcctgcgcttactagcagtgtg

SEQ ID NO: 3083473 - DNA, 25 bp, Homo sapien
taactcctgcaatatgatgtaatag

SEQ ID NO: 3083474 - DNA, 25 bp, Homo sapien
caatatgatgtaatagttcagatcc

SEQ ID NO: 3083475 - DNA, 25 bp, Homo sapien
cagtgtgacgttgggcaagttgtat

SEQ ID NO: 3083476 - DNA, 25 bp, Homo sapien
atccctggataataaacattttgtt

SEQ ID NO: 3083477 - DNA, 25 bp, Homo sapien
aatccctggataataaacattttgt

SEQ ID NO: 3083478 - DNA, 25 bp, Homo sapien
tgtggccttgagtaatgcattatac

SEQ ID NO: 3083479 - DNA, 25 bp, Homo sapien
gttccagggtaacttggtctgtggc

SEQ ID NO: 3083480 - DNA, 25 bp, Homo sapien
cagagcatctgttgtgtacatgatc

SEQ ID NO: 3083481 - DNA, 25 bp, Homo sapien
gcttaaagatgtatacagagcatct

SEQ ID NO: 3083482 - DNA, 25 bp, Homo sapien
ttctctttcttaatgatcagaaaca

SEQ ID NO: 3083483 - DNA, 25 bp, Homo sapien
cctttctctttcttaatgatcagaa

SEQ ID NO: 3083484 - DNA, 25 bp, Homo sapien
tctctttcttaatgatcagaaacat

SEQ ID NO: 3083485 - DNA, 25 bp, Homo sapien
tttctctttcttaatgatcagaaac

SEQ ID NO: 3083486 - DNA, 25 bp, Homo sapien
tagtagataactagtggccacatac

SEQ ID NO: 3083487 - DNA, 25 bp, Homo sapien
tattgagaccatatgctacgagttg

SEQ ID NO: 3083488 - DNA, 25 bp, Homo sapien
gataaatagggataggaaaggttca

SEQ ID NO: 3083489 - DNA, 25 bp, Homo sapien
tacgagttgttgctgactaggtaga

SEQ ID NO: 3083490 - DNA, 25 bp, Homo sapien
catatgttcctgcagcgcagtgttc

SEQ ID NO: 3083491 - DNA, 25 bp, Homo sapien
tcctgcagcgcagtgttcaggaaga

SEQ ID NO: 3083492 - DNA, 25 bp, Homo sapien
tatgttcctgcagcgcagtgttcag

SEQ ID NO: 3083493 - DNA, 25 bp, Homo sapien
gttcctgcagcgcagtgttcaggaa

SEQ ID NO: 3083494 - DNA, 25 bp, Homo sapien
gaatcgcttaaggcctggagttttg

SEQ ID NO: 3083495 - DNA, 25 bp, Homo sapien
acataccgagacccacccctctaca

SEQ ID NO: 3083496 - DNA, 25 bp, Homo sapien
tcgcttaaggcctggagttttgagt

SEQ ID NO: 3083497 - DNA, 25 bp, Homo sapien
aggcgtggtggctgtagtctgagct

SEQ ID NO: 3083498 - DNA, 25 bp, Homo sapien
taatgtgacttttgatgatatgata

SEQ ID NO: 3083499 - DNA, 25 bp, Homo sapien
ttgtgctattgatgaggaaatccag

SEQ ID NO: 3083500 - DNA, 25 bp, Homo sapien
acatttgaatgaattgtgctattga

SEQ ID NO: 3083501 - DNA, 25 bp, Homo sapien
tactctgatcagtgtatcaatgcct

SEQ ID NO: 3083502 - DNA, 25 bp, Homo sapien
agaacttgtcccattggttgaattt

SEQ ID NO: 3083503 - DNA, 25 bp, Homo sapien
tcccattggttgaatttctcattaa

SEQ ID NO: 3083504 - DNA, 25 bp, Homo sapien
aatttctcattaatggagaagaacc

SEQ ID NO: 3083505 - DNA, 25 bp, Homo sapien
cttgtcccattggttgaatttctca

SEQ ID NO: 3083506 - DNA, 25 bp, Homo sapien
ctctagtggtgttggagaaatggtc

SEQ ID NO: 3083507 - DNA, 25 bp, Homo sapien
ctcttactttacccacctgagtagc

SEQ ID NO: 3083508 - DNA, 25 bp, Homo sapien
cctcttactttacccacctgagtag

SEQ ID NO: 3083509 - DNA, 25 bp, Homo sapien
tcctcttactttacccacctgagta

SEQ ID NO: 3083510 - DNA, 25 bp, Homo sapien
tgccttcttgttacaggtgatgctg

SEQ ID NO: 3083511 - DNA, 25 bp, Homo sapien
cactcatgactcgtctgggtttcct

SEQ ID NO: 3083512 - DNA, 25 bp, Homo sapien
gcagcaaacacactcatgactcgtc

SEQ ID NO: 3083513 - DNA, 25 bp, Homo sapien
cctccatctgtagatgaggcagcaa

SEQ ID NO: 3083514 - DNA, 25 bp, Homo sapien
cagattgggagctttcttaggatcc

SEQ ID NO: 3083515 - DNA, 25 bp, Homo sapien
agagatccagattgggagctttctt

SEQ ID NO: 3083516 - DNA, 25 bp, Homo sapien
tcaaatggaccttatgaatttcctc

SEQ ID NO: 3083517 - DNA, 25 bp, Homo sapien
cctctttagcttcttatgttgtgta

SEQ ID NO: 3083518 - DNA, 25 bp, Homo sapien
agctggcaccagatctttttaaaga

SEQ ID NO: 3083519 - DNA, 25 bp, Homo sapien
cttctttgtggcatgctacatgctt

SEQ ID NO: 3083520 - DNA, 25 bp, Homo sapien
tctaagcagtatagtgccacgtgca

SEQ ID NO: 3083521 - DNA, 25 bp, Homo sapien
cagtgatggctaagcaaacaggatt

SEQ ID NO: 3083522 - DNA, 25 bp, Homo sapien
caacagcagttagttgatagcctca

SEQ ID NO: 3083523 - DNA, 25 bp, Homo sapien
tatacatgtctgctgtccactctag

SEQ ID NO: 3083524 - DNA, 25 bp, Homo sapien
tcatctcatgtcatattctttctcg

SEQ ID NO: 3083525 - DNA, 25 bp, Homo sapien
catctcatgtcatattctttctcga

SEQ ID NO: 3083526 - DNA, 25 bp, Homo sapien
ctcatgtcatattctttctcgattt

SEQ ID NO: 3083527 - DNA, 25 bp, Homo sapien
tctcatgtcatattctttctcgatt

SEQ ID NO: 3083528 - DNA, 25 bp, Homo sapien
caaggtatgcctttatacgtacttg

SEQ ID NO: 3083529 - DNA, 25 bp, Homo sapien
ccaaggtatgcctttatacgtactt

SEQ ID NO: 3083530 - DNA, 25 bp, Homo sapien
ggtatgcctttatacgtacttgtat

SEQ ID NO: 3083531 - DNA, 25 bp, Homo sapien
tgcctttatacgtacttgtatttct

SEQ ID NO: 3083532 - DNA, 25 bp, Homo sapien
gcctgatgagttagaggtggtgttc

SEQ ID NO: 3083533 - DNA, 25 bp, Homo sapien
tctttagtagatgactggcagatgc

SEQ ID NO: 3083534 - DNA, 25 bp, Homo sapien
tggtgttctcgaagagaggcctgaa

SEQ ID NO: 3083535 - DNA, 25 bp, Homo sapien
gagttcatatgtctatgagtgcccc

SEQ ID NO: 3083536 - DNA, 25 bp, Homo sapien
ctttaggtatagtctaggaagctgc

SEQ ID NO: 3083537 - DNA, 25 bp, Homo sapien
gggactggtctcattgcggctgctt

SEQ ID NO: 3083538 - DNA, 25 bp, Homo sapien
ggttcaactctgtctaatgcctggg

SEQ ID NO: 3083539 - DNA, 25 bp, Homo sapien
tgttgggatctagccacctggttca

SEQ ID NO: 3083540 - DNA, 25 bp, Homo sapien
gtggagaaggaagttactgtgctaa

SEQ ID NO: 3083541 - DNA, 25 bp, Homo sapien
cacttactgaggcattaaactgggt

SEQ ID NO: 3083542 - DNA, 25 bp, Homo sapien
tgggtatcttaaacagttctctggg

SEQ ID NO: 3083543 - DNA, 25 bp, Homo sapien
gagagttccaatccctacagccttt

SEQ ID NO: 3083544 - DNA, 25 bp, Homo sapien
ggactatggttttcctggtgctgca

SEQ ID NO: 3083545 - DNA, 25 bp, Homo sapien
tacagcatatggtggtgacgtgact

SEQ ID NO: 3083546 - DNA, 25 bp, Homo sapien
aaatgcagtgttccctgttgagagg

SEQ ID NO: 3083547 - DNA, 25 bp, Homo sapien
catggttgcctgagataagactggc

SEQ ID NO: 3083548 - DNA, 25 bp, Homo sapien
cgtgtagtagttctaaaatcacctt

SEQ ID NO: 3083549 - DNA, 25 bp, Homo sapien
agatgtctgggcaggctccttccgt

SEQ ID NO: 3083550 - DNA, 25 bp, Homo sapien
aggctccttccgtgtagtagttcta

SEQ ID NO: 3083551 - DNA, 25 bp, Homo sapien
cagatgtctgggcaggctccttccg

SEQ ID NO: 3083552 - DNA, 25 bp, Homo sapien
tggcaggtaagcagggcgaccactt

SEQ ID NO: 3083553 - DNA, 25 bp, Homo sapien
tttgggttacccagcagtgatcagg

SEQ ID NO: 3083554 - DNA, 25 bp, Homo sapien
accgccgaggagcagtgccactatt

SEQ ID NO: 3083555 - DNA, 25 bp, Homo sapien
tctaggtgaggacttctgatgcaca

SEQ ID NO: 3083556 - DNA, 25 bp, Homo sapien
gtcgcccacgaggtatatttcaccg

SEQ ID NO: 3083557 - DNA, 25 bp, Homo sapien
tatttcaccgctgtcagcatcaggc

SEQ ID NO: 3083558 - DNA, 25 bp, Homo sapien
caccgctgtcagcatcaggcgtggt

SEQ ID NO: 3083559 - DNA, 25 bp, Homo sapien
gaggtatatttcaccgctgtcagca

SEQ ID NO: 3083560 - DNA, 25 bp, Homo sapien
ggattaccctgtcccgaagcttcat

SEQ ID NO: 3083561 - DNA, 25 bp, Homo sapien
tgtcaaagtcatcgcactggatcag

SEQ ID NO: 3083562 - DNA, 25 bp, Homo sapien
gtccaagctgaaggctccataccct

SEQ ID NO: 3083563 - DNA, 25 bp, Homo sapien
ttggcagcagtcatcactgacactt

SEQ ID NO: 3083564 - DNA, 25 bp, Homo sapien
acaaatatgccgctgatgccgcttc

SEQ ID NO: 3083565 - DNA, 25 bp, Homo sapien
ctgtccaggcgaatgagcaggtcct

SEQ ID NO: 3083566 - DNA, 25 bp, Homo sapien
aatatgccgctgatgccgcttctcc

SEQ ID NO: 3083567 - DNA, 25 bp, Homo sapien
gctttacaaatatgccgctgatgcc

SEQ ID NO: 3083568 - DNA, 25 bp, Homo sapien
cataccaccctgaaatggaggacag

SEQ ID NO: 3083569 - DNA, 25 bp, Homo sapien
caggattcttgcactaatgggtttc

SEQ ID NO: 3083570 - DNA, 25 bp, Homo sapien
gagtaggtatcactgctgcatgcca

SEQ ID NO: 3083571 - DNA, 25 bp, Homo sapien
ctagaatatgccaaccagagcttgt

SEQ ID NO: 3083572 - DNA, 25 bp, Homo sapien
tagggactcctgagacacggttact

SEQ ID NO: 3083573 - DNA, 25 bp, Homo sapien
tataacttaaactcgatggctcagg

SEQ ID NO: 3083574 - DNA, 25 bp, Homo sapien
agtaccccaggtcgttgtccagata

SEQ ID NO: 3083575 - DNA, 25 bp, Homo sapien
tatcttgtccgggttgcagacgtgc

SEQ ID NO: 3083576 - DNA, 25 bp, Homo sapien
tcagagctttgaaagtcagtaccaa

SEQ ID NO: 3083577 - DNA, 25 bp, Homo sapien
caaatgaacgcataattggacacca

SEQ ID NO: 3083578 - DNA, 25 bp, Homo sapien
tcaagggctgaagtgttggtaacct

SEQ ID NO: 3083579 - DNA, 25 bp, Homo sapien
ggtgtccaaagcctcacagcaggtg

SEQ ID NO: 3083580 - DNA, 25 bp, Homo sapien
ggctaaggccaaattcccgatgatt

SEQ ID NO: 3083581 - DNA, 25 bp, Homo sapien
gcttttaagcttaccctcctgagga

SEQ ID NO: 3083582 - DNA, 25 bp, Homo sapien
gctgtggacaagagacgccgttcta

SEQ ID NO: 3083583 - DNA, 25 bp, Homo sapien
taggccctcaagagagctgtggaca

SEQ ID NO: 3083584 - DNA, 25 bp, Homo sapien
ctgtgcccgacctagatgttttgtt

SEQ ID NO: 3083585 - DNA, 25 bp, Homo sapien
ccaagtacctgggaccacagtgcat

SEQ ID NO: 3083586 - DNA, 25 bp, Homo sapien
ttgtttttagatggagtctcactct

SEQ ID NO: 3083587 - DNA, 25 bp, Homo sapien
ccactgtgcccgacctagatgtttt

SEQ ID NO: 3083588 - DNA, 25 bp, Homo sapien
taactgcaggcagacacagtacgca

SEQ ID NO: 3083589 - DNA, 25 bp, Homo sapien
tacgcacgtgcacatggtggccaaa

SEQ ID NO: 3083590 - DNA, 25 bp, Homo sapien
taacaggtatcatgtctggaaggcc

SEQ ID NO: 3083591 - DNA, 25 bp, Homo sapien
tctaacaggccatcctcttgggagg

SEQ ID NO: 3083592 - DNA, 25 bp, Homo sapien
gaatcatctgttgcaccaacagcac

SEQ ID NO: 3083593 - DNA, 25 bp, Homo sapien
catctgttgcaccaacagcacattg

SEQ ID NO: 3083594 - DNA, 25 bp, Homo sapien
atttattgaatcatctgttgcacca

SEQ ID NO: 3083595 - DNA, 25 bp, Homo sapien
tattgaatcatctgttgcaccaaca

SEQ ID NO: 3083596 - DNA, 25 bp, Homo sapien
ccagtttacagacttttgttgcaaa

SEQ ID NO: 3083597 - DNA, 25 bp, Homo sapien
tcttcagctccttagtcatccagtg

SEQ ID NO: 3083598 - DNA, 25 bp, Homo sapien
ttggcaaacagaccagtttacagac

SEQ ID NO: 3083599 - DNA, 25 bp, Homo sapien
aacagaccagtttacagacttttgt

SEQ ID NO: 3083600 - DNA, 25 bp, Homo sapien
ggaggcgaacactgtcatccggaca

SEQ ID NO: 3083601 - DNA, 25 bp, Homo sapien
agactggcccctttctctaagacgg

SEQ ID NO: 3083602 - DNA, 25 bp, Homo sapien
ctgattgaagaactgacggcacccc

SEQ ID NO: 3083603 - DNA, 25 bp, Homo sapien
taatcacactatttccaggccgaag

SEQ ID NO: 3083604 - DNA, 25 bp, Homo sapien
aagatctgtgctctgcgaccaggac

SEQ ID NO: 3083605 - DNA, 25 bp, Homo sapien
tgtttgaattcagcagccatcgtgg

SEQ ID NO: 3083606 - DNA, 25 bp, Homo sapien
agaaggctcgtcctccagaacagag

SEQ ID NO: 3083607 - DNA, 25 bp, Homo sapien
cacaatgaactggtctatagcagcg

SEQ ID NO: 3083608 - DNA, 25 bp, Homo sapien
cgggtcaagatgtagagcaccgccc

SEQ ID NO: 3083609 - DNA, 25 bp, Homo sapien
ccgtcagcgtcttgaagtccatgga

SEQ ID NO: 3083610 - DNA, 25 bp, Homo sapien
ttggccaggacaccctcgggctcaa

SEQ ID NO: 3083611 - DNA, 25 bp, Homo sapien
tcgggctcaaatgcgctatacttgc

SEQ ID NO: 3083612 - DNA, 25 bp, Homo sapien
tgctgtgggcggtagcggctccgca

SEQ ID NO: 3083613 - DNA, 25 bp, Homo sapien
agaatgaagctccggggaacaggaa

SEQ ID NO: 3083614 - DNA, 25 bp, Homo sapien
ggaagaagctgaagcccaccagcca

SEQ ID NO: 3083615 - DNA, 25 bp, Homo sapien
ggtagcaccaaagaagatgtgctgt

SEQ ID NO: 3083616 - DNA, 25 bp, Homo sapien
acgtgcccacgtggcgactgtgagc

SEQ ID NO: 3083617 - DNA, 25 bp, Homo sapien
acgtggcgactgtgagcccctcagc

SEQ ID NO: 3083618 - DNA, 25 bp, Homo sapien
cacgtggcgactgtgagcccctcag

SEQ ID NO: 3083619 - DNA, 25 bp, Homo sapien
cacccacgtgcccacgtggcgactg

SEQ ID NO: 3083620 - DNA, 25 bp, Homo sapien
gtacaggtcagcgtagcccttcttc

SEQ ID NO: 3083621 - DNA, 25 bp, Homo sapien
gcacaaagtacaggacaaagacaag

SEQ ID NO: 3083622 - DNA, 25 bp, Homo sapien
ttcctgtggtagtcgaacaccgcca

SEQ ID NO: 3083623 - DNA, 25 bp, Homo sapien
acaaggatcccgcaccagctgtgta

SEQ ID NO: 3083624 - DNA, 25 bp, Homo sapien
aggcaggtggcggggaaggccgcgc

SEQ ID NO: 3083625 - DNA, 25 bp, Homo sapien
aagaggcaggcaggtggcggggaag

SEQ ID NO: 3083626 - DNA, 25 bp, Homo sapien
aggcaggcaggtggcggggaaggcc

SEQ ID NO: 3083627 - DNA, 25 bp, Homo sapien
caggtggcggggaaggccgcgcccg

SEQ ID NO: 3083628 - DNA, 25 bp, Homo sapien
caggaccttggtggtgcgtttagct

SEQ ID NO: 3083629 - DNA, 25 bp, Homo sapien
gcaaagatgtgcagcagcccgtgca

SEQ ID NO: 3083630 - DNA, 25 bp, Homo sapien
caaccagggcgatgacgagcgcaaa

SEQ ID NO: 3083631 - DNA, 25 bp, Homo sapien
tggtgcgtttagcttcgttcctgaa

SEQ ID NO: 3083632 - DNA, 25 bp, Homo sapien
tcttgtcaggtgtcctgcaaattcc

SEQ ID NO: 3083633 - DNA, 25 bp, Homo sapien
gaggtccactgttggtcacactgag

SEQ ID NO: 3083634 - DNA, 25 bp, Homo sapien
taagcctgggcagatggtcctactc

SEQ ID NO: 3083635 - DNA, 25 bp, Homo sapien
gagttcacctgttagccacgtggct

SEQ ID NO: 3083636 - DNA, 25 bp, Homo sapien
gggtcaaccggatgcagatcccgct

SEQ ID NO: 3083637 - DNA, 25 bp, Homo sapien
tgtcaccaggaccacctctaggaag

SEQ ID NO: 3083638 - DNA, 25 bp, Homo sapien
aagagcgggtcaaccggatgcagat

SEQ ID NO: 3083639 - DNA, 25 bp, Homo sapien
gaggaatgcctcttagctttctgct

SEQ ID NO: 3083640 - DNA, 25 bp, Homo sapien
tgcgcgttgaactgcaggtcgctct

SEQ ID NO: 3083641 - DNA, 25 bp, Homo sapien
cggtcatggccaccaaggtcaggcc

SEQ ID NO: 3083642 - DNA, 25 bp, Homo sapien
catttccctgcaggaagatcaggcc

SEQ ID NO: 3083643 - DNA, 25 bp, Homo sapien
tcaggcctatgaccatgcagagggg

SEQ ID NO: 3083644 - DNA, 25 bp, Homo sapien
agataagcacggtccccccagatat

SEQ ID NO: 3083645 - DNA, 25 bp, Homo sapien
gagatgtacacacccctcaagatgc

SEQ ID NO: 3083646 - DNA, 25 bp, Homo sapien
agccgcccctgctagatgcgcgcaa

SEQ ID NO: 3083647 - DNA, 25 bp, Homo sapien
gcacagcaccccgagatgcgcacag

SEQ ID NO: 3083648 - DNA, 25 bp, Homo sapien
gatgcgcacagccaccccgctagat

SEQ ID NO: 3083649 - DNA, 25 bp, Homo sapien
cagatgcgagcagcccccctgagat

SEQ ID NO: 3083650 - DNA, 25 bp, Homo sapien
agccaccccgctagatgggcacagc

SEQ ID NO: 3083651 - DNA, 25 bp, Homo sapien
cacagcacccccagatgcgagcagc

SEQ ID NO: 3083652 - DNA, 25 bp, Homo sapien
cccccacggatgcgcacagccccta

SEQ ID NO: 3083653 - DNA, 25 bp, Homo sapien
ccccccacggatgcgcacagcccct

SEQ ID NO: 3083654 - DNA, 25 bp, Homo sapien
tcccccccacggatgcgcacagccc

SEQ ID NO: 3083655 - DNA, 25 bp, Homo sapien
gtcccccccacggatgcgcacagcc

SEQ ID NO: 3083656 - DNA, 25 bp, Homo sapien
caggcgtgacctgggacacgacgcc

SEQ ID NO: 3083657 - DNA, 25 bp, Homo sapien
cgccaggagttccatatgcggtgag

SEQ ID NO: 3083658 - DNA, 25 bp, Homo sapien
ggtctcaagtctcgggagtggctgg

SEQ ID NO: 3083659 - DNA, 25 bp, Homo sapien
aggcagaggtctcaagtctcgggag

SEQ ID NO: 3083660 - DNA, 25 bp, Homo sapien
tgtgcgccacggaaaagtgctgcca

SEQ ID NO: 3083661 - DNA, 25 bp, Homo sapien
gcctgtgcgccacggaaaagtgctg

SEQ ID NO: 3083662 - DNA, 25 bp, Homo sapien
cggcctgtgcgccacggaaaagtgc

SEQ ID NO: 3083663 - DNA, 25 bp, Homo sapien
agcggcctgtgcgccacggaaaagt

SEQ ID NO: 3083664 - DNA, 25 bp, Homo sapien
ctgctcctcgaaggcagggacgctc

SEQ ID NO: 3083665 - DNA, 25 bp, Homo sapien
tcctccttgggtatctttgggtctc

SEQ ID NO: 3083666 - DNA, 25 bp, Homo sapien
tgggtctctaataccccgagtctaa

SEQ ID NO: 3083667 - DNA, 25 bp, Homo sapien
cccgagtctaacaggaaaatgtact

SEQ ID NO: 3083668 - DNA, 25 bp, Homo sapien
ttattagattcatccccagagagcc

SEQ ID NO: 3083669 - DNA, 25 bp, Homo sapien
ggtcgccgcctcctttattagattc

SEQ ID NO: 3083670 - DNA, 25 bp, Homo sapien
tcctctccaggtcgccgcctccttt

SEQ ID NO: 3083671 - DNA, 25 bp, Homo sapien
tttattagattcatccccagagagc

SEQ ID NO: 3083672 - DNA, 25 bp, Homo sapien
gaccacagtccgtaggttctgagcg

SEQ ID NO: 3083673 - DNA, 25 bp, Homo sapien
gataacccatttgtgtgcagggaag

SEQ ID NO: 3083674 - DNA, 25 bp, Homo sapien
aacaggactctcgtgaggccattca

SEQ ID NO: 3083675 - DNA, 25 bp, Homo sapien
ttacaggagataagcggaagatccc

SEQ ID NO: 3083676 - DNA, 25 bp, Homo sapien
acttaatgcaatcagcgcattaggg

SEQ ID NO: 3083677 - DNA, 25 bp, Homo sapien
cttaatgcaatcagcgcattaggga

SEQ ID NO: 3083678 - DNA, 25 bp, Homo sapien
aatgcaatcagcgcattagggacag

SEQ ID NO: 3083679 - DNA, 25 bp, Homo sapien
ttaatgcaatcagcgcattagggac

SEQ ID NO: 3083680 - DNA, 25 bp, Homo sapien
aggctcggctccgagagggcgggcg

SEQ ID NO: 3083681 - DNA, 25 bp, Homo sapien
tgcgaggccggctgctactcgggag

SEQ ID NO: 3083682 - DNA, 25 bp, Homo sapien
aaagatccaaactcggggtcaccag

SEQ ID NO: 3083683 - DNA, 25 bp, Homo sapien
cttgctctagaacgcggcgcaggag

SEQ ID NO: 3083684 - DNA, 25 bp, Homo sapien
ttggccggttctgcgggccgtggcg

SEQ ID NO: 3083685 - DNA, 25 bp, Homo sapien
tggcgcgacggcgtcgccatggcaa

SEQ ID NO: 3083686 - DNA, 25 bp, Homo sapien
cgcccgggtcgcttggccggttctg

SEQ ID NO: 3083687 - DNA, 25 bp, Homo sapien
ggccgtggcgcgacggcgtcgccat

SEQ ID NO: 3083688 - DNA, 25 bp, Homo sapien
gccgcgggattcgtccttgcgagcc

SEQ ID NO: 3083689 - DNA, 25 bp, Homo sapien
ttggtcccgcgcttcctgattttct

SEQ ID NO: 3083690 - DNA, 25 bp, Homo sapien
gtgcgtgggatctgcggcctgcggg

SEQ ID NO: 3083691 - DNA, 25 bp, Homo sapien
cccgactgcgcacggaaggacctgg

SEQ ID NO: 3083692 - DNA, 25 bp, Homo sapien
ctcttccctgcagccatcccatctg

SEQ ID NO: 3083693 - DNA, 25 bp, Homo sapien
cgcctcttccctgcagccatcccat

SEQ ID NO: 3083694 - DNA, 25 bp, Homo sapien
cttccctgcagccatcccatctggg

SEQ ID NO: 3083695 - DNA, 25 bp, Homo sapien
ggagcgcctcttccctgcagccatc

SEQ ID NO: 3083696 - DNA, 25 bp, Homo sapien
tggagatttccataggatggatgcc

SEQ ID NO: 3083697 - DNA, 25 bp, Homo sapien
agatttccataggatggatgcctgg

SEQ ID NO: 3083698 - DNA, 25 bp, Homo sapien
aggcagaggaaagggtcacaaatct

SEQ ID NO: 3083699 - DNA, 25 bp, Homo sapien
tcatggagatttccataggatggat

SEQ ID NO: 3083700 - DNA, 25 bp, Homo sapien
tcaaagccaaactagcagcatgtcc

SEQ ID NO: 3083701 - DNA, 25 bp, Homo sapien
agccaaactagcagcatgtccaaga

SEQ ID NO: 3083702 - DNA, 25 bp, Homo sapien
tgcaccgtcaaagccaaactagcag

SEQ ID NO: 3083703 - DNA, 25 bp, Homo sapien
aggacctgcaccgtcaaagccaaac

SEQ ID NO: 3083704 - DNA, 25 bp, Homo sapien
tcaccatcaacagcaagcccttggg

SEQ ID NO: 3083705 - DNA, 25 bp, Homo sapien
acatcaccatcaacagcaagccctt

SEQ ID NO: 3083706 - DNA, 25 bp, Homo sapien
gacatcaccatcaacagcaagccct

SEQ ID NO: 3083707 - DNA, 25 bp, Homo sapien
catcaccatcaacagcaagcccttg

SEQ ID NO: 3083708 - DNA, 25 bp, Homo sapien
tacctcacgtgggtcaggtctctgt

SEQ ID NO: 3083709 - DNA, 25 bp, Homo sapien
cctttgttgtgacggcagccgagga

SEQ ID NO: 3083710 - DNA, 25 bp, Homo sapien
gaatacgagtgtgggtcatttcctc

SEQ ID NO: 3083711 - DNA, 25 bp, Homo sapien
tctcctgtggtaactggtgacctgt

SEQ ID NO: 3083712 - DNA, 25 bp, Homo sapien
gagtcagacgggagaatgaaccagc

SEQ ID NO: 3083713 - DNA, 25 bp, Homo sapien
ttgctgacacagtccctaacccagg

SEQ ID NO: 3083714 - DNA, 25 bp, Homo sapien
tgaaccagcagaagcaatgcccgcc

SEQ ID NO: 3083715 - DNA, 25 bp, Homo sapien
taacccagggtctatagacattgtg

SEQ ID NO: 3083716 - DNA, 25 bp, Homo sapien
ttctcctctctactcatctctcctc

SEQ ID NO: 3083717 - DNA, 25 bp, Homo sapien
gttaggcctcaggctcttctcctct

SEQ ID NO: 3083718 - DNA, 25 bp, Homo sapien
catctctcctcccttggcccctcct

SEQ ID NO: 3083719 - DNA, 25 bp, Homo sapien
ttaggcctcaggctcttctcctctc

SEQ ID NO: 3083720 - DNA, 25 bp, Homo sapien
atcaccgcggagaatgcaaggcgcc

SEQ ID NO: 3083721 - DNA, 25 bp, Homo sapien
gacaccaacatcaccgcggagaatg

SEQ ID NO: 3083722 - DNA, 25 bp, Homo sapien
ttcgcgcagagctacaactccagcg

SEQ ID NO: 3083723 - DNA, 25 bp, Homo sapien
aactccagcgccgaacaggtgctgt

SEQ ID NO: 3083724 - DNA, 25 bp, Homo sapien
tcagccaggagtttgcggaggcctg

SEQ ID NO: 3083725 - DNA, 25 bp, Homo sapien
ggcagaacttcacggacccgcagct

SEQ ID NO: 3083726 - DNA, 25 bp, Homo sapien
gcagctgcgcaggatcatcggagct

SEQ ID NO: 3083727 - DNA, 25 bp, Homo sapien
aaggagctgtatgaaccgatctggc

SEQ ID NO: 3083728 - DNA, 25 bp, Homo sapien
gcaggatctactccaccgccaaggt

SEQ ID NO: 3083729 - DNA, 25 bp, Homo sapien
tgagcaggatctactccaccgccaa

SEQ ID NO: 3083730 - DNA, 25 bp, Homo sapien
acatgagcaggatctactccaccgc

SEQ ID NO: 3083731 - DNA, 25 bp, Homo sapien
atgagcaggatctactccaccgcca

SEQ ID NO: 3083732 - DNA, 25 bp, Homo sapien
tccgggtggcagaggagttcttcac

SEQ ID NO: 3083733 - DNA, 25 bp, Homo sapien
gggctggaacgccacgcacatgttc

SEQ ID NO: 3083734 - DNA, 25 bp, Homo sapien
aagggtcgatgctggagaagccggc

SEQ ID NO: 3083735 - DNA, 25 bp, Homo sapien
tgtgccacgcctcggcttgggactt

SEQ ID NO: 3083736 - DNA, 25 bp, Homo sapien
caacaggaaagacttcaggttcaga

SEQ ID NO: 3083737 - DNA, 25 bp, Homo sapien
tacaacaggaaagacttcaggttca

SEQ ID NO: 3083738 - DNA, 25 bp, Homo sapien
ctacaacaggaaagacttcaggttc

SEQ ID NO: 3083739 - DNA, 25 bp, Homo sapien
aacaggaaagacttcaggttcagac

SEQ ID NO: 3083740 - DNA, 25 bp, Homo sapien
gccacagtttctgcagtccattggg

SEQ ID NO: 3083741 - DNA, 25 bp, Homo sapien
agaaccagcagaacggcgaggtcct

SEQ ID NO: 3083742 - DNA, 25 bp, Homo sapien
ggacatggtcggcttagatgccctg

SEQ ID NO: 3083743 - DNA, 25 bp, Homo sapien
caggccccagggtcttattgccaca

SEQ ID NO: 3083744 - DNA, 25 bp, Homo sapien
ccttgcagagcatgacatcaacttt

SEQ ID NO: 3083745 - DNA, 25 bp, Homo sapien
ctttctgatgaagatggcccttgac

SEQ ID NO: 3083746 - DNA, 25 bp, Homo sapien
tacctcgtcgatcagtggcgctgga

SEQ ID NO: 3083747 - DNA, 25 bp, Homo sapien
agatcgcctttatccccttcagcta

SEQ ID NO: 3083748 - DNA, 25 bp, Homo sapien
ctgggcatcgccctgctggtagcca

SEQ ID NO: 3083749 - DNA, 25 bp, Homo sapien
gagctgagacactcctgaggtgacc

SEQ ID NO: 3083750 - DNA, 25 bp, Homo sapien
tgaatacaattaaaggtcctgccct

SEQ ID NO: 3083751 - DNA, 25 bp, Homo sapien
cccagttcggctccgaggtggagct

SEQ ID NO: 3083752 - DNA, 25 bp, Homo sapien
gcccctgtctggcccaagcactgac

SEQ ID NO: 3083753 - DNA, 25 bp, Homo sapien
caagcactgacccacgcggactctg

SEQ ID NO: 3083754 - DNA, 25 bp, Homo sapien
aagcactgacccacgcggactctgg

SEQ ID NO: 3083755 - DNA, 25 bp, Homo sapien
gcccaagcactgacccacgcggact

SEQ ID NO: 3083756 - DNA, 25 bp, Homo sapien
gagtcactttctcaagcatcacctc

SEQ ID NO: 3083757 - DNA, 25 bp, Homo sapien
gcaaggcagatcaggttttatccat

SEQ ID NO: 3083758 - DNA, 25 bp, Homo sapien
catgctggttacctggccccacaat

SEQ ID NO: 3083759 - DNA, 25 bp, Homo sapien
gagtaacttccccaagcttccttca

SEQ ID NO: 3083760 - DNA, 25 bp, Homo sapien
caaactgctgatccaggtgacccag

SEQ ID NO: 3083761 - DNA, 25 bp, Homo sapien
gaagaagctcacgacttttcccagc

SEQ ID NO: 3083762 - DNA, 25 bp, Homo sapien
tacatgagtaccttgctctgagcct

SEQ ID NO: 3083763 - DNA, 25 bp, Homo sapien
catttaaacagcaagcctggtgcag

SEQ ID NO: 3083764 - DNA, 25 bp, Homo sapien
tagcatttgcgttgggatccacggc

SEQ ID NO: 3083765 - DNA, 25 bp, Homo sapien
gaacctaggcagtccaggctacagt

SEQ ID NO: 3083766 - DNA, 25 bp, Homo sapien
actcacaggcacagatacctttggg

SEQ ID NO: 3083767 - DNA, 25 bp, Homo sapien
caagctggtcgggtcggtgcctacc

SEQ ID NO: 3083768 - DNA, 25 bp, Homo sapien
tccacttaagtgcatgtttcagggt

SEQ ID NO: 3083769 - DNA, 25 bp, Homo sapien
tagcagattcttatagtcagactcc

SEQ ID NO: 3083770 - DNA, 25 bp, Homo sapien
aatatgtttggtctttaggcccagg

SEQ ID NO: 3083771 - DNA, 25 bp, Homo sapien
tgttctacctggcttacctacgtaa

SEQ ID NO: 3083772 - DNA, 25 bp, Homo sapien
tgcttatacttggtccatgtaagtg

SEQ ID NO: 3083773 - DNA, 25 bp, Homo sapien
tagtcaatgaacaaatgtactcagc

SEQ ID NO: 3083774 - DNA, 25 bp, Homo sapien
aagtaaaggtagtcaatgaacaaat

SEQ ID NO: 3083775 - DNA, 25 bp, Homo sapien
catgtaagtgctcagttattaatga

SEQ ID NO: 3083776 - DNA, 25 bp, Homo sapien
catgctaacctttgtatagttctga

SEQ ID NO: 3083777 - DNA, 25 bp, Homo sapien
cctttgtatagttctgatttgagtg

SEQ ID NO: 3083778 - DNA, 25 bp, Homo sapien
aacctttgtatagttctgatttgag

SEQ ID NO: 3083779 - DNA, 25 bp, Homo sapien
cagggaccatgctaacctttgtata

SEQ ID NO: 3083780 - DNA, 25 bp, Homo sapien
ggtgagagagtcttcccgaggcatc

SEQ ID NO: 3083781 - DNA, 25 bp, Homo sapien
gtctgtgcttccaaccctgaacaag

SEQ ID NO: 3083782 - DNA, 25 bp, Homo sapien
gactgatggactgcggcaatcctgg

SEQ ID NO: 3083783 - DNA, 25 bp, Homo sapien
ccttacatgagagatggactgatgg

SEQ ID NO: 3083784 - DNA, 25 bp, Homo sapien
tacaaagcgagcagttcttggtcag

SEQ ID NO: 3083785 - DNA, 25 bp, Homo sapien
tgagattagtagagtagcaggcctg

SEQ ID NO: 3083786 - DNA, 25 bp, Homo sapien
tttgctttaccatacagggacctgt

SEQ ID NO: 3083787 - DNA, 25 bp, Homo sapien
tctcaagggtagcaaggccaagctg

SEQ ID NO: 3083788 - DNA, 25 bp, Homo sapien
ttaggtcctgcagtacagtcttccc

SEQ ID NO: 3083789 - DNA, 25 bp, Homo sapien
tcttccagggaggaattagcctgca

SEQ ID NO: 3083790 - DNA, 25 bp, Homo sapien
gcagccactaggactttagcaggaa

SEQ ID NO: 3083791 - DNA, 25 bp, Homo sapien
tgtaagccatccatgctccagaaag

SEQ ID NO: 3083792 - DNA, 25 bp, Homo sapien
tatgacagttatgcagactttcccc

SEQ ID NO: 3083793 - DNA, 25 bp, Homo sapien
gactgtccattgcatggctgtggag

SEQ ID NO: 3083794 - DNA, 25 bp, Homo sapien
cgtgatgctaggtaactgtgggaac

SEQ ID NO: 3083795 - DNA, 25 bp, Homo sapien
tggagtgagactgcccttagcctgg

SEQ ID NO: 3083796 - DNA, 25 bp, Homo sapien
tgaagtagaagcctcaaagcagact

SEQ ID NO: 3083797 - DNA, 25 bp, Homo sapien
gagcaaagtcactgtgaaccctggg

SEQ ID NO: 3083798 - DNA, 25 bp, Homo sapien
tgagagcgtctcgtgttgcagaccc

SEQ ID NO: 3083799 - DNA, 25 bp, Homo sapien
tggactggtatatccaacgagaaac

SEQ ID NO: 3083800 - DNA, 25 bp, Homo sapien
gcatccacggtcaggtgtagaggaa

SEQ ID NO: 3083801 - DNA, 25 bp, Homo sapien
tcacaggactgattgtacacagggc

SEQ ID NO: 3083802 - DNA, 25 bp, Homo sapien
gaaggctacttcatgggcacctgaa

SEQ ID NO: 3083803 - DNA, 25 bp, Homo sapien
tcagcctcctgtataagaagtaccg

SEQ ID NO: 3083804 - DNA, 25 bp, Homo sapien
tccgaaggacgtcgaaaggagtcgc

SEQ ID NO: 3083805 - DNA, 25 bp, Homo sapien
caggacgctgcactttaccgcggct

SEQ ID NO: 3083806 - DNA, 25 bp, Homo sapien
tagcagcttgaaccccagggtcggg

SEQ ID NO: 3083807 - DNA, 25 bp, Homo sapien
tcaggcacatcaagggtccgaagga

SEQ ID NO: 3083808 - DNA, 25 bp, Homo sapien
ggcccaaggacaggacttgcgacct

SEQ ID NO: 3083809 - DNA, 25 bp, Homo sapien
caggacttgcgaccttgaagccaaa

SEQ ID NO: 3083810 - DNA, 25 bp, Homo sapien
caaggacaggacttgcgaccttgaa

SEQ ID NO: 3083811 - DNA, 25 bp, Homo sapien
gacaggacttgcgaccttgaagcca

SEQ ID NO: 3083812 - DNA, 25 bp, Homo sapien
ctggatgagtgtcccgacaccctct

SEQ ID NO: 3083813 - DNA, 25 bp, Homo sapien
acaccctctcggatgcagggcagga

SEQ ID NO: 3083814 - DNA, 25 bp, Homo sapien
attgtaagtgccctgaggcgctctg

SEQ ID NO: 3083815 - DNA, 25 bp, Homo sapien
ctctgatgttgggtagctggcctct

SEQ ID NO: 3083816 - DNA, 25 bp, Homo sapien
aggctttcattccatccgttctata

SEQ ID NO: 3083817 - DNA, 25 bp, Homo sapien
ggctttcattccatccgttctataa

SEQ ID NO: 3083818 - DNA, 25 bp, Homo sapien
tttcattccatccgttctataaaaa

SEQ ID NO: 3083819 - DNA, 25 bp, Homo sapien
gctttcattccatccgttctataaa

SEQ ID NO: 3083820 - DNA, 25 bp, Homo sapien
cagccagtaattatgcttcccataa

SEQ ID NO: 3083821 - DNA, 25 bp, Homo sapien
ccatcagccagtaattatgcttccc

SEQ ID NO: 3083822 - DNA, 25 bp, Homo sapien
gtaattatgcttcccataattagta

SEQ ID NO: 3083823 - DNA, 25 bp, Homo sapien
aattatgcttcccataattagtatg

SEQ ID NO: 3083824 - DNA, 25 bp, Homo sapien
ggccaggtggtgccggaacttctcc

SEQ ID NO: 3083825 - DNA, 25 bp, Homo sapien
caccgggccaggtggtgccggaact

SEQ ID NO: 3083826 - DNA, 25 bp, Homo sapien
ttgttgcaatgcatggcgcaccggg

SEQ ID NO: 3083827 - DNA, 25 bp, Homo sapien
gctttgttgttgcaatgcatggcgc

SEQ ID NO: 3083828 - DNA, 25 bp, Homo sapien
ggcagtgctttgatgtactggtgca

SEQ ID NO: 3083829 - DNA, 25 bp, Homo sapien
gcagtgctttgatgtactggtgcac

SEQ ID NO: 3083830 - DNA, 25 bp, Homo sapien
gcatggaggcctggctgtcctcaca

SEQ ID NO: 3083831 - DNA, 25 bp, Homo sapien
gtcctcacaacagctggtgctgcac

SEQ ID NO: 3083832 - DNA, 25 bp, Homo sapien
gctgtcctcacaacagctggtgctg

SEQ ID NO: 3083833 - DNA, 25 bp, Homo sapien
tgcatggaggcctggctgtcctcac

SEQ ID NO: 3083834 - DNA, 25 bp, Homo sapien
catgagaccctgcatcttccagatg

SEQ ID NO: 3083835 - DNA, 25 bp, Homo sapien
cggaacatgagaccctgcatcttcc

SEQ ID NO: 3083836 - DNA, 25 bp, Homo sapien
aacatgagaccctgcatcttccaga

SEQ ID NO: 3083837 - DNA, 25 bp, Homo sapien
tcttcaccatggagtccaccacctc

SEQ ID NO: 3083838 - DNA, 25 bp, Homo sapien
attacactggaacagaggccggaga

SEQ ID NO: 3083839 - DNA, 25 bp, Homo sapien
tctggagcctgacatattacactgg

SEQ ID NO: 3083840 - DNA, 25 bp, Homo sapien
catttttgtcaaacgcctatctagg

SEQ ID NO: 3083841 - DNA, 25 bp, Homo sapien
aggccggagaaaggagcccacatta

SEQ ID NO: 3083842 - DNA, 25 bp, Homo sapien
tttttcggagcgttcctgaggtgga

SEQ ID NO: 3083843 - DNA, 25 bp, Homo sapien
actgcgggtctgagggactggcggg

SEQ ID NO: 3083844 - DNA, 25 bp, Homo sapien
ctgaggtggagaacggtggccggac

SEQ ID NO: 3083845 - DNA, 25 bp, Homo sapien
gagctgcgcgaccagcggtttgttt

SEQ ID NO: 3083846 - DNA, 25 bp, Homo sapien
tctgaccacctatgtagactctgaa

SEQ ID NO: 3083847 - DNA, 25 bp, Homo sapien
taggagctccctgttagaatagtct

SEQ ID NO: 3083848 - DNA, 25 bp, Homo sapien
gcaaatgctgttcataatacctgag

SEQ ID NO: 3083849 - DNA, 25 bp, Homo sapien
ttgtctagggttccaaggctgttag

SEQ ID NO: 3083850 - DNA, 25 bp, Homo sapien
aaaagcattggttacccgtgacctg

SEQ ID NO: 3083851 - DNA, 25 bp, Homo sapien
ctgctgcgctggtagagtgaagtca

SEQ ID NO: 3083852 - DNA, 25 bp, Homo sapien
caaacttatgttgcacgaaggatac

SEQ ID NO: 3083853 - DNA, 25 bp, Homo sapien
gactttatgcactatgtaagggact

SEQ ID NO: 3083854 - DNA, 25 bp, Homo sapien
agtcctttaggcatctacccttcct

SEQ ID NO: 3083855 - DNA, 25 bp, Homo sapien
gtctgtttgctatgtgttcctcatc

SEQ ID NO: 3083856 - DNA, 25 bp, Homo sapien
gaagagaagtctagtcccttaatac

SEQ ID NO: 3083857 - DNA, 25 bp, Homo sapien
cactcttgtaattcattgaactgga

SEQ ID NO: 3083858 - DNA, 25 bp, Homo sapien
taaacataaaatcactctgccaaat

SEQ ID NO: 3083859 - DNA, 25 bp, Homo sapien
tggaagagcaggacgagcagtatac

SEQ ID NO: 3083860 - DNA, 25 bp, Homo sapien
gatatcataccttaagtacactgct

SEQ ID NO: 3083861 - DNA, 25 bp, Homo sapien
tgtggactggcaccagcccagatat

SEQ ID NO: 3083862 - DNA, 25 bp, Homo sapien
tggccagaccatcacgaaggccttt

SEQ ID NO: 3083863 - DNA, 25 bp, Homo sapien
tgccaaacctctgttgtagagatgt

SEQ ID NO: 3083864 - DNA, 25 bp, Homo sapien
gattgccacttagcagccactcaaa

SEQ ID NO: 3083865 - DNA, 25 bp, Homo sapien
taaagcaaatgcttacctctcagga

SEQ ID NO: 3083866 - DNA, 25 bp, Homo sapien
taagctcagatggttgttgccagaa

SEQ ID NO: 3083867 - DNA, 25 bp, Homo sapien
ctgagggtcacacaagactgcgatc

SEQ ID NO: 3083868 - DNA, 25 bp, Homo sapien
tgactcaaatgggtcctctgctgag

SEQ ID NO: 3083869 - DNA, 25 bp, Homo sapien
ttcttctgaatgtcacccaagggct

SEQ ID NO: 3083870 - DNA, 25 bp, Homo sapien
ttatggaggtcgttagtgaattttc

SEQ ID NO: 3083871 - DNA, 25 bp, Homo sapien
actaattttatggaggtcgttagtg

SEQ ID NO: 3083872 - DNA, 25 bp, Homo sapien
ggaggtcgttagtgaattttcataa

SEQ ID NO: 3083873 - DNA, 25 bp, Homo sapien
taattttatggaggtcgttagtgaa

SEQ ID NO: 3083874 - DNA, 25 bp, Homo sapien
tagcagcaagaacatagactttggg

SEQ ID NO: 3083875 - DNA, 25 bp, Homo sapien
atcttcccttcacgggatctgggaa

SEQ ID NO: 3083876 - DNA, 25 bp, Homo sapien
gacaaacctagatccagtcccagct

SEQ ID NO: 3083877 - DNA, 25 bp, Homo sapien
gacctggatttaaagtctggccttg

SEQ ID NO: 3083878 - DNA, 25 bp, Homo sapien
ggcccgcgatgtggaactgctgcca

SEQ ID NO: 3083879 - DNA, 25 bp, Homo sapien
ggagtcactcttatgctgtacccag

SEQ ID NO: 3083880 - DNA, 25 bp, Homo sapien
tgccagtcctgtcctttaccaaaga

SEQ ID NO: 3083881 - DNA, 25 bp, Homo sapien
aaaggccagcactcgctagcagtgg

SEQ ID NO: 3083882 - DNA, 25 bp, Homo sapien
gaagggaaagcccatatgctaccac

SEQ ID NO: 3083883 - DNA, 25 bp, Homo sapien
ccactccatctggtagaagggaaag

SEQ ID NO: 3083884 - DNA, 25 bp, Homo sapien
ctgtgtccaaaaccgccagctctgt

SEQ ID NO: 3083885 - DNA, 25 bp, Homo sapien
tgagtcgtgacctgctaggccagag

SEQ ID NO: 3083886 - DNA, 25 bp, Homo sapien
gcagaagtgtgtgtcgcatgcgcca

SEQ ID NO: 3083887 - DNA, 25 bp, Homo sapien
tagactgttacaggtgacggacgcc

SEQ ID NO: 3083888 - DNA, 25 bp, Homo sapien
aaaatgtgcctattgctagagctcc

SEQ ID NO: 3083889 - DNA, 25 bp, Homo sapien
cccaagaggatacagagcacggtgc

SEQ ID NO: 3083890 - DNA, 25 bp, Homo sapien
gctggctcagcatcctcaggaccaa

SEQ ID NO: 3083891 - DNA, 25 bp, Homo sapien
gctcagcatcctcaggaccaagttg

SEQ ID NO: 3083892 - DNA, 25 bp, Homo sapien
tggacatgctggctcagcatcctca

SEQ ID NO: 3083893 - DNA, 25 bp, Homo sapien
tggctcagcatcctcaggaccaagt

SEQ ID NO: 3083894 - DNA, 25 bp, Homo sapien
gaggcgctcacttcacacttgggag

SEQ ID NO: 3083895 - DNA, 25 bp, Homo sapien
tatcttgaccgagggcttgcagtgc

SEQ ID NO: 3083896 - DNA, 25 bp, Homo sapien
tggagcaggacaacccagacttctg

SEQ ID NO: 3083897 - DNA, 25 bp, Homo sapien
cacgctggtggttcgagatggtccc

SEQ ID NO: 3083898 - DNA, 25 bp, Homo sapien
gtgcagcgcggcgtagctgcccagg

SEQ ID NO: 3083899 - DNA, 25 bp, Homo sapien
ctccttgtgctgcttgcggccaaac

SEQ ID NO: 3083900 - DNA, 25 bp, Homo sapien
ggtttgcagtagaactccccgtgca

SEQ ID NO: 3083901 - DNA, 25 bp, Homo sapien
gttgcctttgctcttaaacagctgc

SEQ ID NO: 3083902 - DNA, 25 bp, Homo sapien
ccagccgctccatggggtacacggt

SEQ ID NO: 3083903 - DNA, 25 bp, Homo sapien
ccgctccatggggtacacggtcttc

SEQ ID NO: 3083904 - DNA, 25 bp, Homo sapien
aaatgagcttgtcggccaccagccg

SEQ ID NO: 3083905 - DNA, 25 bp, Homo sapien
ccatggggtacacggtcttctggca

SEQ ID NO: 3083906 - DNA, 25 bp, Homo sapien
ctgtgcgggaagctcagccaggtgc

SEQ ID NO: 3083907 - DNA, 25 bp, Homo sapien
gtgctcatcccgctccctcacaccc

SEQ ID NO: 3083908 - DNA, 25 bp, Homo sapien
catcccgctccctcacacccctcct

SEQ ID NO: 3083909 - DNA, 25 bp, Homo sapien
tgtgcgggaagctcagccaggtgct

SEQ ID NO: 3083910 - DNA, 25 bp, Homo sapien
tgctgctgccgccgcctttggcgtc

SEQ ID NO: 3083911 - DNA, 25 bp, Homo sapien
cttggagcgctgcaccgtgctgctg

SEQ ID NO: 3083912 - DNA, 25 bp, Homo sapien
cgtgctgctgccgccgcctttggcg

SEQ ID NO: 3083913 - DNA, 25 bp, Homo sapien
tggagcgctgcaccgtgctgctgcc

SEQ ID NO: 3083914 - DNA, 25 bp, Homo sapien
ggggtggcctgggcggctcctgcag

SEQ ID NO: 3083915 - DNA, 25 bp, Homo sapien
cctgggcggctcctgcagcctggaa

SEQ ID NO: 3083916 - DNA, 25 bp, Homo sapien
atgagagggggtggcctgggcggct

SEQ ID NO: 3083917 - DNA, 25 bp, Homo sapien
agagggggtggcctgggcggctcct

SEQ ID NO: 3083918 - DNA, 25 bp, Homo sapien
gtggagaagcggcacccgctgggtt

SEQ ID NO: 3083919 - DNA, 25 bp, Homo sapien
ctcgttggaggtggaagcctcgggt

SEQ ID NO: 3083920 - DNA, 25 bp, Homo sapien
tcgggtggagaagcggcacccgctg

SEQ ID NO: 3083921 - DNA, 25 bp, Homo sapien
cctcgggtggagaagcggcacccgc

SEQ ID NO: 3083922 - DNA, 25 bp, Homo sapien
aagtcagtcgggagggccccgccag

SEQ ID NO: 3083923 - DNA, 25 bp, Homo sapien
gaagtcagtcgggagggccccgcca

SEQ ID NO: 3083924 - DNA, 25 bp, Homo sapien
ctgcaaggggaagtcagtcgggagg

SEQ ID NO: 3083925 - DNA, 25 bp, Homo sapien
gcaaggggaagtcagtcgggagggc

SEQ ID NO: 3083926 - DNA, 25 bp, Homo sapien
tcccgagtggcaccgtccctcggaa

SEQ ID NO: 3083927 - DNA, 25 bp, Homo sapien
tcggaagaacaaagttagcgggagc

SEQ ID NO: 3083928 - DNA, 25 bp, Homo sapien
cgtcccgcgggctgggaccgcttgg

SEQ ID NO: 3083929 - DNA, 25 bp, Homo sapien
tgcggttgggactttccctaagtca

SEQ ID NO: 3083930 - DNA, 25 bp, Homo sapien
cgagccccgccagcgggtctcggct

SEQ ID NO: 3083931 - DNA, 25 bp, Homo sapien
gaaacgaggactcgagcctgtgcgc

SEQ ID NO: 3083932 - DNA, 25 bp, Homo sapien
agagcggctcgcagactcgccggga

SEQ ID NO: 3083933 - DNA, 25 bp, Homo sapien
ggccggccctgaaacgaggactcga

SEQ ID NO: 3083934 - DNA, 25 bp, Homo sapien
tgctgccgctaccagtggtccccga

SEQ ID NO: 3083935 - DNA, 25 bp, Homo sapien
gggcgcgggcgcgagctgctgccgc

SEQ ID NO: 3083936 - DNA, 25 bp, Homo sapien
ccgccaccgccttatcgctgcaccg

SEQ ID NO: 3083937 - DNA, 25 bp, Homo sapien
gggcgcacgggtacgaggagggcgc

SEQ ID NO: 3083938 - DNA, 25 bp, Homo sapien
gggacgagttcaggctgcggcggct

SEQ ID NO: 3083939 - DNA, 25 bp, Homo sapien
ggacaggatggaagggccgcgctcc

SEQ ID NO: 3083940 - DNA, 25 bp, Homo sapien
gtcgcgggacactgggcgctcccgg

SEQ ID NO: 3083941 - DNA, 25 bp, Homo sapien
cgcgctccgcatcctactgggaggg

SEQ ID NO: 3083942 - DNA, 25 bp, Homo sapien
gcacagccggcgagagacggccact

SEQ ID NO: 3083943 - DNA, 25 bp, Homo sapien
agagacggccactcgctttggagcg

SEQ ID NO: 3083944 - DNA, 25 bp, Homo sapien
gctgaggtgacagagcttgggccgc

SEQ ID NO: 3083945 - DNA, 25 bp, Homo sapien
agccgcacagcaggccggaggcaca

SEQ ID NO: 3083946 - DNA, 25 bp, Homo sapien
tgaaaattttaatttgttctgacaa

SEQ ID NO: 3083947 - DNA, 25 bp, Homo sapien
tctgaaaattttaatttgttctgac

SEQ ID NO: 3083948 - DNA, 25 bp, Homo sapien
ctgaaaattttaatttgttctgaca

SEQ ID NO: 3083949 - DNA, 25 bp, Homo sapien
tctctgaaaattttaatttgttctg

SEQ ID NO: 3083950 - DNA, 25 bp, Homo sapien
gaaagacttaggtgtcagggcccaa

SEQ ID NO: 3083951 - DNA, 25 bp, Homo sapien
caaaccctgggcttggaattcagct

SEQ ID NO: 3083952 - DNA, 25 bp, Homo sapien
gaatgtcggctttggaccctcctga

SEQ ID NO: 3083953 - DNA, 25 bp, Homo sapien
cactgatggcccttggagaaagcac

SEQ ID NO: 3083954 - DNA, 25 bp, Homo sapien
caattcgggcaaagcctctgaggca

SEQ ID NO: 3083955 - DNA, 25 bp, Homo sapien
gtgacaggacgaagcaattcgggca

SEQ ID NO: 3083956 - DNA, 25 bp, Homo sapien
caggccaaagattccactgtggtcc

SEQ ID NO: 3083957 - DNA, 25 bp, Homo sapien
agactggctgccctcaaaattggtg

SEQ ID NO: 3083958 - DNA, 25 bp, Homo sapien
gattgtgagttgttagaaccagaac

SEQ ID NO: 3083959 - DNA, 25 bp, Homo sapien
ggtgggtgacagatcctgttgctct

SEQ ID NO: 3083960 - DNA, 25 bp, Homo sapien
aaccagaactagaaccagaaccaga

SEQ ID NO: 3083961 - DNA, 25 bp, Homo sapien
gctgtcggagccaactccatgagag

SEQ ID NO: 3083962 - DNA, 25 bp, Homo sapien
ctgcttgaagaaagagtggttcagg

SEQ ID NO: 3083963 - DNA, 25 bp, Homo sapien
gattcccctgcagaacctttgggag

SEQ ID NO: 3083964 - DNA, 25 bp, Homo sapien
agcatcactgccgtgtccccagctt

SEQ ID NO: 3083965 - DNA, 25 bp, Homo sapien
ccccagcttcccgaaatcctgccac

SEQ ID NO: 3083966 - DNA, 25 bp, Homo sapien
gaggtaagtcccttcacaccctggc

SEQ ID NO: 3083967 - DNA, 25 bp, Homo sapien
gagcaccctctgctctcccgaagcc

SEQ ID NO: 3083968 - DNA, 25 bp, Homo sapien
cctctgctctcccgaagcccaggcc

SEQ ID NO: 3083969 - DNA, 25 bp, Homo sapien
ctgagcaccctctgctctcccgaag

SEQ ID NO: 3083970 - DNA, 25 bp, Homo sapien
caccctctgctctcccgaagcccag

SEQ ID NO: 3083971 - DNA, 25 bp, Homo sapien
tgctccacaaagtggtggaagtggg

SEQ ID NO: 3083972 - DNA, 25 bp, Homo sapien
actgctccacaaagtggtggaagtg

SEQ ID NO: 3083973 - DNA, 25 bp, Homo sapien
agcgcgaagggctcatggtcagctc

SEQ ID NO: 3083974 - DNA, 25 bp, Homo sapien
ttggccactgagcgcgaagggctca

SEQ ID NO: 3083975 - DNA, 25 bp, Homo sapien
cactgagcgcgaagggctcatggtc

SEQ ID NO: 3083976 - DNA, 25 bp, Homo sapien
ggctcatggtcagctcctcagcggg

SEQ ID NO: 3083977 - DNA, 25 bp, Homo sapien
ctggggaggacagaaccaggacctg

SEQ ID NO: 3083978 - DNA, 25 bp, Homo sapien
tggggaggacagaaccaggacctgg

SEQ ID NO: 3083979 - DNA, 25 bp, Homo sapien
ggctggaaagcagggctcacagttt

SEQ ID NO: 3083980 - DNA, 25 bp, Homo sapien
ttcccaaagaaacgctggtcactgg

SEQ ID NO: 3083981 - DNA, 25 bp, Homo sapien
agtacccgctttcgccatggctgga

SEQ ID NO: 3083982 - DNA, 25 bp, Homo sapien
tagccaggccaacgtgaaaggagag

SEQ ID NO: 3083983 - DNA, 25 bp, Homo sapien
taaatagacatgtagcgtgtgggcc

SEQ ID NO: 3083984 - DNA, 25 bp, Homo sapien
tttcccaagggtagactgtgccact

SEQ ID NO: 3083985 - DNA, 25 bp, Homo sapien
tgctgtctgccgagaagagtgtcct

SEQ ID NO: 3083986 - DNA, 25 bp, Homo sapien
caagcagcctgtgggttccggaagt

SEQ ID NO: 3083987 - DNA, 25 bp, Homo sapien
atccttaaaggggacatggccgttg

SEQ ID NO: 3083988 - DNA, 25 bp, Homo sapien
ttcccacactgtagatgtcagactt

SEQ ID NO: 3083989 - DNA, 25 bp, Homo sapien
agatgtcagacttggcatcataacc

SEQ ID NO: 3083990 - DNA, 25 bp, Homo sapien
tggccgttggccagttcacaggctg

SEQ ID NO: 3083991 - DNA, 25 bp, Homo sapien
gaaaatcgtggaccactcgctgccg

SEQ ID NO: 3083992 - DNA, 25 bp, Homo sapien
gccacggcagaaccttgacactgta

SEQ ID NO: 3083993 - DNA, 25 bp, Homo sapien
caggatgtggctggctttgacactc

SEQ ID NO: 3083994 - DNA, 25 bp, Homo sapien
catgctgaggttgctgcgcaaacca

SEQ ID NO: 3083995 - DNA, 25 bp, Homo sapien
ttagggtgtacatccagaagtggca

SEQ ID NO: 3083996 - DNA, 25 bp, Homo sapien
aaacatgtcccctgatgggtctgca

SEQ ID NO: 3083997 - DNA, 25 bp, Homo sapien
cacacgtgtgaatggtgacatccaa

SEQ ID NO: 3083998 - DNA, 25 bp, Homo sapien
aattgtcaccttggttctgggaaga

SEQ ID NO: 3083999 - DNA, 25 bp, Homo sapien
ggctcaggggcatagctacccactg

SEQ ID NO: 3084000 - DNA, 25 bp, Homo sapien
acttcactttacctgaaggctcagg

SEQ ID NO: 3084001 - DNA, 25 bp, Homo sapien
tacccactgtaatcatgggaaaggc

SEQ ID NO: 3084002 - DNA, 25 bp, Homo sapien
tgggaaaggccgcctaagaacgcac

SEQ ID NO: 3084003 - DNA, 25 bp, Homo sapien
ctgtgtacatatcccatgtggtgga

SEQ ID NO: 3084004 - DNA, 25 bp, Homo sapien
agcaccccctgcaggatgtaagcaa

SEQ ID NO: 3084005 - DNA, 25 bp, Homo sapien
catgtggtggatgtagtcgagggcc

SEQ ID NO: 3084006 - DNA, 25 bp, Homo sapien
taagcaatcgccagctcattcatgc

SEQ ID NO: 3084007 - DNA, 25 bp, Homo sapien
tgaagagtttggagacatgcagctc

SEQ ID NO: 3084008 - DNA, 25 bp, Homo sapien
agctcattgtctgcaataaaagtgg

SEQ ID NO: 3084009 - DNA, 25 bp, Homo sapien
aaagtggctcgatatggcacgatat

SEQ ID NO: 3084010 - DNA, 25 bp, Homo sapien
cacgatattgggatggttgaagagt

SEQ ID NO: 3084011 - DNA, 25 bp, Homo sapien
gtttgtaccttgctagattcacagt

SEQ ID NO: 3084012 - DNA, 25 bp, Homo sapien
taggttaatcctccgtacagtcacg

SEQ ID NO: 3084013 - DNA, 25 bp, Homo sapien
taccatctcattggaacaagcttct

SEQ ID NO: 3084014 - DNA, 25 bp, Homo sapien
tacagtcacgtactctcctgttggt

SEQ ID NO: 3084015 - DNA, 25 bp, Homo sapien
tcctaactagtggatggcctctgct

SEQ ID NO: 3084016 - DNA, 25 bp, Homo sapien
tgtgcccatgaatcctcctaactag

SEQ ID NO: 3084017 - DNA, 25 bp, Homo sapien
ttaactgttatgttcatggctcaca

SEQ ID NO: 3084018 - DNA, 25 bp, Homo sapien
actatggccaggacaccggaaacat

SEQ ID NO: 3084019 - DNA, 25 bp, Homo sapien
gctcgtaacaccctccctctggcag

SEQ ID NO: 3084020 - DNA, 25 bp, Homo sapien
ctatcacagtgagcagctcgtaaca

SEQ ID NO: 3084021 - DNA, 25 bp, Homo sapien
tcacagtgagcagctcgtaacaccc

SEQ ID NO: 3084022 - DNA, 25 bp, Homo sapien
acagtgagcagctcgtaacaccctc

SEQ ID NO: 3084023 - DNA, 25 bp, Homo sapien
tgctattgactctgagctcgcatca

SEQ ID NO: 3084024 - DNA, 25 bp, Homo sapien
aggatgctattgactctgagctcgc

SEQ ID NO: 3084025 - DNA, 25 bp, Homo sapien
ttgactctgagctcgcatcattggt

SEQ ID NO: 3084026 - DNA, 25 bp, Homo sapien
tattgactctgagctcgcatcattg

SEQ ID NO: 3084027 - DNA, 25 bp, Homo sapien
cctttgtgaaagtatgagaggctcc

SEQ ID NO: 3084028 - DNA, 25 bp, Homo sapien
tacccagaagagcacgagctgagag

SEQ ID NO: 3084029 - DNA, 25 bp, Homo sapien
tgaaaaggcggtgcttgaacaactc

SEQ ID NO: 3084030 - DNA, 25 bp, Homo sapien
gaaaccataaagatgacggtgctct

SEQ ID NO: 3084031 - DNA, 25 bp, Homo sapien
taagatgaccagagtatactttcca

SEQ ID NO: 3084032 - DNA, 25 bp, Homo sapien
gtatactttccagagcacttccaaa

SEQ ID NO: 3084033 - DNA, 25 bp, Homo sapien
cagagtatactttccagagcacttc

SEQ ID NO: 3084034 - DNA, 25 bp, Homo sapien
gatgaccagagtatactttccagag

SEQ ID NO: 3084035 - DNA, 25 bp, Homo sapien
gacccaggcccaaaccagtgagatt

SEQ ID NO: 3084036 - DNA, 25 bp, Homo sapien
aatcaaaacgtgagtacatggcaca

SEQ ID NO: 3084037 - DNA, 25 bp, Homo sapien
ctcagtcaagtagccgggacagatc

SEQ ID NO: 3084038 - DNA, 25 bp, Homo sapien
cgagggccaaggagattatgtgact

SEQ ID NO: 3084039 - DNA, 25 bp, Homo sapien
tatttatcagtcatgtgagcgttct

SEQ ID NO: 3084040 - DNA, 25 bp, Homo sapien
tttatcagtcatgtgagcgttctcc

SEQ ID NO: 3084041 - DNA, 25 bp, Homo sapien
atttttgccagtctcatggatttga

SEQ ID NO: 3084042 - DNA, 25 bp, Homo sapien
gccagtctcatggatttgatttaca

SEQ ID NO: 3084043 - DNA, 25 bp, Homo sapien
catagtgttgtatctattagatgag

SEQ ID NO: 3084044 - DNA, 25 bp, Homo sapien
tgttgtatctattagatgagataaa

SEQ ID NO: 3084045 - DNA, 25 bp, Homo sapien
aaaatatgttaagagcttagtgcta

SEQ ID NO: 3084046 - DNA, 25 bp, Homo sapien
aaatatgttaagagcttagtgctac

SEQ ID NO: 3084047 - DNA, 25 bp, Homo sapien
ttcaatacatgtgaatcctattctc

SEQ ID NO: 3084048 - DNA, 25 bp, Homo sapien
tcctccttctattgctctctacttt

SEQ ID NO: 3084049 - DNA, 25 bp, Homo sapien
cctccttctattgctctctactttt

SEQ ID NO: 3084050 - DNA, 25 bp, Homo sapien
tcaatacatgtgaatcctattctcc

SEQ ID NO: 3084051 - DNA, 25 bp, Homo sapien
gcagagcttgatcagtaaagttgat

SEQ ID NO: 3084052 - DNA, 25 bp, Homo sapien
aagttgatttgatactggtttttat

SEQ ID NO: 3084053 - DNA, 25 bp, Homo sapien
tcctaagcagagcttgatcagtaaa

SEQ ID NO: 3084054 - DNA, 25 bp, Homo sapien
cagaatcctaagcagagcttgatca

SEQ ID NO: 3084055 - DNA, 25 bp, Homo sapien
aagatactggttaccacatgccagg

SEQ ID NO: 3084056 - DNA, 25 bp, Homo sapien
gctcatttggtcttgaagtgtctca

SEQ ID NO: 3084057 - DNA, 25 bp, Homo sapien
aaatgacaactctccatcggtttag

SEQ ID NO: 3084058 - DNA, 25 bp, Homo sapien
gcaaaaagcctcaagcaagagttct

SEQ ID NO: 3084059 - DNA, 25 bp, Homo sapien
cctgattagcagatgacataagcac

SEQ ID NO: 3084060 - DNA, 25 bp, Homo sapien
aaaatagcttggtacactgtgcaca

SEQ ID NO: 3084061 - DNA, 25 bp, Homo sapien
cactcaaccttagggctgctgcaga

SEQ ID NO: 3084062 - DNA, 25 bp, Homo sapien
tcagaagtctaggtaggaaaggttc

SEQ ID NO: 3084063 - DNA, 25 bp, Homo sapien
aaggggtggcagtcgattggcaggg

SEQ ID NO: 3084064 - DNA, 25 bp, Homo sapien
atcacactacaaataaagctcagtg

SEQ ID NO: 3084065 - DNA, 25 bp, Homo sapien
caacagccatagtgctagggcctag

SEQ ID NO: 3084066 - DNA, 25 bp, Homo sapien
atgcaacagccatagtgctagggcc

SEQ ID NO: 3084067 - DNA, 25 bp, Homo sapien
gccatagtgctagggcctaggaagc

SEQ ID NO: 3084068 - DNA, 25 bp, Homo sapien
tctccgagtgtcacccggaggctgc

SEQ ID NO: 3084069 - DNA, 25 bp, Homo sapien
ctccgagtgtcacccggaggctgct

SEQ ID NO: 3084070 - DNA, 25 bp, Homo sapien
tttctccgagtgtcacccggaggct

SEQ ID NO: 3084071 - DNA, 25 bp, Homo sapien
ttttctccgagtgtcacccggaggc

SEQ ID NO: 3084072 - DNA, 25 bp, Homo sapien
ggggtagagaaattgattgttggca

SEQ ID NO: 3084073 - DNA, 25 bp, Homo sapien
gggtagagaaattgattgttggcat

SEQ ID NO: 3084074 - DNA, 25 bp, Homo sapien
ctggggtagagaaattgattgttgg

SEQ ID NO: 3084075 - DNA, 25 bp, Homo sapien
tggggtagagaaattgattgttggc

SEQ ID NO: 3084076 - DNA, 25 bp, Homo sapien
gcaattattgtacttaggactacat

SEQ ID NO: 3084077 - DNA, 25 bp, Homo sapien
acacacccacattcagaacagcaat

SEQ ID NO: 3084078 - DNA, 25 bp, Homo sapien
tttgtgttttagcagaagacacacc

SEQ ID NO: 3084079 - DNA, 25 bp, Homo sapien
ccacttaaaagtcattacagcaaaa

SEQ ID NO: 3084080 - DNA, 25 bp, Homo sapien
tgcgccaccatgctgactatctttt

SEQ ID NO: 3084081 - DNA, 25 bp, Homo sapien
tggcacgatcttggcaattctcctg

SEQ ID NO: 3084082 - DNA, 25 bp, Homo sapien
ttttgtctttttagcagagatgggg

SEQ ID NO: 3084083 - DNA, 25 bp, Homo sapien
cgtgcgccaccatgctgactatctt

SEQ ID NO: 3084084 - DNA, 25 bp, Homo sapien
cctttactgtgcatctaactaattc

SEQ ID NO: 3084085 - DNA, 25 bp, Homo sapien
tgttccactatcctttcctttactg

SEQ ID NO: 3084086 - DNA, 25 bp, Homo sapien
cacagatatcactagtccagaaatt

SEQ ID NO: 3084087 - DNA, 25 bp, Homo sapien
ccacctagtaactaacaagtttgag

SEQ ID NO: 3084088 - DNA, 25 bp, Homo sapien
ataggatcctaaaagagtatcttag

SEQ ID NO: 3084089 - DNA, 25 bp, Homo sapien
caaagaatggggctctactattatt

SEQ ID NO: 3084090 - DNA, 25 bp, Homo sapien
actataggatcctaaaagagtatct

SEQ ID NO: 3084091 - DNA, 25 bp, Homo sapien
catacccggccggtaatctgtttct

SEQ ID NO: 3084092 - DNA, 25 bp, Homo sapien
tccaaatctcttaagccctcaacaa

SEQ ID NO: 3084093 - DNA, 25 bp, Homo sapien
gttccaaatctcttaagccctcaac

SEQ ID NO: 3084094 - DNA, 25 bp, Homo sapien
caatgaacttttccgagacccaccg

SEQ ID NO: 3084095 - DNA, 25 bp, Homo sapien
ccaaatctcttaagccctcaacaat

SEQ ID NO: 3084096 - DNA, 25 bp, Homo sapien
agtggaggctgcactacctgcctta

SEQ ID NO: 3084097 - DNA, 25 bp, Homo sapien
cgtctacacttaaaagtatcatcga

SEQ ID NO: 3084098 - DNA, 25 bp, Homo sapien
ttctctatcagacaagctggtggta

SEQ ID NO: 3084099 - DNA, 25 bp, Homo sapien
gtatcattccgaccctcacgtagaa

SEQ ID NO: 3084100 - DNA, 25 bp, Homo sapien
tgtaggcctacttcagtttcaaaaa

SEQ ID NO: 3084101 - DNA, 25 bp, Homo sapien
gtgtaggcctacttcagtttcaaaa

SEQ ID NO: 3084102 - DNA, 25 bp, Homo sapien
ctgtgtaggcctacttcagtttcaa

SEQ ID NO: 3084103 - DNA, 25 bp, Homo sapien
tgtgtaggcctacttcagtttcaaa

SEQ ID NO: 3084104 - DNA, 25 bp, Homo sapien
cctgtcagcccaaagtgcgcggcgg

SEQ ID NO: 3084105 - DNA, 25 bp, Homo sapien
gacaatgagctcttcgtttaggccg

SEQ ID NO: 3084106 - DNA, 25 bp, Homo sapien
tctgcctgaacaggacaaaccggca

SEQ ID NO: 3084107 - DNA, 25 bp, Homo sapien
tgtccttacgaggacttgacccgct

SEQ ID NO: 3084108 - DNA, 25 bp, Homo sapien
tgcgggagtcgaggacgcgggttaa

SEQ ID NO: 3084109 - DNA, 25 bp, Homo sapien
caggcccaagcctattctgctctcg

SEQ ID NO: 3084110 - DNA, 25 bp, Homo sapien
aggatggccgctccgacgaaggccc

SEQ ID NO: 3084111 - DNA, 25 bp, Homo sapien
tctcgggctgcggcgcctcattgcg

SEQ ID NO: 3084112 - DNA, 25 bp, Homo sapien
tgttcctggagttagcaagcagccc

SEQ ID NO: 3084113 - DNA, 25 bp, Homo sapien
cgccctttccgagtggccgcggctg

SEQ ID NO: 3084114 - DNA, 25 bp, Homo sapien
tcctcagttttactgccgcgccgcc

SEQ ID NO: 3084115 - DNA, 25 bp, Homo sapien
aggactgatagagcgctccgcccca

SEQ ID NO: 3084116 - DNA, 25 bp, Homo sapien
taataacttgccgaaagtcaaagga

SEQ ID NO: 3084117 - DNA, 25 bp, Homo sapien
tctgctggcactaaaagccaggtct

SEQ ID NO: 3084118 - DNA, 25 bp, Homo sapien
agccaggtctttgtcttacagtcca

SEQ ID NO: 3084119 - DNA, 25 bp, Homo sapien
gctaaacatccaggcaatgcaaatg

SEQ ID NO: 3084120 - DNA, 25 bp, Homo sapien
gcttatactcttgtaggataactcc

SEQ ID NO: 3084121 - DNA, 25 bp, Homo sapien
attttcctctgagcttatactcttg

SEQ ID NO: 3084122 - DNA, 25 bp, Homo sapien
ttatcgaacagaaagaattttcctc

SEQ ID NO: 3084123 - DNA, 25 bp, Homo sapien
agtgctgacttttatcgaacagaaa

SEQ ID NO: 3084124 - DNA, 25 bp, Homo sapien
taaaacaaggccactactataatta

SEQ ID NO: 3084125 - DNA, 25 bp, Homo sapien
cactttaatagatgtccataggtag

SEQ ID NO: 3084126 - DNA, 25 bp, Homo sapien
caaatgtatgggactttaggaaagc

SEQ ID NO: 3084127 - DNA, 25 bp, Homo sapien
gaatgcttaagttacaaaattagct

SEQ ID NO: 3084128 - DNA, 25 bp, Homo sapien
cagagatctgaacaagctaagtgct

SEQ ID NO: 3084129 - DNA, 25 bp, Homo sapien
tccaagagttggttccgcaagaggt

SEQ ID NO: 3084130 - DNA, 25 bp, Homo sapien
taagtgctcgtgcagatacatgggc

SEQ ID NO: 3084131 - DNA, 25 bp, Homo sapien
caggctgcagcaaccaagaaggaaa

SEQ ID NO: 3084132 - DNA, 25 bp, Homo sapien
ctttttctcaagtttaatgtagaca

SEQ ID NO: 3084133 - DNA, 25 bp, Homo sapien
ttctcaagtttaatgtagacataca

SEQ ID NO: 3084134 - DNA, 25 bp, Homo sapien
ttttctcaagtttaatgtagacata

SEQ ID NO: 3084135 - DNA, 25 bp, Homo sapien
tactttttctcaagtttaatgtaga

SEQ ID NO: 3084136 - DNA, 25 bp, Homo sapien
taaacactgaagtactaaaagcact

SEQ ID NO: 3084137 - DNA, 25 bp, Homo sapien
aggtggcatcagaactcaaatctct

SEQ ID NO: 3084138 - DNA, 25 bp, Homo sapien
tagagtcagtctttatagccatttc

SEQ ID NO: 3084139 - DNA, 25 bp, Homo sapien
gactgtctgaaatttaaggttgaga

SEQ ID NO: 3084140 - DNA, 25 bp, Homo sapien
tttgctcacgcctcaatgcagcctc

SEQ ID NO: 3084141 - DNA, 25 bp, Homo sapien
cttttgctcacgcctcaatgcagcc

SEQ ID NO: 3084142 - DNA, 25 bp, Homo sapien
tcttttgctcacgcctcaatgcagc

SEQ ID NO: 3084143 - DNA, 25 bp, Homo sapien
ttttgctcacgcctcaatgcagcct

SEQ ID NO: 3084144 - DNA, 25 bp, Homo sapien
gttccatcaggttattcattgcaaa

SEQ ID NO: 3084145 - DNA, 25 bp, Homo sapien
tatcataaatgtataactgccagaa

SEQ ID NO: 3084146 - DNA, 25 bp, Homo sapien
tagcctgatgttcaccataccattc

SEQ ID NO: 3084147 - DNA, 25 bp, Homo sapien
gcacagacaccatacctgcacataa

SEQ ID NO: 3084148 - DNA, 25 bp, Homo sapien
ggtctaaaatttagagctgagtggc

SEQ ID NO: 3084149 - DNA, 25 bp, Homo sapien
gaccagcatttacaaggtctaaaat

SEQ ID NO: 3084150 - DNA, 25 bp, Homo sapien
tctctttcttgaccagcatttacaa

SEQ ID NO: 3084151 - DNA, 25 bp, Homo sapien
taaaatttagagctgagtggcgcac

SEQ ID NO: 3084152 - DNA, 25 bp, Homo sapien
gaaaatgctaaacttttagcctaca

SEQ ID NO: 3084153 - DNA, 25 bp, Homo sapien
aagcagtcatccttacaaatcgtag

SEQ ID NO: 3084154 - DNA, 25 bp, Homo sapien
gattaccttaacaaccaacagaaca

SEQ ID NO: 3084155 - DNA, 25 bp, Homo sapien
aattgatacaatgtcccaaatgttg

SEQ ID NO: 3084156 - DNA, 25 bp, Homo sapien
tcattcatgattcgctccttctctg

SEQ ID NO: 3084157 - DNA, 25 bp, Homo sapien
ctactcgggcacggttcttatctgc

SEQ ID NO: 3084158 - DNA, 25 bp, Homo sapien
ctcattcatgattcgctccttctct

SEQ ID NO: 3084159 - DNA, 25 bp, Homo sapien
tcgggcacggttcttatctgctttt

SEQ ID NO: 3084160 - DNA, 25 bp, Homo sapien
tccccaagaaacaaagtatttcata

SEQ ID NO: 3084161 - DNA, 25 bp, Homo sapien
aacaaagtatttcataagaaatcca

SEQ ID NO: 3084162 - DNA, 25 bp, Homo sapien
agaaacaaagtatttcataagaaat

SEQ ID NO: 3084163 - DNA, 25 bp, Homo sapien
caaagtatttcataagaaatccatt

SEQ ID NO: 3084164 - DNA, 25 bp, Homo sapien
ttctctgttgagtcggaactttttg

SEQ ID NO: 3084165 - DNA, 25 bp, Homo sapien
ctgttgagtcggaactttttggctt

SEQ ID NO: 3084166 - DNA, 25 bp, Homo sapien
ttttggctttatcaatagaataaat

SEQ ID NO: 3084167 - DNA, 25 bp, Homo sapien
tttggctttatcaatagaataaatc

SEQ ID NO: 3084168 - DNA, 25 bp, Homo sapien
caggggtagcagtgcctccatatcc

SEQ ID NO: 3084169 - DNA, 25 bp, Homo sapien
tcatcaggggtagcagtgcctccat

SEQ ID NO: 3084170 - DNA, 25 bp, Homo sapien
gttcatcaggggtagcagtgcctcc

SEQ ID NO: 3084171 - DNA, 25 bp, Homo sapien
catcaggggtagcagtgcctccata

SEQ ID NO: 3084172 - DNA, 25 bp, Homo sapien
ggaaacaatactctccttaaggtca

SEQ ID NO: 3084173 - DNA, 25 bp, Homo sapien
ccttaaggtcatctcagagaagact

SEQ ID NO: 3084174 - DNA, 25 bp, Homo sapien
tctccttaaggtcatctcagagaag

SEQ ID NO: 3084175 - DNA, 25 bp, Homo sapien
aatactctccttaaggtcatctcag

SEQ ID NO: 3084176 - DNA, 25 bp, Homo sapien
tgtcaggtagctttaaaggctgacc

SEQ ID NO: 3084177 - DNA, 25 bp, Homo sapien
caggtagctttaaaggctgaccttc

SEQ ID NO: 3084178 - DNA, 25 bp, Homo sapien
tagtgtcaggtagctttaaaggctg

SEQ ID NO: 3084179 - DNA, 25 bp, Homo sapien
ctcttagtgtcaggtagctttaaag

SEQ ID NO: 3084180 - DNA, 25 bp, Homo sapien
tccaggcaagggtatattccatctc

SEQ ID NO: 3084181 - DNA, 25 bp, Homo sapien
cacagtatttggcttggcataccca

SEQ ID NO: 3084182 - DNA, 25 bp, Homo sapien
tgaaggagctttacaggtcatctgg

SEQ ID NO: 3084183 - DNA, 25 bp, Homo sapien
gatacctgcacataatcagcacagt

SEQ ID NO: 3084184 - DNA, 25 bp, Homo sapien
aatgaacagattcaatcttgtcagc

SEQ ID NO: 3084185 - DNA, 25 bp, Homo sapien
taatttttggaccagagaactggtc

SEQ ID NO: 3084186 - DNA, 25 bp, Homo sapien
tgaacagattcaatcttgtcagcat

SEQ ID NO: 3084187 - DNA, 25 bp, Homo sapien
atcttgtcagcatagtgtgtaagaa

SEQ ID NO: 3084188 - DNA, 25 bp, Homo sapien
tgtatccatcattccgtctgtgact

SEQ ID NO: 3084189 - DNA, 25 bp, Homo sapien
tcccatctctgacaggatggccaaa

SEQ ID NO: 3084190 - DNA, 25 bp, Homo sapien
gatggccaaagagtccggcagtcca

SEQ ID NO: 3084191 - DNA, 25 bp, Homo sapien
tccatactttgctccagacttaggt

SEQ ID NO: 3084192 - DNA, 25 bp, Homo sapien
caaggctttccgtgtgccaacagca

SEQ ID NO: 3084193 - DNA, 25 bp, Homo sapien
gcatctctttctgtagtcgcaccaa

SEQ ID NO: 3084194 - DNA, 25 bp, Homo sapien
tacgtaggtatccatgtcttcatca

SEQ ID NO: 3084195 - DNA, 25 bp, Homo sapien
gccaacagcaaatacgtaggtatcc

SEQ ID NO: 3084196 - DNA, 25 bp, Homo sapien
cgggccaggacattcagtaagtctt

SEQ ID NO: 3084197 - DNA, 25 bp, Homo sapien
gcctcatcatccgggccaggacatt

SEQ ID NO: 3084198 - DNA, 25 bp, Homo sapien
tggcctcatcatccgggccaggaca

SEQ ID NO: 3084199 - DNA, 25 bp, Homo sapien
ggcctcatcatccgggccaggacat

SEQ ID NO: 3084200 - DNA, 25 bp, Homo sapien
tcctggttcaactttcctgtgcttg

SEQ ID NO: 3084201 - DNA, 25 bp, Homo sapien
tcagctggataagcatgccctcaca

SEQ ID NO: 3084202 - DNA, 25 bp, Homo sapien
tcgaccagaacaccacaggttatag

SEQ ID NO: 3084203 - DNA, 25 bp, Homo sapien
tagatgtgctcattctcctggttca

SEQ ID NO: 3084204 - DNA, 25 bp, Homo sapien
ccacttaatgtgactcaacagaaaa

SEQ ID NO: 3084205 - DNA, 25 bp, Homo sapien
aaccacttaatgtgactcaacagaa

SEQ ID NO: 3084206 - DNA, 25 bp, Homo sapien
aaaccacttaatgtgactcaacaga

SEQ ID NO: 3084207 - DNA, 25 bp, Homo sapien
cacttaatgtgactcaacagaaaat

SEQ ID NO: 3084208 - DNA, 25 bp, Homo sapien
cacaagggaaaacggactgatacac

SEQ ID NO: 3084209 - DNA, 25 bp, Homo sapien
cactactgtgttgcagagcaggtgg

SEQ ID NO: 3084210 - DNA, 25 bp, Homo sapien
tacattgcacaactacagaggttcc

SEQ ID NO: 3084211 - DNA, 25 bp, Homo sapien
gaaattgctcaacctcacaagggaa

SEQ ID NO: 3084212 - DNA, 25 bp, Homo sapien
tgcaaggcgactgtttttattcttc

SEQ ID NO: 3084213 - DNA, 25 bp, Homo sapien
tatgagtgttaaaccaggcctgtgc

SEQ ID NO: 3084214 - DNA, 25 bp, Homo sapien
taaagtaaagttgctctccaaaagc

SEQ ID NO: 3084215 - DNA, 25 bp, Homo sapien
gaccagtcaccatcaaaatttctag

SEQ ID NO: 3084216 - DNA, 25 bp, Homo sapien
ttttgctagaagaagtatctggttt

SEQ ID NO: 3084217 - DNA, 25 bp, Homo sapien
atttttgctagaagaagtatctggt

SEQ ID NO: 3084218 - DNA, 25 bp, Homo sapien
tcaacaatcgttattgggtctttat

SEQ ID NO: 3084219 - DNA, 25 bp, Homo sapien
atcaacaatcgttattgggtcttta

SEQ ID NO: 3084220 - DNA, 25 bp, Homo sapien
gtcagggtttcaatagaagaacaca

SEQ ID NO: 3084221 - DNA, 25 bp, Homo sapien
caattctcacccacaaacagtatct

SEQ ID NO: 3084222 - DNA, 25 bp, Homo sapien
taaataatacaattctcacccacaa

SEQ ID NO: 3084223 - DNA, 25 bp, Homo sapien
aacagtatctattctctaacccctc

SEQ ID NO: 3084224 - DNA, 25 bp, Homo sapien
tatgacccgttgaggagattcagta

SEQ ID NO: 3084225 - DNA, 25 bp, Homo sapien
catcctcaaattcagcgaagtcatt

SEQ ID NO: 3084226 - DNA, 25 bp, Homo sapien
ccaaacaccagaaggacaacacaga

SEQ ID NO: 3084227 - DNA, 25 bp, Homo sapien
tggcttcagagacactcccaaacac

SEQ ID NO: 3084228 - DNA, 25 bp, Homo sapien
gaagtctccgctgcacctgtcagtt

SEQ ID NO: 3084229 - DNA, 25 bp, Homo sapien
tcttagaagtctccgctgcacctgt

SEQ ID NO: 3084230 - DNA, 25 bp, Homo sapien
tcagttctcaaatgcacaagtcctt

SEQ ID NO: 3084231 - DNA, 25 bp, Homo sapien
gcacctgtcagttctcaaatgcaca

SEQ ID NO: 3084232 - DNA, 25 bp, Homo sapien
tttactgccccggatgcctctagga

SEQ ID NO: 3084233 - DNA, 25 bp, Homo sapien
ggatgcctctaggacgcagccagaa

SEQ ID NO: 3084234 - DNA, 25 bp, Homo sapien
ggacgcagccagaaccgtagctcag

SEQ ID NO: 3084235 - DNA, 25 bp, Homo sapien
cgcctccgcgatcgcagcggtttta

SEQ ID NO: 3084236 - DNA, 25 bp, Homo sapien
aatgcgagcggctcgtcagcgcctg

SEQ ID NO: 3084237 - DNA, 25 bp, Homo sapien
ccgtccgttacgtagaatgcgagcg

SEQ ID NO: 3084238 - DNA, 25 bp, Homo sapien
tagcctccgccgtccgttacgtaga

SEQ ID NO: 3084239 - DNA, 25 bp, Homo sapien
tcacgccgcgcctctcttcacgtag

SEQ ID NO: 3084240 - DNA, 25 bp, Homo sapien
tccgcgcccgcggttgtagcagctg

SEQ ID NO: 3084241 - DNA, 25 bp, Homo sapien
gggggcactggaggcaactgctggg

SEQ ID NO: 3084242 - DNA, 25 bp, Homo sapien
ggtttctggacgcaaggccgccagt

SEQ ID NO: 3084243 - DNA, 25 bp, Homo sapien
tttgggctccgggattcgctccgcg

SEQ ID NO: 3084244 - DNA, 25 bp, Homo sapien
tagcgcggggagaattctgacccaa

SEQ ID NO: 3084245 - DNA, 25 bp, Homo sapien
cccaaggaggcagcgcttgggagat

SEQ ID NO: 3084246 - DNA, 25 bp, Homo sapien
tccagggcaggaatagcgcggggag

SEQ ID NO: 3084247 - DNA, 25 bp, Homo sapien
ccagttggcggctttccggaggcgg

SEQ ID NO: 3084248 - DNA, 25 bp, Homo sapien
gagtgaaaagatataggcgatgatc

SEQ ID NO: 3084249 - DNA, 25 bp, Homo sapien
cgttgagtaggtcgattattagcat

SEQ ID NO: 3084250 - DNA, 25 bp, Homo sapien
ctttgtgcagcgttgagtaggtcga

SEQ ID NO: 3084251 - DNA, 25 bp, Homo sapien
tataggcgatgatctttgtgcagcg

SEQ ID NO: 3084252 - DNA, 25 bp, Homo sapien
tagcactgtcaatgactagaattcc

SEQ ID NO: 3084253 - DNA, 25 bp, Homo sapien
tgagatagtctgtaccttcttaagg

SEQ ID NO: 3084254 - DNA, 25 bp, Homo sapien
tcgtatatagacaaatttagcactg

SEQ ID NO: 3084255 - DNA, 25 bp, Homo sapien
tagaattccttcgttcgtcacttga

SEQ ID NO: 3084256 - DNA, 25 bp, Homo sapien
taatcgtgagagcaagatggagccc

SEQ ID NO: 3084257 - DNA, 25 bp, Homo sapien
tcacggagagactggcaatcggcat

SEQ ID NO: 3084258 - DNA, 25 bp, Homo sapien
cacgtcacggagatggtggtcgcca

SEQ ID NO: 3084259 - DNA, 25 bp, Homo sapien
ggcatagcgatagtccacgtcacgg

SEQ ID NO: 3084260 - DNA, 25 bp, Homo sapien
cgcacacagtgtagggacagatagg

SEQ ID NO: 3084261 - DNA, 25 bp, Homo sapien
catattaagaatagtgccgcacaca

SEQ ID NO: 3084262 - DNA, 25 bp, Homo sapien
gacagatagggaagtgcttattaaa

SEQ ID NO: 3084263 - DNA, 25 bp, Homo sapien
acctgtggatcgtttgtcatttctg

SEQ ID NO: 3084264 - DNA, 25 bp, Homo sapien
cctggttttattcaggaataggatg

SEQ ID NO: 3084265 - DNA, 25 bp, Homo sapien
ccattatcctggttttattcaggaa

SEQ ID NO: 3084266 - DNA, 25 bp, Homo sapien
tatcctggttttattcaggaatagg

SEQ ID NO: 3084267 - DNA, 25 bp, Homo sapien
ttatcctggttttattcaggaatag

SEQ ID NO: 3084268 - DNA, 25 bp, Homo sapien
gactgactacattgagtatcgctcc

SEQ ID NO: 3084269 - DNA, 25 bp, Homo sapien
tgagtatcgctccaacaccgaactt

SEQ ID NO: 3084270 - DNA, 25 bp, Homo sapien
cacgtccaggtgtagactgactaca

SEQ ID NO: 3084271 - DNA, 25 bp, Homo sapien
ttaagtggcccacacgtccaggtgt

SEQ ID NO: 3084272 - DNA, 25 bp, Homo sapien
gggccagactgagccatgccacacc

SEQ ID NO: 3084273 - DNA, 25 bp, Homo sapien
tcaggaccaccacgggagttctagg

SEQ ID NO: 3084274 - DNA, 25 bp, Homo sapien
gagttctaggcactccacctcactg

SEQ ID NO: 3084275 - DNA, 25 bp, Homo sapien
tgagtgtcaacacagttcagcagtg

SEQ ID NO: 3084276 - DNA, 25 bp, Homo sapien
gacatggcgtttctccttgccaagc

SEQ ID NO: 3084277 - DNA, 25 bp, Homo sapien
tccttgagtccaccaccttgaaatg

SEQ ID NO: 3084278 - DNA, 25 bp, Homo sapien
cactttgcggcccacaccttttttg

SEQ ID NO: 3084279 - DNA, 25 bp, Homo sapien
ttttttggctacaacgtaggtgaca

SEQ ID NO: 3084280 - DNA, 25 bp, Homo sapien
tttctctcgttctgagatgtccact

SEQ ID NO: 3084281 - DNA, 25 bp, Homo sapien
ctttctctcgttctgagatgtccac

SEQ ID NO: 3084282 - DNA, 25 bp, Homo sapien
ttctctcgttctgagatgtccactg

SEQ ID NO: 3084283 - DNA, 25 bp, Homo sapien
ccttttctttctagccttagcctca

SEQ ID NO: 3084284 - DNA, 25 bp, Homo sapien
ttctttctagccttagcctcagcca

SEQ ID NO: 3084285 - DNA, 25 bp, Homo sapien
ttttctttctagccttagcctcagc

SEQ ID NO: 3084286 - DNA, 25 bp, Homo sapien
tccttttctttctagccttagcctc

SEQ ID NO: 3084287 - DNA, 25 bp, Homo sapien
cagcgtttccggtaatgctccacct

SEQ ID NO: 3084288 - DNA, 25 bp, Homo sapien
taccaacaggcaactgtcgtatccg

SEQ ID NO: 3084289 - DNA, 25 bp, Homo sapien
tcttgcacaaaccactccggaagct

SEQ ID NO: 3084290 - DNA, 25 bp, Homo sapien
cttgatgggacgtgcattgatttcc

SEQ ID NO: 3084291 - DNA, 25 bp, Homo sapien
gagtggaaaggacatctgtctaata

SEQ ID NO: 3084292 - DNA, 25 bp, Homo sapien
tggaaaggacatctgtctaatatcc

SEQ ID NO: 3084293 - DNA, 25 bp, Homo sapien
aaggacatctgtctaatatccaaca

SEQ ID NO: 3084294 - DNA, 25 bp, Homo sapien
ctgagtggaaaggacatctgtctaa

SEQ ID NO: 3084295 - DNA, 25 bp, Homo sapien
tcggggtccagtatccgatgtttcg

SEQ ID NO: 3084296 - DNA, 25 bp, Homo sapien
cacctagagcaaggccttcggggtc

SEQ ID NO: 3084297 - DNA, 25 bp, Homo sapien
aagaggcaataacagcacctagagc

SEQ ID NO: 3084298 - DNA, 25 bp, Homo sapien
tagagcaaggccttcggggtccagt

SEQ ID NO: 3084299 - DNA, 25 bp, Homo sapien
aaggagaaaggtcaaagctcaattc

SEQ ID NO: 3084300 - DNA, 25 bp, Homo sapien
gaaggagaaaggtcaaagctcaatt

SEQ ID NO: 3084301 - DNA, 25 bp, Homo sapien
gggtcctcaataggcactatctcaa

SEQ ID NO: 3084302 - DNA, 25 bp, Homo sapien
ggcactatctcaaacccgtcatcat

SEQ ID NO: 3084303 - DNA, 25 bp, Homo sapien
tgggtcctcaataggcactatctca

SEQ ID NO: 3084304 - DNA, 25 bp, Homo sapien
tcaataggcactatctcaaacccgt

SEQ ID NO: 3084305 - DNA, 25 bp, Homo sapien
cttaggcccacggcttcgcttctta

SEQ ID NO: 3084306 - DNA, 25 bp, Homo sapien
ctgacttaggcccacggcttcgctt

SEQ ID NO: 3084307 - DNA, 25 bp, Homo sapien
gacttaggcccacggcttcgcttct

SEQ ID NO: 3084308 - DNA, 25 bp, Homo sapien
ttaggcccacggcttcgcttcttac

SEQ ID NO: 3084309 - DNA, 25 bp, Homo sapien
cttctgtccccgaagaagcctctgt

SEQ ID NO: 3084310 - DNA, 25 bp, Homo sapien
tcctcactgctagtactgctatcac

SEQ ID NO: 3084311 - DNA, 25 bp, Homo sapien
cttcatcttggtacaggggagacat

SEQ ID NO: 3084312 - DNA, 25 bp, Homo sapien
tccgccggttctcaaataacagctg

SEQ ID NO: 3084313 - DNA, 25 bp, Homo sapien
tctccagggcctcatcggcatcgtc

SEQ ID NO: 3084314 - DNA, 25 bp, Homo sapien
gggcctcatcggcatcgtcctcgat

SEQ ID NO: 3084315 - DNA, 25 bp, Homo sapien
ggcatcgtcctcgatcccagcaaag

SEQ ID NO: 3084316 - DNA, 25 bp, Homo sapien
atcgtcctcgatcccagcaaagctg

SEQ ID NO: 3084317 - DNA, 25 bp, Homo sapien
ccttctcccaaggaagactcatctc

SEQ ID NO: 3084318 - DNA, 25 bp, Homo sapien
ttctcccaaggaagactcatctccc

SEQ ID NO: 3084319 - DNA, 25 bp, Homo sapien
gaagactcatctccccgcagtcttg

SEQ ID NO: 3084320 - DNA, 25 bp, Homo sapien
caaggaagactcatctccccgcagt

SEQ ID NO: 3084321 - DNA, 25 bp, Homo sapien
tgccttttcctccagtggtaccagc

SEQ ID NO: 3084322 - DNA, 25 bp, Homo sapien
tggtaccagcagtggattctcctcc

SEQ ID NO: 3084323 - DNA, 25 bp, Homo sapien
ctttgagaaccacaggttggcttgt

SEQ ID NO: 3084324 - DNA, 25 bp, Homo sapien
ttgttcttcctgcagtactgccttt

SEQ ID NO: 3084325 - DNA, 25 bp, Homo sapien
caccctaacacttcctcagagtggc

SEQ ID NO: 3084326 - DNA, 25 bp, Homo sapien
gcattccctttggtgcacacgtgcc

SEQ ID NO: 3084327 - DNA, 25 bp, Homo sapien
cctactcaggctctggtagtaccca

SEQ ID NO: 3084328 - DNA, 25 bp, Homo sapien
ctcagagacccagattgcctggagc

SEQ ID NO: 3084329 - DNA, 25 bp, Homo sapien
cgcttttggtcccttagaccctgat

SEQ ID NO: 3084330 - DNA, 25 bp, Homo sapien
ttggtcccttagaccctgatgtccc

SEQ ID NO: 3084331 - DNA, 25 bp, Homo sapien
ttttggtcccttagaccctgatgtc

SEQ ID NO: 3084332 - DNA, 25 bp, Homo sapien
gcttttggtcccttagaccctgatg

SEQ ID NO: 3084333 - DNA, 25 bp, Homo sapien
tcccttggcagatcggacagaaatg

SEQ ID NO: 3084334 - DNA, 25 bp, Homo sapien
gatgtgtcatcaccgtcgtcctcaa

SEQ ID NO: 3084335 - DNA, 25 bp, Homo sapien
gacacatagatatcatcccttggca

SEQ ID NO: 3084336 - DNA, 25 bp, Homo sapien
tcctctggatccaggtcactatcca

SEQ ID NO: 3084337 - DNA, 25 bp, Homo sapien
accccggatggtgctcaaggagaac

SEQ ID NO: 3084338 - DNA, 25 bp, Homo sapien
agtctccccctcgtctgcaatggaa

SEQ ID NO: 3084339 - DNA, 25 bp, Homo sapien
ccctcgtctgcaatggaaaccccag

SEQ ID NO: 3084340 - DNA, 25 bp, Homo sapien
ctggtgaccccggatggtgctcaag

SEQ ID NO: 3084341 - DNA, 25 bp, Homo sapien
tttgtggttccagctgttgagtcct

SEQ ID NO: 3084342 - DNA, 25 bp, Homo sapien
ctttgtggttccagctgttgagtcc

SEQ ID NO: 3084343 - DNA, 25 bp, Homo sapien
ttccagctgttgagtcctcctcatc

SEQ ID NO: 3084344 - DNA, 25 bp, Homo sapien
gttccagctgttgagtcctcctcat

SEQ ID NO: 3084345 - DNA, 25 bp, Homo sapien
ttttgttctccagtttagtagcgac

SEQ ID NO: 3084346 - DNA, 25 bp, Homo sapien
ttggccacatatcgccgaagttttg

SEQ ID NO: 3084347 - DNA, 25 bp, Homo sapien
tatcgccgaagttttgttctccagt

SEQ ID NO: 3084348 - DNA, 25 bp, Homo sapien
ttcttggccacatatcgccgaagtt

SEQ ID NO: 3084349 - DNA, 25 bp, Homo sapien
catcccaaacctttagcacagcaat

SEQ ID NO: 3084350 - DNA, 25 bp, Homo sapien
tacataaatcaaaaggctcaggccc

SEQ ID NO: 3084351 - DNA, 25 bp, Homo sapien
cacctttcgggcttcggctacataa

SEQ ID NO: 3084352 - DNA, 25 bp, Homo sapien
tctgttttaggctcactacccacct

SEQ ID NO: 3084353 - DNA, 25 bp, Homo sapien
gcacacccgtatgtcctcagtggta

SEQ ID NO: 3084354 - DNA, 25 bp, Homo sapien
gatgtcctgacagcacacccgtatg

SEQ ID NO: 3084355 - DNA, 25 bp, Homo sapien
cctcagtggtagctggatgctgtgc

SEQ ID NO: 3084356 - DNA, 25 bp, Homo sapien
tggatgctgtgccaactcttcatca

SEQ ID NO: 3084357 - DNA, 25 bp, Homo sapien
aagtcagtgactgaggtacggtgat

SEQ ID NO: 3084358 - DNA, 25 bp, Homo sapien
tgaggtcaccctcagcatagccttc

SEQ ID NO: 3084359 - DNA, 25 bp, Homo sapien
ccttggagaggaagtcaacagggtt

SEQ ID NO: 3084360 - DNA, 25 bp, Homo sapien
tacggtgatagagagtgaggtcacc

SEQ ID NO: 3084361 - DNA, 25 bp, Homo sapien
taaccaattcagtaacggtcttagc

SEQ ID NO: 3084362 - DNA, 25 bp, Homo sapien
cttcttagtaaccaattcagtaacg

SEQ ID NO: 3084363 - DNA, 25 bp, Homo sapien
ccaattcagtaacggtcttagcctg

SEQ ID NO: 3084364 - DNA, 25 bp, Homo sapien
agtaacggtcttagcctgaacttca

SEQ ID NO: 3084365 - DNA, 25 bp, Homo sapien
tgctgaaagatccatagcagaggct

SEQ ID NO: 3084366 - DNA, 25 bp, Homo sapien
tctgcagattcatggcgagaggctt

SEQ ID NO: 3084367 - DNA, 25 bp, Homo sapien
tgatagtcacgagaacggaaaacct

SEQ ID NO: 3084368 - DNA, 25 bp, Homo sapien
ggcagactacaaagatctctgcaga

SEQ ID NO: 3084369 - DNA, 25 bp, Homo sapien
aattagttgacgcactctgcagccc

SEQ ID NO: 3084370 - DNA, 25 bp, Homo sapien
gagacaattagttgacgcactctgc

SEQ ID NO: 3084371 - DNA, 25 bp, Homo sapien
gatagagacaattagttgacgcact

SEQ ID NO: 3084372 - DNA, 25 bp, Homo sapien
ctgtaggatagagacaattagttga

SEQ ID NO: 3084373 - DNA, 25 bp, Homo sapien
tgggggccccatcattgagcacaac

SEQ ID NO: 3084374 - DNA, 25 bp, Homo sapien
atggacccagctagccccaacgttg

SEQ ID NO: 3084375 - DNA, 25 bp, Homo sapien
ccatcattgagcacaacatcaacct

SEQ ID NO: 3084376 - DNA, 25 bp, Homo sapien
tggacccagctagccccaacgttgg

SEQ ID NO: 3084377 - DNA, 25 bp, Homo sapien
ctggagagtcaccacattggggaga

SEQ ID NO: 3084378 - DNA, 25 bp, Homo sapien
tcctgctggagagtcaccacattgg

SEQ ID NO: 3084379 - DNA, 25 bp, Homo sapien
ctgcctacaacgttctgttgtgatg

SEQ ID NO: 3084380 - DNA, 25 bp, Homo sapien
gcctacaacgttctgttgtgatgtc

SEQ ID NO: 3084381 - DNA, 25 bp, Homo sapien
caataaggctggatacaggcataaa

SEQ ID NO: 3084382 - DNA, 25 bp, Homo sapien
taaggctggatacaggcataaactt

SEQ ID NO: 3084383 - DNA, 25 bp, Homo sapien
ccacaataaggctggatacaggcat

SEQ ID NO: 3084384 - DNA, 25 bp, Homo sapien
cacaataaggctggatacaggcata

SEQ ID NO: 3084385 - DNA, 25 bp, Homo sapien
ctgcaggaactgaaagcggcgattg

SEQ ID NO: 3084386 - DNA, 25 bp, Homo sapien
gcttgaaagcagatcgggaacggta

SEQ ID NO: 3084387 - DNA, 25 bp, Homo sapien
tccagcaaggctcgggctttctgca

SEQ ID NO: 3084388 - DNA, 25 bp, Homo sapien
ggcgattgagctggatcagcttgaa

SEQ ID NO: 3084389 - DNA, 25 bp, Homo sapien
tgataaaacttgtctcgtcggctct

SEQ ID NO: 3084390 - DNA, 25 bp, Homo sapien
gtctccttcgccaagtgataaaact

SEQ ID NO: 3084391 - DNA, 25 bp, Homo sapien
cgtctccttcgccaagtgataaaac

SEQ ID NO: 3084392 - DNA, 25 bp, Homo sapien
aagtgataaaacttgtctcgtcggc

SEQ ID NO: 3084393 - DNA, 25 bp, Homo sapien
tttcccacttcccgcagcaattcca

SEQ ID NO: 3084394 - DNA, 25 bp, Homo sapien
gtctctttccggagcaccagattcc

SEQ ID NO: 3084395 - DNA, 25 bp, Homo sapien
ttcccacttcccgcagcaattccac

SEQ ID NO: 3084396 - DNA, 25 bp, Homo sapien
ctctttccggagcaccagattccac

SEQ ID NO: 3084397 - DNA, 25 bp, Homo sapien
tttctccacacttggaaccgcacaa

SEQ ID NO: 3084398 - DNA, 25 bp, Homo sapien
tctccacacttggaaccgcacaagt

SEQ ID NO: 3084399 - DNA, 25 bp, Homo sapien
gaaccgcacaagtatgcagctaact

SEQ ID NO: 3084400 - DNA, 25 bp, Homo sapien
cacttggaaccgcacaagtatgcag

SEQ ID NO: 3084401 - DNA, 25 bp, Homo sapien
gagtgtggccctagattgttctcaa

SEQ ID NO: 3084402 - DNA, 25 bp, Homo sapien
gttcccttagtgtggtctcgccgca

SEQ ID NO: 3084403 - DNA, 25 bp, Homo sapien
tgcgtccctggctcgaggttttccg

SEQ ID NO: 3084404 - DNA, 25 bp, Homo sapien
agaagatggcgcttgacggaccaga

SEQ ID NO: 3084405 - DNA, 25 bp, Homo sapien
tcctggaccagtattggacaagcag

SEQ ID NO: 3084406 - DNA, 25 bp, Homo sapien
ctttgatggctgctgtaaggtccag

SEQ ID NO: 3084407 - DNA, 25 bp, Homo sapien
tagctgatgctatacccatgtgccg

SEQ ID NO: 3084408 - DNA, 25 bp, Homo sapien
cattagattctgttactcctggacc

SEQ ID NO: 3084409 - DNA, 25 bp, Homo sapien
caggcactgggaagacactgttggc

SEQ ID NO: 3084410 - DNA, 25 bp, Homo sapien
gagctgtttgtcatggcacgggaac

SEQ ID NO: 3084411 - DNA, 25 bp, Homo sapien
gctgtggctcatcatacggactgta

SEQ ID NO: 3084412 - DNA, 25 bp, Homo sapien
gcaagggacccagcactcggtaaat

SEQ ID NO: 3084413 - DNA, 25 bp, Homo sapien
aaatttccaaacctgccagatgtgg

SEQ ID NO: 3084414 - DNA, 25 bp, Homo sapien
ccaaacctgccagatgtggcactcg

SEQ ID NO: 3084415 - DNA, 25 bp, Homo sapien
tgccagatgtggcactcgccaagcc

SEQ ID NO: 3084416 - DNA, 25 bp, Homo sapien
aaacctgccagatgtggcactcgcc

SEQ ID NO: 3084417 - DNA, 25 bp, Homo sapien
gaaggaggcacctaacaggctccct

SEQ ID NO: 3084418 - DNA, 25 bp, Homo sapien
tagaaaacttgctcccaaaatagtg

SEQ ID NO: 3084419 - DNA, 25 bp, Homo sapien
gaggcatctgctgaacccaattaaa

SEQ ID NO: 3084420 - DNA, 25 bp, Homo sapien
ggccagagccgcttgcatagattga

SEQ ID NO: 3084421 - DNA, 25 bp, Homo sapien
ttaggtcaggcgaattcccagcacc

SEQ ID NO: 3084422 - DNA, 25 bp, Homo sapien
tggtagaaagcagctcgtctctcct

SEQ ID NO: 3084423 - DNA, 25 bp, Homo sapien
agaaagcagctcgtctctcctcctc

SEQ ID NO: 3084424 - DNA, 25 bp, Homo sapien
ggtagaaagcagctcgtctctcctc

SEQ ID NO: 3084425 - DNA, 25 bp, Homo sapien
ttggcaaagatgtgcctgcctactg

SEQ ID NO: 3084426 - DNA, 25 bp, Homo sapien
gaggtctcggcgctgggaacggagc

SEQ ID NO: 3084427 - DNA, 25 bp, Homo sapien
cggcgctgggaacggagccattcct

SEQ ID NO: 3084428 - DNA, 25 bp, Homo sapien
gggtcggtgctaaaactgagcatga

SEQ ID NO: 3084429 - DNA, 25 bp, Homo sapien
cggtgctaaaactgagcatgaaatc

SEQ ID NO: 3084430 - DNA, 25 bp, Homo sapien
gaggaagctgtggagccagagggcc

SEQ ID NO: 3084431 - DNA, 25 bp, Homo sapien
cagaggaagctgtggagccagaggg

SEQ ID NO: 3084432 - DNA, 25 bp, Homo sapien
ccaatcctgggccccagaggaagct

SEQ ID NO: 3084433 - DNA, 25 bp, Homo sapien
ggaagctgtggagccagagggccca

SEQ ID NO: 3084434 - DNA, 25 bp, Homo sapien
cttcttctggtcgttagggtcgaca

SEQ ID NO: 3084435 - DNA, 25 bp, Homo sapien
cacctccacatcgatgtcgtaacag

SEQ ID NO: 3084436 - DNA, 25 bp, Homo sapien
tgtcgtaacaggctgtcttcttctg

SEQ ID NO: 3084437 - DNA, 25 bp, Homo sapien
ttgacatcaagggaggcgatctcct

SEQ ID NO: 3084438 - DNA, 25 bp, Homo sapien
tcggagaaacggagtcggccacaac

SEQ ID NO: 3084439 - DNA, 25 bp, Homo sapien
gagaaacggagtcggccacaactga

SEQ ID NO: 3084440 - DNA, 25 bp, Homo sapien
tggttgatgacaatggggtctggat

SEQ ID NO: 3084441 - DNA, 25 bp, Homo sapien
aacggagtcggccacaactgaagat

SEQ ID NO: 3084442 - DNA, 25 bp, Homo sapien
ctggaggaaatacgaaaggctcagc

SEQ ID NO: 3084443 - DNA, 25 bp, Homo sapien
tgggcacagtggagtggaccattcc

SEQ ID NO: 3084444 - DNA, 25 bp, Homo sapien
ctcagcgttggcttgtgggcacagt

SEQ ID NO: 3084445 - DNA, 25 bp, Homo sapien
agtggagtggaccattccaggacca

SEQ ID NO: 3084446 - DNA, 25 bp, Homo sapien
ccacagggcctgcatgatggcggcc

SEQ ID NO: 3084447 - DNA, 25 bp, Homo sapien
taacggttgcagttgatgtactccc

SEQ ID NO: 3084448 - DNA, 25 bp, Homo sapien
ttgtgcttgatgtaaagccacaggg

SEQ ID NO: 3084449 - DNA, 25 bp, Homo sapien
atggcggccctcgtctgcgtgtgca

SEQ ID NO: 3084450 - DNA, 25 bp, Homo sapien
tgaggtctccaggccgttttacttg

SEQ ID NO: 3084451 - DNA, 25 bp, Homo sapien
tccaggccgttttacttggaagcca

SEQ ID NO: 3084452 - DNA, 25 bp, Homo sapien
ttacttggaagccatctgtctcctg

SEQ ID NO: 3084453 - DNA, 25 bp, Homo sapien
aggagggtgcacttgacgttgaggt

SEQ ID NO: 3084454 - DNA, 25 bp, Homo sapien
ctgcacatcagcctgcttttgcccc

SEQ ID NO: 3084455 - DNA, 25 bp, Homo sapien
tgcacatcagcctgcttttgcccca

SEQ ID NO: 3084456 - DNA, 25 bp, Homo sapien
ttgtccagctcaatgacgaggctct

SEQ ID NO: 3084457 - DNA, 25 bp, Homo sapien
ggtgattgtcaggcccgtacagctc

SEQ ID NO: 3084458 - DNA, 25 bp, Homo sapien
gacgaggctcttaaagaatgaagaa

SEQ ID NO: 3084459 - DNA, 25 bp, Homo sapien
ccagctcaatgacgaggctcttaaa

SEQ ID NO: 3084460 - DNA, 25 bp, Homo sapien
ccttccactcggagttcccaggaag

SEQ ID NO: 3084461 - DNA, 25 bp, Homo sapien
tcgccttccgccttgctgggactga

SEQ ID NO: 3084462 - DNA, 25 bp, Homo sapien
gaacgtattggaaatgtagatccga

SEQ ID NO: 3084463 - DNA, 25 bp, Homo sapien
tgcagttcctgcactatcgccttcc

SEQ ID NO: 3084464 - DNA, 25 bp, Homo sapien
tctagcccaacttgcttggcccctg

SEQ ID NO: 3084465 - DNA, 25 bp, Homo sapien
tactctactagtgggctgcatcctg

SEQ ID NO: 3084466 - DNA, 25 bp, Homo sapien
aacacattcaactgagttcgtactc

SEQ ID NO: 3084467 - DNA, 25 bp, Homo sapien
tgcatcctgcatgtgaaaaacccgg

SEQ ID NO: 3084468 - DNA, 25 bp, Homo sapien
gagactctggaacaagctcccggat

SEQ ID NO: 3084469 - DNA, 25 bp, Homo sapien
cgcttgcgagcaatggtctggtcca

SEQ ID NO: 3084470 - DNA, 25 bp, Homo sapien
tcctggatctccatccgcttgcgag

SEQ ID NO: 3084471 - DNA, 25 bp, Homo sapien
caagagatccatgtacgcctgagac

SEQ ID NO: 3084472 - DNA, 25 bp, Homo sapien
tcgctgaggtagaaccttatctgcc

SEQ ID NO: 3084473 - DNA, 25 bp, Homo sapien
gctgaggtagaaccttatctgccat

SEQ ID NO: 3084474 - DNA, 25 bp, Homo sapien
gaggtagaaccttatctgccatctt

SEQ ID NO: 3084475 - DNA, 25 bp, Homo sapien
tgaggtagaaccttatctgccatct

SEQ ID NO: 3084476 - DNA, 25 bp, Homo sapien
atgccaggtcgaagcggagctgctg

SEQ ID NO: 3084477 - DNA, 25 bp, Homo sapien
gcacaagcaggcgttttcggaatgg

SEQ ID NO: 3084478 - DNA, 25 bp, Homo sapien
gcgttttcggaatggatccatcatg

SEQ ID NO: 3084479 - DNA, 25 bp, Homo sapien
ccatcatggtgggtggcatgccagg

SEQ ID NO: 3084480 - DNA, 25 bp, Homo sapien
gaagtgagccaacgggggtgcatag

SEQ ID NO: 3084481 - DNA, 25 bp, Homo sapien
caacgggggtgcataggtcaggggc

SEQ ID NO: 3084482 - DNA, 25 bp, Homo sapien
ggggaagtgagccaacgggggtgca

SEQ ID NO: 3084483 - DNA, 25 bp, Homo sapien
gagccaacgggggtgcataggtcag

SEQ ID NO: 3084484 - DNA, 25 bp, Homo sapien
agcgaatgaggcctgccagaacctg

SEQ ID NO: 3084485 - DNA, 25 bp, Homo sapien
agtgggcgcctgagcacagagtgta

SEQ ID NO: 3084486 - DNA, 25 bp, Homo sapien
ttcagggcccattgctaccttccag

SEQ ID NO: 3084487 - DNA, 25 bp, Homo sapien
gcaagctggtccctattctctcaga

SEQ ID NO: 3084488 - DNA, 25 bp, Homo sapien
gcttcggacgtggtggagttagaac

SEQ ID NO: 3084489 - DNA, 25 bp, Homo sapien
tgagtcgaaaacagaggaagcccac

SEQ ID NO: 3084490 - DNA, 25 bp, Homo sapien
cacagcaaacccgtagatgagcaag

SEQ ID NO: 3084491 - DNA, 25 bp, Homo sapien
gcttgggcacatggcttcggacgtg

SEQ ID NO: 3084492 - DNA, 25 bp, Homo sapien
ggcccatggggcggaaggcggcggc

SEQ ID NO: 3084493 - DNA, 25 bp, Homo sapien
cccggagcgccggtccgggcagcat

SEQ ID NO: 3084494 - DNA, 25 bp, Homo sapien
ccccggagcgccggtccgggcagca

SEQ ID NO: 3084495 - DNA, 25 bp, Homo sapien
ccgcggggggaggcggcgctcccag

SEQ ID NO: 3084496 - DNA, 25 bp, Homo sapien
cagggccgcagccacggcgccgccg

SEQ ID NO: 3084497 - DNA, 25 bp, Homo sapien
gggaggcggcgctcccagggccgca

SEQ ID NO: 3084498 - DNA, 25 bp, Homo sapien
ccgcagccacggcgccgccgccagg

SEQ ID NO: 3084499 - DNA, 25 bp, Homo sapien
gcgcctcggcccgacatcgctccgt

SEQ ID NO: 3084500 - DNA, 25 bp, Homo sapien
acatcgctccgtcccgtcccgcggt

SEQ ID NO: 3084501 - DNA, 25 bp, Homo sapien
ccgtcccgcggtgccgcgatccgga

SEQ ID NO: 3084502 - DNA, 25 bp, Homo sapien
tcccgtcccgcggtgccgcgatccg

SEQ ID NO: 3084503 - DNA, 25 bp, Homo sapien
gtcgagtccactccgtgctctgtgc

SEQ ID NO: 3084504 - DNA, 25 bp, Homo sapien
gggctccgcgtcgagtccactccgt

SEQ ID NO: 3084505 - DNA, 25 bp, Homo sapien
tgtgctccgcgatccgggacttggc

SEQ ID NO: 3084506 - DNA, 25 bp, Homo sapien
tctgtgctccgcgatccgggacttg

SEQ ID NO: 3084507 - DNA, 25 bp, Homo sapien
cgggatttcctaatccaagttcgcg

SEQ ID NO: 3084508 - DNA, 25 bp, Homo sapien
cacagacccggttcgggacagattc

SEQ ID NO: 3084509 - DNA, 25 bp, Homo sapien
tccgggatttgtcgatccgggctcc

SEQ ID NO: 3084510 - DNA, 25 bp, Homo sapien
tccaagttcgcgagttcctcacaga

SEQ ID NO: 3084511 - DNA, 25 bp, Homo sapien
ggagattccggatccaggatctgct

SEQ ID NO: 3084512 - DNA, 25 bp, Homo sapien
gggagattccggatccaggatctgc

SEQ ID NO: 3084513 - DNA, 25 bp, Homo sapien
ccgggagattccggatccaggatct

SEQ ID NO: 3084514 - DNA, 25 bp, Homo sapien
cgggagattccggatccaggatctg

SEQ ID NO: 3084515 - DNA, 25 bp, Homo sapien
ccgagtcgagttacccagaggcggc

SEQ ID NO: 3084516 - DNA, 25 bp, Homo sapien
ttggccgcccgagtcgagttaccca

SEQ ID NO: 3084517 - DNA, 25 bp, Homo sapien
gccgcccgagtcgagttacccagag

SEQ ID NO: 3084518 - DNA, 25 bp, Homo sapien
gagttacccagaggcggctacgaac

SEQ ID NO: 3084519 - DNA, 25 bp, Homo sapien
cttcacagtgaatgagccgttgcta

SEQ ID NO: 3084520 - DNA, 25 bp, Homo sapien
ctttggcccagcctttcgtcggagg

SEQ ID NO: 3084521 - DNA, 25 bp, Homo sapien
gggtcagaggtctaaggtcacttag

SEQ ID NO: 3084522 - DNA, 25 bp, Homo sapien
ctgcgcgcggaagcgccgagtgagg

SEQ ID NO: 3084523 - DNA, 25 bp, Homo sapien
gaattccgcggccacactccccgaa

SEQ ID NO: 3084524 - DNA, 25 bp, Homo sapien
cgaattccgcggccacactccccga

SEQ ID NO: 3084525 - DNA, 25 bp, Homo sapien
aatcagagtgagagttgccagatca

SEQ ID NO: 3084526 - DNA, 25 bp, Homo sapien
gatatcagcatataagaagtgggct

SEQ ID NO: 3084527 - DNA, 25 bp, Homo sapien
tagcggtaaaatgcctgaagagtac

SEQ ID NO: 3084528 - DNA, 25 bp, Homo sapien
cactgaatgtaagggagagctcctc

SEQ ID NO: 3084529 - DNA, 25 bp, Homo sapien
gcatctaaaatccatccgaggccag

SEQ ID NO: 3084530 - DNA, 25 bp, Homo sapien
ggacaggacccatacatagctcagg

SEQ ID NO: 3084531 - DNA, 25 bp, Homo sapien
tataataggctcttggtaggacagg

SEQ ID NO: 3084532 - DNA, 25 bp, Homo sapien
gatatggactagctaaagaggacct

SEQ ID NO: 3084533 - DNA, 25 bp, Homo sapien
tgcatagctacaataagtggcctgg

SEQ ID NO: 3084534 - DNA, 25 bp, Homo sapien
cagagtgattgtggatgccctgaac

SEQ ID NO: 3084535 - DNA, 25 bp, Homo sapien
gtgattcggctgtagacatccctgc

SEQ ID NO: 3084536 - DNA, 25 bp, Homo sapien
ccatggaggctggtgatcaggaact

SEQ ID NO: 3084537 - DNA, 25 bp, Homo sapien
gaaggatccacacaaccagtggtca

SEQ ID NO: 3084538 - DNA, 25 bp, Homo sapien
tctctgagggaggatgatctgcttc

SEQ ID NO: 3084539 - DNA, 25 bp, Homo sapien
gccgtcccgcaaagctcttcagagt

SEQ ID NO: 3084540 - DNA, 25 bp, Homo sapien
cagtagtttggatgagccgtcccgc

SEQ ID NO: 3084541 - DNA, 25 bp, Homo sapien
aggcactggggaggggtcggtcaca

SEQ ID NO: 3084542 - DNA, 25 bp, Homo sapien
tcggtcacaggatgccacgcgggca

SEQ ID NO: 3084543 - DNA, 25 bp, Homo sapien
gcggcactgcaccatgcgcaggaat

SEQ ID NO: 3084544 - DNA, 25 bp, Homo sapien
tagagcagcccgtagttcttgagca

SEQ ID NO: 3084545 - DNA, 25 bp, Homo sapien
gcgcaggaatgtctcgaccttgtcc

SEQ ID NO: 3084546 - DNA, 25 bp, Homo sapien
ccgtagttcttgagcagtgcgtcat

SEQ ID NO: 3084547 - DNA, 25 bp, Homo sapien
ccagtccggcggctgccgtcttcca

SEQ ID NO: 3084548 - DNA, 25 bp, Homo sapien
gaggatctgcccagtccggcggctg

SEQ ID NO: 3084549 - DNA, 25 bp, Homo sapien
tgtaggtctgcttgaggatctgccc

SEQ ID NO: 3084550 - DNA, 25 bp, Homo sapien
agtccggcggctgccgtcttccagc

SEQ ID NO: 3084551 - DNA, 25 bp, Homo sapien
tccccttcagggtgtagagaagggc

SEQ ID NO: 3084552 - DNA, 25 bp, Homo sapien
cttcagggtgtagagaagggcctgg

SEQ ID NO: 3084553 - DNA, 25 bp, Homo sapien
ccttcagggtgtagagaagggcctg

SEQ ID NO: 3084554 - DNA, 25 bp, Homo sapien
ggttccaggattggcgacccctggc

SEQ ID NO: 3084555 - DNA, 25 bp, Homo sapien
cagtggggttccaggattggcgacc

SEQ ID NO: 3084556 - DNA, 25 bp, Homo sapien
ctaagccagtggggttccaggattg

SEQ ID NO: 3084557 - DNA, 25 bp, Homo sapien
ttggcgacccctggcgccaccctca

SEQ ID NO: 3084558 - DNA, 25 bp, Homo sapien
ggtcctttaggaggtgatagtcatc

SEQ ID NO: 3084559 - DNA, 25 bp, Homo sapien
taggaggtgatagtcatcgctgtcc

SEQ ID NO: 3084560 - DNA, 25 bp, Homo sapien
agtcatcgctgtccgaggtgtcata

SEQ ID NO: 3084561 - DNA, 25 bp, Homo sapien
gaggtgatagtcatcgctgtccgag

SEQ ID NO: 3084562 - DNA, 25 bp, Homo sapien
tactcctgaggaaccgcacgggctc

SEQ ID NO: 3084563 - DNA, 25 bp, Homo sapien
ggttgttggcgaacatactcctgag

SEQ ID NO: 3084564 - DNA, 25 bp, Homo sapien
accaggttgttggcgaacatactcc

SEQ ID NO: 3084565 - DNA, 25 bp, Homo sapien
caggttgttggcgaacatactcctg

SEQ ID NO: 3084566 - DNA, 25 bp, Homo sapien
cagggagatgcggagcagctctaga

SEQ ID NO: 3084567 - DNA, 25 bp, Homo sapien
ctcgatgagcagcagggagatgcgg

SEQ ID NO: 3084568 - DNA, 25 bp, Homo sapien
atgagcagcagggagatgcggagca

SEQ ID NO: 3084569 - DNA, 25 bp, Homo sapien
gggagatgcggagcagctctagatt

SEQ ID NO: 3084570 - DNA, 25 bp, Homo sapien
tgcaggggaaggaccggcagtggct

SEQ ID NO: 3084571 - DNA, 25 bp, Homo sapien
gggaaggaccggcagtggctgtgct

SEQ ID NO: 3084572 - DNA, 25 bp, Homo sapien
catccccgcctaggggagacggcat

SEQ ID NO: 3084573 - DNA, 25 bp, Homo sapien
gcctaggggagacggcatccactca

SEQ ID NO: 3084574 - DNA, 25 bp, Homo sapien
cagaaggaggtctgggagtcatgca

SEQ ID NO: 3084575 - DNA, 25 bp, Homo sapien
agtcatgcaggaatgaatacttctg

SEQ ID NO: 3084576 - DNA, 25 bp, Homo sapien
ctccatgttggagggtgtcggaata

SEQ ID NO: 3084577 - DNA, 25 bp, Homo sapien
cctccatgttggagggtgtcggaat

SEQ ID NO: 3084578 - DNA, 25 bp, Homo sapien
ggcttggagcatagcgtggtcaaaa

SEQ ID NO: 3084579 - DNA, 25 bp, Homo sapien
tcaatggccagctggtgcgcgcgat

SEQ ID NO: 3084580 - DNA, 25 bp, Homo sapien
ggtttggacggcaccagcctcttga

SEQ ID NO: 3084581 - DNA, 25 bp, Homo sapien
catagcgtggtcaaaaagcctggat

SEQ ID NO: 3084582 - DNA, 25 bp, Homo sapien
tctggccttagatggcgatactcac

SEQ ID NO: 3084583 - DNA, 25 bp, Homo sapien
ccctcaggacacgttgtgcccaaag

SEQ ID NO: 3084584 - DNA, 25 bp, Homo sapien
gagattggccaaatatctggcctta

SEQ ID NO: 3084585 - DNA, 25 bp, Homo sapien
aaccggagggcaatggagggagccg

SEQ ID NO: 3084586 - DNA, 25 bp, Homo sapien
atcctagagccggtctcttgtgggc

SEQ ID NO: 3084587 - DNA, 25 bp, Homo sapien
tccacaggaccctgagtggttcggg

SEQ ID NO: 3084588 - DNA, 25 bp, Homo sapien
gtccacaggaccctgagtggttcgg

SEQ ID NO: 3084589 - DNA, 25 bp, Homo sapien
agagccggtctcttgtgggcccttt

SEQ ID NO: 3084590 - DNA, 25 bp, Homo sapien
tggagtagcaccttccacgaccagg

SEQ ID NO: 3084591 - DNA, 25 bp, Homo sapien
tagcaccttccacgaccaggagagg

SEQ ID NO: 3084592 - DNA, 25 bp, Homo sapien
agtagcaccttccacgaccaggaga

SEQ ID NO: 3084593 - DNA, 25 bp, Homo sapien
ggcactggagtagcaccttccacga

SEQ ID NO: 3084594 - DNA, 25 bp, Homo sapien
tccacagagcggcactgcacgatgc

SEQ ID NO: 3084595 - DNA, 25 bp, Homo sapien
gaatgtctcgaccttgtccatgtcc

SEQ ID NO: 3084596 - DNA, 25 bp, Homo sapien
tagagcagcccgtagttcttgagca

SEQ ID NO: 3084597 - DNA, 25 bp, Homo sapien
ggcactgcacgatgcgcaggaatgt

SEQ ID NO: 3084598 - DNA, 25 bp, Homo sapien
ctgtaggactgattgaagatctgcc

SEQ ID NO: 3084599 - DNA, 25 bp, Homo sapien
tgattgaagatctgcccagtccggg

SEQ ID NO: 3084600 - DNA, 25 bp, Homo sapien
gtaggactgattgaagatctgccca

SEQ ID NO: 3084601 - DNA, 25 bp, Homo sapien
caaacttgctgtaggactgattgaa

SEQ ID NO: 3084602 - DNA, 25 bp, Homo sapien
atacggtgagttctcttgggtcagc

SEQ ID NO: 3084603 - DNA, 25 bp, Homo sapien
tcccctccaggttgtagagaaaggc

SEQ ID NO: 3084604 - DNA, 25 bp, Homo sapien
tgggtcagcgcctgactgctaaaaa

SEQ ID NO: 3084605 - DNA, 25 bp, Homo sapien
gaagagaaggagaggccaagcgctt

SEQ ID NO: 3084606 - DNA, 25 bp, Homo sapien
aggctgttggcgaagacgctcctga

SEQ ID NO: 3084607 - DNA, 25 bp, Homo sapien
cgatagacgttgctgtccgaggcgc

SEQ ID NO: 3084608 - DNA, 25 bp, Homo sapien
ggtccttcaggtggcgatagacgtt

SEQ ID NO: 3084609 - DNA, 25 bp, Homo sapien
tacaccaggctgttggcgaagacgc

SEQ ID NO: 3084610 - DNA, 25 bp, Homo sapien
gggagatgcggagcagctctaggtt

SEQ ID NO: 3084611 - DNA, 25 bp, Homo sapien
ctggatgagcagcagggagatgcgg

SEQ ID NO: 3084612 - DNA, 25 bp, Homo sapien
ggatgagcagcagggagatgcggag

SEQ ID NO: 3084613 - DNA, 25 bp, Homo sapien
atgagcagcagggagatgcggagca

SEQ ID NO: 3084614 - DNA, 25 bp, Homo sapien
gatttctgctgcgttttcaccctgt

SEQ ID NO: 3084615 - DNA, 25 bp, Homo sapien
tttcaccctgttggaaggtgttgga

SEQ ID NO: 3084616 - DNA, 25 bp, Homo sapien
tgcgttttcaccctgttggaaggtg

SEQ ID NO: 3084617 - DNA, 25 bp, Homo sapien
tgctgcgttttcaccctgttggaag

SEQ ID NO: 3084618 - DNA, 25 bp, Homo sapien
ctgcaggaatgaatacttctgctcc

SEQ ID NO: 3084619 - DNA, 25 bp, Homo sapien
acttctgctccttcaggatataggc

SEQ ID NO: 3084620 - DNA, 25 bp, Homo sapien
tctgctccttcaggatataggcttc

SEQ ID NO: 3084621 - DNA, 25 bp, Homo sapien
tgcaggaatgaatacttctgctcct

SEQ ID NO: 3084622 - DNA, 25 bp, Homo sapien
ccgcccaccaaggtctatgctggag

SEQ ID NO: 3084623 - DNA, 25 bp, Homo sapien
tctcctcccattacttcccagcggg

SEQ ID NO: 3084624 - DNA, 25 bp, Homo sapien
tagtctcctcccattacttcccagc

SEQ ID NO: 3084625 - DNA, 25 bp, Homo sapien
aaggaccgcccaccaaggtctatgc

SEQ ID NO: 3084626 - DNA, 25 bp, Homo sapien
tcctgataggtgtcatatgccagct

SEQ ID NO: 3084627 - DNA, 25 bp, Homo sapien
aaactcctgataggtgtcatatgcc

SEQ ID NO: 3084628 - DNA, 25 bp, Homo sapien
gctggtacaggcgacgggcgcggag

SEQ ID NO: 3084629 - DNA, 25 bp, Homo sapien
ataggtgtcatatgccagctggtac

SEQ ID NO: 3084630 - DNA, 25 bp, Homo sapien
gccaggagcagggacgtccgggagc

SEQ ID NO: 3084631 - DNA, 25 bp, Homo sapien
agccaggagcagggacgtccgggag

SEQ ID NO: 3084632 - DNA, 25 bp, Homo sapien
gccaggacaggcagagcaggccaaa

SEQ ID NO: 3084633 - DNA, 25 bp, Homo sapien
agagcaggccaaaagccaggagcag

SEQ ID NO: 3084634 - DNA, 25 bp, Homo sapien
gtccacaggaccctgagtggttcgg

SEQ ID NO: 3084635 - DNA, 25 bp, Homo sapien
tccacaggaccctgagtggttcggg

SEQ ID NO: 3084636 - DNA, 25 bp, Homo sapien
gggtcacaggatgctactcgggcac

SEQ ID NO: 3084637 - DNA, 25 bp, Homo sapien
ggggtcacaggatgctactcgggca

SEQ ID NO: 3084638 - DNA, 25 bp, Homo sapien
gcggcactgcaccatgcgcaggaat

SEQ ID NO: 3084639 - DNA, 25 bp, Homo sapien
tagagcagcccgtagttcttgagca

SEQ ID NO: 3084640 - DNA, 25 bp, Homo sapien
gcgcaggaatgtctcgaccttgtcc

SEQ ID NO: 3084641 - DNA, 25 bp, Homo sapien
cagtgcgtcatggttgtgcgagttt

SEQ ID NO: 3084642 - DNA, 25 bp, Homo sapien
ccagtccggcggctgccgtcttcca

SEQ ID NO: 3084643 - DNA, 25 bp, Homo sapien
gaggatctgcccagtccggcggctg

SEQ ID NO: 3084644 - DNA, 25 bp, Homo sapien
tgtaggtctgcttgaggatctgccc

SEQ ID NO: 3084645 - DNA, 25 bp, Homo sapien
agtccggcggctgccgtcttccagc

SEQ ID NO: 3084646 - DNA, 25 bp, Homo sapien
agaaggagaggccaagcgcttgggc

SEQ ID NO: 3084647 - DNA, 25 bp, Homo sapien
tccctccccttcagggtgtagagaa

SEQ ID NO: 3084648 - DNA, 25 bp, Homo sapien
aggagaggccaagcgcttgggcact

SEQ ID NO: 3084649 - DNA, 25 bp, Homo sapien
gaagagaaggagaggccaagcgctt

SEQ ID NO: 3084650 - DNA, 25 bp, Homo sapien
gaagaataaggtgagttctcttggg

SEQ ID NO: 3084651 - DNA, 25 bp, Homo sapien
gaaatgaagaataaggtgagttctc

SEQ ID NO: 3084652 - DNA, 25 bp, Homo sapien
caggcgaaatgaagaataaggtgag

SEQ ID NO: 3084653 - DNA, 25 bp, Homo sapien
ataaggtgagttctcttgggtcagc

SEQ ID NO: 3084654 - DNA, 25 bp, Homo sapien
caggattggtgacccctggcgccac

SEQ ID NO: 3084655 - DNA, 25 bp, Homo sapien
ggttccaggattggtgacccctggc

SEQ ID NO: 3084656 - DNA, 25 bp, Homo sapien
cccagccctcgaagccagtggggtt

SEQ ID NO: 3084657 - DNA, 25 bp, Homo sapien
aaaagagggcagcagtatttctctc

SEQ ID NO: 3084658 - DNA, 25 bp, Homo sapien
atcagcgtttggatgccttcctcta

SEQ ID NO: 3084659 - DNA, 25 bp, Homo sapien
cagcgtttggatgccttcctctagg

SEQ ID NO: 3084660 - DNA, 25 bp, Homo sapien
ccccatcagcgtttggatgccttcc

SEQ ID NO: 3084661 - DNA, 25 bp, Homo sapien
gcgtttggatgccttcctctaggtc

SEQ ID NO: 3084662 - DNA, 25 bp, Homo sapien
gatagtcatcgctgtccgaggtgtc

SEQ ID NO: 3084663 - DNA, 25 bp, Homo sapien
agtcatcgctgtccgaggtgtcata

SEQ ID NO: 3084664 - DNA, 25 bp, Homo sapien
ctttaggaggtgatagtcatcgctg

SEQ ID NO: 3084665 - DNA, 25 bp, Homo sapien
gaggtgatagtcatcgctgtccgag

SEQ ID NO: 3084666 - DNA, 25 bp, Homo sapien
ggttgttggcgaacatactcctgag

SEQ ID NO: 3084667 - DNA, 25 bp, Homo sapien
accaggttgttggcgaacatactcc

SEQ ID NO: 3084668 - DNA, 25 bp, Homo sapien
aggttgttggcgaacatactcctga

SEQ ID NO: 3084669 - DNA, 25 bp, Homo sapien
caggttgttggcgaacatactcctg

SEQ ID NO: 3084670 - DNA, 25 bp, Homo sapien
gggctccagccacgactcgatgagc

SEQ ID NO: 3084671 - DNA, 25 bp, Homo sapien
gctccagccacgactcgatgagcag

SEQ ID NO: 3084672 - DNA, 25 bp, Homo sapien
ggctccagccacgactcgatgagca

SEQ ID NO: 3084673 - DNA, 25 bp, Homo sapien
tgcaggggaaggaccggcagtggct

SEQ ID NO: 3084674 - DNA, 25 bp, Homo sapien
catccccgcctaggggagacggcat

SEQ ID NO: 3084675 - DNA, 25 bp, Homo sapien
gggaaggaccggcagtggctgtgct

SEQ ID NO: 3084676 - DNA, 25 bp, Homo sapien
gcctaggggagacggcatccactca

SEQ ID NO: 3084677 - DNA, 25 bp, Homo sapien
tgttggagggtgtcggaatagagtc

SEQ ID NO: 3084678 - DNA, 25 bp, Homo sapien
ccatgttggagggtgtcggaataga

SEQ ID NO: 3084679 - DNA, 25 bp, Homo sapien
ctccatgttggagggtgtcggaata

SEQ ID NO: 3084680 - DNA, 25 bp, Homo sapien
cctccatgttggagggtgtcggaat

SEQ ID NO: 3084681 - DNA, 25 bp, Homo sapien
gagtcatgcaggaatgaatacttct

SEQ ID NO: 3084682 - DNA, 25 bp, Homo sapien
agtcatgcaggaatgaatacttctg

SEQ ID NO: 3084683 - DNA, 25 bp, Homo sapien
ggagtcatgcaggaatgaatacttc

SEQ ID NO: 3084684 - DNA, 25 bp, Homo sapien
gggagtcatgcaggaatgaatactt

SEQ ID NO: 3084685 - DNA, 25 bp, Homo sapien
ttgccacccctgacccgcacccatt

SEQ ID NO: 3084686 - DNA, 25 bp, Homo sapien
ctgcattttcgcttcagaaaacaac

SEQ ID NO: 3084687 - DNA, 25 bp, Homo sapien
ggctcagcctatgctcatctgcctg

SEQ ID NO: 3084688 - DNA, 25 bp, Homo sapien
gtctcctcccattacttccccagtg

SEQ ID NO: 3084689 - DNA, 25 bp, Homo sapien
ggcttggagcatagcgtggtcaaaa

SEQ ID NO: 3084690 - DNA, 25 bp, Homo sapien
tcaatggccagctggtgcgcgcgat

SEQ ID NO: 3084691 - DNA, 25 bp, Homo sapien
ggtttggacggcaccagcctcttga

SEQ ID NO: 3084692 - DNA, 25 bp, Homo sapien
catagcgtggtcaaaaagcctggat

SEQ ID NO: 3084693 - DNA, 25 bp, Homo sapien
ccctcaggacacgttgtgcccaaag

SEQ ID NO: 3084694 - DNA, 25 bp, Homo sapien
gagattggccaaatatctggcctta

SEQ ID NO: 3084695 - DNA, 25 bp, Homo sapien
tctggccttagatggcgatactcac

SEQ ID NO: 3084696 - DNA, 25 bp, Homo sapien
aaccggagggcaatggagggagccg

SEQ ID NO: 3084697 - DNA, 25 bp, Homo sapien
atcctagagccggtctcttgtgggc

SEQ ID NO: 3084698 - DNA, 25 bp, Homo sapien
gtccacaggaccctgagtggttcgg

SEQ ID NO: 3084699 - DNA, 25 bp, Homo sapien
agagccggtctcttgtgggcccttt

SEQ ID NO: 3084700 - DNA, 25 bp, Homo sapien
tccacaggaccctgagtggttcggg

SEQ ID NO: 3084701 - DNA, 25 bp, Homo sapien
gggtcacaggatgccacgcgggccc

SEQ ID NO: 3084702 - DNA, 25 bp, Homo sapien
taattttattaagacaaggctggtg

SEQ ID NO: 3084703 - DNA, 25 bp, Homo sapien
gggaggggtcacaggatgccacgcg

SEQ ID NO: 3084704 - DNA, 25 bp, Homo sapien
aattttattaagacaaggctggtgg

SEQ ID NO: 3084705 - DNA, 25 bp, Homo sapien
ggtctgcccagtcaggtggctgccg

SEQ ID NO: 3084706 - DNA, 25 bp, Homo sapien
gtctgcccagtcaggtggctgccgt

SEQ ID NO: 3084707 - DNA, 25 bp, Homo sapien
ataaggtgagttctcttgggtcagc

SEQ ID NO: 3084708 - DNA, 25 bp, Homo sapien
gaaatgaagaataaggtgagttctc

SEQ ID NO: 3084709 - DNA, 25 bp, Homo sapien
tgaagaataaggtgagttctcttgg

SEQ ID NO: 3084710 - DNA, 25 bp, Homo sapien
gcctggaggattcacgaggggaaat

SEQ ID NO: 3084711 - DNA, 25 bp, Homo sapien
aggtgtcatacaccaggttgttggt

SEQ ID NO: 3084712 - DNA, 25 bp, Homo sapien
ttgttggtgaaggtactcctgagga

SEQ ID NO: 3084713 - DNA, 25 bp, Homo sapien
aggttgttggtgaaggtactcctga

SEQ ID NO: 3084714 - DNA, 25 bp, Homo sapien
ttggtgaaggtactcctgaggaacc

SEQ ID NO: 3084715 - DNA, 25 bp, Homo sapien
agcagggagatgtggagcagctcta

SEQ ID NO: 3084716 - DNA, 25 bp, Homo sapien
ctcgatgagcagcagggagatgtgg

SEQ ID NO: 3084717 - DNA, 25 bp, Homo sapien
atgagcagcagggagatgtggagca

SEQ ID NO: 3084718 - DNA, 25 bp, Homo sapien
gggagatgtggagcagctctaagtt

SEQ ID NO: 3084719 - DNA, 25 bp, Homo sapien
tgcaggggaaggaccggcagtggct

SEQ ID NO: 3084720 - DNA, 25 bp, Homo sapien
caggggaaggaccggcagtggctgt

SEQ ID NO: 3084721 - DNA, 25 bp, Homo sapien
gggaaggaccggcagtggctgtgct

SEQ ID NO: 3084722 - DNA, 25 bp, Homo sapien
ggggaaggaccggcagtggctgtgc

SEQ ID NO: 3084723 - DNA, 25 bp, Homo sapien
gggagtcatgcaggaatgaatactt

SEQ ID NO: 3084724 - DNA, 25 bp, Homo sapien
gcaggaatgaatacttctgttcctt

SEQ ID NO: 3084725 - DNA, 25 bp, Homo sapien
cagaaggaggtctgggagtcatgca

SEQ ID NO: 3084726 - DNA, 25 bp, Homo sapien
agtcatgcaggaatgaatacttctg

SEQ ID NO: 3084727 - DNA, 25 bp, Homo sapien
ggctcagcctatgctcatctgcctg

SEQ ID NO: 3084728 - DNA, 25 bp, Homo sapien
ctgcattttcgcttcagaaaacaac

SEQ ID NO: 3084729 - DNA, 25 bp, Homo sapien
tccttagtctcctcccattacttcc

SEQ ID NO: 3084730 - DNA, 25 bp, Homo sapien
gtctcctcccattacttccccagtg

SEQ ID NO: 3084731 - DNA, 25 bp, Homo sapien
tcaatggccagctggtgtgcgcgat

SEQ ID NO: 3084732 - DNA, 25 bp, Homo sapien
gatgggcttggagcatagcctcttt

SEQ ID NO: 3084733 - DNA, 25 bp, Homo sapien
ggtgtcaatggccagctggtgtgcg

SEQ ID NO: 3084734 - DNA, 25 bp, Homo sapien
gagcatagcctctttaaaaagcctg

SEQ ID NO: 3084735 - DNA, 25 bp, Homo sapien
gccaggagcagggacgtccgggagc

SEQ ID NO: 3084736 - DNA, 25 bp, Homo sapien
cagagcagggcaaaagccaggagca

SEQ ID NO: 3084737 - DNA, 25 bp, Homo sapien
cagcctcttgaagccagggcaggca

SEQ ID NO: 3084738 - DNA, 25 bp, Homo sapien
ggcagagcagggcaaaagccaggag

SEQ ID NO: 3084739 - DNA, 25 bp, Homo sapien
ggccttagatggcgatattcacatt

SEQ ID NO: 3084740 - DNA, 25 bp, Homo sapien
tctggccttagatggcgatattcac

SEQ ID NO: 3084741 - DNA, 25 bp, Homo sapien
ctggccttagatggcgatattcaca

SEQ ID NO: 3084742 - DNA, 25 bp, Homo sapien
ggcaagaagggagccgcagagcaag

SEQ ID NO: 3084743 - DNA, 25 bp, Homo sapien
cacaggaccctgagtggtgcgggga

SEQ ID NO: 3084744 - DNA, 25 bp, Homo sapien
gtccacaggaccctgagtggtgcgg

SEQ ID NO: 3084745 - DNA, 25 bp, Homo sapien
gcggggagtcgggccttgggatgct

SEQ ID NO: 3084746 - DNA, 25 bp, Homo sapien
gtgcggggagtcgggccttgggatg

SEQ ID NO: 3084747 - DNA, 25 bp, Homo sapien
tggtgggcactggagtggcaacttc

SEQ ID NO: 3084748 - DNA, 25 bp, Homo sapien
gggtcacagggatgccacccgggca

SEQ ID NO: 3084749 - DNA, 25 bp, Homo sapien
ggtcacagggatgccacccgggcag

SEQ ID NO: 3084750 - DNA, 25 bp, Homo sapien
tgggcactggagtggcaacttccag

SEQ ID NO: 3084751 - DNA, 25 bp, Homo sapien
ctgccctccacagagcggcactgca

SEQ ID NO: 3084752 - DNA, 25 bp, Homo sapien
agctgccctccacagagcggcactg

SEQ ID NO: 3084753 - DNA, 25 bp, Homo sapien
cacagctgccctccacagagcggca

SEQ ID NO: 3084754 - DNA, 25 bp, Homo sapien
tgccctccacagagcggcactgcac

SEQ ID NO: 3084755 - DNA, 25 bp, Homo sapien
gcagcccgtagttcttgagtagtgc

SEQ ID NO: 3084756 - DNA, 25 bp, Homo sapien
agcagcccgtagttcttgagtagtg

SEQ ID NO: 3084757 - DNA, 25 bp, Homo sapien
cagcccgtagttcttgagtagtgcg

SEQ ID NO: 3084758 - DNA, 25 bp, Homo sapien
gagcagcccgtagttcttgagtagt

SEQ ID NO: 3084759 - DNA, 25 bp, Homo sapien
gagtttgtgtcgaacttgctgtagg

SEQ ID NO: 3084760 - DNA, 25 bp, Homo sapien
tgtgtgagtttgtgtcgaacttgct

SEQ ID NO: 3084761 - DNA, 25 bp, Homo sapien
catcgttgtgtgagtttgtgtcgaa

SEQ ID NO: 3084762 - DNA, 25 bp, Homo sapien
gtgtcgaacttgctgtaggtctgct

SEQ ID NO: 3084763 - DNA, 25 bp, Homo sapien
ctgcccagtccgggggctgccatct

SEQ ID NO: 3084764 - DNA, 25 bp, Homo sapien
ccagtccgggggctgccatcttcca

SEQ ID NO: 3084765 - DNA, 25 bp, Homo sapien
cagtccgggggctgccatcttccag

SEQ ID NO: 3084766 - DNA, 25 bp, Homo sapien
gcccagtccgggggctgccatcttc

SEQ ID NO: 3084767 - DNA, 25 bp, Homo sapien
aggtcatagacgttgctgtcagagg

SEQ ID NO: 3084768 - DNA, 25 bp, Homo sapien
cctttaggaggtcatagacgttgct

SEQ ID NO: 3084769 - DNA, 25 bp, Homo sapien
gtcctttaggaggtcatagacgttg

SEQ ID NO: 3084770 - DNA, 25 bp, Homo sapien
tcatagacgttgctgtcagaggcgc

SEQ ID NO: 3084771 - DNA, 25 bp, Homo sapien
tgttggcgaagacactcctgaggaa

SEQ ID NO: 3084772 - DNA, 25 bp, Homo sapien
ctgttggcgaagacactcctgagga

SEQ ID NO: 3084773 - DNA, 25 bp, Homo sapien
gggagatgcggagcagctctaggtt

SEQ ID NO: 3084774 - DNA, 25 bp, Homo sapien
tggatgagcagcagggagatgcgga

SEQ ID NO: 3084775 - DNA, 25 bp, Homo sapien
atgagcagcagggagatgcggagca

SEQ ID NO: 3084776 - DNA, 25 bp, Homo sapien
agggagatgcggagcagctctaggt

SEQ ID NO: 3084777 - DNA, 25 bp, Homo sapien
tgcccgggggctctgactacaggtc

SEQ ID NO: 3084778 - DNA, 25 bp, Homo sapien
ttcctccctgttggagggtgtcgga

SEQ ID NO: 3084779 - DNA, 25 bp, Homo sapien
tggagggtgtcggaatagactctga

SEQ ID NO: 3084780 - DNA, 25 bp, Homo sapien
tgtcggaatagactctgagaaacag

SEQ ID NO: 3084781 - DNA, 25 bp, Homo sapien
tgttgtgtttcctccctgttggagg

SEQ ID NO: 3084782 - DNA, 25 bp, Homo sapien
caggaatgaatacttctgttccttt

SEQ ID NO: 3084783 - DNA, 25 bp, Homo sapien
tgcaggaatgaatacttctgttcct

SEQ ID NO: 3084784 - DNA, 25 bp, Homo sapien
gcaggaatgaatacttctgttcctt

SEQ ID NO: 3084785 - DNA, 25 bp, Homo sapien
agctcccattgttacttttctggga

SEQ ID NO: 3084786 - DNA, 25 bp, Homo sapien
cattgttacttttctgggaacctca

SEQ ID NO: 3084787 - DNA, 25 bp, Homo sapien
gctcccattgttacttttctgggaa

SEQ ID NO: 3084788 - DNA, 25 bp, Homo sapien
actcctggtaggtgtcaaaggccag

SEQ ID NO: 3084789 - DNA, 25 bp, Homo sapien
ctggtgcagacgatgggcgcggagc

SEQ ID NO: 3084790 - DNA, 25 bp, Homo sapien
aggtgtcaaaggccagctggtgcag

SEQ ID NO: 3084791 - DNA, 25 bp, Homo sapien
ggtgcagacgatgggcgcggagcat

SEQ ID NO: 3084792 - DNA, 25 bp, Homo sapien
agagcaggccaaaagccaggagcag

SEQ ID NO: 3084793 - DNA, 25 bp, Homo sapien
caggcagagcaggccaaaagccagg

SEQ ID NO: 3084794 - DNA, 25 bp, Homo sapien
gccaggagcagggacgtccgggagc

SEQ ID NO: 3084795 - DNA, 25 bp, Homo sapien
agccaggagcagggacgtccgggag

SEQ ID NO: 3084796 - DNA, 25 bp, Homo sapien
tactgggcttacatggcgatactca

SEQ ID NO: 3084797 - DNA, 25 bp, Homo sapien
tctgagattggccaaatactgggct

SEQ ID NO: 3084798 - DNA, 25 bp, Homo sapien
ggaccaggagctttctgagattggc

SEQ ID NO: 3084799 - DNA, 25 bp, Homo sapien
ttggccaaatactgggcttacatgg

SEQ ID NO: 3084800 - DNA, 25 bp, Homo sapien
gtccacaggaccctgagtggttcgg

SEQ ID NO: 3084801 - DNA, 25 bp, Homo sapien
tccacaggaccctgagtggttcggg

SEQ ID NO: 3084802 - DNA, 25 bp, Homo sapien
gttcaggcacggaggaagggcctcg

SEQ ID NO: 3084803 - DNA, 25 bp, Homo sapien
agtttgccacatgatatgtccaggg

SEQ ID NO: 3084804 - DNA, 25 bp, Homo sapien
tgtacatcgtgtttcacttcctgta

SEQ ID NO: 3084805 - DNA, 25 bp, Homo sapien
tgtatctcgttggacccttcagttt

SEQ ID NO: 3084806 - DNA, 25 bp, Homo sapien
accattacgtaatgtatatatataa

SEQ ID NO: 3084807 - DNA, 25 bp, Homo sapien
ggcccagttgggtccatggcccttc

SEQ ID NO: 3084808 - DNA, 25 bp, Homo sapien
ctggagacaaatggcagctctggtg

SEQ ID NO: 3084809 - DNA, 25 bp, Homo sapien
tccgagtccatttgcgggctctgga

SEQ ID NO: 3084810 - DNA, 25 bp, Homo sapien
aggcagctccgaagcagtcactgag

SEQ ID NO: 3084811 - DNA, 25 bp, Homo sapien
gcagcgtcactatgtcctcataggt

SEQ ID NO: 3084812 - DNA, 25 bp, Homo sapien
tatgtcctcataggtggctgtctgg

SEQ ID NO: 3084813 - DNA, 25 bp, Homo sapien
tggctgtctggtcaatgtccaggcc

SEQ ID NO: 3084814 - DNA, 25 bp, Homo sapien
tgtccgcagcgtcactatgtcctca

SEQ ID NO: 3084815 - DNA, 25 bp, Homo sapien
ctggagacattaagtggaactcagg

SEQ ID NO: 3084816 - DNA, 25 bp, Homo sapien
tggagacattaagtggaactcaggc

SEQ ID NO: 3084817 - DNA, 25 bp, Homo sapien
ggagacattaagtggaactcaggcc

SEQ ID NO: 3084818 - DNA, 25 bp, Homo sapien
ctcgtaggtgtgatcttcctccatg

SEQ ID NO: 3084819 - DNA, 25 bp, Homo sapien
ttcctccatgccagccttgctgtca

SEQ ID NO: 3084820 - DNA, 25 bp, Homo sapien
tcctccatgccagccttgctgtcat

SEQ ID NO: 3084821 - DNA, 25 bp, Homo sapien
gtaggtgtgatcttcctccatgcca

SEQ ID NO: 3084822 - DNA, 25 bp, Homo sapien
tggagatcagagtgttagtgtcccc

SEQ ID NO: 3084823 - DNA, 25 bp, Homo sapien
agatcagagtgttagtgtcccccag

SEQ ID NO: 3084824 - DNA, 25 bp, Homo sapien
gatggagatcagagtgttagtgtcc

SEQ ID NO: 3084825 - DNA, 25 bp, Homo sapien
atcagagtgttagtgtcccccagcc

SEQ ID NO: 3084826 - DNA, 25 bp, Homo sapien
caggaagataggcacgatgatgaag

SEQ ID NO: 3084827 - DNA, 25 bp, Homo sapien
catccttcagcgtgttcctctgctt

SEQ ID NO: 3084828 - DNA, 25 bp, Homo sapien
gaggatgatcagcagcgtctggatc

SEQ ID NO: 3084829 - DNA, 25 bp, Homo sapien
ggatcatgatgataccatccttcag

SEQ ID NO: 3084830 - DNA, 25 bp, Homo sapien
caaaccggatgccttggatggtgag

SEQ ID NO: 3084831 - DNA, 25 bp, Homo sapien
tagatgccattgtcctcaaaccgga

SEQ ID NO: 3084832 - DNA, 25 bp, Homo sapien
atgactcgcagctctgtgccgcagc

SEQ ID NO: 3084833 - DNA, 25 bp, Homo sapien
gacctccgaggtgttgttgcacttc

SEQ ID NO: 3084834 - DNA, 25 bp, Homo sapien
tccatgcggcccttttccagcttca

SEQ ID NO: 3084835 - DNA, 25 bp, Homo sapien
ttccagagccagctcacattgccgg

SEQ ID NO: 3084836 - DNA, 25 bp, Homo sapien
gggattctcgtccatctcctgcttc

SEQ ID NO: 3084837 - DNA, 25 bp, Homo sapien
gaggcgctgttcatgtagcagtgca

SEQ ID NO: 3084838 - DNA, 25 bp, Homo sapien
tgaaacgtgggctctgccagatccg

SEQ ID NO: 3084839 - DNA, 25 bp, Homo sapien
tgggctctgccagatccgcgaacaa

SEQ ID NO: 3084840 - DNA, 25 bp, Homo sapien
tgccagatccgcgaacaagcactac

SEQ ID NO: 3084841 - DNA, 25 bp, Homo sapien
ctggctatgaaacgtgggctctgcc

SEQ ID NO: 3084842 - DNA, 25 bp, Homo sapien
aggctcagcattccgcttggcatct

SEQ ID NO: 3084843 - DNA, 25 bp, Homo sapien
gccaggctcagcattccgcttggca

SEQ ID NO: 3084844 - DNA, 25 bp, Homo sapien
cagcattccgcttggcatcttcctg

SEQ ID NO: 3084845 - DNA, 25 bp, Homo sapien
tcagcattccgcttggcatcttcct

SEQ ID NO: 3084846 - DNA, 25 bp, Homo sapien
attccggtaccggtcctccgatctg

SEQ ID NO: 3084847 - DNA, 25 bp, Homo sapien
cctagttcttccacggtcctggttg

SEQ ID NO: 3084848 - DNA, 25 bp, Homo sapien
tcttccacggtcctggttgctaact

SEQ ID NO: 3084849 - DNA, 25 bp, Homo sapien
cacggtcctggttgctaactctggt

SEQ ID NO: 3084850 - DNA, 25 bp, Homo sapien
ctcctgagcctagttcttccacggt

SEQ ID NO: 3084851 - DNA, 25 bp, Homo sapien
gggagacaggcggtaaagagtgaga

SEQ ID NO: 3084852 - DNA, 25 bp, Homo sapien
acaggcctcgtcgtgggttctgtac

SEQ ID NO: 3084853 - DNA, 25 bp, Homo sapien
tgacacccacagacccaggccccag

SEQ ID NO: 3084854 - DNA, 25 bp, Homo sapien
caggcggtaaagagtgagagacaga

SEQ ID NO: 3084855 - DNA, 25 bp, Homo sapien
cagcagcaacgccaccatccagtgg

SEQ ID NO: 3084856 - DNA, 25 bp, Homo sapien
catccagtggctgggcacaggagac

SEQ ID NO: 3084857 - DNA, 25 bp, Homo sapien
agcagcagcaacgccaccatccagt

SEQ ID NO: 3084858 - DNA, 25 bp, Homo sapien
ggcacaggagacaacgccagcctgg

SEQ ID NO: 3084859 - DNA, 25 bp, Homo sapien
caaacccgtgacaacgtccgaggct

SEQ ID NO: 3084860 - DNA, 25 bp, Homo sapien
caacgtccgaggctccttggaggaa

SEQ ID NO: 3084861 - DNA, 25 bp, Homo sapien
aaaacgtgtaactgcaccggctgca

SEQ ID NO: 3084862 - DNA, 25 bp, Homo sapien
tcctgccatgcaaattgggacccag

SEQ ID NO: 3084863 - DNA, 25 bp, Homo sapien
gagaatcttcttactgagcagcagg

SEQ ID NO: 3084864 - DNA, 25 bp, Homo sapien
cacgccccagggtcgaaatatctaa

SEQ ID NO: 3084865 - DNA, 25 bp, Homo sapien
caagtgaataaatccagcgacgcct

SEQ ID NO: 3084866 - DNA, 25 bp, Homo sapien
tatacaaagatacccagacacgtgc

SEQ ID NO: 3084867 - DNA, 25 bp, Homo sapien
actccttgacacctgggcgcacagt

SEQ ID NO: 3084868 - DNA, 25 bp, Homo sapien
agagactccttgacacctgggcgca

SEQ ID NO: 3084869 - DNA, 25 bp, Homo sapien
agactccttgacacctgggcgcaca

SEQ ID NO: 3084870 - DNA, 25 bp, Homo sapien
aagagactccttgacacctgggcgc

SEQ ID NO: 3084871 - DNA, 25 bp, Homo sapien
ctcctccgggcttggcgagctgctg

SEQ ID NO: 3084872 - DNA, 25 bp, Homo sapien
cgggcttggcgagctgctgttccca

SEQ ID NO: 3084873 - DNA, 25 bp, Homo sapien
cccatagtgggtccggcgtcccctg

SEQ ID NO: 3084874 - DNA, 25 bp, Homo sapien
ctgatgggcatcagccccatagtgg

SEQ ID NO: 3084875 - DNA, 25 bp, Homo sapien
tgtccacgaagtctgagaggcggct

SEQ ID NO: 3084876 - DNA, 25 bp, Homo sapien
gatgcccgactccttcttgacgtag

SEQ ID NO: 3084877 - DNA, 25 bp, Homo sapien
tccatggtctgcttgagggcgtcca

SEQ ID NO: 3084878 - DNA, 25 bp, Homo sapien
gatgcctgcttcatggagcgctgta

SEQ ID NO: 3084879 - DNA, 25 bp, Homo sapien
tgcattgagagtgaatggcaggcac

SEQ ID NO: 3084880 - DNA, 25 bp, Homo sapien
ttgagagtgaatggcaggcacgcac

SEQ ID NO: 3084881 - DNA, 25 bp, Homo sapien
cctttgtgcattgagagtgaatggc

SEQ ID NO: 3084882 - DNA, 25 bp, Homo sapien
ctttgtgcattgagagtgaatggca

SEQ ID NO: 3084883 - DNA, 25 bp, Homo sapien
tgtccgtgtgaggatgggtcttccc

SEQ ID NO: 3084884 - DNA, 25 bp, Homo sapien
catgtgtctgggtgagcgtgtgagg

SEQ ID NO: 3084885 - DNA, 25 bp, Homo sapien
gggcaggtgtgtccgtgtgaggatg

SEQ ID NO: 3084886 - DNA, 25 bp, Homo sapien
gtctgggtgagcgtgtgagggtgca

SEQ ID NO: 3084887 - DNA, 25 bp, Homo sapien
acaggatgtccaccttgagctggct

SEQ ID NO: 3084888 - DNA, 25 bp, Homo sapien
ccaacggtgaagtagtactggcgca

SEQ ID NO: 3084889 - DNA, 25 bp, Homo sapien
tgagcacgcactcccctgtgaagat

SEQ ID NO: 3084890 - DNA, 25 bp, Homo sapien
gaaggcctgcttcgtcacgaggtca

SEQ ID NO: 3084891 - DNA, 25 bp, Homo sapien
ctggggccggggaattggcttctga

SEQ ID NO: 3084892 - DNA, 25 bp, Homo sapien
ggccggggaattggcttctgaggct

SEQ ID NO: 3084893 - DNA, 25 bp, Homo sapien
gccaagcttcttcatggcgttatag

SEQ ID NO: 3084894 - DNA, 25 bp, Homo sapien
aagcttcttcatggcgttatagtat

SEQ ID NO: 3084895 - DNA, 25 bp, Homo sapien
gtatagtgggatagggcttgtcagg

SEQ ID NO: 3084896 - DNA, 25 bp, Homo sapien
gatagggcttgtcaggttgaggtgc

SEQ ID NO: 3084897 - DNA, 25 bp, Homo sapien
tagggcttgtcaggttgaggtgcag

SEQ ID NO: 3084898 - DNA, 25 bp, Homo sapien
agtgggatagggcttgtcaggttga

SEQ ID NO: 3084899 - DNA, 25 bp, Homo sapien
tcaggcagcgtttgtgggtttgtgc

SEQ ID NO: 3084900 - DNA, 25 bp, Homo sapien
tgggtttgtgcaatggagagtggac

SEQ ID NO: 3084901 - DNA, 25 bp, Homo sapien
gtttgtgcaatggagagtggacaaa

SEQ ID NO: 3084902 - DNA, 25 bp, Homo sapien
cgtttgtgggtttgtgcaatggaga

SEQ ID NO: 3084903 - DNA, 25 bp, Homo sapien
gggagggcccgaggggctgggctga

SEQ ID NO: 3084904 - DNA, 25 bp, Homo sapien
ggagggcccgaggggctgggctgat

SEQ ID NO: 3084905 - DNA, 25 bp, Homo sapien
cgggagggcccgaggggctgggctg

SEQ ID NO: 3084906 - DNA, 25 bp, Homo sapien
agggcccgaggggctgggctgatac

SEQ ID NO: 3084907 - DNA, 25 bp, Homo sapien
agtagaggtacatgtagaggttcac

SEQ ID NO: 3084908 - DNA, 25 bp, Homo sapien
aggtacatgtagaggttcacctcgt

SEQ ID NO: 3084909 - DNA, 25 bp, Homo sapien
tgtagaggttcacctcgtactgcgg

SEQ ID NO: 3084910 - DNA, 25 bp, Homo sapien
aggttcacctcgtactgcggctgct

SEQ ID NO: 3084911 - DNA, 25 bp, Homo sapien
gggagtccacggctgcatacatgat

SEQ ID NO: 3084912 - DNA, 25 bp, Homo sapien
ccgggagtccacggctgcatacatg

SEQ ID NO: 3084913 - DNA, 25 bp, Homo sapien
tcccgggagtccacggctgcataca

SEQ ID NO: 3084914 - DNA, 25 bp, Homo sapien
ctcccgggagtccacggctgcatac

SEQ ID NO: 3084915 - DNA, 25 bp, Homo sapien
tagcccagacccacgttgtcgtagt

SEQ ID NO: 3084916 - DNA, 25 bp, Homo sapien
tgaccttgacattgagccagcggac

SEQ ID NO: 3084917 - DNA, 25 bp, Homo sapien
aacttgccggcaaacaggttgacac

SEQ ID NO: 3084918 - DNA, 25 bp, Homo sapien
ttgacctcggagatgtcgaacctct

SEQ ID NO: 3084919 - DNA, 25 bp, Homo sapien
gggccagggggtccattgccagtgc

SEQ ID NO: 3084920 - DNA, 25 bp, Homo sapien
ccagggggtccattgccagtgcctc

SEQ ID NO: 3084921 - DNA, 25 bp, Homo sapien
gggtccattgccagtgcctctccca

SEQ ID NO: 3084922 - DNA, 25 bp, Homo sapien
cagcctctgagagagggctccacat

SEQ ID NO: 3084923 - DNA, 25 bp, Homo sapien
cctcatgccctcgaatcgggacagt

SEQ ID NO: 3084924 - DNA, 25 bp, Homo sapien
gatttgatgggtcccagctccgagt

SEQ ID NO: 3084925 - DNA, 25 bp, Homo sapien
gtccgcagggatttgatgggtccca

SEQ ID NO: 3084926 - DNA, 25 bp, Homo sapien
cctcgaatcgggacagtgccctcag

SEQ ID NO: 3084927 - DNA, 25 bp, Homo sapien
tacggggccagcgtggggggactca

SEQ ID NO: 3084928 - DNA, 25 bp, Homo sapien
tgaagtacaccttaaagccgtaggc

SEQ ID NO: 3084929 - DNA, 25 bp, Homo sapien
agatgtaggtgaagaccttgtcggc

SEQ ID NO: 3084930 - DNA, 25 bp, Homo sapien
taggatggtgcgaatgactcgccgc

SEQ ID NO: 3084931 - DNA, 25 bp, Homo sapien
ccttgtcggcatattctaggatggt

SEQ ID NO: 3084932 - DNA, 25 bp, Homo sapien
ggtctcgaaccagttgtgctcgaca

SEQ ID NO: 3084933 - DNA, 25 bp, Homo sapien
ttgaagcaggccctgcgcagagtcc

SEQ ID NO: 3084934 - DNA, 25 bp, Homo sapien
agatgtccacgtagaggcagggcca

SEQ ID NO: 3084935 - DNA, 25 bp, Homo sapien
tgtgctcgacaatcttgaagcaggc

SEQ ID NO: 3084936 - DNA, 25 bp, Homo sapien
acaggcaccacatcatgggcctggg

SEQ ID NO: 3084937 - DNA, 25 bp, Homo sapien
acagggacaggcaccacatcatggg

SEQ ID NO: 3084938 - DNA, 25 bp, Homo sapien
gggacagggacaggcaccacatcat

SEQ ID NO: 3084939 - DNA, 25 bp, Homo sapien
gggacaggcaccacatcatgggcct

SEQ ID NO: 3084940 - DNA, 25 bp, Homo sapien
aggacatttctccagtgccatgtcc

SEQ ID NO: 3084941 - DNA, 25 bp, Homo sapien
agtgccatgtcctgaaggccttgct

SEQ ID NO: 3084942 - DNA, 25 bp, Homo sapien
cccaggcggtctccatcctgcacag

SEQ ID NO: 3084943 - DNA, 25 bp, Homo sapien
gcaagctctatggacaaggacattt

SEQ ID NO: 3084944 - DNA, 25 bp, Homo sapien
ggcagccccaggtccgtgtgctttt

SEQ ID NO: 3084945 - DNA, 25 bp, Homo sapien
gccccaggtccgtgtgcttttggtc

SEQ ID NO: 3084946 - DNA, 25 bp, Homo sapien
ccctagacacgtgaggcacggggat

SEQ ID NO: 3084947 - DNA, 25 bp, Homo sapien
cccaggtccgtgtgcttttggtcct

SEQ ID NO: 3084948 - DNA, 25 bp, Homo sapien
gggagacacccagatgaggtgaggg

SEQ ID NO: 3084949 - DNA, 25 bp, Homo sapien
gggggagacacccagatgaggtgag

SEQ ID NO: 3084950 - DNA, 25 bp, Homo sapien
gagacacccagatgaggtgaggggt

SEQ ID NO: 3084951 - DNA, 25 bp, Homo sapien
acacccagatgaggtgaggggtgcc

SEQ ID NO: 3084952 - DNA, 25 bp, Homo sapien
gtgctgcagacggacgagttcccat

SEQ ID NO: 3084953 - DNA, 25 bp, Homo sapien
tcagctgtgctgcagacggacgagt

SEQ ID NO: 3084954 - DNA, 25 bp, Homo sapien
gacggacgagttcccatcatagaga

SEQ ID NO: 3084955 - DNA, 25 bp, Homo sapien
ttcccatcatagagaggctgcggcg

SEQ ID NO: 3084956 - DNA, 25 bp, Homo sapien
aaagccgatgcccaacttgatgcgc

SEQ ID NO: 3084957 - DNA, 25 bp, Homo sapien
agactgtcggcgctgaaggagctca

SEQ ID NO: 3084958 - DNA, 25 bp, Homo sapien
aatctgcaggttgttcatctcgcca

SEQ ID NO: 3084959 - DNA, 25 bp, Homo sapien
gatgcgcccgatggcaatctgcagg

SEQ ID NO: 3084960 - DNA, 25 bp, Homo sapien
agaagcatagccaggttcttcctcg

SEQ ID NO: 3084961 - DNA, 25 bp, Homo sapien
tcagccagaagcatagccaggttct

SEQ ID NO: 3084962 - DNA, 25 bp, Homo sapien
catagccaggttcttcctcggagcc

SEQ ID NO: 3084963 - DNA, 25 bp, Homo sapien
gccagaagcatagccaggttcttcc

SEQ ID NO: 3084964 - DNA, 25 bp, Homo sapien
acccgcaggaagtgaccaagtgcca

SEQ ID NO: 3084965 - DNA, 25 bp, Homo sapien
agttacccgcaggaagtgaccaagt

SEQ ID NO: 3084966 - DNA, 25 bp, Homo sapien
ttacccgcaggaagtgaccaagtgc

SEQ ID NO: 3084967 - DNA, 25 bp, Homo sapien
accaagtgccataggtgcaggggat

SEQ ID NO: 3084968 - DNA, 25 bp, Homo sapien
ctctctggcagggtgccctggtggc

SEQ ID NO: 3084969 - DNA, 25 bp, Homo sapien
tggcctctggcagacacctgcttct

SEQ ID NO: 3084970 - DNA, 25 bp, Homo sapien
tggtggcctctggcagacacctgct

SEQ ID NO: 3084971 - DNA, 25 bp, Homo sapien
tctctggcagggtgccctggtggcc

SEQ ID NO: 3084972 - DNA, 25 bp, Homo sapien
gcacacgcactccttgtagctcttg

SEQ ID NO: 3084973 - DNA, 25 bp, Homo sapien
gattgccgatgaccatgaccatgag

SEQ ID NO: 3084974 - DNA, 25 bp, Homo sapien
tgagcatgttcagcgttggccacga

SEQ ID NO: 3084975 - DNA, 25 bp, Homo sapien
cccgcacaggatgcggaagacgatg

SEQ ID NO: 3084976 - DNA, 25 bp, Homo sapien
catcccagcccctggccctggggct

SEQ ID NO: 3084977 - DNA, 25 bp, Homo sapien
agcccctggccctggggcttttgtg

SEQ ID NO: 3084978 - DNA, 25 bp, Homo sapien
acccccatcccagcccctggccctg

SEQ ID NO: 3084979 - DNA, 25 bp, Homo sapien
ccagcccctggccctggggcttttg

SEQ ID NO: 3084980 - DNA, 25 bp, Homo sapien
cggaaggagcgtagcacagacagtc

SEQ ID NO: 3084981 - DNA, 25 bp, Homo sapien
cagacggaaggagcgtagcacagac

SEQ ID NO: 3084982 - DNA, 25 bp, Homo sapien
gacggaaggagcgtagcacagacag

SEQ ID NO: 3084983 - DNA, 25 bp, Homo sapien
gaaggagcgtagcacagacagtccc

SEQ ID NO: 3084984 - DNA, 25 bp, Homo sapien
gctgtcgaagatattccaaccctgc

SEQ ID NO: 3084985 - DNA, 25 bp, Homo sapien
caaccctgctggaaatactcgtagg

SEQ ID NO: 3084986 - DNA, 25 bp, Homo sapien
cgtaggggtccatggcaatcagctt

SEQ ID NO: 3084987 - DNA, 25 bp, Homo sapien
tactcgtaggggtccatggcaatca

SEQ ID NO: 3084988 - DNA, 25 bp, Homo sapien
gggcgcagcagttccatatgagcac

SEQ ID NO: 3084989 - DNA, 25 bp, Homo sapien
tccacgaacgggtccatgacgatca

SEQ ID NO: 3084990 - DNA, 25 bp, Homo sapien
gttgcccacagtgagcacgttgtca

SEQ ID NO: 3084991 - DNA, 25 bp, Homo sapien
cacgttgtcaaagtgctccgtcatg

SEQ ID NO: 3084992 - DNA, 25 bp, Homo sapien
ggtgaggattatcccctcacgtgcc

SEQ ID NO: 3084993 - DNA, 25 bp, Homo sapien
gcaaggcctattccaagttccaccg

SEQ ID NO: 3084994 - DNA, 25 bp, Homo sapien
tccagctagagcttttgttccacct

SEQ ID NO: 3084995 - DNA, 25 bp, Homo sapien
caggtatctggtgaggattatcccc

SEQ ID NO: 3084996 - DNA, 25 bp, Homo sapien
ctatcctcctgaatccagtccagcc

SEQ ID NO: 3084997 - DNA, 25 bp, Homo sapien
atcctcctgaatccagtccagccag

SEQ ID NO: 3084998 - DNA, 25 bp, Homo sapien
tatcctcctgaatccagtccagcca

SEQ ID NO: 3084999 - DNA, 25 bp, Homo sapien
cctcctgaatccagtccagccaggc

SEQ ID NO: 3085000 - DNA, 25 bp, Homo sapien
cttccatggcgtcggagatgccgct

SEQ ID NO: 3085001 - DNA, 25 bp, Homo sapien
tcggagatgccgctgtctccgctgc

SEQ ID NO: 3085002 - DNA, 25 bp, Homo sapien
cttccagagcttgggcggccttggc

SEQ ID NO: 3085003 - DNA, 25 bp, Homo sapien
ccttctccccttgcgatgtgtccag

SEQ ID NO: 3085004 - DNA, 25 bp, Homo sapien
gatggactaattgaccctcagagct

SEQ ID NO: 3085005 - DNA, 25 bp, Homo sapien
agccagagggatggactaattgacc

SEQ ID NO: 3085006 - DNA, 25 bp, Homo sapien
gccagagggatggactaattgaccc

SEQ ID NO: 3085007 - DNA, 25 bp, Homo sapien
gagggatggactaattgaccctcag

SEQ ID NO: 3085008 - DNA, 25 bp, Homo sapien
gccccggctgagggcaggtagaacc

SEQ ID NO: 3085009 - DNA, 25 bp, Homo sapien
ccggctgagggcaggtagaaccctg

SEQ ID NO: 3085010 - DNA, 25 bp, Homo sapien
cccggctgagggcaggtagaaccct

SEQ ID NO: 3085011 - DNA, 25 bp, Homo sapien
tctgctcggcatatgccatggccac

SEQ ID NO: 3085012 - DNA, 25 bp, Homo sapien
gccaggatcagattgatgaggtaga

SEQ ID NO: 3085013 - DNA, 25 bp, Homo sapien
tcggcatatgccatggccaccacgg

SEQ ID NO: 3085014 - DNA, 25 bp, Homo sapien
caggatcagattgatgaggtagaaa

SEQ ID NO: 3085015 - DNA, 25 bp, Homo sapien
ctcccaatagtcctgtgtcatgagg

SEQ ID NO: 3085016 - DNA, 25 bp, Homo sapien
tggaagaggttctcccaatagtcct

SEQ ID NO: 3085017 - DNA, 25 bp, Homo sapien
gatgcactcataaccctcagggcag

SEQ ID NO: 3085018 - DNA, 25 bp, Homo sapien
ccggtcttgatgcactcataaccct

SEQ ID NO: 3085019 - DNA, 25 bp, Homo sapien
tgggtttagggtgggaggagcactc

SEQ ID NO: 3085020 - DNA, 25 bp, Homo sapien
gtttagggtgggaggagcactccag

SEQ ID NO: 3085021 - DNA, 25 bp, Homo sapien
ggtttagggtgggaggagcactcca

SEQ ID NO: 3085022 - DNA, 25 bp, Homo sapien
ggctgggtttagggtgggaggagca

SEQ ID NO: 3085023 - DNA, 25 bp, Homo sapien
cagggcatcgttggagccctccagg

SEQ ID NO: 3085024 - DNA, 25 bp, Homo sapien
agggcatcgttggagccctccagga

SEQ ID NO: 3085025 - DNA, 25 bp, Homo sapien
cgcaaagacgctcaggcagaagaca

SEQ ID NO: 3085026 - DNA, 25 bp, Homo sapien
tgtaggcgtcccaatcaaaggtatc

SEQ ID NO: 3085027 - DNA, 25 bp, Homo sapien
caaaggtatcgttggtggcccagct

SEQ ID NO: 3085028 - DNA, 25 bp, Homo sapien
tgtgtcattgccgtaccacgtgtca

SEQ ID NO: 3085029 - DNA, 25 bp, Homo sapien
accgtgatggttttgagggcccgca

SEQ ID NO: 3085030 - DNA, 25 bp, Homo sapien
ggatgaccgtgatggttttgagggc

SEQ ID NO: 3085031 - DNA, 25 bp, Homo sapien
atgaccgtgatggttttgagggccc

SEQ ID NO: 3085032 - DNA, 25 bp, Homo sapien
ctgggatgaccgtgatggttttgag

SEQ ID NO: 3085033 - DNA, 25 bp, Homo sapien
gtggaggggggtggggactgtcaga

SEQ ID NO: 3085034 - DNA, 25 bp, Homo sapien
tggaggggggtggggactgtcagag

SEQ ID NO: 3085035 - DNA, 25 bp, Homo sapien
ggaggggggtggggactgtcagagc

SEQ ID NO: 3085036 - DNA, 25 bp, Homo sapien
gaagcctcgggccagtatcttgatg

SEQ ID NO: 3085037 - DNA, 25 bp, Homo sapien
tgaagtcgtcgacacagaagcctcg

SEQ ID NO: 3085038 - DNA, 25 bp, Homo sapien
gaggaatgtgaagtcgtcgacacag

SEQ ID NO: 3085039 - DNA, 25 bp, Homo sapien
ccagtatcttgatgagggactcaaa

SEQ ID NO: 3085040 - DNA, 25 bp, Homo sapien
gagagggccggccgggacaggcatg

SEQ ID NO: 3085041 - DNA, 25 bp, Homo sapien
agagggccggccgggacaggcatgt

SEQ ID NO: 3085042 - DNA, 25 bp, Homo sapien
cactcatggtcatgaatacgcagtt

SEQ ID NO: 3085043 - DNA, 25 bp, Homo sapien
ggtcaagatggtgatcatgatgaac

SEQ ID NO: 3085044 - DNA, 25 bp, Homo sapien
gaggcgggtcactcatggtcatgaa

SEQ ID NO: 3085045 - DNA, 25 bp, Homo sapien
tggtcatgaatacgcagttggtcaa

SEQ ID NO: 3085046 - DNA, 25 bp, Homo sapien
gagaagcggaagatggccttgccct

SEQ ID NO: 3085047 - DNA, 25 bp, Homo sapien
cgcctgactacgctgaaggggctca

SEQ ID NO: 3085048 - DNA, 25 bp, Homo sapien
tagagagcaggtgtggcggagaagc

SEQ ID NO: 3085049 - DNA, 25 bp, Homo sapien
ccttgcccttgttgagtacgatgaa

SEQ ID NO: 3085050 - DNA, 25 bp, Homo sapien
ggtctccgtagatcatgggtaggtt

SEQ ID NO: 3085051 - DNA, 25 bp, Homo sapien
gatcatgggtaggttcttgccagcc

SEQ ID NO: 3085052 - DNA, 25 bp, Homo sapien
accgcccgctgttctatggctgcca

SEQ ID NO: 3085053 - DNA, 25 bp, Homo sapien
tcacttcgtggcttccgttcgggct

SEQ ID NO: 3085054 - DNA, 25 bp, Homo sapien
ctccctgggcgggccgtccactcct

SEQ ID NO: 3085055 - DNA, 25 bp, Homo sapien
cctgggcgggccgtccactcctcac

SEQ ID NO: 3085056 - DNA, 25 bp, Homo sapien
tcagagaccagaagggtggtgggtg

SEQ ID NO: 3085057 - DNA, 25 bp, Homo sapien
ctcagagaccagaagggtggtgggt

SEQ ID NO: 3085058 - DNA, 25 bp, Homo sapien
accaaccagattctttgtggccttg

SEQ ID NO: 3085059 - DNA, 25 bp, Homo sapien
aggaccgacggcaaaccaaccagat

SEQ ID NO: 3085060 - DNA, 25 bp, Homo sapien
caagctccgggaactgtgtggcttc

SEQ ID NO: 3085061 - DNA, 25 bp, Homo sapien
ggcgtgcagactctatcaggactgg

SEQ ID NO: 3085062 - DNA, 25 bp, Homo sapien
tgcaaaaaggttgctgtgattgatt

SEQ ID NO: 3085063 - DNA, 25 bp, Homo sapien
gggcgcaaggaggaagaccgtggtg

SEQ ID NO: 3085064 - DNA, 25 bp, Homo sapien
gaggaagaccgtggtgcctctgcct

SEQ ID NO: 3085065 - DNA, 25 bp, Homo sapien
aggctctgtgcaaaaaggttgctgt

SEQ ID NO: 3085066 - DNA, 25 bp, Homo sapien
ggttggtggctgcccgaagcatcat

SEQ ID NO: 3085067 - DNA, 25 bp, Homo sapien
tgtagcacggaagctgtttaggggc

SEQ ID NO: 3085068 - DNA, 25 bp, Homo sapien
tagcacggaagctgtttaggggctt

SEQ ID NO: 3085069 - DNA, 25 bp, Homo sapien
atgtgtagcacggaagctgtttagg

SEQ ID NO: 3085070 - DNA, 25 bp, Homo sapien
tcatgtgtagcacggaagctgttta

SEQ ID NO: 3085071 - DNA, 25 bp, Homo sapien
ccgctggcccacaatttccgtgtgt

SEQ ID NO: 3085072 - DNA, 25 bp, Homo sapien
ccatcactggcagcatgtgtggtcc

SEQ ID NO: 3085073 - DNA, 25 bp, Homo sapien
tgtgtggtccgctggcccacaattt

SEQ ID NO: 3085074 - DNA, 25 bp, Homo sapien
agcatgtgtggtccgctggcccaca

SEQ ID NO: 3085075 - DNA, 25 bp, Homo sapien
ccccagctccgaagggtgcccagaa

SEQ ID NO: 3085076 - DNA, 25 bp, Homo sapien
tatttacgtggtcccgcacaggtga

SEQ ID NO: 3085077 - DNA, 25 bp, Homo sapien
caaggcccttgggtctatttacgtg

SEQ ID NO: 3085078 - DNA, 25 bp, Homo sapien
cacaggtgatgtggctccaaatgct

SEQ ID NO: 3085079 - DNA, 25 bp, Homo sapien
gctcatctttgctcggttgccctgc

SEQ ID NO: 3085080 - DNA, 25 bp, Homo sapien
gagcagagcggttgctgacaagccc

SEQ ID NO: 3085081 - DNA, 25 bp, Homo sapien
tattggacgggagcagagcggttgc

SEQ ID NO: 3085082 - DNA, 25 bp, Homo sapien
gacgggagcagagcggttgctgaca

SEQ ID NO: 3085083 - DNA, 25 bp, Homo sapien
tggacgggagcagagcggttgctga

SEQ ID NO: 3085084 - DNA, 25 bp, Homo sapien
tctgggactgctggtcaccaccccg

SEQ ID NO: 3085085 - DNA, 25 bp, Homo sapien
ggtcaccaccccgataatcactggg

SEQ ID NO: 3085086 - DNA, 25 bp, Homo sapien
gactgctggtcaccaccccgataat

SEQ ID NO: 3085087 - DNA, 25 bp, Homo sapien
cccgataatcactgggccgctgctc

SEQ ID NO: 3085088 - DNA, 25 bp, Homo sapien
cagtcagacagtttgacccaccggg

SEQ ID NO: 3085089 - DNA, 25 bp, Homo sapien
tgatagctctccattacccacaggg

SEQ ID NO: 3085090 - DNA, 25 bp, Homo sapien
tattctattgggaggatgcatcccc

SEQ ID NO: 3085091 - DNA, 25 bp, Homo sapien
caacaatgctgggacaagtgaccat

SEQ ID NO: 3085092 - DNA, 25 bp, Homo sapien
cagtaaagtaatgcccacaagcctg

SEQ ID NO: 3085093 - DNA, 25 bp, Homo sapien
gcctggatctcagcttgttaatggc

SEQ ID NO: 3085094 - DNA, 25 bp, Homo sapien
aatggctgttgaagccataagaccc

SEQ ID NO: 3085095 - DNA, 25 bp, Homo sapien
ctgttgaagccataagacccatggg

SEQ ID NO: 3085096 - DNA, 25 bp, Homo sapien
gaaacagggcaaatagccgcaagga

SEQ ID NO: 3085097 - DNA, 25 bp, Homo sapien
gagagaggcgagaagccggccacgt

SEQ ID NO: 3085098 - DNA, 25 bp, Homo sapien
ctcttccgtgaattcgggcggtgtt

SEQ ID NO: 3085099 - DNA, 25 bp, Homo sapien
cctcttccgtgaattcgggcggtgt

SEQ ID NO: 3085100 - DNA, 25 bp, Homo sapien
gagcagcgcggcgggaggtggacat

SEQ ID NO: 3085101 - DNA, 25 bp, Homo sapien
ttcctagacctgctggaactgatga

SEQ ID NO: 3085102 - DNA, 25 bp, Homo sapien
tcctgccttagcttgggagacggca

SEQ ID NO: 3085103 - DNA, 25 bp, Homo sapien
ccccaaaccgagaggaagaggcgtg

SEQ ID NO: 3085104 - DNA, 25 bp, Homo sapien
gatgctgcagaacgcgcagatgcac

SEQ ID NO: 3085105 - DNA, 25 bp, Homo sapien
tgcggatccacctggggttcctgtt

SEQ ID NO: 3085106 - DNA, 25 bp, Homo sapien
gatgcggatccacctggggttcctg

SEQ ID NO: 3085107 - DNA, 25 bp, Homo sapien
ctgtgggtccagggatgcggatcca

SEQ ID NO: 3085108 - DNA, 25 bp, Homo sapien
tgggtccagggatgcggatccacct

SEQ ID NO: 3085109 - DNA, 25 bp, Homo sapien
gatggcacatggagaggtacaaagc

SEQ ID NO: 3085110 - DNA, 25 bp, Homo sapien
tgcatcatgagcgtctggcctggtg

SEQ ID NO: 3085111 - DNA, 25 bp, Homo sapien
gaggatcttagaaccagcccttgaa

SEQ ID NO: 3085112 - DNA, 25 bp, Homo sapien
gttagggatacaaagccaggttggc

SEQ ID NO: 3085113 - DNA, 25 bp, Homo sapien
tacaaagcctatctggaggaaataa

SEQ ID NO: 3085114 - DNA, 25 bp, Homo sapien
acctggaggttccacaggaagagcc

SEQ ID NO: 3085115 - DNA, 25 bp, Homo sapien
tggccacaagccattcttacaaagc

SEQ ID NO: 3085116 - DNA, 25 bp, Homo sapien
gggagagcctgatggtagattctca

SEQ ID NO: 3085117 - DNA, 25 bp, Homo sapien
ggtggtggccatgccactcatggtt

SEQ ID NO: 3085118 - DNA, 25 bp, Homo sapien
tgtattcgggctagaaaaggcaatg

SEQ ID NO: 3085119 - DNA, 25 bp, Homo sapien
aagtccaggtgtttgtattcgggct

SEQ ID NO: 3085120 - DNA, 25 bp, Homo sapien
gaaaaggcaatgtcccaagtctctg

SEQ ID NO: 3085121 - DNA, 25 bp, Homo sapien
gcagcctcctccaagccgctcgcac

SEQ ID NO: 3085122 - DNA, 25 bp, Homo sapien
tggggcagcctcctccaagccgctc

SEQ ID NO: 3085123 - DNA, 25 bp, Homo sapien
gggcagcctcctccaagccgctcgc

SEQ ID NO: 3085124 - DNA, 25 bp, Homo sapien
ctatggccggaaggcctggggcagc

SEQ ID NO: 3085125 - DNA, 25 bp, Homo sapien
acgaacagggacagcaacaccgaca

SEQ ID NO: 3085126 - DNA, 25 bp, Homo sapien
gcagagcaggacagatgtcacgaac

SEQ ID NO: 3085127 - DNA, 25 bp, Homo sapien
ggtgcccatccgctgctggcgcaag

SEQ ID NO: 3085128 - DNA, 25 bp, Homo sapien
ggcgcaagtgctggccgaagatgaa

SEQ ID NO: 3085129 - DNA, 25 bp, Homo sapien
tgatcccagttaccagggaccaaaa

SEQ ID NO: 3085130 - DNA, 25 bp, Homo sapien
gccgcccgctcatgcatccagcagt

SEQ ID NO: 3085131 - DNA, 25 bp, Homo sapien
ggcaagggtcttagacgtcctgtga

SEQ ID NO: 3085132 - DNA, 25 bp, Homo sapien
ggtcttagacgtcctgtgatcccag

SEQ ID NO: 3085133 - DNA, 25 bp, Homo sapien
catcttcggggctgagtgtttgtga

SEQ ID NO: 3085134 - DNA, 25 bp, Homo sapien
tctccaacatcttcggggctgagtg

SEQ ID NO: 3085135 - DNA, 25 bp, Homo sapien
tcttcggggctgagtgtttgtgaaa

SEQ ID NO: 3085136 - DNA, 25 bp, Homo sapien
catagatctccaacatcttcggggc

SEQ ID NO: 3085137 - DNA, 25 bp, Homo sapien
cactcaatggtgaaggacttgccca

SEQ ID NO: 3085138 - DNA, 25 bp, Homo sapien
ccttcccgaaggtctcatagtgcag

SEQ ID NO: 3085139 - DNA, 25 bp, Homo sapien
caccaaagtgggttgcagtgtcagg

SEQ ID NO: 3085140 - DNA, 25 bp, Homo sapien
cattgccacggaacaggaagagggt

SEQ ID NO: 3085141 - DNA, 25 bp, Homo sapien
gagggcagcagttgaggatggaggc

SEQ ID NO: 3085142 - DNA, 25 bp, Homo sapien
tttacagacatgatggtttccggtg

SEQ ID NO: 3085143 - DNA, 25 bp, Homo sapien
tccggtgaccaggtgtctacaagga

SEQ ID NO: 3085144 - DNA, 25 bp, Homo sapien
tggactgtgtggtagttttacagac

SEQ ID NO: 3085145 - DNA, 25 bp, Homo sapien
tctgcgtcttgagatgccagcgggc

SEQ ID NO: 3085146 - DNA, 25 bp, Homo sapien
gataaaaaccctgggcgacacttca

SEQ ID NO: 3085147 - DNA, 25 bp, Homo sapien
ggtgatacccttagcgccaagatgt

SEQ ID NO: 3085148 - DNA, 25 bp, Homo sapien
tgatggaatggacccaggtgatacc

SEQ ID NO: 3085149 - DNA, 25 bp, Homo sapien
cacgctgacgttggaattcattgac

SEQ ID NO: 3085150 - DNA, 25 bp, Homo sapien
tgacgttggaattcattgactcctg

SEQ ID NO: 3085151 - DNA, 25 bp, Homo sapien
cgctgacgttggaattcattgactc

SEQ ID NO: 3085152 - DNA, 25 bp, Homo sapien
ggtacacgctgacgttggaattcat

SEQ ID NO: 3085153 - DNA, 25 bp, Homo sapien
tgaagtggcattggaggaccgtgtc

SEQ ID NO: 3085154 - DNA, 25 bp, Homo sapien
ttcgtccagcagaatcttatctaga

SEQ ID NO: 3085155 - DNA, 25 bp, Homo sapien
ggaccgtgtcatgggagatgtttga

SEQ ID NO: 3085156 - DNA, 25 bp, Homo sapien
ccagcagaatcttatctagagaggt

SEQ ID NO: 3085157 - DNA, 25 bp, Homo sapien
cagttgacctcgagggaccctttgg

SEQ ID NO: 3085158 - DNA, 25 bp, Homo sapien
gtgctgcagttgacctcgagggacc

SEQ ID NO: 3085159 - DNA, 25 bp, Homo sapien
ctgcagttgacctcgagggaccctt

SEQ ID NO: 3085160 - DNA, 25 bp, Homo sapien
gacctcgagggaccctttgggctca

SEQ ID NO: 3085161 - DNA, 25 bp, Homo sapien
gtacctcgaataccttctcatccga

SEQ ID NO: 3085162 - DNA, 25 bp, Homo sapien
agcttctttggcctcacgtgtacct

SEQ ID NO: 3085163 - DNA, 25 bp, Homo sapien
tctttggcctcacgtgtacctcgaa

SEQ ID NO: 3085164 - DNA, 25 bp, Homo sapien
gcctcacgtgtacctcgaatacctt

SEQ ID NO: 3085165 - DNA, 25 bp, Homo sapien
accagaaacactgggcagtcgtgtc

SEQ ID NO: 3085166 - DNA, 25 bp, Homo sapien
aaaccagaaacactgggcagtcgtg

SEQ ID NO: 3085167 - DNA, 25 bp, Homo sapien
tggaaaaccagaaacactgggcagt

SEQ ID NO: 3085168 - DNA, 25 bp, Homo sapien
gaaaaccagaaacactgggcagtcg

SEQ ID NO: 3085169 - DNA, 25 bp, Homo sapien
gagccatgatcatgccactgtactc

SEQ ID NO: 3085170 - DNA, 25 bp, Homo sapien
cctgggtgatagaccgagaccctgt

SEQ ID NO: 3085171 - DNA, 25 bp, Homo sapien
ggatcacccgagcccagggaggtgc

SEQ ID NO: 3085172 - DNA, 25 bp, Homo sapien
tcacccgagcccagggaggtgcagt

SEQ ID NO: 3085173 - DNA, 25 bp, Homo sapien
cagatcagggtgaagagggccacag

SEQ ID NO: 3085174 - DNA, 25 bp, Homo sapien
atcagggtgaagagggccacagtca

SEQ ID NO: 3085175 - DNA, 25 bp, Homo sapien
gggtgaagagggccacagtcagggt

SEQ ID NO: 3085176 - DNA, 25 bp, Homo sapien
ggtgaagagggccacagtcagggtc

SEQ ID NO: 3085177 - DNA, 25 bp, Homo sapien
ctctggcagtctccacgggctcgca

SEQ ID NO: 3085178 - DNA, 25 bp, Homo sapien
cgggctcgcagggaccagccaaggg

SEQ ID NO: 3085179 - DNA, 25 bp, Homo sapien
tctggcagtctccacgggctcgcag

SEQ ID NO: 3085180 - DNA, 25 bp, Homo sapien
ccacgggctcgcagggaccagccaa

SEQ ID NO: 3085181 - DNA, 25 bp, Homo sapien
tctgagagatctttgggaagccacg

SEQ ID NO: 3085182 - DNA, 25 bp, Homo sapien
acgtgcaccagctcgttctaggacc

SEQ ID NO: 3085183 - DNA, 25 bp, Homo sapien
caggcctctaagaatccaggcagag

SEQ ID NO: 3085184 - DNA, 25 bp, Homo sapien
gatctttgggaagccacgtgcacca

SEQ ID NO: 3085185 - DNA, 25 bp, Homo sapien
ggagcctgaggtgtttcactttatt

SEQ ID NO: 3085186 - DNA, 25 bp, Homo sapien
gagcctgaggtgtttcactttattc

SEQ ID NO: 3085187 - DNA, 25 bp, Homo sapien
ccaaaatacctaaatgagcatttac

SEQ ID NO: 3085188 - DNA, 25 bp, Homo sapien
gaacggactaaaactcagacctcga

SEQ ID NO: 3085189 - DNA, 25 bp, Homo sapien
gggaaagtgagaagctcaaccttac

SEQ ID NO: 3085190 - DNA, 25 bp, Homo sapien
catgctgccacgcttcattggaggg

SEQ ID NO: 3085191 - DNA, 25 bp, Homo sapien
agacctcgacactgccaaaatcctt

SEQ ID NO: 3085192 - DNA, 25 bp, Homo sapien
tgtgggctccaagaagggtagctct

SEQ ID NO: 3085193 - DNA, 25 bp, Homo sapien
acaaggtgacaaggtgcgcgtgtca

SEQ ID NO: 3085194 - DNA, 25 bp, Homo sapien
gacaaggtgcgcgtgtcacagctgc

SEQ ID NO: 3085195 - DNA, 25 bp, Homo sapien
tcccgggcaggaaattggtgacaag

SEQ ID NO: 3085196 - DNA, 25 bp, Homo sapien
tttggaatctccttgtcatactgct

SEQ ID NO: 3085197 - DNA, 25 bp, Homo sapien
catactgctggcaaaacagagccaa

SEQ ID NO: 3085198 - DNA, 25 bp, Homo sapien
gacagtcaaggccacacattgctct

SEQ ID NO: 3085199 - DNA, 25 bp, Homo sapien
tctggcgcaatttctcttggtgctt

SEQ ID NO: 3085200 - DNA, 25 bp, Homo sapien
caacatacatccctccaacccctga

SEQ ID NO: 3085201 - DNA, 25 bp, Homo sapien
ctgaccctgtcaccgtcttctcccc

SEQ ID NO: 3085202 - DNA, 25 bp, Homo sapien
ctccaacccctgaccctgtcaccgt

SEQ ID NO: 3085203 - DNA, 25 bp, Homo sapien
ttttcttccatcaacatacatccct

SEQ ID NO: 3085204 - DNA, 25 bp, Homo sapien
atgttttcaatagcgaaggaaacac

SEQ ID NO: 3085205 - DNA, 25 bp, Homo sapien
taaatgttttcaatagcgaaggaaa

SEQ ID NO: 3085206 - DNA, 25 bp, Homo sapien
ttaaatgttttcaatagcgaaggaa

SEQ ID NO: 3085207 - DNA, 25 bp, Homo sapien
aatgttttcaatagcgaaggaaaca

SEQ ID NO: 3085208 - DNA, 25 bp, Homo sapien
tgtgttgggaggattgcaaagtcca

SEQ ID NO: 3085209 - DNA, 25 bp, Homo sapien
gatttctccatagagagggtgcagg

SEQ ID NO: 3085210 - DNA, 25 bp, Homo sapien
caaagtccaagcagacgtcagctga

SEQ ID NO: 3085211 - DNA, 25 bp, Homo sapien
ctgatttctccatagagagggtgca

SEQ ID NO: 3085212 - DNA, 25 bp, Homo sapien
ccaaagtgttggttaaggctgctcc

SEQ ID NO: 3085213 - DNA, 25 bp, Homo sapien
gaaatgccagtgttccccaggtgaa

SEQ ID NO: 3085214 - DNA, 25 bp, Homo sapien
tcaaaaactgagattaggccgggtg

SEQ ID NO: 3085215 - DNA, 25 bp, Homo sapien
taagcgccggtacaaaaaatcagaa

SEQ ID NO: 3085216 - DNA, 25 bp, Homo sapien
gcacagtgggaaaccagaattctcg

SEQ ID NO: 3085217 - DNA, 25 bp, Homo sapien
gctaagccgcaacacgatatgtgat

SEQ ID NO: 3085218 - DNA, 25 bp, Homo sapien
tgacaagtacccacacgagatctct

SEQ ID NO: 3085219 - DNA, 25 bp, Homo sapien
ggcacacgtgcccaagagaggttta

SEQ ID NO: 3085220 - DNA, 25 bp, Homo sapien
gccaaagcccacaggtaaagcacct

SEQ ID NO: 3085221 - DNA, 25 bp, Homo sapien
gtaaagcaccttgcagccgtatggg

SEQ ID NO: 3085222 - DNA, 25 bp, Homo sapien
tgatcctctcttgggttactgccaa

SEQ ID NO: 3085223 - DNA, 25 bp, Homo sapien
caccttctgatcctctcttgggtta

SEQ ID NO: 3085224 - DNA, 25 bp, Homo sapien
gcaggaaatgcggtctggccacgtt

SEQ ID NO: 3085225 - DNA, 25 bp, Homo sapien
gtttctgaacaacgcacagccttgc

SEQ ID NO: 3085226 - DNA, 25 bp, Homo sapien
ccaaggcctaagtgaggtaatcgat

SEQ ID NO: 3085227 - DNA, 25 bp, Homo sapien
ttgcttagaagacgccaaggacacc

SEQ ID NO: 3085228 - DNA, 25 bp, Homo sapien
ttcctgaaaggcctgtagactgaca

SEQ ID NO: 3085229 - DNA, 25 bp, Homo sapien
tgtcccagcacgcaagcaaaatgta

SEQ ID NO: 3085230 - DNA, 25 bp, Homo sapien
caagctctaattgtggtgaccaggc

SEQ ID NO: 3085231 - DNA, 25 bp, Homo sapien
gcaaagccgggaggcatcaagctct

SEQ ID NO: 3085232 - DNA, 25 bp, Homo sapien
gaagcgagatgtgaagtagcacacg

SEQ ID NO: 3085233 - DNA, 25 bp, Homo sapien
tcagagggcgtctggagtcactggg

SEQ ID NO: 3085234 - DNA, 25 bp, Homo sapien
caggcagctcccggtagtggtgctt

SEQ ID NO: 3085235 - DNA, 25 bp, Homo sapien
aagagtctctcgtggctgcacagct

SEQ ID NO: 3085236 - DNA, 25 bp, Homo sapien
tttataggtcctgaatttacgcagg

SEQ ID NO: 3085237 - DNA, 25 bp, Homo sapien
tcggaggagatctctgacagaacca

SEQ ID NO: 3085238 - DNA, 25 bp, Homo sapien
tctctgacagaaccacctttatagg

SEQ ID NO: 3085239 - DNA, 25 bp, Homo sapien
tttctcatggctcggaggagatctc

SEQ ID NO: 3085240 - DNA, 25 bp, Homo sapien
tctctctaactgcttcacgatcggg

SEQ ID NO: 3085241 - DNA, 25 bp, Homo sapien
tcacgatcgggccatccagggattc

SEQ ID NO: 3085242 - DNA, 25 bp, Homo sapien
ggacagtgatgttctcccgccagtc

SEQ ID NO: 3085243 - DNA, 25 bp, Homo sapien
gccagtccatcttcaccacggctct

SEQ ID NO: 3085244 - DNA, 25 bp, Homo sapien
catcttctctatcaattcacgtgca

SEQ ID NO: 3085245 - DNA, 25 bp, Homo sapien
taggctccagaagaacgggtgtttg

SEQ ID NO: 3085246 - DNA, 25 bp, Homo sapien
ttgagcacatgcttcgctgaggggc

SEQ ID NO: 3085247 - DNA, 25 bp, Homo sapien
tctgaggatccatcgcaatcatctt

SEQ ID NO: 3085248 - DNA, 25 bp, Homo sapien
tgcagaaaagatgtccaccgtgtag

SEQ ID NO: 3085249 - DNA, 25 bp, Homo sapien
ctgccctcagagattacgtagtaaa

SEQ ID NO: 3085250 - DNA, 25 bp, Homo sapien
tagtaaaagacgcagcctgcagaaa

SEQ ID NO: 3085251 - DNA, 25 bp, Homo sapien
gacttgccaaaagggtggctgccct

SEQ ID NO: 3085252 - DNA, 25 bp, Homo sapien
tcctgggagaatcagctgacatatg

SEQ ID NO: 3085253 - DNA, 25 bp, Homo sapien
caaaaatggttgcttacgacagtgc

SEQ ID NO: 3085254 - DNA, 25 bp, Homo sapien
cctgcagcactgcatgggtgtcaga

SEQ ID NO: 3085255 - DNA, 25 bp, Homo sapien
ccaacacgaaagtgctcacagacag

SEQ ID NO: 3085256 - DNA, 25 bp, Homo sapien
tctggagcgatccagccttctgtgc

SEQ ID NO: 3085257 - DNA, 25 bp, Homo sapien
aagtcggagatcatggccttgatct

SEQ ID NO: 3085258 - DNA, 25 bp, Homo sapien
aggcaccccagatcggcggctgaaa

SEQ ID NO: 3085259 - DNA, 25 bp, Homo sapien
ctgaaactgtgtctgcccactgcca

SEQ ID NO: 3085260 - DNA, 25 bp, Homo sapien
ggctccaggccgagatgcgcaaagt

SEQ ID NO: 3085261 - DNA, 25 bp, Homo sapien
gcccgaggtggtctgctgcagcaag

SEQ ID NO: 3085262 - DNA, 25 bp, Homo sapien
ggccgagatgcgcaaagtccttctg

SEQ ID NO: 3085263 - DNA, 25 bp, Homo sapien
ggccaggcccgaggtggtctgctgc

SEQ ID NO: 3085264 - DNA, 25 bp, Homo sapien
ggaattgccggtccttctccgtgca

SEQ ID NO: 3085265 - DNA, 25 bp, Homo sapien
tagcggatcacgttcgggtgctcat

SEQ ID NO: 3085266 - DNA, 25 bp, Homo sapien
gacctcacggtctgcgaagctaaaa

SEQ ID NO: 3085267 - DNA, 25 bp, Homo sapien
tgcacacagctcgatggcaatgtac

SEQ ID NO: 3085268 - DNA, 25 bp, Homo sapien
caggacatccttgggacagaaggaa

SEQ ID NO: 3085269 - DNA, 25 bp, Homo sapien
actatcaccacgctggtttcctcat

SEQ ID NO: 3085270 - DNA, 25 bp, Homo sapien
ggtacacaattgtgccctcagctcc

SEQ ID NO: 3085271 - DNA, 25 bp, Homo sapien
cagaaggaaattttcccaactatca

SEQ ID NO: 3085272 - DNA, 25 bp, Homo sapien
ctctggtcagccgcgacgcccagcc

SEQ ID NO: 3085273 - DNA, 25 bp, Homo sapien
cagagcgagtggttggaggccctgg

SEQ ID NO: 3085274 - DNA, 25 bp, Homo sapien
cggagcagagcgagtggttggaggc

SEQ ID NO: 3085275 - DNA, 25 bp, Homo sapien
ctgccggagcagagcgagtggttgg

SEQ ID NO: 3085276 - DNA, 25 bp, Homo sapien
ctccatcgtcttgttccagggaggg

SEQ ID NO: 3085277 - DNA, 25 bp, Homo sapien
tgagtacgggccagacgtgtccagg

SEQ ID NO: 3085278 - DNA, 25 bp, Homo sapien
gagtacgggccagacgtgtccagga

SEQ ID NO: 3085279 - DNA, 25 bp, Homo sapien
ctgagtacgggccagacgtgtccag

SEQ ID NO: 3085280 - DNA, 25 bp, Homo sapien
caggagctggatcttctccagttcc

SEQ ID NO: 3085281 - DNA, 25 bp, Homo sapien
ctgcaggagctggatcttctccagt

SEQ ID NO: 3085282 - DNA, 25 bp, Homo sapien
ccttctggaactgctggtgctggag

SEQ ID NO: 3085283 - DNA, 25 bp, Homo sapien
tccaggtgggtggaagggcagctgc

SEQ ID NO: 3085284 - DNA, 25 bp, Homo sapien
atccagacaagggcagctgttccca

SEQ ID NO: 3085285 - DNA, 25 bp, Homo sapien
ggcagctgttcccacagggaaacaa

SEQ ID NO: 3085286 - DNA, 25 bp, Homo sapien
aagggcagctgttcccacagggaaa

SEQ ID NO: 3085287 - DNA, 25 bp, Homo sapien
gctgttcccacagggaaacaagcag

SEQ ID NO: 3085288 - DNA, 25 bp, Homo sapien
tagatccttgctcatacagcccact

SEQ ID NO: 3085289 - DNA, 25 bp, Homo sapien
tggaagcagaattgcttcgatgact

SEQ ID NO: 3085290 - DNA, 25 bp, Homo sapien
ttccaccgactagttagatccttgc

SEQ ID NO: 3085291 - DNA, 25 bp, Homo sapien
gatgactggacgtctttccaccgac

SEQ ID NO: 3085292 - DNA, 25 bp, Homo sapien
tccacatcccgagacacggtggtag

SEQ ID NO: 3085293 - DNA, 25 bp, Homo sapien
tggtaggtgcgttttctgaagtctg

SEQ ID NO: 3085294 - DNA, 25 bp, Homo sapien
atgatgaaggccacccagccaatca

SEQ ID NO: 3085295 - DNA, 25 bp, Homo sapien
gatgatggtagccatgtccttaagc

SEQ ID NO: 3085296 - DNA, 25 bp, Homo sapien
taagctcaccaaagatcatgtagcc

SEQ ID NO: 3085297 - DNA, 25 bp, Homo sapien
gctttgagaggccatgcatctttgc

SEQ ID NO: 3085298 - DNA, 25 bp, Homo sapien
ggagcaatacttttggcaggtgtct

SEQ ID NO: 3085299 - DNA, 25 bp, Homo sapien
tgatggtaggttcagtatccaggaa

SEQ ID NO: 3085300 - DNA, 25 bp, Homo sapien
tgaatcggtcactaagcctcagacg

SEQ ID NO: 3085301 - DNA, 25 bp, Homo sapien
tacttccgtagatgatggtaaacag

SEQ ID NO: 3085302 - DNA, 25 bp, Homo sapien
gccctggaatcttgaaagtctacaa

SEQ ID NO: 3085303 - DNA, 25 bp, Homo sapien
ggtctcggcatcagtcagccattct

SEQ ID NO: 3085304 - DNA, 25 bp, Homo sapien
gtttcaggccctgtaacatggttcc

SEQ ID NO: 3085305 - DNA, 25 bp, Homo sapien
gactaggctgcaagctcagaaggca

SEQ ID NO: 3085306 - DNA, 25 bp, Homo sapien
gagtcaaagtctaatgcctcaccct

SEQ ID NO: 3085307 - DNA, 25 bp, Homo sapien
tacttagtagcctcgggtctggcca

SEQ ID NO: 3085308 - DNA, 25 bp, Homo sapien
agcatcttggtagacgcagacagtg

SEQ ID NO: 3085309 - DNA, 25 bp, Homo sapien
catcttggtagacgcagacagtggg

SEQ ID NO: 3085310 - DNA, 25 bp, Homo sapien
ttcccgatgtttgggtagattgttg

SEQ ID NO: 3085311 - DNA, 25 bp, Homo sapien
agcaggaatcacattttcccgatgt

SEQ ID NO: 3085312 - DNA, 25 bp, Homo sapien
ggatcaaacttgacgtccgtgctgg

SEQ ID NO: 3085313 - DNA, 25 bp, Homo sapien
tccgtgctgggcgtgatcacacact

SEQ ID NO: 3085314 - DNA, 25 bp, Homo sapien
tccagcaaaggaagtgtgctgccgc

SEQ ID NO: 3085315 - DNA, 25 bp, Homo sapien
tgtccccaatggtgacgccatcagt

SEQ ID NO: 3085316 - DNA, 25 bp, Homo sapien
cgtgtaccattgagggagaggcata

SEQ ID NO: 3085317 - DNA, 25 bp, Homo sapien
agcaaccccctcgtgtaccattgag

SEQ ID NO: 3085318 - DNA, 25 bp, Homo sapien
cccctcgtgtaccattgagggagag

SEQ ID NO: 3085319 - DNA, 25 bp, Homo sapien
cctcgtgtaccattgagggagaggc

SEQ ID NO: 3085320 - DNA, 25 bp, Homo sapien
ccatcaccattggacacaaagtggg

SEQ ID NO: 3085321 - DNA, 25 bp, Homo sapien
cagggtctccacagcgacattgatg

SEQ ID NO: 3085322 - DNA, 25 bp, Homo sapien
tcccgctgccagacataaaaggcca

SEQ ID NO: 3085323 - DNA, 25 bp, Homo sapien
gaaggtcagatagcgcagggtctcc

SEQ ID NO: 3085324 - DNA, 25 bp, Homo sapien
ccaaggcccctgcacattgactgtg

SEQ ID NO: 3085325 - DNA, 25 bp, Homo sapien
taggtcaaaagtactggcccaagct

SEQ ID NO: 3085326 - DNA, 25 bp, Homo sapien
ccatgggcttgcagtaaattccttc

SEQ ID NO: 3085327 - DNA, 25 bp, Homo sapien
tagaaagactcaacgagggatgtcc

SEQ ID NO: 3085328 - DNA, 25 bp, Homo sapien
ctcaggcagtgaggccgcatagtca

SEQ ID NO: 3085329 - DNA, 25 bp, Homo sapien
gcattccaccggagctctcgggttt

SEQ ID NO: 3085330 - DNA, 25 bp, Homo sapien
agtgaggccgcatagtcaaagtagg

SEQ ID NO: 3085331 - DNA, 25 bp, Homo sapien
ttttggtgtcgtacatggtgatggt

SEQ ID NO: 3085332 - DNA, 25 bp, Homo sapien
tgcttctctccggtcaggaggtcaa

SEQ ID NO: 3085333 - DNA, 25 bp, Homo sapien
gccgatgacaaagtctgctgcttct

SEQ ID NO: 3085334 - DNA, 25 bp, Homo sapien
ggtcaataacataccagatgtcctg

SEQ ID NO: 3085335 - DNA, 25 bp, Homo sapien
gactatctgcaaaggccgatgacaa

SEQ ID NO: 3085336 - DNA, 25 bp, Homo sapien
acagatgttgcatacatgcctgctc

SEQ ID NO: 3085337 - DNA, 25 bp, Homo sapien
ctctaaagttctaacagatgttgca

SEQ ID NO: 3085338 - DNA, 25 bp, Homo sapien
tacctctaaagttctaacagatgtt

SEQ ID NO: 3085339 - DNA, 25 bp, Homo sapien
gatgttgcatacatgcctgctccac

SEQ ID NO: 3085340 - DNA, 25 bp, Homo sapien
taaagctcctcgaggcatgaatagg

SEQ ID NO: 3085341 - DNA, 25 bp, Homo sapien
gtttaatgaactcgcctaagaggcc

SEQ ID NO: 3085342 - DNA, 25 bp, Homo sapien
tactttaatgggtagattgggcaac

SEQ ID NO: 3085343 - DNA, 25 bp, Homo sapien
ggcctgcacttgagacccagaaata

SEQ ID NO: 3085344 - DNA, 25 bp, Homo sapien
gaacttcggcatggggatgcctgca

SEQ ID NO: 3085345 - DNA, 25 bp, Homo sapien
cggcatggggatgcctgcaccaatt

SEQ ID NO: 3085346 - DNA, 25 bp, Homo sapien
gaggattccatctgaacttcggcat

SEQ ID NO: 3085347 - DNA, 25 bp, Homo sapien
gtagaggattccatctgaacttcgg

SEQ ID NO: 3085348 - DNA, 25 bp, Homo sapien
ggtctgtaacctaggagggcattac

SEQ ID NO: 3085349 - DNA, 25 bp, Homo sapien
ttgggtctgtaacctaggagggcat

SEQ ID NO: 3085350 - DNA, 25 bp, Homo sapien
tgttgggtctgtaacctaggagggc

SEQ ID NO: 3085351 - DNA, 25 bp, Homo sapien
tgtaacctaggagggcattactggg

SEQ ID NO: 3085352 - DNA, 25 bp, Homo sapien
caggccttcattattcttgcttcca

SEQ ID NO: 3085353 - DNA, 25 bp, Homo sapien
tcattaggatctgggagaaaggcag

SEQ ID NO: 3085354 - DNA, 25 bp, Homo sapien
gcgtatacaggctgccatcattagg

SEQ ID NO: 3085355 - DNA, 25 bp, Homo sapien
ttcttgcttccaagcgtatacaggc

SEQ ID NO: 3085356 - DNA, 25 bp, Homo sapien
cttccacatgtgttgggacctgcag

SEQ ID NO: 3085357 - DNA, 25 bp, Homo sapien
tcttccacatgtgttgggacctgca

SEQ ID NO: 3085358 - DNA, 25 bp, Homo sapien
ctgtgcaaaagaacaacaaagccat

SEQ ID NO: 3085359 - DNA, 25 bp, Homo sapien
agcctcttcaaagctgcagcccagg

SEQ ID NO: 3085360 - DNA, 25 bp, Homo sapien
taagcacctggaataagcctcttca

SEQ ID NO: 3085361 - DNA, 25 bp, Homo sapien
gcagcccaggtaaagacacaattat

SEQ ID NO: 3085362 - DNA, 25 bp, Homo sapien
cagataaaacaagaagtggcaggct

SEQ ID NO: 3085363 - DNA, 25 bp, Homo sapien
tgctcttccagttgcacagggcaca

SEQ ID NO: 3085364 - DNA, 25 bp, Homo sapien
gctcttccagttgcacagggcacag

SEQ ID NO: 3085365 - DNA, 25 bp, Homo sapien
tagtgcagcatgtcttcataaagac

SEQ ID NO: 3085366 - DNA, 25 bp, Homo sapien
taaacgtcctttgagcagaatgcct

SEQ ID NO: 3085367 - DNA, 25 bp, Homo sapien
gatgaatgtcaaatcttacagccct

SEQ ID NO: 3085368 - DNA, 25 bp, Homo sapien
tcataaagaccaactagctagagct

SEQ ID NO: 3085369 - DNA, 25 bp, Homo sapien
catccagcgttgacacaaacaacaa

SEQ ID NO: 3085370 - DNA, 25 bp, Homo sapien
caaggtttcaggaagcgtcactgtg

SEQ ID NO: 3085371 - DNA, 25 bp, Homo sapien
acagcatgcaaacttccatccagcg

SEQ ID NO: 3085372 - DNA, 25 bp, Homo sapien
aaagtccatttgattgagcctgtcc

SEQ ID NO: 3085373 - DNA, 25 bp, Homo sapien
caacgagatgtagaagactcttaat

SEQ ID NO: 3085374 - DNA, 25 bp, Homo sapien
aagactcttaatgttgatatgattc

SEQ ID NO: 3085375 - DNA, 25 bp, Homo sapien
gaagactcttaatgttgatatgatt

SEQ ID NO: 3085376 - DNA, 25 bp, Homo sapien
ctgcaacgagatgtagaagactctt

SEQ ID NO: 3085377 - DNA, 25 bp, Homo sapien
catttcaatttatcgggagatgtta

SEQ ID NO: 3085378 - DNA, 25 bp, Homo sapien
cgcatttcaatttatcgggagatgt

SEQ ID NO: 3085379 - DNA, 25 bp, Homo sapien
ttatcgggagatgttacaaatactc

SEQ ID NO: 3085380 - DNA, 25 bp, Homo sapien
tcaatttatcgggagatgttacaaa

SEQ ID NO: 3085381 - DNA, 25 bp, Homo sapien
tcattcacataggatggggccccag

SEQ ID NO: 3085382 - DNA, 25 bp, Homo sapien
cccagcacagcgtttttaaaaagct

SEQ ID NO: 3085383 - DNA, 25 bp, Homo sapien
gggaagcaccgcctcaagtaacaca

SEQ ID NO: 3085384 - DNA, 25 bp, Homo sapien
tccccaggtgactgagtcatggctg

SEQ ID NO: 3085385 - DNA, 25 bp, Homo sapien
tctgactcaactggagatcaatgac

SEQ ID NO: 3085386 - DNA, 25 bp, Homo sapien
tcaactggagatcaatgacaatgtc

SEQ ID NO: 3085387 - DNA, 25 bp, Homo sapien
caaacttctctgactcaactggaga

SEQ ID NO: 3085388 - DNA, 25 bp, Homo sapien
cttggtcaacaaacttctctgactc

SEQ ID NO: 3085389 - DNA, 25 bp, Homo sapien
ctagggatgtgacagcactgtttgt

SEQ ID NO: 3085390 - DNA, 25 bp, Homo sapien
tgcagcccagacaaacaattattcc

SEQ ID NO: 3085391 - DNA, 25 bp, Homo sapien
caaacaattattccttcatctgaca

SEQ ID NO: 3085392 - DNA, 25 bp, Homo sapien
actaacaaaggaagtcatgtttaat

SEQ ID NO: 3085393 - DNA, 25 bp, Homo sapien
ataatcccagcaaaaggtagtactt

SEQ ID NO: 3085394 - DNA, 25 bp, Homo sapien
cctccaaaagggacaatcaatgtat

SEQ ID NO: 3085395 - DNA, 25 bp, Homo sapien
caagtggtacttaaatattcctagg

SEQ ID NO: 3085396 - DNA, 25 bp, Homo sapien
ggcctcacaaccgaccatacaaaga

SEQ ID NO: 3085397 - DNA, 25 bp, Homo sapien
tacgctcctaaaagaaagtggccac

SEQ ID NO: 3085398 - DNA, 25 bp, Homo sapien
acactcaacattgcttagggctggg

SEQ ID NO: 3085399 - DNA, 25 bp, Homo sapien
caaagggtatcatccagagactgcc

SEQ ID NO: 3085400 - DNA, 25 bp, Homo sapien
tcagagaaatactacgcagccaatt

SEQ ID NO: 3085401 - DNA, 25 bp, Homo sapien
tctttatgatccctatggccacagc

SEQ ID NO: 3085402 - DNA, 25 bp, Homo sapien
caagatgactggcaggcaaagctcg

SEQ ID NO: 3085403 - DNA, 25 bp, Homo sapien
tattaccacatcaaccctgatcagt

SEQ ID NO: 3085404 - DNA, 25 bp, Homo sapien
cctgttatcatacagaaagcaccaa

SEQ ID NO: 3085405 - DNA, 25 bp, Homo sapien
tgctgtatgtttgtacatgagcaaa

SEQ ID NO: 3085406 - DNA, 25 bp, Homo sapien
gatagaaagactgtctaaaaccagc

SEQ ID NO: 3085407 - DNA, 25 bp, Homo sapien
aaaccagctgtgttgctctaaggca

SEQ ID NO: 3085408 - DNA, 25 bp, Homo sapien
tttgaaaccaaacatgggatatagg

SEQ ID NO: 3085409 - DNA, 25 bp, Homo sapien
tcatattcctaggttacaagcccag

SEQ ID NO: 3085410 - DNA, 25 bp, Homo sapien
tgaaaccctcagacctatgcaagtg

SEQ ID NO: 3085411 - DNA, 25 bp, Homo sapien
gagaagctacattactgcagaaggc

SEQ ID NO: 3085412 - DNA, 25 bp, Homo sapien
gaagaaactttaatgcggctcacta

SEQ ID NO: 3085413 - DNA, 25 bp, Homo sapien
ggagaaaattctaggagtgaaattc

SEQ ID NO: 3085414 - DNA, 25 bp, Homo sapien
tgtctgattttatacccactgcgtt

SEQ ID NO: 3085415 - DNA, 25 bp, Homo sapien
agaatatgcctagggcacagctagc

SEQ ID NO: 3085416 - DNA, 25 bp, Homo sapien
tgaccagttagaactcaggtttgtc

SEQ ID NO: 3085417 - DNA, 25 bp, Homo sapien
taccaatccaaggtgaggtgctcaa

SEQ ID NO: 3085418 - DNA, 25 bp, Homo sapien
cccttgacgttatgaaatgatcgaa

SEQ ID NO: 3085419 - DNA, 25 bp, Homo sapien
gatgccaggcagtagttaccaatcc

SEQ ID NO: 3085420 - DNA, 25 bp, Homo sapien
gcttataccttcgtttgtgaacaga

SEQ ID NO: 3085421 - DNA, 25 bp, Homo sapien
tcatttgaggttctgaagcggcctc

SEQ ID NO: 3085422 - DNA, 25 bp, Homo sapien
gaacccatgcgggatcttccaagag

SEQ ID NO: 3085423 - DNA, 25 bp, Homo sapien
aaagagttcacacggtggctggcac

SEQ ID NO: 3085424 - DNA, 25 bp, Homo sapien
caaacaaggattcgaagcgcaggac

SEQ ID NO: 3085425 - DNA, 25 bp, Homo sapien
cggccgtcgcgagctgtcctccacc

SEQ ID NO: 3085426 - DNA, 25 bp, Homo sapien
cgtcgcgctcccagctcggactcca

SEQ ID NO: 3085427 - DNA, 25 bp, Homo sapien
cgacccggccgtcgcgagctgtcct

SEQ ID NO: 3085428 - DNA, 25 bp, Homo sapien
cccgacccggccgtcgcgagctgtc

SEQ ID NO: 3085429 - DNA, 25 bp, Homo sapien
cccgaggccgggcagcagcagcgtc

SEQ ID NO: 3085430 - DNA, 25 bp, Homo sapien
gcagcagcagccgccgggccggcat

SEQ ID NO: 3085431 - DNA, 25 bp, Homo sapien
agcagcagcagcagccgccgggccg

SEQ ID NO: 3085432 - DNA, 25 bp, Homo sapien
gcagcagcagcagccgccgggccgg

SEQ ID NO: 3085433 - DNA, 25 bp, Homo sapien
cgggggcgccgcgacgacagcgagg

SEQ ID NO: 3085434 - DNA, 25 bp, Homo sapien
cgacgacagcgaggcggtgaccgag

SEQ ID NO: 3085435 - DNA, 25 bp, Homo sapien
gggcgccgcgacgacagcgaggcgg

SEQ ID NO: 3085436 - DNA, 25 bp, Homo sapien
gccgcgacgacagcgaggcggtgac

SEQ ID NO: 3085437 - DNA, 25 bp, Homo sapien
tggctggcttcgctcatgaggcgtc

SEQ ID NO: 3085438 - DNA, 25 bp, Homo sapien
tcagcggacgcagaactgactaggc

SEQ ID NO: 3085439 - DNA, 25 bp, Homo sapien
ttcccggccctataagcgctgggtg

SEQ ID NO: 3085440 - DNA, 25 bp, Homo sapien
gggaaagaccggcaatgccccacca

SEQ ID NO: 3085441 - DNA, 25 bp, Homo sapien
gcgcggcagtcgcagtgttcacagc

SEQ ID NO: 3085442 - DNA, 25 bp, Homo sapien
gaatcatccgcaaggtttaccgagg

SEQ ID NO: 3085443 - DNA, 25 bp, Homo sapien
tttcagcagctaccggaggcttcca

SEQ ID NO: 3085444 - DNA, 25 bp, Homo sapien
gacctccggagcgaaggtttcagca

SEQ ID NO: 3085445 - DNA, 25 bp, Homo sapien
tattcctggcgggtcgtctggctgg

SEQ ID NO: 3085446 - DNA, 25 bp, Homo sapien
tccgggaggtcaggttgtattcctg

SEQ ID NO: 3085447 - DNA, 25 bp, Homo sapien
cacgtgttagactgctgacgcgggt

SEQ ID NO: 3085448 - DNA, 25 bp, Homo sapien
ttaaaagaacgccatcgacgctccc

SEQ ID NO: 3085449 - DNA, 25 bp, Homo sapien
taacctgactgtccggctgctaggc

SEQ ID NO: 3085450 - DNA, 25 bp, Homo sapien
tagagcatgtgcttgcgcataactg

SEQ ID NO: 3085451 - DNA, 25 bp, Homo sapien
ccgcgagcgacaagaagtaacctga

SEQ ID NO: 3085452 - DNA, 25 bp, Homo sapien
gggtcaatctgcagcgctagagcat

SEQ ID NO: 3085453 - DNA, 25 bp, Homo sapien
atttattttgtgaaacaatgcaagc

SEQ ID NO: 3085454 - DNA, 25 bp, Homo sapien
tttattttgtgaaacaatgcaagcg

SEQ ID NO: 3085455 - DNA, 25 bp, Homo sapien
gacattgagatatttattttgtgaa

SEQ ID NO: 3085456 - DNA, 25 bp, Homo sapien
tttgacattgagatatttattttgt

SEQ ID NO: 3085457 - DNA, 25 bp, Homo sapien
acaattataaagaccagtgaccagg

SEQ ID NO: 3085458 - DNA, 25 bp, Homo sapien
cacgatagtgcatctagtccttagc

SEQ ID NO: 3085459 - DNA, 25 bp, Homo sapien
gactctgacaggcagatcggcctac

SEQ ID NO: 3085460 - DNA, 25 bp, Homo sapien
gattaagtgcaacatggtacagtca

SEQ ID NO: 3085461 - DNA, 25 bp, Homo sapien
tacttctcgaagcaaagagagcccc

SEQ ID NO: 3085462 - DNA, 25 bp, Homo sapien
tgtccttacccaagctgatagcgtg

SEQ ID NO: 3085463 - DNA, 25 bp, Homo sapien
taaagtcatgttcaggcaaggtgct

SEQ ID NO: 3085464 - DNA, 25 bp, Homo sapien
tctgtcaccgaaatgaaaaggctca

SEQ ID NO: 3085465 - DNA, 25 bp, Homo sapien
gaaaaagtccactgtgcaccggctg

SEQ ID NO: 3085466 - DNA, 25 bp, Homo sapien
gtagaggaggcaagttgttcagctt

SEQ ID NO: 3085467 - DNA, 25 bp, Homo sapien
cattgcacactgacattctctggaa

SEQ ID NO: 3085468 - DNA, 25 bp, Homo sapien
tggaagtgtggaaggccgcatacaa

SEQ ID NO: 3085469 - DNA, 25 bp, Homo sapien
ttgctgccacaaacatgggtagact

SEQ ID NO: 3085470 - DNA, 25 bp, Homo sapien
cagcaggcaatccagacagttgtca

SEQ ID NO: 3085471 - DNA, 25 bp, Homo sapien
cagggaatgacacctcacagtggaa

SEQ ID NO: 3085472 - DNA, 25 bp, Homo sapien
gccatggtgtgggtcacgtataact

SEQ ID NO: 3085473 - DNA, 25 bp, Homo sapien
gaagcagtcctttaagaaacagtag

SEQ ID NO: 3085474 - DNA, 25 bp, Homo sapien
agggcagaagcagtcctttaagaaa

SEQ ID NO: 3085475 - DNA, 25 bp, Homo sapien
agaagcagtcctttaagaaacagta

SEQ ID NO: 3085476 - DNA, 25 bp, Homo sapien
ggcagagggcagaagcagtccttta

SEQ ID NO: 3085477 - DNA, 25 bp, Homo sapien
cagaggccagtgctacagtacagat

SEQ ID NO: 3085478 - DNA, 25 bp, Homo sapien
atatggggaacatctgacatcaccc

SEQ ID NO: 3085479 - DNA, 25 bp, Homo sapien
ggcggccaagaaccccacacatcca

SEQ ID NO: 3085480 - DNA, 25 bp, Homo sapien
gatggcggccaagaaccccacacat

SEQ ID NO: 3085481 - DNA, 25 bp, Homo sapien
aggtgggtctttcaggaggcaggaa

SEQ ID NO: 3085482 - DNA, 25 bp, Homo sapien
gggtccatggctgagtgcattatag

SEQ ID NO: 3085483 - DNA, 25 bp, Homo sapien
ggcaggaagtagagcgagggtccat

SEQ ID NO: 3085484 - DNA, 25 bp, Homo sapien
catcatccatgtttggcatgacaaa

SEQ ID NO: 3085485 - DNA, 25 bp, Homo sapien
tactcttccgggatgaaggtcacca

SEQ ID NO: 3085486 - DNA, 25 bp, Homo sapien
tcaaaagaggatcctgacccagctg

SEQ ID NO: 3085487 - DNA, 25 bp, Homo sapien
gaaatagctcatcctagggcctcag

SEQ ID NO: 3085488 - DNA, 25 bp, Homo sapien
taccagcgcatggatacgagaatcc

SEQ ID NO: 3085489 - DNA, 25 bp, Homo sapien
gtctgtcacatgaactaaagtcact

SEQ ID NO: 3085490 - DNA, 25 bp, Homo sapien
agctttcagctccacatgtggtggc

SEQ ID NO: 3085491 - DNA, 25 bp, Homo sapien
atccagtctgtcacatgaactaaag

SEQ ID NO: 3085492 - DNA, 25 bp, Homo sapien
cacatgtggtggctttcggaaacca

SEQ ID NO: 3085493 - DNA, 25 bp, Homo sapien
gggtgtgttggagacttcttcgatc

SEQ ID NO: 3085494 - DNA, 25 bp, Homo sapien
tacttgttcgatgacctccaacgta

SEQ ID NO: 3085495 - DNA, 25 bp, Homo sapien
ggtggaatgttgaccgccaaggttc

SEQ ID NO: 3085496 - DNA, 25 bp, Homo sapien
cattcttgtacttcaacagtgagca

SEQ ID NO: 3085497 - DNA, 25 bp, Homo sapien
ggggcatcgtcttcctcggaggagc

SEQ ID NO: 3085498 - DNA, 25 bp, Homo sapien
tcctcatcgctgtccgccagacaga

SEQ ID NO: 3085499 - DNA, 25 bp, Homo sapien
gaggagctgtttgtctcccccgctg

SEQ ID NO: 3085500 - DNA, 25 bp, Homo sapien
ctgtccgccagacagaatgcccggg

SEQ ID NO: 3085501 - DNA, 25 bp, Homo sapien
tgtaactgttaactacatctcgtca

SEQ ID NO: 3085502 - DNA, 25 bp, Homo sapien
tcaaccacaacagggtcgggatgta

SEQ ID NO: 3085503 - DNA, 25 bp, Homo sapien
aactacatctcgtcattctctccaa

SEQ ID NO: 3085504 - DNA, 25 bp, Homo sapien
caagctctgcttagaaagagaacac

SEQ ID NO: 3085505 - DNA, 25 bp, Homo sapien
tgatttcaaccagcagtgcagcgga

SEQ ID NO: 3085506 - DNA, 25 bp, Homo sapien
tctcctgagggtcacagaaaaagcc

SEQ ID NO: 3085507 - DNA, 25 bp, Homo sapien
gatcagcgcagatgctcaggacact

SEQ ID NO: 3085508 - DNA, 25 bp, Homo sapien
tgagcctcgggcctatagaaagcag

SEQ ID NO: 3085509 - DNA, 25 bp, Homo sapien
taaaatctcagtctaaccctcaggg

SEQ ID NO: 3085510 - DNA, 25 bp, Homo sapien
tacctgcagtgtgcgacaaaaggac

SEQ ID NO: 3085511 - DNA, 25 bp, Homo sapien
gacttgtacaaagggcccagactgc

SEQ ID NO: 3085512 - DNA, 25 bp, Homo sapien
ggaggacatctcacaggttaagcag

SEQ ID NO: 3085513 - DNA, 25 bp, Homo sapien
ctttacctagtttggtcaaattcat

SEQ ID NO: 3085514 - DNA, 25 bp, Homo sapien
acaagaggctctttacctagtttgg

SEQ ID NO: 3085515 - DNA, 25 bp, Homo sapien
ttcattttggtctcgagagtcatca

SEQ ID NO: 3085516 - DNA, 25 bp, Homo sapien
attcattttggtctcgagagtcatc

SEQ ID NO: 3085517 - DNA, 25 bp, Homo sapien
tgtttacattaagcagttagaaaga

SEQ ID NO: 3085518 - DNA, 25 bp, Homo sapien
catccaaacataatcgtttcttttg

SEQ ID NO: 3085519 - DNA, 25 bp, Homo sapien
aactcaatgtaaaagaacaacaata

SEQ ID NO: 3085520 - DNA, 25 bp, Homo sapien
tactggaaataaagggtatatctgc

SEQ ID NO: 3085521 - DNA, 25 bp, Homo sapien
ggcttagtaaactgctggctcatgc

SEQ ID NO: 3085522 - DNA, 25 bp, Homo sapien
tgatgtgtggtccagcgtccctgcc

SEQ ID NO: 3085523 - DNA, 25 bp, Homo sapien
cccagtcacggggacattctaccaa

SEQ ID NO: 3085524 - DNA, 25 bp, Homo sapien
caaggagcccagtcacatagattgg

SEQ ID NO: 3085525 - DNA, 25 bp, Homo sapien
ctgcaccaaggagacctatactgcc

SEQ ID NO: 3085526 - DNA, 25 bp, Homo sapien
agcctccctttttctgcattcacca

SEQ ID NO: 3085527 - DNA, 25 bp, Homo sapien
caccaaggagacctatactgcctct

SEQ ID NO: 3085528 - DNA, 25 bp, Homo sapien
cagggagagctgtgtacaccctggc

SEQ ID NO: 3085529 - DNA, 25 bp, Homo sapien
ggaagaggctgtactggtcagccat

SEQ ID NO: 3085530 - DNA, 25 bp, Homo sapien
ctgctgttgccagggaagaggctgt

SEQ ID NO: 3085531 - DNA, 25 bp, Homo sapien
tgctctgtctcccttgctgctgttg

SEQ ID NO: 3085532 - DNA, 25 bp, Homo sapien
tgttgccagggaagaggctgtactg

SEQ ID NO: 3085533 - DNA, 25 bp, Homo sapien
agtaagacttagtctgtgtacaagg

SEQ ID NO: 3085534 - DNA, 25 bp, Homo sapien
gtttcacagcggcaggatcaattac

SEQ ID NO: 3085535 - DNA, 25 bp, Homo sapien
cacgagtgacaatgtagtaagactt

SEQ ID NO: 3085536 - DNA, 25 bp, Homo sapien
ctcttcagtttcacagcggcaggat

SEQ ID NO: 3085537 - DNA, 25 bp, Homo sapien
gaggtttgtgttagctgatcattca

SEQ ID NO: 3085538 - DNA, 25 bp, Homo sapien
ggtttgtgttagctgatcattcacc

SEQ ID NO: 3085539 - DNA, 25 bp, Homo sapien
tttgtgttagctgatcattcaccag

SEQ ID NO: 3085540 - DNA, 25 bp, Homo sapien
tgttagctgatcattcaccagcttc

SEQ ID NO: 3085541 - DNA, 25 bp, Homo sapien
gagtgagctcattcataaagtaggg

SEQ ID NO: 3085542 - DNA, 25 bp, Homo sapien
cacgcccatgtcaagttccgtcaga

SEQ ID NO: 3085543 - DNA, 25 bp, Homo sapien
caacgtaaggcttgaaggcctggag

SEQ ID NO: 3085544 - DNA, 25 bp, Homo sapien
ggcctggaggatttttggcacagcc

SEQ ID NO: 3085545 - DNA, 25 bp, Homo sapien
gatcctcaataaggtctcctggttg

SEQ ID NO: 3085546 - DNA, 25 bp, Homo sapien
tcctcagaggatataccatgtggcc

SEQ ID NO: 3085547 - DNA, 25 bp, Homo sapien
aactggccctggattagcaccagag

SEQ ID NO: 3085548 - DNA, 25 bp, Homo sapien
taactttcccagcttgagagggagc

SEQ ID NO: 3085549 - DNA, 25 bp, Homo sapien
cagatcagaccagtatttctctcct

SEQ ID NO: 3085550 - DNA, 25 bp, Homo sapien
caccagatcagaccagtatttctct

SEQ ID NO: 3085551 - DNA, 25 bp, Homo sapien
ttggatcttcttagacaccagatca

SEQ ID NO: 3085552 - DNA, 25 bp, Homo sapien
ggatcttcttagacaccagatcaga

SEQ ID NO: 3085553 - DNA, 25 bp, Homo sapien
ttcttccaagcaaggcattcaccca

SEQ ID NO: 3085554 - DNA, 25 bp, Homo sapien
ccaaaatattcttccaagcaaggca

SEQ ID NO: 3085555 - DNA, 25 bp, Homo sapien
cctcagagggtggaacctctggcaa

SEQ ID NO: 3085556 - DNA, 25 bp, Homo sapien
cattcacccaggcttcctgttcttc

SEQ ID NO: 3085557 - DNA, 25 bp, Homo sapien
tctgacttacgctaccacatggatg

SEQ ID NO: 3085558 - DNA, 25 bp, Homo sapien
caagcacccaccgatggaggaatgg

SEQ ID NO: 3085559 - DNA, 25 bp, Homo sapien
aaatggcgtacgtacacaatggagc

SEQ ID NO: 3085560 - DNA, 25 bp, Homo sapien
ctcaaaaaggaaggcgattctgact

SEQ ID NO: 3085561 - DNA, 25 bp, Homo sapien
cactaatgttttcaaggcatatcca

SEQ ID NO: 3085562 - DNA, 25 bp, Homo sapien
ttgtgactgactcccctcactaatg

SEQ ID NO: 3085563 - DNA, 25 bp, Homo sapien
caccagtctaggaaactagtttgtc

SEQ ID NO: 3085564 - DNA, 25 bp, Homo sapien
catgttgtagcagtgcgtccttttt

SEQ ID NO: 3085565 - DNA, 25 bp, Homo sapien
ggtaccagaaccttatcagataaat

SEQ ID NO: 3085566 - DNA, 25 bp, Homo sapien
tgttggcagcacaaaagtttctaat

SEQ ID NO: 3085567 - DNA, 25 bp, Homo sapien
cagccccgttgcttaatctggttat

SEQ ID NO: 3085568 - DNA, 25 bp, Homo sapien
taaatgattcgtaaacattttctcc

SEQ ID NO: 3085569 - DNA, 25 bp, Homo sapien
agaaatgtgtctaagtcgaaaagtg

SEQ ID NO: 3085570 - DNA, 25 bp, Homo sapien
aagtgaaaaaggtccggcccagcag

SEQ ID NO: 3085571 - DNA, 25 bp, Homo sapien
cactgttatcccagtgcccacaaca

SEQ ID NO: 3085572 - DNA, 25 bp, Homo sapien
agggcttcggagcacttacgcatga

SEQ ID NO: 3085573 - DNA, 25 bp, Homo sapien
tgcccggacggactgttgtgtctgc

SEQ ID NO: 3085574 - DNA, 25 bp, Homo sapien
cggctgtgggtcaggtgcccggacg

SEQ ID NO: 3085575 - DNA, 25 bp, Homo sapien
acacctgcccatgtacacgctgtag

SEQ ID NO: 3085576 - DNA, 25 bp, Homo sapien
gagaagcatcttctgccgcacgctg

SEQ ID NO: 3085577 - DNA, 25 bp, Homo sapien
tccagattcgctttcgagccaaagt

SEQ ID NO: 3085578 - DNA, 25 bp, Homo sapien
gatttccgactttagcttagatgcc

SEQ ID NO: 3085579 - DNA, 25 bp, Homo sapien
tagagtatctgatctcgctggctag

SEQ ID NO: 3085580 - DNA, 25 bp, Homo sapien
gctgaccaagctcgatacaaatggg

SEQ ID NO: 3085581 - DNA, 25 bp, Homo sapien
tctggctgatgtaggtgacctctgg

SEQ ID NO: 3085582 - DNA, 25 bp, Homo sapien
tcaaagtcgcatggtaggtttctgg

SEQ ID NO: 3085583 - DNA, 25 bp, Homo sapien
caaagactgaatgtgtcaaagtcgc

SEQ ID NO: 3085584 - DNA, 25 bp, Homo sapien
ctggcttgggttcattgtagctggc

SEQ ID NO: 3085585 - DNA, 25 bp, Homo sapien
tatacactgtgttaaagctaatctc

SEQ ID NO: 3085586 - DNA, 25 bp, Homo sapien
taatacactatacactgtgttaaag

SEQ ID NO: 3085587 - DNA, 25 bp, Homo sapien
cactatacactgtgttaaagctaat

SEQ ID NO: 3085588 - DNA, 25 bp, Homo sapien
cactgtgttaaagctaatctcatag

SEQ ID NO: 3085589 - DNA, 25 bp, Homo sapien
tgaaattgggctgtatcagctcaca

SEQ ID NO: 3085590 - DNA, 25 bp, Homo sapien
tcagctcacaagaacggattctaca

SEQ ID NO: 3085591 - DNA, 25 bp, Homo sapien
cagtgacttcacgttggtagctttc

SEQ ID NO: 3085592 - DNA, 25 bp, Homo sapien
tgctacatcacggaaatcagggaat

SEQ ID NO: 3085593 - DNA, 25 bp, Homo sapien
attttgttcatttgtccctctaagt

SEQ ID NO: 3085594 - DNA, 25 bp, Homo sapien
aacactttgctgatattttgttcat

SEQ ID NO: 3085595 - DNA, 25 bp, Homo sapien
tgatattttgttcatttgtccctct

SEQ ID NO: 3085596 - DNA, 25 bp, Homo sapien
tattttgttcatttgtccctctaag

SEQ ID NO: 3085597 - DNA, 25 bp, Homo sapien
tatcatctatgtatttgatacaggg

SEQ ID NO: 3085598 - DNA, 25 bp, Homo sapien
atcatctatgtatttgatacagggt

SEQ ID NO: 3085599 - DNA, 25 bp, Homo sapien
ctatcatctatgtatttgatacagg

SEQ ID NO: 3085600 - DNA, 25 bp, Homo sapien
tcctaggaaaattcctgtccctgga

SEQ ID NO: 3085601 - DNA, 25 bp, Homo sapien
caaaacaagacatacaggcatgtgt

SEQ ID NO: 3085602 - DNA, 25 bp, Homo sapien
ggtgctgagctgttactctgcccca

SEQ ID NO: 3085603 - DNA, 25 bp, Homo sapien
tgagatacatacaccagctcatctg

SEQ ID NO: 3085604 - DNA, 25 bp, Homo sapien
taaaagggtccaggtggcttactgc

SEQ ID NO: 3085605 - DNA, 25 bp, Homo sapien
ggcttactgcccagtttcatgcctc

SEQ ID NO: 3085606 - DNA, 25 bp, Homo sapien
cagacacttgctttgctcacctgta

SEQ ID NO: 3085607 - DNA, 25 bp, Homo sapien
caccctctgttcaagccatagtgat

SEQ ID NO: 3085608 - DNA, 25 bp, Homo sapien
cttatggcccaggtaccccaggtgc

SEQ ID NO: 3085609 - DNA, 25 bp, Homo sapien
tatggcccaggtaccccaggtgcat

SEQ ID NO: 3085610 - DNA, 25 bp, Homo sapien
ttatggcccaggtaccccaggtgca

SEQ ID NO: 3085611 - DNA, 25 bp, Homo sapien
gagttataaactccacaagagcagg

SEQ ID NO: 3085612 - DNA, 25 bp, Homo sapien
ggaagaagctgacgccctaataagt

SEQ ID NO: 3085613 - DNA, 25 bp, Homo sapien
caaggtgtgggatgctacctcagct

SEQ ID NO: 3085614 - DNA, 25 bp, Homo sapien
gcaaagacggcacttctcctaggaa

SEQ ID NO: 3085615 - DNA, 25 bp, Homo sapien
taccttctggtaagtgagggctgcc

SEQ ID NO: 3085616 - DNA, 25 bp, Homo sapien
gacatccttaaccatattgttccta

SEQ ID NO: 3085617 - DNA, 25 bp, Homo sapien
gttcctatggaattcaggaagcacg

SEQ ID NO: 3085618 - DNA, 25 bp, Homo sapien
tcattttgggactacctgacatcct

SEQ ID NO: 3085619 - DNA, 25 bp, Homo sapien
tgctgatcaaatgggttcagagcgg

SEQ ID NO: 3085620 - DNA, 25 bp, Homo sapien
agctgctgatcaaatgggttcagag

SEQ ID NO: 3085621 - DNA, 25 bp, Homo sapien
agggcctagacaaccacacaacagt

SEQ ID NO: 3085622 - DNA, 25 bp, Homo sapien
agacggcggagtaccatagggccta

SEQ ID NO: 3085623 - DNA, 25 bp, Homo sapien
agacaggatttcactgttagccagg

SEQ ID NO: 3085624 - DNA, 25 bp, Homo sapien
gagacaggatttcactgttagccag

SEQ ID NO: 3085625 - DNA, 25 bp, Homo sapien
gcattctcatttaaatagatgggag

SEQ ID NO: 3085626 - DNA, 25 bp, Homo sapien
atttaactaagaagccaaacaagct

SEQ ID NO: 3085627 - DNA, 25 bp, Homo sapien
ttttgcaatagggacatcacgctgc

SEQ ID NO: 3085628 - DNA, 25 bp, Homo sapien
ggacatcacgctgccatttttagag

SEQ ID NO: 3085629 - DNA, 25 bp, Homo sapien
tgctccagggaaacgaagttctcct

SEQ ID NO: 3085630 - DNA, 25 bp, Homo sapien
attgctccagggaaacgaagttctc

SEQ ID NO: 3085631 - DNA, 25 bp, Homo sapien
ttgctccagggaaacgaagttctcc

SEQ ID NO: 3085632 - DNA, 25 bp, Homo sapien
ggcaggtctaggcatgaaccttctg

SEQ ID NO: 3085633 - DNA, 25 bp, Homo sapien
tattaagtagcaagacaccttggac

SEQ ID NO: 3085634 - DNA, 25 bp, Homo sapien
tggacaatgaccacctctctcagag

SEQ ID NO: 3085635 - DNA, 25 bp, Homo sapien
tgtaacacaaggaattctccaggca

SEQ ID NO: 3085636 - DNA, 25 bp, Homo sapien
agtgtgtgtactagccagctcccgg

SEQ ID NO: 3085637 - DNA, 25 bp, Homo sapien
taccagatgagttgactgggtgcct

SEQ ID NO: 3085638 - DNA, 25 bp, Homo sapien
gctcttaaaaaacacggcctgtgca

SEQ ID NO: 3085639 - DNA, 25 bp, Homo sapien
aacaagtcagatctaaaatacggct

SEQ ID NO: 3085640 - DNA, 25 bp, Homo sapien
tcttcactggcaattccgggtgctg

SEQ ID NO: 3085641 - DNA, 25 bp, Homo sapien
taatgtcttcatcaagtgcctgtgc

SEQ ID NO: 3085642 - DNA, 25 bp, Homo sapien
taaagaagcccaacgtcttcactgg

SEQ ID NO: 3085643 - DNA, 25 bp, Homo sapien
tcatagatgacttctgaaaggcgtc

SEQ ID NO: 3085644 - DNA, 25 bp, Homo sapien
tctgctcagaaagggatgacacact

SEQ ID NO: 3085645 - DNA, 25 bp, Homo sapien
tgtacttaatacttgtgctgctgga

SEQ ID NO: 3085646 - DNA, 25 bp, Homo sapien
acagtgttcttggagacgggcaaaa

SEQ ID NO: 3085647 - DNA, 25 bp, Homo sapien
cacactgggagagctagctaagggc

SEQ ID NO: 3085648 - DNA, 25 bp, Homo sapien
cagccctgttacaatgctttggtca

SEQ ID NO: 3085649 - DNA, 25 bp, Homo sapien
ccaggacaggcgaggcagcagggcc

SEQ ID NO: 3085650 - DNA, 25 bp, Homo sapien
gctttggtcatccagcccctcctca

SEQ ID NO: 3085651 - DNA, 25 bp, Homo sapien
gggttcaagatagaggtcttccttg

SEQ ID NO: 3085652 - DNA, 25 bp, Homo sapien
tcctcgccggatgccgagaagtgaa

SEQ ID NO: 3085653 - DNA, 25 bp, Homo sapien
aatggcgatggtatctcgggacacg

SEQ ID NO: 3085654 - DNA, 25 bp, Homo sapien
ccgagaagtgaatggcgatggtatc

SEQ ID NO: 3085655 - DNA, 25 bp, Homo sapien
tcctcctcgccggatgccgagaagt

SEQ ID NO: 3085656 - DNA, 25 bp, Homo sapien
tggcatgtcagtggttttctcggca

SEQ ID NO: 3085657 - DNA, 25 bp, Homo sapien
ggttttctcggcatggcgaccatac

SEQ ID NO: 3085658 - DNA, 25 bp, Homo sapien
gcatggcgaccatacagacttgtca

SEQ ID NO: 3085659 - DNA, 25 bp, Homo sapien
gatggttttggcatgtcagtggttt

SEQ ID NO: 3085660 - DNA, 25 bp, Homo sapien
gaatcctcctttaaggttgctatcc

SEQ ID NO: 3085661 - DNA, 25 bp, Homo sapien
tcctaaggtctttgccagaatcctc

SEQ ID NO: 3085662 - DNA, 25 bp, Homo sapien
taaaccttagccttgatccggtatg

SEQ ID NO: 3085663 - DNA, 25 bp, Homo sapien
gatccggtatgtttccagaaagcag

SEQ ID NO: 3085664 - DNA, 25 bp, Homo sapien
tcaaatgacagtgacggagctcccc

SEQ ID NO: 3085665 - DNA, 25 bp, Homo sapien
aatgacagtgacggagctccccact

SEQ ID NO: 3085666 - DNA, 25 bp, Homo sapien
ctcaaatgacagtgacggagctccc

SEQ ID NO: 3085667 - DNA, 25 bp, Homo sapien
gaccacagccctcaaatggccctca

SEQ ID NO: 3085668 - DNA, 25 bp, Homo sapien
tgtcattattaaggtggaaggtggt

SEQ ID NO: 3085669 - DNA, 25 bp, Homo sapien
tttgtcattattaaggtggaaggtg

SEQ ID NO: 3085670 - DNA, 25 bp, Homo sapien
gatgtgtttgtcattattaaggtgg

SEQ ID NO: 3085671 - DNA, 25 bp, Homo sapien
cattattaaggtggaaggtggttag

SEQ ID NO: 3085672 - DNA, 25 bp, Homo sapien
aggtcaaataatgggatgtttattt

SEQ ID NO: 3085673 - DNA, 25 bp, Homo sapien
cccaagacaggaaagggacgaagct

SEQ ID NO: 3085674 - DNA, 25 bp, Homo sapien
tggaggtcaaataatgggatgttta

SEQ ID NO: 3085675 - DNA, 25 bp, Homo sapien
ggaggtcaaataatgggatgtttat

SEQ ID NO: 3085676 - DNA, 25 bp, Homo sapien
agacactgggcaaggtgactgaggg

SEQ ID NO: 3085677 - DNA, 25 bp, Homo sapien
acactgggcaaggtgactgagggga

SEQ ID NO: 3085678 - DNA, 25 bp, Homo sapien
cactgggcaaggtgactgaggggac

SEQ ID NO: 3085679 - DNA, 25 bp, Homo sapien
actgggcaaggtgactgaggggaca

SEQ ID NO: 3085680 - DNA, 25 bp, Homo sapien
cacggaaccactttgtataaggttg

SEQ ID NO: 3085681 - DNA, 25 bp, Homo sapien
aaactcagatgtcactattcaatgg

SEQ ID NO: 3085682 - DNA, 25 bp, Homo sapien
gccttcctgaggactataacatggt

SEQ ID NO: 3085683 - DNA, 25 bp, Homo sapien
cactattcaatggtatcctttccag

SEQ ID NO: 3085684 - DNA, 25 bp, Homo sapien
tcgcactcatggatgttgacattgt

SEQ ID NO: 3085685 - DNA, 25 bp, Homo sapien
tggattcttgaatttgcctcgcact

SEQ ID NO: 3085686 - DNA, 25 bp, Homo sapien
ttgacattgtccagagcaggctttg

SEQ ID NO: 3085687 - DNA, 25 bp, Homo sapien
tgacgtctagacagcaggtcaggaa

SEQ ID NO: 3085688 - DNA, 25 bp, Homo sapien
ggctgctggacctgttgtgatcaca

SEQ ID NO: 3085689 - DNA, 25 bp, Homo sapien
tatctgtttctacaagccacagaag

SEQ ID NO: 3085690 - DNA, 25 bp, Homo sapien
gaaagtgaccttgttactctgaaaa

SEQ ID NO: 3085691 - DNA, 25 bp, Homo sapien
caaattacatgaactctctactccc

SEQ ID NO: 3085692 - DNA, 25 bp, Homo sapien
tcttctaccgtgaattggtctctcc

SEQ ID NO: 3085693 - DNA, 25 bp, Homo sapien
ctccaggttcttctaccgtgaattg

SEQ ID NO: 3085694 - DNA, 25 bp, Homo sapien
ttctaccgtgaattggtctctccat

SEQ ID NO: 3085695 - DNA, 25 bp, Homo sapien
caggttcttctaccgtgaattggtc

SEQ ID NO: 3085696 - DNA, 25 bp, Homo sapien
cgagcttgcattcgtagtgaggaga

SEQ ID NO: 3085697 - DNA, 25 bp, Homo sapien
cagcagtatttggtgcaggactaga

SEQ ID NO: 3085698 - DNA, 25 bp, Homo sapien
gtttgcaccaaactagaacagtggc

SEQ ID NO: 3085699 - DNA, 25 bp, Homo sapien
gaaatgtcaattacctctggcagaa

SEQ ID NO: 3085700 - DNA, 25 bp, Homo sapien
tttgcaggagcaatccaacgggtag

SEQ ID NO: 3085701 - DNA, 25 bp, Homo sapien
taagcttatgactgaagccagctcc

SEQ ID NO: 3085702 - DNA, 25 bp, Homo sapien
tatctgcagtttccgtcacccatag

SEQ ID NO: 3085703 - DNA, 25 bp, Homo sapien
tgtgctttgtgcaggaaggaaccac

SEQ ID NO: 3085704 - DNA, 25 bp, Homo sapien
tattcatagggtggtataaagttta

SEQ ID NO: 3085705 - DNA, 25 bp, Homo sapien
ataagattgataatagtatctacta

SEQ ID NO: 3085706 - DNA, 25 bp, Homo sapien
aataagattgataatagtatctact

SEQ ID NO: 3085707 - DNA, 25 bp, Homo sapien
ttaaaagtccaaattagtgaagtga

SEQ ID NO: 3085708 - DNA, 25 bp, Homo sapien
agtccaaattagtgaagtgacgcgc

SEQ ID NO: 3085709 - DNA, 25 bp, Homo sapien
aaagtccaaattagtgaagtgacgc

SEQ ID NO: 3085710 - DNA, 25 bp, Homo sapien
taaaagtccaaattagtgaagtgac

SEQ ID NO: 3085711 - DNA, 25 bp, Homo sapien
gctccaccatctaaccagcttgtca

SEQ ID NO: 3085712 - DNA, 25 bp, Homo sapien
gcacgttttttgaatcaatgtccta

SEQ ID NO: 3085713 - DNA, 25 bp, Homo sapien
gaatcaatgtcctagactgacattc

SEQ ID NO: 3085714 - DNA, 25 bp, Homo sapien
tgtcctagactgacattcttgctcc

SEQ ID NO: 3085715 - DNA, 25 bp, Homo sapien
tgcctcattgtactatgccggcgcc

SEQ ID NO: 3085716 - DNA, 25 bp, Homo sapien
tggctgcctcattgtactatgccgg

SEQ ID NO: 3085717 - DNA, 25 bp, Homo sapien
tcattgtactatgccggcgcccgtg

SEQ ID NO: 3085718 - DNA, 25 bp, Homo sapien
ggccgcgcgactccggcttcggctg

SEQ ID NO: 3085719 - DNA, 25 bp, Homo sapien
agggggcacctccagagtggtgggc

SEQ ID NO: 3085720 - DNA, 25 bp, Homo sapien
agaaggagggggcacctccagagtg

SEQ ID NO: 3085721 - DNA, 25 bp, Homo sapien
ggggcacctccagagtggtgggcat

SEQ ID NO: 3085722 - DNA, 25 bp, Homo sapien
aggagggggcacctccagagtggtg

SEQ ID NO: 3085723 - DNA, 25 bp, Homo sapien
tgagggtgagtaccactggatgtcc

SEQ ID NO: 3085724 - DNA, 25 bp, Homo sapien
taattctaaaatttggtgagggtga

SEQ ID NO: 3085725 - DNA, 25 bp, Homo sapien
gctgtcagtgaggataattctaaaa

SEQ ID NO: 3085726 - DNA, 25 bp, Homo sapien
gaaacttgatgggaagctgtcagtg

SEQ ID NO: 3085727 - DNA, 25 bp, Homo sapien
ttagttcacattcacaccgactgta

SEQ ID NO: 3085728 - DNA, 25 bp, Homo sapien
ttcacattcacaccgactgtagatt

SEQ ID NO: 3085729 - DNA, 25 bp, Homo sapien
agttcacattcacaccgactgtaga

SEQ ID NO: 3085730 - DNA, 25 bp, Homo sapien
cacattcacaccgactgtagatttt

SEQ ID NO: 3085731 - DNA, 25 bp, Homo sapien
ctggacaaccgaacatggatacagt

SEQ ID NO: 3085732 - DNA, 25 bp, Homo sapien
tacagtatgagacgttgcttattcc

SEQ ID NO: 3085733 - DNA, 25 bp, Homo sapien
tcagggcaagtttccggagctcttt

SEQ ID NO: 3085734 - DNA, 25 bp, Homo sapien
tgagcctggtatcaaagtgtgcatc

SEQ ID NO: 3085735 - DNA, 25 bp, Homo sapien
agttggaaaggaaattggccactat

SEQ ID NO: 3085736 - DNA, 25 bp, Homo sapien
tctagagacggtgttaggttccgct

SEQ ID NO: 3085737 - DNA, 25 bp, Homo sapien
tagggtctgtcgttgaaaggcactg

SEQ ID NO: 3085738 - DNA, 25 bp, Homo sapien
gaatccagtcccagactctgtagaa

SEQ ID NO: 3085739 - DNA, 25 bp, Homo sapien
tcatgctgcaaattctggcccaaac

SEQ ID NO: 3085740 - DNA, 25 bp, Homo sapien
gtacactacacttgggtcaggcagg

SEQ ID NO: 3085741 - DNA, 25 bp, Homo sapien
gactgtcctcaaatagcctgctggg

SEQ ID NO: 3085742 - DNA, 25 bp, Homo sapien
gaagttgcgcgcatgctcacttgag

SEQ ID NO: 3085743 - DNA, 25 bp, Homo sapien
tgagagatctaagtgccctgcctga

SEQ ID NO: 3085744 - DNA, 25 bp, Homo sapien
ggtttcttcccaacacgccaatgac

SEQ ID NO: 3085745 - DNA, 25 bp, Homo sapien
gacctcctccttaagactctcaaag

SEQ ID NO: 3085746 - DNA, 25 bp, Homo sapien
tcttggtgtgtacctttcagagacc

SEQ ID NO: 3085747 - DNA, 25 bp, Homo sapien
cgccaatgacgctggtggagagtct

SEQ ID NO: 3085748 - DNA, 25 bp, Homo sapien
caaagtctgtgttggaagcccctcc

SEQ ID NO: 3085749 - DNA, 25 bp, Homo sapien
ggactaattggcttctagggctgga

SEQ ID NO: 3085750 - DNA, 25 bp, Homo sapien
ggctttggtgagacccactttcctc

SEQ ID NO: 3085751 - DNA, 25 bp, Homo sapien
ggtaccctctgcctatggtcaaggc

SEQ ID NO: 3085752 - DNA, 25 bp, Homo sapien
gacaccattccaaaaccagcgggag

SEQ ID NO: 3085753 - DNA, 25 bp, Homo sapien
taactaatgagttccgcggccgaga

SEQ ID NO: 3085754 - DNA, 25 bp, Homo sapien
cactaagaaagatccctgcgcatga

SEQ ID NO: 3085755 - DNA, 25 bp, Homo sapien
taccacatgagaacacaagagggcg

SEQ ID NO: 3085756 - DNA, 25 bp, Homo sapien
aggtcaaatttatttaatacaacat

SEQ ID NO: 3085757 - DNA, 25 bp, Homo sapien
caaatttatttaatacaacatccac

SEQ ID NO: 3085758 - DNA, 25 bp, Homo sapien
tttatttaatacaacatccacgagg

SEQ ID NO: 3085759 - DNA, 25 bp, Homo sapien
aatttatttaatacaacatccacga

SEQ ID NO: 3085760 - DNA, 25 bp, Homo sapien
tcagaatatcccaatggccttgccc

SEQ ID NO: 3085761 - DNA, 25 bp, Homo sapien
tttcacaggcggtgctcccaagtag

SEQ ID NO: 3085762 - DNA, 25 bp, Homo sapien
taaccaggccatgcgctagaaatga

SEQ ID NO: 3085763 - DNA, 25 bp, Homo sapien
gtgaaattccacagcgcaatgacag

SEQ ID NO: 3085764 - DNA, 25 bp, Homo sapien
gaaccggcagcttagcctgaggaat

SEQ ID NO: 3085765 - DNA, 25 bp, Homo sapien
tggatttaagaaccggcagcttagc

SEQ ID NO: 3085766 - DNA, 25 bp, Homo sapien
cttagcaggatggatttaagaaccg

SEQ ID NO: 3085767 - DNA, 25 bp, Homo sapien
caggatggatttaagaaccggcagc

SEQ ID NO: 3085768 - DNA, 25 bp, Homo sapien
tgtccttccagggatgtgcatctgg

SEQ ID NO: 3085769 - DNA, 25 bp, Homo sapien
tcggaacatggatgtccttccaggg

SEQ ID NO: 3085770 - DNA, 25 bp, Homo sapien
gtccttccagggatgtgcatctggc

SEQ ID NO: 3085771 - DNA, 25 bp, Homo sapien
gttcttctcggaacatggatgtcct

SEQ ID NO: 3085772 - DNA, 25 bp, Homo sapien
aagttccatcaagggagccttccgt

SEQ ID NO: 3085773 - DNA, 25 bp, Homo sapien
ttccatcaagggagccttccgttct

SEQ ID NO: 3085774 - DNA, 25 bp, Homo sapien
gttccatcaagggagccttccgttc

SEQ ID NO: 3085775 - DNA, 25 bp, Homo sapien
ctaagttccatcaagggagccttcc

SEQ ID NO: 3085776 - DNA, 25 bp, Homo sapien
caagattgaagattgccctggtgga

SEQ ID NO: 3085777 - DNA, 25 bp, Homo sapien
gaaacaaggcaagttatgatcacac

SEQ ID NO: 3085778 - DNA, 25 bp, Homo sapien
tcagcactacagatacacgtggccc

SEQ ID NO: 3085779 - DNA, 25 bp, Homo sapien
cgtggcccctcagaagacaacattt

SEQ ID NO: 3085780 - DNA, 25 bp, Homo sapien
ctgtagtgctctttaacagcttcaa

SEQ ID NO: 3085781 - DNA, 25 bp, Homo sapien
cctgtagtgctctttaacagcttca

SEQ ID NO: 3085782 - DNA, 25 bp, Homo sapien
catcctgggagcagactttgaggcc

SEQ ID NO: 3085783 - DNA, 25 bp, Homo sapien
taaagttctgtctggcctggagctc

SEQ ID NO: 3085784 - DNA, 25 bp, Homo sapien
gaccagtcatgggtgagctctcaga

SEQ ID NO: 3085785 - DNA, 25 bp, Homo sapien
tctgtcgtgacagaggactggccgc

SEQ ID NO: 3085786 - DNA, 25 bp, Homo sapien
caatgctgccatcactccattcatt

SEQ ID NO: 3085787 - DNA, 25 bp, Homo sapien
gctgatctttctccctcaatgctgc

SEQ ID NO: 3085788 - DNA, 25 bp, Homo sapien
atgctgccatcactccattcattct

SEQ ID NO: 3085789 - DNA, 25 bp, Homo sapien
tcctgctgatctttctccctcaatg

SEQ ID NO: 3085790 - DNA, 25 bp, Homo sapien
gagcaacgcaaataacccagttcaa

SEQ ID NO: 3085791 - DNA, 25 bp, Homo sapien
ctacaaaacaaaggatgacatggca

SEQ ID NO: 3085792 - DNA, 25 bp, Homo sapien
ggatgacatggcagtgagcaacgca

SEQ ID NO: 3085793 - DNA, 25 bp, Homo sapien
tggcagtgagcaacgcaaataaccc

SEQ ID NO: 3085794 - DNA, 25 bp, Homo sapien
taaatggatgtacaactattgactt

SEQ ID NO: 3085795 - DNA, 25 bp, Homo sapien
caacgctcttagcagatctgggcaa

SEQ ID NO: 3085796 - DNA, 25 bp, Homo sapien
caccaccggtatcctctttgggaat

SEQ ID NO: 3085797 - DNA, 25 bp, Homo sapien
tactattttgtcaatcccttccagg

SEQ ID NO: 3085798 - DNA, 25 bp, Homo sapien
gcatccattttttcatggggatact

SEQ ID NO: 3085799 - DNA, 25 bp, Homo sapien
ttttcatggggatactttttcacca

SEQ ID NO: 3085800 - DNA, 25 bp, Homo sapien
cagagcaatcatcaccaaagttgaa

SEQ ID NO: 3085801 - DNA, 25 bp, Homo sapien
ttttttggtaacagagcaatcatca

SEQ ID NO: 3085802 - DNA, 25 bp, Homo sapien
cgatcagcctaagatgctttataga

SEQ ID NO: 3085803 - DNA, 25 bp, Homo sapien
actttctcagtttgccactctggga

SEQ ID NO: 3085804 - DNA, 25 bp, Homo sapien
ttatagaccccaagtgctaaccacc

SEQ ID NO: 3085805 - DNA, 25 bp, Homo sapien
gtggccacttgattgactttctcag

SEQ ID NO: 3085806 - DNA, 25 bp, Homo sapien
gggtctccaaagcaaaacactcgac

SEQ ID NO: 3085807 - DNA, 25 bp, Homo sapien
aacactcgacgtccaagaccttggg

SEQ ID NO: 3085808 - DNA, 25 bp, Homo sapien
caaagcaaaacactcgacgtccaag

SEQ ID NO: 3085809 - DNA, 25 bp, Homo sapien
gggagcaggtaagggtcaccggctg

SEQ ID NO: 3085810 - DNA, 25 bp, Homo sapien
attcaagaagcgctcgttgactaca

SEQ ID NO: 3085811 - DNA, 25 bp, Homo sapien
gtaagcattcaagaagcgctcgttg

SEQ ID NO: 3085812 - DNA, 25 bp, Homo sapien
cacagcgctggtgtaagaggtggca

SEQ ID NO: 3085813 - DNA, 25 bp, Homo sapien
cgctcgttgactacatgaatagtaa

SEQ ID NO: 3085814 - DNA, 25 bp, Homo sapien
aggctggggcactggagaccctcac

SEQ ID NO: 3085815 - DNA, 25 bp, Homo sapien
caggctggggcactggagaccctca

SEQ ID NO: 3085816 - DNA, 25 bp, Homo sapien
ctagggggcatcccccaggctgggg

SEQ ID NO: 3085817 - DNA, 25 bp, Homo sapien
ccccaggctggggcactggagaccc

SEQ ID NO: 3085818 - DNA, 25 bp, Homo sapien
cagggacagctttccggacttcact

SEQ ID NO: 3085819 - DNA, 25 bp, Homo sapien
gctttccggacttcactgtacactg

SEQ ID NO: 3085820 - DNA, 25 bp, Homo sapien
ttccggacttcactgtacactgtct

SEQ ID NO: 3085821 - DNA, 25 bp, Homo sapien
gacagctttccggacttcactgtac

SEQ ID NO: 3085822 - DNA, 25 bp, Homo sapien
cagttactcgagagctaagggacga

SEQ ID NO: 3085823 - DNA, 25 bp, Homo sapien
tagctgggactgagaactcttacag

SEQ ID NO: 3085824 - DNA, 25 bp, Homo sapien
caacgcagggttgggctatggcctc

SEQ ID NO: 3085825 - DNA, 25 bp, Homo sapien
aggtcttggtctaacgagcgtcact

SEQ ID NO: 3085826 - DNA, 25 bp, Homo sapien
cagcagctgcttgctaatgagtaaa

SEQ ID NO: 3085827 - DNA, 25 bp, Homo sapien
tgctaatgagtaaaccaggctggca

SEQ ID NO: 3085828 - DNA, 25 bp, Homo sapien
ctgctgtcagggatgtttccggatg

SEQ ID NO: 3085829 - DNA, 25 bp, Homo sapien
ctgcttgctaatgagtaaaccaggc

SEQ ID NO: 3085830 - DNA, 25 bp, Homo sapien
cagagagggaacacctgaggctcag

SEQ ID NO: 3085831 - DNA, 25 bp, Homo sapien
ggcctgacttcccacactgctcctt

SEQ ID NO: 3085832 - DNA, 25 bp, Homo sapien
tctccacccacaggaaggcagagag

SEQ ID NO: 3085833 - DNA, 25 bp, Homo sapien
ctggtaatacctggctctccaccca

SEQ ID NO: 3085834 - DNA, 25 bp, Homo sapien
tgaggggggtggatcttttgaagtc

SEQ ID NO: 3085835 - DNA, 25 bp, Homo sapien
ggctgaggggggtggatcttttgaa

SEQ ID NO: 3085836 - DNA, 25 bp, Homo sapien
gaggctgaggggggtggatcttttg

SEQ ID NO: 3085837 - DNA, 25 bp, Homo sapien
ctgaggggggtggatcttttgaagt

SEQ ID NO: 3085838 - DNA, 25 bp, Homo sapien
tccgtgtactgcacgtctgagttca

SEQ ID NO: 3085839 - DNA, 25 bp, Homo sapien
acttgaacttccgtgtactgcacgt

SEQ ID NO: 3085840 - DNA, 25 bp, Homo sapien
gaacttccgtgtactgcacgtctga

SEQ ID NO: 3085841 - DNA, 25 bp, Homo sapien
tactgcacgtctgagttcagaggct

SEQ ID NO: 3085842 - DNA, 25 bp, Homo sapien
catggtttctgacatcgtcattgtg

SEQ ID NO: 3085843 - DNA, 25 bp, Homo sapien
tggtttctgacatcgtcattgtgac

SEQ ID NO: 3085844 - DNA, 25 bp, Homo sapien
gcatggtttctgacatcgtcattgt

SEQ ID NO: 3085845 - DNA, 25 bp, Homo sapien
atggtttctgacatcgtcattgtga

SEQ ID NO: 3085846 - DNA, 25 bp, Homo sapien
cagcgattctcctagtctcgctttg

SEQ ID NO: 3085847 - DNA, 25 bp, Homo sapien
cgattctcctagtctcgctttgttg

SEQ ID NO: 3085848 - DNA, 25 bp, Homo sapien
ccagcgattctcctagtctcgcttt

SEQ ID NO: 3085849 - DNA, 25 bp, Homo sapien
gcgattctcctagtctcgctttgtt

SEQ ID NO: 3085850 - DNA, 25 bp, Homo sapien
aaatggcaggagaacatgactttac

SEQ ID NO: 3085851 - DNA, 25 bp, Homo sapien
tagaaatggcaggagaacatgactt

SEQ ID NO: 3085852 - DNA, 25 bp, Homo sapien
gaaatggcaggagaacatgacttta

SEQ ID NO: 3085853 - DNA, 25 bp, Homo sapien
ttagaaatggcaggagaacatgact

SEQ ID NO: 3085854 - DNA, 25 bp, Homo sapien
gggatctgacattttctcgttgttg

SEQ ID NO: 3085855 - DNA, 25 bp, Homo sapien
tgttggagttcagaagtggtactgc

SEQ ID NO: 3085856 - DNA, 25 bp, Homo sapien
cttccatattgggatctgacatttt

SEQ ID NO: 3085857 - DNA, 25 bp, Homo sapien
cgtaatgactgttagcttccatatt

SEQ ID NO: 3085858 - DNA, 25 bp, Homo sapien
gacatttccactggcatctgcttgg

SEQ ID NO: 3085859 - DNA, 25 bp, Homo sapien
ggacatttccactggcatctgcttg

SEQ ID NO: 3085860 - DNA, 25 bp, Homo sapien
ctggacatttccactggcatctgct

SEQ ID NO: 3085861 - DNA, 25 bp, Homo sapien
tggacatttccactggcatctgctt

SEQ ID NO: 3085862 - DNA, 25 bp, Homo sapien
taaccactgcaataagtcctttctt

SEQ ID NO: 3085863 - DNA, 25 bp, Homo sapien
acatttggccgcaatgatcaagaga

SEQ ID NO: 3085864 - DNA, 25 bp, Homo sapien
gatcaagagagcaatgatcactccg

SEQ ID NO: 3085865 - DNA, 25 bp, Homo sapien
gcaatgatcactccgatgataacca

SEQ ID NO: 3085866 - DNA, 25 bp, Homo sapien
tccaccaccttacttgacaggatag

SEQ ID NO: 3085867 - DNA, 25 bp, Homo sapien
gcttggtccaaaatgcctgggtggc

SEQ ID NO: 3085868 - DNA, 25 bp, Homo sapien
catttgatagaagggtttgccctct

SEQ ID NO: 3085869 - DNA, 25 bp, Homo sapien
tgaaggctgtgcagtaatactctcc

SEQ ID NO: 3085870 - DNA, 25 bp, Homo sapien
ttactacagtacttcacacagggct

SEQ ID NO: 3085871 - DNA, 25 bp, Homo sapien
gactttccttctagtgtgagagcag

SEQ ID NO: 3085872 - DNA, 25 bp, Homo sapien
gtttaaaccaacagcttcacatggg

SEQ ID NO: 3085873 - DNA, 25 bp, Homo sapien
caccaggtggatcgttccgagaact

SEQ ID NO: 3085874 - DNA, 25 bp, Homo sapien
taacattttggcgtgggaatggcaa

SEQ ID NO: 3085875 - DNA, 25 bp, Homo sapien
cactgatcgattcgcaacggacttc

SEQ ID NO: 3085876 - DNA, 25 bp, Homo sapien
tgcaacacactggtattcgacgtct

SEQ ID NO: 3085877 - DNA, 25 bp, Homo sapien
gaaataggcaaagttccactgatcg

SEQ ID NO: 3085878 - DNA, 25 bp, Homo sapien
tacatccccagaaatacatgttcat

SEQ ID NO: 3085879 - DNA, 25 bp, Homo sapien
gaaaacattacatccccagaaatac

SEQ ID NO: 3085880 - DNA, 25 bp, Homo sapien
gaaaaagtacaacaagtagccaaca

SEQ ID NO: 3085881 - DNA, 25 bp, Homo sapien
tattttaccatatctcacacgcaca

SEQ ID NO: 3085882 - DNA, 25 bp, Homo sapien
aaccagaatctcgccacccaaagtg

SEQ ID NO: 3085883 - DNA, 25 bp, Homo sapien
ctggagttctataatcaaccagaat

SEQ ID NO: 3085884 - DNA, 25 bp, Homo sapien
aatcaaccagaatctcgccacccaa

SEQ ID NO: 3085885 - DNA, 25 bp, Homo sapien
ccagaatctcgccacccaaagtgtg

SEQ ID NO: 3085886 - DNA, 25 bp, Homo sapien
gaggctatcttggtgaaatcttgag

SEQ ID NO: 3085887 - DNA, 25 bp, Homo sapien
tacgtcccactgtccgactttgagg

SEQ ID NO: 3085888 - DNA, 25 bp, Homo sapien
tgacacaatcgtatcttccttctgg

SEQ ID NO: 3085889 - DNA, 25 bp, Homo sapien
tacctgcagtgcagatatacgtccc

SEQ ID NO: 3085890 - DNA, 25 bp, Homo sapien
ccttggtccagatgtgtgaaggaag

SEQ ID NO: 3085891 - DNA, 25 bp, Homo sapien
agcaggacaggttcagtctttcacc

SEQ ID NO: 3085892 - DNA, 25 bp, Homo sapien
caggttcagtctttcaccttggtcc

SEQ ID NO: 3085893 - DNA, 25 bp, Homo sapien
gaaggaagattccagttcgggcttg

SEQ ID NO: 3085894 - DNA, 25 bp, Homo sapien
tggcagaaccaacttccaacttcca

SEQ ID NO: 3085895 - DNA, 25 bp, Homo sapien
gagtgggaatggagcgagatgtgtc

SEQ ID NO: 3085896 - DNA, 25 bp, Homo sapien
tggagcgagatgtgtctggccacca

SEQ ID NO: 3085897 - DNA, 25 bp, Homo sapien
gctcaggtgctcttggcagaaccaa

SEQ ID NO: 3085898 - DNA, 25 bp, Homo sapien
aaccacaaagaacgatgaggaaggg

SEQ ID NO: 3085899 - DNA, 25 bp, Homo sapien
gaaatgatcctagcttgacatcgga

SEQ ID NO: 3085900 - DNA, 25 bp, Homo sapien
gataaaacgcggtcctgttcctcaa

SEQ ID NO: 3085901 - DNA, 25 bp, Homo sapien
attctgaggtctgcatatggatccc

SEQ ID NO: 3085902 - DNA, 25 bp, Homo sapien
cacggtgaccagttcactcttggta

SEQ ID NO: 3085903 - DNA, 25 bp, Homo sapien
agtgagactccatcaaagaaagaaa

SEQ ID NO: 3085904 - DNA, 25 bp, Homo sapien
gagtgagactccatcaaagaaagaa

SEQ ID NO: 3085905 - DNA, 25 bp, Homo sapien
gaagggcctggcctattgggaatat

SEQ ID NO: 3085906 - DNA, 25 bp, Homo sapien
agctgttattcacgccactgtgtgc

SEQ ID NO: 3085907 - DNA, 25 bp, Homo sapien
ggtggagagttaagtccagtgtcac

SEQ ID NO: 3085908 - DNA, 25 bp, Homo sapien
tatgtctagtgcttacgtattcagg

SEQ ID NO: 3085909 - DNA, 25 bp, Homo sapien
gtcatccttatagaacagcatctgg

SEQ ID NO: 3085910 - DNA, 25 bp, Homo sapien
tgttgtaaaacagcacgtcatcctt

SEQ ID NO: 3085911 - DNA, 25 bp, Homo sapien
cagtccggcaggctcttcatgtcaa

SEQ ID NO: 3085912 - DNA, 25 bp, Homo sapien
acatccgcgaagcactgcagggtca

SEQ ID NO: 3085913 - DNA, 25 bp, Homo sapien
ctgtaggatggagtaatcatatctc

SEQ ID NO: 3085914 - DNA, 25 bp, Homo sapien
aggatggagtaatcatatctcatta

SEQ ID NO: 3085915 - DNA, 25 bp, Homo sapien
gtaggatggagtaatcatatctcat

SEQ ID NO: 3085916 - DNA, 25 bp, Homo sapien
tgtaggatggagtaatcatatctca

SEQ ID NO: 3085917 - DNA, 25 bp, Homo sapien
cacgaagcatagagtccctgatgaa

SEQ ID NO: 3085918 - DNA, 25 bp, Homo sapien
tagagtccctgatgaacttctgtgc

SEQ ID NO: 3085919 - DNA, 25 bp, Homo sapien
tactgggagccacgaagcatagagt

SEQ ID NO: 3085920 - DNA, 25 bp, Homo sapien
tcaggaaaattactgggagccacga

SEQ ID NO: 3085921 - DNA, 25 bp, Homo sapien
caggcttcaaagataggcagcaccc

SEQ ID NO: 3085922 - DNA, 25 bp, Homo sapien
gaagcacctacagttgagcagagaa

SEQ ID NO: 3085923 - DNA, 25 bp, Homo sapien
gattatggatatcctgcctccgtgg

SEQ ID NO: 3085924 - DNA, 25 bp, Homo sapien
gagtcaggcctatggctccagacaa

SEQ ID NO: 3085925 - DNA, 25 bp, Homo sapien
aactgactaaacaattcatcaagat

SEQ ID NO: 3085926 - DNA, 25 bp, Homo sapien
caagagtagtcgtgagaacagagaa

SEQ ID NO: 3085927 - DNA, 25 bp, Homo sapien
actagtcaagagtagtcgtgagaac

SEQ ID NO: 3085928 - DNA, 25 bp, Homo sapien
tcatcaagataacccactactttca

SEQ ID NO: 3085929 - DNA, 25 bp, Homo sapien
taatgtgcgttttaggcatcacaga

SEQ ID NO: 3085930 - DNA, 25 bp, Homo sapien
tgttagaagtatcaaaccccagcaa

SEQ ID NO: 3085931 - DNA, 25 bp, Homo sapien
gatctaagcctttctaaaaatgccc

SEQ ID NO: 3085932 - DNA, 25 bp, Homo sapien
tgcccacatgggataaactttagtt

SEQ ID NO: 3085933 - DNA, 25 bp, Homo sapien
agttttcttgaccctcaaggcttga

SEQ ID NO: 3085934 - DNA, 25 bp, Homo sapien
ttttcttgaccctcaaggcttgaac

SEQ ID NO: 3085935 - DNA, 25 bp, Homo sapien
gttttcttgaccctcaaggcttgaa

SEQ ID NO: 3085936 - DNA, 25 bp, Homo sapien
agcagaagggtcagcaggactccaa

SEQ ID NO: 3085937 - DNA, 25 bp, Homo sapien
agagcagaagggtcagcaggactcc

SEQ ID NO: 3085938 - DNA, 25 bp, Homo sapien
agaagggtcagcaggactccaagcc

SEQ ID NO: 3085939 - DNA, 25 bp, Homo sapien
gggtcagcaggactccaagccacat

SEQ ID NO: 3085940 - DNA, 25 bp, Homo sapien
gccccttgggcccacctcggctgca

SEQ ID NO: 3085941 - DNA, 25 bp, Homo sapien
ccccttgggcccacctcggctgcat

SEQ ID NO: 3085942 - DNA, 25 bp, Homo sapien
gactgcaggcacagttagttctgcc

SEQ ID NO: 3085943 - DNA, 25 bp, Homo sapien
aaggcactgcccacaagtcaccgtt

SEQ ID NO: 3085944 - DNA, 25 bp, Homo sapien
tgactcgctcagcagaaggcactgc

SEQ ID NO: 3085945 - DNA, 25 bp, Homo sapien
cacaagtcaccgttgagaaacccgc

SEQ ID NO: 3085946 - DNA, 25 bp, Homo sapien
ccggctgtggcgctggtcaggtaat

SEQ ID NO: 3085947 - DNA, 25 bp, Homo sapien
cgctggtcaggtaatggcagccatg

SEQ ID NO: 3085948 - DNA, 25 bp, Homo sapien
cccggcgcctgcagagagaccggct

SEQ ID NO: 3085949 - DNA, 25 bp, Homo sapien
ctgtggcgctggtcaggtaatggca

SEQ ID NO: 3085950 - DNA, 25 bp, Homo sapien
ctgcagtgctcctgccttcaaatac

SEQ ID NO: 3085951 - DNA, 25 bp, Homo sapien
cagtgctcctgccttcaaataccgg

SEQ ID NO: 3085952 - DNA, 25 bp, Homo sapien
ctcctgccttcaaataccggggaag

SEQ ID NO: 3085953 - DNA, 25 bp, Homo sapien
agtgctcctgccttcaaataccggg

SEQ ID NO: 3085954 - DNA, 25 bp, Homo sapien
tcagcccgctggctgcattgttctc

SEQ ID NO: 3085955 - DNA, 25 bp, Homo sapien
cattgttctcccctgacattgttct

SEQ ID NO: 3085956 - DNA, 25 bp, Homo sapien
acattgttctcaggccggctctgct

SEQ ID NO: 3085957 - DNA, 25 bp, Homo sapien
ccctgacattgttctcaggccggct

SEQ ID NO: 3085958 - DNA, 25 bp, Homo sapien
gattgtttttcccaagactgggctc

SEQ ID NO: 3085959 - DNA, 25 bp, Homo sapien
ggccacgtaggttactgtggcattt

SEQ ID NO: 3085960 - DNA, 25 bp, Homo sapien
gggaatccgatgagattgtttttcc

SEQ ID NO: 3085961 - DNA, 25 bp, Homo sapien
cagttcttgggccacgtaggttact

SEQ ID NO: 3085962 - DNA, 25 bp, Homo sapien
tcagacggcaaaagacaaaccccac

SEQ ID NO: 3085963 - DNA, 25 bp, Homo sapien
caggggccactcagacggcaaaaga

SEQ ID NO: 3085964 - DNA, 25 bp, Homo sapien
gcatcccaggggccactcagacggc

SEQ ID NO: 3085965 - DNA, 25 bp, Homo sapien
ccactcagacggcaaaagacaaacc

SEQ ID NO: 3085966 - DNA, 25 bp, Homo sapien
tccatgcagaggtggactcaactga

SEQ ID NO: 3085967 - DNA, 25 bp, Homo sapien
taattaggcaggaatatcaccaccc

SEQ ID NO: 3085968 - DNA, 25 bp, Homo sapien
gatctttcagactgaccccacctgg

SEQ ID NO: 3085969 - DNA, 25 bp, Homo sapien
caaagaagttactgatgatggatcc

SEQ ID NO: 3085970 - DNA, 25 bp, Homo sapien
aacactgaatgaaagcaagcaccac

SEQ ID NO: 3085971 - DNA, 25 bp, Homo sapien
gctttggacagtctacccgctagag

SEQ ID NO: 3085972 - DNA, 25 bp, Homo sapien
cccgctagagttcttgtatgtaaga

SEQ ID NO: 3085973 - DNA, 25 bp, Homo sapien
gaacatattcctgatacaatgaaag

SEQ ID NO: 3085974 - DNA, 25 bp, Homo sapien
agagaagaatatttattatacaaat

SEQ ID NO: 3085975 - DNA, 25 bp, Homo sapien
gagaagaatatttattatacaaata

SEQ ID NO: 3085976 - DNA, 25 bp, Homo sapien
ctgtgaagagaatactcatttcatc

SEQ ID NO: 3085977 - DNA, 25 bp, Homo sapien
ttggatatatgcatcatttccttca

SEQ ID NO: 3085978 - DNA, 25 bp, Homo sapien
gtgaagagaatactcatttcatcat

SEQ ID NO: 3085979 - DNA, 25 bp, Homo sapien
ctatacattcttagctgatgatata

SEQ ID NO: 3085980 - DNA, 25 bp, Homo sapien
tgtaggactccatcagaaacttttt

SEQ ID NO: 3085981 - DNA, 25 bp, Homo sapien
taataaattcctccacgttgccagc

SEQ ID NO: 3085982 - DNA, 25 bp, Homo sapien
taaccaaacagatagatgcacggct

SEQ ID NO: 3085983 - DNA, 25 bp, Homo sapien
gaagaaccgcataataacctcagcc

SEQ ID NO: 3085984 - DNA, 25 bp, Homo sapien
aagttgttccaatgaggactgcata

SEQ ID NO: 3085985 - DNA, 25 bp, Homo sapien
ccaatgaggactgcatagtttccaa

SEQ ID NO: 3085986 - DNA, 25 bp, Homo sapien
tagtttccaaataaccaggccacac

SEQ ID NO: 3085987 - DNA, 25 bp, Homo sapien
aactcattaaatagcccttgacaaa

SEQ ID NO: 3085988 - DNA, 25 bp, Homo sapien
gccctcatctgagaggtgagacctg

SEQ ID NO: 3085989 - DNA, 25 bp, Homo sapien
ttgtgaagccacaaatcaccctctt

SEQ ID NO: 3085990 - DNA, 25 bp, Homo sapien
gatccaaagggctgtatgaactcag

SEQ ID NO: 3085991 - DNA, 25 bp, Homo sapien
caaagctgaatactaaatgccaatc

SEQ ID NO: 3085992 - DNA, 25 bp, Homo sapien
tagtgtccgcattcaggtctgggct

SEQ ID NO: 3085993 - DNA, 25 bp, Homo sapien
aaatgtgggacatacgccattatct

SEQ ID NO: 3085994 - DNA, 25 bp, Homo sapien
tcacccagacagaaatgacgactgc

SEQ ID NO: 3085995 - DNA, 25 bp, Homo sapien
tctttgagctcactatctcccatct

SEQ ID NO: 3085996 - DNA, 25 bp, Homo sapien
ccacagttcattatttaattaaagc

SEQ ID NO: 3085997 - DNA, 25 bp, Homo sapien
ttttttttctgaagcagggtcttgc

SEQ ID NO: 3085998 - DNA, 25 bp, Homo sapien
tttttctgaagcagggtcttgctct

SEQ ID NO: 3085999 - DNA, 25 bp, Homo sapien
cagttcattatttaattaaagcttt

SEQ ID NO: 3086000 - DNA, 25 bp, Homo sapien
tccaaagcaaccttaataggggcta

SEQ ID NO: 3086001 - DNA, 25 bp, Homo sapien
acatccaaagcaaccttaatagggg

SEQ ID NO: 3086002 - DNA, 25 bp, Homo sapien
gtggggcctcttcctacatccaaag

SEQ ID NO: 3086003 - DNA, 25 bp, Homo sapien
ctgtcttagttccaatgtggggcct

SEQ ID NO: 3086004 - DNA, 25 bp, Homo sapien
agaagttagctgaggtcataaaaac

SEQ ID NO: 3086005 - DNA, 25 bp, Homo sapien
aaaaacaccatgtagtaacatattc

SEQ ID NO: 3086006 - DNA, 25 bp, Homo sapien
aacagaagttagctgaggtcataaa

SEQ ID NO: 3086007 - DNA, 25 bp, Homo sapien
taacatattcagctgccccccagat

SEQ ID NO: 3086008 - DNA, 25 bp, Homo sapien
ggctagaatgctccactcactgcct

SEQ ID NO: 3086009 - DNA, 25 bp, Homo sapien
caggctagaatgctccactcactgc

SEQ ID NO: 3086010 - DNA, 25 bp, Homo sapien
ccaggctagaatgctccactcactg

SEQ ID NO: 3086011 - DNA, 25 bp, Homo sapien
tagaatgctccactcactgcctcac

SEQ ID NO: 3086012 - DNA, 25 bp, Homo sapien
tcgtggcagggagaaacagacaata

SEQ ID NO: 3086013 - DNA, 25 bp, Homo sapien
aaaaatctccgtctctcgtggcagg

SEQ ID NO: 3086014 - DNA, 25 bp, Homo sapien
tcagcaactttaaggtggtcagaaa

SEQ ID NO: 3086015 - DNA, 25 bp, Homo sapien
taatgcctctgataccaggaacagt

SEQ ID NO: 3086016 - DNA, 25 bp, Homo sapien
ggaatacaaatgacagggctctgag

SEQ ID NO: 3086017 - DNA, 25 bp, Homo sapien
ggtgacacttgagcaaacactcgaa

SEQ ID NO: 3086018 - DNA, 25 bp, Homo sapien
tgagcaaaggagcaacacaacatgc

SEQ ID NO: 3086019 - DNA, 25 bp, Homo sapien
tagcaaggtcagtgctgctggagca

SEQ ID NO: 3086020 - DNA, 25 bp, Homo sapien
ttcaaagggtatatgactattcccc

SEQ ID NO: 3086021 - DNA, 25 bp, Homo sapien
gcaggctaaatgaacactgtataat

SEQ ID NO: 3086022 - DNA, 25 bp, Homo sapien
tcacttaactaagaagagtggtttc

SEQ ID NO: 3086023 - DNA, 25 bp, Homo sapien
aaactcatggttcccaatcccagct

SEQ ID NO: 3086024 - DNA, 25 bp, Homo sapien
tacttgggctcttgatcccatcctg

SEQ ID NO: 3086025 - DNA, 25 bp, Homo sapien
ttgggctcttgatcccatcctgacc

SEQ ID NO: 3086026 - DNA, 25 bp, Homo sapien
tctccttttcaagatacattcttct

SEQ ID NO: 3086027 - DNA, 25 bp, Homo sapien
tcaagatacattcttctacttgggc

SEQ ID NO: 3086028 - DNA, 25 bp, Homo sapien
gaaaccgagcacactaacattaaga

SEQ ID NO: 3086029 - DNA, 25 bp, Homo sapien
gccatgtggcacaagaccagaagcc

SEQ ID NO: 3086030 - DNA, 25 bp, Homo sapien
ggcagagaggtcaatagcacaggtc

SEQ ID NO: 3086031 - DNA, 25 bp, Homo sapien
acatctagctcctctgatccaggaa

SEQ ID NO: 3086032 - DNA, 25 bp, Homo sapien
taggtccccatttacagagagaaca

SEQ ID NO: 3086033 - DNA, 25 bp, Homo sapien
gagagaacacaaggaaccacatttt

SEQ ID NO: 3086034 - DNA, 25 bp, Homo sapien
cagctggaaagaatcatagaggtag

SEQ ID NO: 3086035 - DNA, 25 bp, Homo sapien
tagaggtaggccagcatgcctcggt

SEQ ID NO: 3086036 - DNA, 25 bp, Homo sapien
aaaactatggtgcttggttgggctc

SEQ ID NO: 3086037 - DNA, 25 bp, Homo sapien
ctcagtgtttcatcagcgaggccca

SEQ ID NO: 3086038 - DNA, 25 bp, Homo sapien
actgggcccacgaagacgataaaga

SEQ ID NO: 3086039 - DNA, 25 bp, Homo sapien
aactggagagggacttaggcatcaa

SEQ ID NO: 3086040 - DNA, 25 bp, Homo sapien
aaactgaagaggaatcatttcaaac

SEQ ID NO: 3086041 - DNA, 25 bp, Homo sapien
tctaaactgaagaggaatcatttca

SEQ ID NO: 3086042 - DNA, 25 bp, Homo sapien
tgaagaggaatcatttcaaacttct

SEQ ID NO: 3086043 - DNA, 25 bp, Homo sapien
ctctaaactgaagaggaatcatttc

SEQ ID NO: 3086044 - DNA, 25 bp, Homo sapien
taaactttctgatacctgggactct

SEQ ID NO: 3086045 - DNA, 25 bp, Homo sapien
tttcacacagttatcgtcgaactga

SEQ ID NO: 3086046 - DNA, 25 bp, Homo sapien
tgggactctattctaccagttgtat

SEQ ID NO: 3086047 - DNA, 25 bp, Homo sapien
taattattcatgatcaaccacagtc

SEQ ID NO: 3086048 - DNA, 25 bp, Homo sapien
ggcaagatcccatccctatttaaaa

SEQ ID NO: 3086049 - DNA, 25 bp, Homo sapien
caaaatggcctaagaggctgggtgc

SEQ ID NO: 3086050 - DNA, 25 bp, Homo sapien
tattggtctgcttcactgttctcta

SEQ ID NO: 3086051 - DNA, 25 bp, Homo sapien
taatcttagcactcagaaaggcaga

SEQ ID NO: 3086052 - DNA, 25 bp, Homo sapien
aatattaaaccatcagtcgggcatg

SEQ ID NO: 3086053 - DNA, 25 bp, Homo sapien
ggacactggccaagtctaggacaat

SEQ ID NO: 3086054 - DNA, 25 bp, Homo sapien
cacattagtaactgatctgggcaag

SEQ ID NO: 3086055 - DNA, 25 bp, Homo sapien
taaggaagtgctcgtcaagacaatg

SEQ ID NO: 3086056 - DNA, 25 bp, Homo sapien
gcttctcagtactaccacttctgta

SEQ ID NO: 3086057 - DNA, 25 bp, Homo sapien
cacttctgtagtactcccgacaaaa

SEQ ID NO: 3086058 - DNA, 25 bp, Homo sapien
gctttacactggagaaatctagtag

SEQ ID NO: 3086059 - DNA, 25 bp, Homo sapien
gccaaggcatattctacagattaac

SEQ ID NO: 3086060 - DNA, 25 bp, Homo sapien
taatcagttcaatttgtagggctct

SEQ ID NO: 3086061 - DNA, 25 bp, Homo sapien
ggctctgtggcaatagtggattact

SEQ ID NO: 3086062 - DNA, 25 bp, Homo sapien
caagatcttggacctataaatgcca

SEQ ID NO: 3086063 - DNA, 25 bp, Homo sapien
tagttatgtaggtgagtgtctctgc

SEQ ID NO: 3086064 - DNA, 25 bp, Homo sapien
tcttcatcctgacagtcactgctgc

SEQ ID NO: 3086065 - DNA, 25 bp, Homo sapien
tttagacacattgccaggatacatg

SEQ ID NO: 3086066 - DNA, 25 bp, Homo sapien
aaagttcgtgatctcctaggttcca

SEQ ID NO: 3086067 - DNA, 25 bp, Homo sapien
gctgaagttagatggactcatggca

SEQ ID NO: 3086068 - DNA, 25 bp, Homo sapien
gacgtaaccagaaatcaagccactg

SEQ ID NO: 3086069 - DNA, 25 bp, Homo sapien
cactggtttgaagttctcggaggag

SEQ ID NO: 3086070 - DNA, 25 bp, Homo sapien
taaaccatactaacgaagcttcagt

SEQ ID NO: 3086071 - DNA, 25 bp, Homo sapien
actggagtcgatgacgtaaccagaa

SEQ ID NO: 3086072 - DNA, 25 bp, Homo sapien
gcaaggccataaggtagcctcttgt

SEQ ID NO: 3086073 - DNA, 25 bp, Homo sapien
gtatctgcttagtgtcaaaaacagg

SEQ ID NO: 3086074 - DNA, 25 bp, Homo sapien
aaaacacactccaatctgagcaagg

SEQ ID NO: 3086075 - DNA, 25 bp, Homo sapien
gtttaccagatccaggcaattaaca

SEQ ID NO: 3086076 - DNA, 25 bp, Homo sapien
cccagtactggttcatcttagaaac

SEQ ID NO: 3086077 - DNA, 25 bp, Homo sapien
taaggtagtaaatatccactcccca

SEQ ID NO: 3086078 - DNA, 25 bp, Homo sapien
aaaccaagatctggaggccgggcgc

SEQ ID NO: 3086079 - DNA, 25 bp, Homo sapien
tcaatttgtcctagatgtggccagt

SEQ ID NO: 3086080 - DNA, 25 bp, Homo sapien
gaacagcaatgattccatggaccag

SEQ ID NO: 3086081 - DNA, 25 bp, Homo sapien
gaaattgagagcgttcccaggtcct

SEQ ID NO: 3086082 - DNA, 25 bp, Homo sapien
gaactaactaacttccttgcatggg

SEQ ID NO: 3086083 - DNA, 25 bp, Homo sapien
cccgacacctgttttgaagcatgaa

SEQ ID NO: 3086084 - DNA, 25 bp, Homo sapien
caagatttcgcgtagagtttctgca

SEQ ID NO: 3086085 - DNA, 25 bp, Homo sapien
tgcagaccttatggcaggccctgac

SEQ ID NO: 3086086 - DNA, 25 bp, Homo sapien
gaaactaacctgaaggcactgtccc

SEQ ID NO: 3086087 - DNA, 25 bp, Homo sapien
tcagaagagaatcccggctaagctg

SEQ ID NO: 3086088 - DNA, 25 bp, Homo sapien
cactaccgttaacagaatccggaga

SEQ ID NO: 3086089 - DNA, 25 bp, Homo sapien
aacaagccaccactaccgttaacag

SEQ ID NO: 3086090 - DNA, 25 bp, Homo sapien
tccgaagttaaagagcacactctcc

SEQ ID NO: 3086091 - DNA, 25 bp, Homo sapien
atcactcaacggatcccaacaagcc

SEQ ID NO: 3086092 - DNA, 25 bp, Homo sapien
gattctagtcttcacaggctccctg

SEQ ID NO: 3086093 - DNA, 25 bp, Homo sapien
ttcagcctgtagtaacctggatggt

SEQ ID NO: 3086094 - DNA, 25 bp, Homo sapien
cagcctgtggtcgtcttaactaata

SEQ ID NO: 3086095 - DNA, 25 bp, Homo sapien
catgtgtgttgtgtccagcctgtgg

SEQ ID NO: 3086096 - DNA, 25 bp, Homo sapien
ggtctattcatactcaacacaagga

SEQ ID NO: 3086097 - DNA, 25 bp, Homo sapien
tgactaatcaggaggcaacgtaacc

SEQ ID NO: 3086098 - DNA, 25 bp, Homo sapien
aaaaaacacgtatcagactctggga

SEQ ID NO: 3086099 - DNA, 25 bp, Homo sapien
ggttacgttgcctcctgattagtca

SEQ ID NO: 3086100 - DNA, 25 bp, Homo sapien
ccagggagcctgtgaagactagaat

SEQ ID NO: 3086101 - DNA, 25 bp, Homo sapien
tattagttaagacgaccacaggctg

SEQ ID NO: 3086102 - DNA, 25 bp, Homo sapien
taaacctaaagctatcccctggatc

SEQ ID NO: 3086103 - DNA, 25 bp, Homo sapien
ccagtgtgactagttaagagcccca

SEQ ID NO: 3086104 - DNA, 25 bp, Homo sapien
tgactgcagtgcagcagtaattatg

SEQ ID NO: 3086105 - DNA, 25 bp, Homo sapien
gcactttttcgctatttaagttgga

SEQ ID NO: 3086106 - DNA, 25 bp, Homo sapien
aaatgtctgtttttcataattgctc

SEQ ID NO: 3086107 - DNA, 25 bp, Homo sapien
tgtgtgttatctgacaagatagtta

SEQ ID NO: 3086108 - DNA, 25 bp, Homo sapien
cagtaattatggtgcactttttcgc

SEQ ID NO: 3086109 - DNA, 25 bp, Homo sapien
aaggcaatgcatggccttccaataa

SEQ ID NO: 3086110 - DNA, 25 bp, Homo sapien
cttaaatagcgaaaaagtgcaccat

SEQ ID NO: 3086111 - DNA, 25 bp, Homo sapien
gcaattatgaaaaacagacatttac

SEQ ID NO: 3086112 - DNA, 25 bp, Homo sapien
gagaaatatccaacttaaatagcga

SEQ ID NO: 3086113 - DNA, 25 bp, Homo sapien
tattggaaggccatgcattgccttc

SEQ ID NO: 3086114 - DNA, 25 bp, Homo sapien
taactatcttgtcagataacacaca

SEQ ID NO: 3086115 - DNA, 25 bp, Homo sapien
cataattactgctgcactgcagtca

SEQ ID NO: 3086116 - DNA, 25 bp, Homo sapien
tagcactcagcaatacggaagtaat

SEQ ID NO: 3086117 - DNA, 25 bp, Homo sapien
gaaggatgaccgtcgggacagatac

SEQ ID NO: 3086118 - DNA, 25 bp, Homo sapien
cagaggttactctagcctgcttaaa

SEQ ID NO: 3086119 - DNA, 25 bp, Homo sapien
taggactggtaatccaacagggact

SEQ ID NO: 3086120 - DNA, 25 bp, Homo sapien
taccagaatggttatgatagcactc

SEQ ID NO: 3086121 - DNA, 25 bp, Homo sapien
gattggttatccaatgccaacagga

SEQ ID NO: 3086122 - DNA, 25 bp, Homo sapien
cattacttccgtattgctgagtgct

SEQ ID NO: 3086123 - DNA, 25 bp, Homo sapien
gagtgctatcataaccattctggta

SEQ ID NO: 3086124 - DNA, 25 bp, Homo sapien
gataaccaatcataggtgcagctgc

SEQ ID NO: 3086125 - DNA, 25 bp, Homo sapien
tatctgtcccgacggtcatccttca

SEQ ID NO: 3086126 - DNA, 25 bp, Homo sapien
tttaagcaggctagagtaacctctg

SEQ ID NO: 3086127 - DNA, 25 bp, Homo sapien
taagtccctgttggattaccagtcc

SEQ ID NO: 3086128 - DNA, 25 bp, Homo sapien
cataattgatcaatttgcaattgtt

SEQ ID NO: 3086129 - DNA, 25 bp, Homo sapien
caatttgcaattgttttcttgacag

SEQ ID NO: 3086130 - DNA, 25 bp, Homo sapien
aattgatcaatttgcaattgttttc

SEQ ID NO: 3086131 - DNA, 25 bp, Homo sapien
tcaatttgcaattgttttcttgaca

SEQ ID NO: 3086132 - DNA, 25 bp, Homo sapien
gatcaatttgcaattgttttcttga

SEQ ID NO: 3086133 - DNA, 25 bp, Homo sapien
tgatcaatttgcaattgttttcttg

SEQ ID NO: 3086134 - DNA, 25 bp, Homo sapien
gaaaacaattgcaaattgatcaatt

SEQ ID NO: 3086135 - DNA, 25 bp, Homo sapien
ctgtcaagaaaacaattgcaaattg

SEQ ID NO: 3086136 - DNA, 25 bp, Homo sapien
tcaagaaaacaattgcaaattgatc

SEQ ID NO: 3086137 - DNA, 25 bp, Homo sapien
aacaattgcaaattgatcaattatg

SEQ ID NO: 3086138 - DNA, 25 bp, Homo sapien
tgtcaagaaaacaattgcaaattga

SEQ ID NO: 3086139 - DNA, 25 bp, Homo sapien
caagaaaacaattgcaaattgatca

SEQ ID NO: 3086140 - DNA, 25 bp, Homo sapien
gttgtctacaaatccatttaaatgg

SEQ ID NO: 3086141 - DNA, 25 bp, Homo sapien
gaaatgttggtagttacgagtcaca

SEQ ID NO: 3086142 - DNA, 25 bp, Homo sapien
gtttctttctgtccacaatgatttg

SEQ ID NO: 3086143 - DNA, 25 bp, Homo sapien
cacgcctaccatgaatagatctgtt

SEQ ID NO: 3086144 - DNA, 25 bp, Homo sapien
gtaaaaacatttcacgcctaccatg

SEQ ID NO: 3086145 - DNA, 25 bp, Homo sapien
tacgagtcacatcgttgtctacaaa

SEQ ID NO: 3086146 - DNA, 25 bp, Homo sapien
ccatttaaatggatttgtagacaac

SEQ ID NO: 3086147 - DNA, 25 bp, Homo sapien
gaaacagatctattcatggtaggcg

SEQ ID NO: 3086148 - DNA, 25 bp, Homo sapien
catggtaggcgtgaaatgtttttac

SEQ ID NO: 3086149 - DNA, 25 bp, Homo sapien
tgtgactcgtaactaccaacatttc

SEQ ID NO: 3086150 - DNA, 25 bp, Homo sapien
gatttgtagacaacgatgtgactcg

SEQ ID NO: 3086151 - DNA, 25 bp, Homo sapien
caaatcattgtggacagaaagaaac

SEQ ID NO: 3086152 - DNA, 25 bp, Homo sapien
tcagttggtcgaagacagaggttca

SEQ ID NO: 3086153 - DNA, 25 bp, Homo sapien
cccaagttgcttcagttggtcgaag

SEQ ID NO: 3086154 - DNA, 25 bp, Homo sapien
caggcacagcatacactttctttac

SEQ ID NO: 3086155 - DNA, 25 bp, Homo sapien
taacataaagcaagtgagcgacctt

SEQ ID NO: 3086156 - DNA, 25 bp, Homo sapien
gaactgctcgcagtaccaaaacagg

SEQ ID NO: 3086157 - DNA, 25 bp, Homo sapien
gaccttatctctgtgcttcgtgaag

SEQ ID NO: 3086158 - DNA, 25 bp, Homo sapien
gaacctctgtcttcgaccaactgaa

SEQ ID NO: 3086159 - DNA, 25 bp, Homo sapien
gagataaggtcgctcacttgcttta

SEQ ID NO: 3086160 - DNA, 25 bp, Homo sapien
tgcctgttttggtactgcgagcagt

SEQ ID NO: 3086161 - DNA, 25 bp, Homo sapien
gcttcacgaagcacagagataaggt

SEQ ID NO: 3086162 - DNA, 25 bp, Homo sapien
taaagaaagtgtatgctgtgcctgt

SEQ ID NO: 3086163 - DNA, 25 bp, Homo sapien
taattgcttgattagcttcacgaag

SEQ ID NO: 3086164 - DNA, 25 bp, Homo sapien
aatttgtcatcaattatgactaccc

SEQ ID NO: 3086165 - DNA, 25 bp, Homo sapien
catcaattatgactaccctaactcc

SEQ ID NO: 3086166 - DNA, 25 bp, Homo sapien
gaaatttgtcatcaattatgactac

SEQ ID NO: 3086167 - DNA, 25 bp, Homo sapien
tcaattatgactaccctaactcctc

SEQ ID NO: 3086168 - DNA, 25 bp, Homo sapien
caattatgactaccctaactcctca

SEQ ID NO: 3086169 - DNA, 25 bp, Homo sapien
tgtcatcaattatgactaccctaac

SEQ ID NO: 3086170 - DNA, 25 bp, Homo sapien
gtagtcataattgatgacaaatttc

SEQ ID NO: 3086171 - DNA, 25 bp, Homo sapien
ggagttagggtagtcataattgatg

SEQ ID NO: 3086172 - DNA, 25 bp, Homo sapien
gaggagttagggtagtcataattga

SEQ ID NO: 3086173 - DNA, 25 bp, Homo sapien
tgaggagttagggtagtcataattg

SEQ ID NO: 3086174 - DNA, 25 bp, Homo sapien
tagggtagtcataattgatgacaaa

SEQ ID NO: 3086175 - DNA, 25 bp, Homo sapien
gagttagggtagtcataattgatga

SEQ ID NO: 3086176 - DNA, 25 bp, Homo sapien
aatttgtcatcaattatgactaccc

SEQ ID NO: 3086177 - DNA, 25 bp, Homo sapien
catcaattatgactaccctaactcc

SEQ ID NO: 3086178 - DNA, 25 bp, Homo sapien
tcaattatgactaccctaactcctc

SEQ ID NO: 3086179 - DNA, 25 bp, Homo sapien
caattatgactaccctaactcctca

SEQ ID NO: 3086180 - DNA, 25 bp, Homo sapien
tgtcatcaattatgactaccctaac

SEQ ID NO: 3086181 - DNA, 25 bp, Homo sapien
tgtggaagatgtgaaatttgtcatc

SEQ ID NO: 3086182 - DNA, 25 bp, Homo sapien
ggagttagggtagtcataattgatg

SEQ ID NO: 3086183 - DNA, 25 bp, Homo sapien
gaggagttagggtagtcataattga

SEQ ID NO: 3086184 - DNA, 25 bp, Homo sapien
gatgacaaatttcacatcttccaca

SEQ ID NO: 3086185 - DNA, 25 bp, Homo sapien
tgaggagttagggtagtcataattg

SEQ ID NO: 3086186 - DNA, 25 bp, Homo sapien
tagggtagtcataattgatgacaaa

SEQ ID NO: 3086187 - DNA, 25 bp, Homo sapien
gagttagggtagtcataattgatga

SEQ ID NO: 3086188 - DNA, 25 bp, Homo sapien
cgtacattgctattttgccacactg

SEQ ID NO: 3086189 - DNA, 25 bp, Homo sapien
tttgccacactgcaacaccttacag

SEQ ID NO: 3086190 - DNA, 25 bp, Homo sapien
tgttgtggtgtgcaaaactccgtac

SEQ ID NO: 3086191 - DNA, 25 bp, Homo sapien
ccgtaccttcttgggaatacaattg

SEQ ID NO: 3086192 - DNA, 25 bp, Homo sapien
tatttttggtctggctgttgtggtg

SEQ ID NO: 3086193 - DNA, 25 bp, Homo sapien
ggtgtgcaaaactccgtacattgct

SEQ ID NO: 3086194 - DNA, 25 bp, Homo sapien
caattgtattcccaagaaggtacgg

SEQ ID NO: 3086195 - DNA, 25 bp, Homo sapien
aaagttagacaattgtattcccaag

SEQ ID NO: 3086196 - DNA, 25 bp, Homo sapien
caccacaacagccagaccaaaaata

SEQ ID NO: 3086197 - DNA, 25 bp, Homo sapien
ctgtaaggtgttgcagtgtggcaaa

SEQ ID NO: 3086198 - DNA, 25 bp, Homo sapien
tgtggcaaaatagcaatgtacggag

SEQ ID NO: 3086199 - DNA, 25 bp, Homo sapien
tgtacggagttttgcacaccacaac

SEQ ID NO: 3086200 - DNA, 25 bp, Homo sapien
gaattatacagatgacatgtgcttt

SEQ ID NO: 3086201 - DNA, 25 bp, Homo sapien
cactgggtgggtgatgaattataca

SEQ ID NO: 3086202 - DNA, 25 bp, Homo sapien
acacattccttttgacagggtctgt

SEQ ID NO: 3086203 - DNA, 25 bp, Homo sapien
caacctcaatggtattcctacagga

SEQ ID NO: 3086204 - DNA, 25 bp, Homo sapien
tgtgcttagggaacacacattcctt

SEQ ID NO: 3086205 - DNA, 25 bp, Homo sapien
taagggaacttgctgatttgggaat

SEQ ID NO: 3086206 - DNA, 25 bp, Homo sapien
acagaccctgtcaaaaggaatgtgt

SEQ ID NO: 3086207 - DNA, 25 bp, Homo sapien
aaagcacatgtcatctgtataattc

SEQ ID NO: 3086208 - DNA, 25 bp, Homo sapien
agcacattcccaaatcagcaagttc

SEQ ID NO: 3086209 - DNA, 25 bp, Homo sapien
cctgtaggaataccattgaggttga

SEQ ID NO: 3086210 - DNA, 25 bp, Homo sapien
aaggaatgtgtgttccctaagcaca

SEQ ID NO: 3086211 - DNA, 25 bp, Homo sapien
taattcatcacccacccagtgacag

SEQ ID NO: 3086212 - DNA, 25 bp, Homo sapien
cctactgcgcagaagcattcagatg

SEQ ID NO: 3086213 - DNA, 25 bp, Homo sapien
caaaatgagcacatgaagaggttgc

SEQ ID NO: 3086214 - DNA, 25 bp, Homo sapien
gagcacatgaagaggttgctgtgaa

SEQ ID NO: 3086215 - DNA, 25 bp, Homo sapien
ttaagtggccctactgcgcagaagc

SEQ ID NO: 3086216 - DNA, 25 bp, Homo sapien
ggttgctgtgaaactttaagtggcc

SEQ ID NO: 3086217 - DNA, 25 bp, Homo sapien
tcctcaaaatgagcacatgaagagg

SEQ ID NO: 3086218 - DNA, 25 bp, Homo sapien
ttcacagcaacctcttcatgtgctc

SEQ ID NO: 3086219 - DNA, 25 bp, Homo sapien
ctcttcatgtgctcattttgaggac

SEQ ID NO: 3086220 - DNA, 25 bp, Homo sapien
gcttctgcgcagtagggccacttaa

SEQ ID NO: 3086221 - DNA, 25 bp, Homo sapien
tagggccacttaaagtttcacagca

SEQ ID NO: 3086222 - DNA, 25 bp, Homo sapien
catctgaatgcttctgcgcagtagg

SEQ ID NO: 3086223 - DNA, 25 bp, Homo sapien
aatgcttctgcgcagtagggccact

SEQ ID NO: 3086224 - DNA, 25 bp, Homo sapien
taatgcaaaggaccttgtacatttt

SEQ ID NO: 3086225 - DNA, 25 bp, Homo sapien
cagctgcggttgtaaggtcttggca

SEQ ID NO: 3086226 - DNA, 25 bp, Homo sapien
gtatgttttcttgcagctgcggttg

SEQ ID NO: 3086227 - DNA, 25 bp, Homo sapien
ggccagaattttgaacttctgatga

SEQ ID NO: 3086228 - DNA, 25 bp, Homo sapien
taaggtcttggcaagacaagcagtg

SEQ ID NO: 3086229 - DNA, 25 bp, Homo sapien
gacaagcagtgtggccagaattttg

SEQ ID NO: 3086230 - DNA, 25 bp, Homo sapien
tcatcagaagttcaaaattctggcc

SEQ ID NO: 3086231 - DNA, 25 bp, Homo sapien
caaccgcagctgcaagaaaacatac

SEQ ID NO: 3086232 - DNA, 25 bp, Homo sapien
tgccaagaccttacaaccgcagctg

SEQ ID NO: 3086233 - DNA, 25 bp, Homo sapien
cactgcttgtcttgccaagacctta

SEQ ID NO: 3086234 - DNA, 25 bp, Homo sapien
aaaatgtacaaggtcctttgcatta

SEQ ID NO: 3086235 - DNA, 25 bp, Homo sapien
caaaattctggccacactgcttgtc

SEQ ID NO: 3086236 - DNA, 25 bp, Homo sapien
acagtgcataaaaacaacttttggg

SEQ ID NO: 3086237 - DNA, 25 bp, Homo sapien
cttgcctagacgagacacagtgcat

SEQ ID NO: 3086238 - DNA, 25 bp, Homo sapien
cgcttgcctagacgagacacagtgc

SEQ ID NO: 3086239 - DNA, 25 bp, Homo sapien
gcctagacgagacacagtgcataaa

SEQ ID NO: 3086240 - DNA, 25 bp, Homo sapien
tagacgagacacagtgcataaaaac

SEQ ID NO: 3086241 - DNA, 25 bp, Homo sapien
cgagacacagtgcataaaaacaact

SEQ ID NO: 3086242 - DNA, 25 bp, Homo sapien
gcactgtgtctcgtctaggcaagcg

SEQ ID NO: 3086243 - DNA, 25 bp, Homo sapien
agttgtttttatgcactgtgtctcg

SEQ ID NO: 3086244 - DNA, 25 bp, Homo sapien
gtttttatgcactgtgtctcgtcta

SEQ ID NO: 3086245 - DNA, 25 bp, Homo sapien
tttatgcactgtgtctcgtctaggc

SEQ ID NO: 3086246 - DNA, 25 bp, Homo sapien
tatgcactgtgtctcgtctaggcaa

SEQ ID NO: 3086247 - DNA, 25 bp, Homo sapien
cccaaaagttgtttttatgcactgt

SEQ ID NO: 3086248 - DNA, 25 bp, Homo sapien
cgtcatgtcgagacctgccagagag

SEQ ID NO: 3086249 - DNA, 25 bp, Homo sapien
tagtcgtcatgtcgagacctgccag

SEQ ID NO: 3086250 - DNA, 25 bp, Homo sapien
tcatgtcgagacctgccagagagag

SEQ ID NO: 3086251 - DNA, 25 bp, Homo sapien
agtcgtcatgtcgagacctgccaga

SEQ ID NO: 3086252 - DNA, 25 bp, Homo sapien
catgtcgagacctgccagagagaga

SEQ ID NO: 3086253 - DNA, 25 bp, Homo sapien
tcgtcatgtcgagacctgccagaga

SEQ ID NO: 3086254 - DNA, 25 bp, Homo sapien
tctctctggcaggtctcgacatgac

SEQ ID NO: 3086255 - DNA, 25 bp, Homo sapien
tctctggcaggtctcgacatgacga

SEQ ID NO: 3086256 - DNA, 25 bp, Homo sapien
ctggcaggtctcgacatgacgacta

SEQ ID NO: 3086257 - DNA, 25 bp, Homo sapien
tctggcaggtctcgacatgacgact

SEQ ID NO: 3086258 - DNA, 25 bp, Homo sapien
tctctctctggcaggtctcgacatg

SEQ ID NO: 3086259 - DNA, 25 bp, Homo sapien
ctctggcaggtctcgacatgacgac

SEQ ID NO: 3086260 - DNA, 25 bp, Homo sapien
aattggtgagtactggcacatgaga

SEQ ID NO: 3086261 - DNA, 25 bp, Homo sapien
tctcatgtgccagtactcaccaatt

SEQ ID NO: 3086262 - DNA, 25 bp, Homo sapien
catagtaagtgggaaaagaaagtgc

SEQ ID NO: 3086263 - DNA, 25 bp, Homo sapien
actaagccttttacaaattggtgag

SEQ ID NO: 3086264 - DNA, 25 bp, Homo sapien
ggagcaacttctcacacatagtaag

SEQ ID NO: 3086265 - DNA, 25 bp, Homo sapien
catgagatctagagcaggagcaact

SEQ ID NO: 3086266 - DNA, 25 bp, Homo sapien
agtgctttgaaagttcctccctcac

SEQ ID NO: 3086267 - DNA, 25 bp, Homo sapien
aattggtgagtactggcacatgaga

SEQ ID NO: 3086268 - DNA, 25 bp, Homo sapien
ctcaccaatttgtaaaaggcttagt

SEQ ID NO: 3086269 - DNA, 25 bp, Homo sapien
tatgtgtgagaagttgctcctgctc

SEQ ID NO: 3086270 - DNA, 25 bp, Homo sapien
tctcatgtgccagtactcaccaatt

SEQ ID NO: 3086271 - DNA, 25 bp, Homo sapien
gtgagggaggaactttcaaagcact

SEQ ID NO: 3086272 - DNA, 25 bp, Homo sapien
tcttttcccacttactatgtgtgag

SEQ ID NO: 3086273 - DNA, 25 bp, Homo sapien
gctcctgctctagatctcatgtgcc

SEQ ID NO: 3086274 - DNA, 25 bp, Homo sapien
gtttgctgaaatgtcgaagaagtag

SEQ ID NO: 3086275 - DNA, 25 bp, Homo sapien
ctacttcttcgacatttcagcaaac

SEQ ID NO: 3086276 - DNA, 25 bp, Homo sapien
gaaatggagagagcagctttaaaag

SEQ ID NO: 3086277 - DNA, 25 bp, Homo sapien
tcaagtttgaaatggagagagcagc

SEQ ID NO: 3086278 - DNA, 25 bp, Homo sapien
tgtcgaagaagtagttccaaacttc

SEQ ID NO: 3086279 - DNA, 25 bp, Homo sapien
caatgttcaatgaaatttttgttca

SEQ ID NO: 3086280 - DNA, 25 bp, Homo sapien
tagttccaaacttcaatgttcaatg

SEQ ID NO: 3086281 - DNA, 25 bp, Homo sapien
gtttgctgaaatgtcgaagaagtag

SEQ ID NO: 3086282 - DNA, 25 bp, Homo sapien
ctacttcttcgacatttcagcaaac

SEQ ID NO: 3086283 - DNA, 25 bp, Homo sapien
cattgaacattgaagtttggaacta

SEQ ID NO: 3086284 - DNA, 25 bp, Homo sapien
tgaacaaaaatttcattgaacattg

SEQ ID NO: 3086285 - DNA, 25 bp, Homo sapien
taaagctgctctctccatttcaaac

SEQ ID NO: 3086286 - DNA, 25 bp, Homo sapien
gaagtttggaactacttcttcgaca

SEQ ID NO: 3086287 - DNA, 25 bp, Homo sapien
tgctctctccatttcaaacttgaac

SEQ ID NO: 3086288 - DNA, 25 bp, Homo sapien
ttatcctcacagttcactgccgtgg

SEQ ID NO: 3086289 - DNA, 25 bp, Homo sapien
tgttctctccgagggaaaaaatgga

SEQ ID NO: 3086290 - DNA, 25 bp, Homo sapien
catgactgccatggtacagccttgt

SEQ ID NO: 3086291 - DNA, 25 bp, Homo sapien
agaacatatcacctctgccccgtaa

SEQ ID NO: 3086292 - DNA, 25 bp, Homo sapien
gaaaaagctgaacgtgtgccagtaa

SEQ ID NO: 3086293 - DNA, 25 bp, Homo sapien
cactgtgatctgtgggtctttgagt

SEQ ID NO: 3086294 - DNA, 25 bp, Homo sapien
gacagaagaaataccacggcagtga

SEQ ID NO: 3086295 - DNA, 25 bp, Homo sapien
tcaaagacccacagatcacagtgaa

SEQ ID NO: 3086296 - DNA, 25 bp, Homo sapien
ccacggcagtgaactgtgaggataa

SEQ ID NO: 3086297 - DNA, 25 bp, Homo sapien
gaagattactggcacacgttcagct

SEQ ID NO: 3086298 - DNA, 25 bp, Homo sapien
gaaacaaggctgtaccatggcagtc

SEQ ID NO: 3086299 - DNA, 25 bp, Homo sapien
cattttttccctcggagagaacagt

SEQ ID NO: 3086300 - DNA, 25 bp, Homo sapien
actagtgatcggctggctgcttcca

SEQ ID NO: 3086301 - DNA, 25 bp, Homo sapien
aggactagtgatcggctggctgctt

SEQ ID NO: 3086302 - DNA, 25 bp, Homo sapien
aggcctaggcatgacaatcggagga

SEQ ID NO: 3086303 - DNA, 25 bp, Homo sapien
ctgtctttgtggcaaggcctaggca

SEQ ID NO: 3086304 - DNA, 25 bp, Homo sapien
tggctgcttccagtcgattagagag

SEQ ID NO: 3086305 - DNA, 25 bp, Homo sapien
taggcatgacaatcggaggactcga

SEQ ID NO: 3086306 - DNA, 25 bp, Homo sapien
tggaagcagccagccgatcactagt

SEQ ID NO: 3086307 - DNA, 25 bp, Homo sapien
tctctaatcgactggaagcagccag

SEQ ID NO: 3086308 - DNA, 25 bp, Homo sapien
ctcgagtcctccgattgtcatgcct

SEQ ID NO: 3086309 - DNA, 25 bp, Homo sapien
tgcctaggccttgccacaaagacag

SEQ ID NO: 3086310 - DNA, 25 bp, Homo sapien
gagtcctccgattgtcatgcctagg

SEQ ID NO: 3086311 - DNA, 25 bp, Homo sapien
aagcagccagccgatcactagtcct

SEQ ID NO: 3086312 - DNA, 25 bp, Homo sapien
gtttcccagaagatctccatttaac

SEQ ID NO: 3086313 - DNA, 25 bp, Homo sapien
gtacaaactcgcattcatggcttgg

SEQ ID NO: 3086314 - DNA, 25 bp, Homo sapien
tacaaactcgcattcatggcttggt

SEQ ID NO: 3086315 - DNA, 25 bp, Homo sapien
ggtttcccagaagatctccatttaa

SEQ ID NO: 3086316 - DNA, 25 bp, Homo sapien
gttagtacaaactcgcattcatggc

SEQ ID NO: 3086317 - DNA, 25 bp, Homo sapien
ttagtacaaactcgcattcatggct

SEQ ID NO: 3086318 - DNA, 25 bp, Homo sapien
ccaagccatgaatgcgagtttgtac

SEQ ID NO: 3086319 - DNA, 25 bp, Homo sapien
accaagccatgaatgcgagtttgta

SEQ ID NO: 3086320 - DNA, 25 bp, Homo sapien
caagccatgaatgcgagtttgtact

SEQ ID NO: 3086321 - DNA, 25 bp, Homo sapien
gttaaatggagatcttctgggaaac

SEQ ID NO: 3086322 - DNA, 25 bp, Homo sapien
gccatgaatgcgagtttgtactaac

SEQ ID NO: 3086323 - DNA, 25 bp, Homo sapien
ttaaatggagatcttctgggaaacc

SEQ ID NO: 3086324 - DNA, 25 bp, Homo sapien
gctacagatgtggcctccagagggc

SEQ ID NO: 3086325 - DNA, 25 bp, Homo sapien
ctacagatgtggcctccagagggct

SEQ ID NO: 3086326 - DNA, 25 bp, Homo sapien
tacagatgtggcctccagagggcta

SEQ ID NO: 3086327 - DNA, 25 bp, Homo sapien
acagatgtggcctccagagggctag

SEQ ID NO: 3086328 - DNA, 25 bp, Homo sapien
tgctacagatgtggcctccagaggg

SEQ ID NO: 3086329 - DNA, 25 bp, Homo sapien
tagccctctggaggccacatctgta

SEQ ID NO: 3086330 - DNA, 25 bp, Homo sapien
ctagccctctggaggccacatctgt

SEQ ID NO: 3086331 - DNA, 25 bp, Homo sapien
agccctctggaggccacatctgtag

SEQ ID NO: 3086332 - DNA, 25 bp, Homo sapien
gccctctggaggccacatctgtagc

SEQ ID NO: 3086333 - DNA, 25 bp, Homo sapien
ccctctggaggccacatctgtagca

SEQ ID NO: 3086334 - DNA, 25 bp, Homo sapien
catctgtagcaatcagaataggagc

SEQ ID NO: 3086335 - DNA, 25 bp, Homo sapien
tagccctctggaggccacatctgta

SEQ ID NO: 3086336 - DNA, 25 bp, Homo sapien
tagcaatcagaataggagcttttcc

SEQ ID NO: 3086337 - DNA, 25 bp, Homo sapien
ctagccctctggaggccacatctgt

SEQ ID NO: 3086338 - DNA, 25 bp, Homo sapien
gaataggagcttttccatgtttgaa

SEQ ID NO: 3086339 - DNA, 25 bp, Homo sapien
ccctctggaggccacatctgtagca

SEQ ID NO: 3086340 - DNA, 25 bp, Homo sapien
gctcagataattgatcatgtatatg

SEQ ID NO: 3086341 - DNA, 25 bp, Homo sapien
cctagctagaattctgctcagataa

SEQ ID NO: 3086342 - DNA, 25 bp, Homo sapien
ccttacttaacctagctagaattct

SEQ ID NO: 3086343 - DNA, 25 bp, Homo sapien
tacttaacctagctagaattctgct

SEQ ID NO: 3086344 - DNA, 25 bp, Homo sapien
taacctagctagaattctgctcaga

SEQ ID NO: 3086345 - DNA, 25 bp, Homo sapien
taattgatcatgtatatgccttcct

SEQ ID NO: 3086346 - DNA, 25 bp, Homo sapien
tgagcagaattctagctaggttaag

SEQ ID NO: 3086347 - DNA, 25 bp, Homo sapien
gcagaattctagctaggttaagtaa

SEQ ID NO: 3086348 - DNA, 25 bp, Homo sapien
agaattctagctaggttaagtaagg

SEQ ID NO: 3086349 - DNA, 25 bp, Homo sapien
catatacatgatcaattatctgagc

SEQ ID NO: 3086350 - DNA, 25 bp, Homo sapien
aggaaggcatatacatgatcaatta

SEQ ID NO: 3086351 - DNA, 25 bp, Homo sapien
ttatctgagcagaattctagctagg

SEQ ID NO: 3086352 - DNA, 25 bp, Homo sapien
ccatggtgacaagagtcaacaagag

SEQ ID NO: 3086353 - DNA, 25 bp, Homo sapien
cctgccatgggtatccatggtgaca

SEQ ID NO: 3086354 - DNA, 25 bp, Homo sapien
caagagcgtgactgggttctaaatg

SEQ ID NO: 3086355 - DNA, 25 bp, Homo sapien
tgacaagagtcaacaagagcgtgac

SEQ ID NO: 3086356 - DNA, 25 bp, Homo sapien
caagagtcaacaagagcgtgactgg

SEQ ID NO: 3086357 - DNA, 25 bp, Homo sapien
caacaagagcgtgactgggttctaa

SEQ ID NO: 3086358 - DNA, 25 bp, Homo sapien
tcacgctcttgttgactcttgtcac

SEQ ID NO: 3086359 - DNA, 25 bp, Homo sapien
tagaacccagtcacgctcttgttga

SEQ ID NO: 3086360 - DNA, 25 bp, Homo sapien
tgtcaccatggatacccatggcagg

SEQ ID NO: 3086361 - DNA, 25 bp, Homo sapien
catttagaacccagtcacgctcttg

SEQ ID NO: 3086362 - DNA, 25 bp, Homo sapien
tttagaacccagtcacgctcttgtt

SEQ ID NO: 3086363 - DNA, 25 bp, Homo sapien
ctcttgttgactcttgtcaccatgg

SEQ ID NO: 3086364 - DNA, 25 bp, Homo sapien
cagcttaggaaagggcaaacttgga

SEQ ID NO: 3086365 - DNA, 25 bp, Homo sapien
caaacttggatcacgagcagtggat

SEQ ID NO: 3086366 - DNA, 25 bp, Homo sapien
gagctcctccattgaagcagattga

SEQ ID NO: 3086367 - DNA, 25 bp, Homo sapien
catttctggcgaaattaaagagatc

SEQ ID NO: 3086368 - DNA, 25 bp, Homo sapien
aagagatctgtgaccaaaagtggtc

SEQ ID NO: 3086369 - DNA, 25 bp, Homo sapien
aaagtggtcaagcactggagtctga

SEQ ID NO: 3086370 - DNA, 25 bp, Homo sapien
aaaaatccactgctcgtgatccaag

SEQ ID NO: 3086371 - DNA, 25 bp, Homo sapien
gaccacttttggtcacagatctctt

SEQ ID NO: 3086372 - DNA, 25 bp, Homo sapien
taatcaatctgcttcaatggaggag

SEQ ID NO: 3086373 - DNA, 25 bp, Homo sapien
tcagactccagtgcttgaccacttt

SEQ ID NO: 3086374 - DNA, 25 bp, Homo sapien
tccaagtttgccctttcctaagctg

SEQ ID NO: 3086375 - DNA, 25 bp, Homo sapien
gatctctttaatttcgccagaaatg

SEQ ID NO: 3086376 - DNA, 25 bp, Homo sapien
aaaccaaaagaagatgtgatgagct

SEQ ID NO: 3086377 - DNA, 25 bp, Homo sapien
aaagaagatgtgatgagcttaccag

SEQ ID NO: 3086378 - DNA, 25 bp, Homo sapien
caaaagaagatgtgatgagcttacc

SEQ ID NO: 3086379 - DNA, 25 bp, Homo sapien
agatgtgatgagcttaccagaaaaa

SEQ ID NO: 3086380 - DNA, 25 bp, Homo sapien
gaagatgtgatgagcttaccagaaa

SEQ ID NO: 3086381 - DNA, 25 bp, Homo sapien
ccaaaagaagatgtgatgagcttac

SEQ ID NO: 3086382 - DNA, 25 bp, Homo sapien
tttctggtaagctcatcacatcttc

SEQ ID NO: 3086383 - DNA, 25 bp, Homo sapien
taagctcatcacatcttcttttggt

SEQ ID NO: 3086384 - DNA, 25 bp, Homo sapien
tctggtaagctcatcacatcttctt

SEQ ID NO: 3086385 - DNA, 25 bp, Homo sapien
ggtaagctcatcacatcttcttttg

SEQ ID NO: 3086386 - DNA, 25 bp, Homo sapien
gtaagctcatcacatcttcttttgg

SEQ ID NO: 3086387 - DNA, 25 bp, Homo sapien
tttttctggtaagctcatcacatct

SEQ ID NO: 3086388 - DNA, 25 bp, Homo sapien
tatttgcttcctaacaactttgctg

SEQ ID NO: 3086389 - DNA, 25 bp, Homo sapien
tgtggccctagcaatggtcttttaa

SEQ ID NO: 3086390 - DNA, 25 bp, Homo sapien
cgaactgctcgataagtggattagc

SEQ ID NO: 3086391 - DNA, 25 bp, Homo sapien
taaggaccaagggtcgaactgctcg

SEQ ID NO: 3086392 - DNA, 25 bp, Homo sapien
gattagcaggcgtttcctctttgac

SEQ ID NO: 3086393 - DNA, 25 bp, Homo sapien
aggaattcatgtgtcccctggttga

SEQ ID NO: 3086394 - DNA, 25 bp, Homo sapien
tacagcaaagttgttaggaagcaaa

SEQ ID NO: 3086395 - DNA, 25 bp, Homo sapien
tttaaaagaccattgctagggccac

SEQ ID NO: 3086396 - DNA, 25 bp, Homo sapien
tatcgagcagttcgacccttggtcc

SEQ ID NO: 3086397 - DNA, 25 bp, Homo sapien
tcaaagaggaaacgcctgctaatcc

SEQ ID NO: 3086398 - DNA, 25 bp, Homo sapien
gctaatccacttatcgagcagttcg

SEQ ID NO: 3086399 - DNA, 25 bp, Homo sapien
cattaagttcaatttacatggctgg

SEQ ID NO: 3086400 - DNA, 25 bp, Homo sapien
tcatataaacattggtgcacttgaa

SEQ ID NO: 3086401 - DNA, 25 bp, Homo sapien
ctaatgtggagtgcgacttggccaa

SEQ ID NO: 3086402 - DNA, 25 bp, Homo sapien
tgtggatgtgtgtcatgacgtagaa

SEQ ID NO: 3086403 - DNA, 25 bp, Homo sapien
cctgataggcaaactctaatgtgga

SEQ ID NO: 3086404 - DNA, 25 bp, Homo sapien
gtgcacttgaactgagtgcaaacca

SEQ ID NO: 3086405 - DNA, 25 bp, Homo sapien
tgtgtgtcatgacgtagaaaaggat

SEQ ID NO: 3086406 - DNA, 25 bp, Homo sapien
tggtttgcactcagttcaagtgcac

SEQ ID NO: 3086407 - DNA, 25 bp, Homo sapien
ttttctacgtcatgacacacatcca

SEQ ID NO: 3086408 - DNA, 25 bp, Homo sapien
caagtgcaccaatgtttatatgaat

SEQ ID NO: 3086409 - DNA, 25 bp, Homo sapien
ttggccaagtcgcactccacattag

SEQ ID NO: 3086410 - DNA, 25 bp, Homo sapien
tccacattagagtttgcctatcagg

SEQ ID NO: 3086411 - DNA, 25 bp, Homo sapien
cactcagttcaagtgcaccaatgtt

SEQ ID NO: 3086412 - DNA, 25 bp, Homo sapien
gtgttttcactcttaagagtctgat

SEQ ID NO: 3086413 - DNA, 25 bp, Homo sapien
cactcttaagagtctgatactaatt

SEQ ID NO: 3086414 - DNA, 25 bp, Homo sapien
aatatgtgatcaaactgaattgtgt

SEQ ID NO: 3086415 - DNA, 25 bp, Homo sapien
taagagtctgatactaatttttccc

SEQ ID NO: 3086416 - DNA, 25 bp, Homo sapien
tatgtgatcaaactgaattgtgttt

SEQ ID NO: 3086417 - DNA, 25 bp, Homo sapien
tgaaatatgtgatcaaactgaattg

SEQ ID NO: 3086418 - DNA, 25 bp, Homo sapien
aaacacaattcagtttgatcacata

SEQ ID NO: 3086419 - DNA, 25 bp, Homo sapien
gggaaaaattagtatcagactctta

SEQ ID NO: 3086420 - DNA, 25 bp, Homo sapien
atcagactcttaagagtgaaaacac

SEQ ID NO: 3086421 - DNA, 25 bp, Homo sapien
aattagtatcagactcttaagagtg

SEQ ID NO: 3086422 - DNA, 25 bp, Homo sapien
gaaaaattagtatcagactcttaag

SEQ ID NO: 3086423 - DNA, 25 bp, Homo sapien
caattcagtttgatcacatatttca

SEQ ID NO: 3086424 - DNA, 25 bp, Homo sapien
ggaaatctgtattgcaacacctgga

SEQ ID NO: 3086425 - DNA, 25 bp, Homo sapien
tgaagcagatagaatgcttgatatg

SEQ ID NO: 3086426 - DNA, 25 bp, Homo sapien
actgattgactttttagagtgtgga

SEQ ID NO: 3086427 - DNA, 25 bp, Homo sapien
ccaatctgagaagaacaacctacct

SEQ ID NO: 3086428 - DNA, 25 bp, Homo sapien
ccccaaataaggaagattgtggatc

SEQ ID NO: 3086429 - DNA, 25 bp, Homo sapien
aatctgtattgcaacacctggaaga

SEQ ID NO: 3086430 - DNA, 25 bp, Homo sapien
tccacactctaaaaagtcaatcagt

SEQ ID NO: 3086431 - DNA, 25 bp, Homo sapien
tcttccaggtgttgcaatacagatt

SEQ ID NO: 3086432 - DNA, 25 bp, Homo sapien
tgatccacaatcttccttatttggg

SEQ ID NO: 3086433 - DNA, 25 bp, Homo sapien
catatcaagcattctatctgcttca

SEQ ID NO: 3086434 - DNA, 25 bp, Homo sapien
ggtaggttgttcttctcagattggt

SEQ ID NO: 3086435 - DNA, 25 bp, Homo sapien
tccaggtgttgcaatacagatttcc

SEQ ID NO: 3086436 - DNA, 25 bp, Homo sapien
tattgtagttacacttacgtattta

SEQ ID NO: 3086437 - DNA, 25 bp, Homo sapien
taaatacgtaagtgtaactacaata

SEQ ID NO: 3086438 - DNA, 25 bp, Homo sapien
tgaagtctacttgtatctacggtgg

SEQ ID NO: 3086439 - DNA, 25 bp, Homo sapien
gaatattgtagagcatgtcgcttga

SEQ ID NO: 3086440 - DNA, 25 bp, Homo sapien
caggtgcagcaagtagctgctgaat

SEQ ID NO: 3086441 - DNA, 25 bp, Homo sapien
tgtatctacggtggtgctcctaagg

SEQ ID NO: 3086442 - DNA, 25 bp, Homo sapien
gctcctaagggaccacaaatacgtg

SEQ ID NO: 3086443 - DNA, 25 bp, Homo sapien
gtgctggcaccaactcgggaactgg

SEQ ID NO: 3086444 - DNA, 25 bp, Homo sapien
cacgtatttgtggtcccttaggagc

SEQ ID NO: 3086445 - DNA, 25 bp, Homo sapien
tcaagcgacatgctctacaatattc

SEQ ID NO: 3086446 - DNA, 25 bp, Homo sapien
ccttaggagcaccaccgtagataca

SEQ ID NO: 3086447 - DNA, 25 bp, Homo sapien
aatattcagcagctacttgctgcac

SEQ ID NO: 3086448 - DNA, 25 bp, Homo sapien
tagatacaagtagacttcaagcgac

SEQ ID NO: 3086449 - DNA, 25 bp, Homo sapien
gccagttcccgagttggtgccagca

SEQ ID NO: 3086450 - DNA, 25 bp, Homo sapien
ttttattagaagcataatgtgtaga

SEQ ID NO: 3086451 - DNA, 25 bp, Homo sapien
gaagcataatgtgtagattttagac

SEQ ID NO: 3086452 - DNA, 25 bp, Homo sapien
cataatgtgtagattttagactaca

SEQ ID NO: 3086453 - DNA, 25 bp, Homo sapien
tgtgtagattttagactacatagct

SEQ ID NO: 3086454 - DNA, 25 bp, Homo sapien
gtgtagattttagactacatagcta

SEQ ID NO: 3086455 - DNA, 25 bp, Homo sapien
aatgtgtagattttagactacatag

SEQ ID NO: 3086456 - DNA, 25 bp, Homo sapien
tctacacattatgcttctaataaaa

SEQ ID NO: 3086457 - DNA, 25 bp, Homo sapien
taaaatctacacattatgcttctaa

SEQ ID NO: 3086458 - DNA, 25 bp, Homo sapien
gtctaaaatctacacattatgcttc

SEQ ID NO: 3086459 - DNA, 25 bp, Homo sapien
gctatgtagtctaaaatctacacat

SEQ ID NO: 3086460 - DNA, 25 bp, Homo sapien
tagctatgtagtctaaaatctacac

SEQ ID NO: 3086461 - DNA, 25 bp, Homo sapien
tgtagtctaaaatctacacattatg

SEQ ID NO: 3086462 - DNA, 25 bp, Homo sapien
tgccattgtccacatcaatcatcag

SEQ ID NO: 3086463 - DNA, 25 bp, Homo sapien
cctagagagaggcgatgggcctatt

SEQ ID NO: 3086464 - DNA, 25 bp, Homo sapien
gccattgtccacatcaatcatcagc

SEQ ID NO: 3086465 - DNA, 25 bp, Homo sapien
ttcctagagagaggcgatgggccta

SEQ ID NO: 3086466 - DNA, 25 bp, Homo sapien
cattcctagagagaggcgatgggcc

SEQ ID NO: 3086467 - DNA, 25 bp, Homo sapien
cagccattcctagagagaggcgatg

SEQ ID NO: 3086468 - DNA, 25 bp, Homo sapien
aataggcccatcgcctctctctagg

SEQ ID NO: 3086469 - DNA, 25 bp, Homo sapien
gctgatgattgatgtggacaatggc

SEQ ID NO: 3086470 - DNA, 25 bp, Homo sapien
catcgcctctctctaggaatggctg

SEQ ID NO: 3086471 - DNA, 25 bp, Homo sapien
tgatgattgatgtggacaatggcag

SEQ ID NO: 3086472 - DNA, 25 bp, Homo sapien
ggcccatcgcctctctctaggaatg

SEQ ID NO: 3086473 - DNA, 25 bp, Homo sapien
taggcccatcgcctctctctaggaa

SEQ ID NO: 3086474 - DNA, 25 bp, Homo sapien
gaactcttgagttgatctgatatat

SEQ ID NO: 3086475 - DNA, 25 bp, Homo sapien
gagaactcttgagttgatctgatat

SEQ ID NO: 3086476 - DNA, 25 bp, Homo sapien
tgggagaactcttgagttgatctga

SEQ ID NO: 3086477 - DNA, 25 bp, Homo sapien
ggagaactcttgagttgatctgata

SEQ ID NO: 3086478 - DNA, 25 bp, Homo sapien
gtttgggagaactcttgagttgatc

SEQ ID NO: 3086479 - DNA, 25 bp, Homo sapien
ttgggagaactcttgagttgatctg

SEQ ID NO: 3086480 - DNA, 25 bp, Homo sapien
tatcagatcaactcaagagttctcc

SEQ ID NO: 3086481 - DNA, 25 bp, Homo sapien
atatatcagatcaactcaagagttc

SEQ ID NO: 3086482 - DNA, 25 bp, Homo sapien
cagatcaactcaagagttctcccaa

SEQ ID NO: 3086483 - DNA, 25 bp, Homo sapien
tatatcagatcaactcaagagttct

SEQ ID NO: 3086484 - DNA, 25 bp, Homo sapien
tcagatcaactcaagagttctccca

SEQ ID NO: 3086485 - DNA, 25 bp, Homo sapien
gatcaactcaagagttctcccaaac

SEQ ID NO: 3086486 - DNA, 25 bp, Homo sapien
gcaagaaaatgtaatggtaatttaa

SEQ ID NO: 3086487 - DNA, 25 bp, Homo sapien
gaactcttgagttgatctgatatat

SEQ ID NO: 3086488 - DNA, 25 bp, Homo sapien
tgagttgatctgatatatgcaagaa

SEQ ID NO: 3086489 - DNA, 25 bp, Homo sapien
gtttgggagaactcttgagttgatc

SEQ ID NO: 3086490 - DNA, 25 bp, Homo sapien
gatttctgtttgtccccactttcac

SEQ ID NO: 3086491 - DNA, 25 bp, Homo sapien
taatgtgatttctgtttgtccccac

SEQ ID NO: 3086492 - DNA, 25 bp, Homo sapien
tcagggatggccagttgctctaagt

SEQ ID NO: 3086493 - DNA, 25 bp, Homo sapien
ggccagttgctctaagtggattgga

SEQ ID NO: 3086494 - DNA, 25 bp, Homo sapien
aacccactgctattcaagctcaggg

SEQ ID NO: 3086495 - DNA, 25 bp, Homo sapien
cagttgctctaagtggattggatat

SEQ ID NO: 3086496 - DNA, 25 bp, Homo sapien
ggatatggttggagtggcacagact

SEQ ID NO: 3086497 - DNA, 25 bp, Homo sapien
gacagaatttcactgaacccactgc

SEQ ID NO: 3086498 - DNA, 25 bp, Homo sapien
acttagagcaactggccatccctga

SEQ ID NO: 3086499 - DNA, 25 bp, Homo sapien
ccctgagcttgaatagcagtgggtt

SEQ ID NO: 3086500 - DNA, 25 bp, Homo sapien
gcagtgggttcagtgaaattctgtc

SEQ ID NO: 3086501 - DNA, 25 bp, Homo sapien
caatccacttagagcaactggccat

SEQ ID NO: 3086502 - DNA, 25 bp, Homo sapien
agtctgtgccactccaaccatatcc

SEQ ID NO: 3086503 - DNA, 25 bp, Homo sapien
tatccaatccacttagagcaactgg

SEQ ID NO: 3086504 - DNA, 25 bp, Homo sapien
gaaattacagttagaggtcacaact

SEQ ID NO: 3086505 - DNA, 25 bp, Homo sapien
aaattacagttagaggtcacaactg

SEQ ID NO: 3086506 - DNA, 25 bp, Homo sapien
gttagaggtcacaactgcccgaagc

SEQ ID NO: 3086507 - DNA, 25 bp, Homo sapien
ggaaattacagttagaggtcacaac

SEQ ID NO: 3086508 - DNA, 25 bp, Homo sapien
ctgcccgaagccagttctaaatttt

SEQ ID NO: 3086509 - DNA, 25 bp, Homo sapien
actgcccgaagccagttctaaattt

SEQ ID NO: 3086510 - DNA, 25 bp, Homo sapien
aaatttagaactggcttcgggcagt

SEQ ID NO: 3086511 - DNA, 25 bp, Homo sapien
aaaatttagaactggcttcgggcag

SEQ ID NO: 3086512 - DNA, 25 bp, Homo sapien
gttgtgacctctaactgtaatttcc

SEQ ID NO: 3086513 - DNA, 25 bp, Homo sapien
gcttcgggcagttgtgacctctaac

SEQ ID NO: 3086514 - DNA, 25 bp, Homo sapien
cagttgtgacctctaactgtaattt

SEQ ID NO: 3086515 - DNA, 25 bp, Homo sapien
agttgtgacctctaactgtaatttc

SEQ ID NO: 3086516 - DNA, 25 bp, Homo sapien
gcttcatcaggctgtaactcgatcg

SEQ ID NO: 3086517 - DNA, 25 bp, Homo sapien
catcaggctgtaactcgatcgtgga

SEQ ID NO: 3086518 - DNA, 25 bp, Homo sapien
taaattcatgtggcttcatcaggct

SEQ ID NO: 3086519 - DNA, 25 bp, Homo sapien
ggctgtaactcgatcgtggattcta

SEQ ID NO: 3086520 - DNA, 25 bp, Homo sapien
tcatcaggctgtaactcgatcgtgg

SEQ ID NO: 3086521 - DNA, 25 bp, Homo sapien
caggctgtaactcgatcgtggattc

SEQ ID NO: 3086522 - DNA, 25 bp, Homo sapien
tccacgatcgagttacagcctgatg

SEQ ID NO: 3086523 - DNA, 25 bp, Homo sapien
cgatcgagttacagcctgatgaagc

SEQ ID NO: 3086524 - DNA, 25 bp, Homo sapien
gaatccacgatcgagttacagcctg

SEQ ID NO: 3086525 - DNA, 25 bp, Homo sapien
cacgatcgagttacagcctgatgaa

SEQ ID NO: 3086526 - DNA, 25 bp, Homo sapien
tagaatccacgatcgagttacagcc

SEQ ID NO: 3086527 - DNA, 25 bp, Homo sapien
agcctgatgaagccacatgaattta

SEQ ID NO: 3086528 - DNA, 25 bp, Homo sapien
gcaccctgatttggctaggcgcaca

SEQ ID NO: 3086529 - DNA, 25 bp, Homo sapien
ttgatgagctgcctaaatttgagaa

SEQ ID NO: 3086530 - DNA, 25 bp, Homo sapien
gaatttttatcaagagcaccctgat

SEQ ID NO: 3086531 - DNA, 25 bp, Homo sapien
tggaatcttgatgagctgcctaaat

SEQ ID NO: 3086532 - DNA, 25 bp, Homo sapien
ccctgatttggctaggcgcacagca

SEQ ID NO: 3086533 - DNA, 25 bp, Homo sapien
aagtggaatcttgatgagctgccta

SEQ ID NO: 3086534 - DNA, 25 bp, Homo sapien
tgctgtgcgcctagccaaatcaggg

SEQ ID NO: 3086535 - DNA, 25 bp, Homo sapien
tgtgcgcctagccaaatcagggtgc

SEQ ID NO: 3086536 - DNA, 25 bp, Homo sapien
atcagggtgctcttgataaaaattc

SEQ ID NO: 3086537 - DNA, 25 bp, Homo sapien
taggcagctcatcaagattccactt

SEQ ID NO: 3086538 - DNA, 25 bp, Homo sapien
ttctcaaatttaggcagctcatcaa

SEQ ID NO: 3086539 - DNA, 25 bp, Homo sapien
atttaggcagctcatcaagattcca

SEQ ID NO: 3086540 - DNA, 25 bp, Homo sapien
gattttcacgaaggacagtgctagg

SEQ ID NO: 3086541 - DNA, 25 bp, Homo sapien
taatgtgtacttgggactacgggaa

SEQ ID NO: 3086542 - DNA, 25 bp, Homo sapien
gacatgataaatccccggcttccga

SEQ ID NO: 3086543 - DNA, 25 bp, Homo sapien
tgggtgacaagtttccgacatgata

SEQ ID NO: 3086544 - DNA, 25 bp, Homo sapien
tgacaaatctatacagaaacctggg

SEQ ID NO: 3086545 - DNA, 25 bp, Homo sapien
ggcttccgacatgataaatcccagg

SEQ ID NO: 3086546 - DNA, 25 bp, Homo sapien
tgggatttatcatgtcggaagccgg

SEQ ID NO: 3086547 - DNA, 25 bp, Homo sapien
tatcatgtcggaaacttgtcaccca

SEQ ID NO: 3086548 - DNA, 25 bp, Homo sapien
tagatttgtcatccattggcacaag

SEQ ID NO: 3086549 - DNA, 25 bp, Homo sapien
aacagacttcgagaggtaaacctag

SEQ ID NO: 3086550 - DNA, 25 bp, Homo sapien
catttcccgtagtcccaagtacaca

SEQ ID NO: 3086551 - DNA, 25 bp, Homo sapien
aaacctagcactgtccttcgtgaaa

SEQ ID NO: 3086552 - DNA, 25 bp, Homo sapien
taacatcgtcgtgatgctcttcggt

SEQ ID NO: 3086553 - DNA, 25 bp, Homo sapien
catcgtcgtgatgctcttcggttca

SEQ ID NO: 3086554 - DNA, 25 bp, Homo sapien
ggccatatgagtaacatcgtcgtga

SEQ ID NO: 3086555 - DNA, 25 bp, Homo sapien
ggttcatgtagccttgttattgctg

SEQ ID NO: 3086556 - DNA, 25 bp, Homo sapien
gatgctcttcggttcatgtagcctt

SEQ ID NO: 3086557 - DNA, 25 bp, Homo sapien
ccaaaacggccatatgagtaacatc

SEQ ID NO: 3086558 - DNA, 25 bp, Homo sapien
tcagcaataacaaggctacatgaac

SEQ ID NO: 3086559 - DNA, 25 bp, Homo sapien
gcaataacaaggctacatgaaccga

SEQ ID NO: 3086560 - DNA, 25 bp, Homo sapien
gatgttactcatatggccgttttgg

SEQ ID NO: 3086561 - DNA, 25 bp, Homo sapien
cacgacgatgttactcatatggccg

SEQ ID NO: 3086562 - DNA, 25 bp, Homo sapien
tgaaccgaagagcatcacgacgatg

SEQ ID NO: 3086563 - DNA, 25 bp, Homo sapien
taacaaggctacatgaaccgaagag

SEQ ID NO: 3086564 - DNA, 25 bp, Homo sapien
aaaacccttgttctgttatcgctga

SEQ ID NO: 3086565 - DNA, 25 bp, Homo sapien
ccccagctgggtttgctagcagaag

SEQ ID NO: 3086566 - DNA, 25 bp, Homo sapien
gaaaacccttgttctgttatcgctg

SEQ ID NO: 3086567 - DNA, 25 bp, Homo sapien
gcggcgttcccccagctgggtttgc

SEQ ID NO: 3086568 - DNA, 25 bp, Homo sapien
tgttatcgctgactgtactgtttag

SEQ ID NO: 3086569 - DNA, 25 bp, Homo sapien
ccagctgggtttgctagcagaagtg

SEQ ID NO: 3086570 - DNA, 25 bp, Homo sapien
ctaaacagtacagtcagcgataaca

SEQ ID NO: 3086571 - DNA, 25 bp, Homo sapien
tcagcgataacagaacaagggtttt

SEQ ID NO: 3086572 - DNA, 25 bp, Homo sapien
cacttctgctagcaaacccagctgg

SEQ ID NO: 3086573 - DNA, 25 bp, Homo sapien
taaacagtacagtcagcgataacag

SEQ ID NO: 3086574 - DNA, 25 bp, Homo sapien
cagcgataacagaacaagggttttc

SEQ ID NO: 3086575 - DNA, 25 bp, Homo sapien
acttctgctagcaaacccagctggg

SEQ ID NO: 3086576 - DNA, 25 bp, Homo sapien
aagcgccgccccagcgggaacgccg

SEQ ID NO: 3086577 - DNA, 25 bp, Homo sapien
caaagggggaagcgccgccccagcg

SEQ ID NO: 3086578 - DNA, 25 bp, Homo sapien
gcgccgccccagcgggaacgccgcc

SEQ ID NO: 3086579 - DNA, 25 bp, Homo sapien
gaagcgccgccccagcgggaacgcc

SEQ ID NO: 3086580 - DNA, 25 bp, Homo sapien
agcgccgccccagcgggaacgccgc

SEQ ID NO: 3086581 - DNA, 25 bp, Homo sapien
agaaatgcgagacaaagggggaagc

SEQ ID NO: 3086582 - DNA, 25 bp, Homo sapien
gcttccccctttgtctcgcatttct

SEQ ID NO: 3086583 - DNA, 25 bp, Homo sapien
ggcggcgttcccgctggggcggcgc

SEQ ID NO: 3086584 - DNA, 25 bp, Homo sapien
cgctggggcggcgcttccccctttg

SEQ ID NO: 3086585 - DNA, 25 bp, Homo sapien
gcggcgttcccgctggggcggcgct

SEQ ID NO: 3086586 - DNA, 25 bp, Homo sapien
ggcgttcccgctggggcggcgcttc

SEQ ID NO: 3086587 - DNA, 25 bp, Homo sapien
cggcgttcccgctggggcggcgctt

SEQ ID NO: 3086588 - DNA, 25 bp, Homo sapien
tggcgcagagagaaatgcgagacaa

SEQ ID NO: 3086589 - DNA, 25 bp, Homo sapien
ggcgcagagagaaatgcgagacaaa

SEQ ID NO: 3086590 - DNA, 25 bp, Homo sapien
cgcagagagaaatgcgagacaaagg

SEQ ID NO: 3086591 - DNA, 25 bp, Homo sapien
gaagcgccgccccagcgggaacgcc

SEQ ID NO: 3086592 - DNA, 25 bp, Homo sapien
agcgccgccccagcgggaacgccgc

SEQ ID NO: 3086593 - DNA, 25 bp, Homo sapien
agaaatgcgagacaaagggggaagc

SEQ ID NO: 3086594 - DNA, 25 bp, Homo sapien
gcttccccctttgtctcgcatttct

SEQ ID NO: 3086595 - DNA, 25 bp, Homo sapien
ttgtctcgcatttctctctgcgcca

SEQ ID NO: 3086596 - DNA, 25 bp, Homo sapien
agtcggccgggcggcgttcccgctg

SEQ ID NO: 3086597 - DNA, 25 bp, Homo sapien
ggcgcttccccctttgtctcgcatt

SEQ ID NO: 3086598 - DNA, 25 bp, Homo sapien
cctttgtctcgcatttctctctgcg

SEQ ID NO: 3086599 - DNA, 25 bp, Homo sapien
ggcgttcccgctggggcggcgcttc

SEQ ID NO: 3086600 - DNA, 25 bp, Homo sapien
gagtcgcgagtacaaaatgccggcc

SEQ ID NO: 3086601 - DNA, 25 bp, Homo sapien
atgtggctgagtcgcgagtacaaaa

SEQ ID NO: 3086602 - DNA, 25 bp, Homo sapien
cgagtacaaaatgccggcctcggac

SEQ ID NO: 3086603 - DNA, 25 bp, Homo sapien
ctcaaaatggcagcgtcgagaaaat

SEQ ID NO: 3086604 - DNA, 25 bp, Homo sapien
gctgagtcgcgagtacaaaatgccg

SEQ ID NO: 3086605 - DNA, 25 bp, Homo sapien
aaatgccggcctcggacatggcggc

SEQ ID NO: 3086606 - DNA, 25 bp, Homo sapien
ccggcattttgtactcgcgactcag

SEQ ID NO: 3086607 - DNA, 25 bp, Homo sapien
gtccgaggccggcattttgtactcg

SEQ ID NO: 3086608 - DNA, 25 bp, Homo sapien
gccgccatgtccgaggccggcattt

SEQ ID NO: 3086609 - DNA, 25 bp, Homo sapien
ttttgtactcgcgactcagccacat

SEQ ID NO: 3086610 - DNA, 25 bp, Homo sapien
attttctcgacgctgccattttgag

SEQ ID NO: 3086611 - DNA, 25 bp, Homo sapien
gaggccggcattttgtactcgcgac

SEQ ID NO: 3086612 - DNA, 25 bp, Homo sapien
attggaagagatttgacggtgtagt

SEQ ID NO: 3086613 - DNA, 25 bp, Homo sapien
tattgtgcggatgaaagcgggacgc

SEQ ID NO: 3086614 - DNA, 25 bp, Homo sapien
agttgagagggagcgtattgtgcgg

SEQ ID NO: 3086615 - DNA, 25 bp, Homo sapien
gacggtgtagtgtcttcaagcttgc

SEQ ID NO: 3086616 - DNA, 25 bp, Homo sapien
agcgggacgcttcgaggcagacgaa

SEQ ID NO: 3086617 - DNA, 25 bp, Homo sapien
gtagtgtcttcaagcttgctttttg

SEQ ID NO: 3086618 - DNA, 25 bp, Homo sapien
ttcgtctgcctcgaagcgtcccgct

SEQ ID NO: 3086619 - DNA, 25 bp, Homo sapien
tcaactccctcaacagctaccaaat

SEQ ID NO: 3086620 - DNA, 25 bp, Homo sapien
actacaccgtcaaatctcttccaat

SEQ ID NO: 3086621 - DNA, 25 bp, Homo sapien
caagcttgaagacactacaccgtca

SEQ ID NO: 3086622 - DNA, 25 bp, Homo sapien
gcgtcccgctttcatccgcacaata

SEQ ID NO: 3086623 - DNA, 25 bp, Homo sapien
caaaaagcaagcttgaagacactac

SEQ ID NO: 3086624 - DNA, 25 bp, Homo sapien
tcgggttattcgagtgaccgagacc

SEQ ID NO: 3086625 - DNA, 25 bp, Homo sapien
atgtcgggttattcgagtgaccgag

SEQ ID NO: 3086626 - DNA, 25 bp, Homo sapien
cgggttattcgagtgaccgagaccg

SEQ ID NO: 3086627 - DNA, 25 bp, Homo sapien
gggttattcgagtgaccgagaccgc

SEQ ID NO: 3086628 - DNA, 25 bp, Homo sapien
tgtcgggttattcgagtgaccgaga

SEQ ID NO: 3086629 - DNA, 25 bp, Homo sapien
ggttattcgagtgaccgagaccgcg

SEQ ID NO: 3086630 - DNA, 25 bp, Homo sapien
cggtctcggtcactcgaataacccg

SEQ ID NO: 3086631 - DNA, 25 bp, Homo sapien
cgcggtctcggtcactcgaataacc

SEQ ID NO: 3086632 - DNA, 25 bp, Homo sapien
ggtctcggtcactcgaataacccga

SEQ ID NO: 3086633 - DNA, 25 bp, Homo sapien
gcggtctcggtcactcgaataaccc

SEQ ID NO: 3086634 - DNA, 25 bp, Homo sapien
tctcggtcactcgaataacccgaca

SEQ ID NO: 3086635 - DNA, 25 bp, Homo sapien
ctcggtcactcgaataacccgacat

SEQ ID NO: 3086636 - DNA, 25 bp, Homo sapien
tgtcatcggtgtccttcctccgctg

SEQ ID NO: 3086637 - DNA, 25 bp, Homo sapien
gaggccatttccagcgacttgtcgc

SEQ ID NO: 3086638 - DNA, 25 bp, Homo sapien
tcgccgtcatcgaggccatttccag

SEQ ID NO: 3086639 - DNA, 25 bp, Homo sapien
gcgacttgtcgcacgcttttctata

SEQ ID NO: 3086640 - DNA, 25 bp, Homo sapien
tcggctggtgtcatcggtgtccttc

SEQ ID NO: 3086641 - DNA, 25 bp, Homo sapien
cagcttcggctggtgtcatcggtgt

SEQ ID NO: 3086642 - DNA, 25 bp, Homo sapien
ctggaaatggcctcgatgacggcga

SEQ ID NO: 3086643 - DNA, 25 bp, Homo sapien
cagcggaggaaggacaccgatgaca

SEQ ID NO: 3086644 - DNA, 25 bp, Homo sapien
tatagaaaagcgtgcgacaagtcgc

SEQ ID NO: 3086645 - DNA, 25 bp, Homo sapien
accgatgacaccagccgaagctgca

SEQ ID NO: 3086646 - DNA, 25 bp, Homo sapien
agtatatagaaaagcgtgcgacaag

SEQ ID NO: 3086647 - DNA, 25 bp, Homo sapien
gacaagtcgctggaaatggcctcga

SEQ ID NO: 3086648 - DNA, 25 bp, Homo sapien
gtccagactataaaagcggctgccg

SEQ ID NO: 3086649 - DNA, 25 bp, Homo sapien
ctcattcatttctaccggtctctag

SEQ ID NO: 3086650 - DNA, 25 bp, Homo sapien
gttccctgcggcgtaggaggcggtc

SEQ ID NO: 3086651 - DNA, 25 bp, Homo sapien
ggaggcggtccagactataaaagcg

SEQ ID NO: 3086652 - DNA, 25 bp, Homo sapien
aggcggtccagactataaaagcggc

SEQ ID NO: 3086653 - DNA, 25 bp, Homo sapien
aagcggccggcacctcattcatttc

SEQ ID NO: 3086654 - DNA, 25 bp, Homo sapien
tagagaccggtagaaatgaatgagg

SEQ ID NO: 3086655 - DNA, 25 bp, Homo sapien
gaaatgaatgaggtgccggccgctt

SEQ ID NO: 3086656 - DNA, 25 bp, Homo sapien
gccgcttttatagtctggaccgcct

SEQ ID NO: 3086657 - DNA, 25 bp, Homo sapien
cgcttttatagtctggaccgcctcc

SEQ ID NO: 3086658 - DNA, 25 bp, Homo sapien
aatgaatgaggtgccggccgctttc

SEQ ID NO: 3086659 - DNA, 25 bp, Homo sapien
cggcagccgcttttatagtctggac

SEQ ID NO: 3086660 - DNA, 25 bp, Homo sapien
tcaagcaagccaccccgccctttcc

SEQ ID NO: 3086661 - DNA, 25 bp, Homo sapien
gtctttccacacctcaagcaagcca

SEQ ID NO: 3086662 - DNA, 25 bp, Homo sapien
tctttccacacctcaagcaagccac

SEQ ID NO: 3086663 - DNA, 25 bp, Homo sapien
ggtctttccacacctcaagcaagcc

SEQ ID NO: 3086664 - DNA, 25 bp, Homo sapien
gacccgcgtgtctgataatcctttg

SEQ ID NO: 3086665 - DNA, 25 bp, Homo sapien
cgtcctgtgaaaggaagtgctcctc

SEQ ID NO: 3086666 - DNA, 25 bp, Homo sapien
tgatgaccaatcagcggcgagaagc

SEQ ID NO: 3086667 - DNA, 25 bp, Homo sapien
ttttggtcggcggagaatggtctct

SEQ ID NO: 3086668 - DNA, 25 bp, Homo sapien
tcgccttcccggccgcgtcggagtc

SEQ ID NO: 3086669 - DNA, 25 bp, Homo sapien
gtcggagtccggcggcgacctgcct

SEQ ID NO: 3086670 - DNA, 25 bp, Homo sapien
ccggccgcgtcggagtccggcggcg

SEQ ID NO: 3086671 - DNA, 25 bp, Homo sapien
cgtcgccttcccggccgcgtcggag

SEQ ID NO: 3086672 - DNA, 25 bp, Homo sapien
aaacatggcaggctcggatgctggt

SEQ ID NO: 3086673 - DNA, 25 bp, Homo sapien
ggcaggctcggatgctggtgagtgt

SEQ ID NO: 3086674 - DNA, 25 bp, Homo sapien
caggctcggatgctggtgagtgtct

SEQ ID NO: 3086675 - DNA, 25 bp, Homo sapien
ggctcggatgctggtgagtgtctcc

SEQ ID NO: 3086676 - DNA, 25 bp, Homo sapien
gggctagcccggactgggtctgggc

SEQ ID NO: 3086677 - DNA, 25 bp, Homo sapien
cgggctagcccggactgggtctggg

SEQ ID NO: 3086678 - DNA, 25 bp, Homo sapien
gcgggttccctggatagggtctctc

SEQ ID NO: 3086679 - DNA, 25 bp, Homo sapien
cttcgaggccgtggaacagcagtat

SEQ ID NO: 3086680 - DNA, 25 bp, Homo sapien
gatagggtctctcagcttcaccacc

SEQ ID NO: 3086681 - DNA, 25 bp, Homo sapien
ttcagacgccgcgtcgcgctggcgg

SEQ ID NO: 3086682 - DNA, 25 bp, Homo sapien
gcgaggccggtaggacacttgggtc

SEQ ID NO: 3086683 - DNA, 25 bp, Homo sapien
aggccggtaggacacttgggtcctg

SEQ ID NO: 3086684 - DNA, 25 bp, Homo sapien
gcactggggcgaggccggtaggaca

SEQ ID NO: 3086685 - DNA, 25 bp, Homo sapien
agaggcactggggcgaggccggtag

SEQ ID NO: 3086686 - DNA, 25 bp, Homo sapien
tcaccactttttccggcaccagaga

SEQ ID NO: 3086687 - DNA, 25 bp, Homo sapien
ttaatgagtttctggtaacctcgga

SEQ ID NO: 3086688 - DNA, 25 bp, Homo sapien
tgcgaagcagcctccattaatgagt

SEQ ID NO: 3086689 - DNA, 25 bp, Homo sapien
gaaaccctgacttgcacaagataat

SEQ ID NO: 3086690 - DNA, 25 bp, Homo sapien
cagttaataagcgcatatgtccttt

SEQ ID NO: 3086691 - DNA, 25 bp, Homo sapien
gacagttaataagcgcatatgtcct

SEQ ID NO: 3086692 - DNA, 25 bp, Homo sapien
ttaataagcgcatatgtcctttcat

SEQ ID NO: 3086693 - DNA, 25 bp, Homo sapien
agacagttaataagcgcatatgtcc

SEQ ID NO: 3086694 - DNA, 25 bp, Homo sapien
cacttcttgctaactagaggttgag

SEQ ID NO: 3086695 - DNA, 25 bp, Homo sapien
ttaccaacagtatagcaatgctggg

SEQ ID NO: 3086696 - DNA, 25 bp, Homo sapien
tcatggttcgaagagcacaggcaat

SEQ ID NO: 3086697 - DNA, 25 bp, Homo sapien
ggttacaggaccttcatgagccagt

SEQ ID NO: 3086698 - DNA, 25 bp, Homo sapien
tttccaggtgctccttgtcttctga

SEQ ID NO: 3086699 - DNA, 25 bp, Homo sapien
accctagagtcaccagtatttgctg

SEQ ID NO: 3086700 - DNA, 25 bp, Homo sapien
ttctgagatgttgggcccctcttgg

SEQ ID NO: 3086701 - DNA, 25 bp, Homo sapien
cctatacatttaatcgttgacactt

SEQ ID NO: 3086702 - DNA, 25 bp, Homo sapien
cggctaagagcttggatgctcggtt

SEQ ID NO: 3086703 - DNA, 25 bp, Homo sapien
cgcggctaagagcttggatgctcgg

SEQ ID NO: 3086704 - DNA, 25 bp, Homo sapien
acgcggctaagagcttggatgctcg

SEQ ID NO: 3086705 - DNA, 25 bp, Homo sapien
gcggctaagagcttggatgctcggt

SEQ ID NO: 3086706 - DNA, 25 bp, Homo sapien
ggcaccattggaattgaaactcagg

SEQ ID NO: 3086707 - DNA, 25 bp, Homo sapien
cattggaattgaaactcaggatctc

SEQ ID NO: 3086708 - DNA, 25 bp, Homo sapien
ccattggaattgaaactcaggatct

SEQ ID NO: 3086709 - DNA, 25 bp, Homo sapien
caccattggaattgaaactcaggat

SEQ ID NO: 3086710 - DNA, 25 bp, Homo sapien
tcagatgagtgggaagtacaaagat

SEQ ID NO: 3086711 - DNA, 25 bp, Homo sapien
gtgggtaaaagtctccactgtaata

SEQ ID NO: 3086712 - DNA, 25 bp, Homo sapien
tcccctttaggcgtttactgaagca

SEQ ID NO: 3086713 - DNA, 25 bp, Homo sapien
tattggacctctaagaatacatgag

SEQ ID NO: 3086714 - DNA, 25 bp, Homo sapien
gaagagaatcttgtgctccggactg

SEQ ID NO: 3086715 - DNA, 25 bp, Homo sapien
taaattaggtgcacttgtcagagac

SEQ ID NO: 3086716 - DNA, 25 bp, Homo sapien
gatgcagatcttcaacaccaaggga

SEQ ID NO: 3086717 - DNA, 25 bp, Homo sapien
tattgctcgacttcggcatgggcac

SEQ ID NO: 3086718 - DNA, 25 bp, Homo sapien
caaagagcaagtacaggagctgttc

SEQ ID NO: 3086719 - DNA, 25 bp, Homo sapien
gtcctgggtaaatccttgaagcttg

SEQ ID NO: 3086720 - DNA, 25 bp, Homo sapien
cctcatggcaaagcataaagacctt

SEQ ID NO: 3086721 - DNA, 25 bp, Homo sapien
gaaatgtgacttgtaccgactgctg

SEQ ID NO: 3086722 - DNA, 25 bp, Homo sapien
ctttcatagggtggaatgtctattc

SEQ ID NO: 3086723 - DNA, 25 bp, Homo sapien
gggtggaatgtctattcgattgaag

SEQ ID NO: 3086724 - DNA, 25 bp, Homo sapien
tcatagctttcatagggtggaatgt

SEQ ID NO: 3086725 - DNA, 25 bp, Homo sapien
cagcaaatccacatgtttcttcaat

SEQ ID NO: 3086726 - DNA, 25 bp, Homo sapien
gtgtataccagtatagccacatcac

SEQ ID NO: 3086727 - DNA, 25 bp, Homo sapien
taaaacagagatgaccacttttggg

SEQ ID NO: 3086728 - DNA, 25 bp, Homo sapien
aaaataagtaaactggcctagcaag

SEQ ID NO: 3086729 - DNA, 25 bp, Homo sapien
gtcaaatctgtttggaactaacact

SEQ ID NO: 3086730 - DNA, 25 bp, Homo sapien
ggcatcaatctggtgtatggtaaag

SEQ ID NO: 3086731 - DNA, 25 bp, Homo sapien
tcggcaggttgttagtgcaggcatc

SEQ ID NO: 3086732 - DNA, 25 bp, Homo sapien
ctttcggcaggttgttagtgcaggc

SEQ ID NO: 3086733 - DNA, 25 bp, Homo sapien
tatggtaaagagtctcgggcctgca

SEQ ID NO: 3086734 - DNA, 25 bp, Homo sapien
ctccccccagggatttcagcgcatg

SEQ ID NO: 3086735 - DNA, 25 bp, Homo sapien
ccccccagggatttcagcgcatgcg

SEQ ID NO: 3086736 - DNA, 25 bp, Homo sapien
cacagctgaaagcacgctctccccc

SEQ ID NO: 3086737 - DNA, 25 bp, Homo sapien
cagctgaaagcacgctctcccccca

SEQ ID NO: 3086738 - DNA, 25 bp, Homo sapien
acaatcagagaagcccgcagaaaag

SEQ ID NO: 3086739 - DNA, 25 bp, Homo sapien
atcagagaagcccgcagaaaaggct

SEQ ID NO: 3086740 - DNA, 25 bp, Homo sapien
tacaatcagagaagcccgcagaaaa

SEQ ID NO: 3086741 - DNA, 25 bp, Homo sapien
caatcagagaagcccgcagaaaagg

SEQ ID NO: 3086742 - DNA, 25 bp, Homo sapien
ggtgtttaccttccagtcattaaca

SEQ ID NO: 3086743 - DNA, 25 bp, Homo sapien
gacaatgttgctgtctggtgtacag

SEQ ID NO: 3086744 - DNA, 25 bp, Homo sapien
tgctcgtcgctcttcatcaaaaaac

SEQ ID NO: 3086745 - DNA, 25 bp, Homo sapien
cagaggcactcgagaggatcctgtc

SEQ ID NO: 3086746 - DNA, 25 bp, Homo sapien
ctgtgaaaatagtacacagtaatga

SEQ ID NO: 3086747 - DNA, 25 bp, Homo sapien
gtgaaaatagtacacagtaatgaac

SEQ ID NO: 3086748 - DNA, 25 bp, Homo sapien
tgtgaaaatagtacacagtaatgaa

SEQ ID NO: 3086749 - DNA, 25 bp, Homo sapien
tacatgagcacattgatacagacct

SEQ ID NO: 3086750 - DNA, 25 bp, Homo sapien
cctggcctacatttgcttaataata

SEQ ID NO: 3086751 - DNA, 25 bp, Homo sapien
gggttcaagactaactcaccatact

SEQ ID NO: 3086752 - DNA, 25 bp, Homo sapien
gtattttatagaattacacccagga

SEQ ID NO: 3086753 - DNA, 25 bp, Homo sapien
cagggttcactgaattaacaccaca

SEQ ID NO: 3086754 - DNA, 25 bp, Homo sapien
caaataaagtctccagtaaggcttc

SEQ ID NO: 3086755 - DNA, 25 bp, Homo sapien
ctacagggttcactgaattaacacc

SEQ ID NO: 3086756 - DNA, 25 bp, Homo sapien
aagtctccagtaaggcttctatggg

SEQ ID NO: 3086757 - DNA, 25 bp, Homo sapien
tctgcagagccaagaattgagcctc

SEQ ID NO: 3086758 - DNA, 25 bp, Homo sapien
tcaatgcctcgtaaaaatctccagt

SEQ ID NO: 3086759 - DNA, 25 bp, Homo sapien
gaattgagcctcaatgcctcgtaaa

SEQ ID NO: 3086760 - DNA, 25 bp, Homo sapien
ctctaactccttctcatcaaatgtc

SEQ ID NO: 3086761 - DNA, 25 bp, Homo sapien
gccatttggtttaagttcatgctga

SEQ ID NO: 3086762 - DNA, 25 bp, Homo sapien
ttcattaacagggatacttttgcca

SEQ ID NO: 3086763 - DNA, 25 bp, Homo sapien
tgcattatgttcaacacagaaggta

SEQ ID NO: 3086764 - DNA, 25 bp, Homo sapien
aagttcatgctgaataatttcacca

SEQ ID NO: 3086765 - DNA, 25 bp, Homo sapien
ttcccattattcgtccaacaaagtg

SEQ ID NO: 3086766 - DNA, 25 bp, Homo sapien
catccaaggtaattgacttcccaag

SEQ ID NO: 3086767 - DNA, 25 bp, Homo sapien
tataaaaaggcaatgtgaaaccacc

SEQ ID NO: 3086768 - DNA, 25 bp, Homo sapien
gaagatccggatctactaactccat

SEQ ID NO: 3086769 - DNA, 25 bp, Homo sapien
atgtgacaagagatacaaccattcc

SEQ ID NO: 3086770 - DNA, 25 bp, Homo sapien
catctcttgaatactggaagaggcc

SEQ ID NO: 3086771 - DNA, 25 bp, Homo sapien
gccatagtatggattcaacatttca

SEQ ID NO: 3086772 - DNA, 25 bp, Homo sapien
taactgcagaatcaggattgatctg

SEQ ID NO: 3086773 - DNA, 25 bp, Homo sapien
aattttatcattaatcgcttccaga

SEQ ID NO: 3086774 - DNA, 25 bp, Homo sapien
tatcattaatcgcttccagagatct

SEQ ID NO: 3086775 - DNA, 25 bp, Homo sapien
atcattaatcgcttccagagatctt

SEQ ID NO: 3086776 - DNA, 25 bp, Homo sapien
ttttatcattaatcgcttccagaga

SEQ ID NO: 3086777 - DNA, 25 bp, Homo sapien
cttccctggaaacctcaatgcggca

SEQ ID NO: 3086778 - DNA, 25 bp, Homo sapien
tgtaccttgggactgtcaggcattc

SEQ ID NO: 3086779 - DNA, 25 bp, Homo sapien
gacataacgataccacttgctgttg

SEQ ID NO: 3086780 - DNA, 25 bp, Homo sapien
tgaaccaggtctcgcttgtaccttg

SEQ ID NO: 3086781 - DNA, 25 bp, Homo sapien
aatgggaaaccattaaacatcatca

SEQ ID NO: 3086782 - DNA, 25 bp, Homo sapien
catacacaaaagtaaagtccacatg

SEQ ID NO: 3086783 - DNA, 25 bp, Homo sapien
gatgcagctggtcaataggccaaaa

SEQ ID NO: 3086784 - DNA, 25 bp, Homo sapien
gaacaggaccttcacaaaaacagga

SEQ ID NO: 3086785 - DNA, 25 bp, Homo sapien
tatggtcaacgaaataaactctgcc

SEQ ID NO: 3086786 - DNA, 25 bp, Homo sapien
gaggcaatggaccaagctcttcaca

SEQ ID NO: 3086787 - DNA, 25 bp, Homo sapien
taaatgcaagttagcagacagccga

SEQ ID NO: 3086788 - DNA, 25 bp, Homo sapien
aaactctgcctgttgccgtattacg

SEQ ID NO: 3086789 - DNA, 25 bp, Homo sapien
tcccttggttgccaccctcaaagaa

SEQ ID NO: 3086790 - DNA, 25 bp, Homo sapien
caaatacacaatagagtcctgagca

SEQ ID NO: 3086791 - DNA, 25 bp, Homo sapien
taaatagagagtatcaaagcaaccc

SEQ ID NO: 3086792 - DNA, 25 bp, Homo sapien
tgtcaagacatggaaatggcaacct

SEQ ID NO: 3086793 - DNA, 25 bp, Homo sapien
aaatggggtcttgccccagccatcc

SEQ ID NO: 3086794 - DNA, 25 bp, Homo sapien
agctgggactacacgaattttcttt

SEQ ID NO: 3086795 - DNA, 25 bp, Homo sapien
tgggactacacgaattttctttctc

SEQ ID NO: 3086796 - DNA, 25 bp, Homo sapien
ccactttagcctcgcgagcagctgg

SEQ ID NO: 3086797 - DNA, 25 bp, Homo sapien
gaagtaactatcagaagagtcaaac

SEQ ID NO: 3086798 - DNA, 25 bp, Homo sapien
gattgcagagcagtaggcaggactt

SEQ ID NO: 3086799 - DNA, 25 bp, Homo sapien
tcaaagaaatcctaggtgaaatggc

SEQ ID NO: 3086800 - DNA, 25 bp, Homo sapien
ctttgatggtctaaagagtgcttaa

SEQ ID NO: 3086801 - DNA, 25 bp, Homo sapien
tggccttgttgcgttgtcctctgtt

SEQ ID NO: 3086802 - DNA, 25 bp, Homo sapien
catgtgctcacaccagtctgtgtat

SEQ ID NO: 3086803 - DNA, 25 bp, Homo sapien
ccagtctgtgtatgtaagaaataca

SEQ ID NO: 3086804 - DNA, 25 bp, Homo sapien
ggatcatgccatgtgctcacaccag

SEQ ID NO: 3086805 - DNA, 25 bp, Homo sapien
tcaaagacagttatatacactaaga

SEQ ID NO: 3086806 - DNA, 25 bp, Homo sapien
ctaagatgatatactaatagggaaa

SEQ ID NO: 3086807 - DNA, 25 bp, Homo sapien
acactaagatgatatactaataggg

SEQ ID NO: 3086808 - DNA, 25 bp, Homo sapien
ttcagagtgtccagatcaaagacag

SEQ ID NO: 3086809 - DNA, 25 bp, Homo sapien
ggcaaagccaggatacgaacctagg

SEQ ID NO: 3086810 - DNA, 25 bp, Homo sapien
tatagaagagcacaaacgctgaggc

SEQ ID NO: 3086811 - DNA, 25 bp, Homo sapien
gactaaagagcaagcacgcacactg

SEQ ID NO: 3086812 - DNA, 25 bp, Homo sapien
tgctcggtgttacatggcaaagcca

SEQ ID NO: 3086813 - DNA, 25 bp, Homo sapien
tatgtcgttgtgacctgactctcct

SEQ ID NO: 3086814 - DNA, 25 bp, Homo sapien
gactgtccacatgttgcaccatttg

SEQ ID NO: 3086815 - DNA, 25 bp, Homo sapien
tggagtgttctcatcaacaaagcag

SEQ ID NO: 3086816 - DNA, 25 bp, Homo sapien
tctgccagggctagaatattcggat

SEQ ID NO: 3086817 - DNA, 25 bp, Homo sapien
aagcataagtcacatgcccagctaa

SEQ ID NO: 3086818 - DNA, 25 bp, Homo sapien
ctccaccacctatgttcaagcaatc

SEQ ID NO: 3086819 - DNA, 25 bp, Homo sapien
tgggaccacaagcataagtcacatg

SEQ ID NO: 3086820 - DNA, 25 bp, Homo sapien
tccaccacctatgttcaagcaatcc

SEQ ID NO: 3086821 - DNA, 25 bp, Homo sapien
caatggcacctgttataagatctac

SEQ ID NO: 3086822 - DNA, 25 bp, Homo sapien
ttattgagtaccactgcaggccctg

SEQ ID NO: 3086823 - DNA, 25 bp, Homo sapien
tgatctacgacagcaaaaaccaaga

SEQ ID NO: 3086824 - DNA, 25 bp, Homo sapien
caggccctggagctacaatgacagc

SEQ ID NO: 3086825 - DNA, 25 bp, Homo sapien
tagatactggattcttccagaggcg

SEQ ID NO: 3086826 - DNA, 25 bp, Homo sapien
gcgtagttcttgttatatggtttag

SEQ ID NO: 3086827 - DNA, 25 bp, Homo sapien
cgtgttgggcgctcccattgcgtag

SEQ ID NO: 3086828 - DNA, 25 bp, Homo sapien
tccagaggcggttctcctttcttcc

SEQ ID NO: 3086829 - DNA, 25 bp, Homo sapien
gcattaataggaaacttggacacag

SEQ ID NO: 3086830 - DNA, 25 bp, Homo sapien
ttggacacagtgcaacaagcaagcc

SEQ ID NO: 3086831 - DNA, 25 bp, Homo sapien
cgggaatgccaacccgaagtatcaa

SEQ ID NO: 3086832 - DNA, 25 bp, Homo sapien
tctgctgttacaaatcgggaatgcc

SEQ ID NO: 3086833 - DNA, 25 bp, Homo sapien
gtgcctattcggtctctggactgaa

SEQ ID NO: 3086834 - DNA, 25 bp, Homo sapien
gtcctcctgtgcctattcggtctct

SEQ ID NO: 3086835 - DNA, 25 bp, Homo sapien
cctcctgtgcctattcggtctctgg

SEQ ID NO: 3086836 - DNA, 25 bp, Homo sapien
cctgtgcctattcggtctctggact

SEQ ID NO: 3086837 - DNA, 25 bp, Homo sapien
gttttaacaggacaccattatccag

SEQ ID NO: 3086838 - DNA, 25 bp, Homo sapien
tatccagtgtagtataaaaccacca

SEQ ID NO: 3086839 - DNA, 25 bp, Homo sapien
gagatgtgaattctagagcaggctc

SEQ ID NO: 3086840 - DNA, 25 bp, Homo sapien
taaggtgtagataatccctgtctga

SEQ ID NO: 3086841 - DNA, 25 bp, Homo sapien
acccggccgcacaacaggagtgagt

SEQ ID NO: 3086842 - DNA, 25 bp, Homo sapien
gaatgacaggaattatcagtaatga

SEQ ID NO: 3086843 - DNA, 25 bp, Homo sapien
ttgtgaaccgcacacacaaggccag

SEQ ID NO: 3086844 - DNA, 25 bp, Homo sapien
gatgtagtgtagatcaggaatcccc

SEQ ID NO: 3086845 - DNA, 25 bp, Homo sapien
ctctgatgggttcataacaaaataa

SEQ ID NO: 3086846 - DNA, 25 bp, Homo sapien
gaacccaattcactgccttgtaaaa

SEQ ID NO: 3086847 - DNA, 25 bp, Homo sapien
accttcagtaactaaaacctctctg

SEQ ID NO: 3086848 - DNA, 25 bp, Homo sapien
ggctttgctatgtggctactctgat

SEQ ID NO: 3086849 - DNA, 25 bp, Homo sapien
taagaagcctctaagatgaacagtg

SEQ ID NO: 3086850 - DNA, 25 bp, Homo sapien
gatgaacagtgtccttccatactag

SEQ ID NO: 3086851 - DNA, 25 bp, Homo sapien
ccttccatactaggcatcttgatca

SEQ ID NO: 3086852 - DNA, 25 bp, Homo sapien
tctttaatttaagaagcctctaaga

SEQ ID NO: 3086853 - DNA, 25 bp, Homo sapien
gttaacctggatcctggattcactg

SEQ ID NO: 3086854 - DNA, 25 bp, Homo sapien
ggctcatttaattcaggccaacaca

SEQ ID NO: 3086855 - DNA, 25 bp, Homo sapien
taagttaacctggatcctggattca

SEQ ID NO: 3086856 - DNA, 25 bp, Homo sapien
aagttaacctggatcctggattcac

SEQ ID NO: 3086857 - DNA, 25 bp, Homo sapien
ttgtcatttggcccgagtttgcata

SEQ ID NO: 3086858 - DNA, 25 bp, Homo sapien
gtatcattgtcatttggcccgagtt

SEQ ID NO: 3086859 - DNA, 25 bp, Homo sapien
gtcctctaactgtatcattgtcatt

SEQ ID NO: 3086860 - DNA, 25 bp, Homo sapien
tgtcctctaactgtatcattgtcat

SEQ ID NO: 3086861 - DNA, 25 bp, Homo sapien
ccaaacactggtgtattacattgcc

SEQ ID NO: 3086862 - DNA, 25 bp, Homo sapien
accaaacactggtgtattacattgc

SEQ ID NO: 3086863 - DNA, 25 bp, Homo sapien
tattgaactagggataatgtcagac

SEQ ID NO: 3086864 - DNA, 25 bp, Homo sapien
tactgttggttaccctgtcagccca

SEQ ID NO: 3086865 - DNA, 25 bp, Homo sapien
tctcctttatacagccagggtttag

SEQ ID NO: 3086866 - DNA, 25 bp, Homo sapien
gggtttagaacagtagcacattaag

SEQ ID NO: 3086867 - DNA, 25 bp, Homo sapien
gtttgtttagcatatgcatctgggc

SEQ ID NO: 3086868 - DNA, 25 bp, Homo sapien
gggctaaaatcccatgacgatgact

SEQ ID NO: 3086869 - DNA, 25 bp, Homo sapien
gctgttgtacactcaaaataacgtt

SEQ ID NO: 3086870 - DNA, 25 bp, Homo sapien
tttccttagatcttatgtgagtttg

SEQ ID NO: 3086871 - DNA, 25 bp, Homo sapien
gcacaagaagttgtgtttgaagccc

SEQ ID NO: 3086872 - DNA, 25 bp, Homo sapien
ttggaaaagcactcgtatctactca

SEQ ID NO: 3086873 - DNA, 25 bp, Homo sapien
attggaaaagcactcgtatctactc

SEQ ID NO: 3086874 - DNA, 25 bp, Homo sapien
aattggaaaagcactcgtatctact

SEQ ID NO: 3086875 - DNA, 25 bp, Homo sapien
ggcattggaaagaagacgaacacaa

SEQ ID NO: 3086876 - DNA, 25 bp, Homo sapien
cattggaaagaagacgaacacaacc

SEQ ID NO: 3086877 - DNA, 25 bp, Homo sapien
tggaaagaagacgaacacaaccgag

SEQ ID NO: 3086878 - DNA, 25 bp, Homo sapien
gaaagaagacgaacacaaccgagaa

SEQ ID NO: 3086879 - DNA, 25 bp, Homo sapien
ggccttgagcgagcaggactcttgc

SEQ ID NO: 3086880 - DNA, 25 bp, Homo sapien
ctgtttgtaacgcttttcccctgct

SEQ ID NO: 3086881 - DNA, 25 bp, Homo sapien
gactcttgcagatttcacttcactg

SEQ ID NO: 3086882 - DNA, 25 bp, Homo sapien
gtagaacaaaagctgtttgtaacgc

SEQ ID NO: 3086883 - DNA, 25 bp, Homo sapien
caagtattaagtagctgaattaccc

SEQ ID NO: 3086884 - DNA, 25 bp, Homo sapien
tgaattacccaagctgaacattttt

SEQ ID NO: 3086885 - DNA, 25 bp, Homo sapien
tccagagccagaatcaagtattaag

SEQ ID NO: 3086886 - DNA, 25 bp, Homo sapien
gctgaattacccaagctgaacattt

SEQ ID NO: 3086887 - DNA, 25 bp, Homo sapien
acttatcttaacgtggatgctagga

SEQ ID NO: 3086888 - DNA, 25 bp, Homo sapien
tagtccaaattgaggcaagctgcaa

SEQ ID NO: 3086889 - DNA, 25 bp, Homo sapien
accacgagacccttgaggacttcaa

SEQ ID NO: 3086890 - DNA, 25 bp, Homo sapien
gatgcacctcaaaaccatgaccaga

SEQ ID NO: 3086891 - DNA, 25 bp, Homo sapien
catcaaccaccaccttagcaaatgg

SEQ ID NO: 3086892 - DNA, 25 bp, Homo sapien
accaccaccttagcaaatggatcag

SEQ ID NO: 3086893 - DNA, 25 bp, Homo sapien
ccaccttagcaaatggatcaggaag

SEQ ID NO: 3086894 - DNA, 25 bp, Homo sapien
tagaatggcattgcccagatccatc

SEQ ID NO: 3086895 - DNA, 25 bp, Homo sapien
gtaagagaggcttaaaagtcgggca

SEQ ID NO: 3086896 - DNA, 25 bp, Homo sapien
ttggactgattgaggtagataacag

SEQ ID NO: 3086897 - DNA, 25 bp, Homo sapien
aaagtcgggcaacagggcttggact

SEQ ID NO: 3086898 - DNA, 25 bp, Homo sapien
gactgattgaggtagataacaggga

SEQ ID NO: 3086899 - DNA, 25 bp, Homo sapien
ctttttcaccaggttttttgcacag

SEQ ID NO: 3086900 - DNA, 25 bp, Homo sapien
ttttcaccaggttttttgcacagag

SEQ ID NO: 3086901 - DNA, 25 bp, Homo sapien
ttcaccaggttttttgcacagagta

SEQ ID NO: 3086902 - DNA, 25 bp, Homo sapien
tttcaccaggttttttgcacagagt

SEQ ID NO: 3086903 - DNA, 25 bp, Homo sapien
gacctgagaactggtaatgttattt

SEQ ID NO: 3086904 - DNA, 25 bp, Homo sapien
ggagcctttactgcactgttctttt

SEQ ID NO: 3086905 - DNA, 25 bp, Homo sapien
aattgttttcacatcctggagcctt

SEQ ID NO: 3086906 - DNA, 25 bp, Homo sapien
tcacatcctggagcctttactgcac

SEQ ID NO: 3086907 - DNA, 25 bp, Homo sapien
cttggggactagaaccacagcccat

SEQ ID NO: 3086908 - DNA, 25 bp, Homo sapien
aaatcttgttaggtgggcgaggcca

SEQ ID NO: 3086909 - DNA, 25 bp, Homo sapien
aatgctgggcagtaagggagtaaca

SEQ ID NO: 3086910 - DNA, 25 bp, Homo sapien
tacagactttttcctagaccgcagt

SEQ ID NO: 3086911 - DNA, 25 bp, Homo sapien
caaactcctgattatgtcaccacag

SEQ ID NO: 3086912 - DNA, 25 bp, Homo sapien
tacctcaacaatcatattagccctg

SEQ ID NO: 3086913 - DNA, 25 bp, Homo sapien
tcatgctgcaaaacaaactaggccc

SEQ ID NO: 3086914 - DNA, 25 bp, Homo sapien
taattatcctaagaacagtatcagc

SEQ ID NO: 3086915 - DNA, 25 bp, Homo sapien
tcagtacctggcaagtagttaatct

SEQ ID NO: 3086916 - DNA, 25 bp, Homo sapien
tacttatcgtgatcagaggtaattt

SEQ ID NO: 3086917 - DNA, 25 bp, Homo sapien
taaagttctcacaaacatgcgtact

SEQ ID NO: 3086918 - DNA, 25 bp, Homo sapien
tcaacttctggtgtaagttcacatg

SEQ ID NO: 3086919 - DNA, 25 bp, Homo sapien
gctttctaaacactgagtgcaagtt

SEQ ID NO: 3086920 - DNA, 25 bp, Homo sapien
taaggatgccgagagaaggaaacct

SEQ ID NO: 3086921 - DNA, 25 bp, Homo sapien
gaacctggtgctatcccttatgaac

SEQ ID NO: 3086922 - DNA, 25 bp, Homo sapien
aaacagacccactcataactgatgg

SEQ ID NO: 3086923 - DNA, 25 bp, Homo sapien
aagacttgcatcactttttggccac

SEQ ID NO: 3086924 - DNA, 25 bp, Homo sapien
accaccaaccaatcaagaacactca

SEQ ID NO: 3086925 - DNA, 25 bp, Homo sapien
caaccaatcaagaacactcaaaaat

SEQ ID NO: 3086926 - DNA, 25 bp, Homo sapien
ccaaccaatcaagaacactcaaaaa

SEQ ID NO: 3086927 - DNA, 25 bp, Homo sapien
caccaaccaatcaagaacactcaaa

SEQ ID NO: 3086928 - DNA, 25 bp, Homo sapien
taagtggttagcaaaaatcctagaa

SEQ ID NO: 3086929 - DNA, 25 bp, Homo sapien
aagaaaaagaacctgttactctgca

SEQ ID NO: 3086930 - DNA, 25 bp, Homo sapien
gcaagtgtgcagagagctaactggc

SEQ ID NO: 3086931 - DNA, 25 bp, Homo sapien
tttgagagattaccagctaactggg

SEQ ID NO: 3086932 - DNA, 25 bp, Homo sapien
tggcatgaggtagaggttcaacttc

SEQ ID NO: 3086933 - DNA, 25 bp, Homo sapien
tcaactgaccacaaatgtataattt

SEQ ID NO: 3086934 - DNA, 25 bp, Homo sapien
cacagaacccggtcccaatgccatt

SEQ ID NO: 3086935 - DNA, 25 bp, Homo sapien
attgaatggttttggcgccctagtc

SEQ ID NO: 3086936 - DNA, 25 bp, Homo sapien
aatccttacaccagtaccacacttt

SEQ ID NO: 3086937 - DNA, 25 bp, Homo sapien
tgagccactgcgcctgaccaatttt

SEQ ID NO: 3086938 - DNA, 25 bp, Homo sapien
gagccactgcgcctgaccaattttt

SEQ ID NO: 3086939 - DNA, 25 bp, Homo sapien
gaaggcctctcaccacaatgtacta

SEQ ID NO: 3086940 - DNA, 25 bp, Homo sapien
ttccctgaaagcaagataaaggtct

SEQ ID NO: 3086941 - DNA, 25 bp, Homo sapien
cattaactctagcactgactgtggt

SEQ ID NO: 3086942 - DNA, 25 bp, Homo sapien
tgacttatgaaaagatgctacccag

SEQ ID NO: 3086943 - DNA, 25 bp, Homo sapien
caaccaatcagtgttttcttcttca

SEQ ID NO: 3086944 - DNA, 25 bp, Homo sapien
agtgatttgcttagatgcacaaagc

SEQ ID NO: 3086945 - DNA, 25 bp, Homo sapien
gcacaaagcttatacatggcataac

SEQ ID NO: 3086946 - DNA, 25 bp, Homo sapien
gcataactaggatacgaactcacat

SEQ ID NO: 3086947 - DNA, 25 bp, Homo sapien
aattctatactctccacaacattct

SEQ ID NO: 3086948 - DNA, 25 bp, Homo sapien
cacaaagagccatgtactcaaatgt

SEQ ID NO: 3086949 - DNA, 25 bp, Homo sapien
ctttctgtatgatgcaacaatccca

SEQ ID NO: 3086950 - DNA, 25 bp, Homo sapien
cactcatttacccaagggcaagaaa

SEQ ID NO: 3086951 - DNA, 25 bp, Homo sapien
actcaaatgtttattcgtaatggcc

SEQ ID NO: 3086952 - DNA, 25 bp, Homo sapien
gtaaagcaattctaatgacaatccc

SEQ ID NO: 3086953 - DNA, 25 bp, Homo sapien
gcattcctaaatacaagcaataact

SEQ ID NO: 3086954 - DNA, 25 bp, Homo sapien
tagaaaacacaacgtaaatcacaca

SEQ ID NO: 3086955 - DNA, 25 bp, Homo sapien
taaagctatcctgaacaatatgggc

SEQ ID NO: 3086956 - DNA, 25 bp, Homo sapien
aaaaactggcctagtgagaatacta

SEQ ID NO: 3086957 - DNA, 25 bp, Homo sapien
tctttaaaaaactggcctagtgaga

SEQ ID NO: 3086958 - DNA, 25 bp, Homo sapien
ttaaaaaactggcctagtgagaata

SEQ ID NO: 3086959 - DNA, 25 bp, Homo sapien
tctctttaaaaaactggcctagtga

SEQ ID NO: 3086960 - DNA, 25 bp, Homo sapien
tatataaagtcattatgggccgggt

SEQ ID NO: 3086961 - DNA, 25 bp, Homo sapien
gcatgttctactgcctgcctgaaga

SEQ ID NO: 3086962 - DNA, 25 bp, Homo sapien
gggcgagggcattcataattatact

SEQ ID NO: 3086963 - DNA, 25 bp, Homo sapien
gaaaagaggaggacatattacgtct

SEQ ID NO: 3086964 - DNA, 25 bp, Homo sapien
taggcaacccagatctaaatgaact

SEQ ID NO: 3086965 - DNA, 25 bp, Homo sapien
gactcctcccaatgtaaggacactg

SEQ ID NO: 3086966 - DNA, 25 bp, Homo sapien
gaatacaagtatcctccaatccagg

SEQ ID NO: 3086967 - DNA, 25 bp, Homo sapien
tatcataggcagtacggaaaccaca

SEQ ID NO: 3086968 - DNA, 25 bp, Homo sapien
agtgtacaatgagcccaagccgtcg

SEQ ID NO: 3086969 - DNA, 25 bp, Homo sapien
ggcacaccggaaaagtcaacctgtc

SEQ ID NO: 3086970 - DNA, 25 bp, Homo sapien
aagccgtcggatcagacaggcacac

SEQ ID NO: 3086971 - DNA, 25 bp, Homo sapien
gaagttagacacaagttctgcggcc

SEQ ID NO: 3086972 - DNA, 25 bp, Homo sapien
aaggtttttcatgcgggcataactg

SEQ ID NO: 3086973 - DNA, 25 bp, Homo sapien
tttttcatgcgggcataactgggtg

SEQ ID NO: 3086974 - DNA, 25 bp, Homo sapien
gtaaaggtttttcatgcgggcataa

SEQ ID NO: 3086975 - DNA, 25 bp, Homo sapien
tcagagacatgagtttaaggtgtgt

SEQ ID NO: 3086976 - DNA, 25 bp, Homo sapien
tccgcctgcgatgcgaaccggtgta

SEQ ID NO: 3086977 - DNA, 25 bp, Homo sapien
cctgcgatgcgaaccggtgtattct

SEQ ID NO: 3086978 - DNA, 25 bp, Homo sapien
aatccgcctgcgatgcgaaccggtg

SEQ ID NO: 3086979 - DNA, 25 bp, Homo sapien
cgcctgcgatgcgaaccggtgtatt

SEQ ID NO: 3086980 - DNA, 25 bp, Homo sapien
aggcgcagcttgacgggcccgttcc

SEQ ID NO: 3086981 - DNA, 25 bp, Homo sapien
ggcgcagcttgacgggcccgttcct

SEQ ID NO: 3086982 - DNA, 25 bp, Homo sapien
ctgtcaggcgcagcttgacgggccc

SEQ ID NO: 3086983 - DNA, 25 bp, Homo sapien
tcaggcgcagcttgacgggcccgtt

SEQ ID NO: 3086984 - DNA, 25 bp, Homo sapien
cggcccgggccgcacaacaaagcgg

SEQ ID NO: 3086985 - DNA, 25 bp, Homo sapien
tctcgtctcggcgaggcccagtagc

SEQ ID NO: 3086986 - DNA, 25 bp, Homo sapien
gggctggtcggctgaagcgggcggt

SEQ ID NO: 3086987 - DNA, 25 bp, Homo sapien
cgggccgcacaacaaagcggcagcc

SEQ ID NO: 3086988 - DNA, 25 bp, Homo sapien
gggctcggccgcttcctcctccacc

SEQ ID NO: 3086989 - DNA, 25 bp, Homo sapien
ctccacccgccctcttgtctgaggg

SEQ ID NO: 3086990 - DNA, 25 bp, Homo sapien
cacccgccctcttgtctgagggacc

SEQ ID NO: 3086991 - DNA, 25 bp, Homo sapien
ctcctccacccgccctcttgtctga

SEQ ID NO: 3086992 - DNA, 25 bp, Homo sapien
ccccaggggaaccacgttgaggctg

SEQ ID NO: 3086993 - DNA, 25 bp, Homo sapien
ttcaaatcctccagcgagagttcca

SEQ ID NO: 3086994 - DNA, 25 bp, Homo sapien
ccctttcgcattggacatggacgaa

SEQ ID NO: 3086995 - DNA, 25 bp, Homo sapien
gacatggacgaagaaggacggacac

SEQ ID NO: 3086996 - DNA, 25 bp, Homo sapien
cgaagaaggacggacactactgggt

SEQ ID NO: 3086997 - DNA, 25 bp, Homo sapien
gacactactgggtcattgtactcag

SEQ ID NO: 3086998 - DNA, 25 bp, Homo sapien
ccttgggccaagacacggagaagtg

SEQ ID NO: 3086999 - DNA, 25 bp, Homo sapien
ggagagttaattgctgtttgagaaa

SEQ ID NO: 3087000 - DNA, 25 bp, Homo sapien
tttctcccaactgaacaagggacac

SEQ ID NO: 3087001 - DNA, 25 bp, Homo sapien
gggacactgtgtttaacatctctgg

SEQ ID NO: 3087002 - DNA, 25 bp, Homo sapien
tgatcgatatctctgactgggaagg

SEQ ID NO: 3087003 - DNA, 25 bp, Homo sapien
gatgagtaaaatccgctccgcagtc

SEQ ID NO: 3087004 - DNA, 25 bp, Homo sapien
taagaggaaggatgtctccgcccgt

SEQ ID NO: 3087005 - DNA, 25 bp, Homo sapien
tctgaatggcggagaatccaaagcc

SEQ ID NO: 3087006 - DNA, 25 bp, Homo sapien
ctaagttagggcaaaaacaggtgct

SEQ ID NO: 3087007 - DNA, 25 bp, Homo sapien
ggatgcccacacaccttgttggagg

SEQ ID NO: 3087008 - DNA, 25 bp, Homo sapien
gcttgggtgactgatgctgaaggac

SEQ ID NO: 3087009 - DNA, 25 bp, Homo sapien
tagggcaaaaacaggtgcttcctcc

SEQ ID NO: 3087010 - DNA, 25 bp, Homo sapien
tgttacagccagaaagccgaggaag

SEQ ID NO: 3087011 - DNA, 25 bp, Homo sapien
agcaccaccccttggctgtctagag

SEQ ID NO: 3087012 - DNA, 25 bp, Homo sapien
gctgcggctgcggtgaacattcttg

SEQ ID NO: 3087013 - DNA, 25 bp, Homo sapien
gaaactggcgcatctcaagtctgag

SEQ ID NO: 3087014 - DNA, 25 bp, Homo sapien
cttgccccaagctcatgtcttcctt

SEQ ID NO: 3087015 - DNA, 25 bp, Homo sapien
gctggagatgaaggcaaagcaacca

SEQ ID NO: 3087016 - DNA, 25 bp, Homo sapien
aagctcatgtcttcctttctagaag

SEQ ID NO: 3087017 - DNA, 25 bp, Homo sapien
ctttctagaagctggagatgaaggc

SEQ ID NO: 3087018 - DNA, 25 bp, Homo sapien
ctgggagagtcaccaaccatcccca

SEQ ID NO: 3087019 - DNA, 25 bp, Homo sapien
tgtgagacttcaggttttaaaacca

SEQ ID NO: 3087020 - DNA, 25 bp, Homo sapien
gaggcatggccaatcctgacagagc

SEQ ID NO: 3087021 - DNA, 25 bp, Homo sapien
aaaccaagatagttggtcagcccac

SEQ ID NO: 3087022 - DNA, 25 bp, Homo sapien
ctgagtgtcagtattctcagaggag

SEQ ID NO: 3087023 - DNA, 25 bp, Homo sapien
aagtcaggcaaccaggataggctca

SEQ ID NO: 3087024 - DNA, 25 bp, Homo sapien
ggaaacgagatctcaggaggtctga

SEQ ID NO: 3087025 - DNA, 25 bp, Homo sapien
gcaggcctgcgaaggcagaagacac

SEQ ID NO: 3087026 - DNA, 25 bp, Homo sapien
cattactgataacattgttacagaa

SEQ ID NO: 3087027 - DNA, 25 bp, Homo sapien
ttactgataacattgttacagaaga

SEQ ID NO: 3087028 - DNA, 25 bp, Homo sapien
tactgataacattgttacagaagaa

SEQ ID NO: 3087029 - DNA, 25 bp, Homo sapien
actgataacattgttacagaagaat

SEQ ID NO: 3087030 - DNA, 25 bp, Homo sapien
ggaaattccacatagaaattagaaa

SEQ ID NO: 3087031 - DNA, 25 bp, Homo sapien
ataggaaattccacatagaaattag

SEQ ID NO: 3087032 - DNA, 25 bp, Homo sapien
cctgaacttggaaagtgtagccttc

SEQ ID NO: 3087033 - DNA, 25 bp, Homo sapien
taggaaattccacatagaaattaga

SEQ ID NO: 3087034 - DNA, 25 bp, Homo sapien
tatggtattgtagtatctgacatag

SEQ ID NO: 3087035 - DNA, 25 bp, Homo sapien
tggtattgtagtatctgacataggg

SEQ ID NO: 3087036 - DNA, 25 bp, Homo sapien
cctgtatggtattgtagtatctgac

SEQ ID NO: 3087037 - DNA, 25 bp, Homo sapien
taatcctgtatggtattgtagtatc

SEQ ID NO: 3087038 - DNA, 25 bp, Homo sapien
cgagggcttattgagatcatctcca

SEQ ID NO: 3087039 - DNA, 25 bp, Homo sapien
tccaatgcagcagggtacgagaata

SEQ ID NO: 3087040 - DNA, 25 bp, Homo sapien
aaaacttcctgaggcagttggctca

SEQ ID NO: 3087041 - DNA, 25 bp, Homo sapien
tcaacgccaagaccaaggtgcgagg

SEQ ID NO: 3087042 - DNA, 25 bp, Homo sapien
gtccaggcctgcgtggatgtcctct

SEQ ID NO: 3087043 - DNA, 25 bp, Homo sapien
ttgcagtcagatacggaggaaatcc

SEQ ID NO: 3087044 - DNA, 25 bp, Homo sapien
cagtcagatacggaggaaatcctta

SEQ ID NO: 3087045 - DNA, 25 bp, Homo sapien
ccttagtaaggcagtccggctcgtc

SEQ ID NO: 3087046 - DNA, 25 bp, Homo sapien
tggcccagatggtcacccaagccat

SEQ ID NO: 3087047 - DNA, 25 bp, Homo sapien
cacccaagccatgtggtccaaggac

SEQ ID NO: 3087048 - DNA, 25 bp, Homo sapien
tggtccaaggactcatacctgaagc

SEQ ID NO: 3087049 - DNA, 25 bp, Homo sapien
catacctgaagcagctgccacactt

SEQ ID NO: 3087050 - DNA, 25 bp, Homo sapien
catatcaaacgttgcacagacaagg

SEQ ID NO: 3087051 - DNA, 25 bp, Homo sapien
gatgtggctcgcttttgtaactgct

SEQ ID NO: 3087052 - DNA, 25 bp, Homo sapien
gaagagtgttttcgacatcatggag

SEQ ID NO: 3087053 - DNA, 25 bp, Homo sapien
ttcccgcagaaacgtgaagagggct

SEQ ID NO: 3087054 - DNA, 25 bp, Homo sapien
tccttttcccttgttcacactctgg

SEQ ID NO: 3087055 - DNA, 25 bp, Homo sapien
aggccaaggtgaagttggactttgt

SEQ ID NO: 3087056 - DNA, 25 bp, Homo sapien
cacaactacactctatacttcatga

SEQ ID NO: 3087057 - DNA, 25 bp, Homo sapien
tgagtgatgcttacatgggatgtga

SEQ ID NO: 3087058 - DNA, 25 bp, Homo sapien
tattaatattaccatccattactca

SEQ ID NO: 3087059 - DNA, 25 bp, Homo sapien
tcaagccaaacatcagaggggcaat

SEQ ID NO: 3087060 - DNA, 25 bp, Homo sapien
gggcaataagtacattacgtcctat

SEQ ID NO: 3087061 - DNA, 25 bp, Homo sapien
caataagtacattacgtcctatgca

SEQ ID NO: 3087062 - DNA, 25 bp, Homo sapien
gttaagcttaatgaagccttatata

SEQ ID NO: 3087063 - DNA, 25 bp, Homo sapien
cttctcagttaagcttaatgaagcc

SEQ ID NO: 3087064 - DNA, 25 bp, Homo sapien
tacttctcagttaagcttaatgaag

SEQ ID NO: 3087065 - DNA, 25 bp, Homo sapien
ctcagttaagcttaatgaagcctta

SEQ ID NO: 3087066 - DNA, 25 bp, Homo sapien
gtatcttttgcaggtaagaggttca

SEQ ID NO: 3087067 - DNA, 25 bp, Homo sapien
gcaggtaagaggttcatcaacggtt

SEQ ID NO: 3087068 - DNA, 25 bp, Homo sapien
tttgcaggtaagaggttcatcaacg

SEQ ID NO: 3087069 - DNA, 25 bp, Homo sapien
aatcttggtatcttttgcaggtaag

SEQ ID NO: 3087070 - DNA, 25 bp, Homo sapien
ctgttcaactgttccacggcccata

SEQ ID NO: 3087071 - DNA, 25 bp, Homo sapien
gttccacggcccatacagcttcctt

SEQ ID NO: 3087072 - DNA, 25 bp, Homo sapien
tgttccacggcccatacagcttcct

SEQ ID NO: 3087073 - DNA, 25 bp, Homo sapien
ttcaactgttccacggcccatacag

SEQ ID NO: 3087074 - DNA, 25 bp, Homo sapien
gctgacaaggaatgggactaatcca

SEQ ID NO: 3087075 - DNA, 25 bp, Homo sapien
ttagagagatcgctgacaaggaatg

SEQ ID NO: 3087076 - DNA, 25 bp, Homo sapien
gacgatattccctatggctcttagg

SEQ ID NO: 3087077 - DNA, 25 bp, Homo sapien
gatcgctgacaaggaatgggactaa

SEQ ID NO: 3087078 - DNA, 25 bp, Homo sapien
ttgacctctattctgtgacgcctcg

SEQ ID NO: 3087079 - DNA, 25 bp, Homo sapien
gacctctattctgtgacgcctcgtt

SEQ ID NO: 3087080 - DNA, 25 bp, Homo sapien
agctccacattgacctctattctgt

SEQ ID NO: 3087081 - DNA, 25 bp, Homo sapien
cctctattctgtgacgcctcgtttc

SEQ ID NO: 3087082 - DNA, 25 bp, Homo sapien
actgtcctttcccttgttcttagat

SEQ ID NO: 3087083 - DNA, 25 bp, Homo sapien
aagatgggcagcttgtgtattagca

SEQ ID NO: 3087084 - DNA, 25 bp, Homo sapien
gatgggcagcttgtgtattagcatt

SEQ ID NO: 3087085 - DNA, 25 bp, Homo sapien
tgggcagcttgtgtattagcattct

SEQ ID NO: 3087086 - DNA, 25 bp, Homo sapien
gaagatgggcagcttgtgtattagc

SEQ ID NO: 3087087 - DNA, 25 bp, Homo sapien
acaactggtttaactgcacactcca

SEQ ID NO: 3087088 - DNA, 25 bp, Homo sapien
ggtagcatcacaactggtttaactg

SEQ ID NO: 3087089 - DNA, 25 bp, Homo sapien
ctggtatgtcctaaagattctcgcc

SEQ ID NO: 3087090 - DNA, 25 bp, Homo sapien
aaagattctcgccatattggtagca

SEQ ID NO: 3087091 - DNA, 25 bp, Homo sapien
ccactttcttttcggtgctcaaccg

SEQ ID NO: 3087092 - DNA, 25 bp, Homo sapien
tgcagtgtgcggagatcacaccatt

SEQ ID NO: 3087093 - DNA, 25 bp, Homo sapien
gttgcagtgtgcggagatcacacca

SEQ ID NO: 3087094 - DNA, 25 bp, Homo sapien
aggttgcagtgtgcggagatcacac

SEQ ID NO: 3087095 - DNA, 25 bp, Homo sapien
gcagtgtgcggagatcacaccattg

SEQ ID NO: 3087096 - DNA, 25 bp, Homo sapien
gcaatgagtcaatgtccaggcagaa

SEQ ID NO: 3087097 - DNA, 25 bp, Homo sapien
taccagttctcacgtaacaccaggg

SEQ ID NO: 3087098 - DNA, 25 bp, Homo sapien
tacatgttgaaagctgtgtgcccca

SEQ ID NO: 3087099 - DNA, 25 bp, Homo sapien
caaggaccttgctccggcttagagg

SEQ ID NO: 3087100 - DNA, 25 bp, Homo sapien
gcaagtattgttaaatctaggcaat

SEQ ID NO: 3087101 - DNA, 25 bp, Homo sapien
aacatttttactattctccatcctc

SEQ ID NO: 3087102 - DNA, 25 bp, Homo sapien
cactgtcactaccatataagcctgt

SEQ ID NO: 3087103 - DNA, 25 bp, Homo sapien
tctaggcaataggtaattgtattcg

SEQ ID NO: 3087104 - DNA, 25 bp, Homo sapien
tgctcccaactgtgacctgctacta

SEQ ID NO: 3087105 - DNA, 25 bp, Homo sapien
tcccaactgtgacctgctactactg

SEQ ID NO: 3087106 - DNA, 25 bp, Homo sapien
atccctgcccccgatgtattacaga

SEQ ID NO: 3087107 - DNA, 25 bp, Homo sapien
cagacgaagtagttcctctcccttt

SEQ ID NO: 3087108 - DNA, 25 bp, Homo sapien
tagtctctacccataaggccagggc

SEQ ID NO: 3087109 - DNA, 25 bp, Homo sapien
tagactccagcacagttgggaccca

SEQ ID NO: 3087110 - DNA, 25 bp, Homo sapien
tgaaaggtcacaggacaactgggac

SEQ ID NO: 3087111 - DNA, 25 bp, Homo sapien
aacaggtgggccaggtagtctctac

SEQ ID NO: 3087112 - DNA, 25 bp, Homo sapien
gctgcgaaaagaatccccatcgagg

SEQ ID NO: 3087113 - DNA, 25 bp, Homo sapien
tgaaaaaagaccagaacctacagag

SEQ ID NO: 3087114 - DNA, 25 bp, Homo sapien
cgaggcatgtgctaaagaatatgtg

SEQ ID NO: 3087115 - DNA, 25 bp, Homo sapien
ccagatgagggtgctgcgaaaagaa

SEQ ID NO: 3087116 - DNA, 25 bp, Homo sapien
aaaaaatctgccactgaaaaaggca

SEQ ID NO: 3087117 - DNA, 25 bp, Homo sapien
aaaatctgccactgaaaaaggcacc

SEQ ID NO: 3087118 - DNA, 25 bp, Homo sapien
aaaaatctgccactgaaaaaggcac

SEQ ID NO: 3087119 - DNA, 25 bp, Homo sapien
aaatctgccactgaaaaaggcacca

SEQ ID NO: 3087120 - DNA, 25 bp, Homo sapien
aggcagaggggctcttgggacagcc

SEQ ID NO: 3087121 - DNA, 25 bp, Homo sapien
gcagaggggctcttgggacagcctg

SEQ ID NO: 3087122 - DNA, 25 bp, Homo sapien
agaggggctcttgggacagcctggg

SEQ ID NO: 3087123 - DNA, 25 bp, Homo sapien
gcaggcagaggggctcttgggacag

SEQ ID NO: 3087124 - DNA, 25 bp, Homo sapien
tcctgctattaccaacgccccttgc

SEQ ID NO: 3087125 - DNA, 25 bp, Homo sapien
tgctattaccaacgccccttgccaa

SEQ ID NO: 3087126 - DNA, 25 bp, Homo sapien
ctgctattaccaacgccccttgcca

SEQ ID NO: 3087127 - DNA, 25 bp, Homo sapien
cttcctgctattaccaacgcccctt

SEQ ID NO: 3087128 - DNA, 25 bp, Homo sapien
agaggcccctttattgcaccgcctt

SEQ ID NO: 3087129 - DNA, 25 bp, Homo sapien
aggcccctttattgcaccgcctttg

SEQ ID NO: 3087130 - DNA, 25 bp, Homo sapien
gaggccgggaagtgcgccaccggga

SEQ ID NO: 3087131 - DNA, 25 bp, Homo sapien
gtggagaggccgggaagtgcgccac

SEQ ID NO: 3087132 - DNA, 25 bp, Homo sapien
agagaatgtggagaggccgggaagt

SEQ ID NO: 3087133 - DNA, 25 bp, Homo sapien
agaatgtggagaggccgggaagtgc

SEQ ID NO: 3087134 - DNA, 25 bp, Homo sapien
caacctcacttaacacgtctttctg

SEQ ID NO: 3087135 - DNA, 25 bp, Homo sapien
ttttcgatttcccagattaacacaa

SEQ ID NO: 3087136 - DNA, 25 bp, Homo sapien
tcccagattaacacaactggattct

SEQ ID NO: 3087137 - DNA, 25 bp, Homo sapien
tgaaacaaacccatcaggagttctt

SEQ ID NO: 3087138 - DNA, 25 bp, Homo sapien
atatgtggcacccacctgctgtagg

SEQ ID NO: 3087139 - DNA, 25 bp, Homo sapien
gagctggcggcaggcccgcaatccc

SEQ ID NO: 3087140 - DNA, 25 bp, Homo sapien
agcctggaaattgcagatgagggat

SEQ ID NO: 3087141 - DNA, 25 bp, Homo sapien
caatttgattacgaaaaatctttcg

SEQ ID NO: 3087142 - DNA, 25 bp, Homo sapien
ttcacgatctcctaccgcggcgggc

SEQ ID NO: 3087143 - DNA, 25 bp, Homo sapien
gggccgcgtacctcctggatggcct

SEQ ID NO: 3087144 - DNA, 25 bp, Homo sapien
ctgcttcacgatctcctaccgcggc

SEQ ID NO: 3087145 - DNA, 25 bp, Homo sapien
ggcgggccgcgtacctcctggatgg

SEQ ID NO: 3087146 - DNA, 25 bp, Homo sapien
ctgcgcgacaggggcagcaggcaca

SEQ ID NO: 3087147 - DNA, 25 bp, Homo sapien
tgcgcgacaggggcagcaggcacac

SEQ ID NO: 3087148 - DNA, 25 bp, Homo sapien
acagccgcgctcacgaaccggtagt

SEQ ID NO: 3087149 - DNA, 25 bp, Homo sapien
cacagccgcgctcacgaaccggtag

SEQ ID NO: 3087150 - DNA, 25 bp, Homo sapien
ggccgttgggggccgctgccacagc

SEQ ID NO: 3087151 - DNA, 25 bp, Homo sapien
acggcgcgcgtcaggtcgtccaggg

SEQ ID NO: 3087152 - DNA, 25 bp, Homo sapien
gtcagcggcagggttgcccagcgca

SEQ ID NO: 3087153 - DNA, 25 bp, Homo sapien
agcggcagggttgcccagcgcaggc

SEQ ID NO: 3087154 - DNA, 25 bp, Homo sapien
gcgcgtcagcggcagggttgcccag

SEQ ID NO: 3087155 - DNA, 25 bp, Homo sapien
ctggcggcgcgtcagcggcagggtt

SEQ ID NO: 3087156 - DNA, 25 bp, Homo sapien
gccaccaatgctcagtgctctgtgc

SEQ ID NO: 3087157 - DNA, 25 bp, Homo sapien
ccgcagcggccggtagcgctcattg

SEQ ID NO: 3087158 - DNA, 25 bp, Homo sapien
atgctcagtgctctgtgctgcgccg

SEQ ID NO: 3087159 - DNA, 25 bp, Homo sapien
cacgtgccaccaatgctcagtgctc

SEQ ID NO: 3087160 - DNA, 25 bp, Homo sapien
gcggcgcccgtccttgccggtgtac

SEQ ID NO: 3087161 - DNA, 25 bp, Homo sapien
gaaggggtgctccaccagtacgtac

SEQ ID NO: 3087162 - DNA, 25 bp, Homo sapien
tcgaaggggtgctccaccagtacgt

SEQ ID NO: 3087163 - DNA, 25 bp, Homo sapien
cgaaggggtgctccaccagtacgta

SEQ ID NO: 3087164 - DNA, 25 bp, Homo sapien
cgtccccctccacatccgccgccat

SEQ ID NO: 3087165 - DNA, 25 bp, Homo sapien
acgtccccctccacatccgccgcca

SEQ ID NO: 3087166 - DNA, 25 bp, Homo sapien
gattctaagatttcagcctcgcttc

SEQ ID NO: 3087167 - DNA, 25 bp, Homo sapien
agcactcgaggagagacttgggttc

SEQ ID NO: 3087168 - DNA, 25 bp, Homo sapien
actgagcccggaatagcccagcact

SEQ ID NO: 3087169 - DNA, 25 bp, Homo sapien
aagtcaagaccactgagcccggaat

SEQ ID NO: 3087170 - DNA, 25 bp, Homo sapien
tagtcttggtccaaatcgactgcga

SEQ ID NO: 3087171 - DNA, 25 bp, Homo sapien
gagattgtgggtagtcttggtccaa

SEQ ID NO: 3087172 - DNA, 25 bp, Homo sapien
tgggtagtcttggtccaaatcgact

SEQ ID NO: 3087173 - DNA, 25 bp, Homo sapien
ttggtccaaatcgactgcgagggaa

SEQ ID NO: 3087174 - DNA, 25 bp, Homo sapien
cacgcttgcttgatagttgaccgtg

SEQ ID NO: 3087175 - DNA, 25 bp, Homo sapien
acgcttgcttgatagttgaccgtgc

SEQ ID NO: 3087176 - DNA, 25 bp, Homo sapien
cccgcttagtccaagggccttggtg

SEQ ID NO: 3087177 - DNA, 25 bp, Homo sapien
aggcgccccggcgaacagctctacc

SEQ ID NO: 3087178 - DNA, 25 bp, Homo sapien
cccgtcagtcaagtgggaagagcag

SEQ ID NO: 3087179 - DNA, 25 bp, Homo sapien
ttttcccgtcagtcaagtgggaaga

SEQ ID NO: 3087180 - DNA, 25 bp, Homo sapien
ccctcaaagctctccggagtggtca

SEQ ID NO: 3087181 - DNA, 25 bp, Homo sapien
ggcccctggagaatgcactctgaga

SEQ ID NO: 3087182 - DNA, 25 bp, Homo sapien
tgtgacccctacagtgtccccaaga

SEQ ID NO: 3087183 - DNA, 25 bp, Homo sapien
agtgactgtccgtgcggagtcccaa

SEQ ID NO: 3087184 - DNA, 25 bp, Homo sapien
gccaagggccaggagaccgcggctt

SEQ ID NO: 3087185 - DNA, 25 bp, Homo sapien
ccgaggctgagggaccgaaggagca

SEQ ID NO: 3087186 - DNA, 25 bp, Homo sapien
aaggagcagggtccaatccgggact

SEQ ID NO: 3087187 - DNA, 25 bp, Homo sapien
gctccttcgccactttgtcaagcgt

SEQ ID NO: 3087188 - DNA, 25 bp, Homo sapien
cagagccaacaaaccccaaggtgga

SEQ ID NO: 3087189 - DNA, 25 bp, Homo sapien
cggggtcatcgagctgcccagagcc

SEQ ID NO: 3087190 - DNA, 25 bp, Homo sapien
gaaagggtatacacttgagtcacta

SEQ ID NO: 3087191 - DNA, 25 bp, Homo sapien
ctaggaaagggtatacacttgagtc

SEQ ID NO: 3087192 - DNA, 25 bp, Homo sapien
ctgggcgggcctcagggagcccaag

SEQ ID NO: 3087193 - DNA, 25 bp, Homo sapien
gtctgctgggcgggcctcagggagc

SEQ ID NO: 3087194 - DNA, 25 bp, Homo sapien
tgctgggcgggcctcagggagccca

SEQ ID NO: 3087195 - DNA, 25 bp, Homo sapien
ctcagggagcccaagggccgggtgg

SEQ ID NO: 3087196 - DNA, 25 bp, Homo sapien
ggggcttccgaggtggtgccggaga

SEQ ID NO: 3087197 - DNA, 25 bp, Homo sapien
gaggtggtgccggagaggtttcgcg

SEQ ID NO: 3087198 - DNA, 25 bp, Homo sapien
tggtgccggagaggtttcgcggaat

SEQ ID NO: 3087199 - DNA, 25 bp, Homo sapien
ccggagaggtttcgcggaatcggag

SEQ ID NO: 3087200 - DNA, 25 bp, Homo sapien
ctggttgtctagtgcgggcgttccc

SEQ ID NO: 3087201 - DNA, 25 bp, Homo sapien
gaggaacctgaatgcctctgctggg

SEQ ID NO: 3087202 - DNA, 25 bp, Homo sapien
ggagtgctgtcacccatacccaaag

SEQ ID NO: 3087203 - DNA, 25 bp, Homo sapien
ctggcaacggcagcgaatagggaca

SEQ ID NO: 3087204 - DNA, 25 bp, Homo sapien
actgcgagcccttccaaccggattg

SEQ ID NO: 3087205 - DNA, 25 bp, Homo sapien
gagcccttccaaccggattgtagac

SEQ ID NO: 3087206 - DNA, 25 bp, Homo sapien
aaccggattgtagacctgccagctc

SEQ ID NO: 3087207 - DNA, 25 bp, Homo sapien
ccttccaaccggattgtagacctgc

SEQ ID NO: 3087208 - DNA, 25 bp, Homo sapien
acccggccacagctccttcgccaac

SEQ ID NO: 3087209 - DNA, 25 bp, Homo sapien
gacccggccacagctccttcgccaa

SEQ ID NO: 3087210 - DNA, 25 bp, Homo sapien
ccgctcggcggcccactgcctgccc

SEQ ID NO: 3087211 - DNA, 25 bp, Homo sapien
tcccgctcggcggcccactgcctgc

SEQ ID NO: 3087212 - DNA, 25 bp, Homo sapien
cccgctcggcggcccactgcctgcc

SEQ ID NO: 3087213 - DNA, 25 bp, Homo sapien
cgctcggcggcccactgcctgcccg

SEQ ID NO: 3087214 - DNA, 25 bp, Homo sapien
ctcgtctccacttgtcccggcaggc

SEQ ID NO: 3087215 - DNA, 25 bp, Homo sapien
cgccggcctcgtctccacttgtccc

SEQ ID NO: 3087216 - DNA, 25 bp, Homo sapien
ctcctcgaccgcgcggctccggcgc

SEQ ID NO: 3087217 - DNA, 25 bp, Homo sapien
gcctcgtctccacttgtcccggcag

SEQ ID NO: 3087218 - DNA, 25 bp, Homo sapien
atagcactataaccagtgaggcacc

SEQ ID NO: 3087219 - DNA, 25 bp, Homo sapien
agcactataaccagtgaggcaccgg

SEQ ID NO: 3087220 - DNA, 25 bp, Homo sapien
gcactataaccagtgaggcaccggc

SEQ ID NO: 3087221 - DNA, 25 bp, Homo sapien
tagcactataaccagtgaggcaccg

SEQ ID NO: 3087222 - DNA, 25 bp, Homo sapien
tgcggttgcgagagacaatccccgg

SEQ ID NO: 3087223 - DNA, 25 bp, Homo sapien
ctgcggttgcgagagacaatccccg

SEQ ID NO: 3087224 - DNA, 25 bp, Homo sapien
ctccaatccgtccacagggtaagct

SEQ ID NO: 3087225 - DNA, 25 bp, Homo sapien
ccaccctccaatccgtccacagggt

SEQ ID NO: 3087226 - DNA, 25 bp, Homo sapien
gcggggctgagatggtgggactggg

SEQ ID NO: 3087227 - DNA, 25 bp, Homo sapien
caatccgtccacagggtaagctcag

SEQ ID NO: 3087228 - DNA, 25 bp, Homo sapien
aggagtccagccccagggccctccg

SEQ ID NO: 3087229 - DNA, 25 bp, Homo sapien
gagtccagccccagggccctccgcc

SEQ ID NO: 3087230 - DNA, 25 bp, Homo sapien
ccaggagtccagccccagggccctc

SEQ ID NO: 3087231 - DNA, 25 bp, Homo sapien
ctcctgggggccaggagtccagccc

SEQ ID NO: 3087232 - DNA, 25 bp, Homo sapien
gggcccccagaaacagttgtgccta

SEQ ID NO: 3087233 - DNA, 25 bp, Homo sapien
cgaagagaagcccacaccccaggcc

SEQ ID NO: 3087234 - DNA, 25 bp, Homo sapien
aagagaagcccacaccccaggccat

SEQ ID NO: 3087235 - DNA, 25 bp, Homo sapien
gggacgaagagaagcccacacccca

SEQ ID NO: 3087236 - DNA, 25 bp, Homo sapien
ctgggacgaagagaagcccacaccc

SEQ ID NO: 3087237 - DNA, 25 bp, Homo sapien
actctgctgcttggcggctggtagg

SEQ ID NO: 3087238 - DNA, 25 bp, Homo sapien
gggtcaggcaggtatgatgccccac

SEQ ID NO: 3087239 - DNA, 25 bp, Homo sapien
gtcaggcaggtatgatgccccactc

SEQ ID NO: 3087240 - DNA, 25 bp, Homo sapien
ggctggtaggccttgggagttctgc

SEQ ID NO: 3087241 - DNA, 25 bp, Homo sapien
tcatgggtgactcgcatacggtcaa

SEQ ID NO: 3087242 - DNA, 25 bp, Homo sapien
gaattagtctgtttccaagggcgcc

SEQ ID NO: 3087243 - DNA, 25 bp, Homo sapien
gaattcatagctttgtgaggcggcg

SEQ ID NO: 3087244 - DNA, 25 bp, Homo sapien
ctgcacagcttagggcgaaggacca

SEQ ID NO: 3087245 - DNA, 25 bp, Homo sapien
cggaggcgccgggacgctggtgagc

SEQ ID NO: 3087246 - DNA, 25 bp, Homo sapien
gacacggtgagtatcctgggctgat

SEQ ID NO: 3087247 - DNA, 25 bp, Homo sapien
ttttaatcaggaatgtggaattgaa

SEQ ID NO: 3087248 - DNA, 25 bp, Homo sapien
gcctggtgagtaaacggccctgcct

SEQ ID NO: 3087249 - DNA, 25 bp, Homo sapien
tcagcagaggggcatcaggcgaaaa

SEQ ID NO: 3087250 - DNA, 25 bp, Homo sapien
agaggggcatcaggcgaaaacgttc

SEQ ID NO: 3087251 - DNA, 25 bp, Homo sapien
cagaggggcatcaggcgaaaacgtt

SEQ ID NO: 3087252 - DNA, 25 bp, Homo sapien
gggcatcaggcgaaaacgttctgtt

SEQ ID NO: 3087253 - DNA, 25 bp, Homo sapien
agctctggtggaagacggtcttgca

SEQ ID NO: 3087254 - DNA, 25 bp, Homo sapien
gctctggtggaagacggtcttgcac

SEQ ID NO: 3087255 - DNA, 25 bp, Homo sapien
ctctggtggaagacggtcttgcact

SEQ ID NO: 3087256 - DNA, 25 bp, Homo sapien
cagctctggtggaagacggtcttgc

SEQ ID NO: 3087257 - DNA, 25 bp, Homo sapien
tgacctgtggccacgctggccagca

SEQ ID NO: 3087258 - DNA, 25 bp, Homo sapien
gagagagcagcacacctgctggtgc

SEQ ID NO: 3087259 - DNA, 25 bp, Homo sapien
ggggagagagcagcacacctgctgg

SEQ ID NO: 3087260 - DNA, 25 bp, Homo sapien
ttgacctgtggccacgctggccagc

SEQ ID NO: 3087261 - DNA, 25 bp, Homo sapien
gaccagaacccacgatatggctgtg

SEQ ID NO: 3087262 - DNA, 25 bp, Homo sapien
gaacccacgatatggctgtgacata

SEQ ID NO: 3087263 - DNA, 25 bp, Homo sapien
cttttgaccagaacccacgatatgg

SEQ ID NO: 3087264 - DNA, 25 bp, Homo sapien
cagaacccacgatatggctgtgaca

SEQ ID NO: 3087265 - DNA, 25 bp, Homo sapien
ctgtgcctttccatcccggaacagg

SEQ ID NO: 3087266 - DNA, 25 bp, Homo sapien
catcccggaacaggagattctcgaa

SEQ ID NO: 3087267 - DNA, 25 bp, Homo sapien
agattctcgaaacagtgcttaccca

SEQ ID NO: 3087268 - DNA, 25 bp, Homo sapien
tgtgtaacccatgcacgcacgctgt

SEQ ID NO: 3087269 - DNA, 25 bp, Homo sapien
tcccggccagtggacaccgataaaa

SEQ ID NO: 3087270 - DNA, 25 bp, Homo sapien
ggaaggtctggatgaatttttccat

SEQ ID NO: 3087271 - DNA, 25 bp, Homo sapien
aggaaggtctggatgaatttttcca

SEQ ID NO: 3087272 - DNA, 25 bp, Homo sapien
gaatcccggccagtggacaccgata

SEQ ID NO: 3087273 - DNA, 25 bp, Homo sapien
ggaggctccactcagagagccggca

SEQ ID NO: 3087274 - DNA, 25 bp, Homo sapien
gaggctccactcagagagccggcag

SEQ ID NO: 3087275 - DNA, 25 bp, Homo sapien
aggctccactcagagagccggcagc

SEQ ID NO: 3087276 - DNA, 25 bp, Homo sapien
atccttcatatacctcatctgcgat

SEQ ID NO: 3087277 - DNA, 25 bp, Homo sapien
ggcggggtaggcatgacactctcac

SEQ ID NO: 3087278 - DNA, 25 bp, Homo sapien
aagtctttctagagttctgggcggg

SEQ ID NO: 3087279 - DNA, 25 bp, Homo sapien
ttcagtaaactacagacaccctctc

SEQ ID NO: 3087280 - DNA, 25 bp, Homo sapien
gcagaaaagctgcagactgctgtct

SEQ ID NO: 3087281 - DNA, 25 bp, Homo sapien
gccggaggtcagcaacacggaacct

SEQ ID NO: 3087282 - DNA, 25 bp, Homo sapien
ccggaggtcagcaacacggaaccta

SEQ ID NO: 3087283 - DNA, 25 bp, Homo sapien
tgccggaggtcagcaacacggaacc

SEQ ID NO: 3087284 - DNA, 25 bp, Homo sapien
ctgccggaggtcagcaacacggaac

SEQ ID NO: 3087285 - DNA, 25 bp, Homo sapien
aggcagacacctcccgcctgggcgg

SEQ ID NO: 3087286 - DNA, 25 bp, Homo sapien
attttcattcccctggcgctgctca

SEQ ID NO: 3087287 - DNA, 25 bp, Homo sapien
caggccagcccgtgttgtttatttt

SEQ ID NO: 3087288 - DNA, 25 bp, Homo sapien
aagacccaggccagcccgtgttgtt

SEQ ID NO: 3087289 - DNA, 25 bp, Homo sapien
gtttctccgcccacacaataaggag

SEQ ID NO: 3087290 - DNA, 25 bp, Homo sapien
cagggcacagtcagccctacttagg

SEQ ID NO: 3087291 - DNA, 25 bp, Homo sapien
cgtgaggctggctacctgggaaaca

SEQ ID NO: 3087292 - DNA, 25 bp, Homo sapien
tctttgtcctctggcgtgaggctgg

SEQ ID NO: 3087293 - DNA, 25 bp, Homo sapien
atgaggggaaaggtcgactcttagc

SEQ ID NO: 3087294 - DNA, 25 bp, Homo sapien
ggaagatgaggggaaaggtcgactc

SEQ ID NO: 3087295 - DNA, 25 bp, Homo sapien
gaggggaaaggtcgactcttagctc

SEQ ID NO: 3087296 - DNA, 25 bp, Homo sapien
agatgaggggaaaggtcgactctta

SEQ ID NO: 3087297 - DNA, 25 bp, Homo sapien
gaccaaggagggtgataaggcccca

SEQ ID NO: 3087298 - DNA, 25 bp, Homo sapien
tgaccaaggagggtgataaggcccc

SEQ ID NO: 3087299 - DNA, 25 bp, Homo sapien
agggagtgagtcagcgcttgccaag

SEQ ID NO: 3087300 - DNA, 25 bp, Homo sapien
tttcgccacctggttaggtgggcag

SEQ ID NO: 3087301 - DNA, 25 bp, Homo sapien
tgaccccagagatttcgccacctgg

SEQ ID NO: 3087302 - DNA, 25 bp, Homo sapien
agtgagtcagcgcttgccaagaggt

SEQ ID NO: 3087303 - DNA, 25 bp, Homo sapien
ccttgagagcccctggggacctgcc

SEQ ID NO: 3087304 - DNA, 25 bp, Homo sapien
agcccctggggacctgcctggggca

SEQ ID NO: 3087305 - DNA, 25 bp, Homo sapien
cccttgagagcccctggggacctgc

SEQ ID NO: 3087306 - DNA, 25 bp, Homo sapien
ccctggggacctgcctggggcacac

SEQ ID NO: 3087307 - DNA, 25 bp, Homo sapien
agtcttcagagaggcgctctctggg

SEQ ID NO: 3087308 - DNA, 25 bp, Homo sapien
tcagagaggcgctctctgggccagc

SEQ ID NO: 3087309 - DNA, 25 bp, Homo sapien
ggccctgaggaggcccggctctggg

SEQ ID NO: 3087310 - DNA, 25 bp, Homo sapien
tcttcagagaggcgctctctgggcc

SEQ ID NO: 3087311 - DNA, 25 bp, Homo sapien
gtacagagacgcgttcaccatctgc

SEQ ID NO: 3087312 - DNA, 25 bp, Homo sapien
gctcgtacagagacgcgttcaccat

SEQ ID NO: 3087313 - DNA, 25 bp, Homo sapien
atgctcgtacagagacgcgttcacc

SEQ ID NO: 3087314 - DNA, 25 bp, Homo sapien
acagagacgcgttcaccatctgcag

SEQ ID NO: 3087315 - DNA, 25 bp, Homo sapien
gatgactgctccaaggtatagccag

SEQ ID NO: 3087316 - DNA, 25 bp, Homo sapien
agtcacctgggcctcatagggttgg

SEQ ID NO: 3087317 - DNA, 25 bp, Homo sapien
caaggtatagccagctcgctggcca

SEQ ID NO: 3087318 - DNA, 25 bp, Homo sapien
aataagcccatgtagggcctacagg

SEQ ID NO: 3087319 - DNA, 25 bp, Homo sapien
tacaaaggagaagccgatctgccgg

SEQ ID NO: 3087320 - DNA, 25 bp, Homo sapien
ggagaagccgatctgccgggagcag

SEQ ID NO: 3087321 - DNA, 25 bp, Homo sapien
aaggagaagccgatctgccgggagc

SEQ ID NO: 3087322 - DNA, 25 bp, Homo sapien
caaaggagaagccgatctgccggga

SEQ ID NO: 3087323 - DNA, 25 bp, Homo sapien
cagccttggccgtgatgattttgaa

SEQ ID NO: 3087324 - DNA, 25 bp, Homo sapien
tgcgcagaagcagccttgggagtca

SEQ ID NO: 3087325 - DNA, 25 bp, Homo sapien
tctcccgggtggcaaatttcagcac

SEQ ID NO: 3087326 - DNA, 25 bp, Homo sapien
gagaaaatatatagggcatccaggt

SEQ ID NO: 3087327 - DNA, 25 bp, Homo sapien
tctacccacacaacccatgccaggg

SEQ ID NO: 3087328 - DNA, 25 bp, Homo sapien
tgccagggctacccacagcaaggcc

SEQ ID NO: 3087329 - DNA, 25 bp, Homo sapien
gggctctacccacacaacccatgcc

SEQ ID NO: 3087330 - DNA, 25 bp, Homo sapien
cacacaacccatgccagggctaccc

SEQ ID NO: 3087331 - DNA, 25 bp, Homo sapien
tagcagatttgatcaagccacccag

SEQ ID NO: 3087332 - DNA, 25 bp, Homo sapien
taacacttgtgggaacacactaccc

SEQ ID NO: 3087333 - DNA, 25 bp, Homo sapien
caactactgagggtaaacacgtttg

SEQ ID NO: 3087334 - DNA, 25 bp, Homo sapien
gaaatgcttccctgaatgaacatga

SEQ ID NO: 3087335 - DNA, 25 bp, Homo sapien
tgcctccggtgtaccacctggaaac

SEQ ID NO: 3087336 - DNA, 25 bp, Homo sapien
ctgcctccggtgtaccacctggaaa

SEQ ID NO: 3087337 - DNA, 25 bp, Homo sapien
cctcattctagcatctataaggctg

SEQ ID NO: 3087338 - DNA, 25 bp, Homo sapien
aatggttttcttgatatctccagca

SEQ ID NO: 3087339 - DNA, 25 bp, Homo sapien
tataaggctgtttggaatggttttc

SEQ ID NO: 3087340 - DNA, 25 bp, Homo sapien
gttttcttgatatctccagcaagtg

SEQ ID NO: 3087341 - DNA, 25 bp, Homo sapien
ctactgaataagcagtgaatgaatc

SEQ ID NO: 3087342 - DNA, 25 bp, Homo sapien
ataagcagtgaatgaatccacaact

SEQ ID NO: 3087343 - DNA, 25 bp, Homo sapien
agcagtgaatgaatccacaacttcc

SEQ ID NO: 3087344 - DNA, 25 bp, Homo sapien
tactgaataagcagtgaatgaatcc

SEQ ID NO: 3087345 - DNA, 25 bp, Homo sapien
actctgacccacactgacggttttg

SEQ ID NO: 3087346 - DNA, 25 bp, Homo sapien
caaagaagcctgatgttggaaggag

SEQ ID NO: 3087347 - DNA, 25 bp, Homo sapien
ggaaggagttcgcttggactacaga

SEQ ID NO: 3087348 - DNA, 25 bp, Homo sapien
cagagcgaggccaatcagatatcca

SEQ ID NO: 3087349 - DNA, 25 bp, Homo sapien
ggactggtgggtgaggaaactacca

SEQ ID NO: 3087350 - DNA, 25 bp, Homo sapien
gactggtgggtgaggaaactaccag

SEQ ID NO: 3087351 - DNA, 25 bp, Homo sapien
cagaccagctccgtcatgagcctgg

SEQ ID NO: 3087352 - DNA, 25 bp, Homo sapien
tgacagtactagaaggctgctggcc

SEQ ID NO: 3087353 - DNA, 25 bp, Homo sapien
tgctggcctgaggtgctctctacag

SEQ ID NO: 3087354 - DNA, 25 bp, Homo sapien
cctgcacgtggacaccatcttgagt

SEQ ID NO: 3087355 - DNA, 25 bp, Homo sapien
tgcaggtgcctcacagtgcaggtgt

SEQ ID NO: 3087356 - DNA, 25 bp, Homo sapien
caggtgcctcacagtgcaggtgtgt

SEQ ID NO: 3087357 - DNA, 25 bp, Homo sapien
tctgcaggtgcctcacagtgcaggt

SEQ ID NO: 3087358 - DNA, 25 bp, Homo sapien
ctctgcaggtgcctcacagtgcagg

SEQ ID NO: 3087359 - DNA, 25 bp, Homo sapien
tcttggctcagtccgttggttggca

SEQ ID NO: 3087360 - DNA, 25 bp, Homo sapien
cttggctcagtccgttggttggcac

SEQ ID NO: 3087361 - DNA, 25 bp, Homo sapien
ttggctcagtccgttggttggcaca

SEQ ID NO: 3087362 - DNA, 25 bp, Homo sapien
tggctcagtccgttggttggcacag

SEQ ID NO: 3087363 - DNA, 25 bp, Homo sapien
ttccaacaataccatagaagtttta

SEQ ID NO: 3087364 - DNA, 25 bp, Homo sapien
attccaacaataccatagaagtttt

SEQ ID NO: 3087365 - DNA, 25 bp, Homo sapien
taggcaggtttcctaagcgaggtca

SEQ ID NO: 3087366 - DNA, 25 bp, Homo sapien
aaacatggtatgcagcagagcctcc

SEQ ID NO: 3087367 - DNA, 25 bp, Homo sapien
ggatctcaggcgaaaaagctcccca

SEQ ID NO: 3087368 - DNA, 25 bp, Homo sapien
tatgagtacacacgagatgtgcccc

SEQ ID NO: 3087369 - DNA, 25 bp, Homo sapien
tacacactgcacagaaacatgccct

SEQ ID NO: 3087370 - DNA, 25 bp, Homo sapien
gcaaagcctggttcaggtggccaca

SEQ ID NO: 3087371 - DNA, 25 bp, Homo sapien
ataaaaccagtggagcatgtcatgg

SEQ ID NO: 3087372 - DNA, 25 bp, Homo sapien
caaagcctggttcaggtggccacag

SEQ ID NO: 3087373 - DNA, 25 bp, Homo sapien
aagcctggttcaggtggccacaggc

SEQ ID NO: 3087374 - DNA, 25 bp, Homo sapien
actgtccggcatttgtctatacatc

SEQ ID NO: 3087375 - DNA, 25 bp, Homo sapien
ccggcatttgtctatacatcctgac

SEQ ID NO: 3087376 - DNA, 25 bp, Homo sapien
accactgtccggcatttgtctatac

SEQ ID NO: 3087377 - DNA, 25 bp, Homo sapien
tgtccggcatttgtctatacatcct

SEQ ID NO: 3087378 - DNA, 25 bp, Homo sapien
atgggaaaggctttcactgtatatg

SEQ ID NO: 3087379 - DNA, 25 bp, Homo sapien
ggaaaggctttcactgtatatgttt

SEQ ID NO: 3087380 - DNA, 25 bp, Homo sapien
tttaaccataaaaagattatctatg

SEQ ID NO: 3087381 - DNA, 25 bp, Homo sapien
taaccataaaaagattatctatgca

SEQ ID NO: 3087382 - DNA, 25 bp, Homo sapien
cagctctaagctgttctaagtccac

SEQ ID NO: 3087383 - DNA, 25 bp, Homo sapien
ctccactatgcctgtattgcctgct

SEQ ID NO: 3087384 - DNA, 25 bp, Homo sapien
tgaagtcacactcttatgcgttatg

SEQ ID NO: 3087385 - DNA, 25 bp, Homo sapien
ccccgggaggtattctgtgaagtca

SEQ ID NO: 3087386 - DNA, 25 bp, Homo sapien
gatgaactggccgtgtccaggctga

SEQ ID NO: 3087387 - DNA, 25 bp, Homo sapien
tcttatggcccgagtgatggacttc

SEQ ID NO: 3087388 - DNA, 25 bp, Homo sapien
tgggctcctcgcaatggtctggact

SEQ ID NO: 3087389 - DNA, 25 bp, Homo sapien
gatggacttcgatgtcttcagagcc

SEQ ID NO: 3087390 - DNA, 25 bp, Homo sapien
gaagctaaggaggaactcgccctcc

SEQ ID NO: 3087391 - DNA, 25 bp, Homo sapien
agggtccagctcagaaagcgggcaa

SEQ ID NO: 3087392 - DNA, 25 bp, Homo sapien
gacttgtaggagagttcgaaggaca

SEQ ID NO: 3087393 - DNA, 25 bp, Homo sapien
gagcgtccactcatttaagatggca

SEQ ID NO: 3087394 - DNA, 25 bp, Homo sapien
ttcaggtagcactccatcaggccat

SEQ ID NO: 3087395 - DNA, 25 bp, Homo sapien
agcagcttcaggtagcactccatca

SEQ ID NO: 3087396 - DNA, 25 bp, Homo sapien
cagcttcaggtagcactccatcagg

SEQ ID NO: 3087397 - DNA, 25 bp, Homo sapien
gcttcaggtagcactccatcaggcc

SEQ ID NO: 3087398 - DNA, 25 bp, Homo sapien
caggtgctccaactctgagatgatg

SEQ ID NO: 3087399 - DNA, 25 bp, Homo sapien
gtgctccaactctgagatgatgtgt

SEQ ID NO: 3087400 - DNA, 25 bp, Homo sapien
ttgacaaacgtcaggtgctccaact

SEQ ID NO: 3087401 - DNA, 25 bp, Homo sapien
gttgacaaacgtcaggtgctccaac

SEQ ID NO: 3087402 - DNA, 25 bp, Homo sapien
gaagggagaacagacgtgtttcaag

SEQ ID NO: 3087403 - DNA, 25 bp, Homo sapien
gggagaacagacgtgtttcaagaaa

SEQ ID NO: 3087404 - DNA, 25 bp, Homo sapien
agaacagacgtgtttcaagaaacta

SEQ ID NO: 3087405 - DNA, 25 bp, Homo sapien
ctgggaagggagaacagacgtgttt

SEQ ID NO: 3087406 - DNA, 25 bp, Homo sapien
catggtgttggcatctccgtcttca

SEQ ID NO: 3087407 - DNA, 25 bp, Homo sapien
gcatctccgtcttcactagtgacca

SEQ ID NO: 3087408 - DNA, 25 bp, Homo sapien
gttggcatctccgtcttcactagtg

SEQ ID NO: 3087409 - DNA, 25 bp, Homo sapien
tgcacatggtgttggcatctccgtc

SEQ ID NO: 3087410 - DNA, 25 bp, Homo sapien
ttgcaaggctttcacggatcccacc

SEQ ID NO: 3087411 - DNA, 25 bp, Homo sapien
gcttttgcaaggctttcacggatcc

SEQ ID NO: 3087412 - DNA, 25 bp, Homo sapien
ttttgcaaggctttcacggatccca

SEQ ID NO: 3087413 - DNA, 25 bp, Homo sapien
tgcttttgcaaggctttcacggatc

SEQ ID NO: 3087414 - DNA, 25 bp, Homo sapien
caggcttctgccctagctctggagg

SEQ ID NO: 3087415 - DNA, 25 bp, Homo sapien
tctgccctagctctggagggtcctg

SEQ ID NO: 3087416 - DNA, 25 bp, Homo sapien
cctcatggagtcagtttgtgcagct

SEQ ID NO: 3087417 - DNA, 25 bp, Homo sapien
gctgttgttagaaggctgggttggc

SEQ ID NO: 3087418 - DNA, 25 bp, Homo sapien
ttctccaccactgaaagcatctcca

SEQ ID NO: 3087419 - DNA, 25 bp, Homo sapien
gggtccagtccattctccaccactg

SEQ ID NO: 3087420 - DNA, 25 bp, Homo sapien
cgggatggcagcctgggggtccagt

SEQ ID NO: 3087421 - DNA, 25 bp, Homo sapien
agtccattctccaccactgaaagca

SEQ ID NO: 3087422 - DNA, 25 bp, Homo sapien
gctccctcagagaatcacatgacac

SEQ ID NO: 3087423 - DNA, 25 bp, Homo sapien
tgctccctcagagaatcacatgaca

SEQ ID NO: 3087424 - DNA, 25 bp, Homo sapien
ccctaaatggtggaaggtgctctga

SEQ ID NO: 3087425 - DNA, 25 bp, Homo sapien
gggaacattaaggccagtgtggcag

SEQ ID NO: 3087426 - DNA, 25 bp, Homo sapien
aaggtgctctgattggatctctggc

SEQ ID NO: 3087427 - DNA, 25 bp, Homo sapien
ggcaggctggccctaaatggtggaa

SEQ ID NO: 3087428 - DNA, 25 bp, Homo sapien
gaatcagaaggaggctttgtgtctc

SEQ ID NO: 3087429 - DNA, 25 bp, Homo sapien
gctttgtgtctcttgactgtgggga

SEQ ID NO: 3087430 - DNA, 25 bp, Homo sapien
ggaatcagaaggaggctttgtgtct

SEQ ID NO: 3087431 - DNA, 25 bp, Homo sapien
ctttgtgtctcttgactgtggggac

SEQ ID NO: 3087432 - DNA, 25 bp, Homo sapien
tgaagagaggtgtggcttcaaggag

SEQ ID NO: 3087433 - DNA, 25 bp, Homo sapien
cactttctgtcctcaaaacgctctt

SEQ ID NO: 3087434 - DNA, 25 bp, Homo sapien
gattctgaatctaccatcctatgga

SEQ ID NO: 3087435 - DNA, 25 bp, Homo sapien
aaacgctcttcattgacacaaagaa

SEQ ID NO: 3087436 - DNA, 25 bp, Homo sapien
agcctccgagccgacgatgcggtct

SEQ ID NO: 3087437 - DNA, 25 bp, Homo sapien
cgacgatgcggtctctcggccactg

SEQ ID NO: 3087438 - DNA, 25 bp, Homo sapien
cgagccgacgatgcggtctctcggc

SEQ ID NO: 3087439 - DNA, 25 bp, Homo sapien
gatgcggtctctcggccactgacaa

SEQ ID NO: 3087440 - DNA, 25 bp, Homo sapien
tggtggagtcttcatagtgatagac

SEQ ID NO: 3087441 - DNA, 25 bp, Homo sapien
cccatggtggagtcttcatagtgat

SEQ ID NO: 3087442 - DNA, 25 bp, Homo sapien
ggagtcttcatagtgatagacacca

SEQ ID NO: 3087443 - DNA, 25 bp, Homo sapien
ctgatggcgacccatggtggagtct

SEQ ID NO: 3087444 - DNA, 25 bp, Homo sapien
gagctctcatgtcgtaagccagtgg

SEQ ID NO: 3087445 - DNA, 25 bp, Homo sapien
tcccacagggacctgatacaacagt

SEQ ID NO: 3087446 - DNA, 25 bp, Homo sapien
aagccagtggagaagtccagggcta

SEQ ID NO: 3087447 - DNA, 25 bp, Homo sapien
aaataaggagcatattgagctctca

SEQ ID NO: 3087448 - DNA, 25 bp, Homo sapien
cagctgaagatgtcagggcacctct

SEQ ID NO: 3087449 - DNA, 25 bp, Homo sapien
tgccgtttctgcagtaccgccgagt

SEQ ID NO: 3087450 - DNA, 25 bp, Homo sapien
aagatgtcagggcacctctgcttcc

SEQ ID NO: 3087451 - DNA, 25 bp, Homo sapien
ccgagtgtgcataaacgggtttaat

SEQ ID NO: 3087452 - DNA, 25 bp, Homo sapien
aggcctctgacttagctaggtctcc

SEQ ID NO: 3087453 - DNA, 25 bp, Homo sapien
tccaccatgtgactccaccgtagac

SEQ ID NO: 3087454 - DNA, 25 bp, Homo sapien
ttagctaggtctccaccatgtgact

SEQ ID NO: 3087455 - DNA, 25 bp, Homo sapien
ctccaccgtagactccccgccttct

SEQ ID NO: 3087456 - DNA, 25 bp, Homo sapien
cctgggttccatgagctgttttagc

SEQ ID NO: 3087457 - DNA, 25 bp, Homo sapien
gcataggtgatgcttggccttgcac

SEQ ID NO: 3087458 - DNA, 25 bp, Homo sapien
gaaagggatgctggcctagtcaact

SEQ ID NO: 3087459 - DNA, 25 bp, Homo sapien
agcaaatgttcaaacctgaggaggg

SEQ ID NO: 3087460 - DNA, 25 bp, Homo sapien
accagcatacacacggggctgcttc

SEQ ID NO: 3087461 - DNA, 25 bp, Homo sapien
ggcaggaacgatggccctgtgcttg

SEQ ID NO: 3087462 - DNA, 25 bp, Homo sapien
gttgtttacgctatgtatttttgca

SEQ ID NO: 3087463 - DNA, 25 bp, Homo sapien
ggaggcctgaggtgggctgggttct

SEQ ID NO: 3087464 - DNA, 25 bp, Homo sapien
gcaggaggcctgaggtgggctgggt

SEQ ID NO: 3087465 - DNA, 25 bp, Homo sapien
tatttttgcaggaggcctgaggtgg

SEQ ID NO: 3087466 - DNA, 25 bp, Homo sapien
tatggcagggcttcactctcctcct

SEQ ID NO: 3087467 - DNA, 25 bp, Homo sapien
atggcagggcttcactctcctcctc

SEQ ID NO: 3087468 - DNA, 25 bp, Homo sapien
ctatggcagggcttcactctcctcc

SEQ ID NO: 3087469 - DNA, 25 bp, Homo sapien
tcttgtaatgaccttcggtgacaac

SEQ ID NO: 3087470 - DNA, 25 bp, Homo sapien
cttgtaatgaccttcggtgacaaca

SEQ ID NO: 3087471 - DNA, 25 bp, Homo sapien
ttcttgtaatgaccttcggtgacaa

SEQ ID NO: 3087472 - DNA, 25 bp, Homo sapien
cttgccccagagtagccagatgtag

SEQ ID NO: 3087473 - DNA, 25 bp, Homo sapien
ttgccccagagtagccagatgtagg

SEQ ID NO: 3087474 - DNA, 25 bp, Homo sapien
gacttgccccagagtagccagatgt

SEQ ID NO: 3087475 - DNA, 25 bp, Homo sapien
acttgccccagagtagccagatgta

SEQ ID NO: 3087476 - DNA, 25 bp, Homo sapien
aattaacgccaagatgagttttttg

SEQ ID NO: 3087477 - DNA, 25 bp, Homo sapien
caattaacgccaagatgagtttttt

SEQ ID NO: 3087478 - DNA, 25 bp, Homo sapien
tctcattaatgtagttctcagtctt

SEQ ID NO: 3087479 - DNA, 25 bp, Homo sapien
ttcactctgggcttctgtgctctca

SEQ ID NO: 3087480 - DNA, 25 bp, Homo sapien
ctgtgctctcattaatgtagttctc

SEQ ID NO: 3087481 - DNA, 25 bp, Homo sapien
actctgggcttctgtgctctcatta

SEQ ID NO: 3087482 - DNA, 25 bp, Homo sapien
tccggataacatgagcaatgagcct

SEQ ID NO: 3087483 - DNA, 25 bp, Homo sapien
attctatcttggatgcctttacttc

SEQ ID NO: 3087484 - DNA, 25 bp, Homo sapien
ttggggataacggactgcagctgct

SEQ ID NO: 3087485 - DNA, 25 bp, Homo sapien
ccgtatcccattctatcttggatgc

SEQ ID NO: 3087486 - DNA, 25 bp, Homo sapien
caaaggcatttcttgcagttgtgtc

SEQ ID NO: 3087487 - DNA, 25 bp, Homo sapien
tcagagatggttccttctggcatgt

SEQ ID NO: 3087488 - DNA, 25 bp, Homo sapien
ctcttaaggatgaaaaagccccttg

SEQ ID NO: 3087489 - DNA, 25 bp, Homo sapien
ggagcagatacttccagaaaaggat

SEQ ID NO: 3087490 - DNA, 25 bp, Homo sapien
agcatcagtctactcagataacttt

SEQ ID NO: 3087491 - DNA, 25 bp, Homo sapien
gcatcagtctactcagataactttt

SEQ ID NO: 3087492 - DNA, 25 bp, Homo sapien
catcagtctactcagataacttttc

SEQ ID NO: 3087493 - DNA, 25 bp, Homo sapien
gagcatcagtctactcagataactt

SEQ ID NO: 3087494 - DNA, 25 bp, Homo sapien
tctggaatgtacgatgggtttagat

SEQ ID NO: 3087495 - DNA, 25 bp, Homo sapien
tggaatgtacgatgggtttagatgt

SEQ ID NO: 3087496 - DNA, 25 bp, Homo sapien
ctggaatgtacgatgggtttagatg

SEQ ID NO: 3087497 - DNA, 25 bp, Homo sapien
gctggaggtagaaggcgcgcccttg

SEQ ID NO: 3087498 - DNA, 25 bp, Homo sapien
tattcagtctctgccggtttttgcc

SEQ ID NO: 3087499 - DNA, 25 bp, Homo sapien
tctattcagtctctgccggtttttg

SEQ ID NO: 3087500 - DNA, 25 bp, Homo sapien
ctattcagtctctgccggtttttgc

SEQ ID NO: 3087501 - DNA, 25 bp, Homo sapien
ctctattcagtctctgccggttttt

SEQ ID NO: 3087502 - DNA, 25 bp, Homo sapien
tctgagggctcctccggctcaataa

SEQ ID NO: 3087503 - DNA, 25 bp, Homo sapien
atcagctcagtgcttgtgtaattct

SEQ ID NO: 3087504 - DNA, 25 bp, Homo sapien
ggctcctccggctcaataatcagct

SEQ ID NO: 3087505 - DNA, 25 bp, Homo sapien
taatcagctcagtgcttgtgtaatt

SEQ ID NO: 3087506 - DNA, 25 bp, Homo sapien
tcctcggtgcacctgtgttcttgct

SEQ ID NO: 3087507 - DNA, 25 bp, Homo sapien
ctcggtgcacctgtgttcttgctac

SEQ ID NO: 3087508 - DNA, 25 bp, Homo sapien
cgtcctcggtgcacctgtgttcttg

SEQ ID NO: 3087509 - DNA, 25 bp, Homo sapien
ctcgtcctcggtgcacctgtgttct

SEQ ID NO: 3087510 - DNA, 25 bp, Homo sapien
gtggagatgctaaagtggaggcccc

SEQ ID NO: 3087511 - DNA, 25 bp, Homo sapien
gcactgttgcaatgcagcttgactg

SEQ ID NO: 3087512 - DNA, 25 bp, Homo sapien
tgtttttaaattggcagaggcagca

SEQ ID NO: 3087513 - DNA, 25 bp, Homo sapien
gacaatgtgtggtgtttgtcagaca

SEQ ID NO: 3087514 - DNA, 25 bp, Homo sapien
gcagacagcctcaatgctgttttta

SEQ ID NO: 3087515 - DNA, 25 bp, Homo sapien
ggtatcattgaagcctgtggactgg

SEQ ID NO: 3087516 - DNA, 25 bp, Homo sapien
gaaaacagagagcaataaattagcg

SEQ ID NO: 3087517 - DNA, 25 bp, Homo sapien
tataaagaagaatccacgaagagtg

SEQ ID NO: 3087518 - DNA, 25 bp, Homo sapien
agccaacactaccacaggggtggga

SEQ ID NO: 3087519 - DNA, 25 bp, Homo sapien
aaagctggtcgatgaaggggacttc

SEQ ID NO: 3087520 - DNA, 25 bp, Homo sapien
aaggggacttcatccagagaggaag

SEQ ID NO: 3087521 - DNA, 25 bp, Homo sapien
ttagagaactaagtgagaaagctgg

SEQ ID NO: 3087522 - DNA, 25 bp, Homo sapien
cttcatccagagaggaagggatcca

SEQ ID NO: 3087523 - DNA, 25 bp, Homo sapien
taagtgttgtaagtgggactagcgt

SEQ ID NO: 3087524 - DNA, 25 bp, Homo sapien
gtcatcatgagaatgttcttaagtg

SEQ ID NO: 3087525 - DNA, 25 bp, Homo sapien
taagtgggactagcgttgttcccat

SEQ ID NO: 3087526 - DNA, 25 bp, Homo sapien
tttccagttcaacagtcatcatgag

SEQ ID NO: 3087527 - DNA, 25 bp, Homo sapien
ctgaagaagaaagccgaaacattca

SEQ ID NO: 3087528 - DNA, 25 bp, Homo sapien
tgaagaagaaagccgaaacattcat

SEQ ID NO: 3087529 - DNA, 25 bp, Homo sapien
ttaatgctggcaatttaaagagata

SEQ ID NO: 3087530 - DNA, 25 bp, Homo sapien
gctggcaatttaaagagatatggat

SEQ ID NO: 3087531 - DNA, 25 bp, Homo sapien
agatattttaatgctggcaatttaa

SEQ ID NO: 3087532 - DNA, 25 bp, Homo sapien
gatatggatcttcaacagttgtcag

SEQ ID NO: 3087533 - DNA, 25 bp, Homo sapien
ttgacctgctctagtcctgaactgg

SEQ ID NO: 3087534 - DNA, 25 bp, Homo sapien
gctctagtcctgaactgggctggta

SEQ ID NO: 3087535 - DNA, 25 bp, Homo sapien
acctgctctagtcctgaactgggct

SEQ ID NO: 3087536 - DNA, 25 bp, Homo sapien
tagtcctgaactgggctggtacacc

SEQ ID NO: 3087537 - DNA, 25 bp, Homo sapien
tctgtagactagagaactaaaggaa

SEQ ID NO: 3087538 - DNA, 25 bp, Homo sapien
cacattacagcaggctgaagacaga

SEQ ID NO: 3087539 - DNA, 25 bp, Homo sapien
gataagagaaacgattcagttctgt

SEQ ID NO: 3087540 - DNA, 25 bp, Homo sapien
ggttctcaatggcacattacagcag

SEQ ID NO: 3087541 - DNA, 25 bp, Homo sapien
aaacatactgtaatcaaactgacag

SEQ ID NO: 3087542 - DNA, 25 bp, Homo sapien
taaacatactgtaatcaaactgaca

SEQ ID NO: 3087543 - DNA, 25 bp, Homo sapien
ctaaacatactgtaatcaaactgac

SEQ ID NO: 3087544 - DNA, 25 bp, Homo sapien
ccagctgtgagcctgtatcttaatc

SEQ ID NO: 3087545 - DNA, 25 bp, Homo sapien
agtcctgagaataaccttgaagaag

SEQ ID NO: 3087546 - DNA, 25 bp, Homo sapien
tagctgggatcatagatgcccgtcc

SEQ ID NO: 3087547 - DNA, 25 bp, Homo sapien
aagaagactcccttgcaatgagcaa

SEQ ID NO: 3087548 - DNA, 25 bp, Homo sapien
ctagcaatgcgctggacacagtgcc

SEQ ID NO: 3087549 - DNA, 25 bp, Homo sapien
agcactgaccggtgagcataaaccc

SEQ ID NO: 3087550 - DNA, 25 bp, Homo sapien
atcatgtcacaccagcactgaccgg

SEQ ID NO: 3087551 - DNA, 25 bp, Homo sapien
tctagtgcctagcaatgcgctggac

SEQ ID NO: 3087552 - DNA, 25 bp, Homo sapien
taccgctatgtaaaggaagctgatg

SEQ ID NO: 3087553 - DNA, 25 bp, Homo sapien
taccaaaacatgatgacaataccct

SEQ ID NO: 3087554 - DNA, 25 bp, Homo sapien
cttttgtgcatctaccgctatgtaa

SEQ ID NO: 3087555 - DNA, 25 bp, Homo sapien
tgccaggattccagtacataccaaa

SEQ ID NO: 3087556 - DNA, 25 bp, Homo sapien
ctgagttctgtaattacattgcaac

SEQ ID NO: 3087557 - DNA, 25 bp, Homo sapien
gctgagttctgtaattacattgcaa

SEQ ID NO: 3087558 - DNA, 25 bp, Homo sapien
agctgagttctgtaattacattgca

SEQ ID NO: 3087559 - DNA, 25 bp, Homo sapien
caaatgtatgtctttcaatagactg

SEQ ID NO: 3087560 - DNA, 25 bp, Homo sapien
cttcaaaaatggtagtggttcaaat

SEQ ID NO: 3087561 - DNA, 25 bp, Homo sapien
tcaatagactgtattttattgcagg

SEQ ID NO: 3087562 - DNA, 25 bp, Homo sapien
gtagtggttcaaatgtatgtctttc

SEQ ID NO: 3087563 - DNA, 25 bp, Homo sapien
gatggtgtaacgttgtctggctgat

SEQ ID NO: 3087564 - DNA, 25 bp, Homo sapien
tggtgtaacgttgtctggctgatgt

SEQ ID NO: 3087565 - DNA, 25 bp, Homo sapien
ctggatggtgtaacgttgtctggct

SEQ ID NO: 3087566 - DNA, 25 bp, Homo sapien
ggtgtaacgttgtctggctgatgtc

SEQ ID NO: 3087567 - DNA, 25 bp, Homo sapien
aatactggagggatagcaggccttc

SEQ ID NO: 3087568 - DNA, 25 bp, Homo sapien
ggccttcaaatgaatccttgtgtaa

SEQ ID NO: 3087569 - DNA, 25 bp, Homo sapien
gtgtaattcagtcaagttattttct

SEQ ID NO: 3087570 - DNA, 25 bp, Homo sapien
actggagggatagcaggccttcaaa

SEQ ID NO: 3087571 - DNA, 25 bp, Homo sapien
tctagatcacaaaatcccttttaga

SEQ ID NO: 3087572 - DNA, 25 bp, Homo sapien
tgcaagtgaagccattcaacctttt

SEQ ID NO: 3087573 - DNA, 25 bp, Homo sapien
ttattatgaaagccccacatggaac

SEQ ID NO: 3087574 - DNA, 25 bp, Homo sapien
tatttcatgcctcctctctagatca

SEQ ID NO: 3087575 - DNA, 25 bp, Homo sapien
ttctcggtccaactgtatgctttcc

SEQ ID NO: 3087576 - DNA, 25 bp, Homo sapien
ccatacatttccatcaatgtaagaa

SEQ ID NO: 3087577 - DNA, 25 bp, Homo sapien
ctcggtccaactgtatgctttccat

SEQ ID NO: 3087578 - DNA, 25 bp, Homo sapien
agtttctcggtccaactgtatgctt

SEQ ID NO: 3087579 - DNA, 25 bp, Homo sapien
catatgctaagcactgatgaagtgt

SEQ ID NO: 3087580 - DNA, 25 bp, Homo sapien
gagacagtagcatacttggccctgg

SEQ ID NO: 3087581 - DNA, 25 bp, Homo sapien
tagcatgatccccagtttaaaggtg

SEQ ID NO: 3087582 - DNA, 25 bp, Homo sapien
gaaattgagtcacaggcagaataac

SEQ ID NO: 3087583 - DNA, 25 bp, Homo sapien
atgctttggagaaactatagtcctc

SEQ ID NO: 3087584 - DNA, 25 bp, Homo sapien
ttggagaaactatagtcctcttcgg

SEQ ID NO: 3087585 - DNA, 25 bp, Homo sapien
tggagaaactatagtcctcttcggg

SEQ ID NO: 3087586 - DNA, 25 bp, Homo sapien
caggatgctttggagaaactatagt

SEQ ID NO: 3087587 - DNA, 25 bp, Homo sapien
taccccttgatatactcgaagttgg

SEQ ID NO: 3087588 - DNA, 25 bp, Homo sapien
tcctgatgggttagggaagactcac

SEQ ID NO: 3087589 - DNA, 25 bp, Homo sapien
tcaggtgtgaatgctctggaggttg

SEQ ID NO: 3087590 - DNA, 25 bp, Homo sapien
ctacaactacattagggaactctgg

SEQ ID NO: 3087591 - DNA, 25 bp, Homo sapien
ccggagattgaaatgaagtctcctg

SEQ ID NO: 3087592 - DNA, 25 bp, Homo sapien
ctgctaaaggtccagcttcttctga

SEQ ID NO: 3087593 - DNA, 25 bp, Homo sapien
gttgaactgctaaaggtccagcttc

SEQ ID NO: 3087594 - DNA, 25 bp, Homo sapien
tattaataggttccggagattgaaa

SEQ ID NO: 3087595 - DNA, 25 bp, Homo sapien
ctgaccctgagagccgagttgtagc

SEQ ID NO: 3087596 - DNA, 25 bp, Homo sapien
accctgagagccgagttgtagcctc

SEQ ID NO: 3087597 - DNA, 25 bp, Homo sapien
atcattacctgaccctgagagccga

SEQ ID NO: 3087598 - DNA, 25 bp, Homo sapien
ctggatggcgggaggttctacatca

SEQ ID NO: 3087599 - DNA, 25 bp, Homo sapien
aaatgatgagtttgatggtgacctg

SEQ ID NO: 3087600 - DNA, 25 bp, Homo sapien
ctaaatgatgagtttgatggtgacc

SEQ ID NO: 3087601 - DNA, 25 bp, Homo sapien
acttcatgatgttctggaggctgac

SEQ ID NO: 3087602 - DNA, 25 bp, Homo sapien
gacctggaggtgaaactgtgacttc

SEQ ID NO: 3087603 - DNA, 25 bp, Homo sapien
cctcatgattcggtagagttagact

SEQ ID NO: 3087604 - DNA, 25 bp, Homo sapien
gatacggtgtatctgtactggaata

SEQ ID NO: 3087605 - DNA, 25 bp, Homo sapien
ttccaataatctcagcaaggctcca

SEQ ID NO: 3087606 - DNA, 25 bp, Homo sapien
gaaggtccaacttgctcagagggcc

SEQ ID NO: 3087607 - DNA, 25 bp, Homo sapien
cgcagcggggacatgacacacgcta

SEQ ID NO: 3087608 - DNA, 25 bp, Homo sapien
agcggggacatgacacacgctagtg

SEQ ID NO: 3087609 - DNA, 25 bp, Homo sapien
acacacgctagtgccgggcactgag

SEQ ID NO: 3087610 - DNA, 25 bp, Homo sapien
ggacatgacacacgctagtgccggg

SEQ ID NO: 3087611 - DNA, 25 bp, Homo sapien
acacctttatttatgccacagatct

SEQ ID NO: 3087612 - DNA, 25 bp, Homo sapien
tgagtcccgccctgtctttatgaca

SEQ ID NO: 3087613 - DNA, 25 bp, Homo sapien
acgctcgtgccccttgtaagcatga

SEQ ID NO: 3087614 - DNA, 25 bp, Homo sapien
cttgtaagcatgagtcccgccctgt

SEQ ID NO: 3087615 - DNA, 25 bp, Homo sapien
ccacagccgttcttacctattttat

SEQ ID NO: 3087616 - DNA, 25 bp, Homo sapien
catagggtgcatagtgatggcttta

SEQ ID NO: 3087617 - DNA, 25 bp, Homo sapien
agtgcctggcatagacatagggtgc

SEQ ID NO: 3087618 - DNA, 25 bp, Homo sapien
catagacatagggtgcatagtgatg

SEQ ID NO: 3087619 - DNA, 25 bp, Homo sapien
acaaacctaggtggtgtagccacca

SEQ ID NO: 3087620 - DNA, 25 bp, Homo sapien
tcaccattgtgctaatatcatagcg

SEQ ID NO: 3087621 - DNA, 25 bp, Homo sapien
tacctagggtacacggtatggctta

SEQ ID NO: 3087622 - DNA, 25 bp, Homo sapien
tggcttaggactcctaggctacaaa

SEQ ID NO: 3087623 - DNA, 25 bp, Homo sapien
tgttacctttgagtttttatctcca

SEQ ID NO: 3087624 - DNA, 25 bp, Homo sapien
catgtgccaccatttctccatgttg

SEQ ID NO: 3087625 - DNA, 25 bp, Homo sapien
tcaagtggttttcatgcctcagttt

SEQ ID NO: 3087626 - DNA, 25 bp, Homo sapien
ctgtgcccggccctgttacctttga

SEQ ID NO: 3087627 - DNA, 25 bp, Homo sapien
tcttcccatctgacatctacaatct

SEQ ID NO: 3087628 - DNA, 25 bp, Homo sapien
tgtactccatagctattttaccact

SEQ ID NO: 3087629 - DNA, 25 bp, Homo sapien
tctcttcactgggtctgtactccat

SEQ ID NO: 3087630 - DNA, 25 bp, Homo sapien
tgacatctacaatctcttcactggg

SEQ ID NO: 3087631 - DNA, 25 bp, Homo sapien
caagcgtgagtcatcatgtctggtc

SEQ ID NO: 3087632 - DNA, 25 bp, Homo sapien
tcaactgtgtttggttcaaaggact

SEQ ID NO: 3087633 - DNA, 25 bp, Homo sapien
gagtagcaggcactatatcactgtg

SEQ ID NO: 3087634 - DNA, 25 bp, Homo sapien
gacatggtcccgctttgttttccag

SEQ ID NO: 3087635 - DNA, 25 bp, Homo sapien
actgaagtacttcaacgacgattaa

SEQ ID NO: 3087636 - DNA, 25 bp, Homo sapien
tgaagtacttcaacgacgattaaga

SEQ ID NO: 3087637 - DNA, 25 bp, Homo sapien
gaagtacttcaacgacgattaagaa

SEQ ID NO: 3087638 - DNA, 25 bp, Homo sapien
agtacttcaacgacgattaagaaag

SEQ ID NO: 3087639 - DNA, 25 bp, Homo sapien
taggaatgacaacggtcttaaatcc

SEQ ID NO: 3087640 - DNA, 25 bp, Homo sapien
caatagcaatctgggctatcttccc

SEQ ID NO: 3087641 - DNA, 25 bp, Homo sapien
atcattgctacatgttggttaaaaa

SEQ ID NO: 3087642 - DNA, 25 bp, Homo sapien
tgagtgatcattgctacatgttggt

SEQ ID NO: 3087643 - DNA, 25 bp, Homo sapien
aaggccagactcctgcaatcatagg

SEQ ID NO: 3087644 - DNA, 25 bp, Homo sapien
ctctgtcaggtattgcctaaggtaa

SEQ ID NO: 3087645 - DNA, 25 bp, Homo sapien
gcctaaggtaaaagtctgtattgta

SEQ ID NO: 3087646 - DNA, 25 bp, Homo sapien
cagaccttccttcgccttatccaca

SEQ ID NO: 3087647 - DNA, 25 bp, Homo sapien
tgtctaaagtctagaatttcaatgt

SEQ ID NO: 3087648 - DNA, 25 bp, Homo sapien
tccctgtaacccagttcaatacttc

SEQ ID NO: 3087649 - DNA, 25 bp, Homo sapien
cacttatcctcaatggcagggggcc

SEQ ID NO: 3087650 - DNA, 25 bp, Homo sapien
agagcgtggttagtgagagaaaatc

SEQ ID NO: 3087651 - DNA, 25 bp, Homo sapien
ggagctgtttcaggcaagggcctga

SEQ ID NO: 3087652 - DNA, 25 bp, Homo sapien
cctgatgtgcaactgccttatgtct

SEQ ID NO: 3087653 - DNA, 25 bp, Homo sapien
tgtttcaggcaagggcctgatgtgc

SEQ ID NO: 3087654 - DNA, 25 bp, Homo sapien
tcaggcaagggcctgatgtgcaact

SEQ ID NO: 3087655 - DNA, 25 bp, Homo sapien
cctgaagaatagataagatgaaccc

SEQ ID NO: 3087656 - DNA, 25 bp, Homo sapien
taaaacaactagaggttcatctgca

SEQ ID NO: 3087657 - DNA, 25 bp, Homo sapien
gaggaaatacacatacctctataca

SEQ ID NO: 3087658 - DNA, 25 bp, Homo sapien
tcagtcttcccattcagtagctcct

SEQ ID NO: 3087659 - DNA, 25 bp, Homo sapien
tcttgctggcgaccatttcccttca

SEQ ID NO: 3087660 - DNA, 25 bp, Homo sapien
ccacagttcttgctggcgaccattt

SEQ ID NO: 3087661 - DNA, 25 bp, Homo sapien
cttggataacgttgccacagttctt

SEQ ID NO: 3087662 - DNA, 25 bp, Homo sapien
ttggataacgttgccacagttcttg

SEQ ID NO: 3087663 - DNA, 25 bp, Homo sapien
tgataccaagtaactgtttcatcat

SEQ ID NO: 3087664 - DNA, 25 bp, Homo sapien
aatgataccaagtaactgtttcatc

SEQ ID NO: 3087665 - DNA, 25 bp, Homo sapien
atgataccaagtaactgtttcatca

SEQ ID NO: 3087666 - DNA, 25 bp, Homo sapien
aaaatgataccaagtaactgtttca

SEQ ID NO: 3087667 - DNA, 25 bp, Homo sapien
tgctttcaaccactatacatatttt

SEQ ID NO: 3087668 - DNA, 25 bp, Homo sapien
tcattttatcctcagatcagctcca

SEQ ID NO: 3087669 - DNA, 25 bp, Homo sapien
aagttctagtattaccactggtata

SEQ ID NO: 3087670 - DNA, 25 bp, Homo sapien
taagaggagaaacaaccgtttgcat

SEQ ID NO: 3087671 - DNA, 25 bp, Homo sapien
agtcattgatattttggccgggcgc

SEQ ID NO: 3087672 - DNA, 25 bp, Homo sapien
ctacaatgtggagtttatggcggac

SEQ ID NO: 3087673 - DNA, 25 bp, Homo sapien
gacagcacaggcagttggaaatata

SEQ ID NO: 3087674 - DNA, 25 bp, Homo sapien
gggaccagctctatcacctatacat

SEQ ID NO: 3087675 - DNA, 25 bp, Homo sapien
tagattaaaagcaaaagggtagaga

SEQ ID NO: 3087676 - DNA, 25 bp, Homo sapien
tatctagattaaaagcaaaagggta

SEQ ID NO: 3087677 - DNA, 25 bp, Homo sapien
tatcatgatatctagattaaaagca

SEQ ID NO: 3087678 - DNA, 25 bp, Homo sapien
tgatatctagattaaaagcaaaagg

SEQ ID NO: 3087679 - DNA, 25 bp, Homo sapien
ccaccgtgcctggctaatttttgta

SEQ ID NO: 3087680 - DNA, 25 bp, Homo sapien
caagtacttgggattacaggcagct

SEQ ID NO: 3087681 - DNA, 25 bp, Homo sapien
ggcatgagccactgcacctggccta

SEQ ID NO: 3087682 - DNA, 25 bp, Homo sapien
aagtacttgggattacaggcagctg

SEQ ID NO: 3087683 - DNA, 25 bp, Homo sapien
agcccaggattcgaaatcagtctgg

SEQ ID NO: 3087684 - DNA, 25 bp, Homo sapien
gagcccaggattcgaaatcagtctg

SEQ ID NO: 3087685 - DNA, 25 bp, Homo sapien
gcccaggattcgaaatcagtctggg

SEQ ID NO: 3087686 - DNA, 25 bp, Homo sapien
cccaggattcgaaatcagtctgggc

SEQ ID NO: 3087687 - DNA, 25 bp, Homo sapien
ctgtagtgactacaccactttgttg

SEQ ID NO: 3087688 - DNA, 25 bp, Homo sapien
ttgttgacggccgtccggacctgca

SEQ ID NO: 3087689 - DNA, 25 bp, Homo sapien
catgttggaaccgaggcggagggag

SEQ ID NO: 3087690 - DNA, 25 bp, Homo sapien
cccggcctgcggaagcggttggagg

SEQ ID NO: 3087691 - DNA, 25 bp, Homo sapien
cgccatcttgtttcttccgttaccg

SEQ ID NO: 3087692 - DNA, 25 bp, Homo sapien
tggtgcaatcacaccccatcgcagc

SEQ ID NO: 3087693 - DNA, 25 bp, Homo sapien
cagatcagtaagtccttccgcctca

SEQ ID NO: 3087694 - DNA, 25 bp, Homo sapien
tacccagatcagtaagtccttccgc

SEQ ID NO: 3087695 - DNA, 25 bp, Homo sapien
cctccccctacccagatcagtaagt

SEQ ID NO: 3087696 - DNA, 25 bp, Homo sapien
taaatgtgtcagattttggctgggc

SEQ ID NO: 3087697 - DNA, 25 bp, Homo sapien
taatcatgatgaaacgttttgggaa

SEQ ID NO: 3087698 - DNA, 25 bp, Homo sapien
attcttatggctgggtacaggtggc

SEQ ID NO: 3087699 - DNA, 25 bp, Homo sapien
tctgagagactataagatttgggaa

SEQ ID NO: 3087700 - DNA, 25 bp, Homo sapien
tttaggttctatattggctgtgatc

SEQ ID NO: 3087701 - DNA, 25 bp, Homo sapien
gctgtgatctttgtactaactggta

SEQ ID NO: 3087702 - DNA, 25 bp, Homo sapien
gcagctcaaaacgacaactacattg

SEQ ID NO: 3087703 - DNA, 25 bp, Homo sapien
cagatttaagtaccatgcagctcaa

SEQ ID NO: 3087704 - DNA, 25 bp, Homo sapien
ctagggtctagggtcccacatggtg

SEQ ID NO: 3087705 - DNA, 25 bp, Homo sapien
gtctagggtcccacatggtggtccc

SEQ ID NO: 3087706 - DNA, 25 bp, Homo sapien
cttctagggtctagggtcccacatg

SEQ ID NO: 3087707 - DNA, 25 bp, Homo sapien
tcacccacggatgcttgggatgggc

SEQ ID NO: 3087708 - DNA, 25 bp, Homo sapien
tcttcagagaggcactgtctaggcc

SEQ ID NO: 3087709 - DNA, 25 bp, Homo sapien
agtcttcagagaggcactgtctagg

SEQ ID NO: 3087710 - DNA, 25 bp, Homo sapien
caggaagcccggctctgggagcact

SEQ ID NO: 3087711 - DNA, 25 bp, Homo sapien
cagagaggcactgtctaggccagcc

SEQ ID NO: 3087712 - DNA, 25 bp, Homo sapien
cctcacccccggatggagttgctgg

SEQ ID NO: 3087713 - DNA, 25 bp, Homo sapien
cccggatggagttgctggctttccc

SEQ ID NO: 3087714 - DNA, 25 bp, Homo sapien
cccggatggagttgctggctttcca

SEQ ID NO: 3087715 - DNA, 25 bp, Homo sapien
ggctttccaacctatctccctctca

SEQ ID NO: 3087716 - DNA, 25 bp, Homo sapien
tcgtacagagatgcgtttgccatct

SEQ ID NO: 3087717 - DNA, 25 bp, Homo sapien
tacagagatgcgtttgccatctgca

SEQ ID NO: 3087718 - DNA, 25 bp, Homo sapien
cagagatgcgtttgccatctgcagg

SEQ ID NO: 3087719 - DNA, 25 bp, Homo sapien
atgctcgtacagagatgcgtttgcc

SEQ ID NO: 3087720 - DNA, 25 bp, Homo sapien
taggcaagccccaagtaggaggacc

SEQ ID NO: 3087721 - DNA, 25 bp, Homo sapien
aggcaagccccaagtaggaggacct

SEQ ID NO: 3087722 - DNA, 25 bp, Homo sapien
tgtaggcaagccccaagtaggagga

SEQ ID NO: 3087723 - DNA, 25 bp, Homo sapien
gtaggcaagccccaagtaggaggac

SEQ ID NO: 3087724 - DNA, 25 bp, Homo sapien
tgtgacaggcctggttgggaaacct

SEQ ID NO: 3087725 - DNA, 25 bp, Homo sapien
tctccccaggtgcccttccctgtcc

SEQ ID NO: 3087726 - DNA, 25 bp, Homo sapien
cctccagggaggtttaatggggctg

SEQ ID NO: 3087727 - DNA, 25 bp, Homo sapien
tccagggaggtttaatggggctgct

SEQ ID NO: 3087728 - DNA, 25 bp, Homo sapien
gggctgcttcaggtggcattattat

SEQ ID NO: 3087729 - DNA, 25 bp, Homo sapien
tggcattattatgatgaaggccagc

SEQ ID NO: 3087730 - DNA, 25 bp, Homo sapien
aaacagatatgtggttgacatcggc

SEQ ID NO: 3087731 - DNA, 25 bp, Homo sapien
gacatcggccaattatttctgagca

SEQ ID NO: 3087732 - DNA, 25 bp, Homo sapien
gttgctgcattttccacggaaacag

SEQ ID NO: 3087733 - DNA, 25 bp, Homo sapien
aagtaatgttgctgcattttccacg

SEQ ID NO: 3087734 - DNA, 25 bp, Homo sapien
ctgtgtgcagatcatctcaaaacaa

SEQ ID NO: 3087735 - DNA, 25 bp, Homo sapien
cacctgaggtcacgatttggagaac

SEQ ID NO: 3087736 - DNA, 25 bp, Homo sapien
tcaaaacaaaatttttggccaggca

SEQ ID NO: 3087737 - DNA, 25 bp, Homo sapien
tgaggtcacgatttggagaacagcc

SEQ ID NO: 3087738 - DNA, 25 bp, Homo sapien
caagcctagtttggttacaggtaca

SEQ ID NO: 3087739 - DNA, 25 bp, Homo sapien
tgacggtcaatgctcgctgctccat

SEQ ID NO: 3087740 - DNA, 25 bp, Homo sapien
caaggtggatatagcaaatctctgc

SEQ ID NO: 3087741 - DNA, 25 bp, Homo sapien
ttgtagagcatcttaccagccatag

SEQ ID NO: 3087742 - DNA, 25 bp, Homo sapien
tgaaagcagcgatggtatttaatta

SEQ ID NO: 3087743 - DNA, 25 bp, Homo sapien
tggtcattgaaagcaggacaatttt

SEQ ID NO: 3087744 - DNA, 25 bp, Homo sapien
cgtgtgtggcctgaacttttaaatc

SEQ ID NO: 3087745 - DNA, 25 bp, Homo sapien
gagccatcgtgtgtggcctgaactt

SEQ ID NO: 3087746 - DNA, 25 bp, Homo sapien
gagtccacggacgtccaaaaatgtg

SEQ ID NO: 3087747 - DNA, 25 bp, Homo sapien
tgacctacaggactaaaaccgtgct

SEQ ID NO: 3087748 - DNA, 25 bp, Homo sapien
cactcgagagagtaaggaaggctca

SEQ ID NO: 3087749 - DNA, 25 bp, Homo sapien
tatagctgagacctgcaacggaact

SEQ ID NO: 3087750 - DNA, 25 bp, Homo sapien
attcaggtacttgaaagaaggttct

SEQ ID NO: 3087751 - DNA, 25 bp, Homo sapien
atgaagtattccacccaaatgaaag

SEQ ID NO: 3087752 - DNA, 25 bp, Homo sapien
tgaagtattccacccaaatgaaagc

SEQ ID NO: 3087753 - DNA, 25 bp, Homo sapien
acatgcaagtagtcatttatttcaa

SEQ ID NO: 3087754 - DNA, 25 bp, Homo sapien
tcaatcactcctatttgaaggtcct

SEQ ID NO: 3087755 - DNA, 25 bp, Homo sapien
cactcctatttgaaggtccttattt

SEQ ID NO: 3087756 - DNA, 25 bp, Homo sapien
tatttttggagaacagtcaggcatt

SEQ ID NO: 3087757 - DNA, 25 bp, Homo sapien
ctcacgactgtgttctggagttgct

SEQ ID NO: 3087758 - DNA, 25 bp, Homo sapien
tgctccaggtgtgccagaagattca

SEQ ID NO: 3087759 - DNA, 25 bp, Homo sapien
tcatcatcaatccacctcaccagtg

SEQ ID NO: 3087760 - DNA, 25 bp, Homo sapien
taaattcccattatcctcacgactg

SEQ ID NO: 3087761 - DNA, 25 bp, Homo sapien
ctggaaaagcattgaaagatgcgca

SEQ ID NO: 3087762 - DNA, 25 bp, Homo sapien
gagagaagcattggcttctagatca

SEQ ID NO: 3087763 - DNA, 25 bp, Homo sapien
acagcaaaataccatcaggcaagag

SEQ ID NO: 3087764 - DNA, 25 bp, Homo sapien
tggcttctagatcatagggtgacat

SEQ ID NO: 3087765 - DNA, 25 bp, Homo sapien
agcaaaataccatcaggcaagagag

SEQ ID NO: 3087766 - DNA, 25 bp, Homo sapien
cacaggcatgggtagacatatgtat

SEQ ID NO: 3087767 - DNA, 25 bp, Homo sapien
cacatactgagattaggtactttcc

SEQ ID NO: 3087768 - DNA, 25 bp, Homo sapien
tcacctgaatgcagtcatacccatg

SEQ ID NO: 3087769 - DNA, 25 bp, Homo sapien
gaaatggcacgtaccaaatacacac

SEQ ID NO: 3087770 - DNA, 25 bp, Homo sapien
tatctttctacaatgctgaagccaa

SEQ ID NO: 3087771 - DNA, 25 bp, Homo sapien
aacagcacactgcaacttgtgcaaa

SEQ ID NO: 3087772 - DNA, 25 bp, Homo sapien
caaaggtttagagggcgccggtcag

SEQ ID NO: 3087773 - DNA, 25 bp, Homo sapien
tgcaacttgtgcaaacagatagggc

SEQ ID NO: 3087774 - DNA, 25 bp, Homo sapien
ttgctgctatccaccatgccttgtc

SEQ ID NO: 3087775 - DNA, 25 bp, Homo sapien
gaagtttcagagtcttttcccacaa

SEQ ID NO: 3087776 - DNA, 25 bp, Homo sapien
cttaatgggctggaggtcaaatact

SEQ ID NO: 3087777 - DNA, 25 bp, Homo sapien
caaatacttgagaaactgaagtttc

SEQ ID NO: 3087778 - DNA, 25 bp, Homo sapien
ctgaagtttcagagtcttttcccac

SEQ ID NO: 3087779 - DNA, 25 bp, Homo sapien
tgtggactgatattcgaaaattagg

SEQ ID NO: 3087780 - DNA, 25 bp, Homo sapien
acccatggtaggtttgttcaatcta

SEQ ID NO: 3087781 - DNA, 25 bp, Homo sapien
cactacagtaatactttcagcaagg

SEQ ID NO: 3087782 - DNA, 25 bp, Homo sapien
cctttacccagaaaatgtggactga

SEQ ID NO: 3087783 - DNA, 25 bp, Homo sapien
cagggagatcccatctcgacaaaaa

SEQ ID NO: 3087784 - DNA, 25 bp, Homo sapien
attcaagatgagcttgagcaacaca

SEQ ID NO: 3087785 - DNA, 25 bp, Homo sapien
ggaattcaagatgagcttgagcaac

SEQ ID NO: 3087786 - DNA, 25 bp, Homo sapien
acagggagatcccatctcgacaaaa

SEQ ID NO: 3087787 - DNA, 25 bp, Homo sapien
tgcagtgacccatgatcagcctggg

SEQ ID NO: 3087788 - DNA, 25 bp, Homo sapien
cagtgacccatgatcagcctgggtg

SEQ ID NO: 3087789 - DNA, 25 bp, Homo sapien
gttgcagtgacccatgatcagcctg

SEQ ID NO: 3087790 - DNA, 25 bp, Homo sapien
gtgacccatgatcagcctgggtgat

SEQ ID NO: 3087791 - DNA, 25 bp, Homo sapien
caagactgcatgttggtagggccat

SEQ ID NO: 3087792 - DNA, 25 bp, Homo sapien
atcagtaagagagtagtgacccacg

SEQ ID NO: 3087793 - DNA, 25 bp, Homo sapien
taagagagtagtgacccacgtctcc

SEQ ID NO: 3087794 - DNA, 25 bp, Homo sapien
tgacccacgtctccaagactgcatg

SEQ ID NO: 3087795 - DNA, 25 bp, Homo sapien
caaccagaacctagattatcacaat

SEQ ID NO: 3087796 - DNA, 25 bp, Homo sapien
taggtagtgagtggccaaccagaac

SEQ ID NO: 3087797 - DNA, 25 bp, Homo sapien
gtcctgtaggtagtgagtggccaac

SEQ ID NO: 3087798 - DNA, 25 bp, Homo sapien
ttatcacaatctaccaacagcacac

SEQ ID NO: 3087799 - DNA, 25 bp, Homo sapien
ataatgtctcaactgaaaatactat

SEQ ID NO: 3087800 - DNA, 25 bp, Homo sapien
taatgtctcaactgaaaatactata

SEQ ID NO: 3087801 - DNA, 25 bp, Homo sapien
gcataatgtctcaactgaaaatact

SEQ ID NO: 3087802 - DNA, 25 bp, Homo sapien
cataatgtctcaactgaaaatacta

SEQ ID NO: 3087803 - DNA, 25 bp, Homo sapien
tcaagttgaagaagcttctaacaac

SEQ ID NO: 3087804 - DNA, 25 bp, Homo sapien
cagaaggcatcttcaggtttcttct

SEQ ID NO: 3087805 - DNA, 25 bp, Homo sapien
cacagaaggcatcttcaggtttctt

SEQ ID NO: 3087806 - DNA, 25 bp, Homo sapien
acagaaggcatcttcaggtttcttc

SEQ ID NO: 3087807 - DNA, 25 bp, Homo sapien
aatttgtaggttttgtgtgttctca

SEQ ID NO: 3087808 - DNA, 25 bp, Homo sapien
ctgcatgaatttgtaggttttgtgt

SEQ ID NO: 3087809 - DNA, 25 bp, Homo sapien
tgtaggttttgtgtgttctcattga

SEQ ID NO: 3087810 - DNA, 25 bp, Homo sapien
ttgtaggttttgtgtgttctcattg

SEQ ID NO: 3087811 - DNA, 25 bp, Homo sapien
agtagcccgtgagccatttaatata

SEQ ID NO: 3087812 - DNA, 25 bp, Homo sapien
tacagtagcccgtgagccatttaat

SEQ ID NO: 3087813 - DNA, 25 bp, Homo sapien
tgctttacagtagcccgtgagccat

SEQ ID NO: 3087814 - DNA, 25 bp, Homo sapien
ttacagtagcccgtgagccatttaa

SEQ ID NO: 3087815 - DNA, 25 bp, Homo sapien
tcatcggtgttgatatgaattaaaa

SEQ ID NO: 3087816 - DNA, 25 bp, Homo sapien
aaatgttctaggtctgtttggctac

SEQ ID NO: 3087817 - DNA, 25 bp, Homo sapien
ttgtaccattgcaatgaatatcaaa

SEQ ID NO: 3087818 - DNA, 25 bp, Homo sapien
tacaaaacttgtaccattgcaatga

SEQ ID NO: 3087819 - DNA, 25 bp, Homo sapien
atactgcgtttgtctggagagggta

SEQ ID NO: 3087820 - DNA, 25 bp, Homo sapien
ctgatggagaatgcaaggtccaaag

SEQ ID NO: 3087821 - DNA, 25 bp, Homo sapien
gatggagaatgcaaggtccaaagag

SEQ ID NO: 3087822 - DNA, 25 bp, Homo sapien
gagaatgcaaggtccaaagagatca

SEQ ID NO: 3087823 - DNA, 25 bp, Homo sapien
tggagaatgcaaggtccaaagagat

SEQ ID NO: 3087824 - DNA, 25 bp, Homo sapien
agtgtctgttcggaataccgtacta

SEQ ID NO: 3087825 - DNA, 25 bp, Homo sapien
gttcggaataccgtactatttgcat

SEQ ID NO: 3087826 - DNA, 25 bp, Homo sapien
ttaaacgctgttccccagcatctac

SEQ ID NO: 3087827 - DNA, 25 bp, Homo sapien
agcatctactttctcatactgtgac

SEQ ID NO: 3087828 - DNA, 25 bp, Homo sapien
tacatatccatattggggactttac

SEQ ID NO: 3087829 - DNA, 25 bp, Homo sapien
aaatacatatccatattggggactt

SEQ ID NO: 3087830 - DNA, 25 bp, Homo sapien
aaatacaagcagtcaaatataaaaa

SEQ ID NO: 3087831 - DNA, 25 bp, Homo sapien
acaaaaaaatacaagcagtcaaata

SEQ ID NO: 3087832 - DNA, 25 bp, Homo sapien
cacacttagagtggtttcctcatgt

SEQ ID NO: 3087833 - DNA, 25 bp, Homo sapien
tgctaatgctttagagtggtcacac

SEQ ID NO: 3087834 - DNA, 25 bp, Homo sapien
gctaatgctttagagtggtcacact

SEQ ID NO: 3087835 - DNA, 25 bp, Homo sapien
tagagtggtcacacttagagtggtt

SEQ ID NO: 3087836 - DNA, 25 bp, Homo sapien
gaacctgctcccattacaaaaacta

SEQ ID NO: 3087837 - DNA, 25 bp, Homo sapien
tcccattacaaaaactagtggtggc

SEQ ID NO: 3087838 - DNA, 25 bp, Homo sapien
attacaaaaactagtggtggccagg

SEQ ID NO: 3087839 - DNA, 25 bp, Homo sapien
tgctcccattacaaaaactagtggt

SEQ ID NO: 3087840 - DNA, 25 bp, Homo sapien
tgaaaagggtcagatgttccaccac

SEQ ID NO: 3087841 - DNA, 25 bp, Homo sapien
ctcttgaaaagggtcagatgttcca

SEQ ID NO: 3087842 - DNA, 25 bp, Homo sapien
aaaagggtcagatgttccaccacga

SEQ ID NO: 3087843 - DNA, 25 bp, Homo sapien
cttgaaaagggtcagatgttccacc

SEQ ID NO: 3087844 - DNA, 25 bp, Homo sapien
tataaaaccagatgtaccttccagt

SEQ ID NO: 3087845 - DNA, 25 bp, Homo sapien
gctctgataagagcataagctcatc

SEQ ID NO: 3087846 - DNA, 25 bp, Homo sapien
ggttgaagaggctggctgaaattcc

SEQ ID NO: 3087847 - DNA, 25 bp, Homo sapien
gaaatctgacttctacaggacaaaa

SEQ ID NO: 3087848 - DNA, 25 bp, Homo sapien
ccttcatctttatattaacgaaggc

SEQ ID NO: 3087849 - DNA, 25 bp, Homo sapien
gcttttatctcacaaggacagacat

SEQ ID NO: 3087850 - DNA, 25 bp, Homo sapien
tctttatattaacgaaggcagtgag

SEQ ID NO: 3087851 - DNA, 25 bp, Homo sapien
ggaagcttttatctcacaaggacag

SEQ ID NO: 3087852 - DNA, 25 bp, Homo sapien
tgggacgctgtggtcccaaaaccag

SEQ ID NO: 3087853 - DNA, 25 bp, Homo sapien
atctcgggccaaccgggagaagttg

SEQ ID NO: 3087854 - DNA, 25 bp, Homo sapien
gcgcacaatatggtcactgtggtgg

SEQ ID NO: 3087855 - DNA, 25 bp, Homo sapien
gcagggggcgcacaatatggtcact

SEQ ID NO: 3087856 - DNA, 25 bp, Homo sapien
cgtctcttcgcactacgccacgccc

SEQ ID NO: 3087857 - DNA, 25 bp, Homo sapien
gcgacgcgccgctccatcgcacacg

SEQ ID NO: 3087858 - DNA, 25 bp, Homo sapien
cgctccatcgcacacgctctctggg

SEQ ID NO: 3087859 - DNA, 25 bp, Homo sapien
ggcgccacgccccttcgcgccgcgc

SEQ ID NO: 3087860 - DNA, 25 bp, Homo sapien
cagttccccgtctgccctcgccggg

SEQ ID NO: 3087861 - DNA, 25 bp, Homo sapien
cccgcagtcgccagttccccgtctg

SEQ ID NO: 3087862 - DNA, 25 bp, Homo sapien
cgtccgcccccgcagtcgccagttc

SEQ ID NO: 3087863 - DNA, 25 bp, Homo sapien
cagagccacagacgcgcccgcgtca

SEQ ID NO: 3087864 - DNA, 25 bp, Homo sapien
tccgaggccgagacccggatgccag

SEQ ID NO: 3087865 - DNA, 25 bp, Homo sapien
gcaaccagcgtagcccccaaatgag

SEQ ID NO: 3087866 - DNA, 25 bp, Homo sapien
gtttgagaggcgtcccggcgtgacg

SEQ ID NO: 3087867 - DNA, 25 bp, Homo sapien
cgccgcaggttgtcgtacagccgcg

SEQ ID NO: 3087868 - DNA, 25 bp, Homo sapien
gttggtaacaacattagaaggtggc

SEQ ID NO: 3087869 - DNA, 25 bp, Homo sapien
acccagattccccagtacttaacat

SEQ ID NO: 3087870 - DNA, 25 bp, Homo sapien
catatcaacacggaaaaacaccatg

SEQ ID NO: 3087871 - DNA, 25 bp, Homo sapien
gttgcaaaatgaaccataggctgtt

SEQ ID NO: 3087872 - DNA, 25 bp, Homo sapien
gaggtggcctgaataagacataaat

SEQ ID NO: 3087873 - DNA, 25 bp, Homo sapien
aggtggcctgaataagacataaatg

SEQ ID NO: 3087874 - DNA, 25 bp, Homo sapien
aacgtaaaacagcgacagcgaccca

SEQ ID NO: 3087875 - DNA, 25 bp, Homo sapien
caaacgtaaaacagcgacagcgacc

SEQ ID NO: 3087876 - DNA, 25 bp, Homo sapien
acgtaaaacagcgacagcgacccac

SEQ ID NO: 3087877 - DNA, 25 bp, Homo sapien
tcagtgcagggaaccaacaaagaca

SEQ ID NO: 3087878 - DNA, 25 bp, Homo sapien
cagtgcagggaaccaacaaagacag

SEQ ID NO: 3087879 - DNA, 25 bp, Homo sapien
gtcagtgcagggaaccaacaaagac

SEQ ID NO: 3087880 - DNA, 25 bp, Homo sapien
ggtcagtgcagggaaccaacaaaga

SEQ ID NO: 3087881 - DNA, 25 bp, Homo sapien
caggtatctgattggactgagccag

SEQ ID NO: 3087882 - DNA, 25 bp, Homo sapien
tgattggactgagccaggaaaggcc

SEQ ID NO: 3087883 - DNA, 25 bp, Homo sapien
tatctgattggactgagccaggaaa

SEQ ID NO: 3087884 - DNA, 25 bp, Homo sapien
agcaggtatctgattggactgagcc

SEQ ID NO: 3087885 - DNA, 25 bp, Homo sapien
gagagcatcgtcagaggcgacactt

SEQ ID NO: 3087886 - DNA, 25 bp, Homo sapien
tggaaagagagcatcgtcagaggcg

SEQ ID NO: 3087887 - DNA, 25 bp, Homo sapien
agcatcgtcagaggcgacacttgcg

SEQ ID NO: 3087888 - DNA, 25 bp, Homo sapien
gaaagagagcatcgtcagaggcgac

SEQ ID NO: 3087889 - DNA, 25 bp, Homo sapien
cagagcagggccatgcgtggcacac

SEQ ID NO: 3087890 - DNA, 25 bp, Homo sapien
aaaacacaaagccacagcagagcag

SEQ ID NO: 3087891 - DNA, 25 bp, Homo sapien
acagcagagcagggccatgcgtggc

SEQ ID NO: 3087892 - DNA, 25 bp, Homo sapien
agcagagcagggccatgcgtggcac

SEQ ID NO: 3087893 - DNA, 25 bp, Homo sapien
aggctgcccagtcagccaagcaggc

SEQ ID NO: 3087894 - DNA, 25 bp, Homo sapien
tcctcttgcatttctgggtcactgt

SEQ ID NO: 3087895 - DNA, 25 bp, Homo sapien
tgcatttctgggtcactgttctctc

SEQ ID NO: 3087896 - DNA, 25 bp, Homo sapien
cagtgttctgtcctcctggaaactc

SEQ ID NO: 3087897 - DNA, 25 bp, Homo sapien
ttgtagcctcaaagtcccaaactca

SEQ ID NO: 3087898 - DNA, 25 bp, Homo sapien
tattgtagcctcaaagtcccaaact

SEQ ID NO: 3087899 - DNA, 25 bp, Homo sapien
gtagcctcaaagtcccaaactcaag

SEQ ID NO: 3087900 - DNA, 25 bp, Homo sapien
gcttattgtagcctcaaagtcccaa

SEQ ID NO: 3087901 - DNA, 25 bp, Homo sapien
taaggagcatgacaggccctccaag

SEQ ID NO: 3087902 - DNA, 25 bp, Homo sapien
gcatgacaggccctccaagatggcc

SEQ ID NO: 3087903 - DNA, 25 bp, Homo sapien
gagcatgacaggccctccaagatgg

SEQ ID NO: 3087904 - DNA, 25 bp, Homo sapien
aggagcatgacaggccctccaagat

SEQ ID NO: 3087905 - DNA, 25 bp, Homo sapien
gcttccccagagacgaaacatcatg

SEQ ID NO: 3087906 - DNA, 25 bp, Homo sapien
tactgtgcagagcaccgtgacgtcc

SEQ ID NO: 3087907 - DNA, 25 bp, Homo sapien
ctgtgtctgttcagccacggctgtg

SEQ ID NO: 3087908 - DNA, 25 bp, Homo sapien
tcagtgccacggaatcagggctacc

SEQ ID NO: 3087909 - DNA, 25 bp, Homo sapien
aagagacaggcggtagcaaaaaggg

SEQ ID NO: 3087910 - DNA, 25 bp, Homo sapien
gagagagggatagaggccaaaaaac

SEQ ID NO: 3087911 - DNA, 25 bp, Homo sapien
caggcggtagcaaaaagggagggtg

SEQ ID NO: 3087912 - DNA, 25 bp, Homo sapien
gagagggatagaggccaaaaaacac

SEQ ID NO: 3087913 - DNA, 25 bp, Homo sapien
tccgatggggcaaagtattgaatcc

SEQ ID NO: 3087914 - DNA, 25 bp, Homo sapien
gtggcccatgaggacttcctccgat

SEQ ID NO: 3087915 - DNA, 25 bp, Homo sapien
cagaataggtccactggctgatggg

SEQ ID NO: 3087916 - DNA, 25 bp, Homo sapien
cagtgggctggacaatttgtagagg

SEQ ID NO: 3087917 - DNA, 25 bp, Homo sapien
cgggcgagccagcttcaggcggaga

SEQ ID NO: 3087918 - DNA, 25 bp, Homo sapien
agggctcccgggcgagccagcttca

SEQ ID NO: 3087919 - DNA, 25 bp, Homo sapien
gcggagaccacagcacgtctccctt

SEQ ID NO: 3087920 - DNA, 25 bp, Homo sapien
gagccagcttcaggcggagaccaca

SEQ ID NO: 3087921 - DNA, 25 bp, Homo sapien
ccagatggtaagacctgaatgctac

SEQ ID NO: 3087922 - DNA, 25 bp, Homo sapien
tcctagtaccatcaaacaggcatga

SEQ ID NO: 3087923 - DNA, 25 bp, Homo sapien
tgtggtaaatgagctctcaccagag

SEQ ID NO: 3087924 - DNA, 25 bp, Homo sapien
tattgcccatcctgaactaaagcac

SEQ ID NO: 3087925 - DNA, 25 bp, Homo sapien
gttgttaatcacctaccagcctaag

SEQ ID NO: 3087926 - DNA, 25 bp, Homo sapien
tagtcaagcagcacaacacaaggac

SEQ ID NO: 3087927 - DNA, 25 bp, Homo sapien
tgtgattaacagaagcgaacgcctt

SEQ ID NO: 3087928 - DNA, 25 bp, Homo sapien
taataagccctaacctcgtaccata

SEQ ID NO: 3087929 - DNA, 25 bp, Homo sapien
taaaataaatgaaatggtaacagag

SEQ ID NO: 3087930 - DNA, 25 bp, Homo sapien
agcaaaacttctggtcttaatttct

SEQ ID NO: 3087931 - DNA, 25 bp, Homo sapien
actaaaataaatgaaatggtaacag

SEQ ID NO: 3087932 - DNA, 25 bp, Homo sapien
atgagcaaaacttctggtcttaatt

SEQ ID NO: 3087933 - DNA, 25 bp, Homo sapien
taacattgctacaaactgcaatgga

SEQ ID NO: 3087934 - DNA, 25 bp, Homo sapien
tgctacaaactgcaatggagagaat

SEQ ID NO: 3087935 - DNA, 25 bp, Homo sapien
cattgctacaaactgcaatggagag

SEQ ID NO: 3087936 - DNA, 25 bp, Homo sapien
tacaaactgcaatggagagaatctt

SEQ ID NO: 3087937 - DNA, 25 bp, Homo sapien
gcaaatcttggcgatgagtcactca

SEQ ID NO: 3087938 - DNA, 25 bp, Homo sapien
tactgaccaactgagatagggctta

SEQ ID NO: 3087939 - DNA, 25 bp, Homo sapien
cactgctatatgtaaggcggacaga

SEQ ID NO: 3087940 - DNA, 25 bp, Homo sapien
catgaacttgcatcacggtgccggg

SEQ ID NO: 3087941 - DNA, 25 bp, Homo sapien
ttttggacgtctcttaagcagtggg

SEQ ID NO: 3087942 - DNA, 25 bp, Homo sapien
tcacgtcacggaaaacaaggcggat

SEQ ID NO: 3087943 - DNA, 25 bp, Homo sapien
tcagagactctgtaaggcgattggt

SEQ ID NO: 3087944 - DNA, 25 bp, Homo sapien
cctttggtgggtcttctggcaagca

SEQ ID NO: 3087945 - DNA, 25 bp, Homo sapien
tctggatacttaacacccgactgct

SEQ ID NO: 3087946 - DNA, 25 bp, Homo sapien
tgtgtacgcccaatacagaggtcaa

SEQ ID NO: 3087947 - DNA, 25 bp, Homo sapien
caatcgagtgctaaatagtctggca

SEQ ID NO: 3087948 - DNA, 25 bp, Homo sapien
aaacaagcgagatgctctgcctgca

SEQ ID NO: 3087949 - DNA, 25 bp, Homo sapien
caagttatccaggaaatattttaca

SEQ ID NO: 3087950 - DNA, 25 bp, Homo sapien
tggttctccaagtttatccaagtta

SEQ ID NO: 3087951 - DNA, 25 bp, Homo sapien
atccaagttatccaggaaatatttt

SEQ ID NO: 3087952 - DNA, 25 bp, Homo sapien
agttatccaggaaatattttacaga

SEQ ID NO: 3087953 - DNA, 25 bp, Homo sapien
ttttgctggttgtaacttgaggctc

SEQ ID NO: 3087954 - DNA, 25 bp, Homo sapien
ttgctggttgtaacttgaggctctc

SEQ ID NO: 3087955 - DNA, 25 bp, Homo sapien
tttttgctggttgtaacttgaggct

SEQ ID NO: 3087956 - DNA, 25 bp, Homo sapien
gctggttgtaacttgaggctctcat

SEQ ID NO: 3087957 - DNA, 25 bp, Homo sapien
taaaaattaagcagactccaagtga

SEQ ID NO: 3087958 - DNA, 25 bp, Homo sapien
cctgagcccagatgtgcaaggccat

SEQ ID NO: 3087959 - DNA, 25 bp, Homo sapien
catgaggaacaaaacttatagccga

SEQ ID NO: 3087960 - DNA, 25 bp, Homo sapien
tacagcatactcaaagtaccaccag

SEQ ID NO: 3087961 - DNA, 25 bp, Homo sapien
tagagcgcttcataataccccgaag

SEQ ID NO: 3087962 - DNA, 25 bp, Homo sapien
tatatgctgttttccaacgcaggac

SEQ ID NO: 3087963 - DNA, 25 bp, Homo sapien
cctcgtgaacgcactccaggtggaa

SEQ ID NO: 3087964 - DNA, 25 bp, Homo sapien
cagctcctgtttccaagtcccgatt

SEQ ID NO: 3087965 - DNA, 25 bp, Homo sapien
gctgctagtgcagtaaatgatcgca

SEQ ID NO: 3087966 - DNA, 25 bp, Homo sapien
gaactcgactacatgctctctcagg

SEQ ID NO: 3087967 - DNA, 25 bp, Homo sapien
tagggcctagtctgggccaagaaca

SEQ ID NO: 3087968 - DNA, 25 bp, Homo sapien
cagttcacttgggttgctagggcct

SEQ ID NO: 3087969 - DNA, 25 bp, Homo sapien
tcctgtcctacgtaacaagtgttgc

SEQ ID NO: 3087970 - DNA, 25 bp, Homo sapien
gggactacaggagcttcaaatgact

SEQ ID NO: 3087971 - DNA, 25 bp, Homo sapien
caaagacagactggccattacagga

SEQ ID NO: 3087972 - DNA, 25 bp, Homo sapien
tctagaatacttagttggacctccc

SEQ ID NO: 3087973 - DNA, 25 bp, Homo sapien
ccgaaaattgattaaagggcagttg

SEQ ID NO: 3087974 - DNA, 25 bp, Homo sapien
atgtagggccttaaaacctgtcagt

SEQ ID NO: 3087975 - DNA, 25 bp, Homo sapien
tgagtagtctgctaaaaacctaagc

SEQ ID NO: 3087976 - DNA, 25 bp, Homo sapien
aagctatttagctgacccatgatgg

SEQ ID NO: 3087977 - DNA, 25 bp, Homo sapien
cctggattggatacttttattccaa

SEQ ID NO: 3087978 - DNA, 25 bp, Homo sapien
caaacctgtcttcaatgctgtgtaa

SEQ ID NO: 3087979 - DNA, 25 bp, Homo sapien
acctggattggatacttttattcca

SEQ ID NO: 3087980 - DNA, 25 bp, Homo sapien
taacctggattggatacttttattc

SEQ ID NO: 3087981 - DNA, 25 bp, Homo sapien
cagttgaaattctcgacgccggtca

SEQ ID NO: 3087982 - DNA, 25 bp, Homo sapien
gggcccgggtatcaaacgacatcat

SEQ ID NO: 3087983 - DNA, 25 bp, Homo sapien
tgtctccccagggaatatgaagctt

SEQ ID NO: 3087984 - DNA, 25 bp, Homo sapien
tatgccgctgtctgcccataatgct

SEQ ID NO: 3087985 - DNA, 25 bp, Homo sapien
cactgtcttaaaattagagccttga

SEQ ID NO: 3087986 - DNA, 25 bp, Homo sapien
agttatgctgcacagaccaacaatg

SEQ ID NO: 3087987 - DNA, 25 bp, Homo sapien
ccaacaatgtccaagctcagaagaa

SEQ ID NO: 3087988 - DNA, 25 bp, Homo sapien
tgaagaccaacatcgaaaacaaatg

SEQ ID NO: 3087989 - DNA, 25 bp, Homo sapien
tgacacgcagaaacgagtgttaatt

SEQ ID NO: 3087990 - DNA, 25 bp, Homo sapien
ttgacacgcagaaacgagtgttaat

SEQ ID NO: 3087991 - DNA, 25 bp, Homo sapien
gacacgcagaaacgagtgttaatta

SEQ ID NO: 3087992 - DNA, 25 bp, Homo sapien
acacgcagaaacgagtgttaattat

SEQ ID NO: 3087993 - DNA, 25 bp, Homo sapien
ggaagcagggagttgggagcgcatg

SEQ ID NO: 3087994 - DNA, 25 bp, Homo sapien
gccaaggaagcagggagttgggagc

SEQ ID NO: 3087995 - DNA, 25 bp, Homo sapien
gcagggagttgggagcgcatgcgac

SEQ ID NO: 3087996 - DNA, 25 bp, Homo sapien
ttaggagacggccaaggaagcaggg

SEQ ID NO: 3087997 - DNA, 25 bp, Homo sapien
ggtgaagcggctagggctgctattg

SEQ ID NO: 3087998 - DNA, 25 bp, Homo sapien
gctattggtgttcctgcctcatccg

SEQ ID NO: 3087999 - DNA, 25 bp, Homo sapien
ggtagcgaggttcggcccacatcgc

SEQ ID NO: 3088000 - DNA, 25 bp, Homo sapien
atgtgactcgggtcacccagccagg

SEQ ID NO: 3088001 - DNA, 25 bp, Homo sapien
ggatcttcaccagccgcttcacata

SEQ ID NO: 3088002 - DNA, 25 bp, Homo sapien
tggtcgaagtcctgcccgtggatga

SEQ ID NO: 3088003 - DNA, 25 bp, Homo sapien
tcacataggtcttttcccgagacag

SEQ ID NO: 3088004 - DNA, 25 bp, Homo sapien
acaggcatttgtcgatctccttgga

SEQ ID NO: 3088005 - DNA, 25 bp, Homo sapien
accgcgacggcaggaagtccgccat

SEQ ID NO: 3088006 - DNA, 25 bp, Homo sapien
tgctgctcggcctcgccactcgtca

SEQ ID NO: 3088007 - DNA, 25 bp, Homo sapien
aagcacacggacagcacggaccgcg

SEQ ID NO: 3088008 - DNA, 25 bp, Homo sapien
tcgccactcgtcagcaggcagccgg

SEQ ID NO: 3088009 - DNA, 25 bp, Homo sapien
tggatggaaagtgctgcttttacat

SEQ ID NO: 3088010 - DNA, 25 bp, Homo sapien
ctggatggaaagtgctgcttttaca

SEQ ID NO: 3088011 - DNA, 25 bp, Homo sapien
gctggatggaaagtgctgcttttac

SEQ ID NO: 3088012 - DNA, 25 bp, Homo sapien
tggagtaatgcagaatagatgctgc

SEQ ID NO: 3088013 - DNA, 25 bp, Homo sapien
aatgcagaatagatgctgcctgcag

SEQ ID NO: 3088014 - DNA, 25 bp, Homo sapien
gtaatgcagaatagatgctgcctgc

SEQ ID NO: 3088015 - DNA, 25 bp, Homo sapien
ggctggcctagggtggagtaatgca

SEQ ID NO: 3088016 - DNA, 25 bp, Homo sapien
tcaagttggctgcaaattggctttg

SEQ ID NO: 3088017 - DNA, 25 bp, Homo sapien
tggctgcaaattggctttgggcttc

SEQ ID NO: 3088018 - DNA, 25 bp, Homo sapien
ctattgcttcaagttggctgcaaat

SEQ ID NO: 3088019 - DNA, 25 bp, Homo sapien
gcttcaagttggctgcaaattggct

SEQ ID NO: 3088020 - DNA, 25 bp, Homo sapien
ggattgagcaggagcatgggaaaac

SEQ ID NO: 3088021 - DNA, 25 bp, Homo sapien
gagggattgagcaggagcatgggaa

SEQ ID NO: 3088022 - DNA, 25 bp, Homo sapien
catgggaaaacccgttgccctcttg

SEQ ID NO: 3088023 - DNA, 25 bp, Homo sapien
agagggattgagcaggagcatggga

SEQ ID NO: 3088024 - DNA, 25 bp, Homo sapien
agcgcatgctaatgagcccgcgtcg

SEQ ID NO: 3088025 - DNA, 25 bp, Homo sapien
cagcgcatgctaatgagcccgcgtc

SEQ ID NO: 3088026 - DNA, 25 bp, Homo sapien
gcagcgcatgctaatgagcccgcgt

SEQ ID NO: 3088027 - DNA, 25 bp, Homo sapien
tgggccctggagtgccggggaccac

SEQ ID NO: 3088028 - DNA, 25 bp, Homo sapien
gggccctggagtgccggggaccaca

SEQ ID NO: 3088029 - DNA, 25 bp, Homo sapien
tgagttgtgataaagacaattccgt

SEQ ID NO: 3088030 - DNA, 25 bp, Homo sapien
acccctttgggtcgatttgtgcagc

SEQ ID NO: 3088031 - DNA, 25 bp, Homo sapien
taggtttccaagctgcgtcctgggc

SEQ ID NO: 3088032 - DNA, 25 bp, Homo sapien
gcagctcgatttcattaagtgactg

SEQ ID NO: 3088033 - DNA, 25 bp, Homo sapien
gcagcccaccccagatccgagtcat

SEQ ID NO: 3088034 - DNA, 25 bp, Homo sapien
tgcagtgcaggcagcccaccccaga

SEQ ID NO: 3088035 - DNA, 25 bp, Homo sapien
aggcagcccaccccagatccgagtc

SEQ ID NO: 3088036 - DNA, 25 bp, Homo sapien
gcaggcagcccaccccagatccgag

SEQ ID NO: 3088037 - DNA, 25 bp, Homo sapien
agcccctgccgaagtacagggatgt

SEQ ID NO: 3088038 - DNA, 25 bp, Homo sapien
agaagcagcccctgccgaagtacag

SEQ ID NO: 3088039 - DNA, 25 bp, Homo sapien
atgtatgagagtctggtgtgtctga

SEQ ID NO: 3088040 - DNA, 25 bp, Homo sapien
tacagggatgtatgagagtctggtg

SEQ ID NO: 3088041 - DNA, 25 bp, Homo sapien
ttgtcttgcaggttgaaatatcagt

SEQ ID NO: 3088042 - DNA, 25 bp, Homo sapien
tcttacaacataacaggcagtacag

SEQ ID NO: 3088043 - DNA, 25 bp, Homo sapien
tcagagggtcttacaacataacagg

SEQ ID NO: 3088044 - DNA, 25 bp, Homo sapien
cttgcaggttgaaatatcagtaaaa

SEQ ID NO: 3088045 - DNA, 25 bp, Homo sapien
ccaaatggaagtgatgcatggagca

SEQ ID NO: 3088046 - DNA, 25 bp, Homo sapien
tcccacaggcttgacaatttgctag

SEQ ID NO: 3088047 - DNA, 25 bp, Homo sapien
tccacagatttaaggcctcagccct

SEQ ID NO: 3088048 - DNA, 25 bp, Homo sapien
tctgggcaactggttacaaattggg

SEQ ID NO: 3088049 - DNA, 25 bp, Homo sapien
tgccagtagtgtagcgcacatgcat

SEQ ID NO: 3088050 - DNA, 25 bp, Homo sapien
gctttcatcacgatttaacaaaatg

SEQ ID NO: 3088051 - DNA, 25 bp, Homo sapien
caccagcagagcctcggaaattgct

SEQ ID NO: 3088052 - DNA, 25 bp, Homo sapien
caggaacacaataggacacccccaa

SEQ ID NO: 3088053 - DNA, 25 bp, Homo sapien
tgcccagctggctcgatatgctcag

SEQ ID NO: 3088054 - DNA, 25 bp, Homo sapien
catgaggagcatagagactctgccc

SEQ ID NO: 3088055 - DNA, 25 bp, Homo sapien
atgtcttcatgctgtattgcctaaa

SEQ ID NO: 3088056 - DNA, 25 bp, Homo sapien
ttattgttgaacttgggctgaccca

SEQ ID NO: 3088057 - DNA, 25 bp, Homo sapien
tcttctgcttggatggatctctgca

SEQ ID NO: 3088058 - DNA, 25 bp, Homo sapien
cctctaaattggaggctctgaatca

SEQ ID NO: 3088059 - DNA, 25 bp, Homo sapien
attggaggctctgaatcagggattc

SEQ ID NO: 3088060 - DNA, 25 bp, Homo sapien
ggtccagcgtcctctaaattggagg

SEQ ID NO: 3088061 - DNA, 25 bp, Homo sapien
gcaggtgggcgcccgcgcagcgcat

SEQ ID NO: 3088062 - DNA, 25 bp, Homo sapien
tgctgctccgcggggtcccggcggg

SEQ ID NO: 3088063 - DNA, 25 bp, Homo sapien
ctggcggcaggtgggcgcccgcgca

SEQ ID NO: 3088064 - DNA, 25 bp, Homo sapien
gccccctggcggcaggtgggcgccc

SEQ ID NO: 3088065 - DNA, 25 bp, Homo sapien
tggctggcgcggattccagctgctt

SEQ ID NO: 3088066 - DNA, 25 bp, Homo sapien
ttggctggcgcggattccagctgct

SEQ ID NO: 3088067 - DNA, 25 bp, Homo sapien
gattggctggcgcggattccagctg

SEQ ID NO: 3088068 - DNA, 25 bp, Homo sapien
ggctggcgcggattccagctgcttt

SEQ ID NO: 3088069 - DNA, 25 bp, Homo sapien
taattaggttttcgtgtgccctgcc

SEQ ID NO: 3088070 - DNA, 25 bp, Homo sapien
tctgcgaagcgtccgaggacaagag

SEQ ID NO: 3088071 - DNA, 25 bp, Homo sapien
ccctgcctgtagtggagaatctgaa

SEQ ID NO: 3088072 - DNA, 25 bp, Homo sapien
acccctttgggtcgatttgtgctgc

SEQ ID NO: 3088073 - DNA, 25 bp, Homo sapien
ctcctgctgtctgcgctggcggcag

SEQ ID NO: 3088074 - DNA, 25 bp, Homo sapien
tctcctgctgtctgcgctggcggca

SEQ ID NO: 3088075 - DNA, 25 bp, Homo sapien
tctggtataatcactgtccgatgag

SEQ ID NO: 3088076 - DNA, 25 bp, Homo sapien
cagacaaagtgaccgggcacagggt

SEQ ID NO: 3088077 - DNA, 25 bp, Homo sapien
gcttcccttgcgaatgctttcccag

SEQ ID NO: 3088078 - DNA, 25 bp, Homo sapien
gacaaagtggttcatttagttctga

SEQ ID NO: 3088079 - DNA, 25 bp, Homo sapien
tccgggtagcagaggtgtgggtatc

SEQ ID NO: 3088080 - DNA, 25 bp, Homo sapien
cgtgctcatcttccgggtagcagag

SEQ ID NO: 3088081 - DNA, 25 bp, Homo sapien
ctcgtgctcatcttccgggtagcag

SEQ ID NO: 3088082 - DNA, 25 bp, Homo sapien
ccgggtagcagaggtgtgggtatca

SEQ ID NO: 3088083 - DNA, 25 bp, Homo sapien
ctggttacccaggattccgctccca

SEQ ID NO: 3088084 - DNA, 25 bp, Homo sapien
ttacccaggattccgctcccaccat

SEQ ID NO: 3088085 - DNA, 25 bp, Homo sapien
caggattccgctcccaccatcttcc

SEQ ID NO: 3088086 - DNA, 25 bp, Homo sapien
cccaggattccgctcccaccatctt

SEQ ID NO: 3088087 - DNA, 25 bp, Homo sapien
caacctcttgagaaatgacaactgt

SEQ ID NO: 3088088 - DNA, 25 bp, Homo sapien
gtgcgattcccgaggttctcacacc

SEQ ID NO: 3088089 - DNA, 25 bp, Homo sapien
tctcagtctcaatgcagctgtgggt

SEQ ID NO: 3088090 - DNA, 25 bp, Homo sapien
gagccatactggtcagaaaggaccg

SEQ ID NO: 3088091 - DNA, 25 bp, Homo sapien
atgaacacaggtgggtggcctcctg

SEQ ID NO: 3088092 - DNA, 25 bp, Homo sapien
ttcaccatgggcgaatttcttggac

SEQ ID NO: 3088093 - DNA, 25 bp, Homo sapien
ggcgaatttcttggactttcttgga

SEQ ID NO: 3088094 - DNA, 25 bp, Homo sapien
ttgttttcctgtgcggcttctggca

SEQ ID NO: 3088095 - DNA, 25 bp, Homo sapien
accaccgcccttgggattcaccatg

SEQ ID NO: 3088096 - DNA, 25 bp, Homo sapien
ccaggcttattagcaggagtacatc

SEQ ID NO: 3088097 - DNA, 25 bp, Homo sapien
catggtgcctcatgagtgtctgagc

SEQ ID NO: 3088098 - DNA, 25 bp, Homo sapien
aacaactctgcggttctgggtcact

SEQ ID NO: 3088099 - DNA, 25 bp, Homo sapien
tttggagaaagactaccgagcactg

SEQ ID NO: 3088100 - DNA, 25 bp, Homo sapien
gggtcagacagggtcccgcggtggc

SEQ ID NO: 3088101 - DNA, 25 bp, Homo sapien
cgaagcggggctgatgctttgtctt

SEQ ID NO: 3088102 - DNA, 25 bp, Homo sapien
cagggtcccgcggtggcctggttgt

SEQ ID NO: 3088103 - DNA, 25 bp, Homo sapien
gtggcctggttgtgcagcactgaca

SEQ ID NO: 3088104 - DNA, 25 bp, Homo sapien
ccagtgccccgcaaacaccctcctg

SEQ ID NO: 3088105 - DNA, 25 bp, Homo sapien
accctcctggcgttgtccctttgct

SEQ ID NO: 3088106 - DNA, 25 bp, Homo sapien
cccagtgccccgcaaacaccctcct

SEQ ID NO: 3088107 - DNA, 25 bp, Homo sapien
cagtgccccgcaaacaccctcctgg

SEQ ID NO: 3088108 - DNA, 25 bp, Homo sapien
tgctgctggacctacagctgaccca

SEQ ID NO: 3088109 - DNA, 25 bp, Homo sapien
gaacatgaagtttgaaacctctgca

SEQ ID NO: 3088110 - DNA, 25 bp, Homo sapien
actgtgcctggatgtcgaatgacca

SEQ ID NO: 3088111 - DNA, 25 bp, Homo sapien
gacagctttcccgttagtgagggct

SEQ ID NO: 3088112 - DNA, 25 bp, Homo sapien
gaccagctgaccattggcaagcaca

SEQ ID NO: 3088113 - DNA, 25 bp, Homo sapien
tcaagaagttgagcatgtcaaggac

SEQ ID NO: 3088114 - DNA, 25 bp, Homo sapien
atagcccatcctgccgtgccgaatc

SEQ ID NO: 3088115 - DNA, 25 bp, Homo sapien
tgccgtgccgaatcaagaagttgag

SEQ ID NO: 3088116 - DNA, 25 bp, Homo sapien
gaagttgagcatgtcaaggactggc

SEQ ID NO: 3088117 - DNA, 25 bp, Homo sapien
cgtgtacaccgggacctgcatgccc

SEQ ID NO: 3088118 - DNA, 25 bp, Homo sapien
cctcacccatcagagtggccttgga

SEQ ID NO: 3088119 - DNA, 25 bp, Homo sapien
tctgtcaccgagagcagcgaggcct

SEQ ID NO: 3088120 - DNA, 25 bp, Homo sapien
ccttggagagctcatcgggcttgga

SEQ ID NO: 3088121 - DNA, 25 bp, Homo sapien
tgaagctttttccagatcaaaatgg

SEQ ID NO: 3088122 - DNA, 25 bp, Homo sapien
cagatcaaaatggatgtgcccacgg

SEQ ID NO: 3088123 - DNA, 25 bp, Homo sapien
ctggaacaggagagtcgggtgaccg

SEQ ID NO: 3088124 - DNA, 25 bp, Homo sapien
gacctgcttgatggactcggaggat

SEQ ID NO: 3088125 - DNA, 25 bp, Homo sapien
gtgcacaatgcttttctcatcagca

SEQ ID NO: 3088126 - DNA, 25 bp, Homo sapien
gacaaagggacattgagtcgcttcc

SEQ ID NO: 3088127 - DNA, 25 bp, Homo sapien
ctctctccttgtctaaatgggtttg

SEQ ID NO: 3088128 - DNA, 25 bp, Homo sapien
gggacattgagtcgcttccaagagc

SEQ ID NO: 3088129 - DNA, 25 bp, Homo sapien
gctttgatctcggagaaggcagagt

SEQ ID NO: 3088130 - DNA, 25 bp, Homo sapien
tctagctggttctaaggggactgcc

SEQ ID NO: 3088131 - DNA, 25 bp, Homo sapien
tagcatggcattaggccaccggtga

SEQ ID NO: 3088132 - DNA, 25 bp, Homo sapien
ccaccggtgatcctgctgcacaaag

SEQ ID NO: 3088133 - DNA, 25 bp, Homo sapien
ggagaggaagtattaggacagaacc

SEQ ID NO: 3088134 - DNA, 25 bp, Homo sapien
gacatcatcctcttgacataatgga

SEQ ID NO: 3088135 - DNA, 25 bp, Homo sapien
ggacagaacctggaggaaagctggc

SEQ ID NO: 3088136 - DNA, 25 bp, Homo sapien
gaggaggcattgagggacagaattg

SEQ ID NO: 3088137 - DNA, 25 bp, Homo sapien
catccagactttgcaaattcttgaa

SEQ ID NO: 3088138 - DNA, 25 bp, Homo sapien
cacatccagactttgcaaattcttg

SEQ ID NO: 3088139 - DNA, 25 bp, Homo sapien
ggcacatccagactttgcaaattct

SEQ ID NO: 3088140 - DNA, 25 bp, Homo sapien
atccagactttgcaaattcttgaag

SEQ ID NO: 3088141 - DNA, 25 bp, Homo sapien
ggcttttacttttcaaaggtctgca

SEQ ID NO: 3088142 - DNA, 25 bp, Homo sapien
ttttacttttcaaaggtctgcatct

SEQ ID NO: 3088143 - DNA, 25 bp, Homo sapien
gcttttacttttcaaaggtctgcat

SEQ ID NO: 3088144 - DNA, 25 bp, Homo sapien
tacttttcaaaggtctgcatctttt

SEQ ID NO: 3088145 - DNA, 25 bp, Homo sapien
tcattttaggccaaatgcatccccc

SEQ ID NO: 3088146 - DNA, 25 bp, Homo sapien
cattttaggccaaatgcatccccct

SEQ ID NO: 3088147 - DNA, 25 bp, Homo sapien
tcggcaagcattgccgtggtgtact

SEQ ID NO: 3088148 - DNA, 25 bp, Homo sapien
gcagccataaggtcaagggtttgag

SEQ ID NO: 3088149 - DNA, 25 bp, Homo sapien
caagggtttgagatactgttggtac

SEQ ID NO: 3088150 - DNA, 25 bp, Homo sapien
tacccaggactggaaatcggcaagc

SEQ ID NO: 3088151 - DNA, 25 bp, Homo sapien
tgtgatgggtgcagtcccttgagag

SEQ ID NO: 3088152 - DNA, 25 bp, Homo sapien
ggtccccctagcacggaaggctctg

SEQ ID NO: 3088153 - DNA, 25 bp, Homo sapien
tggaattggctccacgactcagcct

SEQ ID NO: 3088154 - DNA, 25 bp, Homo sapien
ggcagggagcccagttgtgatgggt

SEQ ID NO: 3088155 - DNA, 25 bp, Homo sapien
tggaaaggccaccacttagtgccat

SEQ ID NO: 3088156 - DNA, 25 bp, Homo sapien
gacatcctccaagcacctggaaagg

SEQ ID NO: 3088157 - DNA, 25 bp, Homo sapien
taccagagaggaatgcaattgagtg

SEQ ID NO: 3088158 - DNA, 25 bp, Homo sapien
tgtgtgtccttaacagcggaggcga

SEQ ID NO: 3088159 - DNA, 25 bp, Homo sapien
cgtggctttgtctcagaaaatccat

SEQ ID NO: 3088160 - DNA, 25 bp, Homo sapien
tcatgagatattgggggctcttcaa

SEQ ID NO: 3088161 - DNA, 25 bp, Homo sapien
aatccatctctaggaacggttccag

SEQ ID NO: 3088162 - DNA, 25 bp, Homo sapien
gcagttcctccgtggctttgtctca

SEQ ID NO: 3088163 - DNA, 25 bp, Homo sapien
gctggctctgtgctcagacaatggg

SEQ ID NO: 3088164 - DNA, 25 bp, Homo sapien
ccaggattgtgactcagtgcatgct

SEQ ID NO: 3088165 - DNA, 25 bp, Homo sapien
cccacaggcaagcagagtcatctgc

SEQ ID NO: 3088166 - DNA, 25 bp, Homo sapien
gctctgtgctcagacaatgggaagc

SEQ ID NO: 3088167 - DNA, 25 bp, Homo sapien
tgggtacacttccttgcactgttcg

SEQ ID NO: 3088168 - DNA, 25 bp, Homo sapien
tcctgttccaaccaaatgggtacac

SEQ ID NO: 3088169 - DNA, 25 bp, Homo sapien
aattttcgatggctctctcgtgaca

SEQ ID NO: 3088170 - DNA, 25 bp, Homo sapien
gaagccctgactcattcgctggagc

SEQ ID NO: 3088171 - DNA, 25 bp, Homo sapien
aatgatggcaattaaccagaatggg

SEQ ID NO: 3088172 - DNA, 25 bp, Homo sapien
tgtcgctcattatttgaaccggcaa

SEQ ID NO: 3088173 - DNA, 25 bp, Homo sapien
tatttgaaccggcaaatgatggcaa

SEQ ID NO: 3088174 - DNA, 25 bp, Homo sapien
tctgcatccaacttgtcgctcatta

SEQ ID NO: 3088175 - DNA, 25 bp, Homo sapien
aggaaactctaccaaatggttctgc

SEQ ID NO: 3088176 - DNA, 25 bp, Homo sapien
aactctaccaaatggttctgctcac

SEQ ID NO: 3088177 - DNA, 25 bp, Homo sapien
gcttggcctaaaagcagcgaagaac

SEQ ID NO: 3088178 - DNA, 25 bp, Homo sapien
agcagcgaagaacccacaggaaact

SEQ ID NO: 3088179 - DNA, 25 bp, Homo sapien
caggctctcggtggaatgggggccc

SEQ ID NO: 3088180 - DNA, 25 bp, Homo sapien
tcagagcagccagtaggtgtctcca

SEQ ID NO: 3088181 - DNA, 25 bp, Homo sapien
cagagcagccagtaggtgtctccat

SEQ ID NO: 3088182 - DNA, 25 bp, Homo sapien
gctctcggtggaatgggggccctga

SEQ ID NO: 3088183 - DNA, 25 bp, Homo sapien
catctggtcgcagtcaacagagcgc

SEQ ID NO: 3088184 - DNA, 25 bp, Homo sapien
gtcgcagtcaacagagcgccttgcc

SEQ ID NO: 3088185 - DNA, 25 bp, Homo sapien
ccagggcatctggtcgcagtcaaca

SEQ ID NO: 3088186 - DNA, 25 bp, Homo sapien
tctggtcgcagtcaacagagcgcct

SEQ ID NO: 3088187 - DNA, 25 bp, Homo sapien
tgttttagcccctagctgtgagttc

SEQ ID NO: 3088188 - DNA, 25 bp, Homo sapien
tgctctgggtagacgaatccccaaa

SEQ ID NO: 3088189 - DNA, 25 bp, Homo sapien
agtttcagcctctgttttagcccct

SEQ ID NO: 3088190 - DNA, 25 bp, Homo sapien
tccactggcacacatgctgctctgg

SEQ ID NO: 3088191 - DNA, 25 bp, Homo sapien
ttagacgccaaacgggtcagaccac

SEQ ID NO: 3088192 - DNA, 25 bp, Homo sapien
accaaatatccccagatggttcctc

SEQ ID NO: 3088193 - DNA, 25 bp, Homo sapien
aaatatccccagatggttcctctct

SEQ ID NO: 3088194 - DNA, 25 bp, Homo sapien
agaccacgggagctccatccctgag

SEQ ID NO: 3088195 - DNA, 25 bp, Homo sapien
gaaacattgggaagaacagtgtatt

SEQ ID NO: 3088196 - DNA, 25 bp, Homo sapien
tctgaaacattcagcttcccttctc

SEQ ID NO: 3088197 - DNA, 25 bp, Homo sapien
tccatggggaaacattgggaagaac

SEQ ID NO: 3088198 - DNA, 25 bp, Homo sapien
tccagttcgtttttctgagtctctg

SEQ ID NO: 3088199 - DNA, 25 bp, Homo sapien
tgataaagaagtgcggatccagcta

SEQ ID NO: 3088200 - DNA, 25 bp, Homo sapien
aaatccactcggaaatagggattag

SEQ ID NO: 3088201 - DNA, 25 bp, Homo sapien
tccccagcgttcttgggtttgccac

SEQ ID NO: 3088202 - DNA, 25 bp, Homo sapien
ccccagagcgataaggcatctgtaa

SEQ ID NO: 3088203 - DNA, 25 bp, Homo sapien
ccagccgtggttgacatcggggacg

SEQ ID NO: 3088204 - DNA, 25 bp, Homo sapien
cccgcctgcaacacctccctgccat

SEQ ID NO: 3088205 - DNA, 25 bp, Homo sapien
gtggttaaccacttgctcccgcctg

SEQ ID NO: 3088206 - DNA, 25 bp, Homo sapien
tgacatcggggacgtggttaaccac

SEQ ID NO: 3088207 - DNA, 25 bp, Homo sapien
tgcttctcttttgcagttccctttt

SEQ ID NO: 3088208 - DNA, 25 bp, Homo sapien
ctgggtgggaatgggacggactgac

SEQ ID NO: 3088209 - DNA, 25 bp, Homo sapien
ttcctgtggagggaagctcgctttg

SEQ ID NO: 3088210 - DNA, 25 bp, Homo sapien
aatgggacggactgactctgggaag

SEQ ID NO: 3088211 - DNA, 25 bp, Homo sapien
aagctcgctttgatcctgggtggga

SEQ ID NO: 3088212 - DNA, 25 bp, Homo sapien
caacctccgaatgaggtctcaatca

SEQ ID NO: 3088213 - DNA, 25 bp, Homo sapien
tggtgaccacaccaacctccgaatg

SEQ ID NO: 3088214 - DNA, 25 bp, Homo sapien
tccactctcttactccccgactggc

SEQ ID NO: 3088215 - DNA, 25 bp, Homo sapien
gaccacaccaacctccgaatgaggt

SEQ ID NO: 3088216 - DNA, 25 bp, Homo sapien
gagtgagttcggctctccattatcc

SEQ ID NO: 3088217 - DNA, 25 bp, Homo sapien
tctgcttggtgaacaaccctccttt

SEQ ID NO: 3088218 - DNA, 25 bp, Homo sapien
ctctccattatccagagcagaatta

SEQ ID NO: 3088219 - DNA, 25 bp, Homo sapien
cctcctttaagagtgagttcggctc

SEQ ID NO: 3088220 - DNA, 25 bp, Homo sapien
ttctgatccagttggcccttgcctg

SEQ ID NO: 3088221 - DNA, 25 bp, Homo sapien
ctgcactctttgagcttggctgtga

SEQ ID NO: 3088222 - DNA, 25 bp, Homo sapien
tatcaaaaatgagggcagcacggcc

SEQ ID NO: 3088223 - DNA, 25 bp, Homo sapien
ttccccttacactgtagcacttctg

SEQ ID NO: 3088224 - DNA, 25 bp, Homo sapien
tctgagcgtttgttgcggtgaaccg

SEQ ID NO: 3088225 - DNA, 25 bp, Homo sapien
aagttcctccctcagcgaaatcagg

SEQ ID NO: 3088226 - DNA, 25 bp, Homo sapien
tgggttggacctctgcacctgagca

SEQ ID NO: 3088227 - DNA, 25 bp, Homo sapien
gaaatgatctgctagtgtgcccaca

SEQ ID NO: 3088228 - DNA, 25 bp, Homo sapien
acacgtttgctgaaagatttacatt

SEQ ID NO: 3088229 - DNA, 25 bp, Homo sapien
gacaaacacgtttgctgaaagattt

SEQ ID NO: 3088230 - DNA, 25 bp, Homo sapien
attttcgatttcctcgtcgcccatt

SEQ ID NO: 3088231 - DNA, 25 bp, Homo sapien
cgatttcctcgtcgcccattttctg

SEQ ID NO: 3088232 - DNA, 25 bp, Homo sapien
cgccttgacaatcgtaaacctgaga

SEQ ID NO: 3088233 - DNA, 25 bp, Homo sapien
catactgaccataaacgccttgaca

SEQ ID NO: 3088234 - DNA, 25 bp, Homo sapien
gaaggcagatgcttcaacatcgggc

SEQ ID NO: 3088235 - DNA, 25 bp, Homo sapien
gagccatcccgtgtcttgggtgaca

SEQ ID NO: 3088236 - DNA, 25 bp, Homo sapien
agaggcccctatcctgtaccaggtg

SEQ ID NO: 3088237 - DNA, 25 bp, Homo sapien
tcatctgcagactgattccagaggc

SEQ ID NO: 3088238 - DNA, 25 bp, Homo sapien
tgcctaacaactgaaactggcccaa

SEQ ID NO: 3088239 - DNA, 25 bp, Homo sapien
tctgtcccactccaaaactacattt

SEQ ID NO: 3088240 - DNA, 25 bp, Homo sapien
ataatcataaagttctccccaactg

SEQ ID NO: 3088241 - DNA, 25 bp, Homo sapien
atcataaagttctccccaactgggc

SEQ ID NO: 3088242 - DNA, 25 bp, Homo sapien
tcataaagttctccccaactgggcc

SEQ ID NO: 3088243 - DNA, 25 bp, Homo sapien
aatcataaagttctccccaactggg

SEQ ID NO: 3088244 - DNA, 25 bp, Homo sapien
cagatctggccatttgctggaggca

SEQ ID NO: 3088245 - DNA, 25 bp, Homo sapien
ctttggctgatcaaaacagtgggca

SEQ ID NO: 3088246 - DNA, 25 bp, Homo sapien
ccttcgtcacaaacaggatgcgtgc

SEQ ID NO: 3088247 - DNA, 25 bp, Homo sapien
ggatgcgtgccgacactggctttca

SEQ ID NO: 3088248 - DNA, 25 bp, Homo sapien
ttcagctcgtccatcaataccaggg

SEQ ID NO: 3088249 - DNA, 25 bp, Homo sapien
cagtatgaagttacaatccttgagc

SEQ ID NO: 3088250 - DNA, 25 bp, Homo sapien
gcagcaaggtataggaggaattgaa

SEQ ID NO: 3088251 - DNA, 25 bp, Homo sapien
catcctggaggtgttcagtgcctga

SEQ ID NO: 3088252 - DNA, 25 bp, Homo sapien
cactgagttccgagcataaatatta

SEQ ID NO: 3088253 - DNA, 25 bp, Homo sapien
cccatgggctttgaagcaggcactg

SEQ ID NO: 3088254 - DNA, 25 bp, Homo sapien
tcagagaggcccaagcacctacaga

SEQ ID NO: 3088255 - DNA, 25 bp, Homo sapien
acatttctggccgtctcagagaggc

SEQ ID NO: 3088256 - DNA, 25 bp, Homo sapien
gaggctctggaagaaaccagggcaa

SEQ ID NO: 3088257 - DNA, 25 bp, Homo sapien
cagggagtgcttggaatgaaaacag

SEQ ID NO: 3088258 - DNA, 25 bp, Homo sapien
aaacagttaagggaaaatgcagcca

SEQ ID NO: 3088259 - DNA, 25 bp, Homo sapien
cagggcaatgcggatgctggatttc

SEQ ID NO: 3088260 - DNA, 25 bp, Homo sapien
ctgtgaggagcctgccaacacaagc

SEQ ID NO: 3088261 - DNA, 25 bp, Homo sapien
acctggtaaaggcttgggcaactca

SEQ ID NO: 3088262 - DNA, 25 bp, Homo sapien
cacctcacgcctgtttgaactctga

SEQ ID NO: 3088263 - DNA, 25 bp, Homo sapien
actctgatttcatccgtggccaact

SEQ ID NO: 3088264 - DNA, 25 bp, Homo sapien
ccagccccactaatgctgcgaatgc

SEQ ID NO: 3088265 - DNA, 25 bp, Homo sapien
ggctttcaagggcaataactgtaaa

SEQ ID NO: 3088266 - DNA, 25 bp, Homo sapien
agccccactaatgctgcgaatgcca

SEQ ID NO: 3088267 - DNA, 25 bp, Homo sapien
gccccactaatgctgcgaatgccat

SEQ ID NO: 3088268 - DNA, 25 bp, Homo sapien
cctatgggaaatcatacggatctga

SEQ ID NO: 3088269 - DNA, 25 bp, Homo sapien
aatcatacggatctgaaattcaccc

SEQ ID NO: 3088270 - DNA, 25 bp, Homo sapien
gagaactggaccctatgggaaatca

SEQ ID NO: 3088271 - DNA, 25 bp, Homo sapien
gatctgaaattcaccccggaaactg

SEQ ID NO: 3088272 - DNA, 25 bp, Homo sapien
taatttacatctcgtttgagcctct

SEQ ID NO: 3088273 - DNA, 25 bp, Homo sapien
ggttattaatggcttattaggctgt

SEQ ID NO: 3088274 - DNA, 25 bp, Homo sapien
attgttcacagggagtgactcggtg

SEQ ID NO: 3088275 - DNA, 25 bp, Homo sapien
ggaggtaatttacatctcgtttgag

SEQ ID NO: 3088276 - DNA, 25 bp, Homo sapien
ttctcacctctgccagggagccatg

SEQ ID NO: 3088277 - DNA, 25 bp, Homo sapien
gagccatgccttcgagttcccagcg

SEQ ID NO: 3088278 - DNA, 25 bp, Homo sapien
tcttaagcaccaactgctgtccggt

SEQ ID NO: 3088279 - DNA, 25 bp, Homo sapien
actgctgtccggtcaaatttctcac

SEQ ID NO: 3088280 - DNA, 25 bp, Homo sapien
cagtgaccaggaatgtctgagctta

SEQ ID NO: 3088281 - DNA, 25 bp, Homo sapien
tgatgccaaggcgatgaggtagcca

SEQ ID NO: 3088282 - DNA, 25 bp, Homo sapien
tggagtaagtagaagcaccctgatg

SEQ ID NO: 3088283 - DNA, 25 bp, Homo sapien
gcttaaaatagagatgccctgtgcc

SEQ ID NO: 3088284 - DNA, 25 bp, Homo sapien
gaaatgatcctgcaaagtgcctggg

SEQ ID NO: 3088285 - DNA, 25 bp, Homo sapien
tataggtcagggtgtatcagtgaag

SEQ ID NO: 3088286 - DNA, 25 bp, Homo sapien
ggtcagggtgtatcagtgaagcact

SEQ ID NO: 3088287 - DNA, 25 bp, Homo sapien
ggagatagaaatgatcctgcaaagt

SEQ ID NO: 3088288 - DNA, 25 bp, Homo sapien
agctgcccactcaggccagtggcca

SEQ ID NO: 3088289 - DNA, 25 bp, Homo sapien
tttggaagctgcccactcaggccag

SEQ ID NO: 3088290 - DNA, 25 bp, Homo sapien
gctgcccactcaggccagtggccat

SEQ ID NO: 3088291 - DNA, 25 bp, Homo sapien
attcagagctactcctccaagcctg

SEQ ID NO: 3088292 - DNA, 25 bp, Homo sapien
cagctgccaccctcgtatgtaccca

SEQ ID NO: 3088293 - DNA, 25 bp, Homo sapien
gtatgtacccaccacggcccagtct

SEQ ID NO: 3088294 - DNA, 25 bp, Homo sapien
cctggaactgcccagagtaccagct

SEQ ID NO: 3088295 - DNA, 25 bp, Homo sapien
agtgggtcccgcagtcttccctcct

SEQ ID NO: 3088296 - DNA, 25 bp, Homo sapien
catttatcgagacctttcccttgca

SEQ ID NO: 3088297 - DNA, 25 bp, Homo sapien
tgtgcagaagtcagtgggtcccgca

SEQ ID NO: 3088298 - DNA, 25 bp, Homo sapien
tctgccttccatttatcgagacctt

SEQ ID NO: 3088299 - DNA, 25 bp, Homo sapien
caagcaatgggacagacgtggagct

SEQ ID NO: 3088300 - DNA, 25 bp, Homo sapien
tctctggttttgagtctgaaccaag

SEQ ID NO: 3088301 - DNA, 25 bp, Homo sapien
tccccacaaatgtaaagcaatcata

SEQ ID NO: 3088302 - DNA, 25 bp, Homo sapien
tctctctggttttgagtctgaacca

SEQ ID NO: 3088303 - DNA, 25 bp, Homo sapien
ccagcaacccaagaattttgctctt

SEQ ID NO: 3088304 - DNA, 25 bp, Homo sapien
ctatcaggaggatggaaagatagga

SEQ ID NO: 3088305 - DNA, 25 bp, Homo sapien
cttagggtgagtaagacaaaagctc

SEQ ID NO: 3088306 - DNA, 25 bp, Homo sapien
cctggcatccagcaacccaagaatt

SEQ ID NO: 3088307 - DNA, 25 bp, Homo sapien
ttaagtccgaatctctgaaggtggg

SEQ ID NO: 3088308 - DNA, 25 bp, Homo sapien
cagccagggaggaaaggatccatga

SEQ ID NO: 3088309 - DNA, 25 bp, Homo sapien
catattagaataccctgggaagtcc

SEQ ID NO: 3088310 - DNA, 25 bp, Homo sapien
ggtcctcaacttcggtggcatatta

SEQ ID NO: 3088311 - DNA, 25 bp, Homo sapien
ggtttgaatggtttgctcctaactg

SEQ ID NO: 3088312 - DNA, 25 bp, Homo sapien
tctccaagctttaccataggcaact

SEQ ID NO: 3088313 - DNA, 25 bp, Homo sapien
tttaccataggcaactggccaccac

SEQ ID NO: 3088314 - DNA, 25 bp, Homo sapien
ctcactccagcggtttgaatggttt

SEQ ID NO: 3088315 - DNA, 25 bp, Homo sapien
aggtgcctgtggagaacaaatccac

SEQ ID NO: 3088316 - DNA, 25 bp, Homo sapien
ggccatccccgaccttcttgggctg

SEQ ID NO: 3088317 - DNA, 25 bp, Homo sapien
ccacttctggttactggtttgagac

SEQ ID NO: 3088318 - DNA, 25 bp, Homo sapien
gtaacagtggccatccccgaccttc

SEQ ID NO: 3088319 - DNA, 25 bp, Homo sapien
cagagttgcccatgagaagtggctc

SEQ ID NO: 3088320 - DNA, 25 bp, Homo sapien
gctctgccctgaactgtctctcatt

SEQ ID NO: 3088321 - DNA, 25 bp, Homo sapien
agttgcccatgagaagtggctctgc

SEQ ID NO: 3088322 - DNA, 25 bp, Homo sapien
tgcccatgagaagtggctctgccct

SEQ ID NO: 3088323 - DNA, 25 bp, Homo sapien
ttaataaaggctacatctcttaatt

SEQ ID NO: 3088324 - DNA, 25 bp, Homo sapien
taaaggctacatctcttaattacaa

SEQ ID NO: 3088325 - DNA, 25 bp, Homo sapien
aggctacatctcttaattacaataa

SEQ ID NO: 3088326 - DNA, 25 bp, Homo sapien
aaattttaataaaggctacatctct

SEQ ID NO: 3088327 - DNA, 25 bp, Homo sapien
aactctttataatgcataatttaca

SEQ ID NO: 3088328 - DNA, 25 bp, Homo sapien
cataatttacagtataagtagaaca

SEQ ID NO: 3088329 - DNA, 25 bp, Homo sapien
tataatgcataatttacagtataag

SEQ ID NO: 3088330 - DNA, 25 bp, Homo sapien
tgcataatttacagtataagtagaa

SEQ ID NO: 3088331 - DNA, 25 bp, Homo sapien
cagtgattctagcaggcctcagggc

SEQ ID NO: 3088332 - DNA, 25 bp, Homo sapien
caagacagttcacaagagcttcggg

SEQ ID NO: 3088333 - DNA, 25 bp, Homo sapien
aaacagtctgtcttcacttggaggg

SEQ ID NO: 3088334 - DNA, 25 bp, Homo sapien
tcatttccacgaaagcacagcggca

SEQ ID NO: 3088335 - DNA, 25 bp, Homo sapien
gctccacaggcaaactcatcgcttg

SEQ ID NO: 3088336 - DNA, 25 bp, Homo sapien
aaactcatcgcttgcttttttgaag

SEQ ID NO: 3088337 - DNA, 25 bp, Homo sapien
tacatcgggagcaccgtctcatcct

SEQ ID NO: 3088338 - DNA, 25 bp, Homo sapien
actttgcccagaatccggccttcat

SEQ ID NO: 3088339 - DNA, 25 bp, Homo sapien
ctggagagccggaacctgccgaagt

SEQ ID NO: 3088340 - DNA, 25 bp, Homo sapien
cagggccgaacagacggcactggcc

SEQ ID NO: 3088341 - DNA, 25 bp, Homo sapien
gatggtttagcagtccaaaggcctc

SEQ ID NO: 3088342 - DNA, 25 bp, Homo sapien
aagtctgtaaaaggctgacttccag

SEQ ID NO: 3088343 - DNA, 25 bp, Homo sapien
ttccactgcaacatgcttcatgtgg

SEQ ID NO: 3088344 - DNA, 25 bp, Homo sapien
tctgaagggactgtttgctttttga

SEQ ID NO: 3088345 - DNA, 25 bp, Homo sapien
gcttcatgtggcaaactttgctttc

SEQ ID NO: 3088346 - DNA, 25 bp, Homo sapien
tctggcgcgtctgaagggactgttt

SEQ ID NO: 3088347 - DNA, 25 bp, Homo sapien
agcagctgaaggaggcactttcccc

SEQ ID NO: 3088348 - DNA, 25 bp, Homo sapien
aaggtcacctgcagttccactcgaa

SEQ ID NO: 3088349 - DNA, 25 bp, Homo sapien
actatacaaggcctgctctagaggg

SEQ ID NO: 3088350 - DNA, 25 bp, Homo sapien
taaaagggactatccagacccagca

SEQ ID NO: 3088351 - DNA, 25 bp, Homo sapien
tccactctgcagacaaggtaaggag

SEQ ID NO: 3088352 - DNA, 25 bp, Homo sapien
cttctcaagggcacctccgtccact

SEQ ID NO: 3088353 - DNA, 25 bp, Homo sapien
ctccgtccactctgcagacaaggta

SEQ ID NO: 3088354 - DNA, 25 bp, Homo sapien
ggagaccaggaagttcccttcctga

SEQ ID NO: 3088355 - DNA, 25 bp, Homo sapien
tcttgcggctgctgcttcgttattg

SEQ ID NO: 3088356 - DNA, 25 bp, Homo sapien
ctcttgcggctgctgcttcgttatt

SEQ ID NO: 3088357 - DNA, 25 bp, Homo sapien
ctaggtctgctcagccaggggagct

SEQ ID NO: 3088358 - DNA, 25 bp, Homo sapien
tggctcttggttctgagcaaacaaa

SEQ ID NO: 3088359 - DNA, 25 bp, Homo sapien
gtctgctcagccaggggagctgctc

SEQ ID NO: 3088360 - DNA, 25 bp, Homo sapien
ggctctggctcttggttctgagcaa

SEQ ID NO: 3088361 - DNA, 25 bp, Homo sapien
ggagcgcgtggacacctgccagttt

SEQ ID NO: 3088362 - DNA, 25 bp, Homo sapien
aactcactggcctggagcgcgtgga

SEQ ID NO: 3088363 - DNA, 25 bp, Homo sapien
aaaagtaagtgacaaccaactcact

SEQ ID NO: 3088364 - DNA, 25 bp, Homo sapien
cttcagcatcctccggtatggaatt

SEQ ID NO: 3088365 - DNA, 25 bp, Homo sapien
tgtggctcccgtctgaacagtggcc

SEQ ID NO: 3088366 - DNA, 25 bp, Homo sapien
ctggagccaggcttggattggagaa

SEQ ID NO: 3088367 - DNA, 25 bp, Homo sapien
ccgtctgaacagtggccgaatgatt

SEQ ID NO: 3088368 - DNA, 25 bp, Homo sapien
gtggccgaatgattcctgtccctct

SEQ ID NO: 3088369 - DNA, 25 bp, Homo sapien
gtcaggggaggcatcgcagggtcct

SEQ ID NO: 3088370 - DNA, 25 bp, Homo sapien
gacacctcagctagcctgcgacagg

SEQ ID NO: 3088371 - DNA, 25 bp, Homo sapien
tcgcctggagacgagcgggcagact

SEQ ID NO: 3088372 - DNA, 25 bp, Homo sapien
ctgctttgggggcttcgacacctca

SEQ ID NO: 3088373 - DNA, 25 bp, Homo sapien
ggctccgtgcctttcccattgcgtt

SEQ ID NO: 3088374 - DNA, 25 bp, Homo sapien
tgccagacatcctgcgacctgtctc

SEQ ID NO: 3088375 - DNA, 25 bp, Homo sapien
ttcccattgcgtttgggcaaggtac

SEQ ID NO: 3088376 - DNA, 25 bp, Homo sapien
gacatcctgcgacctgtctccttcc

SEQ ID NO: 3088377 - DNA, 25 bp, Homo sapien
tgtggggaaccaagaaccacaccca

SEQ ID NO: 3088378 - DNA, 25 bp, Homo sapien
ccaagaaccacacccaacccagaga

SEQ ID NO: 3088379 - DNA, 25 bp, Homo sapien
accaagaaccacacccaacccagag

SEQ ID NO: 3088380 - DNA, 25 bp, Homo sapien
caagaaccacacccaacccagagac

SEQ ID NO: 3088381 - DNA, 25 bp, Homo sapien
tcgctgggcatggtttccggagcct

SEQ ID NO: 3088382 - DNA, 25 bp, Homo sapien
cgaattgagtgtgagctcggagccc

SEQ ID NO: 3088383 - DNA, 25 bp, Homo sapien
tatcgtctgcgggtcttcctcgtag

SEQ ID NO: 3088384 - DNA, 25 bp, Homo sapien
ctatagcggcctacgcctggagact

SEQ ID NO: 3088385 - DNA, 25 bp, Homo sapien
gcctcgagatcagctcagctgcaaa

SEQ ID NO: 3088386 - DNA, 25 bp, Homo sapien
aggctgtggcggctctccaactcca

SEQ ID NO: 3088387 - DNA, 25 bp, Homo sapien
tggcgggttccacgggggtcatctc

SEQ ID NO: 3088388 - DNA, 25 bp, Homo sapien
tcagcttttccagcctcgagatcag

SEQ ID NO: 3088389 - DNA, 25 bp, Homo sapien
aggcgctgtgcaccgcaaacccatg

SEQ ID NO: 3088390 - DNA, 25 bp, Homo sapien
cgctagcgccatggcctcatggaga

SEQ ID NO: 3088391 - DNA, 25 bp, Homo sapien
gctgctcgggacttttatgcgctag

SEQ ID NO: 3088392 - DNA, 25 bp, Homo sapien
acccatgttcgggtgtagagtggat

SEQ ID NO: 3088393 - DNA, 25 bp, Homo sapien
cgcactccgagaggccctgcttgtt

SEQ ID NO: 3088394 - DNA, 25 bp, Homo sapien
agttggtcgcactccgagaggccct

SEQ ID NO: 3088395 - DNA, 25 bp, Homo sapien
gcaggagcagttggtcgcactccga

SEQ ID NO: 3088396 - DNA, 25 bp, Homo sapien
agcagttggtcgcactccgagaggc

SEQ ID NO: 3088397 - DNA, 25 bp, Homo sapien
ggtgtctcaacactgtcctcgatct

SEQ ID NO: 3088398 - DNA, 25 bp, Homo sapien
gaggtggtggtgtctcaacactgtc

SEQ ID NO: 3088399 - DNA, 25 bp, Homo sapien
ggtggtgtctcaacactgtcctcga

SEQ ID NO: 3088400 - DNA, 25 bp, Homo sapien
ggtggtggtgtctcaacactgtcct

SEQ ID NO: 3088401 - DNA, 25 bp, Homo sapien
gtagcagaacactgctgagcttggc

SEQ ID NO: 3088402 - DNA, 25 bp, Homo sapien
agcagaacactgctgagcttggctg

SEQ ID NO: 3088403 - DNA, 25 bp, Homo sapien
tagcagaacactgctgagcttggct

SEQ ID NO: 3088404 - DNA, 25 bp, Homo sapien
tccctcttgcttagctcctttcttt

SEQ ID NO: 3088405 - DNA, 25 bp, Homo sapien
tccgcatttgataggcacagactca

SEQ ID NO: 3088406 - DNA, 25 bp, Homo sapien
gttggaaaggaacagctaccctcca

SEQ ID NO: 3088407 - DNA, 25 bp, Homo sapien
gagttggaaaggaacagctaccctc

SEQ ID NO: 3088408 - DNA, 25 bp, Homo sapien
ttctaaacacttcgttcattccgca

SEQ ID NO: 3088409 - DNA, 25 bp, Homo sapien
tcttactgcccacacgataaggagg

SEQ ID NO: 3088410 - DNA, 25 bp, Homo sapien
ttggccattggccttcacactgcga

SEQ ID NO: 3088411 - DNA, 25 bp, Homo sapien
ggccttcacactgcgatgcatttct

SEQ ID NO: 3088412 - DNA, 25 bp, Homo sapien
cccacacgataaggaggaattccat

SEQ ID NO: 3088413 - DNA, 25 bp, Homo sapien
cacatgggctactgtcatatgccat

SEQ ID NO: 3088414 - DNA, 25 bp, Homo sapien
catcacatgggctactgtcatatgc

SEQ ID NO: 3088415 - DNA, 25 bp, Homo sapien
tcacatgggctactgtcatatgcca

SEQ ID NO: 3088416 - DNA, 25 bp, Homo sapien
gcacatcacatgggctactgtcata

SEQ ID NO: 3088417 - DNA, 25 bp, Homo sapien
tgagatcccgccgacagggccacat

SEQ ID NO: 3088418 - DNA, 25 bp, Homo sapien
cttgagatcccgccgacagggccac

SEQ ID NO: 3088419 - DNA, 25 bp, Homo sapien
ttgagatcccgccgacagggccaca

SEQ ID NO: 3088420 - DNA, 25 bp, Homo sapien
gaaatagcagactcatgcacacatg

SEQ ID NO: 3088421 - DNA, 25 bp, Homo sapien
atgtcattttctggcgactttgaaa

SEQ ID NO: 3088422 - DNA, 25 bp, Homo sapien
actttgaaatagcagactcatgcac

SEQ ID NO: 3088423 - DNA, 25 bp, Homo sapien
tgcacacatgcgtccactcgcatct

SEQ ID NO: 3088424 - DNA, 25 bp, Homo sapien
ccctcccaccaaactgatgtccata

SEQ ID NO: 3088425 - DNA, 25 bp, Homo sapien
actgatgtccatacatgcacaggtg

SEQ ID NO: 3088426 - DNA, 25 bp, Homo sapien
tcctccttaatcagcaccataccct

SEQ ID NO: 3088427 - DNA, 25 bp, Homo sapien
tacatgcacaggtgcggtctgcaaa

SEQ ID NO: 3088428 - DNA, 25 bp, Homo sapien
tgataaggattaacaggatcgctcc

SEQ ID NO: 3088429 - DNA, 25 bp, Homo sapien
gaatcatccgtcagcgcatcactgg

SEQ ID NO: 3088430 - DNA, 25 bp, Homo sapien
tccgtcatggacatggaatcatccg

SEQ ID NO: 3088431 - DNA, 25 bp, Homo sapien
gatatctcactgtcgttggcgctgg

SEQ ID NO: 3088432 - DNA, 25 bp, Homo sapien
cattcctcttgtgtcaccagtgagg

SEQ ID NO: 3088433 - DNA, 25 bp, Homo sapien
cctgctgggccgcattcctcttgtg

SEQ ID NO: 3088434 - DNA, 25 bp, Homo sapien
gatctccttccagaacaaccagtgt

SEQ ID NO: 3088435 - DNA, 25 bp, Homo sapien
acaaccagtgtgcacatctcctgct

SEQ ID NO: 3088436 - DNA, 25 bp, Homo sapien
gtcggcaggctgcacgttaaggcct

SEQ ID NO: 3088437 - DNA, 25 bp, Homo sapien
tatttacaaagaccctggcatcctc

SEQ ID NO: 3088438 - DNA, 25 bp, Homo sapien
gctgcacgttaaggcctgaagtcgc

SEQ ID NO: 3088439 - DNA, 25 bp, Homo sapien
tgaagtcgcaggaggcctatttaca

SEQ ID NO: 3088440 - DNA, 25 bp, Homo sapien
atgaaaaggacccagaaaggtgaca

SEQ ID NO: 3088441 - DNA, 25 bp, Homo sapien
tggtctgtaaagatggccgtggggt

SEQ ID NO: 3088442 - DNA, 25 bp, Homo sapien
caaatgaaaaggacccagaaaggtg

SEQ ID NO: 3088443 - DNA, 25 bp, Homo sapien
gttggcaaatgaaaaggacccagaa

SEQ ID NO: 3088444 - DNA, 25 bp, Homo sapien
gctacatgctgaactctggtcttcc

SEQ ID NO: 3088445 - DNA, 25 bp, Homo sapien
tgctacatgctgaactctggtcttc

SEQ ID NO: 3088446 - DNA, 25 bp, Homo sapien
ttgctacatgctgaactctggtctt

SEQ ID NO: 3088447 - DNA, 25 bp, Homo sapien
ctacatgctgaactctggtcttcca

SEQ ID NO: 3088448 - DNA, 25 bp, Homo sapien
aatggctccgcacaaaaacgggcct

SEQ ID NO: 3088449 - DNA, 25 bp, Homo sapien
tctttgataattgaagccaagcttg

SEQ ID NO: 3088450 - DNA, 25 bp, Homo sapien
acgggcctcatcagcgagttctttc

SEQ ID NO: 3088451 - DNA, 25 bp, Homo sapien
gccaagcttgattccaatggctccg

SEQ ID NO: 3088452 - DNA, 25 bp, Homo sapien
gagaggctcaagatcaaccatctgg

SEQ ID NO: 3088453 - DNA, 25 bp, Homo sapien
cctgagaggctcaagatcaaccatc

SEQ ID NO: 3088454 - DNA, 25 bp, Homo sapien
gctcaagatcaaccatctggtgccc

SEQ ID NO: 3088455 - DNA, 25 bp, Homo sapien
gaggctcaagatcaaccatctggtg

SEQ ID NO: 3088456 - DNA, 25 bp, Homo sapien
ttcctgctgctgggcactagagacc

SEQ ID NO: 3088457 - DNA, 25 bp, Homo sapien
tgctgctgggcactagagaccacat

SEQ ID NO: 3088458 - DNA, 25 bp, Homo sapien
gctgctgggcactagagaccacatc

SEQ ID NO: 3088459 - DNA, 25 bp, Homo sapien
cctgctgctgggcactagagaccac

SEQ ID NO: 3088460 - DNA, 25 bp, Homo sapien
tcttatgtaggtcttggtggcaggc

SEQ ID NO: 3088461 - DNA, 25 bp, Homo sapien
tctgcgcctggtcaaacatgatgga

SEQ ID NO: 3088462 - DNA, 25 bp, Homo sapien
tttgctggacaagccaaccacggtt

SEQ ID NO: 3088463 - DNA, 25 bp, Homo sapien
accacggttggcgaaagtttgcact

SEQ ID NO: 3088464 - DNA, 25 bp, Homo sapien
tggctactcgtaaagttttggtatc

SEQ ID NO: 3088465 - DNA, 25 bp, Homo sapien
tccctctccaggaaagttcggaaca

SEQ ID NO: 3088466 - DNA, 25 bp, Homo sapien
caataaggagtgtaaggacttggtc

SEQ ID NO: 3088467 - DNA, 25 bp, Homo sapien
gaacaggtaagcaccgtcttgatcg

SEQ ID NO: 3088468 - DNA, 25 bp, Homo sapien
tccgggaggcaagtcaccaacatag

SEQ ID NO: 3088469 - DNA, 25 bp, Homo sapien
gggtccgggaggcaagtcaccaaca

SEQ ID NO: 3088470 - DNA, 25 bp, Homo sapien
aagtcaccaacatagcgctactcat

SEQ ID NO: 3088471 - DNA, 25 bp, Homo sapien
ggaggcaagtcaccaacatagcgct

SEQ ID NO: 3088472 - DNA, 25 bp, Homo sapien
tcagcaggggctcatctgaacctcc

SEQ ID NO: 3088473 - DNA, 25 bp, Homo sapien
ttccagttcctctcagcaatcggcg

SEQ ID NO: 3088474 - DNA, 25 bp, Homo sapien
tctctcaagtcagcaggggctcatc

SEQ ID NO: 3088475 - DNA, 25 bp, Homo sapien
agcaatcggcgtggtctctctgtct

SEQ ID NO: 3088476 - DNA, 25 bp, Homo sapien
ctgagctccctgcacacttttcggg

SEQ ID NO: 3088477 - DNA, 25 bp, Homo sapien
tcaaaagcgaaatctgagctccctg

SEQ ID NO: 3088478 - DNA, 25 bp, Homo sapien
aaaagcgaaatctgagctccctgca

SEQ ID NO: 3088479 - DNA, 25 bp, Homo sapien
cttttcaaaagcgaaatctgagctc

SEQ ID NO: 3088480 - DNA, 25 bp, Homo sapien
acgccactactgcctgtgccaagaa

SEQ ID NO: 3088481 - DNA, 25 bp, Homo sapien
agtcttatctaaccaataaacaagc

SEQ ID NO: 3088482 - DNA, 25 bp, Homo sapien
gaatcccaaactctactgatttcaa

SEQ ID NO: 3088483 - DNA, 25 bp, Homo sapien
cggatccgcgaaacctacaaaactg

SEQ ID NO: 3088484 - DNA, 25 bp, Homo sapien
cccgaccagagcctcgagccgcggg

SEQ ID NO: 3088485 - DNA, 25 bp, Homo sapien
acgctgaacccgaccagagcctcga

SEQ ID NO: 3088486 - DNA, 25 bp, Homo sapien
atctgggatgggtgcacgctgaacc

SEQ ID NO: 3088487 - DNA, 25 bp, Homo sapien
gtgcaaccccgggcgagaagccagg

SEQ ID NO: 3088488 - DNA, 25 bp, Homo sapien
tcccccggcccaaatgcaactgaac

SEQ ID NO: 3088489 - DNA, 25 bp, Homo sapien
aaatgcaactgaacgcctccagagc

SEQ ID NO: 3088490 - DNA, 25 bp, Homo sapien
ctggaagacgaaggccgccgaagcc

SEQ ID NO: 3088491 - DNA, 25 bp, Homo sapien
cggtcccccggcccaaatgcaactg

SEQ ID NO: 3088492 - DNA, 25 bp, Homo sapien
acttgggccggtcctgcgcgcagac

SEQ ID NO: 3088493 - DNA, 25 bp, Homo sapien
gaggcgcccgcagaaaaagcacaga

SEQ ID NO: 3088494 - DNA, 25 bp, Homo sapien
tctgcctctccgcaaaaggggccgg

SEQ ID NO: 3088495 - DNA, 25 bp, Homo sapien
ggcgacgcgcggagtctctgcctct

SEQ ID NO: 3088496 - DNA, 25 bp, Homo sapien
cccaaaggcactcccgcgcgcactc

SEQ ID NO: 3088497 - DNA, 25 bp, Homo sapien
tcccaaaggcactcccgcgcgcact

SEQ ID NO: 3088498 - DNA, 25 bp, Homo sapien
ccaaaggcactcccgcgcgcactca

SEQ ID NO: 3088499 - DNA, 25 bp, Homo sapien
caaaggcactcccgcgcgcactcac

SEQ ID NO: 3088500 - DNA, 25 bp, Homo sapien
gaaatagccggcctgccaacttcaa

SEQ ID NO: 3088501 - DNA, 25 bp, Homo sapien
gccccgcacatcaaagcgcgcggtc

SEQ ID NO: 3088502 - DNA, 25 bp, Homo sapien
actcggataagtctcctctctgggc

SEQ ID NO: 3088503 - DNA, 25 bp, Homo sapien
atccataaccgcgacagcgacgcga

SEQ ID NO: 3088504 - DNA, 25 bp, Homo sapien
ttttatgcaaaagatccgagcgggc

SEQ ID NO: 3088505 - DNA, 25 bp, Homo sapien
gctttcaacgcaggtcctgtttcca

SEQ ID NO: 3088506 - DNA, 25 bp, Homo sapien
ttcagagcgaaagccaccggccggg

SEQ ID NO: 3088507 - DNA, 25 bp, Homo sapien
caacaatcccgggttcagagcgaaa

SEQ ID NO: 3088508 - DNA, 25 bp, Homo sapien
ccggctctcgggctgttactgagtt

SEQ ID NO: 3088509 - DNA, 25 bp, Homo sapien
tctcgggctgttactgagttgccag

SEQ ID NO: 3088510 - DNA, 25 bp, Homo sapien
ctgttactgagttgccaggacctta

SEQ ID NO: 3088511 - DNA, 25 bp, Homo sapien
ggccccgaaatccatcgctctgagg

SEQ ID NO: 3088512 - DNA, 25 bp, Homo sapien
aaaacctgcctttcggtgcccatgg

SEQ ID NO: 3088513 - DNA, 25 bp, Homo sapien
tctggactctggctcgtgggtgcca

SEQ ID NO: 3088514 - DNA, 25 bp, Homo sapien
gcataaagacagcagtaccagccct

SEQ ID NO: 3088515 - DNA, 25 bp, Homo sapien
ggtgccatgacaggtggccgctcct

SEQ ID NO: 3088516 - DNA, 25 bp, Homo sapien
tgagcttgtaaccagaggagagcac

SEQ ID NO: 3088517 - DNA, 25 bp, Homo sapien
agtttggcttttaggagttggcctg

SEQ ID NO: 3088518 - DNA, 25 bp, Homo sapien
gcttttaggagttggcctgagcttg

SEQ ID NO: 3088519 - DNA, 25 bp, Homo sapien
gagttggcctgagcttgtaaccaga

SEQ ID NO: 3088520 - DNA, 25 bp, Homo sapien
gcatcttccctatggagcgactagg

SEQ ID NO: 3088521 - DNA, 25 bp, Homo sapien
caagctattgcattcgaattagagg

SEQ ID NO: 3088522 - DNA, 25 bp, Homo sapien
ggaggtaaatgtgaatagtccttgc

SEQ ID NO: 3088523 - DNA, 25 bp, Homo sapien
tcttccctatggagcgactaggaac

SEQ ID NO: 3088524 - DNA, 25 bp, Homo sapien
caggaatccattggttcacaaagca

SEQ ID NO: 3088525 - DNA, 25 bp, Homo sapien
aaaatacggtcacaaagagcagagt

SEQ ID NO: 3088526 - DNA, 25 bp, Homo sapien
cagcttcaacgggtcaagcggagtc

SEQ ID NO: 3088527 - DNA, 25 bp, Homo sapien
gaaaatgatcaagacctggcagcct

SEQ ID NO: 3088528 - DNA, 25 bp, Homo sapien
gccagagcaatttgtaagagcacag

SEQ ID NO: 3088529 - DNA, 25 bp, Homo sapien
gtaagagcacagaggtgtgaaaggc

SEQ ID NO: 3088530 - DNA, 25 bp, Homo sapien
aagagcacagaggtgtgaaaggcag

SEQ ID NO: 3088531 - DNA, 25 bp, Homo sapien
cagagcaatttgtaagagcacagag

SEQ ID NO: 3088532 - DNA, 25 bp, Homo sapien
tgcagagtggatactcggagaatgc

SEQ ID NO: 3088533 - DNA, 25 bp, Homo sapien
agagtggatactcggagaatgccct

SEQ ID NO: 3088534 - DNA, 25 bp, Homo sapien
gggaggtagggtcgctgtctgcaga

SEQ ID NO: 3088535 - DNA, 25 bp, Homo sapien
tagggtcgctgtctgcagagtggat

SEQ ID NO: 3088536 - DNA, 25 bp, Homo sapien
tggcttatctgtaacagacctgacc

SEQ ID NO: 3088537 - DNA, 25 bp, Homo sapien
gtggcctcgggacttcacccatttc

SEQ ID NO: 3088538 - DNA, 25 bp, Homo sapien
ccaggagatgccctgctctgaattt

SEQ ID NO: 3088539 - DNA, 25 bp, Homo sapien
tgctccagccgaacttggcttatct

SEQ ID NO: 3088540 - DNA, 25 bp, Homo sapien
ctgtgaaaaggcatcaacctcaaac

SEQ ID NO: 3088541 - DNA, 25 bp, Homo sapien
tgtgaaaaggcatcaacctcaaact

SEQ ID NO: 3088542 - DNA, 25 bp, Homo sapien
gtggcacgaggaaagcaggcaccca

SEQ ID NO: 3088543 - DNA, 25 bp, Homo sapien
cttttcttggggagccacggtggca

SEQ ID NO: 3088544 - DNA, 25 bp, Homo sapien
tttttgtgccacatgatcggcagga

SEQ ID NO: 3088545 - DNA, 25 bp, Homo sapien
gacaccgataatccccgttttgata

SEQ ID NO: 3088546 - DNA, 25 bp, Homo sapien
cagaacgttttgctggcgttgtggt

SEQ ID NO: 3088547 - DNA, 25 bp, Homo sapien
gcacagagggatcagaacgttttgc

SEQ ID NO: 3088548 - DNA, 25 bp, Homo sapien
ggttggtgttagtatcttcttcgga

SEQ ID NO: 3088549 - DNA, 25 bp, Homo sapien
cgttgtggttggtgttagtatcttc

SEQ ID NO: 3088550 - DNA, 25 bp, Homo sapien
taatccaaaaagaccaccttggata

SEQ ID NO: 3088551 - DNA, 25 bp, Homo sapien
ctaatccaaaaagaccaccttggat

SEQ ID NO: 3088552 - DNA, 25 bp, Homo sapien
acaagcatcagtgttcgtaggcccc

SEQ ID NO: 3088553 - DNA, 25 bp, Homo sapien
gcctgtcttgtaccctcttttgcag

SEQ ID NO: 3088554 - DNA, 25 bp, Homo sapien
aggtctgcctgtcttgtaccctctt

SEQ ID NO: 3088555 - DNA, 25 bp, Homo sapien
tgcagacaggcgtttccttaaaccc

SEQ ID NO: 3088556 - DNA, 25 bp, Homo sapien
gaaggcagctagtccgagctgctgt

SEQ ID NO: 3088557 - DNA, 25 bp, Homo sapien
agctagtccgagctgctgtttttaa

SEQ ID NO: 3088558 - DNA, 25 bp, Homo sapien
aggcagctagtccgagctgctgttt

SEQ ID NO: 3088559 - DNA, 25 bp, Homo sapien
ctgaaggcagctagtccgagctgct

SEQ ID NO: 3088560 - DNA, 25 bp, Homo sapien
tataggcaggccaacaccatgtgac

SEQ ID NO: 3088561 - DNA, 25 bp, Homo sapien
tgtgacttgagtaatctggcctaga

SEQ ID NO: 3088562 - DNA, 25 bp, Homo sapien
gatgtcacttgtgggtagccagcta

SEQ ID NO: 3088563 - DNA, 25 bp, Homo sapien
cactgctagaggaatggccaccttg

SEQ ID NO: 3088564 - DNA, 25 bp, Homo sapien
gatagaaccgggagtccatttcctg

SEQ ID NO: 3088565 - DNA, 25 bp, Homo sapien
ccagcagcctggaaataccggacaa

SEQ ID NO: 3088566 - DNA, 25 bp, Homo sapien
tcagacaacgtttggtggatcccca

SEQ ID NO: 3088567 - DNA, 25 bp, Homo sapien
caggcctgttggaaacaaactgcca

SEQ ID NO: 3088568 - DNA, 25 bp, Homo sapien
caactggaagaagccatctgcccat

SEQ ID NO: 3088569 - DNA, 25 bp, Homo sapien
catcctgtaggtatggtcctctccc

SEQ ID NO: 3088570 - DNA, 25 bp, Homo sapien
ctctattccggaggctctgttcaga

SEQ ID NO: 3088571 - DNA, 25 bp, Homo sapien
gttcagaaggtccaagccatgagtc

SEQ ID NO: 3088572 - DNA, 25 bp, Homo sapien
agctaaccgagaaccacatcagtgg

SEQ ID NO: 3088573 - DNA, 25 bp, Homo sapien
tcagtggctacaatagggctttgct

SEQ ID NO: 3088574 - DNA, 25 bp, Homo sapien
gaaggccaagttcccatccatcggt

SEQ ID NO: 3088575 - DNA, 25 bp, Homo sapien
gtaatgtcagacaagggccagcagg

SEQ ID NO: 3088576 - DNA, 25 bp, Homo sapien
catttcctcaaggatcagagagcgg

SEQ ID NO: 3088577 - DNA, 25 bp, Homo sapien
ttttctagtcggtgaactcgggcca

SEQ ID NO: 3088578 - DNA, 25 bp, Homo sapien
cttggcattgcgtggtctcttagga

SEQ ID NO: 3088579 - DNA, 25 bp, Homo sapien
gctcttccaaatgcctaagtcggcc

SEQ ID NO: 3088580 - DNA, 25 bp, Homo sapien
cactgcctttaatcctacagcaacc

SEQ ID NO: 3088581 - DNA, 25 bp, Homo sapien
tcctcattgccatcgctcctgtcgc

SEQ ID NO: 3088582 - DNA, 25 bp, Homo sapien
tgccatcgctcctgtcgccgtgtgt

SEQ ID NO: 3088583 - DNA, 25 bp, Homo sapien
tcattgccatcgctcctgtcgccgt

SEQ ID NO: 3088584 - DNA, 25 bp, Homo sapien
gctggcagacacgactgcacaagtt

SEQ ID NO: 3088585 - DNA, 25 bp, Homo sapien
cgactgcacaagttcttatgagaag

SEQ ID NO: 3088586 - DNA, 25 bp, Homo sapien
aagtgggtatctgggagagcttccc

SEQ ID NO: 3088587 - DNA, 25 bp, Homo sapien
gacacgactgcacaagttcttatga

SEQ ID NO: 3088588 - DNA, 25 bp, Homo sapien
gatgtgttccgttcattcccaatgc

SEQ ID NO: 3088589 - DNA, 25 bp, Homo sapien
ggcaaggatgtgttccgttcattcc

SEQ ID NO: 3088590 - DNA, 25 bp, Homo sapien
gcagaggcaaggatgtgttccgttc

SEQ ID NO: 3088591 - DNA, 25 bp, Homo sapien
ccaatgcaaggggtaatgagagcaa

SEQ ID NO: 3088592 - DNA, 25 bp, Homo sapien
caaaccttgatctagtggccagttt

SEQ ID NO: 3088593 - DNA, 25 bp, Homo sapien
gcggcaaccaaaccttgatctagtg

SEQ ID NO: 3088594 - DNA, 25 bp, Homo sapien
cagaaaaggcttcaaagcggcaacc

SEQ ID NO: 3088595 - DNA, 25 bp, Homo sapien
gcttcaaagcggcaaccaaaccttg

SEQ ID NO: 3088596 - DNA, 25 bp, Homo sapien
tctaacctcgcaaataatgggaaag

SEQ ID NO: 3088597 - DNA, 25 bp, Homo sapien
taacctcgcaaataatgggaaaggc

SEQ ID NO: 3088598 - DNA, 25 bp, Homo sapien
aaatggtaactctaacctcgcaaat

SEQ ID NO: 3088599 - DNA, 25 bp, Homo sapien
taactctaacctcgcaaataatggg

SEQ ID NO: 3088600 - DNA, 25 bp, Homo sapien
gcagaaaagtggcaccacttttacg

SEQ ID NO: 3088601 - DNA, 25 bp, Homo sapien
aaaatcccaagtccatgctaccaac

SEQ ID NO: 3088602 - DNA, 25 bp, Homo sapien
tacgataccagccaccgaaaaatcc

SEQ ID NO: 3088603 - DNA, 25 bp, Homo sapien
tggcaccacttttacgataccagcc

SEQ ID NO: 3088604 - DNA, 25 bp, Homo sapien
tgcaacttggtctcaacttctcttt

SEQ ID NO: 3088605 - DNA, 25 bp, Homo sapien
ctaactgacatgctttaaagttgca

SEQ ID NO: 3088606 - DNA, 25 bp, Homo sapien
ctctctcactgttcggtctctgcga

SEQ ID NO: 3088607 - DNA, 25 bp, Homo sapien
tctgcgatcgactagctaactgaca

SEQ ID NO: 3088608 - DNA, 25 bp, Homo sapien
taaaagagaaatccagggctggatt

SEQ ID NO: 3088609 - DNA, 25 bp, Homo sapien
aaaagagaaatccagggctggattc

SEQ ID NO: 3088610 - DNA, 25 bp, Homo sapien
tctgcatgaagtgaatgtgttcctc

SEQ ID NO: 3088611 - DNA, 25 bp, Homo sapien
ggttttaggcaaagtacctgacagc

SEQ ID NO: 3088612 - DNA, 25 bp, Homo sapien
cactataaagatgtgcggatttgcc

SEQ ID NO: 3088613 - DNA, 25 bp, Homo sapien
ggatttaccatcactctcgcgtgca

SEQ ID NO: 3088614 - DNA, 25 bp, Homo sapien
tgtcaggttagtgacagctgccgtc

SEQ ID NO: 3088615 - DNA, 25 bp, Homo sapien
ttgatgtcaggttagtgacagctgc

SEQ ID NO: 3088616 - DNA, 25 bp, Homo sapien
gatgtcaggttagtgacagctgccg

SEQ ID NO: 3088617 - DNA, 25 bp, Homo sapien
ggttgatgtcaggttagtgacagct

SEQ ID NO: 3088618 - DNA, 25 bp, Homo sapien
ccactttgaattgaccaaccatgta

SEQ ID NO: 3088619 - DNA, 25 bp, Homo sapien
tccccactttgaattgaccaaccat

SEQ ID NO: 3088620 - DNA, 25 bp, Homo sapien
ttcattccccactttgaattgacca

SEQ ID NO: 3088621 - DNA, 25 bp, Homo sapien
tgaattgaccaaccatgtatctttt

SEQ ID NO: 3088622 - DNA, 25 bp, Homo sapien
tctgtgaagttcattgttgagtggg

SEQ ID NO: 3088623 - DNA, 25 bp, Homo sapien
ttatgccccgatggctgccttctgt

SEQ ID NO: 3088624 - DNA, 25 bp, Homo sapien
ttttcttcattatgccccgatggct

SEQ ID NO: 3088625 - DNA, 25 bp, Homo sapien
ggaggttgcaaaatcagagctcaga

SEQ ID NO: 3088626 - DNA, 25 bp, Homo sapien
cgctcaactcggtaaggaatttcaa

SEQ ID NO: 3088627 - DNA, 25 bp, Homo sapien
tcaactcggtaaggaatttcaaaca

SEQ ID NO: 3088628 - DNA, 25 bp, Homo sapien
tcggtaaggaatttcaaacatgcca

SEQ ID NO: 3088629 - DNA, 25 bp, Homo sapien
ggtaaggaatttcaaacatgccaaa

SEQ ID NO: 3088630 - DNA, 25 bp, Homo sapien
cccactagtgtatgaatgatgcatg

SEQ ID NO: 3088631 - DNA, 25 bp, Homo sapien
caaacgtgattttgatcgtacgcaa

SEQ ID NO: 3088632 - DNA, 25 bp, Homo sapien
gcagttctcagcacatactcaaatg

SEQ ID NO: 3088633 - DNA, 25 bp, Homo sapien
cactttgcccaatataagcagttct

SEQ ID NO: 3088634 - DNA, 25 bp, Homo sapien
caatatccaaatcttcaaacctgct

SEQ ID NO: 3088635 - DNA, 25 bp, Homo sapien
acagcctggaaattgcatccgttgc

SEQ ID NO: 3088636 - DNA, 25 bp, Homo sapien
ctggaagaagtccacagcacagcct

SEQ ID NO: 3088637 - DNA, 25 bp, Homo sapien
gcatccgttgcattctctcgtgcag

SEQ ID NO: 3088638 - DNA, 25 bp, Homo sapien
cgcagtcacgactttctctaggttt

SEQ ID NO: 3088639 - DNA, 25 bp, Homo sapien
aaccaaaaatcgcagtcacgacttt

SEQ ID NO: 3088640 - DNA, 25 bp, Homo sapien
taacaggtatgtcaatcaaaaaata

SEQ ID NO: 3088641 - DNA, 25 bp, Homo sapien
tttctctaggtttaacaggtatgtc

SEQ ID NO: 3088642 - DNA, 25 bp, Homo sapien
gtacagactaagcactgggatgaga

SEQ ID NO: 3088643 - DNA, 25 bp, Homo sapien
catcttgttttgatagtacagacta

SEQ ID NO: 3088644 - DNA, 25 bp, Homo sapien
gacaaaggccagacaaggaggctca

SEQ ID NO: 3088645 - DNA, 25 bp, Homo sapien
tgcccggcagattctctcatcttgt

SEQ ID NO: 3088646 - DNA, 25 bp, Homo sapien
ttcctgaaggatggaagctctcttt

SEQ ID NO: 3088647 - DNA, 25 bp, Homo sapien
cctgaaggatggaagctctcttttg

SEQ ID NO: 3088648 - DNA, 25 bp, Homo sapien
cttctgccttgatatgtagtcagtt

SEQ ID NO: 3088649 - DNA, 25 bp, Homo sapien
cttgatatgtagtcagttcttcctg

SEQ ID NO: 3088650 - DNA, 25 bp, Homo sapien
acaccgtgtctttctcgctccgttg

SEQ ID NO: 3088651 - DNA, 25 bp, Homo sapien
tccacaccgtgtctttctcgctccg

SEQ ID NO: 3088652 - DNA, 25 bp, Homo sapien
tgctgcttccacaccgtgtctttct

SEQ ID NO: 3088653 - DNA, 25 bp, Homo sapien
accgtgtctttctcgctccgttgct

SEQ ID NO: 3088654 - DNA, 25 bp, Homo sapien
acatagttatgcaagggagtacagc

SEQ ID NO: 3088655 - DNA, 25 bp, Homo sapien
ggtctgaactgaaaccatggcaacg

SEQ ID NO: 3088656 - DNA, 25 bp, Homo sapien
ggttgatcccgaaacatagttatgc

SEQ ID NO: 3088657 - DNA, 25 bp, Homo sapien
aaaccatggcaacggttgatcccga

SEQ ID NO: 3088658 - DNA, 25 bp, Homo sapien
ggaaaatgccttgattctagtaatt

SEQ ID NO: 3088659 - DNA, 25 bp, Homo sapien
tctggcaacaatttggaatcagatt

SEQ ID NO: 3088660 - DNA, 25 bp, Homo sapien
cagagtatcccctaaatccttggaa

SEQ ID NO: 3088661 - DNA, 25 bp, Homo sapien
caatttggaatcagatttatttgca

SEQ ID NO: 3088662 - DNA, 25 bp, Homo sapien
cttcaagttcttgtcttagggatgc

SEQ ID NO: 3088663 - DNA, 25 bp, Homo sapien
tcttgtcttagggatgctggcatca

SEQ ID NO: 3088664 - DNA, 25 bp, Homo sapien
tcttagggatgctggcatcaatcct

SEQ ID NO: 3088665 - DNA, 25 bp, Homo sapien
tcatattcttgtcgtatgtaagtta

SEQ ID NO: 3088666 - DNA, 25 bp, Homo sapien
gctgtcatctgaggacaactcatag

SEQ ID NO: 3088667 - DNA, 25 bp, Homo sapien
gaaaaggctacccagtctgaccctg

SEQ ID NO: 3088668 - DNA, 25 bp, Homo sapien
tgtgaactccaaccatactaagctg

SEQ ID NO: 3088669 - DNA, 25 bp, Homo sapien
tgcagcctctccttgatcaggatgt

SEQ ID NO: 3088670 - DNA, 25 bp, Homo sapien
ccccacagtaaaaatctcatccagg

SEQ ID NO: 3088671 - DNA, 25 bp, Homo sapien
cagtaaaaatctcatccaggctccc

SEQ ID NO: 3088672 - DNA, 25 bp, Homo sapien
cacagtaaaaatctcatccaggctc

SEQ ID NO: 3088673 - DNA, 25 bp, Homo sapien
taaaaatctcatccaggctccctat

SEQ ID NO: 3088674 - DNA, 25 bp, Homo sapien
cattgctcaagtactgctgcacgcc

SEQ ID NO: 3088675 - DNA, 25 bp, Homo sapien
tattggagggccttggatccttgct

SEQ ID NO: 3088676 - DNA, 25 bp, Homo sapien
caggtggaggcagattcttcctgag

SEQ ID NO: 3088677 - DNA, 25 bp, Homo sapien
gatccttgctcataggtgagcttga

SEQ ID NO: 3088678 - DNA, 25 bp, Homo sapien
tgtggagcgttagcaacaggttgca

SEQ ID NO: 3088679 - DNA, 25 bp, Homo sapien
ctgagtggcaggatatcaagtgatt

SEQ ID NO: 3088680 - DNA, 25 bp, Homo sapien
tgtactatgtggagcgttagcaaca

SEQ ID NO: 3088681 - DNA, 25 bp, Homo sapien
cacttgtactatgtggagcgttagc

SEQ ID NO: 3088682 - DNA, 25 bp, Homo sapien
cagattgtcattgactactgggttt

SEQ ID NO: 3088683 - DNA, 25 bp, Homo sapien
gattgtcattgactactgggtttga

SEQ ID NO: 3088684 - DNA, 25 bp, Homo sapien
ccagattgtcattgactactgggtt

SEQ ID NO: 3088685 - DNA, 25 bp, Homo sapien
attgtcattgactactgggtttgaa

SEQ ID NO: 3088686 - DNA, 25 bp, Homo sapien
ttgcactatcttggtctgcctcttg

SEQ ID NO: 3088687 - DNA, 25 bp, Homo sapien
cttgttggtgtccttgtgttcttcc

SEQ ID NO: 3088688 - DNA, 25 bp, Homo sapien
gcttttgcactatcttggtctgcct

SEQ ID NO: 3088689 - DNA, 25 bp, Homo sapien
ggcacagcttttgcactatcttggt

SEQ ID NO: 3088690 - DNA, 25 bp, Homo sapien
attgaaggtgactcccttgagccac

SEQ ID NO: 3088691 - DNA, 25 bp, Homo sapien
aggtgactcccttgagccacagcac

SEQ ID NO: 3088692 - DNA, 25 bp, Homo sapien
ttgaaggtgactcccttgagccaca

SEQ ID NO: 3088693 - DNA, 25 bp, Homo sapien
gaaggtgactcccttgagccacagc

SEQ ID NO: 3088694 - DNA, 25 bp, Homo sapien
gggcagttcccaatcttggccccat

SEQ ID NO: 3088695 - DNA, 25 bp, Homo sapien
tgctttttctcacaacaggatggtt

SEQ ID NO: 3088696 - DNA, 25 bp, Homo sapien
cactgtgtccatctggacatctgga

SEQ ID NO: 3088697 - DNA, 25 bp, Homo sapien
gctttttctcacaacaggatggttc

SEQ ID NO: 3088698 - DNA, 25 bp, Homo sapien
tttgccactgtgtccatctggacat

SEQ ID NO: 3088699 - DNA, 25 bp, Homo sapien
tgtggtgatgtcagggagggtgcag

SEQ ID NO: 3088700 - DNA, 25 bp, Homo sapien
gtggtgatgtcagggagggtgcaga

SEQ ID NO: 3088701 - DNA, 25 bp, Homo sapien
tggtgatgtcagggagggtgcagat

SEQ ID NO: 3088702 - DNA, 25 bp, Homo sapien
ctgtggtgatgtcagggagggtgca

SEQ ID NO: 3088703 - DNA, 25 bp, Homo sapien
gcttggccagaccttcatgatgagg

SEQ ID NO: 3088704 - DNA, 25 bp, Homo sapien
tttcctggcaaggagcacttctagc

SEQ ID NO: 3088705 - DNA, 25 bp, Homo sapien
tagacaagccatatagccctgagtg

SEQ ID NO: 3088706 - DNA, 25 bp, Homo sapien
ttcattagcaaaaacgggccccaca

SEQ ID NO: 3088707 - DNA, 25 bp, Homo sapien
cagcgatccatcctaaagcacaaat

SEQ ID NO: 3088708 - DNA, 25 bp, Homo sapien
gaagccgggccaatagtgattggca

SEQ ID NO: 3088709 - DNA, 25 bp, Homo sapien
gcacaaattattgcggaagccgggc

SEQ ID NO: 3088710 - DNA, 25 bp, Homo sapien
gactcagaagaggaactcggacagc

SEQ ID NO: 3088711 - DNA, 25 bp, Homo sapien
cctcggatagtatcactcttgacac

SEQ ID NO: 3088712 - DNA, 25 bp, Homo sapien
cattggcaccaataatgtgtttaaa

SEQ ID NO: 3088713 - DNA, 25 bp, Homo sapien
taaatgcttcctcggatagtatcac

SEQ ID NO: 3088714 - DNA, 25 bp, Homo sapien
ggagatccagaaccaaaacctatga

SEQ ID NO: 3088715 - DNA, 25 bp, Homo sapien
gctattaataagtaggctggcttca

SEQ ID NO: 3088716 - DNA, 25 bp, Homo sapien
tgcagttcttaatcagcacagtggc

SEQ ID NO: 3088717 - DNA, 25 bp, Homo sapien
tcagtattgcagttcttaatcagca

SEQ ID NO: 3088718 - DNA, 25 bp, Homo sapien
gaagattctgtcatctcagtattgc

SEQ ID NO: 3088719 - DNA, 25 bp, Homo sapien
taccaattatctccttatgtttgag

SEQ ID NO: 3088720 - DNA, 25 bp, Homo sapien
gaggcaagctacgactgctctttct

SEQ ID NO: 3088721 - DNA, 25 bp, Homo sapien
tttcaaaagaggcaagctacgactg

SEQ ID NO: 3088722 - DNA, 25 bp, Homo sapien
cttatgtttgagaaggcatgtcttg

SEQ ID NO: 3088723 - DNA, 25 bp, Homo sapien
ttcatctgctctaggtgagatggag

SEQ ID NO: 3088724 - DNA, 25 bp, Homo sapien
tgagatggagaaacggcagccagtt

SEQ ID NO: 3088725 - DNA, 25 bp, Homo sapien
ctgctctaggtgagatggagaaacg

SEQ ID NO: 3088726 - DNA, 25 bp, Homo sapien
cggcagccagttagtagttcatttt

SEQ ID NO: 3088727 - DNA, 25 bp, Homo sapien
tccagagggctaatggttgaacaag

SEQ ID NO: 3088728 - DNA, 25 bp, Homo sapien
tgatctgacagtacttaaacccaga

SEQ ID NO: 3088729 - DNA, 25 bp, Homo sapien
tctttgtagcaatgtcgtgacctct

SEQ ID NO: 3088730 - DNA, 25 bp, Homo sapien
gaggacaatgatggacccaccaagc

SEQ ID NO: 3088731 - DNA, 25 bp, Homo sapien
ctgtcacggagaataacatgtggcc

SEQ ID NO: 3088732 - DNA, 25 bp, Homo sapien
gaggcaagtgttcaaactgtcacgg

SEQ ID NO: 3088733 - DNA, 25 bp, Homo sapien
tcactgcagatgagttagccaacag

SEQ ID NO: 3088734 - DNA, 25 bp, Homo sapien
tgatgcatcataccagctgtctggg

SEQ ID NO: 3088735 - DNA, 25 bp, Homo sapien
actgctcagcattccatccagaatt

SEQ ID NO: 3088736 - DNA, 25 bp, Homo sapien
cagcattccatccagaattggctgc

SEQ ID NO: 3088737 - DNA, 25 bp, Homo sapien
ctaacgaatgactgaactgctcagc

SEQ ID NO: 3088738 - DNA, 25 bp, Homo sapien
ttccatccagaattggctgctggtc

SEQ ID NO: 3088739 - DNA, 25 bp, Homo sapien
tcacgacagtccttgaagcctcttc

SEQ ID NO: 3088740 - DNA, 25 bp, Homo sapien
ctagatcacgacagtccttgaagcc

SEQ ID NO: 3088741 - DNA, 25 bp, Homo sapien
tccctgtgccttggtgagggtatct

SEQ ID NO: 3088742 - DNA, 25 bp, Homo sapien
gatcacgacagtccttgaagcctct

SEQ ID NO: 3088743 - DNA, 25 bp, Homo sapien
gctattgtcactacaaagatgaaag

SEQ ID NO: 3088744 - DNA, 25 bp, Homo sapien
catctcttggttacaaagattatga

SEQ ID NO: 3088745 - DNA, 25 bp, Homo sapien
gaagatatcaggaattagtgtaaga

SEQ ID NO: 3088746 - DNA, 25 bp, Homo sapien
tacccatgggtatttcctgacattt

SEQ ID NO: 3088747 - DNA, 25 bp, Homo sapien
tacagtgtctgtcatcttgtcagca

SEQ ID NO: 3088748 - DNA, 25 bp, Homo sapien
tctctgcccatggaaagtcaatggc

SEQ ID NO: 3088749 - DNA, 25 bp, Homo sapien
tgaatactcttctactactgtgtga

SEQ ID NO: 3088750 - DNA, 25 bp, Homo sapien
tgtcatggaaggagcaaaagtttgg

SEQ ID NO: 3088751 - DNA, 25 bp, Homo sapien
taggtcattagctattgtcacagcc

SEQ ID NO: 3088752 - DNA, 25 bp, Homo sapien
ccagggactgggtatgccaggctaa

SEQ ID NO: 3088753 - DNA, 25 bp, Homo sapien
tatactcagttctttagccagggac

SEQ ID NO: 3088754 - DNA, 25 bp, Homo sapien
tatgtgaaccatgggtgggatattc

SEQ ID NO: 3088755 - DNA, 25 bp, Homo sapien
gtaattttttctctgcacatcgcac

SEQ ID NO: 3088756 - DNA, 25 bp, Homo sapien
cctgtgactccaattctttgtgttg

SEQ ID NO: 3088757 - DNA, 25 bp, Homo sapien
gtgactccaattctttgtgttgtaa

SEQ ID NO: 3088758 - DNA, 25 bp, Homo sapien
ttcctgtgactccaattctttgtgt

SEQ ID NO: 3088759 - DNA, 25 bp, Homo sapien
ctgattagaacggttttctaattca

SEQ ID NO: 3088760 - DNA, 25 bp, Homo sapien
gattagaacggttttctaattcatc

SEQ ID NO: 3088761 - DNA, 25 bp, Homo sapien
tagaacggttttctaattcatcttg

SEQ ID NO: 3088762 - DNA, 25 bp, Homo sapien
gaacggttttctaattcatcttgta

SEQ ID NO: 3088763 - DNA, 25 bp, Homo sapien
caaattgaatatgtttgtgctactc

SEQ ID NO: 3088764 - DNA, 25 bp, Homo sapien
tatgtttgtgctactccatgctgcc

SEQ ID NO: 3088765 - DNA, 25 bp, Homo sapien
gtttgtgctactccatgctgcctct

SEQ ID NO: 3088766 - DNA, 25 bp, Homo sapien
tgaatatgtttgtgctactccatgc

SEQ ID NO: 3088767 - DNA, 25 bp, Homo sapien
tgtagttctgcgtcaattaaacaag

SEQ ID NO: 3088768 - DNA, 25 bp, Homo sapien
tcttgtagttctgcgtcaattaaac

SEQ ID NO: 3088769 - DNA, 25 bp, Homo sapien
tagttctgcgtcaattaaacaagaa

SEQ ID NO: 3088770 - DNA, 25 bp, Homo sapien
ttttctcttgtagttctgcgtcaat

SEQ ID NO: 3088771 - DNA, 25 bp, Homo sapien
tacaaagactaattcacacatgccg

SEQ ID NO: 3088772 - DNA, 25 bp, Homo sapien
gagggaggacccataagccattcat

SEQ ID NO: 3088773 - DNA, 25 bp, Homo sapien
ggaatttcctcgtctggccaggatg

SEQ ID NO: 3088774 - DNA, 25 bp, Homo sapien
caaactgtgtatttctcctccgtga

SEQ ID NO: 3088775 - DNA, 25 bp, Homo sapien
aatcccttcctaaactagcttcatg

SEQ ID NO: 3088776 - DNA, 25 bp, Homo sapien
actccactctacgtcctgatttctg

SEQ ID NO: 3088777 - DNA, 25 bp, Homo sapien
taagattagcatcctgcaccctgca

SEQ ID NO: 3088778 - DNA, 25 bp, Homo sapien
ctgcatcctggcatgtaggatgtgt

SEQ ID NO: 3088779 - DNA, 25 bp, Homo sapien
tggaaataggatccttgcagacata

SEQ ID NO: 3088780 - DNA, 25 bp, Homo sapien
ttgcagacataatcagacgaggtca

SEQ ID NO: 3088781 - DNA, 25 bp, Homo sapien
taggatccttgcagacataatcaga

SEQ ID NO: 3088782 - DNA, 25 bp, Homo sapien
acataatcagacgaggtcaccctgg

SEQ ID NO: 3088783 - DNA, 25 bp, Homo sapien
taggattctgtgatatctggagcca

SEQ ID NO: 3088784 - DNA, 25 bp, Homo sapien
tcctgtttaatgttcagctgacaca

SEQ ID NO: 3088785 - DNA, 25 bp, Homo sapien
gagccaatactcatgaaggaagaag

SEQ ID NO: 3088786 - DNA, 25 bp, Homo sapien
cgtttaaaccacttagaatgagagg

SEQ ID NO: 3088787 - DNA, 25 bp, Homo sapien
ggttggtgttgatgtgtttaaagct

SEQ ID NO: 3088788 - DNA, 25 bp, Homo sapien
taaggttggtgttgatgtgtttaaa

SEQ ID NO: 3088789 - DNA, 25 bp, Homo sapien
ttggtgttgatgtgtttaaagctgc

SEQ ID NO: 3088790 - DNA, 25 bp, Homo sapien
aggttggtgttgatgtgtttaaagc

SEQ ID NO: 3088791 - DNA, 25 bp, Homo sapien
tcttcccaacgttactcagattgcc

SEQ ID NO: 3088792 - DNA, 25 bp, Homo sapien
cgttactcagattgcctgcaacagg

SEQ ID NO: 3088793 - DNA, 25 bp, Homo sapien
ctaactcttcccaacgttactcaga

SEQ ID NO: 3088794 - DNA, 25 bp, Homo sapien
caacgttactcagattgcctgcaac

SEQ ID NO: 3088795 - DNA, 25 bp, Homo sapien
tctcatcttcaaacttttgtctaac

SEQ ID NO: 3088796 - DNA, 25 bp, Homo sapien
ctcatcttcaaacttttgtctaaca

SEQ ID NO: 3088797 - DNA, 25 bp, Homo sapien
tcttcaaacttttgtctaacatcct

SEQ ID NO: 3088798 - DNA, 25 bp, Homo sapien
catcttcaaacttttgtctaacatc

SEQ ID NO: 3088799 - DNA, 25 bp, Homo sapien
gatttggcaagcttctgagtgtatt

SEQ ID NO: 3088800 - DNA, 25 bp, Homo sapien
atttggcaagcttctgagtgtattc

SEQ ID NO: 3088801 - DNA, 25 bp, Homo sapien
aagatttggcaagcttctgagtgta

SEQ ID NO: 3088802 - DNA, 25 bp, Homo sapien
agatttggcaagcttctgagtgtat

SEQ ID NO: 3088803 - DNA, 25 bp, Homo sapien
tgtacatgaacacatacacagtgac

SEQ ID NO: 3088804 - DNA, 25 bp, Homo sapien
acatgtacatgaacacatacacagt

SEQ ID NO: 3088805 - DNA, 25 bp, Homo sapien
tgaaaaacacatgtacatgaacaca

SEQ ID NO: 3088806 - DNA, 25 bp, Homo sapien
ctgaaaaacacatgtacatgaacac

SEQ ID NO: 3088807 - DNA, 25 bp, Homo sapien
cagctgcaccgcccttctggggcag

SEQ ID NO: 3088808 - DNA, 25 bp, Homo sapien
agctgcaccgcccttctggggcagc

SEQ ID NO: 3088809 - DNA, 25 bp, Homo sapien
gcttgtctttgatgttacgccaact

SEQ ID NO: 3088810 - DNA, 25 bp, Homo sapien
tgtctttgatgttacgccaactatt

SEQ ID NO: 3088811 - DNA, 25 bp, Homo sapien
tcttggatcagtttgcccagagctg

SEQ ID NO: 3088812 - DNA, 25 bp, Homo sapien
agagtgactctcgtgcaaggctagc

SEQ ID NO: 3088813 - DNA, 25 bp, Homo sapien
catcaaggtgttcaggagagtgact

SEQ ID NO: 3088814 - DNA, 25 bp, Homo sapien
catcactgcagggtgtgttacaaag

SEQ ID NO: 3088815 - DNA, 25 bp, Homo sapien
aacaatagaagccccatataggtca

SEQ ID NO: 3088816 - DNA, 25 bp, Homo sapien
caatagaagccccatataggtcagg

SEQ ID NO: 3088817 - DNA, 25 bp, Homo sapien
gaaacaatagaagccccatataggt

SEQ ID NO: 3088818 - DNA, 25 bp, Homo sapien
aatagaagccccatataggtcaggg

SEQ ID NO: 3088819 - DNA, 25 bp, Homo sapien
gagctggtgttcacagacaggtcag

SEQ ID NO: 3088820 - DNA, 25 bp, Homo sapien
aggagctggtgttcacagacaggtc

SEQ ID NO: 3088821 - DNA, 25 bp, Homo sapien
ggagctggtgttcacagacaggtca

SEQ ID NO: 3088822 - DNA, 25 bp, Homo sapien
agcgtgtgttcaagctggccaacaa

SEQ ID NO: 3088823 - DNA, 25 bp, Homo sapien
aagactgcaggacccgtttcctgtg

SEQ ID NO: 3088824 - DNA, 25 bp, Homo sapien
tggccaacaagactgcaggacccgt

SEQ ID NO: 3088825 - DNA, 25 bp, Homo sapien
gatgagcttggcagcgtgtgttcaa

SEQ ID NO: 3088826 - DNA, 25 bp, Homo sapien
gataatcgatgtctccgtgggtgct

SEQ ID NO: 3088827 - DNA, 25 bp, Homo sapien
ggtgctgggtgcgtaggtgacatcc

SEQ ID NO: 3088828 - DNA, 25 bp, Homo sapien
gaatacaacatttcctgggtgtctg

SEQ ID NO: 3088829 - DNA, 25 bp, Homo sapien
ccaaaataatgtccaaccaaagatt

SEQ ID NO: 3088830 - DNA, 25 bp, Homo sapien
atcctggaaccaggggagtgactga

SEQ ID NO: 3088831 - DNA, 25 bp, Homo sapien
ccatcctggaaccaggggagtgact

SEQ ID NO: 3088832 - DNA, 25 bp, Homo sapien
atgccatcctggaaccaggggagtg

SEQ ID NO: 3088833 - DNA, 25 bp, Homo sapien
tgccatcctggaaccaggggagtga

SEQ ID NO: 3088834 - DNA, 25 bp, Homo sapien
ctgctgcacagccaaatggtgattc

SEQ ID NO: 3088835 - DNA, 25 bp, Homo sapien
aagcaggcacctctgactttatggc

SEQ ID NO: 3088836 - DNA, 25 bp, Homo sapien
tgctgcacagccaaatggtgattca

SEQ ID NO: 3088837 - DNA, 25 bp, Homo sapien
gctgacttgccgcttccatctaagc

SEQ ID NO: 3088838 - DNA, 25 bp, Homo sapien
tgccacctgctgacttgccgcttcc

SEQ ID NO: 3088839 - DNA, 25 bp, Homo sapien
gacttgccgcttccatctaagctgt

SEQ ID NO: 3088840 - DNA, 25 bp, Homo sapien
ctgctgacttgccgcttccatctaa

SEQ ID NO: 3088841 - DNA, 25 bp, Homo sapien
aaggtccttcgtgataaggagccca

SEQ ID NO: 3088842 - DNA, 25 bp, Homo sapien
tactcaaggtccttcgtgataagga

SEQ ID NO: 3088843 - DNA, 25 bp, Homo sapien
cagtccccaccctggtactcaaggt

SEQ ID NO: 3088844 - DNA, 25 bp, Homo sapien
caccctggtactcaaggtccttcgt

SEQ ID NO: 3088845 - DNA, 25 bp, Homo sapien
gtctctttcaaacaccacctttatc

SEQ ID NO: 3088846 - DNA, 25 bp, Homo sapien
cagtctatctatacttgtaccagtg

SEQ ID NO: 3088847 - DNA, 25 bp, Homo sapien
ccaaatttctatggcgtgtgtcaga

SEQ ID NO: 3088848 - DNA, 25 bp, Homo sapien
gggattataagcaaagctgctacac

SEQ ID NO: 3088849 - DNA, 25 bp, Homo sapien
tgtaccagtgccaaactactaacgt

SEQ ID NO: 3088850 - DNA, 25 bp, Homo sapien
cacggatctatgatgggaactgaga

SEQ ID NO: 3088851 - DNA, 25 bp, Homo sapien
agggatcagggcctgattcaaatcc

SEQ ID NO: 3088852 - DNA, 25 bp, Homo sapien
gatcagggcctgattcaaatcccag

SEQ ID NO: 3088853 - DNA, 25 bp, Homo sapien
caaatcccagcacggatctatgatg

SEQ ID NO: 3088854 - DNA, 25 bp, Homo sapien
gggcctctatattcttcctcgagtg

SEQ ID NO: 3088855 - DNA, 25 bp, Homo sapien
gtgctcccaacagttagaaagcctt

SEQ ID NO: 3088856 - DNA, 25 bp, Homo sapien
tatattcttcctcgagtgctcccaa

SEQ ID NO: 3088857 - DNA, 25 bp, Homo sapien
ttcctcgagtgctcccaacagttag

SEQ ID NO: 3088858 - DNA, 25 bp, Homo sapien
ggatattaagactgatgatcagtac

SEQ ID NO: 3088859 - DNA, 25 bp, Homo sapien
gagcagcataacatctggagtcata

SEQ ID NO: 3088860 - DNA, 25 bp, Homo sapien
tggcttccacaagagtgactggttc

SEQ ID NO: 3088861 - DNA, 25 bp, Homo sapien
agcagcataacatctggagtcatac

SEQ ID NO: 3088862 - DNA, 25 bp, Homo sapien
cttggcttccacaagagtgactggt

SEQ ID NO: 3088863 - DNA, 25 bp, Homo sapien
gcccggacacaacttgttgatattc

SEQ ID NO: 3088864 - DNA, 25 bp, Homo sapien
aagcccggacacaacttgttgatat

SEQ ID NO: 3088865 - DNA, 25 bp, Homo sapien
caagcccggacacaacttgttgata

SEQ ID NO: 3088866 - DNA, 25 bp, Homo sapien
ccggacacaacttgttgatattcat

SEQ ID NO: 3088867 - DNA, 25 bp, Homo sapien
acaatggtagcttctggacatagat

SEQ ID NO: 3088868 - DNA, 25 bp, Homo sapien
gatgtccactgattacaatggtagc

SEQ ID NO: 3088869 - DNA, 25 bp, Homo sapien
gattacaatggtagcttctggacat

SEQ ID NO: 3088870 - DNA, 25 bp, Homo sapien
gagatgtccactgattacaatggta

SEQ ID NO: 3088871 - DNA, 25 bp, Homo sapien
aaagctactgacatccttgaagtgc

SEQ ID NO: 3088872 - DNA, 25 bp, Homo sapien
tctgatgaactatgtgaccatggtt

SEQ ID NO: 3088873 - DNA, 25 bp, Homo sapien
tccagtactataatcgcagaacaga

SEQ ID NO: 3088874 - DNA, 25 bp, Homo sapien
acagaatttggaaaaatccgagaat

SEQ ID NO: 3088875 - DNA, 25 bp, Homo sapien
ttactaactgccttttcttccatag

SEQ ID NO: 3088876 - DNA, 25 bp, Homo sapien
tttcaatattactaactgccttttc

SEQ ID NO: 3088877 - DNA, 25 bp, Homo sapien
ctttttcaatattactaactgcctt

SEQ ID NO: 3088878 - DNA, 25 bp, Homo sapien
atattactaactgccttttcttcca

SEQ ID NO: 3088879 - DNA, 25 bp, Homo sapien
cgtatgtttgaagccccatatcgac

SEQ ID NO: 3088880 - DNA, 25 bp, Homo sapien
tgtttgaagccccatatcgacacaa

SEQ ID NO: 3088881 - DNA, 25 bp, Homo sapien
gtttgaagccccatatcgacacaaa

SEQ ID NO: 3088882 - DNA, 25 bp, Homo sapien
tgaagccccatatcgacacaaaatt

SEQ ID NO: 3088883 - DNA, 25 bp, Homo sapien
tgctacttgttgtataaactcagtc

SEQ ID NO: 3088884 - DNA, 25 bp, Homo sapien
ctacttgttgtataaactcagtcaa

SEQ ID NO: 3088885 - DNA, 25 bp, Homo sapien
catgctacttgttgtataaactcag

SEQ ID NO: 3088886 - DNA, 25 bp, Homo sapien
ataaactcagtcaacaaattaaaag

SEQ ID NO: 3088887 - DNA, 25 bp, Homo sapien
caatactactgtttggtgaaatcaa

SEQ ID NO: 3088888 - DNA, 25 bp, Homo sapien
tgtttccagagggttataagtatct

SEQ ID NO: 3088889 - DNA, 25 bp, Homo sapien
tactggtgcctaaaacatgccaggc

SEQ ID NO: 3088890 - DNA, 25 bp, Homo sapien
ccagtctcaattagggtgctatagt

SEQ ID NO: 3088891 - DNA, 25 bp, Homo sapien
tccaaaacgaccctaagagctccaa

SEQ ID NO: 3088892 - DNA, 25 bp, Homo sapien
caaaacgaccctaagagctccaaga

SEQ ID NO: 3088893 - DNA, 25 bp, Homo sapien
tcattgctccaaaacgaccctaaga

SEQ ID NO: 3088894 - DNA, 25 bp, Homo sapien
tgctccaaaacgaccctaagagctc

SEQ ID NO: 3088895 - DNA, 25 bp, Homo sapien
ttatatattatctccacaagaaaac

SEQ ID NO: 3088896 - DNA, 25 bp, Homo sapien
aacaaccagattaaaatgaaatact

SEQ ID NO: 3088897 - DNA, 25 bp, Homo sapien
tatatattatctccacaagaaaaca

SEQ ID NO: 3088898 - DNA, 25 bp, Homo sapien
aaccagattaaaatgaaatactaca

SEQ ID NO: 3088899 - DNA, 25 bp, Homo sapien
tacactttagagtttatatagaata

SEQ ID NO: 3088900 - DNA, 25 bp, Homo sapien
aaatttctacagatgccaatgcaaa

SEQ ID NO: 3088901 - DNA, 25 bp, Homo sapien
cagcttgaaaagtcaaagtgacttt

SEQ ID NO: 3088902 - DNA, 25 bp, Homo sapien
gactttcaagcattgttgtttaaac

SEQ ID NO: 3088903 - DNA, 25 bp, Homo sapien
ggtcccaaaaccaagctgtctgctc

SEQ ID NO: 3088904 - DNA, 25 bp, Homo sapien
caaagaagaagcgtatgcattattt

SEQ ID NO: 3088905 - DNA, 25 bp, Homo sapien
tctgctctgtatgctctcatagctt

SEQ ID NO: 3088906 - DNA, 25 bp, Homo sapien
aagcgtatgcattatttcctcagtg

SEQ ID NO: 3088907 - DNA, 25 bp, Homo sapien
cagtagttttggtatactcacaaag

SEQ ID NO: 3088908 - DNA, 25 bp, Homo sapien
aaccatcactacagtctaagttgtt

SEQ ID NO: 3088909 - DNA, 25 bp, Homo sapien
acaaccatcactacagtctaagttg

SEQ ID NO: 3088910 - DNA, 25 bp, Homo sapien
ccatcactacagtctaagttgtttt

SEQ ID NO: 3088911 - DNA, 25 bp, Homo sapien
tccgatttttcctaagctcatagct

SEQ ID NO: 3088912 - DNA, 25 bp, Homo sapien
taaaagatcccgcttcctacagacc

SEQ ID NO: 3088913 - DNA, 25 bp, Homo sapien
tcctcgtgttatcccctttgactgc

SEQ ID NO: 3088914 - DNA, 25 bp, Homo sapien
taccgtctgacattcttccgatttt

SEQ ID NO: 3088915 - DNA, 25 bp, Homo sapien
tttgaggttagattttcctgtatcc

SEQ ID NO: 3088916 - DNA, 25 bp, Homo sapien
tctctttgaggttagattttcctgt

SEQ ID NO: 3088917 - DNA, 25 bp, Homo sapien
cctcagaggcttcaaacttcctgcc

SEQ ID NO: 3088918 - DNA, 25 bp, Homo sapien
tcttctctttgaggttagattttcc

SEQ ID NO: 3088919 - DNA, 25 bp, Homo sapien
cttctctcatctctatcagtctcag

SEQ ID NO: 3088920 - DNA, 25 bp, Homo sapien
ctatcagtctcagggcttggttttc

SEQ ID NO: 3088921 - DNA, 25 bp, Homo sapien
ctcatctctatcagtctcagggctt

SEQ ID NO: 3088922 - DNA, 25 bp, Homo sapien
tcatctctatcagtctcagggcttg

SEQ ID NO: 3088923 - DNA, 25 bp, Homo sapien
cagatggatggtctaaactcagaga

SEQ ID NO: 3088924 - DNA, 25 bp, Homo sapien
gcagatggatggtctaaactcagag

SEQ ID NO: 3088925 - DNA, 25 bp, Homo sapien
ttaagatctcagaagcagtgatgag

SEQ ID NO: 3088926 - DNA, 25 bp, Homo sapien
tcgttgacccccattaagatctcag

SEQ ID NO: 3088927 - DNA, 25 bp, Homo sapien
cttcgttgacccccattaagatctc

SEQ ID NO: 3088928 - DNA, 25 bp, Homo sapien
cattaagatctcagaagcagtgatg

SEQ ID NO: 3088929 - DNA, 25 bp, Homo sapien
caggcagaacttctaacaagaagcc

SEQ ID NO: 3088930 - DNA, 25 bp, Homo sapien
cccagagggttagagtgtctgagat

SEQ ID NO: 3088931 - DNA, 25 bp, Homo sapien
ctgtagggcaggcagaacttctaac

SEQ ID NO: 3088932 - DNA, 25 bp, Homo sapien
ccctcccctgatagaaaggtgactt

SEQ ID NO: 3088933 - DNA, 25 bp, Homo sapien
cacagaatggctaaatggatttaaa

SEQ ID NO: 3088934 - DNA, 25 bp, Homo sapien
tatacctgcacccaacactatagca

SEQ ID NO: 3088935 - DNA, 25 bp, Homo sapien
gagactgactgcaatgcaataatag

SEQ ID NO: 3088936 - DNA, 25 bp, Homo sapien
tcaactgtacgctgtcttcaagaaa

SEQ ID NO: 3088937 - DNA, 25 bp, Homo sapien
cctgtcatagtcaagaaagctttac

SEQ ID NO: 3088938 - DNA, 25 bp, Homo sapien
taacccctgtcatagtcaagaaagc

SEQ ID NO: 3088939 - DNA, 25 bp, Homo sapien
tgtcatagtcaagaaagctttacaa

SEQ ID NO: 3088940 - DNA, 25 bp, Homo sapien
cccctgtcatagtcaagaaagcttt

SEQ ID NO: 3088941 - DNA, 25 bp, Homo sapien
gaatttctcagtagattatcattct

SEQ ID NO: 3088942 - DNA, 25 bp, Homo sapien
tgaatacaaagatgtatcatatcct

SEQ ID NO: 3088943 - DNA, 25 bp, Homo sapien
tgtctcaataaagattaatgctatg

SEQ ID NO: 3088944 - DNA, 25 bp, Homo sapien
catatcctacccaaagtatttataa

SEQ ID NO: 3088945 - DNA, 25 bp, Homo sapien
ggacaaaaaccgaactcatcgcact

SEQ ID NO: 3088946 - DNA, 25 bp, Homo sapien
ccaactggacaaaaaccgaactcat

SEQ ID NO: 3088947 - DNA, 25 bp, Homo sapien
agatatcatcatatggactctgagg

SEQ ID NO: 3088948 - DNA, 25 bp, Homo sapien
aaaaccgaactcatcgcactcaaca

SEQ ID NO: 3088949 - DNA, 25 bp, Homo sapien
tcagcagcatgagtctttttcagct

SEQ ID NO: 3088950 - DNA, 25 bp, Homo sapien
catgttcccttgtagccctttgctt

SEQ ID NO: 3088951 - DNA, 25 bp, Homo sapien
gccttcagtttattgacgacaatct

SEQ ID NO: 3088952 - DNA, 25 bp, Homo sapien
gaagaagaccaagctctaccagctg

SEQ ID NO: 3088953 - DNA, 25 bp, Homo sapien
tagctatccagcttctattctcctc

SEQ ID NO: 3088954 - DNA, 25 bp, Homo sapien
ctgcagtactgagattactagattt

SEQ ID NO: 3088955 - DNA, 25 bp, Homo sapien
acacctaagtaagttctagcaggaa

SEQ ID NO: 3088956 - DNA, 25 bp, Homo sapien
tatcccccagcacacctaagtaagt

SEQ ID NO: 3088957 - DNA, 25 bp, Homo sapien
tataacatcatacccactggacatg

SEQ ID NO: 3088958 - DNA, 25 bp, Homo sapien
ttttatgagaacaggcacagccaag

SEQ ID NO: 3088959 - DNA, 25 bp, Homo sapien
gaatactactgttccctcactgcgg

SEQ ID NO: 3088960 - DNA, 25 bp, Homo sapien
gaatggaaagtcaaacgctctctgg

SEQ ID NO: 3088961 - DNA, 25 bp, Homo sapien
aagtcccgcctttggttccacatca

SEQ ID NO: 3088962 - DNA, 25 bp, Homo sapien
tcatctggttcggagtccaagtcca

SEQ ID NO: 3088963 - DNA, 25 bp, Homo sapien
gagtccaagtccatcaaaccttttc

SEQ ID NO: 3088964 - DNA, 25 bp, Homo sapien
ttccggcaatatcactcttccttct

SEQ ID NO: 3088965 - DNA, 25 bp, Homo sapien
caggaggttatcttccggcaatatc

SEQ ID NO: 3088966 - DNA, 25 bp, Homo sapien
gggcatcccaccaggaggttatctt

SEQ ID NO: 3088967 - DNA, 25 bp, Homo sapien
cccagggcatcccaccaggaggtta

SEQ ID NO: 3088968 - DNA, 25 bp, Homo sapien
taaacaagcccggtttactgctgcc

SEQ ID NO: 3088969 - DNA, 25 bp, Homo sapien
cttcagaattaggtgagaaacagcc

SEQ ID NO: 3088970 - DNA, 25 bp, Homo sapien
tctcaggagcaaccataggactgga

SEQ ID NO: 3088971 - DNA, 25 bp, Homo sapien
cctgtgtctgtcagtaatggcccga

SEQ ID NO: 3088972 - DNA, 25 bp, Homo sapien
tctttccctccataggagatctcat

SEQ ID NO: 3088973 - DNA, 25 bp, Homo sapien
tattcatccaatactttctcagaga

SEQ ID NO: 3088974 - DNA, 25 bp, Homo sapien
catccaatactttctcagagataat

SEQ ID NO: 3088975 - DNA, 25 bp, Homo sapien
atattcctagtaatttcttcgaggc

SEQ ID NO: 3088976 - DNA, 25 bp, Homo sapien
cagagataatttctgccaatattcc

SEQ ID NO: 3088977 - DNA, 25 bp, Homo sapien
tattggcagcgcgaagctgtttttc

SEQ ID NO: 3088978 - DNA, 25 bp, Homo sapien
caatttcccgttcatggtctcggac

SEQ ID NO: 3088979 - DNA, 25 bp, Homo sapien
gattttcgtgctccatattggcagc

SEQ ID NO: 3088980 - DNA, 25 bp, Homo sapien
gctgctgtaataggtgcgtcttctc

SEQ ID NO: 3088981 - DNA, 25 bp, Homo sapien
gaagttcctaaaagcatcggcctcc

SEQ ID NO: 3088982 - DNA, 25 bp, Homo sapien
catttcagaacagacgaaatccttc

SEQ ID NO: 3088983 - DNA, 25 bp, Homo sapien
caacacatgcagaacttgaaattca

SEQ ID NO: 3088984 - DNA, 25 bp, Homo sapien
gatgacgtcttcattccaattgaac

SEQ ID NO: 3088985 - DNA, 25 bp, Homo sapien
caaaataatcttgaaggtaatcaaa

SEQ ID NO: 3088986 - DNA, 25 bp, Homo sapien
agaaagtagggagagtggttctcca

SEQ ID NO: 3088987 - DNA, 25 bp, Homo sapien
tgtaaaaacgggttatagctagaga

SEQ ID NO: 3088988 - DNA, 25 bp, Homo sapien
tctacatagccctggtgtaaaaacg

SEQ ID NO: 3088989 - DNA, 25 bp, Homo sapien
tgtggctcccagattagatgtttgc

SEQ ID NO: 3088990 - DNA, 25 bp, Homo sapien
caacagttcagtttacgcatggaag

SEQ ID NO: 3088991 - DNA, 25 bp, Homo sapien
ttaatgttgctgtgataaccgctgt

SEQ ID NO: 3088992 - DNA, 25 bp, Homo sapien
aaagcaggcagtgtgtcaagaacag

SEQ ID NO: 3088993 - DNA, 25 bp, Homo sapien
agagcagaaggctggaaacacagct

SEQ ID NO: 3088994 - DNA, 25 bp, Homo sapien
ggaagcaggcgctatctcctgtggt

SEQ ID NO: 3088995 - DNA, 25 bp, Homo sapien
aagcaaggctggaagcaggcgctat

SEQ ID NO: 3088996 - DNA, 25 bp, Homo sapien
gattagcaagctgatagatgaagca

SEQ ID NO: 3088997 - DNA, 25 bp, Homo sapien
accgctgtctgatgtcctccagttg

SEQ ID NO: 3088998 - DNA, 25 bp, Homo sapien
ctgttgttcataccgctgtctgatg

SEQ ID NO: 3088999 - DNA, 25 bp, Homo sapien
ggatctagttagatctgcctccact

SEQ ID NO: 3089000 - DNA, 25 bp, Homo sapien
tctcacgaagagatttggatctagt

SEQ ID NO: 3089001 - DNA, 25 bp, Homo sapien
tcaaaaatcatcttacaaaacactt

SEQ ID NO: 3089002 - DNA, 25 bp, Homo sapien
caaaaatcatcttacaaaacacttt

SEQ ID NO: 3089003 - DNA, 25 bp, Homo sapien
cacacctggcttgaagtgtattaga

SEQ ID NO: 3089004 - DNA, 25 bp, Homo sapien
aattacttgttggtatacgtaagag

SEQ ID NO: 3089005 - DNA, 25 bp, Homo sapien
taagagaaagcccacgtatccatag

SEQ ID NO: 3089006 - DNA, 25 bp, Homo sapien
gatatggtgcttcaaaaattacttg

SEQ ID NO: 3089007 - DNA, 25 bp, Homo sapien
tgcaaaatggtttctgtagctttgc

SEQ ID NO: 3089008 - DNA, 25 bp, Homo sapien
aaatggtttctgtagctttgcatat

SEQ ID NO: 3089009 - DNA, 25 bp, Homo sapien
caaaatggtttctgtagctttgcat

SEQ ID NO: 3089010 - DNA, 25 bp, Homo sapien
ctagcagttgcaaaatggtttctgt

SEQ ID NO: 3089011 - DNA, 25 bp, Homo sapien
tctctgacccgattgtatggctaat

SEQ ID NO: 3089012 - DNA, 25 bp, Homo sapien
tccttccaaagcaaggtacatgctt

SEQ ID NO: 3089013 - DNA, 25 bp, Homo sapien
gtacatgcttgccattactacattt

SEQ ID NO: 3089014 - DNA, 25 bp, Homo sapien
ggatgaatcaagtggtaacatctct

SEQ ID NO: 3089015 - DNA, 25 bp, Homo sapien
gttcagttccacctgccgcttaaac

SEQ ID NO: 3089016 - DNA, 25 bp, Homo sapien
tgggcctgcaacctctgaacttcag

SEQ ID NO: 3089017 - DNA, 25 bp, Homo sapien
cagtcacacgagttagctgctcctc

SEQ ID NO: 3089018 - DNA, 25 bp, Homo sapien
ttaaactcttccagagcggcatctg

SEQ ID NO: 3089019 - DNA, 25 bp, Homo sapien
ctagaaaggttcagagaagcttcag

SEQ ID NO: 3089020 - DNA, 25 bp, Homo sapien
aagcggcaatatcacctatattcat

SEQ ID NO: 3089021 - DNA, 25 bp, Homo sapien
gatgctgacttatcctaaacttatc

SEQ ID NO: 3089022 - DNA, 25 bp, Homo sapien
ctcagtaagaatagctctaggtttc

SEQ ID NO: 3089023 - DNA, 25 bp, Homo sapien
aaggtcagtgtgcatttagagttta

SEQ ID NO: 3089024 - DNA, 25 bp, Homo sapien
gtttaggcctacaaactaatctgtg

SEQ ID NO: 3089025 - DNA, 25 bp, Homo sapien
tctgagcagagagtaggagaaccac

SEQ ID NO: 3089026 - DNA, 25 bp, Homo sapien
ctggtttcaaaatggcggcatagaa

SEQ ID NO: 3089027 - DNA, 25 bp, Homo sapien
aatattcctgaggatagccagagac

SEQ ID NO: 3089028 - DNA, 25 bp, Homo sapien
tgtctctgccttaagccacaggaaa

SEQ ID NO: 3089029 - DNA, 25 bp, Homo sapien
tgcgcccactctcaccgtggtgctg

SEQ ID NO: 3089030 - DNA, 25 bp, Homo sapien
ccgtagatggaactagtctagcgtc

SEQ ID NO: 3089031 - DNA, 25 bp, Homo sapien
caaacttctcccgtagatggaacta

SEQ ID NO: 3089032 - DNA, 25 bp, Homo sapien
tgcataacacttcggtggcagcaga

SEQ ID NO: 3089033 - DNA, 25 bp, Homo sapien
tgtcttaagctggtccacaaccatg

SEQ ID NO: 3089034 - DNA, 25 bp, Homo sapien
tggcatgggctgatcgtcctgcgct

SEQ ID NO: 3089035 - DNA, 25 bp, Homo sapien
atgggctgatcgtcctgcgctgtga

SEQ ID NO: 3089036 - DNA, 25 bp, Homo sapien
tcatgtcttaagctggtccacaacc

SEQ ID NO: 3089037 - DNA, 25 bp, Homo sapien
caacttctctacaatggcagctttc

SEQ ID NO: 3089038 - DNA, 25 bp, Homo sapien
aggctagacaacttctctacaatgg

SEQ ID NO: 3089039 - DNA, 25 bp, Homo sapien
tgaaacggaaggctagacaacttct

SEQ ID NO: 3089040 - DNA, 25 bp, Homo sapien
ggcagctttccatggaactgttgtc

SEQ ID NO: 3089041 - DNA, 25 bp, Homo sapien
tcctttatcaagttcactctgcaag

SEQ ID NO: 3089042 - DNA, 25 bp, Homo sapien
ttttcctttatcaagttcactctgc

SEQ ID NO: 3089043 - DNA, 25 bp, Homo sapien
tatcaagttcactctgcaagtcatg

SEQ ID NO: 3089044 - DNA, 25 bp, Homo sapien
caagttcactctgcaagtcatgagc

SEQ ID NO: 3089045 - DNA, 25 bp, Homo sapien
aggaagctcttccttaatggatgga

SEQ ID NO: 3089046 - DNA, 25 bp, Homo sapien
cttccttaatggatggacagccagt

SEQ ID NO: 3089047 - DNA, 25 bp, Homo sapien
agctcttccttaatggatggacagc

SEQ ID NO: 3089048 - DNA, 25 bp, Homo sapien
ccttaatggatggacagccagtgat

SEQ ID NO: 3089049 - DNA, 25 bp, Homo sapien
gtgttttaaatgacttttctccatc

SEQ ID NO: 3089050 - DNA, 25 bp, Homo sapien
ttttaaatgacttttctccatctga

SEQ ID NO: 3089051 - DNA, 25 bp, Homo sapien
ttttttcatagatgtgttttaaatg

SEQ ID NO: 3089052 - DNA, 25 bp, Homo sapien
ctccatctgaaacttattttcttga

SEQ ID NO: 3089053 - DNA, 25 bp, Homo sapien
gctgttttaattgacagacattctg

SEQ ID NO: 3089054 - DNA, 25 bp, Homo sapien
tgttttaattgacagacattctgct

SEQ ID NO: 3089055 - DNA, 25 bp, Homo sapien
gttttaattgacagacattctgctc

SEQ ID NO: 3089056 - DNA, 25 bp, Homo sapien
tgctgttttaattgacagacattct

SEQ ID NO: 3089057 - DNA, 25 bp, Homo sapien
tgctcataatcatttacaagatggt

SEQ ID NO: 3089058 - DNA, 25 bp, Homo sapien
gctgaaagagcatgttcttgtttta

SEQ ID NO: 3089059 - DNA, 25 bp, Homo sapien
tttgtaacagtttcatgttttgctc

SEQ ID NO: 3089060 - DNA, 25 bp, Homo sapien
cttctctttatgcagtgtgttacgc

SEQ ID NO: 3089061 - DNA, 25 bp, Homo sapien
tcactacacgttatctggtaacatc

SEQ ID NO: 3089062 - DNA, 25 bp, Homo sapien
ctacacgttatctggtaacatcttt

SEQ ID NO: 3089063 - DNA, 25 bp, Homo sapien
tgtaattcactacacgttatctggt

SEQ ID NO: 3089064 - DNA, 25 bp, Homo sapien
aattcactacacgttatctggtaac

SEQ ID NO: 3089065 - DNA, 25 bp, Homo sapien
ctacaagcgcatgctgccacgcccg

SEQ ID NO: 3089066 - DNA, 25 bp, Homo sapien
caatctcctgaccttgtgatctgcc

SEQ ID NO: 3089067 - DNA, 25 bp, Homo sapien
ggactacaagcgcatgctgccacgc

SEQ ID NO: 3089068 - DNA, 25 bp, Homo sapien
aatctcctgaccttgtgatctgccc

SEQ ID NO: 3089069 - DNA, 25 bp, Homo sapien
gtgatgtctatgtctggttcccgag

SEQ ID NO: 3089070 - DNA, 25 bp, Homo sapien
tctatgtctggttcccgagttaata

SEQ ID NO: 3089071 - DNA, 25 bp, Homo sapien
ccatgtgatgtctatgtctggttcc

SEQ ID NO: 3089072 - DNA, 25 bp, Homo sapien
tgtctggttcccgagttaatatgat

SEQ ID NO: 3089073 - DNA, 25 bp, Homo sapien
tccattttattcagacgcacatttg

SEQ ID NO: 3089074 - DNA, 25 bp, Homo sapien
tttattcagacgcacatttgtatcc

SEQ ID NO: 3089075 - DNA, 25 bp, Homo sapien
tgtttgcgccatgtattcactctcc

SEQ ID NO: 3089076 - DNA, 25 bp, Homo sapien
gaagatcaaacttttcctgttccat

SEQ ID NO: 3089077 - DNA, 25 bp, Homo sapien
gtggcagaagcctcttctcttcaaa

SEQ ID NO: 3089078 - DNA, 25 bp, Homo sapien
ccttgtaagtggcagaagcctcttc

SEQ ID NO: 3089079 - DNA, 25 bp, Homo sapien
gcagaagcctcttctcttcaaatac

SEQ ID NO: 3089080 - DNA, 25 bp, Homo sapien
agtggcagaagcctcttctcttcaa

SEQ ID NO: 3089081 - DNA, 25 bp, Homo sapien
agctctgcaatctggtcttctttag

SEQ ID NO: 3089082 - DNA, 25 bp, Homo sapien
tagagattccgtactttgttcacat

SEQ ID NO: 3089083 - DNA, 25 bp, Homo sapien
tagtctctctgataacttgacagtc

SEQ ID NO: 3089084 - DNA, 25 bp, Homo sapien
taacttgacagtcacgtatcagtgt

SEQ ID NO: 3089085 - DNA, 25 bp, Homo sapien
cccggcctaaaatctatctcttaat

SEQ ID NO: 3089086 - DNA, 25 bp, Homo sapien
tcatgttgtttactcctgtataaag

SEQ ID NO: 3089087 - DNA, 25 bp, Homo sapien
atgttgtttactcctgtataaagtt

SEQ ID NO: 3089088 - DNA, 25 bp, Homo sapien
gtttcatgttgtttactcctgtata

SEQ ID NO: 3089089 - DNA, 25 bp, Homo sapien
ttcatgttgtttactcctgtataaa

SEQ ID NO: 3089090 - DNA, 25 bp, Homo sapien
tgtttctgttgcagtttaagctttt

SEQ ID NO: 3089091 - DNA, 25 bp, Homo sapien
tctgttgcagtttaagcttttcttc

SEQ ID NO: 3089092 - DNA, 25 bp, Homo sapien
cttctgaacatcagcatcatgtttc

SEQ ID NO: 3089093 - DNA, 25 bp, Homo sapien
agcatcatgtttctgttgcagttta

SEQ ID NO: 3089094 - DNA, 25 bp, Homo sapien
ctctttctcacgtattcgagagaga

SEQ ID NO: 3089095 - DNA, 25 bp, Homo sapien
aactgctggattttctcaggctgaa

SEQ ID NO: 3089096 - DNA, 25 bp, Homo sapien
ggaaactgctggattttctcaggct

SEQ ID NO: 3089097 - DNA, 25 bp, Homo sapien
ttctcacgtattcgagagagaaaat

SEQ ID NO: 3089098 - DNA, 25 bp, Homo sapien
gtctcaggtatcgaggattttctat

SEQ ID NO: 3089099 - DNA, 25 bp, Homo sapien
cttctgtctcaggtatcgaggattt

SEQ ID NO: 3089100 - DNA, 25 bp, Homo sapien
tctgtctcaggtatcgaggattttc

SEQ ID NO: 3089101 - DNA, 25 bp, Homo sapien
ctgtctcaggtatcgaggattttct

SEQ ID NO: 3089102 - DNA, 25 bp, Homo sapien
tagcacccaattctgtgagtcagca

SEQ ID NO: 3089103 - DNA, 25 bp, Homo sapien
tcatggcttgaaactacaaccattt

SEQ ID NO: 3089104 - DNA, 25 bp, Homo sapien
gatcatcccaaaacttcatggcttg

SEQ ID NO: 3089105 - DNA, 25 bp, Homo sapien
ccctgacaatactaggtattggaga

SEQ ID NO: 3089106 - DNA, 25 bp, Homo sapien
tattaaggcgagcttcaatgtcact

SEQ ID NO: 3089107 - DNA, 25 bp, Homo sapien
aagattccaactattaaggcgagct

SEQ ID NO: 3089108 - DNA, 25 bp, Homo sapien
tgtcactatcatccaaagaaacagg

SEQ ID NO: 3089109 - DNA, 25 bp, Homo sapien
tcaatgtcactatcatccaaagaaa

SEQ ID NO: 3089110 - DNA, 25 bp, Homo sapien
ctaaaacagtcatgtgttggccggg

SEQ ID NO: 3089111 - DNA, 25 bp, Homo sapien
ccagagttaggcaataaagactgga

SEQ ID NO: 3089112 - DNA, 25 bp, Homo sapien
atgtaactcaagacagccagagtta

SEQ ID NO: 3089113 - DNA, 25 bp, Homo sapien
ctcttgtaactaaaagtcatgtaac

SEQ ID NO: 3089114 - DNA, 25 bp, Homo sapien
tctttggggtaatattttgtccatc

SEQ ID NO: 3089115 - DNA, 25 bp, Homo sapien
tgatctcactcggagcttcccagtg

SEQ ID NO: 3089116 - DNA, 25 bp, Homo sapien
caaggagtgtgatctcactcggagc

SEQ ID NO: 3089117 - DNA, 25 bp, Homo sapien
tctctgtgagttggactcaaggagt

SEQ ID NO: 3089118 - DNA, 25 bp, Homo sapien
tcctctgtttagtaaccttctgtca

SEQ ID NO: 3089119 - DNA, 25 bp, Homo sapien
tacagtacaatacccctagtagaga

SEQ ID NO: 3089120 - DNA, 25 bp, Homo sapien
gtctgttaggttcaactggtctatt

SEQ ID NO: 3089121 - DNA, 25 bp, Homo sapien
tctttatgtctgttaggttcaactg

SEQ ID NO: 3089122 - DNA, 25 bp, Homo sapien
cgtattacccatgaaatttctagaa

SEQ ID NO: 3089123 - DNA, 25 bp, Homo sapien
taggactacgtattacccatgaaat

SEQ ID NO: 3089124 - DNA, 25 bp, Homo sapien
gtggaagaactagatacataggact

SEQ ID NO: 3089125 - DNA, 25 bp, Homo sapien
gatacataggactacgtattaccca

SEQ ID NO: 3089126 - DNA, 25 bp, Homo sapien
aatacagagagcactacaaagacac

SEQ ID NO: 3089127 - DNA, 25 bp, Homo sapien
cccaacctggcaagacaaaccaata

SEQ ID NO: 3089128 - DNA, 25 bp, Homo sapien
cagagagcactacaaagacactcct

SEQ ID NO: 3089129 - DNA, 25 bp, Homo sapien
gcactacaaagacactcctcaagaa

SEQ ID NO: 3089130 - DNA, 25 bp, Homo sapien
gactctgcatctttaataatataaa

SEQ ID NO: 3089131 - DNA, 25 bp, Homo sapien
ttcaaaaggactctgcatctttaat

SEQ ID NO: 3089132 - DNA, 25 bp, Homo sapien
aaaaggcttcaaaaggactctgcat

SEQ ID NO: 3089133 - DNA, 25 bp, Homo sapien
ggcttcaaaaggactctgcatcttt

SEQ ID NO: 3089134 - DNA, 25 bp, Homo sapien
gatttggttcatcaaaatagatgga

SEQ ID NO: 3089135 - DNA, 25 bp, Homo sapien
tttgtgttcacttgtctccagctca

SEQ ID NO: 3089136 - DNA, 25 bp, Homo sapien
cagttggcgactgtactaaagtgtt

SEQ ID NO: 3089137 - DNA, 25 bp, Homo sapien
gcttgaaccttttgctcgtgctgga

SEQ ID NO: 3089138 - DNA, 25 bp, Homo sapien
tcggtgtgtaaaagggccttcaagc

SEQ ID NO: 3089139 - DNA, 25 bp, Homo sapien
gaaggttcgcacagctttctaatcc

SEQ ID NO: 3089140 - DNA, 25 bp, Homo sapien
caagcgcacctcgtttaagcatatg

SEQ ID NO: 3089141 - DNA, 25 bp, Homo sapien
taacaattttgcatacaggttccga

SEQ ID NO: 3089142 - DNA, 25 bp, Homo sapien
ctgtcctatgaggtaattttagaac

SEQ ID NO: 3089143 - DNA, 25 bp, Homo sapien
tcccagtcgcaaacccttgggtcag

SEQ ID NO: 3089144 - DNA, 25 bp, Homo sapien
acccttgggtcagactcttggacca

SEQ ID NO: 3089145 - DNA, 25 bp, Homo sapien
acgtcagaccgatcaaaccggctga

SEQ ID NO: 3089146 - DNA, 25 bp, Homo sapien
tcttggaccacgtcagaccgatcaa

SEQ ID NO: 3089147 - DNA, 25 bp, Homo sapien
ccggcgcaaaattccactcaagaac

SEQ ID NO: 3089148 - DNA, 25 bp, Homo sapien
ttcccaagtcgtcccggcctggatc

SEQ ID NO: 3089149 - DNA, 25 bp, Homo sapien
gggcggcagccaccggcgcaaaatt

SEQ ID NO: 3089150 - DNA, 25 bp, Homo sapien
gcctgagggcgacgccccttcccga

SEQ ID NO: 3089151 - DNA, 25 bp, Homo sapien
caccacacgcaagctttccgctcgg

SEQ ID NO: 3089152 - DNA, 25 bp, Homo sapien
cacacgcaagctttccgctcggccg

SEQ ID NO: 3089153 - DNA, 25 bp, Homo sapien
accacacgcaagctttccgctcggc

SEQ ID NO: 3089154 - DNA, 25 bp, Homo sapien
cacgcaagctttccgctcggccgct

SEQ ID NO: 3089155 - DNA, 25 bp, Homo sapien
agcttccgggataacccgaccacag

SEQ ID NO: 3089156 - DNA, 25 bp, Homo sapien
ttggcgggtccccagtcgaagcttc

SEQ ID NO: 3089157 - DNA, 25 bp, Homo sapien
tccccagtcgaagcttccgggataa

SEQ ID NO: 3089158 - DNA, 25 bp, Homo sapien
gataacccgaccacagtttgaatgc

SEQ ID NO: 3089159 - DNA, 25 bp, Homo sapien
ttttgtgtggaatctgaaaaccacc

SEQ ID NO: 3089160 - DNA, 25 bp, Homo sapien
tcaattaggttccttggatgaacaa

SEQ ID NO: 3089161 - DNA, 25 bp, Homo sapien
aatttcaattaggttccttggatga

SEQ ID NO: 3089162 - DNA, 25 bp, Homo sapien
taggttccttggatgaacaagaaac

SEQ ID NO: 3089163 - DNA, 25 bp, Homo sapien
ttagcatggctttacatcggatgca

SEQ ID NO: 3089164 - DNA, 25 bp, Homo sapien
gcatggctttacatcggatgcatca

SEQ ID NO: 3089165 - DNA, 25 bp, Homo sapien
acatcggatgcatcagttttccaaa

SEQ ID NO: 3089166 - DNA, 25 bp, Homo sapien
ggctttacatcggatgcatcagttt

SEQ ID NO: 3089167 - DNA, 25 bp, Homo sapien
gggaaatgataagaccctcattttc

SEQ ID NO: 3089168 - DNA, 25 bp, Homo sapien
agtatcggccctttacagtactgca

SEQ ID NO: 3089169 - DNA, 25 bp, Homo sapien
tacagtgaagactgttctataacag

SEQ ID NO: 3089170 - DNA, 25 bp, Homo sapien
aaattaaaggttctatatacagtga

SEQ ID NO: 3089171 - DNA, 25 bp, Homo sapien
taatcaaaccaaccccatgaggtgg

SEQ ID NO: 3089172 - DNA, 25 bp, Homo sapien
tcctccatgtcatgcatatttctaa

SEQ ID NO: 3089173 - DNA, 25 bp, Homo sapien
tcccactagctggacacttctcaga

SEQ ID NO: 3089174 - DNA, 25 bp, Homo sapien
caagattgtcaatgtttttgaaaga

SEQ ID NO: 3089175 - DNA, 25 bp, Homo sapien
gctgcaatgagatgtgatcgcaaca

SEQ ID NO: 3089176 - DNA, 25 bp, Homo sapien
ttggcaacatggcataatctcttct

SEQ ID NO: 3089177 - DNA, 25 bp, Homo sapien
caatgagatgtgatcgcaacactgc

SEQ ID NO: 3089178 - DNA, 25 bp, Homo sapien
catggcataatctcttctctaataa

SEQ ID NO: 3089179 - DNA, 25 bp, Homo sapien
gtgggagtcctagctaaacgttcca

SEQ ID NO: 3089180 - DNA, 25 bp, Homo sapien
tcctagctaaacgttccaatgcaga

SEQ ID NO: 3089181 - DNA, 25 bp, Homo sapien
gctaaacgttccaatgcagacttac

SEQ ID NO: 3089182 - DNA, 25 bp, Homo sapien
gagtcctagctaaacgttccaatgc

SEQ ID NO: 3089183 - DNA, 25 bp, Homo sapien
gcatcctctgtatagctacacttct

SEQ ID NO: 3089184 - DNA, 25 bp, Homo sapien
tctccttggtacaccacagtggctt

SEQ ID NO: 3089185 - DNA, 25 bp, Homo sapien
gaaactttatcaccatgtagcattc

SEQ ID NO: 3089186 - DNA, 25 bp, Homo sapien
gggacttcgatagtgccatctatac

SEQ ID NO: 3089187 - DNA, 25 bp, Homo sapien
cgggccatccagagaatatccatca

SEQ ID NO: 3089188 - DNA, 25 bp, Homo sapien
aatccattgtctggtcttgatggga

SEQ ID NO: 3089189 - DNA, 25 bp, Homo sapien
tttacaacttggcatggcagaccag

SEQ ID NO: 3089190 - DNA, 25 bp, Homo sapien
gccaaatgtggctttatccttgtaa

SEQ ID NO: 3089191 - DNA, 25 bp, Homo sapien
ccttgtgcttaattctgtccccact

SEQ ID NO: 3089192 - DNA, 25 bp, Homo sapien
tggaatgcaatttatagttaccttg

SEQ ID NO: 3089193 - DNA, 25 bp, Homo sapien
cctcttatatctgtggtaccctgga

SEQ ID NO: 3089194 - DNA, 25 bp, Homo sapien
atcactgtgtgttcctgtaactgga

SEQ ID NO: 3089195 - DNA, 25 bp, Homo sapien
ttaagggtacaaactccagagtcag

SEQ ID NO: 3089196 - DNA, 25 bp, Homo sapien
caaacccacgtccttatgagctgca

SEQ ID NO: 3089197 - DNA, 25 bp, Homo sapien
gaagccagcaggaaatacgtcaaag

SEQ ID NO: 3089198 - DNA, 25 bp, Homo sapien
ggagccaggagcacaatattctcag

SEQ ID NO: 3089199 - DNA, 25 bp, Homo sapien
ccctgcattctggtaatttagtcca

SEQ ID NO: 3089200 - DNA, 25 bp, Homo sapien
ccaatttccatgtgtcgtgcaggta

SEQ ID NO: 3089201 - DNA, 25 bp, Homo sapien
cctgcattctggtaatttagtccaa

SEQ ID NO: 3089202 - DNA, 25 bp, Homo sapien
tgtgtcgtgcaggtaattgtatcat

SEQ ID NO: 3089203 - DNA, 25 bp, Homo sapien
gatggcttataaacacgaagtgttg

SEQ ID NO: 3089204 - DNA, 25 bp, Homo sapien
tgtcccgatagagggaattgtttcc

SEQ ID NO: 3089205 - DNA, 25 bp, Homo sapien
tgttgcaaacgtaggtatggatggt

SEQ ID NO: 3089206 - DNA, 25 bp, Homo sapien
ctgctgtgtcccgatagagggaatt

SEQ ID NO: 3089207 - DNA, 25 bp, Homo sapien
tggcagaatcagcgccattcagata

SEQ ID NO: 3089208 - DNA, 25 bp, Homo sapien
ttggcagaatcagcgccattcagat

SEQ ID NO: 3089209 - DNA, 25 bp, Homo sapien
ggcagaatcagcgccattcagataa

SEQ ID NO: 3089210 - DNA, 25 bp, Homo sapien
tcgtgttgggatattcaaaagtcgt

SEQ ID NO: 3089211 - DNA, 25 bp, Homo sapien
caaaagtcgtatagcgtacggctcc

SEQ ID NO: 3089212 - DNA, 25 bp, Homo sapien
tacaagaaaaactgatcgtgttggg

SEQ ID NO: 3089213 - DNA, 25 bp, Homo sapien
attccagcaaaaggacatactctgg

SEQ ID NO: 3089214 - DNA, 25 bp, Homo sapien
tcctcgggacacatagcccggcttg

SEQ ID NO: 3089215 - DNA, 25 bp, Homo sapien
tgcaggaatacgtaatctcttctcc

SEQ ID NO: 3089216 - DNA, 25 bp, Homo sapien
atctcttctcctggctcatagaatg

SEQ ID NO: 3089217 - DNA, 25 bp, Homo sapien
tcatagaatgtttttaacgggacca

SEQ ID NO: 3089218 - DNA, 25 bp, Homo sapien
tagcaacatggcagagaaaactcga

SEQ ID NO: 3089219 - DNA, 25 bp, Homo sapien
gaacaagatgagcactggagaaatc

SEQ ID NO: 3089220 - DNA, 25 bp, Homo sapien
gagaaaactcgagaacaagatgagc

SEQ ID NO: 3089221 - DNA, 25 bp, Homo sapien
acaagatgagcactggagaaatcat

SEQ ID NO: 3089222 - DNA, 25 bp, Homo sapien
ggatgagtcacactggcactaccaa

SEQ ID NO: 3089223 - DNA, 25 bp, Homo sapien
gtggatgagtcacactggcactacc

SEQ ID NO: 3089224 - DNA, 25 bp, Homo sapien
tggatgagtcacactggcactacca

SEQ ID NO: 3089225 - DNA, 25 bp, Homo sapien
gtggttttcgtctgctaaaaagaca

SEQ ID NO: 3089226 - DNA, 25 bp, Homo sapien
ttcattccactctccaaaccaatgg

SEQ ID NO: 3089227 - DNA, 25 bp, Homo sapien
actctccaaaccaatggcatcttct

SEQ ID NO: 3089228 - DNA, 25 bp, Homo sapien
ccaatggcatcttctgtggtgttca

SEQ ID NO: 3089229 - DNA, 25 bp, Homo sapien
ctccaaaccaatggcatcttctgtg

SEQ ID NO: 3089230 - DNA, 25 bp, Homo sapien
ggacaagtttgagacaaaaaggcca

SEQ ID NO: 3089231 - DNA, 25 bp, Homo sapien
tcctgcttcacaagaagttctgagt

SEQ ID NO: 3089232 - DNA, 25 bp, Homo sapien
caagaagttctgagttaggacaagt

SEQ ID NO: 3089233 - DNA, 25 bp, Homo sapien
tctgagttaggacaagtttgagaca

SEQ ID NO: 3089234 - DNA, 25 bp, Homo sapien
tagctgctaacaagatcacggtaat

SEQ ID NO: 3089235 - DNA, 25 bp, Homo sapien
ctgctccaccaatggcaagccatag

SEQ ID NO: 3089236 - DNA, 25 bp, Homo sapien
cttcagcacaagatgtacctgctcc

SEQ ID NO: 3089237 - DNA, 25 bp, Homo sapien
cacggtaattcagagctcctgctgc

SEQ ID NO: 3089238 - DNA, 25 bp, Homo sapien
aatggccaaaggctgaactgcggga

SEQ ID NO: 3089239 - DNA, 25 bp, Homo sapien
ctgagcgtggagcactgaggatttt

SEQ ID NO: 3089240 - DNA, 25 bp, Homo sapien
ggaaggtgctaatgaggaatgaaat

SEQ ID NO: 3089241 - DNA, 25 bp, Homo sapien
agcgtggagcactgaggattttctc

SEQ ID NO: 3089242 - DNA, 25 bp, Homo sapien
taagttacaaacgtactggctgcac

SEQ ID NO: 3089243 - DNA, 25 bp, Homo sapien
gagtgattagctggtgcatccccac

SEQ ID NO: 3089244 - DNA, 25 bp, Homo sapien
tggctgcactctgcacctgacagta

SEQ ID NO: 3089245 - DNA, 25 bp, Homo sapien
ttatgtattttagcggcctccaggc

SEQ ID NO: 3089246 - DNA, 25 bp, Homo sapien
ggagctgaaacagtgttatccactg

SEQ ID NO: 3089247 - DNA, 25 bp, Homo sapien
ctgtttccagttggtagtttctgtc

SEQ ID NO: 3089248 - DNA, 25 bp, Homo sapien
tcatcagagaacagagcgatccact

SEQ ID NO: 3089249 - DNA, 25 bp, Homo sapien
tgtactgctcaaatgcactctttct

SEQ ID NO: 3089250 - DNA, 25 bp, Homo sapien
tattgtcaaaagctgcgagtgccag

SEQ ID NO: 3089251 - DNA, 25 bp, Homo sapien
tcctgtgggcccaaggaggaacttg

SEQ ID NO: 3089252 - DNA, 25 bp, Homo sapien
ggaacttggcagtgagttattgtca

SEQ ID NO: 3089253 - DNA, 25 bp, Homo sapien
aggtagggtagccagttgaagtcct

SEQ ID NO: 3089254 - DNA, 25 bp, Homo sapien
aatttttctgatggtcgcagacttc

SEQ ID NO: 3089255 - DNA, 25 bp, Homo sapien
tacattgccgaatcaaaatttttct

SEQ ID NO: 3089256 - DNA, 25 bp, Homo sapien
tccgtgtctagaaagctgctagctt

SEQ ID NO: 3089257 - DNA, 25 bp, Homo sapien
ctcaggatacattgccgaatcaaaa

SEQ ID NO: 3089258 - DNA, 25 bp, Homo sapien
gctgttccgcagtagaggtttgcaa

SEQ ID NO: 3089259 - DNA, 25 bp, Homo sapien
aaccagtagccaacactaaaccagg

SEQ ID NO: 3089260 - DNA, 25 bp, Homo sapien
tgcacatgtcttagggatggaaaac

SEQ ID NO: 3089261 - DNA, 25 bp, Homo sapien
ccccgcatttggcaaggttgcacat

SEQ ID NO: 3089262 - DNA, 25 bp, Homo sapien
ttgtttcctctctccttctggcttt

SEQ ID NO: 3089263 - DNA, 25 bp, Homo sapien
ttcctctctccttctggcttttcat

SEQ ID NO: 3089264 - DNA, 25 bp, Homo sapien
cacacccttgtttcctctctccttc

SEQ ID NO: 3089265 - DNA, 25 bp, Homo sapien
gtttcctctctccttctggcttttc

SEQ ID NO: 3089266 - DNA, 25 bp, Homo sapien
gagtcctgagcaagtgttcctggca

SEQ ID NO: 3089267 - DNA, 25 bp, Homo sapien
ggctaaaccatgggaccctttcaca

SEQ ID NO: 3089268 - DNA, 25 bp, Homo sapien
tggctaaaccatgggaccctttcac

SEQ ID NO: 3089269 - DNA, 25 bp, Homo sapien
gctaaaccatgggaccctttcacat

SEQ ID NO: 3089270 - DNA, 25 bp, Homo sapien
ttggctaaaccatgggaccctttca

SEQ ID NO: 3089271 - DNA, 25 bp, Homo sapien
cgatttcaggtggttcaggagcctc

SEQ ID NO: 3089272 - DNA, 25 bp, Homo sapien
taatgcaggttcttggcccttccag

SEQ ID NO: 3089273 - DNA, 25 bp, Homo sapien
cagctgggaacagggatactaatga

SEQ ID NO: 3089274 - DNA, 25 bp, Homo sapien
cctaaggtggatatccgaagggctc

SEQ ID NO: 3089275 - DNA, 25 bp, Homo sapien
gtcctctgctcaattgtcccacgat

SEQ ID NO: 3089276 - DNA, 25 bp, Homo sapien
tgttggatgccttcactggatcctg

SEQ ID NO: 3089277 - DNA, 25 bp, Homo sapien
caatgttataattgcctggtggttg

SEQ ID NO: 3089278 - DNA, 25 bp, Homo sapien
tcccactctttagccttcctgatgc

SEQ ID NO: 3089279 - DNA, 25 bp, Homo sapien
cccaaacatcccagcagttgtacat

SEQ ID NO: 3089280 - DNA, 25 bp, Homo sapien
tgccccaaacatcccagcagttgta

SEQ ID NO: 3089281 - DNA, 25 bp, Homo sapien
aaagtgccccaaacatcccagcagt

SEQ ID NO: 3089282 - DNA, 25 bp, Homo sapien
tttaaagtgccccaaacatcccagc

SEQ ID NO: 3089283 - DNA, 25 bp, Homo sapien
taggctctcgcctttataagtggag

SEQ ID NO: 3089284 - DNA, 25 bp, Homo sapien
catctattgagcaagacagttggga

SEQ ID NO: 3089285 - DNA, 25 bp, Homo sapien
tcagtgttctgttggatttctggca

SEQ ID NO: 3089286 - DNA, 25 bp, Homo sapien
ctggaaagtcccgaaattcagtgtt

SEQ ID NO: 3089287 - DNA, 25 bp, Homo sapien
ggtccaagatatcccagtacttcca

SEQ ID NO: 3089288 - DNA, 25 bp, Homo sapien
ccctcctaaaacagcaagggtggca

SEQ ID NO: 3089289 - DNA, 25 bp, Homo sapien
aatgaggtccaagatatcccagtac

SEQ ID NO: 3089290 - DNA, 25 bp, Homo sapien
tgaggtccaagatatcccagtactt

SEQ ID NO: 3089291 - DNA, 25 bp, Homo sapien
ccgttttcactattggatctggctc

SEQ ID NO: 3089292 - DNA, 25 bp, Homo sapien
cactattggatctggctctgtccac

SEQ ID NO: 3089293 - DNA, 25 bp, Homo sapien
ctgcccgttttcactattggatctg

SEQ ID NO: 3089294 - DNA, 25 bp, Homo sapien
gttttcactattggatctggctctg

SEQ ID NO: 3089295 - DNA, 25 bp, Homo sapien
ctggtttgtaagagggcatgttgcc

SEQ ID NO: 3089296 - DNA, 25 bp, Homo sapien
caaacccagagtgtaatctcatagg

SEQ ID NO: 3089297 - DNA, 25 bp, Homo sapien
gcagcaaagctagggttcaaaccca

SEQ ID NO: 3089298 - DNA, 25 bp, Homo sapien
tgcctgtagcatttctccttagtga

SEQ ID NO: 3089299 - DNA, 25 bp, Homo sapien
taaggagcccagtgcaccggtgatc

SEQ ID NO: 3089300 - DNA, 25 bp, Homo sapien
gtgcaccggtgatcagctactttat

SEQ ID NO: 3089301 - DNA, 25 bp, Homo sapien
gatcagctactttatttccagaagt

SEQ ID NO: 3089302 - DNA, 25 bp, Homo sapien
ggtgatcagctactttatttccaga

SEQ ID NO: 3089303 - DNA, 25 bp, Homo sapien
atgtgatgacttaattacaactgcc

SEQ ID NO: 3089304 - DNA, 25 bp, Homo sapien
tacaactgccacttgactgagtgtc

SEQ ID NO: 3089305 - DNA, 25 bp, Homo sapien
cctagtggagacttgctatctgatt

SEQ ID NO: 3089306 - DNA, 25 bp, Homo sapien
tcgacactgttaaagggagcaggct

SEQ ID NO: 3089307 - DNA, 25 bp, Homo sapien
cgggtttgtacaacaggcagctttt

SEQ ID NO: 3089308 - DNA, 25 bp, Homo sapien
tgcattggacttgctggctgaagcc

SEQ ID NO: 3089309 - DNA, 25 bp, Homo sapien
agtcgatggtgcttctagctgatcc

SEQ ID NO: 3089310 - DNA, 25 bp, Homo sapien
tgtcccggtagctggtgactccttg

SEQ ID NO: 3089311 - DNA, 25 bp, Homo sapien
gagccgtcctgggcatcggcatctg

SEQ ID NO: 3089312 - DNA, 25 bp, Homo sapien
ctgcatagctccttgttgtgtggac

SEQ ID NO: 3089313 - DNA, 25 bp, Homo sapien
catatctggggagccgtcctgggca

SEQ ID NO: 3089314 - DNA, 25 bp, Homo sapien
cagttcaggatatgcatatctgggg

SEQ ID NO: 3089315 - DNA, 25 bp, Homo sapien
gtagtacatcatgtgatcagacagc

SEQ ID NO: 3089316 - DNA, 25 bp, Homo sapien
ttgtcttaccttactcactggagca

SEQ ID NO: 3089317 - DNA, 25 bp, Homo sapien
gttgggtggttgtgtagtacatcat

SEQ ID NO: 3089318 - DNA, 25 bp, Homo sapien
gcaggcatggaccaggacggtccct

SEQ ID NO: 3089319 - DNA, 25 bp, Homo sapien
ggagagacggcacttgtgtgggtca

SEQ ID NO: 3089320 - DNA, 25 bp, Homo sapien
tggtccgcagagccgtgtcttgcat

SEQ ID NO: 3089321 - DNA, 25 bp, Homo sapien
tggagacagtgtaccagaagtcatt

SEQ ID NO: 3089322 - DNA, 25 bp, Homo sapien
cagggtcgtggagagacggcacttg

SEQ ID NO: 3089323 - DNA, 25 bp, Homo sapien
gacctccgggtatttttctacatca

SEQ ID NO: 3089324 - DNA, 25 bp, Homo sapien
tcttcagcaaaccattgggcaggga

SEQ ID NO: 3089325 - DNA, 25 bp, Homo sapien
ggcagggaatcaaaagtcatcataa

SEQ ID NO: 3089326 - DNA, 25 bp, Homo sapien
ccactgctggtgtaaagagagattt

SEQ ID NO: 3089327 - DNA, 25 bp, Homo sapien
gatacagtgctgatgcctgcatcct

SEQ ID NO: 3089328 - DNA, 25 bp, Homo sapien
tcaggatacagtgctgatgcctgca

SEQ ID NO: 3089329 - DNA, 25 bp, Homo sapien
tacagtgctgatgcctgcatcctga

SEQ ID NO: 3089330 - DNA, 25 bp, Homo sapien
agtgctgatgcctgcatcctgatgg

SEQ ID NO: 3089331 - DNA, 25 bp, Homo sapien
caaagaagtagagccatcatatttc

SEQ ID NO: 3089332 - DNA, 25 bp, Homo sapien
cactgtcgtccaactctgtttgtga

SEQ ID NO: 3089333 - DNA, 25 bp, Homo sapien
tcctcaggataaggctctgtgacat

SEQ ID NO: 3089334 - DNA, 25 bp, Homo sapien
ctgtgacatcgtctaaactccaaag

SEQ ID NO: 3089335 - DNA, 25 bp, Homo sapien
gaagtccaagctcaatatctctgag

SEQ ID NO: 3089336 - DNA, 25 bp, Homo sapien
cattttattgacgatagaatcaaaa

SEQ ID NO: 3089337 - DNA, 25 bp, Homo sapien
tccagaacccatggtcgaagtccaa

SEQ ID NO: 3089338 - DNA, 25 bp, Homo sapien
ccttgaaattacacagccaggaatg

SEQ ID NO: 3089339 - DNA, 25 bp, Homo sapien
tacgcttcatcatgttggaggaatc

SEQ ID NO: 3089340 - DNA, 25 bp, Homo sapien
gggaagagccctttgcttatgctat

SEQ ID NO: 3089341 - DNA, 25 bp, Homo sapien
tctttcacagaactcagcagtagcc

SEQ ID NO: 3089342 - DNA, 25 bp, Homo sapien
tatatgatttaaggccagctgccgt

SEQ ID NO: 3089343 - DNA, 25 bp, Homo sapien
ggttagtagtttcatgaagatacac

SEQ ID NO: 3089344 - DNA, 25 bp, Homo sapien
tttcatgaagatacaccacccttcc

SEQ ID NO: 3089345 - DNA, 25 bp, Homo sapien
ttagtagcgagatggctgtgttctg

SEQ ID NO: 3089346 - DNA, 25 bp, Homo sapien
ctgggtttgggttagtagtttcatg

SEQ ID NO: 3089347 - DNA, 25 bp, Homo sapien
caaacggccagatttctaagcgcag

SEQ ID NO: 3089348 - DNA, 25 bp, Homo sapien
tggatgaatgaaccggtaagacccc

SEQ ID NO: 3089349 - DNA, 25 bp, Homo sapien
tattcattcaggagcacggtaggca

SEQ ID NO: 3089350 - DNA, 25 bp, Homo sapien
aaaggtagccctggaagtcctgagc

SEQ ID NO: 3089351 - DNA, 25 bp, Homo sapien
tgctgctggtgtctatcacacaggc

SEQ ID NO: 3089352 - DNA, 25 bp, Homo sapien
tgtgggccatgcagaaagctgcagc

SEQ ID NO: 3089353 - DNA, 25 bp, Homo sapien
aagctgcagcggaatggcattagtg

SEQ ID NO: 3089354 - DNA, 25 bp, Homo sapien
aggctacaggtcctggacccctgca

SEQ ID NO: 3089355 - DNA, 25 bp, Homo sapien
cccaatagtctcaagcgggtgctgt

SEQ ID NO: 3089356 - DNA, 25 bp, Homo sapien
tgagttcagtcaatccacccaatag

SEQ ID NO: 3089357 - DNA, 25 bp, Homo sapien
tgtgtgtggactgcacaccccgggt

SEQ ID NO: 3089358 - DNA, 25 bp, Homo sapien
tgtcagaagcgtacacaggcagagg

SEQ ID NO: 3089359 - DNA, 25 bp, Homo sapien
gatccatgcggagagagaacagtct

SEQ ID NO: 3089360 - DNA, 25 bp, Homo sapien
gagtgtggtgcccatccggcatcat

SEQ ID NO: 3089361 - DNA, 25 bp, Homo sapien
ctgactacagggacacctctgccat

SEQ ID NO: 3089362 - DNA, 25 bp, Homo sapien
ttcaggctttgagcggatccatgcg

SEQ ID NO: 3089363 - DNA, 25 bp, Homo sapien
tccggaagagccagtatctggagtc

SEQ ID NO: 3089364 - DNA, 25 bp, Homo sapien
agagccagtatctggagtcatggcc

SEQ ID NO: 3089365 - DNA, 25 bp, Homo sapien
ggaagagccagtatctggagtcatg

SEQ ID NO: 3089366 - DNA, 25 bp, Homo sapien
ggctccggaagagccagtatctgga

SEQ ID NO: 3089367 - DNA, 25 bp, Homo sapien
tccacatagatgaggagcaaggtgg

SEQ ID NO: 3089368 - DNA, 25 bp, Homo sapien
tgtccacatagatgaggagcaaggt

SEQ ID NO: 3089369 - DNA, 25 bp, Homo sapien
cctttgtccacatagatgaggagca

SEQ ID NO: 3089370 - DNA, 25 bp, Homo sapien
tgcctttgtccacatagatgaggag

SEQ ID NO: 3089371 - DNA, 25 bp, Homo sapien
gcagagctctcttcagtggcagctt

SEQ ID NO: 3089372 - DNA, 25 bp, Homo sapien
taggatcttgggaagcgtgaagttc

SEQ ID NO: 3089373 - DNA, 25 bp, Homo sapien
ctgggagccgatcttgtttaggatc

SEQ ID NO: 3089374 - DNA, 25 bp, Homo sapien
agcgtgaagttcgaggctggtcagg

SEQ ID NO: 3089375 - DNA, 25 bp, Homo sapien
tctctgaaacaccaagtgaggatgc

SEQ ID NO: 3089376 - DNA, 25 bp, Homo sapien
tgctgagctattgcagatccctccc

SEQ ID NO: 3089377 - DNA, 25 bp, Homo sapien
caccaagtgaggatgcgtgtttgct

SEQ ID NO: 3089378 - DNA, 25 bp, Homo sapien
tataaacatagtcaagagcagcctc

SEQ ID NO: 3089379 - DNA, 25 bp, Homo sapien
gaattccggcatttcagtgtctctt

SEQ ID NO: 3089380 - DNA, 25 bp, Homo sapien
ttgggaccccgcacttgcttggcag

SEQ ID NO: 3089381 - DNA, 25 bp, Homo sapien
ggaccccgcacttgcttggcagtga

SEQ ID NO: 3089382 - DNA, 25 bp, Homo sapien
agctcagtaggtaaagggcgaattc

SEQ ID NO: 3089383 - DNA, 25 bp, Homo sapien
tgtgcacctcctctgagtggaagtc

SEQ ID NO: 3089384 - DNA, 25 bp, Homo sapien
gtttctgggcacactggggacgtct

SEQ ID NO: 3089385 - DNA, 25 bp, Homo sapien
tgagtggaagtcaatgcctgtgatc

SEQ ID NO: 3089386 - DNA, 25 bp, Homo sapien
ctcctcttcaggtggtttctgggca

SEQ ID NO: 3089387 - DNA, 25 bp, Homo sapien
ttttgggaaccataaacgctgccat

SEQ ID NO: 3089388 - DNA, 25 bp, Homo sapien
cttttgggaaccataaacgctgcca

SEQ ID NO: 3089389 - DNA, 25 bp, Homo sapien
gggagaatcttcccctcgttgtctg

SEQ ID NO: 3089390 - DNA, 25 bp, Homo sapien
tgtcacaaggcttatctttgaggct

SEQ ID NO: 3089391 - DNA, 25 bp, Homo sapien
tggcaatgaatttcggggagaatct

SEQ ID NO: 3089392 - DNA, 25 bp, Homo sapien
ttgcagtttccttgagttagggtgg

SEQ ID NO: 3089393 - DNA, 25 bp, Homo sapien
atttgtcaaaagatactcccacttc

SEQ ID NO: 3089394 - DNA, 25 bp, Homo sapien
tgtgattgtgaattatttgtcaaaa

SEQ ID NO: 3089395 - DNA, 25 bp, Homo sapien
gttaattttagcagttgtgattgtg

SEQ ID NO: 3089396 - DNA, 25 bp, Homo sapien
ttgtcaaaagatactcccacttctg

SEQ ID NO: 3089397 - DNA, 25 bp, Homo sapien
cagtgcagaagtccctgtctgttcc

SEQ ID NO: 3089398 - DNA, 25 bp, Homo sapien
taccagcccttacggccttgctgtg

SEQ ID NO: 3089399 - DNA, 25 bp, Homo sapien
aataccagcccttacggccttgctg

SEQ ID NO: 3089400 - DNA, 25 bp, Homo sapien
tctgttcccgtgattttgacagagg

SEQ ID NO: 3089401 - DNA, 25 bp, Homo sapien
tatttgccttggtatctaggagcac

SEQ ID NO: 3089402 - DNA, 25 bp, Homo sapien
cttaggaaaacgtggatcattagtc

SEQ ID NO: 3089403 - DNA, 25 bp, Homo sapien
ggtatcgacaggtaagactgcctta

SEQ ID NO: 3089404 - DNA, 25 bp, Homo sapien
aatagaatcgtggtgaaagatggcc

SEQ ID NO: 3089405 - DNA, 25 bp, Homo sapien
tattaggctcgatgccattaaactg

SEQ ID NO: 3089406 - DNA, 25 bp, Homo sapien
tgcgttaggctcttcttgagcccta

SEQ ID NO: 3089407 - DNA, 25 bp, Homo sapien
ttggtttcggaaatcgagacgcctg

SEQ ID NO: 3089408 - DNA, 25 bp, Homo sapien
cgagacgcctgatggaagtttgtgt

SEQ ID NO: 3089409 - DNA, 25 bp, Homo sapien
ccagcgaaccaagacatcaggtgac

SEQ ID NO: 3089410 - DNA, 25 bp, Homo sapien
gacatcaggtgaccctccaatttga

SEQ ID NO: 3089411 - DNA, 25 bp, Homo sapien
tgaccctccaatttgattcactgaa

SEQ ID NO: 3089412 - DNA, 25 bp, Homo sapien
gattcactgaaaatactgccggtgg

SEQ ID NO: 3089413 - DNA, 25 bp, Homo sapien
ccccattgagcttgtagcatcgaga

SEQ ID NO: 3089414 - DNA, 25 bp, Homo sapien
taagggctggtgtcttaaccgcaag

SEQ ID NO: 3089415 - DNA, 25 bp, Homo sapien
caggaatgcggcctctgcacctgtg

SEQ ID NO: 3089416 - DNA, 25 bp, Homo sapien
gcatcgagatgtgctgtgtgtcaca

SEQ ID NO: 3089417 - DNA, 25 bp, Homo sapien
aaaaaatccgctgcacctactggct

SEQ ID NO: 3089418 - DNA, 25 bp, Homo sapien
tggtgtccaagggatgaaatagctt

SEQ ID NO: 3089419 - DNA, 25 bp, Homo sapien
tgttttgctaaggagcccgtactag

SEQ ID NO: 3089420 - DNA, 25 bp, Homo sapien
gactgactgcgaggcaagtgaatga

SEQ ID NO: 3089421 - DNA, 25 bp, Homo sapien
aggtatgccttaggccagtggctgc

SEQ ID NO: 3089422 - DNA, 25 bp, Homo sapien
tgacttggtgattctaggtatgcct

SEQ ID NO: 3089423 - DNA, 25 bp, Homo sapien
tggtttaggctgacttggtgattct

SEQ ID NO: 3089424 - DNA, 25 bp, Homo sapien
tgattctaggtatgccttaggccag

SEQ ID NO: 3089425 - DNA, 25 bp, Homo sapien
gattccgcttgatttgagagctaag

SEQ ID NO: 3089426 - DNA, 25 bp, Homo sapien
tctatgtccagttcttccttgctgt

SEQ ID NO: 3089427 - DNA, 25 bp, Homo sapien
gagagctaagttctatgtccagttc

SEQ ID NO: 3089428 - DNA, 25 bp, Homo sapien
gctctctaaaagtgccagataaatg

SEQ ID NO: 3089429 - DNA, 25 bp, Homo sapien
tatcgttactgtgtttatagacccg

SEQ ID NO: 3089430 - DNA, 25 bp, Homo sapien
tgtgtttatagacccgactccatcg

SEQ ID NO: 3089431 - DNA, 25 bp, Homo sapien
ggcttttctctttatcgttactgtg

SEQ ID NO: 3089432 - DNA, 25 bp, Homo sapien
ggttgcacactgggaggcttttctc

SEQ ID NO: 3089433 - DNA, 25 bp, Homo sapien
ttaaagtctctgccgggctccactt

SEQ ID NO: 3089434 - DNA, 25 bp, Homo sapien
aaagtctctgccgggctccacttag

SEQ ID NO: 3089435 - DNA, 25 bp, Homo sapien
aagtctctgccgggctccacttagt

SEQ ID NO: 3089436 - DNA, 25 bp, Homo sapien
gtctctgccgggctccacttagttc

SEQ ID NO: 3089437 - DNA, 25 bp, Homo sapien
tattccctcgaaatgcaaacgaggc

SEQ ID NO: 3089438 - DNA, 25 bp, Homo sapien
tcgaaatgcaaacgaggctccatgg

SEQ ID NO: 3089439 - DNA, 25 bp, Homo sapien
tgtccacattccagtcgttcaccat

SEQ ID NO: 3089440 - DNA, 25 bp, Homo sapien
agatgccttattccctcgaaatgca

SEQ ID NO: 3089441 - DNA, 25 bp, Homo sapien
ctcgagaacactggggcaccctcct

SEQ ID NO: 3089442 - DNA, 25 bp, Homo sapien
tgtgagaagtgacttgccttcaggg

SEQ ID NO: 3089443 - DNA, 25 bp, Homo sapien
tttcatgacaagttgcagtgaagtc

SEQ ID NO: 3089444 - DNA, 25 bp, Homo sapien
tgaagtcgtatttggctgtgagaag

SEQ ID NO: 3089445 - DNA, 25 bp, Homo sapien
aagttgcagtgaagtcgtatttggc

SEQ ID NO: 3089446 - DNA, 25 bp, Homo sapien
tttttcattctcagcactagcgtca

SEQ ID NO: 3089447 - DNA, 25 bp, Homo sapien
gagaagtccctggatctgctgtcct

SEQ ID NO: 3089448 - DNA, 25 bp, Homo sapien
ctgccagatggctgcctgtcttggt

SEQ ID NO: 3089449 - DNA, 25 bp, Homo sapien
gcagaacgctgccagatggctgcct

SEQ ID NO: 3089450 - DNA, 25 bp, Homo sapien
caggaccctaattcattagtttggt

SEQ ID NO: 3089451 - DNA, 25 bp, Homo sapien
tagtttggtaatagctctttactgc

SEQ ID NO: 3089452 - DNA, 25 bp, Homo sapien
ttagtttggtaatagctctttactg

SEQ ID NO: 3089453 - DNA, 25 bp, Homo sapien
attcacaggaccctaattcattagt

SEQ ID NO: 3089454 - DNA, 25 bp, Homo sapien
tgcttatagatgtgagtgacattga

SEQ ID NO: 3089455 - DNA, 25 bp, Homo sapien
tccactacactgaggaggccttgga

SEQ ID NO: 3089456 - DNA, 25 bp, Homo sapien
agcaggggaaacaagtcctgttcca

SEQ ID NO: 3089457 - DNA, 25 bp, Homo sapien
ttatagatgtgagtgacattgaagc

SEQ ID NO: 3089458 - DNA, 25 bp, Homo sapien
ttaagatgtcctgttcatgtgctgc

SEQ ID NO: 3089459 - DNA, 25 bp, Homo sapien
tgtcctgttcatgtgctgcttaata

SEQ ID NO: 3089460 - DNA, 25 bp, Homo sapien
gatgtcctgttcatgtgctgcttaa

SEQ ID NO: 3089461 - DNA, 25 bp, Homo sapien
cctgttcatgtgctgcttaatagta

SEQ ID NO: 3089462 - DNA, 25 bp, Homo sapien
ttggcagactctaacacattcacag

SEQ ID NO: 3089463 - DNA, 25 bp, Homo sapien
agaaggtacaatccttgtgaaatcc

SEQ ID NO: 3089464 - DNA, 25 bp, Homo sapien
tcctcaaatattgtacctgctctgc

SEQ ID NO: 3089465 - DNA, 25 bp, Homo sapien
gcagactctaacacattcacagacg

SEQ ID NO: 3089466 - DNA, 25 bp, Homo sapien
gagctccctgttcttagaagagttt

SEQ ID NO: 3089467 - DNA, 25 bp, Homo sapien
tcagtgcggagctccctgttcttag

SEQ ID NO: 3089468 - DNA, 25 bp, Homo sapien
cttcttgatcagtgcggagctccct

SEQ ID NO: 3089469 - DNA, 25 bp, Homo sapien
gcggagctccctgttcttagaagag

SEQ ID NO: 3089470 - DNA, 25 bp, Homo sapien
catgttggcccatgggagttacgtc

SEQ ID NO: 3089471 - DNA, 25 bp, Homo sapien
gtaatgttctgcatgtcctgtcggg

SEQ ID NO: 3089472 - DNA, 25 bp, Homo sapien
gaggaagcccgagtccatttctgaa

SEQ ID NO: 3089473 - DNA, 25 bp, Homo sapien
cagcagtgcctacactcaggtgaca

SEQ ID NO: 3089474 - DNA, 25 bp, Homo sapien
taggagtgcaaattctcggaagccc

SEQ ID NO: 3089475 - DNA, 25 bp, Homo sapien
gaagcccagagttggaagatccacg

SEQ ID NO: 3089476 - DNA, 25 bp, Homo sapien
aagatccacggcacaggatgtgaca

SEQ ID NO: 3089477 - DNA, 25 bp, Homo sapien
aaattctcggaagcccagagttgga

SEQ ID NO: 3089478 - DNA, 25 bp, Homo sapien
tttagcgtctcttatgtgtctggtg

SEQ ID NO: 3089479 - DNA, 25 bp, Homo sapien
tagcgtctcttatgtgtctggtgtt

SEQ ID NO: 3089480 - DNA, 25 bp, Homo sapien
gtatttagcgtctcttatgtgtctg

SEQ ID NO: 3089481 - DNA, 25 bp, Homo sapien
gtctcttatgtgtctggtgtttttc

SEQ ID NO: 3089482 - DNA, 25 bp, Homo sapien
gggtgaaggtttcccagtgaccatc

SEQ ID NO: 3089483 - DNA, 25 bp, Homo sapien
caagccattgcttatgtcaccctga

SEQ ID NO: 3089484 - DNA, 25 bp, Homo sapien
taacactgccgttgggcgttgccgt

SEQ ID NO: 3089485 - DNA, 25 bp, Homo sapien
gggatgtcatgccacccacgtacat

SEQ ID NO: 3089486 - DNA, 25 bp, Homo sapien
taaactgggtgtgcattttggtaac

SEQ ID NO: 3089487 - DNA, 25 bp, Homo sapien
ctttttgtactctcctcattctctt

SEQ ID NO: 3089488 - DNA, 25 bp, Homo sapien
ctaaactgggtgtgcattttggtaa

SEQ ID NO: 3089489 - DNA, 25 bp, Homo sapien
tgcattttggtaacagtttctaaaa

SEQ ID NO: 3089490 - DNA, 25 bp, Homo sapien
tggttttggactaattgctctattt

SEQ ID NO: 3089491 - DNA, 25 bp, Homo sapien
ttattttttggcacatgctctgcct

SEQ ID NO: 3089492 - DNA, 25 bp, Homo sapien
ctggttttggactaattgctctatt

SEQ ID NO: 3089493 - DNA, 25 bp, Homo sapien
tttattttttggcacatgctctgcc

SEQ ID NO: 3089494 - DNA, 25 bp, Homo sapien
gctaacgagacaggctccaactgct

SEQ ID NO: 3089495 - DNA, 25 bp, Homo sapien
taaggagagctaacgagacaggctc

SEQ ID NO: 3089496 - DNA, 25 bp, Homo sapien
cattgtttttagtaaggagagctaa

SEQ ID NO: 3089497 - DNA, 25 bp, Homo sapien
ttttagtaaggagagctaacgagac

SEQ ID NO: 3089498 - DNA, 25 bp, Homo sapien
ggccatcccagggagaacagcatcg

SEQ ID NO: 3089499 - DNA, 25 bp, Homo sapien
agggccatcccagggagaacagcat

SEQ ID NO: 3089500 - DNA, 25 bp, Homo sapien
gccatcccagggagaacagcatcgc

SEQ ID NO: 3089501 - DNA, 25 bp, Homo sapien
atcccagggagaacagcatcgccat

SEQ ID NO: 3089502 - DNA, 25 bp, Homo sapien
tgagacaaagggtaacattcagcac

SEQ ID NO: 3089503 - DNA, 25 bp, Homo sapien
tctgagacaaagggtaacattcagc

SEQ ID NO: 3089504 - DNA, 25 bp, Homo sapien
ctgagacaaagggtaacattcagca

SEQ ID NO: 3089505 - DNA, 25 bp, Homo sapien
gaggttggtacctctccaggccacg

SEQ ID NO: 3089506 - DNA, 25 bp, Homo sapien
gatgcatgctcagtccttcgtccag

SEQ ID NO: 3089507 - DNA, 25 bp, Homo sapien
caataataagaatcacctgtggccc

SEQ ID NO: 3089508 - DNA, 25 bp, Homo sapien
agccagggtctggtgtagctcagca

SEQ ID NO: 3089509 - DNA, 25 bp, Homo sapien
gagtgccacgcaaccagacttcttg

SEQ ID NO: 3089510 - DNA, 25 bp, Homo sapien
tctttctggattgttgcgtgtggca

SEQ ID NO: 3089511 - DNA, 25 bp, Homo sapien
tcttttatggaagttgccacctgca

SEQ ID NO: 3089512 - DNA, 25 bp, Homo sapien
ttcttggctacaacacacatgtggc

SEQ ID NO: 3089513 - DNA, 25 bp, Homo sapien
tgagctctggatgggcgagccagcc

SEQ ID NO: 3089514 - DNA, 25 bp, Homo sapien
tgggactggagctctttttgactga

SEQ ID NO: 3089515 - DNA, 25 bp, Homo sapien
tctggatgggcgagccagccatggg

SEQ ID NO: 3089516 - DNA, 25 bp, Homo sapien
ggagctctttttgactgagctgcac

SEQ ID NO: 3089517 - DNA, 25 bp, Homo sapien
ttctgtttaccacctggatgctttc

SEQ ID NO: 3089518 - DNA, 25 bp, Homo sapien
gagtttctgtttaccacctggatgc

SEQ ID NO: 3089519 - DNA, 25 bp, Homo sapien
ctttgagcatcgagtttctgtttac

SEQ ID NO: 3089520 - DNA, 25 bp, Homo sapien
catcgagtttctgtttaccacctgg

SEQ ID NO: 3089521 - DNA, 25 bp, Homo sapien
acatctgatgctgccctactaaagg

SEQ ID NO: 3089522 - DNA, 25 bp, Homo sapien
ttcagaatgatgaccctcggaccgg

SEQ ID NO: 3089523 - DNA, 25 bp, Homo sapien
gggtaatctgccatgcagttcagaa

SEQ ID NO: 3089524 - DNA, 25 bp, Homo sapien
ctactaaaggcaaaacggatggtct

SEQ ID NO: 3089525 - DNA, 25 bp, Homo sapien
ctggtgaggagtaattcgtggttta

SEQ ID NO: 3089526 - DNA, 25 bp, Homo sapien
gctcattcgtatagctggtgtggag

SEQ ID NO: 3089527 - DNA, 25 bp, Homo sapien
tgcttgttgctcagcagggtactgg

SEQ ID NO: 3089528 - DNA, 25 bp, Homo sapien
gaaatctgtcttcagtgcacttact

SEQ ID NO: 3089529 - DNA, 25 bp, Homo sapien
ggataattttgtgggactcaatgaa

SEQ ID NO: 3089530 - DNA, 25 bp, Homo sapien
aaaggataattttgtgggactcaat

SEQ ID NO: 3089531 - DNA, 25 bp, Homo sapien
gactcaatgaagtgatgaaattgag

SEQ ID NO: 3089532 - DNA, 25 bp, Homo sapien
gggactcaatgaagtgatgaaattg

SEQ ID NO: 3089533 - DNA, 25 bp, Homo sapien
cttgagatgagtcctccatagcagc

SEQ ID NO: 3089534 - DNA, 25 bp, Homo sapien
tggtcttccgtgagagtccggcgat

SEQ ID NO: 3089535 - DNA, 25 bp, Homo sapien
cacattggtcaaggcctcatttcta

SEQ ID NO: 3089536 - DNA, 25 bp, Homo sapien
tgtctactcctgatttgggcctgag

SEQ ID NO: 3089537 - DNA, 25 bp, Homo sapien
gcacatggtcatgtccccatgggtt

SEQ ID NO: 3089538 - DNA, 25 bp, Homo sapien
agtcggtccaggcttccgcacatgg

SEQ ID NO: 3089539 - DNA, 25 bp, Homo sapien
ggtagagcccagcaagtcggtccag

SEQ ID NO: 3089540 - DNA, 25 bp, Homo sapien
tgtccccatgggtttgtccacatgg

SEQ ID NO: 3089541 - DNA, 25 bp, Homo sapien
gcagcatgagggagtctttctgttc

SEQ ID NO: 3089542 - DNA, 25 bp, Homo sapien
aatgcagcatgagggagtctttctg

SEQ ID NO: 3089543 - DNA, 25 bp, Homo sapien
tgcagcatgagggagtctttctgtt

SEQ ID NO: 3089544 - DNA, 25 bp, Homo sapien
gaatgcagcatgagggagtctttct

SEQ ID NO: 3089545 - DNA, 25 bp, Homo sapien
gatagtgtcctaactgaccgcctgt

SEQ ID NO: 3089546 - DNA, 25 bp, Homo sapien
gactgtcgtgatagtgtcctaactg

SEQ ID NO: 3089547 - DNA, 25 bp, Homo sapien
tctgtgactgtcgtgatagtgtcct

SEQ ID NO: 3089548 - DNA, 25 bp, Homo sapien
ccagatctgtgactgtcgtgatagt

SEQ ID NO: 3089549 - DNA, 25 bp, Homo sapien
tccccatgccgacactcatctgttt

SEQ ID NO: 3089550 - DNA, 25 bp, Homo sapien
ctgtggatcacgtccccatgccgac

SEQ ID NO: 3089551 - DNA, 25 bp, Homo sapien
tgtggatcacgtccccatgccgaca

SEQ ID NO: 3089552 - DNA, 25 bp, Homo sapien
atcacgtccccatgccgacactcat

SEQ ID NO: 3089553 - DNA, 25 bp, Homo sapien
acttgcaagaggctacttgtgcttc

SEQ ID NO: 3089554 - DNA, 25 bp, Homo sapien
gtgcgttccctagtcagtacacagt

SEQ ID NO: 3089555 - DNA, 25 bp, Homo sapien
catgtgcgttccctagtcagtacac

SEQ ID NO: 3089556 - DNA, 25 bp, Homo sapien
gttccctagtcagtacacagtcagc

SEQ ID NO: 3089557 - DNA, 25 bp, Homo sapien
gtgcacatgtgcgttccctagtcag

SEQ ID NO: 3089558 - DNA, 25 bp, Homo sapien
tctctttctctgcgccggagatcct

SEQ ID NO: 3089559 - DNA, 25 bp, Homo sapien
tgcgccggagatcctcaagatcagg

SEQ ID NO: 3089560 - DNA, 25 bp, Homo sapien
ggagatgtctcggcatctctcaggg

SEQ ID NO: 3089561 - DNA, 25 bp, Homo sapien
tcaagatcaggggagatgtctcggc

SEQ ID NO: 3089562 - DNA, 25 bp, Homo sapien
ccacgtggtcccacatgagacactg

SEQ ID NO: 3089563 - DNA, 25 bp, Homo sapien
gagagccacgtggtcccacatgaga

SEQ ID NO: 3089564 - DNA, 25 bp, Homo sapien
gccacgtggtcccacatgagacact

SEQ ID NO: 3089565 - DNA, 25 bp, Homo sapien
gagccacgtggtcccacatgagaca

SEQ ID NO: 3089566 - DNA, 25 bp, Homo sapien
tcagtattaactgccttgctctcag

SEQ ID NO: 3089567 - DNA, 25 bp, Homo sapien
tcatttagggtcctcagtattaact

SEQ ID NO: 3089568 - DNA, 25 bp, Homo sapien
ttaactgccttgctctcaggtggat

SEQ ID NO: 3089569 - DNA, 25 bp, Homo sapien
ttaacaaatctgttgggtgaatcca

SEQ ID NO: 3089570 - DNA, 25 bp, Homo sapien
tgatctgaaccagtagagatgaggc

SEQ ID NO: 3089571 - DNA, 25 bp, Homo sapien
cctggtgcggcaaagggacctatat

SEQ ID NO: 3089572 - DNA, 25 bp, Homo sapien
cacaggttgttgaccatggtttaac

SEQ ID NO: 3089573 - DNA, 25 bp, Homo sapien
gctatggcaccataaccttgttgat

SEQ ID NO: 3089574 - DNA, 25 bp, Homo sapien
cccaggactcagtacacagtgggcc

SEQ ID NO: 3089575 - DNA, 25 bp, Homo sapien
gcccaggactcagtacacagtgggc

SEQ ID NO: 3089576 - DNA, 25 bp, Homo sapien
tctgagggccattagaactctagat

SEQ ID NO: 3089577 - DNA, 25 bp, Homo sapien
gaactctagatggctgcacagacac

SEQ ID NO: 3089578 - DNA, 25 bp, Homo sapien
gggtctgagggccattagaactcta

SEQ ID NO: 3089579 - DNA, 25 bp, Homo sapien
tgtgggtctgagggccattagaact

SEQ ID NO: 3089580 - DNA, 25 bp, Homo sapien
tgtcctcctgggatagaatatgaac

SEQ ID NO: 3089581 - DNA, 25 bp, Homo sapien
gtctgtcctcctgggatagaatatg

SEQ ID NO: 3089582 - DNA, 25 bp, Homo sapien
aatgtctgtcctcctgggatagaat

SEQ ID NO: 3089583 - DNA, 25 bp, Homo sapien
ctgtcctcctgggatagaatatgaa

SEQ ID NO: 3089584 - DNA, 25 bp, Homo sapien
taagtcccagatgaacgtgaagtct

SEQ ID NO: 3089585 - DNA, 25 bp, Homo sapien
tgaacgtgaagtctgcccacttcca

SEQ ID NO: 3089586 - DNA, 25 bp, Homo sapien
aacgtgaagtctgcccacttccagg

SEQ ID NO: 3089587 - DNA, 25 bp, Homo sapien
aattacctaagtcccagatgaacgt

SEQ ID NO: 3089588 - DNA, 25 bp, Homo sapien
tcgcgttgcccagtgttagtgatga

SEQ ID NO: 3089589 - DNA, 25 bp, Homo sapien
aaagcccaaatctgatcgcgttgcc

SEQ ID NO: 3089590 - DNA, 25 bp, Homo sapien
tatttcacagggagatccaaggaca

SEQ ID NO: 3089591 - DNA, 25 bp, Homo sapien
cacattggtggtttccctgaaggtc

SEQ ID NO: 3089592 - DNA, 25 bp, Homo sapien
gatcccatgttgtgttgactgcaaa

SEQ ID NO: 3089593 - DNA, 25 bp, Homo sapien
gccttggaaatgtaacaggcccatt

SEQ ID NO: 3089594 - DNA, 25 bp, Homo sapien
caggcccatttttcgcagttggaaa

SEQ ID NO: 3089595 - DNA, 25 bp, Homo sapien
gactgcaaaggcgtacggcatcaag

SEQ ID NO: 3089596 - DNA, 25 bp, Homo sapien
tgtgatggcataaatggatcactgg

SEQ ID NO: 3089597 - DNA, 25 bp, Homo sapien
tttctgtgatggcataaatggatca

SEQ ID NO: 3089598 - DNA, 25 bp, Homo sapien
tctgtgatggcataaatggatcact

SEQ ID NO: 3089599 - DNA, 25 bp, Homo sapien
gatggcataaatggatcactggagg

SEQ ID NO: 3089600 - DNA, 25 bp, Homo sapien
gccttgaccgctaattagagttctc

SEQ ID NO: 3089601 - DNA, 25 bp, Homo sapien
cagatgcagcggagccttgaccgct

SEQ ID NO: 3089602 - DNA, 25 bp, Homo sapien
gcggagccttgaccgctaattagag

SEQ ID NO: 3089603 - DNA, 25 bp, Homo sapien
tcatcaacagatgcagcggagcctt

SEQ ID NO: 3089604 - DNA, 25 bp, Homo sapien
cagtgaaaagggcattccgtcggca

SEQ ID NO: 3089605 - DNA, 25 bp, Homo sapien
cattttgatcacctgccactgtagc

SEQ ID NO: 3089606 - DNA, 25 bp, Homo sapien
cactgtagcattggtccttccaggc

SEQ ID NO: 3089607 - DNA, 25 bp, Homo sapien
aactgttgaaaccagcacatccctg

SEQ ID NO: 3089608 - DNA, 25 bp, Homo sapien
cagaagggccttggtctgtccacca

SEQ ID NO: 3089609 - DNA, 25 bp, Homo sapien
cagatgtctcatgtgttatctgaca

SEQ ID NO: 3089610 - DNA, 25 bp, Homo sapien
atgtctcatgtgttatctgacacat

SEQ ID NO: 3089611 - DNA, 25 bp, Homo sapien
gatgtctcatgtgttatctgacaca

SEQ ID NO: 3089612 - DNA, 25 bp, Homo sapien
tttaaagacaccagcttctatttcc

SEQ ID NO: 3089613 - DNA, 25 bp, Homo sapien
tggataccactctcctcgatctggg

SEQ ID NO: 3089614 - DNA, 25 bp, Homo sapien
gggttccatgcctactttaaagaca

SEQ ID NO: 3089615 - DNA, 25 bp, Homo sapien
gtgggccgtttgcattctgcatctc

SEQ ID NO: 3089616 - DNA, 25 bp, Homo sapien
gagttactctgattgaagggaagaa

SEQ ID NO: 3089617 - DNA, 25 bp, Homo sapien
agttactctgattgaagggaagaaa

SEQ ID NO: 3089618 - DNA, 25 bp, Homo sapien
accagagttactctgattgaaggga

SEQ ID NO: 3089619 - DNA, 25 bp, Homo sapien
cagagttactctgattgaagggaag

SEQ ID NO: 3089620 - DNA, 25 bp, Homo sapien
ctcctcctccaccagccatgaggag

SEQ ID NO: 3089621 - DNA, 25 bp, Homo sapien
tcctcctccaccagccatgaggaga

SEQ ID NO: 3089622 - DNA, 25 bp, Homo sapien
cctcctcctccaccagccatgagga

SEQ ID NO: 3089623 - DNA, 25 bp, Homo sapien
cctcctccaccagccatgaggagac

SEQ ID NO: 3089624 - DNA, 25 bp, Homo sapien
ttcccctgcggcagctttttctgca

SEQ ID NO: 3089625 - DNA, 25 bp, Homo sapien
taaacaaaggtagttggcagcatgc

SEQ ID NO: 3089626 - DNA, 25 bp, Homo sapien
gcagcatgctaacaatgcctccagg

SEQ ID NO: 3089627 - DNA, 25 bp, Homo sapien
cgaggaattcctactgcgagaataa

SEQ ID NO: 3089628 - DNA, 25 bp, Homo sapien
cttgtaagtcctcatgggatttggg

SEQ ID NO: 3089629 - DNA, 25 bp, Homo sapien
cagcttgagacatccgtggtttggg

SEQ ID NO: 3089630 - DNA, 25 bp, Homo sapien
tgactcatgggctctacaacattgg

SEQ ID NO: 3089631 - DNA, 25 bp, Homo sapien
ccaattcagtgatggctttagcgcc

SEQ ID NO: 3089632 - DNA, 25 bp, Homo sapien
ttctactgacagttttgccaattca

SEQ ID NO: 3089633 - DNA, 25 bp, Homo sapien
agaaaattgtatccccactgaagtg

SEQ ID NO: 3089634 - DNA, 25 bp, Homo sapien
tgggacccagcatgttctcagtgtg

SEQ ID NO: 3089635 - DNA, 25 bp, Homo sapien
cagaatccccgaactcatggtgcct

SEQ ID NO: 3089636 - DNA, 25 bp, Homo sapien
gaagtgctggttccatgaacccagg

SEQ ID NO: 3089637 - DNA, 25 bp, Homo sapien
tattgatgaatccagtagtttgttg

SEQ ID NO: 3089638 - DNA, 25 bp, Homo sapien
cctacaagcctagtacctctcagaa

SEQ ID NO: 3089639 - DNA, 25 bp, Homo sapien
tattcatactggacacaagctggtc

SEQ ID NO: 3089640 - DNA, 25 bp, Homo sapien
tctgctttctcgctgctcatttgaa

SEQ ID NO: 3089641 - DNA, 25 bp, Homo sapien
tatgtactgcaaccaagagctgaga

SEQ ID NO: 3089642 - DNA, 25 bp, Homo sapien
ggcctggctttcttcgcccgtgaaa

SEQ ID NO: 3089643 - DNA, 25 bp, Homo sapien
aaagtgtgccactccttttggcctg

SEQ ID NO: 3089644 - DNA, 25 bp, Homo sapien
tgtgttagcattccggtcattcagc

SEQ ID NO: 3089645 - DNA, 25 bp, Homo sapien
cggagggtactttctcagcaggaca

SEQ ID NO: 3089646 - DNA, 25 bp, Homo sapien
aactgagtaaccaagctgttcggag

SEQ ID NO: 3089647 - DNA, 25 bp, Homo sapien
gtagagacgcaaacaaaccctgaga

SEQ ID NO: 3089648 - DNA, 25 bp, Homo sapien
taacgtgaccgggaaaatgtgagcc

SEQ ID NO: 3089649 - DNA, 25 bp, Homo sapien
caagcgtaaggtgcacatgagaggt

SEQ ID NO: 3089650 - DNA, 25 bp, Homo sapien
tcatgtttgtccagaagtgccaact

SEQ ID NO: 3089651 - DNA, 25 bp, Homo sapien
gaaaagaagcaagcgtaaggtgcac

SEQ ID NO: 3089652 - DNA, 25 bp, Homo sapien
aactgctgcaccagaaaagccggga

SEQ ID NO: 3089653 - DNA, 25 bp, Homo sapien
ctgcccttccaccaacatttttgca

SEQ ID NO: 3089654 - DNA, 25 bp, Homo sapien
tgcccttccaccaacatttttgcat

SEQ ID NO: 3089655 - DNA, 25 bp, Homo sapien
tcagggaaagcatagcggtcactcc

SEQ ID NO: 3089656 - DNA, 25 bp, Homo sapien
tccacttttcatcaagcaggctctt

SEQ ID NO: 3089657 - DNA, 25 bp, Homo sapien
gtcactcccgcctggcttcctgtct

SEQ ID NO: 3089658 - DNA, 25 bp, Homo sapien
catcaagcaggctcttggcaaaatc

SEQ ID NO: 3089659 - DNA, 25 bp, Homo sapien
tgtaactggttaattccttcgtgaa

SEQ ID NO: 3089660 - DNA, 25 bp, Homo sapien
tgttgacactaatgggatgctgatg

SEQ ID NO: 3089661 - DNA, 25 bp, Homo sapien
tgtgtgtagatgctgaactgctact

SEQ ID NO: 3089662 - DNA, 25 bp, Homo sapien
ggaatttccccgctctagagcagta

SEQ ID NO: 3089663 - DNA, 25 bp, Homo sapien
ccacctctgtgacggatggatcctt

SEQ ID NO: 3089664 - DNA, 25 bp, Homo sapien
acaccacctctgtgacggatggatc

SEQ ID NO: 3089665 - DNA, 25 bp, Homo sapien
tggacaggaccaccttcttgagccc

SEQ ID NO: 3089666 - DNA, 25 bp, Homo sapien
gatgcagacctggggtactggacag

SEQ ID NO: 3089667 - DNA, 25 bp, Homo sapien
gagagagtttcaggactgagtgcca

SEQ ID NO: 3089668 - DNA, 25 bp, Homo sapien
ctagagagagtttcaggactgagtg

SEQ ID NO: 3089669 - DNA, 25 bp, Homo sapien
tagagagagtttcaggactgagtgc

SEQ ID NO: 3089670 - DNA, 25 bp, Homo sapien
gagagtttcaggactgagtgccagc

SEQ ID NO: 3089671 - DNA, 25 bp, Homo sapien
aaagagtgcattcgagggaggaaca

SEQ ID NO: 3089672 - DNA, 25 bp, Homo sapien
cacagggttcctcacagtaatgtct

SEQ ID NO: 3089673 - DNA, 25 bp, Homo sapien
tgttgatcacgagcagtcactgggt

SEQ ID NO: 3089674 - DNA, 25 bp, Homo sapien
aatgtctgagacttagctttgctgc

SEQ ID NO: 3089675 - DNA, 25 bp, Homo sapien
tggcttcctggtgagtaaacttcct

SEQ ID NO: 3089676 - DNA, 25 bp, Homo sapien
tgtcgtggcttcctggtgagtaaac

SEQ ID NO: 3089677 - DNA, 25 bp, Homo sapien
cgtggcttcctggtgagtaaacttc

SEQ ID NO: 3089678 - DNA, 25 bp, Homo sapien
cttcctggtgagtaaacttcctgtt

SEQ ID NO: 3089679 - DNA, 25 bp, Homo sapien
tgggccctttctcgccaactaactg

SEQ ID NO: 3089680 - DNA, 25 bp, Homo sapien
tagcatgagtgcttcccagtgtctc

SEQ ID NO: 3089681 - DNA, 25 bp, Homo sapien
gtttcctccttttcggtctgtagca

SEQ ID NO: 3089682 - DNA, 25 bp, Homo sapien
tctcgccaactaactgccattctaa

SEQ ID NO: 3089683 - DNA, 25 bp, Homo sapien
ttatccgtcagttgattctttccct

SEQ ID NO: 3089684 - DNA, 25 bp, Homo sapien
ctgagcctacttgggctacatctac

SEQ ID NO: 3089685 - DNA, 25 bp, Homo sapien
gggctacatctaccttcagagcctt

SEQ ID NO: 3089686 - DNA, 25 bp, Homo sapien
tgattctttccctgagcctacttgg

SEQ ID NO: 3089687 - DNA, 25 bp, Homo sapien
cattagatcactgccaacagaggtt

SEQ ID NO: 3089688 - DNA, 25 bp, Homo sapien
tcaaacactcattagatcactgcca

SEQ ID NO: 3089689 - DNA, 25 bp, Homo sapien
gctgagcagacccaaaggaagcaag

SEQ ID NO: 3089690 - DNA, 25 bp, Homo sapien
cactcattagatcactgccaacaga

SEQ ID NO: 3089691 - DNA, 25 bp, Homo sapien
ccaacatctttatgaggctggttgg

SEQ ID NO: 3089692 - DNA, 25 bp, Homo sapien
acatctttatgaggctggttggagg

SEQ ID NO: 3089693 - DNA, 25 bp, Homo sapien
atctttatgaggctggttggaggcc

SEQ ID NO: 3089694 - DNA, 25 bp, Homo sapien
aacatctttatgaggctggttggag

SEQ ID NO: 3089695 - DNA, 25 bp, Homo sapien
ggctgtcacctcgtcattccaagaa

SEQ ID NO: 3089696 - DNA, 25 bp, Homo sapien
gaagccattgccaagttaaagtgaa

SEQ ID NO: 3089697 - DNA, 25 bp, Homo sapien
taaatgagtaagtatggaaggtgcc

SEQ ID NO: 3089698 - DNA, 25 bp, Homo sapien
tagctctaatgaagggctgtccctg

SEQ ID NO: 3089699 - DNA, 25 bp, Homo sapien
gtgaagagaatatcgtggaaaccat

SEQ ID NO: 3089700 - DNA, 25 bp, Homo sapien
ccatggcaaatgttagacacaatac

SEQ ID NO: 3089701 - DNA, 25 bp, Homo sapien
aatcatgccagggtttgtgtgtcag

SEQ ID NO: 3089702 - DNA, 25 bp, Homo sapien
ttgaatggcagagtggcatgcatgt

SEQ ID NO: 3089703 - DNA, 25 bp, Homo sapien
gaagcacaatgtgaagcatcctctg

SEQ ID NO: 3089704 - DNA, 25 bp, Homo sapien
aggaagcacaatgtgaagcatcctc

SEQ ID NO: 3089705 - DNA, 25 bp, Homo sapien
cccggacatgaggacggtcagctca

SEQ ID NO: 3089706 - DNA, 25 bp, Homo sapien
acatgaggacggtcagctcattgag

SEQ ID NO: 3089707 - DNA, 25 bp, Homo sapien
cccagcgtcaggtgagcgtggaggc

SEQ ID NO: 3089708 - DNA, 25 bp, Homo sapien
tcccagcgtcaggtgagcgtggagg

SEQ ID NO: 3089709 - DNA, 25 bp, Homo sapien
ccagcgtcaggtgagcgtggaggca

SEQ ID NO: 3089710 - DNA, 25 bp, Homo sapien
ctcccagcgtcaggtgagcgtggag

SEQ ID NO: 3089711 - DNA, 25 bp, Homo sapien
gtctttcacgtagcaatgtatccga

SEQ ID NO: 3089712 - DNA, 25 bp, Homo sapien
cttgcgtctttcacgtagcaatgta

SEQ ID NO: 3089713 - DNA, 25 bp, Homo sapien
acgtagcaatgtatccgacaggtgt

SEQ ID NO: 3089714 - DNA, 25 bp, Homo sapien
tttcacgtagcaatgtatccgacag

SEQ ID NO: 3089715 - DNA, 25 bp, Homo sapien
ggtttatagcattctttgcgtgtcc

SEQ ID NO: 3089716 - DNA, 25 bp, Homo sapien
gtttatagcattctttgcgtgtcca

SEQ ID NO: 3089717 - DNA, 25 bp, Homo sapien
agctcacgtgggtttatagcattct

SEQ ID NO: 3089718 - DNA, 25 bp, Homo sapien
cagctcacgtgggtttatagcattc

SEQ ID NO: 3089719 - DNA, 25 bp, Homo sapien
tcagcgaccccagtgcaacagttct

SEQ ID NO: 3089720 - DNA, 25 bp, Homo sapien
tgcaacagttctgcctggagtggac

SEQ ID NO: 3089721 - DNA, 25 bp, Homo sapien
ccccagtgcaacagttctgcctgga

SEQ ID NO: 3089722 - DNA, 25 bp, Homo sapien
agcgaccccagtgcaacagttctgc

SEQ ID NO: 3089723 - DNA, 25 bp, Homo sapien
aactcgttgttgtctgctgtgcctg

SEQ ID NO: 3089724 - DNA, 25 bp, Homo sapien
tcaacacggagctgtgactgacggc

SEQ ID NO: 3089725 - DNA, 25 bp, Homo sapien
gcttttcaatccaataggcctgcaa

SEQ ID NO: 3089726 - DNA, 25 bp, Homo sapien
tcagctccgcttgctcggtgaggtg

SEQ ID NO: 3089727 - DNA, 25 bp, Homo sapien
caaatgtgatcaactgttcagggtc

SEQ ID NO: 3089728 - DNA, 25 bp, Homo sapien
gaggcctcaaaataccgactgcgtc

SEQ ID NO: 3089729 - DNA, 25 bp, Homo sapien
ttaacccttcctagaaagcaagcag

SEQ ID NO: 3089730 - DNA, 25 bp, Homo sapien
ggtacgtcatgctcagtgtccagtt

SEQ ID NO: 3089731 - DNA, 25 bp, Homo sapien
aaacttcgtgagaccaacacagccg

SEQ ID NO: 3089732 - DNA, 25 bp, Homo sapien
tgtgtgtactggacacgcaggaagc

SEQ ID NO: 3089733 - DNA, 25 bp, Homo sapien
cgttggtacacacgtggcattgccg

SEQ ID NO: 3089734 - DNA, 25 bp, Homo sapien
tcagaggctgcggactttcttccag

SEQ ID NO: 3089735 - DNA, 25 bp, Homo sapien
tcacagaacacacaaccatgaaagg

SEQ ID NO: 3089736 - DNA, 25 bp, Homo sapien
cagaacacacaaccatgaaaggctt

SEQ ID NO: 3089737 - DNA, 25 bp, Homo sapien
cacagaacacacaaccatgaaaggc

SEQ ID NO: 3089738 - DNA, 25 bp, Homo sapien
agaacacacaaccatgaaaggcttt

SEQ ID NO: 3089739 - DNA, 25 bp, Homo sapien
gaacttggccgactgatgctctgcg

SEQ ID NO: 3089740 - DNA, 25 bp, Homo sapien
ggttacctgacgcacacatggatga

SEQ ID NO: 3089741 - DNA, 25 bp, Homo sapien
taataaccgtggaggtcacactcag

SEQ ID NO: 3089742 - DNA, 25 bp, Homo sapien
gatcatgagagttaccgggacagca

SEQ ID NO: 3089743 - DNA, 25 bp, Homo sapien
ttcagctgccaatgcgagggctggc

SEQ ID NO: 3089744 - DNA, 25 bp, Homo sapien
taagatgccgcggtcacactcaacc

SEQ ID NO: 3089745 - DNA, 25 bp, Homo sapien
ctctttcagctgccaatgcgagggc

SEQ ID NO: 3089746 - DNA, 25 bp, Homo sapien
aagatgccgcggtcacactcaacct

SEQ ID NO: 3089747 - DNA, 25 bp, Homo sapien
tcacatcagcgtccattgatgagtg

SEQ ID NO: 3089748 - DNA, 25 bp, Homo sapien
tagcctctgatcatgcttttcacat

SEQ ID NO: 3089749 - DNA, 25 bp, Homo sapien
gatcatgcttttcacatcagcgtcc

SEQ ID NO: 3089750 - DNA, 25 bp, Homo sapien
gcgtccattgatgagtgggtctcac

SEQ ID NO: 3089751 - DNA, 25 bp, Homo sapien
cccggtgcatgtgtgggtccggcca

SEQ ID NO: 3089752 - DNA, 25 bp, Homo sapien
gagggaatcctatggcccggtgcat

SEQ ID NO: 3089753 - DNA, 25 bp, Homo sapien
cggtgcatgtgtgggtccggccatg

SEQ ID NO: 3089754 - DNA, 25 bp, Homo sapien
acttttgccctgagagagggaatcc

SEQ ID NO: 3089755 - DNA, 25 bp, Homo sapien
catcggtcactgacaagttggctgg

SEQ ID NO: 3089756 - DNA, 25 bp, Homo sapien
tcggtcactgacaagttggctggat

SEQ ID NO: 3089757 - DNA, 25 bp, Homo sapien
cggtcactgacaagttggctggatt

SEQ ID NO: 3089758 - DNA, 25 bp, Homo sapien
tcatcggtcactgacaagttggctg

SEQ ID NO: 3089759 - DNA, 25 bp, Homo sapien
tcaggctcccatgtctggtccattc

SEQ ID NO: 3089760 - DNA, 25 bp, Homo sapien
aggctcccatgtctggtccattcat

SEQ ID NO: 3089761 - DNA, 25 bp, Homo sapien
caggctcccatgtctggtccattca

SEQ ID NO: 3089762 - DNA, 25 bp, Homo sapien
gcagcgttagcccacccagggagtg

SEQ ID NO: 3089763 - DNA, 25 bp, Homo sapien
gttccaaaggaacagaacactgtcc

SEQ ID NO: 3089764 - DNA, 25 bp, Homo sapien
aggctttgctgcagttccaaaggaa

SEQ ID NO: 3089765 - DNA, 25 bp, Homo sapien
ctggtactcgaagcctggtgtcccc

SEQ ID NO: 3089766 - DNA, 25 bp, Homo sapien
ctatcagtggggtgactatataact

SEQ ID NO: 3089767 - DNA, 25 bp, Homo sapien
gggtgactatataactaactgttat

SEQ ID NO: 3089768 - DNA, 25 bp, Homo sapien
tcagtggggtgactatataactaac

SEQ ID NO: 3089769 - DNA, 25 bp, Homo sapien
gtggggtgactatataactaactgt

SEQ ID NO: 3089770 - DNA, 25 bp, Homo sapien
ggagcatggtaagagtagcaagtct

SEQ ID NO: 3089771 - DNA, 25 bp, Homo sapien
cctcatgtgacaccagaccataatg

SEQ ID NO: 3089772 - DNA, 25 bp, Homo sapien
caggagcatggtaagagtagcaagt

SEQ ID NO: 3089773 - DNA, 25 bp, Homo sapien
tcatgtgacaccagaccataatgtc

SEQ ID NO: 3089774 - DNA, 25 bp, Homo sapien
tggaaggcggcagctatttgacctc

SEQ ID NO: 3089775 - DNA, 25 bp, Homo sapien
aggcggcagctatttgacctctctt

SEQ ID NO: 3089776 - DNA, 25 bp, Homo sapien
tgtggaaggcggcagctatttgacc

SEQ ID NO: 3089777 - DNA, 25 bp, Homo sapien
tgccctgtggaaggcggcagctatt

SEQ ID NO: 3089778 - DNA, 25 bp, Homo sapien
taaggagccgctcgtgtgtaacacc

SEQ ID NO: 3089779 - DNA, 25 bp, Homo sapien
gcagccacacttctcacgggctgag

SEQ ID NO: 3089780 - DNA, 25 bp, Homo sapien
tgagcgtcccgaagttctctaagga

SEQ ID NO: 3089781 - DNA, 25 bp, Homo sapien
tagcccatgtgaatccgtgctgaca

SEQ ID NO: 3089782 - DNA, 25 bp, Homo sapien
gagcagaggacgaacagctggtctt

SEQ ID NO: 3089783 - DNA, 25 bp, Homo sapien
aggagaccgcacactctcaatgagg

SEQ ID NO: 3089784 - DNA, 25 bp, Homo sapien
aggcttcacactcggatgcatccgg

SEQ ID NO: 3089785 - DNA, 25 bp, Homo sapien
gacgcggatggctgtgtgaactctc

SEQ ID NO: 3089786 - DNA, 25 bp, Homo sapien
ttctaggtccccaccaaccagctcg

SEQ ID NO: 3089787 - DNA, 25 bp, Homo sapien
gctcggacaggaagtgccatttggt

SEQ ID NO: 3089788 - DNA, 25 bp, Homo sapien
acaggaagtgccatttggtggccca

SEQ ID NO: 3089789 - DNA, 25 bp, Homo sapien
caccaaccagctcggacaggaagtg

SEQ ID NO: 3089790 - DNA, 25 bp, Homo sapien
cggtctcgtattgatcagtctggta

SEQ ID NO: 3089791 - DNA, 25 bp, Homo sapien
tgaaggtgccttgatcggtctcgta

SEQ ID NO: 3089792 - DNA, 25 bp, Homo sapien
tcagtctggtattgatcgtcccaca

SEQ ID NO: 3089793 - DNA, 25 bp, Homo sapien
tccatccccaacacgattgaaggtg

SEQ ID NO: 3089794 - DNA, 25 bp, Homo sapien
ctggagtttggaattccatctctgc

SEQ ID NO: 3089795 - DNA, 25 bp, Homo sapien
tggagtttggaattccatctctgct

SEQ ID NO: 3089796 - DNA, 25 bp, Homo sapien
cgagggacattggaccagggtcggg

SEQ ID NO: 3089797 - DNA, 25 bp, Homo sapien
gaagaccgggagagaccacctcttc

SEQ ID NO: 3089798 - DNA, 25 bp, Homo sapien
taagagccgggaagaccgggagaga

SEQ ID NO: 3089799 - DNA, 25 bp, Homo sapien
gccgctccagcgaggtaagagccgg

SEQ ID NO: 3089800 - DNA, 25 bp, Homo sapien
cccagccaggggcaggggctggaga

SEQ ID NO: 3089801 - DNA, 25 bp, Homo sapien
agcccagccaggggcaggggctgga

SEQ ID NO: 3089802 - DNA, 25 bp, Homo sapien
agccaggggcaggggctggagagcc

SEQ ID NO: 3089803 - DNA, 25 bp, Homo sapien
gacagcccagccaggggcaggggct

SEQ ID NO: 3089804 - DNA, 25 bp, Homo sapien
cagtcgcttctaggcaatttaccca

SEQ ID NO: 3089805 - DNA, 25 bp, Homo sapien
gggctggcagattattatccggata

SEQ ID NO: 3089806 - DNA, 25 bp, Homo sapien
gagggcagacttttccacgacggac

SEQ ID NO: 3089807 - DNA, 25 bp, Homo sapien
ggtggcctcatttctccagctcgtg

SEQ ID NO: 3089808 - DNA, 25 bp, Homo sapien
agcagagatggactcgcgggggtga

SEQ ID NO: 3089809 - DNA, 25 bp, Homo sapien
ctgagcagagatggactcgcggggg

SEQ ID NO: 3089810 - DNA, 25 bp, Homo sapien
cagagatggactcgcgggggtgatc

SEQ ID NO: 3089811 - DNA, 25 bp, Homo sapien
tggactcgcgggggtgatcagggtg

SEQ ID NO: 3089812 - DNA, 25 bp, Homo sapien
tcacatacaagctgtcaccgaggct

SEQ ID NO: 3089813 - DNA, 25 bp, Homo sapien
tttgacagatgtcacatacaagctg

SEQ ID NO: 3089814 - DNA, 25 bp, Homo sapien
ctggattatcagtgactgggttaga

SEQ ID NO: 3089815 - DNA, 25 bp, Homo sapien
cagtgactgggttagagcaggaccc

SEQ ID NO: 3089816 - DNA, 25 bp, Homo sapien
cctcatttccacaaacctgaagtct

SEQ ID NO: 3089817 - DNA, 25 bp, Homo sapien
cctgaagtcttgatcaattaacagc

SEQ ID NO: 3089818 - DNA, 25 bp, Homo sapien
ttgatcaattaacagccaggattgc

SEQ ID NO: 3089819 - DNA, 25 bp, Homo sapien
ggaacacaagatggggcttcccctc

SEQ ID NO: 3089820 - DNA, 25 bp, Homo sapien
gattccttgctcagttgtgcacaag

SEQ ID NO: 3089821 - DNA, 25 bp, Homo sapien
gaagccccagcaatgagcagtttac

SEQ ID NO: 3089822 - DNA, 25 bp, Homo sapien
aattgagagtccctgctcacggcag

SEQ ID NO: 3089823 - DNA, 25 bp, Homo sapien
cttgatgatgtggactggtcctggc

SEQ ID NO: 3089824 - DNA, 25 bp, Homo sapien
gtgtttgccctgtttgatccctgag

SEQ ID NO: 3089825 - DNA, 25 bp, Homo sapien
gatgatgggatgtcacagccatatg

SEQ ID NO: 3089826 - DNA, 25 bp, Homo sapien
gatgtgtgaggtccctctcaggagg

SEQ ID NO: 3089827 - DNA, 25 bp, Homo sapien
ccctgagtaagtggctatcggaggt

SEQ ID NO: 3089828 - DNA, 25 bp, Homo sapien
gggctgggctggttgtctgcagagg

SEQ ID NO: 3089829 - DNA, 25 bp, Homo sapien
tgggctggttgtctgcagaggaggc

SEQ ID NO: 3089830 - DNA, 25 bp, Homo sapien
ctttactgccaaatgggctgggctg

SEQ ID NO: 3089831 - DNA, 25 bp, Homo sapien
gctgggctggttgtctgcagaggag

SEQ ID NO: 3089832 - DNA, 25 bp, Homo sapien
cctgttccaggagttgggacttcca

SEQ ID NO: 3089833 - DNA, 25 bp, Homo sapien
gctcccaactcaaaggcagctggca

SEQ ID NO: 3089834 - DNA, 25 bp, Homo sapien
cacattggagcaaggatgctgcagg

SEQ ID NO: 3089835 - DNA, 25 bp, Homo sapien
cttccatgagccgttcgtgggtgga

SEQ ID NO: 3089836 - DNA, 25 bp, Homo sapien
tggaaagaagccagctgtcagcctg

SEQ ID NO: 3089837 - DNA, 25 bp, Homo sapien
gaaagaagccagctgtcagcctggt

SEQ ID NO: 3089838 - DNA, 25 bp, Homo sapien
ctggaaagaagccagctgtcagcct

SEQ ID NO: 3089839 - DNA, 25 bp, Homo sapien
aaagaagccagctgtcagcctggtc

SEQ ID NO: 3089840 - DNA, 25 bp, Homo sapien
tctcacactgggtgctctcaagcaa

SEQ ID NO: 3089841 - DNA, 25 bp, Homo sapien
gaaccactggaataagccagtgttg

SEQ ID NO: 3089842 - DNA, 25 bp, Homo sapien
tctcaagcaaaagagtacaagctgc

SEQ ID NO: 3089843 - DNA, 25 bp, Homo sapien
gtgttgcaattgctctcacactggg

SEQ ID NO: 3089844 - DNA, 25 bp, Homo sapien
ccatattgtctgaatgaggctcagc

SEQ ID NO: 3089845 - DNA, 25 bp, Homo sapien
tccatattgtctgaatgaggctcag

SEQ ID NO: 3089846 - DNA, 25 bp, Homo sapien
atcatatcctctccatattgtctga

SEQ ID NO: 3089847 - DNA, 25 bp, Homo sapien
tctgttcttggctcctgtctgtgta

SEQ ID NO: 3089848 - DNA, 25 bp, Homo sapien
ccattctgttcttggctcctgtctg

SEQ ID NO: 3089849 - DNA, 25 bp, Homo sapien
tggctcctgtctgtgtacctggcac

SEQ ID NO: 3089850 - DNA, 25 bp, Homo sapien
tgtctgtgtacctggcaccctctgt

SEQ ID NO: 3089851 - DNA, 25 bp, Homo sapien
gtgggtggccctcccttgcacctct

SEQ ID NO: 3089852 - DNA, 25 bp, Homo sapien
gacaggagacttcctatgtaaatct

SEQ ID NO: 3089853 - DNA, 25 bp, Homo sapien
aaataggtatctcttcccaggtggg

SEQ ID NO: 3089854 - DNA, 25 bp, Homo sapien
ccagtcatggccctaggagacagga

SEQ ID NO: 3089855 - DNA, 25 bp, Homo sapien
agaaggagcataccaggtgctctga

SEQ ID NO: 3089856 - DNA, 25 bp, Homo sapien
cagaaggagcataccaggtgctctg

SEQ ID NO: 3089857 - DNA, 25 bp, Homo sapien
gaagggtgggatttgctctgtgcat

SEQ ID NO: 3089858 - DNA, 25 bp, Homo sapien
gagaagggtgggatttgctctgtgc

SEQ ID NO: 3089859 - DNA, 25 bp, Homo sapien
cccactggcttcccaaaaagagtgt

SEQ ID NO: 3089860 - DNA, 25 bp, Homo sapien
actggcttcccaaaaagagtgttgt

SEQ ID NO: 3089861 - DNA, 25 bp, Homo sapien
tcatgtcgggacaacctcgttgctc

SEQ ID NO: 3089862 - DNA, 25 bp, Homo sapien
tgtcgggacaacctcgttgctccca

SEQ ID NO: 3089863 - DNA, 25 bp, Homo sapien
cttcatgtcgggacaacctcgttgc

SEQ ID NO: 3089864 - DNA, 25 bp, Homo sapien
catgtcgggacaacctcgttgctcc

SEQ ID NO: 3089865 - DNA, 25 bp, Homo sapien
tccgtgactggttgctgcccactct

SEQ ID NO: 3089866 - DNA, 25 bp, Homo sapien
tgaatccttcctgagggacgttgct

SEQ ID NO: 3089867 - DNA, 25 bp, Homo sapien
tgggtatccctgtattctcccctca

SEQ ID NO: 3089868 - DNA, 25 bp, Homo sapien
cttccagaagttccaaataccaagg

SEQ ID NO: 3089869 - DNA, 25 bp, Homo sapien
tctgggctttctggccttgcaacat

SEQ ID NO: 3089870 - DNA, 25 bp, Homo sapien
gacttcttggaaagcagacactttc

SEQ ID NO: 3089871 - DNA, 25 bp, Homo sapien
cagcttctgggaggttctgggcttt

SEQ ID NO: 3089872 - DNA, 25 bp, Homo sapien
ggaaagcagacactttcctctctag

SEQ ID NO: 3089873 - DNA, 25 bp, Homo sapien
tacttgtgttgaccaagtgctgcaa

SEQ ID NO: 3089874 - DNA, 25 bp, Homo sapien
tgagcaggtaagagtcagcccattt

SEQ ID NO: 3089875 - DNA, 25 bp, Homo sapien
attgctggcccctgccgatacagcg

SEQ ID NO: 3089876 - DNA, 25 bp, Homo sapien
tgcacttggactgtggtatggcttc

SEQ ID NO: 3089877 - DNA, 25 bp, Homo sapien
acacagggctgtcgctgctcctgtg

SEQ ID NO: 3089878 - DNA, 25 bp, Homo sapien
tcaatctggaactttcagggtgttt

SEQ ID NO: 3089879 - DNA, 25 bp, Homo sapien
agggctgtcgctgctcctgtggtcc

SEQ ID NO: 3089880 - DNA, 25 bp, Homo sapien
caaacacagggctgtcgctgctcct

SEQ ID NO: 3089881 - DNA, 25 bp, Homo sapien
gttccagggagctccgttatctccc

SEQ ID NO: 3089882 - DNA, 25 bp, Homo sapien
ctgcccatggcaccatggcttttga

SEQ ID NO: 3089883 - DNA, 25 bp, Homo sapien
tggcaccatggcttttgaaggctgc

SEQ ID NO: 3089884 - DNA, 25 bp, Homo sapien
ccatggcaccatggcttttgaaggc

SEQ ID NO: 3089885 - DNA, 25 bp, Homo sapien
ctgtgccggcatctcaggcagcctg

SEQ ID NO: 3089886 - DNA, 25 bp, Homo sapien
aggcagcctgtgcttgatgttccca

SEQ ID NO: 3089887 - DNA, 25 bp, Homo sapien
tgtcatgttgacttttccacgcaga

SEQ ID NO: 3089888 - DNA, 25 bp, Homo sapien
ctgcacggatttcacatgccaggca

SEQ ID NO: 3089889 - DNA, 25 bp, Homo sapien
gatcgtttccggcaataacatccac

SEQ ID NO: 3089890 - DNA, 25 bp, Homo sapien
cctctgctccaaagccatgaaacaa

SEQ ID NO: 3089891 - DNA, 25 bp, Homo sapien
ccaggccccagtgtagggtcacagg

SEQ ID NO: 3089892 - DNA, 25 bp, Homo sapien
tttttggacacaaatctggaagtcg

SEQ ID NO: 3089893 - DNA, 25 bp, Homo sapien
aaacatgtacagaggcatggctgta

SEQ ID NO: 3089894 - DNA, 25 bp, Homo sapien
tggctgtagccagagaacattgtag

SEQ ID NO: 3089895 - DNA, 25 bp, Homo sapien
cattgtagatcattaggaaatttca

SEQ ID NO: 3089896 - DNA, 25 bp, Homo sapien
gtacagaggcatggctgtagccaga

SEQ ID NO: 3089897 - DNA, 25 bp, Homo sapien
tctagcaatcgcctccaaaagcttt

SEQ ID NO: 3089898 - DNA, 25 bp, Homo sapien
aagaaaaatgtggagaatctagcaa

SEQ ID NO: 3089899 - DNA, 25 bp, Homo sapien
ggagaatctagcaatcgcctccaaa

SEQ ID NO: 3089900 - DNA, 25 bp, Homo sapien
ctccaaaagctttcgcttagtgcca

SEQ ID NO: 3089901 - DNA, 25 bp, Homo sapien
tgggaagctcaagctgggattccca

SEQ ID NO: 3089902 - DNA, 25 bp, Homo sapien
taaaacctgattggaaatgagatca

SEQ ID NO: 3089903 - DNA, 25 bp, Homo sapien
ggacaccatccggaccaagagtggg

SEQ ID NO: 3089904 - DNA, 25 bp, Homo sapien
tgttttctgagcatggggacaccat

SEQ ID NO: 3089905 - DNA, 25 bp, Homo sapien
catgggagacagtggaaatcagcat

SEQ ID NO: 3089906 - DNA, 25 bp, Homo sapien
atgggagacagtggaaatcagcatg

SEQ ID NO: 3089907 - DNA, 25 bp, Homo sapien
ggtatgatgagagcctcccttgtgc

SEQ ID NO: 3089908 - DNA, 25 bp, Homo sapien
cttgtgccaatggagctcccactgg

SEQ ID NO: 3089909 - DNA, 25 bp, Homo sapien
cagggacagtggtatgatgagagcc

SEQ ID NO: 3089910 - DNA, 25 bp, Homo sapien
ccttgtgccaatggagctcccactg

SEQ ID NO: 3089911 - DNA, 25 bp, Homo sapien
tcatagggaacatgagagagatgta

SEQ ID NO: 3089912 - DNA, 25 bp, Homo sapien
tcttctccgatgatgtgccggacat

SEQ ID NO: 3089913 - DNA, 25 bp, Homo sapien
gactccaacctcttctccgatgatg

SEQ ID NO: 3089914 - DNA, 25 bp, Homo sapien
tgccggacatcatagggaacatgag

SEQ ID NO: 3089915 - DNA, 25 bp, Homo sapien
tctgggggcactggtcttattgctg

SEQ ID NO: 3089916 - DNA, 25 bp, Homo sapien
ctgctctctctggttgagacccttt

SEQ ID NO: 3089917 - DNA, 25 bp, Homo sapien
cctgctctctctggttgagaccctt

SEQ ID NO: 3089918 - DNA, 25 bp, Homo sapien
cttcttgcctctcagccctatcctt

SEQ ID NO: 3089919 - DNA, 25 bp, Homo sapien
gatctgatggtagcaaggggctcac

SEQ ID NO: 3089920 - DNA, 25 bp, Homo sapien
caatgatctgatggtagcaaggggc

SEQ ID NO: 3089921 - DNA, 25 bp, Homo sapien
gccgccaaagcgctgctcagtcttg

SEQ ID NO: 3089922 - DNA, 25 bp, Homo sapien
agtaggccgccaaagcgctgctcag

SEQ ID NO: 3089923 - DNA, 25 bp, Homo sapien
tttccaattgtctgccccagtaggc

SEQ ID NO: 3089924 - DNA, 25 bp, Homo sapien
tggacatggctcctgcatttccaat

SEQ ID NO: 3089925 - DNA, 25 bp, Homo sapien
ctgtggccacacattcgtggtcctg

SEQ ID NO: 3089926 - DNA, 25 bp, Homo sapien
cgtggtcctgctttgatgagtggct

SEQ ID NO: 3089927 - DNA, 25 bp, Homo sapien
tgagtggctgcctctgaaagtgcag

SEQ ID NO: 3089928 - DNA, 25 bp, Homo sapien
acagcaggtgcaggttctgctccaa

SEQ ID NO: 3089929 - DNA, 25 bp, Homo sapien
gtcataacactcattccaagatgag

SEQ ID NO: 3089930 - DNA, 25 bp, Homo sapien
tcattccaagatgagtgaggtcggg

SEQ ID NO: 3089931 - DNA, 25 bp, Homo sapien
gggcgaccgtggacagtctcacact

SEQ ID NO: 3089932 - DNA, 25 bp, Homo sapien
cacactggaggtaggactaagtgca

SEQ ID NO: 3089933 - DNA, 25 bp, Homo sapien
actgatacacagctcaatgcccact

SEQ ID NO: 3089934 - DNA, 25 bp, Homo sapien
cgctctcactgctagtgaggtggaa

SEQ ID NO: 3089935 - DNA, 25 bp, Homo sapien
acggcttgctctgatgagggctgct

SEQ ID NO: 3089936 - DNA, 25 bp, Homo sapien
ttcctgagaaagatgacggcttgct

SEQ ID NO: 3089937 - DNA, 25 bp, Homo sapien
cacaggagcccgattcaaggctgag

SEQ ID NO: 3089938 - DNA, 25 bp, Homo sapien
tacaagccttgttgttatatactaa

SEQ ID NO: 3089939 - DNA, 25 bp, Homo sapien
caacttgagccttggcagagctttc

SEQ ID NO: 3089940 - DNA, 25 bp, Homo sapien
cagagctttccatggtacaagcctt

SEQ ID NO: 3089941 - DNA, 25 bp, Homo sapien
cagagagtgcaaatgtaggagccct

SEQ ID NO: 3089942 - DNA, 25 bp, Homo sapien
tcctgcagaccacttgaagaggccc

SEQ ID NO: 3089943 - DNA, 25 bp, Homo sapien
agagttgagttgcttgccatagccc

SEQ ID NO: 3089944 - DNA, 25 bp, Homo sapien
gagccagatgcgagtgtttgaaaac

SEQ ID NO: 3089945 - DNA, 25 bp, Homo sapien
tgatgccagaccatcttgcctgggt

SEQ ID NO: 3089946 - DNA, 25 bp, Homo sapien
tctgagtgcagacgatagcctcctc

SEQ ID NO: 3089947 - DNA, 25 bp, Homo sapien
taggaattaaaagctccgctctggt

SEQ ID NO: 3089948 - DNA, 25 bp, Homo sapien
tagcagagttgcacataaaacgcgc

SEQ ID NO: 3089949 - DNA, 25 bp, Homo sapien
tgtggacaaaggaacctctcggcct

SEQ ID NO: 3089950 - DNA, 25 bp, Homo sapien
atgaggtggtgactgacttggcttc

SEQ ID NO: 3089951 - DNA, 25 bp, Homo sapien
catgaggtggtgactgacttggctt

SEQ ID NO: 3089952 - DNA, 25 bp, Homo sapien
ttggcttctggtccagtgcattctc

SEQ ID NO: 3089953 - DNA, 25 bp, Homo sapien
ccagtgcattctcaactctcccaca

SEQ ID NO: 3089954 - DNA, 25 bp, Homo sapien
gcaagaatagcagcactccctatac

SEQ ID NO: 3089955 - DNA, 25 bp, Homo sapien
gaaagttaagcttcgtcttgcaaga

SEQ ID NO: 3089956 - DNA, 25 bp, Homo sapien
tcacaatcttgtgggacagagaaca

SEQ ID NO: 3089957 - DNA, 25 bp, Homo sapien
gaaggtgccacaaagaaagttaagc

SEQ ID NO: 3089958 - DNA, 25 bp, Homo sapien
cacctggacatgtcaaagggtgctg

SEQ ID NO: 3089959 - DNA, 25 bp, Homo sapien
caacaggaccacctggacatgtcaa

SEQ ID NO: 3089960 - DNA, 25 bp, Homo sapien
ggacatgtcaaagggtgctgcacct

SEQ ID NO: 3089961 - DNA, 25 bp, Homo sapien
tcaaagggtgctgcacctcctgatg

SEQ ID NO: 3089962 - DNA, 25 bp, Homo sapien
gagtgtgtccaggttgggatcacgg

SEQ ID NO: 3089963 - DNA, 25 bp, Homo sapien
gggagtgtgtccaggttgggatcac

SEQ ID NO: 3089964 - DNA, 25 bp, Homo sapien
gaagggagtgtgtccaggttgggat

SEQ ID NO: 3089965 - DNA, 25 bp, Homo sapien
aagggagtgtgtccaggttgggatc

SEQ ID NO: 3089966 - DNA, 25 bp, Homo sapien
atggccatcgccatcggcaccgact

SEQ ID NO: 3089967 - DNA, 25 bp, Homo sapien
tcggcaccgactactggctgtactc

SEQ ID NO: 3089968 - DNA, 25 bp, Homo sapien
atggtgcgatgcgaccgcgggctgc

SEQ ID NO: 3089969 - DNA, 25 bp, Homo sapien
gccttctcgctcatggccatcgcca

SEQ ID NO: 3089970 - DNA, 25 bp, Homo sapien
aacggagacagcgacctcggtcgcg

SEQ ID NO: 3089971 - DNA, 25 bp, Homo sapien
ccgctcctcgctgtgcggtggggtg

SEQ ID NO: 3089972 - DNA, 25 bp, Homo sapien
gagtctcccccaacggagacagcga

SEQ ID NO: 3089973 - DNA, 25 bp, Homo sapien
gtaaggggagcgacaccgagtctcc

SEQ ID NO: 3089974 - DNA, 25 bp, Homo sapien
attctttgtatctttggtgacaccc

SEQ ID NO: 3089975 - DNA, 25 bp, Homo sapien
tgtatctttggtgacacccagccaa

SEQ ID NO: 3089976 - DNA, 25 bp, Homo sapien
tatctttggtgacacccagccaagc

SEQ ID NO: 3089977 - DNA, 25 bp, Homo sapien
tttgtatctttggtgacacccagcc

SEQ ID NO: 3089978 - DNA, 25 bp, Homo sapien
gggcagcatcttgcacaccagtgta

SEQ ID NO: 3089979 - DNA, 25 bp, Homo sapien
gcagcatcttgcacaccagtgtacc

SEQ ID NO: 3089980 - DNA, 25 bp, Homo sapien
gcatcttgcacaccagtgtacccaa

SEQ ID NO: 3089981 - DNA, 25 bp, Homo sapien
ttgcacaccagtgtacccaaccttt

SEQ ID NO: 3089982 - DNA, 25 bp, Homo sapien
ctctgcccatagcttccacgctgac

SEQ ID NO: 3089983 - DNA, 25 bp, Homo sapien
ccggaaagcctctgcccatagcttc

SEQ ID NO: 3089984 - DNA, 25 bp, Homo sapien
agcctctgcccatagcttccacgct

SEQ ID NO: 3089985 - DNA, 25 bp, Homo sapien
cccggaaagcctctgcccatagctt

SEQ ID NO: 3089986 - DNA, 25 bp, Homo sapien
ttcagtgacttttgacccttttgct

SEQ ID NO: 3089987 - DNA, 25 bp, Homo sapien
agttcagtgacttttgacccttttg

SEQ ID NO: 3089988 - DNA, 25 bp, Homo sapien
gtcggtgtggcctcatggagggtcc

SEQ ID NO: 3089989 - DNA, 25 bp, Homo sapien
ggtgggtcggtgtggcctcatggag

SEQ ID NO: 3089990 - DNA, 25 bp, Homo sapien
tgcagaacagcgatggaaactccct

SEQ ID NO: 3089991 - DNA, 25 bp, Homo sapien
gttctgtatccccatgagactccgg

SEQ ID NO: 3089992 - DNA, 25 bp, Homo sapien
gacatggtaccagacaaaggacttt

SEQ ID NO: 3089993 - DNA, 25 bp, Homo sapien
tcttttctgaactgcgaggcaggac

SEQ ID NO: 3089994 - DNA, 25 bp, Homo sapien
actggggcggatagaaaaatcaagt

SEQ ID NO: 3089995 - DNA, 25 bp, Homo sapien
ggctgcgtccagctagtgtccacag

SEQ ID NO: 3089996 - DNA, 25 bp, Homo sapien
ggactggggcggatagaaaaatcaa

SEQ ID NO: 3089997 - DNA, 25 bp, Homo sapien
tggctgcgtccagctagtgtccaca

SEQ ID NO: 3089998 - DNA, 25 bp, Homo sapien
ggccacagctttgtcgctgagcttc

SEQ ID NO: 3089999 - DNA, 25 bp, Homo sapien
tggtgtctgcattcttcgaggctcc

SEQ ID NO: 3090000 - DNA, 25 bp, Homo sapien
tgagctgccaaccccgaatgtgcac

SEQ ID NO: 3090001 - DNA, 25 bp, Homo sapien
gagacaatgacagactgagctgcca

SEQ ID NO: 3090002 - DNA, 25 bp, Homo sapien
ccaaccccgaatgtgcacaggggac

SEQ ID NO: 3090003 - DNA, 25 bp, Homo sapien
ctatgaggtggagacaatgacagac

SEQ ID NO: 3090004 - DNA, 25 bp, Homo sapien
tgacgccgtgacttgcctctgagga

SEQ ID NO: 3090005 - DNA, 25 bp, Homo sapien
ctttggactttaactggagctgctc

SEQ ID NO: 3090006 - DNA, 25 bp, Homo sapien
catgggcttgcaagggctttggact

SEQ ID NO: 3090007 - DNA, 25 bp, Homo sapien
catcagatggctttgcggtgcatgg

SEQ ID NO: 3090008 - DNA, 25 bp, Homo sapien
cagtttcttgactcaagcccagctc

SEQ ID NO: 3090009 - DNA, 25 bp, Homo sapien
gaggtgtcgggaaatgctgtttaac

SEQ ID NO: 3090010 - DNA, 25 bp, Homo sapien
ctaccatggcaagcccacagaggtg

SEQ ID NO: 3090011 - DNA, 25 bp, Homo sapien
aatgctgtttaactgcctctcctcc

SEQ ID NO: 3090012 - DNA, 25 bp, Homo sapien
cagaggcagggcgttctgaatggct

SEQ ID NO: 3090013 - DNA, 25 bp, Homo sapien
ggaggccacggtgttatttcctcac

SEQ ID NO: 3090014 - DNA, 25 bp, Homo sapien
acggtgttatttcctcacctctcag

SEQ ID NO: 3090015 - DNA, 25 bp, Homo sapien
gggcgttctgaatggctcctgtgaa

SEQ ID NO: 3090016 - DNA, 25 bp, Homo sapien
agcagaattacttaaaactgtgtcg

SEQ ID NO: 3090017 - DNA, 25 bp, Homo sapien
cccagggtatttactctctggttct

SEQ ID NO: 3090018 - DNA, 25 bp, Homo sapien
ctgtgtcgtccttaggtgtttgtgg

SEQ ID NO: 3090019 - DNA, 25 bp, Homo sapien
tgcctggcttcaggccgggcattgt

SEQ ID NO: 3090020 - DNA, 25 bp, Homo sapien
catcattaacatgcgatgggggagg

SEQ ID NO: 3090021 - DNA, 25 bp, Homo sapien
gcctgataacaagtgcacattgacg

SEQ ID NO: 3090022 - DNA, 25 bp, Homo sapien
agggatgccccgtactcgcttccgg

SEQ ID NO: 3090023 - DNA, 25 bp, Homo sapien
cattgacggcccaggttccccaggg

SEQ ID NO: 3090024 - DNA, 25 bp, Homo sapien
tgtgctgcgaatatccaaaataacc

SEQ ID NO: 3090025 - DNA, 25 bp, Homo sapien
caaaataacccatggtgaccccagg

SEQ ID NO: 3090026 - DNA, 25 bp, Homo sapien
gcccctggcaagatctttctcagcc

SEQ ID NO: 3090027 - DNA, 25 bp, Homo sapien
tctcagccccatgctaaaaacagtc

SEQ ID NO: 3090028 - DNA, 25 bp, Homo sapien
gtgggcacagcgtcgtgaccagaac

SEQ ID NO: 3090029 - DNA, 25 bp, Homo sapien
aggccccaggtctgactcatgcagt

SEQ ID NO: 3090030 - DNA, 25 bp, Homo sapien
tgtccccgtggttgccagatgctgg

SEQ ID NO: 3090031 - DNA, 25 bp, Homo sapien
accagaacaacgcacgatgccaggc

SEQ ID NO: 3090032 - DNA, 25 bp, Homo sapien
atgcatgggacagagggattgttcc

SEQ ID NO: 3090033 - DNA, 25 bp, Homo sapien
ggattgttcccggatgcctaagaaa

SEQ ID NO: 3090034 - DNA, 25 bp, Homo sapien
ggtactatcgaaacagaaagcctct

SEQ ID NO: 3090035 - DNA, 25 bp, Homo sapien
gaaagcctcttatgagaggaggcca

SEQ ID NO: 3090036 - DNA, 25 bp, Homo sapien
attcagagctgatgtgtgtctggag

SEQ ID NO: 3090037 - DNA, 25 bp, Homo sapien
cattcagagctgatgtgtgtctgga

SEQ ID NO: 3090038 - DNA, 25 bp, Homo sapien
catcaaggctcagcgctgtctgctc

SEQ ID NO: 3090039 - DNA, 25 bp, Homo sapien
aggctggagcacacgcatcaaggct

SEQ ID NO: 3090040 - DNA, 25 bp, Homo sapien
tccggtcatcagaactattgtgtgc

SEQ ID NO: 3090041 - DNA, 25 bp, Homo sapien
catgtatctcatctccaaacagccg

SEQ ID NO: 3090042 - DNA, 25 bp, Homo sapien
ctttgaagtgaggaagcagagtttc

SEQ ID NO: 3090043 - DNA, 25 bp, Homo sapien
aagtgaggaagcagagtttctgttt

SEQ ID NO: 3090044 - DNA, 25 bp, Homo sapien
tgaagtgaggaagcagagtttctgt

SEQ ID NO: 3090045 - DNA, 25 bp, Homo sapien
gtgaggaagcagagtttctgttttt

SEQ ID NO: 3090046 - DNA, 25 bp, Homo sapien
gttgaagtgtacagaagccagaggt

SEQ ID NO: 3090047 - DNA, 25 bp, Homo sapien
tgttgaagtgtacagaagccagagg

SEQ ID NO: 3090048 - DNA, 25 bp, Homo sapien
gtctggtttacacttactgcctctc

SEQ ID NO: 3090049 - DNA, 25 bp, Homo sapien
aggagagtccaacttgaaatttcac

SEQ ID NO: 3090050 - DNA, 25 bp, Homo sapien
tcttcaccacttcaaaggagagtcc

SEQ ID NO: 3090051 - DNA, 25 bp, Homo sapien
gaaatttcactgtctggtttacact

SEQ ID NO: 3090052 - DNA, 25 bp, Homo sapien
tagaatgtttagcacatccctggtc

SEQ ID NO: 3090053 - DNA, 25 bp, Homo sapien
taggtggtaacaaagccagaactca

SEQ ID NO: 3090054 - DNA, 25 bp, Homo sapien
tagagaaccttgcactagagcaggc

SEQ ID NO: 3090055 - DNA, 25 bp, Homo sapien
cacagagaagtgaattaggacccca

SEQ ID NO: 3090056 - DNA, 25 bp, Homo sapien
gggccagcaatagccgggagccctt

SEQ ID NO: 3090057 - DNA, 25 bp, Homo sapien
ggaaacccacaagggctggagagca

SEQ ID NO: 3090058 - DNA, 25 bp, Homo sapien
aagcccgaggatttggtccacacag

SEQ ID NO: 3090059 - DNA, 25 bp, Homo sapien
ctatttacaaaggtgcgggtgaggt

SEQ ID NO: 3090060 - DNA, 25 bp, Homo sapien
gcatttccagttaggtggataactt

SEQ ID NO: 3090061 - DNA, 25 bp, Homo sapien
gtctgcatttccagttaggtggata

SEQ ID NO: 3090062 - DNA, 25 bp, Homo sapien
tggtgcccctctccaagtctgcatt

SEQ ID NO: 3090063 - DNA, 25 bp, Homo sapien
ctgcatttccagttaggtggataac

SEQ ID NO: 3090064 - DNA, 25 bp, Homo sapien
ggcatgtgatcctcaagacgacgaa

SEQ ID NO: 3090065 - DNA, 25 bp, Homo sapien
gaggttcctgcgtcgttgagccaga

SEQ ID NO: 3090066 - DNA, 25 bp, Homo sapien
gtcagcatgctgaaccgacggacga

SEQ ID NO: 3090067 - DNA, 25 bp, Homo sapien
cagggtctctgaaatctcccgggaa

SEQ ID NO: 3090068 - DNA, 25 bp, Homo sapien
caactggcatttggcaacaggagcc

SEQ ID NO: 3090069 - DNA, 25 bp, Homo sapien
tgccccttgtcatagacccaaggag

SEQ ID NO: 3090070 - DNA, 25 bp, Homo sapien
agagtctggagggttccatcggtca

SEQ ID NO: 3090071 - DNA, 25 bp, Homo sapien
ctgactggacttcagagtctggagg

SEQ ID NO: 3090072 - DNA, 25 bp, Homo sapien
gtgtttcgccagttaagcacctgtg

SEQ ID NO: 3090073 - DNA, 25 bp, Homo sapien
atgtccaagtgtgcccagcagcgga

SEQ ID NO: 3090074 - DNA, 25 bp, Homo sapien
tccgttcggcctagtgatgatgtca

SEQ ID NO: 3090075 - DNA, 25 bp, Homo sapien
gcaaggccccgagacttttcttctg

SEQ ID NO: 3090076 - DNA, 25 bp, Homo sapien
agctctgacccaagtgaacacaagg

SEQ ID NO: 3090077 - DNA, 25 bp, Homo sapien
gaaagtccaaatgaacccgcaaaga

SEQ ID NO: 3090078 - DNA, 25 bp, Homo sapien
gagtccagcttttgacatggcatag

SEQ ID NO: 3090079 - DNA, 25 bp, Homo sapien
gaaggacttccatgtacaagatcaa

SEQ ID NO: 3090080 - DNA, 25 bp, Homo sapien
cagatcatcatcctggcattggaat

SEQ ID NO: 3090081 - DNA, 25 bp, Homo sapien
ccagatcatcatcctggcattggaa

SEQ ID NO: 3090082 - DNA, 25 bp, Homo sapien
accccagatcatcatcctggcattg

SEQ ID NO: 3090083 - DNA, 25 bp, Homo sapien
cccagatcatcatcctggcattgga

SEQ ID NO: 3090084 - DNA, 25 bp, Homo sapien
tcggaagcaaagctgcaatccctga

SEQ ID NO: 3090085 - DNA, 25 bp, Homo sapien
taagatgggtccacctcggatgtcc

SEQ ID NO: 3090086 - DNA, 25 bp, Homo sapien
agagtctgcacaggaccgtcacggt

SEQ ID NO: 3090087 - DNA, 25 bp, Homo sapien
tcctcttgacccatgactaagatgg

SEQ ID NO: 3090088 - DNA, 25 bp, Homo sapien
gagtcacctcagcaacccaccaggt

SEQ ID NO: 3090089 - DNA, 25 bp, Homo sapien
gggatttggtgagccaaatgctacc

SEQ ID NO: 3090090 - DNA, 25 bp, Homo sapien
acacgtagcctacccctgtgtctga

SEQ ID NO: 3090091 - DNA, 25 bp, Homo sapien
cggagcctggcgtttatctggtggg

SEQ ID NO: 3090092 - DNA, 25 bp, Homo sapien
cacagccagaactgcgatacaaacc

SEQ ID NO: 3090093 - DNA, 25 bp, Homo sapien
cagaactgcgatacaaaccaaaggg

SEQ ID NO: 3090094 - DNA, 25 bp, Homo sapien
agccagaactgcgatacaaaccaaa

SEQ ID NO: 3090095 - DNA, 25 bp, Homo sapien
tggaggctggccgccagagagccac

SEQ ID NO: 3090096 - DNA, 25 bp, Homo sapien
gaatcatcctgccagctagaatcac

SEQ ID NO: 3090097 - DNA, 25 bp, Homo sapien
tcattgtagtatagctcattgggcc

SEQ ID NO: 3090098 - DNA, 25 bp, Homo sapien
tctgcagaatcatcctgccagctag

SEQ ID NO: 3090099 - DNA, 25 bp, Homo sapien
gggccacatgctttgttgattataa

SEQ ID NO: 3090100 - DNA, 25 bp, Homo sapien
ttcaaatcaaccagagcttcagaca

SEQ ID NO: 3090101 - DNA, 25 bp, Homo sapien
cagacaaagggggaatttcatcaca

SEQ ID NO: 3090102 - DNA, 25 bp, Homo sapien
atcaaccagagcttcagacaaaggg

SEQ ID NO: 3090103 - DNA, 25 bp, Homo sapien
cccttgtggatttcaaatcaaccag

SEQ ID NO: 3090104 - DNA, 25 bp, Homo sapien
caacaccggacaagacagcttactc

SEQ ID NO: 3090105 - DNA, 25 bp, Homo sapien
tcctgccaagtgttgtcataaggcc

SEQ ID NO: 3090106 - DNA, 25 bp, Homo sapien
taacgctttgtcactgctcggagaa

SEQ ID NO: 3090107 - DNA, 25 bp, Homo sapien
tgtggaatgggcagagacaacaccg

SEQ ID NO: 3090108 - DNA, 25 bp, Homo sapien
cactgtaggaactgtagaccccaag

SEQ ID NO: 3090109 - DNA, 25 bp, Homo sapien
taagttgggactgcataaaggaacc

SEQ ID NO: 3090110 - DNA, 25 bp, Homo sapien
tagtgcctcgatacatgctaggtgc

SEQ ID NO: 3090111 - DNA, 25 bp, Homo sapien
catgctgtgtaggtggtagatcccc

SEQ ID NO: 3090112 - DNA, 25 bp, Homo sapien
gacctcgaggcaattctgatactgg

SEQ ID NO: 3090113 - DNA, 25 bp, Homo sapien
tggtggccaatccaaagggcctgtc

SEQ ID NO: 3090114 - DNA, 25 bp, Homo sapien
cagcatcgcctggaaacttgttgga

SEQ ID NO: 3090115 - DNA, 25 bp, Homo sapien
ttcaaactgcgagaatcagacccag

SEQ ID NO: 3090116 - DNA, 25 bp, Homo sapien
tatactcacagcagagcggtgggcc

SEQ ID NO: 3090117 - DNA, 25 bp, Homo sapien
gactcttaacaaaggtggctcgctc

SEQ ID NO: 3090118 - DNA, 25 bp, Homo sapien
tagacgctttagacgaccactgcgg

SEQ ID NO: 3090119 - DNA, 25 bp, Homo sapien
tcaggaagacatatagcgcggcagt

SEQ ID NO: 3090120 - DNA, 25 bp, Homo sapien
caaaatatgcctgcaaagaatgcct

SEQ ID NO: 3090121 - DNA, 25 bp, Homo sapien
gcctttaactctatcctatggtgga

SEQ ID NO: 3090122 - DNA, 25 bp, Homo sapien
tagaatgcagcatcgtgtcaccaaa

SEQ ID NO: 3090123 - DNA, 25 bp, Homo sapien
aattaacctcttggctgctagcttg

SEQ ID NO: 3090124 - DNA, 25 bp, Homo sapien
caaagggaactgtgcatctatagat

SEQ ID NO: 3090125 - DNA, 25 bp, Homo sapien
tagttgcaagtctagcagcaaagca

SEQ ID NO: 3090126 - DNA, 25 bp, Homo sapien
agcaaagcaattaagtgagaacata

SEQ ID NO: 3090127 - DNA, 25 bp, Homo sapien
tctatagatgaagtccaactacctt

SEQ ID NO: 3090128 - DNA, 25 bp, Homo sapien
agccattgctgccagatgagctccc

SEQ ID NO: 3090129 - DNA, 25 bp, Homo sapien
tgctgccagatgagctccctaggct

SEQ ID NO: 3090130 - DNA, 25 bp, Homo sapien
ccattgctgccagatgagctcccta

SEQ ID NO: 3090131 - DNA, 25 bp, Homo sapien
attgctgccagatgagctccctagg

SEQ ID NO: 3090132 - DNA, 25 bp, Homo sapien
gaaactggccaagatgctgcagcac

SEQ ID NO: 3090133 - DNA, 25 bp, Homo sapien
gactccgcgatctgcttgttaggca

SEQ ID NO: 3090134 - DNA, 25 bp, Homo sapien
tctccgacttcagttgatcctcagg

SEQ ID NO: 3090135 - DNA, 25 bp, Homo sapien
gaactggacacctcgaggttctccg

SEQ ID NO: 3090136 - DNA, 25 bp, Homo sapien
aaatattcacggctccttcctcagg

SEQ ID NO: 3090137 - DNA, 25 bp, Homo sapien
gataagtgcctaggtgtacaatggg

SEQ ID NO: 3090138 - DNA, 25 bp, Homo sapien
cttctctagaccgtgatgttccagg

SEQ ID NO: 3090139 - DNA, 25 bp, Homo sapien
tacaatgggatgtacgagccataca

SEQ ID NO: 3090140 - DNA, 25 bp, Homo sapien
tatagcaatgtaattagttttaact

SEQ ID NO: 3090141 - DNA, 25 bp, Homo sapien
ctcagttttatagcaatgtaattag

SEQ ID NO: 3090142 - DNA, 25 bp, Homo sapien
ttctcagttttatagcaatgtaatt

SEQ ID NO: 3090143 - DNA, 25 bp, Homo sapien
cagttttatagcaatgtaattagtt

SEQ ID NO: 3090144 - DNA, 25 bp, Homo sapien
tgttcacaaagatcaacgtctacag

SEQ ID NO: 3090145 - DNA, 25 bp, Homo sapien
catggcacatactcaaaaatgggcc

SEQ ID NO: 3090146 - DNA, 25 bp, Homo sapien
tagagtgtcttatccattccgatcc

SEQ ID NO: 3090147 - DNA, 25 bp, Homo sapien
gaggaaagatcaaagcgcattcatc

SEQ ID NO: 3090148 - DNA, 25 bp, Homo sapien
gtcctgctggatccattgcacggaa

SEQ ID NO: 3090149 - DNA, 25 bp, Homo sapien
tgctggatccattgcacggaatgtt

SEQ ID NO: 3090150 - DNA, 25 bp, Homo sapien
ctgtcctgctggatccattgcacgg

SEQ ID NO: 3090151 - DNA, 25 bp, Homo sapien
cctgctggatccattgcacggaatg

SEQ ID NO: 3090152 - DNA, 25 bp, Homo sapien
tgagccagactgtcttgaggagtgc

SEQ ID NO: 3090153 - DNA, 25 bp, Homo sapien
agattggttactgtggtcctgaagc

SEQ ID NO: 3090154 - DNA, 25 bp, Homo sapien
tcttctttggtacaagggccgacca

SEQ ID NO: 3090155 - DNA, 25 bp, Homo sapien
tcttcagaacaaggttgaactgagc

SEQ ID NO: 3090156 - DNA, 25 bp, Homo sapien
ttcacaatcagctaataacaaaagg

SEQ ID NO: 3090157 - DNA, 25 bp, Homo sapien
tgccttcctattatcaaatcaataa

SEQ ID NO: 3090158 - DNA, 25 bp, Homo sapien
gtgccttcctattatcaaatcaata

SEQ ID NO: 3090159 - DNA, 25 bp, Homo sapien
aaatgctgggttgctggctacttca

SEQ ID NO: 3090160 - DNA, 25 bp, Homo sapien
gctagggagcgaagaagaagatact

SEQ ID NO: 3090161 - DNA, 25 bp, Homo sapien
tgtacaaaagggttctgcggtggcc

SEQ ID NO: 3090162 - DNA, 25 bp, Homo sapien
ggtggcatttcagctagttcccgtg

SEQ ID NO: 3090163 - DNA, 25 bp, Homo sapien
gaaagcttagtcaactacacatgta

SEQ ID NO: 3090164 - DNA, 25 bp, Homo sapien
caaaatcatagtactaataactaga

SEQ ID NO: 3090165 - DNA, 25 bp, Homo sapien
ttcaacaaacaaaatcatagtacta

SEQ ID NO: 3090166 - DNA, 25 bp, Homo sapien
ttaacactcaatagatgctgaggtg

SEQ ID NO: 3090167 - DNA, 25 bp, Homo sapien
agtctgccctcactggcggctgatg

SEQ ID NO: 3090168 - DNA, 25 bp, Homo sapien
ccctgactgagaaaggcatgatgct

SEQ ID NO: 3090169 - DNA, 25 bp, Homo sapien
tgctcgctccactgctggaaccgtg

SEQ ID NO: 3090170 - DNA, 25 bp, Homo sapien
tcttcggcactgctggtgagcttcc

SEQ ID NO: 3090171 - DNA, 25 bp, Homo sapien
agcctcccctataggtaatcccgag

SEQ ID NO: 3090172 - DNA, 25 bp, Homo sapien
gctccggaattacagcttctgcagg

SEQ ID NO: 3090173 - DNA, 25 bp, Homo sapien
caatgaagctattcagatgtgaagg

SEQ ID NO: 3090174 - DNA, 25 bp, Homo sapien
agactgtggccgatgagcaactgca

SEQ ID NO: 3090175 - DNA, 25 bp, Homo sapien
gaggctgctgattcaactgactttg

SEQ ID NO: 3090176 - DNA, 25 bp, Homo sapien
gctgattcaactgactttgctgctg

SEQ ID NO: 3090177 - DNA, 25 bp, Homo sapien
gattcaactgactttgctgctggac

SEQ ID NO: 3090178 - DNA, 25 bp, Homo sapien
gctgctgattcaactgactttgctg

SEQ ID NO: 3090179 - DNA, 25 bp, Homo sapien
tactgggataaacaacactaggacg

SEQ ID NO: 3090180 - DNA, 25 bp, Homo sapien
tctgctgctgatttaacaaggtgtg

SEQ ID NO: 3090181 - DNA, 25 bp, Homo sapien
cactaggacgtgattcaggacttct

SEQ ID NO: 3090182 - DNA, 25 bp, Homo sapien
aaagtggcgattagggattgcatac

SEQ ID NO: 3090183 - DNA, 25 bp, Homo sapien
tggtgttcgaatcttattaatttca

SEQ ID NO: 3090184 - DNA, 25 bp, Homo sapien
ctttttctctggtgttcgaatctta

SEQ ID NO: 3090185 - DNA, 25 bp, Homo sapien
tcaggtccggaattatttgtatcac

SEQ ID NO: 3090186 - DNA, 25 bp, Homo sapien
atttcaggtccggaattatttgtat

SEQ ID NO: 3090187 - DNA, 25 bp, Homo sapien
gccattgctgcctgatgtgtaataa

SEQ ID NO: 3090188 - DNA, 25 bp, Homo sapien
ggagatcctcgtccatgtgtctgta

SEQ ID NO: 3090189 - DNA, 25 bp, Homo sapien
tgtaataggttcatgttataggcca

SEQ ID NO: 3090190 - DNA, 25 bp, Homo sapien
tgtaataattcgaggatcaactgca

SEQ ID NO: 3090191 - DNA, 25 bp, Homo sapien
gaaagtatttcgaatgtccacttac

SEQ ID NO: 3090192 - DNA, 25 bp, Homo sapien
ttgattcaatagaaagtatttcgaa

SEQ ID NO: 3090193 - DNA, 25 bp, Homo sapien
tcaatagaaagtatttcgaatgtcc

SEQ ID NO: 3090194 - DNA, 25 bp, Homo sapien
tagaaagtatttcgaatgtccactt

SEQ ID NO: 3090195 - DNA, 25 bp, Homo sapien
ggtaaaggcaccgacataactacat

SEQ ID NO: 3090196 - DNA, 25 bp, Homo sapien
tacattccctccatagacagcaggt

SEQ ID NO: 3090197 - DNA, 25 bp, Homo sapien
tgaggatctattctttgaacagggc

SEQ ID NO: 3090198 - DNA, 25 bp, Homo sapien
aaagaatacttgtcccagtgtgagg

SEQ ID NO: 3090199 - DNA, 25 bp, Homo sapien
caattccatcattctggaagtgatc

SEQ ID NO: 3090200 - DNA, 25 bp, Homo sapien
attccatcattctggaagtgatcat

SEQ ID NO: 3090201 - DNA, 25 bp, Homo sapien
aattccatcattctggaagtgatca

SEQ ID NO: 3090202 - DNA, 25 bp, Homo sapien
ttccatcattctggaagtgatcatt

SEQ ID NO: 3090203 - DNA, 25 bp, Homo sapien
tgacacagggcaataaaccgttccc

SEQ ID NO: 3090204 - DNA, 25 bp, Homo sapien
gtgccagcggattcaacacatatgt

SEQ ID NO: 3090205 - DNA, 25 bp, Homo sapien
aaaagtgattccatgtaggctactg

SEQ ID NO: 3090206 - DNA, 25 bp, Homo sapien
aagcctctaactgggctttgatctg

SEQ ID NO: 3090207 - DNA, 25 bp, Homo sapien
tcttccaatagagcacagagcaatg

SEQ ID NO: 3090208 - DNA, 25 bp, Homo sapien
tcttgtgatggcagtattgagaagc

SEQ ID NO: 3090209 - DNA, 25 bp, Homo sapien
aaaaccataatctaagtcctctgtg

SEQ ID NO: 3090210 - DNA, 25 bp, Homo sapien
gtatgtcttgtacgtactgtgctaa

SEQ ID NO: 3090211 - DNA, 25 bp, Homo sapien
ttctacattaacatcagataatctc

SEQ ID NO: 3090212 - DNA, 25 bp, Homo sapien
gttcagcacgtattctaaacacttg

SEQ ID NO: 3090213 - DNA, 25 bp, Homo sapien
gataatctcttttttcgaagttcag

SEQ ID NO: 3090214 - DNA, 25 bp, Homo sapien
tgaacatttagcaccctttctacat

SEQ ID NO: 3090215 - DNA, 25 bp, Homo sapien
ctcgtgctgtaaagaaagttagtgg

SEQ ID NO: 3090216 - DNA, 25 bp, Homo sapien
cactggccatcagtttgccctcata

SEQ ID NO: 3090217 - DNA, 25 bp, Homo sapien
ctcatagaaaagctcagaggtataa

SEQ ID NO: 3090218 - DNA, 25 bp, Homo sapien
tcttctcctcgtgctgtaaagaaag

SEQ ID NO: 3090219 - DNA, 25 bp, Homo sapien
gagtcggtcaagtaatgaaacgtga

SEQ ID NO: 3090220 - DNA, 25 bp, Homo sapien
caggagaatcctacatgggaactca

SEQ ID NO: 3090221 - DNA, 25 bp, Homo sapien
cagggtaatgctcatagagtcggtc

SEQ ID NO: 3090222 - DNA, 25 bp, Homo sapien
tgatgatagcttcatgggagcggta

SEQ ID NO: 3090223 - DNA, 25 bp, Homo sapien
cataatggtttcacactccatggcc

SEQ ID NO: 3090224 - DNA, 25 bp, Homo sapien
gttttgagttgctaatgctagaggc

SEQ ID NO: 3090225 - DNA, 25 bp, Homo sapien
tgatcaccagccaagacaatccgag

SEQ ID NO: 3090226 - DNA, 25 bp, Homo sapien
tctaatagaatgtgtgtaaaaaacc

SEQ ID NO: 3090227 - DNA, 25 bp, Homo sapien
aaatgcagcataaacacaggatagc

SEQ ID NO: 3090228 - DNA, 25 bp, Homo sapien
ctagaaaatgcagcataaacacagg

SEQ ID NO: 3090229 - DNA, 25 bp, Homo sapien
tagaaaatgcagcataaacacagga

SEQ ID NO: 3090230 - DNA, 25 bp, Homo sapien
gaaaatgcagcataaacacaggata

SEQ ID NO: 3090231 - DNA, 25 bp, Homo sapien
cccacacactgtagtttgccaatcc

SEQ ID NO: 3090232 - DNA, 25 bp, Homo sapien
gcccacacactgtagtttgccaatc

SEQ ID NO: 3090233 - DNA, 25 bp, Homo sapien
tcccagtctaaactgaattcataag

SEQ ID NO: 3090234 - DNA, 25 bp, Homo sapien
cagtctaaactgaattcataagccc

SEQ ID NO: 3090235 - DNA, 25 bp, Homo sapien
ggtggacagtctttacccagcgatt

SEQ ID NO: 3090236 - DNA, 25 bp, Homo sapien
tcaaggtaacaaccaccactcgatg

SEQ ID NO: 3090237 - DNA, 25 bp, Homo sapien
ggttcaaggtccaactgacagaggt

SEQ ID NO: 3090238 - DNA, 25 bp, Homo sapien
tactgatgcacaactgggtggacag

SEQ ID NO: 3090239 - DNA, 25 bp, Homo sapien
caaatgaatctggtaaccgttagca

SEQ ID NO: 3090240 - DNA, 25 bp, Homo sapien
cagagtaatcttgcaacagaatggc

SEQ ID NO: 3090241 - DNA, 25 bp, Homo sapien
taaccactgtgactctctaccaaaa

SEQ ID NO: 3090242 - DNA, 25 bp, Homo sapien
catagaaagtatatgcagtaccaca

SEQ ID NO: 3090243 - DNA, 25 bp, Homo sapien
gcagcactattagaatgggtgcaaa

SEQ ID NO: 3090244 - DNA, 25 bp, Homo sapien
gattgcctgcttctacatatggatg

SEQ ID NO: 3090245 - DNA, 25 bp, Homo sapien
taatcctttatgtagagatcagcag

SEQ ID NO: 3090246 - DNA, 25 bp, Homo sapien
ctacatatggatgtaaataatcctt

SEQ ID NO: 3090247 - DNA, 25 bp, Homo sapien
taccagggaaatatgagcacgcttc

SEQ ID NO: 3090248 - DNA, 25 bp, Homo sapien
agaacagaggtagtatcctaccagg

SEQ ID NO: 3090249 - DNA, 25 bp, Homo sapien
cttgctagccctcattgtgtattta

SEQ ID NO: 3090250 - DNA, 25 bp, Homo sapien
aactgtcttgctagccctcattgtg

SEQ ID NO: 3090251 - DNA, 25 bp, Homo sapien
caagtggagtggtaatggccagaac

SEQ ID NO: 3090252 - DNA, 25 bp, Homo sapien
ccgatgataagcacaggcggcagct

SEQ ID NO: 3090253 - DNA, 25 bp, Homo sapien
tagagtgaacgttttgcctgtccca

SEQ ID NO: 3090254 - DNA, 25 bp, Homo sapien
gcctgtcccatagggtccgatgata

SEQ ID NO: 3090255 - DNA, 25 bp, Homo sapien
taaatagaacataacacacgagtat

SEQ ID NO: 3090256 - DNA, 25 bp, Homo sapien
catgcatctcgttaataaatagaac

SEQ ID NO: 3090257 - DNA, 25 bp, Homo sapien
tatgttaaacacatgcatctcgtta

SEQ ID NO: 3090258 - DNA, 25 bp, Homo sapien
cgagtatcgtgaatttcagtgaacc

SEQ ID NO: 3090259 - DNA, 25 bp, Homo sapien
tgaacatgccctacatagtagagga

SEQ ID NO: 3090260 - DNA, 25 bp, Homo sapien
gtgaggtgtctgtccatgatggccc

SEQ ID NO: 3090261 - DNA, 25 bp, Homo sapien
ctggaccacatatctctaggctgat

SEQ ID NO: 3090262 - DNA, 25 bp, Homo sapien
ttgcatgaggcaaaacacatcagga

SEQ ID NO: 3090263 - DNA, 25 bp, Homo sapien
ctgttaggactccatggtatggtgg

SEQ ID NO: 3090264 - DNA, 25 bp, Homo sapien
tgtctggaaacaaaaccccattgtc

SEQ ID NO: 3090265 - DNA, 25 bp, Homo sapien
tgatcctgtctagtgcatagtgcat

SEQ ID NO: 3090266 - DNA, 25 bp, Homo sapien
ctccatggtatggtgggagtcatac

SEQ ID NO: 3090267 - DNA, 25 bp, Homo sapien
cagtcgtccagccaaagtatcttca

SEQ ID NO: 3090268 - DNA, 25 bp, Homo sapien
gtgtttcagtaagcttaaagcgacc

SEQ ID NO: 3090269 - DNA, 25 bp, Homo sapien
tgagcatactttgcacctccagaaa

SEQ ID NO: 3090270 - DNA, 25 bp, Homo sapien
tgtgtcacagtcaggccgaagatta

SEQ ID NO: 3090271 - DNA, 25 bp, Homo sapien
actttcgtgattagaaatattctgc

SEQ ID NO: 3090272 - DNA, 25 bp, Homo sapien
atgtaagaaactagtatgaagcccc

SEQ ID NO: 3090273 - DNA, 25 bp, Homo sapien
gaagccccttgatactactttcgtg

SEQ ID NO: 3090274 - DNA, 25 bp, Homo sapien
agtctcttgcaacccttaccatcaa

SEQ ID NO: 3090275 - DNA, 25 bp, Homo sapien
cacatcatgcctgattatttaactt

SEQ ID NO: 3090276 - DNA, 25 bp, Homo sapien
tcaaactgacccacatcatgcctga

SEQ ID NO: 3090277 - DNA, 25 bp, Homo sapien
cagtatttaacctctacaattttgt

SEQ ID NO: 3090278 - DNA, 25 bp, Homo sapien
gacccacatcatgcctgattattta

SEQ ID NO: 3090279 - DNA, 25 bp, Homo sapien
cagtttttaaggcttgtctccagtt

SEQ ID NO: 3090280 - DNA, 25 bp, Homo sapien
tttcactaatcttccctcactctaa

SEQ ID NO: 3090281 - DNA, 25 bp, Homo sapien
ggtcttaacctgtggcatatggata

SEQ ID NO: 3090282 - DNA, 25 bp, Homo sapien
ttaatagaaagctactaccaaatac

SEQ ID NO: 3090283 - DNA, 25 bp, Homo sapien
tagaggaagaatcccaacgtttagc

SEQ ID NO: 3090284 - DNA, 25 bp, Homo sapien
taaaacggactgagtaaatagctgg

SEQ ID NO: 3090285 - DNA, 25 bp, Homo sapien
tgtaaccgtgactgatagttgctct

SEQ ID NO: 3090286 - DNA, 25 bp, Homo sapien
ggtcaatgatttgtctaaaacggac

SEQ ID NO: 3090287 - DNA, 25 bp, Homo sapien
cataaatagcagaaggatgtgggtc

SEQ ID NO: 3090288 - DNA, 25 bp, Homo sapien
tagcagaaggatgtgggtcccttat

SEQ ID NO: 3090289 - DNA, 25 bp, Homo sapien
cctcataaatagcagaaggatgtgg

SEQ ID NO: 3090290 - DNA, 25 bp, Homo sapien
aaatagcagaaggatgtgggtccct

SEQ ID NO: 3090291 - DNA, 25 bp, Homo sapien
tcaaaaacactaactgtaatagtac

SEQ ID NO: 3090292 - DNA, 25 bp, Homo sapien
actgtaatagtactgagataaaagc

SEQ ID NO: 3090293 - DNA, 25 bp, Homo sapien
taaacaaattgtttgcccataaaca

SEQ ID NO: 3090294 - DNA, 25 bp, Homo sapien
gacatggactctcccgtgataatca

SEQ ID NO: 3090295 - DNA, 25 bp, Homo sapien
aaatattaaccgtctggccctctgc

SEQ ID NO: 3090296 - DNA, 25 bp, Homo sapien
agtaaaagggatcaaagtcagtggg

SEQ ID NO: 3090297 - DNA, 25 bp, Homo sapien
tcattacgacgcagagctgagtagt

SEQ ID NO: 3090298 - DNA, 25 bp, Homo sapien
cagtcacacccatttgcttatgcat

SEQ ID NO: 3090299 - DNA, 25 bp, Homo sapien
tacctgggtagtactatctccggca

SEQ ID NO: 3090300 - DNA, 25 bp, Homo sapien
tactaaaatgaggacgatgagcatc

SEQ ID NO: 3090301 - DNA, 25 bp, Homo sapien
tctccggcagatattgcaatgatac

SEQ ID NO: 3090302 - DNA, 25 bp, Homo sapien
caaagtcgaaaactatggtttggcg

SEQ ID NO: 3090303 - DNA, 25 bp, Homo sapien
ggtcaggattgtgctctacctttac

SEQ ID NO: 3090304 - DNA, 25 bp, Homo sapien
catgtctggtgggattttttggtgc

SEQ ID NO: 3090305 - DNA, 25 bp, Homo sapien
gctctacctttactccttctataca

SEQ ID NO: 3090306 - DNA, 25 bp, Homo sapien
tgctgacagtaactgacaggtcagg

SEQ ID NO: 3090307 - DNA, 25 bp, Homo sapien
ctcaagttcattgtttaagacaaac

SEQ ID NO: 3090308 - DNA, 25 bp, Homo sapien
aaataatgtagcttattttcctcac

SEQ ID NO: 3090309 - DNA, 25 bp, Homo sapien
caagttcattgtttaagacaaacaa

SEQ ID NO: 3090310 - DNA, 25 bp, Homo sapien
gactcaagttcattgtttaagacaa

SEQ ID NO: 3090311 - DNA, 25 bp, Homo sapien
gccgtgaagcatatcttttctgcca

SEQ ID NO: 3090312 - DNA, 25 bp, Homo sapien
aatgtgctgaagtacactgggcacc

SEQ ID NO: 3090313 - DNA, 25 bp, Homo sapien
gggcaccatacctacagattccttg

SEQ ID NO: 3090314 - DNA, 25 bp, Homo sapien
tctatcaaggtttccatgtaactgc

SEQ ID NO: 3090315 - DNA, 25 bp, Homo sapien
tcgtactgtcttgtacaaaggaggg

SEQ ID NO: 3090316 - DNA, 25 bp, Homo sapien
ataaactcccagcatttgccctctg

SEQ ID NO: 3090317 - DNA, 25 bp, Homo sapien
gaaaggccatatttatcgtactgtc

SEQ ID NO: 3090318 - DNA, 25 bp, Homo sapien
caaaacttcatgtgctgaaaggcca

SEQ ID NO: 3090319 - DNA, 25 bp, Homo sapien
tcctcgctgcttgtgattcccctag

SEQ ID NO: 3090320 - DNA, 25 bp, Homo sapien
cttgtgattcccctaggtggtgggc

SEQ ID NO: 3090321 - DNA, 25 bp, Homo sapien
ttacacaaagtatattcctcgctgc

SEQ ID NO: 3090322 - DNA, 25 bp, Homo sapien
gtggtgggcggaaatgccaaccatt

SEQ ID NO: 3090323 - DNA, 25 bp, Homo sapien
catctaagtcttccacgtgatatcc

SEQ ID NO: 3090324 - DNA, 25 bp, Homo sapien
atccagagagggcgttactagttgc

SEQ ID NO: 3090325 - DNA, 25 bp, Homo sapien
cagagagggcgttactagttgctgt

SEQ ID NO: 3090326 - DNA, 25 bp, Homo sapien
tccagagagggcgttactagttgct

SEQ ID NO: 3090327 - DNA, 25 bp, Homo sapien
gagcacttactgctaggtaccccac

SEQ ID NO: 3090328 - DNA, 25 bp, Homo sapien
gagtccaaggctagggatccattca

SEQ ID NO: 3090329 - DNA, 25 bp, Homo sapien
tcttgcagctaatggcatgctacca

SEQ ID NO: 3090330 - DNA, 25 bp, Homo sapien
gataaaccaccaatcagcgcatttg

SEQ ID NO: 3090331 - DNA, 25 bp, Homo sapien
gtgaagcaccgcaccgggactgttt

SEQ ID NO: 3090332 - DNA, 25 bp, Homo sapien
tgtaccaacctaatacctatatata

SEQ ID NO: 3090333 - DNA, 25 bp, Homo sapien
gtaccaacctaatacctatatatac

SEQ ID NO: 3090334 - DNA, 25 bp, Homo sapien
taccaacctaatacctatatataca

SEQ ID NO: 3090335 - DNA, 25 bp, Homo sapien
ggacagaagataagccctggcacac

SEQ ID NO: 3090336 - DNA, 25 bp, Homo sapien
tctagtagccagaagtagttaaaaa

SEQ ID NO: 3090337 - DNA, 25 bp, Homo sapien
taccagttctgtccactagggacag

SEQ ID NO: 3090338 - DNA, 25 bp, Homo sapien
taaggcttgaggatatctcattttt

SEQ ID NO: 3090339 - DNA, 25 bp, Homo sapien
tcttccaaacggatccactgaaatg

SEQ ID NO: 3090340 - DNA, 25 bp, Homo sapien
actcttccaaacggatccactgaaa

SEQ ID NO: 3090341 - DNA, 25 bp, Homo sapien
caaactcttccaaacggatccactg

SEQ ID NO: 3090342 - DNA, 25 bp, Homo sapien
cttccaaacggatccactgaaatgg

SEQ ID NO: 3090343 - DNA, 25 bp, Homo sapien
tcaaatcctttgttaccatcccatt

SEQ ID NO: 3090344 - DNA, 25 bp, Homo sapien
agcactgcccgaaaggcatcttctc

SEQ ID NO: 3090345 - DNA, 25 bp, Homo sapien
aaagcactgcccgaaaggcatcttc

SEQ ID NO: 3090346 - DNA, 25 bp, Homo sapien
ctgtgagtgacttggcaagaatggt

SEQ ID NO: 3090347 - DNA, 25 bp, Homo sapien
ttggcaagaatggtggatacaggtt

SEQ ID NO: 3090348 - DNA, 25 bp, Homo sapien
aagaacagccatcattaaccatatg

SEQ ID NO: 3090349 - DNA, 25 bp, Homo sapien
taaccatatgacatttaatgcacat

SEQ ID NO: 3090350 - DNA, 25 bp, Homo sapien
attaaccatatgacatttaatgcac

SEQ ID NO: 3090351 - DNA, 25 bp, Homo sapien
agaacagccatcattaaccatatga

SEQ ID NO: 3090352 - DNA, 25 bp, Homo sapien
tttctataacactctcaaagtggca

SEQ ID NO: 3090353 - DNA, 25 bp, Homo sapien
gaccatggtgagtggaaaaaagcca

SEQ ID NO: 3090354 - DNA, 25 bp, Homo sapien
ttgggaggctgactgcttgtaccca

SEQ ID NO: 3090355 - DNA, 25 bp, Homo sapien
ggcatggcggcgcatacccataata

SEQ ID NO: 3090356 - DNA, 25 bp, Homo sapien
catcatttttgaaattagccaaaaa

SEQ ID NO: 3090357 - DNA, 25 bp, Homo sapien
attatcatcatttttgaaattagcc

SEQ ID NO: 3090358 - DNA, 25 bp, Homo sapien
tcatcatttttgaaattagccaaaa

SEQ ID NO: 3090359 - DNA, 25 bp, Homo sapien
tatcatcatttttgaaattagccaa

SEQ ID NO: 3090360 - DNA, 25 bp, Homo sapien
tgttcaattcaataattcgagtctc

SEQ ID NO: 3090361 - DNA, 25 bp, Homo sapien
tcaattcaataattcgagtctcatt

SEQ ID NO: 3090362 - DNA, 25 bp, Homo sapien
gttcaattcaataattcgagtctca

SEQ ID NO: 3090363 - DNA, 25 bp, Homo sapien
ttcaattcaataattcgagtctcat

SEQ ID NO: 3090364 - DNA, 25 bp, Homo sapien
catgtctacaatcttcatcagcttg

SEQ ID NO: 3090365 - DNA, 25 bp, Homo sapien
ttacacatggctcacccccttgcct

SEQ ID NO: 3090366 - DNA, 25 bp, Homo sapien
ttaaaattgtaaccacatctctaac

SEQ ID NO: 3090367 - DNA, 25 bp, Homo sapien
ttcatgcggttactaccttttaaca

SEQ ID NO: 3090368 - DNA, 25 bp, Homo sapien
catgcggttactaccttttaacaat

SEQ ID NO: 3090369 - DNA, 25 bp, Homo sapien
gacaaggccctgtgaagtctgccat

SEQ ID NO: 3090370 - DNA, 25 bp, Homo sapien
tctgccatggagtactggccaagag

SEQ ID NO: 3090371 - DNA, 25 bp, Homo sapien
gatgcgttctatttccaatggacaa

SEQ ID NO: 3090372 - DNA, 25 bp, Homo sapien
gagaagactctcgattttgatgcgt

SEQ ID NO: 3090373 - DNA, 25 bp, Homo sapien
accatgtcccgctaaatcgttattt

SEQ ID NO: 3090374 - DNA, 25 bp, Homo sapien
gcaatccttctaactcagcatcttg

SEQ ID NO: 3090375 - DNA, 25 bp, Homo sapien
ctgttacctaggctcgagtagagtg

SEQ ID NO: 3090376 - DNA, 25 bp, Homo sapien
tgcaccaagcctaaactaacacttt

SEQ ID NO: 3090377 - DNA, 25 bp, Homo sapien
tacctcctagggttactgcaaggat

SEQ ID NO: 3090378 - DNA, 25 bp, Homo sapien
tatagcacagtgatccagagcacag

SEQ ID NO: 3090379 - DNA, 25 bp, Homo sapien
tgggaagacaactaatacctacctc

SEQ ID NO: 3090380 - DNA, 25 bp, Homo sapien
taaagtccatggataccagaggccc

SEQ ID NO: 3090381 - DNA, 25 bp, Homo sapien
tgcactgggtatcacccaaatagcc

SEQ ID NO: 3090382 - DNA, 25 bp, Homo sapien
cactgggtatcacccaaatagccca

SEQ ID NO: 3090383 - DNA, 25 bp, Homo sapien
actgcactgggtatcacccaaatag

SEQ ID NO: 3090384 - DNA, 25 bp, Homo sapien
gcactgggtatcacccaaatagccc

SEQ ID NO: 3090385 - DNA, 25 bp, Homo sapien
caccagcactgtagttcattagtga

SEQ ID NO: 3090386 - DNA, 25 bp, Homo sapien
cattagtgatccattacttcatcca

SEQ ID NO: 3090387 - DNA, 25 bp, Homo sapien
tctcaccagcactgtagttcattag

SEQ ID NO: 3090388 - DNA, 25 bp, Homo sapien
gcactgtagttcattagtgatccat

SEQ ID NO: 3090389 - DNA, 25 bp, Homo sapien
cattactttctacgccatcttggat

SEQ ID NO: 3090390 - DNA, 25 bp, Homo sapien
tggatccacttgtcaacgtccccac

SEQ ID NO: 3090391 - DNA, 25 bp, Homo sapien
acttgtcaacgtccccacaaagcat

SEQ ID NO: 3090392 - DNA, 25 bp, Homo sapien
tgtcattactttctacgccatcttg

SEQ ID NO: 3090393 - DNA, 25 bp, Homo sapien
cgtgatccgcgaccctctaggtggg

SEQ ID NO: 3090394 - DNA, 25 bp, Homo sapien
gcgggtaacgtgatccgcgaccctc

SEQ ID NO: 3090395 - DNA, 25 bp, Homo sapien
gggtaacgtgatccgcgaccctcta

SEQ ID NO: 3090396 - DNA, 25 bp, Homo sapien
ctccgggcgggtaacgtgatccgcg

SEQ ID NO: 3090397 - DNA, 25 bp, Homo sapien
aactttggtgtcgttggtctcacac

SEQ ID NO: 3090398 - DNA, 25 bp, Homo sapien
gaactttggtgtcgttggtctcaca

SEQ ID NO: 3090399 - DNA, 25 bp, Homo sapien
agaactttggtgtcgttggtctcac

SEQ ID NO: 3090400 - DNA, 25 bp, Homo sapien
ctttggtgtcgttggtctcacacac

SEQ ID NO: 3090401 - DNA, 25 bp, Homo sapien
caaagattgaagtcctcgtcgtcgt

SEQ ID NO: 3090402 - DNA, 25 bp, Homo sapien
ctggggggtggtggtcttatggatg

SEQ ID NO: 3090403 - DNA, 25 bp, Homo sapien
tctttaccatccactatctgggggg

SEQ ID NO: 3090404 - DNA, 25 bp, Homo sapien
atctggggggtggtggtcttatgga

SEQ ID NO: 3090405 - DNA, 25 bp, Homo sapien
ttgaccttgatgtttagcaaggacc

SEQ ID NO: 3090406 - DNA, 25 bp, Homo sapien
cctcctgattgaccttgatgtttag

SEQ ID NO: 3090407 - DNA, 25 bp, Homo sapien
caaggacccgttctcctggtcctgg

SEQ ID NO: 3090408 - DNA, 25 bp, Homo sapien
tagcaaggacccgttctcctggtcc

SEQ ID NO: 3090409 - DNA, 25 bp, Homo sapien
tgtccgttttggctgcagacgcagg

SEQ ID NO: 3090410 - DNA, 25 bp, Homo sapien
cttggcacgagaggcgagcagctcc

SEQ ID NO: 3090411 - DNA, 25 bp, Homo sapien
tccccgaagtggagcagacaaaagt

SEQ ID NO: 3090412 - DNA, 25 bp, Homo sapien
caaacttgggctggatccatcaggc

SEQ ID NO: 3090413 - DNA, 25 bp, Homo sapien
acctctgagagagtggcccacactc

SEQ ID NO: 3090414 - DNA, 25 bp, Homo sapien
gcacctctgagagagtggcccacac

SEQ ID NO: 3090415 - DNA, 25 bp, Homo sapien
cagctgcctcaacctgtctggcacc

SEQ ID NO: 3090416 - DNA, 25 bp, Homo sapien
gctgcctcaacctgtctggcacctc

SEQ ID NO: 3090417 - DNA, 25 bp, Homo sapien
agatggctcccagcagttgtcttca

SEQ ID NO: 3090418 - DNA, 25 bp, Homo sapien
cacaatggcctcatcttggttccgt

SEQ ID NO: 3090419 - DNA, 25 bp, Homo sapien
ccgtttgcctgcgaggtctttagat

SEQ ID NO: 3090420 - DNA, 25 bp, Homo sapien
tttttgagccatccataacagtagg

SEQ ID NO: 3090421 - DNA, 25 bp, Homo sapien
ttttaaagtatgagtttattctcca

SEQ ID NO: 3090422 - DNA, 25 bp, Homo sapien
tttaaagtatgagtttattctccag

SEQ ID NO: 3090423 - DNA, 25 bp, Homo sapien
tcttttaaagtatgagtttattctc

SEQ ID NO: 3090424 - DNA, 25 bp, Homo sapien
ttaaagtatgagtttattctccagg

SEQ ID NO: 3090425 - DNA, 25 bp, Homo sapien
gattaattgaggttccgaacaactc

SEQ ID NO: 3090426 - DNA, 25 bp, Homo sapien
cagtaacatatggaaattgaggata

SEQ ID NO: 3090427 - DNA, 25 bp, Homo sapien
gatcgagtcgagtgcaatttggtca

SEQ ID NO: 3090428 - DNA, 25 bp, Homo sapien
aatttggtcactgggacacagttac

SEQ ID NO: 3090429 - DNA, 25 bp, Homo sapien
atcgtgacactgcaatccagcctgg

SEQ ID NO: 3090430 - DNA, 25 bp, Homo sapien
tgacactgcaatccagcctgggcaa

SEQ ID NO: 3090431 - DNA, 25 bp, Homo sapien
cgtgacactgcaatccagcctgggc

SEQ ID NO: 3090432 - DNA, 25 bp, Homo sapien
aactgcttgaatatgggaggcaaag

SEQ ID NO: 3090433 - DNA, 25 bp, Homo sapien
tggcttcaaggaattctcccacctc

SEQ ID NO: 3090434 - DNA, 25 bp, Homo sapien
aacctccgcctcctggcttcaagga

SEQ ID NO: 3090435 - DNA, 25 bp, Homo sapien
caatggtgtgatcttggctcactgc

SEQ ID NO: 3090436 - DNA, 25 bp, Homo sapien
acagggttttgccatgttggccagg

SEQ ID NO: 3090437 - DNA, 25 bp, Homo sapien
ccaaagtgctgggatccactgcacc

SEQ ID NO: 3090438 - DNA, 25 bp, Homo sapien
aagtgctgggatccactgcacccgg

SEQ ID NO: 3090439 - DNA, 25 bp, Homo sapien
aaagtgctgggatccactgcacccg

SEQ ID NO: 3090440 - DNA, 25 bp, Homo sapien
caaagtgctgggatccactgcaccc

SEQ ID NO: 3090441 - DNA, 25 bp, Homo sapien
gaccaatgcattgaatttccaaaga

SEQ ID NO: 3090442 - DNA, 25 bp, Homo sapien
aaatatgacagatatcccacaactg

SEQ ID NO: 3090443 - DNA, 25 bp, Homo sapien
caatgactcacaggataaatatgac

SEQ ID NO: 3090444 - DNA, 25 bp, Homo sapien
tcagtcctgggatcataaaatagga

SEQ ID NO: 3090445 - DNA, 25 bp, Homo sapien
tgtgattggaaccagccggactcaa

SEQ ID NO: 3090446 - DNA, 25 bp, Homo sapien
tagtcactatccctatagagcggac

SEQ ID NO: 3090447 - DNA, 25 bp, Homo sapien
cacttactatgagggtggcctgacg

SEQ ID NO: 3090448 - DNA, 25 bp, Homo sapien
ttaccagcatacacactcagtctag

SEQ ID NO: 3090449 - DNA, 25 bp, Homo sapien
ggtcaaagggagtctcaaacatatt

SEQ ID NO: 3090450 - DNA, 25 bp, Homo sapien
acaactttttgtgtattcagacgac

SEQ ID NO: 3090451 - DNA, 25 bp, Homo sapien
tggaatatgtttgttagttgaatga

SEQ ID NO: 3090452 - DNA, 25 bp, Homo sapien
aaaaacatatctgggtaagttatga

SEQ ID NO: 3090453 - DNA, 25 bp, Homo sapien
cagtctttttttaatgacttccaat

SEQ ID NO: 3090454 - DNA, 25 bp, Homo sapien
gcgtagttttgttaaccagagacat

SEQ ID NO: 3090455 - DNA, 25 bp, Homo sapien
cagtttctgagaccagtcatttaat

SEQ ID NO: 3090456 - DNA, 25 bp, Homo sapien
tatgagatgcgtagttttgttaacc

SEQ ID NO: 3090457 - DNA, 25 bp, Homo sapien
cctctttggctatgagatgcgtagt

SEQ ID NO: 3090458 - DNA, 25 bp, Homo sapien
taatacttggccattattctaatat

SEQ ID NO: 3090459 - DNA, 25 bp, Homo sapien
gagtataatacttggccattattct

SEQ ID NO: 3090460 - DNA, 25 bp, Homo sapien
ccgagtataatacttggccattatt

SEQ ID NO: 3090461 - DNA, 25 bp, Homo sapien
atccgagtataatacttggccatta

SEQ ID NO: 3090462 - DNA, 25 bp, Homo sapien
atttttctacagtccatcactggag

SEQ ID NO: 3090463 - DNA, 25 bp, Homo sapien
gagcaaagctagttctaagtttcaa

SEQ ID NO: 3090464 - DNA, 25 bp, Homo sapien
cgtaacatttgtcagtaagtctaaa

SEQ ID NO: 3090465 - DNA, 25 bp, Homo sapien
atcactggagcaaagctagttctaa

SEQ ID NO: 3090466 - DNA, 25 bp, Homo sapien
tgtgccctggtgctttgtaaagtgt

SEQ ID NO: 3090467 - DNA, 25 bp, Homo sapien
cataatacaacataacggcagtgat

SEQ ID NO: 3090468 - DNA, 25 bp, Homo sapien
cacagaaggctcacaataaagtttg

SEQ ID NO: 3090469 - DNA, 25 bp, Homo sapien
cctagggagggtactgtcttattct

SEQ ID NO: 3090470 - DNA, 25 bp, Homo sapien
aaacatccgttgcaggactctcaag

SEQ ID NO: 3090471 - DNA, 25 bp, Homo sapien
ttgcaggactctcaagggaaccttt

SEQ ID NO: 3090472 - DNA, 25 bp, Homo sapien
ccaaaaacatccgttgcaggactct

SEQ ID NO: 3090473 - DNA, 25 bp, Homo sapien
catccgttgcaggactctcaaggga

SEQ ID NO: 3090474 - DNA, 25 bp, Homo sapien
attgtatacatcttaatattccaaa

SEQ ID NO: 3090475 - DNA, 25 bp, Homo sapien
aaattgtatacatcttaatattcca

SEQ ID NO: 3090476 - DNA, 25 bp, Homo sapien
aattgtatacatcttaatattccaa

SEQ ID NO: 3090477 - DNA, 25 bp, Homo sapien
tgaaccaaatctgactgttcattgt

SEQ ID NO: 3090478 - DNA, 25 bp, Homo sapien
gtgaaccaaatctgactgttcattg

SEQ ID NO: 3090479 - DNA, 25 bp, Homo sapien
atattgctctgtagtgcttacaaat

SEQ ID NO: 3090480 - DNA, 25 bp, Homo sapien
tatattgctctgtagtgcttacaaa

SEQ ID NO: 3090481 - DNA, 25 bp, Homo sapien
atatattgctctgtagtgcttacaa

SEQ ID NO: 3090482 - DNA, 25 bp, Homo sapien
tattgctctgtagtgcttacaaata

SEQ ID NO: 3090483 - DNA, 25 bp, Homo sapien
tgtaatccttcacagctaggcagag

SEQ ID NO: 3090484 - DNA, 25 bp, Homo sapien
aatttggtgttaattttcttgctga

SEQ ID NO: 3090485 - DNA, 25 bp, Homo sapien
aggcagagcctcatttgctccaaaa

SEQ ID NO: 3090486 - DNA, 25 bp, Homo sapien
ccaaaataaattccactcgctcttt

SEQ ID NO: 3090487 - DNA, 25 bp, Homo sapien
cctgtaaaatggaggctgcctcttt

SEQ ID NO: 3090488 - DNA, 25 bp, Homo sapien
ctcctgtaaaatggaggctgcctct

SEQ ID NO: 3090489 - DNA, 25 bp, Homo sapien
actcctgtaaaatggaggctgcctc

SEQ ID NO: 3090490 - DNA, 25 bp, Homo sapien
taactcctgtaaaatggaggctgcc

SEQ ID NO: 3090491 - DNA, 25 bp, Homo sapien
accattcgtagagtatcaattaatc

SEQ ID NO: 3090492 - DNA, 25 bp, Homo sapien
cataagtacagcactgttgaaccat

SEQ ID NO: 3090493 - DNA, 25 bp, Homo sapien
tcctcaacataagtacagcactgtt

SEQ ID NO: 3090494 - DNA, 25 bp, Homo sapien
cgtagagtatcaattaatcgaagtt

SEQ ID NO: 3090495 - DNA, 25 bp, Homo sapien
tatatgcatgtaaacttacctaaag

SEQ ID NO: 3090496 - DNA, 25 bp, Homo sapien
cactttaatactatccttaccctag

SEQ ID NO: 3090497 - DNA, 25 bp, Homo sapien
accctagaagcagtctaattaataa

SEQ ID NO: 3090498 - DNA, 25 bp, Homo sapien
aaaccaaaatcaattacagtaactg

SEQ ID NO: 3090499 - DNA, 25 bp, Homo sapien
tagaagagcttgtgaaaagttctga

SEQ ID NO: 3090500 - DNA, 25 bp, Homo sapien
accctctaggatgttacaacgttga

SEQ ID NO: 3090501 - DNA, 25 bp, Homo sapien
cagacttatagaagagcttgtgaaa

SEQ ID NO: 3090502 - DNA, 25 bp, Homo sapien
tacaacgttgacttaacacatttta

SEQ ID NO: 3090503 - DNA, 25 bp, Homo sapien
gcaactaagatacgggatgtcgata

SEQ ID NO: 3090504 - DNA, 25 bp, Homo sapien
actgcaactaagatacgggatgtcg

SEQ ID NO: 3090505 - DNA, 25 bp, Homo sapien
tactgcaactaagatacgggatgtc

SEQ ID NO: 3090506 - DNA, 25 bp, Homo sapien
ctaagatacgggatgtcgataccat

SEQ ID NO: 3090507 - DNA, 25 bp, Homo sapien
attaatggtaactgagctttcccct

SEQ ID NO: 3090508 - DNA, 25 bp, Homo sapien
atattgaaagttaatggaagaatgt

SEQ ID NO: 3090509 - DNA, 25 bp, Homo sapien
gaaattaatggtaactgagctttcc

SEQ ID NO: 3090510 - DNA, 25 bp, Homo sapien
caatgaaattaatggtaactgagct

SEQ ID NO: 3090511 - DNA, 25 bp, Homo sapien
agagagaagggtttcaatgacttct

SEQ ID NO: 3090512 - DNA, 25 bp, Homo sapien
ttcaatgacttcttgaagtcttcct

SEQ ID NO: 3090513 - DNA, 25 bp, Homo sapien
agtacgagtctgcttttccagagag

SEQ ID NO: 3090514 - DNA, 25 bp, Homo sapien
tccagagagagaagggtttcaatga

SEQ ID NO: 3090515 - DNA, 25 bp, Homo sapien
aggctggcttgagccatggaggtga

SEQ ID NO: 3090516 - DNA, 25 bp, Homo sapien
gctggcttgagccatggaggtgaag

SEQ ID NO: 3090517 - DNA, 25 bp, Homo sapien
gggaggctggcttgagccatggagg

SEQ ID NO: 3090518 - DNA, 25 bp, Homo sapien
aggctgggctacatggcgaaacctg

SEQ ID NO: 3090519 - DNA, 25 bp, Homo sapien
cttgagcagatactgattcaactga

SEQ ID NO: 3090520 - DNA, 25 bp, Homo sapien
gattcctttatgaagttaccgtcac

SEQ ID NO: 3090521 - DNA, 25 bp, Homo sapien
taatcatgcttaccggaaatgaagg

SEQ ID NO: 3090522 - DNA, 25 bp, Homo sapien
gaatgcttggagctaaaagacagga

SEQ ID NO: 3090523 - DNA, 25 bp, Homo sapien
caacatcaatgttgagtataagttc

SEQ ID NO: 3090524 - DNA, 25 bp, Homo sapien
catcaatgttgagtataagttctgt

SEQ ID NO: 3090525 - DNA, 25 bp, Homo sapien
tgtaaatgatgtaagcgactaatga

SEQ ID NO: 3090526 - DNA, 25 bp, Homo sapien
tgatgtaagcgactaatgagtttgt

SEQ ID NO: 3090527 - DNA, 25 bp, Homo sapien
gatttaaatcaatacctataaaggc

SEQ ID NO: 3090528 - DNA, 25 bp, Homo sapien
tccacagggttggtgtaagatttaa

SEQ ID NO: 3090529 - DNA, 25 bp, Homo sapien
tcttcagcgaagtgggcacaataat

SEQ ID NO: 3090530 - DNA, 25 bp, Homo sapien
gcacaataattgtaccaatccacag

SEQ ID NO: 3090531 - DNA, 25 bp, Homo sapien
tcaagacccaatacaaacgtcagcc

SEQ ID NO: 3090532 - DNA, 25 bp, Homo sapien
catagcttccttctcggtgttccag

SEQ ID NO: 3090533 - DNA, 25 bp, Homo sapien
gcaccattaagaatgcatagcttcc

SEQ ID NO: 3090534 - DNA, 25 bp, Homo sapien
acactttccccttgtatggccctca

SEQ ID NO: 3090535 - DNA, 25 bp, Homo sapien
gtcctgtgttagtcatcttcgtact

SEQ ID NO: 3090536 - DNA, 25 bp, Homo sapien
tcaactcctaaaggacagggtcctg

SEQ ID NO: 3090537 - DNA, 25 bp, Homo sapien
gactaattcatcacgtacatcaact

SEQ ID NO: 3090538 - DNA, 25 bp, Homo sapien
caccatgcatgacttgactaattca

SEQ ID NO: 3090539 - DNA, 25 bp, Homo sapien
tggcgcccgccaacagccagccggc

SEQ ID NO: 3090540 - DNA, 25 bp, Homo sapien
gtgactcagcccctggcgcccgcca

SEQ ID NO: 3090541 - DNA, 25 bp, Homo sapien
aagcaggctccgcgccgtgactcag

SEQ ID NO: 3090542 - DNA, 25 bp, Homo sapien
ctaagcaggctccgcgccgtgactc

SEQ ID NO: 3090543 - DNA, 25 bp, Homo sapien
taggcgctgatccaccgtggcgctg

SEQ ID NO: 3090544 - DNA, 25 bp, Homo sapien
ctagcttcgcacactcgggtaggcg

SEQ ID NO: 3090545 - DNA, 25 bp, Homo sapien
gcacactcgggtaggcgctgatcca

SEQ ID NO: 3090546 - DNA, 25 bp, Homo sapien
tccatcttgacgatgcgcccgtcag

SEQ ID NO: 3090547 - DNA, 25 bp, Homo sapien
gtccccgcctgagcgtcccttgctg

SEQ ID NO: 3090548 - DNA, 25 bp, Homo sapien
ccgcctgagcgtcccttgctgtccc

SEQ ID NO: 3090549 - DNA, 25 bp, Homo sapien
ccccgcctgagcgtcccttgctgtc

SEQ ID NO: 3090550 - DNA, 25 bp, Homo sapien
ggtccccgcctgagcgtcccttgct

SEQ ID NO: 3090551 - DNA, 25 bp, Homo sapien
acaccggaagttgcccgcgcacccg

SEQ ID NO: 3090552 - DNA, 25 bp, Homo sapien
cacaccggaagttgcccgcgcaccc

SEQ ID NO: 3090553 - DNA, 25 bp, Homo sapien
acagtggttcacactatacccagca

SEQ ID NO: 3090554 - DNA, 25 bp, Homo sapien
cataagaattgccttgggacttcct

SEQ ID NO: 3090555 - DNA, 25 bp, Homo sapien
ttagcttagtaaccaaacaagatca

SEQ ID NO: 3090556 - DNA, 25 bp, Homo sapien
tctatatttaacagaggcctgatag

SEQ ID NO: 3090557 - DNA, 25 bp, Homo sapien
cttctgatctcaagtgattcgccca

SEQ ID NO: 3090558 - DNA, 25 bp, Homo sapien
tctgatctcaagtgattcgcccact

SEQ ID NO: 3090559 - DNA, 25 bp, Homo sapien
cgaacttctgatctcaagtgattcg

SEQ ID NO: 3090560 - DNA, 25 bp, Homo sapien
ctcgaacttctgatctcaagtgatt

SEQ ID NO: 3090561 - DNA, 25 bp, Homo sapien
tctgaaaccaggcaagggtttgttc

SEQ ID NO: 3090562 - DNA, 25 bp, Homo sapien
catttccattcacacggctgcactt

SEQ ID NO: 3090563 - DNA, 25 bp, Homo sapien
gacttgcttactggaccacacatag

SEQ ID NO: 3090564 - DNA, 25 bp, Homo sapien
tggaccacacataggtggtgggcat

SEQ ID NO: 3090565 - DNA, 25 bp, Homo sapien
tcgagcgggtgacttttgtgcattc

SEQ ID NO: 3090566 - DNA, 25 bp, Homo sapien
tgacattagcatcgggcagacccgc

SEQ ID NO: 3090567 - DNA, 25 bp, Homo sapien
ggagagaagccgatcgagcctttgt

SEQ ID NO: 3090568 - DNA, 25 bp, Homo sapien
caggttcccgtctgctttcggaggc

SEQ ID NO: 3090569 - DNA, 25 bp, Homo sapien
cggccggcaggaccatgctgctgaa

SEQ ID NO: 3090570 - DNA, 25 bp, Homo sapien
ctgactttgcaacaccgcgttccgg

SEQ ID NO: 3090571 - DNA, 25 bp, Homo sapien
gagcagagtcgtccccagcgggtct

SEQ ID NO: 3090572 - DNA, 25 bp, Homo sapien
aaagagtaccggatctgcatgccgc

SEQ ID NO: 3090573 - DNA, 25 bp, Homo sapien
gcgccagccaccgcaccctgctaat

SEQ ID NO: 3090574 - DNA, 25 bp, Homo sapien
caggcgccagccaccgcaccctgct

SEQ ID NO: 3090575 - DNA, 25 bp, Homo sapien
cgccagccaccgcaccctgctaatt

SEQ ID NO: 3090576 - DNA, 25 bp, Homo sapien
aggcgccagccaccgcaccctgcta

SEQ ID NO: 3090577 - DNA, 25 bp, Homo sapien
tgtgaaaacccaatcgctgtgcttg

SEQ ID NO: 3090578 - DNA, 25 bp, Homo sapien
gagagcggcacatctcagacatgag

SEQ ID NO: 3090579 - DNA, 25 bp, Homo sapien
gtttgagagcggcacatctcagaca

SEQ ID NO: 3090580 - DNA, 25 bp, Homo sapien
ccaatcgctgtgcttgtgaaccaca

SEQ ID NO: 3090581 - DNA, 25 bp, Homo sapien
tagtcaaatgcagtagtaagaaagg

SEQ ID NO: 3090582 - DNA, 25 bp, Homo sapien
tcaaatgcagtagtaagaaaggggg

SEQ ID NO: 3090583 - DNA, 25 bp, Homo sapien
gggaaagaatagaacaagttcaatc

SEQ ID NO: 3090584 - DNA, 25 bp, Homo sapien
gttcaatctgtaactcaatgtgaac

SEQ ID NO: 3090585 - DNA, 25 bp, Homo sapien
tacaatttttgctgaaccacgttcc

SEQ ID NO: 3090586 - DNA, 25 bp, Homo sapien
tattttacccactgtcagatggcag

SEQ ID NO: 3090587 - DNA, 25 bp, Homo sapien
tgttgcactggcataggttcctggc

SEQ ID NO: 3090588 - DNA, 25 bp, Homo sapien
ccgtgtccagcccatgtattgctat

SEQ ID NO: 3090589 - DNA, 25 bp, Homo sapien
tacttagaatttcaccagccatgaa

SEQ ID NO: 3090590 - DNA, 25 bp, Homo sapien
gctagaatatactgggctccagtct

SEQ ID NO: 3090591 - DNA, 25 bp, Homo sapien
ctatatgtgatggaagcaaagtcag

SEQ ID NO: 3090592 - DNA, 25 bp, Homo sapien
cagaattcactatgaagctacttag

SEQ ID NO: 3090593 - DNA, 25 bp, Homo sapien
aatggcaccgaggtgctgtctcagg

SEQ ID NO: 3090594 - DNA, 25 bp, Homo sapien
gaggtccctgtgagtcctaatggca

SEQ ID NO: 3090595 - DNA, 25 bp, Homo sapien
ggtgaccttctcctaatcctgaaaa

SEQ ID NO: 3090596 - DNA, 25 bp, Homo sapien
gaaaaagtctccatgattggccctg

SEQ ID NO: 3090597 - DNA, 25 bp, Homo sapien
ctgctttctatagttttcctgtctc

SEQ ID NO: 3090598 - DNA, 25 bp, Homo sapien
tagttgggccagaccaagggaagcc

SEQ ID NO: 3090599 - DNA, 25 bp, Homo sapien
gccaggaaagaatttagttgggcca

SEQ ID NO: 3090600 - DNA, 25 bp, Homo sapien
gttttcctgtctcctggcagtcagt

SEQ ID NO: 3090601 - DNA, 25 bp, Homo sapien
ttgagtgtctcaaacgcatttccca

SEQ ID NO: 3090602 - DNA, 25 bp, Homo sapien
tgagtgtctcaaacgcatttcccac

SEQ ID NO: 3090603 - DNA, 25 bp, Homo sapien
gagtgtctcaaacgcatttcccaca

SEQ ID NO: 3090604 - DNA, 25 bp, Homo sapien
tcagtccccagttattttgagtgtc

SEQ ID NO: 3090605 - DNA, 25 bp, Homo sapien
tgatgattcatctgaggacgactca

SEQ ID NO: 3090606 - DNA, 25 bp, Homo sapien
ctgatgattcatctgaggacgactc

SEQ ID NO: 3090607 - DNA, 25 bp, Homo sapien
gatgattcatctgaggacgactcac

SEQ ID NO: 3090608 - DNA, 25 bp, Homo sapien
catatcgtgtgagacggaagctaac

SEQ ID NO: 3090609 - DNA, 25 bp, Homo sapien
tcattctctccgattgtaaaaggcg

SEQ ID NO: 3090610 - DNA, 25 bp, Homo sapien
cagcctctgatttgctcggcagaga

SEQ ID NO: 3090611 - DNA, 25 bp, Homo sapien
taagcagaggagaaatcacggaagc

SEQ ID NO: 3090612 - DNA, 25 bp, Homo sapien
aagccccgacgtcaattattcttct

SEQ ID NO: 3090613 - DNA, 25 bp, Homo sapien
aagccaagccccgacgtcaattatt

SEQ ID NO: 3090614 - DNA, 25 bp, Homo sapien
agaccataaagccaagccccgacgt

SEQ ID NO: 3090615 - DNA, 25 bp, Homo sapien
gccaagccccgacgtcaattattct

SEQ ID NO: 3090616 - DNA, 25 bp, Homo sapien
gaatctggtttctcctctttaacca

SEQ ID NO: 3090617 - DNA, 25 bp, Homo sapien
aatgttgcttgaatctggtttctcc

SEQ ID NO: 3090618 - DNA, 25 bp, Homo sapien
catttctgccccagaaatgttgctt

SEQ ID NO: 3090619 - DNA, 25 bp, Homo sapien
tctttcatttctgccccagaaatgt

SEQ ID NO: 3090620 - DNA, 25 bp, Homo sapien
gacttcttcgctggcatgtagctgc

SEQ ID NO: 3090621 - DNA, 25 bp, Homo sapien
ctagaaaaccgcttggtggtcctcg

SEQ ID NO: 3090622 - DNA, 25 bp, Homo sapien
tagctgcagcctagaaaaccgcttg

SEQ ID NO: 3090623 - DNA, 25 bp, Homo sapien
ggtcctcgttcatgaacctgccgtt

SEQ ID NO: 3090624 - DNA, 25 bp, Homo sapien
tttgacttgggctatcacttcaccc

SEQ ID NO: 3090625 - DNA, 25 bp, Homo sapien
gccaaacctagtgtggatacctgtt

SEQ ID NO: 3090626 - DNA, 25 bp, Homo sapien
tacctgtttggaatagtgcactaca

SEQ ID NO: 3090627 - DNA, 25 bp, Homo sapien
tatagtctcgtgccgccaaaccctg

SEQ ID NO: 3090628 - DNA, 25 bp, Homo sapien
ctccaaacccatcccgttgtgttgg

SEQ ID NO: 3090629 - DNA, 25 bp, Homo sapien
gcagggagtctccttcgcttaaggg

SEQ ID NO: 3090630 - DNA, 25 bp, Homo sapien
tgggaactcatgcagcagggagtct

SEQ ID NO: 3090631 - DNA, 25 bp, Homo sapien
acccatcccgttgtgttggagggtg

SEQ ID NO: 3090632 - DNA, 25 bp, Homo sapien
catcgctgatatcaggagaagctgc

SEQ ID NO: 3090633 - DNA, 25 bp, Homo sapien
tagcaaattcggcttccggaagtcc

SEQ ID NO: 3090634 - DNA, 25 bp, Homo sapien
tattttatgtgtttggctaggcgca

SEQ ID NO: 3090635 - DNA, 25 bp, Homo sapien
caagtgaaacaggatgtcatctccg

SEQ ID NO: 3090636 - DNA, 25 bp, Homo sapien
aaggcagaggctgcgacgacctcgt

SEQ ID NO: 3090637 - DNA, 25 bp, Homo sapien
cctttgctgcgagggagctttgttt

SEQ ID NO: 3090638 - DNA, 25 bp, Homo sapien
gttggcagcagagaaccttgttacc

SEQ ID NO: 3090639 - DNA, 25 bp, Homo sapien
tagcgaacacgacagattgaggaac

SEQ ID NO: 3090640 - DNA, 25 bp, Homo sapien
ttaacagagcaacagagcggtctct

SEQ ID NO: 3090641 - DNA, 25 bp, Homo sapien
aaaaaccccagtgtctcccatagag

SEQ ID NO: 3090642 - DNA, 25 bp, Homo sapien
gggacagtattaactcctcactcta

SEQ ID NO: 3090643 - DNA, 25 bp, Homo sapien
gctagcatgcagtccttatttgtgg

SEQ ID NO: 3090644 - DNA, 25 bp, Homo sapien
aaactttgggcttcatggtgaatca

SEQ ID NO: 3090645 - DNA, 25 bp, Homo sapien
catggtgaatcatcaggacaggctt

SEQ ID NO: 3090646 - DNA, 25 bp, Homo sapien
gcttcatggtgaatcatcaggacag

SEQ ID NO: 3090647 - DNA, 25 bp, Homo sapien
tgggcttcatggtgaatcatcagga

SEQ ID NO: 3090648 - DNA, 25 bp, Homo sapien
aggccaagtgtaagcgctgttctgg

SEQ ID NO: 3090649 - DNA, 25 bp, Homo sapien
agtgtaagcgctgttctgggggcca

SEQ ID NO: 3090650 - DNA, 25 bp, Homo sapien
ctaggccaagtgtaagcgctgttct

SEQ ID NO: 3090651 - DNA, 25 bp, Homo sapien
tgtaagcgctgttctgggggccact

SEQ ID NO: 3090652 - DNA, 25 bp, Homo sapien
agaggtgtcagtaaaggagaaagct

SEQ ID NO: 3090653 - DNA, 25 bp, Homo sapien
cagaggtgtcagtaaaggagaaagc

SEQ ID NO: 3090654 - DNA, 25 bp, Homo sapien
gaggtgtcagtaaaggagaaagctt

SEQ ID NO: 3090655 - DNA, 25 bp, Homo sapien
gattaccgagcagctcaaaagagct

SEQ ID NO: 3090656 - DNA, 25 bp, Homo sapien
aggtttggattaccgagcagctcaa

SEQ ID NO: 3090657 - DNA, 25 bp, Homo sapien
tgttgctggcgggattttctccttg

SEQ ID NO: 3090658 - DNA, 25 bp, Homo sapien
gttgctggcgggattttctccttgc

SEQ ID NO: 3090659 - DNA, 25 bp, Homo sapien
gggctggattgtttgctccgtctcc

SEQ ID NO: 3090660 - DNA, 25 bp, Homo sapien
cctcacagatgtggtatggaagagt

SEQ ID NO: 3090661 - DNA, 25 bp, Homo sapien
ggtgagatcaccagtgtagaccttc

SEQ ID NO: 3090662 - DNA, 25 bp, Homo sapien
tgtttgctccgtctccttttgcctc

SEQ ID NO: 3090663 - DNA, 25 bp, Homo sapien
tgccgggccgttcattaagaaatgc

SEQ ID NO: 3090664 - DNA, 25 bp, Homo sapien
gtgatgtaacccagatctgccagat

SEQ ID NO: 3090665 - DNA, 25 bp, Homo sapien
cagctggtgcacttgactctgggca

SEQ ID NO: 3090666 - DNA, 25 bp, Homo sapien
ccatcaggatgacgcagagaggcgt

SEQ ID NO: 3090667 - DNA, 25 bp, Homo sapien
cacttggaacactggatggaagagg

SEQ ID NO: 3090668 - DNA, 25 bp, Homo sapien
gattggaaaatttaggatattgaag

SEQ ID NO: 3090669 - DNA, 25 bp, Homo sapien
attggggctgttgtcagtaagtgac

SEQ ID NO: 3090670 - DNA, 25 bp, Homo sapien
caagtaacaaaaccattgccctagt

SEQ ID NO: 3090671 - DNA, 25 bp, Homo sapien
ttctgctgtgaaaaggtacacagga

SEQ ID NO: 3090672 - DNA, 25 bp, Homo sapien
ggctaaagtctctctagaacccgta

SEQ ID NO: 3090673 - DNA, 25 bp, Homo sapien
tcaaccttctgctgtgaaaaggtac

SEQ ID NO: 3090674 - DNA, 25 bp, Homo sapien
gctaaagtctctctagaacccgtac

SEQ ID NO: 3090675 - DNA, 25 bp, Homo sapien
gcactggagcctgctatcaagcctt

SEQ ID NO: 3090676 - DNA, 25 bp, Homo sapien
tatcaagccttgtgagacgtgcctt

SEQ ID NO: 3090677 - DNA, 25 bp, Homo sapien
gagacgtgccttttgtccagttgtt

SEQ ID NO: 3090678 - DNA, 25 bp, Homo sapien
gacgtgccttttgtccagttgttga

SEQ ID NO: 3090679 - DNA, 25 bp, Homo sapien
tggacagctgtacatgatcagcaaa

SEQ ID NO: 3090680 - DNA, 25 bp, Homo sapien
gctgtacatgatcagcaaacacagc

SEQ ID NO: 3090681 - DNA, 25 bp, Homo sapien
gacagctgtacatgatcagcaaaca

SEQ ID NO: 3090682 - DNA, 25 bp, Homo sapien
aaattggacagctgtacatgatcag

SEQ ID NO: 3090683 - DNA, 25 bp, Homo sapien
tcttgactcagattcagccgtgttc

SEQ ID NO: 3090684 - DNA, 25 bp, Homo sapien
tgtgcggtttgaagctgccacctct

SEQ ID NO: 3090685 - DNA, 25 bp, Homo sapien
tccatcccaaatataggacagcttt

SEQ ID NO: 3090686 - DNA, 25 bp, Homo sapien
tagtgcagtcctccgggcccacagt

SEQ ID NO: 3090687 - DNA, 25 bp, Homo sapien
ctgcacccaggatttatgacagatg

SEQ ID NO: 3090688 - DNA, 25 bp, Homo sapien
ggtggcagaacccacccttgactct

SEQ ID NO: 3090689 - DNA, 25 bp, Homo sapien
tatcccctgatcctttaatcctaaa

SEQ ID NO: 3090690 - DNA, 25 bp, Homo sapien
gacagatgctttcagttgccttagt

SEQ ID NO: 3090691 - DNA, 25 bp, Homo sapien
aatgaactggttgtatggacgagcc

SEQ ID NO: 3090692 - DNA, 25 bp, Homo sapien
agatgtaccgctgcccttgtgtggg

SEQ ID NO: 3090693 - DNA, 25 bp, Homo sapien
aagtcagcagtacgttgggatggca

SEQ ID NO: 3090694 - DNA, 25 bp, Homo sapien
ttttagaatcaggtgacacagaacc

SEQ ID NO: 3090695 - DNA, 25 bp, Homo sapien
ggaagtcacactgatccattcccat

SEQ ID NO: 3090696 - DNA, 25 bp, Homo sapien
gggaagtcacactgatccattccca

SEQ ID NO: 3090697 - DNA, 25 bp, Homo sapien
tcacctgtatttgggaagtcacact

SEQ ID NO: 3090698 - DNA, 25 bp, Homo sapien
atgctcacctgtatttgggaagtca

SEQ ID NO: 3090699 - DNA, 25 bp, Homo sapien
gaagaggatccatgagtgaatgaac

SEQ ID NO: 3090700 - DNA, 25 bp, Homo sapien
ggaatacaagcagctgttttccggc

SEQ ID NO: 3090701 - DNA, 25 bp, Homo sapien
aacagaagcctctgtgtagggtgcg

SEQ ID NO: 3090702 - DNA, 25 bp, Homo sapien
agaggcccgcgtgcatttccatgct

SEQ ID NO: 3090703 - DNA, 25 bp, Homo sapien
tgagcggtgtacattcttccagaag

SEQ ID NO: 3090704 - DNA, 25 bp, Homo sapien
gaaatccccaatgtgtctgaccctt

SEQ ID NO: 3090705 - DNA, 25 bp, Homo sapien
aatgacagtcttcaaagtgagcggt

SEQ ID NO: 3090706 - DNA, 25 bp, Homo sapien
tagcaaccctaatcgatcactggac

SEQ ID NO: 3090707 - DNA, 25 bp, Homo sapien
caagagcgccatttagtcatgatga

SEQ ID NO: 3090708 - DNA, 25 bp, Homo sapien
ggaatgatccagaccaagatggtgg

SEQ ID NO: 3090709 - DNA, 25 bp, Homo sapien
gataccaatgagactgccaagtgga

SEQ ID NO: 3090710 - DNA, 25 bp, Homo sapien
gaacaaaatagggatgatctcaggc

SEQ ID NO: 3090711 - DNA, 25 bp, Homo sapien
gtttcctgttagggcctgaacttca

SEQ ID NO: 3090712 - DNA, 25 bp, Homo sapien
tgtttcctgttagggcctgaacttc

SEQ ID NO: 3090713 - DNA, 25 bp, Homo sapien
ggtcatagccttcctggaccaagaa

SEQ ID NO: 3090714 - DNA, 25 bp, Homo sapien
cattggtccccacagatctaaatat

SEQ ID NO: 3090715 - DNA, 25 bp, Homo sapien
ttaagttgggtgactaagtctccag

SEQ ID NO: 3090716 - DNA, 25 bp, Homo sapien
ttgggtgactaagtctccaggtccc

SEQ ID NO: 3090717 - DNA, 25 bp, Homo sapien
catgccggggtacatcgttaagttc

SEQ ID NO: 3090718 - DNA, 25 bp, Homo sapien
cgttaagttcacttggttgtgctgt

SEQ ID NO: 3090719 - DNA, 25 bp, Homo sapien
taatggccagatttaacacagctgc

SEQ ID NO: 3090720 - DNA, 25 bp, Homo sapien
ccagatttaacacagctgcctcatg

SEQ ID NO: 3090721 - DNA, 25 bp, Homo sapien
tgcatgcttcttggaaaataagagg

SEQ ID NO: 3090722 - DNA, 25 bp, Homo sapien
catgcttcttggaaaataagaggac

SEQ ID NO: 3090723 - DNA, 25 bp, Homo sapien
gaaaataagaggacttgatgacatc

SEQ ID NO: 3090724 - DNA, 25 bp, Homo sapien
gacttgatgacatcactgggatggg

SEQ ID NO: 3090725 - DNA, 25 bp, Homo sapien
gacacaagagaagggtcctcagcag

SEQ ID NO: 3090726 - DNA, 25 bp, Homo sapien
tgcccagaggtttaggacccttcaa

SEQ ID NO: 3090727 - DNA, 25 bp, Homo sapien
ctcctgggtgcccagaggtttagga

SEQ ID NO: 3090728 - DNA, 25 bp, Homo sapien
gagggcaagctcctgggtgcccaga

SEQ ID NO: 3090729 - DNA, 25 bp, Homo sapien
gtggggatggtgagggcaagctcct

SEQ ID NO: 3090730 - DNA, 25 bp, Homo sapien
caaggaacaatgaggtgttcttttt

SEQ ID NO: 3090731 - DNA, 25 bp, Homo sapien
ttcccaaggaacaatgaggtgttct

SEQ ID NO: 3090732 - DNA, 25 bp, Homo sapien
cccaaggaacaatgaggtgttcttt

SEQ ID NO: 3090733 - DNA, 25 bp, Homo sapien
gaacaatgaggtgttctttttcaga

SEQ ID NO: 3090734 - DNA, 25 bp, Homo sapien
ctgatgtgatagaattccactcctc

SEQ ID NO: 3090735 - DNA, 25 bp, Homo sapien
gatgtgatagaattccactcctcat

SEQ ID NO: 3090736 - DNA, 25 bp, Homo sapien
tgatgtgatagaattccactcctca

SEQ ID NO: 3090737 - DNA, 25 bp, Homo sapien
gtacatgcaccgttcaaggagggcc

SEQ ID NO: 3090738 - DNA, 25 bp, Homo sapien
gtgaaatcgcctaagggagcggccc

SEQ ID NO: 3090739 - DNA, 25 bp, Homo sapien
aaggctgccggactttgaggctcac

SEQ ID NO: 3090740 - DNA, 25 bp, Homo sapien
cctttaagatgcgtgaaggctgccg

SEQ ID NO: 3090741 - DNA, 25 bp, Homo sapien
tccaggttcctcttgctcagtcaga

SEQ ID NO: 3090742 - DNA, 25 bp, Homo sapien
cgggcacagccaactggtccaggtt

SEQ ID NO: 3090743 - DNA, 25 bp, Homo sapien
caagccaagggcagtccatgaatca

SEQ ID NO: 3090744 - DNA, 25 bp, Homo sapien
ttttgtcacgcaatcaggaaccaca

SEQ ID NO: 3090745 - DNA, 25 bp, Homo sapien
ttaggttctcgagggtttgcctgtc

SEQ ID NO: 3090746 - DNA, 25 bp, Homo sapien
cacttaggttctcgagggtttgcct

SEQ ID NO: 3090747 - DNA, 25 bp, Homo sapien
ctccacttaggttctcgagggtttg

SEQ ID NO: 3090748 - DNA, 25 bp, Homo sapien
ggttctcgagggtttgcctgtccat

SEQ ID NO: 3090749 - DNA, 25 bp, Homo sapien
tgttttcaagtctctcgggcagata

SEQ ID NO: 3090750 - DNA, 25 bp, Homo sapien
tctccctatctttgccaatgcttgt

SEQ ID NO: 3090751 - DNA, 25 bp, Homo sapien
tgaaattgctaggttaaatggtaac

SEQ ID NO: 3090752 - DNA, 25 bp, Homo sapien
aattttggctaagattctgatgtcc

SEQ ID NO: 3090753 - DNA, 25 bp, Homo sapien
tgaatatactgcaagtgtgtgtaca

SEQ ID NO: 3090754 - DNA, 25 bp, Homo sapien
gcctgtaattgtcatcacctatgga

SEQ ID NO: 3090755 - DNA, 25 bp, Homo sapien
cacctatggacagagggattaagaa

SEQ ID NO: 3090756 - DNA, 25 bp, Homo sapien
tataggacctataggcagcctgtaa

SEQ ID NO: 3090757 - DNA, 25 bp, Homo sapien
gaacaacttcatgttgtctcgggct

SEQ ID NO: 3090758 - DNA, 25 bp, Homo sapien
ccgagacattctgctgattggacat

SEQ ID NO: 3090759 - DNA, 25 bp, Homo sapien
gacaggcttttgcatgggttgatga

SEQ ID NO: 3090760 - DNA, 25 bp, Homo sapien
agtggtatggtaagtcaatttctcc

SEQ ID NO: 3090761 - DNA, 25 bp, Homo sapien
gaagagcaaatgcaccttcctgggt

SEQ ID NO: 3090762 - DNA, 25 bp, Homo sapien
ttctgaagagcaaatgcaccttcct

SEQ ID NO: 3090763 - DNA, 25 bp, Homo sapien
tctgcaccttctgaagagcaaatgc

SEQ ID NO: 3090764 - DNA, 25 bp, Homo sapien
gcaccttctgaagagcaaatgcacc

SEQ ID NO: 3090765 - DNA, 25 bp, Homo sapien
aattgattcaatccaaataggttaa

SEQ ID NO: 3090766 - DNA, 25 bp, Homo sapien
taggttaactagagaatcatagctg

SEQ ID NO: 3090767 - DNA, 25 bp, Homo sapien
gattcaatccaaataggttaactag

SEQ ID NO: 3090768 - DNA, 25 bp, Homo sapien
tccaaataggttaactagagaatca

SEQ ID NO: 3090769 - DNA, 25 bp, Homo sapien
caagacttgaggttcagtatagacc

SEQ ID NO: 3090770 - DNA, 25 bp, Homo sapien
tctctgacgccatgcattctgtgca

SEQ ID NO: 3090771 - DNA, 25 bp, Homo sapien
gaagtagtgccagccatcttcaagc

SEQ ID NO: 3090772 - DNA, 25 bp, Homo sapien
gacttgggccaaaaatcatgtcatg

SEQ ID NO: 3090773 - DNA, 25 bp, Homo sapien
tatggtactgcccacatgctaatac

SEQ ID NO: 3090774 - DNA, 25 bp, Homo sapien
caggctatggtactgcccacatgct

SEQ ID NO: 3090775 - DNA, 25 bp, Homo sapien
tactgcccacatgctaatactttct

SEQ ID NO: 3090776 - DNA, 25 bp, Homo sapien
tgcccacatgctaatactttctacc

SEQ ID NO: 3090777 - DNA, 25 bp, Homo sapien
ctcagcgttgttcccgtgacttcag

SEQ ID NO: 3090778 - DNA, 25 bp, Homo sapien
cgtagagtggttcttcccatggaaa

SEQ ID NO: 3090779 - DNA, 25 bp, Homo sapien
agcgttgttcccgtgacttcagggt

SEQ ID NO: 3090780 - DNA, 25 bp, Homo sapien
agaaggtgataacgtagagtggttc

SEQ ID NO: 3090781 - DNA, 25 bp, Homo sapien
taatcatcaagctatagaggctcca

SEQ ID NO: 3090782 - DNA, 25 bp, Homo sapien
ggctccaagtgcaattaataataac

SEQ ID NO: 3090783 - DNA, 25 bp, Homo sapien
tctcaggcataacatacttagctgt

SEQ ID NO: 3090784 - DNA, 25 bp, Homo sapien
tagtctgactcaggatttggagcct

SEQ ID NO: 3090785 - DNA, 25 bp, Homo sapien
ctgataacccaagtggaaactctaa

SEQ ID NO: 3090786 - DNA, 25 bp, Homo sapien
ttcctgataacccaagtggaaactc

SEQ ID NO: 3090787 - DNA, 25 bp, Homo sapien
tccagggggacaggcggagccacct

SEQ ID NO: 3090788 - DNA, 25 bp, Homo sapien
gatgttttcctgataacccaagtgg

SEQ ID NO: 3090789 - DNA, 25 bp, Homo sapien
catggatggaattcctagggagttc

SEQ ID NO: 3090790 - DNA, 25 bp, Homo sapien
tcctagggagttcccttgcaattaa

SEQ ID NO: 3090791 - DNA, 25 bp, Homo sapien
ttggcagatcgttccacaaggccat

SEQ ID NO: 3090792 - DNA, 25 bp, Homo sapien
aatctagcttatttatattcgacca

SEQ ID NO: 3090793 - DNA, 25 bp, Homo sapien
tctagtagtcacaacgggtaaacca

SEQ ID NO: 3090794 - DNA, 25 bp, Homo sapien
taacaccagaattgcatgtacctct

SEQ ID NO: 3090795 - DNA, 25 bp, Homo sapien
tttacagattaaagcagggactagg

SEQ ID NO: 3090796 - DNA, 25 bp, Homo sapien
tctggaattgcaggctgtagttaca

SEQ ID NO: 3090797 - DNA, 25 bp, Homo sapien
gaacggtgttttgtttgcgaccatc

SEQ ID NO: 3090798 - DNA, 25 bp, Homo sapien
gcttcatccaggcaagaacggtgtt

SEQ ID NO: 3090799 - DNA, 25 bp, Homo sapien
aacgtgtcagtgagtacctggacca

SEQ ID NO: 3090800 - DNA, 25 bp, Homo sapien
tattcaattgaagtgctggagctct

SEQ ID NO: 3090801 - DNA, 25 bp, Homo sapien
tcacttctcgaatccctcatccatc

SEQ ID NO: 3090802 - DNA, 25 bp, Homo sapien
tcgaatccctcatccatcagcaatt

SEQ ID NO: 3090803 - DNA, 25 bp, Homo sapien
ccatcagcaattcctgtgcaccttc

SEQ ID NO: 3090804 - DNA, 25 bp, Homo sapien
catcagcaattcctgtgcaccttcc

SEQ ID NO: 3090805 - DNA, 25 bp, Homo sapien
aaagagttttaacctgatcttcaca

SEQ ID NO: 3090806 - DNA, 25 bp, Homo sapien
cagccaaagagttttaacctgatct

SEQ ID NO: 3090807 - DNA, 25 bp, Homo sapien
gccaaagagttttaacctgatcttc

SEQ ID NO: 3090808 - DNA, 25 bp, Homo sapien
tcagccaaagagttttaacctgatc

SEQ ID NO: 3090809 - DNA, 25 bp, Homo sapien
cttctatagccactaagaggcttaa

SEQ ID NO: 3090810 - DNA, 25 bp, Homo sapien
taagaggcttaaatggtgccaagga

SEQ ID NO: 3090811 - DNA, 25 bp, Homo sapien
tatagccactaagaggcttaaatgg

SEQ ID NO: 3090812 - DNA, 25 bp, Homo sapien
taaatggtgccaaggacgtaggaga

SEQ ID NO: 3090813 - DNA, 25 bp, Homo sapien
cagcagatagcttgacatagttacc

SEQ ID NO: 3090814 - DNA, 25 bp, Homo sapien
tgtagctctcagttcaaggccaaag

SEQ ID NO: 3090815 - DNA, 25 bp, Homo sapien
cagggaatctgatggtgtagctctc

SEQ ID NO: 3090816 - DNA, 25 bp, Homo sapien
gcaagaagtcccaaaacaggtcgtc

SEQ ID NO: 3090817 - DNA, 25 bp, Homo sapien
agtccctagctacttcataggctga

SEQ ID NO: 3090818 - DNA, 25 bp, Homo sapien
cataggctgaggtaggagttatcac

SEQ ID NO: 3090819 - DNA, 25 bp, Homo sapien
gcagtccctagctacttcataggct

SEQ ID NO: 3090820 - DNA, 25 bp, Homo sapien
ctgcagtccctagctacttcatagg

SEQ ID NO: 3090821 - DNA, 25 bp, Homo sapien
tcaacaaagtggtgtacgatgacca

SEQ ID NO: 3090822 - DNA, 25 bp, Homo sapien
gagggccgtcaacaaagtggtgtac

SEQ ID NO: 3090823 - DNA, 25 bp, Homo sapien
ggccgtcaacaaagtggtgtacgat

SEQ ID NO: 3090824 - DNA, 25 bp, Homo sapien
aagtggtgtacgatgaccacgagag

SEQ ID NO: 3090825 - DNA, 25 bp, Homo sapien
cgatgactccgattatccggaggag

SEQ ID NO: 3090826 - DNA, 25 bp, Homo sapien
ggacgacgatgactccgattatccg

SEQ ID NO: 3090827 - DNA, 25 bp, Homo sapien
acgacgatgactccgattatccgga

SEQ ID NO: 3090828 - DNA, 25 bp, Homo sapien
gacgatgactccgattatccggagg

SEQ ID NO: 3090829 - DNA, 25 bp, Homo sapien
catggaggaccgtacaaagtgtcag

SEQ ID NO: 3090830 - DNA, 25 bp, Homo sapien
tataattgtgctcacgctgtcatgg

SEQ ID NO: 3090831 - DNA, 25 bp, Homo sapien
tctataccaataccgagtgaggcca

SEQ ID NO: 3090832 - DNA, 25 bp, Homo sapien
taacttcggctggaaatgaacttcc

SEQ ID NO: 3090833 - DNA, 25 bp, Homo sapien
gggataagtaattgcagtaacacaa

SEQ ID NO: 3090834 - DNA, 25 bp, Homo sapien
ttaatttcagccagcttacttcccc

SEQ ID NO: 3090835 - DNA, 25 bp, Homo sapien
tcctctaaaaggcaatgtgagatag

SEQ ID NO: 3090836 - DNA, 25 bp, Homo sapien
gagaaccatctttagtcctctaaaa

SEQ ID NO: 3090837 - DNA, 25 bp, Homo sapien
gacactttgtgatgtccctggacca

SEQ ID NO: 3090838 - DNA, 25 bp, Homo sapien
gggcccttggtgacttacattctag

SEQ ID NO: 3090839 - DNA, 25 bp, Homo sapien
caccagtttaacagggcgctacaga

SEQ ID NO: 3090840 - DNA, 25 bp, Homo sapien
tattgagtgccctacaatgtgcctg

SEQ ID NO: 3090841 - DNA, 25 bp, Homo sapien
tgttcccttacactgaaagcctcag

SEQ ID NO: 3090842 - DNA, 25 bp, Homo sapien
cgtgctggccggacttcttgctttt

SEQ ID NO: 3090843 - DNA, 25 bp, Homo sapien
cagtacctatcctgacttggaatca

SEQ ID NO: 3090844 - DNA, 25 bp, Homo sapien
cagggtattcctatcctaatgtgca

SEQ ID NO: 3090845 - DNA, 25 bp, Homo sapien
cagaagttagcaatcacagctgggc

SEQ ID NO: 3090846 - DNA, 25 bp, Homo sapien
tagatttctagacacaggattgctg

SEQ ID NO: 3090847 - DNA, 25 bp, Homo sapien
cccttcgtgtattgtgagacttgga

SEQ ID NO: 3090848 - DNA, 25 bp, Homo sapien
gcccctcaagtacgtaggactagag

SEQ ID NO: 3090849 - DNA, 25 bp, Homo sapien
gaagaaagatccttttcatactccc

SEQ ID NO: 3090850 - DNA, 25 bp, Homo sapien
ttggagagctttgggcgatttttta

SEQ ID NO: 3090851 - DNA, 25 bp, Homo sapien
gtaaccaccatgcatcaacagtttg

SEQ ID NO: 3090852 - DNA, 25 bp, Homo sapien
aggatcattctgcatgtattgttct

SEQ ID NO: 3090853 - DNA, 25 bp, Homo sapien
aaacaattcctaagtactcaatcag

SEQ ID NO: 3090854 - DNA, 25 bp, Homo sapien
aaaatgcaattcgactccttcctag

SEQ ID NO: 3090855 - DNA, 25 bp, Homo sapien
tacatgagaagacattatagcaggg

SEQ ID NO: 3090856 - DNA, 25 bp, Homo sapien
gataagagtgcaattagtacagtgg

SEQ ID NO: 3090857 - DNA, 25 bp, Homo sapien
caagggctatatgcttgaaaggtaa

SEQ ID NO: 3090858 - DNA, 25 bp, Homo sapien
gctagcttttagtgcttatattaga

SEQ ID NO: 3090859 - DNA, 25 bp, Homo sapien
tgtttagggatatagacgtttgtaa

SEQ ID NO: 3090860 - DNA, 25 bp, Homo sapien
gacttcctaggagaagttgctagct

SEQ ID NO: 3090861 - DNA, 25 bp, Homo sapien
tagaatattggaggcttacaaggcc

SEQ ID NO: 3090862 - DNA, 25 bp, Homo sapien
gccaggcaatactaatgtgaattac

SEQ ID NO: 3090863 - DNA, 25 bp, Homo sapien
gaattacagaaagtcgttagaagga

SEQ ID NO: 3090864 - DNA, 25 bp, Homo sapien
ggtttgttcctaaattgccaggcaa

SEQ ID NO: 3090865 - DNA, 25 bp, Homo sapien
gaaatttttattcgtactgcagaat

SEQ ID NO: 3090866 - DNA, 25 bp, Homo sapien
tccgtaagattgtagaatggaactt

SEQ ID NO: 3090867 - DNA, 25 bp, Homo sapien
ctgcagaattactagtttagtttac

SEQ ID NO: 3090868 - DNA, 25 bp, Homo sapien
gcctcagccgcctgattatcatttt

SEQ ID NO: 3090869 - DNA, 25 bp, Homo sapien
aataacgtaaattatcgttacatgg

SEQ ID NO: 3090870 - DNA, 25 bp, Homo sapien
taaacttgacatattaaagtgctaa

SEQ ID NO: 3090871 - DNA, 25 bp, Homo sapien
tgctaatactctggaaataacgtaa

SEQ ID NO: 3090872 - DNA, 25 bp, Homo sapien
cgtaaattatcgttacatggttctt

SEQ ID NO: 3090873 - DNA, 25 bp, Homo sapien
agggtaggctcaactgggaagcact

SEQ ID NO: 3090874 - DNA, 25 bp, Homo sapien
ttgctataaaaagccatgcacgtga

SEQ ID NO: 3090875 - DNA, 25 bp, Homo sapien
taatcctttctgtctaatggaggca

SEQ ID NO: 3090876 - DNA, 25 bp, Homo sapien
tggtcccaatcaagtgttgctcggg

SEQ ID NO: 3090877 - DNA, 25 bp, Homo sapien
cactggatgtggtttctgggaagaa

SEQ ID NO: 3090878 - DNA, 25 bp, Homo sapien
cagtgctgccagaaagattctccta

SEQ ID NO: 3090879 - DNA, 25 bp, Homo sapien
ctgatagttgtcctccacagtgctg

SEQ ID NO: 3090880 - DNA, 25 bp, Homo sapien
gacttggtaactactgcagcaagga

SEQ ID NO: 3090881 - DNA, 25 bp, Homo sapien
tgtgttgtccatttgtcgatttcta

SEQ ID NO: 3090882 - DNA, 25 bp, Homo sapien
tccatttgtcgatttctaatgacca

SEQ ID NO: 3090883 - DNA, 25 bp, Homo sapien
tgtccatttgtcgatttctaatgac

SEQ ID NO: 3090884 - DNA, 25 bp, Homo sapien
tttttaatgtgttgtccatttgtcg

SEQ ID NO: 3090885 - DNA, 25 bp, Homo sapien
taactactaaagttggatctccagc

SEQ ID NO: 3090886 - DNA, 25 bp, Homo sapien
gaactttcatcaaacctttgctaca

SEQ ID NO: 3090887 - DNA, 25 bp, Homo sapien
ccccataagtggctcagttacaact

SEQ ID NO: 3090888 - DNA, 25 bp, Homo sapien
gatctccagctacagtaacattcca

SEQ ID NO: 3090889 - DNA, 25 bp, Homo sapien
cctcaaagtaatgtccaaggacagt

SEQ ID NO: 3090890 - DNA, 25 bp, Homo sapien
acagtcatccaagccccaagttgca

SEQ ID NO: 3090891 - DNA, 25 bp, Homo sapien
ggacaacaatcccaggttcagacta

SEQ ID NO: 3090892 - DNA, 25 bp, Homo sapien
tgtccaaagtccatcacagactcga

SEQ ID NO: 3090893 - DNA, 25 bp, Homo sapien
gagggtgtttcaccattttttgtca

SEQ ID NO: 3090894 - DNA, 25 bp, Homo sapien
agagagggtgtttcaccattttttg

SEQ ID NO: 3090895 - DNA, 25 bp, Homo sapien
agggtgtttcaccattttttgtcag

SEQ ID NO: 3090896 - DNA, 25 bp, Homo sapien
ggtgtttcaccattttttgtcaggc

SEQ ID NO: 3090897 - DNA, 25 bp, Homo sapien
ggcctcttgaacaagccagtttaca

SEQ ID NO: 3090898 - DNA, 25 bp, Homo sapien
gaaagccctgagaatcagccccaat

SEQ ID NO: 3090899 - DNA, 25 bp, Homo sapien
agttggtcagttgcccttcaaagcc

SEQ ID NO: 3090900 - DNA, 25 bp, Homo sapien
tctacacagagtgggaaaatagttg

SEQ ID NO: 3090901 - DNA, 25 bp, Homo sapien
tgtccaacggacaagaaaaaagcaa

SEQ ID NO: 3090902 - DNA, 25 bp, Homo sapien
tagtcaggctatcctgacaagactt

SEQ ID NO: 3090903 - DNA, 25 bp, Homo sapien
taaagttcagcgtgttaacctaaca

SEQ ID NO: 3090904 - DNA, 25 bp, Homo sapien
aaggagccagatgtttttagtcagg

SEQ ID NO: 3090905 - DNA, 25 bp, Homo sapien
cacacaactgggaatcaacaatgag

SEQ ID NO: 3090906 - DNA, 25 bp, Homo sapien
tccagccccggttacatataatcat

SEQ ID NO: 3090907 - DNA, 25 bp, Homo sapien
tattgtggcagaagcgagaaaactt

SEQ ID NO: 3090908 - DNA, 25 bp, Homo sapien
gttgggctaagtggtcctggactac

SEQ ID NO: 3090909 - DNA, 25 bp, Homo sapien
tacatttcacattgggatagctgcc

SEQ ID NO: 3090910 - DNA, 25 bp, Homo sapien
taatacttgtcctgggctttgaccc

SEQ ID NO: 3090911 - DNA, 25 bp, Homo sapien
tgttgccgacgtccaagtctcttgc

SEQ ID NO: 3090912 - DNA, 25 bp, Homo sapien
catacattactaggagcagggaggc

SEQ ID NO: 3090913 - DNA, 25 bp, Homo sapien
caaatgcattgggtatgaattgcac

SEQ ID NO: 3090914 - DNA, 25 bp, Homo sapien
tcaaatgcattgggtatgaattgca

SEQ ID NO: 3090915 - DNA, 25 bp, Homo sapien
tctcttatggtagatgtggcccatc

SEQ ID NO: 3090916 - DNA, 25 bp, Homo sapien
tcttatggtagatgtggcccatcac

SEQ ID NO: 3090917 - DNA, 25 bp, Homo sapien
cttatggtagatgtggcccatcaca

SEQ ID NO: 3090918 - DNA, 25 bp, Homo sapien
tatggtagatgtggcccatcacaat

SEQ ID NO: 3090919 - DNA, 25 bp, Homo sapien
tacaagataaccaaccaggccggtg

SEQ ID NO: 3090920 - DNA, 25 bp, Homo sapien
tatcttgctgcacaagttgaaactg

SEQ ID NO: 3090921 - DNA, 25 bp, Homo sapien
ggcctttaagaaacgcctaagctgc

SEQ ID NO: 3090922 - DNA, 25 bp, Homo sapien
gagtctacaggcatctggtggaaac

SEQ ID NO: 3090923 - DNA, 25 bp, Homo sapien
cattgtttcccatcgctcccaaaaa

SEQ ID NO: 3090924 - DNA, 25 bp, Homo sapien
tcccatcgctcccaaaaaaaggctg

SEQ ID NO: 3090925 - DNA, 25 bp, Homo sapien
tcattgtttcccatcgctcccaaaa

SEQ ID NO: 3090926 - DNA, 25 bp, Homo sapien
ccatcgctcccaaaaaaaggctggg

SEQ ID NO: 3090927 - DNA, 25 bp, Homo sapien
tacaaacggtggtataaagtacata

SEQ ID NO: 3090928 - DNA, 25 bp, Homo sapien
taaagtacatatgcagcgtcattca

SEQ ID NO: 3090929 - DNA, 25 bp, Homo sapien
atgcagcgtcattcaggtcagtttc

SEQ ID NO: 3090930 - DNA, 25 bp, Homo sapien
tacatatgcagcgtcattcaggtca

SEQ ID NO: 3090931 - DNA, 25 bp, Homo sapien
aggagtccagggctaacatgtggac

SEQ ID NO: 3090932 - DNA, 25 bp, Homo sapien
aaactctggacacggcttattgcag

SEQ ID NO: 3090933 - DNA, 25 bp, Homo sapien
ggctaacatgtggactcggaagaag

SEQ ID NO: 3090934 - DNA, 25 bp, Homo sapien
caggtttaaactctggacacggctt

SEQ ID NO: 3090935 - DNA, 25 bp, Homo sapien
tccacatcgtgcacgatcccgttca

SEQ ID NO: 3090936 - DNA, 25 bp, Homo sapien
gcccagcacgtccacatcgtgcacg

SEQ ID NO: 3090937 - DNA, 25 bp, Homo sapien
cacgtccacatcgtgcacgatcccg

SEQ ID NO: 3090938 - DNA, 25 bp, Homo sapien
acatcgtgcacgatcccgttcaccg

SEQ ID NO: 3090939 - DNA, 25 bp, Homo sapien
cattaccccgagttcctctcccagt

SEQ ID NO: 3090940 - DNA, 25 bp, Homo sapien
cgcgaaacggcccgcacgggtcagg

SEQ ID NO: 3090941 - DNA, 25 bp, Homo sapien
ccctgggatctcgcgggcggattct

SEQ ID NO: 3090942 - DNA, 25 bp, Homo sapien
gaagagcattaccccgagttcctct

SEQ ID NO: 3090943 - DNA, 25 bp, Homo sapien
tcgcgttcgtccagatcggaccggc

SEQ ID NO: 3090944 - DNA, 25 bp, Homo sapien
gttcgtccagatcggaccggcaggc

SEQ ID NO: 3090945 - DNA, 25 bp, Homo sapien
aattcgctctcgcagaacgcctcgc

SEQ ID NO: 3090946 - DNA, 25 bp, Homo sapien
gaacgcctcgcgttcgtccagatcg

SEQ ID NO: 3090947 - DNA, 25 bp, Homo sapien
tctgcggcgggctgaggccgaagct

SEQ ID NO: 3090948 - DNA, 25 bp, Homo sapien
aagctgaggctgaagcgcggcggcg

SEQ ID NO: 3090949 - DNA, 25 bp, Homo sapien
tccgcgtccctctgcggcgggctga

SEQ ID NO: 3090950 - DNA, 25 bp, Homo sapien
ggctgaggccgaagctgaggctgaa

SEQ ID NO: 3090951 - DNA, 25 bp, Homo sapien
aagctggcctggttgtcggccggcg

SEQ ID NO: 3090952 - DNA, 25 bp, Homo sapien
gggcctcaaggagtggctgcgcgcg

SEQ ID NO: 3090953 - DNA, 25 bp, Homo sapien
cagccgcgggagtccggctttctgc

SEQ ID NO: 3090954 - DNA, 25 bp, Homo sapien
gcggttctcggcttgcgccaggcgc

SEQ ID NO: 3090955 - DNA, 25 bp, Homo sapien
gagaagaggagaggcgggaaggcgg

SEQ ID NO: 3090956 - DNA, 25 bp, Homo sapien
tcggggaaagccgaggaagccgaga

SEQ ID NO: 3090957 - DNA, 25 bp, Homo sapien
gcaggggcgctgcagaagaagggct

SEQ ID NO: 3090958 - DNA, 25 bp, Homo sapien
gagaagcagtgaggggaggccgtcg

SEQ ID NO: 3090959 - DNA, 25 bp, Homo sapien
tcccacgtttcactgagcctccttc

SEQ ID NO: 3090960 - DNA, 25 bp, Homo sapien
ctttataagacgaacgcagacccgg

SEQ ID NO: 3090961 - DNA, 25 bp, Homo sapien
agacccggggtgtcctctcttgcga

SEQ ID NO: 3090962 - DNA, 25 bp, Homo sapien
agggccccgcactacaccaatctta

SEQ ID NO: 3090963 - DNA, 25 bp, Homo sapien
tttttctctccgccaccggtgcttc

SEQ ID NO: 3090964 - DNA, 25 bp, Homo sapien
ctccgccaccggtgcttcgggggat

SEQ ID NO: 3090965 - DNA, 25 bp, Homo sapien
tctccgccaccggtgcttcggggga

SEQ ID NO: 3090966 - DNA, 25 bp, Homo sapien
ttctctccgccaccggtgcttcggg

SEQ ID NO: 3090967 - DNA, 25 bp, Homo sapien
ttcctaaggaggacgagcacatggc

SEQ ID NO: 3090968 - DNA, 25 bp, Homo sapien
tggaacaaaaccgagccgcagggat

SEQ ID NO: 3090969 - DNA, 25 bp, Homo sapien
ctcgctgagcagaccattggaacaa

SEQ ID NO: 3090970 - DNA, 25 bp, Homo sapien
cccaggctctaaaagtgagcctggt

SEQ ID NO: 3090971 - DNA, 25 bp, Homo sapien
ccggaggctgatgccttatccatta

SEQ ID NO: 3090972 - DNA, 25 bp, Homo sapien
tccggaggctgatgccttatccatt

SEQ ID NO: 3090973 - DNA, 25 bp, Homo sapien
gcgatgccatcatcacgctcccgcc

SEQ ID NO: 3090974 - DNA, 25 bp, Homo sapien
cgatgccatcatcacgctcccgccc

SEQ ID NO: 3090975 - DNA, 25 bp, Homo sapien
gatgccatcatcacgctcccgcccc

SEQ ID NO: 3090976 - DNA, 25 bp, Homo sapien
gcttgtcctctgactaggtttctaa

SEQ ID NO: 3090977 - DNA, 25 bp, Homo sapien
tacatactgtatgaagcttgtcctc

SEQ ID NO: 3090978 - DNA, 25 bp, Homo sapien
tgtttctctactaagaactctttct

SEQ ID NO: 3090979 - DNA, 25 bp, Homo sapien
gaaactatacttgaacagttccaac

SEQ ID NO: 3090980 - DNA, 25 bp, Homo sapien
cataggagccattggaaaccttgtc

SEQ ID NO: 3090981 - DNA, 25 bp, Homo sapien
ccacccttgctggagcttgccaaaa

SEQ ID NO: 3090982 - DNA, 25 bp, Homo sapien
tacaggacccaagttcagaaggcca

SEQ ID NO: 3090983 - DNA, 25 bp, Homo sapien
tttggaaagcccttgaaacgtgtca

SEQ ID NO: 3090984 - DNA, 25 bp, Homo sapien
cagggtcctagagcattcattttca

SEQ ID NO: 3090985 - DNA, 25 bp, Homo sapien
gggtcctagagcattcattttcagg

SEQ ID NO: 3090986 - DNA, 25 bp, Homo sapien
gtcctagagcattcattttcaggaa

SEQ ID NO: 3090987 - DNA, 25 bp, Homo sapien
cttcagggtcctagagcattcattt

SEQ ID NO: 3090988 - DNA, 25 bp, Homo sapien
cagaatagcaaatatgaagaggctg

SEQ ID NO: 3090989 - DNA, 25 bp, Homo sapien
gaatagcaaatatgaagaggctgac

SEQ ID NO: 3090990 - DNA, 25 bp, Homo sapien
atagcaaatatgaagaggctgaccc

SEQ ID NO: 3090991 - DNA, 25 bp, Homo sapien
aagaggctgacccacactgacagtt

SEQ ID NO: 3090992 - DNA, 25 bp, Homo sapien
cagccgactctccagttggggtctt

SEQ ID NO: 3090993 - DNA, 25 bp, Homo sapien
ctcagcagccgactctccagttggg

SEQ ID NO: 3090994 - DNA, 25 bp, Homo sapien
cagcagccgactctccagttggggt

SEQ ID NO: 3090995 - DNA, 25 bp, Homo sapien
ccctcagcagccgactctccagttg

SEQ ID NO: 3090996 - DNA, 25 bp, Homo sapien
ctggtgtccctgttgaagatctcat

SEQ ID NO: 3090997 - DNA, 25 bp, Homo sapien
catcctcattggaagactccttgtc

SEQ ID NO: 3090998 - DNA, 25 bp, Homo sapien
aagactccttgtcatgcagcttcat

SEQ ID NO: 3090999 - DNA, 25 bp, Homo sapien
gaagatctcatcctcattggaagac

SEQ ID NO: 3091000 - DNA, 25 bp, Homo sapien
tgtcacaaggccagttgattagttg

SEQ ID NO: 3091001 - DNA, 25 bp, Homo sapien
gttaaaggtagttatctcttgcaga

SEQ ID NO: 3091002 - DNA, 25 bp, Homo sapien
ttaaaggtagttatctcttgcagac

SEQ ID NO: 3091003 - DNA, 25 bp, Homo sapien
taaaggtagttatctcttgcagaca

SEQ ID NO: 3091004 - DNA, 25 bp, Homo sapien
tcactcttccaatatgctagcactg

SEQ ID NO: 3091005 - DNA, 25 bp, Homo sapien
cactcttccaatatgctagcactgg

SEQ ID NO: 3091006 - DNA, 25 bp, Homo sapien
actcttccaatatgctagcactggc

SEQ ID NO: 3091007 - DNA, 25 bp, Homo sapien
tctaataaatctaccagacaatact

SEQ ID NO: 3091008 - DNA, 25 bp, Homo sapien
gactctaataaatctaccagacaat

SEQ ID NO: 3091009 - DNA, 25 bp, Homo sapien
ataaatctaccagacaatacttctc

SEQ ID NO: 3091010 - DNA, 25 bp, Homo sapien
ttgtgactctaataaatctaccaga

SEQ ID NO: 3091011 - DNA, 25 bp, Homo sapien
gcatacctcagccttaaacgactga

SEQ ID NO: 3091012 - DNA, 25 bp, Homo sapien
tgtcaagtggggaagtggctttggt

SEQ ID NO: 3091013 - DNA, 25 bp, Homo sapien
catacctcagccttaaacgactgaa

SEQ ID NO: 3091014 - DNA, 25 bp, Homo sapien
agcatacctcagccttaaacgactg

SEQ ID NO: 3091015 - DNA, 25 bp, Homo sapien
caagattagtttgttgttatagcca

SEQ ID NO: 3091016 - DNA, 25 bp, Homo sapien
ttagaatcaaaatcgttagtattac

SEQ ID NO: 3091017 - DNA, 25 bp, Homo sapien
cgttagtattacagtcacagatatc

SEQ ID NO: 3091018 - DNA, 25 bp, Homo sapien
cacagatatcaccaagattagtttg

SEQ ID NO: 3091019 - DNA, 25 bp, Homo sapien
tggcatatgctaaatgatgggaaag

SEQ ID NO: 3091020 - DNA, 25 bp, Homo sapien
agtcccaggttctcctgtgtgggca

SEQ ID NO: 3091021 - DNA, 25 bp, Homo sapien
taaatgatgggaaagtctgggtctc

SEQ ID NO: 3091022 - DNA, 25 bp, Homo sapien
ttcctggcatatgctaaatgatggg

SEQ ID NO: 3091023 - DNA, 25 bp, Homo sapien
ctgtgctttcattaatatagttctt

SEQ ID NO: 3091024 - DNA, 25 bp, Homo sapien
tcactcgacttctgctctttctgtt

SEQ ID NO: 3091025 - DNA, 25 bp, Homo sapien
gtgctttcattaatatagttcttag

SEQ ID NO: 3091026 - DNA, 25 bp, Homo sapien
gctttcattaatatagttcttagtt

SEQ ID NO: 3091027 - DNA, 25 bp, Homo sapien
aggtctcggagcagtccgtcttcaa

SEQ ID NO: 3091028 - DNA, 25 bp, Homo sapien
cacttgcacataggtctcggagcag

SEQ ID NO: 3091029 - DNA, 25 bp, Homo sapien
tagttgatgggttagcggaatttca

SEQ ID NO: 3091030 - DNA, 25 bp, Homo sapien
atgacggactgtagttgatgggtta

SEQ ID NO: 3091031 - DNA, 25 bp, Homo sapien
ctggggatgagagcaatgggtaact

SEQ ID NO: 3091032 - DNA, 25 bp, Homo sapien
ggggatgagagcaatgggtaactga

SEQ ID NO: 3091033 - DNA, 25 bp, Homo sapien
gatgagagcaatgggtaactgaagc

SEQ ID NO: 3091034 - DNA, 25 bp, Homo sapien
caggtcagtgcccacgttgttgtat

SEQ ID NO: 3091035 - DNA, 25 bp, Homo sapien
agttgaatgcagtcctagtgggaat

SEQ ID NO: 3091036 - DNA, 25 bp, Homo sapien
gagatggtgccttctggcatagtag

SEQ ID NO: 3091037 - DNA, 25 bp, Homo sapien
gagactgttggcttctgctcttggg

SEQ ID NO: 3091038 - DNA, 25 bp, Homo sapien
gcttttgcagttgtggaaggcagaa

SEQ ID NO: 3091039 - DNA, 25 bp, Homo sapien
tcccgctacgttctcgggcccctgc

SEQ ID NO: 3091040 - DNA, 25 bp, Homo sapien
aagaggagactgttggcttctgctc

SEQ ID NO: 3091041 - DNA, 25 bp, Homo sapien
gcaggtttttgcctacactttgaac

SEQ ID NO: 3091042 - DNA, 25 bp, Homo sapien
gctttgaagggccttttctggatgc

SEQ ID NO: 3091043 - DNA, 25 bp, Homo sapien
gcccatgaggactctgttcactctc

SEQ ID NO: 3091044 - DNA, 25 bp, Homo sapien
actttgaacctttgccaggctgttt

SEQ ID NO: 3091045 - DNA, 25 bp, Homo sapien
taaatttgttacctagaaggctgga

SEQ ID NO: 3091046 - DNA, 25 bp, Homo sapien
aacaggagcttatctccatcttgca

SEQ ID NO: 3091047 - DNA, 25 bp, Homo sapien
tcaaaacaggagcttatctccatct

SEQ ID NO: 3091048 - DNA, 25 bp, Homo sapien
aaacaggagcttatctccatcttgc

SEQ ID NO: 3091049 - DNA, 25 bp, Homo sapien
aaaacaggagcttatctccatcttg

SEQ ID NO: 3091050 - DNA, 25 bp, Homo sapien
tagatttcctgctgagaaataaggc

SEQ ID NO: 3091051 - DNA, 25 bp, Homo sapien
aaaagcagtttaatgaatggtaaca

SEQ ID NO: 3091052 - DNA, 25 bp, Homo sapien
taatttagcgcagtgataacatcac

SEQ ID NO: 3091053 - DNA, 25 bp, Homo sapien
tcttatcataagtgtctagctgctc

SEQ ID NO: 3091054 - DNA, 25 bp, Homo sapien
gctcagtagtcagctcaatgctcat

SEQ ID NO: 3091055 - DNA, 25 bp, Homo sapien
tctgaggctgcctccggctcagtag

SEQ ID NO: 3091056 - DNA, 25 bp, Homo sapien
gctcaatgctcatgtgcttcttctg

SEQ ID NO: 3091057 - DNA, 25 bp, Homo sapien
ccttcatgaacactctttctggatt

SEQ ID NO: 3091058 - DNA, 25 bp, Homo sapien
aactctgtctttatataagtagcca

SEQ ID NO: 3091059 - DNA, 25 bp, Homo sapien
ccatccaaagcttctggccgcatga

SEQ ID NO: 3091060 - DNA, 25 bp, Homo sapien
actctgtctttatataagtagccaa

SEQ ID NO: 3091061 - DNA, 25 bp, Homo sapien
gcagacagcctcaatgctattttta

SEQ ID NO: 3091062 - DNA, 25 bp, Homo sapien
gcactgttgcaatgcagcttgactg

SEQ ID NO: 3091063 - DNA, 25 bp, Homo sapien
ggcagcaggccatatggctaggtaa

SEQ ID NO: 3091064 - DNA, 25 bp, Homo sapien
gacaatgtgtggtgtttgtcagaca

SEQ ID NO: 3091065 - DNA, 25 bp, Homo sapien
cagattatgggacaatttacaaaac

SEQ ID NO: 3091066 - DNA, 25 bp, Homo sapien
ccacctgcaatcacgaggcaggaag

SEQ ID NO: 3091067 - DNA, 25 bp, Homo sapien
tccagattatgggacaatttacaaa

SEQ ID NO: 3091068 - DNA, 25 bp, Homo sapien
acctgcaatcacgaggcaggaagga

SEQ ID NO: 3091069 - DNA, 25 bp, Homo sapien
aggaccctccatttcatcagttttg

SEQ ID NO: 3091070 - DNA, 25 bp, Homo sapien
atcagttttggattgggcaacagag

SEQ ID NO: 3091071 - DNA, 25 bp, Homo sapien
gtgccctcatgtactgctgacgtgg

SEQ ID NO: 3091072 - DNA, 25 bp, Homo sapien
cctcatgtactgctgacgtggaggg

SEQ ID NO: 3091073 - DNA, 25 bp, Homo sapien
cactaggggcttgaagatttgctca

SEQ ID NO: 3091074 - DNA, 25 bp, Homo sapien
gtggggtggccactaggggcttgaa

SEQ ID NO: 3091075 - DNA, 25 bp, Homo sapien
ggccactaggggcttgaagatttgc

SEQ ID NO: 3091076 - DNA, 25 bp, Homo sapien
gggtggccactaggggcttgaagat

SEQ ID NO: 3091077 - DNA, 25 bp, Homo sapien
tgctgagggttgtgtaggtggctgg

SEQ ID NO: 3091078 - DNA, 25 bp, Homo sapien
cagagtgacacaggcttctgtgggc

SEQ ID NO: 3091079 - DNA, 25 bp, Homo sapien
cccgtgcaaggtgtgctgagggttg

SEQ ID NO: 3091080 - DNA, 25 bp, Homo sapien
gtcccgtgcaaggtgtgctgagggt

SEQ ID NO: 3091081 - DNA, 25 bp, Homo sapien
accccacagggacgcttgatccaag

SEQ ID NO: 3091082 - DNA, 25 bp, Homo sapien
gatcagccgctagtgtaaacgagca

SEQ ID NO: 3091083 - DNA, 25 bp, Homo sapien
cctgttaaggccgtggaactcgagg

SEQ ID NO: 3091084 - DNA, 25 bp, Homo sapien
gctgccctggaggaacgttagtgtt

SEQ ID NO: 3091085 - DNA, 25 bp, Homo sapien
cgtatcagttctcgttcatctggtt

SEQ ID NO: 3091086 - DNA, 25 bp, Homo sapien
catctggttgatcagcatgaagaca

SEQ ID NO: 3091087 - DNA, 25 bp, Homo sapien
cagcatgaagacatcgccctcatgg

SEQ ID NO: 3091088 - DNA, 25 bp, Homo sapien
atctttctccggctccaagtcatac

SEQ ID NO: 3091089 - DNA, 25 bp, Homo sapien
tcaggctttccgaggtcaaagcact

SEQ ID NO: 3091090 - DNA, 25 bp, Homo sapien
ctttccgaggtcaaagcactcccgg

SEQ ID NO: 3091091 - DNA, 25 bp, Homo sapien
cggaaagaggacgaagctgcgatct

SEQ ID NO: 3091092 - DNA, 25 bp, Homo sapien
aagcttcccggatcctgcacttgaa

SEQ ID NO: 3091093 - DNA, 25 bp, Homo sapien
ctgccaaggccgggagttgactcac

SEQ ID NO: 3091094 - DNA, 25 bp, Homo sapien
ctactggatgtcggtctccaggagg

SEQ ID NO: 3091095 - DNA, 25 bp, Homo sapien
ctccaggaggttgtgcatgctggtt

SEQ ID NO: 3091096 - DNA, 25 bp, Homo sapien
ggttgtgcatgctggtttctgccac

SEQ ID NO: 3091097 - DNA, 25 bp, Homo sapien
caggaggttgtgcatgctggtttct

SEQ ID NO: 3091098 - DNA, 25 bp, Homo sapien
tcaaacttctccagcgcctggtgca

SEQ ID NO: 3091099 - DNA, 25 bp, Homo sapien
cctcaaacttctccagcgcctggtg

SEQ ID NO: 3091100 - DNA, 25 bp, Homo sapien
agcgcctggtgcagctcctcttcgg

SEQ ID NO: 3091101 - DNA, 25 bp, Homo sapien
ggtgcagctcctcttcggggatctt

SEQ ID NO: 3091102 - DNA, 25 bp, Homo sapien
agtcaaagtccaggcggcggccctc

SEQ ID NO: 3091103 - DNA, 25 bp, Homo sapien
tagtcaaagtccaggcggcggccct

SEQ ID NO: 3091104 - DNA, 25 bp, Homo sapien
ataggttctggagggggtcaatgaa

SEQ ID NO: 3091105 - DNA, 25 bp, Homo sapien
gggggtcaatgaagttatgcttgac

SEQ ID NO: 3091106 - DNA, 25 bp, Homo sapien
ctggagggggtcaatgaagttatgc

SEQ ID NO: 3091107 - DNA, 25 bp, Homo sapien
gttctggagggggtcaatgaagtta

SEQ ID NO: 3091108 - DNA, 25 bp, Homo sapien
cctgactgcaggtagccggggttct

SEQ ID NO: 3091109 - DNA, 25 bp, Homo sapien
gagcccccctgactgcaggtagccg

SEQ ID NO: 3091110 - DNA, 25 bp, Homo sapien
ccccggatcttgcacgcggtgttga

SEQ ID NO: 3091111 - DNA, 25 bp, Homo sapien
ccggatcttgcacgcggtgttgagc

SEQ ID NO: 3091112 - DNA, 25 bp, Homo sapien
atttaagtcgttgtcacctcattat

SEQ ID NO: 3091113 - DNA, 25 bp, Homo sapien
ataatgaggtgacaacgacttaaat

SEQ ID NO: 3091114 - DNA, 25 bp, Homo sapien
tccatctcttcgaagtcatcatcca

SEQ ID NO: 3091115 - DNA, 25 bp, Homo sapien
gtcatcatccagcttggtcccctca

SEQ ID NO: 3091116 - DNA, 25 bp, Homo sapien
cttctccatctcttcgaagtcatca

SEQ ID NO: 3091117 - DNA, 25 bp, Homo sapien
atcatccagcttggtcccctcagcc

SEQ ID NO: 3091118 - DNA, 25 bp, Homo sapien
cccggcaaccgacatgctgcctcct

SEQ ID NO: 3091119 - DNA, 25 bp, Homo sapien
caggctcccgggcaccaccaaccct

SEQ ID NO: 3091120 - DNA, 25 bp, Homo sapien
ctgcccagaccccgccagcgacagg

SEQ ID NO: 3091121 - DNA, 25 bp, Homo sapien
tgccgcggaaccttccgcccagacc

SEQ ID NO: 3091122 - DNA, 25 bp, Homo sapien
tgactctgcaggaaacactatatct

SEQ ID NO: 3091123 - DNA, 25 bp, Homo sapien
aacactatatctagtgtcctccata

SEQ ID NO: 3091124 - DNA, 25 bp, Homo sapien
atatctagtgtcctccataattcaa

SEQ ID NO: 3091125 - DNA, 25 bp, Homo sapien
ctgactctgcaggaaacactatatc

SEQ ID NO: 3091126 - DNA, 25 bp, Homo sapien
aaaccatactcctatcacatactct

SEQ ID NO: 3091127 - DNA, 25 bp, Homo sapien
cctgtgactggcatcatgtctgaaa

SEQ ID NO: 3091128 - DNA, 25 bp, Homo sapien
catctgtctacttgtcagtctcctg

SEQ ID NO: 3091129 - DNA, 25 bp, Homo sapien
gcagagaccacatcttatcgtcatt

SEQ ID NO: 3091130 - DNA, 25 bp, Homo sapien
aaagctcagttctgttagtaaattg

SEQ ID NO: 3091131 - DNA, 25 bp, Homo sapien
ctgttagtaaattgcaaccaagatt

SEQ ID NO: 3091132 - DNA, 25 bp, Homo sapien
ccaaagctcagttctgttagtaaat

SEQ ID NO: 3091133 - DNA, 25 bp, Homo sapien
cagttctgttagtaaattgcaacca

SEQ ID NO: 3091134 - DNA, 25 bp, Homo sapien
gttacgttgtctggctggtgtctcc

SEQ ID NO: 3091135 - DNA, 25 bp, Homo sapien
atggtgttacgttgtctggctggtg

SEQ ID NO: 3091136 - DNA, 25 bp, Homo sapien
gtgttacgttgtctggctggtgtct

SEQ ID NO: 3091137 - DNA, 25 bp, Homo sapien
ctggatggtgttacgttgtctggct

SEQ ID NO: 3091138 - DNA, 25 bp, Homo sapien
acaaggcagcgtctcatatctgcag

SEQ ID NO: 3091139 - DNA, 25 bp, Homo sapien
actgagatcaatacaaggcagcgtc

SEQ ID NO: 3091140 - DNA, 25 bp, Homo sapien
gcagcgtctcatatctgcaggtaca

SEQ ID NO: 3091141 - DNA, 25 bp, Homo sapien
gctttggactgagatcaatacaagg

SEQ ID NO: 3091142 - DNA, 25 bp, Homo sapien
cccctgtagtaagttgtgtagttat

SEQ ID NO: 3091143 - DNA, 25 bp, Homo sapien
agggcggtagatgtccagtctctgt

SEQ ID NO: 3091144 - DNA, 25 bp, Homo sapien
tctccagggcggtagatgtccagtc

SEQ ID NO: 3091145 - DNA, 25 bp, Homo sapien
ccctgtagtaagttgtgtagttatg

SEQ ID NO: 3091146 - DNA, 25 bp, Homo sapien
cactgggtgatatttgatgctgagc

SEQ ID NO: 3091147 - DNA, 25 bp, Homo sapien
gtgctttggcagaactatagtcttc

SEQ ID NO: 3091148 - DNA, 25 bp, Homo sapien
gggtgctttggcagaactatagtct

SEQ ID NO: 3091149 - DNA, 25 bp, Homo sapien
gttgaactatgacactgggtgatat

SEQ ID NO: 3091150 - DNA, 25 bp, Homo sapien
gaattgttacctcttgatatactgg

SEQ ID NO: 3091151 - DNA, 25 bp, Homo sapien
attgttacctcttgatatactggaa

SEQ ID NO: 3091152 - DNA, 25 bp, Homo sapien
ttggaattgttacctcttgatatac

SEQ ID NO: 3091153 - DNA, 25 bp, Homo sapien
agaaagttcaacctccgtagtggat

SEQ ID NO: 3091154 - DNA, 25 bp, Homo sapien
ggcaatgtccaatgctgagcttgat

SEQ ID NO: 3091155 - DNA, 25 bp, Homo sapien
gggcaatgtccaatgctgagcttga

SEQ ID NO: 3091156 - DNA, 25 bp, Homo sapien
tgcctccatagagggctctggaatc

SEQ ID NO: 3091157 - DNA, 25 bp, Homo sapien
gggtcggagaaggttctgcctccat

SEQ ID NO: 3091158 - DNA, 25 bp, Homo sapien
aagctgagctgggaccatctgctgg

SEQ ID NO: 3091159 - DNA, 25 bp, Homo sapien
ggcttgaagattctacctccttagg

SEQ ID NO: 3091160 - DNA, 25 bp, Homo sapien
agatggtttgaccttctcaggtggc

SEQ ID NO: 3091161 - DNA, 25 bp, Homo sapien
actggagatggtttgaccttctcag

SEQ ID NO: 3091162 - DNA, 25 bp, Homo sapien
gagatggtttgaccttctcaggtgg

SEQ ID NO: 3091163 - DNA, 25 bp, Homo sapien
ctggagatggtttgaccttctcagg

SEQ ID NO: 3091164 - DNA, 25 bp, Homo sapien
ctcttcagtggacttcagaggatga

SEQ ID NO: 3091165 - DNA, 25 bp, Homo sapien
tcttcagtggacttcagaggatgac

SEQ ID NO: 3091166 - DNA, 25 bp, Homo sapien
gattcagtcttttccggagaacaca

SEQ ID NO: 3091167 - DNA, 25 bp, Homo sapien
ctcatcttggattgcagaaggttcc

SEQ ID NO: 3091168 - DNA, 25 bp, Homo sapien
attcagtcttttccggagaacacag

SEQ ID NO: 3091169 - DNA, 25 bp, Homo sapien
gctcagttggagcctcatcttggat

SEQ ID NO: 3091170 - DNA, 25 bp, Homo sapien
ttgaatattcatccagcaaagtttg

SEQ ID NO: 3091171 - DNA, 25 bp, Homo sapien
tttggataattgctcagcaaggctc

SEQ ID NO: 3091172 - DNA, 25 bp, Homo sapien
cagtgctgagctagatctctcttca

SEQ ID NO: 3091173 - DNA, 25 bp, Homo sapien
caaagtttgtttctgacaccgaggt

SEQ ID NO: 3091174 - DNA, 25 bp, Homo sapien
aatacacttccttccaaggacagca

SEQ ID NO: 3091175 - DNA, 25 bp, Homo sapien
acttccttccaaggacagcaactga

SEQ ID NO: 3091176 - DNA, 25 bp, Homo sapien
atacacttccttccaaggacagcaa

SEQ ID NO: 3091177 - DNA, 25 bp, Homo sapien
catgtaaactccaagaaggtgcttc

SEQ ID NO: 3091178 - DNA, 25 bp, Homo sapien
atgtaaactccaagaaggtgcttca

SEQ ID NO: 3091179 - DNA, 25 bp, Homo sapien
agcatgtaaactccaagaaggtgct

SEQ ID NO: 3091180 - DNA, 25 bp, Homo sapien
gcatgtaaactccaagaaggtgctt

SEQ ID NO: 3091181 - DNA, 25 bp, Homo sapien
tcttcccatctgacatctacaatct

SEQ ID NO: 3091182 - DNA, 25 bp, Homo sapien
ttgaattaagccgtgtagttcttct

SEQ ID NO: 3091183 - DNA, 25 bp, Homo sapien
tgacatctacaatctcttcactggg

SEQ ID NO: 3091184 - DNA, 25 bp, Homo sapien
tctcttcactgggtctgtactccac

SEQ ID NO: 3091185 - DNA, 25 bp, Homo sapien
aaaccttctgaatagcaagcttctg

SEQ ID NO: 3091186 - DNA, 25 bp, Homo sapien
tgacaaaaccttctgaatagcaagc

SEQ ID NO: 3091187 - DNA, 25 bp, Homo sapien
caaaaccttctgaatagcaagcttc

SEQ ID NO: 3091188 - DNA, 25 bp, Homo sapien
accttctgaatagcaagcttctggg

SEQ ID NO: 3091189 - DNA, 25 bp, Homo sapien
tcataaggaacaataacggtcttaa

SEQ ID NO: 3091190 - DNA, 25 bp, Homo sapien
tgataattgctacacgtttaaaaaa

SEQ ID NO: 3091191 - DNA, 25 bp, Homo sapien
gtcttccctttcataaggaacaata

SEQ ID NO: 3091192 - DNA, 25 bp, Homo sapien
tctgagtgataattgctacacgttt

SEQ ID NO: 3091193 - DNA, 25 bp, Homo sapien
ctagaagggagatacaagccaagaa

SEQ ID NO: 3091194 - DNA, 25 bp, Homo sapien
agaagggagatacaagccaagaacc

SEQ ID NO: 3091195 - DNA, 25 bp, Homo sapien
gagatacaagccaagaacctggcac

SEQ ID NO: 3091196 - DNA, 25 bp, Homo sapien
gatacaagccaagaacctggcacat

SEQ ID NO: 3091197 - DNA, 25 bp, Homo sapien
tgaacaagacgcgatgcaggttgcc

SEQ ID NO: 3091198 - DNA, 25 bp, Homo sapien
tatattttgccctgagggaggcccc

SEQ ID NO: 3091199 - DNA, 25 bp, Homo sapien
gaaaagcccctggattgggtcacca

SEQ ID NO: 3091200 - DNA, 25 bp, Homo sapien
cagctgcacaggaacttacggaggc

SEQ ID NO: 3091201 - DNA, 25 bp, Homo sapien
agcccaaacacaccatccatggaat

SEQ ID NO: 3091202 - DNA, 25 bp, Homo sapien
ggtcatggctggaccggagaaatcc

SEQ ID NO: 3091203 - DNA, 25 bp, Homo sapien
tgaaagacaaatacggaccttagtg

SEQ ID NO: 3091204 - DNA, 25 bp, Homo sapien
tacggaccttagtgaatgagtctgg

SEQ ID NO: 3091205 - DNA, 25 bp, Homo sapien
agtaacaggtaagaagtcattctgt

SEQ ID NO: 3091206 - DNA, 25 bp, Homo sapien
gaaacttagtaagattcatataagt

SEQ ID NO: 3091207 - DNA, 25 bp, Homo sapien
aagattcatataagtaacaggtaag

SEQ ID NO: 3091208 - DNA, 25 bp, Homo sapien
tagaaggccagttaggggttgcaga

SEQ ID NO: 3091209 - DNA, 25 bp, Homo sapien
gtgggtgttactatcccgttgatag

SEQ ID NO: 3091210 - DNA, 25 bp, Homo sapien
tgaggtgggtgttactatcccgttg

SEQ ID NO: 3091211 - DNA, 25 bp, Homo sapien
tactatcccgttgataggaaagaaa

SEQ ID NO: 3091212 - DNA, 25 bp, Homo sapien
ttactatcccgttgataggaaagaa

SEQ ID NO: 3091213 - DNA, 25 bp, Homo sapien
gcgccgccaggtccccccaacagtc

SEQ ID NO: 3091214 - DNA, 25 bp, Homo sapien
cagtcccctcggcccccgagccgct

SEQ ID NO: 3091215 - DNA, 25 bp, Homo sapien
gtcccctcggcccccgagccgctca

SEQ ID NO: 3091216 - DNA, 25 bp, Homo sapien
tgccgcgccgccaggtccccccaac

SEQ ID NO: 3091217 - DNA, 25 bp, Homo sapien
tgcgcagtccctggactacctggcg

SEQ ID NO: 3091218 - DNA, 25 bp, Homo sapien
tgtacttgcggcctgcgcagtccct

SEQ ID NO: 3091219 - DNA, 25 bp, Homo sapien
ttgcggcctgcgcagtccctggact

SEQ ID NO: 3091220 - DNA, 25 bp, Homo sapien
cccgcctgcctgtacttgcggcctg

SEQ ID NO: 3091221 - DNA, 25 bp, Homo sapien
caagtgggcattccacgcaacaggt

SEQ ID NO: 3091222 - DNA, 25 bp, Homo sapien
tgaagtaggttttaggcaggattcc

SEQ ID NO: 3091223 - DNA, 25 bp, Homo sapien
tttactgaggctttccaagtgggca

SEQ ID NO: 3091224 - DNA, 25 bp, Homo sapien
gctgtcatcggagtcaatttcagga

SEQ ID NO: 3091225 - DNA, 25 bp, Homo sapien
gccgccgcctaggttgaggcagcct

SEQ ID NO: 3091226 - DNA, 25 bp, Homo sapien
ggcagcctccaagccgtggctgagc

SEQ ID NO: 3091227 - DNA, 25 bp, Homo sapien
agcctccaagccgtggctgagctcg

SEQ ID NO: 3091228 - DNA, 25 bp, Homo sapien
ccgccgccgcctaggttgaggcagc

SEQ ID NO: 3091229 - DNA, 25 bp, Homo sapien
ctgattccgattatctggaggagct

SEQ ID NO: 3091230 - DNA, 25 bp, Homo sapien
aggacgaggctgattccgattatct

SEQ ID NO: 3091231 - DNA, 25 bp, Homo sapien
gaggctgattccgattatctggagg

SEQ ID NO: 3091232 - DNA, 25 bp, Homo sapien
ggaggaagaggacggcgacgtcgag

SEQ ID NO: 3091233 - DNA, 25 bp, Homo sapien
aagttatacccaactgatactatat

SEQ ID NO: 3091234 - DNA, 25 bp, Homo sapien
tatgccttgagtcttttttaatcag

SEQ ID NO: 3091235 - DNA, 25 bp, Homo sapien
tactatattatcataaggtttccag

SEQ ID NO: 3091236 - DNA, 25 bp, Homo sapien
tatcataaggtttccagtccagatc

SEQ ID NO: 3091237 - DNA, 25 bp, Homo sapien
ggttttagatttgctgtgcacgctg

SEQ ID NO: 3091238 - DNA, 25 bp, Homo sapien
cgctgaacgccatgaaaaatggact

SEQ ID NO: 3091239 - DNA, 25 bp, Homo sapien
tgccagacaatggttttagatttgc

SEQ ID NO: 3091240 - DNA, 25 bp, Homo sapien
cataaggaaatcaattacttgcctc

SEQ ID NO: 3091241 - DNA, 25 bp, Homo sapien
cctgcttgaagcatggaggtcttgc

SEQ ID NO: 3091242 - DNA, 25 bp, Homo sapien
taacatcgtggtactctgtagccag

SEQ ID NO: 3091243 - DNA, 25 bp, Homo sapien
tctagagactagacctttggcagct

SEQ ID NO: 3091244 - DNA, 25 bp, Homo sapien
cacaactgagcgtggtttctcccag

SEQ ID NO: 3091245 - DNA, 25 bp, Homo sapien
ccaaacatctggtcatggtattcat

SEQ ID NO: 3091246 - DNA, 25 bp, Homo sapien
cccaaacatctggtcatggtattca

SEQ ID NO: 3091247 - DNA, 25 bp, Homo sapien
ctcccaaacatctggtcatggtatt

SEQ ID NO: 3091248 - DNA, 25 bp, Homo sapien
tcccaaacatctggtcatggtattc

SEQ ID NO: 3091249 - DNA, 25 bp, Homo sapien
ccctgtgctgccctttttggccaga

SEQ ID NO: 3091250 - DNA, 25 bp, Homo sapien
cctttggatattcactctcactgcc

SEQ ID NO: 3091251 - DNA, 25 bp, Homo sapien
tggccagatacagaccaaaggtgtc

SEQ ID NO: 3091252 - DNA, 25 bp, Homo sapien
tacagaccaaaggtgtcttgtccac

SEQ ID NO: 3091253 - DNA, 25 bp, Homo sapien
tggtataggtcttagtttcagagac

SEQ ID NO: 3091254 - DNA, 25 bp, Homo sapien
gaaaaaccttgacatctgtaaggct

SEQ ID NO: 3091255 - DNA, 25 bp, Homo sapien
cattacacagtaatcagtggtatag

SEQ ID NO: 3091256 - DNA, 25 bp, Homo sapien
ttgacatctgtaaggctcattacac

SEQ ID NO: 3091257 - DNA, 25 bp, Homo sapien
aatttttgatacattgtcgaggaaa

SEQ ID NO: 3091258 - DNA, 25 bp, Homo sapien
tgatacattgtcgaggaaatcaaat

SEQ ID NO: 3091259 - DNA, 25 bp, Homo sapien
tacattgtcgaggaaatcaaatatt

SEQ ID NO: 3091260 - DNA, 25 bp, Homo sapien
tctttactcaagttatatttgtcaa

SEQ ID NO: 3091261 - DNA, 25 bp, Homo sapien
taaaagttcagccaagattcacatg

SEQ ID NO: 3091262 - DNA, 25 bp, Homo sapien
tgtacaattctagaggtcccacgtt

SEQ ID NO: 3091263 - DNA, 25 bp, Homo sapien
ttcgttacgctgatgcaagttggca

SEQ ID NO: 3091264 - DNA, 25 bp, Homo sapien
tgtgcaccacgaaaaagtctaaaag

SEQ ID NO: 3091265 - DNA, 25 bp, Homo sapien
cccagcctgtaatttactctcaaat

SEQ ID NO: 3091266 - DNA, 25 bp, Homo sapien
catggatgttaatggaccattcggg

SEQ ID NO: 3091267 - DNA, 25 bp, Homo sapien
ttcttctccaaccttgggccactgg

SEQ ID NO: 3091268 - DNA, 25 bp, Homo sapien
gaacttgtagtgctctttgaaatgc

SEQ ID NO: 3091269 - DNA, 25 bp, Homo sapien
gaaatgcagacagactatggttcat

SEQ ID NO: 3091270 - DNA, 25 bp, Homo sapien
taatgctatcctaaaatttgtgagc

SEQ ID NO: 3091271 - DNA, 25 bp, Homo sapien
agaaataatgctatcctaaaatttg

SEQ ID NO: 3091272 - DNA, 25 bp, Homo sapien
gaaaataaatattagaccatgcaga

SEQ ID NO: 3091273 - DNA, 25 bp, Homo sapien
cagtttaaacgcaaaatgaagttct

SEQ ID NO: 3091274 - DNA, 25 bp, Homo sapien
gatatgggcactgggttcaaaggac

SEQ ID NO: 3091275 - DNA, 25 bp, Homo sapien
gaaagtcccaccagagggtacagag

SEQ ID NO: 3091276 - DNA, 25 bp, Homo sapien
ctctattctggaagaggcgggtcgc

SEQ ID NO: 3091277 - DNA, 25 bp, Homo sapien
gcatctgtggctctcgagaaccggg

SEQ ID NO: 3091278 - DNA, 25 bp, Homo sapien
catttcaagccctacgagggacaga

SEQ ID NO: 3091279 - DNA, 25 bp, Homo sapien
ttacatttcaagccctacgagggac

SEQ ID NO: 3091280 - DNA, 25 bp, Homo sapien
caagccctacgagggacagagggcc

SEQ ID NO: 3091281 - DNA, 25 bp, Homo sapien
tttcaagccctacgagggacagagg

SEQ ID NO: 3091282 - DNA, 25 bp, Homo sapien
tgtgggatcggtcgcttggcttccc

SEQ ID NO: 3091283 - DNA, 25 bp, Homo sapien
cagaagtgtgggatcggtcgcttgg

SEQ ID NO: 3091284 - DNA, 25 bp, Homo sapien
gggctcagaagtgtgggatcggtcg

SEQ ID NO: 3091285 - DNA, 25 bp, Homo sapien
agtgtgggatcggtcgcttggcttc

SEQ ID NO: 3091286 - DNA, 25 bp, Homo sapien
cacgttgcccctaatcaaatggaag

SEQ ID NO: 3091287 - DNA, 25 bp, Homo sapien
tcaagcttgtgtgtacctgtaacca

SEQ ID NO: 3091288 - DNA, 25 bp, Homo sapien
gaaagctaaggcgatttgcaatcca

SEQ ID NO: 3091289 - DNA, 25 bp, Homo sapien
tagcaggtggtgatgaactatgcca

SEQ ID NO: 3091290 - DNA, 25 bp, Homo sapien
tgtgaaccaaagagtctttctacat

SEQ ID NO: 3091291 - DNA, 25 bp, Homo sapien
agcgatgttggtagtgctcttcaca

SEQ ID NO: 3091292 - DNA, 25 bp, Homo sapien
tgctactgaatacagccagatttat

SEQ ID NO: 3091293 - DNA, 25 bp, Homo sapien
aaaacaaaagcgatgttggtagtgc

SEQ ID NO: 3091294 - DNA, 25 bp, Homo sapien
ggcacagtcccatcttacacggtct

SEQ ID NO: 3091295 - DNA, 25 bp, Homo sapien
cagctgcgcaggagtagaaggccct

SEQ ID NO: 3091296 - DNA, 25 bp, Homo sapien
taaagtcttcccacgatggctcact

SEQ ID NO: 3091297 - DNA, 25 bp, Homo sapien
ggctccatttgcacgtgaactctgt

SEQ ID NO: 3091298 - DNA, 25 bp, Homo sapien
gaatcccagtgttgcaaagagacca

SEQ ID NO: 3091299 - DNA, 25 bp, Homo sapien
tcaatgcccagactaatgcccagag

SEQ ID NO: 3091300 - DNA, 25 bp, Homo sapien
tgcccagaggaatgatgtacaagga

SEQ ID NO: 3091301 - DNA, 25 bp, Homo sapien
tacaaggaaggtgcaaagaatccca

SEQ ID NO: 3091302 - DNA, 25 bp, Homo sapien
aaacattctcctgtggaagcaactg

SEQ ID NO: 3091303 - DNA, 25 bp, Homo sapien
gactatggaacgtcttttgccaaaa

SEQ ID NO: 3091304 - DNA, 25 bp, Homo sapien
aagcaaacacagcgaaacattctcc

SEQ ID NO: 3091305 - DNA, 25 bp, Homo sapien
gaagcaactgcagtgactatggaac

SEQ ID NO: 3091306 - DNA, 25 bp, Homo sapien
gagaaaactaaagcagtatcccaga

SEQ ID NO: 3091307 - DNA, 25 bp, Homo sapien
agaaaactaaagcagtatcccagac

SEQ ID NO: 3091308 - DNA, 25 bp, Homo sapien
caagaataagtctggcatgttgcac

SEQ ID NO: 3091309 - DNA, 25 bp, Homo sapien
tcaaaactactgatctgagacactg

SEQ ID NO: 3091310 - DNA, 25 bp, Homo sapien
cttgagaacagattcccaggtcccc

SEQ ID NO: 3091311 - DNA, 25 bp, Homo sapien
taagtgtctagacaacttctgagcc

SEQ ID NO: 3091312 - DNA, 25 bp, Homo sapien
caacatcactaccagacggtgtccg

SEQ ID NO: 3091313 - DNA, 25 bp, Homo sapien
tccgaaacgattgctcaggactgtg

SEQ ID NO: 3091314 - DNA, 25 bp, Homo sapien
gagatgatgccgatggcgacgtaca

SEQ ID NO: 3091315 - DNA, 25 bp, Homo sapien
catatgagaaacctcttgtgagaag

SEQ ID NO: 3091316 - DNA, 25 bp, Homo sapien
aaaatgaaacagctaccgcccagcc

SEQ ID NO: 3091317 - DNA, 25 bp, Homo sapien
tgatgatgccgtaggtgaagacttc

SEQ ID NO: 3091318 - DNA, 25 bp, Homo sapien
catcaggcacttcagtatacacatt

SEQ ID NO: 3091319 - DNA, 25 bp, Homo sapien
cagattgagattatccatgagatcc

SEQ ID NO: 3091320 - DNA, 25 bp, Homo sapien
ttgaggcggcagtaagaagtgatca

SEQ ID NO: 3091321 - DNA, 25 bp, Homo sapien
cttgaggcggcagtaagaagtgatc

SEQ ID NO: 3091322 - DNA, 25 bp, Homo sapien
gttgaggctggaagcttgaggcggc

SEQ ID NO: 3091323 - DNA, 25 bp, Homo sapien
agttgaggctggaagcttgaggcgg

SEQ ID NO: 3091324 - DNA, 25 bp, Homo sapien
ctgaagttctggtgccagctgcccc

SEQ ID NO: 3091325 - DNA, 25 bp, Homo sapien
atgagaaggctctgtctggccagca

SEQ ID NO: 3091326 - DNA, 25 bp, Homo sapien
tgccatcatgagaaggctctgtctg

SEQ ID NO: 3091327 - DNA, 25 bp, Homo sapien
tggccagcactgaagttctggtgcc

SEQ ID NO: 3091328 - DNA, 25 bp, Homo sapien
caagtttcaaaacgcaggctctgga

SEQ ID NO: 3091329 - DNA, 25 bp, Homo sapien
gtttcaaaacgcaggctctggatgg

SEQ ID NO: 3091330 - DNA, 25 bp, Homo sapien
aagagcaagtttcaaaacgcaggct

SEQ ID NO: 3091331 - DNA, 25 bp, Homo sapien
ctctggatggaaatggggtggctac

SEQ ID NO: 3091332 - DNA, 25 bp, Homo sapien
ctcgagcaaaagcactgcggatttc

SEQ ID NO: 3091333 - DNA, 25 bp, Homo sapien
gaacagctttgacaagttgtttctg

SEQ ID NO: 3091334 - DNA, 25 bp, Homo sapien
tcttaaaggcgtagcccggagaaca

SEQ ID NO: 3091335 - DNA, 25 bp, Homo sapien
aaagcactgcggatttctcttcttc

SEQ ID NO: 3091336 - DNA, 25 bp, Homo sapien
agcccgggaaccttgaagttgcgcg

SEQ ID NO: 3091337 - DNA, 25 bp, Homo sapien
agtccaggtggaggacccgcgctct

SEQ ID NO: 3091338 - DNA, 25 bp, Homo sapien
ggccgtcagccgctgacagttctga

SEQ ID NO: 3091339 - DNA, 25 bp, Homo sapien
cagcgctttcctgcggttggcagcc

SEQ ID NO: 3091340 - DNA, 25 bp, Homo sapien
ctctagcgcaagttggctcgggctg

SEQ ID NO: 3091341 - DNA, 25 bp, Homo sapien
taagccgctcggtaacatgagaaaa

SEQ ID NO: 3091342 - DNA, 25 bp, Homo sapien
catgagaaaaggattaaccccttag

SEQ ID NO: 3091343 - DNA, 25 bp, Homo sapien
cccaataaggcggaggcttggcctc

SEQ ID NO: 3091344 - DNA, 25 bp, Homo sapien
ctgcaacgctagtaggagcgcgagc

SEQ ID NO: 3091345 - DNA, 25 bp, Homo sapien
accatgtgctgcgagcgctgagcgc

SEQ ID NO: 3091346 - DNA, 25 bp, Homo sapien
ggtccttggcacaacgccccgatct

SEQ ID NO: 3091347 - DNA, 25 bp, Homo sapien
accccggagctttgctgcaacgcta

SEQ ID NO: 3091348 - DNA, 25 bp, Homo sapien
gcggcagcaacagcatccgcgttgc

SEQ ID NO: 3091349 - DNA, 25 bp, Homo sapien
gggccgctgcgggtgccttgcttcc

SEQ ID NO: 3091350 - DNA, 25 bp, Homo sapien
gagtgtcgcagtgggccccagggag

SEQ ID NO: 3091351 - DNA, 25 bp, Homo sapien
tccgcgttgcgcgaaaggaatgtga

SEQ ID NO: 3091352 - DNA, 25 bp, Homo sapien
ccagtgagcgaatttcagacattga

SEQ ID NO: 3091353 - DNA, 25 bp, Homo sapien
aaaatgtggcaaacaggcttccagt

SEQ ID NO: 3091354 - DNA, 25 bp, Homo sapien
gaaagacgttattcagaggtccatc

SEQ ID NO: 3091355 - DNA, 25 bp, Homo sapien
cagacattgacctggagctttcttc

SEQ ID NO: 3091356 - DNA, 25 bp, Homo sapien
cactttcttagtggccaaagagcag

SEQ ID NO: 3091357 - DNA, 25 bp, Homo sapien
gagaactcatcctgtagtcaccaga

SEQ ID NO: 3091358 - DNA, 25 bp, Homo sapien
tctgaggccctgaatacagaagggt

SEQ ID NO: 3091359 - DNA, 25 bp, Homo sapien
tcaccagatggagtcccaaacagcc

SEQ ID NO: 3091360 - DNA, 25 bp, Homo sapien
cctatagccgttatcactgccatca

SEQ ID NO: 3091361 - DNA, 25 bp, Homo sapien
aatgagggattgcaaatttcctgat

SEQ ID NO: 3091362 - DNA, 25 bp, Homo sapien
catagaagatcaagccaaatgaggg

SEQ ID NO: 3091363 - DNA, 25 bp, Homo sapien
catcttcttgcagattccacccctg

SEQ ID NO: 3091364 - DNA, 25 bp, Homo sapien
gagcttgatgcttttcctgagatac

SEQ ID NO: 3091365 - DNA, 25 bp, Homo sapien
cgcttaggatgacgcatagggcatc

SEQ ID NO: 3091366 - DNA, 25 bp, Homo sapien
tttcctgagatacgcgcccttggtg

SEQ ID NO: 3091367 - DNA, 25 bp, Homo sapien
tgacgcatagggcatctccacagag

SEQ ID NO: 3091368 - DNA, 25 bp, Homo sapien
tccatcaaggtgaactttgtagaaa

SEQ ID NO: 3091369 - DNA, 25 bp, Homo sapien
ctttgtagaaacactcttctgcttc

SEQ ID NO: 3091370 - DNA, 25 bp, Homo sapien
caaggtgaactttgtagaaacactc

SEQ ID NO: 3091371 - DNA, 25 bp, Homo sapien
ggtgaactttgtagaaacactcttc

SEQ ID NO: 3091372 - DNA, 25 bp, Homo sapien
tcctagaccaaatccccaagtcaac

SEQ ID NO: 3091373 - DNA, 25 bp, Homo sapien
caagtcaacacctaaaggtctcagt

SEQ ID NO: 3091374 - DNA, 25 bp, Homo sapien
cccttttagtttgtggccagcgcac

SEQ ID NO: 3091375 - DNA, 25 bp, Homo sapien
caggttgagctgtaggactcatctg

SEQ ID NO: 3091376 - DNA, 25 bp, Homo sapien
ttgccgttgaccttgtgggatgtca

SEQ ID NO: 3091377 - DNA, 25 bp, Homo sapien
tgccgttgaccttgtgggatgtcat

SEQ ID NO: 3091378 - DNA, 25 bp, Homo sapien
ctgggataataggtaactctgggcc

SEQ ID NO: 3091379 - DNA, 25 bp, Homo sapien
cggcttggccttcgcaatggagtca

SEQ ID NO: 3091380 - DNA, 25 bp, Homo sapien
tcaacgagaccaccttggcagaggt

SEQ ID NO: 3091381 - DNA, 25 bp, Homo sapien
aatggagtcacacgcaactttgcag

SEQ ID NO: 3091382 - DNA, 25 bp, Homo sapien
agagctcttgccacacattgcccga

SEQ ID NO: 3091383 - DNA, 25 bp, Homo sapien
gagcgcatttgcagaccgaggagca

SEQ ID NO: 3091384 - DNA, 25 bp, Homo sapien
aaccaggcaggaagcgggcatttct

SEQ ID NO: 3091385 - DNA, 25 bp, Homo sapien
tctcggtgcttgaactgcgggctgc

SEQ ID NO: 3091386 - DNA, 25 bp, Homo sapien
agcctggcttgtacaccacattgca

SEQ ID NO: 3091387 - DNA, 25 bp, Homo sapien
aaagcctggcttgtacaccacattg

SEQ ID NO: 3091388 - DNA, 25 bp, Homo sapien
cctggcttgtacaccacattgcagc

SEQ ID NO: 3091389 - DNA, 25 bp, Homo sapien
gcaaagcctggcttgtacaccacat

SEQ ID NO: 3091390 - DNA, 25 bp, Homo sapien
cttccttggtgcctgtttgcccttc

SEQ ID NO: 3091391 - DNA, 25 bp, Homo sapien
atctctcggttctttacacctcagg

SEQ ID NO: 3091392 - DNA, 25 bp, Homo sapien
tctcggttctttacacctcagggaa

SEQ ID NO: 3091393 - DNA, 25 bp, Homo sapien
gcatcttccttgactgtccttcctt

SEQ ID NO: 3091394 - DNA, 25 bp, Homo sapien
aaacctggccatagacccaaacagg

SEQ ID NO: 3091395 - DNA, 25 bp, Homo sapien
gttcaccgaagcaggaaacctggcc

SEQ ID NO: 3091396 - DNA, 25 bp, Homo sapien
gccatagacccaaacaggagatgct

SEQ ID NO: 3091397 - DNA, 25 bp, Homo sapien
gaagtaaaaattgactgatgggttc

SEQ ID NO: 3091398 - DNA, 25 bp, Homo sapien
ttcctataggaagccgtggactttc

SEQ ID NO: 3091399 - DNA, 25 bp, Homo sapien
taggaagccgtggactttctcttaa

SEQ ID NO: 3091400 - DNA, 25 bp, Homo sapien
catttcctataggaagccgtggact

SEQ ID NO: 3091401 - DNA, 25 bp, Homo sapien
ccgtggactttctcttaaaggcatt

SEQ ID NO: 3091402 - DNA, 25 bp, Homo sapien
gttagagaaggttgtctgtgatgcc

SEQ ID NO: 3091403 - DNA, 25 bp, Homo sapien
tagagaaggttgtctgtgatgccag

SEQ ID NO: 3091404 - DNA, 25 bp, Homo sapien
tagagatctgccagatcaagtctgg

SEQ ID NO: 3091405 - DNA, 25 bp, Homo sapien
tctgccagatcaagtctgggttaga

SEQ ID NO: 3091406 - DNA, 25 bp, Homo sapien
tcttccatttcggatcagatgattt

SEQ ID NO: 3091407 - DNA, 25 bp, Homo sapien
catttcggatcagatgattttcccc

SEQ ID NO: 3091408 - DNA, 25 bp, Homo sapien
tccccagccttaacggtccctgcac

SEQ ID NO: 3091409 - DNA, 25 bp, Homo sapien
agccttaacggtccctgcaccataa

SEQ ID NO: 3091410 - DNA, 25 bp, Homo sapien
tctcctggaatgtcccctctgtcat

SEQ ID NO: 3091411 - DNA, 25 bp, Homo sapien
tcttgctctcctggaatgtcccctc

SEQ ID NO: 3091412 - DNA, 25 bp, Homo sapien
ttgctctcctggaatgtcccctctg

SEQ ID NO: 3091413 - DNA, 25 bp, Homo sapien
tgctctcctggaatgtcccctctgt

SEQ ID NO: 3091414 - DNA, 25 bp, Homo sapien
ggatcttgctaacctacagttctga

SEQ ID NO: 3091415 - DNA, 25 bp, Homo sapien
gccccagccgcaaggaataatagtc

SEQ ID NO: 3091416 - DNA, 25 bp, Homo sapien
tctcctaggtgacgctgatgtggtt

SEQ ID NO: 3091417 - DNA, 25 bp, Homo sapien
aactatgcttagtgctggtgccaca

SEQ ID NO: 3091418 - DNA, 25 bp, Homo sapien
ctccagctttcagtcctttgctgaa

SEQ ID NO: 3091419 - DNA, 25 bp, Homo sapien
tctcctaattcctgaatcttttgca

SEQ ID NO: 3091420 - DNA, 25 bp, Homo sapien
tcttttgcaaggagattgtctgctt

SEQ ID NO: 3091421 - DNA, 25 bp, Homo sapien
gttttataactagctggattcctcc

SEQ ID NO: 3091422 - DNA, 25 bp, Homo sapien
tgaccgatagagctaatggcttgtt

SEQ ID NO: 3091423 - DNA, 25 bp, Homo sapien
aatcctgtgttcaaccctggtgcca

SEQ ID NO: 3091424 - DNA, 25 bp, Homo sapien
accccagtgccttctggttgaccga

SEQ ID NO: 3091425 - DNA, 25 bp, Homo sapien
taatggcttgtttcctggaaccaca

SEQ ID NO: 3091426 - DNA, 25 bp, Homo sapien
tgcacgtagttgtttcttacctccc

SEQ ID NO: 3091427 - DNA, 25 bp, Homo sapien
cggttcttggatgttgagcagatca

SEQ ID NO: 3091428 - DNA, 25 bp, Homo sapien
cataaaatccatgccagatcggttc

SEQ ID NO: 3091429 - DNA, 25 bp, Homo sapien
caagaggttggaactattactgaca

SEQ ID NO: 3091430 - DNA, 25 bp, Homo sapien
gaagggattggttggtttcacatac

SEQ ID NO: 3091431 - DNA, 25 bp, Homo sapien
gaagaagggattggttggtttcaca

SEQ ID NO: 3091432 - DNA, 25 bp, Homo sapien
ctgagtgaagaagggattggttggt

SEQ ID NO: 3091433 - DNA, 25 bp, Homo sapien
gtgaagaagggattggttggtttca

SEQ ID NO: 3091434 - DNA, 25 bp, Homo sapien
gagacctaattgttccatccttggg

SEQ ID NO: 3091435 - DNA, 25 bp, Homo sapien
ccaagctgaccgaggcaatagatcc

SEQ ID NO: 3091436 - DNA, 25 bp, Homo sapien
gctagtctctagcaatccgatggcc

SEQ ID NO: 3091437 - DNA, 25 bp, Homo sapien
tccgatggccccaagaaaggagtcc

SEQ ID NO: 3091438 - DNA, 25 bp, Homo sapien
cctccccttaggtggaacagctaga

SEQ ID NO: 3091439 - DNA, 25 bp, Homo sapien
cacaagtgcttcttagtctatccct

SEQ ID NO: 3091440 - DNA, 25 bp, Homo sapien
tagtagttttggtgagcctgggccc

SEQ ID NO: 3091441 - DNA, 25 bp, Homo sapien
tacccttaggtcagttaggctgtga

SEQ ID NO: 3091442 - DNA, 25 bp, Homo sapien
acacagtctctactcctagcatgaa

SEQ ID NO: 3091443 - DNA, 25 bp, Homo sapien
tacactttgttaggacgagtctttc

SEQ ID NO: 3091444 - DNA, 25 bp, Homo sapien
gatcaacttgactctcagccacagg

SEQ ID NO: 3091445 - DNA, 25 bp, Homo sapien
tagcatgaactgtttgtcaaagctc

SEQ ID NO: 3091446 - DNA, 25 bp, Homo sapien
gaaggagcaaatagattctcaaggt

SEQ ID NO: 3091447 - DNA, 25 bp, Homo sapien
ggaccacaggatcatcactggaagg

SEQ ID NO: 3091448 - DNA, 25 bp, Homo sapien
tcatcactggaaggagcaaatagat

SEQ ID NO: 3091449 - DNA, 25 bp, Homo sapien
cactggaaggagcaaatagattctc

SEQ ID NO: 3091450 - DNA, 25 bp, Homo sapien
ttattccacgaggaggagtacctgg

SEQ ID NO: 3091451 - DNA, 25 bp, Homo sapien
gaagctgtgcccctagaaagaggtg

SEQ ID NO: 3091452 - DNA, 25 bp, Homo sapien
aaaggttcttgcagacgtcctccaa

SEQ ID NO: 3091453 - DNA, 25 bp, Homo sapien
tttcaacctggaagacgataccgca

SEQ ID NO: 3091454 - DNA, 25 bp, Homo sapien
ttccagatctcagagcagacgagtc

SEQ ID NO: 3091455 - DNA, 25 bp, Homo sapien
aatccggattccgtctcagtagggc

SEQ ID NO: 3091456 - DNA, 25 bp, Homo sapien
ctatcaaacaatgccttgaggagca

SEQ ID NO: 3091457 - DNA, 25 bp, Homo sapien
cagtagggctcgagtagatcctgaa

SEQ ID NO: 3091458 - DNA, 25 bp, Homo sapien
caaagagatgttcctataagtacat

SEQ ID NO: 3091459 - DNA, 25 bp, Homo sapien
gaaatacaattcaaagagatgttcc

SEQ ID NO: 3091460 - DNA, 25 bp, Homo sapien
tagtgtccaaaatgggactcccaag

SEQ ID NO: 3091461 - DNA, 25 bp, Homo sapien
gagtctctctctaagtatgtaatat

SEQ ID NO: 3091462 - DNA, 25 bp, Homo sapien
tggtgaggagttaaccaggtcctgt

SEQ ID NO: 3091463 - DNA, 25 bp, Homo sapien
ccattggcaaccagggtcgtgggaa

SEQ ID NO: 3091464 - DNA, 25 bp, Homo sapien
gatgtgtatacaatgtctcccgcgc

SEQ ID NO: 3091465 - DNA, 25 bp, Homo sapien
cctgtggtttaagcagtggagcacc

SEQ ID NO: 3091466 - DNA, 25 bp, Homo sapien
gcactccattcttccgccttccttg

SEQ ID NO: 3091467 - DNA, 25 bp, Homo sapien
ataggggggatgtcctgatttctga

SEQ ID NO: 3091468 - DNA, 25 bp, Homo sapien
acaattgcactccattcttccgcct

SEQ ID NO: 3091469 - DNA, 25 bp, Homo sapien
ccaaaaccacctgataggggggatg

SEQ ID NO: 3091470 - DNA, 25 bp, Homo sapien
tcatgactgcttcgttttgcccttc

SEQ ID NO: 3091471 - DNA, 25 bp, Homo sapien
ccttctgatttccacggcacaagat

SEQ ID NO: 3091472 - DNA, 25 bp, Homo sapien
ttgcccttctgatttccacggcaca

SEQ ID NO: 3091473 - DNA, 25 bp, Homo sapien
gcccttctgatttccacggcacaag

SEQ ID NO: 3091474 - DNA, 25 bp, Homo sapien
aaatcaaaacagaatggccttactc

SEQ ID NO: 3091475 - DNA, 25 bp, Homo sapien
tcaacaggtctgtgcccatgcagag

SEQ ID NO: 3091476 - DNA, 25 bp, Homo sapien
ggtaggcaggtgcattatcaacagg

SEQ ID NO: 3091477 - DNA, 25 bp, Homo sapien
ggtgcattatcaacaggtctgtgcc

SEQ ID NO: 3091478 - DNA, 25 bp, Homo sapien
taggaggctgaggggggtgatcacc

SEQ ID NO: 3091479 - DNA, 25 bp, Homo sapien
gtggctcacacctgtaatcccagca

SEQ ID NO: 3091480 - DNA, 25 bp, Homo sapien
aaaaagtcagtttaggctgggcgca

SEQ ID NO: 3091481 - DNA, 25 bp, Homo sapien
ctttaggaggctgaggggggtgatc

SEQ ID NO: 3091482 - DNA, 25 bp, Homo sapien
acgccaacacattctagcctgaggg

SEQ ID NO: 3091483 - DNA, 25 bp, Homo sapien
cgccaacacattctagcctgaggga

SEQ ID NO: 3091484 - DNA, 25 bp, Homo sapien
cacgccaacacattctagcctgagg

SEQ ID NO: 3091485 - DNA, 25 bp, Homo sapien
taaatcccaaggaggcaagcgtgat

SEQ ID NO: 3091486 - DNA, 25 bp, Homo sapien
tgtagcagactactcaggcaagcct

SEQ ID NO: 3091487 - DNA, 25 bp, Homo sapien
tgatgacccgcgttcttaaggcagc

SEQ ID NO: 3091488 - DNA, 25 bp, Homo sapien
caagagaggcgattttaaccaagct

SEQ ID NO: 3091489 - DNA, 25 bp, Homo sapien
acattgtttcagtgcccaagtggca

SEQ ID NO: 3091490 - DNA, 25 bp, Homo sapien
taggcagcatgccaacagaggtttt

SEQ ID NO: 3091491 - DNA, 25 bp, Homo sapien
aatgtaaaagctcacgctgcgaccg

SEQ ID NO: 3091492 - DNA, 25 bp, Homo sapien
tcactagagggttccacggatctgc

SEQ ID NO: 3091493 - DNA, 25 bp, Homo sapien
gcaaagtaagggatcgcaggcctct

SEQ ID NO: 3091494 - DNA, 25 bp, Homo sapien
tactctgtaggattcgaagcacaca

SEQ ID NO: 3091495 - DNA, 25 bp, Homo sapien
gccatcagggtttagctcgacacct

SEQ ID NO: 3091496 - DNA, 25 bp, Homo sapien
tgcaaacgcatccatgggagcctca

SEQ ID NO: 3091497 - DNA, 25 bp, Homo sapien
agcgccccgccgtcctcagaataac

SEQ ID NO: 3091498 - DNA, 25 bp, Homo sapien
tctcatcatcaagacacactggtcc

SEQ ID NO: 3091499 - DNA, 25 bp, Homo sapien
ggtcccgtcgcaaactcatgttcag

SEQ ID NO: 3091500 - DNA, 25 bp, Homo sapien
agacacactggtcccgtcgcaaact

SEQ ID NO: 3091501 - DNA, 25 bp, Homo sapien
gaccgtatcgtgtgatgccttgcca

SEQ ID NO: 3091502 - DNA, 25 bp, Homo sapien
ttaggaaaaagaccgtatcgtgtga

SEQ ID NO: 3091503 - DNA, 25 bp, Homo sapien
tgccttgccaggttgagggtcccag

SEQ ID NO: 3091504 - DNA, 25 bp, Homo sapien
tcgtgtgatgccttgccaggttgag

SEQ ID NO: 3091505 - DNA, 25 bp, Homo sapien
actgttggagatgctcccctgttgg

SEQ ID NO: 3091506 - DNA, 25 bp, Homo sapien
ctgttggagatgctcccctgttggc

SEQ ID NO: 3091507 - DNA, 25 bp, Homo sapien
gaggtaaggaaggtctgaggtcatt

SEQ ID NO: 3091508 - DNA, 25 bp, Homo sapien
aggctgaagatgcacttggtctggc

SEQ ID NO: 3091509 - DNA, 25 bp, Homo sapien
tcgctgcataagactgaggtaagga

SEQ ID NO: 3091510 - DNA, 25 bp, Homo sapien
ggtctggctacggtcgctgcataag

SEQ ID NO: 3091511 - DNA, 25 bp, Homo sapien
tgtgacaatcaagaggaggtgaaag

SEQ ID NO: 3091512 - DNA, 25 bp, Homo sapien
gtgacaatcaagaggaggtgaaaga

SEQ ID NO: 3091513 - DNA, 25 bp, Homo sapien
aaatcatcatatatctaggacacct

SEQ ID NO: 3091514 - DNA, 25 bp, Homo sapien
tcatatatctaggacaccttccaaa

SEQ ID NO: 3091515 - DNA, 25 bp, Homo sapien
ccacacgctgctgggccaggatgag

SEQ ID NO: 3091516 - DNA, 25 bp, Homo sapien
acgctgctgggccaggatgagctga

SEQ ID NO: 3091517 - DNA, 25 bp, Homo sapien
ctgggccaggatgagctgaagtgac

SEQ ID NO: 3091518 - DNA, 25 bp, Homo sapien
ctgctgggccaggatgagctgaagt

SEQ ID NO: 3091519 - DNA, 25 bp, Homo sapien
tcttggcgaagggacaactctacac

SEQ ID NO: 3091520 - DNA, 25 bp, Homo sapien
tgcagagcacttgcccactagaggt

SEQ ID NO: 3091521 - DNA, 25 bp, Homo sapien
gaacacccactgtgagctcagggct

SEQ ID NO: 3091522 - DNA, 25 bp, Homo sapien
cactgaagcttgtcgttcttggcga

SEQ ID NO: 3091523 - DNA, 25 bp, Homo sapien
catcctgaggatccaaattgtacat

SEQ ID NO: 3091524 - DNA, 25 bp, Homo sapien
taaaggtgtccactggatgacgcaa

SEQ ID NO: 3091525 - DNA, 25 bp, Homo sapien
caactagcagccgtggcaacttctg

SEQ ID NO: 3091526 - DNA, 25 bp, Homo sapien
gggttttgattaagacacactctcc

SEQ ID NO: 3091527 - DNA, 25 bp, Homo sapien
tcaagcgtgcagtggcaaaagccct

SEQ ID NO: 3091528 - DNA, 25 bp, Homo sapien
ctgtccggagaagttcaagcgtgca

SEQ ID NO: 3091529 - DNA, 25 bp, Homo sapien
catgtagccactccaggtcgaaggc

SEQ ID NO: 3091530 - DNA, 25 bp, Homo sapien
ctgtcctgatgcatcatgtctgaca

SEQ ID NO: 3091531 - DNA, 25 bp, Homo sapien
gggagtaatgcacaggcaacgatgg

SEQ ID NO: 3091532 - DNA, 25 bp, Homo sapien
aatgcacaggcaacgatgggactgg

SEQ ID NO: 3091533 - DNA, 25 bp, Homo sapien
ctagggagtaatgcacaggcaacga

SEQ ID NO: 3091534 - DNA, 25 bp, Homo sapien
gagtaatgcacaggcaacgatggga

SEQ ID NO: 3091535 - DNA, 25 bp, Homo sapien
cagcacgaggtgctaaagacacgtt

SEQ ID NO: 3091536 - DNA, 25 bp, Homo sapien
agaggcacgtgtgagccgtaaccgc

SEQ ID NO: 3091537 - DNA, 25 bp, Homo sapien
gttcaagggccctggccagcgaagc

SEQ ID NO: 3091538 - DNA, 25 bp, Homo sapien
gacatatgaacacccgtggacaggt

SEQ ID NO: 3091539 - DNA, 25 bp, Homo sapien
tgtgctcacagacagaaacgggaga

SEQ ID NO: 3091540 - DNA, 25 bp, Homo sapien
ctgtgctcacagacagaaacgggag

SEQ ID NO: 3091541 - DNA, 25 bp, Homo sapien
gtgctcacagacagaaacgggagag

SEQ ID NO: 3091542 - DNA, 25 bp, Homo sapien
tgctcacagacagaaacgggagagc

SEQ ID NO: 3091543 - DNA, 25 bp, Homo sapien
ctgtgcagattgggggttggaaagt

SEQ ID NO: 3091544 - DNA, 25 bp, Homo sapien
tgtgcagattgggggttggaaagtt

SEQ ID NO: 3091545 - DNA, 25 bp, Homo sapien
cttctgaaactccatccaagggtac

SEQ ID NO: 3091546 - DNA, 25 bp, Homo sapien
ccccaccgtggggtatgaaacactg

SEQ ID NO: 3091547 - DNA, 25 bp, Homo sapien
tacagtaggctttctgtcctgatcc

SEQ ID NO: 3091548 - DNA, 25 bp, Homo sapien
gttttcaaagcgctctttctctaga

SEQ ID NO: 3091549 - DNA, 25 bp, Homo sapien
aactccccagatacagtaggctttc

SEQ ID NO: 3091550 - DNA, 25 bp, Homo sapien
tatcttcccgggatctctgggctcc

SEQ ID NO: 3091551 - DNA, 25 bp, Homo sapien
tgtgcatcatgcctccaaagttttg

SEQ ID NO: 3091552 - DNA, 25 bp, Homo sapien
cattcatgccagtagaagagcctag

SEQ ID NO: 3091553 - DNA, 25 bp, Homo sapien
taggtgaagtcccaagtgaagccaa

SEQ ID NO: 3091554 - DNA, 25 bp, Homo sapien
gaggcgcagaggaattgtgaatcca

SEQ ID NO: 3091555 - DNA, 25 bp, Homo sapien
taccgtctcggtgttactggaggcg

SEQ ID NO: 3091556 - DNA, 25 bp, Homo sapien
cagcttgaagatgtgtaccgtctcg

SEQ ID NO: 3091557 - DNA, 25 bp, Homo sapien
tgtgaatccatactgaacactagag

SEQ ID NO: 3091558 - DNA, 25 bp, Homo sapien
gggaggaactgtgccttcctggcat

SEQ ID NO: 3091559 - DNA, 25 bp, Homo sapien
gaagaaacaaggtatagccctgcct

SEQ ID NO: 3091560 - DNA, 25 bp, Homo sapien
gcccggcccatagtcttatttatgt

SEQ ID NO: 3091561 - DNA, 25 bp, Homo sapien
tgatctggctgcaaacctacatccg

SEQ ID NO: 3091562 - DNA, 25 bp, Homo sapien
tttaaaatgggtttgacattgaaca

SEQ ID NO: 3091563 - DNA, 25 bp, Homo sapien
ggcacagagccactctctgtcctct

SEQ ID NO: 3091564 - DNA, 25 bp, Homo sapien
tgcgggacttctgcggggactttaa

SEQ ID NO: 3091565 - DNA, 25 bp, Homo sapien
gactttaaaatgggtttgacattga

SEQ ID NO: 3091566 - DNA, 25 bp, Homo sapien
ggacagagaacacccggatgactgt

SEQ ID NO: 3091567 - DNA, 25 bp, Homo sapien
ctcatagagcttttgcccatcaggg

SEQ ID NO: 3091568 - DNA, 25 bp, Homo sapien
cctctccggaactcatagagctttt

SEQ ID NO: 3091569 - DNA, 25 bp, Homo sapien
catcagggacagagaacacccggat

SEQ ID NO: 3091570 - DNA, 25 bp, Homo sapien
ttggagcctgaggcattgaaggtga

SEQ ID NO: 3091571 - DNA, 25 bp, Homo sapien
gagcctgaggcattgaaggtgatgg

SEQ ID NO: 3091572 - DNA, 25 bp, Homo sapien
tttcagacgcacttgctagtttgga

SEQ ID NO: 3091573 - DNA, 25 bp, Homo sapien
tttttcagacgcacttgctagtttg

SEQ ID NO: 3091574 - DNA, 25 bp, Homo sapien
tggaatggttgatagagagagcaca

SEQ ID NO: 3091575 - DNA, 25 bp, Homo sapien
catcataaagcacaatctcccctga

SEQ ID NO: 3091576 - DNA, 25 bp, Homo sapien
cagggagtttccatcataaagcaca

SEQ ID NO: 3091577 - DNA, 25 bp, Homo sapien
aagtcaggcttccaggataggccag

SEQ ID NO: 3091578 - DNA, 25 bp, Homo sapien
gattcttctgattaaggcttccaat

SEQ ID NO: 3091579 - DNA, 25 bp, Homo sapien
tgctttccgctgatgattcttctga

SEQ ID NO: 3091580 - DNA, 25 bp, Homo sapien
attcttctgattaaggcttccaata

SEQ ID NO: 3091581 - DNA, 25 bp, Homo sapien
aatggactcttctaggcaaaccagc

SEQ ID NO: 3091582 - DNA, 25 bp, Homo sapien
gaatataaatggactcttctaggca

SEQ ID NO: 3091583 - DNA, 25 bp, Homo sapien
tggactcttctaggcaaaccagcag

SEQ ID NO: 3091584 - DNA, 25 bp, Homo sapien
tataaatggactcttctaggcaaac

SEQ ID NO: 3091585 - DNA, 25 bp, Homo sapien
cagctctaacttatttctactcaga

SEQ ID NO: 3091586 - DNA, 25 bp, Homo sapien
ctgcttttgggccgctgtctgagcc

SEQ ID NO: 3091587 - DNA, 25 bp, Homo sapien
ggcctgcttttgggccgctgtctga

SEQ ID NO: 3091588 - DNA, 25 bp, Homo sapien
taacttatttctactcagactctcc

SEQ ID NO: 3091589 - DNA, 25 bp, Homo sapien
gaagggcttcggccccatttgaaca

SEQ ID NO: 3091590 - DNA, 25 bp, Homo sapien
cccatttgaacaccccagtgcccca

SEQ ID NO: 3091591 - DNA, 25 bp, Homo sapien
caggttcagagcctcttcccaatgg

SEQ ID NO: 3091592 - DNA, 25 bp, Homo sapien
cagtgccccacgtccccactgttcc

SEQ ID NO: 3091593 - DNA, 25 bp, Homo sapien
gaactcttagatattggttccaatg

SEQ ID NO: 3091594 - DNA, 25 bp, Homo sapien
ggttccaatgaaccgatgctcatct

SEQ ID NO: 3091595 - DNA, 25 bp, Homo sapien
cgacgttagatcttggttccgagaa

SEQ ID NO: 3091596 - DNA, 25 bp, Homo sapien
ggaagggagaactcttagatattgg

SEQ ID NO: 3091597 - DNA, 25 bp, Homo sapien
ggaaacagatatttatgagcacgta

SEQ ID NO: 3091598 - DNA, 25 bp, Homo sapien
tgagcacgtatctaccaagcactgc

SEQ ID NO: 3091599 - DNA, 25 bp, Homo sapien
tggtgaacacaccagcacagtgcct

SEQ ID NO: 3091600 - DNA, 25 bp, Homo sapien
taccaggtcgtataatggtgaacac

SEQ ID NO: 3091601 - DNA, 25 bp, Homo sapien
agtgatacacgttcatctgccgtgg

SEQ ID NO: 3091602 - DNA, 25 bp, Homo sapien
tagctgtaattacagatctctgtgc

SEQ ID NO: 3091603 - DNA, 25 bp, Homo sapien
tctgccgtggttttgtgtgactgac

SEQ ID NO: 3091604 - DNA, 25 bp, Homo sapien
cacgatgtagacgtccgggatttca

SEQ ID NO: 3091605 - DNA, 25 bp, Homo sapien
aaattaatgactgtgcatataagca

SEQ ID NO: 3091606 - DNA, 25 bp, Homo sapien
aaaattaatgactgtgcatataagc

SEQ ID NO: 3091607 - DNA, 25 bp, Homo sapien
aattaatgactgtgcatataagcat

SEQ ID NO: 3091608 - DNA, 25 bp, Homo sapien
taaaaattaatgactgtgcatataa

SEQ ID NO: 3091609 - DNA, 25 bp, Homo sapien
actcagagaaaacagcttatacccg

SEQ ID NO: 3091610 - DNA, 25 bp, Homo sapien
tcagagaaaacagcttatacccggc

SEQ ID NO: 3091611 - DNA, 25 bp, Homo sapien
agcttatacccggctttagttccag

SEQ ID NO: 3091612 - DNA, 25 bp, Homo sapien
agagaaaacagcttatacccggctt

SEQ ID NO: 3091613 - DNA, 25 bp, Homo sapien
tgaacagaatctgacccggagcaca

SEQ ID NO: 3091614 - DNA, 25 bp, Homo sapien
acaaggtagctggtgacgtctcgca

SEQ ID NO: 3091615 - DNA, 25 bp, Homo sapien
tgggacacagggatagggcaactac

SEQ ID NO: 3091616 - DNA, 25 bp, Homo sapien
tattacaagcctggatggccaaggc

SEQ ID NO: 3091617 - DNA, 25 bp, Homo sapien
cagctgagcgccgactcaaccccgc

SEQ ID NO: 3091618 - DNA, 25 bp, Homo sapien
gctgagcgccgactcaaccccgccc

SEQ ID NO: 3091619 - DNA, 25 bp, Homo sapien
gtgcagtcctggttgaaagagaagc

SEQ ID NO: 3091620 - DNA, 25 bp, Homo sapien
tgagcgccgactcaaccccgcccgg

SEQ ID NO: 3091621 - DNA, 25 bp, Homo sapien
ctcggcccgggaagccgcagctcgg

SEQ ID NO: 3091622 - DNA, 25 bp, Homo sapien
tcggcccgggaagccgcagctcgga

SEQ ID NO: 3091623 - DNA, 25 bp, Homo sapien
gctcggcccgggaagccgcagctcg

SEQ ID NO: 3091624 - DNA, 25 bp, Homo sapien
cggcccgggaagccgcagctcggag

SEQ ID NO: 3091625 - DNA, 25 bp, Homo sapien
cgcccgcgccggctccacgggccgg

SEQ ID NO: 3091626 - DNA, 25 bp, Homo sapien
gcgccggctccacgggccgggtcgc

SEQ ID NO: 3091627 - DNA, 25 bp, Homo sapien
ccggcgacagccacctcagcagccc

SEQ ID NO: 3091628 - DNA, 25 bp, Homo sapien
ggcgacagccacctcagcagcccgc

SEQ ID NO: 3091629 - DNA, 25 bp, Homo sapien
ctggcttcgtaacgcggctctccat

SEQ ID NO: 3091630 - DNA, 25 bp, Homo sapien
gacaaaggcgcgtgacgcaaaggca

SEQ ID NO: 3091631 - DNA, 25 bp, Homo sapien
cggtgttttcattgccggagccgcc

SEQ ID NO: 3091632 - DNA, 25 bp, Homo sapien
tctccattggacaaaggcgcgtgac

SEQ ID NO: 3091633 - DNA, 25 bp, Homo sapien
taatgtccttggagctgagagtctg

SEQ ID NO: 3091634 - DNA, 25 bp, Homo sapien
ttttgttcaccgaggcatcttcgca

SEQ ID NO: 3091635 - DNA, 25 bp, Homo sapien
gaagacagttgctttctacaagtgc

SEQ ID NO: 3091636 - DNA, 25 bp, Homo sapien
tgttacccatgccagtgcagagagg

SEQ ID NO: 3091637 - DNA, 25 bp, Homo sapien
gccttttgatacaagttccaaagga

SEQ ID NO: 3091638 - DNA, 25 bp, Homo sapien
tccctgtgccttttgatacaagttc

SEQ ID NO: 3091639 - DNA, 25 bp, Homo sapien
gttccaaaggaacatttaacagcat

SEQ ID NO: 3091640 - DNA, 25 bp, Homo sapien
cctgtgccttttgatacaagttcca

SEQ ID NO: 3091641 - DNA, 25 bp, Homo sapien
tggttggtcaatgcacataagtcca

SEQ ID NO: 3091642 - DNA, 25 bp, Homo sapien
ccttgacggtggatcagaagtgtca

SEQ ID NO: 3091643 - DNA, 25 bp, Homo sapien
cataagtccatgtggagagagctcg

SEQ ID NO: 3091644 - DNA, 25 bp, Homo sapien
gcatactcctccttgacggtggatc

SEQ ID NO: 3091645 - DNA, 25 bp, Homo sapien
acctagaacaaggttgagtgtgact

SEQ ID NO: 3091646 - DNA, 25 bp, Homo sapien
aacaaggttgagtgtgactgacaca

SEQ ID NO: 3091647 - DNA, 25 bp, Homo sapien
tagaacaaggttgagtgtgactgac

SEQ ID NO: 3091648 - DNA, 25 bp, Homo sapien
gccccagcatatgaggatttggcac

SEQ ID NO: 3091649 - DNA, 25 bp, Homo sapien
ggcctgctcaatgctatcaaattcc

SEQ ID NO: 3091650 - DNA, 25 bp, Homo sapien
atcaacccttctttgtactgtcaag

SEQ ID NO: 3091651 - DNA, 25 bp, Homo sapien
gcttgccagcgtagggttcagttta

SEQ ID NO: 3091652 - DNA, 25 bp, Homo sapien
gagtgaaatcctatctgactgaggc

SEQ ID NO: 3091653 - DNA, 25 bp, Homo sapien
gcttcgtcgcttcgcagccggtttg

SEQ ID NO: 3091654 - DNA, 25 bp, Homo sapien
tcagtagccgaacgctgattggctg

SEQ ID NO: 3091655 - DNA, 25 bp, Homo sapien
gcctagccgctatcgcagagtggag

SEQ ID NO: 3091656 - DNA, 25 bp, Homo sapien
gaccgatccaagatggcgtcacggg

SEQ ID NO: 3091657 - DNA, 25 bp, Homo sapien
ctcccccatttcctgaaggacaacg

SEQ ID NO: 3091658 - DNA, 25 bp, Homo sapien
cctgaaggacaacggctctatttta

SEQ ID NO: 3091659 - DNA, 25 bp, Homo sapien
atttcctgaaggacaacggctctat

SEQ ID NO: 3091660 - DNA, 25 bp, Homo sapien
ccccatttcctgaaggacaacggct

SEQ ID NO: 3091661 - DNA, 25 bp, Homo sapien
gaacagaattgtcctggcacttgag

SEQ ID NO: 3091662 - DNA, 25 bp, Homo sapien
tgttaactgggaaccaagtaccaga

SEQ ID NO: 3091663 - DNA, 25 bp, Homo sapien
gaggcttgtgaagctaacagatcac

SEQ ID NO: 3091664 - DNA, 25 bp, Homo sapien
agagccaggctattttgagttatgc

SEQ ID NO: 3091665 - DNA, 25 bp, Homo sapien
tgtttgccaagctaatctgcctggt

SEQ ID NO: 3091666 - DNA, 25 bp, Homo sapien
tctgtgtgcaactaactgactctgt

SEQ ID NO: 3091667 - DNA, 25 bp, Homo sapien
tagacctttatccagctagtgccaa

SEQ ID NO: 3091668 - DNA, 25 bp, Homo sapien
gtatttaactacatctgcctcggct

SEQ ID NO: 3091669 - DNA, 25 bp, Homo sapien
ggccctggcagtgtatgtttagatg

SEQ ID NO: 3091670 - DNA, 25 bp, Homo sapien
tgtttagatgggctaagacaacatc

SEQ ID NO: 3091671 - DNA, 25 bp, Homo sapien
tcaagaagcaatggctagataacca

SEQ ID NO: 3091672 - DNA, 25 bp, Homo sapien
caaataatagctgaaccttttgtac

SEQ ID NO: 3091673 - DNA, 25 bp, Homo sapien
gaagtgttatttgtccagtcgaggc

SEQ ID NO: 3091674 - DNA, 25 bp, Homo sapien
tatgctgcagtagggccacaacagt

SEQ ID NO: 3091675 - DNA, 25 bp, Homo sapien
gactgactagtcactccatggaatg

SEQ ID NO: 3091676 - DNA, 25 bp, Homo sapien
aatgaacatgctggaagaactcgag

SEQ ID NO: 3091677 - DNA, 25 bp, Homo sapien
tgtcagagttactgttgcctgcgct

SEQ ID NO: 3091678 - DNA, 25 bp, Homo sapien
tgcgctggcccaaagtgcagatttt

SEQ ID NO: 3091679 - DNA, 25 bp, Homo sapien
taagaagttactccaggaccgggca

SEQ ID NO: 3091680 - DNA, 25 bp, Homo sapien
tactgattcagatgggtccagtgac

SEQ ID NO: 3091681 - DNA, 25 bp, Homo sapien
caaggcaacgcacgacagaagcggt

SEQ ID NO: 3091682 - DNA, 25 bp, Homo sapien
cagatttcccagtgcactcaggaga

SEQ ID NO: 3091683 - DNA, 25 bp, Homo sapien
gacttgactcccagcagtaacaggt

SEQ ID NO: 3091684 - DNA, 25 bp, Homo sapien
aagattcagttccatgggccccact

SEQ ID NO: 3091685 - DNA, 25 bp, Homo sapien
cgcatcacatcgctgagtctgtagt

SEQ ID NO: 3091686 - DNA, 25 bp, Homo sapien
cactgggccgtcgactatgacactc

SEQ ID NO: 3091687 - DNA, 25 bp, Homo sapien
gtctgtagtcagcttgggccagcag

SEQ ID NO: 3091688 - DNA, 25 bp, Homo sapien
tggtttggagccttcgatccagggc

SEQ ID NO: 3091689 - DNA, 25 bp, Homo sapien
ttcatcatgggagtgtcgtccgaac

SEQ ID NO: 3091690 - DNA, 25 bp, Homo sapien
atggagatttcatcatgggagtgtc

SEQ ID NO: 3091691 - DNA, 25 bp, Homo sapien
agatttcatcatgggagtgtcgtcc

SEQ ID NO: 3091692 - DNA, 25 bp, Homo sapien
gagaggcgagaggatggagatttca

SEQ ID NO: 3091693 - DNA, 25 bp, Homo sapien
gttgtcaaggtgaataaggaaccca

SEQ ID NO: 3091694 - DNA, 25 bp, Homo sapien
aggaacccatcatccccgaacttgg

SEQ ID NO: 3091695 - DNA, 25 bp, Homo sapien
catctcataatggtgccggtccata

SEQ ID NO: 3091696 - DNA, 25 bp, Homo sapien
cctctggcgttgtcaaggtgaataa

SEQ ID NO: 3091697 - DNA, 25 bp, Homo sapien
tggtttcccctcacttggtgaagtg

SEQ ID NO: 3091698 - DNA, 25 bp, Homo sapien
tcccctcacttggtgaagtgaacat

SEQ ID NO: 3091699 - DNA, 25 bp, Homo sapien
ctggtttcccctcacttggtgaagt

SEQ ID NO: 3091700 - DNA, 25 bp, Homo sapien
gtttcccctcacttggtgaagtgaa

SEQ ID NO: 3091701 - DNA, 25 bp, Homo sapien
ggtgagatgcctgccttatgagtga

SEQ ID NO: 3091702 - DNA, 25 bp, Homo sapien
agcttccaatctgacgcccactcag

SEQ ID NO: 3091703 - DNA, 25 bp, Homo sapien
ttatgagtgacgaccccttgagctt

SEQ ID NO: 3091704 - DNA, 25 bp, Homo sapien
gaggggagcctgttaccttctgtcc

SEQ ID NO: 3091705 - DNA, 25 bp, Homo sapien
tcgatgacattgaggagccgctggc

SEQ ID NO: 3091706 - DNA, 25 bp, Homo sapien
gtacgggtagatctgtttcactgtg

SEQ ID NO: 3091707 - DNA, 25 bp, Homo sapien
tatcaagaagtcgaagatggccatg

SEQ ID NO: 3091708 - DNA, 25 bp, Homo sapien
ctggctgttgttgtacgggtagatc

SEQ ID NO: 3091709 - DNA, 25 bp, Homo sapien
tcacagtaaaggggattgacctccc

SEQ ID NO: 3091710 - DNA, 25 bp, Homo sapien
cacagtaaaggggattgacctccca

SEQ ID NO: 3091711 - DNA, 25 bp, Homo sapien
ctgagggggagaagaagtcctgggg

SEQ ID NO: 3091712 - DNA, 25 bp, Homo sapien
gatggatcgattcactcagtcagct

SEQ ID NO: 3091713 - DNA, 25 bp, Homo sapien
caaggacgcgtaaggctgcatattc

SEQ ID NO: 3091714 - DNA, 25 bp, Homo sapien
tctggtggacactaaacccatggtt

SEQ ID NO: 3091715 - DNA, 25 bp, Homo sapien
gaccaaggagcttctcaaggagaga

SEQ ID NO: 3091716 - DNA, 25 bp, Homo sapien
ccaggttgagggacggcaggaaggc

SEQ ID NO: 3091717 - DNA, 25 bp, Homo sapien
cacagacagcatactccgtcttgca

SEQ ID NO: 3091718 - DNA, 25 bp, Homo sapien
cacatgtatggacacttggcgaaga

SEQ ID NO: 3091719 - DNA, 25 bp, Homo sapien
ccagtgtgtaggagcggatccaggg

SEQ ID NO: 3091720 - DNA, 25 bp, Homo sapien
catttactatcctccccactgttgg

SEQ ID NO: 3091721 - DNA, 25 bp, Homo sapien
ccttggtgacatttactatcctccc

SEQ ID NO: 3091722 - DNA, 25 bp, Homo sapien
cggcacccgtcggaagtccagaatc

SEQ ID NO: 3091723 - DNA, 25 bp, Homo sapien
actgttggcggcacccgtcggaagt

SEQ ID NO: 3091724 - DNA, 25 bp, Homo sapien
agcattgtgtctctgaaagtcaatg

SEQ ID NO: 3091725 - DNA, 25 bp, Homo sapien
cattgtgtctctgaaagtcaatgaa

SEQ ID NO: 3091726 - DNA, 25 bp, Homo sapien
gcattgtgtctctgaaagtcaatga

SEQ ID NO: 3091727 - DNA, 25 bp, Homo sapien
catctgtaggaacatatcatctttc

SEQ ID NO: 3091728 - DNA, 25 bp, Homo sapien
tgtccaggctagcaaggacaatccc

SEQ ID NO: 3091729 - DNA, 25 bp, Homo sapien
ttaattcctgagtcccatctgtagg

SEQ ID NO: 3091730 - DNA, 25 bp, Homo sapien
gatcagtgcttctcatactttgaga

SEQ ID NO: 3091731 - DNA, 25 bp, Homo sapien
taagcctggtgaactaacctctgct

SEQ ID NO: 3091732 - DNA, 25 bp, Homo sapien
gcgacattatcacctaacaagagag

SEQ ID NO: 3091733 - DNA, 25 bp, Homo sapien
tccaggctttgaggctccatttaga

SEQ ID NO: 3091734 - DNA, 25 bp, Homo sapien
aaatttagcatcactcttgagggcc

SEQ ID NO: 3091735 - DNA, 25 bp, Homo sapien
catggccttcccgaaatccgagaac

SEQ ID NO: 3091736 - DNA, 25 bp, Homo sapien
gccttcccgaaatccgagaacctca

SEQ ID NO: 3091737 - DNA, 25 bp, Homo sapien
tgaacatggccttcccgaaatccga

SEQ ID NO: 3091738 - DNA, 25 bp, Homo sapien
ttcccgaaatccgagaacctcagca

SEQ ID NO: 3091739 - DNA, 25 bp, Homo sapien
gctgacttcgctttcctcttatgta

SEQ ID NO: 3091740 - DNA, 25 bp, Homo sapien
ttcaataagcccagctgacttcgct

SEQ ID NO: 3091741 - DNA, 25 bp, Homo sapien
aagactaggatgtgctctccatagc

SEQ ID NO: 3091742 - DNA, 25 bp, Homo sapien
tatgtaatgagaccctaaagactag

SEQ ID NO: 3091743 - DNA, 25 bp, Homo sapien
tctgggtgcagtcacatgcccccag

SEQ ID NO: 3091744 - DNA, 25 bp, Homo sapien
ccccagcaaggctttctcatcttga

SEQ ID NO: 3091745 - DNA, 25 bp, Homo sapien
tgggtgcagtcacatgcccccagca

SEQ ID NO: 3091746 - DNA, 25 bp, Homo sapien
aaggctttctcatcttgactgtaat

SEQ ID NO: 3091747 - DNA, 25 bp, Homo sapien
catggcggttaatacccaggtggaa

SEQ ID NO: 3091748 - DNA, 25 bp, Homo sapien
cagctggcctcgagtcggagctgca

SEQ ID NO: 3091749 - DNA, 25 bp, Homo sapien
tgcagaagtttgctgacaacagggc

SEQ ID NO: 3091750 - DNA, 25 bp, Homo sapien
gaaagtgcctcatgtcttgcagaag

SEQ ID NO: 3091751 - DNA, 25 bp, Homo sapien
cagatagttgttcattagaggaaca

SEQ ID NO: 3091752 - DNA, 25 bp, Homo sapien
aagaatgcaaagacccaccaagata

SEQ ID NO: 3091753 - DNA, 25 bp, Homo sapien
agaatgcaaagacccaccaagatac

SEQ ID NO: 3091754 - DNA, 25 bp, Homo sapien
ctgaaagagccagatagttgttcat

SEQ ID NO: 3091755 - DNA, 25 bp, Homo sapien
catcagatatggtttggatgtttgt

SEQ ID NO: 3091756 - DNA, 25 bp, Homo sapien
atcagatatggtttggatgtttgtc

SEQ ID NO: 3091757 - DNA, 25 bp, Homo sapien
ccctccaaatctcatgttgaaatgt

SEQ ID NO: 3091758 - DNA, 25 bp, Homo sapien
gtcccctccaaatctcatgttgaaa

SEQ ID NO: 3091759 - DNA, 25 bp, Homo sapien
caataggtccttgttgtccgtggac

SEQ ID NO: 3091760 - DNA, 25 bp, Homo sapien
tcactgccaaattcactgtccaggg

SEQ ID NO: 3091761 - DNA, 25 bp, Homo sapien
cagtcctacaaccaaccagatgtga

SEQ ID NO: 3091762 - DNA, 25 bp, Homo sapien
ttaaccctcttatctggatcctgga

SEQ ID NO: 3091763 - DNA, 25 bp, Homo sapien
tatgagaccatcagagcagtaacac

SEQ ID NO: 3091764 - DNA, 25 bp, Homo sapien
tatgcagaacgatcaactctcccca

SEQ ID NO: 3091765 - DNA, 25 bp, Homo sapien
gagtagtagtaactgggccaagaag

SEQ ID NO: 3091766 - DNA, 25 bp, Homo sapien
gaaacctcagcactgcgtttgtgcc

SEQ ID NO: 3091767 - DNA, 25 bp, Homo sapien
aggtgaagtcaagagctctatttgg

SEQ ID NO: 3091768 - DNA, 25 bp, Homo sapien
ggtgaagtcaagagctctatttggc

SEQ ID NO: 3091769 - DNA, 25 bp, Homo sapien
gtgaagtcaagagctctatttggca

SEQ ID NO: 3091770 - DNA, 25 bp, Homo sapien
tgaagtcaagagctctatttggcat

SEQ ID NO: 3091771 - DNA, 25 bp, Homo sapien
catgagaggcagctaagtcaagtga

SEQ ID NO: 3091772 - DNA, 25 bp, Homo sapien
taaggctgcatatcgataagtatca

SEQ ID NO: 3091773 - DNA, 25 bp, Homo sapien
cctgacaacaggaggccacaaaagc

SEQ ID NO: 3091774 - DNA, 25 bp, Homo sapien
taattgacgtcgaagtgatggagga

SEQ ID NO: 3091775 - DNA, 25 bp, Homo sapien
agctgctgcggaccaactgctataa

SEQ ID NO: 3091776 - DNA, 25 bp, Homo sapien
tcatatttggctgacttcccctgcc

SEQ ID NO: 3091777 - DNA, 25 bp, Homo sapien
catcatatttggctgacttcccctg

SEQ ID NO: 3091778 - DNA, 25 bp, Homo sapien
caactgctataaatcctagctcatc

SEQ ID NO: 3091779 - DNA, 25 bp, Homo sapien
tcaaaggtattgtctgaagggaatc

SEQ ID NO: 3091780 - DNA, 25 bp, Homo sapien
gaggtattgattacccgctggctcg

SEQ ID NO: 3091781 - DNA, 25 bp, Homo sapien
ggaatctaggctggcccttagacct

SEQ ID NO: 3091782 - DNA, 25 bp, Homo sapien
cctgtttgactccatgacttcagaa

SEQ ID NO: 3091783 - DNA, 25 bp, Homo sapien
ggcacagtgctagcagagagactca

SEQ ID NO: 3091784 - DNA, 25 bp, Homo sapien
gcttgatcaccacgatcgcgaatgg

SEQ ID NO: 3091785 - DNA, 25 bp, Homo sapien
tgcccaaagaatgtgcctgctgccc

SEQ ID NO: 3091786 - DNA, 25 bp, Homo sapien
gaatgacaaccctgaaaaactgcac

SEQ ID NO: 3091787 - DNA, 25 bp, Homo sapien
tcatctgcctagtcactaccaggaa

SEQ ID NO: 3091788 - DNA, 25 bp, Homo sapien
tagtcctgacaccatacagtgtcct

SEQ ID NO: 3091789 - DNA, 25 bp, Homo sapien
gaaggacaaggaaggtattcatctg

SEQ ID NO: 3091790 - DNA, 25 bp, Homo sapien
caccatacagtgtcctctcttggag

SEQ ID NO: 3091791 - DNA, 25 bp, Homo sapien
tccagactgtctcatctgggaggca

SEQ ID NO: 3091792 - DNA, 25 bp, Homo sapien
ccaagttcgtggtgtcagcagggtt

SEQ ID NO: 3091793 - DNA, 25 bp, Homo sapien
ccattccaggtgagttagcctctgt

SEQ ID NO: 3091794 - DNA, 25 bp, Homo sapien
tggagacaggcctaagccagcagat

SEQ ID NO: 3091795 - DNA, 25 bp, Homo sapien
taatggtgcataacacaattgggtg

SEQ ID NO: 3091796 - DNA, 25 bp, Homo sapien
tggtagcagagtattgaaaatcctg

SEQ ID NO: 3091797 - DNA, 25 bp, Homo sapien
ttgcagaaactgtgaagcacctccc

SEQ ID NO: 3091798 - DNA, 25 bp, Homo sapien
acagctcactttgcaatctcagaat

SEQ ID NO: 3091799 - DNA, 25 bp, Homo sapien
aagcatcccccagaaaaacttcagc

SEQ ID NO: 3091800 - DNA, 25 bp, Homo sapien
gctgcccagtctctttgcggtgatt

SEQ ID NO: 3091801 - DNA, 25 bp, Homo sapien
acttactccctttgaccaactgtca

SEQ ID NO: 3091802 - DNA, 25 bp, Homo sapien
aacttcagccaacttactccctttg

SEQ ID NO: 3091803 - DNA, 25 bp, Homo sapien
atataagtaacaacacatctgctta

SEQ ID NO: 3091804 - DNA, 25 bp, Homo sapien
ccctgcccggccttgtgtttcattt

SEQ ID NO: 3091805 - DNA, 25 bp, Homo sapien
gtctcagtccctcaagtgactagga

SEQ ID NO: 3091806 - DNA, 25 bp, Homo sapien
aacaacacatctgcttattaatatg

SEQ ID NO: 3091807 - DNA, 25 bp, Homo sapien
cataaaatgtgagccgtagagttac

SEQ ID NO: 3091808 - DNA, 25 bp, Homo sapien
ggagggaccataaaaccaccgatga

SEQ ID NO: 3091809 - DNA, 25 bp, Homo sapien
cagttaacgtggaattgagaatcac

SEQ ID NO: 3091810 - DNA, 25 bp, Homo sapien
taactcatacgaaggcttcctgcca

SEQ ID NO: 3091811 - DNA, 25 bp, Homo sapien
gaaactttttcctcgtactatctga

SEQ ID NO: 3091812 - DNA, 25 bp, Homo sapien
cgtactatctgactccgggactgga

SEQ ID NO: 3091813 - DNA, 25 bp, Homo sapien
tctgactccgggactggactgtgag

SEQ ID NO: 3091814 - DNA, 25 bp, Homo sapien
ttcgctgtgcggctgcaatagaaac

SEQ ID NO: 3091815 - DNA, 25 bp, Homo sapien
tgtggctgccgccagccggttcagt

SEQ ID NO: 3091816 - DNA, 25 bp, Homo sapien
gctcctccgggacgttgtacagcgg

SEQ ID NO: 3091817 - DNA, 25 bp, Homo sapien
cttggagctcgacccgctgtggctg

SEQ ID NO: 3091818 - DNA, 25 bp, Homo sapien
cgggaaaagttgtgcacgatcgtgc

SEQ ID NO: 3091819 - DNA, 25 bp, Homo sapien
ggcggctgctagtgctcccgcgact

SEQ ID NO: 3091820 - DNA, 25 bp, Homo sapien
gggtcagtgagaccggaatgctccc

SEQ ID NO: 3091821 - DNA, 25 bp, Homo sapien
ggcgtcgcttctccgcgccgagtga

SEQ ID NO: 3091822 - DNA, 25 bp, Homo sapien
ctctcggagtcagcgggcgtcgctt

SEQ ID NO: 3091823 - DNA, 25 bp, Homo sapien
tggcttgtctctaatgtcttcactc

SEQ ID NO: 3091824 - DNA, 25 bp, Homo sapien
ttctattgtccagagtttcacagca

SEQ ID NO: 3091825 - DNA, 25 bp, Homo sapien
cagctgtcatggcttgtctctaatg

SEQ ID NO: 3091826 - DNA, 25 bp, Homo sapien
tcttctattgtccagagtttcacag

SEQ ID NO: 3091827 - DNA, 25 bp, Homo sapien
gcctttgtggctcgccagttgcctg

SEQ ID NO: 3091828 - DNA, 25 bp, Homo sapien
ctccaagcatgatttacacgatggc

SEQ ID NO: 3091829 - DNA, 25 bp, Homo sapien
agcatgatttacacgatggcttggg

SEQ ID NO: 3091830 - DNA, 25 bp, Homo sapien
gcagggaggcctttgtggctcgcca

SEQ ID NO: 3091831 - DNA, 25 bp, Homo sapien
cccagccatgcaggtatttccagag

SEQ ID NO: 3091832 - DNA, 25 bp, Homo sapien
tgcaactgtgaactcgggaaatcct

SEQ ID NO: 3091833 - DNA, 25 bp, Homo sapien
cctgcatggcatagtgagtctgcaa

SEQ ID NO: 3091834 - DNA, 25 bp, Homo sapien
aatcctgtaccttcccgtgcagtcg

SEQ ID NO: 3091835 - DNA, 25 bp, Homo sapien
ttccacttcctaccagtctcctctt

SEQ ID NO: 3091836 - DNA, 25 bp, Homo sapien
tgcctttccacttcctaccagtctc

SEQ ID NO: 3091837 - DNA, 25 bp, Homo sapien
tttccacttcctaccagtctcctct

SEQ ID NO: 3091838 - DNA, 25 bp, Homo sapien
cctttccacttcctaccagtctcct

SEQ ID NO: 3091839 - DNA, 25 bp, Homo sapien
tgtgactgtacatgacgttatgtcc

SEQ ID NO: 3091840 - DNA, 25 bp, Homo sapien
caccccactgggtgaacagtcagga

SEQ ID NO: 3091841 - DNA, 25 bp, Homo sapien
tggtggctgccacggtctgtaaccg

SEQ ID NO: 3091842 - DNA, 25 bp, Homo sapien
tatgtccatgcgagaggtgctcaga

SEQ ID NO: 3091843 - DNA, 25 bp, Homo sapien
tgttcacacagaggcatgatgctgg

SEQ ID NO: 3091844 - DNA, 25 bp, Homo sapien
tgaagtgtccattctctgcatgtgg

SEQ ID NO: 3091845 - DNA, 25 bp, Homo sapien
taaaggcgttttaatgtggctcact

SEQ ID NO: 3091846 - DNA, 25 bp, Homo sapien
tgtcaagtttgaaagtgtctcagca

SEQ ID NO: 3091847 - DNA, 25 bp, Homo sapien
gcacgtcaatgtctccttagagact

SEQ ID NO: 3091848 - DNA, 25 bp, Homo sapien
gtacttgtgcacgtcaatgtctcct

SEQ ID NO: 3091849 - DNA, 25 bp, Homo sapien
ctccttagagactgcggcgctcctt

SEQ ID NO: 3091850 - DNA, 25 bp, Homo sapien
cagccaagactgatagtacttgtgc

SEQ ID NO: 3091851 - DNA, 25 bp, Homo sapien
acctcttgttcatgaagcgctggaa

SEQ ID NO: 3091852 - DNA, 25 bp, Homo sapien
atgaagcgctggaaagggccctgct

SEQ ID NO: 3091853 - DNA, 25 bp, Homo sapien
cttgttcatgaagcgctggaaaggg

SEQ ID NO: 3091854 - DNA, 25 bp, Homo sapien
ccacctcttgttcatgaagcgctgg

SEQ ID NO: 3091855 - DNA, 25 bp, Homo sapien
ttctgatggccgagcgtgccctcct

SEQ ID NO: 3091856 - DNA, 25 bp, Homo sapien
cgagcgtgccctcctttctggctga

SEQ ID NO: 3091857 - DNA, 25 bp, Homo sapien
cacatcttgacttattttatactcc

SEQ ID NO: 3091858 - DNA, 25 bp, Homo sapien
actggtggttgtggtgaatggattc

SEQ ID NO: 3091859 - DNA, 25 bp, Homo sapien
cacaagaacctcatggcaattaggg

SEQ ID NO: 3091860 - DNA, 25 bp, Homo sapien
tccagcattgaccataaagatgcca

SEQ ID NO: 3091861 - DNA, 25 bp, Homo sapien
attagggagttaggccatttcctgc

SEQ ID NO: 3091862 - DNA, 25 bp, Homo sapien
tcttccagcattgaccataaagatg

SEQ ID NO: 3091863 - DNA, 25 bp, Homo sapien
tacgtcacgcattaggaagctcttt

SEQ ID NO: 3091864 - DNA, 25 bp, Homo sapien
tatagggtacattgtcacttctcag

SEQ ID NO: 3091865 - DNA, 25 bp, Homo sapien
ttgctattggagaagacaattccca

SEQ ID NO: 3091866 - DNA, 25 bp, Homo sapien
cccacaggtttgttggtggtcagac

SEQ ID NO: 3091867 - DNA, 25 bp, Homo sapien
ttgctttgcttcaaggccaaggcct

SEQ ID NO: 3091868 - DNA, 25 bp, Homo sapien
ccaaggcctttatcctgagatcaag

SEQ ID NO: 3091869 - DNA, 25 bp, Homo sapien
tcctatcactttcgctacatctctt

SEQ ID NO: 3091870 - DNA, 25 bp, Homo sapien
aattctccttaatagctagtttcag

SEQ ID NO: 3091871 - DNA, 25 bp, Homo sapien
ttgaatccaaggttagtaagtcaga

SEQ ID NO: 3091872 - DNA, 25 bp, Homo sapien
tgtgttgaatccaaggttagtaagt

SEQ ID NO: 3091873 - DNA, 25 bp, Homo sapien
tgttgaatccaaggttagtaagtca

SEQ ID NO: 3091874 - DNA, 25 bp, Homo sapien
tgtgtgttgaatccaaggttagtaa

SEQ ID NO: 3091875 - DNA, 25 bp, Homo sapien
ctagctccaggactccatttcataa

SEQ ID NO: 3091876 - DNA, 25 bp, Homo sapien
aactgaaatgcaccagggctgggtc

SEQ ID NO: 3091877 - DNA, 25 bp, Homo sapien
tgaaatgcaccagggctgggtctgc

SEQ ID NO: 3091878 - DNA, 25 bp, Homo sapien
ataaactgaaatgcaccagggctgg

SEQ ID NO: 3091879 - DNA, 25 bp, Homo sapien
ccacttctgcaacgcctgactggga

SEQ ID NO: 3091880 - DNA, 25 bp, Homo sapien
agagaagggctttgttcggcagcct

SEQ ID NO: 3091881 - DNA, 25 bp, Homo sapien
tttgtcttgtcctcagtgctccagg

SEQ ID NO: 3091882 - DNA, 25 bp, Homo sapien
caagtgcccgtcttcaggtaggccc

SEQ ID NO: 3091883 - DNA, 25 bp, Homo sapien
cactgagtcatattaagggtggtga

SEQ ID NO: 3091884 - DNA, 25 bp, Homo sapien
gcatgacctctctcacaagattgac

SEQ ID NO: 3091885 - DNA, 25 bp, Homo sapien
caagattgaccctttgctctggaac

SEQ ID NO: 3091886 - DNA, 25 bp, Homo sapien
tgccagcaggaggaaaggtagcttc

SEQ ID NO: 3091887 - DNA, 25 bp, Homo sapien
tggcatcaagcttctccttacttgg

SEQ ID NO: 3091888 - DNA, 25 bp, Homo sapien
tggatgcccttccaattagtgaaac

SEQ ID NO: 3091889 - DNA, 25 bp, Homo sapien
tgccattatacaaaaccccaggatt

SEQ ID NO: 3091890 - DNA, 25 bp, Homo sapien
catttttaggatggtgtccagactc

SEQ ID NO: 3091891 - DNA, 25 bp, Homo sapien
tcatccacagctaagccgcattctg

SEQ ID NO: 3091892 - DNA, 25 bp, Homo sapien
catcaaaactagtggtagcaaaggg

SEQ ID NO: 3091893 - DNA, 25 bp, Homo sapien
cattctcatgtgttggtgaccacgt

SEQ ID NO: 3091894 - DNA, 25 bp, Homo sapien
ctctctgagagggacacgtagtgtc

SEQ ID NO: 3091895 - DNA, 25 bp, Homo sapien
tcatctgtgttaggaagcttatctg

SEQ ID NO: 3091896 - DNA, 25 bp, Homo sapien
gcttatctgaatgcaagtcatcagt

SEQ ID NO: 3091897 - DNA, 25 bp, Homo sapien
cctctcatctgtgttaggaagctta

SEQ ID NO: 3091898 - DNA, 25 bp, Homo sapien
catcagtggtgaaattattacaaat

SEQ ID NO: 3091899 - DNA, 25 bp, Homo sapien
gcttctcgatatttcctggcagcag

SEQ ID NO: 3091900 - DNA, 25 bp, Homo sapien
tgctctgcttttccgttgcttctcg

SEQ ID NO: 3091901 - DNA, 25 bp, Homo sapien
tcatcaaccatgtgccaaagagatg

SEQ ID NO: 3091902 - DNA, 25 bp, Homo sapien
tctcatcaaccatgtgccaaagaga

SEQ ID NO: 3091903 - DNA, 25 bp, Homo sapien
atccaaaaagcatagggcacaaggg

SEQ ID NO: 3091904 - DNA, 25 bp, Homo sapien
gatccaaaaagcatagggcacaagg

SEQ ID NO: 3091905 - DNA, 25 bp, Homo sapien
ccaaaaagcatagggcacaagggag

SEQ ID NO: 3091906 - DNA, 25 bp, Homo sapien
gggatccaaaaagcatagggcacaa

SEQ ID NO: 3091907 - DNA, 25 bp, Homo sapien
catagctctcccatatcaattttcc

SEQ ID NO: 3091908 - DNA, 25 bp, Homo sapien
caaagggatgacatagctctcccat

SEQ ID NO: 3091909 - DNA, 25 bp, Homo sapien
ggatgacatagctctcccatatcaa

SEQ ID NO: 3091910 - DNA, 25 bp, Homo sapien
ggacaaagggatgacatagctctcc

SEQ ID NO: 3091911 - DNA, 25 bp, Homo sapien
tccgttgttggatgaaaacacatga

SEQ ID NO: 3091912 - DNA, 25 bp, Homo sapien
tcccttgttggatcaaggtgatgag

SEQ ID NO: 3091913 - DNA, 25 bp, Homo sapien
aacagagctttcatccgttgttgga

SEQ ID NO: 3091914 - DNA, 25 bp, Homo sapien
catcccttgttggatcaaggtgatg

SEQ ID NO: 3091915 - DNA, 25 bp, Homo sapien
agtcaacatttccatgagtttctgg

SEQ ID NO: 3091916 - DNA, 25 bp, Homo sapien
ggatgcccgaaacctttcatcataa

SEQ ID NO: 3091917 - DNA, 25 bp, Homo sapien
tgctcctctggagggtcattcaggt

SEQ ID NO: 3091918 - DNA, 25 bp, Homo sapien
tgtgggcgatatgatccttcagcat

SEQ ID NO: 3091919 - DNA, 25 bp, Homo sapien
tctgtctgaaagtgcccccgacatg

SEQ ID NO: 3091920 - DNA, 25 bp, Homo sapien
tgccttctgtctgaaagtgcccccg

SEQ ID NO: 3091921 - DNA, 25 bp, Homo sapien
cctttttcgtggatgatgctaaaca

SEQ ID NO: 3091922 - DNA, 25 bp, Homo sapien
tctctcctttttcgtggatgatgct

SEQ ID NO: 3091923 - DNA, 25 bp, Homo sapien
tggcaggttatggtcctggccacca

SEQ ID NO: 3091924 - DNA, 25 bp, Homo sapien
tgaacatgcaggcatgcgtgcagca

SEQ ID NO: 3091925 - DNA, 25 bp, Homo sapien
cagggtgagtcatgccctgtgtgca

SEQ ID NO: 3091926 - DNA, 25 bp, Homo sapien
tgtctctccaggaccgcgggtaggg

SEQ ID NO: 3091927 - DNA, 25 bp, Homo sapien
ctgggtcagctgcaggtatgaattt

SEQ ID NO: 3091928 - DNA, 25 bp, Homo sapien
cagctgcaggtatgaatttgttcat

SEQ ID NO: 3091929 - DNA, 25 bp, Homo sapien
tgctgggtcagctgcaggtatgaat

SEQ ID NO: 3091930 - DNA, 25 bp, Homo sapien
actttctgctgggtcagctgcaggt

SEQ ID NO: 3091931 - DNA, 25 bp, Homo sapien
ctaggacagagacatcttttaggca

SEQ ID NO: 3091932 - DNA, 25 bp, Homo sapien
cttgcagggatcttgcaacattgag

SEQ ID NO: 3091933 - DNA, 25 bp, Homo sapien
cttttaggcagatggagattttggc

SEQ ID NO: 3091934 - DNA, 25 bp, Homo sapien
tttgaataatggaatgcggcttgca

SEQ ID NO: 3091935 - DNA, 25 bp, Homo sapien
catggtcagttcatggcccaagttc

SEQ ID NO: 3091936 - DNA, 25 bp, Homo sapien
gtcagttcatggcccaagttcaggg

SEQ ID NO: 3091937 - DNA, 25 bp, Homo sapien
tggtcagttcatggcccaagttcag

SEQ ID NO: 3091938 - DNA, 25 bp, Homo sapien
acatggtcagttcatggcccaagtt

SEQ ID NO: 3091939 - DNA, 25 bp, Homo sapien
gattcctgagtattatgtggatcac

SEQ ID NO: 3091940 - DNA, 25 bp, Homo sapien
tctcctttcagatagaaatcccttc

SEQ ID NO: 3091941 - DNA, 25 bp, Homo sapien
aagacaacgtatattcatgccccag

SEQ ID NO: 3091942 - DNA, 25 bp, Homo sapien
cccttctgggtgattcctgagtatt

SEQ ID NO: 3091943 - DNA, 25 bp, Homo sapien
ggacaagggaactggtctcctgaag

SEQ ID NO: 3091944 - DNA, 25 bp, Homo sapien
gggcgaggacaagggaactggtctc

SEQ ID NO: 3091945 - DNA, 25 bp, Homo sapien
gaggacaagggaactggtctcctga

SEQ ID NO: 3091946 - DNA, 25 bp, Homo sapien
caggcagccggagtccaaaaagagt

SEQ ID NO: 3091947 - DNA, 25 bp, Homo sapien
gggcctctccgcatgtctaaattac

SEQ ID NO: 3091948 - DNA, 25 bp, Homo sapien
taaacatttcagtccctgtgatgcc

SEQ ID NO: 3091949 - DNA, 25 bp, Homo sapien
attttgtttcccgacaatgctccag

SEQ ID NO: 3091950 - DNA, 25 bp, Homo sapien
aattaccgagagtgataaacatttc

SEQ ID NO: 3091951 - DNA, 25 bp, Homo sapien
cacagaaactatgattgggacaggt

SEQ ID NO: 3091952 - DNA, 25 bp, Homo sapien
tcagcagcacaggtttacatgttcc

SEQ ID NO: 3091953 - DNA, 25 bp, Homo sapien
gtggatcagctaggcctggacctca

SEQ ID NO: 3091954 - DNA, 25 bp, Homo sapien
agcagtgcttcagaggttttccctg

SEQ ID NO: 3091955 - DNA, 25 bp, Homo sapien
gcctggatgaggagtaaccctgtgt

SEQ ID NO: 3091956 - DNA, 25 bp, Homo sapien
ttgcagccagatgtctggtcacatc

SEQ ID NO: 3091957 - DNA, 25 bp, Homo sapien
tgcttcctcatctcgtttgctgatg

SEQ ID NO: 3091958 - DNA, 25 bp, Homo sapien
agtctgctgctctagtctgtgttcc

SEQ ID NO: 3091959 - DNA, 25 bp, Homo sapien
aatcctcgccacgtggcaagggcac

SEQ ID NO: 3091960 - DNA, 25 bp, Homo sapien
cagctggctaaactggcagctatgc

SEQ ID NO: 3091961 - DNA, 25 bp, Homo sapien
ggcaatcctcgccacgtggcaaggg

SEQ ID NO: 3091962 - DNA, 25 bp, Homo sapien
ggcagctatgctttggagctcatga

SEQ ID NO: 3091963 - DNA, 25 bp, Homo sapien
caatatagcctcatctaatgtaatg

SEQ ID NO: 3091964 - DNA, 25 bp, Homo sapien
ggcctttctttccaattgctactcc

SEQ ID NO: 3091965 - DNA, 25 bp, Homo sapien
gtacaactgaagctctctgatctct

SEQ ID NO: 3091966 - DNA, 25 bp, Homo sapien
taatgcagtatcctgtgtacaactg

SEQ ID NO: 3091967 - DNA, 25 bp, Homo sapien
ctgggtcatcagacgtaacttgcat

SEQ ID NO: 3091968 - DNA, 25 bp, Homo sapien
aagtctgggtcatcagacgtaactt

SEQ ID NO: 3091969 - DNA, 25 bp, Homo sapien
ttggagtatacacttaagcagcatg

SEQ ID NO: 3091970 - DNA, 25 bp, Homo sapien
gtctgggtcatcagacgtaacttgc

SEQ ID NO: 3091971 - DNA, 25 bp, Homo sapien
gatatcagatactatgacccatgac

SEQ ID NO: 3091972 - DNA, 25 bp, Homo sapien
tttaaaagtccagtgaaaatggcac

SEQ ID NO: 3091973 - DNA, 25 bp, Homo sapien
tatgcctacatcatggtgttacctg

SEQ ID NO: 3091974 - DNA, 25 bp, Homo sapien
aaatggcacacagttggcttacaga

SEQ ID NO: 3091975 - DNA, 25 bp, Homo sapien
tcttatctagaaacttatacgatca

SEQ ID NO: 3091976 - DNA, 25 bp, Homo sapien
tatcttatctagaaacttatacgat

SEQ ID NO: 3091977 - DNA, 25 bp, Homo sapien
atcttatctagaaacttatacgatc

SEQ ID NO: 3091978 - DNA, 25 bp, Homo sapien
cctgcagagatacagaggctgtgag

SEQ ID NO: 3091979 - DNA, 25 bp, Homo sapien
ggcttagtcaaatgcctctgtccac

SEQ ID NO: 3091980 - DNA, 25 bp, Homo sapien
aatggaaccagtatggcctgcagag

SEQ ID NO: 3091981 - DNA, 25 bp, Homo sapien
caccacacggagaaccatttctgta

SEQ ID NO: 3091982 - DNA, 25 bp, Homo sapien
cttcactgagggatcaaaatcctcc

SEQ ID NO: 3091983 - DNA, 25 bp, Homo sapien
ttcactgagggatcaaaatcctcct

SEQ ID NO: 3091984 - DNA, 25 bp, Homo sapien
gaggctgtactcctctaggtcaaag

SEQ ID NO: 3091985 - DNA, 25 bp, Homo sapien
ctcctctaggtcaaagctctgttta

SEQ ID NO: 3091986 - DNA, 25 bp, Homo sapien
tcctctaggtcaaagctctgtttaa

SEQ ID NO: 3091987 - DNA, 25 bp, Homo sapien
aaatcactctcattatcccctggca

SEQ ID NO: 3091988 - DNA, 25 bp, Homo sapien
cagatgcagggaagttagttctaaa

SEQ ID NO: 3091989 - DNA, 25 bp, Homo sapien
gtttcaatgaccagacaggagtcag

SEQ ID NO: 3091990 - DNA, 25 bp, Homo sapien
tagcgagagagttctgactagcaca

SEQ ID NO: 3091991 - DNA, 25 bp, Homo sapien
gctaaaggttgcacatcttccactg

SEQ ID NO: 3091992 - DNA, 25 bp, Homo sapien
tcttccactggcaacttataaacca

SEQ ID NO: 3091993 - DNA, 25 bp, Homo sapien
taatttgaagaaagcttgggctaaa

SEQ ID NO: 3091994 - DNA, 25 bp, Homo sapien
gcttgggctaaaggttgcacatctt

SEQ ID NO: 3091995 - DNA, 25 bp, Homo sapien
tagacatgcctaggtagaacacccc

SEQ ID NO: 3091996 - DNA, 25 bp, Homo sapien
tcatctggccaacagaaggtctttc

SEQ ID NO: 3091997 - DNA, 25 bp, Homo sapien
cacttgtgccagatgtgaactgatg

SEQ ID NO: 3091998 - DNA, 25 bp, Homo sapien
taagaagagtgataccacttgtgcc

SEQ ID NO: 3091999 - DNA, 25 bp, Homo sapien
atgaggtacagaagatctctaaagc

SEQ ID NO: 3092000 - DNA, 25 bp, Homo sapien
cagtgggacaaaagagagtataatg

SEQ ID NO: 3092001 - DNA, 25 bp, Homo sapien
tgtttggggtgattccggctgcagg

SEQ ID NO: 3092002 - DNA, 25 bp, Homo sapien
ggtacagaagatctctaaagcttat

SEQ ID NO: 3092003 - DNA, 25 bp, Homo sapien
ctcaacataactgacaagtaacagt

SEQ ID NO: 3092004 - DNA, 25 bp, Homo sapien
atgactatcactcaacataactgac

SEQ ID NO: 3092005 - DNA, 25 bp, Homo sapien
gaatgactatcactcaacataactg

SEQ ID NO: 3092006 - DNA, 25 bp, Homo sapien
acataactgacaagtaacagtgaac

SEQ ID NO: 3092007 - DNA, 25 bp, Homo sapien
gcaggtaatctttgccaaatttgct

SEQ ID NO: 3092008 - DNA, 25 bp, Homo sapien
tcaggtgttggatggaaccgataca

SEQ ID NO: 3092009 - DNA, 25 bp, Homo sapien
gaaaagcctcaggatctctgcatgg

SEQ ID NO: 3092010 - DNA, 25 bp, Homo sapien
gggctccacttgtgccaggttcttc

SEQ ID NO: 3092011 - DNA, 25 bp, Homo sapien
aacctcccagataccatgatggcca

SEQ ID NO: 3092012 - DNA, 25 bp, Homo sapien
atgatggccactcggtcacacacgg

SEQ ID NO: 3092013 - DNA, 25 bp, Homo sapien
catgtagtgggtggttaggagggca

SEQ ID NO: 3092014 - DNA, 25 bp, Homo sapien
tgtttctaaaggtggcccggatggc

SEQ ID NO: 3092015 - DNA, 25 bp, Homo sapien
tccctgaccgtggtaatgttcctca

SEQ ID NO: 3092016 - DNA, 25 bp, Homo sapien
tgcaagtcatccgtgctgtccctga

SEQ ID NO: 3092017 - DNA, 25 bp, Homo sapien
tcaagagtgagacctatgggcccta

SEQ ID NO: 3092018 - DNA, 25 bp, Homo sapien
aaaaatggttcacaggctccatgca

SEQ ID NO: 3092019 - DNA, 25 bp, Homo sapien
gtcgacggctcatccagaagcacca

SEQ ID NO: 3092020 - DNA, 25 bp, Homo sapien
ccggtcgacggctcatccagaagca

SEQ ID NO: 3092021 - DNA, 25 bp, Homo sapien
gggtccatcccggtcgacggctcat

SEQ ID NO: 3092022 - DNA, 25 bp, Homo sapien
atccagaagcaccactgacgggttc

SEQ ID NO: 3092023 - DNA, 25 bp, Homo sapien
ccatctggttcccatctatggcact

SEQ ID NO: 3092024 - DNA, 25 bp, Homo sapien
ggttcccatctatggcacttgcaga

SEQ ID NO: 3092025 - DNA, 25 bp, Homo sapien
tcccatctatggcacttgcagagca

SEQ ID NO: 3092026 - DNA, 25 bp, Homo sapien
catctatggcacttgcagagcaaca

SEQ ID NO: 3092027 - DNA, 25 bp, Homo sapien
cctgcagcttgagcgcatccactaa

SEQ ID NO: 3092028 - DNA, 25 bp, Homo sapien
tcctgcagcttgagcgcatccacta

SEQ ID NO: 3092029 - DNA, 25 bp, Homo sapien
ggaaacaggagagtcgtacagtctt

SEQ ID NO: 3092030 - DNA, 25 bp, Homo sapien
aaggaaacaggagagtcgtacagtc

SEQ ID NO: 3092031 - DNA, 25 bp, Homo sapien
aggaaacaggagagtcgtacagtct

SEQ ID NO: 3092032 - DNA, 25 bp, Homo sapien
tatccaggaaaggagtttctagttg

SEQ ID NO: 3092033 - DNA, 25 bp, Homo sapien
tcagcatttagagtctcccatcctg

SEQ ID NO: 3092034 - DNA, 25 bp, Homo sapien
tgtaaatctacccagtgtgacctgg

SEQ ID NO: 3092035 - DNA, 25 bp, Homo sapien
gtgacctgggtcagcatttagagtc

SEQ ID NO: 3092036 - DNA, 25 bp, Homo sapien
aggttgggccacagcgcgttctcct

SEQ ID NO: 3092037 - DNA, 25 bp, Homo sapien
cggcggcgtacacctccaggtgctg

SEQ ID NO: 3092038 - DNA, 25 bp, Homo sapien
tcctgagggcagtaccccaggaact

SEQ ID NO: 3092039 - DNA, 25 bp, Homo sapien
ttcctcagccctttcacggcggcgt

SEQ ID NO: 3092040 - DNA, 25 bp, Homo sapien
ccatgacatcattctcttcacgaac

SEQ ID NO: 3092041 - DNA, 25 bp, Homo sapien
actgcttctttgagtatttccatga

SEQ ID NO: 3092042 - DNA, 25 bp, Homo sapien
cttctgcactgcttctttgagtatt

SEQ ID NO: 3092043 - DNA, 25 bp, Homo sapien
tccatgacatcattctcttcacgaa

SEQ ID NO: 3092044 - DNA, 25 bp, Homo sapien
agataacatattttccacataattc

SEQ ID NO: 3092045 - DNA, 25 bp, Homo sapien
gataacatattttccacataattca

SEQ ID NO: 3092046 - DNA, 25 bp, Homo sapien
ttagataacatattttccacataat

SEQ ID NO: 3092047 - DNA, 25 bp, Homo sapien
ataacatattttccacataattcac

SEQ ID NO: 3092048 - DNA, 25 bp, Homo sapien
ccttaatggatgtgcttttaccagc

SEQ ID NO: 3092049 - DNA, 25 bp, Homo sapien
tgtctccagttatcaccttaatgga

SEQ ID NO: 3092050 - DNA, 25 bp, Homo sapien
tctccagttatcaccttaatggatg

SEQ ID NO: 3092051 - DNA, 25 bp, Homo sapien
tccagttatcaccttaatggatgtg

SEQ ID NO: 3092052 - DNA, 25 bp, Homo sapien
catttctcgtggctatcttattctt

SEQ ID NO: 3092053 - DNA, 25 bp, Homo sapien
agaaggagacatttctcgtggctat

SEQ ID NO: 3092054 - DNA, 25 bp, Homo sapien
gacatttctcgtggctatcttattc

SEQ ID NO: 3092055 - DNA, 25 bp, Homo sapien
ggagacatttctcgtggctatctta

SEQ ID NO: 3092056 - DNA, 25 bp, Homo sapien
aattagtagaattcaaggcatttgc

SEQ ID NO: 3092057 - DNA, 25 bp, Homo sapien
aaaattagtagaattcaaggcattt

SEQ ID NO: 3092058 - DNA, 25 bp, Homo sapien
tagtagaattcaaggcatttgctgt

SEQ ID NO: 3092059 - DNA, 25 bp, Homo sapien
ttagtagaattcaaggcatttgctg

SEQ ID NO: 3092060 - DNA, 25 bp, Homo sapien
tatgggcacatggttcctactccag

SEQ ID NO: 3092061 - DNA, 25 bp, Homo sapien
cagtctgtgatccactggctgggat

SEQ ID NO: 3092062 - DNA, 25 bp, Homo sapien
tgtggatagtgtcagatagagcctt

SEQ ID NO: 3092063 - DNA, 25 bp, Homo sapien
tggtgccgaaaatagtctcagcttt

SEQ ID NO: 3092064 - DNA, 25 bp, Homo sapien
tccattccagacatcgaagagtaaa

SEQ ID NO: 3092065 - DNA, 25 bp, Homo sapien
cttccattccagacatcgaagagta

SEQ ID NO: 3092066 - DNA, 25 bp, Homo sapien
cattccagacatcgaagagtaaaaa

SEQ ID NO: 3092067 - DNA, 25 bp, Homo sapien
tccagacatcgaagagtaaaaagaa

SEQ ID NO: 3092068 - DNA, 25 bp, Homo sapien
gaaatggctgtacatccattcgttc

SEQ ID NO: 3092069 - DNA, 25 bp, Homo sapien
gtacatccattcgttcttcagaaaa

SEQ ID NO: 3092070 - DNA, 25 bp, Homo sapien
aattaggaataccagaaatggctgt

SEQ ID NO: 3092071 - DNA, 25 bp, Homo sapien
ttaggaataccagaaatggctgtac

SEQ ID NO: 3092072 - DNA, 25 bp, Homo sapien
tcctcccaaggtctatgagcttttg

SEQ ID NO: 3092073 - DNA, 25 bp, Homo sapien
tcctttctaaagtgtatagcaaggg

SEQ ID NO: 3092074 - DNA, 25 bp, Homo sapien
tgaattggccctaaacagccctgct

SEQ ID NO: 3092075 - DNA, 25 bp, Homo sapien
agccctgctaacatttgaccatgaa

SEQ ID NO: 3092076 - DNA, 25 bp, Homo sapien
cctcttcactcatgtacagtaactt

SEQ ID NO: 3092077 - DNA, 25 bp, Homo sapien
tcttcactcatgtacagtaacttcc

SEQ ID NO: 3092078 - DNA, 25 bp, Homo sapien
ttccccttcccatagatacctcttc

SEQ ID NO: 3092079 - DNA, 25 bp, Homo sapien
ctcttcactcatgtacagtaacttc

SEQ ID NO: 3092080 - DNA, 25 bp, Homo sapien
atgagtttcaagggactgggacaga

SEQ ID NO: 3092081 - DNA, 25 bp, Homo sapien
tcatgagtttcaagggactgggaca

SEQ ID NO: 3092082 - DNA, 25 bp, Homo sapien
catgagtttcaagggactgggacag

SEQ ID NO: 3092083 - DNA, 25 bp, Homo sapien
tgagtttcaagggactgggacagac

SEQ ID NO: 3092084 - DNA, 25 bp, Homo sapien
tcactttcgaagatactgaacgcaa

SEQ ID NO: 3092085 - DNA, 25 bp, Homo sapien
gatactgaacgcaaatccagccaca

SEQ ID NO: 3092086 - DNA, 25 bp, Homo sapien
aatggaatatcactttcgaagatac

SEQ ID NO: 3092087 - DNA, 25 bp, Homo sapien
tcgaagatactgaacgcaaatccag

SEQ ID NO: 3092088 - DNA, 25 bp, Homo sapien
gtttatcttttgagagccctttcag

SEQ ID NO: 3092089 - DNA, 25 bp, Homo sapien
caggattgaaactgtccatttaatc

SEQ ID NO: 3092090 - DNA, 25 bp, Homo sapien
tgtttatcttttgagagccctttca

SEQ ID NO: 3092091 - DNA, 25 bp, Homo sapien
aaactgtccatttaatctccttcct

SEQ ID NO: 3092092 - DNA, 25 bp, Homo sapien
aagatgaaggaaatcacgtatgtca

SEQ ID NO: 3092093 - DNA, 25 bp, Homo sapien
atcacgtatgtcatgaagatgaggg

SEQ ID NO: 3092094 - DNA, 25 bp, Homo sapien
atgagggaaaaggaataaccaacag

SEQ ID NO: 3092095 - DNA, 25 bp, Homo sapien
tccccttgcgaaagatgaaggaaat

SEQ ID NO: 3092096 - DNA, 25 bp, Homo sapien
tattgtaagtagcatgtcttcgaag

SEQ ID NO: 3092097 - DNA, 25 bp, Homo sapien
atatataaaaacgaagaccaagaag

SEQ ID NO: 3092098 - DNA, 25 bp, Homo sapien
tgtcttcgaagtttgaaatgtagct

SEQ ID NO: 3092099 - DNA, 25 bp, Homo sapien
gaaatgtagctcattaaatatataa

SEQ ID NO: 3092100 - DNA, 25 bp, Homo sapien
gcagaaggggagagtccggaaatcc

SEQ ID NO: 3092101 - DNA, 25 bp, Homo sapien
cagaaggggagagtccggaaatccg

SEQ ID NO: 3092102 - DNA, 25 bp, Homo sapien
cccaaaccagtaagcagaaggggag

SEQ ID NO: 3092103 - DNA, 25 bp, Homo sapien
taaggtgggcaactcgatgttaaaa

SEQ ID NO: 3092104 - DNA, 25 bp, Homo sapien
ctgctcatggcaatgtaaggtgggc

SEQ ID NO: 3092105 - DNA, 25 bp, Homo sapien
gaatccgattggattgtcctgtcca

SEQ ID NO: 3092106 - DNA, 25 bp, Homo sapien
catgatatatgccaggaatccgatt

SEQ ID NO: 3092107 - DNA, 25 bp, Homo sapien
aacaaattgaagctctgaaaacgta

SEQ ID NO: 3092108 - DNA, 25 bp, Homo sapien
aaattgaagctctgaaaacgtattg

SEQ ID NO: 3092109 - DNA, 25 bp, Homo sapien
caaattgaagctctgaaaacgtatt

SEQ ID NO: 3092110 - DNA, 25 bp, Homo sapien
aaacaaattgaagctctgaaaacgt

SEQ ID NO: 3092111 - DNA, 25 bp, Homo sapien
gaggagagtcaggaattgtaagatt

SEQ ID NO: 3092112 - DNA, 25 bp, Homo sapien
gcagtggtttactcaataaaaacaa

SEQ ID NO: 3092113 - DNA, 25 bp, Homo sapien
ggagattcctgatagaggagagtca

SEQ ID NO: 3092114 - DNA, 25 bp, Homo sapien
caagattccagcacttaaaagggtg

SEQ ID NO: 3092115 - DNA, 25 bp, Homo sapien
ggcattgcatgctaacgaaaagctg

SEQ ID NO: 3092116 - DNA, 25 bp, Homo sapien
tcggatatgtactgatggtttaacc

SEQ ID NO: 3092117 - DNA, 25 bp, Homo sapien
taagaactgggaagcaattcaatct

SEQ ID NO: 3092118 - DNA, 25 bp, Homo sapien
tccaagtagcccattactaacaatg

SEQ ID NO: 3092119 - DNA, 25 bp, Homo sapien
gaaagattattagagacctgcatac

SEQ ID NO: 3092120 - DNA, 25 bp, Homo sapien
ctccacagactgtataaagtcatca

SEQ ID NO: 3092121 - DNA, 25 bp, Homo sapien
ccacagactgtataaagtcatcaat

SEQ ID NO: 3092122 - DNA, 25 bp, Homo sapien
cttttcattacaacacactgtgatg

SEQ ID NO: 3092123 - DNA, 25 bp, Homo sapien
ttacaacacactgtgatggctccat

SEQ ID NO: 3092124 - DNA, 25 bp, Homo sapien
ggtgtagttaaagatattaggtatc

SEQ ID NO: 3092125 - DNA, 25 bp, Homo sapien
gttaaagatattaggtatcacaaaa

SEQ ID NO: 3092126 - DNA, 25 bp, Homo sapien
ctaaggtgtagttaaagatattagg

SEQ ID NO: 3092127 - DNA, 25 bp, Homo sapien
tgtagttaaagatattaggtatcac

SEQ ID NO: 3092128 - DNA, 25 bp, Homo sapien
aggagaaagttcccaggtgtaactg

SEQ ID NO: 3092129 - DNA, 25 bp, Homo sapien
tattgatgatcagtagttgagtgag

SEQ ID NO: 3092130 - DNA, 25 bp, Homo sapien
gagggcaaaatccagccattagaat

SEQ ID NO: 3092131 - DNA, 25 bp, Homo sapien
accatggtatactccacaagaagag

SEQ ID NO: 3092132 - DNA, 25 bp, Homo sapien
gtgtcgtcagctttttccgcttgta

SEQ ID NO: 3092133 - DNA, 25 bp, Homo sapien
gaacccttgcaattgcgcagatttg

SEQ ID NO: 3092134 - DNA, 25 bp, Homo sapien
tcaacaagcctttcagtgtcgtcag

SEQ ID NO: 3092135 - DNA, 25 bp, Homo sapien
taagtgaagagaggacttgttccat

SEQ ID NO: 3092136 - DNA, 25 bp, Homo sapien
taggtcaggatagctatcaagatcc

SEQ ID NO: 3092137 - DNA, 25 bp, Homo sapien
gatagctatcaagatccttgtaaag

SEQ ID NO: 3092138 - DNA, 25 bp, Homo sapien
gaaacaccataattctcaattccta

SEQ ID NO: 3092139 - DNA, 25 bp, Homo sapien
tctcaattcctaggtcaggatagct

SEQ ID NO: 3092140 - DNA, 25 bp, Homo sapien
ttggctgataatttggcatcaggga

SEQ ID NO: 3092141 - DNA, 25 bp, Homo sapien
caagtgatgttatgttttcctcaac

SEQ ID NO: 3092142 - DNA, 25 bp, Homo sapien
tttccttcgcttttggctgataatt

SEQ ID NO: 3092143 - DNA, 25 bp, Homo sapien
cagggatgtgctgtttaacaagtga

SEQ ID NO: 3092144 - DNA, 25 bp, Homo sapien
aaacaaagaagagcccgcgcacttt

SEQ ID NO: 3092145 - DNA, 25 bp, Homo sapien
tagaaacaaagaagagcccgcgcac

SEQ ID NO: 3092146 - DNA, 25 bp, Homo sapien
gaagagcccgcgcactttagcttcc

SEQ ID NO: 3092147 - DNA, 25 bp, Homo sapien
aagaagagcccgcgcactttagctt

SEQ ID NO: 3092148 - DNA, 25 bp, Homo sapien
cgcggtctgttttgcgttctttcag

SEQ ID NO: 3092149 - DNA, 25 bp, Homo sapien
cagttggttcatccaacaggaaaat

SEQ ID NO: 3092150 - DNA, 25 bp, Homo sapien
ggtactgaagaggatcacgcggtct

SEQ ID NO: 3092151 - DNA, 25 bp, Homo sapien
aaggttccatacttggtgtcttgaa

SEQ ID NO: 3092152 - DNA, 25 bp, Homo sapien
taagttttgagcaagaacatcctga

SEQ ID NO: 3092153 - DNA, 25 bp, Homo sapien
tttgagcaagaacatcctgaatatt

SEQ ID NO: 3092154 - DNA, 25 bp, Homo sapien
aagttttgagcaagaacatcctgaa

SEQ ID NO: 3092155 - DNA, 25 bp, Homo sapien
agcaagaacatcctgaatatttttc

SEQ ID NO: 3092156 - DNA, 25 bp, Homo sapien
caacacattaactttaacatatttt

SEQ ID NO: 3092157 - DNA, 25 bp, Homo sapien
cacattaactttaacatatttttgt

SEQ ID NO: 3092158 - DNA, 25 bp, Homo sapien
acacattaactttaacatatttttg

SEQ ID NO: 3092159 - DNA, 25 bp, Homo sapien
gacaaactccggtcagcttgctgag

SEQ ID NO: 3092160 - DNA, 25 bp, Homo sapien
tggattgtggacaaactccggtcag

SEQ ID NO: 3092161 - DNA, 25 bp, Homo sapien
tctaggtcagccatttctgaaagct

SEQ ID NO: 3092162 - DNA, 25 bp, Homo sapien
gagtctgaggttttctcttacagtg

SEQ ID NO: 3092163 - DNA, 25 bp, Homo sapien
tcaaggtgtagtccctttgtctgcc

SEQ ID NO: 3092164 - DNA, 25 bp, Homo sapien
tgtgggaaaagacacgcagctgtcc

SEQ ID NO: 3092165 - DNA, 25 bp, Homo sapien
gaagagcttccacctagtgatttgt

SEQ ID NO: 3092166 - DNA, 25 bp, Homo sapien
tgagtgaggccatgttaaatcatcc

SEQ ID NO: 3092167 - DNA, 25 bp, Homo sapien
ttgcagtgatttggccttcgtaaat

SEQ ID NO: 3092168 - DNA, 25 bp, Homo sapien
tattgcagtgatttggccttcgtaa

SEQ ID NO: 3092169 - DNA, 25 bp, Homo sapien
gcagtgatttggccttcgtaaatgt

SEQ ID NO: 3092170 - DNA, 25 bp, Homo sapien
gtattgcagtgatttggccttcgta

SEQ ID NO: 3092171 - DNA, 25 bp, Homo sapien
tatattcttttgtaacatttctgat

SEQ ID NO: 3092172 - DNA, 25 bp, Homo sapien
ttatattcttttgtaacatttctga

SEQ ID NO: 3092173 - DNA, 25 bp, Homo sapien
caaggcttctattttatcaggcttt

SEQ ID NO: 3092174 - DNA, 25 bp, Homo sapien
ctttcaaggcttctattttatcagg

SEQ ID NO: 3092175 - DNA, 25 bp, Homo sapien
gaacgggatcacctctgaactgcaa

SEQ ID NO: 3092176 - DNA, 25 bp, Homo sapien
catggacattcgatacccaaaggct

SEQ ID NO: 3092177 - DNA, 25 bp, Homo sapien
gattgggacccataagcaaaggttc

SEQ ID NO: 3092178 - DNA, 25 bp, Homo sapien
cattggcgtcatgtgaggagttaca

SEQ ID NO: 3092179 - DNA, 25 bp, Homo sapien
aagagtcatgaaatgaaggatcggc

SEQ ID NO: 3092180 - DNA, 25 bp, Homo sapien
gaaggatcggcatccatttcatctt

SEQ ID NO: 3092181 - DNA, 25 bp, Homo sapien
aaacaaaggtggacgtcgatgtcca

SEQ ID NO: 3092182 - DNA, 25 bp, Homo sapien
tttcatcttcaagggccacgtgatc

SEQ ID NO: 3092183 - DNA, 25 bp, Homo sapien
tttcaaagtaaatcgccaatgccag

SEQ ID NO: 3092184 - DNA, 25 bp, Homo sapien
caatgccagatagaggcaagtgtca

SEQ ID NO: 3092185 - DNA, 25 bp, Homo sapien
tgttgctacaatgagatttgagccg

SEQ ID NO: 3092186 - DNA, 25 bp, Homo sapien
gcaagtgtcaaatgccaacatgaaa

SEQ ID NO: 3092187 - DNA, 25 bp, Homo sapien
aggcaaagggactaagcaagcttaa

SEQ ID NO: 3092188 - DNA, 25 bp, Homo sapien
ttaaaatccactccaaggatgcagg

SEQ ID NO: 3092189 - DNA, 25 bp, Homo sapien
taaaatccactccaaggatgcagga

SEQ ID NO: 3092190 - DNA, 25 bp, Homo sapien
agggactaagcaagcttaaaatcca

SEQ ID NO: 3092191 - DNA, 25 bp, Homo sapien
gacagtgaggaggaacacgaccagg

SEQ ID NO: 3092192 - DNA, 25 bp, Homo sapien
acagtgaggaggaacacgaccaggc

SEQ ID NO: 3092193 - DNA, 25 bp, Homo sapien
tttaccaagatgctcattaagaaag

SEQ ID NO: 3092194 - DNA, 25 bp, Homo sapien
taccaagatgctcattaagaaagcc

SEQ ID NO: 3092195 - DNA, 25 bp, Homo sapien
gatgctcattaagaaagccaaagct

SEQ ID NO: 3092196 - DNA, 25 bp, Homo sapien
ccaagatgctcattaagaaagccaa

SEQ ID NO: 3092197 - DNA, 25 bp, Homo sapien
gataaactgggtagatcttataaca

SEQ ID NO: 3092198 - DNA, 25 bp, Homo sapien
caaagataatccatacaggagaaag

SEQ ID NO: 3092199 - DNA, 25 bp, Homo sapien
aagactaccatgaagccagacaaaa

SEQ ID NO: 3092200 - DNA, 25 bp, Homo sapien
caagaaaagggccataatgaagatg

SEQ ID NO: 3092201 - DNA, 25 bp, Homo sapien
aattattctgtgtaggtatctctca

SEQ ID NO: 3092202 - DNA, 25 bp, Homo sapien
taaagacgcattgaagaggccgggc

SEQ ID NO: 3092203 - DNA, 25 bp, Homo sapien
tgtaccccttggttgtggagaaaca

SEQ ID NO: 3092204 - DNA, 25 bp, Homo sapien
aaagatgcattgaagattcccagtt

SEQ ID NO: 3092205 - DNA, 25 bp, Homo sapien
ctgaatcccgaagacccatcattgt

SEQ ID NO: 3092206 - DNA, 25 bp, Homo sapien
acgctgaatcccgaagacccatcat

SEQ ID NO: 3092207 - DNA, 25 bp, Homo sapien
gaatcccgaagacccatcattgtca

SEQ ID NO: 3092208 - DNA, 25 bp, Homo sapien
cagaacgctgaatcccgaagaccca

SEQ ID NO: 3092209 - DNA, 25 bp, Homo sapien
tcagttataactcctgattgaccaa

SEQ ID NO: 3092210 - DNA, 25 bp, Homo sapien
ggtacaaatcagttataactcctga

SEQ ID NO: 3092211 - DNA, 25 bp, Homo sapien
tgattgaccaatgaaggaatgcatc

SEQ ID NO: 3092212 - DNA, 25 bp, Homo sapien
gatgcatagtaaatgaatgaggaaa

SEQ ID NO: 3092213 - DNA, 25 bp, Homo sapien
tatatattcagtaagccacccctca

SEQ ID NO: 3092214 - DNA, 25 bp, Homo sapien
aattaggcattcttccatggcattc

SEQ ID NO: 3092215 - DNA, 25 bp, Homo sapien
ccctcatctcaagcttcaagctgga

SEQ ID NO: 3092216 - DNA, 25 bp, Homo sapien
aacaaagttgagtccatgaatgaga

SEQ ID NO: 3092217 - DNA, 25 bp, Homo sapien
aatggcagcttgaagagccacaaaa

SEQ ID NO: 3092218 - DNA, 25 bp, Homo sapien
tctataatagcagcattaatggcag

SEQ ID NO: 3092219 - DNA, 25 bp, Homo sapien
ttctataatagcagcattaatggca

SEQ ID NO: 3092220 - DNA, 25 bp, Homo sapien
cagcattaatggcagcttgaagagc

SEQ ID NO: 3092221 - DNA, 25 bp, Homo sapien
cttccaaaatactgaaacttcacag

SEQ ID NO: 3092222 - DNA, 25 bp, Homo sapien
aacttcacagtaaacatcttcattt

SEQ ID NO: 3092223 - DNA, 25 bp, Homo sapien
tactgaaacttcacagtaaacatct

SEQ ID NO: 3092224 - DNA, 25 bp, Homo sapien
aaatactgaaacttcacagtaaaca

SEQ ID NO: 3092225 - DNA, 25 bp, Homo sapien
caaatgatatgagtatgtattagta

SEQ ID NO: 3092226 - DNA, 25 bp, Homo sapien
aagaacttcaaatgatatgagtatg

SEQ ID NO: 3092227 - DNA, 25 bp, Homo sapien
ctggcattccatgtcctagcaagaa

SEQ ID NO: 3092228 - DNA, 25 bp, Homo sapien
ggcattccatgtcctagcaagaact

SEQ ID NO: 3092229 - DNA, 25 bp, Homo sapien
caggtgtgtatacaacagaaaatct

SEQ ID NO: 3092230 - DNA, 25 bp, Homo sapien
taaatgtatctacccgtcccaggtc

SEQ ID NO: 3092231 - DNA, 25 bp, Homo sapien
ccaggaagggagtagaggctacttt

SEQ ID NO: 3092232 - DNA, 25 bp, Homo sapien
tacaaacaaagtagtaggagcaatg

SEQ ID NO: 3092233 - DNA, 25 bp, Homo sapien
ggcccaagtttgttgacacacactg

SEQ ID NO: 3092234 - DNA, 25 bp, Homo sapien
aggcccaagtttgttgacacacact

SEQ ID NO: 3092235 - DNA, 25 bp, Homo sapien
tctaccagtggtacaagaggagctg

SEQ ID NO: 3092236 - DNA, 25 bp, Homo sapien
tctaactcacattatgaggccaaca

SEQ ID NO: 3092237 - DNA, 25 bp, Homo sapien
ctgaaacaattccaaacagtcgaaa

SEQ ID NO: 3092238 - DNA, 25 bp, Homo sapien
caattccaaacagtcgaaaaagagg

SEQ ID NO: 3092239 - DNA, 25 bp, Homo sapien
aatttctgcatagatgattgtcatt

SEQ ID NO: 3092240 - DNA, 25 bp, Homo sapien
gatgattgtcattcagtttataaag

SEQ ID NO: 3092241 - DNA, 25 bp, Homo sapien
tttgtgataggaataagaaaagaca

SEQ ID NO: 3092242 - DNA, 25 bp, Homo sapien
tgtgataggaataagaaaagacaaa

SEQ ID NO: 3092243 - DNA, 25 bp, Homo sapien
tcctggtctctaccatgtatctaga

SEQ ID NO: 3092244 - DNA, 25 bp, Homo sapien
tagaggtatggtttatccactgagc

SEQ ID NO: 3092245 - DNA, 25 bp, Homo sapien
tccactgagctccttgtttagaaga

SEQ ID NO: 3092246 - DNA, 25 bp, Homo sapien
aatggaagcaaggaatctagaggta

SEQ ID NO: 3092247 - DNA, 25 bp, Homo sapien
tttaggcacgaagtcagcacctctg

SEQ ID NO: 3092248 - DNA, 25 bp, Homo sapien
gaacattggtactccgggaagcagg

SEQ ID NO: 3092249 - DNA, 25 bp, Homo sapien
gcacctctgtcatggcctatgtcag

SEQ ID NO: 3092250 - DNA, 25 bp, Homo sapien
ggcttgcataagtgaatcagaagtt

SEQ ID NO: 3092251 - DNA, 25 bp, Homo sapien
ccttggcccaaggtctcagacgaat

SEQ ID NO: 3092252 - DNA, 25 bp, Homo sapien
aagtcaagtgactcagtaggatcag

SEQ ID NO: 3092253 - DNA, 25 bp, Homo sapien
tgacttgtatcaactcatttgtgac

SEQ ID NO: 3092254 - DNA, 25 bp, Homo sapien
cgaatattcttacgggttgatggaa

SEQ ID NO: 3092255 - DNA, 25 bp, Homo sapien
aaggtgttcatagggttaccagttg

SEQ ID NO: 3092256 - DNA, 25 bp, Homo sapien
ccagttggataggtcataataatat

SEQ ID NO: 3092257 - DNA, 25 bp, Homo sapien
tatttgcataagagtatgcccttgc

SEQ ID NO: 3092258 - DNA, 25 bp, Homo sapien
gagatatgggaaattaagacctatg

SEQ ID NO: 3092259 - DNA, 25 bp, Homo sapien
cacaaaggctgcatggtatggctta

SEQ ID NO: 3092260 - DNA, 25 bp, Homo sapien
tgctgctgggtaatcaattgactcc

SEQ ID NO: 3092261 - DNA, 25 bp, Homo sapien
ttatgccctatgatcgccctcactg

SEQ ID NO: 3092262 - DNA, 25 bp, Homo sapien
cacagtaggaaacatgggatttggt

SEQ ID NO: 3092263 - DNA, 25 bp, Homo sapien
tcaccgagggatcaaagtcctcttc

SEQ ID NO: 3092264 - DNA, 25 bp, Homo sapien
cttcaccgagggatcaaagtcctct

SEQ ID NO: 3092265 - DNA, 25 bp, Homo sapien
ttcaccgagggatcaaagtcctctt

SEQ ID NO: 3092266 - DNA, 25 bp, Homo sapien
tttccacttcaccgagggatcaaag

SEQ ID NO: 3092267 - DNA, 25 bp, Homo sapien
tcctccaggtcgaaactctgtttaa

SEQ ID NO: 3092268 - DNA, 25 bp, Homo sapien
ctcctccaggtcgaaactctgttta

SEQ ID NO: 3092269 - DNA, 25 bp, Homo sapien
tagaacctaaataagtcaaactcag

SEQ ID NO: 3092270 - DNA, 25 bp, Homo sapien
atgatggttgccaagagatggccag

SEQ ID NO: 3092271 - DNA, 25 bp, Homo sapien
taaccccacttatatgtagaaccta

SEQ ID NO: 3092272 - DNA, 25 bp, Homo sapien
ggaaatcgtgttgtggatgaatcta

SEQ ID NO: 3092273 - DNA, 25 bp, Homo sapien
tcctcaacaggcaacttatagacca

SEQ ID NO: 3092274 - DNA, 25 bp, Homo sapien
ttgaagaaagcctgtgataaaggtc

SEQ ID NO: 3092275 - DNA, 25 bp, Homo sapien
taaaggtcgcacatcctcaacaggc

SEQ ID NO: 3092276 - DNA, 25 bp, Homo sapien
aggcaacttatagaccatcagggag

SEQ ID NO: 3092277 - DNA, 25 bp, Homo sapien
catggaggggctccatttgtgccag

SEQ ID NO: 3092278 - DNA, 25 bp, Homo sapien
gaaaagcctcaggatctctgcatgg

SEQ ID NO: 3092279 - DNA, 25 bp, Homo sapien
tctccagcaggtagtctttgccaaa

SEQ ID NO: 3092280 - DNA, 25 bp, Homo sapien
gggctccatttgtgccaggttcttc

SEQ ID NO: 3092281 - DNA, 25 bp, Homo sapien
gacaccatgatggccactcggtcac

SEQ ID NO: 3092282 - DNA, 25 bp, Homo sapien
tggtcaggagggcgcccctctccgt

SEQ ID NO: 3092283 - DNA, 25 bp, Homo sapien
cctctgccatgtagtgggtggtcag

SEQ ID NO: 3092284 - DNA, 25 bp, Homo sapien
atgatggccactcggtcacacaccg

SEQ ID NO: 3092285 - DNA, 25 bp, Homo sapien
atcccggtcgacggctcatccagaa

SEQ ID NO: 3092286 - DNA, 25 bp, Homo sapien
gtcgacggctcatccagaagcacca

SEQ ID NO: 3092287 - DNA, 25 bp, Homo sapien
ccggtcgacggctcatccagaagca

SEQ ID NO: 3092288 - DNA, 25 bp, Homo sapien
gtccatcccggtcgacggctcatcc

SEQ ID NO: 3092289 - DNA, 25 bp, Homo sapien
cctgcagcttgagcgcatccactaa

SEQ ID NO: 3092290 - DNA, 25 bp, Homo sapien
tcctgcagcttgagcgcatccacta

SEQ ID NO: 3092291 - DNA, 25 bp, Homo sapien
tgatggcgatcattgcgtccccttt

SEQ ID NO: 3092292 - DNA, 25 bp, Homo sapien
tcctgagacctttcacggcagcgta

SEQ ID NO: 3092293 - DNA, 25 bp, Homo sapien
cgtgtgatggcgatcattgcgtccc

SEQ ID NO: 3092294 - DNA, 25 bp, Homo sapien
tgagacctttcacggcagcgtacac

SEQ ID NO: 3092295 - DNA, 25 bp, Homo sapien
ctgagggcagtaccccaggaagccc

SEQ ID NO: 3092296 - DNA, 25 bp, Homo sapien
ctccaccgctccctttcaaaatcac

SEQ ID NO: 3092297 - DNA, 25 bp, Homo sapien
agggcagtaccccaggaagcccagg

SEQ ID NO: 3092298 - DNA, 25 bp, Homo sapien
cctccaccgctccctttcaaaatca

SEQ ID NO: 3092299 - DNA, 25 bp, Homo sapien
gtttcgccagtgatagttataatta

SEQ ID NO: 3092300 - DNA, 25 bp, Homo sapien
tgagaattctgtttcgccagtgata

SEQ ID NO: 3092301 - DNA, 25 bp, Homo sapien
taattataggatttatcttgcaata

SEQ ID NO: 3092302 - DNA, 25 bp, Homo sapien
tctgtttcgccagtgatagttataa

SEQ ID NO: 3092303 - DNA, 25 bp, Homo sapien
tccattgtgtcctaacagtcctata

SEQ ID NO: 3092304 - DNA, 25 bp, Homo sapien
tgtcctaacagtcctataacttcac

SEQ ID NO: 3092305 - DNA, 25 bp, Homo sapien
cattgtgtcctaacagtcctataac

SEQ ID NO: 3092306 - DNA, 25 bp, Homo sapien
gttatcatcttaatagttgtacttt

SEQ ID NO: 3092307 - DNA, 25 bp, Homo sapien
catccttcttaacagaaagaccgcc

SEQ ID NO: 3092308 - DNA, 25 bp, Homo sapien
tccttcttaacagaaagaccgcctc

SEQ ID NO: 3092309 - DNA, 25 bp, Homo sapien
cagaaagaccgcctcttttcattgt

SEQ ID NO: 3092310 - DNA, 25 bp, Homo sapien
cttcttaacagaaagaccgcctctt

SEQ ID NO: 3092311 - DNA, 25 bp, Homo sapien
ttgcctgcatattccttccgtagac

SEQ ID NO: 3092312 - DNA, 25 bp, Homo sapien
tttgcctgcatattccttccgtaga

SEQ ID NO: 3092313 - DNA, 25 bp, Homo sapien
tgcctgcatattccttccgtagaca

SEQ ID NO: 3092314 - DNA, 25 bp, Homo sapien
gtcaagtaataagctgtatgtgtaa

SEQ ID NO: 3092315 - DNA, 25 bp, Homo sapien
gaagtcaagtaataagctgtatgtg

SEQ ID NO: 3092316 - DNA, 25 bp, Homo sapien
tgctgaagtcaagtaataagctgta

SEQ ID NO: 3092317 - DNA, 25 bp, Homo sapien
gctgaagtcaagtaataagctgtat

SEQ ID NO: 3092318 - DNA, 25 bp, Homo sapien
aaatagttgacgaagaacatttctg

SEQ ID NO: 3092319 - DNA, 25 bp, Homo sapien
aatagttgacgaagaacatttctga

SEQ ID NO: 3092320 - DNA, 25 bp, Homo sapien
aaaatagcgttgcttcttggagaaa

SEQ ID NO: 3092321 - DNA, 25 bp, Homo sapien
tcaaagtctcgcacagccatagcat

SEQ ID NO: 3092322 - DNA, 25 bp, Homo sapien
tggaaaaatagcgttgcttcttgga

SEQ ID NO: 3092323 - DNA, 25 bp, Homo sapien
ctcatcaaagtctcgcacagccata

SEQ ID NO: 3092324 - DNA, 25 bp, Homo sapien
tagagattccacctcttacacataa

SEQ ID NO: 3092325 - DNA, 25 bp, Homo sapien
actattcttccttcccggattggat

SEQ ID NO: 3092326 - DNA, 25 bp, Homo sapien
cataagcctacaaaggagctcctgg

SEQ ID NO: 3092327 - DNA, 25 bp, Homo sapien
ctcgtgtgtgctaatatggtttctc

SEQ ID NO: 3092328 - DNA, 25 bp, Homo sapien
gcagttcatttctaggcatcgcaga

SEQ ID NO: 3092329 - DNA, 25 bp, Homo sapien
ctaggcatcgcagaatgaaaagaaa

SEQ ID NO: 3092330 - DNA, 25 bp, Homo sapien
tcatttctaggcatcgcagaatgaa

SEQ ID NO: 3092331 - DNA, 25 bp, Homo sapien
ttctaggcatcgcagaatgaaaaga

SEQ ID NO: 3092332 - DNA, 25 bp, Homo sapien
tgtgttccctcatgcaagaatgttg

SEQ ID NO: 3092333 - DNA, 25 bp, Homo sapien
gaaactgtcaaagttagcctcactg

SEQ ID NO: 3092334 - DNA, 25 bp, Homo sapien
gcaagtgaaaccagtactacccatg

SEQ ID NO: 3092335 - DNA, 25 bp, Homo sapien
tccaggttaaaagccatcgtgtgtg

SEQ ID NO: 3092336 - DNA, 25 bp, Homo sapien
gctcctaagtaatccatggaatcag

SEQ ID NO: 3092337 - DNA, 25 bp, Homo sapien
aacatggtgccaaaaaatagcccta

SEQ ID NO: 3092338 - DNA, 25 bp, Homo sapien
gaatagagagccaatcaatgtgaag

SEQ ID NO: 3092339 - DNA, 25 bp, Homo sapien
catttagatcagtagcaactatcga

SEQ ID NO: 3092340 - DNA, 25 bp, Homo sapien
tagcaactatcgagaagatgaccac

SEQ ID NO: 3092341 - DNA, 25 bp, Homo sapien
ggctcgtgcatggtgcgcgcaccca

SEQ ID NO: 3092342 - DNA, 25 bp, Homo sapien
tcttccagttgatcacgtgggctcc

SEQ ID NO: 3092343 - DNA, 25 bp, Homo sapien
tcggctcgtgcatggtgcgcgcacc

SEQ ID NO: 3092344 - DNA, 25 bp, Homo sapien
cagttgatcacgtgggctcctgagg

SEQ ID NO: 3092345 - DNA, 25 bp, Homo sapien
aatctcattgtcaaggggtgggcac

SEQ ID NO: 3092346 - DNA, 25 bp, Homo sapien
gtaggcagtgaatctcattgtcaag

SEQ ID NO: 3092347 - DNA, 25 bp, Homo sapien
aggcagtgaatctcattgtcaaggg

SEQ ID NO: 3092348 - DNA, 25 bp, Homo sapien
ctagtaggcagtgaatctcattgtc

SEQ ID NO: 3092349 - DNA, 25 bp, Homo sapien
ctattagacgttgggccacagtcca

SEQ ID NO: 3092350 - DNA, 25 bp, Homo sapien
cctattagacgttgggccacagtcc

SEQ ID NO: 3092351 - DNA, 25 bp, Homo sapien
gttgggccacagtccaattcagtcc

SEQ ID NO: 3092352 - DNA, 25 bp, Homo sapien
tagacgttgggccacagtccaattc

SEQ ID NO: 3092353 - DNA, 25 bp, Homo sapien
ttctcccattgcgaaaaatgaatga

SEQ ID NO: 3092354 - DNA, 25 bp, Homo sapien
ctcccattgcgaaaaatgaatgaaa

SEQ ID NO: 3092355 - DNA, 25 bp, Homo sapien
gagacatagccaatactacacagga

SEQ ID NO: 3092356 - DNA, 25 bp, Homo sapien
aaaacaagagatgagacatagccaa

SEQ ID NO: 3092357 - DNA, 25 bp, Homo sapien
tttgcattagcaggaggatcaaaaa

SEQ ID NO: 3092358 - DNA, 25 bp, Homo sapien
caggttttgaattataaatataatc

SEQ ID NO: 3092359 - DNA, 25 bp, Homo sapien
tataatccattatttgcattagcag

SEQ ID NO: 3092360 - DNA, 25 bp, Homo sapien
aaccagtatgcagaagggtagaggc

SEQ ID NO: 3092361 - DNA, 25 bp, Homo sapien
aatccgtagctgggaatgagctttt

SEQ ID NO: 3092362 - DNA, 25 bp, Homo sapien
tccgtagctgggaatgagctttttt

SEQ ID NO: 3092363 - DNA, 25 bp, Homo sapien
atccgtagctgggaatgagcttttt

SEQ ID NO: 3092364 - DNA, 25 bp, Homo sapien
tgcttcgccttttagaaatattatc

SEQ ID NO: 3092365 - DNA, 25 bp, Homo sapien
catttttgcttcgccttttagaaat

SEQ ID NO: 3092366 - DNA, 25 bp, Homo sapien
ggaaattgcaaatatacagtcatga

SEQ ID NO: 3092367 - DNA, 25 bp, Homo sapien
gaagagctgaagtttgggaaattgc

SEQ ID NO: 3092368 - DNA, 25 bp, Homo sapien
aaattagatttaccacttgcatgta

SEQ ID NO: 3092369 - DNA, 25 bp, Homo sapien
aaaacatgtgaagactttaactctt

SEQ ID NO: 3092370 - DNA, 25 bp, Homo sapien
catgtaaatttatagtcgtaagggt

SEQ ID NO: 3092371 - DNA, 25 bp, Homo sapien
aaagtgcttgattattcattgcatc

SEQ ID NO: 3092372 - DNA, 25 bp, Homo sapien
aagaggctgccatcggtatccagaa

SEQ ID NO: 3092373 - DNA, 25 bp, Homo sapien
tgctcattgcaatgtatggagtgaa

SEQ ID NO: 3092374 - DNA, 25 bp, Homo sapien
tgtagtcaccaatgctgctcattgc

SEQ ID NO: 3092375 - DNA, 25 bp, Homo sapien
ggtgttacttcggtacccatactca

SEQ ID NO: 3092376 - DNA, 25 bp, Homo sapien
caaaaaatgtgcttctgtcagtctg

SEQ ID NO: 3092377 - DNA, 25 bp, Homo sapien
ggaggacaggaaagcaattcagccg

SEQ ID NO: 3092378 - DNA, 25 bp, Homo sapien
aattcagccgttttgtattacatgc

SEQ ID NO: 3092379 - DNA, 25 bp, Homo sapien
cattgctaatgacatccaggaggac

SEQ ID NO: 3092380 - DNA, 25 bp, Homo sapien
gaaatgcagcaactggagtccagca

SEQ ID NO: 3092381 - DNA, 25 bp, Homo sapien
tgaaatgcagcaactggagtccagc

SEQ ID NO: 3092382 - DNA, 25 bp, Homo sapien
tggtgaaatgcagcaactggagtcc

SEQ ID NO: 3092383 - DNA, 25 bp, Homo sapien
tttggtgaaatgcagcaactggagt

SEQ ID NO: 3092384 - DNA, 25 bp, Homo sapien
tcgcctcagtgaatgtaaaaagtta

SEQ ID NO: 3092385 - DNA, 25 bp, Homo sapien
cttttcatcacctgacacaatgata

SEQ ID NO: 3092386 - DNA, 25 bp, Homo sapien
acttctatagctatgttctgtcgcc

SEQ ID NO: 3092387 - DNA, 25 bp, Homo sapien
tagcaccattgtaagatgggtcatc

SEQ ID NO: 3092388 - DNA, 25 bp, Homo sapien
ttggggggaatctctcaacaagaac

SEQ ID NO: 3092389 - DNA, 25 bp, Homo sapien
ggggggaatctctcaacaagaacaa

SEQ ID NO: 3092390 - DNA, 25 bp, Homo sapien
tggggggaatctctcaacaagaaca

SEQ ID NO: 3092391 - DNA, 25 bp, Homo sapien
ttgttgtcctggtgagaggaagtat

SEQ ID NO: 3092392 - DNA, 25 bp, Homo sapien
cccacgggtaacttttctgatatga

SEQ ID NO: 3092393 - DNA, 25 bp, Homo sapien
cagtaaatgggtcagaggatcctgt

SEQ ID NO: 3092394 - DNA, 25 bp, Homo sapien
tatgactcgtagaatagatgttcca

SEQ ID NO: 3092395 - DNA, 25 bp, Homo sapien
aaggcttcctatatcttttgcccca

SEQ ID NO: 3092396 - DNA, 25 bp, Homo sapien
gagcgccacgccactgattgttttc

SEQ ID NO: 3092397 - DNA, 25 bp, Homo sapien
ttaggaagcgaacttttgctattgc

SEQ ID NO: 3092398 - DNA, 25 bp, Homo sapien
ttgctattgcacagacctgctgcct

SEQ ID NO: 3092399 - DNA, 25 bp, Homo sapien
ttggttagaacatctatcaagatcc

SEQ ID NO: 3092400 - DNA, 25 bp, Homo sapien
ccataatcctcaatgccttggttag

SEQ ID NO: 3092401 - DNA, 25 bp, Homo sapien
caatgccttggttagaacatctatc

SEQ ID NO: 3092402 - DNA, 25 bp, Homo sapien
gaaacacctcattcaaagttgttat

SEQ ID NO: 3092403 - DNA, 25 bp, Homo sapien
tatactctctggatcacacctttca

SEQ ID NO: 3092404 - DNA, 25 bp, Homo sapien
tgtgctgtcaatttggcatcagaga

SEQ ID NO: 3092405 - DNA, 25 bp, Homo sapien
tcagagatgtgctgcttaaccagtg

SEQ ID NO: 3092406 - DNA, 25 bp, Homo sapien
gcttaaccagtgatgttatactctc

SEQ ID NO: 3092407 - DNA, 25 bp, Homo sapien
ccccatttcttcttaaggaacagag

SEQ ID NO: 3092408 - DNA, 25 bp, Homo sapien
cttcccattggatatgaacaccttc

SEQ ID NO: 3092409 - DNA, 25 bp, Homo sapien
tgccccatttcttcttaaggaacag

SEQ ID NO: 3092410 - DNA, 25 bp, Homo sapien
gccccatttcttcttaaggaacaga

SEQ ID NO: 3092411 - DNA, 25 bp, Homo sapien
gctgaagagaattactctgtctgat

SEQ ID NO: 3092412 - DNA, 25 bp, Homo sapien
ccagcagtcggttcatccaatagca

SEQ ID NO: 3092413 - DNA, 25 bp, Homo sapien
cagtcggttcatccaatagcaaaac

SEQ ID NO: 3092414 - DNA, 25 bp, Homo sapien
gtgctgaagagaattactctgtctg

SEQ ID NO: 3092415 - DNA, 25 bp, Homo sapien
tgtccaccacttaagttttgagcaa

SEQ ID NO: 3092416 - DNA, 25 bp, Homo sapien
gtccaccacttaagttttgagcaag

SEQ ID NO: 3092417 - DNA, 25 bp, Homo sapien
ttctaattcctgtacaactcgttgt

SEQ ID NO: 3092418 - DNA, 25 bp, Homo sapien
ctaattcctgtacaactcgttgtac

SEQ ID NO: 3092419 - DNA, 25 bp, Homo sapien
tctaattcctgtacaactcgttgta

SEQ ID NO: 3092420 - DNA, 25 bp, Homo sapien
ggacaaaatccagtgaacttgctga

SEQ ID NO: 3092421 - DNA, 25 bp, Homo sapien
tgtgtgattatagacagtgactgaa

SEQ ID NO: 3092422 - DNA, 25 bp, Homo sapien
tctatatcagccattcttgaaagtg

SEQ ID NO: 3092423 - DNA, 25 bp, Homo sapien
ggattgtggacaaaatccagtgaac

SEQ ID NO: 3092424 - DNA, 25 bp, Homo sapien
ctgatgttggaactgacaacccact

SEQ ID NO: 3092425 - DNA, 25 bp, Homo sapien
tgacaacccactaagtatgtttaac

SEQ ID NO: 3092426 - DNA, 25 bp, Homo sapien
tggaactgacaacccactaagtatg

SEQ ID NO: 3092427 - DNA, 25 bp, Homo sapien
tgttggaactgacaacccactaagt

SEQ ID NO: 3092428 - DNA, 25 bp, Homo sapien
tctggccttcatatatgtcaaacac

SEQ ID NO: 3092429 - DNA, 25 bp, Homo sapien
ggccttcatatatgtcaaacaccac

SEQ ID NO: 3092430 - DNA, 25 bp, Homo sapien
agggcagtgatctggccttcatata

SEQ ID NO: 3092431 - DNA, 25 bp, Homo sapien
ctgtgaccaaggagggcagtgatct

SEQ ID NO: 3092432 - DNA, 25 bp, Homo sapien
cttccctgcatattcttttttaaga

SEQ ID NO: 3092433 - DNA, 25 bp, Homo sapien
acttccctgcatattcttttttaag

SEQ ID NO: 3092434 - DNA, 25 bp, Homo sapien
ttccctgcatattcttttttaagat

SEQ ID NO: 3092435 - DNA, 25 bp, Homo sapien
tcattctcaaggaccacatgattag

SEQ ID NO: 3092436 - DNA, 25 bp, Homo sapien
cattaggtgtaggatcagaatctgt

SEQ ID NO: 3092437 - DNA, 25 bp, Homo sapien
tgattagcccttccgtgttgaaacc

SEQ ID NO: 3092438 - DNA, 25 bp, Homo sapien
aacaagggagaacatcgatgtccat

SEQ ID NO: 3092439 - DNA, 25 bp, Homo sapien
caagtgggcattagaattcacatca

SEQ ID NO: 3092440 - DNA, 25 bp, Homo sapien
tagctattatgaggtatggattttg

SEQ ID NO: 3092441 - DNA, 25 bp, Homo sapien
gaaaagagtagctattatgaggtat

SEQ ID NO: 3092442 - DNA, 25 bp, Homo sapien
aatccaagtgggcattagaattcac

SEQ ID NO: 3092443 - DNA, 25 bp, Homo sapien
aaaaatgcaggaagacgtgtataca

SEQ ID NO: 3092444 - DNA, 25 bp, Homo sapien
cactcatcaggaaagctaaagttat

SEQ ID NO: 3092445 - DNA, 25 bp, Homo sapien
cacactcatcaggaaagctaaagtt

SEQ ID NO: 3092446 - DNA, 25 bp, Homo sapien
tgtatacaatgctgggaatcccagg

SEQ ID NO: 3092447 - DNA, 25 bp, Homo sapien
caaaagaggtgagaccagaattagt

SEQ ID NO: 3092448 - DNA, 25 bp, Homo sapien
gacttagatgaaattaaccaactca

SEQ ID NO: 3092449 - DNA, 25 bp, Homo sapien
gaaagacttcagctggtatataatt

SEQ ID NO: 3092450 - DNA, 25 bp, Homo sapien
tgataaattattggcagtagagaga

SEQ ID NO: 3092451 - DNA, 25 bp, Homo sapien
gagggtgaagaccatcacaaaacca

SEQ ID NO: 3092452 - DNA, 25 bp, Homo sapien
aaccagtcaggacgacaatttgtgc

SEQ ID NO: 3092453 - DNA, 25 bp, Homo sapien
gccatgataaggatgaagccagcat

SEQ ID NO: 3092454 - DNA, 25 bp, Homo sapien
aagccagcatacatcaaaccccagg

SEQ ID NO: 3092455 - DNA, 25 bp, Homo sapien
agctaacttatctcctaccctcagg

SEQ ID NO: 3092456 - DNA, 25 bp, Homo sapien
taatggagcagggttcagcaaactt

SEQ ID NO: 3092457 - DNA, 25 bp, Homo sapien
tacaatggatgtcactgggagaggt

SEQ ID NO: 3092458 - DNA, 25 bp, Homo sapien
tgtgaagctcaccatttatcaaggg

SEQ ID NO: 3092459 - DNA, 25 bp, Homo sapien
tactctaataacgtggctattctga

SEQ ID NO: 3092460 - DNA, 25 bp, Homo sapien
tggccatggaccagtagcagtctgt

SEQ ID NO: 3092461 - DNA, 25 bp, Homo sapien
gacccctggtctaaggagtcaacca

SEQ ID NO: 3092462 - DNA, 25 bp, Homo sapien
gcattggatactcataaagagcccg

SEQ ID NO: 3092463 - DNA, 25 bp, Homo sapien
aaatcagttgcaactcctccttggg

SEQ ID NO: 3092464 - DNA, 25 bp, Homo sapien
agaatgctgactctcggagtcccat

SEQ ID NO: 3092465 - DNA, 25 bp, Homo sapien
tcttgtgtaacattgactgatacat

SEQ ID NO: 3092466 - DNA, 25 bp, Homo sapien
tcttcatatgtacaccagtaactga

SEQ ID NO: 3092467 - DNA, 25 bp, Homo sapien
gctacaaagcctttctcccagaact

SEQ ID NO: 3092468 - DNA, 25 bp, Homo sapien
ttgaaaagctacaaagcctttctcc

SEQ ID NO: 3092469 - DNA, 25 bp, Homo sapien
gcagcttgaaaagctacaaagcctt

SEQ ID NO: 3092470 - DNA, 25 bp, Homo sapien
tctatgatagcagcattaatggcag

SEQ ID NO: 3092471 - DNA, 25 bp, Homo sapien
ttttcattcactgcttgacagtgag

SEQ ID NO: 3092472 - DNA, 25 bp, Homo sapien
ttttttcattcactgcttgacagtg

SEQ ID NO: 3092473 - DNA, 25 bp, Homo sapien
cattttttcattcactgcttgacag

SEQ ID NO: 3092474 - DNA, 25 bp, Homo sapien
tgaaccttcacacttcattttttca

SEQ ID NO: 3092475 - DNA, 25 bp, Homo sapien
tctctgtgctctttcatcatgggga

SEQ ID NO: 3092476 - DNA, 25 bp, Homo sapien
gcgtctattgaatagttcaaatcca

SEQ ID NO: 3092477 - DNA, 25 bp, Homo sapien
aatggtaggagaaggtatcagtaaa

SEQ ID NO: 3092478 - DNA, 25 bp, Homo sapien
gatgactctcactgcgtctattgaa

SEQ ID NO: 3092479 - DNA, 25 bp, Homo sapien
ggattcaggtgcaaatgcaataaca

SEQ ID NO: 3092480 - DNA, 25 bp, Homo sapien
gtcccagatccattgaagacatttg

SEQ ID NO: 3092481 - DNA, 25 bp, Homo sapien
cattaaaactatctacacgtcccag

SEQ ID NO: 3092482 - DNA, 25 bp, Homo sapien
tatctcttgggtagttttggattca

SEQ ID NO: 3092483 - DNA, 25 bp, Homo sapien
cagaaacagtaccagaagaaatgaa

SEQ ID NO: 3092484 - DNA, 25 bp, Homo sapien
gaaacagtaccagaagaaatgaaaa

SEQ ID NO: 3092485 - DNA, 25 bp, Homo sapien
agaaacagtaccagaagaaatgaaa

SEQ ID NO: 3092486 - DNA, 25 bp, Homo sapien
tggagaaaaataggtacagaaacag

SEQ ID NO: 3092487 - DNA, 25 bp, Homo sapien
acagttcttgcagagaagagcccat

SEQ ID NO: 3092488 - DNA, 25 bp, Homo sapien
caacaaggtctgtcttttcattctc

SEQ ID NO: 3092489 - DNA, 25 bp, Homo sapien
acaaggtctgtcttttcattctcca

SEQ ID NO: 3092490 - DNA, 25 bp, Homo sapien
agacagttcttgcagagaagagccc

SEQ ID NO: 3092491 - DNA, 25 bp, Homo sapien
ctgacccacgctcatgcgtctcttg

SEQ ID NO: 3092492 - DNA, 25 bp, Homo sapien
gtttgctgacccacgctcatgcgtc

SEQ ID NO: 3092493 - DNA, 25 bp, Homo sapien
tttgctgacccacgctcatgcgtct

SEQ ID NO: 3092494 - DNA, 25 bp, Homo sapien
ccacgctcatgcgtctcttgctcat

SEQ ID NO: 3092495 - DNA, 25 bp, Homo sapien
gaaaaaaaatgaagtacatgtgaag

SEQ ID NO: 3092496 - DNA, 25 bp, Homo sapien
aaaaaaatgaagtacatgtgaaggt

SEQ ID NO: 3092497 - DNA, 25 bp, Homo sapien
agaaaaaaaatgaagtacatgtgaa

SEQ ID NO: 3092498 - DNA, 25 bp, Homo sapien
aaaaaaaatgaagtacatgtgaagg

SEQ ID NO: 3092499 - DNA, 25 bp, Homo sapien
taatcatgccatcggagcaggctgt

SEQ ID NO: 3092500 - DNA, 25 bp, Homo sapien
gaaatcaagcggtgataaacctcag

SEQ ID NO: 3092501 - DNA, 25 bp, Homo sapien
tattgtgcccacgtgactactgttc

SEQ ID NO: 3092502 - DNA, 25 bp, Homo sapien
tttatgacgtgcctcatcagcagaa

SEQ ID NO: 3092503 - DNA, 25 bp, Homo sapien
gggtcactactacatcatgctttta

SEQ ID NO: 3092504 - DNA, 25 bp, Homo sapien
tccttttgggtcactactacatcat

SEQ ID NO: 3092505 - DNA, 25 bp, Homo sapien
aaaaatctagaaacacagttcatcc

SEQ ID NO: 3092506 - DNA, 25 bp, Homo sapien
tcagttcagctagcctgccaaaata

SEQ ID NO: 3092507 - DNA, 25 bp, Homo sapien
tgctctcaaagcctccaggcttgtc

SEQ ID NO: 3092508 - DNA, 25 bp, Homo sapien
ctgtgctctcaaagcctccaggctt

SEQ ID NO: 3092509 - DNA, 25 bp, Homo sapien
ctctcaaagcctccaggcttgtcat

SEQ ID NO: 3092510 - DNA, 25 bp, Homo sapien
tgtgctctcaaagcctccaggcttg

SEQ ID NO: 3092511 - DNA, 25 bp, Homo sapien
ttctactatccatgggcagggcagg

SEQ ID NO: 3092512 - DNA, 25 bp, Homo sapien
gcaagtaacttaccttggagcccca

SEQ ID NO: 3092513 - DNA, 25 bp, Homo sapien
gagggatgactcaccaaatgctaga

SEQ ID NO: 3092514 - DNA, 25 bp, Homo sapien
tctccacggctgtgtcaaaactaga

SEQ ID NO: 3092515 - DNA, 25 bp, Homo sapien
gatacacccgttagcatatttgaac

SEQ ID NO: 3092516 - DNA, 25 bp, Homo sapien
caggagaaacgcagtaacaggtgga

SEQ ID NO: 3092517 - DNA, 25 bp, Homo sapien
ggagaacgctgaacacgcaggagaa

SEQ ID NO: 3092518 - DNA, 25 bp, Homo sapien
aagacggtattggatcagatgggac

SEQ ID NO: 3092519 - DNA, 25 bp, Homo sapien
taacaggtggagtgctgcttttttg

SEQ ID NO: 3092520 - DNA, 25 bp, Homo sapien
aggtagccactagccccatgtgagt

SEQ ID NO: 3092521 - DNA, 25 bp, Homo sapien
cagccaagatcagcttacctggagc

SEQ ID NO: 3092522 - DNA, 25 bp, Homo sapien
tacctggagcagaaatcactagagc

SEQ ID NO: 3092523 - DNA, 25 bp, Homo sapien
caacatgtaaagagcgtggaagtca

SEQ ID NO: 3092524 - DNA, 25 bp, Homo sapien
ttttatagaaggacaatcactggtg

SEQ ID NO: 3092525 - DNA, 25 bp, Homo sapien
taaccaggtattgtgatttatcacc

SEQ ID NO: 3092526 - DNA, 25 bp, Homo sapien
tctctccttgacatggtgattcttt

SEQ ID NO: 3092527 - DNA, 25 bp, Homo sapien
gctcttgtgaagacctttttgtgga

SEQ ID NO: 3092528 - DNA, 25 bp, Homo sapien
ctccctcgtctgttagtcccctggg

SEQ ID NO: 3092529 - DNA, 25 bp, Homo sapien
aaatgatctagtcacccagatagtg

SEQ ID NO: 3092530 - DNA, 25 bp, Homo sapien
cattactacgattagaataatggct

SEQ ID NO: 3092531 - DNA, 25 bp, Homo sapien
gtgagtatagtaaacaatggttagt

SEQ ID NO: 3092532 - DNA, 25 bp, Homo sapien
tgtgattaacatatgaggtcatgtt

SEQ ID NO: 3092533 - DNA, 25 bp, Homo sapien
acagccttgctggtatctgctgttt

SEQ ID NO: 3092534 - DNA, 25 bp, Homo sapien
atactgctgtgattaacatatgagg

SEQ ID NO: 3092535 - DNA, 25 bp, Homo sapien
ccttgctggtatctgctgtttttta

SEQ ID NO: 3092536 - DNA, 25 bp, Homo sapien
aacagatggctattggtgtgtggct

SEQ ID NO: 3092537 - DNA, 25 bp, Homo sapien
catattgctagctaactatcctagg

SEQ ID NO: 3092538 - DNA, 25 bp, Homo sapien
ttcttgcatcattgctctggcaaga

SEQ ID NO: 3092539 - DNA, 25 bp, Homo sapien
ttatggttgtttcggccattcaggc

SEQ ID NO: 3092540 - DNA, 25 bp, Homo sapien
tctggaacttggtattggtctgcta

SEQ ID NO: 3092541 - DNA, 25 bp, Homo sapien
tagtttcagtaaaattgctcagctc

SEQ ID NO: 3092542 - DNA, 25 bp, Homo sapien
gagttacggagtagtccctcatctg

SEQ ID NO: 3092543 - DNA, 25 bp, Homo sapien
catctggtctgggtcttttcttggt

SEQ ID NO: 3092544 - DNA, 25 bp, Homo sapien
gttgtctatcgatcttgtttatctg

SEQ ID NO: 3092545 - DNA, 25 bp, Homo sapien
gttcttctagttccaccaggtgtta

SEQ ID NO: 3092546 - DNA, 25 bp, Homo sapien
accaggtgttatgttagagtgttaa

SEQ ID NO: 3092547 - DNA, 25 bp, Homo sapien
cctcaattttgttagttctgcactg

SEQ ID NO: 3092548 - DNA, 25 bp, Homo sapien
tgtgaagtagtcatgcaactcttgg

SEQ ID NO: 3092549 - DNA, 25 bp, Homo sapien
caactcttggctactgaatataccc

SEQ ID NO: 3092550 - DNA, 25 bp, Homo sapien
cctgttgtatcatgaactggtgtga

SEQ ID NO: 3092551 - DNA, 25 bp, Homo sapien
gcttgtctacttgtgtgtccaagga

SEQ ID NO: 3092552 - DNA, 25 bp, Homo sapien
aggtttgctatcacccctatgtttg

SEQ ID NO: 3092553 - DNA, 25 bp, Homo sapien
cacccctatgtttgagaggaagaat

SEQ ID NO: 3092554 - DNA, 25 bp, Homo sapien
ttttgtattgcctttatcacaggtt

SEQ ID NO: 3092555 - DNA, 25 bp, Homo sapien
catgagtttataggagatcaacaaa

SEQ ID NO: 3092556 - DNA, 25 bp, Homo sapien
taaggttcatctgaatgagggagga

SEQ ID NO: 3092557 - DNA, 25 bp, Homo sapien
tcatcaaaatttcctacttcctgtt

SEQ ID NO: 3092558 - DNA, 25 bp, Homo sapien
cattgttgtatcaatttcttcatca

SEQ ID NO: 3092559 - DNA, 25 bp, Homo sapien
gaggagtttccatctcattgttgta

SEQ ID NO: 3092560 - DNA, 25 bp, Homo sapien
tcttccaggttaaagttatgcttca

SEQ ID NO: 3092561 - DNA, 25 bp, Homo sapien
tattcttccaggttaaagttatgct

SEQ ID NO: 3092562 - DNA, 25 bp, Homo sapien
agaaaggctgtattcttccaggtta

SEQ ID NO: 3092563 - DNA, 25 bp, Homo sapien
tccagtgtgcactgagaaaggctgt

SEQ ID NO: 3092564 - DNA, 25 bp, Homo sapien
tgccacgggcagcttataggttaac

SEQ ID NO: 3092565 - DNA, 25 bp, Homo sapien
gcttataggttaacaaagaggaata

SEQ ID NO: 3092566 - DNA, 25 bp, Homo sapien
tagagggtaaacgtctgccacgggc

SEQ ID NO: 3092567 - DNA, 25 bp, Homo sapien
tctaatttgtgaaaggtctgtgata

SEQ ID NO: 3092568 - DNA, 25 bp, Homo sapien
tcagaatctcagtgtggaccaaagt

SEQ ID NO: 3092569 - DNA, 25 bp, Homo sapien
cacttgagacgtttccttcactttt

SEQ ID NO: 3092570 - DNA, 25 bp, Homo sapien
ggaccaaagtcacttgagacgtttc

SEQ ID NO: 3092571 - DNA, 25 bp, Homo sapien
tctagaatgtaatccttgccaagtt

SEQ ID NO: 3092572 - DNA, 25 bp, Homo sapien
aggaggacacctctctctgtgtttt

SEQ ID NO: 3092573 - DNA, 25 bp, Homo sapien
cacacggtcacacaaggcttccgcc

SEQ ID NO: 3092574 - DNA, 25 bp, Homo sapien
gtttttaacgactgcctggattgcc

SEQ ID NO: 3092575 - DNA, 25 bp, Homo sapien
gcctcagccaggttatgggtggtca

SEQ ID NO: 3092576 - DNA, 25 bp, Homo sapien
gggtctatgcccgtagatggttcat

SEQ ID NO: 3092577 - DNA, 25 bp, Homo sapien
ctgtggggtctatgcccgtagatgg

SEQ ID NO: 3092578 - DNA, 25 bp, Homo sapien
tggggtctatgcccgtagatggttc

SEQ ID NO: 3092579 - DNA, 25 bp, Homo sapien
gtctatgcccgtagatggttcatcc

SEQ ID NO: 3092580 - DNA, 25 bp, Homo sapien
caggaacattcagctgctcatgcag

SEQ ID NO: 3092581 - DNA, 25 bp, Homo sapien
cgtgattcctgctgttaatttctgc

SEQ ID NO: 3092582 - DNA, 25 bp, Homo sapien
ctttctcgtgattcctgctgttaat

SEQ ID NO: 3092583 - DNA, 25 bp, Homo sapien
catgcagtttgaaagcactcactaa

SEQ ID NO: 3092584 - DNA, 25 bp, Homo sapien
cattctgacacaaaggaatcgcagg

SEQ ID NO: 3092585 - DNA, 25 bp, Homo sapien
tcatcatcagtgctacagtctccct

SEQ ID NO: 3092586 - DNA, 25 bp, Homo sapien
ctctggaaaggtggagatagcatat

SEQ ID NO: 3092587 - DNA, 25 bp, Homo sapien
gatagcatattgactctcggttctt

SEQ ID NO: 3092588 - DNA, 25 bp, Homo sapien
gacggcagcatacacctccaggtgt

SEQ ID NO: 3092589 - DNA, 25 bp, Homo sapien
aactgaactgcagcctttcagttcc

SEQ ID NO: 3092590 - DNA, 25 bp, Homo sapien
aggtgttccctcaacgtcagcatgg

SEQ ID NO: 3092591 - DNA, 25 bp, Homo sapien
gatggcgagcctcgcgtccgctttc

SEQ ID NO: 3092592 - DNA, 25 bp, Homo sapien
tccagcaccattgggtcctagcaat

SEQ ID NO: 3092593 - DNA, 25 bp, Homo sapien
accattgggtcctagcaatcccaaa

SEQ ID NO: 3092594 - DNA, 25 bp, Homo sapien
gcaccattgggtcctagcaatccca

SEQ ID NO: 3092595 - DNA, 25 bp, Homo sapien
cagcaccattgggtcctagcaatcc

SEQ ID NO: 3092596 - DNA, 25 bp, Homo sapien
cacagaaagagatatttcttgctgc

SEQ ID NO: 3092597 - DNA, 25 bp, Homo sapien
acacagaaagagatatttcttgctg

SEQ ID NO: 3092598 - DNA, 25 bp, Homo sapien
gaacacagaaagagatatttcttgc

SEQ ID NO: 3092599 - DNA, 25 bp, Homo sapien
aacacagaaagagatatttcttgct

SEQ ID NO: 3092600 - DNA, 25 bp, Homo sapien
ctcatctaagattgaagtggtcaga

SEQ ID NO: 3092601 - DNA, 25 bp, Homo sapien
tcttcatctatgggttcttctggat

SEQ ID NO: 3092602 - DNA, 25 bp, Homo sapien
ttcatctatgggttcttctggattt

SEQ ID NO: 3092603 - DNA, 25 bp, Homo sapien
tcatctaagattgaagtggtcagag

SEQ ID NO: 3092604 - DNA, 25 bp, Homo sapien
agcatctctactttggggggaaatt

SEQ ID NO: 3092605 - DNA, 25 bp, Homo sapien
ttagcatctctactttggggggaaa

SEQ ID NO: 3092606 - DNA, 25 bp, Homo sapien
tagcatctctactttggggggaaat

SEQ ID NO: 3092607 - DNA, 25 bp, Homo sapien
cttagcatctctactttggggggaa

SEQ ID NO: 3092608 - DNA, 25 bp, Homo sapien
tctctaatgtgcaggtgatgatgtg

SEQ ID NO: 3092609 - DNA, 25 bp, Homo sapien
catgtggtattctagctgttaaaag

SEQ ID NO: 3092610 - DNA, 25 bp, Homo sapien
actgtcctcttctctaatgtgcagg

SEQ ID NO: 3092611 - DNA, 25 bp, Homo sapien
cattcctgtgattttactactgtcc

SEQ ID NO: 3092612 - DNA, 25 bp, Homo sapien
gatgcacaattatctcagacgagag

SEQ ID NO: 3092613 - DNA, 25 bp, Homo sapien
tatgttgctaaatcgattccttccc

SEQ ID NO: 3092614 - DNA, 25 bp, Homo sapien
tgacaatcaacatgtgcttccactg

SEQ ID NO: 3092615 - DNA, 25 bp, Homo sapien
tctcttggcagtaaggcagcaatcc

SEQ ID NO: 3092616 - DNA, 25 bp, Homo sapien
aaacaggatcttttcgcattctttt

SEQ ID NO: 3092617 - DNA, 25 bp, Homo sapien
acaggatcttttcgcattcttttct

SEQ ID NO: 3092618 - DNA, 25 bp, Homo sapien
gaaaacaggatcttttcgcattctt

SEQ ID NO: 3092619 - DNA, 25 bp, Homo sapien
ctgaaaacaggatcttttcgcattc

SEQ ID NO: 3092620 - DNA, 25 bp, Homo sapien
cttagaacaaaaacgaatagcaaag

SEQ ID NO: 3092621 - DNA, 25 bp, Homo sapien
aacaaaaacgaatagcaaagtctga

SEQ ID NO: 3092622 - DNA, 25 bp, Homo sapien
gcatcttagaacaaaaacgaatagc

SEQ ID NO: 3092623 - DNA, 25 bp, Homo sapien
tagaacaaaaacgaatagcaaagtc

SEQ ID NO: 3092624 - DNA, 25 bp, Homo sapien
gtggatcattctcataagctggggg

SEQ ID NO: 3092625 - DNA, 25 bp, Homo sapien
ttgtctttgggtaaatagttgtgga

SEQ ID NO: 3092626 - DNA, 25 bp, Homo sapien
tgaattaagttggtggtgttttgtc

SEQ ID NO: 3092627 - DNA, 25 bp, Homo sapien
ttgggtaaatagttgtggatcattc

SEQ ID NO: 3092628 - DNA, 25 bp, Homo sapien
ctggaaattctctgtagtgctcctg

SEQ ID NO: 3092629 - DNA, 25 bp, Homo sapien
agaaaatcagtggcactcaattcaa

SEQ ID NO: 3092630 - DNA, 25 bp, Homo sapien
aaatcagtggcactcaattcaaaat

SEQ ID NO: 3092631 - DNA, 25 bp, Homo sapien
tctggaaattctctgtagtgctcct

SEQ ID NO: 3092632 - DNA, 25 bp, Homo sapien
tttcccccaatctggcattacccat

SEQ ID NO: 3092633 - DNA, 25 bp, Homo sapien
ttttcccccaatctggcattaccca

SEQ ID NO: 3092634 - DNA, 25 bp, Homo sapien
gaaggaaccaataccatggtggtaa

SEQ ID NO: 3092635 - DNA, 25 bp, Homo sapien
taccatggtggtaatcaatatactt

SEQ ID NO: 3092636 - DNA, 25 bp, Homo sapien
gttttaaatccaagcaaggtatatg

SEQ ID NO: 3092637 - DNA, 25 bp, Homo sapien
ccaagcaaggtatatgaaggaacca

SEQ ID NO: 3092638 - DNA, 25 bp, Homo sapien
caagagaggagtctaaactttgaca

SEQ ID NO: 3092639 - DNA, 25 bp, Homo sapien
tagctgactcctcttattctaccag

SEQ ID NO: 3092640 - DNA, 25 bp, Homo sapien
taagatgtgctactatacctccacc

SEQ ID NO: 3092641 - DNA, 25 bp, Homo sapien
cagaactccgtgtgctaagatgtgc

SEQ ID NO: 3092642 - DNA, 25 bp, Homo sapien
taaggtgagcctaatgttctttctg

SEQ ID NO: 3092643 - DNA, 25 bp, Homo sapien
tacttccactggattgtgctgatgg

SEQ ID NO: 3092644 - DNA, 25 bp, Homo sapien
gccagtttttccgagtaaggtgagc

SEQ ID NO: 3092645 - DNA, 25 bp, Homo sapien
gagatatagttatagacactgtttg

SEQ ID NO: 3092646 - DNA, 25 bp, Homo sapien
gaagctgcataaccaggagtaacta

SEQ ID NO: 3092647 - DNA, 25 bp, Homo sapien
ctgcataaccaggagtaactataac

SEQ ID NO: 3092648 - DNA, 25 bp, Homo sapien
caagagaagctgcataaccaggagt

SEQ ID NO: 3092649 - DNA, 25 bp, Homo sapien
gacaagagaagctgcataaccagga

SEQ ID NO: 3092650 - DNA, 25 bp, Homo sapien
agcaaacacaatttggcttgtaata

SEQ ID NO: 3092651 - DNA, 25 bp, Homo sapien
ggcttgtaataagaaggtactgcat

SEQ ID NO: 3092652 - DNA, 25 bp, Homo sapien
aaacacaatttggcttgtaataaga

SEQ ID NO: 3092653 - DNA, 25 bp, Homo sapien
gcaaacacaatttggcttgtaataa

SEQ ID NO: 3092654 - DNA, 25 bp, Homo sapien
agaagctgacgtccactagtgcctg

SEQ ID NO: 3092655 - DNA, 25 bp, Homo sapien
gaagaagctgacgtccactagtgcc

SEQ ID NO: 3092656 - DNA, 25 bp, Homo sapien
aagctgacgtccactagtgcctgcc

SEQ ID NO: 3092657 - DNA, 25 bp, Homo sapien
aaatgaagaagctgacgtccactag

SEQ ID NO: 3092658 - DNA, 25 bp, Homo sapien
gcagaagtgtagaggcctgaaatcc

SEQ ID NO: 3092659 - DNA, 25 bp, Homo sapien
aagtgtagaggcctgaaatccatag

SEQ ID NO: 3092660 - DNA, 25 bp, Homo sapien
aagcagaagtgtagaggcctgaaat

SEQ ID NO: 3092661 - DNA, 25 bp, Homo sapien
cagtaagcagaagtgtagaggcctg

SEQ ID NO: 3092662 - DNA, 25 bp, Homo sapien
gaaccatccggcaacccagtccaga

SEQ ID NO: 3092663 - DNA, 25 bp, Homo sapien
ggaaccatccggcaacccagtccag

SEQ ID NO: 3092664 - DNA, 25 bp, Homo sapien
aaccatccggcaacccagtccagag

SEQ ID NO: 3092665 - DNA, 25 bp, Homo sapien
aggaaccatccggcaacccagtcca

SEQ ID NO: 3092666 - DNA, 25 bp, Homo sapien
caatggatactattcaaccttaaaa

SEQ ID NO: 3092667 - DNA, 25 bp, Homo sapien
tatacaaacaatggatactattcaa

SEQ ID NO: 3092668 - DNA, 25 bp, Homo sapien
tatatacaaacaatggatactattc

SEQ ID NO: 3092669 - DNA, 25 bp, Homo sapien
gtatatacaaacaatggatactatt

SEQ ID NO: 3092670 - DNA, 25 bp, Homo sapien
ccctcgagtcatcctgtgcagcaga

SEQ ID NO: 3092671 - DNA, 25 bp, Homo sapien
gacaccccttccctcgagtcatcct

SEQ ID NO: 3092672 - DNA, 25 bp, Homo sapien
tcgttccaaagaggaagggtaatca

SEQ ID NO: 3092673 - DNA, 25 bp, Homo sapien
ccttccctcgagtcatcctgtgcag

SEQ ID NO: 3092674 - DNA, 25 bp, Homo sapien
aacagtgcaatctcttggtattaca

SEQ ID NO: 3092675 - DNA, 25 bp, Homo sapien
tgggcttgactcaattcgaatatgt

SEQ ID NO: 3092676 - DNA, 25 bp, Homo sapien
tgaagtagcccattgctgataatat

SEQ ID NO: 3092677 - DNA, 25 bp, Homo sapien
tgtgattaaacatttgaagtagccc

SEQ ID NO: 3092678 - DNA, 25 bp, Homo sapien
cttttgtttaccagaaactatgata

SEQ ID NO: 3092679 - DNA, 25 bp, Homo sapien
tatgagaggccatcagtaccatttc

SEQ ID NO: 3092680 - DNA, 25 bp, Homo sapien
gtttaccagaaactatgatagctcc

SEQ ID NO: 3092681 - DNA, 25 bp, Homo sapien
gtatgagaggccatcagtaccattt

SEQ ID NO: 3092682 - DNA, 25 bp, Homo sapien
ggcctgaatcgcaaatccatgggaa

SEQ ID NO: 3092683 - DNA, 25 bp, Homo sapien
tccacagtcacttgaggtgcaatgc

SEQ ID NO: 3092684 - DNA, 25 bp, Homo sapien
gctgctgtgtaacaaagggatctca

SEQ ID NO: 3092685 - DNA, 25 bp, Homo sapien
gatctcaaaatagaacgggtgtgcc

SEQ ID NO: 3092686 - DNA, 25 bp, Homo sapien
ctgtgttattgatgatcaacaggct

SEQ ID NO: 3092687 - DNA, 25 bp, Homo sapien
tcaacaggctggtacggggttcctg

SEQ ID NO: 3092688 - DNA, 25 bp, Homo sapien
tcaaagggaatattgcgattccaaa

SEQ ID NO: 3092689 - DNA, 25 bp, Homo sapien
tcccaatcgatcttttcatttaaca

SEQ ID NO: 3092690 - DNA, 25 bp, Homo sapien
tcgagtgtgaacatacaggtattcc

SEQ ID NO: 3092691 - DNA, 25 bp, Homo sapien
aatgctgaatttatccaccccgtgg

SEQ ID NO: 3092692 - DNA, 25 bp, Homo sapien
tatttgttgagtgccaagcctgcct

SEQ ID NO: 3092693 - DNA, 25 bp, Homo sapien
tagcatgctacacagtaccagaagg

SEQ ID NO: 3092694 - DNA, 25 bp, Homo sapien
cggagccgtgccatggcaaagactt

SEQ ID NO: 3092695 - DNA, 25 bp, Homo sapien
ctttaagaaacggagccgtgccatg

SEQ ID NO: 3092696 - DNA, 25 bp, Homo sapien
ttaagaaacggagccgtgccatggc

SEQ ID NO: 3092697 - DNA, 25 bp, Homo sapien
aaacggagccgtgccatggcaaaga

SEQ ID NO: 3092698 - DNA, 25 bp, Homo sapien
ctttctgagtctcttatcatctcca

SEQ ID NO: 3092699 - DNA, 25 bp, Homo sapien
ggaagagtgagccagctccatttca

SEQ ID NO: 3092700 - DNA, 25 bp, Homo sapien
tctgagtctcttatcatctccactt

SEQ ID NO: 3092701 - DNA, 25 bp, Homo sapien
tgagtctcttatcatctccacttgt

SEQ ID NO: 3092702 - DNA, 25 bp, Homo sapien
tcataacctgtcactccctggtcag

SEQ ID NO: 3092703 - DNA, 25 bp, Homo sapien
aagacttcatttagagttgacatgg

SEQ ID NO: 3092704 - DNA, 25 bp, Homo sapien
gttcgatagttgactgtccttccag

SEQ ID NO: 3092705 - DNA, 25 bp, Homo sapien
tgacatggaaatgtcataacctgtc

SEQ ID NO: 3092706 - DNA, 25 bp, Homo sapien
aaagtcaataacacaacctctgagg

SEQ ID NO: 3092707 - DNA, 25 bp, Homo sapien
tatataaacctcagccagacaccag

SEQ ID NO: 3092708 - DNA, 25 bp, Homo sapien
gtgtttccctatgacccgcacatgg

SEQ ID NO: 3092709 - DNA, 25 bp, Homo sapien
tatctagttagatgtaggctccatg

SEQ ID NO: 3092710 - DNA, 25 bp, Homo sapien
taagcatgccattagacagcagagg

SEQ ID NO: 3092711 - DNA, 25 bp, Homo sapien
tctggtgacaaaacgctgagcccac

SEQ ID NO: 3092712 - DNA, 25 bp, Homo sapien
tacaaggacatagagagctgccaca

SEQ ID NO: 3092713 - DNA, 25 bp, Homo sapien
cagaaatgttttccgatcgatggca

SEQ ID NO: 3092714 - DNA, 25 bp, Homo sapien
tttttaatttagcatcggggatgtg

SEQ ID NO: 3092715 - DNA, 25 bp, Homo sapien
catcggggatgtgatgagtaatgaa

SEQ ID NO: 3092716 - DNA, 25 bp, Homo sapien
ttaatttagcatcggggatgtgatg

SEQ ID NO: 3092717 - DNA, 25 bp, Homo sapien
tttagcatcggggatgtgatgagta

SEQ ID NO: 3092718 - DNA, 25 bp, Homo sapien
gggttacatatttcattcctatgta

SEQ ID NO: 3092719 - DNA, 25 bp, Homo sapien
gttacatatttcattcctatgtaaa

SEQ ID NO: 3092720 - DNA, 25 bp, Homo sapien
ctgggttacatatttcattcctatg

SEQ ID NO: 3092721 - DNA, 25 bp, Homo sapien
tgggttacatatttcattcctatgt

SEQ ID NO: 3092722 - DNA, 25 bp, Homo sapien
gaacacctagctgttgagcacaact

SEQ ID NO: 3092723 - DNA, 25 bp, Homo sapien
tccagtatggtagagatgaagcacg

SEQ ID NO: 3092724 - DNA, 25 bp, Homo sapien
gaacagctacctagaaaagtggcac

SEQ ID NO: 3092725 - DNA, 25 bp, Homo sapien
gaagcacgaggccagttctgtttca

SEQ ID NO: 3092726 - DNA, 25 bp, Homo sapien
ttcaaaaacatagaagaacctgcac

SEQ ID NO: 3092727 - DNA, 25 bp, Homo sapien
tacaaccagaaaggaattccacagt

SEQ ID NO: 3092728 - DNA, 25 bp, Homo sapien
caattgcatcatggtaacactgaga

SEQ ID NO: 3092729 - DNA, 25 bp, Homo sapien
taaagaaagacgaggagccaaggct

SEQ ID NO: 3092730 - DNA, 25 bp, Homo sapien
cagtggaactagactcctgtcgtcc

SEQ ID NO: 3092731 - DNA, 25 bp, Homo sapien
cttgatctctggaaaagggatccaa

SEQ ID NO: 3092732 - DNA, 25 bp, Homo sapien
agtagttggttcatctaaaagcaaa

SEQ ID NO: 3092733 - DNA, 25 bp, Homo sapien
ggatcacatgatctgctctacgctc

SEQ ID NO: 3092734 - DNA, 25 bp, Homo sapien
tgatctgctctacgctctctcagga

SEQ ID NO: 3092735 - DNA, 25 bp, Homo sapien
gcattacaatgaaagctctaccact

SEQ ID NO: 3092736 - DNA, 25 bp, Homo sapien
ttgcagacattcgacctgcttcctt

SEQ ID NO: 3092737 - DNA, 25 bp, Homo sapien
acattaactgtatccagaagatagc

SEQ ID NO: 3092738 - DNA, 25 bp, Homo sapien
taataaccatccagccatttttctc

SEQ ID NO: 3092739 - DNA, 25 bp, Homo sapien
ccaattccaataatattcgttgtac

SEQ ID NO: 3092740 - DNA, 25 bp, Homo sapien
tgtttagcaaggttatcttgaatgt

SEQ ID NO: 3092741 - DNA, 25 bp, Homo sapien
cttaaatgtttagcaaggttatctt

SEQ ID NO: 3092742 - DNA, 25 bp, Homo sapien
catgtccaattccaataatattcgt

SEQ ID NO: 3092743 - DNA, 25 bp, Homo sapien
ggttttccttcacggtgagtatgtc

SEQ ID NO: 3092744 - DNA, 25 bp, Homo sapien
cacggtgagtatgtcaaattgaaca

SEQ ID NO: 3092745 - DNA, 25 bp, Homo sapien
ggacagacgccagttatctttctga

SEQ ID NO: 3092746 - DNA, 25 bp, Homo sapien
gaacattgaattgaggacagacgcc

SEQ ID NO: 3092747 - DNA, 25 bp, Homo sapien
ggattgccgtgatttgaccttcata

SEQ ID NO: 3092748 - DNA, 25 bp, Homo sapien
tgaagatttgccagctccactgtga

SEQ ID NO: 3092749 - DNA, 25 bp, Homo sapien
tctgttggaacagacaatccattaa

SEQ ID NO: 3092750 - DNA, 25 bp, Homo sapien
gaccttcatatatgtcaaagagcaa

SEQ ID NO: 3092751 - DNA, 25 bp, Homo sapien
tgtattagaaagatggtttatttaa

SEQ ID NO: 3092752 - DNA, 25 bp, Homo sapien
gaggctaagggattgcaacttcttc

SEQ ID NO: 3092753 - DNA, 25 bp, Homo sapien
tccagaaactaactccatgaggaag

SEQ ID NO: 3092754 - DNA, 25 bp, Homo sapien
tgatttcccaaagagcagctatact

SEQ ID NO: 3092755 - DNA, 25 bp, Homo sapien
caaaggtgttgcagatgtgctccag

SEQ ID NO: 3092756 - DNA, 25 bp, Homo sapien
ctttcaatgcttccacttttccaga

SEQ ID NO: 3092757 - DNA, 25 bp, Homo sapien
tatattccttcttaacatttctgat

SEQ ID NO: 3092758 - DNA, 25 bp, Homo sapien
tccagattttcctttatattccttc

SEQ ID NO: 3092759 - DNA, 25 bp, Homo sapien
tttcaatgcttccacttttccagat

SEQ ID NO: 3092760 - DNA, 25 bp, Homo sapien
gaaacttaagtacagtctgatacca

SEQ ID NO: 3092761 - DNA, 25 bp, Homo sapien
tcactatgaatacaccccaaaaagc

SEQ ID NO: 3092762 - DNA, 25 bp, Homo sapien
tatgtgtcaggatcaccaaaccacc

SEQ ID NO: 3092763 - DNA, 25 bp, Homo sapien
acatcttttggcatcctcggcctca

SEQ ID NO: 3092764 - DNA, 25 bp, Homo sapien
gatgctcagcatcgatttctttctc

SEQ ID NO: 3092765 - DNA, 25 bp, Homo sapien
tcagagggatgctcagcatcgattt

SEQ ID NO: 3092766 - DNA, 25 bp, Homo sapien
gaattcaggagctactggttcaaaa

SEQ ID NO: 3092767 - DNA, 25 bp, Homo sapien
ttggaattcaggagctactggttca

SEQ ID NO: 3092768 - DNA, 25 bp, Homo sapien
aggagaataatggcgctcatctcca

SEQ ID NO: 3092769 - DNA, 25 bp, Homo sapien
ggagaataatggcgctcatctccat

SEQ ID NO: 3092770 - DNA, 25 bp, Homo sapien
gaaagacaggaatatatacaagtaa

SEQ ID NO: 3092771 - DNA, 25 bp, Homo sapien
caaccttaaatagtggaaggaacat

SEQ ID NO: 3092772 - DNA, 25 bp, Homo sapien
aacaagaagattgtgccagaaaaaa

SEQ ID NO: 3092773 - DNA, 25 bp, Homo sapien
tattaagggccttcacatatcaacc

SEQ ID NO: 3092774 - DNA, 25 bp, Homo sapien
gataatttaactgggcgatcaatat

SEQ ID NO: 3092775 - DNA, 25 bp, Homo sapien
gtttgcaagataatttaactgggcg

SEQ ID NO: 3092776 - DNA, 25 bp, Homo sapien
atttaactgggcgatcaatatactt

SEQ ID NO: 3092777 - DNA, 25 bp, Homo sapien
caagataatttaactgggcgatcaa

SEQ ID NO: 3092778 - DNA, 25 bp, Homo sapien
gaatgatgctgaacaaatattcatg

SEQ ID NO: 3092779 - DNA, 25 bp, Homo sapien
gatgctgaacaaatattcatgagaa

SEQ ID NO: 3092780 - DNA, 25 bp, Homo sapien
caaatattcatgagaaagctcttcc

SEQ ID NO: 3092781 - DNA, 25 bp, Homo sapien
gaacaaatattcatgagaaagctct

SEQ ID NO: 3092782 - DNA, 25 bp, Homo sapien
tatatgagtctcctgaagggtcagg

SEQ ID NO: 3092783 - DNA, 25 bp, Homo sapien
ttgtcaaagtataatgccaatagca

SEQ ID NO: 3092784 - DNA, 25 bp, Homo sapien
tgagaccatccaaaagcaacataga

SEQ ID NO: 3092785 - DNA, 25 bp, Homo sapien
caatagcaagtagatgagaccatcc

SEQ ID NO: 3092786 - DNA, 25 bp, Homo sapien
taaaagtaaatatttgtatatagga

SEQ ID NO: 3092787 - DNA, 25 bp, Homo sapien
tcaaaatgaaaatatatctgagcgg

SEQ ID NO: 3092788 - DNA, 25 bp, Homo sapien
tatgttaaatgaatagtaataaaag

SEQ ID NO: 3092789 - DNA, 25 bp, Homo sapien
cattatgttaaatgaatagtaataa

SEQ ID NO: 3092790 - DNA, 25 bp, Homo sapien
gctcttagtttgagtagtgctgatc

SEQ ID NO: 3092791 - DNA, 25 bp, Homo sapien
tcctacagcgtatgaagtatctact

SEQ ID NO: 3092792 - DNA, 25 bp, Homo sapien
tagtgctgatcctacagcgtatgaa

SEQ ID NO: 3092793 - DNA, 25 bp, Homo sapien
tttgagtagtgctgatcctacagcg

SEQ ID NO: 3092794 - DNA, 25 bp, Homo sapien
ctgaatcattccagtagtaaaggca

SEQ ID NO: 3092795 - DNA, 25 bp, Homo sapien
cagtagtaaaggcaaaagggctaca

SEQ ID NO: 3092796 - DNA, 25 bp, Homo sapien
aatcattccagtagtaaaggcaaaa

SEQ ID NO: 3092797 - DNA, 25 bp, Homo sapien
gcaaaagggctacaaatattcaaaa

SEQ ID NO: 3092798 - DNA, 25 bp, Homo sapien
ggaagttgttcataaaatacagtga

SEQ ID NO: 3092799 - DNA, 25 bp, Homo sapien
aaacacaaccaaattggtgaggaca

SEQ ID NO: 3092800 - DNA, 25 bp, Homo sapien
tgaaggaagttgttcataaaataca

SEQ ID NO: 3092801 - DNA, 25 bp, Homo sapien
acaaccaaattggtgaggacagctt

SEQ ID NO: 3092802 - DNA, 25 bp, Homo sapien
cagagcggagtgaaacgagaagtaa

SEQ ID NO: 3092803 - DNA, 25 bp, Homo sapien
ggagcatctacatactttctgcaga

SEQ ID NO: 3092804 - DNA, 25 bp, Homo sapien
catgaaagtagtgattgcagtaacc

SEQ ID NO: 3092805 - DNA, 25 bp, Homo sapien
gatattgtgatcagctaccatgtga

SEQ ID NO: 3092806 - DNA, 25 bp, Homo sapien
tgataattgtaacgaatatggaaat

SEQ ID NO: 3092807 - DNA, 25 bp, Homo sapien
cagtcatgactataatttgggtgaa

SEQ ID NO: 3092808 - DNA, 25 bp, Homo sapien
tgaagccagcatagattagacccca

SEQ ID NO: 3092809 - DNA, 25 bp, Homo sapien
catgaagccagtcatgactataatt

SEQ ID NO: 3092810 - DNA, 25 bp, Homo sapien
aagacaaaaagttatataaattatg

SEQ ID NO: 3092811 - DNA, 25 bp, Homo sapien
atttaatatatacaaaagcatctaa

SEQ ID NO: 3092812 - DNA, 25 bp, Homo sapien
aaatatttaatatatacaaaagcat

SEQ ID NO: 3092813 - DNA, 25 bp, Homo sapien
atatttaatatatacaaaagcatct

SEQ ID NO: 3092814 - DNA, 25 bp, Homo sapien
aagaccaggcgagaaaacaagctgc

SEQ ID NO: 3092815 - DNA, 25 bp, Homo sapien
ggattatactctcttcaacatgaga

SEQ ID NO: 3092816 - DNA, 25 bp, Homo sapien
aaatctatgccttgtggccaaaccc

SEQ ID NO: 3092817 - DNA, 25 bp, Homo sapien
tccatctcacattgggcaattctct

SEQ ID NO: 3092818 - DNA, 25 bp, Homo sapien
tagcagtaactgacatcaactcctc

SEQ ID NO: 3092819 - DNA, 25 bp, Homo sapien
atgctgaatcttggagacccatcat

SEQ ID NO: 3092820 - DNA, 25 bp, Homo sapien
actcctccatcacagggtgattggt

SEQ ID NO: 3092821 - DNA, 25 bp, Homo sapien
tttagttatgaaaggtaatgtcttc

SEQ ID NO: 3092822 - DNA, 25 bp, Homo sapien
caagatgttcccagtaaaggcaact

SEQ ID NO: 3092823 - DNA, 25 bp, Homo sapien
agtggcccctcctaaattcttgttg

SEQ ID NO: 3092824 - DNA, 25 bp, Homo sapien
tgcaacttaattcccattgtgatgg

SEQ ID NO: 3092825 - DNA, 25 bp, Homo sapien
actggtgaactatgagtaagctctg

SEQ ID NO: 3092826 - DNA, 25 bp, Homo sapien
ttaatagctgtttgtaaagccacaa

SEQ ID NO: 3092827 - DNA, 25 bp, Homo sapien
ttctataatggcagtattaatagct

SEQ ID NO: 3092828 - DNA, 25 bp, Homo sapien
tctataatggcagtattaatagctg

SEQ ID NO: 3092829 - DNA, 25 bp, Homo sapien
atagctgtttgtaaagccacaaatc

SEQ ID NO: 3092830 - DNA, 25 bp, Homo sapien
ggtcaatgtacatgaaaactcacca

SEQ ID NO: 3092831 - DNA, 25 bp, Homo sapien
tcaccatatccatcccagcaatgag

SEQ ID NO: 3092832 - DNA, 25 bp, Homo sapien
ctattccagtatttggtcaatgtac

SEQ ID NO: 3092833 - DNA, 25 bp, Homo sapien
tgtacatgaaaactcaccatatcca

SEQ ID NO: 3092834 - DNA, 25 bp, Homo sapien
ggcacaggccacgttgtctagctaa

SEQ ID NO: 3092835 - DNA, 25 bp, Homo sapien
ataggcacaggccacgttgtctagc

SEQ ID NO: 3092836 - DNA, 25 bp, Homo sapien
cacaggccacgttgtctagctaatt

SEQ ID NO: 3092837 - DNA, 25 bp, Homo sapien
taggcacaggccacgttgtctagct

SEQ ID NO: 3092838 - DNA, 25 bp, Homo sapien
cctgtagtaggaacatacgattgac

SEQ ID NO: 3092839 - DNA, 25 bp, Homo sapien
taggtttacaagatgccacaggagg

SEQ ID NO: 3092840 - DNA, 25 bp, Homo sapien
tattccccgggctatatctggagtg

SEQ ID NO: 3092841 - DNA, 25 bp, Homo sapien
taggaacccctggtctaagtgccca

SEQ ID NO: 3092842 - DNA, 25 bp, Homo sapien
aatgatatttgatatggaaagtcac

SEQ ID NO: 3092843 - DNA, 25 bp, Homo sapien
ccataatgatatttgatatggaaag

SEQ ID NO: 3092844 - DNA, 25 bp, Homo sapien
tcatgtgtcattgaaagcatctctg

SEQ ID NO: 3092845 - DNA, 25 bp, Homo sapien
gtgtcattgaaagcatctctgttgc

SEQ ID NO: 3092846 - DNA, 25 bp, Homo sapien
tatttggtgccccaatgacacttgt

SEQ ID NO: 3092847 - DNA, 25 bp, Homo sapien
cagaagtatttcgtccatgtgtgtt

SEQ ID NO: 3092848 - DNA, 25 bp, Homo sapien
caaagtggactgttatatccctgga

SEQ ID NO: 3092849 - DNA, 25 bp, Homo sapien
ttaaagatgattcccatagcatatg

SEQ ID NO: 3092850 - DNA, 25 bp, Homo sapien
tcattatctgctgggttaaattaga

SEQ ID NO: 3092851 - DNA, 25 bp, Homo sapien
gtgtatacacaaccattaaagaaga

SEQ ID NO: 3092852 - DNA, 25 bp, Homo sapien
aaagaggagcaagtgctgttttatt

SEQ ID NO: 3092853 - DNA, 25 bp, Homo sapien
aattagatattggtgtatacacaac

SEQ ID NO: 3092854 - DNA, 25 bp, Homo sapien
aggaaactggacatttctcatggaa

SEQ ID NO: 3092855 - DNA, 25 bp, Homo sapien
caggaaactggacatttctcatgga

SEQ ID NO: 3092856 - DNA, 25 bp, Homo sapien
ccaggaaactggacatttctcatgg

SEQ ID NO: 3092857 - DNA, 25 bp, Homo sapien
tccaggaaactggacatttctcatg

SEQ ID NO: 3092858 - DNA, 25 bp, Homo sapien
cacagtcctagaagtattgagaggc

SEQ ID NO: 3092859 - DNA, 25 bp, Homo sapien
aacagagcaatacacagtcctagaa

SEQ ID NO: 3092860 - DNA, 25 bp, Homo sapien
tggaaaacagagcaatacacagtcc

SEQ ID NO: 3092861 - DNA, 25 bp, Homo sapien
tcctagaagtattgagaggccccat

SEQ ID NO: 3092862 - DNA, 25 bp, Homo sapien
gctttggtttgctgatacacgcttt

SEQ ID NO: 3092863 - DNA, 25 bp, Homo sapien
ctttggtttgctgatacacgctttt

SEQ ID NO: 3092864 - DNA, 25 bp, Homo sapien
tttggtttgctgatacacgcttttc

SEQ ID NO: 3092865 - DNA, 25 bp, Homo sapien
tgctttggtttgctgatacacgctt

SEQ ID NO: 3092866 - DNA, 25 bp, Homo sapien
tgaaggagaaagtaatcatggtgga

SEQ ID NO: 3092867 - DNA, 25 bp, Homo sapien
ttagcctattcgctgaaggagaaag

SEQ ID NO: 3092868 - DNA, 25 bp, Homo sapien
cgctgaaggagaaagtaatcatggt

SEQ ID NO: 3092869 - DNA, 25 bp, Homo sapien
tattcgctgaaggagaaagtaatca

SEQ ID NO: 3092870 - DNA, 25 bp, Homo sapien
tagccagaccaagctgtacatgatg

SEQ ID NO: 3092871 - DNA, 25 bp, Homo sapien
aaagcactctagaaacactgtcaaa

SEQ ID NO: 3092872 - DNA, 25 bp, Homo sapien
taaatgggtgcctactccagcagct

SEQ ID NO: 3092873 - DNA, 25 bp, Homo sapien
cagcagctcttacacagcctggttt

SEQ ID NO: 3092874 - DNA, 25 bp, Homo sapien
cattgtttcttgtgtatgctttctt

SEQ ID NO: 3092875 - DNA, 25 bp, Homo sapien
cttgacctgtttcctcttacttatt

SEQ ID NO: 3092876 - DNA, 25 bp, Homo sapien
tccagagggtttataggactgtccg

SEQ ID NO: 3092877 - DNA, 25 bp, Homo sapien
tagatcgcccatagaaaatgaaacc

SEQ ID NO: 3092878 - DNA, 25 bp, Homo sapien
gactgtccggtgctaaaaacagact

SEQ ID NO: 3092879 - DNA, 25 bp, Homo sapien
tagtgtaaacactctggagccaaac

SEQ ID NO: 3092880 - DNA, 25 bp, Homo sapien
gaaagtcagcaactgcatgtcagct

SEQ ID NO: 3092881 - DNA, 25 bp, Homo sapien
taacacaatcctgctaaattttctg

SEQ ID NO: 3092882 - DNA, 25 bp, Homo sapien
ttccatcaggcctatcttcttaccg

SEQ ID NO: 3092883 - DNA, 25 bp, Homo sapien
caatgtttcatattgctctgctgca

SEQ ID NO: 3092884 - DNA, 25 bp, Homo sapien
gacacttttaggctgactttttcag

SEQ ID NO: 3092885 - DNA, 25 bp, Homo sapien
tgacgtcctatcttcccaggtgttt

SEQ ID NO: 3092886 - DNA, 25 bp, Homo sapien
gcatccagtgaggcctcacactgct

SEQ ID NO: 3092887 - DNA, 25 bp, Homo sapien
aagaagcgtggtgccaatatctgca

SEQ ID NO: 3092888 - DNA, 25 bp, Homo sapien
tgataataaccgataaccaacctaa

SEQ ID NO: 3092889 - DNA, 25 bp, Homo sapien
taaacttgcatataacccgaacgta

SEQ ID NO: 3092890 - DNA, 25 bp, Homo sapien
catttgaagttcaggctaaaaacct

SEQ ID NO: 3092891 - DNA, 25 bp, Homo sapien
cagtttatcagaccttcttatagtc

SEQ ID NO: 3092892 - DNA, 25 bp, Homo sapien
ctaacaatgtagtaggacctaaaat

SEQ ID NO: 3092893 - DNA, 25 bp, Homo sapien
gaaactaacaatgtagtaggaccta

SEQ ID NO: 3092894 - DNA, 25 bp, Homo sapien
agtttccattcaactgttgtatcaa

SEQ ID NO: 3092895 - DNA, 25 bp, Homo sapien
gaagtttccattcaactgttgtatc

SEQ ID NO: 3092896 - DNA, 25 bp, Homo sapien
aagtttccattcaactgttgtatca

SEQ ID NO: 3092897 - DNA, 25 bp, Homo sapien
cctgagagaggctgtattcctccag

SEQ ID NO: 3092898 - DNA, 25 bp, Homo sapien
tattcctccaggttgaaggtctgtt

SEQ ID NO: 3092899 - DNA, 25 bp, Homo sapien
tgtattcctccaggttgaaggtctg

SEQ ID NO: 3092900 - DNA, 25 bp, Homo sapien
tgctccaaggtagcctgagagaggc

SEQ ID NO: 3092901 - DNA, 25 bp, Homo sapien
taacttgaaaaaggcccgagataga

SEQ ID NO: 3092902 - DNA, 25 bp, Homo sapien
ctctaacttgaaaaaggcccgagat

SEQ ID NO: 3092903 - DNA, 25 bp, Homo sapien
tctaacttgaaaaaggcccgagata

SEQ ID NO: 3092904 - DNA, 25 bp, Homo sapien
cttgaaaaaggcccgagatagaggg

SEQ ID NO: 3092905 - DNA, 25 bp, Homo sapien
cacttggatatctctttacacatca

SEQ ID NO: 3092906 - DNA, 25 bp, Homo sapien
tatctctttacacatcaactacatg

SEQ ID NO: 3092907 - DNA, 25 bp, Homo sapien
ggatatctctttacacatcaactac

SEQ ID NO: 3092908 - DNA, 25 bp, Homo sapien
tctctttacacatcaactacatgag

SEQ ID NO: 3092909 - DNA, 25 bp, Homo sapien
cttccacctgggtaggttctttcat

SEQ ID NO: 3092910 - DNA, 25 bp, Homo sapien
aatctctgtgtggagagcttccacc

SEQ ID NO: 3092911 - DNA, 25 bp, Homo sapien
cctgtgggaaaagcttcaaaatctc

SEQ ID NO: 3092912 - DNA, 25 bp, Homo sapien
gcttccacctgggtaggttctttca

SEQ ID NO: 3092913 - DNA, 25 bp, Homo sapien
acttgtttttcagatgttgaatgga

SEQ ID NO: 3092914 - DNA, 25 bp, Homo sapien
ttcagatgttgaatggaaccaatac

SEQ ID NO: 3092915 - DNA, 25 bp, Homo sapien
cagatgttgaatggaaccaatacac

SEQ ID NO: 3092916 - DNA, 25 bp, Homo sapien
gtttttcagatgttgaatggaacca

SEQ ID NO: 3092917 - DNA, 25 bp, Homo sapien
catcatggccatacggtcacacaca

SEQ ID NO: 3092918 - DNA, 25 bp, Homo sapien
taatgggtggtcaagagggtgcccc

SEQ ID NO: 3092919 - DNA, 25 bp, Homo sapien
cctctgacatgtaatgggtggtcaa

SEQ ID NO: 3092920 - DNA, 25 bp, Homo sapien
ttagcgttcctgacaccatcatggc

SEQ ID NO: 3092921 - DNA, 25 bp, Homo sapien
cccggtgaacggctcatctagaagc

SEQ ID NO: 3092922 - DNA, 25 bp, Homo sapien
catcccggtgaacggctcatctaga

SEQ ID NO: 3092923 - DNA, 25 bp, Homo sapien
tccatcccggtgaacggctcatcta

SEQ ID NO: 3092924 - DNA, 25 bp, Homo sapien
ggtgaacggctcatctagaagcacc

SEQ ID NO: 3092925 - DNA, 25 bp, Homo sapien
aggaacagcccgtcggcacccagcc

SEQ ID NO: 3092926 - DNA, 25 bp, Homo sapien
gcaatgcaaggaacagcccgtcggc

SEQ ID NO: 3092927 - DNA, 25 bp, Homo sapien
atgcaaggaacagcccgtcggcacc

SEQ ID NO: 3092928 - DNA, 25 bp, Homo sapien
ggaacagcccgtcggcacccagcca

SEQ ID NO: 3092929 - DNA, 25 bp, Homo sapien
ttattccctctgatagagttttcac

SEQ ID NO: 3092930 - DNA, 25 bp, Homo sapien
ctttattccctctgatagagttttc

SEQ ID NO: 3092931 - DNA, 25 bp, Homo sapien
tttattccctctgatagagttttca

SEQ ID NO: 3092932 - DNA, 25 bp, Homo sapien
tgctacaaattgtgagacttctctc

SEQ ID NO: 3092933 - DNA, 25 bp, Homo sapien
tcctgctacaaattgtgagacttct

SEQ ID NO: 3092934 - DNA, 25 bp, Homo sapien
tcctcctgctacaaattgtgagact

SEQ ID NO: 3092935 - DNA, 25 bp, Homo sapien
cttcctcctgctacaaattgtgaga

SEQ ID NO: 3092936 - DNA, 25 bp, Homo sapien
tcattgtaagcttgggccacagtga

SEQ ID NO: 3092937 - DNA, 25 bp, Homo sapien
aaatactgagagcagcatcttcttt

SEQ ID NO: 3092938 - DNA, 25 bp, Homo sapien
gctgcatacaactccaagtgctctt

SEQ ID NO: 3092939 - DNA, 25 bp, Homo sapien
tcttctttgcccagtcctttcacag

SEQ ID NO: 3092940 - DNA, 25 bp, Homo sapien
ctgagggcagtaccccaagaacttg

SEQ ID NO: 3092941 - DNA, 25 bp, Homo sapien
gctgttgtcatgctgttgccttact

SEQ ID NO: 3092942 - DNA, 25 bp, Homo sapien
tgctgttgccttactgatgctctgc

SEQ ID NO: 3092943 - DNA, 25 bp, Homo sapien
agggcagtaccccaagaacttgagg

SEQ ID NO: 3092944 - DNA, 25 bp, Homo sapien
atttactgataggaataatagaaag

SEQ ID NO: 3092945 - DNA, 25 bp, Homo sapien
gataaaagtggccattaagctacaa

SEQ ID NO: 3092946 - DNA, 25 bp, Homo sapien
agattcacctttggtttttgctcca

SEQ ID NO: 3092947 - DNA, 25 bp, Homo sapien
ttttgaatacgcaagagaaatttta

SEQ ID NO: 3092948 - DNA, 25 bp, Homo sapien
ttgtgcacccagttatcattttaat

SEQ ID NO: 3092949 - DNA, 25 bp, Homo sapien
gctccattgtgtcctagtaatccca

SEQ ID NO: 3092950 - DNA, 25 bp, Homo sapien
ggaagtacttttaccagctccattg

SEQ ID NO: 3092951 - DNA, 25 bp, Homo sapien
cactcctgcagttggctttgtgcac

SEQ ID NO: 3092952 - DNA, 25 bp, Homo sapien
aagaaagagtcaccatcaatatttg

SEQ ID NO: 3092953 - DNA, 25 bp, Homo sapien
aaagagtcaccatcaatatttgaat

SEQ ID NO: 3092954 - DNA, 25 bp, Homo sapien
gaaagagtcaccatcaatatttgaa

SEQ ID NO: 3092955 - DNA, 25 bp, Homo sapien
agaaagagtcaccatcaatatttga

SEQ ID NO: 3092956 - DNA, 25 bp, Homo sapien
gtaaacagcttgcagttatgactgg

SEQ ID NO: 3092957 - DNA, 25 bp, Homo sapien
taaacagcttgcagttatgactggt

SEQ ID NO: 3092958 - DNA, 25 bp, Homo sapien
aatattccttgtgtaaacagcttgc

SEQ ID NO: 3092959 - DNA, 25 bp, Homo sapien
aacagcttgcagttatgactggttc

SEQ ID NO: 3092960 - DNA, 25 bp, Homo sapien
cttcgggctcttccggattgggatg

SEQ ID NO: 3092961 - DNA, 25 bp, Homo sapien
ctcttccggattgggatgagtttct

SEQ ID NO: 3092962 - DNA, 25 bp, Homo sapien
ttcttcgggctcttccggattggga

SEQ ID NO: 3092963 - DNA, 25 bp, Homo sapien
ggctcttccggattgggatgagttt

SEQ ID NO: 3092964 - DNA, 25 bp, Homo sapien
tcaccatccagatcatgaccacatt

SEQ ID NO: 3092965 - DNA, 25 bp, Homo sapien
gaccacattcctcataaaagatcat

SEQ ID NO: 3092966 - DNA, 25 bp, Homo sapien
atgaccacattcctcataaaagatc

SEQ ID NO: 3092967 - DNA, 25 bp, Homo sapien
tgtcaccatccagatcatgaccaca

SEQ ID NO: 3092968 - DNA, 25 bp, Homo sapien
atttccagacaccttatgacaaaaa

SEQ ID NO: 3092969 - DNA, 25 bp, Homo sapien
tccagacaccttatgacaaaaagga

SEQ ID NO: 3092970 - DNA, 25 bp, Homo sapien
tttccagacaccttatgacaaaaag

SEQ ID NO: 3092971 - DNA, 25 bp, Homo sapien
ttccagacaccttatgacaaaaagg

SEQ ID NO: 3092972 - DNA, 25 bp, Homo sapien
taaattaatcattcttaacagaggc

SEQ ID NO: 3092973 - DNA, 25 bp, Homo sapien
aattaatcattcttaacagaggctc

SEQ ID NO: 3092974 - DNA, 25 bp, Homo sapien
ttaatcattcttaacagaggctcac

SEQ ID NO: 3092975 - DNA, 25 bp, Homo sapien
aaataaattaatcattcttaacaga

SEQ ID NO: 3092976 - DNA, 25 bp, Homo sapien
tttgagaagattccagattcattct

SEQ ID NO: 3092977 - DNA, 25 bp, Homo sapien
gagaagattccagattcattcttga

SEQ ID NO: 3092978 - DNA, 25 bp, Homo sapien
aggctttgagaagattccagattca

SEQ ID NO: 3092979 - DNA, 25 bp, Homo sapien
aagattccagattcattcttgataa

SEQ ID NO: 3092980 - DNA, 25 bp, Homo sapien
gagattcaagccaatgtcataaagc

SEQ ID NO: 3092981 - DNA, 25 bp, Homo sapien
cataacatggttgtttcaccggaaa

SEQ ID NO: 3092982 - DNA, 25 bp, Homo sapien
gctagaacgtgcaatgggaacaaaa

SEQ ID NO: 3092983 - DNA, 25 bp, Homo sapien
taaggacgccttcttgcaacagtgt

SEQ ID NO: 3092984 - DNA, 25 bp, Homo sapien
aacagagcctcaaagattatcaagc

SEQ ID NO: 3092985 - DNA, 25 bp, Homo sapien
tcaaggagcttaacaaatcataggt

SEQ ID NO: 3092986 - DNA, 25 bp, Homo sapien
ggagaggattcatcactcagagaga

SEQ ID NO: 3092987 - DNA, 25 bp, Homo sapien
gccaggagaaagtgtgatgatgtaa

SEQ ID NO: 3092988 - DNA, 25 bp, Homo sapien
ttcatttattctattgtccagactg

SEQ ID NO: 3092989 - DNA, 25 bp, Homo sapien
catttattctattgtccagactgtc

SEQ ID NO: 3092990 - DNA, 25 bp, Homo sapien
tttattctattgtccagactgtcca

SEQ ID NO: 3092991 - DNA, 25 bp, Homo sapien
ttattctattgtccagactgtccaa

SEQ ID NO: 3092992 - DNA, 25 bp, Homo sapien
tcatattgagttgataccataattg

SEQ ID NO: 3092993 - DNA, 25 bp, Homo sapien
taacatgacataccccagcaaagtg

SEQ ID NO: 3092994 - DNA, 25 bp, Homo sapien
ctggatcaataacatgacatacccc

SEQ ID NO: 3092995 - DNA, 25 bp, Homo sapien
tattgagttgataccataattgtgg

SEQ ID NO: 3092996 - DNA, 25 bp, Homo sapien
tgccatatctaagcagtcagagaaa

SEQ ID NO: 3092997 - DNA, 25 bp, Homo sapien
ggttgtcactttaaagggcagccca

SEQ ID NO: 3092998 - DNA, 25 bp, Homo sapien
cagaggtaaattatatggttgtcac

SEQ ID NO: 3092999 - DNA, 25 bp, Homo sapien
taactgatgatatgacttgggaact

SEQ ID NO: 3093000 - DNA, 25 bp, Homo sapien
ggccaaccaatgtaactgtaacagc

SEQ ID NO: 3093001 - DNA, 25 bp, Homo sapien
aggccaaccaatgtaactgtaacag

SEQ ID NO: 3093002 - DNA, 25 bp, Homo sapien
tgaatgaaagcacatatgtgaggaa

SEQ ID NO: 3093003 - DNA, 25 bp, Homo sapien
gatgaatgaaagcacatatgtgagg

SEQ ID NO: 3093004 - DNA, 25 bp, Homo sapien
catatgtgaggaatataagagaaac

SEQ ID NO: 3093005 - DNA, 25 bp, Homo sapien
aaagcacatatgtgaggaatataag

SEQ ID NO: 3093006 - DNA, 25 bp, Homo sapien
atgtccaccagagcctgtccacacc

SEQ ID NO: 3093007 - DNA, 25 bp, Homo sapien
gccagaggcctgaaatccataactg

SEQ ID NO: 3093008 - DNA, 25 bp, Homo sapien
aaggccagaggcctgaaatccataa

SEQ ID NO: 3093009 - DNA, 25 bp, Homo sapien
ggccagaggcctgaaatccataact

SEQ ID NO: 3093010 - DNA, 25 bp, Homo sapien
aatctaatttcctctctctccctct

SEQ ID NO: 3093011 - DNA, 25 bp, Homo sapien
tctaatttcctctctctccctctta

SEQ ID NO: 3093012 - DNA, 25 bp, Homo sapien
tcaatctaatttcctctctctccct

SEQ ID NO: 3093013 - DNA, 25 bp, Homo sapien
ctaatttcctctctctccctcttac

SEQ ID NO: 3093014 - DNA, 25 bp, Homo sapien
tcatgccgataaaaggagaaacgca

SEQ ID NO: 3093015 - DNA, 25 bp, Homo sapien
gctgatgctgctcatgccgataaaa

SEQ ID NO: 3093016 - DNA, 25 bp, Homo sapien
gctgctcatgccgataaaaggagaa

SEQ ID NO: 3093017 - DNA, 25 bp, Homo sapien
tataatcgctgatgctgctcatgcc

SEQ ID NO: 3093018 - DNA, 25 bp, Homo sapien
tccacaggagacaatttaatatcca

SEQ ID NO: 3093019 - DNA, 25 bp, Homo sapien
ccctggatccacaggagacaattta

SEQ ID NO: 3093020 - DNA, 25 bp, Homo sapien
acaagccttccgaacattaattttg

SEQ ID NO: 3093021 - DNA, 25 bp, Homo sapien
caagccttccgaacattaattttgt

SEQ ID NO: 3093022 - DNA, 25 bp, Homo sapien
cgaaagccctttaaatcatattact

SEQ ID NO: 3093023 - DNA, 25 bp, Homo sapien
gccagacctattttccctacagaga

SEQ ID NO: 3093024 - DNA, 25 bp, Homo sapien
gtgaactacagtggtttgcactcag

SEQ ID NO: 3093025 - DNA, 25 bp, Homo sapien
aacccagcatacattcaattctgaa

SEQ ID NO: 3093026 - DNA, 25 bp, Homo sapien
taaatcaccctatctcattcgcaga

SEQ ID NO: 3093027 - DNA, 25 bp, Homo sapien
ggtagcacattgctattaccatcca

SEQ ID NO: 3093028 - DNA, 25 bp, Homo sapien
tatgcatattcttgctaacatccac

SEQ ID NO: 3093029 - DNA, 25 bp, Homo sapien
aattatattagatctcactcttgag

SEQ ID NO: 3093030 - DNA, 25 bp, Homo sapien
ataagggcattgctaacaattccca

SEQ ID NO: 3093031 - DNA, 25 bp, Homo sapien
tctatttccaaaactatatcctgac

SEQ ID NO: 3093032 - DNA, 25 bp, Homo sapien
cttctggtcaccagacactatgatg

SEQ ID NO: 3093033 - DNA, 25 bp, Homo sapien
gctccattgtaggagggatcatctg

SEQ ID NO: 3093034 - DNA, 25 bp, Homo sapien
actatgatggctccattgtaggagg

SEQ ID NO: 3093035 - DNA, 25 bp, Homo sapien
ccaacaatgagtttcacgagttact

SEQ ID NO: 3093036 - DNA, 25 bp, Homo sapien
cgtcttcgggatttgttccagagaa

SEQ ID NO: 3093037 - DNA, 25 bp, Homo sapien
gaaatacatactgggtgaaaactcc

SEQ ID NO: 3093038 - DNA, 25 bp, Homo sapien
taacaggctggtaagaggcgtcttc

SEQ ID NO: 3093039 - DNA, 25 bp, Homo sapien
gataaaagcaattccaagtactagt

SEQ ID NO: 3093040 - DNA, 25 bp, Homo sapien
ggataaaagcaattccaagtactag

SEQ ID NO: 3093041 - DNA, 25 bp, Homo sapien
ataaaagcaattccaagtactagta

SEQ ID NO: 3093042 - DNA, 25 bp, Homo sapien
taaaagcaattccaagtactagtaa

SEQ ID NO: 3093043 - DNA, 25 bp, Homo sapien
tccagagagctgcactactgacagc

SEQ ID NO: 3093044 - DNA, 25 bp, Homo sapien
gaagcgaagtgttgccactgcatag

SEQ ID NO: 3093045 - DNA, 25 bp, Homo sapien
catagatttgtcgtctccagagagc

SEQ ID NO: 3093046 - DNA, 25 bp, Homo sapien
taactttaagaagcgaagtgttgcc

SEQ ID NO: 3093047 - DNA, 25 bp, Homo sapien
cactgaaacagcataattccttatg

SEQ ID NO: 3093048 - DNA, 25 bp, Homo sapien
tgccctggtcagaacacttatcaag

SEQ ID NO: 3093049 - DNA, 25 bp, Homo sapien
attccttatgccctggtcagaacac

SEQ ID NO: 3093050 - DNA, 25 bp, Homo sapien
aacagcataattccttatgccctgg

SEQ ID NO: 3093051 - DNA, 25 bp, Homo sapien
aggaatgtgctgcttaataagggat

SEQ ID NO: 3093052 - DNA, 25 bp, Homo sapien
ccccactttcgcttcagaaacaaag

SEQ ID NO: 3093053 - DNA, 25 bp, Homo sapien
caataccccactttcgcttcagaaa

SEQ ID NO: 3093054 - DNA, 25 bp, Homo sapien
tcaacttcccattagacagaaatac

SEQ ID NO: 3093055 - DNA, 25 bp, Homo sapien
caaagatgatcctgcacatttcaac

SEQ ID NO: 3093056 - DNA, 25 bp, Homo sapien
ttggaataaagaagccaagaatcac

SEQ ID NO: 3093057 - DNA, 25 bp, Homo sapien
tagttggaataaagaagccaagaat

SEQ ID NO: 3093058 - DNA, 25 bp, Homo sapien
ctagttggaataaagaagccaagaa

SEQ ID NO: 3093059 - DNA, 25 bp, Homo sapien
gttggaataaagaagccaagaatca

SEQ ID NO: 3093060 - DNA, 25 bp, Homo sapien
gaggataagtcggtctactttatgc

SEQ ID NO: 3093061 - DNA, 25 bp, Homo sapien
ggtctactttatgctccttcaggag

SEQ ID NO: 3093062 - DNA, 25 bp, Homo sapien
ggtactgaagaggataagtcggtct

SEQ ID NO: 3093063 - DNA, 25 bp, Homo sapien
gataagtcggtctactttatgctcc

SEQ ID NO: 3093064 - DNA, 25 bp, Homo sapien
ctcctaagatggcaatccctagtgt

SEQ ID NO: 3093065 - DNA, 25 bp, Homo sapien
gatggcaatccctagtgttagtttt

SEQ ID NO: 3093066 - DNA, 25 bp, Homo sapien
gatctcctaagatggcaatccctag

SEQ ID NO: 3093067 - DNA, 25 bp, Homo sapien
taagatggcaatccctagtgttagt

SEQ ID NO: 3093068 - DNA, 25 bp, Homo sapien
gaatgctttgcatgtctaattccat

SEQ ID NO: 3093069 - DNA, 25 bp, Homo sapien
gagtaatagctgaacaaaaaaaata

SEQ ID NO: 3093070 - DNA, 25 bp, Homo sapien
agagtagagtaatagctgaacaaaa

SEQ ID NO: 3093071 - DNA, 25 bp, Homo sapien
tagagtaatagctgaacaaaaaaaa

SEQ ID NO: 3093072 - DNA, 25 bp, Homo sapien
agtagagtaatagctgaacaaaaaa

SEQ ID NO: 3093073 - DNA, 25 bp, Homo sapien
tgtggacaaaatccaatattctttc

SEQ ID NO: 3093074 - DNA, 25 bp, Homo sapien
tagcaaataccctgaggttttctct

SEQ ID NO: 3093075 - DNA, 25 bp, Homo sapien
cttctgtagaaacagacaatccact

SEQ ID NO: 3093076 - DNA, 25 bp, Homo sapien
tccattatgcccaagtattgcagtg

SEQ ID NO: 3093077 - DNA, 25 bp, Homo sapien
ttctgtagaaacagacaatccacta

SEQ ID NO: 3093078 - DNA, 25 bp, Homo sapien
atttaccagctccattatgcccaag

SEQ ID NO: 3093079 - DNA, 25 bp, Homo sapien
aaattagattttggattatatgcag

SEQ ID NO: 3093080 - DNA, 25 bp, Homo sapien
aagtggaaattagattttggattat

SEQ ID NO: 3093081 - DNA, 25 bp, Homo sapien
ggaaattagattttggattatatgc

SEQ ID NO: 3093082 - DNA, 25 bp, Homo sapien
ttagattttggattatatgcagatg

SEQ ID NO: 3093083 - DNA, 25 bp, Homo sapien
aattgtataagttatgtattcctga

SEQ ID NO: 3093084 - DNA, 25 bp, Homo sapien
tttgaatgtcaaagaatctatacac

SEQ ID NO: 3093085 - DNA, 25 bp, Homo sapien
atttggagaaattggatcaagactg

SEQ ID NO: 3093086 - DNA, 25 bp, Homo sapien
aatataaatttctaccctcttgctt

SEQ ID NO: 3093087 - DNA, 25 bp, Homo sapien
catattcggagggaggtagaactga

SEQ ID NO: 3093088 - DNA, 25 bp, Homo sapien
tatctgctgggatctaagacatgtc

SEQ ID NO: 3093089 - DNA, 25 bp, Homo sapien
tcacatatatgtgcctaaggcttga

SEQ ID NO: 3093090 - DNA, 25 bp, Homo sapien
gaaattgtctccctgaggcttgcag

SEQ ID NO: 3093091 - DNA, 25 bp, Homo sapien
aaggccatagattaaccgcatccca

SEQ ID NO: 3093092 - DNA, 25 bp, Homo sapien
gtaaggccatagattaaccgcatcc

SEQ ID NO: 3093093 - DNA, 25 bp, Homo sapien
gccatagattaaccgcatcccaagg

SEQ ID NO: 3093094 - DNA, 25 bp, Homo sapien
ggccatagattaaccgcatcccaag

SEQ ID NO: 3093095 - DNA, 25 bp, Homo sapien
gacagggtggcggtcgggcagagac

SEQ ID NO: 3093096 - DNA, 25 bp, Homo sapien
ctcatctcccagacagggtggcggt

SEQ ID NO: 3093097 - DNA, 25 bp, Homo sapien
catctcccagacagggtggcggtcg

SEQ ID NO: 3093098 - DNA, 25 bp, Homo sapien
cccagatgatgggcggcggggcaga

SEQ ID NO: 3093099 - DNA, 25 bp, Homo sapien
gcaatgcttctacttttccagtctt

SEQ ID NO: 3093100 - DNA, 25 bp, Homo sapien
tccagtctttccattatattctttt

SEQ ID NO: 3093101 - DNA, 25 bp, Homo sapien
cttgcaatgcttctacttttccagt

SEQ ID NO: 3093102 - DNA, 25 bp, Homo sapien
ccagtctttccattatattctttta

SEQ ID NO: 3093103 - DNA, 25 bp, Homo sapien
gcttctcactatactactccacaaa

SEQ ID NO: 3093104 - DNA, 25 bp, Homo sapien
ttttagtccttatttgatatacttc

SEQ ID NO: 3093105 - DNA, 25 bp, Homo sapien
tctagttaccaaatctaatgaacac

SEQ ID NO: 3093106 - DNA, 25 bp, Homo sapien
ttcaccaatgaccattctagttacc

SEQ ID NO: 3093107 - DNA, 25 bp, Homo sapien
cttatggcttcttttccatggaatt

SEQ ID NO: 3093108 - DNA, 25 bp, Homo sapien
ctggagacaccggttcaaaagaatc

SEQ ID NO: 3093109 - DNA, 25 bp, Homo sapien
tggagacaccggttcaaaagaatca

SEQ ID NO: 3093110 - DNA, 25 bp, Homo sapien
ggagacaccggttcaaaagaatcat

SEQ ID NO: 3093111 - DNA, 25 bp, Homo sapien
gagacaccggttcaaaagaatcatc

SEQ ID NO: 3093112 - DNA, 25 bp, Homo sapien
tggagaatccccatggccatcttta

SEQ ID NO: 3093113 - DNA, 25 bp, Homo sapien
aaataatggagaatccccatggcca

SEQ ID NO: 3093114 - DNA, 25 bp, Homo sapien
atggagaatccccatggccatcttt

SEQ ID NO: 3093115 - DNA, 25 bp, Homo sapien
ggagaatccccatggccatctttat

SEQ ID NO: 3093116 - DNA, 25 bp, Homo sapien
tattctagaagggttgcatatttcc

SEQ ID NO: 3093117 - DNA, 25 bp, Homo sapien
tctgttcctggactctttgggggcg

SEQ ID NO: 3093118 - DNA, 25 bp, Homo sapien
ggttgatagcatctaatgttcatca

SEQ ID NO: 3093119 - DNA, 25 bp, Homo sapien
ccatctgttcctggactctttgggg

SEQ ID NO: 3093120 - DNA, 25 bp, Homo sapien
ccagtattaggtgcacacagattta

SEQ ID NO: 3093121 - DNA, 25 bp, Homo sapien
tcagggtatactttaagaccattgt

SEQ ID NO: 3093122 - DNA, 25 bp, Homo sapien
agttcagggtatactttaagaccat

SEQ ID NO: 3093123 - DNA, 25 bp, Homo sapien
tgagacagtgcttgatataatgttg

SEQ ID NO: 3093124 - DNA, 25 bp, Homo sapien
aaatgattcagttcatacctttaaa

SEQ ID NO: 3093125 - DNA, 25 bp, Homo sapien
tcttctctactatcagaaatgcttc

SEQ ID NO: 3093126 - DNA, 25 bp, Homo sapien
ttttcttctctactatcagaaatgc

SEQ ID NO: 3093127 - DNA, 25 bp, Homo sapien
aaaatgattcagttcggccgggcgc

SEQ ID NO: 3093128 - DNA, 25 bp, Homo sapien
gaatccccagagggatcaggaaaaa

SEQ ID NO: 3093129 - DNA, 25 bp, Homo sapien
aggtaaaactcgctcaaaatataat

SEQ ID NO: 3093130 - DNA, 25 bp, Homo sapien
taaaactcgctcaaaatataatgtg

SEQ ID NO: 3093131 - DNA, 25 bp, Homo sapien
tggctatcattttgtatgaatcccc

SEQ ID NO: 3093132 - DNA, 25 bp, Homo sapien
gaagacttaatacccatcccaaaga

SEQ ID NO: 3093133 - DNA, 25 bp, Homo sapien
ggaagttgtctatataacacagtga

SEQ ID NO: 3093134 - DNA, 25 bp, Homo sapien
gaatcccagacatccccaaaataca

SEQ ID NO: 3093135 - DNA, 25 bp, Homo sapien
tccagccaaaccagcgagcataggt

SEQ ID NO: 3093136 - DNA, 25 bp, Homo sapien
ggattgatgttatgaccagagccat

SEQ ID NO: 3093137 - DNA, 25 bp, Homo sapien
gaaaggccatataagctatagagtg

SEQ ID NO: 3093138 - DNA, 25 bp, Homo sapien
tgtgaatatcaccatgaagccagta

SEQ ID NO: 3093139 - DNA, 25 bp, Homo sapien
tgaagcaaatgtatgtcaatcccca

SEQ ID NO: 3093140 - DNA, 25 bp, Homo sapien
cagaatgctgactctcggagaccca

SEQ ID NO: 3093141 - DNA, 25 bp, Homo sapien
aatgctgactctcggagacccatca

SEQ ID NO: 3093142 - DNA, 25 bp, Homo sapien
gaatgctgactctcggagacccatc

SEQ ID NO: 3093143 - DNA, 25 bp, Homo sapien
agaatgctgactctcggagacccat

SEQ ID NO: 3093144 - DNA, 25 bp, Homo sapien
tcctccattacagaatgatttgttg

SEQ ID NO: 3093145 - DNA, 25 bp, Homo sapien
gtcaactcctccattacagaatgat

SEQ ID NO: 3093146 - DNA, 25 bp, Homo sapien
ccattacagaatgatttgttgtgac

SEQ ID NO: 3093147 - DNA, 25 bp, Homo sapien
aactcctccattacagaatgatttg

SEQ ID NO: 3093148 - DNA, 25 bp, Homo sapien
ttctataattgcagcattaattgca

SEQ ID NO: 3093149 - DNA, 25 bp, Homo sapien
tctataattgcagcattaattgcag

SEQ ID NO: 3093150 - DNA, 25 bp, Homo sapien
acaaaaaatttcaccatgcatggcc

SEQ ID NO: 3093151 - DNA, 25 bp, Homo sapien
ttcaccatgcatggcccaacagtgt

SEQ ID NO: 3093152 - DNA, 25 bp, Homo sapien
cccttttagccagtactttgccaag

SEQ ID NO: 3093153 - DNA, 25 bp, Homo sapien
ttagccagtactttgccaagtaaca

SEQ ID NO: 3093154 - DNA, 25 bp, Homo sapien
gctcctttataactgggattctata

SEQ ID NO: 3093155 - DNA, 25 bp, Homo sapien
tatatccccaattaaacttcaggcg

SEQ ID NO: 3093156 - DNA, 25 bp, Homo sapien
ggaagttctatatccatggtctctt

SEQ ID NO: 3093157 - DNA, 25 bp, Homo sapien
tctggtgtcccaatgactgttcttc

SEQ ID NO: 3093158 - DNA, 25 bp, Homo sapien
ttcataaaggaagccaaggccatct

SEQ ID NO: 3093159 - DNA, 25 bp, Homo sapien
ctttcataaaggaagccaaggccat

SEQ ID NO: 3093160 - DNA, 25 bp, Homo sapien
taaaggaagccaaggccatcttatt

SEQ ID NO: 3093161 - DNA, 25 bp, Homo sapien
aggaagccaaggccatcttattcat

SEQ ID NO: 3093162 - DNA, 25 bp, Homo sapien
gagtcattaaactgatccacgcttc

SEQ ID NO: 3093163 - DNA, 25 bp, Homo sapien
ggtgtatatgccactaccaggccag

SEQ ID NO: 3093164 - DNA, 25 bp, Homo sapien
ttgttcaggaaaacgggtagctctg

SEQ ID NO: 3093165 - DNA, 25 bp, Homo sapien
gaagtgttccgaaaagatgcacaaa

SEQ ID NO: 3093166 - DNA, 25 bp, Homo sapien
ctagaaacaatgttattgtccattc

SEQ ID NO: 3093167 - DNA, 25 bp, Homo sapien
tgttgacgcacgcttatctcttttt

SEQ ID NO: 3093168 - DNA, 25 bp, Homo sapien
ctgaatttgttgacgcacgcttatc

SEQ ID NO: 3093169 - DNA, 25 bp, Homo sapien
aatttgttgacgcacgcttatctct

SEQ ID NO: 3093170 - DNA, 25 bp, Homo sapien
gagcctgaatttgttgacgcacgct

SEQ ID NO: 3093171 - DNA, 25 bp, Homo sapien
taacagggtaaagtaaatattgcag

SEQ ID NO: 3093172 - DNA, 25 bp, Homo sapien
cattaacagggtaaagtaaatattg

SEQ ID NO: 3093173 - DNA, 25 bp, Homo sapien
cagggtaaagtaaatattgcagagc

SEQ ID NO: 3093174 - DNA, 25 bp, Homo sapien
tcctgttcattaacagggtaaagta

SEQ ID NO: 3093175 - DNA, 25 bp, Homo sapien
taatgaattgttggctgagcgcatc

SEQ ID NO: 3093176 - DNA, 25 bp, Homo sapien
caaggactcctctacaaatggttgc

SEQ ID NO: 3093177 - DNA, 25 bp, Homo sapien
tatttgaagcacttggatccactgg

SEQ ID NO: 3093178 - DNA, 25 bp, Homo sapien
aaagccatggtctgtgtgtagaaca

SEQ ID NO: 3093179 - DNA, 25 bp, Homo sapien
gatttatgcagctttctagcccaga

SEQ ID NO: 3093180 - DNA, 25 bp, Homo sapien
aatcagcagatcagccactagggtg

SEQ ID NO: 3093181 - DNA, 25 bp, Homo sapien
ggctggagagcacaacatggaagtt

SEQ ID NO: 3093182 - DNA, 25 bp, Homo sapien
tgagcccaagaccagtacagctgtc

SEQ ID NO: 3093183 - DNA, 25 bp, Homo sapien
tatccctttggcacaagcctctgct

SEQ ID NO: 3093184 - DNA, 25 bp, Homo sapien
gaaaggtatccctttggcacaagcc

SEQ ID NO: 3093185 - DNA, 25 bp, Homo sapien
ccatctggtggtcagagtttcactc

SEQ ID NO: 3093186 - DNA, 25 bp, Homo sapien
ggaccagaaaggtatccctttggca

SEQ ID NO: 3093187 - DNA, 25 bp, Homo sapien
tctactaggcacccacccacacctt

SEQ ID NO: 3093188 - DNA, 25 bp, Homo sapien
ctactaggcacccacccacaccttg

SEQ ID NO: 3093189 - DNA, 25 bp, Homo sapien
ttctactaggcacccacccacacct

SEQ ID NO: 3093190 - DNA, 25 bp, Homo sapien
tctgagagtaactgaacctgttata

SEQ ID NO: 3093191 - DNA, 25 bp, Homo sapien
agagcagcattgagaattgcttaca

SEQ ID NO: 3093192 - DNA, 25 bp, Homo sapien
ttctgcacttgaaaactagcctcag

SEQ ID NO: 3093193 - DNA, 25 bp, Homo sapien
taatttgcaagagttgtttaggcac

SEQ ID NO: 3093194 - DNA, 25 bp, Homo sapien
taaaaagaaataggcgcactgcact

SEQ ID NO: 3093195 - DNA, 25 bp, Homo sapien
tttataccttgagccaatacatggg

SEQ ID NO: 3093196 - DNA, 25 bp, Homo sapien
gggccaaaactgatagtcatccgag

SEQ ID NO: 3093197 - DNA, 25 bp, Homo sapien
tatcagccacgtactttgtaccgag

SEQ ID NO: 3093198 - DNA, 25 bp, Homo sapien
ataaatctacacactgatctactta

SEQ ID NO: 3093199 - DNA, 25 bp, Homo sapien
tacacactgatctacttacaatttt

SEQ ID NO: 3093200 - DNA, 25 bp, Homo sapien
tctacacactgatctacttacaatt

SEQ ID NO: 3093201 - DNA, 25 bp, Homo sapien
cactgatctacttacaattttatag

SEQ ID NO: 3093202 - DNA, 25 bp, Homo sapien
cacttcagcttttacggatgacaac

SEQ ID NO: 3093203 - DNA, 25 bp, Homo sapien
tgatcaatgactgccacctagtgga

SEQ ID NO: 3093204 - DNA, 25 bp, Homo sapien
gataactgtcattctagccacagag

SEQ ID NO: 3093205 - DNA, 25 bp, Homo sapien
taaaatcatgtactagaacaagggc

SEQ ID NO: 3093206 - DNA, 25 bp, Homo sapien
tttatttagattggaacattacgta

SEQ ID NO: 3093207 - DNA, 25 bp, Homo sapien
tatttaagaagatggcataaactta

SEQ ID NO: 3093208 - DNA, 25 bp, Homo sapien
tatttagattggaacattacgtact

SEQ ID NO: 3093209 - DNA, 25 bp, Homo sapien
ttagattggaacattacgtacttat

SEQ ID NO: 3093210 - DNA, 25 bp, Homo sapien
ttcaagtgcgttcttggttctccag

SEQ ID NO: 3093211 - DNA, 25 bp, Homo sapien
ccagtaagcagaccgaacaatacaa

SEQ ID NO: 3093212 - DNA, 25 bp, Homo sapien
tcaagtgcgttcttggttctccagt

SEQ ID NO: 3093213 - DNA, 25 bp, Homo sapien
aaagaagtcccagtaagcagaccga

SEQ ID NO: 3093214 - DNA, 25 bp, Homo sapien
caaaatactactctatcttcttgtg

SEQ ID NO: 3093215 - DNA, 25 bp, Homo sapien
tatcttcttgtgttcgttcccacca

SEQ ID NO: 3093216 - DNA, 25 bp, Homo sapien
tccacaactattatcttcctcctct

SEQ ID NO: 3093217 - DNA, 25 bp, Homo sapien
tgtgttcgttcccaccaaagtgtgc

SEQ ID NO: 3093218 - DNA, 25 bp, Homo sapien
taactaaatcagaaatggtacaagg

SEQ ID NO: 3093219 - DNA, 25 bp, Homo sapien
tagttatatcaacaagtatcaagag

SEQ ID NO: 3093220 - DNA, 25 bp, Homo sapien
caaggctatatctagttatatcaac

SEQ ID NO: 3093221 - DNA, 25 bp, Homo sapien
gctgtatctcaagtacctcaaagaa

SEQ ID NO: 3093222 - DNA, 25 bp, Homo sapien
aaaagctatattcttcaatggcaaa

SEQ ID NO: 3093223 - DNA, 25 bp, Homo sapien
tcttcaatggcaaaagcatgtttag

SEQ ID NO: 3093224 - DNA, 25 bp, Homo sapien
tgttccaatgttgcttgagaaaagc

SEQ ID NO: 3093225 - DNA, 25 bp, Homo sapien
tgttgcttgagaaaagctatattct

SEQ ID NO: 3093226 - DNA, 25 bp, Homo sapien
ggatattggtcctatctccataaac

SEQ ID NO: 3093227 - DNA, 25 bp, Homo sapien
caactccactgtagcctattctggc

SEQ ID NO: 3093228 - DNA, 25 bp, Homo sapien
tggcaatacctaccaaagtggctaa

SEQ ID NO: 3093229 - DNA, 25 bp, Homo sapien
cacagcaagtatacaatcatggttc

SEQ ID NO: 3093230 - DNA, 25 bp, Homo sapien
tctatggaccagtatgaagtaagga

SEQ ID NO: 3093231 - DNA, 25 bp, Homo sapien
gataaactgtgtcaatgctctctaa

SEQ ID NO: 3093232 - DNA, 25 bp, Homo sapien
gactaactgcaaagactcgataatt

SEQ ID NO: 3093233 - DNA, 25 bp, Homo sapien
taattaagctgacccttctcataga

SEQ ID NO: 3093234 - DNA, 25 bp, Homo sapien
agccaaaatagaagatactacttac

SEQ ID NO: 3093235 - DNA, 25 bp, Homo sapien
gtgaaagggactgaacatcttcctt

SEQ ID NO: 3093236 - DNA, 25 bp, Homo sapien
aattttataagccaaaatagaagat

SEQ ID NO: 3093237 - DNA, 25 bp, Homo sapien
ttataagccaaaatagaagatacta

SEQ ID NO: 3093238 - DNA, 25 bp, Homo sapien
taggaattttataagccaaaataga

SEQ ID NO: 3093239 - DNA, 25 bp, Homo sapien
aaaagattgtgaaagggactgaaca

SEQ ID NO: 3093240 - DNA, 25 bp, Homo sapien
gattgtgaaagggactgaacatctt

SEQ ID NO: 3093241 - DNA, 25 bp, Homo sapien
tgaaagggactgaacatcttcctta

SEQ ID NO: 3093242 - DNA, 25 bp, Homo sapien
ctttcctgacggcttgcatttggga

SEQ ID NO: 3093243 - DNA, 25 bp, Homo sapien
caaatttactctttagatgttgtac

SEQ ID NO: 3093244 - DNA, 25 bp, Homo sapien
tctttgaaggcggtctacttctagg

SEQ ID NO: 3093245 - DNA, 25 bp, Homo sapien
tagatgttgtactgttccgatacat

SEQ ID NO: 3093246 - DNA, 25 bp, Homo sapien
tcacaactgagacaccgacattggt

SEQ ID NO: 3093247 - DNA, 25 bp, Homo sapien
ccttagtctctaactgtgggtgaca

SEQ ID NO: 3093248 - DNA, 25 bp, Homo sapien
tctatccaggataccgtagtgttct

SEQ ID NO: 3093249 - DNA, 25 bp, Homo sapien
caggtgtgtgttagaaggtccctca

SEQ ID NO: 3093250 - DNA, 25 bp, Homo sapien
ccctgaatggcacgctatttagaca

SEQ ID NO: 3093251 - DNA, 25 bp, Homo sapien
aattgttctgtaaggaagatgtacc

SEQ ID NO: 3093252 - DNA, 25 bp, Homo sapien
ggagattaagcctcctcccttgaag

SEQ ID NO: 3093253 - DNA, 25 bp, Homo sapien
tttttgaaataacaagtactatgcc

SEQ ID NO: 3093254 - DNA, 25 bp, Homo sapien
gcccagacaccatgatagctactcg

SEQ ID NO: 3093255 - DNA, 25 bp, Homo sapien
gtggtcagaatagcagcccgctttc

SEQ ID NO: 3093256 - DNA, 25 bp, Homo sapien
tgcctcctccatatagtgagtggtc

SEQ ID NO: 3093257 - DNA, 25 bp, Homo sapien
gatagctactcgatcacagacagcc

SEQ ID NO: 3093258 - DNA, 25 bp, Homo sapien
ataaaacaaaaagagaggaacacat

SEQ ID NO: 3093259 - DNA, 25 bp, Homo sapien
gatggttcatctagcaaagtaatct

SEQ ID NO: 3093260 - DNA, 25 bp, Homo sapien
gctgtttggctttgggatccatacc

SEQ ID NO: 3093261 - DNA, 25 bp, Homo sapien
caaagtaatctgaggattccctagc

SEQ ID NO: 3093262 - DNA, 25 bp, Homo sapien
ccctagcatacttagagcaaaacac

SEQ ID NO: 3093263 - DNA, 25 bp, Homo sapien
gatgttcttttaaatcaagtgcatg

SEQ ID NO: 3093264 - DNA, 25 bp, Homo sapien
ttcctgcaggtagtttctttacagt

SEQ ID NO: 3093265 - DNA, 25 bp, Homo sapien
tgcaggtagtttctttacagtcttc

SEQ ID NO: 3093266 - DNA, 25 bp, Homo sapien
tcttttaaatcaagtgcatgtgtta

SEQ ID NO: 3093267 - DNA, 25 bp, Homo sapien
aaatgttcctgcaatgtagtatctg

SEQ ID NO: 3093268 - DNA, 25 bp, Homo sapien
gtaacccatacacttcagtgaatca

SEQ ID NO: 3093269 - DNA, 25 bp, Homo sapien
cacaaagggtttatctgaggacagt

SEQ ID NO: 3093270 - DNA, 25 bp, Homo sapien
caatgtagtatctggccacaaaggg

SEQ ID NO: 3093271 - DNA, 25 bp, Homo sapien
tgccagcaccatttggacccaatag

SEQ ID NO: 3093272 - DNA, 25 bp, Homo sapien
tcaccaaccagaatattaataattg

SEQ ID NO: 3093273 - DNA, 25 bp, Homo sapien
ggacccaatagtcctaagatctctc

SEQ ID NO: 3093274 - DNA, 25 bp, Homo sapien
ctggcctgaagttggttcaatatca

SEQ ID NO: 3093275 - DNA, 25 bp, Homo sapien
cacagaaagagatgtatttagttgc

SEQ ID NO: 3093276 - DNA, 25 bp, Homo sapien
acacagaaagagatgtatttagttg

SEQ ID NO: 3093277 - DNA, 25 bp, Homo sapien
aaattgctgaccataatggatggtt

SEQ ID NO: 3093278 - DNA, 25 bp, Homo sapien
aattgctgaccataatggatggttt

SEQ ID NO: 3093279 - DNA, 25 bp, Homo sapien
actggcaacccatcagctctttgac

SEQ ID NO: 3093280 - DNA, 25 bp, Homo sapien
acctttagtctttcagctttgacat

SEQ ID NO: 3093281 - DNA, 25 bp, Homo sapien
tagtctttcagctttgacatcttca

SEQ ID NO: 3093282 - DNA, 25 bp, Homo sapien
acactggcaacccatcagctctttg

SEQ ID NO: 3093283 - DNA, 25 bp, Homo sapien
aaaatccacagtacacactgcaggt

SEQ ID NO: 3093284 - DNA, 25 bp, Homo sapien
tccacagtacacactgcaggtaagg

SEQ ID NO: 3093285 - DNA, 25 bp, Homo sapien
agtattgtaagaggaaaatccacag

SEQ ID NO: 3093286 - DNA, 25 bp, Homo sapien
tctcatagtattgtaagaggaaaat

SEQ ID NO: 3093287 - DNA, 25 bp, Homo sapien
gaaagcctatcccatggattatagg

SEQ ID NO: 3093288 - DNA, 25 bp, Homo sapien
gctactgaaagcctatcccatggat

SEQ ID NO: 3093289 - DNA, 25 bp, Homo sapien
tataacagctactgaaagcctatcc

SEQ ID NO: 3093290 - DNA, 25 bp, Homo sapien
cctatcccatggattataggtgtcc

SEQ ID NO: 3093291 - DNA, 25 bp, Homo sapien
caggcaacctagaagtggatagatt

SEQ ID NO: 3093292 - DNA, 25 bp, Homo sapien
cagtgattgcaatacaagccaacgc

SEQ ID NO: 3093293 - DNA, 25 bp, Homo sapien
tgcaattgtgtatcccataaagaaa

SEQ ID NO: 3093294 - DNA, 25 bp, Homo sapien
gatagattggaatgatgatacaaaa

SEQ ID NO: 3093295 - DNA, 25 bp, Homo sapien
caatataagtgaacagaataactga

SEQ ID NO: 3093296 - DNA, 25 bp, Homo sapien
aagaagcaatataagtgaacagaat

SEQ ID NO: 3093297 - DNA, 25 bp, Homo sapien
gaagcaatataagtgaacagaataa

SEQ ID NO: 3093298 - DNA, 25 bp, Homo sapien
cagaatagataaatgaccaaaattc

SEQ ID NO: 3093299 - DNA, 25 bp, Homo sapien
ttcagcatcaacctcatgtaactct

SEQ ID NO: 3093300 - DNA, 25 bp, Homo sapien
tttcagcatcaacctcatgtaactc

SEQ ID NO: 3093301 - DNA, 25 bp, Homo sapien
cacagcaaggaactttacagtataa

SEQ ID NO: 3093302 - DNA, 25 bp, Homo sapien
cttgtccaatccaatatgcagatgg

SEQ ID NO: 3093303 - DNA, 25 bp, Homo sapien
gggatatcaacaacagcttgtccaa

SEQ ID NO: 3093304 - DNA, 25 bp, Homo sapien
aaataaggggatatcaacaacagct

SEQ ID NO: 3093305 - DNA, 25 bp, Homo sapien
gtttaagttgagtataagctttgat

SEQ ID NO: 3093306 - DNA, 25 bp, Homo sapien
aagtttaagttgagtataagctttg

SEQ ID NO: 3093307 - DNA, 25 bp, Homo sapien
ctgaaagtttaagttgagtataagc

SEQ ID NO: 3093308 - DNA, 25 bp, Homo sapien
tgaaagtttaagttgagtataagct

SEQ ID NO: 3093309 - DNA, 25 bp, Homo sapien
caaccaaagactgtacaagatcgct

SEQ ID NO: 3093310 - DNA, 25 bp, Homo sapien
gtgaaagaataccaaagaacctctg

SEQ ID NO: 3093311 - DNA, 25 bp, Homo sapien
tccaaggccctaatgatgacaatca

SEQ ID NO: 3093312 - DNA, 25 bp, Homo sapien
caagatcgctatatgcctgaaggaa

SEQ ID NO: 3093313 - DNA, 25 bp, Homo sapien
cattttccatggcaaagtaaggtgg

SEQ ID NO: 3093314 - DNA, 25 bp, Homo sapien
gcaaagtaaggtggcattgcagtaa

SEQ ID NO: 3093315 - DNA, 25 bp, Homo sapien
gcagtaacaatgattccaagcaaag

SEQ ID NO: 3093316 - DNA, 25 bp, Homo sapien
ggcattgcagtaacaatgattccaa

SEQ ID NO: 3093317 - DNA, 25 bp, Homo sapien
tagcagataccctcgcactggcaca

SEQ ID NO: 3093318 - DNA, 25 bp, Homo sapien
catagagacagagtacatcactgtc

SEQ ID NO: 3093319 - DNA, 25 bp, Homo sapien
gggacagagaaggtactctgcactg

SEQ ID NO: 3093320 - DNA, 25 bp, Homo sapien
aatagaatccgcagtgcctagcaga

SEQ ID NO: 3093321 - DNA, 25 bp, Homo sapien
tcactaatataggtaaagaataaac

SEQ ID NO: 3093322 - DNA, 25 bp, Homo sapien
gaataaaccatagtactgttgaaaa

SEQ ID NO: 3093323 - DNA, 25 bp, Homo sapien
agtagttactaatgatattcactaa

SEQ ID NO: 3093324 - DNA, 25 bp, Homo sapien
agaatggggtactccagatctggat

SEQ ID NO: 3093325 - DNA, 25 bp, Homo sapien
gcatcacatttaaagccgcactatg

SEQ ID NO: 3093326 - DNA, 25 bp, Homo sapien
cgcactatggggagccacggataca

SEQ ID NO: 3093327 - DNA, 25 bp, Homo sapien
cacggatacatagtcactgtcatta

SEQ ID NO: 3093328 - DNA, 25 bp, Homo sapien
catcacatttaaagccgcactatgg

SEQ ID NO: 3093329 - DNA, 25 bp, Homo sapien
aagctaataagatcactgatatctg

SEQ ID NO: 3093330 - DNA, 25 bp, Homo sapien
ctaataagatcactgatatctgagt

SEQ ID NO: 3093331 - DNA, 25 bp, Homo sapien
aaaagctaataagatcactgatatc

SEQ ID NO: 3093332 - DNA, 25 bp, Homo sapien
gctaataagatcactgatatctgag

SEQ ID NO: 3093333 - DNA, 25 bp, Homo sapien
catgctccatgccaacactcgttca

SEQ ID NO: 3093334 - DNA, 25 bp, Homo sapien
cagcatcaataagatacgtattgaa

SEQ ID NO: 3093335 - DNA, 25 bp, Homo sapien
gacagaccatgcctttaccttaaat

SEQ ID NO: 3093336 - DNA, 25 bp, Homo sapien
ctataatttagatttcatgcagaca

SEQ ID NO: 3093337 - DNA, 25 bp, Homo sapien
ttagaaaatataagtctggaacaag

SEQ ID NO: 3093338 - DNA, 25 bp, Homo sapien
aagaagcagacttgttttgtattta

SEQ ID NO: 3093339 - DNA, 25 bp, Homo sapien
agaaaatataagtctggaacaagtt

SEQ ID NO: 3093340 - DNA, 25 bp, Homo sapien
tgaagaagcagacttgttttgtatt

SEQ ID NO: 3093341 - DNA, 25 bp, Homo sapien
ctgtgaaaaaaattaaaagcagaag

SEQ ID NO: 3093342 - DNA, 25 bp, Homo sapien
tgtgaaaaaaattaaaagcagaagc

SEQ ID NO: 3093343 - DNA, 25 bp, Homo sapien
tgaaaaaaattaaaagcagaagcaa

SEQ ID NO: 3093344 - DNA, 25 bp, Homo sapien
gtgaaaaaaattaaaagcagaagca

SEQ ID NO: 3093345 - DNA, 25 bp, Homo sapien
gaaactttgctattgtatacatctg

SEQ ID NO: 3093346 - DNA, 25 bp, Homo sapien
cagccttggtttcagaaagaataag

SEQ ID NO: 3093347 - DNA, 25 bp, Homo sapien
tccaaaggctcatggtgctcactag

SEQ ID NO: 3093348 - DNA, 25 bp, Homo sapien
aagtaagctctgttccatttcatca

SEQ ID NO: 3093349 - DNA, 25 bp, Homo sapien
tcttccaaagtcgtcatggaaacac

SEQ ID NO: 3093350 - DNA, 25 bp, Homo sapien
aaaatacgtcttccaaagtcgtcat

SEQ ID NO: 3093351 - DNA, 25 bp, Homo sapien
ttccaaagtcgtcatggaaacacca

SEQ ID NO: 3093352 - DNA, 25 bp, Homo sapien
tacgtcttccaaagtcgtcatggaa

SEQ ID NO: 3093353 - DNA, 25 bp, Homo sapien
ttagctaggcataaatactgatgca

SEQ ID NO: 3093354 - DNA, 25 bp, Homo sapien
gcctaagtaacaggcttaacattct

SEQ ID NO: 3093355 - DNA, 25 bp, Homo sapien
ctgtgaaacatatcatgacccatct

SEQ ID NO: 3093356 - DNA, 25 bp, Homo sapien
tatatgggaatatatctattatcat

SEQ ID NO: 3093357 - DNA, 25 bp, Homo sapien
ataacatccttttgtctatcaagca

SEQ ID NO: 3093358 - DNA, 25 bp, Homo sapien
taacatccttttgtctatcaagcaa

SEQ ID NO: 3093359 - DNA, 25 bp, Homo sapien
catccttttgtctatcaagcaattc

SEQ ID NO: 3093360 - DNA, 25 bp, Homo sapien
aacatccttttgtctatcaagcaat

SEQ ID NO: 3093361 - DNA, 25 bp, Homo sapien
tgaaaggcaagctatacacaagttg

SEQ ID NO: 3093362 - DNA, 25 bp, Homo sapien
acacaagttgttggtcattctgttg

SEQ ID NO: 3093363 - DNA, 25 bp, Homo sapien
ggtcattctgttgtaataaagtagc

SEQ ID NO: 3093364 - DNA, 25 bp, Homo sapien
agtagctccaggtatatgttgttta

SEQ ID NO: 3093365 - DNA, 25 bp, Homo sapien
ccccatttacttttgaggaacattg

SEQ ID NO: 3093366 - DNA, 25 bp, Homo sapien
caggcggtagccgatcccccattta

SEQ ID NO: 3093367 - DNA, 25 bp, Homo sapien
cattgaagaaccaacacatttcagc

SEQ ID NO: 3093368 - DNA, 25 bp, Homo sapien
tcagcattccttgtgatatcacagc

SEQ ID NO: 3093369 - DNA, 25 bp, Homo sapien
gagaacaggggtccattccagctgt

SEQ ID NO: 3093370 - DNA, 25 bp, Homo sapien
ctgtcacccgattggcttttctgta

SEQ ID NO: 3093371 - DNA, 25 bp, Homo sapien
tacaatatgtcgagaacaggggtcc

SEQ ID NO: 3093372 - DNA, 25 bp, Homo sapien
tccatgaaatgagtactgaacactg

SEQ ID NO: 3093373 - DNA, 25 bp, Homo sapien
ggttatctttgatagtctgcatgtc

SEQ ID NO: 3093374 - DNA, 25 bp, Homo sapien
gcaattcctaatgacagctttcttt

SEQ ID NO: 3093375 - DNA, 25 bp, Homo sapien
ctttgggttcccaagaacagcaatt

SEQ ID NO: 3093376 - DNA, 25 bp, Homo sapien
ctgcatgtctaaatctagtaaaacc

SEQ ID NO: 3093377 - DNA, 25 bp, Homo sapien
caaagtgtatatctaactgtggaca

SEQ ID NO: 3093378 - DNA, 25 bp, Homo sapien
gctggtatccctttgattgaagcca

SEQ ID NO: 3093379 - DNA, 25 bp, Homo sapien
gagactctgtgtccatatatagatg

SEQ ID NO: 3093380 - DNA, 25 bp, Homo sapien
tgtattatattgttggctggtatcc

SEQ ID NO: 3093381 - DNA, 25 bp, Homo sapien
tccactgtggccaagtaaggcagta

SEQ ID NO: 3093382 - DNA, 25 bp, Homo sapien
aagtaaggcagtaatctgaccctca

SEQ ID NO: 3093383 - DNA, 25 bp, Homo sapien
taatctgaccctcatatatgtcaaa

SEQ ID NO: 3093384 - DNA, 25 bp, Homo sapien
ggccaagtaaggcagtaatctgacc

SEQ ID NO: 3093385 - DNA, 25 bp, Homo sapien
tgtatgtcttctgaataccactaat

SEQ ID NO: 3093386 - DNA, 25 bp, Homo sapien
ttcacccttctttctgtatgtcttc

SEQ ID NO: 3093387 - DNA, 25 bp, Homo sapien
acattttcacccttctttctgtatg

SEQ ID NO: 3093388 - DNA, 25 bp, Homo sapien
ttctgtatgtcttctgaataccact

SEQ ID NO: 3093389 - DNA, 25 bp, Homo sapien
taaattgccaaagattgaaccatac

SEQ ID NO: 3093390 - DNA, 25 bp, Homo sapien
tacctaaattgccaaagattgaacc

SEQ ID NO: 3093391 - DNA, 25 bp, Homo sapien
cagcagttcttatacctaaattgcc

SEQ ID NO: 3093392 - DNA, 25 bp, Homo sapien
tcatcagcagttcttatacctaaat

SEQ ID NO: 3093393 - DNA, 25 bp, Homo sapien
gctctttgaccaatatgaaggcttc

SEQ ID NO: 3093394 - DNA, 25 bp, Homo sapien
gatgatctccgtaagccaaattccc

SEQ ID NO: 3093395 - DNA, 25 bp, Homo sapien
aaatataaagatgatctccgtaagc

SEQ ID NO: 3093396 - DNA, 25 bp, Homo sapien
tttgctctttgaccaatatgaaggc

SEQ ID NO: 3093397 - DNA, 25 bp, Homo sapien
tcaagatagacagccaagaggacat

SEQ ID NO: 3093398 - DNA, 25 bp, Homo sapien
tgtaataattagaggatatgggcct

SEQ ID NO: 3093399 - DNA, 25 bp, Homo sapien
gaatatactattaagtgtgagcatg

SEQ ID NO: 3093400 - DNA, 25 bp, Homo sapien
ctggaatgacttgatcaagatagac

SEQ ID NO: 3093401 - DNA, 25 bp, Homo sapien
gcaataccaatcacaaaagtacagt

SEQ ID NO: 3093402 - DNA, 25 bp, Homo sapien
taaaaagaggtgtcagcattaaagc

SEQ ID NO: 3093403 - DNA, 25 bp, Homo sapien
tcataaggccaataaatccaaaagc

SEQ ID NO: 3093404 - DNA, 25 bp, Homo sapien
gaaaagccacactaacgatttggga

SEQ ID NO: 3093405 - DNA, 25 bp, Homo sapien
caaaaatagtccaatacttgacagt

SEQ ID NO: 3093406 - DNA, 25 bp, Homo sapien
tcatcatcctggagcataaattaac

SEQ ID NO: 3093407 - DNA, 25 bp, Homo sapien
gtcattaaaacctctcattcagcca

SEQ ID NO: 3093408 - DNA, 25 bp, Homo sapien
acatttaacaactgatacagggtgg

SEQ ID NO: 3093409 - DNA, 25 bp, Homo sapien
taaacttgtatatagaagaacccag

SEQ ID NO: 3093410 - DNA, 25 bp, Homo sapien
gccataagaagggacataagaaaaa

SEQ ID NO: 3093411 - DNA, 25 bp, Homo sapien
caaagaagctgtcgcaatgactgcc

SEQ ID NO: 3093412 - DNA, 25 bp, Homo sapien
caatgctgctactttgaggaaataa

SEQ ID NO: 3093413 - DNA, 25 bp, Homo sapien
aaaaggtgaaaatgctataactagg

SEQ ID NO: 3093414 - DNA, 25 bp, Homo sapien
ttttctgctacgatatgaattgcca

SEQ ID NO: 3093415 - DNA, 25 bp, Homo sapien
gaaaggtatctatttctacaacagc

SEQ ID NO: 3093416 - DNA, 25 bp, Homo sapien
aataacagctttagttgactccagc

SEQ ID NO: 3093417 - DNA, 25 bp, Homo sapien
taatttagttatgatagcagcccct

SEQ ID NO: 3093418 - DNA, 25 bp, Homo sapien
cagctatatccctaaatttggtcag

SEQ ID NO: 3093419 - DNA, 25 bp, Homo sapien
tcagtaacctagtacaaatacaatc

SEQ ID NO: 3093420 - DNA, 25 bp, Homo sapien
tagtaaaacgggacagctatatccc

SEQ ID NO: 3093421 - DNA, 25 bp, Homo sapien
taatggcagcatctatggatgcttg

SEQ ID NO: 3093422 - DNA, 25 bp, Homo sapien
ctgtataatggcagcatctatggat

SEQ ID NO: 3093423 - DNA, 25 bp, Homo sapien
tatggatgcttgtaaaactgtgaaa

SEQ ID NO: 3093424 - DNA, 25 bp, Homo sapien
tataatggcagcatctatggatgct

SEQ ID NO: 3093425 - DNA, 25 bp, Homo sapien
ggggggaagaatatgagatctaaga

SEQ ID NO: 3093426 - DNA, 25 bp, Homo sapien
ctatggggggaagaatatgagatct

SEQ ID NO: 3093427 - DNA, 25 bp, Homo sapien
ggggaagaatatgagatctaagatt

SEQ ID NO: 3093428 - DNA, 25 bp, Homo sapien
atggggggaagaatatgagatctaa

SEQ ID NO: 3093429 - DNA, 25 bp, Homo sapien
ctgtacaacatgcaagtgcatcgtt

SEQ ID NO: 3093430 - DNA, 25 bp, Homo sapien
caacatgcaagtgcatcgttttaaa

SEQ ID NO: 3093431 - DNA, 25 bp, Homo sapien
tgcaagtgcatcgttttaaagatat

SEQ ID NO: 3093432 - DNA, 25 bp, Homo sapien
ttaaagatattatatggagagatac

SEQ ID NO: 3093433 - DNA, 25 bp, Homo sapien
cattctacatgacttagctctaaag

SEQ ID NO: 3093434 - DNA, 25 bp, Homo sapien
tcaatcaatctttacaggaccaaag

SEQ ID NO: 3093435 - DNA, 25 bp, Homo sapien
aagtaaatcattctacatgacttag

SEQ ID NO: 3093436 - DNA, 25 bp, Homo sapien
gaaataagctactgactttcaaagg

SEQ ID NO: 3093437 - DNA, 25 bp, Homo sapien
aacgaagttcataggacatggagtc

SEQ ID NO: 3093438 - DNA, 25 bp, Homo sapien
cctacaaagttgctcggcttagaga

SEQ ID NO: 3093439 - DNA, 25 bp, Homo sapien
gaagatactggaatcatatcaggaa

SEQ ID NO: 3093440 - DNA, 25 bp, Homo sapien
tagagagactggatgttaacatttc

SEQ ID NO: 3093441 - DNA, 25 bp, Homo sapien
gagtatatccaagaattagattaga

SEQ ID NO: 3093442 - DNA, 25 bp, Homo sapien
gacactttctgcatgatgctgcttg

SEQ ID NO: 3093443 - DNA, 25 bp, Homo sapien
gattgagttctatattaggcacttc

SEQ ID NO: 3093444 - DNA, 25 bp, Homo sapien
taaacttgtccataggattgagttc

SEQ ID NO: 3093445 - DNA, 25 bp, Homo sapien
catgctaattaatattaaccaaaat

SEQ ID NO: 3093446 - DNA, 25 bp, Homo sapien
atgctaattaatattaaccaaaata

SEQ ID NO: 3093447 - DNA, 25 bp, Homo sapien
tgctaattaatattaaccaaaataa

SEQ ID NO: 3093448 - DNA, 25 bp, Homo sapien
ctacctccctaattgcagtggacat

SEQ ID NO: 3093449 - DNA, 25 bp, Homo sapien
taattcttcagtagaagtgttctgg

SEQ ID NO: 3093450 - DNA, 25 bp, Homo sapien
tcagtagaagtgttctggtctgtct

SEQ ID NO: 3093451 - DNA, 25 bp, Homo sapien
tgtctccaaactcctacctccctaa

SEQ ID NO: 3093452 - DNA, 25 bp, Homo sapien
gaatgcatggagcagcaatctgtca

SEQ ID NO: 3093453 - DNA, 25 bp, Homo sapien
tctcttaggaaactggacagaatgc

SEQ ID NO: 3093454 - DNA, 25 bp, Homo sapien
aataagcagctgtttcagtcccagg

SEQ ID NO: 3093455 - DNA, 25 bp, Homo sapien
cagtcccaggtaagatggattaagc

SEQ ID NO: 3093456 - DNA, 25 bp, Homo sapien
tagaaaatagctgaccgggtgcggt

SEQ ID NO: 3093457 - DNA, 25 bp, Homo sapien
tacagtaacaaaagcctagtgcagc

SEQ ID NO: 3093458 - DNA, 25 bp, Homo sapien
tactggcgggaaagcaaatggttca

SEQ ID NO: 3093459 - DNA, 25 bp, Homo sapien
caagcaatcccatggtaacagggcc

SEQ ID NO: 3093460 - DNA, 25 bp, Homo sapien
tttctgcctgtggacctctattgga

SEQ ID NO: 3093461 - DNA, 25 bp, Homo sapien
cagggtacatttaccctttgaagat

SEQ ID NO: 3093462 - DNA, 25 bp, Homo sapien
tattggagctatctcgattcttcag

SEQ ID NO: 3093463 - DNA, 25 bp, Homo sapien
ctatcacaggtccagtatccctctt

SEQ ID NO: 3093464 - DNA, 25 bp, Homo sapien
tccttaaagatcaaggatgtgcaaa

SEQ ID NO: 3093465 - DNA, 25 bp, Homo sapien
gagtccttaaagatcaaggatgtgc

SEQ ID NO: 3093466 - DNA, 25 bp, Homo sapien
tgagagtccttaaagatcaaggatg

SEQ ID NO: 3093467 - DNA, 25 bp, Homo sapien
ctgagagtccttaaagatcaaggat

SEQ ID NO: 3093468 - DNA, 25 bp, Homo sapien
tccctagagtccagacgttcaaggc

SEQ ID NO: 3093469 - DNA, 25 bp, Homo sapien
cctagagtccagacgttcaaggctg

SEQ ID NO: 3093470 - DNA, 25 bp, Homo sapien
ccctagagtccagacgttcaaggct

SEQ ID NO: 3093471 - DNA, 25 bp, Homo sapien
gcaaaggcagtgtcccgaagtccca

SEQ ID NO: 3093472 - DNA, 25 bp, Homo sapien
cgacagcgtccaggcaaaggcagtg

SEQ ID NO: 3093473 - DNA, 25 bp, Homo sapien
cctcacgtccgcatcctgggcgctc

SEQ ID NO: 3093474 - DNA, 25 bp, Homo sapien
ttgctgagggtggaacgacagcgtc

SEQ ID NO: 3093475 - DNA, 25 bp, Homo sapien
actcccccagggacggctgtcccag

SEQ ID NO: 3093476 - DNA, 25 bp, Homo sapien
ggacggctgtcccaggctagcctca

SEQ ID NO: 3093477 - DNA, 25 bp, Homo sapien
ctcaactcccccagggacggctgtc

SEQ ID NO: 3093478 - DNA, 25 bp, Homo sapien
cagggacggctgtcccaggctagcc

SEQ ID NO: 3093479 - DNA, 25 bp, Homo sapien
ctgttgactcagtgcgggtgaccca

SEQ ID NO: 3093480 - DNA, 25 bp, Homo sapien
ccagctgggatctgtgcgagggcgc

SEQ ID NO: 3093481 - DNA, 25 bp, Homo sapien
ctcagggcccgagccgcagagctgt

SEQ ID NO: 3093482 - DNA, 25 bp, Homo sapien
ggcctggacgcgctcagtctgttga

SEQ ID NO: 3093483 - DNA, 25 bp, Homo sapien
tcccgccgcggcatctggagtgctg

SEQ ID NO: 3093484 - DNA, 25 bp, Homo sapien
cctggcatttggatgggcctctctg

SEQ ID NO: 3093485 - DNA, 25 bp, Homo sapien
tgaacgcgttttgagtcctctgcag

SEQ ID NO: 3093486 - DNA, 25 bp, Homo sapien
tgctgtggccccgtttccgtaactc

SEQ ID NO: 3093487 - DNA, 25 bp, Homo sapien
aacaagccatactgatgggttgcca

SEQ ID NO: 3093488 - DNA, 25 bp, Homo sapien
acaagccatactgatgggttgccat

SEQ ID NO: 3093489 - DNA, 25 bp, Homo sapien
tctgagcttccgtatctaggaaagg

SEQ ID NO: 3093490 - DNA, 25 bp, Homo sapien
gagcttccgtatctaggaaagggaa

SEQ ID NO: 3093491 - DNA, 25 bp, Homo sapien
acagtctgaataacaacgaagttct

SEQ ID NO: 3093492 - DNA, 25 bp, Homo sapien
catggcctcaagtatcacctcaata

SEQ ID NO: 3093493 - DNA, 25 bp, Homo sapien
agttctaagtcacattcgtttctct

SEQ ID NO: 3093494 - DNA, 25 bp, Homo sapien
tggcctcaagtatcacctcaatact

SEQ ID NO: 3093495 - DNA, 25 bp, Homo sapien
ctgtaacccgtaagagcagcccaag

SEQ ID NO: 3093496 - DNA, 25 bp, Homo sapien
tctagtgatgcatcaccaaatgctt

SEQ ID NO: 3093497 - DNA, 25 bp, Homo sapien
tcttccaaattctagtgatgcatca

SEQ ID NO: 3093498 - DNA, 25 bp, Homo sapien
caagcaaatgacttggcacatcttc

SEQ ID NO: 3093499 - DNA, 25 bp, Homo sapien
gtcaaaaatcatactaaacaattag

SEQ ID NO: 3093500 - DNA, 25 bp, Homo sapien
atgtgtcaaaaatcatactaaacaa

SEQ ID NO: 3093501 - DNA, 25 bp, Homo sapien
ttttttgcgtctgtccatacatttt

SEQ ID NO: 3093502 - DNA, 25 bp, Homo sapien
gtgtcaaaaatcatactaaacaatt

SEQ ID NO: 3093503 - DNA, 25 bp, Homo sapien
ttcacagcagtgttcgcagagccag

SEQ ID NO: 3093504 - DNA, 25 bp, Homo sapien
aaaatgtagccttcacagcagtgtt

SEQ ID NO: 3093505 - DNA, 25 bp, Homo sapien
ctaggtggtccgcaaaaaaatgtag

SEQ ID NO: 3093506 - DNA, 25 bp, Homo sapien
agcagtgttcgcagagccagcccac

SEQ ID NO: 3093507 - DNA, 25 bp, Homo sapien
gattcatagaagtctaagtcctggc

SEQ ID NO: 3093508 - DNA, 25 bp, Homo sapien
tagaagtctaagtcctggcaaactg

SEQ ID NO: 3093509 - DNA, 25 bp, Homo sapien
caaactgacagaagagctatggcat

SEQ ID NO: 3093510 - DNA, 25 bp, Homo sapien
acagaagagctatggcattgggaga

SEQ ID NO: 3093511 - DNA, 25 bp, Homo sapien
gcacactgcctgagacataatgata

SEQ ID NO: 3093512 - DNA, 25 bp, Homo sapien
gatttattactacctgaagtgccta

SEQ ID NO: 3093513 - DNA, 25 bp, Homo sapien
taataatcacttatagcacactgcc

SEQ ID NO: 3093514 - DNA, 25 bp, Homo sapien
ctccagggatcaaaccagaattaaa

SEQ ID NO: 3093515 - DNA, 25 bp, Homo sapien
attaataatatggcttttgtcacca

SEQ ID NO: 3093516 - DNA, 25 bp, Homo sapien
aattaataatatggcttttgtcacc

SEQ ID NO: 3093517 - DNA, 25 bp, Homo sapien
ttaataatatggcttttgtcaccat

SEQ ID NO: 3093518 - DNA, 25 bp, Homo sapien
tacacatgcggaactctgccgtgca

SEQ ID NO: 3093519 - DNA, 25 bp, Homo sapien
tagtttatgctcaggtacacgagag

SEQ ID NO: 3093520 - DNA, 25 bp, Homo sapien
cacgagagcatttacggtcattaca

SEQ ID NO: 3093521 - DNA, 25 bp, Homo sapien
catgaaggcttagatcggcacctgc

SEQ ID NO: 3093522 - DNA, 25 bp, Homo sapien
aagaaatcaggtggctcattgcagt

SEQ ID NO: 3093523 - DNA, 25 bp, Homo sapien
gaaatcaggtggctcattgcagtca

SEQ ID NO: 3093524 - DNA, 25 bp, Homo sapien
ctcattgcagtcacacactgattca

SEQ ID NO: 3093525 - DNA, 25 bp, Homo sapien
ggtggctcattgcagtcacacactg

SEQ ID NO: 3093526 - DNA, 25 bp, Homo sapien
ttccttaaatcagagccccgtggac

SEQ ID NO: 3093527 - DNA, 25 bp, Homo sapien
ggactccgccggagaactacattac

SEQ ID NO: 3093528 - DNA, 25 bp, Homo sapien
gagccccgtggactccgccggagaa

SEQ ID NO: 3093529 - DNA, 25 bp, Homo sapien
ggcgaccacgtttccttaaatcaga

SEQ ID NO: 3093530 - DNA, 25 bp, Homo sapien
aagatactcagttccaagtttggag

SEQ ID NO: 3093531 - DNA, 25 bp, Homo sapien
ggacgtctgcgcactaagatactca

SEQ ID NO: 3093532 - DNA, 25 bp, Homo sapien
tcgcgcccttcgcaggaaggacgtc

SEQ ID NO: 3093533 - DNA, 25 bp, Homo sapien
tggagcttttagctgccagccctgg

SEQ ID NO: 3093534 - DNA, 25 bp, Homo sapien
ctttccagtctgttttgcaaggtgt

SEQ ID NO: 3093535 - DNA, 25 bp, Homo sapien
gctgcatcggtcaagagaaactcca

SEQ ID NO: 3093536 - DNA, 25 bp, Homo sapien
gcctgcagcttgcatctttgttgca

SEQ ID NO: 3093537 - DNA, 25 bp, Homo sapien
gcatgaagattgcacgcctgcagct

SEQ ID NO: 3093538 - DNA, 25 bp, Homo sapien
tatgtagtccataatctccctcttt

SEQ ID NO: 3093539 - DNA, 25 bp, Homo sapien
tcccagtgaaatgattcttcacttc

SEQ ID NO: 3093540 - DNA, 25 bp, Homo sapien
cccatgcggttcagtatgtagtcca

SEQ ID NO: 3093541 - DNA, 25 bp, Homo sapien
tgagttggcccatgcggttcagtat

SEQ ID NO: 3093542 - DNA, 25 bp, Homo sapien
cacagagtcgcttacatcgtggata

SEQ ID NO: 3093543 - DNA, 25 bp, Homo sapien
tgctcacagagtcgcttacatcgtg

SEQ ID NO: 3093544 - DNA, 25 bp, Homo sapien
tttgtgctcacagagtcgcttacat

SEQ ID NO: 3093545 - DNA, 25 bp, Homo sapien
cgcttacatcgtggatattgggtat

SEQ ID NO: 3093546 - DNA, 25 bp, Homo sapien
tatatgatgtgtagttgttccagta

SEQ ID NO: 3093547 - DNA, 25 bp, Homo sapien
gactttcttgcatctatatgatgtg

SEQ ID NO: 3093548 - DNA, 25 bp, Homo sapien
tgttccagtacccaccatattttgg

SEQ ID NO: 3093549 - DNA, 25 bp, Homo sapien
ctaaactttctggtctgagatgaca

SEQ ID NO: 3093550 - DNA, 25 bp, Homo sapien
atgtgtcctctatatagttgaccct

SEQ ID NO: 3093551 - DNA, 25 bp, Homo sapien
gaccctgaacaatgtaaggattagg

SEQ ID NO: 3093552 - DNA, 25 bp, Homo sapien
tgtcctctatatagttgaccctgaa

SEQ ID NO: 3093553 - DNA, 25 bp, Homo sapien
ttgaccctgaacaatgtaaggatta

SEQ ID NO: 3093554 - DNA, 25 bp, Homo sapien
tggcttcttccttttcaataccacc

SEQ ID NO: 3093555 - DNA, 25 bp, Homo sapien
tctggcttcttccttttcaatacca

SEQ ID NO: 3093556 - DNA, 25 bp, Homo sapien
gcttcttccttttcaataccaccca

SEQ ID NO: 3093557 - DNA, 25 bp, Homo sapien
cccctctggcttcttccttttcaat

SEQ ID NO: 3093558 - DNA, 25 bp, Homo sapien
tgtttccagacctctggattttacc

SEQ ID NO: 3093559 - DNA, 25 bp, Homo sapien
aaatgtggacgcttcccagagtggc

SEQ ID NO: 3093560 - DNA, 25 bp, Homo sapien
gagtggcttttctcttgaggtatgc

SEQ ID NO: 3093561 - DNA, 25 bp, Homo sapien
tgaggtatgctgttgctctaagagc

SEQ ID NO: 3093562 - DNA, 25 bp, Homo sapien
agatcttgcctctccttggatcctt

SEQ ID NO: 3093563 - DNA, 25 bp, Homo sapien
cttgaaagacacttctgacttcatc

SEQ ID NO: 3093564 - DNA, 25 bp, Homo sapien
gcctctccttggatccttaatcctg

SEQ ID NO: 3093565 - DNA, 25 bp, Homo sapien
ccttggatccttaatcctgatggtc

SEQ ID NO: 3093566 - DNA, 25 bp, Homo sapien
ttgaggtcagttggcaaacagggct

SEQ ID NO: 3093567 - DNA, 25 bp, Homo sapien
gggctgtttcaacccgaaattgaga

SEQ ID NO: 3093568 - DNA, 25 bp, Homo sapien
ggagctgagggacgcttattcctag

SEQ ID NO: 3093569 - DNA, 25 bp, Homo sapien
taatgaaggtgtactaggagtgagc

SEQ ID NO: 3093570 - DNA, 25 bp, Homo sapien
tgttcccagcccgaagctggaggtc

SEQ ID NO: 3093571 - DNA, 25 bp, Homo sapien
cccagcccgaagctggaggtctgtg

SEQ ID NO: 3093572 - DNA, 25 bp, Homo sapien
tggttcccccatggctgtcttgctg

SEQ ID NO: 3093573 - DNA, 25 bp, Homo sapien
gtggttcccccatggctgtcttgct

SEQ ID NO: 3093574 - DNA, 25 bp, Homo sapien
ccttgacaacggaggtgttagtagg

SEQ ID NO: 3093575 - DNA, 25 bp, Homo sapien
ggctggctgggtgtagctgttgcag

SEQ ID NO: 3093576 - DNA, 25 bp, Homo sapien
ggcttccttgacaacggaggtgtta

SEQ ID NO: 3093577 - DNA, 25 bp, Homo sapien
tcattgccggaggtggagttgcctt

SEQ ID NO: 3093578 - DNA, 25 bp, Homo sapien
cttggatgtctgagtattgaatcca

SEQ ID NO: 3093579 - DNA, 25 bp, Homo sapien
gtattgaatccacaattcattacca

SEQ ID NO: 3093580 - DNA, 25 bp, Homo sapien
gagtattgaatccacaattcattac

SEQ ID NO: 3093581 - DNA, 25 bp, Homo sapien
ggatgtctgagtattgaatccacaa

SEQ ID NO: 3093582 - DNA, 25 bp, Homo sapien
tattgcatagagtgacagcctcaac

SEQ ID NO: 3093583 - DNA, 25 bp, Homo sapien
taagcgttgggacgaagtgactcat

SEQ ID NO: 3093584 - DNA, 25 bp, Homo sapien
catttggccgaaagctggttattgc

SEQ ID NO: 3093585 - DNA, 25 bp, Homo sapien
tgactcatggagacactttgccttt

SEQ ID NO: 3093586 - DNA, 25 bp, Homo sapien
tgacgcagagcaggagtttggcagg

SEQ ID NO: 3093587 - DNA, 25 bp, Homo sapien
ggaacaggagtgcagatttctggga

SEQ ID NO: 3093588 - DNA, 25 bp, Homo sapien
agtttggcaggaacaggagtgcaga

SEQ ID NO: 3093589 - DNA, 25 bp, Homo sapien
ctgatgacgcagagcaggagtttgg

SEQ ID NO: 3093590 - DNA, 25 bp, Homo sapien
gggatcctcttcttattaaagtctg

SEQ ID NO: 3093591 - DNA, 25 bp, Homo sapien
tggtatttgtatgaatgtctgaatg

SEQ ID NO: 3093592 - DNA, 25 bp, Homo sapien
tcttcttattaaagtctgtccttcc

SEQ ID NO: 3093593 - DNA, 25 bp, Homo sapien
gaacataggagctcaagttggaatt

SEQ ID NO: 3093594 - DNA, 25 bp, Homo sapien
tttcctggtgctgtctgcctagaac

SEQ ID NO: 3093595 - DNA, 25 bp, Homo sapien
ggtgctgtctgcctagaacttgaca

SEQ ID NO: 3093596 - DNA, 25 bp, Homo sapien
tagaacttgacactacctcctcaca

SEQ ID NO: 3093597 - DNA, 25 bp, Homo sapien
tgtctgcctagaacttgacactacc

SEQ ID NO: 3093598 - DNA, 25 bp, Homo sapien
gaaatatgccgtaggaaacttattc

SEQ ID NO: 3093599 - DNA, 25 bp, Homo sapien
gagaaaattctatatctatgcaagc

SEQ ID NO: 3093600 - DNA, 25 bp, Homo sapien
gagtgcaagaaattgggagtcctag

SEQ ID NO: 3093601 - DNA, 25 bp, Homo sapien
ttgaactcaggaaatctatggtatt

SEQ ID NO: 3093602 - DNA, 25 bp, Homo sapien
tctctttctatgaccacagctgttc

SEQ ID NO: 3093603 - DNA, 25 bp, Homo sapien
ggtaatacttctaggaccctgaatg

SEQ ID NO: 3093604 - DNA, 25 bp, Homo sapien
taaagctctggacaagttgatctct

SEQ ID NO: 3093605 - DNA, 25 bp, Homo sapien
gaagccctagaggattaaagctctg

SEQ ID NO: 3093606 - DNA, 25 bp, Homo sapien
tgttttagctcccaggttgtgcatg

SEQ ID NO: 3093607 - DNA, 25 bp, Homo sapien
tagaaggcatctggtacagccaaaa

SEQ ID NO: 3093608 - DNA, 25 bp, Homo sapien
ggttggaacctctgctggattggaa

SEQ ID NO: 3093609 - DNA, 25 bp, Homo sapien
ttcttcaggtgtcggagaagtctga

SEQ ID NO: 3093610 - DNA, 25 bp, Homo sapien
caggttcaggaaaggttaaatatag

SEQ ID NO: 3093611 - DNA, 25 bp, Homo sapien
taaaggacctgtatgtagaccatgt

SEQ ID NO: 3093612 - DNA, 25 bp, Homo sapien
gagatctacttcacatctaggatga

SEQ ID NO: 3093613 - DNA, 25 bp, Homo sapien
ggtgtagctgctttgagaaacaggt

SEQ ID NO: 3093614 - DNA, 25 bp, Homo sapien
gagactcgtgggtagttcttgagat

SEQ ID NO: 3093615 - DNA, 25 bp, Homo sapien
gggtagttcttgagatgggaaccac

SEQ ID NO: 3093616 - DNA, 25 bp, Homo sapien
actgagactcgtgggtagttcttga

SEQ ID NO: 3093617 - DNA, 25 bp, Homo sapien
gtgtccactgagactcgtgggtagt

SEQ ID NO: 3093618 - DNA, 25 bp, Homo sapien
acgttgtcccttgggacactgcttc

SEQ ID NO: 3093619 - DNA, 25 bp, Homo sapien
gatcccacgttgtcccttgggacac

SEQ ID NO: 3093620 - DNA, 25 bp, Homo sapien
gttgtcccttgggacactgcttcat

SEQ ID NO: 3093621 - DNA, 25 bp, Homo sapien
ccacgttgtcccttgggacactgct

SEQ ID NO: 3093622 - DNA, 25 bp, Homo sapien
cactgaatgatacttcactgctggt

SEQ ID NO: 3093623 - DNA, 25 bp, Homo sapien
aagattggaggatggcagagtccct

SEQ ID NO: 3093624 - DNA, 25 bp, Homo sapien
tgccaactacccttggaacgtaagc

SEQ ID NO: 3093625 - DNA, 25 bp, Homo sapien
tttacattgctgttgcaaagccagc

SEQ ID NO: 3093626 - DNA, 25 bp, Homo sapien
gagtgtgtgcaagacctctcgtgta

SEQ ID NO: 3093627 - DNA, 25 bp, Homo sapien
tcgtgtaccccatcattttcggtgc

SEQ ID NO: 3093628 - DNA, 25 bp, Homo sapien
cggtgcagtcaaagctagcgaacat

SEQ ID NO: 3093629 - DNA, 25 bp, Homo sapien
ccatcattttcggtgcagtcaaagc

SEQ ID NO: 3093630 - DNA, 25 bp, Homo sapien
tctgtgttcacggatgaccctcaaa

SEQ ID NO: 3093631 - DNA, 25 bp, Homo sapien
tactgataggaagtgtagaacacct

SEQ ID NO: 3093632 - DNA, 25 bp, Homo sapien
aacatttgcagggagtaacatgcca

SEQ ID NO: 3093633 - DNA, 25 bp, Homo sapien
caaaatagttaatgccccaccagca

SEQ ID NO: 3093634 - DNA, 25 bp, Homo sapien
tgtgacatcctagaccacggttggc

SEQ ID NO: 3093635 - DNA, 25 bp, Homo sapien
gaaagcatctatacgcaatacacaa

SEQ ID NO: 3093636 - DNA, 25 bp, Homo sapien
ggttgcagtttatatactccacggg

SEQ ID NO: 3093637 - DNA, 25 bp, Homo sapien
ctgtagaatattgactgtgacatcc

SEQ ID NO: 3093638 - DNA, 25 bp, Homo sapien
ttcagaccatattcagtggtgcccc

SEQ ID NO: 3093639 - DNA, 25 bp, Homo sapien
ttttatagccaaccacggctgtgag

SEQ ID NO: 3093640 - DNA, 25 bp, Homo sapien
tgtcaacctccagtcagaatatctg

SEQ ID NO: 3093641 - DNA, 25 bp, Homo sapien
tgaactctgcctatctgaacctctg

SEQ ID NO: 3093642 - DNA, 25 bp, Homo sapien
gaaaatgccctgatgctagaatgag

SEQ ID NO: 3093643 - DNA, 25 bp, Homo sapien
gatatcggagaggtcctatgcaccc

SEQ ID NO: 3093644 - DNA, 25 bp, Homo sapien
gattgccgcattgtctctttgtgaa

SEQ ID NO: 3093645 - DNA, 25 bp, Homo sapien
catctcttctttacggattgccgca

SEQ ID NO: 3093646 - DNA, 25 bp, Homo sapien
gccaactccccagcatgtaggggtg

SEQ ID NO: 3093647 - DNA, 25 bp, Homo sapien
agactgagacctaaggtgaaaggga

SEQ ID NO: 3093648 - DNA, 25 bp, Homo sapien
ctgagacctaaggtgaaagggactg

SEQ ID NO: 3093649 - DNA, 25 bp, Homo sapien
ccaactccccagcatgtaggggtgg

SEQ ID NO: 3093650 - DNA, 25 bp, Homo sapien
tttgagccgtcttcaaacactggca

SEQ ID NO: 3093651 - DNA, 25 bp, Homo sapien
gctgtgtcttacgaaggcaaacgaa

SEQ ID NO: 3093652 - DNA, 25 bp, Homo sapien
tccactgacgcaggaacatttcgct

SEQ ID NO: 3093653 - DNA, 25 bp, Homo sapien
attaaagtacctggcgtttgagccg

SEQ ID NO: 3093654 - DNA, 25 bp, Homo sapien
gaaaaatctctccaaggcaacatac

SEQ ID NO: 3093655 - DNA, 25 bp, Homo sapien
ctggaaaaatctctccaaggcaaca

SEQ ID NO: 3093656 - DNA, 25 bp, Homo sapien
tggaaaaatctctccaaggcaacat

SEQ ID NO: 3093657 - DNA, 25 bp, Homo sapien
ggaaaaatctctccaaggcaacata

SEQ ID NO: 3093658 - DNA, 25 bp, Homo sapien
tcctacatcatcgagtgtcatcctt

SEQ ID NO: 3093659 - DNA, 25 bp, Homo sapien
gtatctcctacatcatcgagtgtca

SEQ ID NO: 3093660 - DNA, 25 bp, Homo sapien
ctacatcatcgagtgtcatccttgt

SEQ ID NO: 3093661 - DNA, 25 bp, Homo sapien
tctcctacatcatcgagtgtcatcc

SEQ ID NO: 3093662 - DNA, 25 bp, Homo sapien
aatctgaagagtactctctgcgtac

SEQ ID NO: 3093663 - DNA, 25 bp, Homo sapien
tctgcgtactttgaagaaggcgcca

SEQ ID NO: 3093664 - DNA, 25 bp, Homo sapien
gaagagtactctctgcgtactttga

SEQ ID NO: 3093665 - DNA, 25 bp, Homo sapien
actctctgcgtactttgaagaaggc

SEQ ID NO: 3093666 - DNA, 25 bp, Homo sapien
tttcaaagccctttaccgtggatga

SEQ ID NO: 3093667 - DNA, 25 bp, Homo sapien
ataagtgaatgtacgatgggtggtc

SEQ ID NO: 3093668 - DNA, 25 bp, Homo sapien
aatgtacgatgggtggtcagatttg

SEQ ID NO: 3093669 - DNA, 25 bp, Homo sapien
caaagccctttaccgtggatgaagt

SEQ ID NO: 3093670 - DNA, 25 bp, Homo sapien
ggttgcttgaatttgactccttgcc

SEQ ID NO: 3093671 - DNA, 25 bp, Homo sapien
ttcaattgtgccatgcccttttggg

SEQ ID NO: 3093672 - DNA, 25 bp, Homo sapien
tgttctggaccccttgcaggtcagc

SEQ ID NO: 3093673 - DNA, 25 bp, Homo sapien
tggcctcttcagaccttgcacttgt

SEQ ID NO: 3093674 - DNA, 25 bp, Homo sapien
ttttagctccttccgaggccatgtc

SEQ ID NO: 3093675 - DNA, 25 bp, Homo sapien
gaaagtgcattcacccaaaccacaa

SEQ ID NO: 3093676 - DNA, 25 bp, Homo sapien
ggcttcaagcccaggatcgactcaa

SEQ ID NO: 3093677 - DNA, 25 bp, Homo sapien
ctctcccggaggtgaactgctggga

SEQ ID NO: 3093678 - DNA, 25 bp, Homo sapien
caggcattttgattctggtcacgac

SEQ ID NO: 3093679 - DNA, 25 bp, Homo sapien
gcccaggcattttgattctggtcac

SEQ ID NO: 3093680 - DNA, 25 bp, Homo sapien
gcattttgattctggtcacgaccac

SEQ ID NO: 3093681 - DNA, 25 bp, Homo sapien
ctcttgcccaggcattttgattctg

SEQ ID NO: 3093682 - DNA, 25 bp, Homo sapien
gatttagccctacgcacatccttgc

SEQ ID NO: 3093683 - DNA, 25 bp, Homo sapien
gttgattcaccccacaggacattat

SEQ ID NO: 3093684 - DNA, 25 bp, Homo sapien
tgaaggatgacgcagatttagccct

SEQ ID NO: 3093685 - DNA, 25 bp, Homo sapien
gacgcagatttagccctacgcacat

SEQ ID NO: 3093686 - DNA, 25 bp, Homo sapien
tgaaaacacccgcactttgggagtg

SEQ ID NO: 3093687 - DNA, 25 bp, Homo sapien
tccgccttccataaagacgagaaag

SEQ ID NO: 3093688 - DNA, 25 bp, Homo sapien
gacgagaaagttgtcagtcatttcc

SEQ ID NO: 3093689 - DNA, 25 bp, Homo sapien
cagaagacgctgcaagttccagttc

SEQ ID NO: 3093690 - DNA, 25 bp, Homo sapien
taggcagctgttctttcaaagggtc

SEQ ID NO: 3093691 - DNA, 25 bp, Homo sapien
ttcttccgtgtaggctaagaagaga

SEQ ID NO: 3093692 - DNA, 25 bp, Homo sapien
ttgcctgggctaggcagctgttctt

SEQ ID NO: 3093693 - DNA, 25 bp, Homo sapien
tgtaggctaagaagagaggttgcct

SEQ ID NO: 3093694 - DNA, 25 bp, Homo sapien
caccagattctgatgaaccttgata

SEQ ID NO: 3093695 - DNA, 25 bp, Homo sapien
tgctgcaccagattctgatgaacct

SEQ ID NO: 3093696 - DNA, 25 bp, Homo sapien
tgtgccctgtgacacatcttataaa

SEQ ID NO: 3093697 - DNA, 25 bp, Homo sapien
ttctatgtgccctgtgacacatctt

SEQ ID NO: 3093698 - DNA, 25 bp, Homo sapien
tattctttagtggccagtttcacaa

SEQ ID NO: 3093699 - DNA, 25 bp, Homo sapien
ctattctttagtggccagtttcaca

SEQ ID NO: 3093700 - DNA, 25 bp, Homo sapien
agcacctggtaacagcggcacttca

SEQ ID NO: 3093701 - DNA, 25 bp, Homo sapien
gaggaggagacgataacagtgggag

SEQ ID NO: 3093702 - DNA, 25 bp, Homo sapien
gagacgataacagtgggagaagcac

SEQ ID NO: 3093703 - DNA, 25 bp, Homo sapien
tggtaacagcggcacttcatccagg

SEQ ID NO: 3093704 - DNA, 25 bp, Homo sapien
atgtgcttccttcaactggtattaa

SEQ ID NO: 3093705 - DNA, 25 bp, Homo sapien
actttcttcccggaatgtgcttcct

SEQ ID NO: 3093706 - DNA, 25 bp, Homo sapien
ctatgctgaactttcttcccggaat

SEQ ID NO: 3093707 - DNA, 25 bp, Homo sapien
gcttccttcaactggtattaaacag

SEQ ID NO: 3093708 - DNA, 25 bp, Homo sapien
ctctttaacgcaatgacctcctcta

SEQ ID NO: 3093709 - DNA, 25 bp, Homo sapien
tctataccactttcaatgactgtac

SEQ ID NO: 3093710 - DNA, 25 bp, Homo sapien
taacgcaatgacctcctctatacca

SEQ ID NO: 3093711 - DNA, 25 bp, Homo sapien
gacctcctctataccactttcaatg

SEQ ID NO: 3093712 - DNA, 25 bp, Homo sapien
cttggagctccacagaaaaaccaga

SEQ ID NO: 3093713 - DNA, 25 bp, Homo sapien
gcaatcggaagagaacttggtttca

SEQ ID NO: 3093714 - DNA, 25 bp, Homo sapien
ctttcataagctgtagtgactgtca

SEQ ID NO: 3093715 - DNA, 25 bp, Homo sapien
tcccaatagcactggctttcataag

SEQ ID NO: 3093716 - DNA, 25 bp, Homo sapien
tcctctgattcagctagccaaatgc

SEQ ID NO: 3093717 - DNA, 25 bp, Homo sapien
tgttcttggataactgcgtgcaaca

SEQ ID NO: 3093718 - DNA, 25 bp, Homo sapien
taactgcgtgcaacacccattagct

SEQ ID NO: 3093719 - DNA, 25 bp, Homo sapien
ctgattcagctagccaaatgccaca

SEQ ID NO: 3093720 - DNA, 25 bp, Homo sapien
gagacttttcattgacactgagtag

SEQ ID NO: 3093721 - DNA, 25 bp, Homo sapien
tttagtggtgagacaatgaacatcc

SEQ ID NO: 3093722 - DNA, 25 bp, Homo sapien
gacagcaggaatgttctccgttgaa

SEQ ID NO: 3093723 - DNA, 25 bp, Homo sapien
aaacacagagcaggatgctgggttg

SEQ ID NO: 3093724 - DNA, 25 bp, Homo sapien
ttgggcctaacattcctaagacact

SEQ ID NO: 3093725 - DNA, 25 bp, Homo sapien
ggcttgtagactctccaccttgggc

SEQ ID NO: 3093726 - DNA, 25 bp, Homo sapien
tgaggtctcgctgtctaacaagcag

SEQ ID NO: 3093727 - DNA, 25 bp, Homo sapien
gacactctaagttacaccctctgag

SEQ ID NO: 3093728 - DNA, 25 bp, Homo sapien
tcttcctctggctcggatagatgag

SEQ ID NO: 3093729 - DNA, 25 bp, Homo sapien
gaagtatcagctcggttttcatggg

SEQ ID NO: 3093730 - DNA, 25 bp, Homo sapien
gttctgaagcccagaccaaatgttc

SEQ ID NO: 3093731 - DNA, 25 bp, Homo sapien
tgacccgaagtatccaccgtttgaa

SEQ ID NO: 3093732 - DNA, 25 bp, Homo sapien
ttgaaggaaagttcccggcatctta

SEQ ID NO: 3093733 - DNA, 25 bp, Homo sapien
ttcaagggctaaccctggtgtgggc

SEQ ID NO: 3093734 - DNA, 25 bp, Homo sapien
gaattgactgtcaatcaaaactggg

SEQ ID NO: 3093735 - DNA, 25 bp, Homo sapien
agttcccggcatcttaggcagtata

SEQ ID NO: 3093736 - DNA, 25 bp, Homo sapien
ttcttccatattcttaggctttcat

SEQ ID NO: 3093737 - DNA, 25 bp, Homo sapien
gctgaacattgagtttcatgctagc

SEQ ID NO: 3093738 - DNA, 25 bp, Homo sapien
catgctagccacgaggtcattttca

SEQ ID NO: 3093739 - DNA, 25 bp, Homo sapien
agctgaacattgagtttcatgctag

SEQ ID NO: 3093740 - DNA, 25 bp, Homo sapien
tcaggagggctgtgattctccaatc

SEQ ID NO: 3093741 - DNA, 25 bp, Homo sapien
cacctctgtggtcacagcttcaatg

SEQ ID NO: 3093742 - DNA, 25 bp, Homo sapien
ggctgtgattctccaatcacctctg

SEQ ID NO: 3093743 - DNA, 25 bp, Homo sapien
tgattctccaatcacctctgtggtc

SEQ ID NO: 3093744 - DNA, 25 bp, Homo sapien
agttggagagaaaagcgttgatctg

SEQ ID NO: 3093745 - DNA, 25 bp, Homo sapien
tggtccattgacagtttgcgttttc

SEQ ID NO: 3093746 - DNA, 25 bp, Homo sapien
tgtttgggaaggagaatcagtgcct

SEQ ID NO: 3093747 - DNA, 25 bp, Homo sapien
tccacttctgaatatgagcaaatca

SEQ ID NO: 3093748 - DNA, 25 bp, Homo sapien
tctggagtaggttggccccagttcc

SEQ ID NO: 3093749 - DNA, 25 bp, Homo sapien
gcatgacacatccatgtagaaagtt

SEQ ID NO: 3093750 - DNA, 25 bp, Homo sapien
taacatgctctggacagtagggaga

SEQ ID NO: 3093751 - DNA, 25 bp, Homo sapien
gggcttagcccatacataacatgct

SEQ ID NO: 3093752 - DNA, 25 bp, Homo sapien
gcagcaggtctcagtagtggctgct

SEQ ID NO: 3093753 - DNA, 25 bp, Homo sapien
tagtggctgctgtttagcctgggtc

SEQ ID NO: 3093754 - DNA, 25 bp, Homo sapien
ctggatattgagagcagcaggtctc

SEQ ID NO: 3093755 - DNA, 25 bp, Homo sapien
tttagcctgggtctgaaatgagaag

SEQ ID NO: 3093756 - DNA, 25 bp, Homo sapien
gagcaagagccccagatgataaact

SEQ ID NO: 3093757 - DNA, 25 bp, Homo sapien
ccttagttcaaaggccagagcaaga

SEQ ID NO: 3093758 - DNA, 25 bp, Homo sapien
gcttgaacaagcatcgagtattccg

SEQ ID NO: 3093759 - DNA, 25 bp, Homo sapien
cacaagactgtgttccattgaaggc

SEQ ID NO: 3093760 - DNA, 25 bp, Homo sapien
cagatgtaaggaaacagcagtggcc

SEQ ID NO: 3093761 - DNA, 25 bp, Homo sapien
gtggcctgagctcttgcaatctcga

SEQ ID NO: 3093762 - DNA, 25 bp, Homo sapien
gcaatctcgatcttgcatcttgaca

SEQ ID NO: 3093763 - DNA, 25 bp, Homo sapien
cctttgacattctggagtaccttgt

SEQ ID NO: 3093764 - DNA, 25 bp, Homo sapien
gtccaccttctctttcctgctgcta

SEQ ID NO: 3093765 - DNA, 25 bp, Homo sapien
tccaccttctctttcctgctgctac

SEQ ID NO: 3093766 - DNA, 25 bp, Homo sapien
caccttctctttcctgctgctacca

SEQ ID NO: 3093767 - DNA, 25 bp, Homo sapien
ccaccttctctttcctgctgctacc

SEQ ID NO: 3093768 - DNA, 25 bp, Homo sapien
caggtcgtggtatgctcttctttac

SEQ ID NO: 3093769 - DNA, 25 bp, Homo sapien
gctgtttctgaacacctggagcgtt

SEQ ID NO: 3093770 - DNA, 25 bp, Homo sapien
ctagtaagggcaaggtgctgtttct

SEQ ID NO: 3093771 - DNA, 25 bp, Homo sapien
aacacctggagcgttcatcagactc

SEQ ID NO: 3093772 - DNA, 25 bp, Homo sapien
tggcaagtgattcaattgcagaatc

SEQ ID NO: 3093773 - DNA, 25 bp, Homo sapien
cttgccattgactggcaagtgattc

SEQ ID NO: 3093774 - DNA, 25 bp, Homo sapien
ccccttgccattgactggcaagtga

SEQ ID NO: 3093775 - DNA, 25 bp, Homo sapien
attgcagaatcttatcctgagggta

SEQ ID NO: 3093776 - DNA, 25 bp, Homo sapien
tttcaacgggagtaataaattcaca

SEQ ID NO: 3093777 - DNA, 25 bp, Homo sapien
caacgggagtaataaattcacatga

SEQ ID NO: 3093778 - DNA, 25 bp, Homo sapien
aacgggagtaataaattcacatgaa

SEQ ID NO: 3093779 - DNA, 25 bp, Homo sapien
tcaacgggagtaataaattcacatg

SEQ ID NO: 3093780 - DNA, 25 bp, Homo sapien
ccattagggctggcacgtaaaaatc

SEQ ID NO: 3093781 - DNA, 25 bp, Homo sapien
tagggctggcacgtaaaaatccaaa

SEQ ID NO: 3093782 - DNA, 25 bp, Homo sapien
ttagggctggcacgtaaaaatccaa

SEQ ID NO: 3093783 - DNA, 25 bp, Homo sapien
cattagggctggcacgtaaaaatcc

SEQ ID NO: 3093784 - DNA, 25 bp, Homo sapien
atgacccattggcaccgcaggtctg

SEQ ID NO: 3093785 - DNA, 25 bp, Homo sapien
gacccattggcaccgcaggtctgtt

SEQ ID NO: 3093786 - DNA, 25 bp, Homo sapien
ctaaccaaacatgacccattggcac

SEQ ID NO: 3093787 - DNA, 25 bp, Homo sapien
acatgacccattggcaccgcaggtc

SEQ ID NO: 3093788 - DNA, 25 bp, Homo sapien
cctaaagaaccctgaagaccctcag

SEQ ID NO: 3093789 - DNA, 25 bp, Homo sapien
gaaccctgaagaccctcagccagga

SEQ ID NO: 3093790 - DNA, 25 bp, Homo sapien
taaagaaccctgaagaccctcagcc

SEQ ID NO: 3093791 - DNA, 25 bp, Homo sapien
aagaaccctgaagaccctcagccag

SEQ ID NO: 3093792 - DNA, 25 bp, Homo sapien
gtgcagacagttgaggcagaaaacc

SEQ ID NO: 3093793 - DNA, 25 bp, Homo sapien
agccacaggcaggaagcggtgcaga

SEQ ID NO: 3093794 - DNA, 25 bp, Homo sapien
ctggccggtcctcctgcaggctgag

SEQ ID NO: 3093795 - DNA, 25 bp, Homo sapien
ctcacacctgtagccagagccacag

SEQ ID NO: 3093796 - DNA, 25 bp, Homo sapien
aggtgaccttcagggtgggctgaag

SEQ ID NO: 3093797 - DNA, 25 bp, Homo sapien
tgtgtggcaactgccccctgatgct

SEQ ID NO: 3093798 - DNA, 25 bp, Homo sapien
caggtgaccttcagggtgggctgaa

SEQ ID NO: 3093799 - DNA, 25 bp, Homo sapien
gactttatctttccactcggcaagc

SEQ ID NO: 3093800 - DNA, 25 bp, Homo sapien
ggcaagctgaattcttaaagtccta

SEQ ID NO: 3093801 - DNA, 25 bp, Homo sapien
aaacctgtttggcacgtgctcttgt

SEQ ID NO: 3093802 - DNA, 25 bp, Homo sapien
gctgaattcttaaagtcctatctga

SEQ ID NO: 3093803 - DNA, 25 bp, Homo sapien
ggttctcctcgatgttagcatgtga

SEQ ID NO: 3093804 - DNA, 25 bp, Homo sapien
aattaatacaaaccgtagtctctgg

SEQ ID NO: 3093805 - DNA, 25 bp, Homo sapien
gaagcaagggctgaagtccggacat

SEQ ID NO: 3093806 - DNA, 25 bp, Homo sapien
gaagtccggacatgacttttcaatt

SEQ ID NO: 3093807 - DNA, 25 bp, Homo sapien
ctggttagtcgtgggcatcagtttc

SEQ ID NO: 3093808 - DNA, 25 bp, Homo sapien
gtggttgccgctgcatctggttagt

SEQ ID NO: 3093809 - DNA, 25 bp, Homo sapien
agtttctgttggtccgtggaggagc

SEQ ID NO: 3093810 - DNA, 25 bp, Homo sapien
tacaggacatccctagaggatttca

SEQ ID NO: 3093811 - DNA, 25 bp, Homo sapien
cacacaaacacatttgtgaagattg

SEQ ID NO: 3093812 - DNA, 25 bp, Homo sapien
cacaaacacatttgtgaagattgtc

SEQ ID NO: 3093813 - DNA, 25 bp, Homo sapien
aacacacaaacacatttgtgaagat

SEQ ID NO: 3093814 - DNA, 25 bp, Homo sapien
ctaacacacaaacacatttgtgaag

SEQ ID NO: 3093815 - DNA, 25 bp, Homo sapien
tcttcccatttctgtaagctggagt

SEQ ID NO: 3093816 - DNA, 25 bp, Homo sapien
ttctgtaagctggagtgacctctac

SEQ ID NO: 3093817 - DNA, 25 bp, Homo sapien
tgtcttcccatttctgtaagctgga

SEQ ID NO: 3093818 - DNA, 25 bp, Homo sapien
tgtaagctggagtgacctctactga

SEQ ID NO: 3093819 - DNA, 25 bp, Homo sapien
tggaagctgcagctcgagtgccagt

SEQ ID NO: 3093820 - DNA, 25 bp, Homo sapien
cagaagcgggaaatttgggtttgtg

SEQ ID NO: 3093821 - DNA, 25 bp, Homo sapien
gctgcagctcgagtgccagttggca

SEQ ID NO: 3093822 - DNA, 25 bp, Homo sapien
tgtgtaaggggacagcttgcttctc

SEQ ID NO: 3093823 - DNA, 25 bp, Homo sapien
aggcatcagtgcgaattaggtttac

SEQ ID NO: 3093824 - DNA, 25 bp, Homo sapien
gggctgagcctacactggacacaaa

SEQ ID NO: 3093825 - DNA, 25 bp, Homo sapien
ttaggtttactagcaggacttgggc

SEQ ID NO: 3093826 - DNA, 25 bp, Homo sapien
cactgaaatttagaagggctgagcc

SEQ ID NO: 3093827 - DNA, 25 bp, Homo sapien
cgggtgtcagaactgttctctgttt

SEQ ID NO: 3093828 - DNA, 25 bp, Homo sapien
ctgattcctcgggtgtcagaactgt

SEQ ID NO: 3093829 - DNA, 25 bp, Homo sapien
gaattctgattcctcgggtgtcaga

SEQ ID NO: 3093830 - DNA, 25 bp, Homo sapien
ctcaggactggttcctctctttctg

SEQ ID NO: 3093831 - DNA, 25 bp, Homo sapien
taagcctgctgattgggtatatatt

SEQ ID NO: 3093832 - DNA, 25 bp, Homo sapien
ccttaagcctgctgattgggtatat

SEQ ID NO: 3093833 - DNA, 25 bp, Homo sapien
cttccttaagcctgctgattgggta

SEQ ID NO: 3093834 - DNA, 25 bp, Homo sapien
cctgctgattgggtatatatttggc

SEQ ID NO: 3093835 - DNA, 25 bp, Homo sapien
gctgcgtgagttccttctgccaagc

SEQ ID NO: 3093836 - DNA, 25 bp, Homo sapien
gctgctgcgtgagttccttctgcca

SEQ ID NO: 3093837 - DNA, 25 bp, Homo sapien
tgctgctgcgtgagttccttctgcc

SEQ ID NO: 3093838 - DNA, 25 bp, Homo sapien
tgctgcgtgagttccttctgccaag

SEQ ID NO: 3093839 - DNA, 25 bp, Homo sapien
tggaggtcccgccatattgggaccg

SEQ ID NO: 3093840 - DNA, 25 bp, Homo sapien
catgcatgagagacagcggtagtac

SEQ ID NO: 3093841 - DNA, 25 bp, Homo sapien
gcatgagagacagcggtagtactct

SEQ ID NO: 3093842 - DNA, 25 bp, Homo sapien
tgagagacagcggtagtactctgga

SEQ ID NO: 3093843 - DNA, 25 bp, Homo sapien
accaaaacaagatcattgacctcca

SEQ ID NO: 3093844 - DNA, 25 bp, Homo sapien
acaagatcattgacctccagttcca

SEQ ID NO: 3093845 - DNA, 25 bp, Homo sapien
ctcctttcacaatatacttatttac

SEQ ID NO: 3093846 - DNA, 25 bp, Homo sapien
ttccatggatatccttttacaaaga

SEQ ID NO: 3093847 - DNA, 25 bp, Homo sapien
atttttgaacatacccctgatcctg

SEQ ID NO: 3093848 - DNA, 25 bp, Homo sapien
ttttgactggagaataaagtaatag

SEQ ID NO: 3093849 - DNA, 25 bp, Homo sapien
tgttctcacaaatgaagtgtgacag

SEQ ID NO: 3093850 - DNA, 25 bp, Homo sapien
ttctcacaaatgaagtgtgacagct

SEQ ID NO: 3093851 - DNA, 25 bp, Homo sapien
gttctcacaaatgaagtgtgacagc

SEQ ID NO: 3093852 - DNA, 25 bp, Homo sapien
gtgttctcacaaatgaagtgtgaca

SEQ ID NO: 3093853 - DNA, 25 bp, Homo sapien
tggaagcaacttcagatatgaggag

SEQ ID NO: 3093854 - DNA, 25 bp, Homo sapien
tttggaagcaacttcagatatgagg

SEQ ID NO: 3093855 - DNA, 25 bp, Homo sapien
gcaacttcagatatgaggagtggag

SEQ ID NO: 3093856 - DNA, 25 bp, Homo sapien
aagcaacttcagatatgaggagtgg

SEQ ID NO: 3093857 - DNA, 25 bp, Homo sapien
gtcagatcacactgctgctagctgg

SEQ ID NO: 3093858 - DNA, 25 bp, Homo sapien
tttcagctgaagaaaggggctgtca

SEQ ID NO: 3093859 - DNA, 25 bp, Homo sapien
aaaggggctgtcagatcacactgct

SEQ ID NO: 3093860 - DNA, 25 bp, Homo sapien
gggctgtcagatcacactgctgcta

SEQ ID NO: 3093861 - DNA, 25 bp, Homo sapien
ctgcatcctagtgacctgaaccaac

SEQ ID NO: 3093862 - DNA, 25 bp, Homo sapien
gggctgtttaaagcaacttgatggg

SEQ ID NO: 3093863 - DNA, 25 bp, Homo sapien
gggccagtgcaacgggatgtaatta

SEQ ID NO: 3093864 - DNA, 25 bp, Homo sapien
taagagcagttaaatcgaagaatct

SEQ ID NO: 3093865 - DNA, 25 bp, Homo sapien
ctctgttgactagaagggctgttta

SEQ ID NO: 3093866 - DNA, 25 bp, Homo sapien
gaagcaatattcatccacacaggct

SEQ ID NO: 3093867 - DNA, 25 bp, Homo sapien
ccttgggcaaactctaaagattcct

SEQ ID NO: 3093868 - DNA, 25 bp, Homo sapien
aaaatgctggtgaaggaccttgggc

SEQ ID NO: 3093869 - DNA, 25 bp, Homo sapien
tgtaattatgtgactcctggaagca

SEQ ID NO: 3093870 - DNA, 25 bp, Homo sapien
taaatctgggtgttacaactttgac

SEQ ID NO: 3093871 - DNA, 25 bp, Homo sapien
tctccataggtctccaggaaattgt

SEQ ID NO: 3093872 - DNA, 25 bp, Homo sapien
tcttagagtatctgtcacgtgcaga

SEQ ID NO: 3093873 - DNA, 25 bp, Homo sapien
gagcattctgtgtctattaggtcca

SEQ ID NO: 3093874 - DNA, 25 bp, Homo sapien
catggctcaagggatgaagtggacc

SEQ ID NO: 3093875 - DNA, 25 bp, Homo sapien
tgttctgccacactaccaccatctc

SEQ ID NO: 3093876 - DNA, 25 bp, Homo sapien
tcaagggatgaagtggacccttcat

SEQ ID NO: 3093877 - DNA, 25 bp, Homo sapien
ctcctcctgttctgccacactacca

SEQ ID NO: 3093878 - DNA, 25 bp, Homo sapien
gctgtaatagcttaccatggtattt

SEQ ID NO: 3093879 - DNA, 25 bp, Homo sapien
gcttaccatggtatttaggtttata

SEQ ID NO: 3093880 - DNA, 25 bp, Homo sapien
gttcccaatgctgtaatagcttacc

SEQ ID NO: 3093881 - DNA, 25 bp, Homo sapien
ttcaccatctgttcccaatgctgta

SEQ ID NO: 3093882 - DNA, 25 bp, Homo sapien
agaaagtaaagcctgctcctgaatt

SEQ ID NO: 3093883 - DNA, 25 bp, Homo sapien
aaagtaaagcctgctcctgaattta

SEQ ID NO: 3093884 - DNA, 25 bp, Homo sapien
gaaagtaaagcctgctcctgaattt

SEQ ID NO: 3093885 - DNA, 25 bp, Homo sapien
gagaaagtaaagcctgctcctgaat

SEQ ID NO: 3093886 - DNA, 25 bp, Homo sapien
tctatgcccgtgaaaagtactgcaa

SEQ ID NO: 3093887 - DNA, 25 bp, Homo sapien
cttttgactagagctgttttctgga

SEQ ID NO: 3093888 - DNA, 25 bp, Homo sapien
catctgcgtgcagttgtttttcctc

SEQ ID NO: 3093889 - DNA, 25 bp, Homo sapien
tccgacgatagacgtaaatagtcct

SEQ ID NO: 3093890 - DNA, 25 bp, Homo sapien
catccttttgtaatcaagtgttcac

SEQ ID NO: 3093891 - DNA, 25 bp, Homo sapien
gagagagtaattcaagcagagtcag

SEQ ID NO: 3093892 - DNA, 25 bp, Homo sapien
tagacagggccagcttatccagaca

SEQ ID NO: 3093893 - DNA, 25 bp, Homo sapien
ctcgcttctctgatcgatctaagag

SEQ ID NO: 3093894 - DNA, 25 bp, Homo sapien
ggcgtcatctgagtgatgtcatgtg

SEQ ID NO: 3093895 - DNA, 25 bp, Homo sapien
tattatcagtctgagtggcgtcatc

SEQ ID NO: 3093896 - DNA, 25 bp, Homo sapien
gctgagctgtattatcagtctgagt

SEQ ID NO: 3093897 - DNA, 25 bp, Homo sapien
gagtggcgtcatctgagtgatgtca

SEQ ID NO: 3093898 - DNA, 25 bp, Homo sapien
atgagccctctgatctctgcagcat

SEQ ID NO: 3093899 - DNA, 25 bp, Homo sapien
catgagccctctgatctctgcagca

SEQ ID NO: 3093900 - DNA, 25 bp, Homo sapien
ttcctgaaattccatggaccaaagt

SEQ ID NO: 3093901 - DNA, 25 bp, Homo sapien
tcctgaaattccatggaccaaagta

SEQ ID NO: 3093902 - DNA, 25 bp, Homo sapien
ttcatcagtattggttggagagaaa

SEQ ID NO: 3093903 - DNA, 25 bp, Homo sapien
agatttgtagcaccattatcagagg

SEQ ID NO: 3093904 - DNA, 25 bp, Homo sapien
caccattatcagaggcagggctgat

SEQ ID NO: 3093905 - DNA, 25 bp, Homo sapien
ctgattagcatatcacgggccagca

SEQ ID NO: 3093906 - DNA, 25 bp, Homo sapien
tggattttccgaagaccaaatgtac

SEQ ID NO: 3093907 - DNA, 25 bp, Homo sapien
gatggattttccgaagaccaaatgt

SEQ ID NO: 3093908 - DNA, 25 bp, Homo sapien
gattttccgaagaccaaatgtacca

SEQ ID NO: 3093909 - DNA, 25 bp, Homo sapien
ctgtgatggattttccgaagaccaa

SEQ ID NO: 3093910 - DNA, 25 bp, Homo sapien
aagtaatccccataacatagcgtag

SEQ ID NO: 3093911 - DNA, 25 bp, Homo sapien
caacgcggctgtgattggagtacta

SEQ ID NO: 3093912 - DNA, 25 bp, Homo sapien
actcaaatctcctgcaatgttggga

SEQ ID NO: 3093913 - DNA, 25 bp, Homo sapien
gtagatcatatcagtcaacgcggct

SEQ ID NO: 3093914 - DNA, 25 bp, Homo sapien
tcaagtaacaaattcttgtaatttg

SEQ ID NO: 3093915 - DNA, 25 bp, Homo sapien
caagtaacaaattcttgtaatttga

SEQ ID NO: 3093916 - DNA, 25 bp, Homo sapien
caaggccgtagaatttgtccacaga

SEQ ID NO: 3093917 - DNA, 25 bp, Homo sapien
tggctagagttaaccagtcctgaga

SEQ ID NO: 3093918 - DNA, 25 bp, Homo sapien
ctgagaaacggcaggaactcttgct

SEQ ID NO: 3093919 - DNA, 25 bp, Homo sapien
tcttgcaaggccgtagaatttgtcc

SEQ ID NO: 3093920 - DNA, 25 bp, Homo sapien
tctcatctccatggcggtaggtgct

SEQ ID NO: 3093921 - DNA, 25 bp, Homo sapien
ttgtctgtggtgaatgtatccggaa

SEQ ID NO: 3093922 - DNA, 25 bp, Homo sapien
ccatggcggtaggtgctgacagctt

SEQ ID NO: 3093923 - DNA, 25 bp, Homo sapien
gaatgtatccggaaaggcaaagaag

SEQ ID NO: 3093924 - DNA, 25 bp, Homo sapien
gcaaagtgacagcaaagtagcatcg

SEQ ID NO: 3093925 - DNA, 25 bp, Homo sapien
gcaaagtagcatcgcaaatttgaaa

SEQ ID NO: 3093926 - DNA, 25 bp, Homo sapien
gacagcaaagtagcatcgcaaattt

SEQ ID NO: 3093927 - DNA, 25 bp, Homo sapien
cgtggagcaacgtggaagaggtgaa

SEQ ID NO: 3093928 - DNA, 25 bp, Homo sapien
cttcaagatgcaacacacccaacat

SEQ ID NO: 3093929 - DNA, 25 bp, Homo sapien
tgttccactccttcatcactatagt

SEQ ID NO: 3093930 - DNA, 25 bp, Homo sapien
cactccttcatcactatagtgacct

SEQ ID NO: 3093931 - DNA, 25 bp, Homo sapien
ttgaaggagggtcctgttccactcc

SEQ ID NO: 3093932 - DNA, 25 bp, Homo sapien
actgtcacttttgaaggagggtcct

SEQ ID NO: 3093933 - DNA, 25 bp, Homo sapien
ggctgaatggtacagaaactcttcc

SEQ ID NO: 3093934 - DNA, 25 bp, Homo sapien
gaatggtacagaaactcttcccgtg

SEQ ID NO: 3093935 - DNA, 25 bp, Homo sapien
tggtacagaaactcttcccgtgaag

SEQ ID NO: 3093936 - DNA, 25 bp, Homo sapien
gtatttggctgaatggtacagaaac

SEQ ID NO: 3093937 - DNA, 25 bp, Homo sapien
ctagttcgtgaagttctgattggcc

SEQ ID NO: 3093938 - DNA, 25 bp, Homo sapien
tggatggccctggttcaatagtaac

SEQ ID NO: 3093939 - DNA, 25 bp, Homo sapien
tctccaatgtaaactgcaattctgt

SEQ ID NO: 3093940 - DNA, 25 bp, Homo sapien
catgtttgttgatacccgcctctcc

SEQ ID NO: 3093941 - DNA, 25 bp, Homo sapien
tgtgtcctccatgatagttactgct

SEQ ID NO: 3093942 - DNA, 25 bp, Homo sapien
aaatggatgagtctgattgagacgc

SEQ ID NO: 3093943 - DNA, 25 bp, Homo sapien
gagtctgattgagacgcttttgtat

SEQ ID NO: 3093944 - DNA, 25 bp, Homo sapien
tggatgagtctgattgagacgcttt

SEQ ID NO: 3093945 - DNA, 25 bp, Homo sapien
gatgagtctgattgagacgcttttg

SEQ ID NO: 3093946 - DNA, 25 bp, Homo sapien
gcaagcctgctgtatcggttcgaac

SEQ ID NO: 3093947 - DNA, 25 bp, Homo sapien
ttcgaaccccaagagcgcggtaaca

SEQ ID NO: 3093948 - DNA, 25 bp, Homo sapien
gattcagcgttttccttcgaacttc

SEQ ID NO: 3093949 - DNA, 25 bp, Homo sapien
cggtaacaaacaccacaaggcggtg

SEQ ID NO: 3093950 - DNA, 25 bp, Homo sapien
tcttgcttgaggaatgcacactcca

SEQ ID NO: 3093951 - DNA, 25 bp, Homo sapien
gggcatcagtgtcccgtgaaataca

SEQ ID NO: 3093952 - DNA, 25 bp, Homo sapien
caatcttgtaagtagaaaacagcca

SEQ ID NO: 3093953 - DNA, 25 bp, Homo sapien
gctttgttgactctgctaccgctga

SEQ ID NO: 3093954 - DNA, 25 bp, Homo sapien
tgcattcaaaagtctccaagatggc

SEQ ID NO: 3093955 - DNA, 25 bp, Homo sapien
gatggcccttctaaggtatctgcta

SEQ ID NO: 3093956 - DNA, 25 bp, Homo sapien
tttcagccctgttgtcaagaagcat

SEQ ID NO: 3093957 - DNA, 25 bp, Homo sapien
agagaacagcgtaccattgatgggc

SEQ ID NO: 3093958 - DNA, 25 bp, Homo sapien
catctgtgggctctccaggcgaata

SEQ ID NO: 3093959 - DNA, 25 bp, Homo sapien
ggcatctgtgggctctccaggcgaa

SEQ ID NO: 3093960 - DNA, 25 bp, Homo sapien
gtgggctctccaggcgaatacacag

SEQ ID NO: 3093961 - DNA, 25 bp, Homo sapien
tctgtgggctctccaggcgaataca

SEQ ID NO: 3093962 - DNA, 25 bp, Homo sapien
tggccaaaggcaaaagagcaacttc

SEQ ID NO: 3093963 - DNA, 25 bp, Homo sapien
ctgatacatccatggccaaaggcaa

SEQ ID NO: 3093964 - DNA, 25 bp, Homo sapien
gcagatgcccctgttcttcagttga

SEQ ID NO: 3093965 - DNA, 25 bp, Homo sapien
ctgttcttcagttgatgaaaaaatc

SEQ ID NO: 3093966 - DNA, 25 bp, Homo sapien
ctgtgggggtatggcttggttttat

SEQ ID NO: 3093967 - DNA, 25 bp, Homo sapien
gtatggcttggttttatattatcag

SEQ ID NO: 3093968 - DNA, 25 bp, Homo sapien
tggcttggttttatattatcaggca

SEQ ID NO: 3093969 - DNA, 25 bp, Homo sapien
gggtatggcttggttttatattatc

SEQ ID NO: 3093970 - DNA, 25 bp, Homo sapien
taggcaacgcttttcagcggaggct

SEQ ID NO: 3093971 - DNA, 25 bp, Homo sapien
tgctttgataggcaacgcttttcag

SEQ ID NO: 3093972 - DNA, 25 bp, Homo sapien
tttgataggcaacgcttttcagcgg

SEQ ID NO: 3093973 - DNA, 25 bp, Homo sapien
gcaacgcttttcagcggaggctgtg

SEQ ID NO: 3093974 - DNA, 25 bp, Homo sapien
gataggcctactgtattgcaggtaa

SEQ ID NO: 3093975 - DNA, 25 bp, Homo sapien
gagaaaaggctctactgtaacctga

SEQ ID NO: 3093976 - DNA, 25 bp, Homo sapien
ggagccactcctatcttctgacgtg

SEQ ID NO: 3093977 - DNA, 25 bp, Homo sapien
gaaattaactgaatgaggagccact

SEQ ID NO: 3093978 - DNA, 25 bp, Homo sapien
aaatctaagattatcgttttatttg

SEQ ID NO: 3093979 - DNA, 25 bp, Homo sapien
tctaagattatcgttttatttgttg

SEQ ID NO: 3093980 - DNA, 25 bp, Homo sapien
agattatcgttttatttgttgcttg

SEQ ID NO: 3093981 - DNA, 25 bp, Homo sapien
taagattatcgttttatttgttgct

SEQ ID NO: 3093982 - DNA, 25 bp, Homo sapien
gatgtgctgctgataattgatgaga

SEQ ID NO: 3093983 - DNA, 25 bp, Homo sapien
tatgaaactatttcggcctgtggtg

SEQ ID NO: 3093984 - DNA, 25 bp, Homo sapien
taaaaatgccatccctttccgagtg

SEQ ID NO: 3093985 - DNA, 25 bp, Homo sapien
ctggttttcaaagcgagctcattac

SEQ ID NO: 3093986 - DNA, 25 bp, Homo sapien
tacagcctagattcttagacatccg

SEQ ID NO: 3093987 - DNA, 25 bp, Homo sapien
taccctcaggttcatttagctttag

SEQ ID NO: 3093988 - DNA, 25 bp, Homo sapien
gcttattgaactgagcggtgaactc

SEQ ID NO: 3093989 - DNA, 25 bp, Homo sapien
cagagtgaacttgtctaccctcagg

SEQ ID NO: 3093990 - DNA, 25 bp, Homo sapien
gatccagacccggttaacactgaag

SEQ ID NO: 3093991 - DNA, 25 bp, Homo sapien
ttagatcagcaaagcgtgccgggcg

SEQ ID NO: 3093992 - DNA, 25 bp, Homo sapien
gagcaaagcttcgttaggacaccga

SEQ ID NO: 3093993 - DNA, 25 bp, Homo sapien
taagtaattcgcgaacagtcgggag

SEQ ID NO: 3093994 - DNA, 25 bp, Homo sapien
catctgtttgtgctcataacttcca

SEQ ID NO: 3093995 - DNA, 25 bp, Homo sapien
caatgcaccagctgtagcgagatac

SEQ ID NO: 3093996 - DNA, 25 bp, Homo sapien
gtttggaggcaagggcgagagcgtc

SEQ ID NO: 3093997 - DNA, 25 bp, Homo sapien
gaacatccccagagctaaaaatact

SEQ ID NO: 3093998 - DNA, 25 bp, Homo sapien
aagctgctaactacatgaacacaaa

SEQ ID NO: 3093999 - DNA, 25 bp, Homo sapien
tcatgatgcgcttcaaagtggcaag

SEQ ID NO: 3094000 - DNA, 25 bp, Homo sapien
aagtggcaagtatttggctattaac

SEQ ID NO: 3094001 - DNA, 25 bp, Homo sapien
tatttttgttgcagtgtagttttcc

SEQ ID NO: 3094002 - DNA, 25 bp, Homo sapien
caagacacaggtaatgcacgacatt

SEQ ID NO: 3094003 - DNA, 25 bp, Homo sapien
taaggatgtcactatggcactgttg

SEQ ID NO: 3094004 - DNA, 25 bp, Homo sapien
cacatgtcattagaatgcagacgga

SEQ ID NO: 3094005 - DNA, 25 bp, Homo sapien
tttgggaggagccatagattcctgg

SEQ ID NO: 3094006 - DNA, 25 bp, Homo sapien
ctctggcaagttgaacaatcctagc

SEQ ID NO: 3094007 - DNA, 25 bp, Homo sapien
ttttgggtttccgctctgggctctg

SEQ ID NO: 3094008 - DNA, 25 bp, Homo sapien
aaaaagtgtggcatagctacctgcc

SEQ ID NO: 3094009 - DNA, 25 bp, Homo sapien
caatcctagccattgacaatcgtga

SEQ ID NO: 3094010 - DNA, 25 bp, Homo sapien
taaatatggcacgtggtaaataacc

SEQ ID NO: 3094011 - DNA, 25 bp, Homo sapien
taatttgatattgagtgcagctgcc

SEQ ID NO: 3094012 - DNA, 25 bp, Homo sapien
tgataagctcagatttgaggacccc

SEQ ID NO: 3094013 - DNA, 25 bp, Homo sapien
tataccaaacccagatagatgggcc

SEQ ID NO: 3094014 - DNA, 25 bp, Homo sapien
tgatccaccgtgaaacctgctgaga

SEQ ID NO: 3094015 - DNA, 25 bp, Homo sapien
gaacataaaccagggtgatccaccg

SEQ ID NO: 3094016 - DNA, 25 bp, Homo sapien
aatgttttgatgtgaagcccttccc

SEQ ID NO: 3094017 - DNA, 25 bp, Homo sapien
tattccatgagttttgtcggctagg

SEQ ID NO: 3094018 - DNA, 25 bp, Homo sapien
ttccatactcagaggtttacagtaa

SEQ ID NO: 3094019 - DNA, 25 bp, Homo sapien
taagtcgctcctttgacactttcat

SEQ ID NO: 3094020 - DNA, 25 bp, Homo sapien
gaatggcttccagaccataagtcgc

SEQ ID NO: 3094021 - DNA, 25 bp, Homo sapien
ttttggcacgaactgcattatttcc

SEQ ID NO: 3094022 - DNA, 25 bp, Homo sapien
tatcagggtgtggtatgagctaata

SEQ ID NO: 3094023 - DNA, 25 bp, Homo sapien
tatgtgacaacaagtatccagactg

SEQ ID NO: 3094024 - DNA, 25 bp, Homo sapien
tgagatattacttggtatcagggtg

SEQ ID NO: 3094025 - DNA, 25 bp, Homo sapien
caagttgataccgttatacagtaaa

SEQ ID NO: 3094026 - DNA, 25 bp, Homo sapien
gcaccagcttagaccagccgcaatt

SEQ ID NO: 3094027 - DNA, 25 bp, Homo sapien
ttagaccagccgcaatttgttgagt

SEQ ID NO: 3094028 - DNA, 25 bp, Homo sapien
ccagccgcaatttgttgagttgaga

SEQ ID NO: 3094029 - DNA, 25 bp, Homo sapien
cttttgcaccagcttagaccagccg

SEQ ID NO: 3094030 - DNA, 25 bp, Homo sapien
ataatcttctgactgaggtttgtcc

SEQ ID NO: 3094031 - DNA, 25 bp, Homo sapien
taatcttctgactgaggtttgtcca

SEQ ID NO: 3094032 - DNA, 25 bp, Homo sapien
ggtttgtccactgcgtgaacgacat

SEQ ID NO: 3094033 - DNA, 25 bp, Homo sapien
tgaggtttgtccactgcgtgaacga

SEQ ID NO: 3094034 - DNA, 25 bp, Homo sapien
tgctttttccactataggacaagta

SEQ ID NO: 3094035 - DNA, 25 bp, Homo sapien
tccactataggacaagtagccatct

SEQ ID NO: 3094036 - DNA, 25 bp, Homo sapien
cactataggacaagtagccatcttc

SEQ ID NO: 3094037 - DNA, 25 bp, Homo sapien
tttttccactataggacaagtagcc

SEQ ID NO: 3094038 - DNA, 25 bp, Homo sapien
tcagtactggacctctggcagcaga

SEQ ID NO: 3094039 - DNA, 25 bp, Homo sapien
ggcagcagagccgtgctttggctct

SEQ ID NO: 3094040 - DNA, 25 bp, Homo sapien
gctttggaggccgagtgccacaaat

SEQ ID NO: 3094041 - DNA, 25 bp, Homo sapien
gccgagtgccacaaatgcctgagct

SEQ ID NO: 3094042 - DNA, 25 bp, Homo sapien
gactgtttctttcggagcttctgcc

SEQ ID NO: 3094043 - DNA, 25 bp, Homo sapien
tcacttgcgcacaatgttaattagg

SEQ ID NO: 3094044 - DNA, 25 bp, Homo sapien
cacattgcgtgcagtaggacaggaa

SEQ ID NO: 3094045 - DNA, 25 bp, Homo sapien
aagaacgctggctttcaagtgaatg

SEQ ID NO: 3094046 - DNA, 25 bp, Homo sapien
tcagatgttcagtttacctccggtc

SEQ ID NO: 3094047 - DNA, 25 bp, Homo sapien
tgttcagtttacctccggtcatgac

SEQ ID NO: 3094048 - DNA, 25 bp, Homo sapien
cagatgttcagtttacctccggtca

SEQ ID NO: 3094049 - DNA, 25 bp, Homo sapien
gatgttcagtttacctccggtcatg

SEQ ID NO: 3094050 - DNA, 25 bp, Homo sapien
aactgcccatttaccatctccacaa

SEQ ID NO: 3094051 - DNA, 25 bp, Homo sapien
aaacccagacggcttcacatagttt

SEQ ID NO: 3094052 - DNA, 25 bp, Homo sapien
ggcttcacatagttttccctgggat

SEQ ID NO: 3094053 - DNA, 25 bp, Homo sapien
tccaccttcaactgcccatttacca

SEQ ID NO: 3094054 - DNA, 25 bp, Homo sapien
cagttattcgtatatgaaacacgca

SEQ ID NO: 3094055 - DNA, 25 bp, Homo sapien
aaacacgcagacttcatttagcgag

SEQ ID NO: 3094056 - DNA, 25 bp, Homo sapien
tgaaacacgcagacttcatttagcg

SEQ ID NO: 3094057 - DNA, 25 bp, Homo sapien
tcgtatatgaaacacgcagacttca

SEQ ID NO: 3094058 - DNA, 25 bp, Homo sapien
tatcacatccttcttcttacggtgg

SEQ ID NO: 3094059 - DNA, 25 bp, Homo sapien
taccaagagttagaagtacccacaa

SEQ ID NO: 3094060 - DNA, 25 bp, Homo sapien
tcttccagccccgaaggaaatgtcc

SEQ ID NO: 3094061 - DNA, 25 bp, Homo sapien
gcggtgggcccaatgtaccaagagt

SEQ ID NO: 3094062 - DNA, 25 bp, Homo sapien
ctgtgcttcctaggagttcaggctg

SEQ ID NO: 3094063 - DNA, 25 bp, Homo sapien
ctgataatgccgtgataaatattat

SEQ ID NO: 3094064 - DNA, 25 bp, Homo sapien
tgataatgccgtgataaatattatt

SEQ ID NO: 3094065 - DNA, 25 bp, Homo sapien
gctgataatgccgtgataaatatta

SEQ ID NO: 3094066 - DNA, 25 bp, Homo sapien
gccactttccaagactttcgtaaca

SEQ ID NO: 3094067 - DNA, 25 bp, Homo sapien
ccactttccaagactttcgtaacat

SEQ ID NO: 3094068 - DNA, 25 bp, Homo sapien
tgccactttccaagactttcgtaac

SEQ ID NO: 3094069 - DNA, 25 bp, Homo sapien
ctgccactttccaagactttcgtaa

SEQ ID NO: 3094070 - DNA, 25 bp, Homo sapien
ttaaggatgggtgaacaggtcacta

SEQ ID NO: 3094071 - DNA, 25 bp, Homo sapien
acaggtcactagatctgaggctctc

SEQ ID NO: 3094072 - DNA, 25 bp, Homo sapien
taaggatgggtgaacaggtcactag

SEQ ID NO: 3094073 - DNA, 25 bp, Homo sapien
gaacaggtcactagatctgaggctc

SEQ ID NO: 3094074 - DNA, 25 bp, Homo sapien
aacgtgcttgtggatttggttttca

SEQ ID NO: 3094075 - DNA, 25 bp, Homo sapien
tccaaaaatatcttgtgaggtccaa

SEQ ID NO: 3094076 - DNA, 25 bp, Homo sapien
gagcctgtacatttcttaatccaac

SEQ ID NO: 3094077 - DNA, 25 bp, Homo sapien
tgtttgatgagcctgtacatttctt

SEQ ID NO: 3094078 - DNA, 25 bp, Homo sapien
cagtgacaaccttcactaagcctga

SEQ ID NO: 3094079 - DNA, 25 bp, Homo sapien
ctaagcctgaacttattgaatgcct

SEQ ID NO: 3094080 - DNA, 25 bp, Homo sapien
gagctgatgggatttcagtgacaac

SEQ ID NO: 3094081 - DNA, 25 bp, Homo sapien
gctgatgggatttcagtgacaacct

SEQ ID NO: 3094082 - DNA, 25 bp, Homo sapien
ggcaaataatcgttgagctccactc

SEQ ID NO: 3094083 - DNA, 25 bp, Homo sapien
tgaaccaactgtatcacaacaacgt

SEQ ID NO: 3094084 - DNA, 25 bp, Homo sapien
gaatctgatgcaggctcaagtttga

SEQ ID NO: 3094085 - DNA, 25 bp, Homo sapien
ggcccagcaatcttgtcatgaacaa

SEQ ID NO: 3094086 - DNA, 25 bp, Homo sapien
aacggatttccaccactagttgcca

SEQ ID NO: 3094087 - DNA, 25 bp, Homo sapien
tgatgggctaaaggctaaaaacgga

SEQ ID NO: 3094088 - DNA, 25 bp, Homo sapien
ttccagagttgaatattggccatgc

SEQ ID NO: 3094089 - DNA, 25 bp, Homo sapien
gagttgaatattggccatgcagaaa

SEQ ID NO: 3094090 - DNA, 25 bp, Homo sapien
agaacaacacgttctttccagtagg

SEQ ID NO: 3094091 - DNA, 25 bp, Homo sapien
aagaacaacacgttctttccagtag

SEQ ID NO: 3094092 - DNA, 25 bp, Homo sapien
ttatgaaagaacaacacgttctttc

SEQ ID NO: 3094093 - DNA, 25 bp, Homo sapien
tgatatagcctagtgcacaccaagg

SEQ ID NO: 3094094 - DNA, 25 bp, Homo sapien
tgctgaccacgtgaaaaataggata

SEQ ID NO: 3094095 - DNA, 25 bp, Homo sapien
accatgtggcttctggtgttaggcc

SEQ ID NO: 3094096 - DNA, 25 bp, Homo sapien
cagtctgtcgttcaccaaaatgtca

SEQ ID NO: 3094097 - DNA, 25 bp, Homo sapien
gacttcagagagcttttataagcat

SEQ ID NO: 3094098 - DNA, 25 bp, Homo sapien
tctctatggtagataggccaatcgt

SEQ ID NO: 3094099 - DNA, 25 bp, Homo sapien
aagaccaattgaagtttatcccaag

SEQ ID NO: 3094100 - DNA, 25 bp, Homo sapien
gaatatactgatagactttgaatca

SEQ ID NO: 3094101 - DNA, 25 bp, Homo sapien
cttcaacatccaacatattattttc

SEQ ID NO: 3094102 - DNA, 25 bp, Homo sapien
atcttcaacatccaacatattattt

SEQ ID NO: 3094103 - DNA, 25 bp, Homo sapien
tcttcaacatccaacatattatttt

SEQ ID NO: 3094104 - DNA, 25 bp, Homo sapien
tctggaattttaccaactgtttgcc

SEQ ID NO: 3094105 - DNA, 25 bp, Homo sapien
gaagagcgaagaatgacgtaccgct

SEQ ID NO: 3094106 - DNA, 25 bp, Homo sapien
tgtttgcccctcaaccatcgtggaa

SEQ ID NO: 3094107 - DNA, 25 bp, Homo sapien
gaagaatgacgtaccgctcatccct

SEQ ID NO: 3094108 - DNA, 25 bp, Homo sapien
ttcacataaaaaatgaagtccagtg

SEQ ID NO: 3094109 - DNA, 25 bp, Homo sapien
gttcacataaaaaatgaagtccagt

SEQ ID NO: 3094110 - DNA, 25 bp, Homo sapien
tgttcacataaaaaatgaagtccag

SEQ ID NO: 3094111 - DNA, 25 bp, Homo sapien
tttgttcacataaaaaatgaagtcc

SEQ ID NO: 3094112 - DNA, 25 bp, Homo sapien
gaacaggacttccaggtgctcttgt

SEQ ID NO: 3094113 - DNA, 25 bp, Homo sapien
aacaggacttccaggtgctcttgtc

SEQ ID NO: 3094114 - DNA, 25 bp, Homo sapien
acaggacttccaggtgctcttgtca

SEQ ID NO: 3094115 - DNA, 25 bp, Homo sapien
caggacttccaggtgctcttgtcat

SEQ ID NO: 3094116 - DNA, 25 bp, Homo sapien
caacaatttagtgaagtcagaaaga

SEQ ID NO: 3094117 - DNA, 25 bp, Homo sapien
gcaggtcagtcaactcatcttcttt

SEQ ID NO: 3094118 - DNA, 25 bp, Homo sapien
ttataggtctgttcttatcagagcc

SEQ ID NO: 3094119 - DNA, 25 bp, Homo sapien
tataggtctgttcttatcagagcct

SEQ ID NO: 3094120 - DNA, 25 bp, Homo sapien
aacacctgcagcaccgttgcataaa

SEQ ID NO: 3094121 - DNA, 25 bp, Homo sapien
tggcttcgttggacctccttcatca

SEQ ID NO: 3094122 - DNA, 25 bp, Homo sapien
gagctggagacctacgtgggttata

SEQ ID NO: 3094123 - DNA, 25 bp, Homo sapien
ctactctttaactttggcaggaaag

SEQ ID NO: 3094124 - DNA, 25 bp, Homo sapien
cctggataacgtcataataatgtaa

SEQ ID NO: 3094125 - DNA, 25 bp, Homo sapien
cagggatgatgtccaccgtaacctg

SEQ ID NO: 3094126 - DNA, 25 bp, Homo sapien
tagtgggtcttgatgccgacagcag

SEQ ID NO: 3094127 - DNA, 25 bp, Homo sapien
gtcttgatgccgacagcagacacag

SEQ ID NO: 3094128 - DNA, 25 bp, Homo sapien
tatttctgcttgagtctccggggat

SEQ ID NO: 3094129 - DNA, 25 bp, Homo sapien
tctgcttgagtctccggggatgtgt

SEQ ID NO: 3094130 - DNA, 25 bp, Homo sapien
tgtgtgggaattgataccctcattc

SEQ ID NO: 3094131 - DNA, 25 bp, Homo sapien
gggatgtgtgggaattgataccctc

SEQ ID NO: 3094132 - DNA, 25 bp, Homo sapien
tgtttactgcgggtagcacatggaa

SEQ ID NO: 3094133 - DNA, 25 bp, Homo sapien
caaatgttccacagtcatgtaagct

SEQ ID NO: 3094134 - DNA, 25 bp, Homo sapien
gcaatgtgctaacttggactggatc

SEQ ID NO: 3094135 - DNA, 25 bp, Homo sapien
gctattagcataagtggaagctgga

SEQ ID NO: 3094136 - DNA, 25 bp, Homo sapien
acaagtttttagagatgtgtcttgt

SEQ ID NO: 3094137 - DNA, 25 bp, Homo sapien
tacaagtttttagagatgtgtcttg

SEQ ID NO: 3094138 - DNA, 25 bp, Homo sapien
tatacaagtttttagagatgtgtct

SEQ ID NO: 3094139 - DNA, 25 bp, Homo sapien
ttatacaagtttttagagatgtgtc

SEQ ID NO: 3094140 - DNA, 25 bp, Homo sapien
aggctgggacatccctgaattcaca

SEQ ID NO: 3094141 - DNA, 25 bp, Homo sapien
cagtcagggtggtcgtctgtgtgca

SEQ ID NO: 3094142 - DNA, 25 bp, Homo sapien
aggtgagccttcagattctgcacct

SEQ ID NO: 3094143 - DNA, 25 bp, Homo sapien
ctcgctggccgtgcataaagaaggc

SEQ ID NO: 3094144 - DNA, 25 bp, Homo sapien
ttgggtctgagtttcaactcaacta

SEQ ID NO: 3094145 - DNA, 25 bp, Homo sapien
cttactcgatttaaagttatttgat

SEQ ID NO: 3094146 - DNA, 25 bp, Homo sapien
aactgatcacacttatttagaaagc

SEQ ID NO: 3094147 - DNA, 25 bp, Homo sapien
tgcacactaactgatcacacttatt

SEQ ID NO: 3094148 - DNA, 25 bp, Homo sapien
caacaagcctaattgaaaaaatggg

SEQ ID NO: 3094149 - DNA, 25 bp, Homo sapien
caagattctgcatcatagacttttg

SEQ ID NO: 3094150 - DNA, 25 bp, Homo sapien
ctgcatcatagacttttgtgttaga

SEQ ID NO: 3094151 - DNA, 25 bp, Homo sapien
tagatttccagatacaccaacaagc

SEQ ID NO: 3094152 - DNA, 25 bp, Homo sapien
caaggaccatgaaatcgtcctgagt

SEQ ID NO: 3094153 - DNA, 25 bp, Homo sapien
taaataccaatgcaagttccaatag

SEQ ID NO: 3094154 - DNA, 25 bp, Homo sapien
gggcctatagctaggctcttcagta

SEQ ID NO: 3094155 - DNA, 25 bp, Homo sapien
tattaggtaagtcagtgctggcaag

SEQ ID NO: 3094156 - DNA, 25 bp, Homo sapien
atctccaagcatattagagttcagt

SEQ ID NO: 3094157 - DNA, 25 bp, Homo sapien
tccaagcatattagagttcagtggg

SEQ ID NO: 3094158 - DNA, 25 bp, Homo sapien
ggaaagaccgttaatttcagcattc

SEQ ID NO: 3094159 - DNA, 25 bp, Homo sapien
tagtagtataggtcacaagtgtcat

SEQ ID NO: 3094160 - DNA, 25 bp, Homo sapien
tgccagtattctttcagctgtctaa

SEQ ID NO: 3094161 - DNA, 25 bp, Homo sapien
ctgccagtattctttcagctgtcta

SEQ ID NO: 3094162 - DNA, 25 bp, Homo sapien
agtattctttcagctgtctaaattc

SEQ ID NO: 3094163 - DNA, 25 bp, Homo sapien
tccccaaagttgctttgaatgttgt

SEQ ID NO: 3094164 - DNA, 25 bp, Homo sapien
gaccaatggttccacatcctgccat

SEQ ID NO: 3094165 - DNA, 25 bp, Homo sapien
gctggagagctctccaggatattgg

SEQ ID NO: 3094166 - DNA, 25 bp, Homo sapien
gctgaccaatggttccacatcctgc

SEQ ID NO: 3094167 - DNA, 25 bp, Homo sapien
gatattggcaaggatctgaatttgt

SEQ ID NO: 3094168 - DNA, 25 bp, Homo sapien
tgatagtggttttgactgaactgct

SEQ ID NO: 3094169 - DNA, 25 bp, Homo sapien
cagatcctccagcacggtgatagtg

SEQ ID NO: 3094170 - DNA, 25 bp, Homo sapien
aacgcagtcaggctcaggtttctcc

SEQ ID NO: 3094171 - DNA, 25 bp, Homo sapien
aactgatcagaaagtccaacgcagt

SEQ ID NO: 3094172 - DNA, 25 bp, Homo sapien
gcaaggaggcaggaatttagtgact

SEQ ID NO: 3094173 - DNA, 25 bp, Homo sapien
gactacatttacataacaatgaccc

SEQ ID NO: 3094174 - DNA, 25 bp, Homo sapien
cttgagctctcggaaatatgttgga

SEQ ID NO: 3094175 - DNA, 25 bp, Homo sapien
gaaaatgcaaacttgagctctcgga

SEQ ID NO: 3094176 - DNA, 25 bp, Homo sapien
ccgtaggctgtgctttctgcaggct

SEQ ID NO: 3094177 - DNA, 25 bp, Homo sapien
tctgcaggctttccaatacccaagg

SEQ ID NO: 3094178 - DNA, 25 bp, Homo sapien
attctcttctagagcgtccttcccg

SEQ ID NO: 3094179 - DNA, 25 bp, Homo sapien
agtttccctgattctagcccattct

SEQ ID NO: 3094180 - DNA, 25 bp, Homo sapien
gaaatgtgctcggtcattattcttt

SEQ ID NO: 3094181 - DNA, 25 bp, Homo sapien
cacattgaggtgatttgccaaataa

SEQ ID NO: 3094182 - DNA, 25 bp, Homo sapien
tccgaatgagccagactgactgtcc

SEQ ID NO: 3094183 - DNA, 25 bp, Homo sapien
catctgttgaggcacattgaggtga

SEQ ID NO: 3094184 - DNA, 25 bp, Homo sapien
ttggttgttcagctgtatatcaact

SEQ ID NO: 3094185 - DNA, 25 bp, Homo sapien
ttcagagtgggggtttgcttgcatt

SEQ ID NO: 3094186 - DNA, 25 bp, Homo sapien
catgggttcagcagaggtctctgcc

SEQ ID NO: 3094187 - DNA, 25 bp, Homo sapien
gctgtatatcaactggcatgggttc

SEQ ID NO: 3094188 - DNA, 25 bp, Homo sapien
tatttctagcagaatacgggaatag

SEQ ID NO: 3094189 - DNA, 25 bp, Homo sapien
tgcactgttgaagattgtcctactg

SEQ ID NO: 3094190 - DNA, 25 bp, Homo sapien
gaagtattcagctctgacatgatca

SEQ ID NO: 3094191 - DNA, 25 bp, Homo sapien
ccaagctaattttccatcaattgca

SEQ ID NO: 3094192 - DNA, 25 bp, Homo sapien
tctgctactgcacatgaggaaaggg

SEQ ID NO: 3094193 - DNA, 25 bp, Homo sapien
caaaatgcacgagaatattcttctc

SEQ ID NO: 3094194 - DNA, 25 bp, Homo sapien
gaatgacaaggaccagctctgttgc

SEQ ID NO: 3094195 - DNA, 25 bp, Homo sapien
tataccagccgcttgtaataccttc

SEQ ID NO: 3094196 - DNA, 25 bp, Homo sapien
gtgactcctggacagccgatgctct

SEQ ID NO: 3094197 - DNA, 25 bp, Homo sapien
tggtgactcctggacagccgatgct

SEQ ID NO: 3094198 - DNA, 25 bp, Homo sapien
tgactcctggacagccgatgctctc

SEQ ID NO: 3094199 - DNA, 25 bp, Homo sapien
ctcctggacagccgatgctctccat

SEQ ID NO: 3094200 - DNA, 25 bp, Homo sapien
tagccacgtgcaagagggagtgcca

SEQ ID NO: 3094201 - DNA, 25 bp, Homo sapien
ctggatagccacgtgcaagagggag

SEQ ID NO: 3094202 - DNA, 25 bp, Homo sapien
gatagccacgtgcaagagggagtgc

SEQ ID NO: 3094203 - DNA, 25 bp, Homo sapien
tggatagccacgtgcaagagggagt

SEQ ID NO: 3094204 - DNA, 25 bp, Homo sapien
tctcccaggagatctttcaatggat

SEQ ID NO: 3094205 - DNA, 25 bp, Homo sapien
tggaaataatggctcgcagctgcag

SEQ ID NO: 3094206 - DNA, 25 bp, Homo sapien
tgatattcccgtcgcaagcggacca

SEQ ID NO: 3094207 - DNA, 25 bp, Homo sapien
gcagctgcagcaacccatagtaaca

SEQ ID NO: 3094208 - DNA, 25 bp, Homo sapien
tgagaaaatcgctagtgcggtgctg

SEQ ID NO: 3094209 - DNA, 25 bp, Homo sapien
gaaatgagaaaatcgctagtgcggt

SEQ ID NO: 3094210 - DNA, 25 bp, Homo sapien
tggaaatgagaaaatcgctagtgcg

SEQ ID NO: 3094211 - DNA, 25 bp, Homo sapien
aaatgagaaaatcgctagtgcggtg

SEQ ID NO: 3094212 - DNA, 25 bp, Homo sapien
ctgattggacaggacatctgtttct

SEQ ID NO: 3094213 - DNA, 25 bp, Homo sapien
cattctgattggacaggacatctgt

SEQ ID NO: 3094214 - DNA, 25 bp, Homo sapien
tgtccattctgattggacaggacat

SEQ ID NO: 3094215 - DNA, 25 bp, Homo sapien
tccattctgattggacaggacatct

SEQ ID NO: 3094216 - DNA, 25 bp, Homo sapien
gacctatacgtggtacatggaagca

SEQ ID NO: 3094217 - DNA, 25 bp, Homo sapien
tctagaaaggacgtcatcaacatgg

SEQ ID NO: 3094218 - DNA, 25 bp, Homo sapien
tcaacatggttgactagaggcaccc

SEQ ID NO: 3094219 - DNA, 25 bp, Homo sapien
tgcactcagttagaagtcagccacc

SEQ ID NO: 3094220 - DNA, 25 bp, Homo sapien
caacttaaccaagcgtgaaagcaga

SEQ ID NO: 3094221 - DNA, 25 bp, Homo sapien
acttaaccaagcgtgaaagcagatc

SEQ ID NO: 3094222 - DNA, 25 bp, Homo sapien
cccaacttaaccaagcgtgaaagca

SEQ ID NO: 3094223 - DNA, 25 bp, Homo sapien
ttaaccaagcgtgaaagcagatctg

SEQ ID NO: 3094224 - DNA, 25 bp, Homo sapien
tccaggacaattgggcaaaaagcat

SEQ ID NO: 3094225 - DNA, 25 bp, Homo sapien
ttccaggacaattgggcaaaaagca

SEQ ID NO: 3094226 - DNA, 25 bp, Homo sapien
ccagctggataatcgggtactttcc

SEQ ID NO: 3094227 - DNA, 25 bp, Homo sapien
gataatcgggtactttcctattgag

SEQ ID NO: 3094228 - DNA, 25 bp, Homo sapien
ttatactccagctggataatcgggt

SEQ ID NO: 3094229 - DNA, 25 bp, Homo sapien
taatcgggtactttcctattgagtc

SEQ ID NO: 3094230 - DNA, 25 bp, Homo sapien
aaactttgcactctgagccatgtag

SEQ ID NO: 3094231 - DNA, 25 bp, Homo sapien
gtcgacaataacctaggagctcttc

SEQ ID NO: 3094232 - DNA, 25 bp, Homo sapien
ggagctcttctaccccactgaggtt

SEQ ID NO: 3094233 - DNA, 25 bp, Homo sapien
cgtgcatggcctctgagctaagtcg

SEQ ID NO: 3094234 - DNA, 25 bp, Homo sapien
ggagctgggcttcactacgtagtaa

SEQ ID NO: 3094235 - DNA, 25 bp, Homo sapien
ggttcaagttgacaccacaggtttc

SEQ ID NO: 3094236 - DNA, 25 bp, Homo sapien
tatggctcctcggacttgactggaa

SEQ ID NO: 3094237 - DNA, 25 bp, Homo sapien
tcatgggtgaccaactatggctcct

SEQ ID NO: 3094238 - DNA, 25 bp, Homo sapien
aatgaaatgaagcgattaccttggg

SEQ ID NO: 3094239 - DNA, 25 bp, Homo sapien
atgaaatgaagcgattaccttgggc

SEQ ID NO: 3094240 - DNA, 25 bp, Homo sapien
tgaaatgaagcgattaccttgggca

SEQ ID NO: 3094241 - DNA, 25 bp, Homo sapien
cctcagaatatgctttgtgcatttc

SEQ ID NO: 3094242 - DNA, 25 bp, Homo sapien
ctgtttgtggcaaaatttcggccat

SEQ ID NO: 3094243 - DNA, 25 bp, Homo sapien
tctgtttgtggcaaaatttcggcca

SEQ ID NO: 3094244 - DNA, 25 bp, Homo sapien
gaatcaggaagtacgagagcctccc

SEQ ID NO: 3094245 - DNA, 25 bp, Homo sapien
caagattacctagtggttcccagga

SEQ ID NO: 3094246 - DNA, 25 bp, Homo sapien
tatcgaaatagacatccagtggcca

SEQ ID NO: 3094247 - DNA, 25 bp, Homo sapien
taggtttcaaagtccttcagggcgc

SEQ ID NO: 3094248 - DNA, 25 bp, Homo sapien
tactgcaatgattcagcaagccctt

SEQ ID NO: 3094249 - DNA, 25 bp, Homo sapien
attactgcaatgattcagcaagccc

SEQ ID NO: 3094250 - DNA, 25 bp, Homo sapien
gcaagccctttgaattatgtgcagg

SEQ ID NO: 3094251 - DNA, 25 bp, Homo sapien
ttcagcaagccctttgaattatgtg

SEQ ID NO: 3094252 - DNA, 25 bp, Homo sapien
tgccatcacaagaaatgcggaggca

SEQ ID NO: 3094253 - DNA, 25 bp, Homo sapien
tattctgattcttgtatgtgctacc

SEQ ID NO: 3094254 - DNA, 25 bp, Homo sapien
gtatgtgctaccgtttgccatcaca

SEQ ID NO: 3094255 - DNA, 25 bp, Homo sapien
ggaggcagttatctccactattaaa

SEQ ID NO: 3094256 - DNA, 25 bp, Homo sapien
tgctggcatttccaaagattcatca

SEQ ID NO: 3094257 - DNA, 25 bp, Homo sapien
gacaaagacatttggctgttccaac

SEQ ID NO: 3094258 - DNA, 25 bp, Homo sapien
cattaactctagcttcctgaagacg

SEQ ID NO: 3094259 - DNA, 25 bp, Homo sapien
cctgaagacgatcaagtatgaaatc

SEQ ID NO: 3094260 - DNA, 25 bp, Homo sapien
cttggcagttttttggcttcctgaa

SEQ ID NO: 3094261 - DNA, 25 bp, Homo sapien
ctgaattatactgacccaaaccatg

SEQ ID NO: 3094262 - DNA, 25 bp, Homo sapien
tatactgacccaaaccatgaataat

SEQ ID NO: 3094263 - DNA, 25 bp, Homo sapien
ttggcttcctgaattatactgaccc

SEQ ID NO: 3094264 - DNA, 25 bp, Homo sapien
agaactgagtgaaaggtgtatcaca

SEQ ID NO: 3094265 - DNA, 25 bp, Homo sapien
aagaactgagtgaaaggtgtatcac

SEQ ID NO: 3094266 - DNA, 25 bp, Homo sapien
gtgaaaggtgtatcacagtggccat

SEQ ID NO: 3094267 - DNA, 25 bp, Homo sapien
gagtgaaaggtgtatcacagtggcc

SEQ ID NO: 3094268 - DNA, 25 bp, Homo sapien
ggaaagaggaaaggcggtgagctgc

SEQ ID NO: 3094269 - DNA, 25 bp, Homo sapien
gcaagaaacaaatgtccataagcct

SEQ ID NO: 3094270 - DNA, 25 bp, Homo sapien
gaaacaaatgtccataagccttctt

SEQ ID NO: 3094271 - DNA, 25 bp, Homo sapien
aagaaacaaatgtccataagccttc

SEQ ID NO: 3094272 - DNA, 25 bp, Homo sapien
aaacaaatgtccataagccttcttt

SEQ ID NO: 3094273 - DNA, 25 bp, Homo sapien
gttcacgtcaacatatgtaaaccaa

SEQ ID NO: 3094274 - DNA, 25 bp, Homo sapien
gcagttactctcataacgggtgcaa

SEQ ID NO: 3094275 - DNA, 25 bp, Homo sapien
tattcactcatcataagctgagcag

SEQ ID NO: 3094276 - DNA, 25 bp, Homo sapien
tccaacacttgacttgtggagggca

SEQ ID NO: 3094277 - DNA, 25 bp, Homo sapien
cctatcgtagtagaatatgttccca

SEQ ID NO: 3094278 - DNA, 25 bp, Homo sapien
tctttttcctatcgtagtagaatat

SEQ ID NO: 3094279 - DNA, 25 bp, Homo sapien
ctatcgtagtagaatatgttcccat

SEQ ID NO: 3094280 - DNA, 25 bp, Homo sapien
ttctttttcctatcgtagtagaata

SEQ ID NO: 3094281 - DNA, 25 bp, Homo sapien
tccaaacacctaactaactatactg

SEQ ID NO: 3094282 - DNA, 25 bp, Homo sapien
gtaacaacccagatcctgaaggcat

SEQ ID NO: 3094283 - DNA, 25 bp, Homo sapien
tttatgttcactgacttgtccctgg

SEQ ID NO: 3094284 - DNA, 25 bp, Homo sapien
ccccttgacagtttacattccttct

SEQ ID NO: 3094285 - DNA, 25 bp, Homo sapien
cattcatggccacttattgtctggt

SEQ ID NO: 3094286 - DNA, 25 bp, Homo sapien
taatcaggagtcttcctaagttgag

SEQ ID NO: 3094287 - DNA, 25 bp, Homo sapien
tcttcctaagttgagatgctgacat

SEQ ID NO: 3094288 - DNA, 25 bp, Homo sapien
tgtaattcaaatccaatgtccagat

SEQ ID NO: 3094289 - DNA, 25 bp, Homo sapien
ggtattaacagtcagaactgccaat

SEQ ID NO: 3094290 - DNA, 25 bp, Homo sapien
gttgtatgggagaaggctgtctacc

SEQ ID NO: 3094291 - DNA, 25 bp, Homo sapien
aaatcttaacttctgaccacggtag

SEQ ID NO: 3094292 - DNA, 25 bp, Homo sapien
tatcatgttccagtatctgcgggct

SEQ ID NO: 3094293 - DNA, 25 bp, Homo sapien
catgcaggggcaaatcgcctctcaa

SEQ ID NO: 3094294 - DNA, 25 bp, Homo sapien
aatcgcctctcaataattctgcaga

SEQ ID NO: 3094295 - DNA, 25 bp, Homo sapien
gcaggggcaaatcgcctctcaataa

SEQ ID NO: 3094296 - DNA, 25 bp, Homo sapien
gggcaaatcgcctctcaataattct

SEQ ID NO: 3094297 - DNA, 25 bp, Homo sapien
ctgaaagtttgccaaagacgaaaag

SEQ ID NO: 3094298 - DNA, 25 bp, Homo sapien
tgctgaaagtttgccaaagacgaaa

SEQ ID NO: 3094299 - DNA, 25 bp, Homo sapien
gacgaaaagcccgtggctttcacca

SEQ ID NO: 3094300 - DNA, 25 bp, Homo sapien
atattgctgaaagtttgccaaagac

SEQ ID NO: 3094301 - DNA, 25 bp, Homo sapien
aagatgcttcgattaaaatactggc

SEQ ID NO: 3094302 - DNA, 25 bp, Homo sapien
gattctgtgtattcattaaactggt

SEQ ID NO: 3094303 - DNA, 25 bp, Homo sapien
tcaatctgcttgtctccccaaataa

SEQ ID NO: 3094304 - DNA, 25 bp, Homo sapien
gatcagtgtctcaaagatgcttcga

SEQ ID NO: 3094305 - DNA, 25 bp, Homo sapien
cagagattcctgtaatctggagcag

SEQ ID NO: 3094306 - DNA, 25 bp, Homo sapien
agattcctgtaatctggagcagaga

SEQ ID NO: 3094307 - DNA, 25 bp, Homo sapien
gcagagacaaggatgggtgcctgta

SEQ ID NO: 3094308 - DNA, 25 bp, Homo sapien
agcagagacaaggatgggtgcctgt

SEQ ID NO: 3094309 - DNA, 25 bp, Homo sapien
caagcaaggaatgtcgtaacgtgcg

SEQ ID NO: 3094310 - DNA, 25 bp, Homo sapien
caaggaatgtcgtaacgtgcgtgca

SEQ ID NO: 3094311 - DNA, 25 bp, Homo sapien
tcgcactgaagtgtttgaccaagca

SEQ ID NO: 3094312 - DNA, 25 bp, Homo sapien
catgtgaattactcataatcgcact

SEQ ID NO: 3094313 - DNA, 25 bp, Homo sapien
ctgctgagctagcaagatcagatga

SEQ ID NO: 3094314 - DNA, 25 bp, Homo sapien
tcaagttggattctcgaggacaccg

SEQ ID NO: 3094315 - DNA, 25 bp, Homo sapien
gttctggcagaagcatgtggaacaa

SEQ ID NO: 3094316 - DNA, 25 bp, Homo sapien
attctcgaggacaccgggaggtttg

SEQ ID NO: 3094317 - DNA, 25 bp, Homo sapien
caccgggaggtttgttctggcagaa

SEQ ID NO: 3094318 - DNA, 25 bp, Homo sapien
ctctattccccaggcaggtgtctaa

SEQ ID NO: 3094319 - DNA, 25 bp, Homo sapien
ttccccaggcaggtgtctaacttct

SEQ ID NO: 3094320 - DNA, 25 bp, Homo sapien
ccccaggcaggtgtctaacttctgg

SEQ ID NO: 3094321 - DNA, 25 bp, Homo sapien
caggcaggtgtctaacttctgggct

SEQ ID NO: 3094322 - DNA, 25 bp, Homo sapien
tccatctgcctttgacagaggaatc

SEQ ID NO: 3094323 - DNA, 25 bp, Homo sapien
catctgcctttgacagaggaatcac

SEQ ID NO: 3094324 - DNA, 25 bp, Homo sapien
ccatctgcctttgacagaggaatca

SEQ ID NO: 3094325 - DNA, 25 bp, Homo sapien
acatcatgctgataactcctccaag

SEQ ID NO: 3094326 - DNA, 25 bp, Homo sapien
tgtccaaactcccatgggcgtctgt

SEQ ID NO: 3094327 - DNA, 25 bp, Homo sapien
agcttagatacaggccacatcatgc

SEQ ID NO: 3094328 - DNA, 25 bp, Homo sapien
gatctcctcagttagggctgtccaa

SEQ ID NO: 3094329 - DNA, 25 bp, Homo sapien
cagattgtaccccagacatcatttt

SEQ ID NO: 3094330 - DNA, 25 bp, Homo sapien
ctaaggattcattagtttgaagtgc

SEQ ID NO: 3094331 - DNA, 25 bp, Homo sapien
gccattttagatgcagattgtaccc

SEQ ID NO: 3094332 - DNA, 25 bp, Homo sapien
gcctctttccaaggccattttagat

SEQ ID NO: 3094333 - DNA, 25 bp, Homo sapien
ccacagagttccgtcagatttctat

SEQ ID NO: 3094334 - DNA, 25 bp, Homo sapien
tatggaagcaggtcagcaagaggca

SEQ ID NO: 3094335 - DNA, 25 bp, Homo sapien
gacaagcccatttgtagccattaga

SEQ ID NO: 3094336 - DNA, 25 bp, Homo sapien
gccattagatagcatgggaagagaa

SEQ ID NO: 3094337 - DNA, 25 bp, Homo sapien
gtcctcacataggagctgtgtctgc

SEQ ID NO: 3094338 - DNA, 25 bp, Homo sapien
ggattcaggatcaagactctgggct

SEQ ID NO: 3094339 - DNA, 25 bp, Homo sapien
cagtaataccatggaaaacacgtgg

SEQ ID NO: 3094340 - DNA, 25 bp, Homo sapien
gtcaacccagagataactaagctca

SEQ ID NO: 3094341 - DNA, 25 bp, Homo sapien
gctcattggagttgcagaaacatca

SEQ ID NO: 3094342 - DNA, 25 bp, Homo sapien
tcaagatttgctgcttctcaattgc

SEQ ID NO: 3094343 - DNA, 25 bp, Homo sapien
attatcaagatttgctgcttctcaa

SEQ ID NO: 3094344 - DNA, 25 bp, Homo sapien
agatttgctgcttctcaattgccat

SEQ ID NO: 3094345 - DNA, 25 bp, Homo sapien
tatcaagatttgctgcttctcaatt

SEQ ID NO: 3094346 - DNA, 25 bp, Homo sapien
gccctatcttttcagctcgaaccat

SEQ ID NO: 3094347 - DNA, 25 bp, Homo sapien
ctcgaaccatttttgaccttaggct

SEQ ID NO: 3094348 - DNA, 25 bp, Homo sapien
tgtgtgtaaagccagccctatcttt

SEQ ID NO: 3094349 - DNA, 25 bp, Homo sapien
ggtctctcaggcgttgctttgtttt

SEQ ID NO: 3094350 - DNA, 25 bp, Homo sapien
tagtgaaaggacagtacatgaggcc

SEQ ID NO: 3094351 - DNA, 25 bp, Homo sapien
tgtgctttctcctgttagtatagtg

SEQ ID NO: 3094352 - DNA, 25 bp, Homo sapien
gatgtaaatggccaaccaaatgtat

SEQ ID NO: 3094353 - DNA, 25 bp, Homo sapien
agctttgctgaaacgaaccgttcta

SEQ ID NO: 3094354 - DNA, 25 bp, Homo sapien
tttatctgacatgacacacattaaa

SEQ ID NO: 3094355 - DNA, 25 bp, Homo sapien
cacatttatctgacatgacacacat

SEQ ID NO: 3094356 - DNA, 25 bp, Homo sapien
catttatctgacatgacacacatta

SEQ ID NO: 3094357 - DNA, 25 bp, Homo sapien
atgacacacattaaaatgatttgtt

SEQ ID NO: 3094358 - DNA, 25 bp, Homo sapien
ttcccattccaagacgttgactttc

SEQ ID NO: 3094359 - DNA, 25 bp, Homo sapien
cattccaagacgttgactttcacca

SEQ ID NO: 3094360 - DNA, 25 bp, Homo sapien
aaaattattgctgctatcattccgg

SEQ ID NO: 3094361 - DNA, 25 bp, Homo sapien
tcattccggttgttagagtttccca

SEQ ID NO: 3094362 - DNA, 25 bp, Homo sapien
ggaccgctgaacaccagagggagtt

SEQ ID NO: 3094363 - DNA, 25 bp, Homo sapien
ctgaacaccagagggagttaagggt

SEQ ID NO: 3094364 - DNA, 25 bp, Homo sapien
taagggtttccttcgacagcggtga

SEQ ID NO: 3094365 - DNA, 25 bp, Homo sapien
gtttccttcgacagcggtgatgcat

SEQ ID NO: 3094366 - DNA, 25 bp, Homo sapien
taggaagagggtcacaatagaatgg

SEQ ID NO: 3094367 - DNA, 25 bp, Homo sapien
catttttgccaatcataggaagagg

SEQ ID NO: 3094368 - DNA, 25 bp, Homo sapien
tagaatggggttatagaactaagaa

SEQ ID NO: 3094369 - DNA, 25 bp, Homo sapien
tgccaatcataggaagagggtcaca

SEQ ID NO: 3094370 - DNA, 25 bp, Homo sapien
tctggcctccactaatggcagtact

SEQ ID NO: 3094371 - DNA, 25 bp, Homo sapien
tctttctctacatctctggcctcca

SEQ ID NO: 3094372 - DNA, 25 bp, Homo sapien
tgtcctgttacattttgttccacgg

SEQ ID NO: 3094373 - DNA, 25 bp, Homo sapien
aatacgttccaatgaacacattttg

SEQ ID NO: 3094374 - DNA, 25 bp, Homo sapien
cagcagccttatcagtagggcggca

SEQ ID NO: 3094375 - DNA, 25 bp, Homo sapien
tattgtttactagcctccttgggtg

SEQ ID NO: 3094376 - DNA, 25 bp, Homo sapien
ttagtgaatgatgcgtaagtctccc

SEQ ID NO: 3094377 - DNA, 25 bp, Homo sapien
catctgtaggccagcatcagggttt

SEQ ID NO: 3094378 - DNA, 25 bp, Homo sapien
tttgaatggtagaaccggtgagaac

SEQ ID NO: 3094379 - DNA, 25 bp, Homo sapien
gctcctggactttgacagtaaatat

SEQ ID NO: 3094380 - DNA, 25 bp, Homo sapien
aatatttgaatggtagaaccggtga

SEQ ID NO: 3094381 - DNA, 25 bp, Homo sapien
tatttgaatggtagaaccggtgaga

SEQ ID NO: 3094382 - DNA, 25 bp, Homo sapien
cctagtgtgctgagtctgtgcagat

SEQ ID NO: 3094383 - DNA, 25 bp, Homo sapien
gatgacggtatttagcagttggtaa

SEQ ID NO: 3094384 - DNA, 25 bp, Homo sapien
aagccccggatcctgaatcttacaa

SEQ ID NO: 3094385 - DNA, 25 bp, Homo sapien
tgcagatctgatactcttcacagtc

SEQ ID NO: 3094386 - DNA, 25 bp, Homo sapien
cttcagatggggtttttgtgtggat

SEQ ID NO: 3094387 - DNA, 25 bp, Homo sapien
tttgcttgggtatcaccagcagagg

SEQ ID NO: 3094388 - DNA, 25 bp, Homo sapien
tgctattcctttctgtttgttcgtt

SEQ ID NO: 3094389 - DNA, 25 bp, Homo sapien
ctttgtctttgatgctggtgacctt

SEQ ID NO: 3094390 - DNA, 25 bp, Homo sapien
gagctgcagactgaagctacttcta

SEQ ID NO: 3094391 - DNA, 25 bp, Homo sapien
ggagctgcagactgaagctacttct

SEQ ID NO: 3094392 - DNA, 25 bp, Homo sapien
gggagctgcagactgaagctacttc

SEQ ID NO: 3094393 - DNA, 25 bp, Homo sapien
gctgcagactgaagctacttctatt

SEQ ID NO: 3094394 - DNA, 25 bp, Homo sapien
cccattaacatgattaggcttttct

SEQ ID NO: 3094395 - DNA, 25 bp, Homo sapien
taagatgtcgcccatcccattaaca

SEQ ID NO: 3094396 - DNA, 25 bp, Homo sapien
tcttttgaatcattacctgaggtaa

SEQ ID NO: 3094397 - DNA, 25 bp, Homo sapien
taaaaatcttattggcacgttggcc

SEQ ID NO: 3094398 - DNA, 25 bp, Homo sapien
ctcagcaccaaatgaggcagttcgt

SEQ ID NO: 3094399 - DNA, 25 bp, Homo sapien
tcagcaccaaatgaggcagttcgtg

SEQ ID NO: 3094400 - DNA, 25 bp, Homo sapien
cagaaggtgcacgagtttctttatc

SEQ ID NO: 3094401 - DNA, 25 bp, Homo sapien
tggcacaggatgtacacaattaatt

SEQ ID NO: 3094402 - DNA, 25 bp, Homo sapien
tgtggcaattgcatgtggcacagga

SEQ ID NO: 3094403 - DNA, 25 bp, Homo sapien
gatatgttcaaatccacacagccgt

SEQ ID NO: 3094404 - DNA, 25 bp, Homo sapien
tcaacataaacgtgtgcaaaaataa

SEQ ID NO: 3094405 - DNA, 25 bp, Homo sapien
gcaagtaataaggagaaggctacca

SEQ ID NO: 3094406 - DNA, 25 bp, Homo sapien
aaaaccagtagcagataaggcctcc

SEQ ID NO: 3094407 - DNA, 25 bp, Homo sapien
aacacatgaaccaaggtgacctcag

SEQ ID NO: 3094408 - DNA, 25 bp, Homo sapien
tggcttcgctcacttttctgccatt

SEQ ID NO: 3094409 - DNA, 25 bp, Homo sapien
ggcttcgctcacttttctgccattc

SEQ ID NO: 3094410 - DNA, 25 bp, Homo sapien
gtttaaataatgatcagatgcacaa

SEQ ID NO: 3094411 - DNA, 25 bp, Homo sapien
ggaacagctttggtttcaaattgcc

SEQ ID NO: 3094412 - DNA, 25 bp, Homo sapien
tgtggtaatttttctccttagaatc

SEQ ID NO: 3094413 - DNA, 25 bp, Homo sapien
gcctgaatgcttgtggtaatttttc

SEQ ID NO: 3094414 - DNA, 25 bp, Homo sapien
ttctggacaacagtgattgccatct

SEQ ID NO: 3094415 - DNA, 25 bp, Homo sapien
atcttatggccatttccactacata

SEQ ID NO: 3094416 - DNA, 25 bp, Homo sapien
tatcttatggccatttccactacat

SEQ ID NO: 3094417 - DNA, 25 bp, Homo sapien
gaagtcttgtaagttctaccatcat

SEQ ID NO: 3094418 - DNA, 25 bp, Homo sapien
cactgaagtcttgtaagttctacca

SEQ ID NO: 3094419 - DNA, 25 bp, Homo sapien
tccactgaagtcttgtaagttctac

SEQ ID NO: 3094420 - DNA, 25 bp, Homo sapien
ttgtaagttctaccatcatagccac

SEQ ID NO: 3094421 - DNA, 25 bp, Homo sapien
tctggtccataaccaggctcttctg

SEQ ID NO: 3094422 - DNA, 25 bp, Homo sapien
tgccttcactgcctttgccgtctaa

SEQ ID NO: 3094423 - DNA, 25 bp, Homo sapien
tatcctgaatcagacgcctcccatt

SEQ ID NO: 3094424 - DNA, 25 bp, Homo sapien
tcttggtctcttcttcgtattgata

SEQ ID NO: 3094425 - DNA, 25 bp, Homo sapien
gaagcattggcaacagcacaaatgt

SEQ ID NO: 3094426 - DNA, 25 bp, Homo sapien
gagaagcattggcaacagcacaaat

SEQ ID NO: 3094427 - DNA, 25 bp, Homo sapien
tgagaagcattggcaacagcacaaa

SEQ ID NO: 3094428 - DNA, 25 bp, Homo sapien
agaagcattggcaacagcacaaatg

SEQ ID NO: 3094429 - DNA, 25 bp, Homo sapien
ttggtttcctaactggcttgtaatg

SEQ ID NO: 3094430 - DNA, 25 bp, Homo sapien
agccaccaaaattgaagcttggttt

SEQ ID NO: 3094431 - DNA, 25 bp, Homo sapien
caccaaaattgaagcttggtttcct

SEQ ID NO: 3094432 - DNA, 25 bp, Homo sapien
tcctaactggcttgtaatggtagcc

SEQ ID NO: 3094433 - DNA, 25 bp, Homo sapien
aacctggagtttaatgttgtctggg

SEQ ID NO: 3094434 - DNA, 25 bp, Homo sapien
taaaatactagggtggttagagcag

SEQ ID NO: 3094435 - DNA, 25 bp, Homo sapien
ggtgttcaaggtcatctctccccaa

SEQ ID NO: 3094436 - DNA, 25 bp, Homo sapien
tgtctggggtgttcaaggtcatctc

SEQ ID NO: 3094437 - DNA, 25 bp, Homo sapien
ccattgtgcaagcatcttcagcttg

SEQ ID NO: 3094438 - DNA, 25 bp, Homo sapien
aattgttctccattgtgcaagcatc

SEQ ID NO: 3094439 - DNA, 25 bp, Homo sapien
tctccattgtgcaagcatcttcagc

SEQ ID NO: 3094440 - DNA, 25 bp, Homo sapien
ttcaattgttctccattgtgcaagc

SEQ ID NO: 3094441 - DNA, 25 bp, Homo sapien
ctttctccaaactttgctgtgtaca

SEQ ID NO: 3094442 - DNA, 25 bp, Homo sapien
cagaactttgaattcaacaagcttt

SEQ ID NO: 3094443 - DNA, 25 bp, Homo sapien
aacagaactttgaattcaacaagct

SEQ ID NO: 3094444 - DNA, 25 bp, Homo sapien
caaactttgctgtgtacataaacac

SEQ ID NO: 3094445 - DNA, 25 bp, Homo sapien
ggtcgttccttcatatgttgcaaaa

SEQ ID NO: 3094446 - DNA, 25 bp, Homo sapien
gatttttcaaggacgctattggtcg

SEQ ID NO: 3094447 - DNA, 25 bp, Homo sapien
tgttctcaaacagacaccaaagttg

SEQ ID NO: 3094448 - DNA, 25 bp, Homo sapien
gaaccacatgtcattgttgggcgga

SEQ ID NO: 3094449 - DNA, 25 bp, Homo sapien
tcattgaggagcctatgggatgtcc

SEQ ID NO: 3094450 - DNA, 25 bp, Homo sapien
tggataacacatggaactccaaatt

SEQ ID NO: 3094451 - DNA, 25 bp, Homo sapien
gagagtacatttgccagcacagtca

SEQ ID NO: 3094452 - DNA, 25 bp, Homo sapien
tgggatgtccttgcttggataacac

SEQ ID NO: 3094453 - DNA, 25 bp, Homo sapien
caggatcttgttcagcacttgagtc

SEQ ID NO: 3094454 - DNA, 25 bp, Homo sapien
ttggaatgccaactctagaccggga

SEQ ID NO: 3094455 - DNA, 25 bp, Homo sapien
agcaaattcaatctagctgtggcag

SEQ ID NO: 3094456 - DNA, 25 bp, Homo sapien
tagaccgggattcaaaaccacgagc

SEQ ID NO: 3094457 - DNA, 25 bp, Homo sapien
ttttggtggttgatgagtggaatct

SEQ ID NO: 3094458 - DNA, 25 bp, Homo sapien
ggaatctgagatctgtcataaacct

SEQ ID NO: 3094459 - DNA, 25 bp, Homo sapien
tggttttggtggttgatgagtggaa

SEQ ID NO: 3094460 - DNA, 25 bp, Homo sapien
aatctgagatctgtcataaacctcc

SEQ ID NO: 3094461 - DNA, 25 bp, Homo sapien
aactgccaaactatgcacagcataa

SEQ ID NO: 3094462 - DNA, 25 bp, Homo sapien
ctatgcacagcataatgaatgggca

SEQ ID NO: 3094463 - DNA, 25 bp, Homo sapien
cattctacaaattccgctaagcgtg

SEQ ID NO: 3094464 - DNA, 25 bp, Homo sapien
ttaactagcagggtccccaactgcc

SEQ ID NO: 3094465 - DNA, 25 bp, Homo sapien
tgaagttctctttcatcgacacact

SEQ ID NO: 3094466 - DNA, 25 bp, Homo sapien
ttatttagtgaagcacgcgttgtcc

SEQ ID NO: 3094467 - DNA, 25 bp, Homo sapien
tgtccaaacggaataaaatgttgca

SEQ ID NO: 3094468 - DNA, 25 bp, Homo sapien
tttttccctccttcagtgctaggca

SEQ ID NO: 3094469 - DNA, 25 bp, Homo sapien
cagctacacctttgcaatgagttcc

SEQ ID NO: 3094470 - DNA, 25 bp, Homo sapien
attcagctacacctttgcaatgagt

SEQ ID NO: 3094471 - DNA, 25 bp, Homo sapien
gctacacctttgcaatgagttcctt

SEQ ID NO: 3094472 - DNA, 25 bp, Homo sapien
tcagctacacctttgcaatgagttc

SEQ ID NO: 3094473 - DNA, 25 bp, Homo sapien
gctattttggctactatcccttcct

SEQ ID NO: 3094474 - DNA, 25 bp, Homo sapien
ggctactatcccttccttccctctc

SEQ ID NO: 3094475 - DNA, 25 bp, Homo sapien
ctactatcccttccttccctctcat

SEQ ID NO: 3094476 - DNA, 25 bp, Homo sapien
tggctattttggctactatcccttc

SEQ ID NO: 3094477 - DNA, 25 bp, Homo sapien
gctatgtgaaggtggcaggtcaggg

SEQ ID NO: 3094478 - DNA, 25 bp, Homo sapien
ttcagcttcccatatggtgtcagca

SEQ ID NO: 3094479 - DNA, 25 bp, Homo sapien
tcaggggagataagtcaattttgtc

SEQ ID NO: 3094480 - DNA, 25 bp, Homo sapien
ttttccagttcagcttcccatatgg

SEQ ID NO: 3094481 - DNA, 25 bp, Homo sapien
aacaggaacaatcaagacaaatgga

SEQ ID NO: 3094482 - DNA, 25 bp, Homo sapien
caatcaagacaaatggaggtctccg

SEQ ID NO: 3094483 - DNA, 25 bp, Homo sapien
aaagcagaccctccaacaggaacaa

SEQ ID NO: 3094484 - DNA, 25 bp, Homo sapien
caagacaaatggaggtctccgtaaa

SEQ ID NO: 3094485 - DNA, 25 bp, Homo sapien
tccggagactggtgaatcagtggtt

SEQ ID NO: 3094486 - DNA, 25 bp, Homo sapien
cctgtccggagactggtgaatcagt

SEQ ID NO: 3094487 - DNA, 25 bp, Homo sapien
gcctgtccggagactggtgaatcag

SEQ ID NO: 3094488 - DNA, 25 bp, Homo sapien
tgtccggagactggtgaatcagtgg

SEQ ID NO: 3094489 - DNA, 25 bp, Homo sapien
aatggaccagactttaacacgcgtt

SEQ ID NO: 3094490 - DNA, 25 bp, Homo sapien
attgtcgctaatcaatggaccagac

SEQ ID NO: 3094491 - DNA, 25 bp, Homo sapien
cgctaatcaatggaccagactttaa

SEQ ID NO: 3094492 - DNA, 25 bp, Homo sapien
aatcaatggaccagactttaacacg

SEQ ID NO: 3094493 - DNA, 25 bp, Homo sapien
tagtgctggtagtgctagtagtact

SEQ ID NO: 3094494 - DNA, 25 bp, Homo sapien
tctatttctatgatagggaccccaa

SEQ ID NO: 3094495 - DNA, 25 bp, Homo sapien
aagtctcagctgtccaatctgtaaa

SEQ ID NO: 3094496 - DNA, 25 bp, Homo sapien
tagatcatcgttctttctacttggg

SEQ ID NO: 3094497 - DNA, 25 bp, Homo sapien
tccactgtcattggctctattagag

SEQ ID NO: 3094498 - DNA, 25 bp, Homo sapien
agaacaattccactgtcattggctc

SEQ ID NO: 3094499 - DNA, 25 bp, Homo sapien
tgactttagaggaggggctgatatc

SEQ ID NO: 3094500 - DNA, 25 bp, Homo sapien
caattccactgtcattggctctatt

SEQ ID NO: 3094501 - DNA, 25 bp, Homo sapien
gcaatcagtccataaaatctgcagt

SEQ ID NO: 3094502 - DNA, 25 bp, Homo sapien
tctttttgaccaagccagctccact

SEQ ID NO: 3094503 - DNA, 25 bp, Homo sapien
cactcattccccagtcagattggaa

SEQ ID NO: 3094504 - DNA, 25 bp, Homo sapien
aatacagcagtagcatagccatcag

SEQ ID NO: 3094505 - DNA, 25 bp, Homo sapien
gagtcttgtcacaggtaaaaccaag

SEQ ID NO: 3094506 - DNA, 25 bp, Homo sapien
aatcagttcaaaagaaggtctgtca

SEQ ID NO: 3094507 - DNA, 25 bp, Homo sapien
caggcagaggtggaacagttgaaat

SEQ ID NO: 3094508 - DNA, 25 bp, Homo sapien
tgaaagttttcaagtctgacttctc

SEQ ID NO: 3094509 - DNA, 25 bp, Homo sapien
cctctttaaggtcaggtggtctgtt

SEQ ID NO: 3094510 - DNA, 25 bp, Homo sapien
cgttgattgttaacaagtgagctca

SEQ ID NO: 3094511 - DNA, 25 bp, Homo sapien
tcctaggatgagagtcaatgggtct

SEQ ID NO: 3094512 - DNA, 25 bp, Homo sapien
gtcaaggtctttgtggtagaagtca

SEQ ID NO: 3094513 - DNA, 25 bp, Homo sapien
cccagcaactgattcccagacaagt

SEQ ID NO: 3094514 - DNA, 25 bp, Homo sapien
ccagacaagtctctgccggcaactt

SEQ ID NO: 3094515 - DNA, 25 bp, Homo sapien
gccggcaacttgtcacgtggtgatg

SEQ ID NO: 3094516 - DNA, 25 bp, Homo sapien
gggatgattctgtcaggcccacgca

SEQ ID NO: 3094517 - DNA, 25 bp, Homo sapien
tatgtgccactttcggcatgacacc

SEQ ID NO: 3094518 - DNA, 25 bp, Homo sapien
caaatatgtgccactttcggcatga

SEQ ID NO: 3094519 - DNA, 25 bp, Homo sapien
tcacgatgggcttcaaatatgtgcc

SEQ ID NO: 3094520 - DNA, 25 bp, Homo sapien
atcatcacgatgggcttcaaatatg

SEQ ID NO: 3094521 - DNA, 25 bp, Homo sapien
tacagggtctggaactaattgcaca

SEQ ID NO: 3094522 - DNA, 25 bp, Homo sapien
aagggtgtaccatgaaatactagtg

SEQ ID NO: 3094523 - DNA, 25 bp, Homo sapien
agttatttttatggctagagccagg

SEQ ID NO: 3094524 - DNA, 25 bp, Homo sapien
ttccaaagggtgtaccatgaaatac

SEQ ID NO: 3094525 - DNA, 25 bp, Homo sapien
ctgatctcatatttggtcctgctgt

SEQ ID NO: 3094526 - DNA, 25 bp, Homo sapien
atctcatatttggtcctgctgtcat

SEQ ID NO: 3094527 - DNA, 25 bp, Homo sapien
ttggttctgatctcatatttggtcc

SEQ ID NO: 3094528 - DNA, 25 bp, Homo sapien
cttggttctgatctcatatttggtc

SEQ ID NO: 3094529 - DNA, 25 bp, Homo sapien
tcagtgaagtgaatcatggctacac

SEQ ID NO: 3094530 - DNA, 25 bp, Homo sapien
cctctaagagcaacttctggtcatc

SEQ ID NO: 3094531 - DNA, 25 bp, Homo sapien
gaacctctggtcaaaagtcagcaag

SEQ ID NO: 3094532 - DNA, 25 bp, Homo sapien
gcatgcaccaatggagcctcttgct

SEQ ID NO: 3094533 - DNA, 25 bp, Homo sapien
tggtacacaaatttacagtggcctg

SEQ ID NO: 3094534 - DNA, 25 bp, Homo sapien
gctctgattggtgcacgtgctttca

SEQ ID NO: 3094535 - DNA, 25 bp, Homo sapien
gttcacaaccttcacactcagacat

SEQ ID NO: 3094536 - DNA, 25 bp, Homo sapien
gacatcatgaagaaaggaggggctc

SEQ ID NO: 3094537 - DNA, 25 bp, Homo sapien
ctctggctgtagctctgctaaaata

SEQ ID NO: 3094538 - DNA, 25 bp, Homo sapien
agtatccttcgatggcgccctctgg

SEQ ID NO: 3094539 - DNA, 25 bp, Homo sapien
gacatccaggaaaaagagtatcctt

SEQ ID NO: 3094540 - DNA, 25 bp, Homo sapien
cagaaaactctgctagcttgaccaa

SEQ ID NO: 3094541 - DNA, 25 bp, Homo sapien
gtttgtcctgatctttctctaagtg

SEQ ID NO: 3094542 - DNA, 25 bp, Homo sapien
gaacctttgtctaattggattgact

SEQ ID NO: 3094543 - DNA, 25 bp, Homo sapien
tctaattggattgactggaagtgta

SEQ ID NO: 3094544 - DNA, 25 bp, Homo sapien
gattgactggaagtgtaatgatcat

SEQ ID NO: 3094545 - DNA, 25 bp, Homo sapien
tacaatgtcacatagtccagtcctg

SEQ ID NO: 3094546 - DNA, 25 bp, Homo sapien
gtcacatagtccagtcctgaaacag

SEQ ID NO: 3094547 - DNA, 25 bp, Homo sapien
catgaaatacaatgtcacatagtcc

SEQ ID NO: 3094548 - DNA, 25 bp, Homo sapien
tccagtcctgaaacagtagttgcca

SEQ ID NO: 3094549 - DNA, 25 bp, Homo sapien
ggatggattcgctgacctggtatta

SEQ ID NO: 3094550 - DNA, 25 bp, Homo sapien
attaactaatgagaagttcatcggc

SEQ ID NO: 3094551 - DNA, 25 bp, Homo sapien
taactaatgagaagttcatcggcat

SEQ ID NO: 3094552 - DNA, 25 bp, Homo sapien
ctgaaaatatggatggattcgctga

SEQ ID NO: 3094553 - DNA, 25 bp, Homo sapien
cctgggtcgatatctacttttctgt

SEQ ID NO: 3094554 - DNA, 25 bp, Homo sapien
tgaagcccaggtagttgcagaacaa

SEQ ID NO: 3094555 - DNA, 25 bp, Homo sapien
caaataatcatcaatcatcacggct

SEQ ID NO: 3094556 - DNA, 25 bp, Homo sapien
ggattttagatggatagagcacaca

SEQ ID NO: 3094557 - DNA, 25 bp, Homo sapien
ctgaagtgccgtggtataagctcga

SEQ ID NO: 3094558 - DNA, 25 bp, Homo sapien
gaagtgccgtggtataagctcgacc

SEQ ID NO: 3094559 - DNA, 25 bp, Homo sapien
tgccgtggtataagctcgacccact

SEQ ID NO: 3094560 - DNA, 25 bp, Homo sapien
tggtataagctcgacccactgcagc

SEQ ID NO: 3094561 - DNA, 25 bp, Homo sapien
tcagttttgtaacctccatttgttc

SEQ ID NO: 3094562 - DNA, 25 bp, Homo sapien
cattatccagatgtttctcagtttt

SEQ ID NO: 3094563 - DNA, 25 bp, Homo sapien
tctcagttttgtaacctccatttgt

SEQ ID NO: 3094564 - DNA, 25 bp, Homo sapien
tgctcttcattatccagatgtttct

SEQ ID NO: 3094565 - DNA, 25 bp, Homo sapien
tttatggccgaggacacacgatgca

SEQ ID NO: 3094566 - DNA, 25 bp, Homo sapien
gcatgtcagttccatcactctttgc

SEQ ID NO: 3094567 - DNA, 25 bp, Homo sapien
gggcatatggtgagacgtcattaac

SEQ ID NO: 3094568 - DNA, 25 bp, Homo sapien
gtttcagtccgtttgagcagcatgt

SEQ ID NO: 3094569 - DNA, 25 bp, Homo sapien
taattatttccagaagtttcatctt

SEQ ID NO: 3094570 - DNA, 25 bp, Homo sapien
caaaaatcagatggcatccatcacg

SEQ ID NO: 3094571 - DNA, 25 bp, Homo sapien
gtttcatcttcaaaaatcagatggc

SEQ ID NO: 3094572 - DNA, 25 bp, Homo sapien
tccagaagtttcatcttcaaaaatc

SEQ ID NO: 3094573 - DNA, 25 bp, Homo sapien
tgatgatgcggctgaaggatctgat

SEQ ID NO: 3094574 - DNA, 25 bp, Homo sapien
tgttcctgatctgatgatgcggctg

SEQ ID NO: 3094575 - DNA, 25 bp, Homo sapien
catcctttcccgatccctgttcctg

SEQ ID NO: 3094576 - DNA, 25 bp, Homo sapien
ctgatctgatgatgcggctgaagga

SEQ ID NO: 3094577 - DNA, 25 bp, Homo sapien
ctaagtagtgtattgcagctcctga

SEQ ID NO: 3094578 - DNA, 25 bp, Homo sapien
ctggcatagtccactgctctctgta

SEQ ID NO: 3094579 - DNA, 25 bp, Homo sapien
gaatatcttataacatgtctggctg

SEQ ID NO: 3094580 - DNA, 25 bp, Homo sapien
tgctatttgaccatggcccagattg

SEQ ID NO: 3094581 - DNA, 25 bp, Homo sapien
agcagagctggtctaataatactga

SEQ ID NO: 3094582 - DNA, 25 bp, Homo sapien
tgaccatggcccagattgctcagag

SEQ ID NO: 3094583 - DNA, 25 bp, Homo sapien
ttagaatagaggaaacgtggctggt

SEQ ID NO: 3094584 - DNA, 25 bp, Homo sapien
tagaatagaggaaacgtggctggtg

SEQ ID NO: 3094585 - DNA, 25 bp, Homo sapien
aatagaggaaacgtggctggtgcca

SEQ ID NO: 3094586 - DNA, 25 bp, Homo sapien
gaatagaggaaacgtggctggtgcc

SEQ ID NO: 3094587 - DNA, 25 bp, Homo sapien
tcctcctcagaactttgatcaatac

SEQ ID NO: 3094588 - DNA, 25 bp, Homo sapien
ctatagcaatgagtgtgccaaatct

SEQ ID NO: 3094589 - DNA, 25 bp, Homo sapien
tctttcacatctccctatgactttc

SEQ ID NO: 3094590 - DNA, 25 bp, Homo sapien
gatcaataccctgctcattggcaaa

SEQ ID NO: 3094591 - DNA, 25 bp, Homo sapien
tatcttctgacttattctttttaac

SEQ ID NO: 3094592 - DNA, 25 bp, Homo sapien
tcttctgacttattctttttaacgc

SEQ ID NO: 3094593 - DNA, 25 bp, Homo sapien
tattttatcttctgacttattcttt

SEQ ID NO: 3094594 - DNA, 25 bp, Homo sapien
ctgacttattctttttaacgctcat

SEQ ID NO: 3094595 - DNA, 25 bp, Homo sapien
ttaatccgggtctctgcgtttcaga

SEQ ID NO: 3094596 - DNA, 25 bp, Homo sapien
gccaacaattggtcacacgcagcac

SEQ ID NO: 3094597 - DNA, 25 bp, Homo sapien
ttataagaataaggccaacaattgg

SEQ ID NO: 3094598 - DNA, 25 bp, Homo sapien
ccatgaaggctttactagttttata

SEQ ID NO: 3094599 - DNA, 25 bp, Homo sapien
tccttgttaaatttcataaatgcag

SEQ ID NO: 3094600 - DNA, 25 bp, Homo sapien
taatcagtctccttgttaaatttca

SEQ ID NO: 3094601 - DNA, 25 bp, Homo sapien
ttcagagcagtgagaactttctttc

SEQ ID NO: 3094602 - DNA, 25 bp, Homo sapien
cataaatgcagctttcagagcagtg

SEQ ID NO: 3094603 - DNA, 25 bp, Homo sapien
caatactgccatatattcctatcac

SEQ ID NO: 3094604 - DNA, 25 bp, Homo sapien
cactgagcatctgcgtttatagtca

SEQ ID NO: 3094605 - DNA, 25 bp, Homo sapien
cagctggttgcttaacctctgcttt

SEQ ID NO: 3094606 - DNA, 25 bp, Homo sapien
cagcttcgggcagtcaaaggaatca

SEQ ID NO: 3094607 - DNA, 25 bp, Homo sapien
ctcactgacacggtaatgggctttg

SEQ ID NO: 3094608 - DNA, 25 bp, Homo sapien
tgcctagaaaacgtagccccttgag

SEQ ID NO: 3094609 - DNA, 25 bp, Homo sapien
tacgtcagcaatttgtggcctcttg

SEQ ID NO: 3094610 - DNA, 25 bp, Homo sapien
tagctgcaatgaaaagcccctctgg

SEQ ID NO: 3094611 - DNA, 25 bp, Homo sapien
aacatcaaacccaagttgagtttat

SEQ ID NO: 3094612 - DNA, 25 bp, Homo sapien
catcaaacccaagttgagtttatta

SEQ ID NO: 3094613 - DNA, 25 bp, Homo sapien
ctaaacatcaaacccaagttgagtt

SEQ ID NO: 3094614 - DNA, 25 bp, Homo sapien
aactaaacatcaaacccaagttgag

SEQ ID NO: 3094615 - DNA, 25 bp, Homo sapien
aaaactgatgccagatataacatgc

SEQ ID NO: 3094616 - DNA, 25 bp, Homo sapien
agatataacatgcaaagccagcggc

SEQ ID NO: 3094617 - DNA, 25 bp, Homo sapien
aagccagcggcttctatggtactgc

SEQ ID NO: 3094618 - DNA, 25 bp, Homo sapien
gatataacatgcaaagccagcggct

SEQ ID NO: 3094619 - DNA, 25 bp, Homo sapien
cagcataggctcatacttgtgtcca

SEQ ID NO: 3094620 - DNA, 25 bp, Homo sapien
tactcagcatattcctaggcagtga

SEQ ID NO: 3094621 - DNA, 25 bp, Homo sapien
tgtgagagcagactgtgtacatccc

SEQ ID NO: 3094622 - DNA, 25 bp, Homo sapien
tcagcaccatgctcgcttgtgagag

SEQ ID NO: 3094623 - DNA, 25 bp, Homo sapien
tgatcagaactgcactcaaccacag

SEQ ID NO: 3094624 - DNA, 25 bp, Homo sapien
tgtaataagggagagcttactgccc

SEQ ID NO: 3094625 - DNA, 25 bp, Homo sapien
tgattggaattttgcccagaccctt

SEQ ID NO: 3094626 - DNA, 25 bp, Homo sapien
tgcacccctcaagcaagtgatcaga

SEQ ID NO: 3094627 - DNA, 25 bp, Homo sapien
tcacttggaaattgccactttctct

SEQ ID NO: 3094628 - DNA, 25 bp, Homo sapien
cacttggaaattgccactttctctt

SEQ ID NO: 3094629 - DNA, 25 bp, Homo sapien
ccaatcatcaagccccatttttgct

SEQ ID NO: 3094630 - DNA, 25 bp, Homo sapien
tgcataaagtcctcataaatagttt

SEQ ID NO: 3094631 - DNA, 25 bp, Homo sapien
aatcatcaagccccatttttgcttg

SEQ ID NO: 3094632 - DNA, 25 bp, Homo sapien
caatcatcaagccccatttttgctt

SEQ ID NO: 3094633 - DNA, 25 bp, Homo sapien
aatgttccaagatggtctcagaatt

SEQ ID NO: 3094634 - DNA, 25 bp, Homo sapien
atgttccaagatggtctcagaattg

SEQ ID NO: 3094635 - DNA, 25 bp, Homo sapien
gaaatcaaataaacagtggaccaga

SEQ ID NO: 3094636 - DNA, 25 bp, Homo sapien
tagctagcttctggtctggccataa

SEQ ID NO: 3094637 - DNA, 25 bp, Homo sapien
gacccacttgcagctaattagaatg

SEQ ID NO: 3094638 - DNA, 25 bp, Homo sapien
gctagtgtaaacaccaaccatctga

SEQ ID NO: 3094639 - DNA, 25 bp, Homo sapien
tgctggaatctgctgttgttcctgc

SEQ ID NO: 3094640 - DNA, 25 bp, Homo sapien
ttgctggaatctgctgttgttcctg

SEQ ID NO: 3094641 - DNA, 25 bp, Homo sapien
ttgttcctgctgtttgccggcagtt

SEQ ID NO: 3094642 - DNA, 25 bp, Homo sapien
cctgctgtttgccggcagttgccat

SEQ ID NO: 3094643 - DNA, 25 bp, Homo sapien
agagagcacatgaggaaggccacta

SEQ ID NO: 3094644 - DNA, 25 bp, Homo sapien
agtggagctttcgatgtttagagag

SEQ ID NO: 3094645 - DNA, 25 bp, Homo sapien
gagctttcgatgtttagagagcaca

SEQ ID NO: 3094646 - DNA, 25 bp, Homo sapien
gaaggccactaatgtcctgtaataa

SEQ ID NO: 3094647 - DNA, 25 bp, Homo sapien
tcaagggagattatgtttaaaggac

SEQ ID NO: 3094648 - DNA, 25 bp, Homo sapien
ctgagggacttcattataaccacag

SEQ ID NO: 3094649 - DNA, 25 bp, Homo sapien
atggcctaagactcccaagagcagc

SEQ ID NO: 3094650 - DNA, 25 bp, Homo sapien
acagcttcttctaccccggatgccc

SEQ ID NO: 3094651 - DNA, 25 bp, Homo sapien
ccggatgccccatggcctaagactc

SEQ ID NO: 3094652 - DNA, 25 bp, Homo sapien
catattctggacaatgagagcccac

SEQ ID NO: 3094653 - DNA, 25 bp, Homo sapien
ttctggacaatgagagcccactttt

SEQ ID NO: 3094654 - DNA, 25 bp, Homo sapien
tttcctatttctgcactacatttgc

SEQ ID NO: 3094655 - DNA, 25 bp, Homo sapien
tattctggacaatgagagcccactt

SEQ ID NO: 3094656 - DNA, 25 bp, Homo sapien
ccacactgtgtcaaagggctgttta

SEQ ID NO: 3094657 - DNA, 25 bp, Homo sapien
taagcaactttcctcagaaatggtc

SEQ ID NO: 3094658 - DNA, 25 bp, Homo sapien
ttggtcacatttcagcactagggcc

SEQ ID NO: 3094659 - DNA, 25 bp, Homo sapien
agcactagggcccaagtctctaagc

SEQ ID NO: 3094660 - DNA, 25 bp, Homo sapien
tctcaaaaggtctagcacatcttac

SEQ ID NO: 3094661 - DNA, 25 bp, Homo sapien
tttctcaaaaggtctagcacatctt

SEQ ID NO: 3094662 - DNA, 25 bp, Homo sapien
cacaaagaaagcagtttctcaaaag

SEQ ID NO: 3094663 - DNA, 25 bp, Homo sapien
agtttctcaaaaggtctagcacatc

SEQ ID NO: 3094664 - DNA, 25 bp, Homo sapien
catcagaggaagctaggcactgtgg

SEQ ID NO: 3094665 - DNA, 25 bp, Homo sapien
tgggaacatccaaaaacagttcatg

SEQ ID NO: 3094666 - DNA, 25 bp, Homo sapien
gcactgtgggaacatccaaaaacag

SEQ ID NO: 3094667 - DNA, 25 bp, Homo sapien
tccaaaaacagttcatgtcctcaaa

SEQ ID NO: 3094668 - DNA, 25 bp, Homo sapien
ctgtccattgctggtatcaagtttc

SEQ ID NO: 3094669 - DNA, 25 bp, Homo sapien
attgctggtatcaagtttccaaaaa

SEQ ID NO: 3094670 - DNA, 25 bp, Homo sapien
ccattgctggtatcaagtttccaaa

SEQ ID NO: 3094671 - DNA, 25 bp, Homo sapien
tgtccattgctggtatcaagtttcc

SEQ ID NO: 3094672 - DNA, 25 bp, Homo sapien
ggcaaactgaccatcatgaagtaca

SEQ ID NO: 3094673 - DNA, 25 bp, Homo sapien
ttctcaaattggtactccttttcca

SEQ ID NO: 3094674 - DNA, 25 bp, Homo sapien
catgaagtacacattcttcttgatg

SEQ ID NO: 3094675 - DNA, 25 bp, Homo sapien
ggaaagatgatgcagggcaaactga

SEQ ID NO: 3094676 - DNA, 25 bp, Homo sapien
tttgccaagtttagaccccattcca

SEQ ID NO: 3094677 - DNA, 25 bp, Homo sapien
ttgccaagtttagaccccattccaa

SEQ ID NO: 3094678 - DNA, 25 bp, Homo sapien
tttagaccccattccaaatccaaca

SEQ ID NO: 3094679 - DNA, 25 bp, Homo sapien
tgccaagtttagaccccattccaaa

SEQ ID NO: 3094680 - DNA, 25 bp, Homo sapien
tccactgggaattatgcctctgttc

SEQ ID NO: 3094681 - DNA, 25 bp, Homo sapien
tgtgtgagttccttgggcgccagag

SEQ ID NO: 3094682 - DNA, 25 bp, Homo sapien
tgttctattgtttgcgtctgggaca

SEQ ID NO: 3094683 - DNA, 25 bp, Homo sapien
ggagttcggacatctgcccattgtg

SEQ ID NO: 3094684 - DNA, 25 bp, Homo sapien
caaaaagcaggatattggggtctct

SEQ ID NO: 3094685 - DNA, 25 bp, Homo sapien
tagcctttatggctaacaatagcca

SEQ ID NO: 3094686 - DNA, 25 bp, Homo sapien
caatagccaataacttccaggaaaa

SEQ ID NO: 3094687 - DNA, 25 bp, Homo sapien
ggcctctgcatcaaagaacagctgg

SEQ ID NO: 3094688 - DNA, 25 bp, Homo sapien
attccttgccagaatgacccgtttt

SEQ ID NO: 3094689 - DNA, 25 bp, Homo sapien
tccttgccagaatgacccgtttttc

SEQ ID NO: 3094690 - DNA, 25 bp, Homo sapien
aattccttgccagaatgacccgttt

SEQ ID NO: 3094691 - DNA, 25 bp, Homo sapien
caattccttgccagaatgacccgtt

SEQ ID NO: 3094692 - DNA, 25 bp, Homo sapien
gagtgtttgacatgtgctcagacac

SEQ ID NO: 3094693 - DNA, 25 bp, Homo sapien
gagttctatcctgtagacttgagct

SEQ ID NO: 3094694 - DNA, 25 bp, Homo sapien
cagctggagtcacagtcgccacctt

SEQ ID NO: 3094695 - DNA, 25 bp, Homo sapien
gccaccttgatccaagagttctatc

SEQ ID NO: 3094696 - DNA, 25 bp, Homo sapien
tgggccctctccaataaccaggagg

SEQ ID NO: 3094697 - DNA, 25 bp, Homo sapien
gcaaagtgctgtccgacctcaataa

SEQ ID NO: 3094698 - DNA, 25 bp, Homo sapien
ccaggaggctttatcttcagaagat

SEQ ID NO: 3094699 - DNA, 25 bp, Homo sapien
gccataggctaaaagcatacccagt

SEQ ID NO: 3094700 - DNA, 25 bp, Homo sapien
tggaggttttccgatcatgaatttt

SEQ ID NO: 3094701 - DNA, 25 bp, Homo sapien
ttccgatcatgaattttgaggagta

SEQ ID NO: 3094702 - DNA, 25 bp, Homo sapien
gaggttttccgatcatgaattttga

SEQ ID NO: 3094703 - DNA, 25 bp, Homo sapien
cttttggaggttttccgatcatgaa

SEQ ID NO: 3094704 - DNA, 25 bp, Homo sapien
tccccttcctctgaattgcctttct

SEQ ID NO: 3094705 - DNA, 25 bp, Homo sapien
tgtcctccttctatatccccttcct

SEQ ID NO: 3094706 - DNA, 25 bp, Homo sapien
cccttcctctgaattgcctttcttt

SEQ ID NO: 3094707 - DNA, 25 bp, Homo sapien
cctgtcctccttctatatccccttc

SEQ ID NO: 3094708 - DNA, 25 bp, Homo sapien
gcatgggctcgtacaattattcttt

SEQ ID NO: 3094709 - DNA, 25 bp, Homo sapien
gctgacaatatgaactgtgtctgtc

SEQ ID NO: 3094710 - DNA, 25 bp, Homo sapien
tgctgcaatgacaggttgctgacaa

SEQ ID NO: 3094711 - DNA, 25 bp, Homo sapien
tctcatttgttaaggcgtcttcttc

SEQ ID NO: 3094712 - DNA, 25 bp, Homo sapien
cattttttctcgaatccagccactg

SEQ ID NO: 3094713 - DNA, 25 bp, Homo sapien
tcagaacccggttgccggcagcatt

SEQ ID NO: 3094714 - DNA, 25 bp, Homo sapien
caagcagttgacacccttgcaacaa

SEQ ID NO: 3094715 - DNA, 25 bp, Homo sapien
cttgaattagtgtcgtaggagctgt

SEQ ID NO: 3094716 - DNA, 25 bp, Homo sapien
cttcagaatagagcaagaagggacc

SEQ ID NO: 3094717 - DNA, 25 bp, Homo sapien
tgagttcctcttgacttagttcttt

SEQ ID NO: 3094718 - DNA, 25 bp, Homo sapien
tgctgaagtgaagacacttagactg

SEQ ID NO: 3094719 - DNA, 25 bp, Homo sapien
gacacttagactgttcatccagagg

SEQ ID NO: 3094720 - DNA, 25 bp, Homo sapien
gaagtgaagacacttagactgttca

SEQ ID NO: 3094721 - DNA, 25 bp, Homo sapien
tagactgttcatccagaggtcccat

SEQ ID NO: 3094722 - DNA, 25 bp, Homo sapien
cactggccagataataggctaatgg

SEQ ID NO: 3094723 - DNA, 25 bp, Homo sapien
aataaagtgcatgggttctcaggaa

SEQ ID NO: 3094724 - DNA, 25 bp, Homo sapien
aaagtacaaccagtcgctggtgtgg

SEQ ID NO: 3094725 - DNA, 25 bp, Homo sapien
gataaatcattcataagcccactgg

SEQ ID NO: 3094726 - DNA, 25 bp, Homo sapien
tccctttgtgagattcaagtaaaag

SEQ ID NO: 3094727 - DNA, 25 bp, Homo sapien
gccatgaggatacataagagtagaa

SEQ ID NO: 3094728 - DNA, 25 bp, Homo sapien
caacagatgtaaaggtccagatgct

SEQ ID NO: 3094729 - DNA, 25 bp, Homo sapien
tcagaatattgcgatagagcaagcc

SEQ ID NO: 3094730 - DNA, 25 bp, Homo sapien
tgttgtcagctttgaaaaacgcata

SEQ ID NO: 3094731 - DNA, 25 bp, Homo sapien
gagtaagtgtgttctgtccttggga

SEQ ID NO: 3094732 - DNA, 25 bp, Homo sapien
ttctccaagtccagaaagattatgg

SEQ ID NO: 3094733 - DNA, 25 bp, Homo sapien
tcaaagcaacatcattcaatagtgg

SEQ ID NO: 3094734 - DNA, 25 bp, Homo sapien
gaaccccttggctccaaagtggcca

SEQ ID NO: 3094735 - DNA, 25 bp, Homo sapien
tagaaccccttggctccaaagtggc

SEQ ID NO: 3094736 - DNA, 25 bp, Homo sapien
tcagtctgctccccaggattcagat

SEQ ID NO: 3094737 - DNA, 25 bp, Homo sapien
cagtctgctccccaggattcagatg

SEQ ID NO: 3094738 - DNA, 25 bp, Homo sapien
gcgtgggaagagatggtcaacaagg

SEQ ID NO: 3094739 - DNA, 25 bp, Homo sapien
ctgcgtgggaagagatggtcaacaa

SEQ ID NO: 3094740 - DNA, 25 bp, Homo sapien
cgtgggaagagatggtcaacaaggg

SEQ ID NO: 3094741 - DNA, 25 bp, Homo sapien
tgcgtgggaagagatggtcaacaag

SEQ ID NO: 3094742 - DNA, 25 bp, Homo sapien
gcttctggagctccaatgccgatgt

SEQ ID NO: 3094743 - DNA, 25 bp, Homo sapien
tagccttcattaatcagagtgagtg

SEQ ID NO: 3094744 - DNA, 25 bp, Homo sapien
cgatgtcagtgtgcatatatagcct

SEQ ID NO: 3094745 - DNA, 25 bp, Homo sapien
tatatagccttcattaatcagagtg

SEQ ID NO: 3094746 - DNA, 25 bp, Homo sapien
gatgccggggacctcattttgtgtt

SEQ ID NO: 3094747 - DNA, 25 bp, Homo sapien
aaagcggcatggtccacttttgtgc

SEQ ID NO: 3094748 - DNA, 25 bp, Homo sapien
tttgtgttttgtgtctcgtagcaac

SEQ ID NO: 3094749 - DNA, 25 bp, Homo sapien
tctcgtagcaacaagagctatttga

SEQ ID NO: 3094750 - DNA, 25 bp, Homo sapien
agggtttcatatcctcctggactga

SEQ ID NO: 3094751 - DNA, 25 bp, Homo sapien
tttgtctgttctatggttgttatac

SEQ ID NO: 3094752 - DNA, 25 bp, Homo sapien
ctggactgagtttctctgttgttga

SEQ ID NO: 3094753 - DNA, 25 bp, Homo sapien
atggttgttatacttctgtaggatt

SEQ ID NO: 3094754 - DNA, 25 bp, Homo sapien
gcaactctgaaaggatcaagacctg

SEQ ID NO: 3094755 - DNA, 25 bp, Homo sapien
caatttcagaagtgaccagggattc

SEQ ID NO: 3094756 - DNA, 25 bp, Homo sapien
ccagtaacttcctaggaattacaat

SEQ ID NO: 3094757 - DNA, 25 bp, Homo sapien
tatttttctaactagtgtcattcta

SEQ ID NO: 3094758 - DNA, 25 bp, Homo sapien
gatttgacagaggaatagggccaat

SEQ ID NO: 3094759 - DNA, 25 bp, Homo sapien
cacaaaagcgctggatgaaagccat

SEQ ID NO: 3094760 - DNA, 25 bp, Homo sapien
tcccagggcaaaactgactgtcttg

SEQ ID NO: 3094761 - DNA, 25 bp, Homo sapien
cactctggcttatgtggctgtctag

SEQ ID NO: 3094762 - DNA, 25 bp, Homo sapien
tagcggtctgcgaaaccatctgact

SEQ ID NO: 3094763 - DNA, 25 bp, Homo sapien
cctcctgagattgtctaattataga

SEQ ID NO: 3094764 - DNA, 25 bp, Homo sapien
tctgactcccctttgaaatcctctt

SEQ ID NO: 3094765 - DNA, 25 bp, Homo sapien
ttatagagtaatgctggaagtattc

SEQ ID NO: 3094766 - DNA, 25 bp, Homo sapien
taggctggtcatacagcagcacgca

SEQ ID NO: 3094767 - DNA, 25 bp, Homo sapien
caaataggctggtcatacagcagca

SEQ ID NO: 3094768 - DNA, 25 bp, Homo sapien
tcatacagcagcacgcatttgactg

SEQ ID NO: 3094769 - DNA, 25 bp, Homo sapien
tggtcatacagcagcacgcatttga

SEQ ID NO: 3094770 - DNA, 25 bp, Homo sapien
gagacaggtacagcacaaattgccc

SEQ ID NO: 3094771 - DNA, 25 bp, Homo sapien
caccacagaagatgattagggtttt

SEQ ID NO: 3094772 - DNA, 25 bp, Homo sapien
taaatttgcatagacgaatgaaaaa

SEQ ID NO: 3094773 - DNA, 25 bp, Homo sapien
caccccaaagacagcacactaagat

SEQ ID NO: 3094774 - DNA, 25 bp, Homo sapien
gttaatctgcaacacgccacagcct

SEQ ID NO: 3094775 - DNA, 25 bp, Homo sapien
cagcctctagatcgctgccgttcag

SEQ ID NO: 3094776 - DNA, 25 bp, Homo sapien
tgccgttcagagtcggatgtcatgg

SEQ ID NO: 3094777 - DNA, 25 bp, Homo sapien
cagctcctgcggcatctgatttgcc

SEQ ID NO: 3094778 - DNA, 25 bp, Homo sapien
ttttaataggatcacccccctcatc

SEQ ID NO: 3094779 - DNA, 25 bp, Homo sapien
attttaataggatcacccccctcat

SEQ ID NO: 3094780 - DNA, 25 bp, Homo sapien
tagcaattatatcagaggctgaggc

SEQ ID NO: 3094781 - DNA, 25 bp, Homo sapien
gtgctacccaaggtctccattcacg

SEQ ID NO: 3094782 - DNA, 25 bp, Homo sapien
acctctgccgctacacgttggtgct

SEQ ID NO: 3094783 - DNA, 25 bp, Homo sapien
tatgtataagactgagccctgtgca

SEQ ID NO: 3094784 - DNA, 25 bp, Homo sapien
ctggctgacttagtgccccaattct

SEQ ID NO: 3094785 - DNA, 25 bp, Homo sapien
catggagagatggaactggtagctt

SEQ ID NO: 3094786 - DNA, 25 bp, Homo sapien
atggagagatggaactggtagcttg

SEQ ID NO: 3094787 - DNA, 25 bp, Homo sapien
tggagagatggaactggtagcttga

SEQ ID NO: 3094788 - DNA, 25 bp, Homo sapien
cccagttccatctcttccctttgta

SEQ ID NO: 3094789 - DNA, 25 bp, Homo sapien
ctcccagttccatctcttccctttg

SEQ ID NO: 3094790 - DNA, 25 bp, Homo sapien
cagttccatctcttccctttgtaag

SEQ ID NO: 3094791 - DNA, 25 bp, Homo sapien
agttccatctcttccctttgtaagt

SEQ ID NO: 3094792 - DNA, 25 bp, Homo sapien
cactgggattctttttggtcggcgg

SEQ ID NO: 3094793 - DNA, 25 bp, Homo sapien
tcaaaatccagtatacaacaaactt

SEQ ID NO: 3094794 - DNA, 25 bp, Homo sapien
ggttcaccagtgcaattaatttgcc

SEQ ID NO: 3094795 - DNA, 25 bp, Homo sapien
gcgtctgtgtttattcggtttcaaa

SEQ ID NO: 3094796 - DNA, 25 bp, Homo sapien
tccttctctcgaatggtttgcaagc

SEQ ID NO: 3094797 - DNA, 25 bp, Homo sapien
tcttctccctggattgtgcacaaaa

SEQ ID NO: 3094798 - DNA, 25 bp, Homo sapien
gggatactccatggaccacttatct

SEQ ID NO: 3094799 - DNA, 25 bp, Homo sapien
caaaattatgccaatttatggtggg

SEQ ID NO: 3094800 - DNA, 25 bp, Homo sapien
aataatcatttgtttgagtgtccat

SEQ ID NO: 3094801 - DNA, 25 bp, Homo sapien
tattcaagccctgatggaatactct

SEQ ID NO: 3094802 - DNA, 25 bp, Homo sapien
tctcttcttcaatgtgagctggact

SEQ ID NO: 3094803 - DNA, 25 bp, Homo sapien
cagtgcgcctagcaaacgacagctt

SEQ ID NO: 3094804 - DNA, 25 bp, Homo sapien
tataggtaggcagttctgagacagc

SEQ ID NO: 3094805 - DNA, 25 bp, Homo sapien
ggtcaaaacaattggagctagttcc

SEQ ID NO: 3094806 - DNA, 25 bp, Homo sapien
taaatatgtgtaaaagcctcagtct

SEQ ID NO: 3094807 - DNA, 25 bp, Homo sapien
tttgttggaggttagggacactgtc

SEQ ID NO: 3094808 - DNA, 25 bp, Homo sapien
ggacactgtctcgtgcattacagga

SEQ ID NO: 3094809 - DNA, 25 bp, Homo sapien
tcacggaatccctgcaatagttgct

SEQ ID NO: 3094810 - DNA, 25 bp, Homo sapien
ggaatccctgcaatagttgctgcat

SEQ ID NO: 3094811 - DNA, 25 bp, Homo sapien
cctgcaatagttgctgcatttctgc

SEQ ID NO: 3094812 - DNA, 25 bp, Homo sapien
cttggtctcacggaatccctgcaat

SEQ ID NO: 3094813 - DNA, 25 bp, Homo sapien
caatccaatgggaaacctactgtct

SEQ ID NO: 3094814 - DNA, 25 bp, Homo sapien
aagagataaggtcaattcatctgac

SEQ ID NO: 3094815 - DNA, 25 bp, Homo sapien
tcatctgacaacaatccaatgggaa

SEQ ID NO: 3094816 - DNA, 25 bp, Homo sapien
cctactgtctccgtagaaattcttt

SEQ ID NO: 3094817 - DNA, 25 bp, Homo sapien
caggaactaggtctattcctcagcc

SEQ ID NO: 3094818 - DNA, 25 bp, Homo sapien
tctgctgcaggaactaggtctattc

SEQ ID NO: 3094819 - DNA, 25 bp, Homo sapien
gatctgctgcaggaactaggtctat

SEQ ID NO: 3094820 - DNA, 25 bp, Homo sapien
gctgcaggaactaggtctattcctc

SEQ ID NO: 3094821 - DNA, 25 bp, Homo sapien
caaaacgctacagacttttccatgg

SEQ ID NO: 3094822 - DNA, 25 bp, Homo sapien
ggtatagttgactcttgaagctgct

SEQ ID NO: 3094823 - DNA, 25 bp, Homo sapien
cacagtttgcaaaacgctacagact

SEQ ID NO: 3094824 - DNA, 25 bp, Homo sapien
attctccagctttagggattgctgg

SEQ ID NO: 3094825 - DNA, 25 bp, Homo sapien
ttataagctcttagaagtgcggagc

SEQ ID NO: 3094826 - DNA, 25 bp, Homo sapien
tataatctctcctatcggcctaatt

SEQ ID NO: 3094827 - DNA, 25 bp, Homo sapien
gcagaagtttgacattaaagaccct

SEQ ID NO: 3094828 - DNA, 25 bp, Homo sapien
gaagtgcggagcttatctttcacca

SEQ ID NO: 3094829 - DNA, 25 bp, Homo sapien
gatggaaggtgaaagggaagcaggc

SEQ ID NO: 3094830 - DNA, 25 bp, Homo sapien
ctgtacaggaatcctggctggggag

SEQ ID NO: 3094831 - DNA, 25 bp, Homo sapien
acaggctgtacaggaatcctggctg

SEQ ID NO: 3094832 - DNA, 25 bp, Homo sapien
atgatggaaggtgaaagggaagcag

SEQ ID NO: 3094833 - DNA, 25 bp, Homo sapien
ggtcggtggttaatgctgcccttac

SEQ ID NO: 3094834 - DNA, 25 bp, Homo sapien
tgctgggtcggtggttaatgctgcc

SEQ ID NO: 3094835 - DNA, 25 bp, Homo sapien
tcggtggttaatgctgcccttaccc

SEQ ID NO: 3094836 - DNA, 25 bp, Homo sapien
aaaggctgctgggtcggtggttaat

SEQ ID NO: 3094837 - DNA, 25 bp, Homo sapien
aacagctcccttgtttgcttatgtg

SEQ ID NO: 3094838 - DNA, 25 bp, Homo sapien
cactttccaacagctcccttgtttg

SEQ ID NO: 3094839 - DNA, 25 bp, Homo sapien
ccttgtttgcttatgtggaatcatg

SEQ ID NO: 3094840 - DNA, 25 bp, Homo sapien
aggggcccttcacactttccaacag

SEQ ID NO: 3094841 - DNA, 25 bp, Homo sapien
tgccccttggccatcgggtgtggtt

SEQ ID NO: 3094842 - DNA, 25 bp, Homo sapien
tccaaatgagtaagtccaagagtct

SEQ ID NO: 3094843 - DNA, 25 bp, Homo sapien
tggatctggcatgaggcttgaccaa

SEQ ID NO: 3094844 - DNA, 25 bp, Homo sapien
cagagttgtagaactcccgggcctt

SEQ ID NO: 3094845 - DNA, 25 bp, Homo sapien
caaaggctctttagaaagagcctga

SEQ ID NO: 3094846 - DNA, 25 bp, Homo sapien
acaaaggctctttagaaagagcctg

SEQ ID NO: 3094847 - DNA, 25 bp, Homo sapien
gagaactgccatgatctggcttcca

SEQ ID NO: 3094848 - DNA, 25 bp, Homo sapien
gctgaatttaaaccagagaactgcc

SEQ ID NO: 3094849 - DNA, 25 bp, Homo sapien
tagcttggaggaccctccaatgagc

SEQ ID NO: 3094850 - DNA, 25 bp, Homo sapien
ccaccataaatagggcctgccttct

SEQ ID NO: 3094851 - DNA, 25 bp, Homo sapien
aaccatttgtattcgtctgttttca

SEQ ID NO: 3094852 - DNA, 25 bp, Homo sapien
tacatgtcagtaggagagagagcga

SEQ ID NO: 3094853 - DNA, 25 bp, Homo sapien
tggtactaaaccatttgtattcgtc

SEQ ID NO: 3094854 - DNA, 25 bp, Homo sapien
tgtcttacatgtcagtaggagagag

SEQ ID NO: 3094855 - DNA, 25 bp, Homo sapien
ggaagacagctagttttgaaggaag

SEQ ID NO: 3094856 - DNA, 25 bp, Homo sapien
caaagcttatgaagggatttctggg

SEQ ID NO: 3094857 - DNA, 25 bp, Homo sapien
ggtgactacctatgctctatttccc

SEQ ID NO: 3094858 - DNA, 25 bp, Homo sapien
ggttacagggacattagctttctaa

SEQ ID NO: 3094859 - DNA, 25 bp, Homo sapien
gactgatacaccatcgtggtccctt

SEQ ID NO: 3094860 - DNA, 25 bp, Homo sapien
acaaaaggcaagacatgactgaccc

SEQ ID NO: 3094861 - DNA, 25 bp, Homo sapien
gactgaccctgaaatagagaatgcc

SEQ ID NO: 3094862 - DNA, 25 bp, Homo sapien
gaatgccaatactggacctcacctg

SEQ ID NO: 3094863 - DNA, 25 bp, Homo sapien
catgacacttgcagattcagcttca

SEQ ID NO: 3094864 - DNA, 25 bp, Homo sapien
gaaaaagagacacatcgaaaacttg

SEQ ID NO: 3094865 - DNA, 25 bp, Homo sapien
gaaggctgaaccagacgacctttaa

SEQ ID NO: 3094866 - DNA, 25 bp, Homo sapien
aacttttatcagttgagactgtgag

SEQ ID NO: 3094867 - DNA, 25 bp, Homo sapien
aaaaagagaaggatcatctagcagt

SEQ ID NO: 3094868 - DNA, 25 bp, Homo sapien
aatcaaatgtgaaaggtggcccaaa

SEQ ID NO: 3094869 - DNA, 25 bp, Homo sapien
aacatgtttcttgcgagctgctgct

SEQ ID NO: 3094870 - DNA, 25 bp, Homo sapien
cccatagaagccaggtctatttagc

SEQ ID NO: 3094871 - DNA, 25 bp, Homo sapien
ggaatgcttaactccgggattccca

SEQ ID NO: 3094872 - DNA, 25 bp, Homo sapien
ggcatttgccaatgccatgaagaag

SEQ ID NO: 3094873 - DNA, 25 bp, Homo sapien
agttggtggcatttgccaatgccat

SEQ ID NO: 3094874 - DNA, 25 bp, Homo sapien
ttggtggcatttgccaatgccatga

SEQ ID NO: 3094875 - DNA, 25 bp, Homo sapien
ggtggcatttgccaatgccatgaag

SEQ ID NO: 3094876 - DNA, 25 bp, Homo sapien
tcttagtgacctcctttccatttct

SEQ ID NO: 3094877 - DNA, 25 bp, Homo sapien
ggtggctcctgcgtttggttctcca

SEQ ID NO: 3094878 - DNA, 25 bp, Homo sapien
cagagtttctgcatccagttattac

SEQ ID NO: 3094879 - DNA, 25 bp, Homo sapien
attacatccattgcaagtctcttag

SEQ ID NO: 3094880 - DNA, 25 bp, Homo sapien
cactggatgtcaaggctggtcaaat

SEQ ID NO: 3094881 - DNA, 25 bp, Homo sapien
ccaatgcagatgttgagggaccttc

SEQ ID NO: 3094882 - DNA, 25 bp, Homo sapien
tcttcagagtcgacgaggtaccttg

SEQ ID NO: 3094883 - DNA, 25 bp, Homo sapien
ggtgaaattcaaaccggtcaggctg

SEQ ID NO: 3094884 - DNA, 25 bp, Homo sapien
cccatttcctgtattgataagagca

SEQ ID NO: 3094885 - DNA, 25 bp, Homo sapien
taatgccgccaataacaagacctga

SEQ ID NO: 3094886 - DNA, 25 bp, Homo sapien
tgaaggtgggtctaccaactaccat

SEQ ID NO: 3094887 - DNA, 25 bp, Homo sapien
tggaacaacatacaccagggacctg

SEQ ID NO: 3094888 - DNA, 25 bp, Homo sapien
tatactgagacgtggatgacgctgg

SEQ ID NO: 3094889 - DNA, 25 bp, Homo sapien
tgcctcttgccagggttctccactg

SEQ ID NO: 3094890 - DNA, 25 bp, Homo sapien
ggaaacccattgatgtccctcccag

SEQ ID NO: 3094891 - DNA, 25 bp, Homo sapien
gacatggaaacccattgatgtccct

SEQ ID NO: 3094892 - DNA, 25 bp, Homo sapien
aaaggacatggaaacccattgatgt

SEQ ID NO: 3094893 - DNA, 25 bp, Homo sapien
ggaagccttcttcaatattccacag

SEQ ID NO: 3094894 - DNA, 25 bp, Homo sapien
ctcctcttggaagccttcttcaata

SEQ ID NO: 3094895 - DNA, 25 bp, Homo sapien
aagccttcttcaatattccacagtg

SEQ ID NO: 3094896 - DNA, 25 bp, Homo sapien
gccttcttcaatattccacagtgat

SEQ ID NO: 3094897 - DNA, 25 bp, Homo sapien
gggatgttacggataccatgcctcc

SEQ ID NO: 3094898 - DNA, 25 bp, Homo sapien
tcctggaggaatcgcttggcaatct

SEQ ID NO: 3094899 - DNA, 25 bp, Homo sapien
gaaatgctcatggtaaattgtggat

SEQ ID NO: 3094900 - DNA, 25 bp, Homo sapien
ttggcaatcttcagacgagaaatgc

SEQ ID NO: 3094901 - DNA, 25 bp, Homo sapien
aatgtcaccaagtgtatcaatggat

SEQ ID NO: 3094902 - DNA, 25 bp, Homo sapien
tgtcaccaagtgtatcaatggattg

SEQ ID NO: 3094903 - DNA, 25 bp, Homo sapien
caccaagtgtatcaatggattgttt

SEQ ID NO: 3094904 - DNA, 25 bp, Homo sapien
gtcaccaagtgtatcaatggattgt

SEQ ID NO: 3094905 - DNA, 25 bp, Homo sapien
tagcttagatattttcacaaggacc

SEQ ID NO: 3094906 - DNA, 25 bp, Homo sapien
tttatcccctgatagaacaatcagc

SEQ ID NO: 3094907 - DNA, 25 bp, Homo sapien
cagagtcaaaggaggtgtcatgcca

SEQ ID NO: 3094908 - DNA, 25 bp, Homo sapien
tagctttacgctgacattggaatca

SEQ ID NO: 3094909 - DNA, 25 bp, Homo sapien
tgaccctgcttgaaatgatggaaat

SEQ ID NO: 3094910 - DNA, 25 bp, Homo sapien
tgttccaagatgaccctgcttgaaa

SEQ ID NO: 3094911 - DNA, 25 bp, Homo sapien
tccaagatgaccctgcttgaaatga

SEQ ID NO: 3094912 - DNA, 25 bp, Homo sapien
aagatgaccctgcttgaaatgatgg

SEQ ID NO: 3094913 - DNA, 25 bp, Homo sapien
tttgatgcaaactttctctgactcc

SEQ ID NO: 3094914 - DNA, 25 bp, Homo sapien
ttgatgcaaactttctctgactccc

SEQ ID NO: 3094915 - DNA, 25 bp, Homo sapien
cattttgatgcaaactttctctgac

SEQ ID NO: 3094916 - DNA, 25 bp, Homo sapien
ttttgatgcaaactttctctgactc

SEQ ID NO: 3094917 - DNA, 25 bp, Homo sapien
aaaggctaacggaaacagaggctgc

SEQ ID NO: 3094918 - DNA, 25 bp, Homo sapien
aacggtggtctttcgcacacatggg

SEQ ID NO: 3094919 - DNA, 25 bp, Homo sapien
gacaacactgccgtacggaaaggct

SEQ ID NO: 3094920 - DNA, 25 bp, Homo sapien
aactggctgatgctctggtccacca

SEQ ID NO: 3094921 - DNA, 25 bp, Homo sapien
taaagggtggctcactctcaggtgc

SEQ ID NO: 3094922 - DNA, 25 bp, Homo sapien
tatctgtaggcaggtccacacacac

SEQ ID NO: 3094923 - DNA, 25 bp, Homo sapien
ggcttccacccaatgtatctgtagg

SEQ ID NO: 3094924 - DNA, 25 bp, Homo sapien
taattcacgagaagagccagagttc

SEQ ID NO: 3094925 - DNA, 25 bp, Homo sapien
cttgatcactcctgaagagcatcca

SEQ ID NO: 3094926 - DNA, 25 bp, Homo sapien
tgaagagcatccaaccaccaccttc

SEQ ID NO: 3094927 - DNA, 25 bp, Homo sapien
aagagcatccaaccaccaccttcat

SEQ ID NO: 3094928 - DNA, 25 bp, Homo sapien
cctgaagagcatccaaccaccacct

SEQ ID NO: 3094929 - DNA, 25 bp, Homo sapien
gtttctcctttgactagcagaaaga

SEQ ID NO: 3094930 - DNA, 25 bp, Homo sapien
tgaacttgagtgacgtcagcgagct

SEQ ID NO: 3094931 - DNA, 25 bp, Homo sapien
ccagtagggtgaagccttggatcat

SEQ ID NO: 3094932 - DNA, 25 bp, Homo sapien
gcttcactcttccagtagaacccaa

SEQ ID NO: 3094933 - DNA, 25 bp, Homo sapien
tctgctcctagtagacaaagtcagc

SEQ ID NO: 3094934 - DNA, 25 bp, Homo sapien
ctctgctcctagtagacaaagtcag

SEQ ID NO: 3094935 - DNA, 25 bp, Homo sapien
tgagttccgtgatagcagcagcatg

SEQ ID NO: 3094936 - DNA, 25 bp, Homo sapien
caagcagccgactattgccagagct

SEQ ID NO: 3094937 - DNA, 25 bp, Homo sapien
cacagcctcctagagatatgcaggg

SEQ ID NO: 3094938 - DNA, 25 bp, Homo sapien
gaagggcacttcaaaagcgaaagca

SEQ ID NO: 3094939 - DNA, 25 bp, Homo sapien
cagaggctggattctgcgggaaacc

SEQ ID NO: 3094940 - DNA, 25 bp, Homo sapien
cagagcagagttcacgtggacagag

SEQ ID NO: 3094941 - DNA, 25 bp, Homo sapien
cagaacattatgagcccagaggaca

SEQ ID NO: 3094942 - DNA, 25 bp, Homo sapien
caaagcaccttgatggagccgcaag

SEQ ID NO: 3094943 - DNA, 25 bp, Homo sapien
gggctttactctcgcggaagcccaa

SEQ ID NO: 3094944 - DNA, 25 bp, Homo sapien
tggggtttgacctcatgaccttggc

SEQ ID NO: 3094945 - DNA, 25 bp, Homo sapien
gtgacgtcacagctccgaggaccat

SEQ ID NO: 3094946 - DNA, 25 bp, Homo sapien
gacaggacgcgctgtccccggagtc

SEQ ID NO: 3094947 - DNA, 25 bp, Homo sapien
aagcatcgcgtgttcgcaactgtcg

SEQ ID NO: 3094948 - DNA, 25 bp, Homo sapien
cagttttagcggagtcgggattcca

SEQ ID NO: 3094949 - DNA, 25 bp, Homo sapien
tgtgatgggacatgcactcactcgg

SEQ ID NO: 3094950 - DNA, 25 bp, Homo sapien
tgaaacgggcctcttggtctgcagt

SEQ ID NO: 3094951 - DNA, 25 bp, Homo sapien
ctgaggtcctctggtcggggactgc

SEQ ID NO: 3094952 - DNA, 25 bp, Homo sapien
cctctggtcggggactgcgcgcgtc

SEQ ID NO: 3094953 - DNA, 25 bp, Homo sapien
tcggggactgcgcgcgtcttcccag

SEQ ID NO: 3094954 - DNA, 25 bp, Homo sapien
tggtcggggactgcgcgcgtcttcc

SEQ ID NO: 3094955 - DNA, 25 bp, Homo sapien
gaaattctcccggaaggacattgat

SEQ ID NO: 3094956 - DNA, 25 bp, Homo sapien
gaaatgtcgggcttcttccgaagac

SEQ ID NO: 3094957 - DNA, 25 bp, Homo sapien
gcttcttccgaagacaacgagagaa

SEQ ID NO: 3094958 - DNA, 25 bp, Homo sapien
tcctataagaaatgtcgggcttctt

SEQ ID NO: 3094959 - DNA, 25 bp, Homo sapien
cacgaagggcgaagatggccgagat

SEQ ID NO: 3094960 - DNA, 25 bp, Homo sapien
caaccttggctaaatggagcagcga

SEQ ID NO: 3094961 - DNA, 25 bp, Homo sapien
gacacaaacatgacctatccaagcg

SEQ ID NO: 3094962 - DNA, 25 bp, Homo sapien
tcttcagagcaagcgtggaggatga

SEQ ID NO: 3094963 - DNA, 25 bp, Homo sapien
gcaactcgtacccaaatttccaaga

SEQ ID NO: 3094964 - DNA, 25 bp, Homo sapien
gccacagacctttgggctgccttat

SEQ ID NO: 3094965 - DNA, 25 bp, Homo sapien
ttcctcaaagggtatggtcatctgt

SEQ ID NO: 3094966 - DNA, 25 bp, Homo sapien
ggatcagcccactgacagaccttaa

SEQ ID NO: 3094967 - DNA, 25 bp, Homo sapien
tctgtaacttaagaaacctggcatt

SEQ ID NO: 3094968 - DNA, 25 bp, Homo sapien
ctttaggtcccagctcgcaagtggc

SEQ ID NO: 3094969 - DNA, 25 bp, Homo sapien
catcaaagaggcaaaaggcattcgc

SEQ ID NO: 3094970 - DNA, 25 bp, Homo sapien
tttattttaatcctcgcagcagccc

SEQ ID NO: 3094971 - DNA, 25 bp, Homo sapien
aaatctcatgccagtcccacagttg

SEQ ID NO: 3094972 - DNA, 25 bp, Homo sapien
ctcaaaatatggttccaagagaggc

SEQ ID NO: 3094973 - DNA, 25 bp, Homo sapien
ccagcaaggatcttcccacttggct

SEQ ID NO: 3094974 - DNA, 25 bp, Homo sapien
gaaaccagcaaggatcttcccactt

SEQ ID NO: 3094975 - DNA, 25 bp, Homo sapien
catagtgggagtcatggcattttcc

SEQ ID NO: 3094976 - DNA, 25 bp, Homo sapien
tcagagggcacaccttgctgtaagt

SEQ ID NO: 3094977 - DNA, 25 bp, Homo sapien
tctactgaatgttgggcagcacccc

SEQ ID NO: 3094978 - DNA, 25 bp, Homo sapien
tgaagctcactctaccaggatttgc

SEQ ID NO: 3094979 - DNA, 25 bp, Homo sapien
cccagccattacgtaggagctttca

SEQ ID NO: 3094980 - DNA, 25 bp, Homo sapien
aactatggtcctttgtagggcaaca

SEQ ID NO: 3094981 - DNA, 25 bp, Homo sapien
tgttaatatgatcgcctctagggca

SEQ ID NO: 3094982 - DNA, 25 bp, Homo sapien
aaaattggcattacccagcatggca

SEQ ID NO: 3094983 - DNA, 25 bp, Homo sapien
cactaacagtgggtgagtcaataac

SEQ ID NO: 3094984 - DNA, 25 bp, Homo sapien
tcaacaacatcagtaatttgtcttg

SEQ ID NO: 3094985 - DNA, 25 bp, Homo sapien
aatttgtcttggagagccgccatac

SEQ ID NO: 3094986 - DNA, 25 bp, Homo sapien
cagaaagatgccctgctgacctcct

SEQ ID NO: 3094987 - DNA, 25 bp, Homo sapien
gccctgctgacctcctcaacaacat

SEQ ID NO: 3094988 - DNA, 25 bp, Homo sapien
ccagtgaaaaccatatgtagaccat

SEQ ID NO: 3094989 - DNA, 25 bp, Homo sapien
tcctgatttatccagtgaaaaccat

SEQ ID NO: 3094990 - DNA, 25 bp, Homo sapien
tgagaagatcagcaaagaatacaaa

SEQ ID NO: 3094991 - DNA, 25 bp, Homo sapien
gaagatcagcaaagaatacaaacag

SEQ ID NO: 3094992 - DNA, 25 bp, Homo sapien
aggaggcttttgagcaatgaccaag

SEQ ID NO: 3094993 - DNA, 25 bp, Homo sapien
taagagtggacattcaaaaggaggc

SEQ ID NO: 3094994 - DNA, 25 bp, Homo sapien
cttaagagtggacattcaaaaggag

SEQ ID NO: 3094995 - DNA, 25 bp, Homo sapien
cttttgagcaatgaccaagctggag

SEQ ID NO: 3094996 - DNA, 25 bp, Homo sapien
tccataaagtgtcccggagcccttc

SEQ ID NO: 3094997 - DNA, 25 bp, Homo sapien
ctgccctccatagtgagtgcttggg

SEQ ID NO: 3094998 - DNA, 25 bp, Homo sapien
cagctgcaatggttattatgctcca

SEQ ID NO: 3094999 - DNA, 25 bp, Homo sapien
tctgcaggtgatcggattgaggtcc

SEQ ID NO: 3095000 - DNA, 25 bp, Homo sapien
ttcgatgtcaggctcaacacaaggc

SEQ ID NO: 3095001 - DNA, 25 bp, Homo sapien
cacaaggcgcttccaaaagggcctt

SEQ ID NO: 3095002 - DNA, 25 bp, Homo sapien
gatgtcaggctcaacacaaggcgct

SEQ ID NO: 3095003 - DNA, 25 bp, Homo sapien
cactttccaactttcgatgtcaggc

SEQ ID NO: 3095004 - DNA, 25 bp, Homo sapien
caaacctgcagatgctcatgaaggg

SEQ ID NO: 3095005 - DNA, 25 bp, Homo sapien
tctgatttctacagctgagtacctg

SEQ ID NO: 3095006 - DNA, 25 bp, Homo sapien
tgagtacctggtgccctaaatgtcc

SEQ ID NO: 3095007 - DNA, 25 bp, Homo sapien
gggccatcagtatccgacatctctg

SEQ ID NO: 3095008 - DNA, 25 bp, Homo sapien
cgatgtgcaccagctatttatgtac

SEQ ID NO: 3095009 - DNA, 25 bp, Homo sapien
ttccttctgtttacacctgagaccg

SEQ ID NO: 3095010 - DNA, 25 bp, Homo sapien
tttacacctgagaccgatgtgcacc

SEQ ID NO: 3095011 - DNA, 25 bp, Homo sapien
tgagaccgatgtgcaccagctattt

SEQ ID NO: 3095012 - DNA, 25 bp, Homo sapien
gaagtagctgattcttcctccaaat

SEQ ID NO: 3095013 - DNA, 25 bp, Homo sapien
cagacgcagttgaggttctccttaa

SEQ ID NO: 3095014 - DNA, 25 bp, Homo sapien
aaatgatgaagtagctgattcttcc

SEQ ID NO: 3095015 - DNA, 25 bp, Homo sapien
ggtgaccggaagttaagaggataca

SEQ ID NO: 3095016 - DNA, 25 bp, Homo sapien
tcttgtaactctcatgcaattgctc

SEQ ID NO: 3095017 - DNA, 25 bp, Homo sapien
cctttgccgatcaagtaacaattta

SEQ ID NO: 3095018 - DNA, 25 bp, Homo sapien
gcccaggaagaatatctggctcatt

SEQ ID NO: 3095019 - DNA, 25 bp, Homo sapien
tctagaaacacattgataagggacg

SEQ ID NO: 3095020 - DNA, 25 bp, Homo sapien
cagctccagatccttcgatcctccc

SEQ ID NO: 3095021 - DNA, 25 bp, Homo sapien
ttctagaggaagggtgatgttgtaa

SEQ ID NO: 3095022 - DNA, 25 bp, Homo sapien
ggccaaatagtgcaaatatgaagga

SEQ ID NO: 3095023 - DNA, 25 bp, Homo sapien
tgaaggagctattcaattgggccat

SEQ ID NO: 3095024 - DNA, 25 bp, Homo sapien
gcagaggccaaatagtgcaaatatg

SEQ ID NO: 3095025 - DNA, 25 bp, Homo sapien
gcatcatgcctttcaccaactggaa

SEQ ID NO: 3095026 - DNA, 25 bp, Homo sapien
catgatcccatttctgcatggcatg

SEQ ID NO: 3095027 - DNA, 25 bp, Homo sapien
tggaatcacaaggagatgcacctgc

SEQ ID NO: 3095028 - DNA, 25 bp, Homo sapien
tgcattatcttctgcatcatgcctt

SEQ ID NO: 3095029 - DNA, 25 bp, Homo sapien
gctgcgtggaggaaaatgtagcatt

SEQ ID NO: 3095030 - DNA, 25 bp, Homo sapien
aaggaagctatctccatacaacaag

SEQ ID NO: 3095031 - DNA, 25 bp, Homo sapien
acagtgatgaatgctaaggaagcta

SEQ ID NO: 3095032 - DNA, 25 bp, Homo sapien
agtgctcgttgtttctgggctgcgt

SEQ ID NO: 3095033 - DNA, 25 bp, Homo sapien
ttgtgccccggacagctgagaggtc

SEQ ID NO: 3095034 - DNA, 25 bp, Homo sapien
cattgtgccccggacagctgagagg

SEQ ID NO: 3095035 - DNA, 25 bp, Homo sapien
gaggtccgagttagccatacacagc

SEQ ID NO: 3095036 - DNA, 25 bp, Homo sapien
gacagctgagaggtccgagttagcc

SEQ ID NO: 3095037 - DNA, 25 bp, Homo sapien
gacactacagtcttccaacccagaa

SEQ ID NO: 3095038 - DNA, 25 bp, Homo sapien
tagtttccatcaaagctcagcccag

SEQ ID NO: 3095039 - DNA, 25 bp, Homo sapien
gatacagtgggctaacagcacggat

SEQ ID NO: 3095040 - DNA, 25 bp, Homo sapien
tctgcatgggaagcaaactcctctt

SEQ ID NO: 3095041 - DNA, 25 bp, Homo sapien
tctcattgcactagggattcccgga

SEQ ID NO: 3095042 - DNA, 25 bp, Homo sapien
gaagacaagacacctacagcacgtg

SEQ ID NO: 3095043 - DNA, 25 bp, Homo sapien
gacactgtacgggacatcctgagga

SEQ ID NO: 3095044 - DNA, 25 bp, Homo sapien
acgtgaccatgaacccaaggcagga

SEQ ID NO: 3095045 - DNA, 25 bp, Homo sapien
tgtgtcttctccctacatagttatg

SEQ ID NO: 3095046 - DNA, 25 bp, Homo sapien
tagtaaatgacaagaaagtgcaagc

SEQ ID NO: 3095047 - DNA, 25 bp, Homo sapien
tcactgctggctactctagctggct

SEQ ID NO: 3095048 - DNA, 25 bp, Homo sapien
aaggtggatcaataactgacaaata

SEQ ID NO: 3095049 - DNA, 25 bp, Homo sapien
aaatggcttgatcaacgatggcgtc

SEQ ID NO: 3095050 - DNA, 25 bp, Homo sapien
tagggctgatggtctttaggagttc

SEQ ID NO: 3095051 - DNA, 25 bp, Homo sapien
tagcggtcctaaatccacagggagg

SEQ ID NO: 3095052 - DNA, 25 bp, Homo sapien
ctatgggaggtctagaaaaatgact

SEQ ID NO: 3095053 - DNA, 25 bp, Homo sapien
ggtggaggccaccaacattttggat

SEQ ID NO: 3095054 - DNA, 25 bp, Homo sapien
ttatgcttcctcaaggtggaggcca

SEQ ID NO: 3095055 - DNA, 25 bp, Homo sapien
ttggattccattgaagatgacagtc

SEQ ID NO: 3095056 - DNA, 25 bp, Homo sapien
gaggccaccaacattttggattcca

SEQ ID NO: 3095057 - DNA, 25 bp, Homo sapien
cacagctctgacgacggcaaagaga

SEQ ID NO: 3095058 - DNA, 25 bp, Homo sapien
tctgacgacggcaaagagaggttgc

SEQ ID NO: 3095059 - DNA, 25 bp, Homo sapien
tggcaaaatattaatccggagctca

SEQ ID NO: 3095060 - DNA, 25 bp, Homo sapien
ggcaaaatattaatccggagctcac

SEQ ID NO: 3095061 - DNA, 25 bp, Homo sapien
gatggcgagcattcccttcatgttc

SEQ ID NO: 3095062 - DNA, 25 bp, Homo sapien
ggatgggcagtgatgcgcaccctct

SEQ ID NO: 3095063 - DNA, 25 bp, Homo sapien
gcagtgatgcgcaccctctgatggc

SEQ ID NO: 3095064 - DNA, 25 bp, Homo sapien
tgcgcaccctctgatggcgagcatt

SEQ ID NO: 3095065 - DNA, 25 bp, Homo sapien
tagtcttgagtcgtgtctgcaccag

SEQ ID NO: 3095066 - DNA, 25 bp, Homo sapien
aacagaactagggacaactggcaca

SEQ ID NO: 3095067 - DNA, 25 bp, Homo sapien
gagtaacatcctcaggagctatgga

SEQ ID NO: 3095068 - DNA, 25 bp, Homo sapien
tgtcagataacaccacgcactcgtt

SEQ ID NO: 3095069 - DNA, 25 bp, Homo sapien
tccaaagaaaggactggattttgct

SEQ ID NO: 3095070 - DNA, 25 bp, Homo sapien
agtccaaagaaaggactggattttg

SEQ ID NO: 3095071 - DNA, 25 bp, Homo sapien
tcagtccaaagaaaggactggattt

SEQ ID NO: 3095072 - DNA, 25 bp, Homo sapien
caaagaaaggactggattttgctct

SEQ ID NO: 3095073 - DNA, 25 bp, Homo sapien
tcctcagcagaccactgagtggggg

SEQ ID NO: 3095074 - DNA, 25 bp, Homo sapien
gggatgctcagctcgctgccatctc

SEQ ID NO: 3095075 - DNA, 25 bp, Homo sapien
gggggatgctcagctcgctgccatc

SEQ ID NO: 3095076 - DNA, 25 bp, Homo sapien
agtgggggggatgctcagctcgctg

SEQ ID NO: 3095077 - DNA, 25 bp, Homo sapien
tgtgtgagtgatagtctagactcct

SEQ ID NO: 3095078 - DNA, 25 bp, Homo sapien
tggtggtcctatttgcacacccaca

SEQ ID NO: 3095079 - DNA, 25 bp, Homo sapien
cactgaagcactctcagaattctgg

SEQ ID NO: 3095080 - DNA, 25 bp, Homo sapien
ttctggcggccccagatgaccaggg

SEQ ID NO: 3095081 - DNA, 25 bp, Homo sapien
gaaggggagatgtgaccacttcata

SEQ ID NO: 3095082 - DNA, 25 bp, Homo sapien
gggagatgtgaccacttcataaatc

SEQ ID NO: 3095083 - DNA, 25 bp, Homo sapien
tgaccctgggtggccgagtctctgc

SEQ ID NO: 3095084 - DNA, 25 bp, Homo sapien
tctctgccaagctttatctggaagg

SEQ ID NO: 3095085 - DNA, 25 bp, Homo sapien
gctggctcagctgagtttaaggggg

SEQ ID NO: 3095086 - DNA, 25 bp, Homo sapien
ctggctcagctgagtttaaggggga

SEQ ID NO: 3095087 - DNA, 25 bp, Homo sapien
taggaagcagaaggggattcatcac

SEQ ID NO: 3095088 - DNA, 25 bp, Homo sapien
ataggaagcagaaggggattcatca

SEQ ID NO: 3095089 - DNA, 25 bp, Homo sapien
aagggcctgacccaaatgcttcctg

SEQ ID NO: 3095090 - DNA, 25 bp, Homo sapien
ttgttaagtgaagggcctgacccaa

SEQ ID NO: 3095091 - DNA, 25 bp, Homo sapien
tgttgtcaaatttgaccttggactg

SEQ ID NO: 3095092 - DNA, 25 bp, Homo sapien
tcctggattccctcatgttgtcaaa

SEQ ID NO: 3095093 - DNA, 25 bp, Homo sapien
gcagtcaggccctgcatgatgtaca

SEQ ID NO: 3095094 - DNA, 25 bp, Homo sapien
cacaacatgcaaaagctggttatgt

SEQ ID NO: 3095095 - DNA, 25 bp, Homo sapien
tcttgggcagtatctatgaggtcca

SEQ ID NO: 3095096 - DNA, 25 bp, Homo sapien
caggccctgcatgatgtacacaaca

SEQ ID NO: 3095097 - DNA, 25 bp, Homo sapien
ccataggctgatagtcagataattt

SEQ ID NO: 3095098 - DNA, 25 bp, Homo sapien
ttggcaagtccatgcagatctcagt

SEQ ID NO: 3095099 - DNA, 25 bp, Homo sapien
cattggcaagtccatgcagatctca

SEQ ID NO: 3095100 - DNA, 25 bp, Homo sapien
tttgttgtggatagttaccaagtcc

SEQ ID NO: 3095101 - DNA, 25 bp, Homo sapien
gcaacctgtctaatcctgctgggaa

SEQ ID NO: 3095102 - DNA, 25 bp, Homo sapien
tgggaaacagtacatccggcccttg

SEQ ID NO: 3095103 - DNA, 25 bp, Homo sapien
cttcaaacctgcagtacaaacatgg

SEQ ID NO: 3095104 - DNA, 25 bp, Homo sapien
aattttatagcactcagggtgtgcc

SEQ ID NO: 3095105 - DNA, 25 bp, Homo sapien
acagtcttcttctggttagttcctg

SEQ ID NO: 3095106 - DNA, 25 bp, Homo sapien
tttattccctctgcattcagtatcc

SEQ ID NO: 3095107 - DNA, 25 bp, Homo sapien
tctgcattcagtatccccacagtct

SEQ ID NO: 3095108 - DNA, 25 bp, Homo sapien
ttcagtatccccacagtcttcttct

SEQ ID NO: 3095109 - DNA, 25 bp, Homo sapien
tagtcctacttgtaatttgaagcaa

SEQ ID NO: 3095110 - DNA, 25 bp, Homo sapien
tcttggcttctagtcctacttgtaa

SEQ ID NO: 3095111 - DNA, 25 bp, Homo sapien
agaaccgtgatgcattgggctggct

SEQ ID NO: 3095112 - DNA, 25 bp, Homo sapien
tgtctccttagtgagaaccgtgatg

SEQ ID NO: 3095113 - DNA, 25 bp, Homo sapien
tccttgcaccctgccgcaagatgag

SEQ ID NO: 3095114 - DNA, 25 bp, Homo sapien
accctgccgcaagatgagcttgcac

SEQ ID NO: 3095115 - DNA, 25 bp, Homo sapien
tgcaccctgccgcaagatgagcttg

SEQ ID NO: 3095116 - DNA, 25 bp, Homo sapien
ttgcaccctgccgcaagatgagctt

SEQ ID NO: 3095117 - DNA, 25 bp, Homo sapien
gagggccaaggagataagcatctca

SEQ ID NO: 3095118 - DNA, 25 bp, Homo sapien
acaactgagcagaagccaaggtctc

SEQ ID NO: 3095119 - DNA, 25 bp, Homo sapien
aagcatctcatcacaaaccagaaag

SEQ ID NO: 3095120 - DNA, 25 bp, Homo sapien
gaacaactgagcagaagccaaggtc

SEQ ID NO: 3095121 - DNA, 25 bp, Homo sapien
gaaaacaaggcagcaatgaccacca

SEQ ID NO: 3095122 - DNA, 25 bp, Homo sapien
aaacaaggcagcaatgaccaccagg

SEQ ID NO: 3095123 - DNA, 25 bp, Homo sapien
gtgaaaacaaggcagcaatgaccac

SEQ ID NO: 3095124 - DNA, 25 bp, Homo sapien
gcagcaatgaccaccaggatgctca

SEQ ID NO: 3095125 - DNA, 25 bp, Homo sapien
tgtgatcgtagcaaacacccctcct

SEQ ID NO: 3095126 - DNA, 25 bp, Homo sapien
acagcagcaattgtgatcgtagcaa

SEQ ID NO: 3095127 - DNA, 25 bp, Homo sapien
gacacccgtcaagggagcagtcata

SEQ ID NO: 3095128 - DNA, 25 bp, Homo sapien
aacagcccaaagacacccgtcaagg

SEQ ID NO: 3095129 - DNA, 25 bp, Homo sapien
tgaatttgcatgagataacagcagt

SEQ ID NO: 3095130 - DNA, 25 bp, Homo sapien
ataacagcagtaaggaatagtaagg

SEQ ID NO: 3095131 - DNA, 25 bp, Homo sapien
tttgcatgagataacagcagtaagg

SEQ ID NO: 3095132 - DNA, 25 bp, Homo sapien
tcccaccaggttatgctcctccacg

SEQ ID NO: 3095133 - DNA, 25 bp, Homo sapien
tttccccctcacataaagtccaatg

SEQ ID NO: 3095134 - DNA, 25 bp, Homo sapien
tgtcttcttctagtccataacttgg

SEQ ID NO: 3095135 - DNA, 25 bp, Homo sapien
taatggggccatctcaacatgtggc

SEQ ID NO: 3095136 - DNA, 25 bp, Homo sapien
tccaatgtgggtcagatgattttcc

SEQ ID NO: 3095137 - DNA, 25 bp, Homo sapien
ccattgaccaactggctaaccttga

SEQ ID NO: 3095138 - DNA, 25 bp, Homo sapien
attgaccaactggctaaccttgagc

SEQ ID NO: 3095139 - DNA, 25 bp, Homo sapien
cattgaccaactggctaaccttgag

SEQ ID NO: 3095140 - DNA, 25 bp, Homo sapien
gtttcattgcctttgacaagtcctt

SEQ ID NO: 3095141 - DNA, 25 bp, Homo sapien
gttatcactctgacatcttctagct

SEQ ID NO: 3095142 - DNA, 25 bp, Homo sapien
gagcaagttgtaatctccccacacc

SEQ ID NO: 3095143 - DNA, 25 bp, Homo sapien
tgctttgggcttagagtcatgtgac

SEQ ID NO: 3095144 - DNA, 25 bp, Homo sapien
attcaggtctgtatcatccttcctc

SEQ ID NO: 3095145 - DNA, 25 bp, Homo sapien
tctcattcaggtctgtatcatcctt

SEQ ID NO: 3095146 - DNA, 25 bp, Homo sapien
ctacagaggtgtctcattcaggtct

SEQ ID NO: 3095147 - DNA, 25 bp, Homo sapien
tcattcaggtctgtatcatccttcc

SEQ ID NO: 3095148 - DNA, 25 bp, Homo sapien
aggggacgcctcagatctttcagga

SEQ ID NO: 3095149 - DNA, 25 bp, Homo sapien
atcactcagccgtctgggtcccatg

SEQ ID NO: 3095150 - DNA, 25 bp, Homo sapien
tgcccgaagtgaaggggacgcctca

SEQ ID NO: 3095151 - DNA, 25 bp, Homo sapien
ctgggtcccatgcccgaagtgaagg

SEQ ID NO: 3095152 - DNA, 25 bp, Homo sapien
gcaaatcccagtctaagccattcag

SEQ ID NO: 3095153 - DNA, 25 bp, Homo sapien
tggacttcgtagttccttgcaaatc

SEQ ID NO: 3095154 - DNA, 25 bp, Homo sapien
aatatgtgtacctggagaggtctcc

SEQ ID NO: 3095155 - DNA, 25 bp, Homo sapien
agtagcaggaaatatgtgtacctgg

SEQ ID NO: 3095156 - DNA, 25 bp, Homo sapien
acttcaatggatattttactctaat

SEQ ID NO: 3095157 - DNA, 25 bp, Homo sapien
gaggaagggtacattgagagcccat

SEQ ID NO: 3095158 - DNA, 25 bp, Homo sapien
tcctctgcatagaaatgtttggtga

SEQ ID NO: 3095159 - DNA, 25 bp, Homo sapien
gcccattgtgaatctcactgtccat

SEQ ID NO: 3095160 - DNA, 25 bp, Homo sapien
ttggggatgactgccaggatcaaca

SEQ ID NO: 3095161 - DNA, 25 bp, Homo sapien
ggatgactgccaggatcaacagagc

SEQ ID NO: 3095162 - DNA, 25 bp, Homo sapien
ggggatgactgccaggatcaacaga

SEQ ID NO: 3095163 - DNA, 25 bp, Homo sapien
gtttggggatgactgccaggatcaa

SEQ ID NO: 3095164 - DNA, 25 bp, Homo sapien
tgtcctttaagggagatcaaagcgg

SEQ ID NO: 3095165 - DNA, 25 bp, Homo sapien
gctgtcctttaagggagatcaaagc

SEQ ID NO: 3095166 - DNA, 25 bp, Homo sapien
tcctttaagggagatcaaagcgggc

SEQ ID NO: 3095167 - DNA, 25 bp, Homo sapien
ctgtcctttaagggagatcaaagcg

SEQ ID NO: 3095168 - DNA, 25 bp, Homo sapien
gggttgacacatcattagggatcca

SEQ ID NO: 3095169 - DNA, 25 bp, Homo sapien
tcttcaacactcaggtacgtgcggg

SEQ ID NO: 3095170 - DNA, 25 bp, Homo sapien
cctgtcccagggaaataagaattga

SEQ ID NO: 3095171 - DNA, 25 bp, Homo sapien
tgctgaatctaaagaatgccctgga

SEQ ID NO: 3095172 - DNA, 25 bp, Homo sapien
cttgcattctcacaaggcgcccccg

SEQ ID NO: 3095173 - DNA, 25 bp, Homo sapien
ttgcattctcacaaggcgcccccgc

SEQ ID NO: 3095174 - DNA, 25 bp, Homo sapien
tgcattctcacaaggcgcccccgcc

SEQ ID NO: 3095175 - DNA, 25 bp, Homo sapien
ccttgcattctcacaaggcgccccc

SEQ ID NO: 3095176 - DNA, 25 bp, Homo sapien
ggttcaggggatgttttgtaagcca

SEQ ID NO: 3095177 - DNA, 25 bp, Homo sapien
caggaatcacgcacaggattgggag

SEQ ID NO: 3095178 - DNA, 25 bp, Homo sapien
catcatctacccaggaatcacgcac

SEQ ID NO: 3095179 - DNA, 25 bp, Homo sapien
ccaggaatcacgcacaggattggga

SEQ ID NO: 3095180 - DNA, 25 bp, Homo sapien
catctacccaggaatcacgcacagg

SEQ ID NO: 3095181 - DNA, 25 bp, Homo sapien
ctgcgaggagaagtcgtcactagtg

SEQ ID NO: 3095182 - DNA, 25 bp, Homo sapien
tgacccaatcgagacagctgggcag

SEQ ID NO: 3095183 - DNA, 25 bp, Homo sapien
gaattccagcaggtgacccaatcga

SEQ ID NO: 3095184 - DNA, 25 bp, Homo sapien
caggtgacccaatcgagacagctgg

SEQ ID NO: 3095185 - DNA, 25 bp, Homo sapien
gagaatgaatagacagccaagcagg

SEQ ID NO: 3095186 - DNA, 25 bp, Homo sapien
cattgcaagagattgagtcacacca

SEQ ID NO: 3095187 - DNA, 25 bp, Homo sapien
tccaagtcgtaagctctgaggtctc

SEQ ID NO: 3095188 - DNA, 25 bp, Homo sapien
tctgactttggtggccttggaggcc

SEQ ID NO: 3095189 - DNA, 25 bp, Homo sapien
atgacaacctggatgagcactgctt

SEQ ID NO: 3095190 - DNA, 25 bp, Homo sapien
catgacaacctggatgagcactgct

SEQ ID NO: 3095191 - DNA, 25 bp, Homo sapien
tgacaacctggatgagcactgcttc

SEQ ID NO: 3095192 - DNA, 25 bp, Homo sapien
tcatgacaacctggatgagcactgc

SEQ ID NO: 3095193 - DNA, 25 bp, Homo sapien
gtcacatgcgcgttcatgttcatct

SEQ ID NO: 3095194 - DNA, 25 bp, Homo sapien
catgcgcgttcatgttcatcttgta

SEQ ID NO: 3095195 - DNA, 25 bp, Homo sapien
cacatgcgcgttcatgttcatcttg

SEQ ID NO: 3095196 - DNA, 25 bp, Homo sapien
tcacatgcgcgttcatgttcatctt

SEQ ID NO: 3095197 - DNA, 25 bp, Homo sapien
aggtgctgaaaagggagagctctcc

SEQ ID NO: 3095198 - DNA, 25 bp, Homo sapien
taggctcacgtggtcccagattcca

SEQ ID NO: 3095199 - DNA, 25 bp, Homo sapien
catcctagggagcaaacggtggctg

SEQ ID NO: 3095200 - DNA, 25 bp, Homo sapien
cctttatttaatgtggccagagcag

SEQ ID NO: 3095201 - DNA, 25 bp, Homo sapien
aaataagtaacccttggagcgcaag

SEQ ID NO: 3095202 - DNA, 25 bp, Homo sapien
taggttcaagttcatcccggctggg

SEQ ID NO: 3095203 - DNA, 25 bp, Homo sapien
tatggaggactgaacccttgctcgg

SEQ ID NO: 3095204 - DNA, 25 bp, Homo sapien
gcggaagcctcttgttgcggacacc

SEQ ID NO: 3095205 - DNA, 25 bp, Homo sapien
cagtgtgaagcctaagtggagaacc

SEQ ID NO: 3095206 - DNA, 25 bp, Homo sapien
gaagctctgcgagtaagacaccgcc

SEQ ID NO: 3095207 - DNA, 25 bp, Homo sapien
ggcacccgaacttggctcatgagca

SEQ ID NO: 3095208 - DNA, 25 bp, Homo sapien
tactactcaagagggcgtccaggga

SEQ ID NO: 3095209 - DNA, 25 bp, Homo sapien
gagttattaatctagtgacaatctc

SEQ ID NO: 3095210 - DNA, 25 bp, Homo sapien
ttattaatctagtgacaatctctct

SEQ ID NO: 3095211 - DNA, 25 bp, Homo sapien
tattaatctagtgacaatctctctg

SEQ ID NO: 3095212 - DNA, 25 bp, Homo sapien
gttattaatctagtgacaatctctc

SEQ ID NO: 3095213 - DNA, 25 bp, Homo sapien
gagccttcttaccacgaaaacagag

SEQ ID NO: 3095214 - DNA, 25 bp, Homo sapien
tgtagatgtctactaaggccgtcgg

SEQ ID NO: 3095215 - DNA, 25 bp, Homo sapien
cattaaagcaattattgccagccaa

SEQ ID NO: 3095216 - DNA, 25 bp, Homo sapien
aaacagaggccgaaacctgtagatg

SEQ ID NO: 3095217 - DNA, 25 bp, Homo sapien
aatcgcccccaagatgcaatcactt

SEQ ID NO: 3095218 - DNA, 25 bp, Homo sapien
atcgcccccaagatgcaatcacttc

SEQ ID NO: 3095219 - DNA, 25 bp, Homo sapien
gaaatcgcccccaagatgcaatcac

SEQ ID NO: 3095220 - DNA, 25 bp, Homo sapien
aaatcgcccccaagatgcaatcact

SEQ ID NO: 3095221 - DNA, 25 bp, Homo sapien
gaaaggcatccatgggctctctgta

SEQ ID NO: 3095222 - DNA, 25 bp, Homo sapien
ttgagcatgtacaggtcactaatgg

SEQ ID NO: 3095223 - DNA, 25 bp, Homo sapien
tgcggcatctcatgcatttgagcat

SEQ ID NO: 3095224 - DNA, 25 bp, Homo sapien
gctcagaagggctagacagccagcc

SEQ ID NO: 3095225 - DNA, 25 bp, Homo sapien
gccagcagcagctttttggaatcag

SEQ ID NO: 3095226 - DNA, 25 bp, Homo sapien
gagccagcagcagctttttggaatc

SEQ ID NO: 3095227 - DNA, 25 bp, Homo sapien
gcagcagctttttggaatcagccat

SEQ ID NO: 3095228 - DNA, 25 bp, Homo sapien
cagcagcagctttttggaatcagcc

SEQ ID NO: 3095229 - DNA, 25 bp, Homo sapien
gagagccaaagaccaaacaggcgga

SEQ ID NO: 3095230 - DNA, 25 bp, Homo sapien
ttattttttaatgcgcttctggccc

SEQ ID NO: 3095231 - DNA, 25 bp, Homo sapien
ctacaattacaagagccgaggccca

SEQ ID NO: 3095232 - DNA, 25 bp, Homo sapien
tggccccatgtcctgtaaacagacc

SEQ ID NO: 3095233 - DNA, 25 bp, Homo sapien
atggcatacaactgtgatcacagct

SEQ ID NO: 3095234 - DNA, 25 bp, Homo sapien
tgatggcatacaactgtgatcacag

SEQ ID NO: 3095235 - DNA, 25 bp, Homo sapien
gatggcatacaactgtgatcacagc

SEQ ID NO: 3095236 - DNA, 25 bp, Homo sapien
gaatccctgataccttgaaggcctg

SEQ ID NO: 3095237 - DNA, 25 bp, Homo sapien
tgaaggccaacgaagtaaccagacg

SEQ ID NO: 3095238 - DNA, 25 bp, Homo sapien
caacactcagaaggacatggtctca

SEQ ID NO: 3095239 - DNA, 25 bp, Homo sapien
gaggcatggtcgttgagtcacccag

SEQ ID NO: 3095240 - DNA, 25 bp, Homo sapien
gatgaacttctgcactgatccgtgt

SEQ ID NO: 3095241 - DNA, 25 bp, Homo sapien
caaaacacggctgcaatgaacgaca

SEQ ID NO: 3095242 - DNA, 25 bp, Homo sapien
gagaacacgagccttcaccatcagt

SEQ ID NO: 3095243 - DNA, 25 bp, Homo sapien
tggcctctttacacggagcaggaac

SEQ ID NO: 3095244 - DNA, 25 bp, Homo sapien
ttcgtttctccacctggttagtggc

SEQ ID NO: 3095245 - DNA, 25 bp, Homo sapien
tttctccacctggttagtggccctc

SEQ ID NO: 3095246 - DNA, 25 bp, Homo sapien
cacctggttagtggccctctgagct

SEQ ID NO: 3095247 - DNA, 25 bp, Homo sapien
tccacctggttagtggccctctgag

SEQ ID NO: 3095248 - DNA, 25 bp, Homo sapien
gatgaacaagcagatgccctctcct

SEQ ID NO: 3095249 - DNA, 25 bp, Homo sapien
ggagccctgacaataagcttggcaa

SEQ ID NO: 3095250 - DNA, 25 bp, Homo sapien
gaattaaacgagaaaccagtgacca

SEQ ID NO: 3095251 - DNA, 25 bp, Homo sapien
tctgctaaaatgctgagccgagctt

SEQ ID NO: 3095252 - DNA, 25 bp, Homo sapien
ggccaactcaactggaaaggatgct

SEQ ID NO: 3095253 - DNA, 25 bp, Homo sapien
gcaggagtcatgagcagggcactta

SEQ ID NO: 3095254 - DNA, 25 bp, Homo sapien
gacaccacggccttatgagccaaga

SEQ ID NO: 3095255 - DNA, 25 bp, Homo sapien
tgactcggaagactccaccatatgg

SEQ ID NO: 3095256 - DNA, 25 bp, Homo sapien
ggcttgcggatgcaccactccaatc

SEQ ID NO: 3095257 - DNA, 25 bp, Homo sapien
ctcaagatcctagctaattacatgt

SEQ ID NO: 3095258 - DNA, 25 bp, Homo sapien
caagttagtacaaactgatggctta

SEQ ID NO: 3095259 - DNA, 25 bp, Homo sapien
ccatttcaagttagtacaaactgat

SEQ ID NO: 3095260 - DNA, 25 bp, Homo sapien
actgcagattcgacggagccgcagg

SEQ ID NO: 3095261 - DNA, 25 bp, Homo sapien
tagtgatcctcaggtcaagggcctc

SEQ ID NO: 3095262 - DNA, 25 bp, Homo sapien
cagccctgtagaggtcctcagagat

SEQ ID NO: 3095263 - DNA, 25 bp, Homo sapien
cttcagagcagaatggagcaagagg

SEQ ID NO: 3095264 - DNA, 25 bp, Homo sapien
ccaccagcaactaagagttcaaggg

SEQ ID NO: 3095265 - DNA, 25 bp, Homo sapien
gagccaccagcaactaagagttcaa

SEQ ID NO: 3095266 - DNA, 25 bp, Homo sapien
gggagccaccagcaactaagagttc

SEQ ID NO: 3095267 - DNA, 25 bp, Homo sapien
gccaccagcaactaagagttcaagg

SEQ ID NO: 3095268 - DNA, 25 bp, Homo sapien
caaaactgcgatgcagcaagtcagc

SEQ ID NO: 3095269 - DNA, 25 bp, Homo sapien
tctgagcacccacattcgtcaggtg

SEQ ID NO: 3095270 - DNA, 25 bp, Homo sapien
gaggtaggtcatcgagtccaaggct

SEQ ID NO: 3095271 - DNA, 25 bp, Homo sapien
tcgtcaggtggctctggtgtcagtc

SEQ ID NO: 3095272 - DNA, 25 bp, Homo sapien
tgtggtgggaaacgtgacaccctgc

SEQ ID NO: 3095273 - DNA, 25 bp, Homo sapien
tgcaacccggcgcttgttagttccc

SEQ ID NO: 3095274 - DNA, 25 bp, Homo sapien
tcagaaagtccctcttgctacctgg

SEQ ID NO: 3095275 - DNA, 25 bp, Homo sapien
gactgacaggttgagaaaagatgac

SEQ ID NO: 3095276 - DNA, 25 bp, Homo sapien
tgagtcatgaggtctgaccagcgac

SEQ ID NO: 3095277 - DNA, 25 bp, Homo sapien
caagcttcgtcgatagcaccaaggg

SEQ ID NO: 3095278 - DNA, 25 bp, Homo sapien
accaagggtccagatgccaggagag

SEQ ID NO: 3095279 - DNA, 25 bp, Homo sapien
gctttcacttgacctctgcagagag

SEQ ID NO: 3095280 - DNA, 25 bp, Homo sapien
caatgagtcggatcacagcatgctt

SEQ ID NO: 3095281 - DNA, 25 bp, Homo sapien
gaccccaatgcaagaggctatcctg

SEQ ID NO: 3095282 - DNA, 25 bp, Homo sapien
ggagagtgaccctcatatgaagcca

SEQ ID NO: 3095283 - DNA, 25 bp, Homo sapien
ggcaccgtggcgtttgacattatca

SEQ ID NO: 3095284 - DNA, 25 bp, Homo sapien
cacagtggcagggtacagtcaagtc

SEQ ID NO: 3095285 - DNA, 25 bp, Homo sapien
tcccaccggtgagtgcatgtagtca

SEQ ID NO: 3095286 - DNA, 25 bp, Homo sapien
tgttctacaaaagccgacacgagag

SEQ ID NO: 3095287 - DNA, 25 bp, Homo sapien
gaaaatgccatgtccaatgctggat

SEQ ID NO: 3095288 - DNA, 25 bp, Homo sapien
ggcaaagggttgcactgaagaagga

SEQ ID NO: 3095289 - DNA, 25 bp, Homo sapien
tgtacttattaacccctgtctgtgg

SEQ ID NO: 3095290 - DNA, 25 bp, Homo sapien
cagcctggcctgaattaattgtgat

SEQ ID NO: 3095291 - DNA, 25 bp, Homo sapien
tccgatggctaactgcaaagctcct

SEQ ID NO: 3095292 - DNA, 25 bp, Homo sapien
tggttcaaagcacccaccgagtcag

SEQ ID NO: 3095293 - DNA, 25 bp, Homo sapien
aagcacccaccgagtcagccagaaa

SEQ ID NO: 3095294 - DNA, 25 bp, Homo sapien
tttcctggttcaaagcacccaccga

SEQ ID NO: 3095295 - DNA, 25 bp, Homo sapien
tcctttcctggttcaaagcacccac

SEQ ID NO: 3095296 - DNA, 25 bp, Homo sapien
ggcggccacacgttacaggagaaga

SEQ ID NO: 3095297 - DNA, 25 bp, Homo sapien
gccacacgttacaggagaagaccag

SEQ ID NO: 3095298 - DNA, 25 bp, Homo sapien
gaaaaggcggccacacgttacagga

SEQ ID NO: 3095299 - DNA, 25 bp, Homo sapien
caggaggccgtgctggaaaaggcgg

SEQ ID NO: 3095300 - DNA, 25 bp, Homo sapien
acccagagggattctaggtgaccca

SEQ ID NO: 3095301 - DNA, 25 bp, Homo sapien
cgtgcaggctacattgaggagtctc

SEQ ID NO: 3095302 - DNA, 25 bp, Homo sapien
tgtagagttctagccaaatcgcaaa

SEQ ID NO: 3095303 - DNA, 25 bp, Homo sapien
gaacgtgcaaacttatcatcagctg

SEQ ID NO: 3095304 - DNA, 25 bp, Homo sapien
tttgtaaaagctgccgaccggccag

SEQ ID NO: 3095305 - DNA, 25 bp, Homo sapien
ggaagattgtaagccccagagacca

SEQ ID NO: 3095306 - DNA, 25 bp, Homo sapien
gcagcaacacttacgctaacgtgaa

SEQ ID NO: 3095307 - DNA, 25 bp, Homo sapien
gctataaaagcccacacctattgca

SEQ ID NO: 3095308 - DNA, 25 bp, Homo sapien
tctacctataagtccgttctgaggg

SEQ ID NO: 3095309 - DNA, 25 bp, Homo sapien
tatttgtaatgcacttgatatggtt

SEQ ID NO: 3095310 - DNA, 25 bp, Homo sapien
ctataagtccgttctgagggtgaaa

SEQ ID NO: 3095311 - DNA, 25 bp, Homo sapien
taatagtatctacctataagtccgt

SEQ ID NO: 3095312 - DNA, 25 bp, Homo sapien
ttctccttcttggtaggccacgcct

SEQ ID NO: 3095313 - DNA, 25 bp, Homo sapien
tctccttcttggtaggccacgcctc

SEQ ID NO: 3095314 - DNA, 25 bp, Homo sapien
tccttcttggtaggccacgcctccc

SEQ ID NO: 3095315 - DNA, 25 bp, Homo sapien
ctccttcttggtaggccacgcctcc

SEQ ID NO: 3095316 - DNA, 25 bp, Homo sapien
ccggcaggccgcagatgttaataaa

SEQ ID NO: 3095317 - DNA, 25 bp, Homo sapien
tttgccctttgccatgagacaccgg

SEQ ID NO: 3095318 - DNA, 25 bp, Homo sapien
tgattgtaaacacggccaagtgccc

SEQ ID NO: 3095319 - DNA, 25 bp, Homo sapien
tcaagtacgtcacaagaatcggccc

SEQ ID NO: 3095320 - DNA, 25 bp, Homo sapien
aggataccaggccaccacgaggcca

SEQ ID NO: 3095321 - DNA, 25 bp, Homo sapien
gaaatattaggaggataccaggcca

SEQ ID NO: 3095322 - DNA, 25 bp, Homo sapien
ttagttagaaaccatggtaatgagg

SEQ ID NO: 3095323 - DNA, 25 bp, Homo sapien
tagttagaaaccatggtaatgagga

SEQ ID NO: 3095324 - DNA, 25 bp, Homo sapien
acaggcacccagaggctgcgtgcac

SEQ ID NO: 3095325 - DNA, 25 bp, Homo sapien
gatgggctcaaaggaaatgccccag

SEQ ID NO: 3095326 - DNA, 25 bp, Homo sapien
tcagaagtgtgatgggctcaaagga

SEQ ID NO: 3095327 - DNA, 25 bp, Homo sapien
ggctcaaaggaaatgccccagcgcc

SEQ ID NO: 3095328 - DNA, 25 bp, Homo sapien
cctggtggtccctgtcgaagcggtc

SEQ ID NO: 3095329 - DNA, 25 bp, Homo sapien
gacatcttcaaacagagcccatgaa

SEQ ID NO: 3095330 - DNA, 25 bp, Homo sapien
acacccttggtccttacagctctgg

SEQ ID NO: 3095331 - DNA, 25 bp, Homo sapien
cggtcacggctcaccgccagacacc

SEQ ID NO: 3095332 - DNA, 25 bp, Homo sapien
cttaaagtaactccctgatttgcgg

SEQ ID NO: 3095333 - DNA, 25 bp, Homo sapien
tcttaaagtaactccctgatttgcg

SEQ ID NO: 3095334 - DNA, 25 bp, Homo sapien
ttcttaaagtaactccctgatttgc

SEQ ID NO: 3095335 - DNA, 25 bp, Homo sapien
gctctatgatgtgtgccgggacaga

SEQ ID NO: 3095336 - DNA, 25 bp, Homo sapien
catggcgtagaactcaaggcttcct

SEQ ID NO: 3095337 - DNA, 25 bp, Homo sapien
tgaggcccgggaagaaaggctctat

SEQ ID NO: 3095338 - DNA, 25 bp, Homo sapien
tctggaagtcataaacaagggtgtt

SEQ ID NO: 3095339 - DNA, 25 bp, Homo sapien
tatcgtccggctttccacgggatgt

SEQ ID NO: 3095340 - DNA, 25 bp, Homo sapien
gactgtccattaaatagacgccaga

SEQ ID NO: 3095341 - DNA, 25 bp, Homo sapien
tatcagaggctccttggcatgccta

SEQ ID NO: 3095342 - DNA, 25 bp, Homo sapien
tgcctacgagcagctgctatcagag

SEQ ID NO: 3095343 - DNA, 25 bp, Homo sapien
tgtgtgcctcgtctttcagggctag

SEQ ID NO: 3095344 - DNA, 25 bp, Homo sapien
tatctgttgggtgaatggacgagca

SEQ ID NO: 3095345 - DNA, 25 bp, Homo sapien
tttgttggtcactagcgcccagcac

SEQ ID NO: 3095346 - DNA, 25 bp, Homo sapien
tctgtacacgtcacccaacaatgtg

SEQ ID NO: 3095347 - DNA, 25 bp, Homo sapien
tgccagatgaggagccgtcgtggtt

SEQ ID NO: 3095348 - DNA, 25 bp, Homo sapien
catgcaaatcatgggtttggagcag

SEQ ID NO: 3095349 - DNA, 25 bp, Homo sapien
atggctacggactggcgggctatta

SEQ ID NO: 3095350 - DNA, 25 bp, Homo sapien
tgatccaaatgtacatgccagatga

SEQ ID NO: 3095351 - DNA, 25 bp, Homo sapien
taaatggaaaccctgagagagctct

SEQ ID NO: 3095352 - DNA, 25 bp, Homo sapien
cagagatacgggatgcacgggttca

SEQ ID NO: 3095353 - DNA, 25 bp, Homo sapien
gaacctgaagtgcaattccagacag

SEQ ID NO: 3095354 - DNA, 25 bp, Homo sapien
gataatcgtgataatagctcccatg

SEQ ID NO: 3095355 - DNA, 25 bp, Homo sapien
caggccttaacagccggcgagcctt

SEQ ID NO: 3095356 - DNA, 25 bp, Homo sapien
tgatgtttgtttgccacccgcctga

SEQ ID NO: 3095357 - DNA, 25 bp, Homo sapien
gattcacctccggtcttcagctcaa

SEQ ID NO: 3095358 - DNA, 25 bp, Homo sapien
gggaagccctgtccagattcacctc

SEQ ID NO: 3095359 - DNA, 25 bp, Homo sapien
agatctccctccaaactggccaatg

SEQ ID NO: 3095360 - DNA, 25 bp, Homo sapien
acacagctagtagggggcagatctc

SEQ ID NO: 3095361 - DNA, 25 bp, Homo sapien
gtgtactccaaccagttcaccttat

SEQ ID NO: 3095362 - DNA, 25 bp, Homo sapien
gttcaccttatacaagagaagagag

SEQ ID NO: 3095363 - DNA, 25 bp, Homo sapien
aaataaggccacatcccagggagag

SEQ ID NO: 3095364 - DNA, 25 bp, Homo sapien
acctgccaaataaggccacatccca

SEQ ID NO: 3095365 - DNA, 25 bp, Homo sapien
ccaaataaggccacatcccagggag

SEQ ID NO: 3095366 - DNA, 25 bp, Homo sapien
ataaggccacatcccagggagaggc

SEQ ID NO: 3095367 - DNA, 25 bp, Homo sapien
cggccgatgtcacttttctaaaact

SEQ ID NO: 3095368 - DNA, 25 bp, Homo sapien
ttctaaaactgaggtgatttcaaac

SEQ ID NO: 3095369 - DNA, 25 bp, Homo sapien
tctaaaactgaggtgatttcaaaca

SEQ ID NO: 3095370 - DNA, 25 bp, Homo sapien
gtgcccggccgatgtcacttttcta

SEQ ID NO: 3095371 - DNA, 25 bp, Homo sapien
acagcagcttgggatatagagtgtt

SEQ ID NO: 3095372 - DNA, 25 bp, Homo sapien
ccagttcttgtatccatggtgccca

SEQ ID NO: 3095373 - DNA, 25 bp, Homo sapien
ccagacagcagcttgggatatagag

SEQ ID NO: 3095374 - DNA, 25 bp, Homo sapien
tcttgtatccatggtgcccagacag

SEQ ID NO: 3095375 - DNA, 25 bp, Homo sapien
tcctccaagggagagtcagcgtgtc

SEQ ID NO: 3095376 - DNA, 25 bp, Homo sapien
agtgaactatcccacctctggtgaa

SEQ ID NO: 3095377 - DNA, 25 bp, Homo sapien
gagtcctagcagtttccagcctgaa

SEQ ID NO: 3095378 - DNA, 25 bp, Homo sapien
aagtgccctccttaagtcagtccgg

SEQ ID NO: 3095379 - DNA, 25 bp, Homo sapien
ctccaataagtaatcaccctgagcc

SEQ ID NO: 3095380 - DNA, 25 bp, Homo sapien
cttctccaataagtaatcaccctga

SEQ ID NO: 3095381 - DNA, 25 bp, Homo sapien
cagccgtaaaaataagctaatgagc

SEQ ID NO: 3095382 - DNA, 25 bp, Homo sapien
ctgggtggccttgagtaaccaactc

SEQ ID NO: 3095383 - DNA, 25 bp, Homo sapien
atttctgtttctgcagccgtaaaaa

SEQ ID NO: 3095384 - DNA, 25 bp, Homo sapien
tgagcatttccagggggccaacgag

SEQ ID NO: 3095385 - DNA, 25 bp, Homo sapien
cagccgcacctcaccaactgtgggt

SEQ ID NO: 3095386 - DNA, 25 bp, Homo sapien
tcacattgacacgtttcctaatcct

SEQ ID NO: 3095387 - DNA, 25 bp, Homo sapien
gctgccacccctcacattgacacgt

SEQ ID NO: 3095388 - DNA, 25 bp, Homo sapien
ggtccccacacggcagctccagggc

SEQ ID NO: 3095389 - DNA, 25 bp, Homo sapien
ctctttcatactggctgagaatttt

SEQ ID NO: 3095390 - DNA, 25 bp, Homo sapien
ctcttcatgacactcggattgaatg

SEQ ID NO: 3095391 - DNA, 25 bp, Homo sapien
tgacactcggattgaatgttctctt

SEQ ID NO: 3095392 - DNA, 25 bp, Homo sapien
ttctctttcatactggctgagaatt

SEQ ID NO: 3095393 - DNA, 25 bp, Homo sapien
tgtgttcgattggataggaaccgtt

SEQ ID NO: 3095394 - DNA, 25 bp, Homo sapien
caataaatccagcatgagtaagagt

SEQ ID NO: 3095395 - DNA, 25 bp, Homo sapien
tctcaatacccgtttttgtgttcga

SEQ ID NO: 3095396 - DNA, 25 bp, Homo sapien
gtaggagcaacggaaacagccactg

SEQ ID NO: 3095397 - DNA, 25 bp, Homo sapien
tcaaccctggaactattccacagag

SEQ ID NO: 3095398 - DNA, 25 bp, Homo sapien
gaatccagacccttctagagatcta

SEQ ID NO: 3095399 - DNA, 25 bp, Homo sapien
agagtgcaagtttcatcgcaggccc

SEQ ID NO: 3095400 - DNA, 25 bp, Homo sapien
tacgcaaacttccagggcggtctgg

SEQ ID NO: 3095401 - DNA, 25 bp, Homo sapien
aatttccaccggtgccgaggcctca

SEQ ID NO: 3095402 - DNA, 25 bp, Homo sapien
ccaccggtgccgaggcctcagtgga

SEQ ID NO: 3095403 - DNA, 25 bp, Homo sapien
ctggctggcggcttgttagagcctg

SEQ ID NO: 3095404 - DNA, 25 bp, Homo sapien
gctggcggcttgttagagcctgcag

SEQ ID NO: 3095405 - DNA, 25 bp, Homo sapien
catgatatgccctcgttgcaggccg

SEQ ID NO: 3095406 - DNA, 25 bp, Homo sapien
gggacacagctaccgcattcagaga

SEQ ID NO: 3095407 - DNA, 25 bp, Homo sapien
tgaagccgggaggagttacatgata

SEQ ID NO: 3095408 - DNA, 25 bp, Homo sapien
tgtcctgcataggaatgaagccggg

SEQ ID NO: 3095409 - DNA, 25 bp, Homo sapien
ttctaggaagaaagagccgactgcc

SEQ ID NO: 3095410 - DNA, 25 bp, Homo sapien
tgtgggtccctgaacaagaagcaaa

SEQ ID NO: 3095411 - DNA, 25 bp, Homo sapien
ccttagaggcgacacagacgtgaac

SEQ ID NO: 3095412 - DNA, 25 bp, Homo sapien
ggaagattgtcccattaacctggct

SEQ ID NO: 3095413 - DNA, 25 bp, Homo sapien
cttagaaataagactctgacgctct

SEQ ID NO: 3095414 - DNA, 25 bp, Homo sapien
tatacaggctagtcccctataggca

SEQ ID NO: 3095415 - DNA, 25 bp, Homo sapien
ttccctcctcgttcctattcttaga

SEQ ID NO: 3095416 - DNA, 25 bp, Homo sapien
agactctgacgctctcttttataca

SEQ ID NO: 3095417 - DNA, 25 bp, Homo sapien
tgagcagtcattacgtaccaggcac

SEQ ID NO: 3095418 - DNA, 25 bp, Homo sapien
gacttggcactgtatccagcagaga

SEQ ID NO: 3095419 - DNA, 25 bp, Homo sapien
ttgattcagggtgcatgtcattccc

SEQ ID NO: 3095420 - DNA, 25 bp, Homo sapien
gacagcgtgcagaccttgattcagg

SEQ ID NO: 3095421 - DNA, 25 bp, Homo sapien
gaaattaaagttccattctcgtcaa

SEQ ID NO: 3095422 - DNA, 25 bp, Homo sapien
gatgatttcgaacaaccacccagaa

SEQ ID NO: 3095423 - DNA, 25 bp, Homo sapien
aaggactttcgagacagtcatgttc

SEQ ID NO: 3095424 - DNA, 25 bp, Homo sapien
catgttccccaaaaccagactgatg

SEQ ID NO: 3095425 - DNA, 25 bp, Homo sapien
aaaccatgatctgagtttggagcct

SEQ ID NO: 3095426 - DNA, 25 bp, Homo sapien
tccttgtcacggaccaaaccatgat

SEQ ID NO: 3095427 - DNA, 25 bp, Homo sapien
gtatacatcctaaacaccaggcact

SEQ ID NO: 3095428 - DNA, 25 bp, Homo sapien
gacaagatgcactaaagccctgtgt

SEQ ID NO: 3095429 - DNA, 25 bp, Homo sapien
ctggagtccagcagcgcaatctcag

SEQ ID NO: 3095430 - DNA, 25 bp, Homo sapien
tgcctcctgggttcaagcaattctc

SEQ ID NO: 3095431 - DNA, 25 bp, Homo sapien
agctcactgcaacctctgcctcctg

SEQ ID NO: 3095432 - DNA, 25 bp, Homo sapien
ggcatgtgccaccacgctcagctaa

SEQ ID NO: 3095433 - DNA, 25 bp, Homo sapien
gaatccgccacacggttatggaagc

SEQ ID NO: 3095434 - DNA, 25 bp, Homo sapien
acacggttatggaagctggctccac

SEQ ID NO: 3095435 - DNA, 25 bp, Homo sapien
tccgccacacggttatggaagctgg

SEQ ID NO: 3095436 - DNA, 25 bp, Homo sapien
ctccgaatccgccacacggttatgg

SEQ ID NO: 3095437 - DNA, 25 bp, Homo sapien
tagagctctcgggagtataagctca

SEQ ID NO: 3095438 - DNA, 25 bp, Homo sapien
ctctagagctctcgggagtataagc

SEQ ID NO: 3095439 - DNA, 25 bp, Homo sapien
gctctcgggagtataagctcacttc

SEQ ID NO: 3095440 - DNA, 25 bp, Homo sapien
aaagctctagagctctcgggagtat

SEQ ID NO: 3095441 - DNA, 25 bp, Homo sapien
ttggatggaacatgggtcatctcca

SEQ ID NO: 3095442 - DNA, 25 bp, Homo sapien
cttggatggaacatgggtcatctcc

SEQ ID NO: 3095443 - DNA, 25 bp, Homo sapien
tcttcaacatggaaagggccggagg

SEQ ID NO: 3095444 - DNA, 25 bp, Homo sapien
tcccaggtttgctgcgtgacagcct

SEQ ID NO: 3095445 - DNA, 25 bp, Homo sapien
tgctgcgtgacagccttcccgttgc

SEQ ID NO: 3095446 - DNA, 25 bp, Homo sapien
tcttcaccctcttcaacatggaaag

SEQ ID NO: 3095447 - DNA, 25 bp, Homo sapien
ttcactgcagccttaggagagaccc

SEQ ID NO: 3095448 - DNA, 25 bp, Homo sapien
gatggtgtctactgccacaaggtga

SEQ ID NO: 3095449 - DNA, 25 bp, Homo sapien
cataccgtgggtaagtaaatctctc

SEQ ID NO: 3095450 - DNA, 25 bp, Homo sapien
ggtgacctgccctatagagaggcca

SEQ ID NO: 3095451 - DNA, 25 bp, Homo sapien
ggcatttccactgtcggccaagccc

SEQ ID NO: 3095452 - DNA, 25 bp, Homo sapien
catttccactgtcggccaagccctg

SEQ ID NO: 3095453 - DNA, 25 bp, Homo sapien
tgagaggtggctccatgccattttg

SEQ ID NO: 3095454 - DNA, 25 bp, Homo sapien
gcatttccactgtcggccaagccct

SEQ ID NO: 3095455 - DNA, 25 bp, Homo sapien
ttagccacagggaaacacggatggg

SEQ ID NO: 3095456 - DNA, 25 bp, Homo sapien
aaagacacctgtggaggcagtagcc

SEQ ID NO: 3095457 - DNA, 25 bp, Homo sapien
cgaccttggtgtaagtgacccctgg

SEQ ID NO: 3095458 - DNA, 25 bp, Homo sapien
ccctgctgagtggaagtgaaacctt

SEQ ID NO: 3095459 - DNA, 25 bp, Homo sapien
ccccacacgtgcacccatccacaca

SEQ ID NO: 3095460 - DNA, 25 bp, Homo sapien
acgccccacacgtgcacccatccac

SEQ ID NO: 3095461 - DNA, 25 bp, Homo sapien
cgccccacacgtgcacccatccaca

SEQ ID NO: 3095462 - DNA, 25 bp, Homo sapien
gccccacacgtgcacccatccacac

SEQ ID NO: 3095463 - DNA, 25 bp, Homo sapien
acacccatccactcatatacctggt

SEQ ID NO: 3095464 - DNA, 25 bp, Homo sapien
gagcctccccgtgaatggaaaacca

SEQ ID NO: 3095465 - DNA, 25 bp, Homo sapien
ggaaaaccagcaatgagagcgcttc

SEQ ID NO: 3095466 - DNA, 25 bp, Homo sapien
caatgagagcgcttcagtcgcttga

SEQ ID NO: 3095467 - DNA, 25 bp, Homo sapien
gcttcagtcgcttgacagtcacatt

SEQ ID NO: 3095468 - DNA, 25 bp, Homo sapien
tgtgcccctccgagactggaaccgt

SEQ ID NO: 3095469 - DNA, 25 bp, Homo sapien
gagcgaccacctctttctatcaggc

SEQ ID NO: 3095470 - DNA, 25 bp, Homo sapien
gaaccgtagagagcgaccacctctt

SEQ ID NO: 3095471 - DNA, 25 bp, Homo sapien
gagactggaaccgtagagagcgacc

SEQ ID NO: 3095472 - DNA, 25 bp, Homo sapien
tagaaggtgccagcctttacgacct

SEQ ID NO: 3095473 - DNA, 25 bp, Homo sapien
acattgtgccagctcatcgtcacca

SEQ ID NO: 3095474 - DNA, 25 bp, Homo sapien
tgtgccagctcatcgtcaccaaaag

SEQ ID NO: 3095475 - DNA, 25 bp, Homo sapien
gacctgtacagaagagctgccttcc

SEQ ID NO: 3095476 - DNA, 25 bp, Homo sapien
accaatcccatagacgcccttcact

SEQ ID NO: 3095477 - DNA, 25 bp, Homo sapien
aagctgacacctccctcgccacagc

SEQ ID NO: 3095478 - DNA, 25 bp, Homo sapien
gcccactgaccaatcccatagacgc

SEQ ID NO: 3095479 - DNA, 25 bp, Homo sapien
agagcagcaagctgacacctccctc

SEQ ID NO: 3095480 - DNA, 25 bp, Homo sapien
gacgaacatcacttctagctctcca

SEQ ID NO: 3095481 - DNA, 25 bp, Homo sapien
ccaaaccagatttaacgtctgcaga

SEQ ID NO: 3095482 - DNA, 25 bp, Homo sapien
cagatttaacgtctgcagagagaaa

SEQ ID NO: 3095483 - DNA, 25 bp, Homo sapien
aggacgaacatcacttctagctctc

SEQ ID NO: 3095484 - DNA, 25 bp, Homo sapien
ccagtttgagcggtgaaccttgaat

SEQ ID NO: 3095485 - DNA, 25 bp, Homo sapien
aaccttgaatgcaggcgcatgggca

SEQ ID NO: 3095486 - DNA, 25 bp, Homo sapien
gggacaagcaacatcacccaatggc

SEQ ID NO: 3095487 - DNA, 25 bp, Homo sapien
cactggaccgggtcattatttcggg

SEQ ID NO: 3095488 - DNA, 25 bp, Homo sapien
atcagatcccttccccgaaccgcag

SEQ ID NO: 3095489 - DNA, 25 bp, Homo sapien
aatcagatcccttccccgaaccgca

SEQ ID NO: 3095490 - DNA, 25 bp, Homo sapien
cagatcccttccccgaaccgcaggg

SEQ ID NO: 3095491 - DNA, 25 bp, Homo sapien
agaaaagaaagtaaatcagatccct

SEQ ID NO: 3095492 - DNA, 25 bp, Homo sapien
taatccacgttaaggggtccgcagc

SEQ ID NO: 3095493 - DNA, 25 bp, Homo sapien
tggcgacccagctgttaagcagaac

SEQ ID NO: 3095494 - DNA, 25 bp, Homo sapien
taagcagaacaaatcaatccacgga

SEQ ID NO: 3095495 - DNA, 25 bp, Homo sapien
ccactttccatccaaggccaaagag

SEQ ID NO: 3095496 - DNA, 25 bp, Homo sapien
ctctgcgctccagactcgcggaggt

SEQ ID NO: 3095497 - DNA, 25 bp, Homo sapien
agcgcatcccgcctactcgtgctgg

SEQ ID NO: 3095498 - DNA, 25 bp, Homo sapien
tgccaagctggaaagcgctgaaggc

SEQ ID NO: 3095499 - DNA, 25 bp, Homo sapien
cgcccggaggaccaagcgagcgcat

SEQ ID NO: 3095500 - DNA, 25 bp, Homo sapien
taacagagggtccttgcggagaagc

SEQ ID NO: 3095501 - DNA, 25 bp, Homo sapien
gtgaccgcgtcctctggataccagc

SEQ ID NO: 3095502 - DNA, 25 bp, Homo sapien
acgacaaatgccagaggcggtgacc

SEQ ID NO: 3095503 - DNA, 25 bp, Homo sapien
gcggagaagcgcagaacgacaaatg

SEQ ID NO: 3095504 - DNA, 25 bp, Homo sapien
tatgccttgttgcacctattaacag

SEQ ID NO: 3095505 - DNA, 25 bp, Homo sapien
taacagccattgtgactaaccaacc

SEQ ID NO: 3095506 - DNA, 25 bp, Homo sapien
ctgtggccacggtgggattgctgga

SEQ ID NO: 3095507 - DNA, 25 bp, Homo sapien
gaagcaagatgaaatcacaaaatca

SEQ ID NO: 3095508 - DNA, 25 bp, Homo sapien
gattgttccaggaagagtaaatgct

SEQ ID NO: 3095509 - DNA, 25 bp, Homo sapien
tgtacccgctgcaccgaggattgtt

SEQ ID NO: 3095510 - DNA, 25 bp, Homo sapien
gctgcaccgaggattgttccaggaa

SEQ ID NO: 3095511 - DNA, 25 bp, Homo sapien
tttacattgttgtacccgctgcacc

SEQ ID NO: 3095512 - DNA, 25 bp, Homo sapien
ttaaaggaagttcacagctggcctg

SEQ ID NO: 3095513 - DNA, 25 bp, Homo sapien
aattataaatcccaggctgctgagg

SEQ ID NO: 3095514 - DNA, 25 bp, Homo sapien
ggcctgatgccccacattgagcgaa

SEQ ID NO: 3095515 - DNA, 25 bp, Homo sapien
cataaatctagcagttcaagggagc

SEQ ID NO: 3095516 - DNA, 25 bp, Homo sapien
cagtcctgagctgtccccaggtctc

SEQ ID NO: 3095517 - DNA, 25 bp, Homo sapien
ctataggatgcatcccaggctccag

SEQ ID NO: 3095518 - DNA, 25 bp, Homo sapien
ggatgcatcccaggctccagtcctg

SEQ ID NO: 3095519 - DNA, 25 bp, Homo sapien
gtccccaggtctcctttcttcagta

SEQ ID NO: 3095520 - DNA, 25 bp, Homo sapien
atacccaatcctgccaacgaagtgg

SEQ ID NO: 3095521 - DNA, 25 bp, Homo sapien
tcatacccaatcctgccaacgaagt

SEQ ID NO: 3095522 - DNA, 25 bp, Homo sapien
tggttggctcgattccaggtctgct

SEQ ID NO: 3095523 - DNA, 25 bp, Homo sapien
tgccaacgaagtggttggctcgatt

SEQ ID NO: 3095524 - DNA, 25 bp, Homo sapien
caagtagtgggactagggactacag

SEQ ID NO: 3095525 - DNA, 25 bp, Homo sapien
cagtgagattcagccctgtatgccc

SEQ ID NO: 3095526 - DNA, 25 bp, Homo sapien
tgtatgcccacagcataacctctca

SEQ ID NO: 3095527 - DNA, 25 bp, Homo sapien
ttcaaaatttgtcttgtagagatga

SEQ ID NO: 3095528 - DNA, 25 bp, Homo sapien
actgaagaattcgacccgggtcaca

SEQ ID NO: 3095529 - DNA, 25 bp, Homo sapien
ggttggccccatgtacaagtctccg

SEQ ID NO: 3095530 - DNA, 25 bp, Homo sapien
tcagattcaagttcagggtcagccc

SEQ ID NO: 3095531 - DNA, 25 bp, Homo sapien
aagtctccgatgaggtcatacgccg

SEQ ID NO: 3095532 - DNA, 25 bp, Homo sapien
tcatgacgccttggtgagagaggtc

SEQ ID NO: 3095533 - DNA, 25 bp, Homo sapien
tctgtatagcaacacggctgcactg

SEQ ID NO: 3095534 - DNA, 25 bp, Homo sapien
tgaaggcagcgaccagttctggaac

SEQ ID NO: 3095535 - DNA, 25 bp, Homo sapien
gaagcttcctttgtaggtcgatcga

SEQ ID NO: 3095536 - DNA, 25 bp, Homo sapien
ctactgggtgagttcattgcatatt

SEQ ID NO: 3095537 - DNA, 25 bp, Homo sapien
ttgagtcacatacagttggaggcag

SEQ ID NO: 3095538 - DNA, 25 bp, Homo sapien
gggtgagttcattgcatattgcctt

SEQ ID NO: 3095539 - DNA, 25 bp, Homo sapien
tttgagtcacatacagttggaggca

SEQ ID NO: 3095540 - DNA, 25 bp, Homo sapien
acaatggctcttgtaatcagtgaag

SEQ ID NO: 3095541 - DNA, 25 bp, Homo sapien
caatggctcttgtaatcagtgaagg

SEQ ID NO: 3095542 - DNA, 25 bp, Homo sapien
cacgtccaaacaggctggatctgct

SEQ ID NO: 3095543 - DNA, 25 bp, Homo sapien
ggtctggggtccgagcagctccatc

SEQ ID NO: 3095544 - DNA, 25 bp, Homo sapien
tctggggtccgagcagctccatcag

SEQ ID NO: 3095545 - DNA, 25 bp, Homo sapien
ctggggtccgagcagctccatcaga

SEQ ID NO: 3095546 - DNA, 25 bp, Homo sapien
gaaggtctggggtccgagcagctcc

SEQ ID NO: 3095547 - DNA, 25 bp, Homo sapien
ggtccgaccggccttggtatctcca

SEQ ID NO: 3095548 - DNA, 25 bp, Homo sapien
ggtaacagtagtcgccccttgcgtc

SEQ ID NO: 3095549 - DNA, 25 bp, Homo sapien
tctccaagcgaggtaacagtagtcg

SEQ ID NO: 3095550 - DNA, 25 bp, Homo sapien
ggccttggtatctccaagcgaggta

SEQ ID NO: 3095551 - DNA, 25 bp, Homo sapien
ttgatattaatcacagttatgaggt

SEQ ID NO: 3095552 - DNA, 25 bp, Homo sapien
aatcacagttatgaggtcttgtcca

SEQ ID NO: 3095553 - DNA, 25 bp, Homo sapien
attaatcacagttatgaggtcttgt

SEQ ID NO: 3095554 - DNA, 25 bp, Homo sapien
cacaacatcccctttttattgatat

SEQ ID NO: 3095555 - DNA, 25 bp, Homo sapien
tcggaagaacgtacatagacccagc

SEQ ID NO: 3095556 - DNA, 25 bp, Homo sapien
tggaatccattgacagcagaggcct

SEQ ID NO: 3095557 - DNA, 25 bp, Homo sapien
gagagagtccattcagtggccaaaa

SEQ ID NO: 3095558 - DNA, 25 bp, Homo sapien
tggaaagcgcgacaaatggccttgc

SEQ ID NO: 3095559 - DNA, 25 bp, Homo sapien
ctgtttcttcgtatggcctttcccg

SEQ ID NO: 3095560 - DNA, 25 bp, Homo sapien
agaagcttgttgtcccatagaagcc

SEQ ID NO: 3095561 - DNA, 25 bp, Homo sapien
aagccaaccactgctgtttcttcgt

SEQ ID NO: 3095562 - DNA, 25 bp, Homo sapien
gaagaaagaagcttgttgtcccata

SEQ ID NO: 3095563 - DNA, 25 bp, Homo sapien
tcactacaaatcccaggatggaggc

SEQ ID NO: 3095564 - DNA, 25 bp, Homo sapien
cactacaaatcccaggatggaggcc

SEQ ID NO: 3095565 - DNA, 25 bp, Homo sapien
atcactacaaatcccaggatggagg

SEQ ID NO: 3095566 - DNA, 25 bp, Homo sapien
cacgtagaccatggcaccggcagca

SEQ ID NO: 3095567 - DNA, 25 bp, Homo sapien
tgtcgtccatgaccacgtagaccat

SEQ ID NO: 3095568 - DNA, 25 bp, Homo sapien
agcaccacggcaaaggcaccaaaga

SEQ ID NO: 3095569 - DNA, 25 bp, Homo sapien
tgatgtcgtccatgaccacgtagac

SEQ ID NO: 3095570 - DNA, 25 bp, Homo sapien
gaaattctggatcccgattccaatg

SEQ ID NO: 3095571 - DNA, 25 bp, Homo sapien
gggaaattctggatcccgattccaa

SEQ ID NO: 3095572 - DNA, 25 bp, Homo sapien
cctgcccctcgcaagggaaggctga

SEQ ID NO: 3095573 - DNA, 25 bp, Homo sapien
agcctgcccctcgcaagggaaggct

SEQ ID NO: 3095574 - DNA, 25 bp, Homo sapien
ggacagttccaagaagcagcccctc

SEQ ID NO: 3095575 - DNA, 25 bp, Homo sapien
cttggccggacagttccaagaagca

SEQ ID NO: 3095576 - DNA, 25 bp, Homo sapien
cagttccaagaagcagcccctccat

SEQ ID NO: 3095577 - DNA, 25 bp, Homo sapien
ttggccggacagttccaagaagcag

SEQ ID NO: 3095578 - DNA, 25 bp, Homo sapien
tgtatacaagatctgatgtggagag

SEQ ID NO: 3095579 - DNA, 25 bp, Homo sapien
gtatacaagatctgatgtggagagc

SEQ ID NO: 3095580 - DNA, 25 bp, Homo sapien
tatacaagatctgatgtggagagct

SEQ ID NO: 3095581 - DNA, 25 bp, Homo sapien
agtggacagacaagaagacacccca

SEQ ID NO: 3095582 - DNA, 25 bp, Homo sapien
cagtacataaaccattgagtgtggc

SEQ ID NO: 3095583 - DNA, 25 bp, Homo sapien
cctgatagctcagtggctgcagaaa

SEQ ID NO: 3095584 - DNA, 25 bp, Homo sapien
gcatctgaaaagtgatagcatccga

SEQ ID NO: 3095585 - DNA, 25 bp, Homo sapien
tgatgctgggtgggtccttgcgggc

SEQ ID NO: 3095586 - DNA, 25 bp, Homo sapien
gggtccttgcgggctgctgtctcca

SEQ ID NO: 3095587 - DNA, 25 bp, Homo sapien
ggccttgagcttgggaaatgcttcc

SEQ ID NO: 3095588 - DNA, 25 bp, Homo sapien
ttccaaggccggagtgcgaagtacc

SEQ ID NO: 3095589 - DNA, 25 bp, Homo sapien
ccatacctcaggtgttttccaaggc

SEQ ID NO: 3095590 - DNA, 25 bp, Homo sapien
gcttccagctcgtgtcagcagcagc

SEQ ID NO: 3095591 - DNA, 25 bp, Homo sapien
gatcctcccatgtgcgatgagcgtg

SEQ ID NO: 3095592 - DNA, 25 bp, Homo sapien
gtgtgttcttgtgtggcaggccctt

SEQ ID NO: 3095593 - DNA, 25 bp, Homo sapien
catgtgcgatgagcgtgtgtgttct

SEQ ID NO: 3095594 - DNA, 25 bp, Homo sapien
tgtgttcttgtgtggcaggccctta

SEQ ID NO: 3095595 - DNA, 25 bp, Homo sapien
ttgttatcatcttgccgtgaaaggc

SEQ ID NO: 3095596 - DNA, 25 bp, Homo sapien
cccactagggcagcctgtcgaggtg

SEQ ID NO: 3095597 - DNA, 25 bp, Homo sapien
tcttgccgtgaaaggcctgattgtt

SEQ ID NO: 3095598 - DNA, 25 bp, Homo sapien
cagcctgtcgaggtgtttgatgagc

SEQ ID NO: 3095599 - DNA, 25 bp, Homo sapien
accctcttggtgcagttctcggaaa

SEQ ID NO: 3095600 - DNA, 25 bp, Homo sapien
caggctggcgagatgagatgaccca

SEQ ID NO: 3095601 - DNA, 25 bp, Homo sapien
gcttagcacgcaagggatcttcccc

SEQ ID NO: 3095602 - DNA, 25 bp, Homo sapien
gtgcagttctcggaaacttcttggt

SEQ ID NO: 3095603 - DNA, 25 bp, Homo sapien
gtcctcttcaaccaagtgcacagct

SEQ ID NO: 3095604 - DNA, 25 bp, Homo sapien
ttcaaccaagtgcacagcttcggga

SEQ ID NO: 3095605 - DNA, 25 bp, Homo sapien
ctcttcaaccaagtgcacagcttcg

SEQ ID NO: 3095606 - DNA, 25 bp, Homo sapien
cgtcctcttcaaccaagtgcacagc

SEQ ID NO: 3095607 - DNA, 25 bp, Homo sapien
ttccttcagggagagtgattgaact

SEQ ID NO: 3095608 - DNA, 25 bp, Homo sapien
tcacttatccttggggcatgtggcc

SEQ ID NO: 3095609 - DNA, 25 bp, Homo sapien
gattgaactgcacgcctaatgcaaa

SEQ ID NO: 3095610 - DNA, 25 bp, Homo sapien
tcagggagagtgattgaactgcacg

SEQ ID NO: 3095611 - DNA, 25 bp, Homo sapien
acaggaaagtttaagcggcaataga

SEQ ID NO: 3095612 - DNA, 25 bp, Homo sapien
aagtttaagcggcaatagagagcct

SEQ ID NO: 3095613 - DNA, 25 bp, Homo sapien
gctggggaggacactttggagcaca

SEQ ID NO: 3095614 - DNA, 25 bp, Homo sapien
caatgtcttgtgaatagcaggggat

SEQ ID NO: 3095615 - DNA, 25 bp, Homo sapien
gaggcaccaggccaatagcaaccat

SEQ ID NO: 3095616 - DNA, 25 bp, Homo sapien
aatgcctggtgcagactgcagaggc

SEQ ID NO: 3095617 - DNA, 25 bp, Homo sapien
cacttcttccaggaatgcctggtgc

SEQ ID NO: 3095618 - DNA, 25 bp, Homo sapien
gcagaggcaccaggccaatagcaac

SEQ ID NO: 3095619 - DNA, 25 bp, Homo sapien
ctggtgggcttttctctcttgacca

SEQ ID NO: 3095620 - DNA, 25 bp, Homo sapien
gcttttctctcttgaccaagtcagt

SEQ ID NO: 3095621 - DNA, 25 bp, Homo sapien
ttttctctcttgaccaagtcagtaa

SEQ ID NO: 3095622 - DNA, 25 bp, Homo sapien
gggcttttctctcttgaccaagtca

SEQ ID NO: 3095623 - DNA, 25 bp, Homo sapien
tgaatagagacagccgcgcccacct

SEQ ID NO: 3095624 - DNA, 25 bp, Homo sapien
aacttgaatagagacagccgcgccc

SEQ ID NO: 3095625 - DNA, 25 bp, Homo sapien
ggccaggtaaggagttgaagaccca

SEQ ID NO: 3095626 - DNA, 25 bp, Homo sapien
tggccaggtaaggagttgaagaccc

SEQ ID NO: 3095627 - DNA, 25 bp, Homo sapien
tgttagcagtttacgatgattatcc

SEQ ID NO: 3095628 - DNA, 25 bp, Homo sapien
tcatgagtcaagagactgggttccc

SEQ ID NO: 3095629 - DNA, 25 bp, Homo sapien
attatccgtaggctccctggacagc

SEQ ID NO: 3095630 - DNA, 25 bp, Homo sapien
tccctggacagctcatgagtcaaga

SEQ ID NO: 3095631 - DNA, 25 bp, Homo sapien
gcgcccgaccaaaatagcgcatttt

SEQ ID NO: 3095632 - DNA, 25 bp, Homo sapien
tgctcaaatcctacaatgatgaggt

SEQ ID NO: 3095633 - DNA, 25 bp, Homo sapien
ccatgagatacttgtacacacagga

SEQ ID NO: 3095634 - DNA, 25 bp, Homo sapien
gttcatgtgttcacatcaatgtcca

SEQ ID NO: 3095635 - DNA, 25 bp, Homo sapien
aaagatgcggctagattcactggtc

SEQ ID NO: 3095636 - DNA, 25 bp, Homo sapien
tttcccatcatttagattaaagaag

SEQ ID NO: 3095637 - DNA, 25 bp, Homo sapien
tcccatcatttagattaaagaagtc

SEQ ID NO: 3095638 - DNA, 25 bp, Homo sapien
agttttcccatcatttagattaaag

SEQ ID NO: 3095639 - DNA, 25 bp, Homo sapien
ttaagggtgaatgggttggcccatc

SEQ ID NO: 3095640 - DNA, 25 bp, Homo sapien
atccacagccacaatgtacccttga

SEQ ID NO: 3095641 - DNA, 25 bp, Homo sapien
ttgtaacgatgggatctgggtgaca

SEQ ID NO: 3095642 - DNA, 25 bp, Homo sapien
caccagctggccacttgtaacgatg

SEQ ID NO: 3095643 - DNA, 25 bp, Homo sapien
ccagagagtaaagatcaaggaagca

SEQ ID NO: 3095644 - DNA, 25 bp, Homo sapien
tcctggatccagagagtaaagatca

SEQ ID NO: 3095645 - DNA, 25 bp, Homo sapien
tattaatcctggatccagagagtaa

SEQ ID NO: 3095646 - DNA, 25 bp, Homo sapien
tggatccagagagtaaagatcaagg

SEQ ID NO: 3095647 - DNA, 25 bp, Homo sapien
cacttctaattgctgatcaacctga

SEQ ID NO: 3095648 - DNA, 25 bp, Homo sapien
tttcttgcccctatttcctgtatcc

SEQ ID NO: 3095649 - DNA, 25 bp, Homo sapien
ggttcaatttcagttcatgaagctg

SEQ ID NO: 3095650 - DNA, 25 bp, Homo sapien
cctgtatcctttcagtgaatgtccc

SEQ ID NO: 3095651 - DNA, 25 bp, Homo sapien
acaacaaggtgccatttgtggagca

SEQ ID NO: 3095652 - DNA, 25 bp, Homo sapien
ttgttgtagcagcatgaatgaacta

SEQ ID NO: 3095653 - DNA, 25 bp, Homo sapien
caagaagccacgtagtgtcttccta

SEQ ID NO: 3095654 - DNA, 25 bp, Homo sapien
agagcaagcccttcaccagacacag

SEQ ID NO: 3095655 - DNA, 25 bp, Homo sapien
gctttgaaaggtgtccagtgctttg

SEQ ID NO: 3095656 - DNA, 25 bp, Homo sapien
cagtgtgctttgaaaggtgtccagt

SEQ ID NO: 3095657 - DNA, 25 bp, Homo sapien
tgtccagtgctttgccaggcgacat

SEQ ID NO: 3095658 - DNA, 25 bp, Homo sapien
tgttagaattttcagtgtgctttga

SEQ ID NO: 3095659 - DNA, 25 bp, Homo sapien
tcccggatccacaataggaacagat

SEQ ID NO: 3095660 - DNA, 25 bp, Homo sapien
gggacaggccaaggaatcccggatc

SEQ ID NO: 3095661 - DNA, 25 bp, Homo sapien
tcagagtggagatatgatcagcagc

SEQ ID NO: 3095662 - DNA, 25 bp, Homo sapien
cagataagacatgacatgagggcat

SEQ ID NO: 3095663 - DNA, 25 bp, Homo sapien
aagaaggaacgtggccgtacttgtg

SEQ ID NO: 3095664 - DNA, 25 bp, Homo sapien
gtcaggaaggcggatgacatggtct

SEQ ID NO: 3095665 - DNA, 25 bp, Homo sapien
gctgaagaaggaacgtggccgtact

SEQ ID NO: 3095666 - DNA, 25 bp, Homo sapien
gcggatgacatggtctgcagctgtt

SEQ ID NO: 3095667 - DNA, 25 bp, Homo sapien
agccgccgctcttctccaagttggt

SEQ ID NO: 3095668 - DNA, 25 bp, Homo sapien
tgagtaacgtgtttcccgtgacaaa

SEQ ID NO: 3095669 - DNA, 25 bp, Homo sapien
gacagtttaatagctccaatacggg

SEQ ID NO: 3095670 - DNA, 25 bp, Homo sapien
caagttggtccagactgaactgaga

SEQ ID NO: 3095671 - DNA, 25 bp, Homo sapien
gtagctctccctcggagtgaccctg

SEQ ID NO: 3095672 - DNA, 25 bp, Homo sapien
tctccctcggagtgaccctgcacat

SEQ ID NO: 3095673 - DNA, 25 bp, Homo sapien
ctctccctcggagtgaccctgcaca

SEQ ID NO: 3095674 - DNA, 25 bp, Homo sapien
tctgtagctctccctcggagtgacc

SEQ ID NO: 3095675 - DNA, 25 bp, Homo sapien
tttcttccccaagtcgcttgtaaca

SEQ ID NO: 3095676 - DNA, 25 bp, Homo sapien
gctttcttccccaagtcgcttgtaa

SEQ ID NO: 3095677 - DNA, 25 bp, Homo sapien
tgctttcttccccaagtcgcttgta

SEQ ID NO: 3095678 - DNA, 25 bp, Homo sapien
tcttccccaagtcgcttgtaacaag

SEQ ID NO: 3095679 - DNA, 25 bp, Homo sapien
cacatacagtaagggccgagtgctc

SEQ ID NO: 3095680 - DNA, 25 bp, Homo sapien
cacatgatgcacgtagaaactgagg

SEQ ID NO: 3095681 - DNA, 25 bp, Homo sapien
tgcttcatagagagatgtcaccagg

SEQ ID NO: 3095682 - DNA, 25 bp, Homo sapien
caggtgcttgtcaggtgaagtccca

SEQ ID NO: 3095683 - DNA, 25 bp, Homo sapien
gtaacgacgggattgtatttgtcag

SEQ ID NO: 3095684 - DNA, 25 bp, Homo sapien
gcaggcaaatggctattaagttctt

SEQ ID NO: 3095685 - DNA, 25 bp, Homo sapien
tattttgcaggcaaatggctattaa

SEQ ID NO: 3095686 - DNA, 25 bp, Homo sapien
ccaggtaacgacgggattgtatttg

SEQ ID NO: 3095687 - DNA, 25 bp, Homo sapien
cagccagaatataaggatgttacta

SEQ ID NO: 3095688 - DNA, 25 bp, Homo sapien
ccaaagcaaagttggacatgtccaa

SEQ ID NO: 3095689 - DNA, 25 bp, Homo sapien
aaatcagggtataacagccagaata

SEQ ID NO: 3095690 - DNA, 25 bp, Homo sapien
tatccaaagcaaagttggacatgtc

SEQ ID NO: 3095691 - DNA, 25 bp, Homo sapien
tagatttggatagcgacacacagtc

SEQ ID NO: 3095692 - DNA, 25 bp, Homo sapien
tatgctaccaagctaccgcgtggtg

SEQ ID NO: 3095693 - DNA, 25 bp, Homo sapien
tgtacaagccgaacatagatttgga

SEQ ID NO: 3095694 - DNA, 25 bp, Homo sapien
tccttctggtactgtgtctagcaac

SEQ ID NO: 3095695 - DNA, 25 bp, Homo sapien
taagatttctctggccattatgcag

SEQ ID NO: 3095696 - DNA, 25 bp, Homo sapien
cactgtagcacatatggagccaaag

SEQ ID NO: 3095697 - DNA, 25 bp, Homo sapien
attatgcagatcagccactgtagca

SEQ ID NO: 3095698 - DNA, 25 bp, Homo sapien
taaacaaatgggtgcgcgtatgctc

SEQ ID NO: 3095699 - DNA, 25 bp, Homo sapien
ctctaaagcaccagaaaattctatc

SEQ ID NO: 3095700 - DNA, 25 bp, Homo sapien
aaagcaccagaaaattctatctcag

SEQ ID NO: 3095701 - DNA, 25 bp, Homo sapien
tcagtttcccctatcgctagcatct

SEQ ID NO: 3095702 - DNA, 25 bp, Homo sapien
gttttgtaggccaagccggtcttga

SEQ ID NO: 3095703 - DNA, 25 bp, Homo sapien
tacaactaaggaacccatattggtg

SEQ ID NO: 3095704 - DNA, 25 bp, Homo sapien
tcaaagatagtagagagagttcctg

SEQ ID NO: 3095705 - DNA, 25 bp, Homo sapien
gagtgctatctttcctgcgcagcgg

SEQ ID NO: 3095706 - DNA, 25 bp, Homo sapien
agcgcctcgcatttagtctccttcg

SEQ ID NO: 3095707 - DNA, 25 bp, Homo sapien
gcagcggcatgtttccctctgtggt

SEQ ID NO: 3095708 - DNA, 25 bp, Homo sapien
cctcggttcgggtctgtctgatgca

SEQ ID NO: 3095709 - DNA, 25 bp, Homo sapien
tgacggcagggttggcttggtcaac

SEQ ID NO: 3095710 - DNA, 25 bp, Homo sapien
aaaacgcggcattgagagtgacggc

SEQ ID NO: 3095711 - DNA, 25 bp, Homo sapien
tttatttccaggcaggtagaagagc

SEQ ID NO: 3095712 - DNA, 25 bp, Homo sapien
cccagtgcttctgtatggaaggtga

SEQ ID NO: 3095713 - DNA, 25 bp, Homo sapien
agcagatgccgtcttttctatagcc

SEQ ID NO: 3095714 - DNA, 25 bp, Homo sapien
aatccaactccaacagcgagaccct

SEQ ID NO: 3095715 - DNA, 25 bp, Homo sapien
ttctatagccccaaatccaactcca

SEQ ID NO: 3095716 - DNA, 25 bp, Homo sapien
tagcagatgccgtcttttctatagc

SEQ ID NO: 3095717 - DNA, 25 bp, Homo sapien
tattgcctcagctggtcgctaactc

SEQ ID NO: 3095718 - DNA, 25 bp, Homo sapien
aagtctgatgctaattccattctca

SEQ ID NO: 3095719 - DNA, 25 bp, Homo sapien
tcttgagggtattgttccatcatct

SEQ ID NO: 3095720 - DNA, 25 bp, Homo sapien
gctgctgaaaagtctgatgctaatt

SEQ ID NO: 3095721 - DNA, 25 bp, Homo sapien
tgataaatatgctcttgaatctcca

SEQ ID NO: 3095722 - DNA, 25 bp, Homo sapien
agcatgataaatatgctcttgaatc

SEQ ID NO: 3095723 - DNA, 25 bp, Homo sapien
catgataaatatgctcttgaatctc

SEQ ID NO: 3095724 - DNA, 25 bp, Homo sapien
gataaatatgctcttgaatctccag

SEQ ID NO: 3095725 - DNA, 25 bp, Homo sapien
gcttgggcttccaattaactgccct

SEQ ID NO: 3095726 - DNA, 25 bp, Homo sapien
ttctccagataagtagctgtgctta

SEQ ID NO: 3095727 - DNA, 25 bp, Homo sapien
tctccagataagtagctgtgcttac

SEQ ID NO: 3095728 - DNA, 25 bp, Homo sapien
gggcttccaattaactgccctgggc

SEQ ID NO: 3095729 - DNA, 25 bp, Homo sapien
catggaaatgtacgtgaataatggt

SEQ ID NO: 3095730 - DNA, 25 bp, Homo sapien
acgtgaataatggtgtgctggtata

SEQ ID NO: 3095731 - DNA, 25 bp, Homo sapien
aatggtgtgctggtataatggacag

SEQ ID NO: 3095732 - DNA, 25 bp, Homo sapien
ggtccatggaaatgtacgtgaataa

SEQ ID NO: 3095733 - DNA, 25 bp, Homo sapien
cgtctgtggtcccaagcctagagca

SEQ ID NO: 3095734 - DNA, 25 bp, Homo sapien
ctataacagcgtctgtggtcccaag

SEQ ID NO: 3095735 - DNA, 25 bp, Homo sapien
gtctgtggtcccaagcctagagcac

SEQ ID NO: 3095736 - DNA, 25 bp, Homo sapien
cagcgtctgtggtcccaagcctaga

SEQ ID NO: 3095737 - DNA, 25 bp, Homo sapien
tgaggacccccttgcagcccagttt

SEQ ID NO: 3095738 - DNA, 25 bp, Homo sapien
tctgtgaccctcctcgaaacacaca

SEQ ID NO: 3095739 - DNA, 25 bp, Homo sapien
agcatcatctgtgaccctcctcgaa

SEQ ID NO: 3095740 - DNA, 25 bp, Homo sapien
ggtccaaccttcaggctggcagctg

SEQ ID NO: 3095741 - DNA, 25 bp, Homo sapien
atcccatgacggcactcaatgcttc

SEQ ID NO: 3095742 - DNA, 25 bp, Homo sapien
caagtgtaaaccatccaggatcatg

SEQ ID NO: 3095743 - DNA, 25 bp, Homo sapien
cttcccaagtgtaaaccatccagga

SEQ ID NO: 3095744 - DNA, 25 bp, Homo sapien
cccaagtgtaaaccatccaggatca

SEQ ID NO: 3095745 - DNA, 25 bp, Homo sapien
ccttaagcactgatattttccttca

SEQ ID NO: 3095746 - DNA, 25 bp, Homo sapien
caaagaagttgttttcaaaggcaat

SEQ ID NO: 3095747 - DNA, 25 bp, Homo sapien
tcattttcaaagaagttgttttcaa

SEQ ID NO: 3095748 - DNA, 25 bp, Homo sapien
cttaagcactgatattttccttcat

SEQ ID NO: 3095749 - DNA, 25 bp, Homo sapien
tgtgttaaccacgtcttggtctcct

SEQ ID NO: 3095750 - DNA, 25 bp, Homo sapien
gtttctaatacaagctcgtgttggg

SEQ ID NO: 3095751 - DNA, 25 bp, Homo sapien
aatggctattactaacattcttgaa

SEQ ID NO: 3095752 - DNA, 25 bp, Homo sapien
tcactgtgttaaccacgtcttggtc

SEQ ID NO: 3095753 - DNA, 25 bp, Homo sapien
gaagccagggcacaattatcagaga

SEQ ID NO: 3095754 - DNA, 25 bp, Homo sapien
tcatgatgtcacttgagctcaaagg

SEQ ID NO: 3095755 - DNA, 25 bp, Homo sapien
tcaggagcacgtgaagacattagtc

SEQ ID NO: 3095756 - DNA, 25 bp, Homo sapien
cattagtcctgcagtatttggctcc

SEQ ID NO: 3095757 - DNA, 25 bp, Homo sapien
ctttgtagccacatttctgctgacc

SEQ ID NO: 3095758 - DNA, 25 bp, Homo sapien
catttctgctgaccccaaagcctca

SEQ ID NO: 3095759 - DNA, 25 bp, Homo sapien
atttctgctgaccccaaagcctcat

SEQ ID NO: 3095760 - DNA, 25 bp, Homo sapien
tgtagccacatttctgctgacccca

SEQ ID NO: 3095761 - DNA, 25 bp, Homo sapien
ggcctctctgctatgcatccatgct

SEQ ID NO: 3095762 - DNA, 25 bp, Homo sapien
tggttaggcccaggtatttactcca

SEQ ID NO: 3095763 - DNA, 25 bp, Homo sapien
gcatttaataagtcaggtagcctct

SEQ ID NO: 3095764 - DNA, 25 bp, Homo sapien
gacccctcgaccagaaatttcttca

SEQ ID NO: 3095765 - DNA, 25 bp, Homo sapien
ctgggaacaggcctataactcggaa

SEQ ID NO: 3095766 - DNA, 25 bp, Homo sapien
taagtcctggacaatactagaggca

SEQ ID NO: 3095767 - DNA, 25 bp, Homo sapien
catgcaactgaagcgtgaccacagg

SEQ ID NO: 3095768 - DNA, 25 bp, Homo sapien
taactcggaagataatagccacagc

SEQ ID NO: 3095769 - DNA, 25 bp, Homo sapien
tctagctgggggaggaaaatcatga

SEQ ID NO: 3095770 - DNA, 25 bp, Homo sapien
caatatgaatgggtgagggacacaa

SEQ ID NO: 3095771 - DNA, 25 bp, Homo sapien
cagcatctagctgggggaggaaaat

SEQ ID NO: 3095772 - DNA, 25 bp, Homo sapien
cattcagtccagagcaaactgtcag

SEQ ID NO: 3095773 - DNA, 25 bp, Homo sapien
ccttcaggctggaaacgtccatgga

SEQ ID NO: 3095774 - DNA, 25 bp, Homo sapien
tgctttaaaccccatggatgcgcgc

SEQ ID NO: 3095775 - DNA, 25 bp, Homo sapien
tcaatcctcagtgcgctgctttaaa

SEQ ID NO: 3095776 - DNA, 25 bp, Homo sapien
gcccttgttgtgaatctccagtgca

SEQ ID NO: 3095777 - DNA, 25 bp, Homo sapien
gaataccctatgtttatgccagagc

SEQ ID NO: 3095778 - DNA, 25 bp, Homo sapien
taattctccctggatggccttgaag

SEQ ID NO: 3095779 - DNA, 25 bp, Homo sapien
tcaggtattcttgcttccgggtcag

SEQ ID NO: 3095780 - DNA, 25 bp, Homo sapien
gacttgcatctcacatgtggcacag

SEQ ID NO: 3095781 - DNA, 25 bp, Homo sapien
taaagctgggaaacgaagagagacc

SEQ ID NO: 3095782 - DNA, 25 bp, Homo sapien
accgcacctggtggcttacagttaa

SEQ ID NO: 3095783 - DNA, 25 bp, Homo sapien
tcctaaggaagggtacaagtctgaa

SEQ ID NO: 3095784 - DNA, 25 bp, Homo sapien
gatccttttggactagtgaaggcag

SEQ ID NO: 3095785 - DNA, 25 bp, Homo sapien
ttcattattgatagcatcctcttct

SEQ ID NO: 3095786 - DNA, 25 bp, Homo sapien
agagctccttcttaatctaattgtg

SEQ ID NO: 3095787 - DNA, 25 bp, Homo sapien
tactgttttattctagctatcttgt

SEQ ID NO: 3095788 - DNA, 25 bp, Homo sapien
agctatcttgtttttgatttccaag

SEQ ID NO: 3095789 - DNA, 25 bp, Homo sapien
catctgaagtaagggatctgagccc

SEQ ID NO: 3095790 - DNA, 25 bp, Homo sapien
gagaagcttgacatggcagactcca

SEQ ID NO: 3095791 - DNA, 25 bp, Homo sapien
catctttttggtaggtggacctcca

SEQ ID NO: 3095792 - DNA, 25 bp, Homo sapien
gctcattcttaggtgcaggcaagga

SEQ ID NO: 3095793 - DNA, 25 bp, Homo sapien
tgttggcctctacaacctgacctgg

SEQ ID NO: 3095794 - DNA, 25 bp, Homo sapien
gaaagttgagctgaatgacacaggg

SEQ ID NO: 3095795 - DNA, 25 bp, Homo sapien
caaggcagaatggaatagcaacggg

SEQ ID NO: 3095796 - DNA, 25 bp, Homo sapien
tctttgaagagactgcccatagctc

SEQ ID NO: 3095797 - DNA, 25 bp, Homo sapien
aatacattcatggatcagaccctgg

SEQ ID NO: 3095798 - DNA, 25 bp, Homo sapien
gaagctgagcctgaactaagggcaa

SEQ ID NO: 3095799 - DNA, 25 bp, Homo sapien
taatgaaggctagagtctacctccg

SEQ ID NO: 3095800 - DNA, 25 bp, Homo sapien
caatctaccaagtgttctccggaga

SEQ ID NO: 3095801 - DNA, 25 bp, Homo sapien
atgtggtagtggccacctgcagttc

SEQ ID NO: 3095802 - DNA, 25 bp, Homo sapien
ttgttgtacctgtgctggaatgcct

SEQ ID NO: 3095803 - DNA, 25 bp, Homo sapien
ggaatgcctgtctctagctttcctt

SEQ ID NO: 3095804 - DNA, 25 bp, Homo sapien
aaaagtctgatgtccctaaaagtgt

SEQ ID NO: 3095805 - DNA, 25 bp, Homo sapien
gcccaggcccaagcttaatgggaga

SEQ ID NO: 3095806 - DNA, 25 bp, Homo sapien
caggtgtccgtagcccagctacgaa

SEQ ID NO: 3095807 - DNA, 25 bp, Homo sapien
ggatttcatacaccatagcccaggc

SEQ ID NO: 3095808 - DNA, 25 bp, Homo sapien
gctacgaaatctgtcatcccaaact

SEQ ID NO: 3095809 - DNA, 25 bp, Homo sapien
gtttcacacagctggggaggcctca

SEQ ID NO: 3095810 - DNA, 25 bp, Homo sapien
agtttcacacagctggggaggcctc

SEQ ID NO: 3095811 - DNA, 25 bp, Homo sapien
ctacattctacatgactttaggaca

SEQ ID NO: 3095812 - DNA, 25 bp, Homo sapien
tcagttgtagaatgatccatccttt

SEQ ID NO: 3095813 - DNA, 25 bp, Homo sapien
taatgtcagttgtagaatgatccat

SEQ ID NO: 3095814 - DNA, 25 bp, Homo sapien
tacatgactttaggacatttacaaa

SEQ ID NO: 3095815 - DNA, 25 bp, Homo sapien
tgaggcaaaagggactccgaggcca

SEQ ID NO: 3095816 - DNA, 25 bp, Homo sapien
ggcctgcatagtcctcttccctggg

SEQ ID NO: 3095817 - DNA, 25 bp, Homo sapien
acaggtccaccttctggcaagcagg

SEQ ID NO: 3095818 - DNA, 25 bp, Homo sapien
accaagccattggtgtacactgagg

SEQ ID NO: 3095819 - DNA, 25 bp, Homo sapien
gagaagtccttctaggtcacccaac

SEQ ID NO: 3095820 - DNA, 25 bp, Homo sapien
cgtggccagtgcacaacaactgaga

SEQ ID NO: 3095821 - DNA, 25 bp, Homo sapien
gaagaggtgagtccaaaagcgttca

SEQ ID NO: 3095822 - DNA, 25 bp, Homo sapien
ggaaactgttgctcaccacactcta

SEQ ID NO: 3095823 - DNA, 25 bp, Homo sapien
catccaggatcattaatgctgcatt

SEQ ID NO: 3095824 - DNA, 25 bp, Homo sapien
cactgcagagctgaagcttagaggt

SEQ ID NO: 3095825 - DNA, 25 bp, Homo sapien
cacttcttgccacactggtgctatg

SEQ ID NO: 3095826 - DNA, 25 bp, Homo sapien
ctaataagaaagtgcagaaacatcc

SEQ ID NO: 3095827 - DNA, 25 bp, Homo sapien
ttcaatgccaaagttgtattcaatt

SEQ ID NO: 3095828 - DNA, 25 bp, Homo sapien
caatgccaaagttgtattcaattta

SEQ ID NO: 3095829 - DNA, 25 bp, Homo sapien
tcaatgccaaagttgtattcaattt

SEQ ID NO: 3095830 - DNA, 25 bp, Homo sapien
gaatacactgtagcacaggcactcg

SEQ ID NO: 3095831 - DNA, 25 bp, Homo sapien
gaagaggaggttcccatggagactg

SEQ ID NO: 3095832 - DNA, 25 bp, Homo sapien
ggccaggttactgtgggacaggtgc

SEQ ID NO: 3095833 - DNA, 25 bp, Homo sapien
ttggatacagatccctcaaccaggg

SEQ ID NO: 3095834 - DNA, 25 bp, Homo sapien
ggaggatcccactgtaatcataagg

SEQ ID NO: 3095835 - DNA, 25 bp, Homo sapien
cagctgaccctgagaggagttatcc

SEQ ID NO: 3095836 - DNA, 25 bp, Homo sapien
gaaagattcaactgggcattgcagg

SEQ ID NO: 3095837 - DNA, 25 bp, Homo sapien
aggcactaaggtggctaaccagctg

SEQ ID NO: 3095838 - DNA, 25 bp, Homo sapien
taccaggaggcaaaacccagtgctt

SEQ ID NO: 3095839 - DNA, 25 bp, Homo sapien
tgtcaacgtgggtactaactcggct

SEQ ID NO: 3095840 - DNA, 25 bp, Homo sapien
caattggtccctcgcaaggtagagc

SEQ ID NO: 3095841 - DNA, 25 bp, Homo sapien
caaatcagggcagagcaattggtcc

SEQ ID NO: 3095842 - DNA, 25 bp, Homo sapien
tagcttccttgatctgaaggccaga

SEQ ID NO: 3095843 - DNA, 25 bp, Homo sapien
agggctcaggcatctgcgcgtctgt

SEQ ID NO: 3095844 - DNA, 25 bp, Homo sapien
gctcaggcatctgcgcgtctgtcgc

SEQ ID NO: 3095845 - DNA, 25 bp, Homo sapien
aagtagggctcaggcatctgcgcgt

SEQ ID NO: 3095846 - DNA, 25 bp, Homo sapien
tgctaattataatgtcaggcttccc

SEQ ID NO: 3095847 - DNA, 25 bp, Homo sapien
gtgctaattataatgtcaggcttcc

SEQ ID NO: 3095848 - DNA, 25 bp, Homo sapien
gctgtgactgcaatcacgcgccacc

SEQ ID NO: 3095849 - DNA, 25 bp, Homo sapien
tgtgactgcaatcacgcgccaccat

SEQ ID NO: 3095850 - DNA, 25 bp, Homo sapien
tgactgcaatcacgcgccaccatac

SEQ ID NO: 3095851 - DNA, 25 bp, Homo sapien
agctgtgactgcaatcacgcgccac

SEQ ID NO: 3095852 - DNA, 25 bp, Homo sapien
cagggtgatgagagtattcaggaat

SEQ ID NO: 3095853 - DNA, 25 bp, Homo sapien
ctttacagggtgatgagagtattca

SEQ ID NO: 3095854 - DNA, 25 bp, Homo sapien
tttctttacagggtgatgagagtat

SEQ ID NO: 3095855 - DNA, 25 bp, Homo sapien
attcaggaatagtggtaggttgggt

SEQ ID NO: 3095856 - DNA, 25 bp, Homo sapien
gtaaccatttaaatatgccactgac

SEQ ID NO: 3095857 - DNA, 25 bp, Homo sapien
gtcagtaaccatttaaatatgccac

SEQ ID NO: 3095858 - DNA, 25 bp, Homo sapien
ggtcagtaaccatttaaatatgcca

SEQ ID NO: 3095859 - DNA, 25 bp, Homo sapien
tagggtcagtaaccatttaaatatg

SEQ ID NO: 3095860 - DNA, 25 bp, Homo sapien
aacgtctgtcactgtgaattggctc

SEQ ID NO: 3095861 - DNA, 25 bp, Homo sapien
gaatgtcagctataatcacaagcca

SEQ ID NO: 3095862 - DNA, 25 bp, Homo sapien
aaagaatgtcagctataatcacaag

SEQ ID NO: 3095863 - DNA, 25 bp, Homo sapien
tcacaagccacaaacgtctgtcact

SEQ ID NO: 3095864 - DNA, 25 bp, Homo sapien
taagctaagtaaatattacgtcgtc

SEQ ID NO: 3095865 - DNA, 25 bp, Homo sapien
acatggagttatgatagcagtggag

SEQ ID NO: 3095866 - DNA, 25 bp, Homo sapien
ggcccatgagatatggatggcagca

SEQ ID NO: 3095867 - DNA, 25 bp, Homo sapien
cactgcacatgtataagctaagtaa

SEQ ID NO: 3095868 - DNA, 25 bp, Homo sapien
ggtgagactaagactccataagagc

SEQ ID NO: 3095869 - DNA, 25 bp, Homo sapien
ccagtgatgggaaataaggatgaca

SEQ ID NO: 3095870 - DNA, 25 bp, Homo sapien
tgacacagctgatagcccatgggag

SEQ ID NO: 3095871 - DNA, 25 bp, Homo sapien
gccaggcttagacttataaaggaat

SEQ ID NO: 3095872 - DNA, 25 bp, Homo sapien
taattggttacaccagccaaagaaa

SEQ ID NO: 3095873 - DNA, 25 bp, Homo sapien
aagaggccaggaatggattatcccc

SEQ ID NO: 3095874 - DNA, 25 bp, Homo sapien
ggtccctcaatgcaaccacaagaat

SEQ ID NO: 3095875 - DNA, 25 bp, Homo sapien
tcctggaggtactgattggagtgat

SEQ ID NO: 3095876 - DNA, 25 bp, Homo sapien
gctgtcacgctcacgggcaagacct

SEQ ID NO: 3095877 - DNA, 25 bp, Homo sapien
tgtcacgctcacgggcaagacctca

SEQ ID NO: 3095878 - DNA, 25 bp, Homo sapien
tggctgtcacgctcacgggcaagac

SEQ ID NO: 3095879 - DNA, 25 bp, Homo sapien
gtcacgctcacgggcaagacctcac

SEQ ID NO: 3095880 - DNA, 25 bp, Homo sapien
gctgccgccgggctgtgccagattc

SEQ ID NO: 3095881 - DNA, 25 bp, Homo sapien
ttccctcgagaaggcacagggacag

SEQ ID NO: 3095882 - DNA, 25 bp, Homo sapien
tggaacgttgtgtatagtgatggcc

SEQ ID NO: 3095883 - DNA, 25 bp, Homo sapien
tggccaagatgagcagtgcgatcct

SEQ ID NO: 3095884 - DNA, 25 bp, Homo sapien
aatgctaaagacataagcaaagcag

SEQ ID NO: 3095885 - DNA, 25 bp, Homo sapien
gctgtccatgaactaacctgggtca

SEQ ID NO: 3095886 - DNA, 25 bp, Homo sapien
ataagcaaagcagtccctgagagct

SEQ ID NO: 3095887 - DNA, 25 bp, Homo sapien
ctgagagctgtccatgaactaacct

SEQ ID NO: 3095888 - DNA, 25 bp, Homo sapien
ccactgcaccttgccccttggggat

SEQ ID NO: 3095889 - DNA, 25 bp, Homo sapien
tgcaccttgccccttggggatttta

SEQ ID NO: 3095890 - DNA, 25 bp, Homo sapien
gagccactgcaccttgccccttggg

SEQ ID NO: 3095891 - DNA, 25 bp, Homo sapien
actgcaccttgccccttggggattt

SEQ ID NO: 3095892 - DNA, 25 bp, Homo sapien
gacgtcagtgccttccctagtagga

SEQ ID NO: 3095893 - DNA, 25 bp, Homo sapien
caaaataaaaatgcacgcctggccc

SEQ ID NO: 3095894 - DNA, 25 bp, Homo sapien
ccacgagcaaattctagcgttctgc

SEQ ID NO: 3095895 - DNA, 25 bp, Homo sapien
ccaatgtgtgaaaactgacgtcagt

SEQ ID NO: 3095896 - DNA, 25 bp, Homo sapien
tctcattgcctgtgaccagagtggg

SEQ ID NO: 3095897 - DNA, 25 bp, Homo sapien
tgtgccagagtgacaagaacctcgt

SEQ ID NO: 3095898 - DNA, 25 bp, Homo sapien
taactagggcctcatggttgactgg

SEQ ID NO: 3095899 - DNA, 25 bp, Homo sapien
gatcagttagcggaggcaattgcca

SEQ ID NO: 3095900 - DNA, 25 bp, Homo sapien
agccacaattgctgtgagtcccaga

SEQ ID NO: 3095901 - DNA, 25 bp, Homo sapien
caggagtaccagggtagaaagccac

SEQ ID NO: 3095902 - DNA, 25 bp, Homo sapien
taagagcccaacagaagtcctaacc

SEQ ID NO: 3095903 - DNA, 25 bp, Homo sapien
gaaatgcagaccaaccgatttgggc

SEQ ID NO: 3095904 - DNA, 25 bp, Homo sapien
tgcagtcgtgagtcccctaacataa

SEQ ID NO: 3095905 - DNA, 25 bp, Homo sapien
gccatgggctgtgaaagggttaacc

SEQ ID NO: 3095906 - DNA, 25 bp, Homo sapien
gccaatccatgctaaggtcttggga

SEQ ID NO: 3095907 - DNA, 25 bp, Homo sapien
tcagcagaccacactgagaaaccct

SEQ ID NO: 3095908 - DNA, 25 bp, Homo sapien
tgagtctaatgtgcgaggtcagcag

SEQ ID NO: 3095909 - DNA, 25 bp, Homo sapien
ctgtgtttatccacctgcaagggtc

SEQ ID NO: 3095910 - DNA, 25 bp, Homo sapien
taatcctgtaggctacgggctcacc

SEQ ID NO: 3095911 - DNA, 25 bp, Homo sapien
cctttcttgtgaacgctggatccag

SEQ ID NO: 3095912 - DNA, 25 bp, Homo sapien
gcagctgagtctattccaaagcgag

SEQ ID NO: 3095913 - DNA, 25 bp, Homo sapien
gcaggcattccaggtgttgaaccac

SEQ ID NO: 3095914 - DNA, 25 bp, Homo sapien
tcccatcctgccttggaaattccat

SEQ ID NO: 3095915 - DNA, 25 bp, Homo sapien
tgctcccatcctgccttggaaattc

SEQ ID NO: 3095916 - DNA, 25 bp, Homo sapien
atttctctcacactcaagtcattat

SEQ ID NO: 3095917 - DNA, 25 bp, Homo sapien
catcctgccttggaaattccatttc

SEQ ID NO: 3095918 - DNA, 25 bp, Homo sapien
cgtgtcactgcaccccatcctgggc

SEQ ID NO: 3095919 - DNA, 25 bp, Homo sapien
cagagatcgtgtcactgcaccccat

SEQ ID NO: 3095920 - DNA, 25 bp, Homo sapien
aaccgggtgcggtggcccgtgcctg

SEQ ID NO: 3095921 - DNA, 25 bp, Homo sapien
atcgtgtcactgcaccccatcctgg

SEQ ID NO: 3095922 - DNA, 25 bp, Homo sapien
cagagcagagcatctcacttggtcc

SEQ ID NO: 3095923 - DNA, 25 bp, Homo sapien
tcattaaaggtgcaagacaggatcc

SEQ ID NO: 3095924 - DNA, 25 bp, Homo sapien
cagcaattggcatgatcttacaccc

SEQ ID NO: 3095925 - DNA, 25 bp, Homo sapien
taatggtggcaacttcagtaggctg

SEQ ID NO: 3095926 - DNA, 25 bp, Homo sapien
gagatttggactaatcaccgtggga

SEQ ID NO: 3095927 - DNA, 25 bp, Homo sapien
gaatgaaagaagtcgacacagcgga

SEQ ID NO: 3095928 - DNA, 25 bp, Homo sapien
gctcctctgaggttgcggaccatga

SEQ ID NO: 3095929 - DNA, 25 bp, Homo sapien
tgaacttgacatgaagaccctctgt

SEQ ID NO: 3095930 - DNA, 25 bp, Homo sapien
tccacggggggatcaactggtgata

SEQ ID NO: 3095931 - DNA, 25 bp, Homo sapien
gtcaggatttggagagtgtgacacc

SEQ ID NO: 3095932 - DNA, 25 bp, Homo sapien
tgtgacaccgaaggcgagagttctt

SEQ ID NO: 3095933 - DNA, 25 bp, Homo sapien
gctgatgctgcacttagggtcagga

SEQ ID NO: 3095934 - DNA, 25 bp, Homo sapien
aacctgataagctcaaagtggcctg

SEQ ID NO: 3095935 - DNA, 25 bp, Homo sapien
ttagtgacatggtctcacagaaacc

SEQ ID NO: 3095936 - DNA, 25 bp, Homo sapien
atgatatccccaaaagagacaccag

SEQ ID NO: 3095937 - DNA, 25 bp, Homo sapien
ctttttcaggtgtgtccgaacagga

SEQ ID NO: 3095938 - DNA, 25 bp, Homo sapien
tcaggcttttaaatcctcatctttc

SEQ ID NO: 3095939 - DNA, 25 bp, Homo sapien
atctcaaatatttcagtagcgaaaa

SEQ ID NO: 3095940 - DNA, 25 bp, Homo sapien
tttcagtagcgaaaattcaaagaca

SEQ ID NO: 3095941 - DNA, 25 bp, Homo sapien
ctcaaatatttcagtagcgaaaatt

SEQ ID NO: 3095942 - DNA, 25 bp, Homo sapien
tatttcagtagcgaaaattcaaaga

SEQ ID NO: 3095943 - DNA, 25 bp, Homo sapien
tgcaatcctccaaagcctagccagt

SEQ ID NO: 3095944 - DNA, 25 bp, Homo sapien
cgtggctgagcttatagcgagaacc

SEQ ID NO: 3095945 - DNA, 25 bp, Homo sapien
tcatctttgcttccgtaggcttagg

SEQ ID NO: 3095946 - DNA, 25 bp, Homo sapien
tagagaaaccgttcccagtcaacag

SEQ ID NO: 3095947 - DNA, 25 bp, Homo sapien
tcaatgggccaatacctccctgttc

SEQ ID NO: 3095948 - DNA, 25 bp, Homo sapien
caatgggccaatacctccctgttct

SEQ ID NO: 3095949 - DNA, 25 bp, Homo sapien
ttcatcaaatctttttccaaaggca

SEQ ID NO: 3095950 - DNA, 25 bp, Homo sapien
tcagttcatcaaatctttttccaaa

SEQ ID NO: 3095951 - DNA, 25 bp, Homo sapien
agttcatcaaatctttttccaaagg

SEQ ID NO: 3095952 - DNA, 25 bp, Homo sapien
tcatcaaatctttttccaaaggcac

SEQ ID NO: 3095953 - DNA, 25 bp, Homo sapien
tgttcccgaacaggacaagccctgg

SEQ ID NO: 3095954 - DNA, 25 bp, Homo sapien
tacaagactgaaagaggacactgtg

SEQ ID NO: 3095955 - DNA, 25 bp, Homo sapien
tataatccacttgacacgagcttgg

SEQ ID NO: 3095956 - DNA, 25 bp, Homo sapien
tacggcttacgcttccctgacttga

SEQ ID NO: 3095957 - DNA, 25 bp, Homo sapien
gcactgaattcactgtaccaccttc

SEQ ID NO: 3095958 - DNA, 25 bp, Homo sapien
tttgactgacaggcactgaattcac

SEQ ID NO: 3095959 - DNA, 25 bp, Homo sapien
tttttgactgacaggcactgaattc

SEQ ID NO: 3095960 - DNA, 25 bp, Homo sapien
cttttttgactgacaggcactgaat

SEQ ID NO: 3095961 - DNA, 25 bp, Homo sapien
aaggtgctgggccagatgccagttt

SEQ ID NO: 3095962 - DNA, 25 bp, Homo sapien
tgattcggagggataggacagtgct

SEQ ID NO: 3095963 - DNA, 25 bp, Homo sapien
gccagtttagctccatgcagtagta

SEQ ID NO: 3095964 - DNA, 25 bp, Homo sapien
tctgtagactaagcatgtggtttgg

SEQ ID NO: 3095965 - DNA, 25 bp, Homo sapien
ccccacgtccatattgcctgactca

SEQ ID NO: 3095966 - DNA, 25 bp, Homo sapien
gcccccacgtccatattgcctgact

SEQ ID NO: 3095967 - DNA, 25 bp, Homo sapien
cgtccatattgcctgactcagctca

SEQ ID NO: 3095968 - DNA, 25 bp, Homo sapien
cacgtccatattgcctgactcagct

SEQ ID NO: 3095969 - DNA, 25 bp, Homo sapien
ttcttcttcatcaacgtagagccga

SEQ ID NO: 3095970 - DNA, 25 bp, Homo sapien
tatccggatggaaagttcactctca

SEQ ID NO: 3095971 - DNA, 25 bp, Homo sapien
ccgaagttcagtgccagggtcgtct

SEQ ID NO: 3095972 - DNA, 25 bp, Homo sapien
gcgggaccctcaggatcagacttct

SEQ ID NO: 3095973 - DNA, 25 bp, Homo sapien
gctggctcccggtgatgagcagcca

SEQ ID NO: 3095974 - DNA, 25 bp, Homo sapien
taacacatgaccttctctcctcggg

SEQ ID NO: 3095975 - DNA, 25 bp, Homo sapien
ataacacatgaccttctctcctcgg

SEQ ID NO: 3095976 - DNA, 25 bp, Homo sapien
ctggctcccggtgatgagcagccag

SEQ ID NO: 3095977 - DNA, 25 bp, Homo sapien
tgtctcgcggccctactgtcagggc

SEQ ID NO: 3095978 - DNA, 25 bp, Homo sapien
taatacagaacataccgatctaggg

SEQ ID NO: 3095979 - DNA, 25 bp, Homo sapien
tgaacgaactaaatgacagaggctc

SEQ ID NO: 3095980 - DNA, 25 bp, Homo sapien
gcccagcacacggtctgtgttcaat

SEQ ID NO: 3095981 - DNA, 25 bp, Homo sapien
cacgtgctcaggtctaccatgggaa

SEQ ID NO: 3095982 - DNA, 25 bp, Homo sapien
ttaaggagtcacactgccctcaggg

SEQ ID NO: 3095983 - DNA, 25 bp, Homo sapien
tgggaagccaatgccatcaaaggac

SEQ ID NO: 3095984 - DNA, 25 bp, Homo sapien
catattgcaggaaggttacagggtt

SEQ ID NO: 3095985 - DNA, 25 bp, Homo sapien
aaccagcaaaatgtcagtctccgag

SEQ ID NO: 3095986 - DNA, 25 bp, Homo sapien
tctatcattggattcctagccaggg

SEQ ID NO: 3095987 - DNA, 25 bp, Homo sapien
ccagggtggtcgttgagaatcttcc

SEQ ID NO: 3095988 - DNA, 25 bp, Homo sapien
gtcagtctccgagcaagcttctcta

SEQ ID NO: 3095989 - DNA, 25 bp, Homo sapien
tgcatctccatccaggcaaggtcaa

SEQ ID NO: 3095990 - DNA, 25 bp, Homo sapien
ggattaatgaacaactgactcaggt

SEQ ID NO: 3095991 - DNA, 25 bp, Homo sapien
caggttgcactgacgacagggctgc

SEQ ID NO: 3095992 - DNA, 25 bp, Homo sapien
aaaatgcccctcaacagggaactga

SEQ ID NO: 3095993 - DNA, 25 bp, Homo sapien
tgatgtgacgtaagcacggccctac

SEQ ID NO: 3095994 - DNA, 25 bp, Homo sapien
tccaagagggcaacaggtctgatgt

SEQ ID NO: 3095995 - DNA, 25 bp, Homo sapien
tggtgatgattccaagagggcaaca

SEQ ID NO: 3095996 - DNA, 25 bp, Homo sapien
caatgaccaggacaaggacgatgac

SEQ ID NO: 3095997 - DNA, 25 bp, Homo sapien
catcagcgacatgggcagctaagca

SEQ ID NO: 3095998 - DNA, 25 bp, Homo sapien
agctaagcaaccacgcagcacggcg

SEQ ID NO: 3095999 - DNA, 25 bp, Homo sapien
gcgctcagtcaaggggccacagaga

SEQ ID NO: 3096000 - DNA, 25 bp, Homo sapien
ggcccctccgtgtcaggctctgtgc

SEQ ID NO: 3096001 - DNA, 25 bp, Homo sapien
gaaacatttgtggttgggccaggca

SEQ ID NO: 3096002 - DNA, 25 bp, Homo sapien
aaaggattttggacacggaatgaca

SEQ ID NO: 3096003 - DNA, 25 bp, Homo sapien
gagaacggtgaacgaagtccaagct

SEQ ID NO: 3096004 - DNA, 25 bp, Homo sapien
tgacatcgtcagaaacatttgtggt

SEQ ID NO: 3096005 - DNA, 25 bp, Homo sapien
tagcctgaagctctacccaaacaac

SEQ ID NO: 3096006 - DNA, 25 bp, Homo sapien
atgaaagctagcctgaagctctacc

SEQ ID NO: 3096007 - DNA, 25 bp, Homo sapien
aaagctagcctgaagctctacccaa

SEQ ID NO: 3096008 - DNA, 25 bp, Homo sapien
tgcccgtgccgactgcccaagtgtc

SEQ ID NO: 3096009 - DNA, 25 bp, Homo sapien
ggaaaatgatctggagcggggagac

SEQ ID NO: 3096010 - DNA, 25 bp, Homo sapien
tgcgtgggatactctgggggcctgt

SEQ ID NO: 3096011 - DNA, 25 bp, Homo sapien
aacctgcgtgggatactctgggggc

SEQ ID NO: 3096012 - DNA, 25 bp, Homo sapien
cctgcgtgggatactctgggggcct

SEQ ID NO: 3096013 - DNA, 25 bp, Homo sapien
cacctttgccaagaagaagggatcc

SEQ ID NO: 3096014 - DNA, 25 bp, Homo sapien
tccaactttggttcctgagcctggg

SEQ ID NO: 3096015 - DNA, 25 bp, Homo sapien
gcccagcccggagagaacaatgctt

SEQ ID NO: 3096016 - DNA, 25 bp, Homo sapien
gggtacggttataagcaagacagac

SEQ ID NO: 3096017 - DNA, 25 bp, Homo sapien
caccctcggctatcgactggttcaa

SEQ ID NO: 3096018 - DNA, 25 bp, Homo sapien
tatatatcgacaacagaggtgggtt

SEQ ID NO: 3096019 - DNA, 25 bp, Homo sapien
cattccgtgcttaaggagttcccct

SEQ ID NO: 3096020 - DNA, 25 bp, Homo sapien
aatgcgcacttgcaggcatccacag

SEQ ID NO: 3096021 - DNA, 25 bp, Homo sapien
gaaagctgggcacgtaaagaaacac

SEQ ID NO: 3096022 - DNA, 25 bp, Homo sapien
tattgccccagaggctttctacagc

SEQ ID NO: 3096023 - DNA, 25 bp, Homo sapien
gaagtaaaaggtccgactgcagaac

SEQ ID NO: 3096024 - DNA, 25 bp, Homo sapien
ggcagccccagcgaaataatacaga

SEQ ID NO: 3096025 - DNA, 25 bp, Homo sapien
tcacgggcaagggtcaaatcagggc

SEQ ID NO: 3096026 - DNA, 25 bp, Homo sapien
catccgctgaattgtgggactccat

SEQ ID NO: 3096027 - DNA, 25 bp, Homo sapien
tagatcccaagaagggcaaacatcc

SEQ ID NO: 3096028 - DNA, 25 bp, Homo sapien
tggtcggaaccgcagccaaaggctt

SEQ ID NO: 3096029 - DNA, 25 bp, Homo sapien
gctgtctgatccaaaggacagttct

SEQ ID NO: 3096030 - DNA, 25 bp, Homo sapien
cagctgtctgatccaaaggacagtt

SEQ ID NO: 3096031 - DNA, 25 bp, Homo sapien
ctgtctgatccaaaggacagttctt

SEQ ID NO: 3096032 - DNA, 25 bp, Homo sapien
agctgtctgatccaaaggacagttc

SEQ ID NO: 3096033 - DNA, 25 bp, Homo sapien
tctctagaacttgtcgggcccagtg

SEQ ID NO: 3096034 - DNA, 25 bp, Homo sapien
gcagggaactctggcaccagttcag

SEQ ID NO: 3096035 - DNA, 25 bp, Homo sapien
cagcaggagaaatggactttgaccc

SEQ ID NO: 3096036 - DNA, 25 bp, Homo sapien
gctgttatgatcttggacccctttc

SEQ ID NO: 3096037 - DNA, 25 bp, Homo sapien
atctctggcttatccccaattccag

SEQ ID NO: 3096038 - DNA, 25 bp, Homo sapien
tctctggcttatccccaattccagt

SEQ ID NO: 3096039 - DNA, 25 bp, Homo sapien
aatctctggcttatccccaattcca

SEQ ID NO: 3096040 - DNA, 25 bp, Homo sapien
tcaaattaaaggatggaaaactaga

SEQ ID NO: 3096041 - DNA, 25 bp, Homo sapien
caaattaaaggatggaaaactagag

SEQ ID NO: 3096042 - DNA, 25 bp, Homo sapien
ctcaaattaaaggatggaaaactag

SEQ ID NO: 3096043 - DNA, 25 bp, Homo sapien
tcaggaggtcagccaagtagacaaa

SEQ ID NO: 3096044 - DNA, 25 bp, Homo sapien
gccaagtagacaaaagccgctccaa

SEQ ID NO: 3096045 - DNA, 25 bp, Homo sapien
caagtgaggcatcaggaggtcagcc

SEQ ID NO: 3096046 - DNA, 25 bp, Homo sapien
gctccaagggtgaagccaacagcca

SEQ ID NO: 3096047 - DNA, 25 bp, Homo sapien
gggccagaagagaccaataggaagc

SEQ ID NO: 3096048 - DNA, 25 bp, Homo sapien
ccagaagagaccaataggaagctgc

SEQ ID NO: 3096049 - DNA, 25 bp, Homo sapien
ggccagaagagaccaataggaagct

SEQ ID NO: 3096050 - DNA, 25 bp, Homo sapien
agaagagaccaataggaagctgcca

SEQ ID NO: 3096051 - DNA, 25 bp, Homo sapien
agggccatcgctgaagacaccaggt

SEQ ID NO: 3096052 - DNA, 25 bp, Homo sapien
accgtaaggagctgatggttggcat

SEQ ID NO: 3096053 - DNA, 25 bp, Homo sapien
gacaccaggtataaccgtaaggagc

SEQ ID NO: 3096054 - DNA, 25 bp, Homo sapien
ggtataaccgtaaggagctgatggt

SEQ ID NO: 3096055 - DNA, 25 bp, Homo sapien
cactagattcatcactcgtgtccat

SEQ ID NO: 3096056 - DNA, 25 bp, Homo sapien
cataacactagattcatcactcgtg

SEQ ID NO: 3096057 - DNA, 25 bp, Homo sapien
ggcggctcttttccataacactaga

SEQ ID NO: 3096058 - DNA, 25 bp, Homo sapien
cttctaaggcggctcttttccataa

SEQ ID NO: 3096059 - DNA, 25 bp, Homo sapien
gctcaagccacgcacccgccttgtc

SEQ ID NO: 3096060 - DNA, 25 bp, Homo sapien
tttttgtgggagatgtatatacatg

SEQ ID NO: 3096061 - DNA, 25 bp, Homo sapien
tatacatgtatatcaagatggggtt

SEQ ID NO: 3096062 - DNA, 25 bp, Homo sapien
taactggtttgcaggggcatctaaa

SEQ ID NO: 3096063 - DNA, 25 bp, Homo sapien
ggccttctgatctcgtctcctgtga

SEQ ID NO: 3096064 - DNA, 25 bp, Homo sapien
tcgaagtgtcctctgatttaacccc

SEQ ID NO: 3096065 - DNA, 25 bp, Homo sapien
cccttgctagaatgaaaacagtcgg

SEQ ID NO: 3096066 - DNA, 25 bp, Homo sapien
gaaatctggttatcaggctagctga

SEQ ID NO: 3096067 - DNA, 25 bp, Homo sapien
aaagagggaaggtatagataggata

SEQ ID NO: 3096068 - DNA, 25 bp, Homo sapien
gaagctatgaggtatgaaatatgtg

SEQ ID NO: 3096069 - DNA, 25 bp, Homo sapien
aataatatgggaaacaactccatat

SEQ ID NO: 3096070 - DNA, 25 bp, Homo sapien
tttcaccctaacgtagaatgacagg

SEQ ID NO: 3096071 - DNA, 25 bp, Homo sapien
tcatgatcccaaaagtcctagctaa

SEQ ID NO: 3096072 - DNA, 25 bp, Homo sapien
taaaagaacatgtgtcgcagcattc

SEQ ID NO: 3096073 - DNA, 25 bp, Homo sapien
gactaaaagttctctccgcactagg

SEQ ID NO: 3096074 - DNA, 25 bp, Homo sapien
gcagcattccttgcagctaccttag

SEQ ID NO: 3096075 - DNA, 25 bp, Homo sapien
ttatgcataaacatagagtagacac

SEQ ID NO: 3096076 - DNA, 25 bp, Homo sapien
aatagatcacatctgttaagtctct

SEQ ID NO: 3096077 - DNA, 25 bp, Homo sapien
agtccattcatgctatggatgtttt

SEQ ID NO: 3096078 - DNA, 25 bp, Homo sapien
tgagtccattcatgctatggatgtt

SEQ ID NO: 3096079 - DNA, 25 bp, Homo sapien
cactgccaaaacactcagagagagt

SEQ ID NO: 3096080 - DNA, 25 bp, Homo sapien
tgccaaaacactcagagagagttcc

SEQ ID NO: 3096081 - DNA, 25 bp, Homo sapien
tcagagagagttccaacttcttggt

SEQ ID NO: 3096082 - DNA, 25 bp, Homo sapien
aaacactcagagagagttccaactt

SEQ ID NO: 3096083 - DNA, 25 bp, Homo sapien
acataaataaacaactgttctgagg

SEQ ID NO: 3096084 - DNA, 25 bp, Homo sapien
cataaataaacaactgttctgaggc

SEQ ID NO: 3096085 - DNA, 25 bp, Homo sapien
cacataaataaacaactgttctgag

SEQ ID NO: 3096086 - DNA, 25 bp, Homo sapien
tccttcccctccagtagcacttgag

SEQ ID NO: 3096087 - DNA, 25 bp, Homo sapien
cttcccctccagtagcacttgaggg

SEQ ID NO: 3096088 - DNA, 25 bp, Homo sapien
cccctccagtagcacttgagggagg

SEQ ID NO: 3096089 - DNA, 25 bp, Homo sapien
tcccctccagtagcacttgagggag

SEQ ID NO: 3096090 - DNA, 25 bp, Homo sapien
atgtcagacatgcctttcactttct

SEQ ID NO: 3096091 - DNA, 25 bp, Homo sapien
atgatcccgattagaacaggggttc

SEQ ID NO: 3096092 - DNA, 25 bp, Homo sapien
tgtcagacatgcctttcactttctg

SEQ ID NO: 3096093 - DNA, 25 bp, Homo sapien
ttcaagttacagatccaaaatccct

SEQ ID NO: 3096094 - DNA, 25 bp, Homo sapien
tactttcaaggacctctctgttgac

SEQ ID NO: 3096095 - DNA, 25 bp, Homo sapien
tggaaggccgagttgggtagaccac

SEQ ID NO: 3096096 - DNA, 25 bp, Homo sapien
gattagatccaccttcaaaggacag

SEQ ID NO: 3096097 - DNA, 25 bp, Homo sapien
ctgcagcaaagccaagacttccatc

SEQ ID NO: 3096098 - DNA, 25 bp, Homo sapien
ccctgcagcaaagccaagacttcca

SEQ ID NO: 3096099 - DNA, 25 bp, Homo sapien
cctgcagcaaagccaagacttccat

SEQ ID NO: 3096100 - DNA, 25 bp, Homo sapien
tcagtttccaagagacaataagatg

SEQ ID NO: 3096101 - DNA, 25 bp, Homo sapien
atcaaaacaagatgtttcagtttcc

SEQ ID NO: 3096102 - DNA, 25 bp, Homo sapien
agtttccaagagacaataagatgat

SEQ ID NO: 3096103 - DNA, 25 bp, Homo sapien
tgtttcagtttccaagagacaataa

SEQ ID NO: 3096104 - DNA, 25 bp, Homo sapien
tccactagagaatacgaacacgaga

SEQ ID NO: 3096105 - DNA, 25 bp, Homo sapien
tagagaatacgaacacgagagctgc

SEQ ID NO: 3096106 - DNA, 25 bp, Homo sapien
agaatacgaacacgagagctgcccc

SEQ ID NO: 3096107 - DNA, 25 bp, Homo sapien
cactagagaatacgaacacgagagc

SEQ ID NO: 3096108 - DNA, 25 bp, Homo sapien
cccgactctccaatcccgttctcca

SEQ ID NO: 3096109 - DNA, 25 bp, Homo sapien
ccgactctccaatcccgttctccat

SEQ ID NO: 3096110 - DNA, 25 bp, Homo sapien
ccaagagtcagttcaagaggctggt

SEQ ID NO: 3096111 - DNA, 25 bp, Homo sapien
taaacctgttgttccgcttccaaga

SEQ ID NO: 3096112 - DNA, 25 bp, Homo sapien
cacatgggcattcccggctgattga

SEQ ID NO: 3096113 - DNA, 25 bp, Homo sapien
gaaaagttctctaatgcctcgctac

SEQ ID NO: 3096114 - DNA, 25 bp, Homo sapien
agtcccacactcttgtcctgatggc

SEQ ID NO: 3096115 - DNA, 25 bp, Homo sapien
ctgcccttccaagtcccacactctt

SEQ ID NO: 3096116 - DNA, 25 bp, Homo sapien
caaaggcaccgaaggagagaaaagc

SEQ ID NO: 3096117 - DNA, 25 bp, Homo sapien
tcgagcccaaccaaaggcaccgaag

SEQ ID NO: 3096118 - DNA, 25 bp, Homo sapien
ctgccactctctcgccggctccact

SEQ ID NO: 3096119 - DNA, 25 bp, Homo sapien
cactctctcgccggctccactcccg

SEQ ID NO: 3096120 - DNA, 25 bp, Homo sapien
ctctctcgccggctccactcccgca

SEQ ID NO: 3096121 - DNA, 25 bp, Homo sapien
gccactctctcgccggctccactcc

SEQ ID NO: 3096122 - DNA, 25 bp, Homo sapien
ctttgactaatgttcgaatccaaac

SEQ ID NO: 3096123 - DNA, 25 bp, Homo sapien
gctccagagtaggaagacaatggtg

SEQ ID NO: 3096124 - DNA, 25 bp, Homo sapien
caatggtgatatcgttcagcctggt

SEQ ID NO: 3096125 - DNA, 25 bp, Homo sapien
ggaagacaatggtgatatcgttcag

SEQ ID NO: 3096126 - DNA, 25 bp, Homo sapien
tggtgatatcgttcagcctggtata

SEQ ID NO: 3096127 - DNA, 25 bp, Homo sapien
cagcttctgagggtttaaggagaga

SEQ ID NO: 3096128 - DNA, 25 bp, Homo sapien
ttaaggagagattggatacagattg

SEQ ID NO: 3096129 - DNA, 25 bp, Homo sapien
tgccagcttctgagggtttaaggag

SEQ ID NO: 3096130 - DNA, 25 bp, Homo sapien
gagagattggatacagattgcctgt

SEQ ID NO: 3096131 - DNA, 25 bp, Homo sapien
caatgtgtgccccaaagacagcgat

SEQ ID NO: 3096132 - DNA, 25 bp, Homo sapien
caaagcatgtggcattatatgctgc

SEQ ID NO: 3096133 - DNA, 25 bp, Homo sapien
agtaactgatgtcagcaaagcatgt

SEQ ID NO: 3096134 - DNA, 25 bp, Homo sapien
cattatatgctgcaatgtgtgcccc

SEQ ID NO: 3096135 - DNA, 25 bp, Homo sapien
actacactccagcctggggaaaatc

SEQ ID NO: 3096136 - DNA, 25 bp, Homo sapien
ctgggaaggttgaggcttgagtgag

SEQ ID NO: 3096137 - DNA, 25 bp, Homo sapien
ctgtgatcacaccactacactccag

SEQ ID NO: 3096138 - DNA, 25 bp, Homo sapien
agcctgggaaggttgaggcttgagt

SEQ ID NO: 3096139 - DNA, 25 bp, Homo sapien
ggtgaatagtaccactcccatccag

SEQ ID NO: 3096140 - DNA, 25 bp, Homo sapien
ttattcctcttggtgaatagtacca

SEQ ID NO: 3096141 - DNA, 25 bp, Homo sapien
gaatagtaccactcccatccagtca

SEQ ID NO: 3096142 - DNA, 25 bp, Homo sapien
tcctcttggtgaatagtaccactcc

SEQ ID NO: 3096143 - DNA, 25 bp, Homo sapien
agcctcacaatcacggccgaaggtg

SEQ ID NO: 3096144 - DNA, 25 bp, Homo sapien
acggccgaaggtgaaaggcacgtct

SEQ ID NO: 3096145 - DNA, 25 bp, Homo sapien
atcacggccgaaggtgaaaggcacg

SEQ ID NO: 3096146 - DNA, 25 bp, Homo sapien
aagcctcacaatcacggccgaaggt

SEQ ID NO: 3096147 - DNA, 25 bp, Homo sapien
gagtcctgcagcactggtagaaggt

SEQ ID NO: 3096148 - DNA, 25 bp, Homo sapien
tgagtcctgcagcactggtagaagg

SEQ ID NO: 3096149 - DNA, 25 bp, Homo sapien
tccctgcagccagggtagaacagca

SEQ ID NO: 3096150 - DNA, 25 bp, Homo sapien
gcacgtgttgcaggcgagggagtgg

SEQ ID NO: 3096151 - DNA, 25 bp, Homo sapien
gaggcacgtgttgcaggcgagggag

SEQ ID NO: 3096152 - DNA, 25 bp, Homo sapien
ctgcagccagggtagaacagcagca

SEQ ID NO: 3096153 - DNA, 25 bp, Homo sapien
cccatcactactaaaaatatgtaaa

SEQ ID NO: 3096154 - DNA, 25 bp, Homo sapien
tatgtaaattagtcgggcgtggtgt

SEQ ID NO: 3096155 - DNA, 25 bp, Homo sapien
aaaatatgtaaattagtcgggcgtg

SEQ ID NO: 3096156 - DNA, 25 bp, Homo sapien
tagtcgggcgtggtgtcacgtgcct

SEQ ID NO: 3096157 - DNA, 25 bp, Homo sapien
gaaaacgtagaaaagagcgcgagcc

SEQ ID NO: 3096158 - DNA, 25 bp, Homo sapien
gataatctcgtggacaggctctgaa

SEQ ID NO: 3096159 - DNA, 25 bp, Homo sapien
gatactgcggatgcttatcagccga

SEQ ID NO: 3096160 - DNA, 25 bp, Homo sapien
caccgtagctataaagggcgccaga

SEQ ID NO: 3096161 - DNA, 25 bp, Homo sapien
acaagcgctcagaaccccttcaggg

SEQ ID NO: 3096162 - DNA, 25 bp, Homo sapien
aaaagcagacgccaaacaagcgctc

SEQ ID NO: 3096163 - DNA, 25 bp, Homo sapien
cacagtttcgcagccaacctggcga

SEQ ID NO: 3096164 - DNA, 25 bp, Homo sapien
caacacgaatcaacagcagaggaaa

SEQ ID NO: 3096165 - DNA, 25 bp, Homo sapien
tccggtaagtggatccagcgcaaag

SEQ ID NO: 3096166 - DNA, 25 bp, Homo sapien
gacttgctgagttgtactgaaccca

SEQ ID NO: 3096167 - DNA, 25 bp, Homo sapien
cctggtgggagacgaaagtttgcct

SEQ ID NO: 3096168 - DNA, 25 bp, Homo sapien
aatgcacgcgtgtgtaggaaaaacc

SEQ ID NO: 3096169 - DNA, 25 bp, Homo sapien
caaagggtggcctagatggcttctc

SEQ ID NO: 3096170 - DNA, 25 bp, Homo sapien
tggcctggcctaactccctgtttca

SEQ ID NO: 3096171 - DNA, 25 bp, Homo sapien
ctccctgtttcaatatgcacttcaa

SEQ ID NO: 3096172 - DNA, 25 bp, Homo sapien
acttcaaagggtggcctagatggct

SEQ ID NO: 3096173 - DNA, 25 bp, Homo sapien
aacccagccaaaacgctctgtgttg

SEQ ID NO: 3096174 - DNA, 25 bp, Homo sapien
ttttaagccattccgcagggtccag

SEQ ID NO: 3096175 - DNA, 25 bp, Homo sapien
ttcagcacccgctgtgggagaacca

SEQ ID NO: 3096176 - DNA, 25 bp, Homo sapien
gtccagacttgcgtatatcctcggg

SEQ ID NO: 3096177 - DNA, 25 bp, Homo sapien
cctttgacagatacgcagatgcggg

SEQ ID NO: 3096178 - DNA, 25 bp, Homo sapien
tggcatgcatcaagcacatcgtgga

SEQ ID NO: 3096179 - DNA, 25 bp, Homo sapien
ggttaaactagatgacctcctggct

SEQ ID NO: 3096180 - DNA, 25 bp, Homo sapien
aggatgccctcaacagtgccaagct

SEQ ID NO: 3096181 - DNA, 25 bp, Homo sapien
tagggaaccacttacttgccgtgaa

SEQ ID NO: 3096182 - DNA, 25 bp, Homo sapien
gatgatgctggctcagttctggcca

SEQ ID NO: 3096183 - DNA, 25 bp, Homo sapien
taaactgctccgtggaaaagaagaa

SEQ ID NO: 3096184 - DNA, 25 bp, Homo sapien
gccaccagctgggatgagctagaaa

SEQ ID NO: 3096185 - DNA, 25 bp, Homo sapien
gatcttcgctaagaaggcagctcag

SEQ ID NO: 3096186 - DNA, 25 bp, Homo sapien
agatcttcgctaagaaggcagctca

SEQ ID NO: 3096187 - DNA, 25 bp, Homo sapien
gttcacggctgcaatgagcagctat

SEQ ID NO: 3096188 - DNA, 25 bp, Homo sapien
cagcttgggagttcacggctgcaat

SEQ ID NO: 3096189 - DNA, 25 bp, Homo sapien
caaggcggtctcttccaaaagcaaa

SEQ ID NO: 3096190 - DNA, 25 bp, Homo sapien
tctagggagctatgtcaaggcggtc

SEQ ID NO: 3096191 - DNA, 25 bp, Homo sapien
tagtgccctccttatagacagaacg

SEQ ID NO: 3096192 - DNA, 25 bp, Homo sapien
ttagtgcgaacgaagcgatacaggc

SEQ ID NO: 3096193 - DNA, 25 bp, Homo sapien
atgctgcttttaatggcggcgcaat

SEQ ID NO: 3096194 - DNA, 25 bp, Homo sapien
tgctgcttttaatggcggcgcaata

SEQ ID NO: 3096195 - DNA, 25 bp, Homo sapien
aaggtgtaaaagatgcccgctgaca

SEQ ID NO: 3096196 - DNA, 25 bp, Homo sapien
tacgatgccaactgttaagcctgca

SEQ ID NO: 3096197 - DNA, 25 bp, Homo sapien
agagttaactgccaacccggcacta

SEQ ID NO: 3096198 - DNA, 25 bp, Homo sapien
cacgtttcatttcagtacgatgcca

SEQ ID NO: 3096199 - DNA, 25 bp, Homo sapien
caatgagatcatgtaagctgctgac

SEQ ID NO: 3096200 - DNA, 25 bp, Homo sapien
taagcatgggctatgttgcagcctc

SEQ ID NO: 3096201 - DNA, 25 bp, Homo sapien
caaaggctcatgctgttccgtgtcc

SEQ ID NO: 3096202 - DNA, 25 bp, Homo sapien
cagactctggtggaatagtgacaca

SEQ ID NO: 3096203 - DNA, 25 bp, Homo sapien
caacaggcatttttcgtgtgcaatt

SEQ ID NO: 3096204 - DNA, 25 bp, Homo sapien
aatatcaaatctgcacagcgctgtc

SEQ ID NO: 3096205 - DNA, 25 bp, Homo sapien
cagtctgaatgggacatactatgga

SEQ ID NO: 3096206 - DNA, 25 bp, Homo sapien
gacatagatttgataccctccctca

SEQ ID NO: 3096207 - DNA, 25 bp, Homo sapien
tgtaggctgtggaagtgggcctccc

SEQ ID NO: 3096208 - DNA, 25 bp, Homo sapien
tagaggccttggcacagcgcggact

SEQ ID NO: 3096209 - DNA, 25 bp, Homo sapien
actgctcgggcacgggctgaggcgt

SEQ ID NO: 3096210 - DNA, 25 bp, Homo sapien
tggtctggctcaagctgccttccgg

SEQ ID NO: 3096211 - DNA, 25 bp, Homo sapien
ctcccaccactgtcactgcctgaag

SEQ ID NO: 3096212 - DNA, 25 bp, Homo sapien
tgctgctcccaccactgtcactgcc

SEQ ID NO: 3096213 - DNA, 25 bp, Homo sapien
tgctcccaccactgtcactgcctga

SEQ ID NO: 3096214 - DNA, 25 bp, Homo sapien
tcccaccactgtcactgcctgaaga

SEQ ID NO: 3096215 - DNA, 25 bp, Homo sapien
taataaatgacaaccctgataactg

SEQ ID NO: 3096216 - DNA, 25 bp, Homo sapien
taactgaattggcagtacctttctg

SEQ ID NO: 3096217 - DNA, 25 bp, Homo sapien
aacttagccgtttaatacatccaca

SEQ ID NO: 3096218 - DNA, 25 bp, Homo sapien
cccttaggcaaagacattggttctg

SEQ ID NO: 3096219 - DNA, 25 bp, Homo sapien
catcattaacaagactcaaaccaag

SEQ ID NO: 3096220 - DNA, 25 bp, Homo sapien
caagacttgtgatggtgccgaggcc

SEQ ID NO: 3096221 - DNA, 25 bp, Homo sapien
tgccgaggccattggagctatggtc

SEQ ID NO: 3096222 - DNA, 25 bp, Homo sapien
ggtcacataccccaatacctacagg

SEQ ID NO: 3096223 - DNA, 25 bp, Homo sapien
tactgtttctcattacaggtactgt

SEQ ID NO: 3096224 - DNA, 25 bp, Homo sapien
ttactgtttctcattacaggtactg

SEQ ID NO: 3096225 - DNA, 25 bp, Homo sapien
cgctttgtttcctcttagtctgttt

SEQ ID NO: 3096226 - DNA, 25 bp, Homo sapien
aacgctttgtttcctcttagtctgt

SEQ ID NO: 3096227 - DNA, 25 bp, Homo sapien
tagcaggccagggaaagaaacagtg

SEQ ID NO: 3096228 - DNA, 25 bp, Homo sapien
gacaactcacttatacccatggcag

SEQ ID NO: 3096229 - DNA, 25 bp, Homo sapien
gacacactactctctttggcagaag

SEQ ID NO: 3096230 - DNA, 25 bp, Homo sapien
taactaaattgtgaagcagaggacg

SEQ ID NO: 3096231 - DNA, 25 bp, Homo sapien
ggttgtcttcttcgttgccattcct

SEQ ID NO: 3096232 - DNA, 25 bp, Homo sapien
tgtcttcttcgttgccattccttct

SEQ ID NO: 3096233 - DNA, 25 bp, Homo sapien
gttgtcttcttcgttgccattcctt

SEQ ID NO: 3096234 - DNA, 25 bp, Homo sapien
tggttgtcttcttcgttgccattcc

SEQ ID NO: 3096235 - DNA, 25 bp, Homo sapien
ctaattgtactcccttccatatgac

SEQ ID NO: 3096236 - DNA, 25 bp, Homo sapien
ttgtactcccttccatatgacaaca

SEQ ID NO: 3096237 - DNA, 25 bp, Homo sapien
aattgtactcccttccatatgacaa

SEQ ID NO: 3096238 - DNA, 25 bp, Homo sapien
gtactcccttccatatgacaacatt

SEQ ID NO: 3096239 - DNA, 25 bp, Homo sapien
gagacaaaaggctagtgtggacaca

SEQ ID NO: 3096240 - DNA, 25 bp, Homo sapien
agtggcaggcctttaatcctaaagg

SEQ ID NO: 3096241 - DNA, 25 bp, Homo sapien
cactttctatgagagtagggtggct

SEQ ID NO: 3096242 - DNA, 25 bp, Homo sapien
gaaaataaatgatcaccctaagctc

SEQ ID NO: 3096243 - DNA, 25 bp, Homo sapien
cgccgctccgcgaagagagggaaca

SEQ ID NO: 3096244 - DNA, 25 bp, Homo sapien
cggtggcgagtacccctcagtcgga

SEQ ID NO: 3096245 - DNA, 25 bp, Homo sapien
gcagctggcggatggaagctacgcg

SEQ ID NO: 3096246 - DNA, 25 bp, Homo sapien
agccgctcgggtggacgcagccggt

SEQ ID NO: 3096247 - DNA, 25 bp, Homo sapien
gcccacgggaagaggcgggctcgga

SEQ ID NO: 3096248 - DNA, 25 bp, Homo sapien
gtggcaccatcccaaccgcaccgac

SEQ ID NO: 3096249 - DNA, 25 bp, Homo sapien
catcccaaccgcaccgactggtaac

SEQ ID NO: 3096250 - DNA, 25 bp, Homo sapien
cgggaggagcgactaggagcttctg

SEQ ID NO: 3096251 - DNA, 25 bp, Homo sapien
gagggagacgacttaccagtttcat

SEQ ID NO: 3096252 - DNA, 25 bp, Homo sapien
gcaggaacggactgtcatgagccat

SEQ ID NO: 3096253 - DNA, 25 bp, Homo sapien
tcaacaccagggattcagtcacagg

SEQ ID NO: 3096254 - DNA, 25 bp, Homo sapien
taagtttgttcattccgagggagac

SEQ ID NO: 3096255 - DNA, 25 bp, Homo sapien
gatagtcagttccaagcatcacaca

SEQ ID NO: 3096256 - DNA, 25 bp, Homo sapien
tggagcccaaatctgatagtcagtt

SEQ ID NO: 3096257 - DNA, 25 bp, Homo sapien
ggtgccagagccctttatgttcagc

SEQ ID NO: 3096258 - DNA, 25 bp, Homo sapien
agtcccgagggacagttatctctgg

SEQ ID NO: 3096259 - DNA, 25 bp, Homo sapien
tgctgatggctggaatcggttaaca

SEQ ID NO: 3096260 - DNA, 25 bp, Homo sapien
taaaactagccaggtaagacgggca

SEQ ID NO: 3096261 - DNA, 25 bp, Homo sapien
gaatccagtcaggaccaggttgtac

SEQ ID NO: 3096262 - DNA, 25 bp, Homo sapien
gaaacggaggatgtggccaaaaaca

SEQ ID NO: 3096263 - DNA, 25 bp, Homo sapien
catgcttattttgacaggagacctg

SEQ ID NO: 3096264 - DNA, 25 bp, Homo sapien
gcagaacattgctagcccaaagcta

SEQ ID NO: 3096265 - DNA, 25 bp, Homo sapien
gagacctgtaacaactcagaatagg

SEQ ID NO: 3096266 - DNA, 25 bp, Homo sapien
tataaacaggcctaacgtctagacc

SEQ ID NO: 3096267 - DNA, 25 bp, Homo sapien
tgcaggtcaggacagtaggctcacc

SEQ ID NO: 3096268 - DNA, 25 bp, Homo sapien
gataggtcatttgcccttctcagga

SEQ ID NO: 3096269 - DNA, 25 bp, Homo sapien
agggagccacgtgatcctgacactg

SEQ ID NO: 3096270 - DNA, 25 bp, Homo sapien
tcactcaggcaagacctttgatagg

SEQ ID NO: 3096271 - DNA, 25 bp, Homo sapien
gaacgaagctcaactcatataagga

SEQ ID NO: 3096272 - DNA, 25 bp, Homo sapien
cgtttcggtaaacaatgacagtgac

SEQ ID NO: 3096273 - DNA, 25 bp, Homo sapien
tccttcggcactggatgttagggaa

SEQ ID NO: 3096274 - DNA, 25 bp, Homo sapien
tgaggcttagccgtggatccttcgg

SEQ ID NO: 3096275 - DNA, 25 bp, Homo sapien
aaggcggcagcactcctgcatgctg

SEQ ID NO: 3096276 - DNA, 25 bp, Homo sapien
aaatcagtgcctagtgagtagcggg

SEQ ID NO: 3096277 - DNA, 25 bp, Homo sapien
cgggtaggtccgacagcaggaacaa

SEQ ID NO: 3096278 - DNA, 25 bp, Homo sapien
tcgccgccatctcttgtatcagaca

SEQ ID NO: 3096279 - DNA, 25 bp, Homo sapien
ttgggaatattcacggacatgcctg

SEQ ID NO: 3096280 - DNA, 25 bp, Homo sapien
taaaagtcgtgttctgccctgtctg

SEQ ID NO: 3096281 - DNA, 25 bp, Homo sapien
tggagtgccccgctaggtaagaagc

SEQ ID NO: 3096282 - DNA, 25 bp, Homo sapien
tcagcatgacgaggaagcacacttc

SEQ ID NO: 3096283 - DNA, 25 bp, Homo sapien
tagtagctcgttcacttacaggatc

SEQ ID NO: 3096284 - DNA, 25 bp, Homo sapien
ccagacctgttggtaggagctgagc

SEQ ID NO: 3096285 - DNA, 25 bp, Homo sapien
gaatcccatagtaagaccattgagc

SEQ ID NO: 3096286 - DNA, 25 bp, Homo sapien
tagcggcagctgaagccatatacag

SEQ ID NO: 3096287 - DNA, 25 bp, Homo sapien
agcagaaataggaggtgctgaatcc

SEQ ID NO: 3096288 - DNA, 25 bp, Homo sapien
aggtgctgaatcccggggccggctg

SEQ ID NO: 3096289 - DNA, 25 bp, Homo sapien
tccaccctgtggcacaggccctgcc

SEQ ID NO: 3096290 - DNA, 25 bp, Homo sapien
tgtccaccctgtggcacaggccctg

SEQ ID NO: 3096291 - DNA, 25 bp, Homo sapien
ggttgagtaaaagattcatcttggg

SEQ ID NO: 3096292 - DNA, 25 bp, Homo sapien
cttcatgtaactcgggttgagtaaa

SEQ ID NO: 3096293 - DNA, 25 bp, Homo sapien
ctcgggttgagtaaaagattcatct

SEQ ID NO: 3096294 - DNA, 25 bp, Homo sapien
catgtaactcgggttgagtaaaaga

SEQ ID NO: 3096295 - DNA, 25 bp, Homo sapien
gggacatggcggtatttacacagag

SEQ ID NO: 3096296 - DNA, 25 bp, Homo sapien
gaagccaactaaatagttgagacac

SEQ ID NO: 3096297 - DNA, 25 bp, Homo sapien
aatagttgagacacattattctggg

SEQ ID NO: 3096298 - DNA, 25 bp, Homo sapien
gcaaattggcacttgggtccctcgg

SEQ ID NO: 3096299 - DNA, 25 bp, Homo sapien
ttggtcataccaaggacagtcctgg

SEQ ID NO: 3096300 - DNA, 25 bp, Homo sapien
cgtccttgcagaaaccttggtcata

SEQ ID NO: 3096301 - DNA, 25 bp, Homo sapien
ggaaggaacactccttgttgctgca

SEQ ID NO: 3096302 - DNA, 25 bp, Homo sapien
cagtcctgggacttgaaagctggct

SEQ ID NO: 3096303 - DNA, 25 bp, Homo sapien
gttgccgttctgctgcgtgcacgtc

SEQ ID NO: 3096304 - DNA, 25 bp, Homo sapien
tggttgccgttctgctgcgtgcacg

SEQ ID NO: 3096305 - DNA, 25 bp, Homo sapien
tgctgcgtgcacgtctctgcattcc

SEQ ID NO: 3096306 - DNA, 25 bp, Homo sapien
ccgttctgctgcgtgcacgtctctg

SEQ ID NO: 3096307 - DNA, 25 bp, Homo sapien
ggcagggacttcagggtgcacttct

SEQ ID NO: 3096308 - DNA, 25 bp, Homo sapien
cttgatccagggggcagtaaagggc

SEQ ID NO: 3096309 - DNA, 25 bp, Homo sapien
ggacttcagggtgcacttctgcttg

SEQ ID NO: 3096310 - DNA, 25 bp, Homo sapien
agggacttcagggtgcacttctgct

SEQ ID NO: 3096311 - DNA, 25 bp, Homo sapien
tcaggcatcctggtgaggtcatact

SEQ ID NO: 3096312 - DNA, 25 bp, Homo sapien
ggagccagtgcttgcataccaccat

SEQ ID NO: 3096313 - DNA, 25 bp, Homo sapien
ttctcccctcggtcatgtcggaagg

SEQ ID NO: 3096314 - DNA, 25 bp, Homo sapien
aggtcatactggtgcaggaacttgc

SEQ ID NO: 3096315 - DNA, 25 bp, Homo sapien
gagacaattgaccagtttacaaact

SEQ ID NO: 3096316 - DNA, 25 bp, Homo sapien
tagggaatggatgagacaattgacc

SEQ ID NO: 3096317 - DNA, 25 bp, Homo sapien
gtttacaaactgagtcagagcaggg

SEQ ID NO: 3096318 - DNA, 25 bp, Homo sapien
gaagtggaggatgctttttgatagc

SEQ ID NO: 3096319 - DNA, 25 bp, Homo sapien
ctttctcacagagccctttagtgaa

SEQ ID NO: 3096320 - DNA, 25 bp, Homo sapien
ctcacagagccctttagtgaagaag

SEQ ID NO: 3096321 - DNA, 25 bp, Homo sapien
tctcacagagccctttagtgaagaa

SEQ ID NO: 3096322 - DNA, 25 bp, Homo sapien
tttagtgaagaagttgcacacagct

SEQ ID NO: 3096323 - DNA, 25 bp, Homo sapien
atcggcatgtcccacctagacctcc

SEQ ID NO: 3096324 - DNA, 25 bp, Homo sapien
gagaagagggaacggagaaggtagc

SEQ ID NO: 3096325 - DNA, 25 bp, Homo sapien
tgttccggaagcctccacctccatc

SEQ ID NO: 3096326 - DNA, 25 bp, Homo sapien
gaagcctccacctccatcggcatgt

SEQ ID NO: 3096327 - DNA, 25 bp, Homo sapien
gtgaaccgctctagccccgcaatga

SEQ ID NO: 3096328 - DNA, 25 bp, Homo sapien
ttctgcatctcgacatccttctcga

SEQ ID NO: 3096329 - DNA, 25 bp, Homo sapien
ccttctcgaaggcaaaggtgaaccg

SEQ ID NO: 3096330 - DNA, 25 bp, Homo sapien
gaaggcaaaggtgaaccgctctagc

SEQ ID NO: 3096331 - DNA, 25 bp, Homo sapien
gaacccaggcaggtgggcccaatat

SEQ ID NO: 3096332 - DNA, 25 bp, Homo sapien
ggcaggtgggcccaatatagctcat

SEQ ID NO: 3096333 - DNA, 25 bp, Homo sapien
caggcaggtgggcccaatatagctc

SEQ ID NO: 3096334 - DNA, 25 bp, Homo sapien
acccaggcaggtgggcccaatatag

SEQ ID NO: 3096335 - DNA, 25 bp, Homo sapien
cagcaaggctgttattctgccagag

SEQ ID NO: 3096336 - DNA, 25 bp, Homo sapien
tgttaccgaacacaaacgtggcgtg

SEQ ID NO: 3096337 - DNA, 25 bp, Homo sapien
cagccacaggttagcaaagagttgc

SEQ ID NO: 3096338 - DNA, 25 bp, Homo sapien
cgtggcgtgcacacagacattacca

SEQ ID NO: 3096339 - DNA, 25 bp, Homo sapien
cttttaagaaagtggctcactcctc

SEQ ID NO: 3096340 - DNA, 25 bp, Homo sapien
ttttaagaaagtggctcactcctcc

SEQ ID NO: 3096341 - DNA, 25 bp, Homo sapien
ctcctttatgagcagtggttttcag

SEQ ID NO: 3096342 - DNA, 25 bp, Homo sapien
cagcccctaatagggcatttggcaa

SEQ ID NO: 3096343 - DNA, 25 bp, Homo sapien
cagtgaaaccctgtctctaccaaaa

SEQ ID NO: 3096344 - DNA, 25 bp, Homo sapien
gacccacccagccaacacagtgaaa

SEQ ID NO: 3096345 - DNA, 25 bp, Homo sapien
accaaaaaatacaaaacatagccag

SEQ ID NO: 3096346 - DNA, 25 bp, Homo sapien
gtgtggtggcgtgagcctgtagtcc

SEQ ID NO: 3096347 - DNA, 25 bp, Homo sapien
tggagccccagccaaagaacatttc

SEQ ID NO: 3096348 - DNA, 25 bp, Homo sapien
tagtgtcagaaatagctgcgctgct

SEQ ID NO: 3096349 - DNA, 25 bp, Homo sapien
tgtgagtctcaaaaccggcagattt

SEQ ID NO: 3096350 - DNA, 25 bp, Homo sapien
tgttgcttgggacactacccgtcat

SEQ ID NO: 3096351 - DNA, 25 bp, Homo sapien
taaagctgtgaatcaagccaggtcc

SEQ ID NO: 3096352 - DNA, 25 bp, Homo sapien
acacgaatgagcctgtctagggaca

SEQ ID NO: 3096353 - DNA, 25 bp, Homo sapien
tatatcccgaggttttgatgtgccc

SEQ ID NO: 3096354 - DNA, 25 bp, Homo sapien
ctctcttgggaggttgcactgtgtc

SEQ ID NO: 3096355 - DNA, 25 bp, Homo sapien
ccctggacagctctaggacctgggt

SEQ ID NO: 3096356 - DNA, 25 bp, Homo sapien
gaacagctaagcgaccaagtgccaa

SEQ ID NO: 3096357 - DNA, 25 bp, Homo sapien
caagagatggcagttagggacacct

SEQ ID NO: 3096358 - DNA, 25 bp, Homo sapien
ccctctaagagtggcaggataccca

SEQ ID NO: 3096359 - DNA, 25 bp, Homo sapien
ttttaatgtttcctcactgttttga

SEQ ID NO: 3096360 - DNA, 25 bp, Homo sapien
tttaatgtttcctcactgttttgac

SEQ ID NO: 3096361 - DNA, 25 bp, Homo sapien
ttaatgtttcctcactgttttgaca

SEQ ID NO: 3096362 - DNA, 25 bp, Homo sapien
ccctcactggctacatggagacagg

SEQ ID NO: 3096363 - DNA, 25 bp, Homo sapien
ctaagctattggaaacaggagcacc

SEQ ID NO: 3096364 - DNA, 25 bp, Homo sapien
caaccctggcctcaaaagtcggtgg

SEQ ID NO: 3096365 - DNA, 25 bp, Homo sapien
aaataaccggcagtcaacctcaggg

SEQ ID NO: 3096366 - DNA, 25 bp, Homo sapien
cagtccgctaatcgccactgtgaat

SEQ ID NO: 3096367 - DNA, 25 bp, Homo sapien
aagcccctagggactgagcgagtgc

SEQ ID NO: 3096368 - DNA, 25 bp, Homo sapien
tgaggcagacctattaacaccatcc

SEQ ID NO: 3096369 - DNA, 25 bp, Homo sapien
agctggtgtctttgccacggatgtc

SEQ ID NO: 3096370 - DNA, 25 bp, Homo sapien
tgttctcttcccctggaaagggctg

SEQ ID NO: 3096371 - DNA, 25 bp, Homo sapien
tttagtgcacatgctcgcagctggc

SEQ ID NO: 3096372 - DNA, 25 bp, Homo sapien
catgatgaagtcaggcagccagtcg

SEQ ID NO: 3096373 - DNA, 25 bp, Homo sapien
aaatgggagccgagagtccttagcc

SEQ ID NO: 3096374 - DNA, 25 bp, Homo sapien
aggagaactccttgtctggctgtct

SEQ ID NO: 3096375 - DNA, 25 bp, Homo sapien
ggtgtggctgcccatgctgcgggct

SEQ ID NO: 3096376 - DNA, 25 bp, Homo sapien
gtcttgagacagcagcccgggccct

SEQ ID NO: 3096377 - DNA, 25 bp, Homo sapien
cccggaaggcagggctgcgctcctc

SEQ ID NO: 3096378 - DNA, 25 bp, Homo sapien
ccagcggcgccctcatcgccatggt

SEQ ID NO: 3096379 - DNA, 25 bp, Homo sapien
agcggcgccctcatcgccatggtaa

SEQ ID NO: 3096380 - DNA, 25 bp, Homo sapien
ctgggtgatggtgccagcggcgccc

SEQ ID NO: 3096381 - DNA, 25 bp, Homo sapien
gggtgatggtgccagcggcgccctc

SEQ ID NO: 3096382 - DNA, 25 bp, Homo sapien
tgcttcagcccgtacgtggccttgg

SEQ ID NO: 3096383 - DNA, 25 bp, Homo sapien
gacatgatggactccgcatgcttca

SEQ ID NO: 3096384 - DNA, 25 bp, Homo sapien
tccatgatgctgaggacgtcaccca

SEQ ID NO: 3096385 - DNA, 25 bp, Homo sapien
ccttgggcacgacaggcagatctgt

SEQ ID NO: 3096386 - DNA, 25 bp, Homo sapien
tccgacggggcactgcctcctccgt

SEQ ID NO: 3096387 - DNA, 25 bp, Homo sapien
gccccattccgacggggcactgcct

SEQ ID NO: 3096388 - DNA, 25 bp, Homo sapien
ctccgtgcccgcctcctcatcgccg

SEQ ID NO: 3096389 - DNA, 25 bp, Homo sapien
ggaatgtggacccgcggccccattc

SEQ ID NO: 3096390 - DNA, 25 bp, Homo sapien
gggctggatgacaggctcttgggca

SEQ ID NO: 3096391 - DNA, 25 bp, Homo sapien
ggctggatgacaggctcttgggcag

SEQ ID NO: 3096392 - DNA, 25 bp, Homo sapien
cttgggcagcttactggtgcccttc

SEQ ID NO: 3096393 - DNA, 25 bp, Homo sapien
agaagagggctgttcgtccaaggac

SEQ ID NO: 3096394 - DNA, 25 bp, Homo sapien
ggtcaccgactgtgaccgcttgctg

SEQ ID NO: 3096395 - DNA, 25 bp, Homo sapien
cctggacaggagactgcgtttggaa

SEQ ID NO: 3096396 - DNA, 25 bp, Homo sapien
ttcttgacaaacagggccgagtccc

SEQ ID NO: 3096397 - DNA, 25 bp, Homo sapien
gcgctgatcatctcggccgtgaggt

SEQ ID NO: 3096398 - DNA, 25 bp, Homo sapien
ccggcccggccaacgtgcatggtgt

SEQ ID NO: 3096399 - DNA, 25 bp, Homo sapien
gacaccagttgcttgaggattggca

SEQ ID NO: 3096400 - DNA, 25 bp, Homo sapien
aacggcgcttggagtgcaccgagct

SEQ ID NO: 3096401 - DNA, 25 bp, Homo sapien
gggacgcaatgaggagatcataagg

SEQ ID NO: 3096402 - DNA, 25 bp, Homo sapien
tgggcagagggggacgcaatgagga

SEQ ID NO: 3096403 - DNA, 25 bp, Homo sapien
cctcccgaggtagccggcaggtctg

SEQ ID NO: 3096404 - DNA, 25 bp, Homo sapien
ggtctggggtcagatctgaagtcca

SEQ ID NO: 3096405 - DNA, 25 bp, Homo sapien
tcctgagtcgtatcttttgtaataa

SEQ ID NO: 3096406 - DNA, 25 bp, Homo sapien
gtttgctgactcctgaatatcatat

SEQ ID NO: 3096407 - DNA, 25 bp, Homo sapien
tgggctcctaggcaaaactctgaag

SEQ ID NO: 3096408 - DNA, 25 bp, Homo sapien
tatcatatatgaccctcttggccag

SEQ ID NO: 3096409 - DNA, 25 bp, Homo sapien
ggctcagcgtccaggcgtgcgccac

SEQ ID NO: 3096410 - DNA, 25 bp, Homo sapien
gattcttgtggctcagcgtccaggc

SEQ ID NO: 3096411 - DNA, 25 bp, Homo sapien
tggctcagcgtccaggcgtgcgcca

SEQ ID NO: 3096412 - DNA, 25 bp, Homo sapien
tcttgtggctcagcgtccaggcgtg

SEQ ID NO: 3096413 - DNA, 25 bp, Homo sapien
caatcccatggagttatcactatca

SEQ ID NO: 3096414 - DNA, 25 bp, Homo sapien
cagctcacagataagagcaccgaga

SEQ ID NO: 3096415 - DNA, 25 bp, Homo sapien
agtgctgggacgataaactttgtag

SEQ ID NO: 3096416 - DNA, 25 bp, Homo sapien
tagtcatacacggtcccaagcattt

SEQ ID NO: 3096417 - DNA, 25 bp, Homo sapien
gcaacttcacttgattacagggccc

SEQ ID NO: 3096418 - DNA, 25 bp, Homo sapien
tctaggagtggtgctactactgggc

SEQ ID NO: 3096419 - DNA, 25 bp, Homo sapien
ccaagactagggagtgaccggaagc

SEQ ID NO: 3096420 - DNA, 25 bp, Homo sapien
gaagcaacaacggaggagtcaagac

SEQ ID NO: 3096421 - DNA, 25 bp, Homo sapien
tacgagagcgagatgtgtacacgcc

SEQ ID NO: 3096422 - DNA, 25 bp, Homo sapien
ccccaagcgggcgattaaatcatta

SEQ ID NO: 3096423 - DNA, 25 bp, Homo sapien
tctgcccgtacaggcggagaattcg

SEQ ID NO: 3096424 - DNA, 25 bp, Homo sapien
tattcatggagaactccgggcgcac

SEQ ID NO: 3096425 - DNA, 25 bp, Homo sapien
gcccctgtcagcgccggcgtttgtt

SEQ ID NO: 3096426 - DNA, 25 bp, Homo sapien
ctcggtccccggagacccgagctct

SEQ ID NO: 3096427 - DNA, 25 bp, Homo sapien
gccggcgtttgtttccctctggctc

SEQ ID NO: 3096428 - DNA, 25 bp, Homo sapien
tgtccccttcgtgggctccgcgcgg

SEQ ID NO: 3096429 - DNA, 25 bp, Homo sapien
cgtgggcagcaacagaaggccttga

SEQ ID NO: 3096430 - DNA, 25 bp, Homo sapien
cagtttgacaggacacgggacttct

SEQ ID NO: 3096431 - DNA, 25 bp, Homo sapien
cctggatagggccatacagaggcac

SEQ ID NO: 3096432 - DNA, 25 bp, Homo sapien
cacctttagaagcactgcccaggga

SEQ ID NO: 3096433 - DNA, 25 bp, Homo sapien
aacactgggagattgcttagggcac

SEQ ID NO: 3096434 - DNA, 25 bp, Homo sapien
tgcaaactctctggagccctaggag

SEQ ID NO: 3096435 - DNA, 25 bp, Homo sapien
tctttctacaaagggcagggcccac

SEQ ID NO: 3096436 - DNA, 25 bp, Homo sapien
aaatctagagttccacagctgcagg

SEQ ID NO: 3096437 - DNA, 25 bp, Homo sapien
gagaaaccgctttttggacactgga

SEQ ID NO: 3096438 - DNA, 25 bp, Homo sapien
cccgagagcaccttacttcctggag

SEQ ID NO: 3096439 - DNA, 25 bp, Homo sapien
aaaaactcatggctgggtgtgcccg

SEQ ID NO: 3096440 - DNA, 25 bp, Homo sapien
gaaaagaaagctgtgcggcacgatc

SEQ ID NO: 3096441 - DNA, 25 bp, Homo sapien
tgggcagggccagcagcgcctgtac

SEQ ID NO: 3096442 - DNA, 25 bp, Homo sapien
cgggaagatcctggccactggatgt

SEQ ID NO: 3096443 - DNA, 25 bp, Homo sapien
gctttttgcagaacactccttggag

SEQ ID NO: 3096444 - DNA, 25 bp, Homo sapien
taaaccctggcatccgtaagtacca

SEQ ID NO: 3096445 - DNA, 25 bp, Homo sapien
taagtaccaagtggacgggaagatc

SEQ ID NO: 3096446 - DNA, 25 bp, Homo sapien
ttgtcacttggtcccatctgacctg

SEQ ID NO: 3096447 - DNA, 25 bp, Homo sapien
tccctcccatcagctattcttgtca

SEQ ID NO: 3096448 - DNA, 25 bp, Homo sapien
caattcaaatgctgggtccactttg

SEQ ID NO: 3096449 - DNA, 25 bp, Homo sapien
cccctgctgggcgtgcaattcaaat

SEQ ID NO: 3096450 - DNA, 25 bp, Homo sapien
tctggagaggatccctagaccctgt

SEQ ID NO: 3096451 - DNA, 25 bp, Homo sapien
tctatccagtggagagtgacgtgtc

SEQ ID NO: 3096452 - DNA, 25 bp, Homo sapien
tgcaggaacaaggaaggcgctaagc

SEQ ID NO: 3096453 - DNA, 25 bp, Homo sapien
taggagggcccagatgagtttgttc

SEQ ID NO: 3096454 - DNA, 25 bp, Homo sapien
catcctctcacggttttctccctcc

SEQ ID NO: 3096455 - DNA, 25 bp, Homo sapien
gccacttccccagctccgtgtaatt

SEQ ID NO: 3096456 - DNA, 25 bp, Homo sapien
ccgtgtaattcccaagggagcagtg

SEQ ID NO: 3096457 - DNA, 25 bp, Homo sapien
ccactccgtgtccatagcagtgaca

SEQ ID NO: 3096458 - DNA, 25 bp, Homo sapien
caggaggtgaaaagttgacttggtt

SEQ ID NO: 3096459 - DNA, 25 bp, Homo sapien
tcaggaggtgaaaagttgacttggt

SEQ ID NO: 3096460 - DNA, 25 bp, Homo sapien
aacaaatgatgaaaatcctgctatg

SEQ ID NO: 3096461 - DNA, 25 bp, Homo sapien
atcctgctatgggagcccgggagcc

SEQ ID NO: 3096462 - DNA, 25 bp, Homo sapien
atgaaaatcctgctatgggagcccg

SEQ ID NO: 3096463 - DNA, 25 bp, Homo sapien
caaatgatgaaaatcctgctatggg

SEQ ID NO: 3096464 - DNA, 25 bp, Homo sapien
tccgtgtagctgtaggcctgtgccc

SEQ ID NO: 3096465 - DNA, 25 bp, Homo sapien
ggccttctggtggtttgagtcgacc

SEQ ID NO: 3096466 - DNA, 25 bp, Homo sapien
tgagtcgacctcgtactcgctgtca

SEQ ID NO: 3096467 - DNA, 25 bp, Homo sapien
gctgtcgccgccacgagttgtagta

SEQ ID NO: 3096468 - DNA, 25 bp, Homo sapien
taaaagccagttagcccaatccaga

SEQ ID NO: 3096469 - DNA, 25 bp, Homo sapien
gagaagtgctccgattttagcgcac

SEQ ID NO: 3096470 - DNA, 25 bp, Homo sapien
gagctaaaaacatggtgcacccctt

SEQ ID NO: 3096471 - DNA, 25 bp, Homo sapien
tttagcgcacagcacacgatcagtg

SEQ ID NO: 3096472 - DNA, 25 bp, Homo sapien
caggctgcagtgttaaagttccatc

SEQ ID NO: 3096473 - DNA, 25 bp, Homo sapien
catatcacaggaaaacgactgggca

SEQ ID NO: 3096474 - DNA, 25 bp, Homo sapien
tgaaaatgaagttgccgtccagcca

SEQ ID NO: 3096475 - DNA, 25 bp, Homo sapien
tcaaacaggcctttaaatctccagt

SEQ ID NO: 3096476 - DNA, 25 bp, Homo sapien
tgccaagcccatcagtaaccctgga

SEQ ID NO: 3096477 - DNA, 25 bp, Homo sapien
aaactcataacttggatcacgtggg

SEQ ID NO: 3096478 - DNA, 25 bp, Homo sapien
gctagggagttaggtccagccttct

SEQ ID NO: 3096479 - DNA, 25 bp, Homo sapien
caataagttcctgggtaagccatgc

SEQ ID NO: 3096480 - DNA, 25 bp, Homo sapien
acatcctcatccgagtagtgcaggc

SEQ ID NO: 3096481 - DNA, 25 bp, Homo sapien
ctgcagggatgaggtcgttgtattt

SEQ ID NO: 3096482 - DNA, 25 bp, Homo sapien
gtgacatcctcatccgagtagtgca

SEQ ID NO: 3096483 - DNA, 25 bp, Homo sapien
tctgcagggatgaggtcgttgtatt

SEQ ID NO: 3096484 - DNA, 25 bp, Homo sapien
caggacaaggtatggccaggtgggc

SEQ ID NO: 3096485 - DNA, 25 bp, Homo sapien
ggcactccctgctctatggccttcc

SEQ ID NO: 3096486 - DNA, 25 bp, Homo sapien
ccaggacaaggtatggccaggtggg

SEQ ID NO: 3096487 - DNA, 25 bp, Homo sapien
cactccctgctctatggccttcccc

SEQ ID NO: 3096488 - DNA, 25 bp, Homo sapien
ccaacccacgcagagggcccagtac

SEQ ID NO: 3096489 - DNA, 25 bp, Homo sapien
ccccaacccacgcagagggcccagt

SEQ ID NO: 3096490 - DNA, 25 bp, Homo sapien
tggcccccaacccacgcagagggcc

SEQ ID NO: 3096491 - DNA, 25 bp, Homo sapien
gggcctggcccccaacccacgcaga

SEQ ID NO: 3096492 - DNA, 25 bp, Homo sapien
gggaagctgctttcatccaagctca

SEQ ID NO: 3096493 - DNA, 25 bp, Homo sapien
aggccgttctttcggcagaaagagt

SEQ ID NO: 3096494 - DNA, 25 bp, Homo sapien
aaagagttcttgacggagagccgcc

SEQ ID NO: 3096495 - DNA, 25 bp, Homo sapien
agctcatcatctcgctgtggcctag

SEQ ID NO: 3096496 - DNA, 25 bp, Homo sapien
tgatgagcacgaagaccagaagcag

SEQ ID NO: 3096497 - DNA, 25 bp, Homo sapien
ctctggccccggatgatgagcacga

SEQ ID NO: 3096498 - DNA, 25 bp, Homo sapien
atgaagatgaggccgaccagggcaa

SEQ ID NO: 3096499 - DNA, 25 bp, Homo sapien
ttcttggcgtacttcttgctctggc

SEQ ID NO: 3096500 - DNA, 25 bp, Homo sapien
agaaccaccactcctcatagaaggg

SEQ ID NO: 3096501 - DNA, 25 bp, Homo sapien
caggactacccatgctgtgtggaca

SEQ ID NO: 3096502 - DNA, 25 bp, Homo sapien
ggctctctgtttcggccttgaagca

SEQ ID NO: 3096503 - DNA, 25 bp, Homo sapien
gggtctttaggatgtctcttccagg

SEQ ID NO: 3096504 - DNA, 25 bp, Homo sapien
tgtgtggacaagagatgggctctct

SEQ ID NO: 3096505 - DNA, 25 bp, Homo sapien
tgccgaaaccatagtcgttgaccgc

SEQ ID NO: 3096506 - DNA, 25 bp, Homo sapien
ggctgctgggggtgccgaaaccata

SEQ ID NO: 3096507 - DNA, 25 bp, Homo sapien
gggtgccgaaaccatagtcgttgac

SEQ ID NO: 3096508 - DNA, 25 bp, Homo sapien
ctgggggtgccgaaaccatagtcgt

SEQ ID NO: 3096509 - DNA, 25 bp, Homo sapien
tgctgaacgtgtaggagctcacctc

SEQ ID NO: 3096510 - DNA, 25 bp, Homo sapien
agtcatagctcacgcccggcttcag

SEQ ID NO: 3096511 - DNA, 25 bp, Homo sapien
gatgacccggaagtcatagctcacg

SEQ ID NO: 3096512 - DNA, 25 bp, Homo sapien
ggatgtccatgctgaacgtgtagga

SEQ ID NO: 3096513 - DNA, 25 bp, Homo sapien
caatgacagaaccaccgtccagaga

SEQ ID NO: 3096514 - DNA, 25 bp, Homo sapien
taaaagatacgtactgtgcagaaag

SEQ ID NO: 3096515 - DNA, 25 bp, Homo sapien
aaagacaactttcgggccaagcacg

SEQ ID NO: 3096516 - DNA, 25 bp, Homo sapien
gcaggccttggtcctcccttgaagt

SEQ ID NO: 3096517 - DNA, 25 bp, Homo sapien
tgagcaatcctcaacccaagctggt

SEQ ID NO: 3096518 - DNA, 25 bp, Homo sapien
taacttggaaacctagcaacgcagg

SEQ ID NO: 3096519 - DNA, 25 bp, Homo sapien
cacctaaccgcggatccatgggata

SEQ ID NO: 3096520 - DNA, 25 bp, Homo sapien
tatagcagccactgagacagccatg

SEQ ID NO: 3096521 - DNA, 25 bp, Homo sapien
aaggtctggcctcgatgacgtagcg

SEQ ID NO: 3096522 - DNA, 25 bp, Homo sapien
tccgctggaccagtgaatggcgatg

SEQ ID NO: 3096523 - DNA, 25 bp, Homo sapien
gtgatgggccctttgcccgggtctc

SEQ ID NO: 3096524 - DNA, 25 bp, Homo sapien
agagctgtaccgcacgatgatgggc

SEQ ID NO: 3096525 - DNA, 25 bp, Homo sapien
cttggctctgatgcggaacctgtag

SEQ ID NO: 3096526 - DNA, 25 bp, Homo sapien
cccgtggtgacgttggcttcgatct

SEQ ID NO: 3096527 - DNA, 25 bp, Homo sapien
tgatgcggaacctgtaggtcacccc

SEQ ID NO: 3096528 - DNA, 25 bp, Homo sapien
ctccggcccgtaggtgaaggtcttg

SEQ ID NO: 3096529 - DNA, 25 bp, Homo sapien
cattcactgaggttgtggtcagctc

SEQ ID NO: 3096530 - DNA, 25 bp, Homo sapien
caggacacattcactgaggttgtgg

SEQ ID NO: 3096531 - DNA, 25 bp, Homo sapien
tcactgaggttgtggtcagctcact

SEQ ID NO: 3096532 - DNA, 25 bp, Homo sapien
cattggggaactgcggggcttccca

SEQ ID NO: 3096533 - DNA, 25 bp, Homo sapien
tgttctcagccaggaaaagcgtctt

SEQ ID NO: 3096534 - DNA, 25 bp, Homo sapien
gccgtgtagccagtcaagttcttga

SEQ ID NO: 3096535 - DNA, 25 bp, Homo sapien
tcttgagcttcacgctgttctcagc

SEQ ID NO: 3096536 - DNA, 25 bp, Homo sapien
ttgaaggcggccacgctgaccatgt

SEQ ID NO: 3096537 - DNA, 25 bp, Homo sapien
gcgctggcacatcagcacttagtac

SEQ ID NO: 3096538 - DNA, 25 bp, Homo sapien
catagcgctggcacatcagcactta

SEQ ID NO: 3096539 - DNA, 25 bp, Homo sapien
tagcgctggcacatcagcacttagt

SEQ ID NO: 3096540 - DNA, 25 bp, Homo sapien
gctggcacatcagcacttagtacag

SEQ ID NO: 3096541 - DNA, 25 bp, Homo sapien
gaccacgttacgaggtgctgctgtg

SEQ ID NO: 3096542 - DNA, 25 bp, Homo sapien
agctgtgtggccgtggcgccgtgga

SEQ ID NO: 3096543 - DNA, 25 bp, Homo sapien
ggctcccaagtcacgtccagctgtg

SEQ ID NO: 3096544 - DNA, 25 bp, Homo sapien
ggtggctcccaagtcacgtccagct

SEQ ID NO: 3096545 - DNA, 25 bp, Homo sapien
tgtacacgctcatccgtatctcgta

SEQ ID NO: 3096546 - DNA, 25 bp, Homo sapien
ccgtatctcgtaccgcctgtgcttg

SEQ ID NO: 3096547 - DNA, 25 bp, Homo sapien
cacagcgttgtacacgctcatccgt

SEQ ID NO: 3096548 - DNA, 25 bp, Homo sapien
caacaaagacctcctgcggggggct

SEQ ID NO: 3096549 - DNA, 25 bp, Homo sapien
ccagctcgtactgcgtgaggctggg

SEQ ID NO: 3096550 - DNA, 25 bp, Homo sapien
gccggctcaggttccgcatggagta

SEQ ID NO: 3096551 - DNA, 25 bp, Homo sapien
ctcaggttccgcatggagtacatgg

SEQ ID NO: 3096552 - DNA, 25 bp, Homo sapien
ctcgtactgcgtgaggctgggccgg

SEQ ID NO: 3096553 - DNA, 25 bp, Homo sapien
gcccaggaggatgccattgatcttg

SEQ ID NO: 3096554 - DNA, 25 bp, Homo sapien
gttgatgcctcgaagcgtgaagccc

SEQ ID NO: 3096555 - DNA, 25 bp, Homo sapien
agcagctcccggtatcggatccgga

SEQ ID NO: 3096556 - DNA, 25 bp, Homo sapien
tgtggcccctgggttgttgatgcct

SEQ ID NO: 3096557 - DNA, 25 bp, Homo sapien
ggtgtggggcgtcacggagaggatg

SEQ ID NO: 3096558 - DNA, 25 bp, Homo sapien
gggcgtcacggagaggatggtgggt

SEQ ID NO: 3096559 - DNA, 25 bp, Homo sapien
ctgccatcggattagcacggaggtg

SEQ ID NO: 3096560 - DNA, 25 bp, Homo sapien
tcacggagaggatggtgggtgcttc

SEQ ID NO: 3096561 - DNA, 25 bp, Homo sapien
tgaactcgctgtcgccaatgtcatt

SEQ ID NO: 3096562 - DNA, 25 bp, Homo sapien
aatgtcattggtcgccttcactcgg

SEQ ID NO: 3096563 - DNA, 25 bp, Homo sapien
cctgcagggtggtcagtgactccga

SEQ ID NO: 3096564 - DNA, 25 bp, Homo sapien
tgactccgactcctcgctgaactcg

SEQ ID NO: 3096565 - DNA, 25 bp, Homo sapien
cttgtaggacgtgaagggcttcagc

SEQ ID NO: 3096566 - DNA, 25 bp, Homo sapien
ggcagctcgcgggtctggatggtgt

SEQ ID NO: 3096567 - DNA, 25 bp, Homo sapien
agcacgctgcgtgctctcacatcct

SEQ ID NO: 3096568 - DNA, 25 bp, Homo sapien
tctggatggtgtagtagcgcacagg

SEQ ID NO: 3096569 - DNA, 25 bp, Homo sapien
agcgcacaggggagagcccgtcgct

SEQ ID NO: 3096570 - DNA, 25 bp, Homo sapien
cccttgcgggtctgggccgtgatgc

SEQ ID NO: 3096571 - DNA, 25 bp, Homo sapien
ttctcggtggtcaccaccaaggcct

SEQ ID NO: 3096572 - DNA, 25 bp, Homo sapien
gatgcggaacaggtagacagactct

SEQ ID NO: 3096573 - DNA, 25 bp, Homo sapien
cttgaggcccgtggctgtgtactgc

SEQ ID NO: 3096574 - DNA, 25 bp, Homo sapien
aagaatgatgccattgggggcggca

SEQ ID NO: 3096575 - DNA, 25 bp, Homo sapien
gcacagacgtggtccgcacctctgg

SEQ ID NO: 3096576 - DNA, 25 bp, Homo sapien
acgtggtccgcacctctgggaacag

SEQ ID NO: 3096577 - DNA, 25 bp, Homo sapien
gctgccagatcagccgcacagacgt

SEQ ID NO: 3096578 - DNA, 25 bp, Homo sapien
atccagcgtccgctccaggatggga

SEQ ID NO: 3096579 - DNA, 25 bp, Homo sapien
gtatttgcccaagccggtgagctgg

SEQ ID NO: 3096580 - DNA, 25 bp, Homo sapien
ctgggcactgcgagacgagttgcct

SEQ ID NO: 3096581 - DNA, 25 bp, Homo sapien
ggacttcatagagcacgtatttgcc

SEQ ID NO: 3096582 - DNA, 25 bp, Homo sapien
tggccagtgcagacacattggtggg

SEQ ID NO: 3096583 - DNA, 25 bp, Homo sapien
cttatagcccagcacgagcccgttg

SEQ ID NO: 3096584 - DNA, 25 bp, Homo sapien
cgagcccgttgcgatcagcctcggg

SEQ ID NO: 3096585 - DNA, 25 bp, Homo sapien
tccagcgcaccagcatgctgctgga

SEQ ID NO: 3096586 - DNA, 25 bp, Homo sapien
ccgtctgaccggctgtacttgatct

SEQ ID NO: 3096587 - DNA, 25 bp, Homo sapien
cacggactcagggttcccattgtat

SEQ ID NO: 3096588 - DNA, 25 bp, Homo sapien
tacttgatcttatagcccacggact

SEQ ID NO: 3096589 - DNA, 25 bp, Homo sapien
aaggcctggacctggacgcggtact

SEQ ID NO: 3096590 - DNA, 25 bp, Homo sapien
actgtgtttctgatgggctcttatc

SEQ ID NO: 3096591 - DNA, 25 bp, Homo sapien
ccgagtgtggcttaggttgtgtgac

SEQ ID NO: 3096592 - DNA, 25 bp, Homo sapien
gagtgtggcttaggttgtgtgactg

SEQ ID NO: 3096593 - DNA, 25 bp, Homo sapien
tgtgtttctgatgggctcttatctt

SEQ ID NO: 3096594 - DNA, 25 bp, Homo sapien
taagaattcttgtttgctccacacg

SEQ ID NO: 3096595 - DNA, 25 bp, Homo sapien
caatgagtgagatcttacgtggaaa

SEQ ID NO: 3096596 - DNA, 25 bp, Homo sapien
caagagggctcctgctatgctagtg

SEQ ID NO: 3096597 - DNA, 25 bp, Homo sapien
tgggaaacgatgttccagagggcct

SEQ ID NO: 3096598 - DNA, 25 bp, Homo sapien
tctagaaggctgactgggggggctg

SEQ ID NO: 3096599 - DNA, 25 bp, Homo sapien
ctgtgcgcagagacacattggctgg

SEQ ID NO: 3096600 - DNA, 25 bp, Homo sapien
gatctttctagaaggctgactgggg

SEQ ID NO: 3096601 - DNA, 25 bp, Homo sapien
gatgttcacctggcgcatgcggaag

SEQ ID NO: 3096602 - DNA, 25 bp, Homo sapien
catcgggctcattggagagctggtg

SEQ ID NO: 3096603 - DNA, 25 bp, Homo sapien
gagctggtggatcagcaaccactcc

SEQ ID NO: 3096604 - DNA, 25 bp, Homo sapien
tgtagcaggtgaaggggttgaggtc

SEQ ID NO: 3096605 - DNA, 25 bp, Homo sapien
gcacctccatggagcgggcatcggg

SEQ ID NO: 3096606 - DNA, 25 bp, Homo sapien
gagcgggggccgatgttggaaatgc

SEQ ID NO: 3096607 - DNA, 25 bp, Homo sapien
tcccatcgtagcctggcctgaactg

SEQ ID NO: 3096608 - DNA, 25 bp, Homo sapien
ggttttcccatcgtagcctggcctg

SEQ ID NO: 3096609 - DNA, 25 bp, Homo sapien
ggaggttttcccatcgtagcctggc

SEQ ID NO: 3096610 - DNA, 25 bp, Homo sapien
gaggcggacacttggccctggccct

SEQ ID NO: 3096611 - DNA, 25 bp, Homo sapien
tcatggcggccacctcgatggtgta

SEQ ID NO: 3096612 - DNA, 25 bp, Homo sapien
cacacgggtgttggttcgattgtac

SEQ ID NO: 3096613 - DNA, 25 bp, Homo sapien
tgaggcccgtgacacggtactccag

SEQ ID NO: 3096614 - DNA, 25 bp, Homo sapien
gaccttcagcgatgtgtccaggatc

SEQ ID NO: 3096615 - DNA, 25 bp, Homo sapien
ttcagcgatgtgtccaggatctcac

SEQ ID NO: 3096616 - DNA, 25 bp, Homo sapien
ttctctcccggctcttgccagctga

SEQ ID NO: 3096617 - DNA, 25 bp, Homo sapien
agctgaccttcagcgatgtgtccag

SEQ ID NO: 3096618 - DNA, 25 bp, Homo sapien
tgctgtcttgaaagttaggccgggc

SEQ ID NO: 3096619 - DNA, 25 bp, Homo sapien
gtactcggtgaacttcttcaggcca

SEQ ID NO: 3096620 - DNA, 25 bp, Homo sapien
ttcaggccagacacgaagcccacgt

SEQ ID NO: 3096621 - DNA, 25 bp, Homo sapien
cacagcactgaggtgaagtactcgg

SEQ ID NO: 3096622 - DNA, 25 bp, Homo sapien
ggatgaactgatacaatgcctggaa

SEQ ID NO: 3096623 - DNA, 25 bp, Homo sapien
ttttaaatagagatctcatctatac

SEQ ID NO: 3096624 - DNA, 25 bp, Homo sapien
gatctcatctatactgtttctttcc

SEQ ID NO: 3096625 - DNA, 25 bp, Homo sapien
tcatggatgaactgatacaatgcct

SEQ ID NO: 3096626 - DNA, 25 bp, Homo sapien
tggaattggtggcttccgcgtgcac

SEQ ID NO: 3096627 - DNA, 25 bp, Homo sapien
cgttccaggtgaagcggatggtcgt

SEQ ID NO: 3096628 - DNA, 25 bp, Homo sapien
tccgcgtgcacattgcccggaggga

SEQ ID NO: 3096629 - DNA, 25 bp, Homo sapien
tagccctggttgatgccgttgatga

SEQ ID NO: 3096630 - DNA, 25 bp, Homo sapien
ctcgatctcgtagttggtccaaatg

SEQ ID NO: 3096631 - DNA, 25 bp, Homo sapien
cactcggtgactttactgctgtaga

SEQ ID NO: 3096632 - DNA, 25 bp, Homo sapien
aaatgatgagatcctccagcagcag

SEQ ID NO: 3096633 - DNA, 25 bp, Homo sapien
ggttgttcacatcagcatccgtgat

SEQ ID NO: 3096634 - DNA, 25 bp, Homo sapien
gaattccattctggtggctctcagg

SEQ ID NO: 3096635 - DNA, 25 bp, Homo sapien
tcatgatggactggttggttcgacc

SEQ ID NO: 3096636 - DNA, 25 bp, Homo sapien
tgatgatgtaacccttgagaattcc

SEQ ID NO: 3096637 - DNA, 25 bp, Homo sapien
gcggctgccactggatcatgatgga

SEQ ID NO: 3096638 - DNA, 25 bp, Homo sapien
cgtcgttgacggcacaaagacggaa

SEQ ID NO: 3096639 - DNA, 25 bp, Homo sapien
caggcccttgactgtcactgaggta

SEQ ID NO: 3096640 - DNA, 25 bp, Homo sapien
taggagcgtgcaggaaccaggccct

SEQ ID NO: 3096641 - DNA, 25 bp, Homo sapien
gacggcacaaagacggaactggtag

SEQ ID NO: 3096642 - DNA, 25 bp, Homo sapien
tggccactgggtgctcgggcgcgtg

SEQ ID NO: 3096643 - DNA, 25 bp, Homo sapien
atggctcgcctttccacggtgctga

SEQ ID NO: 3096644 - DNA, 25 bp, Homo sapien
gcttggtccacgtcaggttgatggc

SEQ ID NO: 3096645 - DNA, 25 bp, Homo sapien
catctccagaatgtagcggatcagg

SEQ ID NO: 3096646 - DNA, 25 bp, Homo sapien
gcaggtgtacgtgccgatgtctccc

SEQ ID NO: 3096647 - DNA, 25 bp, Homo sapien
gatgtgcagggagccgtttctgtcc

SEQ ID NO: 3096648 - DNA, 25 bp, Homo sapien
gatgtctcccgaccacgtctgtgag

SEQ ID NO: 3096649 - DNA, 25 bp, Homo sapien
gagagtcgttgcctcctgctgagat

SEQ ID NO: 3096650 - DNA, 25 bp, Homo sapien
gggggcttggtgatgcgggtccgag

SEQ ID NO: 3096651 - DNA, 25 bp, Homo sapien
ctgatggttactcgggggtcgtggg

SEQ ID NO: 3096652 - DNA, 25 bp, Homo sapien
tcgtgggtcactccgcacaccatgg

SEQ ID NO: 3096653 - DNA, 25 bp, Homo sapien
cccttgatgacactctgatcctggg

SEQ ID NO: 3096654 - DNA, 25 bp, Homo sapien
aacgactaggtctgctgaggcctca

SEQ ID NO: 3096655 - DNA, 25 bp, Homo sapien
catcgaccccccgagagttggtggc

SEQ ID NO: 3096656 - DNA, 25 bp, Homo sapien
tgtgaagcgaggcagctgcacagag

SEQ ID NO: 3096657 - DNA, 25 bp, Homo sapien
tgtaggtccccgcatcggagatgtg

SEQ ID NO: 3096658 - DNA, 25 bp, Homo sapien
ttctgccaagtgatagctggtcggg

SEQ ID NO: 3096659 - DNA, 25 bp, Homo sapien
atgccatcgatcaccgtgctgtcca

SEQ ID NO: 3096660 - DNA, 25 bp, Homo sapien
agcaccactgacatgccatcgatca

SEQ ID NO: 3096661 - DNA, 25 bp, Homo sapien
gaggtctcacatgctagcaccactg

SEQ ID NO: 3096662 - DNA, 25 bp, Homo sapien
acagccaggtaggtggaagtttgca

SEQ ID NO: 3096663 - DNA, 25 bp, Homo sapien
cctcgccggctgcattgcgggcgaa

SEQ ID NO: 3096664 - DNA, 25 bp, Homo sapien
taggtggaagtttgcacctcgccgg

SEQ ID NO: 3096665 - DNA, 25 bp, Homo sapien
gaagtttgcacctcgccggctgcat

SEQ ID NO: 3096666 - DNA, 25 bp, Homo sapien
ggcaccaggccgctgatctgcaggc

SEQ ID NO: 3096667 - DNA, 25 bp, Homo sapien
ctgcgtccttgtaccaggtgatgga

SEQ ID NO: 3096668 - DNA, 25 bp, Homo sapien
ggtatcatcgggcaccaggccgctg

SEQ ID NO: 3096669 - DNA, 25 bp, Homo sapien
tgccggaagcgggtcaacttctcca

SEQ ID NO: 3096670 - DNA, 25 bp, Homo sapien
ctgacaggggatgtccaccaccttc

SEQ ID NO: 3096671 - DNA, 25 bp, Homo sapien
cctgacaggggatgtccaccacctt

SEQ ID NO: 3096672 - DNA, 25 bp, Homo sapien
tgacaggggatgtccaccaccttct

SEQ ID NO: 3096673 - DNA, 25 bp, Homo sapien
ggctccttgacaaactgaggcggtt

SEQ ID NO: 3096674 - DNA, 25 bp, Homo sapien
tccgcagtgatgtgtctttctggct

SEQ ID NO: 3096675 - DNA, 25 bp, Homo sapien
ctccgcagtgatgtgtctttctggc

SEQ ID NO: 3096676 - DNA, 25 bp, Homo sapien
tctttctggctccttgacaaactga

SEQ ID NO: 3096677 - DNA, 25 bp, Homo sapien
ccagcactgagaggtaggcgccccg

SEQ ID NO: 3096678 - DNA, 25 bp, Homo sapien
acactcgtagtagccggcgtcactg

SEQ ID NO: 3096679 - DNA, 25 bp, Homo sapien
caaatgatatgtagcttgatcaggg

SEQ ID NO: 3096680 - DNA, 25 bp, Homo sapien
ggttgtggtcactgatgccgcccga

SEQ ID NO: 3096681 - DNA, 25 bp, Homo sapien
ccacgctggtgtttttaggtgggat

SEQ ID NO: 3096682 - DNA, 25 bp, Homo sapien
aggtaacctctgaggtgccggccac

SEQ ID NO: 3096683 - DNA, 25 bp, Homo sapien
caccacgctggtgtttttaggtggg

SEQ ID NO: 3096684 - DNA, 25 bp, Homo sapien
cacacactccaaggtaacctctgag

SEQ ID NO: 3096685 - DNA, 25 bp, Homo sapien
cacatagtagcgacctgcgtcaggg

SEQ ID NO: 3096686 - DNA, 25 bp, Homo sapien
ctggctggtcttgttatccccgttt

SEQ ID NO: 3096687 - DNA, 25 bp, Homo sapien
tctccacggtgagcgtgatgggctg

SEQ ID NO: 3096688 - DNA, 25 bp, Homo sapien
ccgtttttgtcgttaacagcctgca

SEQ ID NO: 3096689 - DNA, 25 bp, Homo sapien
gattttaatgcgatgggcctgagac

SEQ ID NO: 3096690 - DNA, 25 bp, Homo sapien
taaacaggctctcaaataaacatcc

SEQ ID NO: 3096691 - DNA, 25 bp, Homo sapien
gctgtgctggttttcgccccactct

SEQ ID NO: 3096692 - DNA, 25 bp, Homo sapien
tcccaatgacaaacaaagccattag

SEQ ID NO: 3096693 - DNA, 25 bp, Homo sapien
tgctgatgatggcaaaactcctgcc

SEQ ID NO: 3096694 - DNA, 25 bp, Homo sapien
cctctcatcatggtaggactttaaa

SEQ ID NO: 3096695 - DNA, 25 bp, Homo sapien
gaagggatgtgcaccgttgctaagc

SEQ ID NO: 3096696 - DNA, 25 bp, Homo sapien
ttgctaagcttggaccatgagcgcc

SEQ ID NO: 3096697 - DNA, 25 bp, Homo sapien
gatgacagctgcttctccgtgggag

SEQ ID NO: 3096698 - DNA, 25 bp, Homo sapien
atcttgcggccgtcccggaaccagg

SEQ ID NO: 3096699 - DNA, 25 bp, Homo sapien
gatgcgcggggcacggatgacagct

SEQ ID NO: 3096700 - DNA, 25 bp, Homo sapien
ctgcttctccgtgggagacgctctg

SEQ ID NO: 3096701 - DNA, 25 bp, Homo sapien
tgaggaagctcaatctagccgaagc

SEQ ID NO: 3096702 - DNA, 25 bp, Homo sapien
tgagactaggtcatcgaaacgatac

SEQ ID NO: 3096703 - DNA, 25 bp, Homo sapien
tggtcatgaactccggccttaaagc

SEQ ID NO: 3096704 - DNA, 25 bp, Homo sapien
gtgcccagctaggacaaaacttttg

SEQ ID NO: 3096705 - DNA, 25 bp, Homo sapien
aggaggacctacttcagactgggat

SEQ ID NO: 3096706 - DNA, 25 bp, Homo sapien
cactgaaggaagacctaatgcctgc

SEQ ID NO: 3096707 - DNA, 25 bp, Homo sapien
aatcctgacaagacatctgggcctg

SEQ ID NO: 3096708 - DNA, 25 bp, Homo sapien
tgacaactgtcgaaaaggagggaat

SEQ ID NO: 3096709 - DNA, 25 bp, Homo sapien
cttaaccatgtctgggggcacctgg

SEQ ID NO: 3096710 - DNA, 25 bp, Homo sapien
gtggaacgcagcaacatccatggtc

SEQ ID NO: 3096711 - DNA, 25 bp, Homo sapien
ctgggcagcacagcatggtcctggt

SEQ ID NO: 3096712 - DNA, 25 bp, Homo sapien
cagcacagcatggtcctggtggaac

SEQ ID NO: 3096713 - DNA, 25 bp, Homo sapien
tgcccctgggtccccattgtactca

SEQ ID NO: 3096714 - DNA, 25 bp, Homo sapien
tggtgggtgccactctggcaccaca

SEQ ID NO: 3096715 - DNA, 25 bp, Homo sapien
tgatggccatgacgggatctggctc

SEQ ID NO: 3096716 - DNA, 25 bp, Homo sapien
cccaggatgtggctggtgggtgcca

SEQ ID NO: 3096717 - DNA, 25 bp, Homo sapien
agcgtgggtgcggtccaggctggtg

SEQ ID NO: 3096718 - DNA, 25 bp, Homo sapien
cattcggttccgcacgatgcaacgg

SEQ ID NO: 3096719 - DNA, 25 bp, Homo sapien
tgcaacggtaaaagccagcgtgggt

SEQ ID NO: 3096720 - DNA, 25 bp, Homo sapien
tggacctcggtttgccgctgcagca

SEQ ID NO: 3096721 - DNA, 25 bp, Homo sapien
agcagcagactctggcattgggggg

SEQ ID NO: 3096722 - DNA, 25 bp, Homo sapien
tgggagcaggtgtatgtacattcac

SEQ ID NO: 3096723 - DNA, 25 bp, Homo sapien
gagcaggtgtatgtacattcaccta

SEQ ID NO: 3096724 - DNA, 25 bp, Homo sapien
gctgggagcaggtgtatgtacattc

SEQ ID NO: 3096725 - DNA, 25 bp, Homo sapien
caggagactggctgagtccagcccc

SEQ ID NO: 3096726 - DNA, 25 bp, Homo sapien
gagactggctgagtccagccccatc

SEQ ID NO: 3096727 - DNA, 25 bp, Homo sapien
cccagcaggagactggctgagtcca

SEQ ID NO: 3096728 - DNA, 25 bp, Homo sapien
agcaggagactggctgagtccagcc

SEQ ID NO: 3096729 - DNA, 25 bp, Homo sapien
ttgccagaaaagcccgtgaggctcc

SEQ ID NO: 3096730 - DNA, 25 bp, Homo sapien
cttcataaggggaggagatgtctca

SEQ ID NO: 3096731 - DNA, 25 bp, Homo sapien
gctgctgggcggtttgcttcataag

SEQ ID NO: 3096732 - DNA, 25 bp, Homo sapien
agcccgtgaggctccgattgatccc

SEQ ID NO: 3096733 - DNA, 25 bp, Homo sapien
agacagaacgttttattactaggag

SEQ ID NO: 3096734 - DNA, 25 bp, Homo sapien
gccctgtccagggtataaggagtta

SEQ ID NO: 3096735 - DNA, 25 bp, Homo sapien
cagggtataaggagttaaaactcag

SEQ ID NO: 3096736 - DNA, 25 bp, Homo sapien
agaacgttttattactaggagcaga

SEQ ID NO: 3096737 - DNA, 25 bp, Homo sapien
catgtactgtggtatcagcagctgc

SEQ ID NO: 3096738 - DNA, 25 bp, Homo sapien
actgttccccagctctacttcgagt

SEQ ID NO: 3096739 - DNA, 25 bp, Homo sapien
ccttgtctccatgtactgtggtatc

SEQ ID NO: 3096740 - DNA, 25 bp, Homo sapien
cagctctacttcgagtccattcatt

SEQ ID NO: 3096741 - DNA, 25 bp, Homo sapien
caatctttaagagttagctgttgcc

SEQ ID NO: 3096742 - DNA, 25 bp, Homo sapien
tggcgtaaggcatagtcggcaatct

SEQ ID NO: 3096743 - DNA, 25 bp, Homo sapien
tatagcccctacctgaagatccagt

SEQ ID NO: 3096744 - DNA, 25 bp, Homo sapien
ggtgtcagaagctatgaccctggct

SEQ ID NO: 3096745 - DNA, 25 bp, Homo sapien
tgccctctgggaaggcccactggcc

SEQ ID NO: 3096746 - DNA, 25 bp, Homo sapien
cctgtgccatgcctgtgctcccgtg

SEQ ID NO: 3096747 - DNA, 25 bp, Homo sapien
catgcctgtgctcccgtgccctctg

SEQ ID NO: 3096748 - DNA, 25 bp, Homo sapien
tctgggaaggcccactggcctctgc

SEQ ID NO: 3096749 - DNA, 25 bp, Homo sapien
tgagcgtgtccaaagtctaagatga

SEQ ID NO: 3096750 - DNA, 25 bp, Homo sapien
ccttcacagagacggtcacaacttc

SEQ ID NO: 3096751 - DNA, 25 bp, Homo sapien
ggtcacaacttcctgggtgtgccag

SEQ ID NO: 3096752 - DNA, 25 bp, Homo sapien
tacttgcacgtgtggtatgccatcc

SEQ ID NO: 3096753 - DNA, 25 bp, Homo sapien
tgttgtggagccacttgaactccag

SEQ ID NO: 3096754 - DNA, 25 bp, Homo sapien
caagtgcacctgtgtccgcacaggc

SEQ ID NO: 3096755 - DNA, 25 bp, Homo sapien
gctgccctcggccatgcatgtaagc

SEQ ID NO: 3096756 - DNA, 25 bp, Homo sapien
caccaggcggtttccttccaagtgc

SEQ ID NO: 3096757 - DNA, 25 bp, Homo sapien
ctctgctctcagcttaacaaatggg

SEQ ID NO: 3096758 - DNA, 25 bp, Homo sapien
tgctctcagcttaacaaatgggcac

SEQ ID NO: 3096759 - DNA, 25 bp, Homo sapien
ctctcagcttaacaaatgggcacat

SEQ ID NO: 3096760 - DNA, 25 bp, Homo sapien
tctgctctcagcttaacaaatgggc

SEQ ID NO: 3096761 - DNA, 25 bp, Homo sapien
tgagcagtgacagctgattttcctc

SEQ ID NO: 3096762 - DNA, 25 bp, Homo sapien
gactctgagcagtgacagctgattt

SEQ ID NO: 3096763 - DNA, 25 bp, Homo sapien
gacagctgattttcctccaggacct

SEQ ID NO: 3096764 - DNA, 25 bp, Homo sapien
ctaggactctgagcagtgacagctg

SEQ ID NO: 3096765 - DNA, 25 bp, Homo sapien
tcatcaggctggtgaccccggtgta

SEQ ID NO: 3096766 - DNA, 25 bp, Homo sapien
ttcatcaggctggtgaccccggtgt

SEQ ID NO: 3096767 - DNA, 25 bp, Homo sapien
attcatcaggctggtgaccccggtg

SEQ ID NO: 3096768 - DNA, 25 bp, Homo sapien
catcaggctggtgaccccggtgtac

SEQ ID NO: 3096769 - DNA, 25 bp, Homo sapien
cagcgctttgtggcgtgtaacaaag

SEQ ID NO: 3096770 - DNA, 25 bp, Homo sapien
agcgctttgtggcgtgtaacaaaga

SEQ ID NO: 3096771 - DNA, 25 bp, Homo sapien
gccgagcagaaaattggagttcaat

SEQ ID NO: 3096772 - DNA, 25 bp, Homo sapien
gagcagaaaattggagttcaatttg

SEQ ID NO: 3096773 - DNA, 25 bp, Homo sapien
ccgagcagaaaattggagttcaatt

SEQ ID NO: 3096774 - DNA, 25 bp, Homo sapien
tgccgagcagaaaattggagttcaa

SEQ ID NO: 3096775 - DNA, 25 bp, Homo sapien
cgtggcacgttgcatggccagagac

SEQ ID NO: 3096776 - DNA, 25 bp, Homo sapien
tctggtgccttcgtgataaatgccc

SEQ ID NO: 3096777 - DNA, 25 bp, Homo sapien
tcccacactgttgggtgatggcggc

SEQ ID NO: 3096778 - DNA, 25 bp, Homo sapien
caccaggagcttaatctcccagaca

SEQ ID NO: 3096779 - DNA, 25 bp, Homo sapien
cctcgggcctacacctcctgcaggt

SEQ ID NO: 3096780 - DNA, 25 bp, Homo sapien
tcagaagccaggatagcacaaggaa

SEQ ID NO: 3096781 - DNA, 25 bp, Homo sapien
ccacccttgttacagcatagccttc

SEQ ID NO: 3096782 - DNA, 25 bp, Homo sapien
cccacctgcaatctccttcctcggg

SEQ ID NO: 3096783 - DNA, 25 bp, Homo sapien
attaatgacaacgaccatgcccagg

SEQ ID NO: 3096784 - DNA, 25 bp, Homo sapien
gaagtcagtgcccaagttaacagaa

SEQ ID NO: 3096785 - DNA, 25 bp, Homo sapien
gaaaccaaggcccaatgagatggag

SEQ ID NO: 3096786 - DNA, 25 bp, Homo sapien
ttaggcagtggactatggaggaccc

SEQ ID NO: 3096787 - DNA, 25 bp, Homo sapien
ttggtgccccactttgggctgagca

SEQ ID NO: 3096788 - DNA, 25 bp, Homo sapien
ccccactttgggctgagcaggggac

SEQ ID NO: 3096789 - DNA, 25 bp, Homo sapien
tggtgccccactttgggctgagcag

SEQ ID NO: 3096790 - DNA, 25 bp, Homo sapien
ctttgggctgagcaggggacagtgt

SEQ ID NO: 3096791 - DNA, 25 bp, Homo sapien
tatagaaaccacctgctaaactagg

SEQ ID NO: 3096792 - DNA, 25 bp, Homo sapien
aaatccataacacggacagtgcctg

SEQ ID NO: 3096793 - DNA, 25 bp, Homo sapien
cacgacgtggatcgctggccttttt

SEQ ID NO: 3096794 - DNA, 25 bp, Homo sapien
tgtcagtaaatgaccctccaggaga

SEQ ID NO: 3096795 - DNA, 25 bp, Homo sapien
ccaagggcatgagggataagcacaa

SEQ ID NO: 3096796 - DNA, 25 bp, Homo sapien
gggtcagccacgttcccaaatcgta

SEQ ID NO: 3096797 - DNA, 25 bp, Homo sapien
taagaccgcatctttcagcgacgcc

SEQ ID NO: 3096798 - DNA, 25 bp, Homo sapien
ggaacactgtattcttaagaccgca

SEQ ID NO: 3096799 - DNA, 25 bp, Homo sapien
gatgcagagctagcagtgtccagat

SEQ ID NO: 3096800 - DNA, 25 bp, Homo sapien
tctggccgcgcggatctgatgcaga

SEQ ID NO: 3096801 - DNA, 25 bp, Homo sapien
tataatcctggtggggtccgatacc

SEQ ID NO: 3096802 - DNA, 25 bp, Homo sapien
gtgtccagatcaaaagcccccacat

SEQ ID NO: 3096803 - DNA, 25 bp, Homo sapien
attcaaacaagagagcccggaggcg

SEQ ID NO: 3096804 - DNA, 25 bp, Homo sapien
agagtctcctatagtcgggagcccc

SEQ ID NO: 3096805 - DNA, 25 bp, Homo sapien
ccggacattggtggaggaattcaaa

SEQ ID NO: 3096806 - DNA, 25 bp, Homo sapien
tccttcggagcccagcttgtaaaga

SEQ ID NO: 3096807 - DNA, 25 bp, Homo sapien
gaaatgcactctggtggcgattttg

SEQ ID NO: 3096808 - DNA, 25 bp, Homo sapien
tgtacccactccctgtacccactcc

SEQ ID NO: 3096809 - DNA, 25 bp, Homo sapien
aaatgcactctggtggcgattttgc

SEQ ID NO: 3096810 - DNA, 25 bp, Homo sapien
tttcggatatttgtcccagcttggg

SEQ ID NO: 3096811 - DNA, 25 bp, Homo sapien
tgccctttcggatatttgtcccagc

SEQ ID NO: 3096812 - DNA, 25 bp, Homo sapien
tgtgccctttcggatatttgtccca

SEQ ID NO: 3096813 - DNA, 25 bp, Homo sapien
cttctgtgccctttcggatatttgt

SEQ ID NO: 3096814 - DNA, 25 bp, Homo sapien
tatgtctcaattgcctcccaaaagc

SEQ ID NO: 3096815 - DNA, 25 bp, Homo sapien
cttctagtggccatctaagccgtca

SEQ ID NO: 3096816 - DNA, 25 bp, Homo sapien
tgctgtgtccttactagtggtggaa

SEQ ID NO: 3096817 - DNA, 25 bp, Homo sapien
taagccgtcagatgaagctggttac

SEQ ID NO: 3096818 - DNA, 25 bp, Homo sapien
tttgcaaccaggtagagaaacgaga

SEQ ID NO: 3096819 - DNA, 25 bp, Homo sapien
cgagagcacgtttgtaagctggaga

SEQ ID NO: 3096820 - DNA, 25 bp, Homo sapien
gaaatgtgttttgcaaccaggtaga

SEQ ID NO: 3096821 - DNA, 25 bp, Homo sapien
ttattcacttttggcagtacagtca

SEQ ID NO: 3096822 - DNA, 25 bp, Homo sapien
tatatttgttattccagtacccagc

SEQ ID NO: 3096823 - DNA, 25 bp, Homo sapien
aaagtgtgtggcgtctccctcttaa

SEQ ID NO: 3096824 - DNA, 25 bp, Homo sapien
ttgtatccaccactatcagcgcttg

SEQ ID NO: 3096825 - DNA, 25 bp, Homo sapien
taatacatgacttgaatgacagctc

SEQ ID NO: 3096826 - DNA, 25 bp, Homo sapien
caaattcgtgatgcaaaaagatgag

SEQ ID NO: 3096827 - DNA, 25 bp, Homo sapien
tgctggggctgccaaattcgtgatg

SEQ ID NO: 3096828 - DNA, 25 bp, Homo sapien
agctgttgagccacactcgcagctg

SEQ ID NO: 3096829 - DNA, 25 bp, Homo sapien
tggtgaattattgggataagtcttc

SEQ ID NO: 3096830 - DNA, 25 bp, Homo sapien
caactgagtactgtgcctgccgaag

SEQ ID NO: 3096831 - DNA, 25 bp, Homo sapien
tgcaccttgtactcctggtcaactg

SEQ ID NO: 3096832 - DNA, 25 bp, Homo sapien
ccttgtactcctggtcaactgagta

SEQ ID NO: 3096833 - DNA, 25 bp, Homo sapien
actgagtactgtgcctgccgaaggc

SEQ ID NO: 3096834 - DNA, 25 bp, Homo sapien
tatagcaatcttcagtagccactcc

SEQ ID NO: 3096835 - DNA, 25 bp, Homo sapien
tcatctgagttgagaaggatatagc

SEQ ID NO: 3096836 - DNA, 25 bp, Homo sapien
ttgaagcagagtatcacgtgattcg

SEQ ID NO: 3096837 - DNA, 25 bp, Homo sapien
gccatactgtgaggttttgaagcag

SEQ ID NO: 3096838 - DNA, 25 bp, Homo sapien
acttctttctcatccgctggcttct

SEQ ID NO: 3096839 - DNA, 25 bp, Homo sapien
ttcttcaaaaccatgtctcctcagg

SEQ ID NO: 3096840 - DNA, 25 bp, Homo sapien
cttcttcaaaaccatgtctcctcag

SEQ ID NO: 3096841 - DNA, 25 bp, Homo sapien
ttggtgacttttgctgctctacgcc

SEQ ID NO: 3096842 - DNA, 25 bp, Homo sapien
cttcttgaactggatgagggttggt

SEQ ID NO: 3096843 - DNA, 25 bp, Homo sapien
gacatttagaggcttcttgaactgg

SEQ ID NO: 3096844 - DNA, 25 bp, Homo sapien
tgagggttggtgacttttgctgctc

SEQ ID NO: 3096845 - DNA, 25 bp, Homo sapien
aatacaggatgctgtgctattgagc

SEQ ID NO: 3096846 - DNA, 25 bp, Homo sapien
tatgtttcctcaaggagaaaaccta

SEQ ID NO: 3096847 - DNA, 25 bp, Homo sapien
ccaagacaaggggttgcatgcattt

SEQ ID NO: 3096848 - DNA, 25 bp, Homo sapien
gtgatcttgggaagtactagtaggg

SEQ ID NO: 3096849 - DNA, 25 bp, Homo sapien
tgtggagctcctctttgtggaccga

SEQ ID NO: 3096850 - DNA, 25 bp, Homo sapien
ccaattatcccacaagcattgcttg

SEQ ID NO: 3096851 - DNA, 25 bp, Homo sapien
tctgctccccgtggttttctggctt

SEQ ID NO: 3096852 - DNA, 25 bp, Homo sapien
tgcaggaagacttccccaattatcc

SEQ ID NO: 3096853 - DNA, 25 bp, Homo sapien
ccttctccatggcaacttggtgcat

SEQ ID NO: 3096854 - DNA, 25 bp, Homo sapien
ctgggccttctccatggcaacttgg

SEQ ID NO: 3096855 - DNA, 25 bp, Homo sapien
ctgctggcaagctggtgcagcccag

SEQ ID NO: 3096856 - DNA, 25 bp, Homo sapien
agggacctcatctgggccttctcca

SEQ ID NO: 3096857 - DNA, 25 bp, Homo sapien
tctgacacctcacgaatgcctggag

SEQ ID NO: 3096858 - DNA, 25 bp, Homo sapien
tttggtgagtgatacagcagcctca

SEQ ID NO: 3096859 - DNA, 25 bp, Homo sapien
cagccctcggaggttctgtaaacag

SEQ ID NO: 3096860 - DNA, 25 bp, Homo sapien
aaggtgcccctcataagtgttctgg

SEQ ID NO: 3096861 - DNA, 25 bp, Homo sapien
gattagtgcattgctttaggactgg

SEQ ID NO: 3096862 - DNA, 25 bp, Homo sapien
cctttgcctggtgaatatttttgtt

SEQ ID NO: 3096863 - DNA, 25 bp, Homo sapien
taggaagccccggtttccactgctg

SEQ ID NO: 3096864 - DNA, 25 bp, Homo sapien
gggagtgcatcgtttcttctaggaa

SEQ ID NO: 3096865 - DNA, 25 bp, Homo sapien
tcctttccatgatgacacggtgacc

SEQ ID NO: 3096866 - DNA, 25 bp, Homo sapien
ttggaatagattcgggcagccgaca

SEQ ID NO: 3096867 - DNA, 25 bp, Homo sapien
gaaccacagctgatgataaaagcca

SEQ ID NO: 3096868 - DNA, 25 bp, Homo sapien
ttcacgtggcgaaaactgtgggctc

SEQ ID NO: 3096869 - DNA, 25 bp, Homo sapien
ccagctcttgtacggctgccaggaa

SEQ ID NO: 3096870 - DNA, 25 bp, Homo sapien
cacaggtgattaggtgattggccag

SEQ ID NO: 3096871 - DNA, 25 bp, Homo sapien
taaatgtcacagattaagccgcaga

SEQ ID NO: 3096872 - DNA, 25 bp, Homo sapien
gccctgaggttgctaggcgacctga

SEQ ID NO: 3096873 - DNA, 25 bp, Homo sapien
ggtgagatgcgaaatgctggtcact

SEQ ID NO: 3096874 - DNA, 25 bp, Homo sapien
tgtgctccttaaacctgaacctgag

SEQ ID NO: 3096875 - DNA, 25 bp, Homo sapien
ccaatggcctcggaagctgcagttt

SEQ ID NO: 3096876 - DNA, 25 bp, Homo sapien
tatcgccgcctcaaaagtgcctgtg

SEQ ID NO: 3096877 - DNA, 25 bp, Homo sapien
tgaacctgagtatccggcaagagcc

SEQ ID NO: 3096878 - DNA, 25 bp, Homo sapien
ttgacaggtctgagaaaccccctgg

SEQ ID NO: 3096879 - DNA, 25 bp, Homo sapien
ttgcctccagattgccgagctgttg

SEQ ID NO: 3096880 - DNA, 25 bp, Homo sapien
tggttgagccagagacttcgtttcc

SEQ ID NO: 3096881 - DNA, 25 bp, Homo sapien
ccttgcctccagattgccgagctgt

SEQ ID NO: 3096882 - DNA, 25 bp, Homo sapien
gagacttcgtttccgtgcttctcca

SEQ ID NO: 3096883 - DNA, 25 bp, Homo sapien
tgtcctgcagccttaagtccagtca

SEQ ID NO: 3096884 - DNA, 25 bp, Homo sapien
ggtgcaagcagacatcattgggaag

SEQ ID NO: 3096885 - DNA, 25 bp, Homo sapien
tgggatggagaacagatctccacca

SEQ ID NO: 3096886 - DNA, 25 bp, Homo sapien
cctctgggaattgggaatcattcat

SEQ ID NO: 3096887 - DNA, 25 bp, Homo sapien
tcttcctatgagttgtttgacagca

SEQ ID NO: 3096888 - DNA, 25 bp, Homo sapien
tgtcaagatggtaggatgagtgggc

SEQ ID NO: 3096889 - DNA, 25 bp, Homo sapien
ctggcctagaagcactcacaggaat

SEQ ID NO: 3096890 - DNA, 25 bp, Homo sapien
tcacaggaatacgatgggatggagg

SEQ ID NO: 3096891 - DNA, 25 bp, Homo sapien
tgttgtctgatactgttcatgttgg

SEQ ID NO: 3096892 - DNA, 25 bp, Homo sapien
tctgatactgttcatgttggtgacc

SEQ ID NO: 3096893 - DNA, 25 bp, Homo sapien
gatactgttcatgttggtgacctta

SEQ ID NO: 3096894 - DNA, 25 bp, Homo sapien
tctgtgttgtctgatactgttcatg

SEQ ID NO: 3096895 - DNA, 25 bp, Homo sapien
atgtggcccaagacgccccggtgga

SEQ ID NO: 3096896 - DNA, 25 bp, Homo sapien
ccccggtggaggctagggtcctcat

SEQ ID NO: 3096897 - DNA, 25 bp, Homo sapien
cacatccgtacatcggcagctcgga

SEQ ID NO: 3096898 - DNA, 25 bp, Homo sapien
cagctcggaggcttgactgctggag

SEQ ID NO: 3096899 - DNA, 25 bp, Homo sapien
gacatctggatatgtctggacacat

SEQ ID NO: 3096900 - DNA, 25 bp, Homo sapien
cccttccccataagggacatctgga

SEQ ID NO: 3096901 - DNA, 25 bp, Homo sapien
ttctgattgtcacatctgggagggt

SEQ ID NO: 3096902 - DNA, 25 bp, Homo sapien
tcctccatcgcttgcagcaggggtt

SEQ ID NO: 3096903 - DNA, 25 bp, Homo sapien
tgtgcaaccatcctgatgatctatt

SEQ ID NO: 3096904 - DNA, 25 bp, Homo sapien
attgtgcaaccatcctgatgatcta

SEQ ID NO: 3096905 - DNA, 25 bp, Homo sapien
gcaaccatcctgatgatctatttcc

SEQ ID NO: 3096906 - DNA, 25 bp, Homo sapien
gtgcaaccatcctgatgatctattt

SEQ ID NO: 3096907 - DNA, 25 bp, Homo sapien
aatcttcgattacggtgtggcctca

SEQ ID NO: 3096908 - DNA, 25 bp, Homo sapien
gagattcacatcttggctcccgggc

SEQ ID NO: 3096909 - DNA, 25 bp, Homo sapien
gaaagtcttccctctacctaggtgc

SEQ ID NO: 3096910 - DNA, 25 bp, Homo sapien
tgtgagatggacacagccgccgttt

SEQ ID NO: 3096911 - DNA, 25 bp, Homo sapien
catactgtctctggatgaagaagtt

SEQ ID NO: 3096912 - DNA, 25 bp, Homo sapien
ctactcatactgtctctggatgaag

SEQ ID NO: 3096913 - DNA, 25 bp, Homo sapien
ctgtctctggatgaagaagttgtgc

SEQ ID NO: 3096914 - DNA, 25 bp, Homo sapien
tctctggatgaagaagttgtgctca

SEQ ID NO: 3096915 - DNA, 25 bp, Homo sapien
tcaccctcctctacattttgaaaca

SEQ ID NO: 3096916 - DNA, 25 bp, Homo sapien
tcgataagcctgctcatctgtgagg

SEQ ID NO: 3096917 - DNA, 25 bp, Homo sapien
tccacagatgtaatcagggctccgg

SEQ ID NO: 3096918 - DNA, 25 bp, Homo sapien
tgaaacaaacgtcagctgccaggct

SEQ ID NO: 3096919 - DNA, 25 bp, Homo sapien
aatgatttccaagccctgaaagagg

SEQ ID NO: 3096920 - DNA, 25 bp, Homo sapien
tgatatccattctcctcaacgggct

SEQ ID NO: 3096921 - DNA, 25 bp, Homo sapien
taaactgactgaattcacactggga

SEQ ID NO: 3096922 - DNA, 25 bp, Homo sapien
taatgacagagcgagttggtacggc

SEQ ID NO: 3096923 - DNA, 25 bp, Homo sapien
tcgcacatccattatgccaccagat

SEQ ID NO: 3096924 - DNA, 25 bp, Homo sapien
tctgcaggacggctcgcacatccat

SEQ ID NO: 3096925 - DNA, 25 bp, Homo sapien
caggacggctcgcacatccattatg

SEQ ID NO: 3096926 - DNA, 25 bp, Homo sapien
gacggctcgcacatccattatgcca

SEQ ID NO: 3096927 - DNA, 25 bp, Homo sapien
gctgcttcaggcagacgccaaactg

SEQ ID NO: 3096928 - DNA, 25 bp, Homo sapien
gcttcaggcagacgccaaactggag

SEQ ID NO: 3096929 - DNA, 25 bp, Homo sapien
cagacttgggggcaaacaggtacaa

SEQ ID NO: 3096930 - DNA, 25 bp, Homo sapien
ggcagacgccaaactggagagatct

SEQ ID NO: 3096931 - DNA, 25 bp, Homo sapien
cctgcacgagggactcgggagtcca

SEQ ID NO: 3096932 - DNA, 25 bp, Homo sapien
caggccatcggccaggatccccggc

SEQ ID NO: 3096933 - DNA, 25 bp, Homo sapien
atccccggcgccctgcggtctgtcc

SEQ ID NO: 3096934 - DNA, 25 bp, Homo sapien
cacacatgacctgcacgagggactc

SEQ ID NO: 3096935 - DNA, 25 bp, Homo sapien
ctccttttatgattatcgatgtgct

SEQ ID NO: 3096936 - DNA, 25 bp, Homo sapien
tatgattatcgatgtgcttataggg

SEQ ID NO: 3096937 - DNA, 25 bp, Homo sapien
tgcttatagggcacccatgctgcct

SEQ ID NO: 3096938 - DNA, 25 bp, Homo sapien
tatcgatgtgcttatagggcaccca

SEQ ID NO: 3096939 - DNA, 25 bp, Homo sapien
ttctttgggtcggtggcagtttctg

SEQ ID NO: 3096940 - DNA, 25 bp, Homo sapien
ctgctgctatgcagtcttcactaat

SEQ ID NO: 3096941 - DNA, 25 bp, Homo sapien
ccccgaccccactgctgctatgcag

SEQ ID NO: 3096942 - DNA, 25 bp, Homo sapien
tggcagtttctgtgaggtgtgaggg

SEQ ID NO: 3096943 - DNA, 25 bp, Homo sapien
ttggataaatctgaggcttgatgat

SEQ ID NO: 3096944 - DNA, 25 bp, Homo sapien
tcttgcaaacaggaggacgcttctc

SEQ ID NO: 3096945 - DNA, 25 bp, Homo sapien
gatgatattgtcagctactagcagc

SEQ ID NO: 3096946 - DNA, 25 bp, Homo sapien
tgccatccttcacaggtgagtgatg

SEQ ID NO: 3096947 - DNA, 25 bp, Homo sapien
ctgaagcaaagtccagttcagagga

SEQ ID NO: 3096948 - DNA, 25 bp, Homo sapien
ggcttccactgagcattaatcacac

SEQ ID NO: 3096949 - DNA, 25 bp, Homo sapien
gcctgaaggaatgcctgaagcaaag

SEQ ID NO: 3096950 - DNA, 25 bp, Homo sapien
tgagcattaatcacacagcctgaag

SEQ ID NO: 3096951 - DNA, 25 bp, Homo sapien
ccccagcagtgcctcgctgagtgct

SEQ ID NO: 3096952 - DNA, 25 bp, Homo sapien
catccttgcccagaggagcggggca

SEQ ID NO: 3096953 - DNA, 25 bp, Homo sapien
tgcatccttgcccagaggagcgggg

SEQ ID NO: 3096954 - DNA, 25 bp, Homo sapien
ccagcagtgcctcgctgagtgctgt

SEQ ID NO: 3096955 - DNA, 25 bp, Homo sapien
agccattggtgcattctctgctgcc

SEQ ID NO: 3096956 - DNA, 25 bp, Homo sapien
gacttagaatcctgggaagatcatt

SEQ ID NO: 3096957 - DNA, 25 bp, Homo sapien
gacaactttaatcatcagcctggac

SEQ ID NO: 3096958 - DNA, 25 bp, Homo sapien
gaacctggcacatcttcgagtcttt

SEQ ID NO: 3096959 - DNA, 25 bp, Homo sapien
caactgtggatcttgtttgtctcaa

SEQ ID NO: 3096960 - DNA, 25 bp, Homo sapien
aagctcccattagccccaactgtgg

SEQ ID NO: 3096961 - DNA, 25 bp, Homo sapien
taattcaggtgccacagacgtggaa

SEQ ID NO: 3096962 - DNA, 25 bp, Homo sapien
caaaaccccagtatatcctcaggag

SEQ ID NO: 3096963 - DNA, 25 bp, Homo sapien
catacatcacactttccaactccac

SEQ ID NO: 3096964 - DNA, 25 bp, Homo sapien
cacactttccaactccaccatactc

SEQ ID NO: 3096965 - DNA, 25 bp, Homo sapien
cactttccaactccaccatactcaa

SEQ ID NO: 3096966 - DNA, 25 bp, Homo sapien
ttccaactccaccatactcaacccc

SEQ ID NO: 3096967 - DNA, 25 bp, Homo sapien
cgcacaaccgaataaaaatgatcaa

SEQ ID NO: 3096968 - DNA, 25 bp, Homo sapien
aaatgatcaatttccctgcccgcct

SEQ ID NO: 3096969 - DNA, 25 bp, Homo sapien
tgcccgccttacagcatccttccac

SEQ ID NO: 3096970 - DNA, 25 bp, Homo sapien
tccacagttattaaagtctctaaaa

SEQ ID NO: 3096971 - DNA, 25 bp, Homo sapien
tcctgtaacgctgatcaatgaggcc

SEQ ID NO: 3096972 - DNA, 25 bp, Homo sapien
ggtttgctcacaacacggtcacagg

SEQ ID NO: 3096973 - DNA, 25 bp, Homo sapien
tagaacggtgtccactgcatagcag

SEQ ID NO: 3096974 - DNA, 25 bp, Homo sapien
gttcctggacgagctgaccttcaag

SEQ ID NO: 3096975 - DNA, 25 bp, Homo sapien
cacccatttgaagcatgctggtgca

SEQ ID NO: 3096976 - DNA, 25 bp, Homo sapien
caggtgggaagctttctgtagggtt

SEQ ID NO: 3096977 - DNA, 25 bp, Homo sapien
ctgacacccatttgaagcatgctgg

SEQ ID NO: 3096978 - DNA, 25 bp, Homo sapien
gacacccatttgaagcatgctggtg

SEQ ID NO: 3096979 - DNA, 25 bp, Homo sapien
tgagtggcaaccaagaccctaatct

SEQ ID NO: 3096980 - DNA, 25 bp, Homo sapien
caatgagtgccgagtagaagtggat

SEQ ID NO: 3096981 - DNA, 25 bp, Homo sapien
gacttcaatggctacgagagacgct

SEQ ID NO: 3096982 - DNA, 25 bp, Homo sapien
tgagcctaaagctggatacaagggt

SEQ ID NO: 3096983 - DNA, 25 bp, Homo sapien
tgtgctgctgcctttcccaagcagg

SEQ ID NO: 3096984 - DNA, 25 bp, Homo sapien
ctgtgctgctgcctttcccaagcag

SEQ ID NO: 3096985 - DNA, 25 bp, Homo sapien
gacagcttgtgcatagcttggaggc

SEQ ID NO: 3096986 - DNA, 25 bp, Homo sapien
gatggcacctcatggaaaagaccag

SEQ ID NO: 3096987 - DNA, 25 bp, Homo sapien
caaacgtaagatgggtgcgctgagc

SEQ ID NO: 3096988 - DNA, 25 bp, Homo sapien
caggagcgtgtgacagggacactta

SEQ ID NO: 3096989 - DNA, 25 bp, Homo sapien
agaggagcacgtccaaagcagagga

SEQ ID NO: 3096990 - DNA, 25 bp, Homo sapien
tgatatttttacttaccatgtaccc

SEQ ID NO: 3096991 - DNA, 25 bp, Homo sapien
atgtacccagaaatatatttagcaa

SEQ ID NO: 3096992 - DNA, 25 bp, Homo sapien
gcaaagcaatttacaccatcactgg

SEQ ID NO: 3096993 - DNA, 25 bp, Homo sapien
caggtgtcggcgctaaagctcttga

SEQ ID NO: 3096994 - DNA, 25 bp, Homo sapien
ttaggcaaaccacttggcgctcgct

SEQ ID NO: 3096995 - DNA, 25 bp, Homo sapien
gggcctctctcatgtccacgtgtaa

SEQ ID NO: 3096996 - DNA, 25 bp, Homo sapien
tgactctcgcagcacccttgtaaga

SEQ ID NO: 3096997 - DNA, 25 bp, Homo sapien
gaactaggacatcctacagttttgg

SEQ ID NO: 3096998 - DNA, 25 bp, Homo sapien
tctcagaactaggacatcctacagt

SEQ ID NO: 3096999 - DNA, 25 bp, Homo sapien
taggacatcctacagttttggccat

SEQ ID NO: 3097000 - DNA, 25 bp, Homo sapien
ctctcagaactaggacatcctacag

SEQ ID NO: 3097001 - DNA, 25 bp, Homo sapien
cagggtttgcctgtaaagtagtagg

SEQ ID NO: 3097002 - DNA, 25 bp, Homo sapien
caagctgcactttgacaattgtgtg

SEQ ID NO: 3097003 - DNA, 25 bp, Homo sapien
tctcaggttcggcaaggcagggttt

SEQ ID NO: 3097004 - DNA, 25 bp, Homo sapien
ttgcctgtaaagtagtaggacagtg

SEQ ID NO: 3097005 - DNA, 25 bp, Homo sapien
ctctctgcatggagtaccacggcca

SEQ ID NO: 3097006 - DNA, 25 bp, Homo sapien
gatgccaaggtgatgtcactacctg

SEQ ID NO: 3097007 - DNA, 25 bp, Homo sapien
gacctcagactggacgttggaatac

SEQ ID NO: 3097008 - DNA, 25 bp, Homo sapien
caaggtgatgtcactacctggatca

SEQ ID NO: 3097009 - DNA, 25 bp, Homo sapien
tgagtctagggagcaacagcagcgc

SEQ ID NO: 3097010 - DNA, 25 bp, Homo sapien
ctgagtctagggagcaacagcagcg

SEQ ID NO: 3097011 - DNA, 25 bp, Homo sapien
gtctagggagcaacagcagcgccat

SEQ ID NO: 3097012 - DNA, 25 bp, Homo sapien
gagctgagtctagggagcaacagca

SEQ ID NO: 3097013 - DNA, 25 bp, Homo sapien
gaatttatagacatgggcccctcca

SEQ ID NO: 3097014 - DNA, 25 bp, Homo sapien
tagaatttcctacaaccccttgaga

SEQ ID NO: 3097015 - DNA, 25 bp, Homo sapien
ttagctccaggagtgaagactttgg

SEQ ID NO: 3097016 - DNA, 25 bp, Homo sapien
cccaagagaagctaagtggtatcca

SEQ ID NO: 3097017 - DNA, 25 bp, Homo sapien
tacccggtgacatccaaactttcca

SEQ ID NO: 3097018 - DNA, 25 bp, Homo sapien
tggtcttgtttggatggagaattgc

SEQ ID NO: 3097019 - DNA, 25 bp, Homo sapien
ctcggatctgctgtctgtggtcttg

SEQ ID NO: 3097020 - DNA, 25 bp, Homo sapien
gcagggcctcggatctgctgtctgt

SEQ ID NO: 3097021 - DNA, 25 bp, Homo sapien
tgtttggatggagaattgcctgcag

SEQ ID NO: 3097022 - DNA, 25 bp, Homo sapien
gaggatacccttcccaaaggcacac

SEQ ID NO: 3097023 - DNA, 25 bp, Homo sapien
gctccaagccacaggtcgggtgggt

SEQ ID NO: 3097024 - DNA, 25 bp, Homo sapien
gcacagtgggtggaggatacccttc

SEQ ID NO: 3097025 - DNA, 25 bp, Homo sapien
tccaagccacaggtcgggtgggtgc

SEQ ID NO: 3097026 - DNA, 25 bp, Homo sapien
aggagcccacgcctgtcctagagcg

SEQ ID NO: 3097027 - DNA, 25 bp, Homo sapien
ccggcaccaactccagcaacatcat

SEQ ID NO: 3097028 - DNA, 25 bp, Homo sapien
gccccggcaccaactccagcaacat

SEQ ID NO: 3097029 - DNA, 25 bp, Homo sapien
gtcctagagcgagccccggcaccaa

SEQ ID NO: 3097030 - DNA, 25 bp, Homo sapien
tattgcaggaggcaattttatgctc

SEQ ID NO: 3097031 - DNA, 25 bp, Homo sapien
tctacattgcttaatgacggaggca

SEQ ID NO: 3097032 - DNA, 25 bp, Homo sapien
tggaaccgaaactgacctattgcag

SEQ ID NO: 3097033 - DNA, 25 bp, Homo sapien
tgacggaggcactaacaggaccttt

SEQ ID NO: 3097034 - DNA, 25 bp, Homo sapien
tgtgtggcccacataaggtgatcct

SEQ ID NO: 3097035 - DNA, 25 bp, Homo sapien
cagcaggaagcgcaagaaaggcgat

SEQ ID NO: 3097036 - DNA, 25 bp, Homo sapien
gcgatcggagacgtgttttctcagc

SEQ ID NO: 3097037 - DNA, 25 bp, Homo sapien
ggctgaagacgccacatttggtgag

SEQ ID NO: 3097038 - DNA, 25 bp, Homo sapien
ttcttgtccccctgctaaggggctc

SEQ ID NO: 3097039 - DNA, 25 bp, Homo sapien
tcttgtccccctgctaaggggctct

SEQ ID NO: 3097040 - DNA, 25 bp, Homo sapien
ttgtccccctgctaaggggctctct

SEQ ID NO: 3097041 - DNA, 25 bp, Homo sapien
gcttcttgtccccctgctaaggggc

SEQ ID NO: 3097042 - DNA, 25 bp, Homo sapien
atcacctccgtggattctttgttct

SEQ ID NO: 3097043 - DNA, 25 bp, Homo sapien
ttctgttgatggcaccatcatcttc

SEQ ID NO: 3097044 - DNA, 25 bp, Homo sapien
tcccagcttcacctcaaagtcgatc

SEQ ID NO: 3097045 - DNA, 25 bp, Homo sapien
ctgttgatggcaccatcatcttcct

SEQ ID NO: 3097046 - DNA, 25 bp, Homo sapien
ccataatttctgactcgatgtgatg

SEQ ID NO: 3097047 - DNA, 25 bp, Homo sapien
gactcgatgtgatgctttggctgga

SEQ ID NO: 3097048 - DNA, 25 bp, Homo sapien
caacagatgcatggagtgggagatt

SEQ ID NO: 3097049 - DNA, 25 bp, Homo sapien
tttggctggagtccgcaacagatgc

SEQ ID NO: 3097050 - DNA, 25 bp, Homo sapien
catgactattaataggctgggaaca

SEQ ID NO: 3097051 - DNA, 25 bp, Homo sapien
gatgcattaagctcttcctggccag

SEQ ID NO: 3097052 - DNA, 25 bp, Homo sapien
caggctacactgatgaggctgttcc

SEQ ID NO: 3097053 - DNA, 25 bp, Homo sapien
tgctcaagcccagggttggcaaccc

SEQ ID NO: 3097054 - DNA, 25 bp, Homo sapien
agctcctccccctgagaagtcttgg

SEQ ID NO: 3097055 - DNA, 25 bp, Homo sapien
tcgcgagtactttgcatggcatctg

SEQ ID NO: 3097056 - DNA, 25 bp, Homo sapien
gctttattgaattttcgcgagtact

SEQ ID NO: 3097057 - DNA, 25 bp, Homo sapien
ggcccaactttgctgtgctgggagc

SEQ ID NO: 3097058 - DNA, 25 bp, Homo sapien
cctggtcggactggccccacagcac

SEQ ID NO: 3097059 - DNA, 25 bp, Homo sapien
ctgctgttcccctggtcggactggc

SEQ ID NO: 3097060 - DNA, 25 bp, Homo sapien
gagcgggagacggggtgggcagcgg

SEQ ID NO: 3097061 - DNA, 25 bp, Homo sapien
cccctggtcggactggccccacagc

SEQ ID NO: 3097062 - DNA, 25 bp, Homo sapien
gataagagctggtcttcgtgccgca

SEQ ID NO: 3097063 - DNA, 25 bp, Homo sapien
ttctgtgcccgcgacgacacgtgtc

SEQ ID NO: 3097064 - DNA, 25 bp, Homo sapien
tgtccagaccttgccgctgagttcc

SEQ ID NO: 3097065 - DNA, 25 bp, Homo sapien
aaattgctccaatttgatggtcctc

SEQ ID NO: 3097066 - DNA, 25 bp, Homo sapien
tgaaccctcgcactgagtattacag

SEQ ID NO: 3097067 - DNA, 25 bp, Homo sapien
tagtggtctcgctaagcttcaagag

SEQ ID NO: 3097068 - DNA, 25 bp, Homo sapien
taagcttcaagagtaaagctgcaga

SEQ ID NO: 3097069 - DNA, 25 bp, Homo sapien
aagccgtgaaccctcgcactgagta

SEQ ID NO: 3097070 - DNA, 25 bp, Homo sapien
ttgatgagaccagggtgcctttcac

SEQ ID NO: 3097071 - DNA, 25 bp, Homo sapien
tctaaatttgatgagaccagggtgc

SEQ ID NO: 3097072 - DNA, 25 bp, Homo sapien
taaatttgatgagaccagggtgcct

SEQ ID NO: 3097073 - DNA, 25 bp, Homo sapien
ttaatctaaatttgatgagaccagg

SEQ ID NO: 3097074 - DNA, 25 bp, Homo sapien
tctctctctctgccttctgagatac

SEQ ID NO: 3097075 - DNA, 25 bp, Homo sapien
ctggttgattctcctcctctctttc

SEQ ID NO: 3097076 - DNA, 25 bp, Homo sapien
tctctctgccttctgagataccaaa

SEQ ID NO: 3097077 - DNA, 25 bp, Homo sapien
tctctctctgccttctgagatacca

SEQ ID NO: 3097078 - DNA, 25 bp, Homo sapien
gtttgcaacgcccttcttggacagc

SEQ ID NO: 3097079 - DNA, 25 bp, Homo sapien
ctgtttgcaacgcccttcttggaca

SEQ ID NO: 3097080 - DNA, 25 bp, Homo sapien
caggtgagacatcccgaataaagac

SEQ ID NO: 3097081 - DNA, 25 bp, Homo sapien
agcacaggtgagacatcccgaataa

SEQ ID NO: 3097082 - DNA, 25 bp, Homo sapien
caatggccagagcgaccataacagg

SEQ ID NO: 3097083 - DNA, 25 bp, Homo sapien
aatggccagagcgaccataacaggc

SEQ ID NO: 3097084 - DNA, 25 bp, Homo sapien
ccagagcgaccataacaggcagcct

SEQ ID NO: 3097085 - DNA, 25 bp, Homo sapien
ttacaccctggtcatcactgacaaa

SEQ ID NO: 3097086 - DNA, 25 bp, Homo sapien
cagcagatacctttacaccctggtc

SEQ ID NO: 3097087 - DNA, 25 bp, Homo sapien
gtttaaagttcgatgcagcagatac

SEQ ID NO: 3097088 - DNA, 25 bp, Homo sapien
gagaaactgaagcagtccctgcccc

SEQ ID NO: 3097089 - DNA, 25 bp, Homo sapien
tgaaccagacacactgattggaact

SEQ ID NO: 3097090 - DNA, 25 bp, Homo sapien
gacacactgattggaactgtattat

SEQ ID NO: 3097091 - DNA, 25 bp, Homo sapien
ccagacacactgattggaactgtat

SEQ ID NO: 3097092 - DNA, 25 bp, Homo sapien
tgaaggaactgaaatgaaccagaca

SEQ ID NO: 3097093 - DNA, 25 bp, Homo sapien
tttgttcccagcacatcgtccagag

SEQ ID NO: 3097094 - DNA, 25 bp, Homo sapien
cgggttcaaagtcagtcctcggtga

SEQ ID NO: 3097095 - DNA, 25 bp, Homo sapien
cagctcctaggagacaggccttgca

SEQ ID NO: 3097096 - DNA, 25 bp, Homo sapien
agaaggccgcctttcatgcagtgct

SEQ ID NO: 3097097 - DNA, 25 bp, Homo sapien
caagtcacgccaagcagtttgcggt

SEQ ID NO: 3097098 - DNA, 25 bp, Homo sapien
gttgaatgcgcttcagtctccccga

SEQ ID NO: 3097099 - DNA, 25 bp, Homo sapien
catatgtgcagagtacggagggccc

SEQ ID NO: 3097100 - DNA, 25 bp, Homo sapien
tacttaccctgtgacaagcccttgg

SEQ ID NO: 3097101 - DNA, 25 bp, Homo sapien
gagaggaactctgcgacgtcaaagt

SEQ ID NO: 3097102 - DNA, 25 bp, Homo sapien
agcgaagcctccacaacagaatggg

SEQ ID NO: 3097103 - DNA, 25 bp, Homo sapien
tatatccgcgtcacatgcagagagg

SEQ ID NO: 3097104 - DNA, 25 bp, Homo sapien
tgtctcacctacattaacccatgca

SEQ ID NO: 3097105 - DNA, 25 bp, Homo sapien
tggagatggccaccgctcagctagg

SEQ ID NO: 3097106 - DNA, 25 bp, Homo sapien
ggcatggagatggccaccgctcagc

SEQ ID NO: 3097107 - DNA, 25 bp, Homo sapien
agatggccaccgctcagctaggaaa

SEQ ID NO: 3097108 - DNA, 25 bp, Homo sapien
ccaccgctcagctaggaaatccctg

SEQ ID NO: 3097109 - DNA, 25 bp, Homo sapien
tgtatgaagcttgccggcgactctg

SEQ ID NO: 3097110 - DNA, 25 bp, Homo sapien
tatcaggtgctcgtggaacccagca

SEQ ID NO: 3097111 - DNA, 25 bp, Homo sapien
tgtatttgctcccacgaattgccgg

SEQ ID NO: 3097112 - DNA, 25 bp, Homo sapien
tatcaaagttcaggtcgggcagggt

SEQ ID NO: 3097113 - DNA, 25 bp, Homo sapien
tcaatgtgaggcaaggcgccgtggc

SEQ ID NO: 3097114 - DNA, 25 bp, Homo sapien
aaatatcaatgtgaggcaaggcgcc

SEQ ID NO: 3097115 - DNA, 25 bp, Homo sapien
atatcaatgtgaggcaaggcgccgt

SEQ ID NO: 3097116 - DNA, 25 bp, Homo sapien
aaaaatatcaatgtgaggcaaggcg

SEQ ID NO: 3097117 - DNA, 25 bp, Homo sapien
gttccaggcctcatagcaagtaggg

SEQ ID NO: 3097118 - DNA, 25 bp, Homo sapien
gacgagttacatcaccgactgccag

SEQ ID NO: 3097119 - DNA, 25 bp, Homo sapien
tactaaagctcagttcgtgggcgat

SEQ ID NO: 3097120 - DNA, 25 bp, Homo sapien
ggaggttgttcagtctagcccagaa

SEQ ID NO: 3097121 - DNA, 25 bp, Homo sapien
tcatgttcgagcagtgcgatcccac

SEQ ID NO: 3097122 - DNA, 25 bp, Homo sapien
gacggaaccctggatatctgggact

SEQ ID NO: 3097123 - DNA, 25 bp, Homo sapien
gaaacaaaagcaggtacccggcatc

SEQ ID NO: 3097124 - DNA, 25 bp, Homo sapien
tctttaccaccaggatggacggaac

SEQ ID NO: 3097125 - DNA, 25 bp, Homo sapien
ctaaggacgacagcgagaaggactc

SEQ ID NO: 3097126 - DNA, 25 bp, Homo sapien
agcattgcagccctggtggacgagc

SEQ ID NO: 3097127 - DNA, 25 bp, Homo sapien
gagaaggactcagacacaggtgatg

SEQ ID NO: 3097128 - DNA, 25 bp, Homo sapien
tgatgaccaaccagacatcctggag

SEQ ID NO: 3097129 - DNA, 25 bp, Homo sapien
ccgagatgcagtcgcacgcgctgct

SEQ ID NO: 3097130 - DNA, 25 bp, Homo sapien
tcagcctgctgtgccgcgtgcacga

SEQ ID NO: 3097131 - DNA, 25 bp, Homo sapien
tgcacgagctcgaggtggagaacac

SEQ ID NO: 3097132 - DNA, 25 bp, Homo sapien
acgagattatccagggccagcggca

SEQ ID NO: 3097133 - DNA, 25 bp, Homo sapien
ggctagcaagatccgttatgtccct

SEQ ID NO: 3097134 - DNA, 25 bp, Homo sapien
gggtttttctctagatcctgaggcc

SEQ ID NO: 3097135 - DNA, 25 bp, Homo sapien
tgccagaaagtctcacaacccagat

SEQ ID NO: 3097136 - DNA, 25 bp, Homo sapien
tgcccctcgaggtcagggctcagaa

SEQ ID NO: 3097137 - DNA, 25 bp, Homo sapien
ttttacccagaaactgagtggttca

SEQ ID NO: 3097138 - DNA, 25 bp, Homo sapien
taggccaggcctttattcccagacc

SEQ ID NO: 3097139 - DNA, 25 bp, Homo sapien
caagaacgttccttcaagtcagctg

SEQ ID NO: 3097140 - DNA, 25 bp, Homo sapien
tgagcatcggtttattcaggaccaa

SEQ ID NO: 3097141 - DNA, 25 bp, Homo sapien
tatacgggcttgacgatgaggtgca

SEQ ID NO: 3097142 - DNA, 25 bp, Homo sapien
cgagaagagcacgttccaggtgacc

SEQ ID NO: 3097143 - DNA, 25 bp, Homo sapien
tgcagggcgttctcaaccaggtact

SEQ ID NO: 3097144 - DNA, 25 bp, Homo sapien
gaggacacgccgtacttggtggcca

SEQ ID NO: 3097145 - DNA, 25 bp, Homo sapien
gagcttcactgtccgggtgcaaaca

SEQ ID NO: 3097146 - DNA, 25 bp, Homo sapien
tccgcggtgatgtagaaattgcctg

SEQ ID NO: 3097147 - DNA, 25 bp, Homo sapien
ggaacaaaacagacgtggctcctgc

SEQ ID NO: 3097148 - DNA, 25 bp, Homo sapien
tactaggcgtgcagccctaggctgg

SEQ ID NO: 3097149 - DNA, 25 bp, Homo sapien
gactaactgctggtcaatgggcgca

SEQ ID NO: 3097150 - DNA, 25 bp, Homo sapien
ccctgcgtgattgcctctgggaata

SEQ ID NO: 3097151 - DNA, 25 bp, Homo sapien
gcctctataggagtgtggcagccac

SEQ ID NO: 3097152 - DNA, 25 bp, Homo sapien
aatgcaactgattccgggttaacag

SEQ ID NO: 3097153 - DNA, 25 bp, Homo sapien
ttagacactagtgtgaatggcaccc

SEQ ID NO: 3097154 - DNA, 25 bp, Homo sapien
catctcgtctgagccgttagaacag

SEQ ID NO: 3097155 - DNA, 25 bp, Homo sapien
gagagagccgtctaactttttcagc

SEQ ID NO: 3097156 - DNA, 25 bp, Homo sapien
gcaatgtatggaattctgcaggcat

SEQ ID NO: 3097157 - DNA, 25 bp, Homo sapien
gacataacaacctctaagggcctgg

SEQ ID NO: 3097158 - DNA, 25 bp, Homo sapien
tctatggccaggtttggaaacagct

SEQ ID NO: 3097159 - DNA, 25 bp, Homo sapien
atgacacgggcaaagacagggagct

SEQ ID NO: 3097160 - DNA, 25 bp, Homo sapien
tactaggaaccgaaagtgacatcaa

SEQ ID NO: 3097161 - DNA, 25 bp, Homo sapien
tgaacttgtcgaagacagcggcgca

SEQ ID NO: 3097162 - DNA, 25 bp, Homo sapien
gcagaaccacatcgctggcgttgcc

SEQ ID NO: 3097163 - DNA, 25 bp, Homo sapien
tggaatacccggacctcatcggtgc

SEQ ID NO: 3097164 - DNA, 25 bp, Homo sapien
tctggttacttagcagctccaggaa

SEQ ID NO: 3097165 - DNA, 25 bp, Homo sapien
ccagaacctcagtcaggggtggaga

SEQ ID NO: 3097166 - DNA, 25 bp, Homo sapien
cagcatagcctgagaaggtgcccgg

SEQ ID NO: 3097167 - DNA, 25 bp, Homo sapien
aggaacacagcatagcctgagaagg

SEQ ID NO: 3097168 - DNA, 25 bp, Homo sapien
ccgggcccagaacctcagtcagggg

SEQ ID NO: 3097169 - DNA, 25 bp, Homo sapien
tgggtgaccaggcccaccaaggtca

SEQ ID NO: 3097170 - DNA, 25 bp, Homo sapien
ctgcatgggtgaccaggcccaccaa

SEQ ID NO: 3097171 - DNA, 25 bp, Homo sapien
accaaggtcagcatggcccagaagc

SEQ ID NO: 3097172 - DNA, 25 bp, Homo sapien
catgggtgaccaggcccaccaaggt

SEQ ID NO: 3097173 - DNA, 25 bp, Homo sapien
gagtagcctctcctaggcatcttta

SEQ ID NO: 3097174 - DNA, 25 bp, Homo sapien
ggcatctttatgctcagcccccaag

SEQ ID NO: 3097175 - DNA, 25 bp, Homo sapien
gagggacggtgaagcccagaccact

SEQ ID NO: 3097176 - DNA, 25 bp, Homo sapien
ccccaagtccactggagggacggtg

SEQ ID NO: 3097177 - DNA, 25 bp, Homo sapien
cttcctagatgagacgagatcgggt

SEQ ID NO: 3097178 - DNA, 25 bp, Homo sapien
gacagcagactgcatagcgtctgag

SEQ ID NO: 3097179 - DNA, 25 bp, Homo sapien
agacagcagactgcatagcgtctga

SEQ ID NO: 3097180 - DNA, 25 bp, Homo sapien
agactgcatagcgtctgagaggggc

SEQ ID NO: 3097181 - DNA, 25 bp, Homo sapien
gaggcagactcagagcaggcttctc

SEQ ID NO: 3097182 - DNA, 25 bp, Homo sapien
gaaggcaagtgcgggggcgaggcag

SEQ ID NO: 3097183 - DNA, 25 bp, Homo sapien
ggcgaggcagactcagagcaggctt

SEQ ID NO: 3097184 - DNA, 25 bp, Homo sapien
agactcagagcaggcttctcaggct

SEQ ID NO: 3097185 - DNA, 25 bp, Homo sapien
gtcctgccccggatgggggtttgca

SEQ ID NO: 3097186 - DNA, 25 bp, Homo sapien
gggtgactggagaagactgccacca

SEQ ID NO: 3097187 - DNA, 25 bp, Homo sapien
tgttggggtgaagtcagtgaaggtc

SEQ ID NO: 3097188 - DNA, 25 bp, Homo sapien
tgactggagaagactgccaccaggg

SEQ ID NO: 3097189 - DNA, 25 bp, Homo sapien
agaggagcgcttggtgacgatccca

SEQ ID NO: 3097190 - DNA, 25 bp, Homo sapien
gaacctcggtgtgcggtgtgtccac

SEQ ID NO: 3097191 - DNA, 25 bp, Homo sapien
gacgatcccacgtacgcttggtgac

SEQ ID NO: 3097192 - DNA, 25 bp, Homo sapien
gtgcgtgcaaaaggcgaacctcggt

SEQ ID NO: 3097193 - DNA, 25 bp, Homo sapien
cctcaccagccggaaagtacgagtc

SEQ ID NO: 3097194 - DNA, 25 bp, Homo sapien
gggcgtggcagtcaacagcaacaac

SEQ ID NO: 3097195 - DNA, 25 bp, Homo sapien
ccgagcccagaaagtgagtgcgcgt

SEQ ID NO: 3097196 - DNA, 25 bp, Homo sapien
cacacgccggcagggccagaaactc

SEQ ID NO: 3097197 - DNA, 25 bp, Homo sapien
cgattagcgccctgaatggaggtga

SEQ ID NO: 3097198 - DNA, 25 bp, Homo sapien
accctcgccgaaagcaaggagccct

SEQ ID NO: 3097199 - DNA, 25 bp, Homo sapien
tgatgtaacggtgatgcaggctcca

SEQ ID NO: 3097200 - DNA, 25 bp, Homo sapien
gcgggcgcccgattagcgccctgaa

SEQ ID NO: 3097201 - DNA, 25 bp, Homo sapien
cttcttatcgatggggtaaacgcct

SEQ ID NO: 3097202 - DNA, 25 bp, Homo sapien
cctgtgcgccttcttatcgatgggg

SEQ ID NO: 3097203 - DNA, 25 bp, Homo sapien
tacacactgaggccgctccttccag

SEQ ID NO: 3097204 - DNA, 25 bp, Homo sapien
tcgatggggtaaacgcctgagcgcc

SEQ ID NO: 3097205 - DNA, 25 bp, Homo sapien
cagcctggctgctgggcagcagcat

SEQ ID NO: 3097206 - DNA, 25 bp, Homo sapien
gcagcagcctggctgctgggcagca

SEQ ID NO: 3097207 - DNA, 25 bp, Homo sapien
taaaagcagcagcctggctgctggg

SEQ ID NO: 3097208 - DNA, 25 bp, Homo sapien
agcagcctggctgctgggcagcagc

SEQ ID NO: 3097209 - DNA, 25 bp, Homo sapien
tgctgtggctattccaacatctctg

SEQ ID NO: 3097210 - DNA, 25 bp, Homo sapien
tctgggaatgcaataggggcctgct

SEQ ID NO: 3097211 - DNA, 25 bp, Homo sapien
ttctgggaatgcaataggggcctgc

SEQ ID NO: 3097212 - DNA, 25 bp, Homo sapien
ttccaacatctctggtcagggcctg

SEQ ID NO: 3097213 - DNA, 25 bp, Homo sapien
aggagcctcttgtattttgagccct

SEQ ID NO: 3097214 - DNA, 25 bp, Homo sapien
tatgctggcgctggttcatcactgg

SEQ ID NO: 3097215 - DNA, 25 bp, Homo sapien
tcctgacggtcacccagcaaagagg

SEQ ID NO: 3097216 - DNA, 25 bp, Homo sapien
cctcggacatgctccagagggtcct

SEQ ID NO: 3097217 - DNA, 25 bp, Homo sapien
cttccccgccgtgcggcaccattgt

SEQ ID NO: 3097218 - DNA, 25 bp, Homo sapien
accttccccgccgtgcggcaccatt

SEQ ID NO: 3097219 - DNA, 25 bp, Homo sapien
gaccttccccgccgtgcggcaccat

SEQ ID NO: 3097220 - DNA, 25 bp, Homo sapien
ctgaccttccccgccgtgcggcacc

SEQ ID NO: 3097221 - DNA, 25 bp, Homo sapien
gtttcaaatatcttattgagggaga

SEQ ID NO: 3097222 - DNA, 25 bp, Homo sapien
ttgctcatggctccagaactggtgg

SEQ ID NO: 3097223 - DNA, 25 bp, Homo sapien
ccagaactggtggcaagtttctctg

SEQ ID NO: 3097224 - DNA, 25 bp, Homo sapien
aggagagaattgctcatggctccag

SEQ ID NO: 3097225 - DNA, 25 bp, Homo sapien
gacagagtcgtccagtgcttgagct

SEQ ID NO: 3097226 - DNA, 25 bp, Homo sapien
aaaagggagggtgccatttcctgcg

SEQ ID NO: 3097227 - DNA, 25 bp, Homo sapien
cctcatgggtgttcaaagggcaaca

SEQ ID NO: 3097228 - DNA, 25 bp, Homo sapien
cgagtctcttctggaaacgtggcca

SEQ ID NO: 3097229 - DNA, 25 bp, Homo sapien
ggttcggagaagttcatgtagatag

SEQ ID NO: 3097230 - DNA, 25 bp, Homo sapien
aagttcatgtagataggctgttccc

SEQ ID NO: 3097231 - DNA, 25 bp, Homo sapien
tcggagaagttcatgtagataggct

SEQ ID NO: 3097232 - DNA, 25 bp, Homo sapien
ccttcacaaataccaggagcatgta

SEQ ID NO: 3097233 - DNA, 25 bp, Homo sapien
gggagccgatgaacactgccatatt

SEQ ID NO: 3097234 - DNA, 25 bp, Homo sapien
atattgctgttggtaggtgagcttg

SEQ ID NO: 3097235 - DNA, 25 bp, Homo sapien
tgaacactgccatattgctgttggt

SEQ ID NO: 3097236 - DNA, 25 bp, Homo sapien
gccgatgaacactgccatattgctg

SEQ ID NO: 3097237 - DNA, 25 bp, Homo sapien
gggtcaacgatcactttcacttgag

SEQ ID NO: 3097238 - DNA, 25 bp, Homo sapien
gaggatcttgcatgtatcccagcgc

SEQ ID NO: 3097239 - DNA, 25 bp, Homo sapien
tcacttgagtcccaaggtcaggtcc

SEQ ID NO: 3097240 - DNA, 25 bp, Homo sapien
aaacatctgcgtcatctcgcctgag

SEQ ID NO: 3097241 - DNA, 25 bp, Homo sapien
tgctctggggctctcacagactctg

SEQ ID NO: 3097242 - DNA, 25 bp, Homo sapien
tagtggcattgaaccgtcagggacc

SEQ ID NO: 3097243 - DNA, 25 bp, Homo sapien
ctcccatccttgcttatagtggcat

SEQ ID NO: 3097244 - DNA, 25 bp, Homo sapien
cattgaaccgtcagggacccctgct

SEQ ID NO: 3097245 - DNA, 25 bp, Homo sapien
tgctctggggctctcacggactctg

SEQ ID NO: 3097246 - DNA, 25 bp, Homo sapien
gaggctgagaaggagcagagcaggg

SEQ ID NO: 3097247 - DNA, 25 bp, Homo sapien
ggagcagagcagggggcagccacat

SEQ ID NO: 3097248 - DNA, 25 bp, Homo sapien
ctgagaggctgagaaggagcagagc

SEQ ID NO: 3097249 - DNA, 25 bp, Homo sapien
gagaggctgagaaggagcagagcag

SEQ ID NO: 3097250 - DNA, 25 bp, Homo sapien
gcaaatgcagatcccagatgcactc

SEQ ID NO: 3097251 - DNA, 25 bp, Homo sapien
tcccggctcctcgtccgcctgatct

SEQ ID NO: 3097252 - DNA, 25 bp, Homo sapien
gatcccagatgcactctggaagttc

SEQ ID NO: 3097253 - DNA, 25 bp, Homo sapien
atgcagatcccagatgcactctgga

SEQ ID NO: 3097254 - DNA, 25 bp, Homo sapien
catttaaatgggtgccaggatccag

SEQ ID NO: 3097255 - DNA, 25 bp, Homo sapien
tactgtgttctccatcctggatcac

SEQ ID NO: 3097256 - DNA, 25 bp, Homo sapien
gggtcacgcctgcagtcatggccag

SEQ ID NO: 3097257 - DNA, 25 bp, Homo sapien
ttttagggaagcacacaggtcacac

SEQ ID NO: 3097258 - DNA, 25 bp, Homo sapien
taatcatgtaaacgcacaaaaacca

SEQ ID NO: 3097259 - DNA, 25 bp, Homo sapien
tgtaaacgcacaaaaaccactatct

SEQ ID NO: 3097260 - DNA, 25 bp, Homo sapien
acccacataatcatgtaaacgcaca

SEQ ID NO: 3097261 - DNA, 25 bp, Homo sapien
aacgcacaaaaaccactatctgaaa

SEQ ID NO: 3097262 - DNA, 25 bp, Homo sapien
tatcataaagccaatagcccaggaa

SEQ ID NO: 3097263 - DNA, 25 bp, Homo sapien
ccaggaaagtatatgtggagcacca

SEQ ID NO: 3097264 - DNA, 25 bp, Homo sapien
ggaaaataatttgcgcttgcctagt

SEQ ID NO: 3097265 - DNA, 25 bp, Homo sapien
caaagaacttctaccaattggatca

SEQ ID NO: 3097266 - DNA, 25 bp, Homo sapien
tgatgaacataacaatcggaatgtg

SEQ ID NO: 3097267 - DNA, 25 bp, Homo sapien
agatgatgatgaacataacaatcgg

SEQ ID NO: 3097268 - DNA, 25 bp, Homo sapien
taacaatcggaatgtgagccaggtg

SEQ ID NO: 3097269 - DNA, 25 bp, Homo sapien
gaacataacaatcggaatgtgagcc

SEQ ID NO: 3097270 - DNA, 25 bp, Homo sapien
cggctggactccaatgccaggtcag

SEQ ID NO: 3097271 - DNA, 25 bp, Homo sapien
gggtgttcacggctggactccaatg

SEQ ID NO: 3097272 - DNA, 25 bp, Homo sapien
tgttcacggctggactccaatgcca

SEQ ID NO: 3097273 - DNA, 25 bp, Homo sapien
gactccaatgccaggtcagtgtctg

SEQ ID NO: 3097274 - DNA, 25 bp, Homo sapien
atattctacactcctggacccaggg

SEQ ID NO: 3097275 - DNA, 25 bp, Homo sapien
catgtgacacatgaggatcgggcac

SEQ ID NO: 3097276 - DNA, 25 bp, Homo sapien
tcagaggtattgctgacggcccgag

SEQ ID NO: 3097277 - DNA, 25 bp, Homo sapien
tcagcaaatggaagcagccgcatat

SEQ ID NO: 3097278 - DNA, 25 bp, Homo sapien
caggaagcggacattgctgaacagg

SEQ ID NO: 3097279 - DNA, 25 bp, Homo sapien
gagcaggaagcggacattgctgaac

SEQ ID NO: 3097280 - DNA, 25 bp, Homo sapien
ccaggagcaggaagcggacattgct

SEQ ID NO: 3097281 - DNA, 25 bp, Homo sapien
ttgggccaattctgcctgcttctag

SEQ ID NO: 3097282 - DNA, 25 bp, Homo sapien
cagaggactgggcttatcaaacagg

SEQ ID NO: 3097283 - DNA, 25 bp, Homo sapien
cagggccaccggaccccagagcatc

SEQ ID NO: 3097284 - DNA, 25 bp, Homo sapien
aacaggatgaaactctggccagggc

SEQ ID NO: 3097285 - DNA, 25 bp, Homo sapien
tatcaaacaggatgaaactctggcc

SEQ ID NO: 3097286 - DNA, 25 bp, Homo sapien
gtgtgcacgggcagcttcgtgggag

SEQ ID NO: 3097287 - DNA, 25 bp, Homo sapien
gctgtcctttctggtcacgctgggc

SEQ ID NO: 3097288 - DNA, 25 bp, Homo sapien
caggtgtgcacgggcagcttcgtgg

SEQ ID NO: 3097289 - DNA, 25 bp, Homo sapien
gggctgtcctttctggtcacgctgg

SEQ ID NO: 3097290 - DNA, 25 bp, Homo sapien
atgggatcatgaaagtctcggagcc

SEQ ID NO: 3097291 - DNA, 25 bp, Homo sapien
acggacacctcaacctcgacaatgg

SEQ ID NO: 3097292 - DNA, 25 bp, Homo sapien
aagtctcggagccacggtgtatcca

SEQ ID NO: 3097293 - DNA, 25 bp, Homo sapien
caacctcgacaatgggatcatgaaa

SEQ ID NO: 3097294 - DNA, 25 bp, Homo sapien
agctgaggtttgcaggactgtccct

SEQ ID NO: 3097295 - DNA, 25 bp, Homo sapien
aagctgaggtttgcaggactgtccc

SEQ ID NO: 3097296 - DNA, 25 bp, Homo sapien
cctcctctgtgagattctccagggt

SEQ ID NO: 3097297 - DNA, 25 bp, Homo sapien
tgaagctgaggtttgcaggactgtc

SEQ ID NO: 3097298 - DNA, 25 bp, Homo sapien
tccacaatcttgtcacatcggagaa

SEQ ID NO: 3097299 - DNA, 25 bp, Homo sapien
tcctgtgttccttctcatagcgaca

SEQ ID NO: 3097300 - DNA, 25 bp, Homo sapien
catcggagaatctgtggtggtctgc

SEQ ID NO: 3097301 - DNA, 25 bp, Homo sapien
ggtggtctgcaccagaatttgttga

SEQ ID NO: 3097302 - DNA, 25 bp, Homo sapien
gagctgaagaccgccacgaggccca

SEQ ID NO: 3097303 - DNA, 25 bp, Homo sapien
gagcagagctgaagaccgccacgag

SEQ ID NO: 3097304 - DNA, 25 bp, Homo sapien
cagagctgaagaccgccacgaggcc

SEQ ID NO: 3097305 - DNA, 25 bp, Homo sapien
agcagagctgaagaccgccacgagg

SEQ ID NO: 3097306 - DNA, 25 bp, Homo sapien
ggatggtgctagtggctcctctcaa

SEQ ID NO: 3097307 - DNA, 25 bp, Homo sapien
ctgccactgtgcaagaccccaggag

SEQ ID NO: 3097308 - DNA, 25 bp, Homo sapien
ttctggcttcagtgtgttactcaca

SEQ ID NO: 3097309 - DNA, 25 bp, Homo sapien
cccttgggtggcgatgcagccactt

SEQ ID NO: 3097310 - DNA, 25 bp, Homo sapien
aggaccaggagcaggacgtaggggc

SEQ ID NO: 3097311 - DNA, 25 bp, Homo sapien
tgaggtccgttcacccagacgacgg

SEQ ID NO: 3097312 - DNA, 25 bp, Homo sapien
agagcttctctgaggtccgttcacc

SEQ ID NO: 3097313 - DNA, 25 bp, Homo sapien
gacgacggcacccagcatgctcagg

SEQ ID NO: 3097314 - DNA, 25 bp, Homo sapien
gaggatagcaccgagtatgctcagg

SEQ ID NO: 3097315 - DNA, 25 bp, Homo sapien
tatccggtgataagatggaaagaaa

SEQ ID NO: 3097316 - DNA, 25 bp, Homo sapien
gtccttgaactgtatagatacctca

SEQ ID NO: 3097317 - DNA, 25 bp, Homo sapien
tctctggacagggttccaatgggca

SEQ ID NO: 3097318 - DNA, 25 bp, Homo sapien
gtgtcttcacagagttctcagtact

SEQ ID NO: 3097319 - DNA, 25 bp, Homo sapien
aggtgtcttcacagagttctcagta

SEQ ID NO: 3097320 - DNA, 25 bp, Homo sapien
ggtgtcttcacagagttctcagtac

SEQ ID NO: 3097321 - DNA, 25 bp, Homo sapien
tgtcttcacagagttctcagtactg

SEQ ID NO: 3097322 - DNA, 25 bp, Homo sapien
gtattgttgcaatcccacatcggta

SEQ ID NO: 3097323 - DNA, 25 bp, Homo sapien
atcgggcaggaaaccagacaggcca

SEQ ID NO: 3097324 - DNA, 25 bp, Homo sapien
ggtattttcctgcatcgtctgccgt

SEQ ID NO: 3097325 - DNA, 25 bp, Homo sapien
ccaggatggtccgtgatgatcactt

SEQ ID NO: 3097326 - DNA, 25 bp, Homo sapien
gagtgtcaggtcctctgcacgccca

SEQ ID NO: 3097327 - DNA, 25 bp, Homo sapien
gaccagtggaaccttgagtgtcagg

SEQ ID NO: 3097328 - DNA, 25 bp, Homo sapien
cttgagtgtcaggtcctctgcacgc

SEQ ID NO: 3097329 - DNA, 25 bp, Homo sapien
cagtggaaccttgagtgtcaggtcc

SEQ ID NO: 3097330 - DNA, 25 bp, Homo sapien
tatacgcaagcggtgagtcagcatt

SEQ ID NO: 3097331 - DNA, 25 bp, Homo sapien
tgtttctcgctcgtctatacgcaag

SEQ ID NO: 3097332 - DNA, 25 bp, Homo sapien
taatcccagcatgctgtaaccacag

SEQ ID NO: 3097333 - DNA, 25 bp, Homo sapien
agtcagcattgcttgggcaccaggc

SEQ ID NO: 3097334 - DNA, 25 bp, Homo sapien
cccaggagatgacaaattccttgaa

SEQ ID NO: 3097335 - DNA, 25 bp, Homo sapien
gagatgacaaattccttgaagagat

SEQ ID NO: 3097336 - DNA, 25 bp, Homo sapien
ggagatgacaaattccttgaagaga

SEQ ID NO: 3097337 - DNA, 25 bp, Homo sapien
caggagatgacaaattccttgaaga

SEQ ID NO: 3097338 - DNA, 25 bp, Homo sapien
cctggacaggacgtcaatgggcatt

SEQ ID NO: 3097339 - DNA, 25 bp, Homo sapien
tgttttctactgcattggagacctc

SEQ ID NO: 3097340 - DNA, 25 bp, Homo sapien
gcactgcctctagaaccacagtcaa

SEQ ID NO: 3097341 - DNA, 25 bp, Homo sapien
gactaggaggctgttccctgaagct

SEQ ID NO: 3097342 - DNA, 25 bp, Homo sapien
caagaccttctttgtggtctgttta

SEQ ID NO: 3097343 - DNA, 25 bp, Homo sapien
tcaagaccttctttgtggtctgttt

SEQ ID NO: 3097344 - DNA, 25 bp, Homo sapien
cagaggacggtccccagcatgctca

SEQ ID NO: 3097345 - DNA, 25 bp, Homo sapien
caggaagtgggtgctcttgagcggg

SEQ ID NO: 3097346 - DNA, 25 bp, Homo sapien
ccagcatgctcaggagcagaggcag

SEQ ID NO: 3097347 - DNA, 25 bp, Homo sapien
aacaggaacaggaagtgggtgctct

SEQ ID NO: 3097348 - DNA, 25 bp, Homo sapien
tcaggtatcagatctgacatcatat

SEQ ID NO: 3097349 - DNA, 25 bp, Homo sapien
tggaggctgaccttgctctgaccct

SEQ ID NO: 3097350 - DNA, 25 bp, Homo sapien
tcttgaaggccttggaggctgacct

SEQ ID NO: 3097351 - DNA, 25 bp, Homo sapien
tgacatcatattcttgaaggccttg

SEQ ID NO: 3097352 - DNA, 25 bp, Homo sapien
tgtgaaagccaggcttgctgttgtg

SEQ ID NO: 3097353 - DNA, 25 bp, Homo sapien
gtgaaagccaggcttgctgttgtgg

SEQ ID NO: 3097354 - DNA, 25 bp, Homo sapien
ctgtgaaagccaggcttgctgttgt

SEQ ID NO: 3097355 - DNA, 25 bp, Homo sapien
tgaaagccaggcttgctgttgtggt

SEQ ID NO: 3097356 - DNA, 25 bp, Homo sapien
tgaactttgaccccaagatcaattc

SEQ ID NO: 3097357 - DNA, 25 bp, Homo sapien
acttgaactttgaccccaagatcaa

SEQ ID NO: 3097358 - DNA, 25 bp, Homo sapien
cttgaactttgaccccaagatcaat

SEQ ID NO: 3097359 - DNA, 25 bp, Homo sapien
gaccccaagatcaattccaggtctc

SEQ ID NO: 3097360 - DNA, 25 bp, Homo sapien
tgtccctgatggaaactcgattctt

SEQ ID NO: 3097361 - DNA, 25 bp, Homo sapien
catggtcacggtgaacacgtggttt

SEQ ID NO: 3097362 - DNA, 25 bp, Homo sapien
tcttttgagattctccatggtcacg

SEQ ID NO: 3097363 - DNA, 25 bp, Homo sapien
gattctccatggtcacggtgaacac

SEQ ID NO: 3097364 - DNA, 25 bp, Homo sapien
tacctcctgctctgatccatttgtt

SEQ ID NO: 3097365 - DNA, 25 bp, Homo sapien
ccagtgattttagcggcaatggagt

SEQ ID NO: 3097366 - DNA, 25 bp, Homo sapien
taacaaggatgttacagtaattcca

SEQ ID NO: 3097367 - DNA, 25 bp, Homo sapien
ttgttggaccagtgattttagcggc

SEQ ID NO: 3097368 - DNA, 25 bp, Homo sapien
gaagcagcagagatggggacagcca

SEQ ID NO: 3097369 - DNA, 25 bp, Homo sapien
tgggaggatgagaagcagcagagat

SEQ ID NO: 3097370 - DNA, 25 bp, Homo sapien
ctgggaggatgagaagcagcagaga

SEQ ID NO: 3097371 - DNA, 25 bp, Homo sapien
gcagcagagatggggacagccacat

SEQ ID NO: 3097372 - DNA, 25 bp, Homo sapien
ccttcagggacttgaatccaagctc

SEQ ID NO: 3097373 - DNA, 25 bp, Homo sapien
tccttggtgatcacaggtgtctggt

SEQ ID NO: 3097374 - DNA, 25 bp, Homo sapien
caggtgtctggtgcccttcagggac

SEQ ID NO: 3097375 - DNA, 25 bp, Homo sapien
tgcccttcagggacttgaatccaag

SEQ ID NO: 3097376 - DNA, 25 bp, Homo sapien
tctagtaaacctgtcactgttggca

SEQ ID NO: 3097377 - DNA, 25 bp, Homo sapien
tggcacagaagctggaaatttggct

SEQ ID NO: 3097378 - DNA, 25 bp, Homo sapien
ttgtccatgccaagcgaatgcgcct

SEQ ID NO: 3097379 - DNA, 25 bp, Homo sapien
ccttcctgatggtggcggaaaggat

SEQ ID NO: 3097380 - DNA, 25 bp, Homo sapien
gctgctcgtgggcctgctctgcact

SEQ ID NO: 3097381 - DNA, 25 bp, Homo sapien
ctgctcccgatctccctgaaggggc

SEQ ID NO: 3097382 - DNA, 25 bp, Homo sapien
atcttgacccctttgtccaggatcc

SEQ ID NO: 3097383 - DNA, 25 bp, Homo sapien
tgctcccgatctccctgaaggggct

SEQ ID NO: 3097384 - DNA, 25 bp, Homo sapien
tttggagagatcttgttgtcttaac

SEQ ID NO: 3097385 - DNA, 25 bp, Homo sapien
tggagagatcttgttgtcttaactt

SEQ ID NO: 3097386 - DNA, 25 bp, Homo sapien
gagagatcttgttgtcttaacttct

SEQ ID NO: 3097387 - DNA, 25 bp, Homo sapien
ttttttggagagatcttgttgtctt

SEQ ID NO: 3097388 - DNA, 25 bp, Homo sapien
catgtgggacactgggcaactgcat

SEQ ID NO: 3097389 - DNA, 25 bp, Homo sapien
tgtctttaaatgcaggtgccccgag

SEQ ID NO: 3097390 - DNA, 25 bp, Homo sapien
taattgctaacaggtggtctcagcc

SEQ ID NO: 3097391 - DNA, 25 bp, Homo sapien
tgaaaaacgatatctgctctgcctg

SEQ ID NO: 3097392 - DNA, 25 bp, Homo sapien
gaggagcccactgaggcctgttcac

SEQ ID NO: 3097393 - DNA, 25 bp, Homo sapien
aggaggagcccactgaggcctgttc

SEQ ID NO: 3097394 - DNA, 25 bp, Homo sapien
atcttccaggaggagcccactgagg

SEQ ID NO: 3097395 - DNA, 25 bp, Homo sapien
ctatcttccaggaggagcccactga

SEQ ID NO: 3097396 - DNA, 25 bp, Homo sapien
ccacgagcaggaagtgagggctgct

SEQ ID NO: 3097397 - DNA, 25 bp, Homo sapien
aggaccacgagcaggaagtgagggc

SEQ ID NO: 3097398 - DNA, 25 bp, Homo sapien
gaccacgagcaggaagtgagggctg

SEQ ID NO: 3097399 - DNA, 25 bp, Homo sapien
agaaggaccacgagcaggaagtgag

SEQ ID NO: 3097400 - DNA, 25 bp, Homo sapien
ccccggtgctgaggtttcgcccagg

SEQ ID NO: 3097401 - DNA, 25 bp, Homo sapien
ctccccggtgctgaggtttcgccca

SEQ ID NO: 3097402 - DNA, 25 bp, Homo sapien
gtgctgaggtttcgcccagggttca

SEQ ID NO: 3097403 - DNA, 25 bp, Homo sapien
tgaggtttcgcccagggttcaccac

SEQ ID NO: 3097404 - DNA, 25 bp, Homo sapien
catggtcacagtgaaggcgagagcc

SEQ ID NO: 3097405 - DNA, 25 bp, Homo sapien
gatcgcgtgaccatgaatccaggac

SEQ ID NO: 3097406 - DNA, 25 bp, Homo sapien
gaattttgcaccagtaagatccagc

SEQ ID NO: 3097407 - DNA, 25 bp, Homo sapien
gtggtctctgatggacacgcggcca

SEQ ID NO: 3097408 - DNA, 25 bp, Homo sapien
aaacacaagcccgagtcccaagtct

SEQ ID NO: 3097409 - DNA, 25 bp, Homo sapien
gccccatcagcagccgtctgtctga

SEQ ID NO: 3097410 - DNA, 25 bp, Homo sapien
agatggccccatcagcagccgtctg

SEQ ID NO: 3097411 - DNA, 25 bp, Homo sapien
ctggaaaacacaagcccgagtccca

SEQ ID NO: 3097412 - DNA, 25 bp, Homo sapien
cttaaggggaagattgccagggaga

SEQ ID NO: 3097413 - DNA, 25 bp, Homo sapien
aaggggaagattgccagggagacct

SEQ ID NO: 3097414 - DNA, 25 bp, Homo sapien
attgccagggagacctgggtgtttc

SEQ ID NO: 3097415 - DNA, 25 bp, Homo sapien
agattgccagggagacctgggtgtt

SEQ ID NO: 3097416 - DNA, 25 bp, Homo sapien
ggagtagagctgggagcagccacat

SEQ ID NO: 3097417 - DNA, 25 bp, Homo sapien
gaggcagagaaggagtagagctggg

SEQ ID NO: 3097418 - DNA, 25 bp, Homo sapien
gagaggcagagaaggagtagagctg

SEQ ID NO: 3097419 - DNA, 25 bp, Homo sapien
ctgagaggcagagaaggagtagagc

SEQ ID NO: 3097420 - DNA, 25 bp, Homo sapien
aatctaggtcccagctggaatccaa

SEQ ID NO: 3097421 - DNA, 25 bp, Homo sapien
gaatccaagtatatgtaacggagcc

SEQ ID NO: 3097422 - DNA, 25 bp, Homo sapien
agcctgggtcatccactttctactt

SEQ ID NO: 3097423 - DNA, 25 bp, Homo sapien
ggcttccgtcctcagcaaatctagg

SEQ ID NO: 3097424 - DNA, 25 bp, Homo sapien
aaatgccgataaagcttccctgcaa

SEQ ID NO: 3097425 - DNA, 25 bp, Homo sapien
gcggcacagtacctgggttgcatca

SEQ ID NO: 3097426 - DNA, 25 bp, Homo sapien
ctgctgcctctgtgcggcacagtac

SEQ ID NO: 3097427 - DNA, 25 bp, Homo sapien
tgccttccttgatacctggagcccc

SEQ ID NO: 3097428 - DNA, 25 bp, Homo sapien
caacctaacgttggaagaggcgcca

SEQ ID NO: 3097429 - DNA, 25 bp, Homo sapien
gagacccgattcctaccagggagga

SEQ ID NO: 3097430 - DNA, 25 bp, Homo sapien
tcaacgaccacgtcctgcataaggt

SEQ ID NO: 3097431 - DNA, 25 bp, Homo sapien
cagtgctgaaaacggatgcggcccg

SEQ ID NO: 3097432 - DNA, 25 bp, Homo sapien
gaatttacctacttggttcagacat

SEQ ID NO: 3097433 - DNA, 25 bp, Homo sapien
tttattggtacatgaaatcaaccga

SEQ ID NO: 3097434 - DNA, 25 bp, Homo sapien
cttggtagaataaaaggctgatcac

SEQ ID NO: 3097435 - DNA, 25 bp, Homo sapien
cactgtatctgtccttgccaatcta

SEQ ID NO: 3097436 - DNA, 25 bp, Homo sapien
cagtccccgggttggtcctgatgag

SEQ ID NO: 3097437 - DNA, 25 bp, Homo sapien
ctttcttatgaggacccttgtggtg

SEQ ID NO: 3097438 - DNA, 25 bp, Homo sapien
tcagcccataacatgtggtaggcaa

SEQ ID NO: 3097439 - DNA, 25 bp, Homo sapien
tcaatgggctcaagtcaaggcgtgg

SEQ ID NO: 3097440 - DNA, 25 bp, Homo sapien
gaaatgtcctccttcggcaaggaag

SEQ ID NO: 3097441 - DNA, 25 bp, Homo sapien
gctgtattccgtgggctcctcaggg

SEQ ID NO: 3097442 - DNA, 25 bp, Homo sapien
tggcccatgttgcagtaggtcggtt

SEQ ID NO: 3097443 - DNA, 25 bp, Homo sapien
aaggcctgctgatggtgctgtattc

SEQ ID NO: 3097444 - DNA, 25 bp, Homo sapien
acagcagcccccatggaggacgcac

SEQ ID NO: 3097445 - DNA, 25 bp, Homo sapien
tcacagcagcccccatggaggacgc

SEQ ID NO: 3097446 - DNA, 25 bp, Homo sapien
cacagcagcccccatggaggacgca

SEQ ID NO: 3097447 - DNA, 25 bp, Homo sapien
ggtgacatattccacttccacctgg

SEQ ID NO: 3097448 - DNA, 25 bp, Homo sapien
catggtgacatattccacttccacc

SEQ ID NO: 3097449 - DNA, 25 bp, Homo sapien
tggtgacatattccacttccacctg

SEQ ID NO: 3097450 - DNA, 25 bp, Homo sapien
atggtgacatattccacttccacct

SEQ ID NO: 3097451 - DNA, 25 bp, Homo sapien
tgggcagaggaaagcttcgtggtag

SEQ ID NO: 3097452 - DNA, 25 bp, Homo sapien
ggaaagcttcgtggtagccttttgc

SEQ ID NO: 3097453 - DNA, 25 bp, Homo sapien
aagcttcgtggtagccttttgcggg

SEQ ID NO: 3097454 - DNA, 25 bp, Homo sapien
cagaggaaagcttcgtggtagcctt

SEQ ID NO: 3097455 - DNA, 25 bp, Homo sapien
tgcatagcagaggtcgccctccagg

SEQ ID NO: 3097456 - DNA, 25 bp, Homo sapien
tcaggtctgcatagcagaggtcgcc

SEQ ID NO: 3097457 - DNA, 25 bp, Homo sapien
tctgcatagcagaggtcgccctcca

SEQ ID NO: 3097458 - DNA, 25 bp, Homo sapien
ggtctgcatagcagaggtcgccctc

SEQ ID NO: 3097459 - DNA, 25 bp, Homo sapien
gacaggaatgcaccaagctgtcccc

SEQ ID NO: 3097460 - DNA, 25 bp, Homo sapien
cggcacagtagggaccgattttgtt

SEQ ID NO: 3097461 - DNA, 25 bp, Homo sapien
caaccccgagtagaatgtgcaagct

SEQ ID NO: 3097462 - DNA, 25 bp, Homo sapien
tacaacctgggtgcttggctgtgct

SEQ ID NO: 3097463 - DNA, 25 bp, Homo sapien
ccaagagtgaggcggccaccaaaag

SEQ ID NO: 3097464 - DNA, 25 bp, Homo sapien
gagtgaggcggccaccaaaagcagc

SEQ ID NO: 3097465 - DNA, 25 bp, Homo sapien
agccaagagtgaggcggccaccaaa

SEQ ID NO: 3097466 - DNA, 25 bp, Homo sapien
aagagtgaggcggccaccaaaagca

SEQ ID NO: 3097467 - DNA, 25 bp, Homo sapien
ctgcaggtctgtagtttgcagcctg

SEQ ID NO: 3097468 - DNA, 25 bp, Homo sapien
caggtctgtagtttgcagcctggga

SEQ ID NO: 3097469 - DNA, 25 bp, Homo sapien
tgcaggtctgtagtttgcagcctgg

SEQ ID NO: 3097470 - DNA, 25 bp, Homo sapien
gagctgcaggtctgtagtttgcagc

SEQ ID NO: 3097471 - DNA, 25 bp, Homo sapien
ccggtcagagttggggagctgctag

SEQ ID NO: 3097472 - DNA, 25 bp, Homo sapien
tgttgtccaagtggtggccggtcag

SEQ ID NO: 3097473 - DNA, 25 bp, Homo sapien
tgtccaagtggtggccggtcagagt

SEQ ID NO: 3097474 - DNA, 25 bp, Homo sapien
gagttggggagctgctagtttcttc

SEQ ID NO: 3097475 - DNA, 25 bp, Homo sapien
ctgtaaacgtagtggaggtaggcgt

SEQ ID NO: 3097476 - DNA, 25 bp, Homo sapien
ggagtcgacgctgtagttgatgctt

SEQ ID NO: 3097477 - DNA, 25 bp, Homo sapien
agtcgacgctgtagttgatgcttgg

SEQ ID NO: 3097478 - DNA, 25 bp, Homo sapien
caggagtcgacgctgtagttgatgc

SEQ ID NO: 3097479 - DNA, 25 bp, Homo sapien
gctctgacccactggttttaacaag

SEQ ID NO: 3097480 - DNA, 25 bp, Homo sapien
ttgttggaccggtgatttgagtgac

SEQ ID NO: 3097481 - DNA, 25 bp, Homo sapien
ttaacaaggatcttgcagtcacgcc

SEQ ID NO: 3097482 - DNA, 25 bp, Homo sapien
tgtaaacacactgcacggtcaagga

SEQ ID NO: 3097483 - DNA, 25 bp, Homo sapien
tgatgaccctcatgaggtcgagctg

SEQ ID NO: 3097484 - DNA, 25 bp, Homo sapien
actcttagcactgatgaccctcatg

SEQ ID NO: 3097485 - DNA, 25 bp, Homo sapien
tcatgaggtcgagctgaggcagcca

SEQ ID NO: 3097486 - DNA, 25 bp, Homo sapien
accctcatgaggtcgagctgaggca

SEQ ID NO: 3097487 - DNA, 25 bp, Homo sapien
tgcctttgaagttgatcaaaacagc

SEQ ID NO: 3097488 - DNA, 25 bp, Homo sapien
agcaacggcaactggtctccatgtg

SEQ ID NO: 3097489 - DNA, 25 bp, Homo sapien
ataaaccaccctggatgaatgcctt

SEQ ID NO: 3097490 - DNA, 25 bp, Homo sapien
accaccctggatgaatgcctttgaa

SEQ ID NO: 3097491 - DNA, 25 bp, Homo sapien
aagaggagcaggtagagtgtcagca

SEQ ID NO: 3097492 - DNA, 25 bp, Homo sapien
gaggagcaggtagagtgtcagcagg

SEQ ID NO: 3097493 - DNA, 25 bp, Homo sapien
agaagaggagcaggtagagtgtcag

SEQ ID NO: 3097494 - DNA, 25 bp, Homo sapien
aggagcaggtagagtgtcagcaggg

SEQ ID NO: 3097495 - DNA, 25 bp, Homo sapien
gaacaaactacagactcccagcctt

SEQ ID NO: 3097496 - DNA, 25 bp, Homo sapien
ttctcttcagacaggtccccgttcc

SEQ ID NO: 3097497 - DNA, 25 bp, Homo sapien
ggtactcactctcgcccttgaactt

SEQ ID NO: 3097498 - DNA, 25 bp, Homo sapien
cagcaggaacaaactacagactccc

SEQ ID NO: 3097499 - DNA, 25 bp, Homo sapien
tgagggcaggtaatgactccatcgc

SEQ ID NO: 3097500 - DNA, 25 bp, Homo sapien
ctggatccccaaaaaaccgaggctg

SEQ ID NO: 3097501 - DNA, 25 bp, Homo sapien
ggcccttgtgctgtgaggaagacca

SEQ ID NO: 3097502 - DNA, 25 bp, Homo sapien
acaaaggtggtgttgctccagctca

SEQ ID NO: 3097503 - DNA, 25 bp, Homo sapien
agtcagcggctccagtttgggcccg

SEQ ID NO: 3097504 - DNA, 25 bp, Homo sapien
ctgcagctctgccggcctggagggg

SEQ ID NO: 3097505 - DNA, 25 bp, Homo sapien
cagctctgccggcctggagggggag

SEQ ID NO: 3097506 - DNA, 25 bp, Homo sapien
gcccgataaggaagttctccgtggc

SEQ ID NO: 3097507 - DNA, 25 bp, Homo sapien
agggagcctgtccttaatccagtag

SEQ ID NO: 3097508 - DNA, 25 bp, Homo sapien
cagggtccgaattcccctctagcct

SEQ ID NO: 3097509 - DNA, 25 bp, Homo sapien
gaattcccctctagcctctaagcct

SEQ ID NO: 3097510 - DNA, 25 bp, Homo sapien
ggagtggtgtcgcaacctcgcctcg

SEQ ID NO: 3097511 - DNA, 25 bp, Homo sapien
tagctggagggccatcaacctcttt

SEQ ID NO: 3097512 - DNA, 25 bp, Homo sapien
tctggtagggcagaacagagcttga

SEQ ID NO: 3097513 - DNA, 25 bp, Homo sapien
atcccagagtcagagtgcaggcacc

SEQ ID NO: 3097514 - DNA, 25 bp, Homo sapien
tggcaaaacagtgtagcccctggtt

SEQ ID NO: 3097515 - DNA, 25 bp, Homo sapien
tgttacttcagtgttgagccccaat

SEQ ID NO: 3097516 - DNA, 25 bp, Homo sapien
tgtacttgagcaactgactccagct

SEQ ID NO: 3097517 - DNA, 25 bp, Homo sapien
aaacacatgtaaagagctcggtgcc

SEQ ID NO: 3097518 - DNA, 25 bp, Homo sapien
tgcccgtcagccatgtgtacttgag

SEQ ID NO: 3097519 - DNA, 25 bp, Homo sapien
ggtccagggctgatcaaagaactct

SEQ ID NO: 3097520 - DNA, 25 bp, Homo sapien
actgagtgcctcatcctaccgggtg

SEQ ID NO: 3097521 - DNA, 25 bp, Homo sapien
tccctgagccaggtaccaccattgt

SEQ ID NO: 3097522 - DNA, 25 bp, Homo sapien
catgccaggatcatgggaccaggcg

SEQ ID NO: 3097523 - DNA, 25 bp, Homo sapien
tactgaggcatgttttcggttccag

SEQ ID NO: 3097524 - DNA, 25 bp, Homo sapien
tactttgtaagccatagggtgccag

SEQ ID NO: 3097525 - DNA, 25 bp, Homo sapien
tggaagatgccctacaagcctcctg

SEQ ID NO: 3097526 - DNA, 25 bp, Homo sapien
cagagtgctcccctcaggtggaagg

SEQ ID NO: 3097527 - DNA, 25 bp, Homo sapien
tggaccacctgttgttcccgggtca

SEQ ID NO: 3097528 - DNA, 25 bp, Homo sapien
taatgcctttaaactcaagactggc

SEQ ID NO: 3097529 - DNA, 25 bp, Homo sapien
gccacaaggagctgtatctaacact

SEQ ID NO: 3097530 - DNA, 25 bp, Homo sapien
gagaggaggacggacactaggttga

SEQ ID NO: 3097531 - DNA, 25 bp, Homo sapien
ccagagtctgaagggcctcgaaagg

SEQ ID NO: 3097532 - DNA, 25 bp, Homo sapien
tcagccacaccactagctggaggga

SEQ ID NO: 3097533 - DNA, 25 bp, Homo sapien
tagctcttcacatggaccaaacggg

SEQ ID NO: 3097534 - DNA, 25 bp, Homo sapien
tcgaaaggtgattcccagcctgggc

SEQ ID NO: 3097535 - DNA, 25 bp, Homo sapien
agggctctgccgacccatctctgta

SEQ ID NO: 3097536 - DNA, 25 bp, Homo sapien
gctctgccgacccatctctgtaagg

SEQ ID NO: 3097537 - DNA, 25 bp, Homo sapien
ttccacgtggctggtctgctccaga

SEQ ID NO: 3097538 - DNA, 25 bp, Homo sapien
tcttccacgtggctggtctgctcca

SEQ ID NO: 3097539 - DNA, 25 bp, Homo sapien
actgatgctcggactcactcactgt

SEQ ID NO: 3097540 - DNA, 25 bp, Homo sapien
cactcactgtcagtctgagggtcac

SEQ ID NO: 3097541 - DNA, 25 bp, Homo sapien
ccactgatgctcggactcactcact

SEQ ID NO: 3097542 - DNA, 25 bp, Homo sapien
cactgatgctcggactcactcactg

SEQ ID NO: 3097543 - DNA, 25 bp, Homo sapien
tgcttggttcatttccttgcccaat

SEQ ID NO: 3097544 - DNA, 25 bp, Homo sapien
agtttctggaacatccggatgcttg

SEQ ID NO: 3097545 - DNA, 25 bp, Homo sapien
aagtttctggaacatccggatgctt

SEQ ID NO: 3097546 - DNA, 25 bp, Homo sapien
ttcccgcattgtctgctcacacttt

SEQ ID NO: 3097547 - DNA, 25 bp, Homo sapien
cctgcccacttcccgcattgtctgc

SEQ ID NO: 3097548 - DNA, 25 bp, Homo sapien
gggcaagtaaggaggcgcctgcccc

SEQ ID NO: 3097549 - DNA, 25 bp, Homo sapien
gacaggggcaagtaaggaggcgcct

SEQ ID NO: 3097550 - DNA, 25 bp, Homo sapien
agcatcgcgagaacggcctcagtgc

SEQ ID NO: 3097551 - DNA, 25 bp, Homo sapien
ccaaggcccttacccctgcagctgg

SEQ ID NO: 3097552 - DNA, 25 bp, Homo sapien
agacagcatcgcgagaacggcctca

SEQ ID NO: 3097553 - DNA, 25 bp, Homo sapien
cgtaagacagcatcgcgagaacggc

SEQ ID NO: 3097554 - DNA, 25 bp, Homo sapien
tccagtgcgggcacttggcagacac

SEQ ID NO: 3097555 - DNA, 25 bp, Homo sapien
acgccgtgtgccaggctccagtgcg

SEQ ID NO: 3097556 - DNA, 25 bp, Homo sapien
aactctgaagttgctactatcatta

SEQ ID NO: 3097557 - DNA, 25 bp, Homo sapien
cacttggcagacaccatctcattta

SEQ ID NO: 3097558 - DNA, 25 bp, Homo sapien
ggcacaaagaagtgtgaaaggcctc

SEQ ID NO: 3097559 - DNA, 25 bp, Homo sapien
cacaaagaagtgtgaaaggcctcac

SEQ ID NO: 3097560 - DNA, 25 bp, Homo sapien
caggcacaaagaagtgtgaaaggcc

SEQ ID NO: 3097561 - DNA, 25 bp, Homo sapien
tgcagacgaggaaacaggcacaaag

SEQ ID NO: 3097562 - DNA, 25 bp, Homo sapien
taagttcacgcctaagcataaggac

SEQ ID NO: 3097563 - DNA, 25 bp, Homo sapien
agcctcggcaggctcagtcagcaga

SEQ ID NO: 3097564 - DNA, 25 bp, Homo sapien
tgggactaaccatacttgaatctac

SEQ ID NO: 3097565 - DNA, 25 bp, Homo sapien
tcccagtgaaccctgtgagtgccca

SEQ ID NO: 3097566 - DNA, 25 bp, Homo sapien
tcatgacctcgatctcccccaaggt

SEQ ID NO: 3097567 - DNA, 25 bp, Homo sapien
tgcaatcatgacctcgatctccccc

SEQ ID NO: 3097568 - DNA, 25 bp, Homo sapien
gaggtcttctagatctgtgaggaag

SEQ ID NO: 3097569 - DNA, 25 bp, Homo sapien
tgtgaggaagaggttcacatctccc

SEQ ID NO: 3097570 - DNA, 25 bp, Homo sapien
gggcagggcctcaatttacagccag

SEQ ID NO: 3097571 - DNA, 25 bp, Homo sapien
gatggtactcctacccaagccagag

SEQ ID NO: 3097572 - DNA, 25 bp, Homo sapien
aaatccttccaagcccgatgcagtg

SEQ ID NO: 3097573 - DNA, 25 bp, Homo sapien
gcttcagggccatgagaatacagga

SEQ ID NO: 3097574 - DNA, 25 bp, Homo sapien
tcagcggctccgaggctgtcaaacg

SEQ ID NO: 3097575 - DNA, 25 bp, Homo sapien
tccgaggctgtcaaacgctgcagct

SEQ ID NO: 3097576 - DNA, 25 bp, Homo sapien
gctcctctgatttcatccactcgtg

SEQ ID NO: 3097577 - DNA, 25 bp, Homo sapien
tgcactgcatggcatactcctgctc

SEQ ID NO: 3097578 - DNA, 25 bp, Homo sapien
gacgagtcagttctatctgtccaat

SEQ ID NO: 3097579 - DNA, 25 bp, Homo sapien
cctatcctgtctcgggtcagtgcgg

SEQ ID NO: 3097580 - DNA, 25 bp, Homo sapien
tatctgtccaatttcctatcctgtc

SEQ ID NO: 3097581 - DNA, 25 bp, Homo sapien
aagaacagcaggacgagtcagttct

SEQ ID NO: 3097582 - DNA, 25 bp, Homo sapien
gaagttagggcaccaggaaccctca

SEQ ID NO: 3097583 - DNA, 25 bp, Homo sapien
caacctcaacaaaggcggctggaca

SEQ ID NO: 3097584 - DNA, 25 bp, Homo sapien
gcggctggacagatcccacgaagtt

SEQ ID NO: 3097585 - DNA, 25 bp, Homo sapien
ggatgtatatggcaagccaacctca

SEQ ID NO: 3097586 - DNA, 25 bp, Homo sapien
tcactaatttacaattaggtgagaa

SEQ ID NO: 3097587 - DNA, 25 bp, Homo sapien
cacgtttagtttacataaagcaatt

SEQ ID NO: 3097588 - DNA, 25 bp, Homo sapien
atcactaatttacaattaggtgaga

SEQ ID NO: 3097589 - DNA, 25 bp, Homo sapien
ttccacgtttagtttacataaagca

SEQ ID NO: 3097590 - DNA, 25 bp, Homo sapien
gctgtaccttacacagctctgggtg

SEQ ID NO: 3097591 - DNA, 25 bp, Homo sapien
tcttaggggaaatagccctgagact

SEQ ID NO: 3097592 - DNA, 25 bp, Homo sapien
tgagactggggctgtaccttacaca

SEQ ID NO: 3097593 - DNA, 25 bp, Homo sapien
tcttcttaggggaaatagccctgag

SEQ ID NO: 3097594 - DNA, 25 bp, Homo sapien
catgctccgaggtgtagggtacaag

SEQ ID NO: 3097595 - DNA, 25 bp, Homo sapien
ctgggcacatgctccgaggtgtagg

SEQ ID NO: 3097596 - DNA, 25 bp, Homo sapien
cacatgctccgaggtgtagggtaca

SEQ ID NO: 3097597 - DNA, 25 bp, Homo sapien
ggcacatgctccgaggtgtagggta

SEQ ID NO: 3097598 - DNA, 25 bp, Homo sapien
caaggcgggcttagtcttaggccct

SEQ ID NO: 3097599 - DNA, 25 bp, Homo sapien
ggcgttctagaccactctcttcgac

SEQ ID NO: 3097600 - DNA, 25 bp, Homo sapien
acgcggacccgggtactgccaagct

SEQ ID NO: 3097601 - DNA, 25 bp, Homo sapien
ctcttcgaccctccaaccacgcgga

SEQ ID NO: 3097602 - DNA, 25 bp, Homo sapien
aatcgtcccccgcagaaagggtgat

SEQ ID NO: 3097603 - DNA, 25 bp, Homo sapien
atcgtcccccgcagaaagggtgatc

SEQ ID NO: 3097604 - DNA, 25 bp, Homo sapien
caccgacgaaatcgtcccccgcaga

SEQ ID NO: 3097605 - DNA, 25 bp, Homo sapien
cgacgaaatcgtcccccgcagaaag

SEQ ID NO: 3097606 - DNA, 25 bp, Homo sapien
cgccccttccgcatgcgcgtgagaa

SEQ ID NO: 3097607 - DNA, 25 bp, Homo sapien
ttccgcatgcgcgtgagaacgcgcc

SEQ ID NO: 3097608 - DNA, 25 bp, Homo sapien
ggctaccgccccttccgcatgcgcg

SEQ ID NO: 3097609 - DNA, 25 bp, Homo sapien
ccagccacgttcccaggcccggccg

SEQ ID NO: 3097610 - DNA, 25 bp, Homo sapien
taggctttccgttgggtaccctgca

SEQ ID NO: 3097611 - DNA, 25 bp, Homo sapien
aagccagcagcttgagaccagtgac

SEQ ID NO: 3097612 - DNA, 25 bp, Homo sapien
taacccttaggtcatagggccctgc

SEQ ID NO: 3097613 - DNA, 25 bp, Homo sapien
gactagagccctgtgttcccaactt

SEQ ID NO: 3097614 - DNA, 25 bp, Homo sapien
catatgacacagaagcacgcagagt

SEQ ID NO: 3097615 - DNA, 25 bp, Homo sapien
cacgcagagtcggagcctttcttct

SEQ ID NO: 3097616 - DNA, 25 bp, Homo sapien
ttgtgctctaatgttgacgccctca

SEQ ID NO: 3097617 - DNA, 25 bp, Homo sapien
cacacgctccgtggtgcggttaaag

SEQ ID NO: 3097618 - DNA, 25 bp, Homo sapien
tcctttcatgagaggccgtgcaggg

SEQ ID NO: 3097619 - DNA, 25 bp, Homo sapien
gaagaccaagtacctgcagatcctg

SEQ ID NO: 3097620 - DNA, 25 bp, Homo sapien
gatcggtgagtctgagaaacagctc

SEQ ID NO: 3097621 - DNA, 25 bp, Homo sapien
cctctctgatgagatggatcggtga

SEQ ID NO: 3097622 - DNA, 25 bp, Homo sapien
gccagcacggctttgggcgtctgtt

SEQ ID NO: 3097623 - DNA, 25 bp, Homo sapien
gctgagcatgagtgccattgtcctc

SEQ ID NO: 3097624 - DNA, 25 bp, Homo sapien
cagctgcggtctgggcgtctgttcc

SEQ ID NO: 3097625 - DNA, 25 bp, Homo sapien
ggcgtctgttggacccctcttctgc

SEQ ID NO: 3097626 - DNA, 25 bp, Homo sapien
gatcgaggcttctccgccaagttcc

SEQ ID NO: 3097627 - DNA, 25 bp, Homo sapien
ggccgtgttgttagcgcagcacctg

SEQ ID NO: 3097628 - DNA, 25 bp, Homo sapien
ggcatttactcccaaggtgcacagt

SEQ ID NO: 3097629 - DNA, 25 bp, Homo sapien
cccgtgtgggacaggcggcatttac

SEQ ID NO: 3097630 - DNA, 25 bp, Homo sapien
cagggccgagtgacagacagctaga

SEQ ID NO: 3097631 - DNA, 25 bp, Homo sapien
gaggaaatcccacagtcagggctgt

SEQ ID NO: 3097632 - DNA, 25 bp, Homo sapien
gctgctctggaggacgccagttaga

SEQ ID NO: 3097633 - DNA, 25 bp, Homo sapien
cagggatgctcacgtccagacagct

SEQ ID NO: 3097634 - DNA, 25 bp, Homo sapien
cagaactctgcgtgagaagaggaca

SEQ ID NO: 3097635 - DNA, 25 bp, Homo sapien
cagtaactggctagccccagggaag

SEQ ID NO: 3097636 - DNA, 25 bp, Homo sapien
catgatttgaggctactgaggtcac

SEQ ID NO: 3097637 - DNA, 25 bp, Homo sapien
gcctgccgcttaaccctgacagtgg

SEQ ID NO: 3097638 - DNA, 25 bp, Homo sapien
cctggcaggcctcccggtagatcgg

SEQ ID NO: 3097639 - DNA, 25 bp, Homo sapien
gggaagccttgcgtcccacgggcta

SEQ ID NO: 3097640 - DNA, 25 bp, Homo sapien
caaaatggcaggtgggcgtgggcgt

SEQ ID NO: 3097641 - DNA, 25 bp, Homo sapien
gactggagatccgtctccaggtgca

SEQ ID NO: 3097642 - DNA, 25 bp, Homo sapien
gggcggccggatcggtcggctcgag

SEQ ID NO: 3097643 - DNA, 25 bp, Homo sapien
tcggctcgaggaaaggagctgtagt

SEQ ID NO: 3097644 - DNA, 25 bp, Homo sapien
aaaggagctgtagtgacagcgcgcg

SEQ ID NO: 3097645 - DNA, 25 bp, Homo sapien
cggatcggtcggctcgaggaaagga

SEQ ID NO: 3097646 - DNA, 25 bp, Homo sapien
ggtgcctcccgcagtgcccggtccg

SEQ ID NO: 3097647 - DNA, 25 bp, Homo sapien
gccgagaggtgcctcccgcagtgcc

SEQ ID NO: 3097648 - DNA, 25 bp, Homo sapien
ggaggccgagaggtgcctcccgcag

SEQ ID NO: 3097649 - DNA, 25 bp, Homo sapien
agaggtgcctcccgcagtgcccggt

SEQ ID NO: 3097650 - DNA, 25 bp, Homo sapien
ctgggcggcgcgacactcgggagac

SEQ ID NO: 3097651 - DNA, 25 bp, Homo sapien
agccctgcgcacaagcgccgcgcga

SEQ ID NO: 3097652 - DNA, 25 bp, Homo sapien
ggagccctgcgcacaagcgccgcgc

SEQ ID NO: 3097653 - DNA, 25 bp, Homo sapien
cgcgacactcgggagacgtcggaca

SEQ ID NO: 3097654 - DNA, 25 bp, Homo sapien
gccaccccaattctcgatggtgcga

SEQ ID NO: 3097655 - DNA, 25 bp, Homo sapien
caattctcgatggtgcgagtggcgc

SEQ ID NO: 3097656 - DNA, 25 bp, Homo sapien
ggccgccaccccaattctcgatggt

SEQ ID NO: 3097657 - DNA, 25 bp, Homo sapien
ccccaattctcgatggtgcgagtgg

SEQ ID NO: 3097658 - DNA, 25 bp, Homo sapien
tctgcaccccgctgaagcagctgta

SEQ ID NO: 3097659 - DNA, 25 bp, Homo sapien
cgccgtggtcaccatgtcgcgggct

SEQ ID NO: 3097660 - DNA, 25 bp, Homo sapien
tgccgcggtgggctggcgaggctct

SEQ ID NO: 3097661 - DNA, 25 bp, Homo sapien
tggtcaccatgtcgcgggctgcctg

SEQ ID NO: 3097662 - DNA, 25 bp, Homo sapien
tcaggaagtagctaactgtgaagca

SEQ ID NO: 3097663 - DNA, 25 bp, Homo sapien
taatcactctagctagcacctggca

SEQ ID NO: 3097664 - DNA, 25 bp, Homo sapien
cctggcacatgaaggttccaacctg

SEQ ID NO: 3097665 - DNA, 25 bp, Homo sapien
agatgaatgagtggtctgagcgccc

SEQ ID NO: 3097666 - DNA, 25 bp, Homo sapien
ccagcccggacttatctgggtaggt

SEQ ID NO: 3097667 - DNA, 25 bp, Homo sapien
tgcccttaaaactttggcctgtgtg

SEQ ID NO: 3097668 - DNA, 25 bp, Homo sapien
gcccggacttatctgggtaggtgcc

SEQ ID NO: 3097669 - DNA, 25 bp, Homo sapien
ccatggccagcccggacttatctgg

SEQ ID NO: 3097670 - DNA, 25 bp, Homo sapien
gttcttctcattctggcagatccct

SEQ ID NO: 3097671 - DNA, 25 bp, Homo sapien
ttgggcaccgagtggcgcagcttcc

SEQ ID NO: 3097672 - DNA, 25 bp, Homo sapien
cagctgggatgagttgggcaccgag

SEQ ID NO: 3097673 - DNA, 25 bp, Homo sapien
ggatgagttgggcaccgagtggcgc

SEQ ID NO: 3097674 - DNA, 25 bp, Homo sapien
aagagcgccaggtctatggcccgct

SEQ ID NO: 3097675 - DNA, 25 bp, Homo sapien
gatgccgtagccagtggtagcaaag

SEQ ID NO: 3097676 - DNA, 25 bp, Homo sapien
tatggcccgcttccagtgggagtcc

SEQ ID NO: 3097677 - DNA, 25 bp, Homo sapien
cagtgggagtccttctgcatggcga

SEQ ID NO: 3097678 - DNA, 25 bp, Homo sapien
tgaactttgattggcaccacagctg

SEQ ID NO: 3097679 - DNA, 25 bp, Homo sapien
taagactcagagaaggtcccaacca

SEQ ID NO: 3097680 - DNA, 25 bp, Homo sapien
gtccccacattgagagctaaggctg

SEQ ID NO: 3097681 - DNA, 25 bp, Homo sapien
tctgagacacatggtggccttccat

SEQ ID NO: 3097682 - DNA, 25 bp, Homo sapien
catcttgaggctggtgagcgcgtcc

SEQ ID NO: 3097683 - DNA, 25 bp, Homo sapien
tccaccgagcgctggttgaacttga

SEQ ID NO: 3097684 - DNA, 25 bp, Homo sapien
ttgaacttgaccatgtgggtgtgca

SEQ ID NO: 3097685 - DNA, 25 bp, Homo sapien
tgggtgtgcatgtcacggtagttac

SEQ ID NO: 3097686 - DNA, 25 bp, Homo sapien
agccccagtgtggacttgcatagtc

SEQ ID NO: 3097687 - DNA, 25 bp, Homo sapien
acagggagagacttacccaaggcct

SEQ ID NO: 3097688 - DNA, 25 bp, Homo sapien
agtcagagcagaaggtcttaaaggc

SEQ ID NO: 3097689 - DNA, 25 bp, Homo sapien
tctgaggcccaagacagggagagac

SEQ ID NO: 3097690 - DNA, 25 bp, Homo sapien
cagtgtcgatgtattgctcttggat

SEQ ID NO: 3097691 - DNA, 25 bp, Homo sapien
actgagttgttgaagaccagcgccc

SEQ ID NO: 3097692 - DNA, 25 bp, Homo sapien
cccgcgggttctcgatgggcactga

SEQ ID NO: 3097693 - DNA, 25 bp, Homo sapien
tcttgtcactgaggcccgacacagt

SEQ ID NO: 3097694 - DNA, 25 bp, Homo sapien
atagtgaaagctgggcccccggact

SEQ ID NO: 3097695 - DNA, 25 bp, Homo sapien
gggcaagaggcggggggatgctgga

SEQ ID NO: 3097696 - DNA, 25 bp, Homo sapien
gaggcggggggatgctggagctcct

SEQ ID NO: 3097697 - DNA, 25 bp, Homo sapien
ctgggggcaagaggcggggggatgc

SEQ ID NO: 3097698 - DNA, 25 bp, Homo sapien
aagaggcggggggatgctggagctc

SEQ ID NO: 3097699 - DNA, 25 bp, Homo sapien
cgaacatgaagacggtgatggccac

SEQ ID NO: 3097700 - DNA, 25 bp, Homo sapien
tactcgaacatgaagacggtgatgg

SEQ ID NO: 3097701 - DNA, 25 bp, Homo sapien
agggctgaagtactcgaacatgaag

SEQ ID NO: 3097702 - DNA, 25 bp, Homo sapien
gaagtactcgaacatgaagacggtg

SEQ ID NO: 3097703 - DNA, 25 bp, Homo sapien
actgatgcccgtctccacaaagggt

SEQ ID NO: 3097704 - DNA, 25 bp, Homo sapien
ggtacagagaagtctacgatctcgg

SEQ ID NO: 3097705 - DNA, 25 bp, Homo sapien
agacggtgccattgctgcgagccac

SEQ ID NO: 3097706 - DNA, 25 bp, Homo sapien
tctacgatctcggagcgttcctcat

SEQ ID NO: 3097707 - DNA, 25 bp, Homo sapien
gaggatgtcgatgcagaatccctta

SEQ ID NO: 3097708 - DNA, 25 bp, Homo sapien
gttggtcaccaggtacaggtcgtag

SEQ ID NO: 3097709 - DNA, 25 bp, Homo sapien
gagaatttgaccactctggccagct

SEQ ID NO: 3097710 - DNA, 25 bp, Homo sapien
cgcttgccatgcttgccgttggtca

SEQ ID NO: 3097711 - DNA, 25 bp, Homo sapien
acaaagggccgctcttccagcgtgg

SEQ ID NO: 3097712 - DNA, 25 bp, Homo sapien
gagaggcactgtagcgaggccacac

SEQ ID NO: 3097713 - DNA, 25 bp, Homo sapien
tcatgtataggacgccatgctccca

SEQ ID NO: 3097714 - DNA, 25 bp, Homo sapien
gggtcagggctctccacgatgacaa

SEQ ID NO: 3097715 - DNA, 25 bp, Homo sapien
gatcaccaccatggtgggctggacc

SEQ ID NO: 3097716 - DNA, 25 bp, Homo sapien
ggcggtgccggttgagggcgatcac

SEQ ID NO: 3097717 - DNA, 25 bp, Homo sapien
tggaccaggtacccaccagggctga

SEQ ID NO: 3097718 - DNA, 25 bp, Homo sapien
cctcccaggtgacattcagtaggtg

SEQ ID NO: 3097719 - DNA, 25 bp, Homo sapien
tctcggtgacgacgctgatgaggcc

SEQ ID NO: 3097720 - DNA, 25 bp, Homo sapien
gcgaaggcgctccagtcgtactctt

SEQ ID NO: 3097721 - DNA, 25 bp, Homo sapien
gggttccatgctggcgccagtagct

SEQ ID NO: 3097722 - DNA, 25 bp, Homo sapien
tcgcgcaccttctggcgcaggctga

SEQ ID NO: 3097723 - DNA, 25 bp, Homo sapien
gaatatctctcctctagaacatggg

SEQ ID NO: 3097724 - DNA, 25 bp, Homo sapien
tcttccctgagtggctagatcaaca

SEQ ID NO: 3097725 - DNA, 25 bp, Homo sapien
cagacacaatgtgaggtcagcccag

SEQ ID NO: 3097726 - DNA, 25 bp, Homo sapien
tgtttggaacgttctcccctgagcc

SEQ ID NO: 3097727 - DNA, 25 bp, Homo sapien
tgcccatcccgtctaatcccagctt

SEQ ID NO: 3097728 - DNA, 25 bp, Homo sapien
ttccaggcctgaggcacgaggggac

SEQ ID NO: 3097729 - DNA, 25 bp, Homo sapien
aggggacatgagtttggacatgcac

SEQ ID NO: 3097730 - DNA, 25 bp, Homo sapien
cccagcttcccagaaccaaagcacc

SEQ ID NO: 3097731 - DNA, 25 bp, Homo sapien
agagcctccgctgatgctgaggatg

SEQ ID NO: 3097732 - DNA, 25 bp, Homo sapien
caccgaagagcgaggtgagcaacag

SEQ ID NO: 3097733 - DNA, 25 bp, Homo sapien
gcctcggtgtccacgttgtcctcaa

SEQ ID NO: 3097734 - DNA, 25 bp, Homo sapien
ctcaaagacaatgccgtggacgtgg

SEQ ID NO: 3097735 - DNA, 25 bp, Homo sapien
ctgcggagagaccagaacaagcaca

SEQ ID NO: 3097736 - DNA, 25 bp, Homo sapien
gagggacacacatacggaagatgaa

SEQ ID NO: 3097737 - DNA, 25 bp, Homo sapien
catggtggcgcccttgaaatcttcc

SEQ ID NO: 3097738 - DNA, 25 bp, Homo sapien
ccttaagctaaagtgccaggtggta

SEQ ID NO: 3097739 - DNA, 25 bp, Homo sapien
gaaatcttcccatgtgtacggttcc

SEQ ID NO: 3097740 - DNA, 25 bp, Homo sapien
tagctgaaagggttctcattcccaa

SEQ ID NO: 3097741 - DNA, 25 bp, Homo sapien
ccctcatctccaggcctcgttccag

SEQ ID NO: 3097742 - DNA, 25 bp, Homo sapien
tctgccagtctgctggccaaacagc

SEQ ID NO: 3097743 - DNA, 25 bp, Homo sapien
tggccaaacagccccattctgccct

SEQ ID NO: 3097744 - DNA, 25 bp, Homo sapien
tcatctccaggcctcgttccagcat

SEQ ID NO: 3097745 - DNA, 25 bp, Homo sapien
ttttaggccggcgataaataattca

SEQ ID NO: 3097746 - DNA, 25 bp, Homo sapien
taaataattcatagggaacgtggca

SEQ ID NO: 3097747 - DNA, 25 bp, Homo sapien
tcatagggaacgtggcatcaggctc

SEQ ID NO: 3097748 - DNA, 25 bp, Homo sapien
ccgcggctcaaggacactcgcgatg

SEQ ID NO: 3097749 - DNA, 25 bp, Homo sapien
ctttgcgctctggaagcccgggagc

SEQ ID NO: 3097750 - DNA, 25 bp, Homo sapien
aagatgccactactctggaagccca

SEQ ID NO: 3097751 - DNA, 25 bp, Homo sapien
ctccgattctcccaggtcgcaggaa

SEQ ID NO: 3097752 - DNA, 25 bp, Homo sapien
tcaggttgccgggtgcctttgctcc

SEQ ID NO: 3097753 - DNA, 25 bp, Homo sapien
tcaccttctcgactcctttccaacc

SEQ ID NO: 3097754 - DNA, 25 bp, Homo sapien
ggtctgggcgccgaggcgagtgcgc

SEQ ID NO: 3097755 - DNA, 25 bp, Homo sapien
actcctttccaacccctcgctctgg

SEQ ID NO: 3097756 - DNA, 25 bp, Homo sapien
gaggcgagtgcgcagcaggtgccca

SEQ ID NO: 3097757 - DNA, 25 bp, Homo sapien
cgctgcgcccgcgacgagagcccgc

SEQ ID NO: 3097758 - DNA, 25 bp, Homo sapien
ggctgggctgcgcaccgcgcctcct

SEQ ID NO: 3097759 - DNA, 25 bp, Homo sapien
ggcgcgctcagtctcagctccgcgg

SEQ ID NO: 3097760 - DNA, 25 bp, Homo sapien
cgcgaccctcccgaggctcgcacgg

SEQ ID NO: 3097761 - DNA, 25 bp, Homo sapien
tcccaacctggtgaccctccacagt

SEQ ID NO: 3097762 - DNA, 25 bp, Homo sapien
ccaacctggtgaccctccacagtcc

SEQ ID NO: 3097763 - DNA, 25 bp, Homo sapien
atttccagcatgttcccaacctggt

SEQ ID NO: 3097764 - DNA, 25 bp, Homo sapien
agcatgttcccaacctggtgaccct

SEQ ID NO: 3097765 - DNA, 25 bp, Homo sapien
gctgaaagctaaaaccttgcgcgca

SEQ ID NO: 3097766 - DNA, 25 bp, Homo sapien
cgcaagggcgaccttccccaggagg

SEQ ID NO: 3097767 - DNA, 25 bp, Homo sapien
ccgggatcagcagaggtgcaaagtc

SEQ ID NO: 3097768 - DNA, 25 bp, Homo sapien
tccctaaggttacctcagttgctga

SEQ ID NO: 3097769 - DNA, 25 bp, Homo sapien
ggaggcgcagcatctcctgaggatc

SEQ ID NO: 3097770 - DNA, 25 bp, Homo sapien
gaggcgcagcatctcctgaggatcc

SEQ ID NO: 3097771 - DNA, 25 bp, Homo sapien
ggcgcagcatctcctgaggatccac

SEQ ID NO: 3097772 - DNA, 25 bp, Homo sapien
caggaggcgcagcatctcctgagga

SEQ ID NO: 3097773 - DNA, 25 bp, Homo sapien
ctcctcggcatccagcttctcccag

SEQ ID NO: 3097774 - DNA, 25 bp, Homo sapien
ctccctgggcttccccgtgccctgg

SEQ ID NO: 3097775 - DNA, 25 bp, Homo sapien
ctggccccgggccacctcctcggca

SEQ ID NO: 3097776 - DNA, 25 bp, Homo sapien
tctccctgggcttccccgtgccctg

SEQ ID NO: 3097777 - DNA, 25 bp, Homo sapien
caaaggggagattgtcaacacctcc

SEQ ID NO: 3097778 - DNA, 25 bp, Homo sapien
aaggggagattgtcaacacctcctc

SEQ ID NO: 3097779 - DNA, 25 bp, Homo sapien
ggggagattgtcaacacctcctcct

SEQ ID NO: 3097780 - DNA, 25 bp, Homo sapien
gcaaaggggagattgtcaacacctc

SEQ ID NO: 3097781 - DNA, 25 bp, Homo sapien
aggacctcagcatcggggcccagac

SEQ ID NO: 3097782 - DNA, 25 bp, Homo sapien
caggacctcagcatcggggcccaga

SEQ ID NO: 3097783 - DNA, 25 bp, Homo sapien
ccaggacctcagcatcggggcccag

SEQ ID NO: 3097784 - DNA, 25 bp, Homo sapien
tggctatgacacctgtaggtcctct

SEQ ID NO: 3097785 - DNA, 25 bp, Homo sapien
tgacacctgtaggtcctctcttcac

SEQ ID NO: 3097786 - DNA, 25 bp, Homo sapien
catggttgtggctatgacacctgta

SEQ ID NO: 3097787 - DNA, 25 bp, Homo sapien
ttcacccagccgctgcagtagaggc

SEQ ID NO: 3097788 - DNA, 25 bp, Homo sapien
tcgacagggcggctcttatacccaa

SEQ ID NO: 3097789 - DNA, 25 bp, Homo sapien
tcaaagggcacgcttgggtcgacag

SEQ ID NO: 3097790 - DNA, 25 bp, Homo sapien
aggtcttccatgtctcccgtgggca

SEQ ID NO: 3097791 - DNA, 25 bp, Homo sapien
accccaagcttggagtcaaagggca

SEQ ID NO: 3097792 - DNA, 25 bp, Homo sapien
tgtctttgagaaacatgagactcac

SEQ ID NO: 3097793 - DNA, 25 bp, Homo sapien
aagggggtgtctttgagaaacatga

SEQ ID NO: 3097794 - DNA, 25 bp, Homo sapien
aacaccaggcgggtggcagaggcct

SEQ ID NO: 3097795 - DNA, 25 bp, Homo sapien
ctgttggggagagtgtgggcaacac

SEQ ID NO: 3097796 - DNA, 25 bp, Homo sapien
tctctgtggccgttcgaagcagcag

SEQ ID NO: 3097797 - DNA, 25 bp, Homo sapien
tctagtgactgctaggcggacacct

SEQ ID NO: 3097798 - DNA, 25 bp, Homo sapien
gaagcagcagttccgtcagccgctt

SEQ ID NO: 3097799 - DNA, 25 bp, Homo sapien
gaggccgatgcctggcgggcagctt

SEQ ID NO: 3097800 - DNA, 25 bp, Homo sapien
ggtaactgaatcatctcccgaagct

SEQ ID NO: 3097801 - DNA, 25 bp, Homo sapien
cggtaactgaatcatctcccgaagc

SEQ ID NO: 3097802 - DNA, 25 bp, Homo sapien
ggccgggctcccggtaactgaatca

SEQ ID NO: 3097803 - DNA, 25 bp, Homo sapien
gctcctcccactctggccccagcac

SEQ ID NO: 3097804 - DNA, 25 bp, Homo sapien
ctggaaccctggctcctcccactct

SEQ ID NO: 3097805 - DNA, 25 bp, Homo sapien
tggctcctcccactctggccccagc

SEQ ID NO: 3097806 - DNA, 25 bp, Homo sapien
cctggctcctcccactctggcccca

SEQ ID NO: 3097807 - DNA, 25 bp, Homo sapien
gggctgccttcgtgatgtccgttct

SEQ ID NO: 3097808 - DNA, 25 bp, Homo sapien
gtcttcactcgactctgcctcagta

SEQ ID NO: 3097809 - DNA, 25 bp, Homo sapien
acttgcaggggtccacgccggccca

SEQ ID NO: 3097810 - DNA, 25 bp, Homo sapien
gccggcccactagccacactgtctt

SEQ ID NO: 3097811 - DNA, 25 bp, Homo sapien
tgcgggccacgtccagagccacgtt

SEQ ID NO: 3097812 - DNA, 25 bp, Homo sapien
gggtcagtaggatgcgggccacgtc

SEQ ID NO: 3097813 - DNA, 25 bp, Homo sapien
gttcccctgccccagaatcacggct

SEQ ID NO: 3097814 - DNA, 25 bp, Homo sapien
ccagaatcacggctgtgtcacagct

SEQ ID NO: 3097815 - DNA, 25 bp, Homo sapien
ctggttctcaggaagcccgttgtac

SEQ ID NO: 3097816 - DNA, 25 bp, Homo sapien
agcccgttgtaccagcccacgaagg

SEQ ID NO: 3097817 - DNA, 25 bp, Homo sapien
gcccgggcggagcacacacctggca

SEQ ID NO: 3097818 - DNA, 25 bp, Homo sapien
cccgatggtcctctgccccgtagct

SEQ ID NO: 3097819 - DNA, 25 bp, Homo sapien
cctgctgccttccaccccgagccac

SEQ ID NO: 3097820 - DNA, 25 bp, Homo sapien
tgctgccttccaccccgagccaccg

SEQ ID NO: 3097821 - DNA, 25 bp, Homo sapien
accagcactgataggccgggcagcc

SEQ ID NO: 3097822 - DNA, 25 bp, Homo sapien
agcaccagcactgataggccgggca

SEQ ID NO: 3097823 - DNA, 25 bp, Homo sapien
cagctccggcaccgtcacgtccctg

SEQ ID NO: 3097824 - DNA, 25 bp, Homo sapien
accacagcgtggtaggcctcccgca

SEQ ID NO: 3097825 - DNA, 25 bp, Homo sapien
agctccggcaccgtcacgtccctgc

SEQ ID NO: 3097826 - DNA, 25 bp, Homo sapien
agcaccacagcgtggtaggcctccc

SEQ ID NO: 3097827 - DNA, 25 bp, Homo sapien
tcacctcggggtgatcaggcgccac

SEQ ID NO: 3097828 - DNA, 25 bp, Homo sapien
gtttctcgtagatgtccacgtgggc

SEQ ID NO: 3097829 - DNA, 25 bp, Homo sapien
agcgcaccaggccaaagggcacagg

SEQ ID NO: 3097830 - DNA, 25 bp, Homo sapien
gtgatcaggcgccacaccaaagcgc

SEQ ID NO: 3097831 - DNA, 25 bp, Homo sapien
taagggccactgtcccaaacgtgct

SEQ ID NO: 3097832 - DNA, 25 bp, Homo sapien
tgtcttaggagcacagccagtagct

SEQ ID NO: 3097833 - DNA, 25 bp, Homo sapien
tcagtgcctgactcaagctaagggc

SEQ ID NO: 3097834 - DNA, 25 bp, Homo sapien
tgaagcaagaggcacgacacctgct

SEQ ID NO: 3097835 - DNA, 25 bp, Homo sapien
caatgtgcgttttacacccctgtca

SEQ ID NO: 3097836 - DNA, 25 bp, Homo sapien
ccaatgtgcgttttacacccctgtc

SEQ ID NO: 3097837 - DNA, 25 bp, Homo sapien
caccaatgtgcgttttacacccctg

SEQ ID NO: 3097838 - DNA, 25 bp, Homo sapien
atgtgcgttttacacccctgtcaca

SEQ ID NO: 3097839 - DNA, 25 bp, Homo sapien
gcaggtgttgggccgtgtagaagcc

SEQ ID NO: 3097840 - DNA, 25 bp, Homo sapien
cccaccacacagatctggggggtct

SEQ ID NO: 3097841 - DNA, 25 bp, Homo sapien
tgcccaccacacagatctggggggt

SEQ ID NO: 3097842 - DNA, 25 bp, Homo sapien
gtgttgggccgtgtagaagccagct

SEQ ID NO: 3097843 - DNA, 25 bp, Homo sapien
tgtgtggagaaatggtggcagaagc

SEQ ID NO: 3097844 - DNA, 25 bp, Homo sapien
ctgtgtggagaaatggtggcagaag

SEQ ID NO: 3097845 - DNA, 25 bp, Homo sapien
cagaagctggaacttcccaagcttc

SEQ ID NO: 3097846 - DNA, 25 bp, Homo sapien
caacagaagctggaacttcccaagc

SEQ ID NO: 3097847 - DNA, 25 bp, Homo sapien
aacagaagctggaacttcccaagct

SEQ ID NO: 3097848 - DNA, 25 bp, Homo sapien
acagaagctggaacttcccaagctt

SEQ ID NO: 3097849 - DNA, 25 bp, Homo sapien
atcctccttctcttgttcctcaagg

SEQ ID NO: 3097850 - DNA, 25 bp, Homo sapien
catcctccttctcttgttcctcaag

SEQ ID NO: 3097851 - DNA, 25 bp, Homo sapien
ctgcatcctccttctcttgttcctc

SEQ ID NO: 3097852 - DNA, 25 bp, Homo sapien
gcatcctccttctcttgttcctcaa

SEQ ID NO: 3097853 - DNA, 25 bp, Homo sapien
tgacctccgtctctaaccctagaag

SEQ ID NO: 3097854 - DNA, 25 bp, Homo sapien
tacagatccctgtttcgactcagac

SEQ ID NO: 3097855 - DNA, 25 bp, Homo sapien
gaagcctcacatctcacgcacagat

SEQ ID NO: 3097856 - DNA, 25 bp, Homo sapien
tatagacccgtcttattcctacaga

SEQ ID NO: 3097857 - DNA, 25 bp, Homo sapien
gacccctactcagcgctcgcaggcc

SEQ ID NO: 3097858 - DNA, 25 bp, Homo sapien
agccccaaaggcgccctgctcctac

SEQ ID NO: 3097859 - DNA, 25 bp, Homo sapien
tcagcgctcgcaggcctccccgcgc

SEQ ID NO: 3097860 - DNA, 25 bp, Homo sapien
ctgctccgacccctactcagcgctc

SEQ ID NO: 3097861 - DNA, 25 bp, Homo sapien
ccgggtccgaggccacgccgaccag

SEQ ID NO: 3097862 - DNA, 25 bp, Homo sapien
gccgggtccgaggccacgccgacca

SEQ ID NO: 3097863 - DNA, 25 bp, Homo sapien
cgggtccgaggccacgccgaccagc

SEQ ID NO: 3097864 - DNA, 25 bp, Homo sapien
tggatctgttcctagctactgctcc

SEQ ID NO: 3097865 - DNA, 25 bp, Homo sapien
gatctgttcctagctactgctccgc

SEQ ID NO: 3097866 - DNA, 25 bp, Homo sapien
tcctagctactgctccgcagggcaa

SEQ ID NO: 3097867 - DNA, 25 bp, Homo sapien
tgttcctagctactgctccgcaggg

SEQ ID NO: 3097868 - DNA, 25 bp, Homo sapien
tgagctcccagcatctagtaggtag

SEQ ID NO: 3097869 - DNA, 25 bp, Homo sapien
aacaaggcaattacacgctcagaga

SEQ ID NO: 3097870 - DNA, 25 bp, Homo sapien
gttctcaactgggtcaactcagcaa

SEQ ID NO: 3097871 - DNA, 25 bp, Homo sapien
tagtaggtagaagccagtgacgctg

SEQ ID NO: 3097872 - DNA, 25 bp, Homo sapien
aagttgctgaggtccagactgacca

SEQ ID NO: 3097873 - DNA, 25 bp, Homo sapien
cagaaaagcacgcaaggcaggtggc

SEQ ID NO: 3097874 - DNA, 25 bp, Homo sapien
tgaaggaagcaatagccaaggccgt

SEQ ID NO: 3097875 - DNA, 25 bp, Homo sapien
ctgaggatcgaggaaggcctgccaa

SEQ ID NO: 3097876 - DNA, 25 bp, Homo sapien
agctcagtgatgggtggggcctgca

SEQ ID NO: 3097877 - DNA, 25 bp, Homo sapien
aagctcagtgatgggtggggcctgc

SEQ ID NO: 3097878 - DNA, 25 bp, Homo sapien
gctcagtgatgggtggggcctgcac

SEQ ID NO: 3097879 - DNA, 25 bp, Homo sapien
tatgagtcctcgttgtacggtagct

SEQ ID NO: 3097880 - DNA, 25 bp, Homo sapien
ttctcacgtaggaactgggacacca

SEQ ID NO: 3097881 - DNA, 25 bp, Homo sapien
tcatagcgacggagaaacagctgga

SEQ ID NO: 3097882 - DNA, 25 bp, Homo sapien
tggaagcgagccaggtatgagtcct

SEQ ID NO: 3097883 - DNA, 25 bp, Homo sapien
gcaggagagggcctatgagcagggg

SEQ ID NO: 3097884 - DNA, 25 bp, Homo sapien
gattatagtgtgagcaacgccccca

SEQ ID NO: 3097885 - DNA, 25 bp, Homo sapien
agtccctttattccagcgcccccag

SEQ ID NO: 3097886 - DNA, 25 bp, Homo sapien
gagcaacgcccccaggccgaagaat

SEQ ID NO: 3097887 - DNA, 25 bp, Homo sapien
tatagtgtgagcaacgcccccaggc

SEQ ID NO: 3097888 - DNA, 25 bp, Homo sapien
tgatgatcgagtggccgaacgccca

SEQ ID NO: 3097889 - DNA, 25 bp, Homo sapien
aggctcatcatgtgaatccgacggg

SEQ ID NO: 3097890 - DNA, 25 bp, Homo sapien
ttgttgtcccgggagaacatgggca

SEQ ID NO: 3097891 - DNA, 25 bp, Homo sapien
cttcaggcacatgttatcagagagc

SEQ ID NO: 3097892 - DNA, 25 bp, Homo sapien
ctggaagatgttgacgtggaggtag

SEQ ID NO: 3097893 - DNA, 25 bp, Homo sapien
ggagcagccagtagtgagaataaag

SEQ ID NO: 3097894 - DNA, 25 bp, Homo sapien
ggttcttgaagcctgacacgttcag

SEQ ID NO: 3097895 - DNA, 25 bp, Homo sapien
agaaatcagggccagcgtccgcagg

SEQ ID NO: 3097896 - DNA, 25 bp, Homo sapien
ttgacgtgcccatgcgtggcgtgct

SEQ ID NO: 3097897 - DNA, 25 bp, Homo sapien
acatagcggttgaggcaaggcagcc

SEQ ID NO: 3097898 - DNA, 25 bp, Homo sapien
caggcccaccacgttggtgtaggca

SEQ ID NO: 3097899 - DNA, 25 bp, Homo sapien
cgtgctctgcagtgaaggctgtgca

SEQ ID NO: 3097900 - DNA, 25 bp, Homo sapien
cccaagatggtgatgccggatgcaa

SEQ ID NO: 3097901 - DNA, 25 bp, Homo sapien
cgtttggactcggtgagggccccat

SEQ ID NO: 3097902 - DNA, 25 bp, Homo sapien
ccggatgcaaagaccagggcattct

SEQ ID NO: 3097903 - DNA, 25 bp, Homo sapien
ccttgacagtgagtgtgtagtggca

SEQ ID NO: 3097904 - DNA, 25 bp, Homo sapien
cggcaaggcgaagaggctgagcgcg

SEQ ID NO: 3097905 - DNA, 25 bp, Homo sapien
atggcgcagtccacgccgtggcgct

SEQ ID NO: 3097906 - DNA, 25 bp, Homo sapien
aggagctcgtcctcaccacgtcctg

SEQ ID NO: 3097907 - DNA, 25 bp, Homo sapien
ccgtggcgctcccaccaggagctcg

SEQ ID NO: 3097908 - DNA, 25 bp, Homo sapien
ctccgtgggttccatggactctgtg

SEQ ID NO: 3097909 - DNA, 25 bp, Homo sapien
cgtgggttccatggactctgtgggc

SEQ ID NO: 3097910 - DNA, 25 bp, Homo sapien
tccgtgggttccatggactctgtgg

SEQ ID NO: 3097911 - DNA, 25 bp, Homo sapien
tgggttccatggactctgtgggctc

SEQ ID NO: 3097912 - DNA, 25 bp, Homo sapien
gggcccgacgcgcacggaggactgg

SEQ ID NO: 3097913 - DNA, 25 bp, Homo sapien
ggcccgacgcgcacggaggactgga

SEQ ID NO: 3097914 - DNA, 25 bp, Homo sapien
gcccgacgcgcacggaggactggag

SEQ ID NO: 3097915 - DNA, 25 bp, Homo sapien
tggctcctctgctgcgggcgctggc

SEQ ID NO: 3097916 - DNA, 25 bp, Homo sapien
ggctcaggcgcgcgaccctggcagg

SEQ ID NO: 3097917 - DNA, 25 bp, Homo sapien
tgctgcgggcgctggcgacccaggc

SEQ ID NO: 3097918 - DNA, 25 bp, Homo sapien
ccggctcaggcgcgcgaccctggca

SEQ ID NO: 3097919 - DNA, 25 bp, Homo sapien
cttctggaccatcgcggcaaggacc

SEQ ID NO: 3097920 - DNA, 25 bp, Homo sapien
ggaccatcgcggcaaggaccagtga

SEQ ID NO: 3097921 - DNA, 25 bp, Homo sapien
gtcctcttctggaccatcgcggcaa

SEQ ID NO: 3097922 - DNA, 25 bp, Homo sapien
ctcttctggaccatcgcggcaagga

SEQ ID NO: 3097923 - DNA, 25 bp, Homo sapien
tacggctgctcagaatgggtggctc

SEQ ID NO: 3097924 - DNA, 25 bp, Homo sapien
aagagtctggctgaggaacttcccc

SEQ ID NO: 3097925 - DNA, 25 bp, Homo sapien
catctgtgacctcagtctggctgga

SEQ ID NO: 3097926 - DNA, 25 bp, Homo sapien
tgtcagcgggctcatcagggactct

SEQ ID NO: 3097927 - DNA, 25 bp, Homo sapien
taggttgtggcaacttgcaattcat

SEQ ID NO: 3097928 - DNA, 25 bp, Homo sapien
cataggttgtggcaacttgcaattc

SEQ ID NO: 3097929 - DNA, 25 bp, Homo sapien
ataggttgtggcaacttgcaattca

SEQ ID NO: 3097930 - DNA, 25 bp, Homo sapien
ggttgtggcaacttgcaattcattt

SEQ ID NO: 3097931 - DNA, 25 bp, Homo sapien
agggccggcgggcgctccatcgcct

SEQ ID NO: 3097932 - DNA, 25 bp, Homo sapien
gcgggcgctccatcgcctgccgccg

SEQ ID NO: 3097933 - DNA, 25 bp, Homo sapien
gccggcgggcgctccatcgcctgcc

SEQ ID NO: 3097934 - DNA, 25 bp, Homo sapien
cggcgggcgctccatcgcctgccgc

SEQ ID NO: 3097935 - DNA, 25 bp, Homo sapien
tcgaggtcagagcacagcatcaaag

SEQ ID NO: 3097936 - DNA, 25 bp, Homo sapien
cagatgttggctccgaaggacacca

SEQ ID NO: 3097937 - DNA, 25 bp, Homo sapien
cagatgtcacacttgtccgggtcac

SEQ ID NO: 3097938 - DNA, 25 bp, Homo sapien
taatttctgcggaacaccatggtgc

SEQ ID NO: 3097939 - DNA, 25 bp, Homo sapien
ctgcccggtggtactggtcgttcat

SEQ ID NO: 3097940 - DNA, 25 bp, Homo sapien
gctcacaatgagacgcagcgactcg

SEQ ID NO: 3097941 - DNA, 25 bp, Homo sapien
ctttcgggtggcctccttgaggagc

SEQ ID NO: 3097942 - DNA, 25 bp, Homo sapien
cagcgactcgaggttgccatggtag

SEQ ID NO: 3097943 - DNA, 25 bp, Homo sapien
cgctgccgcagacggagggtgcgga

SEQ ID NO: 3097944 - DNA, 25 bp, Homo sapien
gaggcatgaggttggaggacggggc

SEQ ID NO: 3097945 - DNA, 25 bp, Homo sapien
ggagggtgcggagcgccagagccgc

SEQ ID NO: 3097946 - DNA, 25 bp, Homo sapien
gcggcggtattagggctgaggcatg

SEQ ID NO: 3097947 - DNA, 25 bp, Homo sapien
aagaggccgattgtacagagcaaag

SEQ ID NO: 3097948 - DNA, 25 bp, Homo sapien
ttattgtaaagaggccgattgtaca

SEQ ID NO: 3097949 - DNA, 25 bp, Homo sapien
ccgattgtacagagcaaagattgtt

SEQ ID NO: 3097950 - DNA, 25 bp, Homo sapien
tgtaaagaggccgattgtacagagc

SEQ ID NO: 3097951 - DNA, 25 bp, Homo sapien
caggctatttccatggatccaggag

SEQ ID NO: 3097952 - DNA, 25 bp, Homo sapien
tccaggagaatatagcaggagaccc

SEQ ID NO: 3097953 - DNA, 25 bp, Homo sapien
caggccctgatcgtggtaatttaaa

SEQ ID NO: 3097954 - DNA, 25 bp, Homo sapien
catgccccaaggatacgggaggtgc

SEQ ID NO: 3097955 - DNA, 25 bp, Homo sapien
gtgtcgtaccagacaggggggtcca

SEQ ID NO: 3097956 - DNA, 25 bp, Homo sapien
caaacagcttcacgtcggtgtcgta

SEQ ID NO: 3097957 - DNA, 25 bp, Homo sapien
gtcgtaccagacaggggggtccaca

SEQ ID NO: 3097958 - DNA, 25 bp, Homo sapien
ctcaaacagcttcacgtcggtgtcg

SEQ ID NO: 3097959 - DNA, 25 bp, Homo sapien
tagatgacgccccacatgtaggtgc

SEQ ID NO: 3097960 - DNA, 25 bp, Homo sapien
gagttggcctggtacttgcggatga

SEQ ID NO: 3097961 - DNA, 25 bp, Homo sapien
tgtaggtgcggaaccacatggcagt

SEQ ID NO: 3097962 - DNA, 25 bp, Homo sapien
tgcaggaaccgcaggatctcagact

SEQ ID NO: 3097963 - DNA, 25 bp, Homo sapien
cctcatgatggtctgcagcggcagc

SEQ ID NO: 3097964 - DNA, 25 bp, Homo sapien
caatgcagatcttctccacctgcgg

SEQ ID NO: 3097965 - DNA, 25 bp, Homo sapien
ctgcagcagcctcatgatggtctgc

SEQ ID NO: 3097966 - DNA, 25 bp, Homo sapien
cacctgcggaaccagcacctgcagc

SEQ ID NO: 3097967 - DNA, 25 bp, Homo sapien
cactctggcgttgggctccactgcc

SEQ ID NO: 3097968 - DNA, 25 bp, Homo sapien
tggctgatgaggtggacggtcgccg

SEQ ID NO: 3097969 - DNA, 25 bp, Homo sapien
ccactctggcgttgggctccactgc

SEQ ID NO: 3097970 - DNA, 25 bp, Homo sapien
atgaggtggacggtcgccgctgctc

SEQ ID NO: 3097971 - DNA, 25 bp, Homo sapien
tctgacacctgggacttctcggtca

SEQ ID NO: 3097972 - DNA, 25 bp, Homo sapien
ctgacacctgggacttctcggtcag

SEQ ID NO: 3097973 - DNA, 25 bp, Homo sapien
tgacacctgggacttctcggtcagc

SEQ ID NO: 3097974 - DNA, 25 bp, Homo sapien
atggcgtagaccaggttggagttgc

SEQ ID NO: 3097975 - DNA, 25 bp, Homo sapien
tgcgcttgcggatgatggcgtagac

SEQ ID NO: 3097976 - DNA, 25 bp, Homo sapien
tggtggaagatgctgcgcttgcgga

SEQ ID NO: 3097977 - DNA, 25 bp, Homo sapien
aggttggccagctggtggaagatgc

SEQ ID NO: 3097978 - DNA, 25 bp, Homo sapien
ctccagctccccccgtccaatctgg

SEQ ID NO: 3097979 - DNA, 25 bp, Homo sapien
ccagctccccccgtccaatctgggt

SEQ ID NO: 3097980 - DNA, 25 bp, Homo sapien
gcagggagcatgcctcgcctcaggg

SEQ ID NO: 3097981 - DNA, 25 bp, Homo sapien
agctccccccgtccaatctgggtgg

SEQ ID NO: 3097982 - DNA, 25 bp, Homo sapien
gcatccacgtcaggccagctgttaa

SEQ ID NO: 3097983 - DNA, 25 bp, Homo sapien
gagaccaggacccttagaaccattg

SEQ ID NO: 3097984 - DNA, 25 bp, Homo sapien
taacacctggcaaaaagtacaggcc

SEQ ID NO: 3097985 - DNA, 25 bp, Homo sapien
tatcccagaatgtcaggcctgagca

SEQ ID NO: 3097986 - DNA, 25 bp, Homo sapien
tccagcaggtgcagcaacttgttgg

SEQ ID NO: 3097987 - DNA, 25 bp, Homo sapien
tggtggttctgggcggcagagaaga

SEQ ID NO: 3097988 - DNA, 25 bp, Homo sapien
tgttggcagtcaccatggacaggct

SEQ ID NO: 3097989 - DNA, 25 bp, Homo sapien
gtactggatgatgttgttgaagacc

SEQ ID NO: 3097990 - DNA, 25 bp, Homo sapien
gctgaggtgggcatatcatctgagg

SEQ ID NO: 3097991 - DNA, 25 bp, Homo sapien
aaagatacaaaaattagccaggtgt

SEQ ID NO: 3097992 - DNA, 25 bp, Homo sapien
aacatggcaaaaccccgtctctact

SEQ ID NO: 3097993 - DNA, 25 bp, Homo sapien
tcaggagttcgagaccagcctggac

SEQ ID NO: 3097994 - DNA, 25 bp, Homo sapien
tgaagggtacacaagcttgcgttct

SEQ ID NO: 3097995 - DNA, 25 bp, Homo sapien
taatgtggctactatgaagggtaca

SEQ ID NO: 3097996 - DNA, 25 bp, Homo sapien
gacaccacctggtggtgagcgcggg

SEQ ID NO: 3097997 - DNA, 25 bp, Homo sapien
caagcttgcgttctttctgtgggct

SEQ ID NO: 3097998 - DNA, 25 bp, Homo sapien
gcaaccgctggtgcccgctggtgat

SEQ ID NO: 3097999 - DNA, 25 bp, Homo sapien
tcgaagaggggctgcaaccgctggt

SEQ ID NO: 3098000 - DNA, 25 bp, Homo sapien
gggctgcaaccgctggtgcccgctg

SEQ ID NO: 3098001 - DNA, 25 bp, Homo sapien
gctgcaaccgctggtgcccgctggt

SEQ ID NO: 3098002 - DNA, 25 bp, Homo sapien
tgtccatgggcacgcggattgagta

SEQ ID NO: 3098003 - DNA, 25 bp, Homo sapien
gattgagtagggtttgttcagccgc

SEQ ID NO: 3098004 - DNA, 25 bp, Homo sapien
tccctgtgaagactgggatgtccat

SEQ ID NO: 3098005 - DNA, 25 bp, Homo sapien
gaagacaccaatgtgcatcaggccc

SEQ ID NO: 3098006 - DNA, 25 bp, Homo sapien
agccctccacctcgccgccaggaaa

SEQ ID NO: 3098007 - DNA, 25 bp, Homo sapien
gagtcagggcagatagccagccctc

SEQ ID NO: 3098008 - DNA, 25 bp, Homo sapien
ccctcctaggaggtcagagtgccag

SEQ ID NO: 3098009 - DNA, 25 bp, Homo sapien
tgggagtcagggcagatagccagcc

SEQ ID NO: 3098010 - DNA, 25 bp, Homo sapien
gatgtctaggacgtcgctgctcttc

SEQ ID NO: 3098011 - DNA, 25 bp, Homo sapien
cccgggcatcgttgaggaagaagag

SEQ ID NO: 3098012 - DNA, 25 bp, Homo sapien
ggacaaggatgtctaggacgtcgct

SEQ ID NO: 3098013 - DNA, 25 bp, Homo sapien
gatcggcccgggcatcgttgaggaa

SEQ ID NO: 3098014 - DNA, 25 bp, Homo sapien
atctccctgcagggcccctcgaggc

SEQ ID NO: 3098015 - DNA, 25 bp, Homo sapien
ctgcagggcccctcgaggctggccc

SEQ ID NO: 3098016 - DNA, 25 bp, Homo sapien
tccctgcagggcccctcgaggctgg

SEQ ID NO: 3098017 - DNA, 25 bp, Homo sapien
tgctctccatctccctgcagggccc

SEQ ID NO: 3098018 - DNA, 25 bp, Homo sapien
tgttgaagtcgcagagcttccagaa

SEQ ID NO: 3098019 - DNA, 25 bp, Homo sapien
ccagaagagaactagcagctcctgg

SEQ ID NO: 3098020 - DNA, 25 bp, Homo sapien
tacccttgaggatgaactggaagtc

SEQ ID NO: 3098021 - DNA, 25 bp, Homo sapien
ggttggacagcagccgggctatacc

SEQ ID NO: 3098022 - DNA, 25 bp, Homo sapien
ctgggggcgagggcagagcaggggg

SEQ ID NO: 3098023 - DNA, 25 bp, Homo sapien
tgggggcgagggcagagcagggggc

SEQ ID NO: 3098024 - DNA, 25 bp, Homo sapien
ttactgaggcctgccactagctggg

SEQ ID NO: 3098025 - DNA, 25 bp, Homo sapien
tagctgcagaagttagaactctggg

SEQ ID NO: 3098026 - DNA, 25 bp, Homo sapien
gaggagcattccactgttctgtcat

SEQ ID NO: 3098027 - DNA, 25 bp, Homo sapien
catgaactgggactgcttggcctga

SEQ ID NO: 3098028 - DNA, 25 bp, Homo sapien
ggtagttcacaaacaggttctcagg

SEQ ID NO: 3098029 - DNA, 25 bp, Homo sapien
caggtagttcacaaacaggttctca

SEQ ID NO: 3098030 - DNA, 25 bp, Homo sapien
tagttcacaaacaggttctcagggc

SEQ ID NO: 3098031 - DNA, 25 bp, Homo sapien
gtagttcacaaacaggttctcaggg

SEQ ID NO: 3098032 - DNA, 25 bp, Homo sapien
ggcatcatccatggcggtgccagtg

SEQ ID NO: 3098033 - DNA, 25 bp, Homo sapien
cactgctggcactgtcgtggtccaa

SEQ ID NO: 3098034 - DNA, 25 bp, Homo sapien
gggatcccgtagcccacagggtcat

SEQ ID NO: 3098035 - DNA, 25 bp, Homo sapien
tgccagtggtggtgccgtccacagt

SEQ ID NO: 3098036 - DNA, 25 bp, Homo sapien
ggcacacacggtgttgaggagggag

SEQ ID NO: 3098037 - DNA, 25 bp, Homo sapien
gcacacacggtgttgaggagggagg

SEQ ID NO: 3098038 - DNA, 25 bp, Homo sapien
caggcggctcttgatggaggaccca

SEQ ID NO: 3098039 - DNA, 25 bp, Homo sapien
tcctgtcgaggactccaaggagaga

SEQ ID NO: 3098040 - DNA, 25 bp, Homo sapien
gagacccagagctggcgaatggact

SEQ ID NO: 3098041 - DNA, 25 bp, Homo sapien
agagcgcagaaaggccaagggccct

SEQ ID NO: 3098042 - DNA, 25 bp, Homo sapien
ctgttctccgtggaacaaaagaact

SEQ ID NO: 3098043 - DNA, 25 bp, Homo sapien
tcggagaagcatgtcagcagcagtt

SEQ ID NO: 3098044 - DNA, 25 bp, Homo sapien
gggcaggtacatggcctcggagaag

SEQ ID NO: 3098045 - DNA, 25 bp, Homo sapien
gaacccatgggttggtgctgccact

SEQ ID NO: 3098046 - DNA, 25 bp, Homo sapien
gctgtccagggagtggacgtcctct

SEQ ID NO: 3098047 - DNA, 25 bp, Homo sapien
catatcgtggatgtagttaggctgg

SEQ ID NO: 3098048 - DNA, 25 bp, Homo sapien
ggttcatatcgtggatgtagttagg

SEQ ID NO: 3098049 - DNA, 25 bp, Homo sapien
gggagtgagcgaagcccacaccagc

SEQ ID NO: 3098050 - DNA, 25 bp, Homo sapien
cggtggctctgaaccgtgaagtccg

SEQ ID NO: 3098051 - DNA, 25 bp, Homo sapien
tccggtggctctgaaccgtgaagtc

SEQ ID NO: 3098052 - DNA, 25 bp, Homo sapien
tcctccggtggctctgaaccgtgaa

SEQ ID NO: 3098053 - DNA, 25 bp, Homo sapien
aggggcctggcatgctcatcatcct

SEQ ID NO: 3098054 - DNA, 25 bp, Homo sapien
gaagtggactcctggttgccccaaa

SEQ ID NO: 3098055 - DNA, 25 bp, Homo sapien
cctaaagggcgctctccctgtgacg

SEQ ID NO: 3098056 - DNA, 25 bp, Homo sapien
cctggacataaacccagggcaggtg

SEQ ID NO: 3098057 - DNA, 25 bp, Homo sapien
tggcattgaacaccatccctcagca

SEQ ID NO: 3098058 - DNA, 25 bp, Homo sapien
tcggggtcctcaaagatgtagggca

SEQ ID NO: 3098059 - DNA, 25 bp, Homo sapien
gcacgcgggtgagcagccggctgca

SEQ ID NO: 3098060 - DNA, 25 bp, Homo sapien
aaagatgtagggcagcacgcgggtg

SEQ ID NO: 3098061 - DNA, 25 bp, Homo sapien
cctccagtcggggtcctcaaagatg

SEQ ID NO: 3098062 - DNA, 25 bp, Homo sapien
tgaggccttgctaagtgagtctccc

SEQ ID NO: 3098063 - DNA, 25 bp, Homo sapien
taaatgacggctgccgtggtcccaa

SEQ ID NO: 3098064 - DNA, 25 bp, Homo sapien
ctatctgtaaactggcgaccctggc

SEQ ID NO: 3098065 - DNA, 25 bp, Homo sapien
gagggagctaaatgaactgatctgt

SEQ ID NO: 3098066 - DNA, 25 bp, Homo sapien
ttggagggtgactcttcccgcacgg

SEQ ID NO: 3098067 - DNA, 25 bp, Homo sapien
acggcccggatctctgctgccggca

SEQ ID NO: 3098068 - DNA, 25 bp, Homo sapien
gctgccggcaccagtgcaaacacat

SEQ ID NO: 3098069 - DNA, 25 bp, Homo sapien
acatcctgcaccgaggtggctgtgt

SEQ ID NO: 3098070 - DNA, 25 bp, Homo sapien
aggcatcatcggtggcttccacggg

SEQ ID NO: 3098071 - DNA, 25 bp, Homo sapien
tggtggtgagctggatcaccgcctt

SEQ ID NO: 3098072 - DNA, 25 bp, Homo sapien
tcagcttggagtcggtcgaccccat

SEQ ID NO: 3098073 - DNA, 25 bp, Homo sapien
cgccttccggaagttcagcttggag

SEQ ID NO: 3098074 - DNA, 25 bp, Homo sapien
ggatcaccgccttccggaagttcag

SEQ ID NO: 3098075 - DNA, 25 bp, Homo sapien
ggctctcgcaggagacaagcggcgc

SEQ ID NO: 3098076 - DNA, 25 bp, Homo sapien
cggctctcgcaggagacaagcggcg

SEQ ID NO: 3098077 - DNA, 25 bp, Homo sapien
tctcgcaggagacaagcggcgcgcc

SEQ ID NO: 3098078 - DNA, 25 bp, Homo sapien
ctctcgcaggagacaagcggcgcgc

SEQ ID NO: 3098079 - DNA, 25 bp, Homo sapien
gcccgcctcagccgcattgtcccgg

SEQ ID NO: 3098080 - DNA, 25 bp, Homo sapien
ccgcctcagccgcattgtcccgggc

SEQ ID NO: 3098081 - DNA, 25 bp, Homo sapien
gcctcagccgcattgtcccgggccg

SEQ ID NO: 3098082 - DNA, 25 bp, Homo sapien
cgcctcagccgcattgtcccgggcc

SEQ ID NO: 3098083 - DNA, 25 bp, Homo sapien
gagactgagtctcgctctgttactc

SEQ ID NO: 3098084 - DNA, 25 bp, Homo sapien
gactgagtctcgctctgttactcag

SEQ ID NO: 3098085 - DNA, 25 bp, Homo sapien
actgagtctcgctctgttactcagg

SEQ ID NO: 3098086 - DNA, 25 bp, Homo sapien
ggattacggcgtgagccaccgcacc

SEQ ID NO: 3098087 - DNA, 25 bp, Homo sapien
gctgcagcacatatgatcacacctg

SEQ ID NO: 3098088 - DNA, 25 bp, Homo sapien
gagggaggaagatcgttgagcccag

SEQ ID NO: 3098089 - DNA, 25 bp, Homo sapien
aaaaaactgccccatgagctcacag

SEQ ID NO: 3098090 - DNA, 25 bp, Homo sapien
acctgtgaatactcactgcacccca

SEQ ID NO: 3098091 - DNA, 25 bp, Homo sapien
taagccgaaatcatgccactgcact

SEQ ID NO: 3098092 - DNA, 25 bp, Homo sapien
aatcatgccactgcacttcagcctg

SEQ ID NO: 3098093 - DNA, 25 bp, Homo sapien
caggaggctgaagcatgaaaatcac

SEQ ID NO: 3098094 - DNA, 25 bp, Homo sapien
tgaacccaggaggcagaggttgcag

SEQ ID NO: 3098095 - DNA, 25 bp, Homo sapien
gaatgttctggacatgcaccaccag

SEQ ID NO: 3098096 - DNA, 25 bp, Homo sapien
ggcttttgaggacccagctgcgtca

SEQ ID NO: 3098097 - DNA, 25 bp, Homo sapien
ggttttcgccccatgctgcatcgtg

SEQ ID NO: 3098098 - DNA, 25 bp, Homo sapien
tcaagttcagctaagagacacccag

SEQ ID NO: 3098099 - DNA, 25 bp, Homo sapien
ttccctatctacacataatgatgag

SEQ ID NO: 3098100 - DNA, 25 bp, Homo sapien
tgcctcattgcacattccctatcta

SEQ ID NO: 3098101 - DNA, 25 bp, Homo sapien
acttagtcctgaccaatccaccatg

SEQ ID NO: 3098102 - DNA, 25 bp, Homo sapien
tcacagttaccagcagttaggacat

SEQ ID NO: 3098103 - DNA, 25 bp, Homo sapien
tataacacttaccatgagggtccgc

SEQ ID NO: 3098104 - DNA, 25 bp, Homo sapien
cataaagctagagccgagggagacc

SEQ ID NO: 3098105 - DNA, 25 bp, Homo sapien
tctccttaggagaggtgaagccgac

SEQ ID NO: 3098106 - DNA, 25 bp, Homo sapien
tcagtcaacagaaaagtcccggtat

SEQ ID NO: 3098107 - DNA, 25 bp, Homo sapien
cttaggaggccagtgccttatccat

SEQ ID NO: 3098108 - DNA, 25 bp, Homo sapien
ccctggcttaggaggccagtgcctt

SEQ ID NO: 3098109 - DNA, 25 bp, Homo sapien
taggaggccagtgccttatccatta

SEQ ID NO: 3098110 - DNA, 25 bp, Homo sapien
acaatccctggcttaggaggccagt

SEQ ID NO: 3098111 - DNA, 25 bp, Homo sapien
aatgtgtaatacaagggccagagct

SEQ ID NO: 3098112 - DNA, 25 bp, Homo sapien
cagaatgtgtaatacaagggccaga

SEQ ID NO: 3098113 - DNA, 25 bp, Homo sapien
tgtgtaatacaagggccagagcttc

SEQ ID NO: 3098114 - DNA, 25 bp, Homo sapien
tgtccagaatgtgtaatacaagggc

SEQ ID NO: 3098115 - DNA, 25 bp, Homo sapien
cattcaagtcctcaatggtcatctg

SEQ ID NO: 3098116 - DNA, 25 bp, Homo sapien
ttctgggaaagcttcattcaagtcc

SEQ ID NO: 3098117 - DNA, 25 bp, Homo sapien
tctcaattggttggtgaggccaata

SEQ ID NO: 3098118 - DNA, 25 bp, Homo sapien
tataaattctcaattggttggtgag

SEQ ID NO: 3098119 - DNA, 25 bp, Homo sapien
gacacccactcagcacaagatttca

SEQ ID NO: 3098120 - DNA, 25 bp, Homo sapien
ctctttctcatattctacaatcctg

SEQ ID NO: 3098121 - DNA, 25 bp, Homo sapien
tggcctttgagagagacacccactc

SEQ ID NO: 3098122 - DNA, 25 bp, Homo sapien
ctttctcatattctacaatcctggc

SEQ ID NO: 3098123 - DNA, 25 bp, Homo sapien
catccgaagacctacagaatgcctg

SEQ ID NO: 3098124 - DNA, 25 bp, Homo sapien
cagctgctaaggtaggagtcgtccc

SEQ ID NO: 3098125 - DNA, 25 bp, Homo sapien
gccactgaatggtcaggacacgcca

SEQ ID NO: 3098126 - DNA, 25 bp, Homo sapien
ggtatccacctgtgaaaccagcagt

SEQ ID NO: 3098127 - DNA, 25 bp, Homo sapien
tttatcctctggcacgggaaccttc

SEQ ID NO: 3098128 - DNA, 25 bp, Homo sapien
caaagggctggaagctacgaatcct

SEQ ID NO: 3098129 - DNA, 25 bp, Homo sapien
tgtcccaagcggaaacgaatacgca

SEQ ID NO: 3098130 - DNA, 25 bp, Homo sapien
tcttctgcatggaaccctagggagc

SEQ ID NO: 3098131 - DNA, 25 bp, Homo sapien
cacaaggacagtgagtcgtcgccaa

SEQ ID NO: 3098132 - DNA, 25 bp, Homo sapien
tgccgatcgggtgtcttcaccaagt

SEQ ID NO: 3098133 - DNA, 25 bp, Homo sapien
tggccatacgcatccttcctaagct

SEQ ID NO: 3098134 - DNA, 25 bp, Homo sapien
ggctcccagattaaggctacactct

SEQ ID NO: 3098135 - DNA, 25 bp, Homo sapien
gttcaatcgaccacaaggcctttgg

SEQ ID NO: 3098136 - DNA, 25 bp, Homo sapien
ttctcaaagtcatccaccaagccag

SEQ ID NO: 3098137 - DNA, 25 bp, Homo sapien
ttgtagtaagcccagtcgatagctg

SEQ ID NO: 3098138 - DNA, 25 bp, Homo sapien
tcgatagctggtggattctcaggta

SEQ ID NO: 3098139 - DNA, 25 bp, Homo sapien
gccagccttggccacattggccttg

SEQ ID NO: 3098140 - DNA, 25 bp, Homo sapien
gatctctgcaaaagctacccagtca

SEQ ID NO: 3098141 - DNA, 25 bp, Homo sapien
tccaggatttcagggaactagcaat

SEQ ID NO: 3098142 - DNA, 25 bp, Homo sapien
ttttagagcaagttttcgcccagcc

SEQ ID NO: 3098143 - DNA, 25 bp, Homo sapien
gggtatgatctctgcaaaagctacc

SEQ ID NO: 3098144 - DNA, 25 bp, Homo sapien
ccaggatgggctgaaactccagacc

SEQ ID NO: 3098145 - DNA, 25 bp, Homo sapien
ttggccaggatgggctgaaactcca

SEQ ID NO: 3098146 - DNA, 25 bp, Homo sapien
ggatgggctgaaactccagacctca

SEQ ID NO: 3098147 - DNA, 25 bp, Homo sapien
ggccaggatgggctgaaactccaga

SEQ ID NO: 3098148 - DNA, 25 bp, Homo sapien
tattacagggtcctggaacgatata

SEQ ID NO: 3098149 - DNA, 25 bp, Homo sapien
acagggtcctggaacgatatacatc

SEQ ID NO: 3098150 - DNA, 25 bp, Homo sapien
gcccacggtcctccgcagcaagtaa

SEQ ID NO: 3098151 - DNA, 25 bp, Homo sapien
cacggtcctccgcagcaagtaacgg

SEQ ID NO: 3098152 - DNA, 25 bp, Homo sapien
cctccgcagcaagtaacggaagtgg

SEQ ID NO: 3098153 - DNA, 25 bp, Homo sapien
ggtcctccgcagcaagtaacggaag

SEQ ID NO: 3098154 - DNA, 25 bp, Homo sapien
gtggcggcggcggtccaagatggcg

SEQ ID NO: 3098155 - DNA, 25 bp, Homo sapien
actgcagctggacccggcgatggcg

SEQ ID NO: 3098156 - DNA, 25 bp, Homo sapien
ccggctctccctgccgagaaatggg

SEQ ID NO: 3098157 - DNA, 25 bp, Homo sapien
gccgagaaatgggccggcccggctg

SEQ ID NO: 3098158 - DNA, 25 bp, Homo sapien
tgcttgccaaggtacgtctgggtag

SEQ ID NO: 3098159 - DNA, 25 bp, Homo sapien
tatctgtagcatagcatagaacccg

SEQ ID NO: 3098160 - DNA, 25 bp, Homo sapien
ccttcagaagtgatgtcctgtgtgc

SEQ ID NO: 3098161 - DNA, 25 bp, Homo sapien
ttgagcttctgacctgaccatgccc

SEQ ID NO: 3098162 - DNA, 25 bp, Homo sapien
ggccaggtccaatgagtaacatcag

SEQ ID NO: 3098163 - DNA, 25 bp, Homo sapien
cagtctcgttgaggcgcttgtccct

SEQ ID NO: 3098164 - DNA, 25 bp, Homo sapien
gatgaactgccgtcctcagtaaaag

SEQ ID NO: 3098165 - DNA, 25 bp, Homo sapien
tagtgatcacgggaaggactgctct

SEQ ID NO: 3098166 - DNA, 25 bp, Homo sapien
gcccgtgacagcaccccataaataa

SEQ ID NO: 3098167 - DNA, 25 bp, Homo sapien
cttgtccttctacggcctggcgggt

SEQ ID NO: 3098168 - DNA, 25 bp, Homo sapien
ttatctaagcgctggctggcgcgcc

SEQ ID NO: 3098169 - DNA, 25 bp, Homo sapien
aaccccttctcgtggtgcctggagt

SEQ ID NO: 3098170 - DNA, 25 bp, Homo sapien
agatcgatctgtacctgcctgtgaa

SEQ ID NO: 3098171 - DNA, 25 bp, Homo sapien
tgcctgtgaacaattaactgaaatt

SEQ ID NO: 3098172 - DNA, 25 bp, Homo sapien
tactcaggagcggtagtaagaagga

SEQ ID NO: 3098173 - DNA, 25 bp, Homo sapien
taagactactcaggagcggtagtaa

SEQ ID NO: 3098174 - DNA, 25 bp, Homo sapien
ttttctaacaactagcggaatccag

SEQ ID NO: 3098175 - DNA, 25 bp, Homo sapien
tggaccttctcgtccagcctggatg

SEQ ID NO: 3098176 - DNA, 25 bp, Homo sapien
tctggcctccataccgttctgaaga

SEQ ID NO: 3098177 - DNA, 25 bp, Homo sapien
aactagcggaatccaggagcaggcc

SEQ ID NO: 3098178 - DNA, 25 bp, Homo sapien
aaaggcgggttctttcagcaggaca

SEQ ID NO: 3098179 - DNA, 25 bp, Homo sapien
gaacctggcacagatcttcctggag

SEQ ID NO: 3098180 - DNA, 25 bp, Homo sapien
tacactgatgaaacgccactgggag

SEQ ID NO: 3098181 - DNA, 25 bp, Homo sapien
gggagcacatactgccccattggtg

SEQ ID NO: 3098182 - DNA, 25 bp, Homo sapien
cagaggcaccagcacgatgccgccc

SEQ ID NO: 3098183 - DNA, 25 bp, Homo sapien
cacagcgcttaacggtatctgcctg

SEQ ID NO: 3098184 - DNA, 25 bp, Homo sapien
gccccgactcggctctgcggtggcc

SEQ ID NO: 3098185 - DNA, 25 bp, Homo sapien
gggcccggtagcacagcgcttaacg

SEQ ID NO: 3098186 - DNA, 25 bp, Homo sapien
ttgctatctaagatctccctccagt

SEQ ID NO: 3098187 - DNA, 25 bp, Homo sapien
cgcagctccgcgcttgctatctaag

SEQ ID NO: 3098188 - DNA, 25 bp, Homo sapien
tccgcgcttgctatctaagatctcc

SEQ ID NO: 3098189 - DNA, 25 bp, Homo sapien
cgctgcgcagctccgcgcttgctat

SEQ ID NO: 3098190 - DNA, 25 bp, Homo sapien
cagccgtctccttgtcgggggcagg

SEQ ID NO: 3098191 - DNA, 25 bp, Homo sapien
agccgtctccttgtcgggggcagga

SEQ ID NO: 3098192 - DNA, 25 bp, Homo sapien
gcagccgtctccttgtcgggggcag

SEQ ID NO: 3098193 - DNA, 25 bp, Homo sapien
agcagccgtctccttgtcgggggca

SEQ ID NO: 3098194 - DNA, 25 bp, Homo sapien
tgaacaagatgtgctcccagcttgg

SEQ ID NO: 3098195 - DNA, 25 bp, Homo sapien
gaacaagatgtgctcccagcttggg

SEQ ID NO: 3098196 - DNA, 25 bp, Homo sapien
caggtgccgattgtggcagcaggtg

SEQ ID NO: 3098197 - DNA, 25 bp, Homo sapien
gtgccgattgtggcagcaggtgaac

SEQ ID NO: 3098198 - DNA, 25 bp, Homo sapien
acagtgaaagacagcgcgctgccat

SEQ ID NO: 3098199 - DNA, 25 bp, Homo sapien
ctaggacagtgaaagacagcgcgct

SEQ ID NO: 3098200 - DNA, 25 bp, Homo sapien
gacagtgaaagacagcgcgctgcca

SEQ ID NO: 3098201 - DNA, 25 bp, Homo sapien
aggacagtgaaagacagcgcgctgc

SEQ ID NO: 3098202 - DNA, 25 bp, Homo sapien
gtattattactccctctccctaatc

SEQ ID NO: 3098203 - DNA, 25 bp, Homo sapien
ggctgccaaggataacgggtccaac

SEQ ID NO: 3098204 - DNA, 25 bp, Homo sapien
tggaggctgccaaggataacgggtc

SEQ ID NO: 3098205 - DNA, 25 bp, Homo sapien
tccctaatccgggcaggccagaggc

SEQ ID NO: 3098206 - DNA, 25 bp, Homo sapien
cttgtcaggataattcgttctacga

SEQ ID NO: 3098207 - DNA, 25 bp, Homo sapien
gtcatcaatgagcaggtcccccaag

SEQ ID NO: 3098208 - DNA, 25 bp, Homo sapien
caagaccaccgtcttgtcccttgtc

SEQ ID NO: 3098209 - DNA, 25 bp, Homo sapien
aggataattcgttctacgaactggg

SEQ ID NO: 3098210 - DNA, 25 bp, Homo sapien
tagggcctgatggaagccggaattc

SEQ ID NO: 3098211 - DNA, 25 bp, Homo sapien
ttcagggatagggacttggctctaa

SEQ ID NO: 3098212 - DNA, 25 bp, Homo sapien
cagtctgtgagtagggcctgatgga

SEQ ID NO: 3098213 - DNA, 25 bp, Homo sapien
ggatagggacttggctctaagccct

SEQ ID NO: 3098214 - DNA, 25 bp, Homo sapien
cagctccacgtgcggagtaggggcg

SEQ ID NO: 3098215 - DNA, 25 bp, Homo sapien
gctccacgtgcggagtaggggcggg

SEQ ID NO: 3098216 - DNA, 25 bp, Homo sapien
tccacgtgcggagtaggggcggggc

SEQ ID NO: 3098217 - DNA, 25 bp, Homo sapien
ctccacgtgcggagtaggggcgggg

SEQ ID NO: 3098218 - DNA, 25 bp, Homo sapien
cacccacacagtggtggtacttcag

SEQ ID NO: 3098219 - DNA, 25 bp, Homo sapien
acacagtggtggtacttcagcaggg

SEQ ID NO: 3098220 - DNA, 25 bp, Homo sapien
cacacagtggtggtacttcagcagg

SEQ ID NO: 3098221 - DNA, 25 bp, Homo sapien
cccacacagtggtggtacttcagca

SEQ ID NO: 3098222 - DNA, 25 bp, Homo sapien
gcggttaccgccgggagccaggagc

SEQ ID NO: 3098223 - DNA, 25 bp, Homo sapien
aggagcccgcccaggactccgcccg

SEQ ID NO: 3098224 - DNA, 25 bp, Homo sapien
ctgcggagaaggacgcggttaccgc

SEQ ID NO: 3098225 - DNA, 25 bp, Homo sapien
caggagcccgcccaggactccgccc

SEQ ID NO: 3098226 - DNA, 25 bp, Homo sapien
gggcttcgtacacactggccacttt

SEQ ID NO: 3098227 - DNA, 25 bp, Homo sapien
gttcatctcccgcacagcgtccaag

SEQ ID NO: 3098228 - DNA, 25 bp, Homo sapien
cacagcgtccaaggctcccgggatg

SEQ ID NO: 3098229 - DNA, 25 bp, Homo sapien
gcttcgtacacactggccactttat

SEQ ID NO: 3098230 - DNA, 25 bp, Homo sapien
ggtgagagctctgcgcccttcacag

SEQ ID NO: 3098231 - DNA, 25 bp, Homo sapien
cctccccagggtgcgctgcccgcgg

SEQ ID NO: 3098232 - DNA, 25 bp, Homo sapien
cgggttccagggtgagagctctgcg

SEQ ID NO: 3098233 - DNA, 25 bp, Homo sapien
ccggaacggagcgagcgggccctgc

SEQ ID NO: 3098234 - DNA, 25 bp, Homo sapien
gccaggaagccgcggcgttgctcca

SEQ ID NO: 3098235 - DNA, 25 bp, Homo sapien
aggaggccggcctcgaagtcggcca

SEQ ID NO: 3098236 - DNA, 25 bp, Homo sapien
agggcgcggtactgctcgcgggcca

SEQ ID NO: 3098237 - DNA, 25 bp, Homo sapien
tccagcggcacgtgcggctcctcag

SEQ ID NO: 3098238 - DNA, 25 bp, Homo sapien
caccagcacgcgcacgctccgcgcc

SEQ ID NO: 3098239 - DNA, 25 bp, Homo sapien
ccagcacgcgcacgctccgcgccat

SEQ ID NO: 3098240 - DNA, 25 bp, Homo sapien
accagcacgcgcacgctccgcgcca

SEQ ID NO: 3098241 - DNA, 25 bp, Homo sapien
agctgcgagctctcggggtctgggg

SEQ ID NO: 3098242 - DNA, 25 bp, Homo sapien
gagggagcgctgcttccggagtccg

SEQ ID NO: 3098243 - DNA, 25 bp, Homo sapien
tccgccgggctgatttgcatagagt

SEQ ID NO: 3098244 - DNA, 25 bp, Homo sapien
ggccggaagcggagggagcgctgct

SEQ ID NO: 3098245 - DNA, 25 bp, Homo sapien
ccggagtccgccgggctgatttgca

SEQ ID NO: 3098246 - DNA, 25 bp, Homo sapien
caagttagggcaacaccaagaaggc

SEQ ID NO: 3098247 - DNA, 25 bp, Homo sapien
gtccagttgaggcttggtaaaccca

SEQ ID NO: 3098248 - DNA, 25 bp, Homo sapien
ttcctctgcgtgagagcaaaggctt

SEQ ID NO: 3098249 - DNA, 25 bp, Homo sapien
tctttgctttgcaggcggcaaggca

SEQ ID NO: 3098250 - DNA, 25 bp, Homo sapien
tccaatctactactagaaaacactc

SEQ ID NO: 3098251 - DNA, 25 bp, Homo sapien
cagtactaagtgtcacaaagctttc

SEQ ID NO: 3098252 - DNA, 25 bp, Homo sapien
gaaaacactcatgccatggcccaca

SEQ ID NO: 3098253 - DNA, 25 bp, Homo sapien
aaagatcctctaacacatctggaac

SEQ ID NO: 3098254 - DNA, 25 bp, Homo sapien
cagaacgacagcgttcaggacagtc

SEQ ID NO: 3098255 - DNA, 25 bp, Homo sapien
cagacagaacgacagcgttcaggac

SEQ ID NO: 3098256 - DNA, 25 bp, Homo sapien
catggaggaaacagacagaacgaca

SEQ ID NO: 3098257 - DNA, 25 bp, Homo sapien
acgacagcgttcaggacagtcagag

SEQ ID NO: 3098258 - DNA, 25 bp, Homo sapien
gctgggcacaggcgcagcaggcacg

SEQ ID NO: 3098259 - DNA, 25 bp, Homo sapien
gacgaggctggacttgccgccaggg

SEQ ID NO: 3098260 - DNA, 25 bp, Homo sapien
ccaagacgaggctggacttgccgcc

SEQ ID NO: 3098261 - DNA, 25 bp, Homo sapien
tggacttgccgccagggggatttct

SEQ ID NO: 3098262 - DNA, 25 bp, Homo sapien
aaacagggaatagaaataatactca

SEQ ID NO: 3098263 - DNA, 25 bp, Homo sapien
taatactcataatgacagccatttc

SEQ ID NO: 3098264 - DNA, 25 bp, Homo sapien
cagggaatagaaataatactcataa

SEQ ID NO: 3098265 - DNA, 25 bp, Homo sapien
aataatactcataatgacagccatt

SEQ ID NO: 3098266 - DNA, 25 bp, Homo sapien
taatcacccaccatgctcccactcc

SEQ ID NO: 3098267 - DNA, 25 bp, Homo sapien
ataatcacccaccatgctcccactc

SEQ ID NO: 3098268 - DNA, 25 bp, Homo sapien
agcgtgatcctggcccaccacaacc

SEQ ID NO: 3098269 - DNA, 25 bp, Homo sapien
ggagtaaagtagcgtgatcctggcc

SEQ ID NO: 3098270 - DNA, 25 bp, Homo sapien
gtagcgtgatcctggcccaccacaa

SEQ ID NO: 3098271 - DNA, 25 bp, Homo sapien
agtaaagtagcgtgatcctggccca

SEQ ID NO: 3098272 - DNA, 25 bp, Homo sapien
cactgcactcgtggttcaggcaaca

SEQ ID NO: 3098273 - DNA, 25 bp, Homo sapien
tttaagacagatgaactaaagttgc

SEQ ID NO: 3098274 - DNA, 25 bp, Homo sapien
gtgccactgcactcgtggttcaggc

SEQ ID NO: 3098275 - DNA, 25 bp, Homo sapien
gcactcgtggttcaggcaacagtga

SEQ ID NO: 3098276 - DNA, 25 bp, Homo sapien
gcaaggctctgtctcgaaaaaacaa

SEQ ID NO: 3098277 - DNA, 25 bp, Homo sapien
tgtctcgaaaaaacaaaaactgtga

SEQ ID NO: 3098278 - DNA, 25 bp, Homo sapien
ggttgccttgagctgagatcatacc

SEQ ID NO: 3098279 - DNA, 25 bp, Homo sapien
ctctgtctcgaaaaaacaaaaactg

SEQ ID NO: 3098280 - DNA, 25 bp, Homo sapien
gaaggtgcaacaactcatccatgtg

SEQ ID NO: 3098281 - DNA, 25 bp, Homo sapien
tcgtaacaacccaggtacagtggct

SEQ ID NO: 3098282 - DNA, 25 bp, Homo sapien
tacttgggacctttccataccaggc

SEQ ID NO: 3098283 - DNA, 25 bp, Homo sapien
aaaaacacccagaaggatggattct

SEQ ID NO: 3098284 - DNA, 25 bp, Homo sapien
tagtctcctggagttcaacgcaaag

SEQ ID NO: 3098285 - DNA, 25 bp, Homo sapien
tagataatagttatggaaggacccc

SEQ ID NO: 3098286 - DNA, 25 bp, Homo sapien
gaaggacccctatcagttccaaagc

SEQ ID NO: 3098287 - DNA, 25 bp, Homo sapien
tggtaatgccagcactagtctcctg

SEQ ID NO: 3098288 - DNA, 25 bp, Homo sapien
gatctaagaagtctccggagcttgc

SEQ ID NO: 3098289 - DNA, 25 bp, Homo sapien
gaagtctccggagcttgcttcagag

SEQ ID NO: 3098290 - DNA, 25 bp, Homo sapien
cttcagatctaagaagtctccggag

SEQ ID NO: 3098291 - DNA, 25 bp, Homo sapien
gagcttgcttcagaggagttccttc

SEQ ID NO: 3098292 - DNA, 25 bp, Homo sapien
ctgctgacttggcccaagaagcttg

SEQ ID NO: 3098293 - DNA, 25 bp, Homo sapien
ctgacttggcccaagaagcttgatt

SEQ ID NO: 3098294 - DNA, 25 bp, Homo sapien
tgacttggcccaagaagcttgattt

SEQ ID NO: 3098295 - DNA, 25 bp, Homo sapien
gctgacttggcccaagaagcttgat

SEQ ID NO: 3098296 - DNA, 25 bp, Homo sapien
acaggttgttctgttggttcatcaa

SEQ ID NO: 3098297 - DNA, 25 bp, Homo sapien
caggttgttctgttggttcatcaaa

SEQ ID NO: 3098298 - DNA, 25 bp, Homo sapien
ggttgttctgttggttcatcaaaac

SEQ ID NO: 3098299 - DNA, 25 bp, Homo sapien
cacaggttgttctgttggttcatca

SEQ ID NO: 3098300 - DNA, 25 bp, Homo sapien
ttcctcctaaggctcaattgctgag

SEQ ID NO: 3098301 - DNA, 25 bp, Homo sapien
gggtagccacacatgaatgcaggtc

SEQ ID NO: 3098302 - DNA, 25 bp, Homo sapien
caagccttgaagaggatcccagaca

SEQ ID NO: 3098303 - DNA, 25 bp, Homo sapien
tatttcacgtgtcttcttagcccca

SEQ ID NO: 3098304 - DNA, 25 bp, Homo sapien
aaggtaggatgcaaaggccacggtc

SEQ ID NO: 3098305 - DNA, 25 bp, Homo sapien
tcactgggcaaacgtcaaaggagga

SEQ ID NO: 3098306 - DNA, 25 bp, Homo sapien
cacggtccgaaggtttaagcgcaga

SEQ ID NO: 3098307 - DNA, 25 bp, Homo sapien
ggtagcgctaccacgttagagacaa

SEQ ID NO: 3098308 - DNA, 25 bp, Homo sapien
ggtctccggatccaatggctgcgcg

SEQ ID NO: 3098309 - DNA, 25 bp, Homo sapien
acaataggacctgaccatgcatggg

SEQ ID NO: 3098310 - DNA, 25 bp, Homo sapien
ccctgactccgtggaaggaatgaat

SEQ ID NO: 3098311 - DNA, 25 bp, Homo sapien
ggacctgatcgatccggtctccgga

SEQ ID NO: 3098312 - DNA, 25 bp, Homo sapien
gctgttggggtcgactcccttgaag

SEQ ID NO: 3098313 - DNA, 25 bp, Homo sapien
tcctgctgttggggtcgactccctt

SEQ ID NO: 3098314 - DNA, 25 bp, Homo sapien
ctgttggggtcgactcccttgaagg

SEQ ID NO: 3098315 - DNA, 25 bp, Homo sapien
ctgctgttggggtcgactcccttga

SEQ ID NO: 3098316 - DNA, 25 bp, Homo sapien
gagcagaacgctcaaagggtcggac

SEQ ID NO: 3098317 - DNA, 25 bp, Homo sapien
ccatgcggcattacgatgggctgtg

SEQ ID NO: 3098318 - DNA, 25 bp, Homo sapien
taacccgccggcattggccgattca

SEQ ID NO: 3098319 - DNA, 25 bp, Homo sapien
tgtccggccgatcgacgcctttata

SEQ ID NO: 3098320 - DNA, 25 bp, Homo sapien
ataccaacatgcctggctaattttt

SEQ ID NO: 3098321 - DNA, 25 bp, Homo sapien
tcccgagcagcgggactacaggtgc

SEQ ID NO: 3098322 - DNA, 25 bp, Homo sapien
caacatgcctggctaatttttgtat

SEQ ID NO: 3098323 - DNA, 25 bp, Homo sapien
ttgctctgttgcccagattggagtg

SEQ ID NO: 3098324 - DNA, 25 bp, Homo sapien
cagtggcgtgatctccattcactga

SEQ ID NO: 3098325 - DNA, 25 bp, Homo sapien
ggcgtgatctccattcactgaaacc

SEQ ID NO: 3098326 - DNA, 25 bp, Homo sapien
tgtttgtttatttagagacacggtc

SEQ ID NO: 3098327 - DNA, 25 bp, Homo sapien
tgccagggctgaacataacttttat

SEQ ID NO: 3098328 - DNA, 25 bp, Homo sapien
cactatattgccagggctgaacata

SEQ ID NO: 3098329 - DNA, 25 bp, Homo sapien
ccctgtgaggtatgcctctatttcc

SEQ ID NO: 3098330 - DNA, 25 bp, Homo sapien
tgcagtctgggaccaagcccgtagt

SEQ ID NO: 3098331 - DNA, 25 bp, Homo sapien
gatcatgtcattggtctccagttgg

SEQ ID NO: 3098332 - DNA, 25 bp, Homo sapien
tggtaggttgacaatcagtatggac

SEQ ID NO: 3098333 - DNA, 25 bp, Homo sapien
caaaaagacctaagacgggaggctg

SEQ ID NO: 3098334 - DNA, 25 bp, Homo sapien
gacggaatgatgctccatctcaaaa

SEQ ID NO: 3098335 - DNA, 25 bp, Homo sapien
tccgtgcctcacttaatatacagaa

SEQ ID NO: 3098336 - DNA, 25 bp, Homo sapien
ggcatcagtatcagtctgtcagaaa

SEQ ID NO: 3098337 - DNA, 25 bp, Homo sapien
tcagtgttttatcagcaacaaaggc

SEQ ID NO: 3098338 - DNA, 25 bp, Homo sapien
ggaaatccacgatactatggcccaa

SEQ ID NO: 3098339 - DNA, 25 bp, Homo sapien
tatttaatatttctcagaataaaga

SEQ ID NO: 3098340 - DNA, 25 bp, Homo sapien
tttaatatttctcagaataaagaaa

SEQ ID NO: 3098341 - DNA, 25 bp, Homo sapien
taatatttctcagaataaagaaaac

SEQ ID NO: 3098342 - DNA, 25 bp, Homo sapien
aagcctcaattttctatttaatatt

SEQ ID NO: 3098343 - DNA, 25 bp, Homo sapien
cgcttgacttgaagggaaaactatc

SEQ ID NO: 3098344 - DNA, 25 bp, Homo sapien
agacgcttgacttgaagggaaaact

SEQ ID NO: 3098345 - DNA, 25 bp, Homo sapien
gccctacatgtaacagctacgtaca

SEQ ID NO: 3098346 - DNA, 25 bp, Homo sapien
ttgacttgaagggaaaactatctag

SEQ ID NO: 3098347 - DNA, 25 bp, Homo sapien
agataagagctgaatgagcatgcca

SEQ ID NO: 3098348 - DNA, 25 bp, Homo sapien
aaagataagagctgaatgagcatgc

SEQ ID NO: 3098349 - DNA, 25 bp, Homo sapien
gaatataaagataagagctgaatga

SEQ ID NO: 3098350 - DNA, 25 bp, Homo sapien
ataaagataagagctgaatgagcat

SEQ ID NO: 3098351 - DNA, 25 bp, Homo sapien
cccgtctccacttgatgtcaatcaa

SEQ ID NO: 3098352 - DNA, 25 bp, Homo sapien
aaacataccattggctgtttagtta

SEQ ID NO: 3098353 - DNA, 25 bp, Homo sapien
tgcaatatgcttgtgcacatatacc

SEQ ID NO: 3098354 - DNA, 25 bp, Homo sapien
tagagaaaactatacggtagtagtc

SEQ ID NO: 3098355 - DNA, 25 bp, Homo sapien
cacatcaattgtatcttcatcctcc

SEQ ID NO: 3098356 - DNA, 25 bp, Homo sapien
catcaattgtatcttcatcctccat

SEQ ID NO: 3098357 - DNA, 25 bp, Homo sapien
cgtctgctgttggaacacatcaatt

SEQ ID NO: 3098358 - DNA, 25 bp, Homo sapien
ctcccgtctgctgttggaacacatc

SEQ ID NO: 3098359 - DNA, 25 bp, Homo sapien
gtaccatcttgggtgacggcagcct

SEQ ID NO: 3098360 - DNA, 25 bp, Homo sapien
catcttgggtgacggcagcctccac

SEQ ID NO: 3098361 - DNA, 25 bp, Homo sapien
taccatcttgggtgacggcagcctc

SEQ ID NO: 3098362 - DNA, 25 bp, Homo sapien
gtggtaccatcttgggtgacggcag

SEQ ID NO: 3098363 - DNA, 25 bp, Homo sapien
tgagctataatgaggccactacact

SEQ ID NO: 3098364 - DNA, 25 bp, Homo sapien
aggccactacacttcaacccgggca

SEQ ID NO: 3098365 - DNA, 25 bp, Homo sapien
gggttgggcacattgattcgtgcct

SEQ ID NO: 3098366 - DNA, 25 bp, Homo sapien
aaaaaccattggcatttcctgagcc

SEQ ID NO: 3098367 - DNA, 25 bp, Homo sapien
tgtttcattgattggttgcccgtca

SEQ ID NO: 3098368 - DNA, 25 bp, Homo sapien
cattgattggttgcccgtcaaatcg

SEQ ID NO: 3098369 - DNA, 25 bp, Homo sapien
cgtcaaatcggaatctgatctgcct

SEQ ID NO: 3098370 - DNA, 25 bp, Homo sapien
ttcattgattggttgcccgtcaaat

SEQ ID NO: 3098371 - DNA, 25 bp, Homo sapien
ctgtcgttcacaataggctttcatt

SEQ ID NO: 3098372 - DNA, 25 bp, Homo sapien
aattaatatgatcgttgttctcagt

SEQ ID NO: 3098373 - DNA, 25 bp, Homo sapien
tcaaattaatatgatcgttgttctc

SEQ ID NO: 3098374 - DNA, 25 bp, Homo sapien
accatcctgccccgccaccttcaaa

SEQ ID NO: 3098375 - DNA, 25 bp, Homo sapien
caccctgcgtgcgcgagcacgagta

SEQ ID NO: 3098376 - DNA, 25 bp, Homo sapien
tgcgcgagcacgagtagccgaagcc

SEQ ID NO: 3098377 - DNA, 25 bp, Homo sapien
gcgagcacgagtagccgaagcctcc

SEQ ID NO: 3098378 - DNA, 25 bp, Homo sapien
cctgcgtgcgcgagcacgagtagcc

SEQ ID NO: 3098379 - DNA, 25 bp, Homo sapien
gcactgaaatgaggcccaatgactt

SEQ ID NO: 3098380 - DNA, 25 bp, Homo sapien
acattagtggattcacatagggcac

SEQ ID NO: 3098381 - DNA, 25 bp, Homo sapien
gattacatacactctatccaggagt

SEQ ID NO: 3098382 - DNA, 25 bp, Homo sapien
aagttctaggccgattaatgctcaa

SEQ ID NO: 3098383 - DNA, 25 bp, Homo sapien
tgatttgctgtcgacgccaggaagg

SEQ ID NO: 3098384 - DNA, 25 bp, Homo sapien
tcgcagtgttaacgaggtgcccgcc

SEQ ID NO: 3098385 - DNA, 25 bp, Homo sapien
caacagtcactgtaagggtaccccg

SEQ ID NO: 3098386 - DNA, 25 bp, Homo sapien
tgtctgcttccctagtggtcgcgag

SEQ ID NO: 3098387 - DNA, 25 bp, Homo sapien
cttcccttgcttttcctcttgggca

SEQ ID NO: 3098388 - DNA, 25 bp, Homo sapien
ttcccttgcttttcctcttgggcat

SEQ ID NO: 3098389 - DNA, 25 bp, Homo sapien
ccagtggatttttgaggaggttaca

SEQ ID NO: 3098390 - DNA, 25 bp, Homo sapien
gaggttacagttggctctttgtatc

SEQ ID NO: 3098391 - DNA, 25 bp, Homo sapien
tacatcatggatacggagtgctggc

SEQ ID NO: 3098392 - DNA, 25 bp, Homo sapien
caatcacagctattgcagtctggac

SEQ ID NO: 3098393 - DNA, 25 bp, Homo sapien
agcaaatttttgtgtttttcaatag

SEQ ID NO: 3098394 - DNA, 25 bp, Homo sapien
tgttgcctaggcaggctggtctgga

SEQ ID NO: 3098395 - DNA, 25 bp, Homo sapien
aggtgtccgtcaccacgcccagcaa

SEQ ID NO: 3098396 - DNA, 25 bp, Homo sapien
tgcccaagctgttcttgaacttgtg

SEQ ID NO: 3098397 - DNA, 25 bp, Homo sapien
gcagcgttctctcgttttcagcaga

SEQ ID NO: 3098398 - DNA, 25 bp, Homo sapien
tccaaaagtatcgagctaaaaggtg

SEQ ID NO: 3098399 - DNA, 25 bp, Homo sapien
tgtgatctaagacctaactgtgtgg

SEQ ID NO: 3098400 - DNA, 25 bp, Homo sapien
ctttcgtgcaggctaaggctttggc

SEQ ID NO: 3098401 - DNA, 25 bp, Homo sapien
tgcacccggccaaggtgtacaacat

SEQ ID NO: 3098402 - DNA, 25 bp, Homo sapien
tggtttgtggcccacctgacagacc

SEQ ID NO: 3098403 - DNA, 25 bp, Homo sapien
tggcccacctgacagacctgctgga

SEQ ID NO: 3098404 - DNA, 25 bp, Homo sapien
actcttgtgggacgcggcctgtgcc

SEQ ID NO: 3098405 - DNA, 25 bp, Homo sapien
ctctttgagggacaggacatgtggg

SEQ ID NO: 3098406 - DNA, 25 bp, Homo sapien
gccagccatgatgctcagtgaccga

SEQ ID NO: 3098407 - DNA, 25 bp, Homo sapien
cattgcatcagtggtcccagaaaca

SEQ ID NO: 3098408 - DNA, 25 bp, Homo sapien
gttggagggatcacgtcagacttct

SEQ ID NO: 3098409 - DNA, 25 bp, Homo sapien
cagtgaccgactgacattcctgggt

SEQ ID NO: 3098410 - DNA, 25 bp, Homo sapien
cttgatgacgtctcggattgcccct

SEQ ID NO: 3098411 - DNA, 25 bp, Homo sapien
tatcgcgagttccaccgtatgtacg

SEQ ID NO: 3098412 - DNA, 25 bp, Homo sapien
cagtgctcttgtttcgccataggaa

SEQ ID NO: 3098413 - DNA, 25 bp, Homo sapien
gatgactctgctgacagacgccttg

SEQ ID NO: 3098414 - DNA, 25 bp, Homo sapien
gtgactcagctcaagtgtggcccga

SEQ ID NO: 3098415 - DNA, 25 bp, Homo sapien
tcaaggtggagatcacagcgtcctc

SEQ ID NO: 3098416 - DNA, 25 bp, Homo sapien
tcacagcagcagtttggttctcagc

SEQ ID NO: 3098417 - DNA, 25 bp, Homo sapien
tagtcagtaggatggcctgtcccca

SEQ ID NO: 3098418 - DNA, 25 bp, Homo sapien
gaactggtccacctcgcccacctct

SEQ ID NO: 3098419 - DNA, 25 bp, Homo sapien
gaaggtcagcttataccgaagccgc

SEQ ID NO: 3098420 - DNA, 25 bp, Homo sapien
cccagggcgaaggtcagcttatacc

SEQ ID NO: 3098421 - DNA, 25 bp, Homo sapien
agcttataccgaagccgcaccttct

SEQ ID NO: 3098422 - DNA, 25 bp, Homo sapien
gagttctgtcccagaaggtggctgc

SEQ ID NO: 3098423 - DNA, 25 bp, Homo sapien
tggagagagttctgtcccagaaggt

SEQ ID NO: 3098424 - DNA, 25 bp, Homo sapien
gtggctgcaacttcactttcattga

SEQ ID NO: 3098425 - DNA, 25 bp, Homo sapien
agaaggtggctgcaacttcactttc

SEQ ID NO: 3098426 - DNA, 25 bp, Homo sapien
cgtttttatcgtaggctgtcacagg

SEQ ID NO: 3098427 - DNA, 25 bp, Homo sapien
cactccttggcaaagtggaagagga

SEQ ID NO: 3098428 - DNA, 25 bp, Homo sapien
caccagcacgtcaggtcgtcctggg

SEQ ID NO: 3098429 - DNA, 25 bp, Homo sapien
taagggagccgtgttcagcatggac

SEQ ID NO: 3098430 - DNA, 25 bp, Homo sapien
tgatgagtccagtgcttcctaacgg

SEQ ID NO: 3098431 - DNA, 25 bp, Homo sapien
ccctgcaaagagtgcctggatccat

SEQ ID NO: 3098432 - DNA, 25 bp, Homo sapien
gaaaagggctactccgtggtcatga

SEQ ID NO: 3098433 - DNA, 25 bp, Homo sapien
tcgcatgtcctacagctccgtggct

SEQ ID NO: 3098434 - DNA, 25 bp, Homo sapien
ctggaaactcagtggctggaagagc

SEQ ID NO: 3098435 - DNA, 25 bp, Homo sapien
tgatcgattccaggggcacgtggat

SEQ ID NO: 3098436 - DNA, 25 bp, Homo sapien
taggcttgatcgattccaggggcac

SEQ ID NO: 3098437 - DNA, 25 bp, Homo sapien
agagcgggctgccgggccccgtgga

SEQ ID NO: 3098438 - DNA, 25 bp, Homo sapien
tgagaggggaggtagtgggtttcac

SEQ ID NO: 3098439 - DNA, 25 bp, Homo sapien
tggtggggatgagaggggaggtagt

SEQ ID NO: 3098440 - DNA, 25 bp, Homo sapien
gatgagaggggaggtagtgggtttc

SEQ ID NO: 3098441 - DNA, 25 bp, Homo sapien
tggggatgagaggggaggtagtggg

SEQ ID NO: 3098442 - DNA, 25 bp, Homo sapien
aggatggaaagcacgtcagagagcc

SEQ ID NO: 3098443 - DNA, 25 bp, Homo sapien
caaagttagctctggttctgacaca

SEQ ID NO: 3098444 - DNA, 25 bp, Homo sapien
gagctgcaggactctcacccaaggc

SEQ ID NO: 3098445 - DNA, 25 bp, Homo sapien
agcctgactgatgggactacaaggc

SEQ ID NO: 3098446 - DNA, 25 bp, Homo sapien
tctagaagctgatcgagggcatcca

SEQ ID NO: 3098447 - DNA, 25 bp, Homo sapien
tgcccagggactgcgggctcaactt

SEQ ID NO: 3098448 - DNA, 25 bp, Homo sapien
agaaaacaaggaggagcccgcactg

SEQ ID NO: 3098449 - DNA, 25 bp, Homo sapien
gaagaagtccaggtcggactgttcc

SEQ ID NO: 3098450 - DNA, 25 bp, Homo sapien
gcagcccaggagacatgacgctgga

SEQ ID NO: 3098451 - DNA, 25 bp, Homo sapien
gacagccccggaggcactcattgtt

SEQ ID NO: 3098452 - DNA, 25 bp, Homo sapien
gaggtccttggcacagtagtgctgt

SEQ ID NO: 3098453 - DNA, 25 bp, Homo sapien
gtagtgctgtcaccgatcctgtgcc

SEQ ID NO: 3098454 - DNA, 25 bp, Homo sapien
tgactctttgggaggaacattaggg

SEQ ID NO: 3098455 - DNA, 25 bp, Homo sapien
gccactggctgttcccagctgactc

SEQ ID NO: 3098456 - DNA, 25 bp, Homo sapien
acattaggggctgggtcggcgaggc

SEQ ID NO: 3098457 - DNA, 25 bp, Homo sapien
tggctgttcccagctgactctttgg

SEQ ID NO: 3098458 - DNA, 25 bp, Homo sapien
tggagcgctccagtccatgatgcag

SEQ ID NO: 3098459 - DNA, 25 bp, Homo sapien
caggatgagaagaggctctgagcta

SEQ ID NO: 3098460 - DNA, 25 bp, Homo sapien
tgagtacctccaactcagggttctt

SEQ ID NO: 3098461 - DNA, 25 bp, Homo sapien
acaagtgacatcaatgggtgaaggc

SEQ ID NO: 3098462 - DNA, 25 bp, Homo sapien
gacaaactgttggtcgtgtccagct

SEQ ID NO: 3098463 - DNA, 25 bp, Homo sapien
tccgcaaggtcgatgagcgtgcctt

SEQ ID NO: 3098464 - DNA, 25 bp, Homo sapien
ccaagcagagtagctcctcgtccag

SEQ ID NO: 3098465 - DNA, 25 bp, Homo sapien
ccttggttactgcactgactgtttc

SEQ ID NO: 3098466 - DNA, 25 bp, Homo sapien
tccgagtcaggcagggttaaggtag

SEQ ID NO: 3098467 - DNA, 25 bp, Homo sapien
cttccgagtcaggcagggttaaggt

SEQ ID NO: 3098468 - DNA, 25 bp, Homo sapien
ttccgagtcaggcagggttaaggta

SEQ ID NO: 3098469 - DNA, 25 bp, Homo sapien
agggttaaggtagccacctcgccat

SEQ ID NO: 3098470 - DNA, 25 bp, Homo sapien
cctgttgtgacagttcccacccaca

SEQ ID NO: 3098471 - DNA, 25 bp, Homo sapien
ggcttatccctgaccgtcgctcttt

SEQ ID NO: 3098472 - DNA, 25 bp, Homo sapien
tatccaaatgcctggcttatccctg

SEQ ID NO: 3098473 - DNA, 25 bp, Homo sapien
atgcctggcttatccctgaccgtcg

SEQ ID NO: 3098474 - DNA, 25 bp, Homo sapien
ttgtcctcagtctcactggcgagtt

SEQ ID NO: 3098475 - DNA, 25 bp, Homo sapien
aataaagtccgcctcttgttctcac

SEQ ID NO: 3098476 - DNA, 25 bp, Homo sapien
tgttctcacactgatcaaacagctc

SEQ ID NO: 3098477 - DNA, 25 bp, Homo sapien
caaactgttatcattgtcctcagtc

SEQ ID NO: 3098478 - DNA, 25 bp, Homo sapien
gtgtctctgacaaggcacgtgctca

SEQ ID NO: 3098479 - DNA, 25 bp, Homo sapien
caccacatgggcatcagggttacaa

SEQ ID NO: 3098480 - DNA, 25 bp, Homo sapien
gtttgtctaggtagcagtcaccagg

SEQ ID NO: 3098481 - DNA, 25 bp, Homo sapien
aaatgaccgggatatgccaattgcc

SEQ ID NO: 3098482 - DNA, 25 bp, Homo sapien
tgttgttaacttcctctaacgtgtg

SEQ ID NO: 3098483 - DNA, 25 bp, Homo sapien
tgtgcagacgcttggtcaccttctg

SEQ ID NO: 3098484 - DNA, 25 bp, Homo sapien
tgtccccgtccgaagagtcctcctg

SEQ ID NO: 3098485 - DNA, 25 bp, Homo sapien
agtcctcctggctgtaatgaagcag

SEQ ID NO: 3098486 - DNA, 25 bp, Homo sapien
acttgatgagcttgttggcctcctg

SEQ ID NO: 3098487 - DNA, 25 bp, Homo sapien
gacttgatgagcttgttggcctcct

SEQ ID NO: 3098488 - DNA, 25 bp, Homo sapien
tcagcgtcctatccacaggaattgg

SEQ ID NO: 3098489 - DNA, 25 bp, Homo sapien
gggatcagcgtcctatccacaggaa

SEQ ID NO: 3098490 - DNA, 25 bp, Homo sapien
tggtggagaggggatcagcgtccta

SEQ ID NO: 3098491 - DNA, 25 bp, Homo sapien
gaggggatcagcgtcctatccacag

SEQ ID NO: 3098492 - DNA, 25 bp, Homo sapien
ctgtacagcagctcaataaccttgg

SEQ ID NO: 3098493 - DNA, 25 bp, Homo sapien
cagcagctcaataaccttggtcttc

SEQ ID NO: 3098494 - DNA, 25 bp, Homo sapien
ggtaggcgtctttgatctttgcttc

SEQ ID NO: 3098495 - DNA, 25 bp, Homo sapien
ctgtctcttcagcatgtggtaggcg

SEQ ID NO: 3098496 - DNA, 25 bp, Homo sapien
cagttcttcatgcatgcctccagca

SEQ ID NO: 3098497 - DNA, 25 bp, Homo sapien
taactcattcaaaaagcggaacttc

SEQ ID NO: 3098498 - DNA, 25 bp, Homo sapien
gcggaacttccccacttcgttatga

SEQ ID NO: 3098499 - DNA, 25 bp, Homo sapien
ctttggagagacgactttgattaac

SEQ ID NO: 3098500 - DNA, 25 bp, Homo sapien
ccagagagtactgaataaacacgcc

SEQ ID NO: 3098501 - DNA, 25 bp, Homo sapien
acctggcactggcaagatccctggc

SEQ ID NO: 3098502 - DNA, 25 bp, Homo sapien
gagctcatcacgaaaagcagtgtgc

SEQ ID NO: 3098503 - DNA, 25 bp, Homo sapien
tagccgcacagaggagaggcgctca

SEQ ID NO: 3098504 - DNA, 25 bp, Homo sapien
ctcccggcctaggccccacagggtg

SEQ ID NO: 3098505 - DNA, 25 bp, Homo sapien
atcctcccggcctaggccccacagg

SEQ ID NO: 3098506 - DNA, 25 bp, Homo sapien
tcccggcctaggccccacagggtgc

SEQ ID NO: 3098507 - DNA, 25 bp, Homo sapien
tgggccagcagtcggacggcgatct

SEQ ID NO: 3098508 - DNA, 25 bp, Homo sapien
ccagcagtcggacggcgatctgtgg

SEQ ID NO: 3098509 - DNA, 25 bp, Homo sapien
cagcagtcggacggcgatctgtggc

SEQ ID NO: 3098510 - DNA, 25 bp, Homo sapien
ggccagcagtcggacggcgatctgt

SEQ ID NO: 3098511 - DNA, 25 bp, Homo sapien
gcggttggaaggattggtggcttta

SEQ ID NO: 3098512 - DNA, 25 bp, Homo sapien
tgtattcccagtcctcctggcggtt

SEQ ID NO: 3098513 - DNA, 25 bp, Homo sapien
tcctcctggcggttggaaggattgg

SEQ ID NO: 3098514 - DNA, 25 bp, Homo sapien
cctggcggttggaaggattggtggc

SEQ ID NO: 3098515 - DNA, 25 bp, Homo sapien
tttccagacctagccttccataatg

SEQ ID NO: 3098516 - DNA, 25 bp, Homo sapien
ccagcgaatattttccacatacctg

SEQ ID NO: 3098517 - DNA, 25 bp, Homo sapien
gaatattttccacatacctgtcaaa

SEQ ID NO: 3098518 - DNA, 25 bp, Homo sapien
gtttttccagacctagccttccata

SEQ ID NO: 3098519 - DNA, 25 bp, Homo sapien
gaacacatcataacagagactccag

SEQ ID NO: 3098520 - DNA, 25 bp, Homo sapien
gtggcacccagtgtatcaccctgct

SEQ ID NO: 3098521 - DNA, 25 bp, Homo sapien
gctgcagggatctgagtagcgacag

SEQ ID NO: 3098522 - DNA, 25 bp, Homo sapien
atctgagtagcgacagctgccaggc

SEQ ID NO: 3098523 - DNA, 25 bp, Homo sapien
aaagccctagtttctgcaatggtca

SEQ ID NO: 3098524 - DNA, 25 bp, Homo sapien
aagccctagtttctgcaatggtcag

SEQ ID NO: 3098525 - DNA, 25 bp, Homo sapien
caaaaagccctagtttctgcaatgg

SEQ ID NO: 3098526 - DNA, 25 bp, Homo sapien
cacaaaaagccctagtttctgcaat

SEQ ID NO: 3098527 - DNA, 25 bp, Homo sapien
cactctattgccccgggctgcagta

SEQ ID NO: 3098528 - DNA, 25 bp, Homo sapien
ccccgggctgcagtaggcgatcatg

SEQ ID NO: 3098529 - DNA, 25 bp, Homo sapien
cacaggcgtgtgcttgttctttttt

SEQ ID NO: 3098530 - DNA, 25 bp, Homo sapien
ggaccacccacaggcgtgtgcttgt

SEQ ID NO: 3098531 - DNA, 25 bp, Homo sapien
gagaatctgagatgggttttcaagc

SEQ ID NO: 3098532 - DNA, 25 bp, Homo sapien
tataacaccccacgtagcaggtact

SEQ ID NO: 3098533 - DNA, 25 bp, Homo sapien
gaatgccggcgttttagcactgcct

SEQ ID NO: 3098534 - DNA, 25 bp, Homo sapien
tagctcaaatggagtatcctcaatg

SEQ ID NO: 3098535 - DNA, 25 bp, Homo sapien
gagctccttggagaacacttccata

SEQ ID NO: 3098536 - DNA, 25 bp, Homo sapien
taaagaagccttatgacctgcctgc

SEQ ID NO: 3098537 - DNA, 25 bp, Homo sapien
tagcaagttgggcatttctgggcaa

SEQ ID NO: 3098538 - DNA, 25 bp, Homo sapien
tgaaattatggcagtagtgcctgct

SEQ ID NO: 3098539 - DNA, 25 bp, Homo sapien
ggaattcccgacaccgatttcacca

SEQ ID NO: 3098540 - DNA, 25 bp, Homo sapien
tccgaagcttctcccttagtcaggg

SEQ ID NO: 3098541 - DNA, 25 bp, Homo sapien
ccgaagcatgtcagcccgaagatct

SEQ ID NO: 3098542 - DNA, 25 bp, Homo sapien
tctgaagctgccaggcgactgaacg

SEQ ID NO: 3098543 - DNA, 25 bp, Homo sapien
gagccaggactccaggctttcccct

SEQ ID NO: 3098544 - DNA, 25 bp, Homo sapien
tgagccaggactccaggctttcccc

SEQ ID NO: 3098545 - DNA, 25 bp, Homo sapien
caggactccaggctttccccttccg

SEQ ID NO: 3098546 - DNA, 25 bp, Homo sapien
gccaggactccaggctttccccttc

SEQ ID NO: 3098547 - DNA, 25 bp, Homo sapien
gcggcttcaaaactcgcgagagtct

SEQ ID NO: 3098548 - DNA, 25 bp, Homo sapien
tgagaggagtgagtgccgtcaccga

SEQ ID NO: 3098549 - DNA, 25 bp, Homo sapien
cgccagactgcgacggatacaggga

SEQ ID NO: 3098550 - DNA, 25 bp, Homo sapien
tcgcgagagtctgcacgagctgaga

SEQ ID NO: 3098551 - DNA, 25 bp, Homo sapien
tgaggcaccaaggtagtagttgcac

SEQ ID NO: 3098552 - DNA, 25 bp, Homo sapien
cattcagtgaaactggctggaggaa

SEQ ID NO: 3098553 - DNA, 25 bp, Homo sapien
cagtttctggtgtgacttgtgctct

SEQ ID NO: 3098554 - DNA, 25 bp, Homo sapien
tagaaaattctcacgctgaactggt

SEQ ID NO: 3098555 - DNA, 25 bp, Homo sapien
agtctttgggtgaggcagagactcc

SEQ ID NO: 3098556 - DNA, 25 bp, Homo sapien
tagaagggaagacactcaaagtctg

SEQ ID NO: 3098557 - DNA, 25 bp, Homo sapien
cacggcataagtgggaaacatctca

SEQ ID NO: 3098558 - DNA, 25 bp, Homo sapien
gactccactgccagctttagaggtg

SEQ ID NO: 3098559 - DNA, 25 bp, Homo sapien
ctagtcggagacttcgctgtagtaa

SEQ ID NO: 3098560 - DNA, 25 bp, Homo sapien
acaaagagctcatccatgcgctgcc

SEQ ID NO: 3098561 - DNA, 25 bp, Homo sapien
ccatcccggatcagcacaaagagct

SEQ ID NO: 3098562 - DNA, 25 bp, Homo sapien
gcagctggcgttgtcttccagccgg

SEQ ID NO: 3098563 - DNA, 25 bp, Homo sapien
agctagccatggcttgcacagctgc

SEQ ID NO: 3098564 - DNA, 25 bp, Homo sapien
aatgagttccgggacttgcctgagg

SEQ ID NO: 3098565 - DNA, 25 bp, Homo sapien
gactgagaaggaagctactgagcca

SEQ ID NO: 3098566 - DNA, 25 bp, Homo sapien
ctgcaggcgacagtgtgggtaacac

SEQ ID NO: 3098567 - DNA, 25 bp, Homo sapien
acacggctgagctggactgtccatc

SEQ ID NO: 3098568 - DNA, 25 bp, Homo sapien
ctgagctggactgtccatcctgcag

SEQ ID NO: 3098569 - DNA, 25 bp, Homo sapien
cggctgagctggactgtccatcctg

SEQ ID NO: 3098570 - DNA, 25 bp, Homo sapien
cacggctgagctggactgtccatcc

SEQ ID NO: 3098571 - DNA, 25 bp, Homo sapien
ccttgctcaaactgtctggctgggc

SEQ ID NO: 3098572 - DNA, 25 bp, Homo sapien
aactgtctggctgggccagccggaa

SEQ ID NO: 3098573 - DNA, 25 bp, Homo sapien
agggccatcatgggcatgttgttca

SEQ ID NO: 3098574 - DNA, 25 bp, Homo sapien
agccggaagaggcagtcatagacag

SEQ ID NO: 3098575 - DNA, 25 bp, Homo sapien
tgcagccggttgaggagtccacgtc

SEQ ID NO: 3098576 - DNA, 25 bp, Homo sapien
gtcggaagacactctggcctgcttg

SEQ ID NO: 3098577 - DNA, 25 bp, Homo sapien
aaagatgttgcagataaaggtgaca

SEQ ID NO: 3098578 - DNA, 25 bp, Homo sapien
tgcagggagcgtgctcgcagctgct

SEQ ID NO: 3098579 - DNA, 25 bp, Homo sapien
tctttgagctagaccctgtgcatct

SEQ ID NO: 3098580 - DNA, 25 bp, Homo sapien
ctctctctttgagctagaccctgtg

SEQ ID NO: 3098581 - DNA, 25 bp, Homo sapien
gagctagaccctgtgcatctctgtc

SEQ ID NO: 3098582 - DNA, 25 bp, Homo sapien
tctctttgagctagaccctgtgcat

SEQ ID NO: 3098583 - DNA, 25 bp, Homo sapien
ttctccaagtccacagcacccggat

SEQ ID NO: 3098584 - DNA, 25 bp, Homo sapien
gagaatggtccacaatcacattggc

SEQ ID NO: 3098585 - DNA, 25 bp, Homo sapien
ggcgtagcacatgcgtcctgcttcc

SEQ ID NO: 3098586 - DNA, 25 bp, Homo sapien
ctgaatgatggcgtagcacatgcgt

SEQ ID NO: 3098587 - DNA, 25 bp, Homo sapien
cagaaatcatacagaggacagtggc

SEQ ID NO: 3098588 - DNA, 25 bp, Homo sapien
gtgtccacccgcttctaagaatttg

SEQ ID NO: 3098589 - DNA, 25 bp, Homo sapien
cactcatatgcttgaagtgaaagag

SEQ ID NO: 3098590 - DNA, 25 bp, Homo sapien
ttacagtagagcactcatatgcttg

SEQ ID NO: 3098591 - DNA, 25 bp, Homo sapien
ggcgagagcaattactatagctcct

SEQ ID NO: 3098592 - DNA, 25 bp, Homo sapien
tcctctggcaaacggaatattctcc

SEQ ID NO: 3098593 - DNA, 25 bp, Homo sapien
aaggcatcaggcgagagcaattact

SEQ ID NO: 3098594 - DNA, 25 bp, Homo sapien
ctgcgtgttacagcgggaaggcatc

SEQ ID NO: 3098595 - DNA, 25 bp, Homo sapien
tgcgcctagccctatggttaaactt

SEQ ID NO: 3098596 - DNA, 25 bp, Homo sapien
tacgttgccgactcctatcgtcaga

SEQ ID NO: 3098597 - DNA, 25 bp, Homo sapien
gaggtgactgtgattcatactccaa

SEQ ID NO: 3098598 - DNA, 25 bp, Homo sapien
ttccagttcaagaattacgttgccg

SEQ ID NO: 3098599 - DNA, 25 bp, Homo sapien
gggtctctgcatcaaaggactggat

SEQ ID NO: 3098600 - DNA, 25 bp, Homo sapien
tactcctctctactgggctccccca

SEQ ID NO: 3098601 - DNA, 25 bp, Homo sapien
ctctgcatcaaaggactggatttta

SEQ ID NO: 3098602 - DNA, 25 bp, Homo sapien
actcctctctactgggctcccccat

SEQ ID NO: 3098603 - DNA, 25 bp, Homo sapien
ccccggtagctcttgactgggctgg

SEQ ID NO: 3098604 - DNA, 25 bp, Homo sapien
gactagccagccccggtagctcttg

SEQ ID NO: 3098605 - DNA, 25 bp, Homo sapien
tagctcttgactgggctgggaataa

SEQ ID NO: 3098606 - DNA, 25 bp, Homo sapien
tagccagccccggtagctcttgact

SEQ ID NO: 3098607 - DNA, 25 bp, Homo sapien
gcgggcggacgttacagttgcttaa

SEQ ID NO: 3098608 - DNA, 25 bp, Homo sapien
ggatcggctcccgagtggcagtaac

SEQ ID NO: 3098609 - DNA, 25 bp, Homo sapien
aaaccggcctgacgttgctggccca

SEQ ID NO: 3098610 - DNA, 25 bp, Homo sapien
cagtttagaaatccctcgcttgtgg

SEQ ID NO: 3098611 - DNA, 25 bp, Homo sapien
ggatgatgcgccccggagaggtggc

SEQ ID NO: 3098612 - DNA, 25 bp, Homo sapien
ccctctggccgtaggaggcgccttt

SEQ ID NO: 3098613 - DNA, 25 bp, Homo sapien
gtaggaggcgcctttagggtctcca

SEQ ID NO: 3098614 - DNA, 25 bp, Homo sapien
gaggcgcctttagggtctccagccc

SEQ ID NO: 3098615 - DNA, 25 bp, Homo sapien
gcgggcgggagaggcggcgtgggag

SEQ ID NO: 3098616 - DNA, 25 bp, Homo sapien
ctgcggagcccacggcccagggtcc

SEQ ID NO: 3098617 - DNA, 25 bp, Homo sapien
cagggtcccgcgggcgggagaggcg

SEQ ID NO: 3098618 - DNA, 25 bp, Homo sapien
ggcgggagaggcggcgtgggagccg

SEQ ID NO: 3098619 - DNA, 25 bp, Homo sapien
tgggagcgcgcaaccagcgtccggc

SEQ ID NO: 3098620 - DNA, 25 bp, Homo sapien
gagcgcgcaaccagcgtccggcgct

SEQ ID NO: 3098621 - DNA, 25 bp, Homo sapien
cgcgcaaccagcgtccggcgctgcg

SEQ ID NO: 3098622 - DNA, 25 bp, Homo sapien
cgcctgggagcgcgcaaccagcgtc

SEQ ID NO: 3098623 - DNA, 25 bp, Homo sapien
gacccgccggcacctcgatcttgcg

SEQ ID NO: 3098624 - DNA, 25 bp, Homo sapien
ctgggccgtgtccgggcccacgccg

SEQ ID NO: 3098625 - DNA, 25 bp, Homo sapien
acgccggacccgccggcacctcgat

SEQ ID NO: 3098626 - DNA, 25 bp, Homo sapien
gatcttgcgcgtggccccgcaccca

SEQ ID NO: 3098627 - DNA, 25 bp, Homo sapien
ctgggatctgctttccatggagccc

SEQ ID NO: 3098628 - DNA, 25 bp, Homo sapien
atccacttcctgcacgggcgctggg

SEQ ID NO: 3098629 - DNA, 25 bp, Homo sapien
cctgcacgggcgctgggatctgctt

SEQ ID NO: 3098630 - DNA, 25 bp, Homo sapien
acgggcgctgggatctgctttccat

SEQ ID NO: 3098631 - DNA, 25 bp, Homo sapien
ccttctcactgtgtcgttggctcac

SEQ ID NO: 3098632 - DNA, 25 bp, Homo sapien
gaccaggagtgtgttctgttctcct

SEQ ID NO: 3098633 - DNA, 25 bp, Homo sapien
ggctggtcagaggagaaacagcaac

SEQ ID NO: 3098634 - DNA, 25 bp, Homo sapien
ccaagtgtagggacctgactcctgc

SEQ ID NO: 3098635 - DNA, 25 bp, Homo sapien
cctgcattccctctgattctctcat

SEQ ID NO: 3098636 - DNA, 25 bp, Homo sapien
tgcattccctctgattctctcatgg

SEQ ID NO: 3098637 - DNA, 25 bp, Homo sapien
ctgcattccctctgattctctcatg

SEQ ID NO: 3098638 - DNA, 25 bp, Homo sapien
gtgggttcaaggctgctaccccgct

SEQ ID NO: 3098639 - DNA, 25 bp, Homo sapien
gttcaaggctgctaccccgcttggg

SEQ ID NO: 3098640 - DNA, 25 bp, Homo sapien
ctgctaccccgcttggggcagctgg

SEQ ID NO: 3098641 - DNA, 25 bp, Homo sapien
gggttcaaggctgctaccccgcttg

SEQ ID NO: 3098642 - DNA, 25 bp, Homo sapien
cagggaagggccagacggcacctct

SEQ ID NO: 3098643 - DNA, 25 bp, Homo sapien
ggaagggccagacggcacctctcag

SEQ ID NO: 3098644 - DNA, 25 bp, Homo sapien
acctctcagtggagactgaatcttc

SEQ ID NO: 3098645 - DNA, 25 bp, Homo sapien
cctctcagtggagactgaatcttcc

SEQ ID NO: 3098646 - DNA, 25 bp, Homo sapien
ctgttcatgcagtggaagacattac

SEQ ID NO: 3098647 - DNA, 25 bp, Homo sapien
cctgttcatgcagtggaagacatta

SEQ ID NO: 3098648 - DNA, 25 bp, Homo sapien
ttgaagaagcccagggcgccttcct

SEQ ID NO: 3098649 - DNA, 25 bp, Homo sapien
ggcagccttcagcaagctgggggac

SEQ ID NO: 3098650 - DNA, 25 bp, Homo sapien
ccatgaggcccttgtatctccgtac

SEQ ID NO: 3098651 - DNA, 25 bp, Homo sapien
agcccagggcgccttccttttgcag

SEQ ID NO: 3098652 - DNA, 25 bp, Homo sapien
accctccaacctgtagccgcttctt

SEQ ID NO: 3098653 - DNA, 25 bp, Homo sapien
gaggtccagcggatatgtcagggtc

SEQ ID NO: 3098654 - DNA, 25 bp, Homo sapien
ttgaagaggtccagcggatatgtca

SEQ ID NO: 3098655 - DNA, 25 bp, Homo sapien
aaccctccaacctgtagccgcttct

SEQ ID NO: 3098656 - DNA, 25 bp, Homo sapien
cacttgtacaggtgcttcaaggagc

SEQ ID NO: 3098657 - DNA, 25 bp, Homo sapien
cacggcgtggcgcagcgtattatag

SEQ ID NO: 3098658 - DNA, 25 bp, Homo sapien
gagccaagcctttgtagaaaacctg

SEQ ID NO: 3098659 - DNA, 25 bp, Homo sapien
ttcaaggagctgtagcaagagaact

SEQ ID NO: 3098660 - DNA, 25 bp, Homo sapien
gaattcccgggcgtcatacacgctg

SEQ ID NO: 3098661 - DNA, 25 bp, Homo sapien
ggccaccacatacaaagtgcactga

SEQ ID NO: 3098662 - DNA, 25 bp, Homo sapien
tgcaaagcgggtgcgcagaacatcc

SEQ ID NO: 3098663 - DNA, 25 bp, Homo sapien
tgcctctgtggaccagctccgtcag

SEQ ID NO: 3098664 - DNA, 25 bp, Homo sapien
cagctccatagcctatggagagaat

SEQ ID NO: 3098665 - DNA, 25 bp, Homo sapien
ttccagaaagctgtcggaccctcct

SEQ ID NO: 3098666 - DNA, 25 bp, Homo sapien
gagagaatctgagctgggacgtgtc

SEQ ID NO: 3098667 - DNA, 25 bp, Homo sapien
cctcctgcagaatctgcctagaggc

SEQ ID NO: 3098668 - DNA, 25 bp, Homo sapien
gggtcactgcgagacaggcgctcat

SEQ ID NO: 3098669 - DNA, 25 bp, Homo sapien
ccatggtactttgcgctggggtcac

SEQ ID NO: 3098670 - DNA, 25 bp, Homo sapien
cactgcgagacaggcgctcatgctg

SEQ ID NO: 3098671 - DNA, 25 bp, Homo sapien
tttgcgctggggtcactgcgagaca

SEQ ID NO: 3098672 - DNA, 25 bp, Homo sapien
gcccgagtaacaagtccagacacag

SEQ ID NO: 3098673 - DNA, 25 bp, Homo sapien
tgatcagcgcccgagtaacaagtcc

SEQ ID NO: 3098674 - DNA, 25 bp, Homo sapien
acggatcttgatgacgtcgaaggga

SEQ ID NO: 3098675 - DNA, 25 bp, Homo sapien
gacgtcgaagggactgatcagcgcc

SEQ ID NO: 3098676 - DNA, 25 bp, Homo sapien
gcccacacaatgtccatcagtatca

SEQ ID NO: 3098677 - DNA, 25 bp, Homo sapien
ccacacaatgtccatcagtatcaag

SEQ ID NO: 3098678 - DNA, 25 bp, Homo sapien
ctgcctctggcccacacaatgtcca

SEQ ID NO: 3098679 - DNA, 25 bp, Homo sapien
ccctgcctctggcccacacaatgtc

SEQ ID NO: 3098680 - DNA, 25 bp, Homo sapien
gataggcaattgttggtcccagaga

SEQ ID NO: 3098681 - DNA, 25 bp, Homo sapien
ccggttcctggaatagagcccatca

SEQ ID NO: 3098682 - DNA, 25 bp, Homo sapien
ggcacgccatgggttatttatacag

SEQ ID NO: 3098683 - DNA, 25 bp, Homo sapien
tgtcacttaacaggtgcaggcctgg

SEQ ID NO: 3098684 - DNA, 25 bp, Homo sapien
ttttcaaggctagctcctctcatcc

SEQ ID NO: 3098685 - DNA, 25 bp, Homo sapien
tttttcaaggctagctcctctcatc

SEQ ID NO: 3098686 - DNA, 25 bp, Homo sapien
tacggtctgtagagttgtacaaagc

SEQ ID NO: 3098687 - DNA, 25 bp, Homo sapien
atacggtctgtagagttgtacaaag

SEQ ID NO: 3098688 - DNA, 25 bp, Homo sapien
caacaggtagttggtaactgatcac

SEQ ID NO: 3098689 - DNA, 25 bp, Homo sapien
aacaggtagttggtaactgatcaca

SEQ ID NO: 3098690 - DNA, 25 bp, Homo sapien
tcaacaggtagttggtaactgatca

SEQ ID NO: 3098691 - DNA, 25 bp, Homo sapien
atcaacaggtagttggtaactgatc

SEQ ID NO: 3098692 - DNA, 25 bp, Homo sapien
gtgagcgcccgggtgcgtgtgctcc

SEQ ID NO: 3098693 - DNA, 25 bp, Homo sapien
ttctctggtctggtgtgacacgtgt

SEQ ID NO: 3098694 - DNA, 25 bp, Homo sapien
agcgagggtgctggtccccgagagg

SEQ ID NO: 3098695 - DNA, 25 bp, Homo sapien
gagctcaggtgctcaagggcgtgcg

SEQ ID NO: 3098696 - DNA, 25 bp, Homo sapien
tcctcgcgcagtcttaacagcaaaa

SEQ ID NO: 3098697 - DNA, 25 bp, Homo sapien
tctctagctcctcgcgcagtcttaa

SEQ ID NO: 3098698 - DNA, 25 bp, Homo sapien
tagctcctcgcgcagtcttaacagc

SEQ ID NO: 3098699 - DNA, 25 bp, Homo sapien
gctcagcgctctccgctctctctag

SEQ ID NO: 3098700 - DNA, 25 bp, Homo sapien
tttaagaaactagatagagccaggc

SEQ ID NO: 3098701 - DNA, 25 bp, Homo sapien
ctgaacattgcaactggaagtcctt

SEQ ID NO: 3098702 - DNA, 25 bp, Homo sapien
gtattcccaatattagggagactga

SEQ ID NO: 3098703 - DNA, 25 bp, Homo sapien
tgtattcccaatattagggagactg

SEQ ID NO: 3098704 - DNA, 25 bp, Homo sapien
ccagctttgtggttttcggcatttg

SEQ ID NO: 3098705 - DNA, 25 bp, Homo sapien
agaagggttcccaagtttgctggag

SEQ ID NO: 3098706 - DNA, 25 bp, Homo sapien
aactgttgtgggtgaccacgcctcc

SEQ ID NO: 3098707 - DNA, 25 bp, Homo sapien
ggagggtctcaaggcttccagcttt

SEQ ID NO: 3098708 - DNA, 25 bp, Homo sapien
ggctgccgatggacctgtgagtaaa

SEQ ID NO: 3098709 - DNA, 25 bp, Homo sapien
tactatctggacaagcgtgtagtca

SEQ ID NO: 3098710 - DNA, 25 bp, Homo sapien
ggacctgtgagtaaatactatctgg

SEQ ID NO: 3098711 - DNA, 25 bp, Homo sapien
gtaaatactatctggacaagcgtgt

SEQ ID NO: 3098712 - DNA, 25 bp, Homo sapien
tttattattcacagttaatcactac

SEQ ID NO: 3098713 - DNA, 25 bp, Homo sapien
tcacagttaatcactacctaccaaa

SEQ ID NO: 3098714 - DNA, 25 bp, Homo sapien
taatcactacctaccaaatgctatc

SEQ ID NO: 3098715 - DNA, 25 bp, Homo sapien
tacctaccaaatgctatccgcagag

SEQ ID NO: 3098716 - DNA, 25 bp, Homo sapien
ggtccaggtgtagaatgccagattc

SEQ ID NO: 3098717 - DNA, 25 bp, Homo sapien
tcaaatggtccaggtgtagaatgcc

SEQ ID NO: 3098718 - DNA, 25 bp, Homo sapien
tatatacacacaaaacttagttcag

SEQ ID NO: 3098719 - DNA, 25 bp, Homo sapien
gcaaggcttcatgatatacaccaat

SEQ ID NO: 3098720 - DNA, 25 bp, Homo sapien
gccgctttgggactgaaaggcccaa

SEQ ID NO: 3098721 - DNA, 25 bp, Homo sapien
ggcagtcttgtttttgtcgtgggaa

SEQ ID NO: 3098722 - DNA, 25 bp, Homo sapien
ctgttcatatctggagtcggaggga

SEQ ID NO: 3098723 - DNA, 25 bp, Homo sapien
aaaggcccaaggctgtcaccagctc

SEQ ID NO: 3098724 - DNA, 25 bp, Homo sapien
gcagtcaacacagcccactgggaag

SEQ ID NO: 3098725 - DNA, 25 bp, Homo sapien
cctgcttcctgggaccatcggtagg

SEQ ID NO: 3098726 - DNA, 25 bp, Homo sapien
ggaagggaggcacaagcagcactcc

SEQ ID NO: 3098727 - DNA, 25 bp, Homo sapien
ggtcttcctgtctttccaatcttgc

SEQ ID NO: 3098728 - DNA, 25 bp, Homo sapien
ggtcaggggacacaggatgaaagcc

SEQ ID NO: 3098729 - DNA, 25 bp, Homo sapien
acaggtcaggggacacaggatgaaa

SEQ ID NO: 3098730 - DNA, 25 bp, Homo sapien
ctggacaggtcaggggacacaggat

SEQ ID NO: 3098731 - DNA, 25 bp, Homo sapien
ggacaggtcaggggacacaggatga

SEQ ID NO: 3098732 - DNA, 25 bp, Homo sapien
gagcaagacaagtgaaaagtgagta

SEQ ID NO: 3098733 - DNA, 25 bp, Homo sapien
tgtgtaccccagcataggaatagtg

SEQ ID NO: 3098734 - DNA, 25 bp, Homo sapien
cccagcataggaatagtgaaacctg

SEQ ID NO: 3098735 - DNA, 25 bp, Homo sapien
tgagtactctcactgtgtaccccag

SEQ ID NO: 3098736 - DNA, 25 bp, Homo sapien
tacaactggaggctgcgttcccatg

SEQ ID NO: 3098737 - DNA, 25 bp, Homo sapien
agctgggcggtcaccttccctcttg

SEQ ID NO: 3098738 - DNA, 25 bp, Homo sapien
cacaacccccgagacggtgaggaca

SEQ ID NO: 3098739 - DNA, 25 bp, Homo sapien
tcctccgctctccttgtctgggact

SEQ ID NO: 3098740 - DNA, 25 bp, Homo sapien
ttagtacaagcaggagaacgcctca

SEQ ID NO: 3098741 - DNA, 25 bp, Homo sapien
ttctcaggaagccatggaagcagag

SEQ ID NO: 3098742 - DNA, 25 bp, Homo sapien
tatatacgaagaacacaggaacagc

SEQ ID NO: 3098743 - DNA, 25 bp, Homo sapien
gaaggcagattcctacaagtcccct

SEQ ID NO: 3098744 - DNA, 25 bp, Homo sapien
ttttattattggcgtcagctaggac

SEQ ID NO: 3098745 - DNA, 25 bp, Homo sapien
tattattggcgtcagctaggactat

SEQ ID NO: 3098746 - DNA, 25 bp, Homo sapien
ttattattggcgtcagctaggacta

SEQ ID NO: 3098747 - DNA, 25 bp, Homo sapien
attattggcgtcagctaggactata

SEQ ID NO: 3098748 - DNA, 25 bp, Homo sapien
aggtgttctgcactccctcacaggc

SEQ ID NO: 3098749 - DNA, 25 bp, Homo sapien
agggtcacagggtgacccggccagg

SEQ ID NO: 3098750 - DNA, 25 bp, Homo sapien
gtcacagggtgacccggccaggtgt

SEQ ID NO: 3098751 - DNA, 25 bp, Homo sapien
ctaaagttccaaccaaagtgagagg

SEQ ID NO: 3098752 - DNA, 25 bp, Homo sapien
gggtctgagttatccatgacatgga

SEQ ID NO: 3098753 - DNA, 25 bp, Homo sapien
catggataaaatctccccggcggaa

SEQ ID NO: 3098754 - DNA, 25 bp, Homo sapien
tcaaagtcaaagagggcctggacgt

SEQ ID NO: 3098755 - DNA, 25 bp, Homo sapien
aaacatgccggtctgcccgtggcaa

SEQ ID NO: 3098756 - DNA, 25 bp, Homo sapien
ttcaccacccagaggaagtacttcc

SEQ ID NO: 3098757 - DNA, 25 bp, Homo sapien
gaagtgctgcacatcgtttccaaac

SEQ ID NO: 3098758 - DNA, 25 bp, Homo sapien
agtacttcccggctccatctcggag

SEQ ID NO: 3098759 - DNA, 25 bp, Homo sapien
tgtggcacctgttctatgtcccgca

SEQ ID NO: 3098760 - DNA, 25 bp, Homo sapien
caggctggaatgcaatggctcagtc

SEQ ID NO: 3098761 - DNA, 25 bp, Homo sapien
ggctggaatgcaatggctcagtctc

SEQ ID NO: 3098762 - DNA, 25 bp, Homo sapien
ctggaatgcaatggctcagtctcgg

SEQ ID NO: 3098763 - DNA, 25 bp, Homo sapien
tggaatgcaatggctcagtctcggc

SEQ ID NO: 3098764 - DNA, 25 bp, Homo sapien
tctccatggcggcagaacttcctgt

SEQ ID NO: 3098765 - DNA, 25 bp, Homo sapien
tcagtggacctgagcaaggcaagcc

SEQ ID NO: 3098766 - DNA, 25 bp, Homo sapien
gatgaagtgatctgccggactcctg

SEQ ID NO: 3098767 - DNA, 25 bp, Homo sapien
caggcgctccactatcccattagag

SEQ ID NO: 3098768 - DNA, 25 bp, Homo sapien
ggagcgctctcactctctcggataa

SEQ ID NO: 3098769 - DNA, 25 bp, Homo sapien
tcggataagaaaggccccatcgtgc

SEQ ID NO: 3098770 - DNA, 25 bp, Homo sapien
gggagaagtccccaggagcgctctc

SEQ ID NO: 3098771 - DNA, 25 bp, Homo sapien
catcgtgccgctgtttgctaagcat

SEQ ID NO: 3098772 - DNA, 25 bp, Homo sapien
ctaaggaaggaaggcaagctggtca

SEQ ID NO: 3098773 - DNA, 25 bp, Homo sapien
ggaaggaaggcaagctggtcaacat

SEQ ID NO: 3098774 - DNA, 25 bp, Homo sapien
aggaaggaaggcaagctggtcaaca

SEQ ID NO: 3098775 - DNA, 25 bp, Homo sapien
aaggaaggaaggcaagctggtcaac

SEQ ID NO: 3098776 - DNA, 25 bp, Homo sapien
tcactctttctatagagggagacat

SEQ ID NO: 3098777 - DNA, 25 bp, Homo sapien
ctatagagggagacatttgaaaatg

SEQ ID NO: 3098778 - DNA, 25 bp, Homo sapien
aggcactaaccgtgggtcactcttt

SEQ ID NO: 3098779 - DNA, 25 bp, Homo sapien
ctggactccctactgactcatgaca

SEQ ID NO: 3098780 - DNA, 25 bp, Homo sapien
attaagctctgccttgtaccagttc

SEQ ID NO: 3098781 - DNA, 25 bp, Homo sapien
ggaatgaagccgtcttttccattaa

SEQ ID NO: 3098782 - DNA, 25 bp, Homo sapien
gtagttcttgggaatgaagccgtct

SEQ ID NO: 3098783 - DNA, 25 bp, Homo sapien
cttgtaccagttctgatcacattct

SEQ ID NO: 3098784 - DNA, 25 bp, Homo sapien
ttttctggcctgaacatattcagtc

SEQ ID NO: 3098785 - DNA, 25 bp, Homo sapien
gggatattttctggcctgaacatat

SEQ ID NO: 3098786 - DNA, 25 bp, Homo sapien
acctggcccttgcacttaattttct

SEQ ID NO: 3098787 - DNA, 25 bp, Homo sapien
tggcccttgcacttaattttctata

SEQ ID NO: 3098788 - DNA, 25 bp, Homo sapien
agaataaattctaagggccctggct

SEQ ID NO: 3098789 - DNA, 25 bp, Homo sapien
tcccaaaggagcgatactgaaatac

SEQ ID NO: 3098790 - DNA, 25 bp, Homo sapien
tcaacataagccagtgaggtgtccc

SEQ ID NO: 3098791 - DNA, 25 bp, Homo sapien
taatgggagagccactcaaagtcag

SEQ ID NO: 3098792 - DNA, 25 bp, Homo sapien
gtactagacaaacaccaagccctgg

SEQ ID NO: 3098793 - DNA, 25 bp, Homo sapien
gacgatgacttaactccaggttagg

SEQ ID NO: 3098794 - DNA, 25 bp, Homo sapien
tgaggataaaatggatacccttccc

SEQ ID NO: 3098795 - DNA, 25 bp, Homo sapien
gaatttcaactgcacgagcagggag

SEQ ID NO: 3098796 - DNA, 25 bp, Homo sapien
tggtatcagaacttctaactggaaa

SEQ ID NO: 3098797 - DNA, 25 bp, Homo sapien
tatttattaatggtatcagaacttc

SEQ ID NO: 3098798 - DNA, 25 bp, Homo sapien
tattaatggtatcagaacttctaac

SEQ ID NO: 3098799 - DNA, 25 bp, Homo sapien
aatggtatcagaacttctaactgga

SEQ ID NO: 3098800 - DNA, 25 bp, Homo sapien
tcagaagtcgctgagagtgacattc

SEQ ID NO: 3098801 - DNA, 25 bp, Homo sapien
tctggaacagttgtctatactctct

SEQ ID NO: 3098802 - DNA, 25 bp, Homo sapien
tctatactctctgtcccagttctct

SEQ ID NO: 3098803 - DNA, 25 bp, Homo sapien
acatttatccatcacataaatcggg

SEQ ID NO: 3098804 - DNA, 25 bp, Homo sapien
tactgcctcatctctctgttcccct

SEQ ID NO: 3098805 - DNA, 25 bp, Homo sapien
tagaacagagaaggacactgggaaa

SEQ ID NO: 3098806 - DNA, 25 bp, Homo sapien
gatgactaggtataatgtggtgtcc

SEQ ID NO: 3098807 - DNA, 25 bp, Homo sapien
ggctcattaatagtaaatacgccat

SEQ ID NO: 3098808 - DNA, 25 bp, Homo sapien
gggcatatgataactctttgtacaa

SEQ ID NO: 3098809 - DNA, 25 bp, Homo sapien
tgcccaattaatagtacgcatagcc

SEQ ID NO: 3098810 - DNA, 25 bp, Homo sapien
aaccaactgggcttaaatcgccagc

SEQ ID NO: 3098811 - DNA, 25 bp, Homo sapien
tactagtgaactcaaaccaactggg

SEQ ID NO: 3098812 - DNA, 25 bp, Homo sapien
caagctgccttgtacattgcctcta

SEQ ID NO: 3098813 - DNA, 25 bp, Homo sapien
ttaacttgaaaaggaacatctggta

SEQ ID NO: 3098814 - DNA, 25 bp, Homo sapien
aacttgaaaaggaacatctggtaca

SEQ ID NO: 3098815 - DNA, 25 bp, Homo sapien
cttgaaaaggaacatctggtacaat

SEQ ID NO: 3098816 - DNA, 25 bp, Homo sapien
taacttgaaaaggaacatctggtac

SEQ ID NO: 3098817 - DNA, 25 bp, Homo sapien
cagagttgacagtaagcttggctaa

SEQ ID NO: 3098818 - DNA, 25 bp, Homo sapien
taggacaactccaacatctcttcag

SEQ ID NO: 3098819 - DNA, 25 bp, Homo sapien
taagtcagccgtatctgcatggaca

SEQ ID NO: 3098820 - DNA, 25 bp, Homo sapien
tgaagctcttcatatgccgtgccgc

SEQ ID NO: 3098821 - DNA, 25 bp, Homo sapien
tctttgggaaggtttgtcatataaa

SEQ ID NO: 3098822 - DNA, 25 bp, Homo sapien
catcaggagggaattatgacctaat

SEQ ID NO: 3098823 - DNA, 25 bp, Homo sapien
tttctaatgatgagtgagacattta

SEQ ID NO: 3098824 - DNA, 25 bp, Homo sapien
ctgggcatcaggagggaattatgac

SEQ ID NO: 3098825 - DNA, 25 bp, Homo sapien
taaaatgcccctatctgacaggcag

SEQ ID NO: 3098826 - DNA, 25 bp, Homo sapien
aaatgggacttgtgcactgaaactc

SEQ ID NO: 3098827 - DNA, 25 bp, Homo sapien
gggccttcaggcttgcacgagcatg

SEQ ID NO: 3098828 - DNA, 25 bp, Homo sapien
aaactagggattggctctccactga

SEQ ID NO: 3098829 - DNA, 25 bp, Homo sapien
gaaggtttttacacttgctccagaa

SEQ ID NO: 3098830 - DNA, 25 bp, Homo sapien
tataaaatgttcatggtctaggtct

SEQ ID NO: 3098831 - DNA, 25 bp, Homo sapien
ggtctaggacaaacttcaaagacag

SEQ ID NO: 3098832 - DNA, 25 bp, Homo sapien
tcttccctaataataggatgggaaa

SEQ ID NO: 3098833 - DNA, 25 bp, Homo sapien
gagtagaactctacgccttgggcaa

SEQ ID NO: 3098834 - DNA, 25 bp, Homo sapien
aaagactatcaataagtccacataa

SEQ ID NO: 3098835 - DNA, 25 bp, Homo sapien
aacttcagagtagaactctacgcct

SEQ ID NO: 3098836 - DNA, 25 bp, Homo sapien
agaactctacgccttgggcaatgag

SEQ ID NO: 3098837 - DNA, 25 bp, Homo sapien
tattccagaacgcaaaatcctttgg

SEQ ID NO: 3098838 - DNA, 25 bp, Homo sapien
tctcagcattgtgctcggcatcagc

SEQ ID NO: 3098839 - DNA, 25 bp, Homo sapien
ttctaacaacctctctaaactggga

SEQ ID NO: 3098840 - DNA, 25 bp, Homo sapien
tctacagggcaaatcaatctactca

SEQ ID NO: 3098841 - DNA, 25 bp, Homo sapien
gctcagctcgtcgtctgcagtagct

SEQ ID NO: 3098842 - DNA, 25 bp, Homo sapien
cgtctgcagtagctttgaagtcata

SEQ ID NO: 3098843 - DNA, 25 bp, Homo sapien
gctcgtcgtctgcagtagctttgaa

SEQ ID NO: 3098844 - DNA, 25 bp, Homo sapien
gaagctcagctcgtcgtctgcagta

SEQ ID NO: 3098845 - DNA, 25 bp, Homo sapien
gctgaagcaacccagcgctctgggc

SEQ ID NO: 3098846 - DNA, 25 bp, Homo sapien
cggcactctgggacacacaatgcca

SEQ ID NO: 3098847 - DNA, 25 bp, Homo sapien
tgggcttagcctcgcctctcttctg

SEQ ID NO: 3098848 - DNA, 25 bp, Homo sapien
tgagcgctgctcagtgctcagcagc

SEQ ID NO: 3098849 - DNA, 25 bp, Homo sapien
tgccaatcggcctgctgtcccagcc

SEQ ID NO: 3098850 - DNA, 25 bp, Homo sapien
gattaagagcagtggccaggattga

SEQ ID NO: 3098851 - DNA, 25 bp, Homo sapien
aggattgaaggcaaccccgccctgc

SEQ ID NO: 3098852 - DNA, 25 bp, Homo sapien
gagagggacgattaagagcagtggc

SEQ ID NO: 3098853 - DNA, 25 bp, Homo sapien
cacgctaactgctacaattttgggc

SEQ ID NO: 3098854 - DNA, 25 bp, Homo sapien
gagaccagtccagtatagcttagtg

SEQ ID NO: 3098855 - DNA, 25 bp, Homo sapien
tgcatggtctctagaggcaggcccc

SEQ ID NO: 3098856 - DNA, 25 bp, Homo sapien
tatctaccttttaagacccaggctg

SEQ ID NO: 3098857 - DNA, 25 bp, Homo sapien
gagctcagctcaatctttttggtga

SEQ ID NO: 3098858 - DNA, 25 bp, Homo sapien
acagaacccacactacagcaaggaa

SEQ ID NO: 3098859 - DNA, 25 bp, Homo sapien
cagcaaggaattaatgagctcagct

SEQ ID NO: 3098860 - DNA, 25 bp, Homo sapien
cccggtgtccactgactcaacattt

SEQ ID NO: 3098861 - DNA, 25 bp, Homo sapien
gagagggcgcgctgcaaatgaaaat

SEQ ID NO: 3098862 - DNA, 25 bp, Homo sapien
tggattcccgcacaaaattaagccc

SEQ ID NO: 3098863 - DNA, 25 bp, Homo sapien
gccgtgcaggtcgaaggcacatcaa

SEQ ID NO: 3098864 - DNA, 25 bp, Homo sapien
aaatgaaaattaccagcgcccgctc

SEQ ID NO: 3098865 - DNA, 25 bp, Homo sapien
ctggcttccgctccccgtcggtgtc

SEQ ID NO: 3098866 - DNA, 25 bp, Homo sapien
gctctgcgagggcagcgcttgctcc

SEQ ID NO: 3098867 - DNA, 25 bp, Homo sapien
gtcgccgaagcagcaatacctcctg

SEQ ID NO: 3098868 - DNA, 25 bp, Homo sapien
gtcaccgccacaggcacagactctg

SEQ ID NO: 3098869 - DNA, 25 bp, Homo sapien
gcatgtcttcttgctcaggggctat

SEQ ID NO: 3098870 - DNA, 25 bp, Homo sapien
tgtcttcttgctcaggggctatgct

SEQ ID NO: 3098871 - DNA, 25 bp, Homo sapien
tcttcttgctcaggggctatgctaa

SEQ ID NO: 3098872 - DNA, 25 bp, Homo sapien
catgtcttcttgctcaggggctatg

SEQ ID NO: 3098873 - DNA, 25 bp, Homo sapien
gacgacatccaggtttacagcttga

SEQ ID NO: 3098874 - DNA, 25 bp, Homo sapien
taggagagacggttccagtgccaac

SEQ ID NO: 3098875 - DNA, 25 bp, Homo sapien
ataatatatctcaaaacaggccggg

SEQ ID NO: 3098876 - DNA, 25 bp, Homo sapien
tacagcttgagcactagaggaccaa

SEQ ID NO: 3098877 - DNA, 25 bp, Homo sapien
aaatggattcgaccttgctgcccgg

SEQ ID NO: 3098878 - DNA, 25 bp, Homo sapien
gactcgccgcactagaagtgccagg

SEQ ID NO: 3098879 - DNA, 25 bp, Homo sapien
ggaggaaatatcctgttgcaccata

SEQ ID NO: 3098880 - DNA, 25 bp, Homo sapien
ggaatgcagtcctttggctccaaaa

SEQ ID NO: 3098881 - DNA, 25 bp, Homo sapien
gacagcaatggaaatcagcctaatg

SEQ ID NO: 3098882 - DNA, 25 bp, Homo sapien
gaaaacaaggttgcatactgtacct

SEQ ID NO: 3098883 - DNA, 25 bp, Homo sapien
gatacggtgttgatacatctgcagg

SEQ ID NO: 3098884 - DNA, 25 bp, Homo sapien
gaatggcatgttcacattggctggg

SEQ ID NO: 3098885 - DNA, 25 bp, Homo sapien
tctgcacccagagaacggcttaagg

SEQ ID NO: 3098886 - DNA, 25 bp, Homo sapien
ctgaactttagctctctggccggcg

SEQ ID NO: 3098887 - DNA, 25 bp, Homo sapien
tgagtatttatttcgaggcccctgg

SEQ ID NO: 3098888 - DNA, 25 bp, Homo sapien
gaagcgttttcaggctcctcggaag

SEQ ID NO: 3098889 - DNA, 25 bp, Homo sapien
tcgctagtcaggttctaaggtgggc

SEQ ID NO: 3098890 - DNA, 25 bp, Homo sapien
tgctcaatcgatcaaaccctgggag

SEQ ID NO: 3098891 - DNA, 25 bp, Homo sapien
acttcggcaggtcacagtgggcact

SEQ ID NO: 3098892 - DNA, 25 bp, Homo sapien
gaggcattcccttggcacaacttgg

SEQ ID NO: 3098893 - DNA, 25 bp, Homo sapien
gtcagccagggcgtcgaacatggtg

SEQ ID NO: 3098894 - DNA, 25 bp, Homo sapien
ccagggcgtcgaacatggtgctgat

SEQ ID NO: 3098895 - DNA, 25 bp, Homo sapien
cagccagggcgtcgaacatggtgct

SEQ ID NO: 3098896 - DNA, 25 bp, Homo sapien
gcgtcgaacatggtgctgatgtcat

SEQ ID NO: 3098897 - DNA, 25 bp, Homo sapien
agtgctctcaggccgtggaggaggc

SEQ ID NO: 3098898 - DNA, 25 bp, Homo sapien
ggcgctagcttagggccagaaaatg

SEQ ID NO: 3098899 - DNA, 25 bp, Homo sapien
ggacgagctggtctgctccagtctc

SEQ ID NO: 3098900 - DNA, 25 bp, Homo sapien
tcagtgcagctgccagggacgagct

SEQ ID NO: 3098901 - DNA, 25 bp, Homo sapien
ctgggtgcaggccaccgacacaggc

SEQ ID NO: 3098902 - DNA, 25 bp, Homo sapien
gtgcaggccaccgacacaggcttgg

SEQ ID NO: 3098903 - DNA, 25 bp, Homo sapien
tgcaggccaccgacacaggcttggg

SEQ ID NO: 3098904 - DNA, 25 bp, Homo sapien
gggtgcaggccaccgacacaggctt

SEQ ID NO: 3098905 - DNA, 25 bp, Homo sapien
gaggagggcagcaggggcggccggg

SEQ ID NO: 3098906 - DNA, 25 bp, Homo sapien
gggttctgtctccccattccaccga

SEQ ID NO: 3098907 - DNA, 25 bp, Homo sapien
gcagcaggggcggccgggggttctg

SEQ ID NO: 3098908 - DNA, 25 bp, Homo sapien
tgctccgggcaccttgaggagggca

SEQ ID NO: 3098909 - DNA, 25 bp, Homo sapien
ctagaagctggaggagactcgccag

SEQ ID NO: 3098910 - DNA, 25 bp, Homo sapien
ggctagaagctggaggagactcgcc

SEQ ID NO: 3098911 - DNA, 25 bp, Homo sapien
aggagactcgccaggagttggggaa

SEQ ID NO: 3098912 - DNA, 25 bp, Homo sapien
ctggaggagactcgccaggagttgg

SEQ ID NO: 3098913 - DNA, 25 bp, Homo sapien
cagtgtctgattccgtgaggttgaa

SEQ ID NO: 3098914 - DNA, 25 bp, Homo sapien
ttgggcctccgcttaacagtgtctg

SEQ ID NO: 3098915 - DNA, 25 bp, Homo sapien
gggccagcaggttcactcagtgttc

SEQ ID NO: 3098916 - DNA, 25 bp, Homo sapien
actccgaaggccagcagtgcggtct

SEQ ID NO: 3098917 - DNA, 25 bp, Homo sapien
gcataactgcctagggtgctgccca

SEQ ID NO: 3098918 - DNA, 25 bp, Homo sapien
cactaggactggtccggacaagggc

SEQ ID NO: 3098919 - DNA, 25 bp, Homo sapien
gccgggcccgcagggcaaaggactg

SEQ ID NO: 3098920 - DNA, 25 bp, Homo sapien
gcactgcgtcctggccgccgggtaa

SEQ ID NO: 3098921 - DNA, 25 bp, Homo sapien
ccctcagcatccccctctgtggggc

SEQ ID NO: 3098922 - DNA, 25 bp, Homo sapien
tggcccttcggcctccccctcagca

SEQ ID NO: 3098923 - DNA, 25 bp, Homo sapien
ggcccttcggcctccccctcagcat

SEQ ID NO: 3098924 - DNA, 25 bp, Homo sapien
tccccctcagcatccccctctgtgg

SEQ ID NO: 3098925 - DNA, 25 bp, Homo sapien
cccggccaagtaggagaaggcccag

SEQ ID NO: 3098926 - DNA, 25 bp, Homo sapien
gcaggctgttcctgtgagtggccag

SEQ ID NO: 3098927 - DNA, 25 bp, Homo sapien
gctctgtgccctctgggaggttcct

SEQ ID NO: 3098928 - DNA, 25 bp, Homo sapien
gtgccccgatgctctcctggctggg

SEQ ID NO: 3098929 - DNA, 25 bp, Homo sapien
ctgggcttagttcgctgccctggaa

SEQ ID NO: 3098930 - DNA, 25 bp, Homo sapien
ggccgcctgtagctctgggcttagt

SEQ ID NO: 3098931 - DNA, 25 bp, Homo sapien
tgccatggccgcctgtagctctggg

SEQ ID NO: 3098932 - DNA, 25 bp, Homo sapien
tgtagctctgggcttagttcgctgc

SEQ ID NO: 3098933 - DNA, 25 bp, Homo sapien
tctccgttctccagtccctcgatgg

SEQ ID NO: 3098934 - DNA, 25 bp, Homo sapien
ggcgcccgccttcgctgagggcctc

SEQ ID NO: 3098935 - DNA, 25 bp, Homo sapien
ctgtagctgggccttctccgttctc

SEQ ID NO: 3098936 - DNA, 25 bp, Homo sapien
tggccatcagctccggacccttggc

SEQ ID NO: 3098937 - DNA, 25 bp, Homo sapien
catggagtcgtagccgctgctcacc

SEQ ID NO: 3098938 - DNA, 25 bp, Homo sapien
tcctcccaggtgaggtcggccacca

SEQ ID NO: 3098939 - DNA, 25 bp, Homo sapien
agtcgtagccgctgctcaccagctg

SEQ ID NO: 3098940 - DNA, 25 bp, Homo sapien
cagccccatggagtcgtagccgctg

SEQ ID NO: 3098941 - DNA, 25 bp, Homo sapien
cacagctgagggtgacagcacgtgc

SEQ ID NO: 3098942 - DNA, 25 bp, Homo sapien
tgagggtgacagcacgtgccccact

SEQ ID NO: 3098943 - DNA, 25 bp, Homo sapien
gctgagggtgacagcacgtgcccca

SEQ ID NO: 3098944 - DNA, 25 bp, Homo sapien
cagctgagggtgacagcacgtgccc

SEQ ID NO: 3098945 - DNA, 25 bp, Homo sapien
gagcgatctctgaggcgatcttctt

SEQ ID NO: 3098946 - DNA, 25 bp, Homo sapien
ttggtcaccccgatggccgtcaggt

SEQ ID NO: 3098947 - DNA, 25 bp, Homo sapien
cagccactcggcgatgctgagctga

SEQ ID NO: 3098948 - DNA, 25 bp, Homo sapien
atgctgagctgagcgatctctgagg

SEQ ID NO: 3098949 - DNA, 25 bp, Homo sapien
tccagctggaactcgcttagccagt

SEQ ID NO: 3098950 - DNA, 25 bp, Homo sapien
atcatagccggcctgcagaaagtgg

SEQ ID NO: 3098951 - DNA, 25 bp, Homo sapien
gccagttatgaatggcctgcgcgtc

SEQ ID NO: 3098952 - DNA, 25 bp, Homo sapien
catgcggctgatggtaggcacatca

SEQ ID NO: 3098953 - DNA, 25 bp, Homo sapien
gctgttctggccgcacgtcctgggt

SEQ ID NO: 3098954 - DNA, 25 bp, Homo sapien
agctgttctggccgcacgtcctggg

SEQ ID NO: 3098955 - DNA, 25 bp, Homo sapien
tccccagagcggcagttggccagag

SEQ ID NO: 3098956 - DNA, 25 bp, Homo sapien
gccagggacggcgggtggagtcctg

SEQ ID NO: 3098957 - DNA, 25 bp, Homo sapien
agggacggcgggtggagtcctggca

SEQ ID NO: 3098958 - DNA, 25 bp, Homo sapien
tggagtcctggcagcacctggtcct

SEQ ID NO: 3098959 - DNA, 25 bp, Homo sapien
ctgccagggacggcgggtggagtcc

SEQ ID NO: 3098960 - DNA, 25 bp, Homo sapien
ctgggcgttctcaatcaggaggcca

SEQ ID NO: 3098961 - DNA, 25 bp, Homo sapien
cagggccatggccattagtgccctc

SEQ ID NO: 3098962 - DNA, 25 bp, Homo sapien
tctgcccgctgccggcactgcggat

SEQ ID NO: 3098963 - DNA, 25 bp, Homo sapien
cgttctcaatcaggaggccagggcc

SEQ ID NO: 3098964 - DNA, 25 bp, Homo sapien
gcccctctggctctcgtggatgtgg

SEQ ID NO: 3098965 - DNA, 25 bp, Homo sapien
tagcctatgcggtctgtgcccctct

SEQ ID NO: 3098966 - DNA, 25 bp, Homo sapien
atgtggcccttccagcggccgtcgg

SEQ ID NO: 3098967 - DNA, 25 bp, Homo sapien
cggccgtcgggatgctgttctagca

SEQ ID NO: 3098968 - DNA, 25 bp, Homo sapien
gggtgcatatagagacctcagagca

SEQ ID NO: 3098969 - DNA, 25 bp, Homo sapien
gcagaacgtggtaacatagcaggtg

SEQ ID NO: 3098970 - DNA, 25 bp, Homo sapien
gagcagaacgtggtaacatagcagg

SEQ ID NO: 3098971 - DNA, 25 bp, Homo sapien
ttaaatgagggtgcatatagagacc

SEQ ID NO: 3098972 - DNA, 25 bp, Homo sapien
tgggatcgtggaggttccagaaatc

SEQ ID NO: 3098973 - DNA, 25 bp, Homo sapien
cagaaatccttgagcgctcggacct

SEQ ID NO: 3098974 - DNA, 25 bp, Homo sapien
cctgcccggacattgagagcagtgg

SEQ ID NO: 3098975 - DNA, 25 bp, Homo sapien
gctcggaccttcaggatccctgagg

SEQ ID NO: 3098976 - DNA, 25 bp, Homo sapien
aactgattcactatgtccagcgccg

SEQ ID NO: 3098977 - DNA, 25 bp, Homo sapien
gaactgattcactatgtccagcgcc

SEQ ID NO: 3098978 - DNA, 25 bp, Homo sapien
gtgaactgattcactatgtccagcg

SEQ ID NO: 3098979 - DNA, 25 bp, Homo sapien
actgattcactatgtccagcgccgt

SEQ ID NO: 3098980 - DNA, 25 bp, Homo sapien
gttatacgtattccggatgttcacg

SEQ ID NO: 3098981 - DNA, 25 bp, Homo sapien
tacgtattccggatgttcacgtcca

SEQ ID NO: 3098982 - DNA, 25 bp, Homo sapien
tatacgtattccggatgttcacgtc

SEQ ID NO: 3098983 - DNA, 25 bp, Homo sapien
ggttatacgtattccggatgttcac

SEQ ID NO: 3098984 - DNA, 25 bp, Homo sapien
caaaaaccacgctggagtcctccgt

SEQ ID NO: 3098985 - DNA, 25 bp, Homo sapien
tttcctgacgcccatgcaaaaacca

SEQ ID NO: 3098986 - DNA, 25 bp, Homo sapien
tgacgcccatgcaaaaaccacgctg

SEQ ID NO: 3098987 - DNA, 25 bp, Homo sapien
catgcaaaaaccacgctggagtcct

SEQ ID NO: 3098988 - DNA, 25 bp, Homo sapien
cgtacccgtcttggtctggcggttg

SEQ ID NO: 3098989 - DNA, 25 bp, Homo sapien
gttgatctcgatcccagctctcagg

SEQ ID NO: 3098990 - DNA, 25 bp, Homo sapien
tcttgccatacagtgcggcctcgtg

SEQ ID NO: 3098991 - DNA, 25 bp, Homo sapien
accacctcggtcttgccatacagtg

SEQ ID NO: 3098992 - DNA, 25 bp, Homo sapien
gagtcacgggggaggtggcgtagga

SEQ ID NO: 3098993 - DNA, 25 bp, Homo sapien
cgtaggagggggtgctgactgctgg

SEQ ID NO: 3098994 - DNA, 25 bp, Homo sapien
aggtggcgtaggagggggtgctgac

SEQ ID NO: 3098995 - DNA, 25 bp, Homo sapien
ggaggtggcgtaggagggggtgctg

SEQ ID NO: 3098996 - DNA, 25 bp, Homo sapien
gggcaccgatggtcccgcaggcagg

SEQ ID NO: 3098997 - DNA, 25 bp, Homo sapien
ctgggagatggagagcccgggtgaa

SEQ ID NO: 3098998 - DNA, 25 bp, Homo sapien
tgatgaggaagcgaggggaccccaa

SEQ ID NO: 3098999 - DNA, 25 bp, Homo sapien
agcactgaggggcaccgatggtccc

SEQ ID NO: 3099000 - DNA, 25 bp, Homo sapien
cagccaagtgcaggggcgtggtgta

SEQ ID NO: 3099001 - DNA, 25 bp, Homo sapien
tgtggccattcttggcagccaagtg

SEQ ID NO: 3099002 - DNA, 25 bp, Homo sapien
gggtcacacgggtctttggcctcac

SEQ ID NO: 3099003 - DNA, 25 bp, Homo sapien
tggtgtagttggggtcacacgggtc

SEQ ID NO: 3099004 - DNA, 25 bp, Homo sapien
gccacacataagtggctgttcagaa

SEQ ID NO: 3099005 - DNA, 25 bp, Homo sapien
atgtccaggacccagcaccccaagg

SEQ ID NO: 3099006 - DNA, 25 bp, Homo sapien
cctgagaccctgtagatgtccagga

SEQ ID NO: 3099007 - DNA, 25 bp, Homo sapien
agtgcccagttagagcctcctcctg

SEQ ID NO: 3099008 - DNA, 25 bp, Homo sapien
tgcagcacccagtgcccagttagag

SEQ ID NO: 3099009 - DNA, 25 bp, Homo sapien
cttgagtcggccaaattcacaggcc

SEQ ID NO: 3099010 - DNA, 25 bp, Homo sapien
gttgaccaggcatgggttggactga

SEQ ID NO: 3099011 - DNA, 25 bp, Homo sapien
tggccttgttgaccaggcatgggtt

SEQ ID NO: 3099012 - DNA, 25 bp, Homo sapien
tgagtcggccaaattcacaggccag

SEQ ID NO: 3099013 - DNA, 25 bp, Homo sapien
tgccctgcgccacgcccctgtgggc

SEQ ID NO: 3099014 - DNA, 25 bp, Homo sapien
ctgccctgcgccacgcccctgtggg

SEQ ID NO: 3099015 - DNA, 25 bp, Homo sapien
cctgccctgcgccacgcccctgtgg

SEQ ID NO: 3099016 - DNA, 25 bp, Homo sapien
attgacagccgcagaggcgcgcagc

SEQ ID NO: 3099017 - DNA, 25 bp, Homo sapien
gatctgtccgtccagcgaggcggca

SEQ ID NO: 3099018 - DNA, 25 bp, Homo sapien
taatgtccatactgtgcagccaggt

SEQ ID NO: 3099019 - DNA, 25 bp, Homo sapien
caggctgcgtagtgcagcgggcgca

SEQ ID NO: 3099020 - DNA, 25 bp, Homo sapien
ccagggtgggggtcgggggcacatg

SEQ ID NO: 3099021 - DNA, 25 bp, Homo sapien
cagggtgggggtcgggggcacatgg

SEQ ID NO: 3099022 - DNA, 25 bp, Homo sapien
ggtcgggggcacatgggggtctcac

SEQ ID NO: 3099023 - DNA, 25 bp, Homo sapien
gggtcgggggcacatgggggtctca

SEQ ID NO: 3099024 - DNA, 25 bp, Homo sapien
ttgatgtcaacagtggcctgagcct

SEQ ID NO: 3099025 - DNA, 25 bp, Homo sapien
gctgtccttgatgtcaacagtggcc

SEQ ID NO: 3099026 - DNA, 25 bp, Homo sapien
tccttgatgtcaacagtggcctgag

SEQ ID NO: 3099027 - DNA, 25 bp, Homo sapien
ctgtccttgatgtcaacagtggcct

SEQ ID NO: 3099028 - DNA, 25 bp, Homo sapien
gagctccaggctgccccccaaagca

SEQ ID NO: 3099029 - DNA, 25 bp, Homo sapien
ccccaaagcagcgtggtggagggca

SEQ ID NO: 3099030 - DNA, 25 bp, Homo sapien
gccccccaaagcagcgtggtggagg

SEQ ID NO: 3099031 - DNA, 25 bp, Homo sapien
cccaaagcagcgtggtggagggcag

SEQ ID NO: 3099032 - DNA, 25 bp, Homo sapien
tagttcacgttgagcctctttgtgg

SEQ ID NO: 3099033 - DNA, 25 bp, Homo sapien
atcctggtagttcacgttgagcctc

SEQ ID NO: 3099034 - DNA, 25 bp, Homo sapien
tcacgttgagcctctttgtggagcc

SEQ ID NO: 3099035 - DNA, 25 bp, Homo sapien
tggtagttcacgttgagcctctttg

SEQ ID NO: 3099036 - DNA, 25 bp, Homo sapien
ttggcgtgcaggaaagcacctgccc

SEQ ID NO: 3099037 - DNA, 25 bp, Homo sapien
gcgtgcaggaaagcacctgccccat

SEQ ID NO: 3099038 - DNA, 25 bp, Homo sapien
tcttggcgtgcaggaaagcacctgc

SEQ ID NO: 3099039 - DNA, 25 bp, Homo sapien
ctcttggcgtgcaggaaagcacctg

SEQ ID NO: 3099040 - DNA, 25 bp, Homo sapien
ttgaccttcgccaccagtttctgca

SEQ ID NO: 3099041 - DNA, 25 bp, Homo sapien
ggatcaggtcctgttcacgacccat

SEQ ID NO: 3099042 - DNA, 25 bp, Homo sapien
cagtttctgcacaccggtcacatct

SEQ ID NO: 3099043 - DNA, 25 bp, Homo sapien
catctccattcttgacggcgaggat

SEQ ID NO: 3099044 - DNA, 25 bp, Homo sapien
gagctctacactcaggagtccaggg

SEQ ID NO: 3099045 - DNA, 25 bp, Homo sapien
cgtcaggtactgagggatactccca

SEQ ID NO: 3099046 - DNA, 25 bp, Homo sapien
aactgccaccacacgaaggaaagct

SEQ ID NO: 3099047 - DNA, 25 bp, Homo sapien
gatggatatcagcttgtggcttccg

SEQ ID NO: 3099048 - DNA, 25 bp, Homo sapien
gcagcggtgcactggtctcagggct

SEQ ID NO: 3099049 - DNA, 25 bp, Homo sapien
cagcagcggtgcactggtctcaggg

SEQ ID NO: 3099050 - DNA, 25 bp, Homo sapien
agcagcggtgcactggtctcagggc

SEQ ID NO: 3099051 - DNA, 25 bp, Homo sapien
gcagcagcggtgcactggtctcagg

SEQ ID NO: 3099052 - DNA, 25 bp, Homo sapien
cgaatttactgccagagtcttgtgg

SEQ ID NO: 3099053 - DNA, 25 bp, Homo sapien
aatttactgccagagtcttgtggca

SEQ ID NO: 3099054 - DNA, 25 bp, Homo sapien
ggtggcagcgaatttactgccagag

SEQ ID NO: 3099055 - DNA, 25 bp, Homo sapien
cagcgaatttactgccagagtcttg

SEQ ID NO: 3099056 - DNA, 25 bp, Homo sapien
tggcactcaggacggtggctcccac

SEQ ID NO: 3099057 - DNA, 25 bp, Homo sapien
ttttccaaggccggctcggcgcctc

SEQ ID NO: 3099058 - DNA, 25 bp, Homo sapien
tccttttccaaggccggctcggcgc

SEQ ID NO: 3099059 - DNA, 25 bp, Homo sapien
ccctggcactcaggacggtggctcc

SEQ ID NO: 3099060 - DNA, 25 bp, Homo sapien
gagagattagtgtgtacataaacga

SEQ ID NO: 3099061 - DNA, 25 bp, Homo sapien
tatatggagagagattagtgtgtac

SEQ ID NO: 3099062 - DNA, 25 bp, Homo sapien
cataaacgaaagaaagatgttaaca

SEQ ID NO: 3099063 - DNA, 25 bp, Homo sapien
tgtgtacataaacgaaagaaagatg

SEQ ID NO: 3099064 - DNA, 25 bp, Homo sapien
ctggatgccagcgtgcagcacttgg

SEQ ID NO: 3099065 - DNA, 25 bp, Homo sapien
tgtccccgtatgagaggcagcttaa

SEQ ID NO: 3099066 - DNA, 25 bp, Homo sapien
ggtccattaataagaaggccaaggc

SEQ ID NO: 3099067 - DNA, 25 bp, Homo sapien
gacgtgtgcaccttagcaaccaggg

SEQ ID NO: 3099068 - DNA, 25 bp, Homo sapien
tgacccctctggaactcaggactcg

SEQ ID NO: 3099069 - DNA, 25 bp, Homo sapien
caggactcgattttaaggacccagg

SEQ ID NO: 3099070 - DNA, 25 bp, Homo sapien
tgcctttaacgagagggtgcctgct

SEQ ID NO: 3099071 - DNA, 25 bp, Homo sapien
gatctaagagtgagagaagcccgcg

SEQ ID NO: 3099072 - DNA, 25 bp, Homo sapien
gagctttggttaaaggcagggtcca

SEQ ID NO: 3099073 - DNA, 25 bp, Homo sapien
caggcatgacgtccacagggccctg

SEQ ID NO: 3099074 - DNA, 25 bp, Homo sapien
agggtattccgaacaggatgccagg

SEQ ID NO: 3099075 - DNA, 25 bp, Homo sapien
tgcgcccagccctctagtaaataat

SEQ ID NO: 3099076 - DNA, 25 bp, Homo sapien
gaacaaaaaccctagcgactcatgg

SEQ ID NO: 3099077 - DNA, 25 bp, Homo sapien
actgttgccctgtccgcagctgtag

SEQ ID NO: 3099078 - DNA, 25 bp, Homo sapien
tccaggaccttcgaggacagctcgc

SEQ ID NO: 3099079 - DNA, 25 bp, Homo sapien
gccagaaacaatgcaggcctcgacg

SEQ ID NO: 3099080 - DNA, 25 bp, Homo sapien
taataaatggttgtcactttgccac

SEQ ID NO: 3099081 - DNA, 25 bp, Homo sapien
tttaaaagcaaagtgcgtacagtgc

SEQ ID NO: 3099082 - DNA, 25 bp, Homo sapien
gcacaacacaggctctagcacacag

SEQ ID NO: 3099083 - DNA, 25 bp, Homo sapien
tgccccgaacaatcttgtatctggg

SEQ ID NO: 3099084 - DNA, 25 bp, Homo sapien
tgggctgcgactgctcaaggtgacc

SEQ ID NO: 3099085 - DNA, 25 bp, Homo sapien
tgttagccgtgtcccaccgtgggct

SEQ ID NO: 3099086 - DNA, 25 bp, Homo sapien
gctgaagattctctgctcatacagg

SEQ ID NO: 3099087 - DNA, 25 bp, Homo sapien
tctgctcatacaggtgcgctagccc

SEQ ID NO: 3099088 - DNA, 25 bp, Homo sapien
gaagggtctataggctttgcaagca

SEQ ID NO: 3099089 - DNA, 25 bp, Homo sapien
ccatgaggaccgctctgagaagggt

SEQ ID NO: 3099090 - DNA, 25 bp, Homo sapien
caggatgacccatgctagaatctgg

SEQ ID NO: 3099091 - DNA, 25 bp, Homo sapien
gactgagaaaagacgatggccctgg

SEQ ID NO: 3099092 - DNA, 25 bp, Homo sapien
agtcagcttcgctctcgcaccgggc

SEQ ID NO: 3099093 - DNA, 25 bp, Homo sapien
tgcctgatgaggttctgggcctctt

SEQ ID NO: 3099094 - DNA, 25 bp, Homo sapien
ggccatgccagtcagcttcgctctc

SEQ ID NO: 3099095 - DNA, 25 bp, Homo sapien
ttcgctctcgcaccgggcccggcca

SEQ ID NO: 3099096 - DNA, 25 bp, Homo sapien
atgaggaggtgagcgttagcctcct

SEQ ID NO: 3099097 - DNA, 25 bp, Homo sapien
gcatgaggaggtgagcgttagcctc

SEQ ID NO: 3099098 - DNA, 25 bp, Homo sapien
aggaggtgagcgttagcctcctccc

SEQ ID NO: 3099099 - DNA, 25 bp, Homo sapien
gggcatgaggaggtgagcgttagcc

SEQ ID NO: 3099100 - DNA, 25 bp, Homo sapien
gctccttccaggagaggtcttctga

SEQ ID NO: 3099101 - DNA, 25 bp, Homo sapien
ttctgagtcagcaagtgtgagaggt

SEQ ID NO: 3099102 - DNA, 25 bp, Homo sapien
cgctccttccaggagaggtcttctg

SEQ ID NO: 3099103 - DNA, 25 bp, Homo sapien
ggtcttctgagtcagcaagtgtgag

SEQ ID NO: 3099104 - DNA, 25 bp, Homo sapien
ctccttcaaggagacgccaggagcg

SEQ ID NO: 3099105 - DNA, 25 bp, Homo sapien
ccttcaaggagacgccaggagcgga

SEQ ID NO: 3099106 - DNA, 25 bp, Homo sapien
gaggcacttgaccacaacatttgca

SEQ ID NO: 3099107 - DNA, 25 bp, Homo sapien
gggtgaggcacttgaccacaacatt

SEQ ID NO: 3099108 - DNA, 25 bp, Homo sapien
ttgagccgtgggattcaaggtgccc

SEQ ID NO: 3099109 - DNA, 25 bp, Homo sapien
tgttcgctggccgagacgctgccct

SEQ ID NO: 3099110 - DNA, 25 bp, Homo sapien
cctcagctacgacggagggcttggc

SEQ ID NO: 3099111 - DNA, 25 bp, Homo sapien
tgcccttgacctcagctacgacgga

SEQ ID NO: 3099112 - DNA, 25 bp, Homo sapien
ggatcgaggccgcttgcccttccat

SEQ ID NO: 3099113 - DNA, 25 bp, Homo sapien
ctgctgggatcgaggccgcttgccc

SEQ ID NO: 3099114 - DNA, 25 bp, Homo sapien
tcgaggccgcttgcccttccatgtg

SEQ ID NO: 3099115 - DNA, 25 bp, Homo sapien
tgctgggatcgaggccgcttgccct

SEQ ID NO: 3099116 - DNA, 25 bp, Homo sapien
actgggtcctggtggctccctcatc

SEQ ID NO: 3099117 - DNA, 25 bp, Homo sapien
gggaagagcaggcatcacagcactg

SEQ ID NO: 3099118 - DNA, 25 bp, Homo sapien
cctcatcccaggaggcctaggagag

SEQ ID NO: 3099119 - DNA, 25 bp, Homo sapien
gagggaagagcaggcatcacagcac

SEQ ID NO: 3099120 - DNA, 25 bp, Homo sapien
tgagctctgagcttcagacgcccag

SEQ ID NO: 3099121 - DNA, 25 bp, Homo sapien
ggatgctgccgtgtaggttccagaa

SEQ ID NO: 3099122 - DNA, 25 bp, Homo sapien
gaagattctatgactacctgtaccc

SEQ ID NO: 3099123 - DNA, 25 bp, Homo sapien
gccgtgtaggttccagaagattcta

SEQ ID NO: 3099124 - DNA, 25 bp, Homo sapien
ctgaaccccctcacaggaggggcag

SEQ ID NO: 3099125 - DNA, 25 bp, Homo sapien
gaatgtcccccggctccatcttcct

SEQ ID NO: 3099126 - DNA, 25 bp, Homo sapien
gcaggcgaatgtcccccggctccat

SEQ ID NO: 3099127 - DNA, 25 bp, Homo sapien
aggggcaggcgaatgtcccccggct

SEQ ID NO: 3099128 - DNA, 25 bp, Homo sapien
ccgctgtggctaggagctgctgttt

SEQ ID NO: 3099129 - DNA, 25 bp, Homo sapien
tgtttcttgctagcccggcccttgg

SEQ ID NO: 3099130 - DNA, 25 bp, Homo sapien
ggcttgctccctgatccgagttgtc

SEQ ID NO: 3099131 - DNA, 25 bp, Homo sapien
catcagttccgtggccgtctggaac

SEQ ID NO: 3099132 - DNA, 25 bp, Homo sapien
ccttggcaagaggtgcacccctgag

SEQ ID NO: 3099133 - DNA, 25 bp, Homo sapien
aggccttggcaagaggtgcacccct

SEQ ID NO: 3099134 - DNA, 25 bp, Homo sapien
caggccttggcaagaggtgcacccc

SEQ ID NO: 3099135 - DNA, 25 bp, Homo sapien
ggcaagaggtgcacccctgagggca

SEQ ID NO: 3099136 - DNA, 25 bp, Homo sapien
gtggaatgtcatactcattgggctc

SEQ ID NO: 3099137 - DNA, 25 bp, Homo sapien
ttggcactgcctcccatgtcatagg

SEQ ID NO: 3099138 - DNA, 25 bp, Homo sapien
actgcctcccatgtcatagggctgc

SEQ ID NO: 3099139 - DNA, 25 bp, Homo sapien
cacatgggaggctggtggaatgtca

SEQ ID NO: 3099140 - DNA, 25 bp, Homo sapien
ttcagcacgctggccttgtagaggt

SEQ ID NO: 3099141 - DNA, 25 bp, Homo sapien
cttcagcacgctggccttgtagagg

SEQ ID NO: 3099142 - DNA, 25 bp, Homo sapien
cttcttcagcacgctggccttgtag

SEQ ID NO: 3099143 - DNA, 25 bp, Homo sapien
tcttcagcacgctggccttgtagag

SEQ ID NO: 3099144 - DNA, 25 bp, Homo sapien
ggttgacagggtcctgcagtctcca

SEQ ID NO: 3099145 - DNA, 25 bp, Homo sapien
ggctctctgagcaccctgtggctta

SEQ ID NO: 3099146 - DNA, 25 bp, Homo sapien
cacagggattctgattagggctctc

SEQ ID NO: 3099147 - DNA, 25 bp, Homo sapien
gcacctaagttgtagccatgcctgg

SEQ ID NO: 3099148 - DNA, 25 bp, Homo sapien
tgttgactggcggttgctgctcagc

SEQ ID NO: 3099149 - DNA, 25 bp, Homo sapien
gaagccgcaggcagtgctcccgtgc

SEQ ID NO: 3099150 - DNA, 25 bp, Homo sapien
gtacgtgttgactggcggttgctgc

SEQ ID NO: 3099151 - DNA, 25 bp, Homo sapien
tcatcagcggtacgtgttgactggc

SEQ ID NO: 3099152 - DNA, 25 bp, Homo sapien
agtgagactggtcgcatggcctcgc

SEQ ID NO: 3099153 - DNA, 25 bp, Homo sapien
tggcacaggacagtgagactggtcg

SEQ ID NO: 3099154 - DNA, 25 bp, Homo sapien
cacaggacagtgagactggtcgcat

SEQ ID NO: 3099155 - DNA, 25 bp, Homo sapien
gacagtgagactggtcgcatggcct

SEQ ID NO: 3099156 - DNA, 25 bp, Homo sapien
tggggatcctcctgctagaagcctc

SEQ ID NO: 3099157 - DNA, 25 bp, Homo sapien
tgctagaagcctctttcaggggaca

SEQ ID NO: 3099158 - DNA, 25 bp, Homo sapien
ccaccttctgcgctctgaggtcccc

SEQ ID NO: 3099159 - DNA, 25 bp, Homo sapien
catgccccgggaagagcccacaagc

SEQ ID NO: 3099160 - DNA, 25 bp, Homo sapien
tggtcctttcgctccaccttctgcg

SEQ ID NO: 3099161 - DNA, 25 bp, Homo sapien
gtggtccttggtcctttcgctccac

SEQ ID NO: 3099162 - DNA, 25 bp, Homo sapien
tgggggtacaaattcttctatcttg

SEQ ID NO: 3099163 - DNA, 25 bp, Homo sapien
ctgggggtacaaattcttctatctt

SEQ ID NO: 3099164 - DNA, 25 bp, Homo sapien
tacaaattcttctatcttggggtct

SEQ ID NO: 3099165 - DNA, 25 bp, Homo sapien
attcttctatcttggggtctttgcc

SEQ ID NO: 3099166 - DNA, 25 bp, Homo sapien
tgcttctgatagaagaggttccact

SEQ ID NO: 3099167 - DNA, 25 bp, Homo sapien
tagaagaggttccactcccgcttgt

SEQ ID NO: 3099168 - DNA, 25 bp, Homo sapien
tctgatagaagaggttccactcccg

SEQ ID NO: 3099169 - DNA, 25 bp, Homo sapien
agaggttccactcccgcttgtgggc

SEQ ID NO: 3099170 - DNA, 25 bp, Homo sapien
gagggcccgatgcaggtcttgctcc

SEQ ID NO: 3099171 - DNA, 25 bp, Homo sapien
aagtacttggcaatggcggcatggc

SEQ ID NO: 3099172 - DNA, 25 bp, Homo sapien
caggcagcgcatccccgaagtactt

SEQ ID NO: 3099173 - DNA, 25 bp, Homo sapien
tctggcagtggtcgcagcctttggc

SEQ ID NO: 3099174 - DNA, 25 bp, Homo sapien
ctctggcatccgagtggtgtgacca

SEQ ID NO: 3099175 - DNA, 25 bp, Homo sapien
ggctctggcatccgagtggtgtgac

SEQ ID NO: 3099176 - DNA, 25 bp, Homo sapien
ctggcatccgagtggtgtgaccaca

SEQ ID NO: 3099177 - DNA, 25 bp, Homo sapien
tctggcatccgagtggtgtgaccac

SEQ ID NO: 3099178 - DNA, 25 bp, Homo sapien
gggttttgtgctcggactcaaagag

SEQ ID NO: 3099179 - DNA, 25 bp, Homo sapien
gggtcggtttctctccacacagcct

SEQ ID NO: 3099180 - DNA, 25 bp, Homo sapien
gtcggtttctctccacacagcctag

SEQ ID NO: 3099181 - DNA, 25 bp, Homo sapien
ctcaaagagctccattgacagcggg

SEQ ID NO: 3099182 - DNA, 25 bp, Homo sapien
ctgggccaggagtgcggtcacagcc

SEQ ID NO: 3099183 - DNA, 25 bp, Homo sapien
tgggaggcacaaccaggcaaatgtc

SEQ ID NO: 3099184 - DNA, 25 bp, Homo sapien
agctgggccaggagtgcggtcacag

SEQ ID NO: 3099185 - DNA, 25 bp, Homo sapien
ccaggagtgcggtcacagccccagc

SEQ ID NO: 3099186 - DNA, 25 bp, Homo sapien
cctcgcgacggtaatttgacacttg

SEQ ID NO: 3099187 - DNA, 25 bp, Homo sapien
gaagttggaggacaagttcccaagc

SEQ ID NO: 3099188 - DNA, 25 bp, Homo sapien
cacgaaggaagtacgaggacagcac

SEQ ID NO: 3099189 - DNA, 25 bp, Homo sapien
ttcagatgctgagcggcacaagggc

SEQ ID NO: 3099190 - DNA, 25 bp, Homo sapien
ctgctgctgggaccctgcactaggg

SEQ ID NO: 3099191 - DNA, 25 bp, Homo sapien
cccgagggcctgcttattctgcaag

SEQ ID NO: 3099192 - DNA, 25 bp, Homo sapien
tgggaccctgcactaggggagggct

SEQ ID NO: 3099193 - DNA, 25 bp, Homo sapien
tgctccgcctgctgtgcagcagagg

SEQ ID NO: 3099194 - DNA, 25 bp, Homo sapien
cctatggctgtctacaatgtgctgc

SEQ ID NO: 3099195 - DNA, 25 bp, Homo sapien
ggtcagtcctcccaatagcctcaaa

SEQ ID NO: 3099196 - DNA, 25 bp, Homo sapien
gaaatccagaaggtacatgccggct

SEQ ID NO: 3099197 - DNA, 25 bp, Homo sapien
gctgaaaacactagagcaggcccct

SEQ ID NO: 3099198 - DNA, 25 bp, Homo sapien
gtagccatctcagcgagaaccggct

SEQ ID NO: 3099199 - DNA, 25 bp, Homo sapien
caaggatggccgcaggccaattgca

SEQ ID NO: 3099200 - DNA, 25 bp, Homo sapien
cggtggttctaaaccagctctgcca

SEQ ID NO: 3099201 - DNA, 25 bp, Homo sapien
tggagggccccgttcgatgaccttc

SEQ ID NO: 3099202 - DNA, 25 bp, Homo sapien
ctcaagacaagggaatggaacagcg

SEQ ID NO: 3099203 - DNA, 25 bp, Homo sapien
acaagggaatggaacagcgaagcca

SEQ ID NO: 3099204 - DNA, 25 bp, Homo sapien
agacaagggaatggaacagcgaagc

SEQ ID NO: 3099205 - DNA, 25 bp, Homo sapien
caagacaagggaatggaacagcgaa

SEQ ID NO: 3099206 - DNA, 25 bp, Homo sapien
aagggctggtataggtgcaaacctc

SEQ ID NO: 3099207 - DNA, 25 bp, Homo sapien
gtttcaaagactgggtcaactgcct

SEQ ID NO: 3099208 - DNA, 25 bp, Homo sapien
gcccaggtacctggacactgacaac

SEQ ID NO: 3099209 - DNA, 25 bp, Homo sapien
tgagccctaccaaggaaacaagggc

SEQ ID NO: 3099210 - DNA, 25 bp, Homo sapien
gctacacgccagttatgcaataaag

SEQ ID NO: 3099211 - DNA, 25 bp, Homo sapien
caacagggcccaattcaatccaggt

SEQ ID NO: 3099212 - DNA, 25 bp, Homo sapien
tctcaagatgccgaggcctcaagct

SEQ ID NO: 3099213 - DNA, 25 bp, Homo sapien
gcagcccagagaaagtagctacaga

SEQ ID NO: 3099214 - DNA, 25 bp, Homo sapien
taccatgagcttcgtgactgtgacc

SEQ ID NO: 3099215 - DNA, 25 bp, Homo sapien
tgaaaagggctctggtcgcaaaggc

SEQ ID NO: 3099216 - DNA, 25 bp, Homo sapien
gacaggcagagttaaccctccagag

SEQ ID NO: 3099217 - DNA, 25 bp, Homo sapien
cccaggtgtatgcaaatgaggacgc

SEQ ID NO: 3099218 - DNA, 25 bp, Homo sapien
tcacagctccgcatgcctggacaca

SEQ ID NO: 3099219 - DNA, 25 bp, Homo sapien
gctccgcatgcctggacacaacctg

SEQ ID NO: 3099220 - DNA, 25 bp, Homo sapien
ccaagcagccctcagactctttccg

SEQ ID NO: 3099221 - DNA, 25 bp, Homo sapien
accaagcagccctcagactctttcc

SEQ ID NO: 3099222 - DNA, 25 bp, Homo sapien
tactcaagtgatgccagaagtccca

SEQ ID NO: 3099223 - DNA, 25 bp, Homo sapien
tcagctgcttaactagggcgtgccg

SEQ ID NO: 3099224 - DNA, 25 bp, Homo sapien
caggtgtcccttggtagcctacggg

SEQ ID NO: 3099225 - DNA, 25 bp, Homo sapien
gttcaaagcacatgactccccgagg

SEQ ID NO: 3099226 - DNA, 25 bp, Homo sapien
ggccatgatagtggctttatcagat

SEQ ID NO: 3099227 - DNA, 25 bp, Homo sapien
gatagtggctttatcagatgctttg

SEQ ID NO: 3099228 - DNA, 25 bp, Homo sapien
catgatagtggctttatcagatgct

SEQ ID NO: 3099229 - DNA, 25 bp, Homo sapien
tagtggctttatcagatgctttgtt

SEQ ID NO: 3099230 - DNA, 25 bp, Homo sapien
gccctgccagctcatgcctgagcac

SEQ ID NO: 3099231 - DNA, 25 bp, Homo sapien
ctggaaggtgctaatggtagcagac

SEQ ID NO: 3099232 - DNA, 25 bp, Homo sapien
ggccctgccagctcatgcctgagca

SEQ ID NO: 3099233 - DNA, 25 bp, Homo sapien
caagggaagattaagccaggtgcag

SEQ ID NO: 3099234 - DNA, 25 bp, Homo sapien
tcatctgactagagaaaagctactg

SEQ ID NO: 3099235 - DNA, 25 bp, Homo sapien
taagtacttataggctggacacggt

SEQ ID NO: 3099236 - DNA, 25 bp, Homo sapien
gctgctgtgaaccatgactatgcta

SEQ ID NO: 3099237 - DNA, 25 bp, Homo sapien
gacttggtcccggtcattcctggag

SEQ ID NO: 3099238 - DNA, 25 bp, Homo sapien
tggtagtacccagccatagacttgg

SEQ ID NO: 3099239 - DNA, 25 bp, Homo sapien
cagcccggccagactcctggtagta

SEQ ID NO: 3099240 - DNA, 25 bp, Homo sapien
ttcctggagtaatagagacggcacc

SEQ ID NO: 3099241 - DNA, 25 bp, Homo sapien
tgtcattgaccgaaacatcaacatg

SEQ ID NO: 3099242 - DNA, 25 bp, Homo sapien
tctatgcagtctgtcattgaccgaa

SEQ ID NO: 3099243 - DNA, 25 bp, Homo sapien
tctcagtctatgcagtctgtcattg

SEQ ID NO: 3099244 - DNA, 25 bp, Homo sapien
cattgaccgaaacatcaacatgagg

SEQ ID NO: 3099245 - DNA, 25 bp, Homo sapien
taggatccacctactgagatgtgag

SEQ ID NO: 3099246 - DNA, 25 bp, Homo sapien
tcctttgggcacagcactaggcaat

SEQ ID NO: 3099247 - DNA, 25 bp, Homo sapien
gtgccagaaccatgccgtgcagtca

SEQ ID NO: 3099248 - DNA, 25 bp, Homo sapien
tctagccctcgaaggagcacatgca

SEQ ID NO: 3099249 - DNA, 25 bp, Homo sapien
gcaccagcgttctttcagaggcctt

SEQ ID NO: 3099250 - DNA, 25 bp, Homo sapien
ttctgcaccagcgttctttcagagg

SEQ ID NO: 3099251 - DNA, 25 bp, Homo sapien
tcccaaaactaatggttgcaacaat

SEQ ID NO: 3099252 - DNA, 25 bp, Homo sapien
ccaaaactaatggttgcaacaatta

SEQ ID NO: 3099253 - DNA, 25 bp, Homo sapien
cacaagcctctctagtcctgcagta

SEQ ID NO: 3099254 - DNA, 25 bp, Homo sapien
gcagtacacaatgccgcagccagat

SEQ ID NO: 3099255 - DNA, 25 bp, Homo sapien
catggtaagccttggcgttcacacc

SEQ ID NO: 3099256 - DNA, 25 bp, Homo sapien
ctgcagctgagctctatggccagct

SEQ ID NO: 3099257 - DNA, 25 bp, Homo sapien
tgttccttctctcgtcggcttcagt

SEQ ID NO: 3099258 - DNA, 25 bp, Homo sapien
tgtgttccttctctcgtcggcttca

SEQ ID NO: 3099259 - DNA, 25 bp, Homo sapien
gaggctctgtcactttataaaaagc

SEQ ID NO: 3099260 - DNA, 25 bp, Homo sapien
tctctcgtcggcttcagtctcttct

SEQ ID NO: 3099261 - DNA, 25 bp, Homo sapien
tcatgagctttgcatgggtctgcag

SEQ ID NO: 3099262 - DNA, 25 bp, Homo sapien
ggtaaggaggacaatgccaggaaac

SEQ ID NO: 3099263 - DNA, 25 bp, Homo sapien
acaatgccaggaaaccaaagagaca

SEQ ID NO: 3099264 - DNA, 25 bp, Homo sapien
gaaaccctggtaaggaggacaatgc

SEQ ID NO: 3099265 - DNA, 25 bp, Homo sapien
tctccatctccatcacatcgcaccc

SEQ ID NO: 3099266 - DNA, 25 bp, Homo sapien
tccatctccatcacatcgcacccca

SEQ ID NO: 3099267 - DNA, 25 bp, Homo sapien
gtcttagactaatctccatctccat

SEQ ID NO: 3099268 - DNA, 25 bp, Homo sapien
aatctccatctccatcacatcgcac

SEQ ID NO: 3099269 - DNA, 25 bp, Homo sapien
gtagtcaggacgaaagtcatgcccc

SEQ ID NO: 3099270 - DNA, 25 bp, Homo sapien
gaagtccttcaggttcccataggga

SEQ ID NO: 3099271 - DNA, 25 bp, Homo sapien
tcctgtgcagagagcttcgagttca

SEQ ID NO: 3099272 - DNA, 25 bp, Homo sapien
cacatcatagaagaggttggcccgg

SEQ ID NO: 3099273 - DNA, 25 bp, Homo sapien
gcaatgagaggagagactacaatgg

SEQ ID NO: 3099274 - DNA, 25 bp, Homo sapien
caatgagaggagagactacaatggt

SEQ ID NO: 3099275 - DNA, 25 bp, Homo sapien
agaggagagactacaatggtgatgc

SEQ ID NO: 3099276 - DNA, 25 bp, Homo sapien
ccctgtgggcatgcacacaaagacg

SEQ ID NO: 3099277 - DNA, 25 bp, Homo sapien
gtgggcatgcacacaaagacgtcct

SEQ ID NO: 3099278 - DNA, 25 bp, Homo sapien
ctgtgggcatgcacacaaagacgtc

SEQ ID NO: 3099279 - DNA, 25 bp, Homo sapien
gcatgcacacaaagacgtccttgtt

SEQ ID NO: 3099280 - DNA, 25 bp, Homo sapien
ccgctcagggtcaaaaggaaaggtg

SEQ ID NO: 3099281 - DNA, 25 bp, Homo sapien
tgtaaaggcgtcttaaaagagtcaa

SEQ ID NO: 3099282 - DNA, 25 bp, Homo sapien
aaagaccttcttcagcgtactccgg

SEQ ID NO: 3099283 - DNA, 25 bp, Homo sapien
ttttactacagccatggtcgcactc

SEQ ID NO: 3099284 - DNA, 25 bp, Homo sapien
gctgaaggtgaactgcctcaagcaa

SEQ ID NO: 3099285 - DNA, 25 bp, Homo sapien
cataaatgtcttcagaacagcttgg

SEQ ID NO: 3099286 - DNA, 25 bp, Homo sapien
cattgaactattccaggccacggta

SEQ ID NO: 3099287 - DNA, 25 bp, Homo sapien
ggccacggtatagcacagagctaga

SEQ ID NO: 3099288 - DNA, 25 bp, Homo sapien
tcctacttctataagcgcaaccacg

SEQ ID NO: 3099289 - DNA, 25 bp, Homo sapien
cttctataagcgcaaccacgacgac

SEQ ID NO: 3099290 - DNA, 25 bp, Homo sapien
aagcgcaaccacgacgaccgttctt

SEQ ID NO: 3099291 - DNA, 25 bp, Homo sapien
tgctcctacttctataagcgcaacc

SEQ ID NO: 3099292 - DNA, 25 bp, Homo sapien
cccctatacacaaccccaactcaga

SEQ ID NO: 3099293 - DNA, 25 bp, Homo sapien
gcgctgggaattcagctttaggcag

SEQ ID NO: 3099294 - DNA, 25 bp, Homo sapien
ggaactgttcgaagacccctataca

SEQ ID NO: 3099295 - DNA, 25 bp, Homo sapien
tggctggttccggaactgttcgaag

SEQ ID NO: 3099296 - DNA, 25 bp, Homo sapien
acaagatggtcattgtgctccaagc

SEQ ID NO: 3099297 - DNA, 25 bp, Homo sapien
cttactgaaagactccgtgccggct

SEQ ID NO: 3099298 - DNA, 25 bp, Homo sapien
gtgtctgcccggaatgctgtaccct

SEQ ID NO: 3099299 - DNA, 25 bp, Homo sapien
tgagatagagcattagagactgtgg

SEQ ID NO: 3099300 - DNA, 25 bp, Homo sapien
gacaaactgtgcaactgtgtggaca

SEQ ID NO: 3099301 - DNA, 25 bp, Homo sapien
taaatgggctgtttgctccggcccc

SEQ ID NO: 3099302 - DNA, 25 bp, Homo sapien
ctgaggctgatgacccaaaggtatt

SEQ ID NO: 3099303 - DNA, 25 bp, Homo sapien
ccggcccctagttatgcatgtgaga

SEQ ID NO: 3099304 - DNA, 25 bp, Homo sapien
gatcttgtctcttcggtaagcagca

SEQ ID NO: 3099305 - DNA, 25 bp, Homo sapien
ctgggcgttgcataggaaacaagct

SEQ ID NO: 3099306 - DNA, 25 bp, Homo sapien
ccatgtttgggagcgtgagtaagaa

SEQ ID NO: 3099307 - DNA, 25 bp, Homo sapien
tttgccccaaactagcgaacaggag

SEQ ID NO: 3099308 - DNA, 25 bp, Homo sapien
gaatgctatgtctgcagtttccctc

SEQ ID NO: 3099309 - DNA, 25 bp, Homo sapien
cttgggtcagaaggaataactcgtt

SEQ ID NO: 3099310 - DNA, 25 bp, Homo sapien
aagctcgtgttcttattggaagtcc

SEQ ID NO: 3099311 - DNA, 25 bp, Homo sapien
cctctaatgaagttctctggtgaac

SEQ ID NO: 3099312 - DNA, 25 bp, Homo sapien
atcattcctggaggggtgcttttcc

SEQ ID NO: 3099313 - DNA, 25 bp, Homo sapien
gaatcattcctggaggggtgctttt

SEQ ID NO: 3099314 - DNA, 25 bp, Homo sapien
ctgctagagaatcattcctggaggg

SEQ ID NO: 3099315 - DNA, 25 bp, Homo sapien
gagaatcattcctggaggggtgctt

SEQ ID NO: 3099316 - DNA, 25 bp, Homo sapien
ttgagaatgcccaagcctacgtagc

SEQ ID NO: 3099317 - DNA, 25 bp, Homo sapien
aatttccagaagctcgtggagtggc

SEQ ID NO: 3099318 - DNA, 25 bp, Homo sapien
gccttgcacagctgggagacatgga

SEQ ID NO: 3099319 - DNA, 25 bp, Homo sapien
cctgcgctcaacacgatggatggtc

SEQ ID NO: 3099320 - DNA, 25 bp, Homo sapien
tgccacctgcatcgacagcaatggg

SEQ ID NO: 3099321 - DNA, 25 bp, Homo sapien
tgagataattactcaggctgcagag

SEQ ID NO: 3099322 - DNA, 25 bp, Homo sapien
aggacgctgctccatgggccagtgt

SEQ ID NO: 3099323 - DNA, 25 bp, Homo sapien
cctggttggacaggcccaagctgtg

SEQ ID NO: 3099324 - DNA, 25 bp, Homo sapien
ccagacagggtgacagagccagact

SEQ ID NO: 3099325 - DNA, 25 bp, Homo sapien
agacagggtgacagagccagactcc

SEQ ID NO: 3099326 - DNA, 25 bp, Homo sapien
ttaccgcactccagacagggtgaca

SEQ ID NO: 3099327 - DNA, 25 bp, Homo sapien
acagggtgacagagccagactccgt

SEQ ID NO: 3099328 - DNA, 25 bp, Homo sapien
aggagtttgtgagccggacactgac

SEQ ID NO: 3099329 - DNA, 25 bp, Homo sapien
tctgtgggcccaaacctatttgtaa

SEQ ID NO: 3099330 - DNA, 25 bp, Homo sapien
acagttcttccaaacttgaccgcac

SEQ ID NO: 3099331 - DNA, 25 bp, Homo sapien
acagagcaggggctaggtgtctcct

SEQ ID NO: 3099332 - DNA, 25 bp, Homo sapien
catacacccacctctagaggaggca

SEQ ID NO: 3099333 - DNA, 25 bp, Homo sapien
aagcatacacccacctctagaggag

SEQ ID NO: 3099334 - DNA, 25 bp, Homo sapien
atacacccacctctagaggaggcag

SEQ ID NO: 3099335 - DNA, 25 bp, Homo sapien
agcatacacccacctctagaggagg

SEQ ID NO: 3099336 - DNA, 25 bp, Homo sapien
atatggaagatggcaccgggcacag

SEQ ID NO: 3099337 - DNA, 25 bp, Homo sapien
acagagccgtgggactggcctgcag

SEQ ID NO: 3099338 - DNA, 25 bp, Homo sapien
gcaccgggcacagagccgtgggact

SEQ ID NO: 3099339 - DNA, 25 bp, Homo sapien
tggcaccgggcacagagccgtggga

SEQ ID NO: 3099340 - DNA, 25 bp, Homo sapien
gaaggtggcagtcccgccgtagtgc

SEQ ID NO: 3099341 - DNA, 25 bp, Homo sapien
aggtggcagtcccgccgtagtgctc

SEQ ID NO: 3099342 - DNA, 25 bp, Homo sapien
catcggctgcttgagagaggtagaa

SEQ ID NO: 3099343 - DNA, 25 bp, Homo sapien
ctccatcggctgcttgagagaggta

SEQ ID NO: 3099344 - DNA, 25 bp, Homo sapien
aagccaccgcccgtcatgcggctgc

SEQ ID NO: 3099345 - DNA, 25 bp, Homo sapien
gtgtcaccgtgcagccaccgaagcc

SEQ ID NO: 3099346 - DNA, 25 bp, Homo sapien
gatgtgccgcatggcgtggggagca

SEQ ID NO: 3099347 - DNA, 25 bp, Homo sapien
ccaggcacagcaagcgcagcctcca

SEQ ID NO: 3099348 - DNA, 25 bp, Homo sapien
gcagagaggatattgaaggggtggg

SEQ ID NO: 3099349 - DNA, 25 bp, Homo sapien
agagaggatattgaaggggtgggcc

SEQ ID NO: 3099350 - DNA, 25 bp, Homo sapien
gaggatattgaaggggtgggcctgg

SEQ ID NO: 3099351 - DNA, 25 bp, Homo sapien
ctgcagagaggatattgaaggggtg

SEQ ID NO: 3099352 - DNA, 25 bp, Homo sapien
tctccaccatgaggcggccaaaggc

SEQ ID NO: 3099353 - DNA, 25 bp, Homo sapien
tgagtgagcggtggctctccaccat

SEQ ID NO: 3099354 - DNA, 25 bp, Homo sapien
ggcccgccggaagccctctttgctc

SEQ ID NO: 3099355 - DNA, 25 bp, Homo sapien
tgtagtcgccacgtctcagggcggc

SEQ ID NO: 3099356 - DNA, 25 bp, Homo sapien
cctctagctcttccagttgtacctc

SEQ ID NO: 3099357 - DNA, 25 bp, Homo sapien
acttcttcacattggcgccgccgca

SEQ ID NO: 3099358 - DNA, 25 bp, Homo sapien
tagctcttccagttgtacctcccgg

SEQ ID NO: 3099359 - DNA, 25 bp, Homo sapien
cttccagttgtacctcccggaggct

SEQ ID NO: 3099360 - DNA, 25 bp, Homo sapien
acattagagttggtgatgagcacgg

SEQ ID NO: 3099361 - DNA, 25 bp, Homo sapien
cagggagtggcggacattagagttg

SEQ ID NO: 3099362 - DNA, 25 bp, Homo sapien
agttggtgatgagcacggccagctt

SEQ ID NO: 3099363 - DNA, 25 bp, Homo sapien
aggccagggagtggcggacattaga

SEQ ID NO: 3099364 - DNA, 25 bp, Homo sapien
ctgcagtcaatgagcagcgcgtggc

SEQ ID NO: 3099365 - DNA, 25 bp, Homo sapien
agcgcgtggcctttctgtcccataa

SEQ ID NO: 3099366 - DNA, 25 bp, Homo sapien
atccctgcgaagctgtgctcggcct

SEQ ID NO: 3099367 - DNA, 25 bp, Homo sapien
ctgctgacacacctgggcgcgggca

SEQ ID NO: 3099368 - DNA, 25 bp, Homo sapien
tgcagtacagggtgaggtggggagg

SEQ ID NO: 3099369 - DNA, 25 bp, Homo sapien
ctgcagtacagggtgaggtggggag

SEQ ID NO: 3099370 - DNA, 25 bp, Homo sapien
tggaggaaggtgtacgtggccactt

SEQ ID NO: 3099371 - DNA, 25 bp, Homo sapien
gaaggtgtacgtggccacttccaag

SEQ ID NO: 3099372 - DNA, 25 bp, Homo sapien
gctggaggaaggtgtacgtggccac

SEQ ID NO: 3099373 - DNA, 25 bp, Homo sapien
gaggaaggtgtacgtggccacttcc

SEQ ID NO: 3099374 - DNA, 25 bp, Homo sapien
ctctgtggctgtgaggtggcactcc

SEQ ID NO: 3099375 - DNA, 25 bp, Homo sapien
gctcctccaatcaggtcacgggaaa

SEQ ID NO: 3099376 - DNA, 25 bp, Homo sapien
tgtcctcctggtttagggctctgga

SEQ ID NO: 3099377 - DNA, 25 bp, Homo sapien
aatgggatgctccactctacaagcc

SEQ ID NO: 3099378 - DNA, 25 bp, Homo sapien
tgaatcactcccttgacatagttgg

SEQ ID NO: 3099379 - DNA, 25 bp, Homo sapien
atagttggcccaccgaggagtccca

SEQ ID NO: 3099380 - DNA, 25 bp, Homo sapien
accagcaccgtcatgagctccagag

SEQ ID NO: 3099381 - DNA, 25 bp, Homo sapien
catcggcaccctcagaggtggtgag

SEQ ID NO: 3099382 - DNA, 25 bp, Homo sapien
gggactcttccgtgcaccggtgctc

SEQ ID NO: 3099383 - DNA, 25 bp, Homo sapien
catctcccgcgggaagaactcgccc

SEQ ID NO: 3099384 - DNA, 25 bp, Homo sapien
ctcgcttcctcccttccaacgtggg

SEQ ID NO: 3099385 - DNA, 25 bp, Homo sapien
caacgtggggaacagcctgtcccgg

SEQ ID NO: 3099386 - DNA, 25 bp, Homo sapien
tgtgttccccgatgaggttgacgcg

SEQ ID NO: 3099387 - DNA, 25 bp, Homo sapien
cgcgacctggggctgtctcaaagca

SEQ ID NO: 3099388 - DNA, 25 bp, Homo sapien
tggttgtagtccgtgtgttccccga

SEQ ID NO: 3099389 - DNA, 25 bp, Homo sapien
accaggccctggttgtagtccgtgt

SEQ ID NO: 3099390 - DNA, 25 bp, Homo sapien
ccctgagtggcacttggcatgacca

SEQ ID NO: 3099391 - DNA, 25 bp, Homo sapien
tccctggcgctggtgactttctatg

SEQ ID NO: 3099392 - DNA, 25 bp, Homo sapien
gacttcgggaagaaccaatgagcac

SEQ ID NO: 3099393 - DNA, 25 bp, Homo sapien
tctgatcaccggtctccaagagggt

SEQ ID NO: 3099394 - DNA, 25 bp, Homo sapien
tcttagtgagggaacacccgttgcc

SEQ ID NO: 3099395 - DNA, 25 bp, Homo sapien
tgcagttacactgtggacccctggt

SEQ ID NO: 3099396 - DNA, 25 bp, Homo sapien
taaaagtatccaaggtcctgacagg

SEQ ID NO: 3099397 - DNA, 25 bp, Homo sapien
caccagacagtgcttgcaaggagcc

SEQ ID NO: 3099398 - DNA, 25 bp, Homo sapien
gatatcccatacaggaagccgccta

SEQ ID NO: 3099399 - DNA, 25 bp, Homo sapien
ggatacctgcatcagctgcaacttc

SEQ ID NO: 3099400 - DNA, 25 bp, Homo sapien
tccatcaagggcataggatacctgc

SEQ ID NO: 3099401 - DNA, 25 bp, Homo sapien
tacccttaccgagggatatcccata

SEQ ID NO: 3099402 - DNA, 25 bp, Homo sapien
tggagaaggttcactagtgtcaccc

SEQ ID NO: 3099403 - DNA, 25 bp, Homo sapien
tgtttccagacacgctacagcatag

SEQ ID NO: 3099404 - DNA, 25 bp, Homo sapien
cccacttgggttgtcacaggtagta

SEQ ID NO: 3099405 - DNA, 25 bp, Homo sapien
tcgccttctgggttgagtgctcaag

SEQ ID NO: 3099406 - DNA, 25 bp, Homo sapien
tgtgggcttctacactacggaacgg

SEQ ID NO: 3099407 - DNA, 25 bp, Homo sapien
tggaacgctttgatgactgctggct

SEQ ID NO: 3099408 - DNA, 25 bp, Homo sapien
tgctaacttcaaacgtggaacgctt

SEQ ID NO: 3099409 - DNA, 25 bp, Homo sapien
catcatcgcacaaggaaactggttt

SEQ ID NO: 3099410 - DNA, 25 bp, Homo sapien
aacttcggtactgtttcctcagcag

SEQ ID NO: 3099411 - DNA, 25 bp, Homo sapien
gaacttcggtactgtttcctcagca

SEQ ID NO: 3099412 - DNA, 25 bp, Homo sapien
cagaatgttagttaagatgatgctg

SEQ ID NO: 3099413 - DNA, 25 bp, Homo sapien
cactaactagttcagaatgttagtt

SEQ ID NO: 3099414 - DNA, 25 bp, Homo sapien
aaaaatgttgatactacaatatata

SEQ ID NO: 3099415 - DNA, 25 bp, Homo sapien
tttaaaaatgttgatactacaatat

SEQ ID NO: 3099416 - DNA, 25 bp, Homo sapien
aaatagctattataaatgcacatag

SEQ ID NO: 3099417 - DNA, 25 bp, Homo sapien
aatagctattataaatgcacatagt

SEQ ID NO: 3099418 - DNA, 25 bp, Homo sapien
ggtcagacttaacagccccaattgt

SEQ ID NO: 3099419 - DNA, 25 bp, Homo sapien
aacagccccaattgttaaacacttg

SEQ ID NO: 3099420 - DNA, 25 bp, Homo sapien
acagccccaattgttaaacacttgg

SEQ ID NO: 3099421 - DNA, 25 bp, Homo sapien
gtatggtcagacttaacagccccaa

SEQ ID NO: 3099422 - DNA, 25 bp, Homo sapien
aagcaagaagtatcacccatccctt

SEQ ID NO: 3099423 - DNA, 25 bp, Homo sapien
agcaagaagtatcacccatcccttc

SEQ ID NO: 3099424 - DNA, 25 bp, Homo sapien
gcaagaagtatcacccatcccttct

SEQ ID NO: 3099425 - DNA, 25 bp, Homo sapien
atgatggtgactctcttagcgtgga

SEQ ID NO: 3099426 - DNA, 25 bp, Homo sapien
gactctcttagcgtggatggcacac

SEQ ID NO: 3099427 - DNA, 25 bp, Homo sapien
gggcatgatggtgactctcttagcg

SEQ ID NO: 3099428 - DNA, 25 bp, Homo sapien
tctctccccgtatccggcgagccaa

SEQ ID NO: 3099429 - DNA, 25 bp, Homo sapien
cactcggggagcggaaaccgcccag

SEQ ID NO: 3099430 - DNA, 25 bp, Homo sapien
ctattaatcccactcggggagcgga

SEQ ID NO: 3099431 - DNA, 25 bp, Homo sapien
tattaatcccactcggggagcggaa

SEQ ID NO: 3099432 - DNA, 25 bp, Homo sapien
cgatggctgcgctctgaaacctcag

SEQ ID NO: 3099433 - DNA, 25 bp, Homo sapien
tgcgctctgaaacctcaggtcggtt

SEQ ID NO: 3099434 - DNA, 25 bp, Homo sapien
tctgaaacctcaggtcggttttgaa

SEQ ID NO: 3099435 - DNA, 25 bp, Homo sapien
ggttttgaaatcctgcgcgatctcc

SEQ ID NO: 3099436 - DNA, 25 bp, Homo sapien
taacgacgaatctctcgaagcgcca

SEQ ID NO: 3099437 - DNA, 25 bp, Homo sapien
gacttctgataacgacgaatctctc

SEQ ID NO: 3099438 - DNA, 25 bp, Homo sapien
tctgataacgacgaatctctcgaag

SEQ ID NO: 3099439 - DNA, 25 bp, Homo sapien
gacgaatctctcgaagcgccacggt

SEQ ID NO: 3099440 - DNA, 25 bp, Homo sapien
gaggagtgagcggacgctgccgcac

SEQ ID NO: 3099441 - DNA, 25 bp, Homo sapien
cacaaagccggccaccgccgggcca

SEQ ID NO: 3099442 - DNA, 25 bp, Homo sapien
tgagcggacgctgccgcacaaagcc

SEQ ID NO: 3099443 - DNA, 25 bp, Homo sapien
agtgagcggacgctgccgcacaaag

SEQ ID NO: 3099444 - DNA, 25 bp, Homo sapien
ttcaccccgccggtagagggagcgc

SEQ ID NO: 3099445 - DNA, 25 bp, Homo sapien
tcttcaccccgccggtagagggagc

SEQ ID NO: 3099446 - DNA, 25 bp, Homo sapien
caccccgccggtagagggagcgctt

SEQ ID NO: 3099447 - DNA, 25 bp, Homo sapien
cgccggtagagggagcgcttttcct

SEQ ID NO: 3099448 - DNA, 25 bp, Homo sapien
tacgagcagtctgcttggttcgggc

SEQ ID NO: 3099449 - DNA, 25 bp, Homo sapien
ggtggacttacgagcagtctgcttg

SEQ ID NO: 3099450 - DNA, 25 bp, Homo sapien
ggacttacgagcagtctgcttggtt

SEQ ID NO: 3099451 - DNA, 25 bp, Homo sapien
acgagcagtctgcttggttcgggcc

SEQ ID NO: 3099452 - DNA, 25 bp, Homo sapien
gcagatggccgagggccgccaacct

SEQ ID NO: 3099453 - DNA, 25 bp, Homo sapien
acctctgaatcaccgccgggaaaag

SEQ ID NO: 3099454 - DNA, 25 bp, Homo sapien
cctaatgactcaggctgcgaggagc

SEQ ID NO: 3099455 - DNA, 25 bp, Homo sapien
agacgccccgaagataaggccgccg

SEQ ID NO: 3099456 - DNA, 25 bp, Homo sapien
gcggcgccaacggttggcagaacct

SEQ ID NO: 3099457 - DNA, 25 bp, Homo sapien
ggcgcgcggcgccaacggttggcag

SEQ ID NO: 3099458 - DNA, 25 bp, Homo sapien
gcgccaacggttggcagaacctgaa

SEQ ID NO: 3099459 - DNA, 25 bp, Homo sapien
gcagaacctgaagccgcgggtaaac

SEQ ID NO: 3099460 - DNA, 25 bp, Homo sapien
caacgactttttctattggtgggcg

SEQ ID NO: 3099461 - DNA, 25 bp, Homo sapien
cagtcgacgagcgaaaaaccagcac

SEQ ID NO: 3099462 - DNA, 25 bp, Homo sapien
gcgtctctgcgtcatagaaccctta

SEQ ID NO: 3099463 - DNA, 25 bp, Homo sapien
tttttataggcacgcttcacgctgc

SEQ ID NO: 3099464 - DNA, 25 bp, Homo sapien
tgaagaactttgcttgactggtggg

SEQ ID NO: 3099465 - DNA, 25 bp, Homo sapien
gaactttgcttgactggtgggaagc

SEQ ID NO: 3099466 - DNA, 25 bp, Homo sapien
aagaactttgcttgactggtgggaa

SEQ ID NO: 3099467 - DNA, 25 bp, Homo sapien
ctttgcttgactggtgggaagcaga

SEQ ID NO: 3099468 - DNA, 25 bp, Homo sapien
gaactgtagcgtgcggtgtacctcc

SEQ ID NO: 3099469 - DNA, 25 bp, Homo sapien
tttcgcagaaatcgctagggcctcc

SEQ ID NO: 3099470 - DNA, 25 bp, Homo sapien
ctatgaaactgaaaacgcgctggta

SEQ ID NO: 3099471 - DNA, 25 bp, Homo sapien
aatgcctcttaggttagacccgccg

SEQ ID NO: 3099472 - DNA, 25 bp, Homo sapien
catcatttgagcctttggatactac

SEQ ID NO: 3099473 - DNA, 25 bp, Homo sapien
gataagccgtgaattatgatctcag

SEQ ID NO: 3099474 - DNA, 25 bp, Homo sapien
gaaagcaggagattatagacaagca

SEQ ID NO: 3099475 - DNA, 25 bp, Homo sapien
tagctagcagggttaacatggaaag

SEQ ID NO: 3099476 - DNA, 25 bp, Homo sapien
taggtagtgctaggaaatgtctctg

SEQ ID NO: 3099477 - DNA, 25 bp, Homo sapien
tccccaagcacagatctaggtagtg

SEQ ID NO: 3099478 - DNA, 25 bp, Homo sapien
gaacttcagtatgagattttcccca

SEQ ID NO: 3099479 - DNA, 25 bp, Homo sapien
caggacataaatagcccggctgctg

SEQ ID NO: 3099480 - DNA, 25 bp, Homo sapien
gatcctagagctgaggtgtagcctt

SEQ ID NO: 3099481 - DNA, 25 bp, Homo sapien
gttccagtggaactagcaccccaga

SEQ ID NO: 3099482 - DNA, 25 bp, Homo sapien
gctgctgattaacgccacagctggt

SEQ ID NO: 3099483 - DNA, 25 bp, Homo sapien
tggaaagggctcagagaaccaagct

SEQ ID NO: 3099484 - DNA, 25 bp, Homo sapien
aatggaaaataaatcgagggccctg

SEQ ID NO: 3099485 - DNA, 25 bp, Homo sapien
gctgagacggcataaggaagtgatt

SEQ ID NO: 3099486 - DNA, 25 bp, Homo sapien
tcagcatgatactgtaggccgccac

SEQ ID NO: 3099487 - DNA, 25 bp, Homo sapien
catattcttgatgcagaggtggtcc

SEQ ID NO: 3099488 - DNA, 25 bp, Homo sapien
cctgtgctgatgagcctgtaggact

SEQ ID NO: 3099489 - DNA, 25 bp, Homo sapien
tggcagctataagaaggctcccggc

SEQ ID NO: 3099490 - DNA, 25 bp, Homo sapien
catgcctgacagagccaatacttgc

SEQ ID NO: 3099491 - DNA, 25 bp, Homo sapien
attcttcgtcaaaagtccaggcccg

SEQ ID NO: 3099492 - DNA, 25 bp, Homo sapien
gaaatgaccccaaggtgtagggcca

SEQ ID NO: 3099493 - DNA, 25 bp, Homo sapien
tctaggtgcccgctttgtgccaggt

SEQ ID NO: 3099494 - DNA, 25 bp, Homo sapien
ccctggtgctagaagttggtgctcc

SEQ ID NO: 3099495 - DNA, 25 bp, Homo sapien
gaatggccagcacgacgttctcaga

SEQ ID NO: 3099496 - DNA, 25 bp, Homo sapien
cctgaatgagtttggcgtggccgcc

SEQ ID NO: 3099497 - DNA, 25 bp, Homo sapien
caggaagcatcaccatcggtactgg

SEQ ID NO: 3099498 - DNA, 25 bp, Homo sapien
ctttcgataacagcacagtgcccca

SEQ ID NO: 3099499 - DNA, 25 bp, Homo sapien
tcagatagtccctcgggaggtcaca

SEQ ID NO: 3099500 - DNA, 25 bp, Homo sapien
taaacatctgttgagcgagtgagca

SEQ ID NO: 3099501 - DNA, 25 bp, Homo sapien
ggctcagacagtgcatgccacaggg

SEQ ID NO: 3099502 - DNA, 25 bp, Homo sapien
catagttgactggaaagcataggcc

SEQ ID NO: 3099503 - DNA, 25 bp, Homo sapien
gatatgggtccttctcggaagcccg

SEQ ID NO: 3099504 - DNA, 25 bp, Homo sapien
tacccggcctggctcgcattccagg

SEQ ID NO: 3099505 - DNA, 25 bp, Homo sapien
acggccaaaaatcaccctagccctg

SEQ ID NO: 3099506 - DNA, 25 bp, Homo sapien
agcccacggccaaaaatcaccctag

SEQ ID NO: 3099507 - DNA, 25 bp, Homo sapien
tctgcctcagttatttccacaccta

SEQ ID NO: 3099508 - DNA, 25 bp, Homo sapien
tgctccctcagagccagaaggttct

SEQ ID NO: 3099509 - DNA, 25 bp, Homo sapien
aaggttcttggctccaggcttcctg

SEQ ID NO: 3099510 - DNA, 25 bp, Homo sapien
tctgcttccgtctgtctgtgccagc

SEQ ID NO: 3099511 - DNA, 25 bp, Homo sapien
cacagcagccaaactgtcctttctg

SEQ ID NO: 3099512 - DNA, 25 bp, Homo sapien
gccctggtcccagtgaacctggccc

SEQ ID NO: 3099513 - DNA, 25 bp, Homo sapien
cagaccctacaggaaagcccttgca

SEQ ID NO: 3099514 - DNA, 25 bp, Homo sapien
gagtagagatgtcgctgctgagccc

SEQ ID NO: 3099515 - DNA, 25 bp, Homo sapien
tggtagagacattgcagccagggct

SEQ ID NO: 3099516 - DNA, 25 bp, Homo sapien
ctacggtgccggccgcaaggcatgc

SEQ ID NO: 3099517 - DNA, 25 bp, Homo sapien
cggtgccggccgcaaggcatgctgg

SEQ ID NO: 3099518 - DNA, 25 bp, Homo sapien
aggcatgctgggaggcctgcttggc

SEQ ID NO: 3099519 - DNA, 25 bp, Homo sapien
atgctgggaggcctgcttggcccgg

SEQ ID NO: 3099520 - DNA, 25 bp, Homo sapien
cctgggcttctcggtcacccttccg

SEQ ID NO: 3099521 - DNA, 25 bp, Homo sapien
tgggcttctcggtcacccttccggc

SEQ ID NO: 3099522 - DNA, 25 bp, Homo sapien
tctcggtcacccttccggccctcca

SEQ ID NO: 3099523 - DNA, 25 bp, Homo sapien
tcggtcacccttccggccctccagc

SEQ ID NO: 3099524 - DNA, 25 bp, Homo sapien
tcgtcggcccccagcgtgtcgtagt

SEQ ID NO: 3099525 - DNA, 25 bp, Homo sapien
ggcacctcacgcagcggcaggaagg

SEQ ID NO: 3099526 - DNA, 25 bp, Homo sapien
cacggtgagcaggaggcatgcccca

SEQ ID NO: 3099527 - DNA, 25 bp, Homo sapien
cgggtctgaggcacctcaccaggct

SEQ ID NO: 3099528 - DNA, 25 bp, Homo sapien
ggaactcatgcctgggctccaaggt

SEQ ID NO: 3099529 - DNA, 25 bp, Homo sapien
tcatcaaacaatgggtgaaggtcct

SEQ ID NO: 3099530 - DNA, 25 bp, Homo sapien
attcaaaggtctcatcaaacaatgg

SEQ ID NO: 3099531 - DNA, 25 bp, Homo sapien
cgggcggccagctcagggaactcat

SEQ ID NO: 3099532 - DNA, 25 bp, Homo sapien
gcggtaggaggccttgactgtcaca

SEQ ID NO: 3099533 - DNA, 25 bp, Homo sapien
cagaggcgcggtaggaggccttgac

SEQ ID NO: 3099534 - DNA, 25 bp, Homo sapien
ttctgctcagaggcgcggtaggagg

SEQ ID NO: 3099535 - DNA, 25 bp, Homo sapien
taggaggccttgactgtcacagccc

SEQ ID NO: 3099536 - DNA, 25 bp, Homo sapien
atgagttcccggctggaggccgcct

SEQ ID NO: 3099537 - DNA, 25 bp, Homo sapien
tccggatgagttcccggctggaggc

SEQ ID NO: 3099538 - DNA, 25 bp, Homo sapien
tgctggattcggctgcagaagtact

SEQ ID NO: 3099539 - DNA, 25 bp, Homo sapien
tgcagaagtacttccggatgagttc

SEQ ID NO: 3099540 - DNA, 25 bp, Homo sapien
ccctcagcgtggaagcagatctcca

SEQ ID NO: 3099541 - DNA, 25 bp, Homo sapien
gccctcagcgtggaagcagatctcc

SEQ ID NO: 3099542 - DNA, 25 bp, Homo sapien
acagccctcagcgtggaagcagatc

SEQ ID NO: 3099543 - DNA, 25 bp, Homo sapien
agccctcagcgtggaagcagatctc

SEQ ID NO: 3099544 - DNA, 25 bp, Homo sapien
agtgtgtgggtccagagcagggtca

SEQ ID NO: 3099545 - DNA, 25 bp, Homo sapien
gagtgtgtgggtccagagcagggtc

SEQ ID NO: 3099546 - DNA, 25 bp, Homo sapien
tgagtgtgtgggtccagagcagggt

SEQ ID NO: 3099547 - DNA, 25 bp, Homo sapien
tagaagttctccctgcaccgtgggc

SEQ ID NO: 3099548 - DNA, 25 bp, Homo sapien
catgatttaagacagaaccaggccg

SEQ ID NO: 3099549 - DNA, 25 bp, Homo sapien
tactctcatctgcaccgggaacttg

SEQ ID NO: 3099550 - DNA, 25 bp, Homo sapien
tgcagcgagccttagcagagcctgt

SEQ ID NO: 3099551 - DNA, 25 bp, Homo sapien
gttggtgttcatgtagcaaagctcc

SEQ ID NO: 3099552 - DNA, 25 bp, Homo sapien
tctcctgcaccaagttggtgttcat

SEQ ID NO: 3099553 - DNA, 25 bp, Homo sapien
ttggtgttcatgtagcaaagctcca

SEQ ID NO: 3099554 - DNA, 25 bp, Homo sapien
agttctcctgcaccaagttggtgtt

SEQ ID NO: 3099555 - DNA, 25 bp, Homo sapien
aaacagggctgggaaccgttctgtg

SEQ ID NO: 3099556 - DNA, 25 bp, Homo sapien
gagagcagtttgtagtgtctgtaag

SEQ ID NO: 3099557 - DNA, 25 bp, Homo sapien
tagtgtctgtaagaggccggcctgc

SEQ ID NO: 3099558 - DNA, 25 bp, Homo sapien
ctgggaaccgttctgtgagagcagt

SEQ ID NO: 3099559 - DNA, 25 bp, Homo sapien
ccaggcatggtcctgcctcagggtc

SEQ ID NO: 3099560 - DNA, 25 bp, Homo sapien
ttgcttcccgtaggtcttcgctcag

SEQ ID NO: 3099561 - DNA, 25 bp, Homo sapien
tcctcccctagaacttctcatgcct

SEQ ID NO: 3099562 - DNA, 25 bp, Homo sapien
tcttcgctcagttgtcacggccttc

SEQ ID NO: 3099563 - DNA, 25 bp, Homo sapien
cagtttctggatgtgcttggcgatg

SEQ ID NO: 3099564 - DNA, 25 bp, Homo sapien
aggcaggacagactccctgacgccc

SEQ ID NO: 3099565 - DNA, 25 bp, Homo sapien
tctggatgtgcttggcgatgcccac

SEQ ID NO: 3099566 - DNA, 25 bp, Homo sapien
tgtgcttggcgatgcccacctccaa

SEQ ID NO: 3099567 - DNA, 25 bp, Homo sapien
tcccatgccagctgggcgggcaact

SEQ ID NO: 3099568 - DNA, 25 bp, Homo sapien
gggtgcggacgccagtgcggatctc

SEQ ID NO: 3099569 - DNA, 25 bp, Homo sapien
tgggcatgcagcgtgttctgcagct

SEQ ID NO: 3099570 - DNA, 25 bp, Homo sapien
ggcgggcaacttgccgatcaccagc

SEQ ID NO: 3099571 - DNA, 25 bp, Homo sapien
cttctggcctgaagagagctcgcgg

SEQ ID NO: 3099572 - DNA, 25 bp, Homo sapien
tggcctgaagagagctcgcgggccc

SEQ ID NO: 3099573 - DNA, 25 bp, Homo sapien
cctgaagagagctcgcgggcccggg

SEQ ID NO: 3099574 - DNA, 25 bp, Homo sapien
ccttctggcctgaagagagctcgcg

SEQ ID NO: 3099575 - DNA, 25 bp, Homo sapien
ctttataaggctgcagtacaccagg

SEQ ID NO: 3099576 - DNA, 25 bp, Homo sapien
tttataaggctgcagtacaccaggg

SEQ ID NO: 3099577 - DNA, 25 bp, Homo sapien
gagggggaaggacacgtggaagatg

SEQ ID NO: 3099578 - DNA, 25 bp, Homo sapien
tggtagtgtggctgttctagaaaga

SEQ ID NO: 3099579 - DNA, 25 bp, Homo sapien
gagagcacgggagaaacggtgggtg

SEQ ID NO: 3099580 - DNA, 25 bp, Homo sapien
ggatttagaatacaggccttgggag

SEQ ID NO: 3099581 - DNA, 25 bp, Homo sapien
gtggatagatccaccgctgatgtgc

SEQ ID NO: 3099582 - DNA, 25 bp, Homo sapien
acaaacttgacggtaatcatgaagg

SEQ ID NO: 3099583 - DNA, 25 bp, Homo sapien
gccagtccagctgccgggcagtgtg

SEQ ID NO: 3099584 - DNA, 25 bp, Homo sapien
ggcaaagcaggtggatagatccacc

SEQ ID NO: 3099585 - DNA, 25 bp, Homo sapien
tgggcagggagcttcacaagagaca

SEQ ID NO: 3099586 - DNA, 25 bp, Homo sapien
tccagaggcagcgttttgcacaaaa

SEQ ID NO: 3099587 - DNA, 25 bp, Homo sapien
ccaaaagggatgttcagagcgggtt

SEQ ID NO: 3099588 - DNA, 25 bp, Homo sapien
gaaaggaggactcaggatactgcca

SEQ ID NO: 3099589 - DNA, 25 bp, Homo sapien
gccagggcctcgttgtacgtcttct

SEQ ID NO: 3099590 - DNA, 25 bp, Homo sapien
ccggctggaaccagcggtggaaatt

SEQ ID NO: 3099591 - DNA, 25 bp, Homo sapien
cagcggtggaaattatccagggcca

SEQ ID NO: 3099592 - DNA, 25 bp, Homo sapien
atccatctgcacagcgcgctgcacc

SEQ ID NO: 3099593 - DNA, 25 bp, Homo sapien
agagctggaacagactctcgcccat

SEQ ID NO: 3099594 - DNA, 25 bp, Homo sapien
cacaaccgtcgtgtggtcctgcacc

SEQ ID NO: 3099595 - DNA, 25 bp, Homo sapien
ccttgaggctgatgtagagctggaa

SEQ ID NO: 3099596 - DNA, 25 bp, Homo sapien
gagctcatgcgcagctggcagagct

SEQ ID NO: 3099597 - DNA, 25 bp, Homo sapien
ggagaagaggtggatcttgagggta

SEQ ID NO: 3099598 - DNA, 25 bp, Homo sapien
cccatgtgcgctggcactggtgcag

SEQ ID NO: 3099599 - DNA, 25 bp, Homo sapien
gcactggtgcaggtcgccaatgaca

SEQ ID NO: 3099600 - DNA, 25 bp, Homo sapien
agatcttgtcccatgtgcgctggca

SEQ ID NO: 3099601 - DNA, 25 bp, Homo sapien
caggtcgccaatgacatcctgtacc

SEQ ID NO: 3099602 - DNA, 25 bp, Homo sapien
ggtggaaccattcagtggtgccagt

SEQ ID NO: 3099603 - DNA, 25 bp, Homo sapien
gttctccaaaggccttcatcttgca

SEQ ID NO: 3099604 - DNA, 25 bp, Homo sapien
ggcaatggggcggtgttggggcaca

SEQ ID NO: 3099605 - DNA, 25 bp, Homo sapien
catcttgcacatctgtaccaggacc

SEQ ID NO: 3099606 - DNA, 25 bp, Homo sapien
gcggtgttggggcacagttctccaa

SEQ ID NO: 3099607 - DNA, 25 bp, Homo sapien
aacctccggatgagggagaggccgt

SEQ ID NO: 3099608 - DNA, 25 bp, Homo sapien
ggagaggccgtaggtcagcagggag

SEQ ID NO: 3099609 - DNA, 25 bp, Homo sapien
agggagctgaatgaggcggccagct

SEQ ID NO: 3099610 - DNA, 25 bp, Homo sapien
gacagagcggaacctccggatgagg

SEQ ID NO: 3099611 - DNA, 25 bp, Homo sapien
ttgagccgaccctggatccactggt

SEQ ID NO: 3099612 - DNA, 25 bp, Homo sapien
cactggtactcgatgctggtgatgg

SEQ ID NO: 3099613 - DNA, 25 bp, Homo sapien
gaccctggatccactggtactcgat

SEQ ID NO: 3099614 - DNA, 25 bp, Homo sapien
gttctgccttgagccgaccctggat

SEQ ID NO: 3099615 - DNA, 25 bp, Homo sapien
agcgacccgtcccaggaggtgcttc

SEQ ID NO: 3099616 - DNA, 25 bp, Homo sapien
taggtccttctgtgtggcgtgcaga

SEQ ID NO: 3099617 - DNA, 25 bp, Homo sapien
ggcgtgcagaaagaggacggtggca

SEQ ID NO: 3099618 - DNA, 25 bp, Homo sapien
actggtggaagtcggataggtcctt

SEQ ID NO: 3099619 - DNA, 25 bp, Homo sapien
gcaggtggaggagtgtcaggacctg

SEQ ID NO: 3099620 - DNA, 25 bp, Homo sapien
tgtcaggacctgaagggcagccccg

SEQ ID NO: 3099621 - DNA, 25 bp, Homo sapien
ggtggaggagtgtcaggacctgaag

SEQ ID NO: 3099622 - DNA, 25 bp, Homo sapien
ggaggagtgtcaggacctgaagggc

SEQ ID NO: 3099623 - DNA, 25 bp, Homo sapien
ctgcgagcggctggccgaagtggct

SEQ ID NO: 3099624 - DNA, 25 bp, Homo sapien
ctcgtgctgggtgacctcgtgggac

SEQ ID NO: 3099625 - DNA, 25 bp, Homo sapien
tggaggtgcacggtgtagctcggct

SEQ ID NO: 3099626 - DNA, 25 bp, Homo sapien
cctcgtgggacacaagctgctgcag

SEQ ID NO: 3099627 - DNA, 25 bp, Homo sapien
gcagaccgccgcaagagctgggcat

SEQ ID NO: 3099628 - DNA, 25 bp, Homo sapien
gcaacccagcagaccgccgcaagag

SEQ ID NO: 3099629 - DNA, 25 bp, Homo sapien
agccccgcaacccagcagaccgccg

SEQ ID NO: 3099630 - DNA, 25 bp, Homo sapien
tggccactggcccagtacccgacct

SEQ ID NO: 3099631 - DNA, 25 bp, Homo sapien
ggtaccactggtcctctcggcagcg

SEQ ID NO: 3099632 - DNA, 25 bp, Homo sapien
cactggcctcggtctgggtaggtct

SEQ ID NO: 3099633 - DNA, 25 bp, Homo sapien
ccagggggtaccactggtcctctcg

SEQ ID NO: 3099634 - DNA, 25 bp, Homo sapien
cctcggtctgggtaggtctcagtgc

SEQ ID NO: 3099635 - DNA, 25 bp, Homo sapien
gggatgcccagcccgtgagcgtcag

SEQ ID NO: 3099636 - DNA, 25 bp, Homo sapien
aggcggggatgcccagcccgtgagc

SEQ ID NO: 3099637 - DNA, 25 bp, Homo sapien
atgcccagcccgtgagcgtcagaac

SEQ ID NO: 3099638 - DNA, 25 bp, Homo sapien
gacaggcggggatgcccagcccgtg

SEQ ID NO: 3099639 - DNA, 25 bp, Homo sapien
gcctcagaaccacgttccccagaaa

SEQ ID NO: 3099640 - DNA, 25 bp, Homo sapien
ccacgttccccagaaagtcgtcctg

SEQ ID NO: 3099641 - DNA, 25 bp, Homo sapien
ctggcctttgtccttccgggcctct

SEQ ID NO: 3099642 - DNA, 25 bp, Homo sapien
ccccagaaagtcgtcctggcctttg

SEQ ID NO: 3099643 - DNA, 25 bp, Homo sapien
gcagatccgtgagctccccaagctt

SEQ ID NO: 3099644 - DNA, 25 bp, Homo sapien
gctccccaagcttctgtcggacaga

SEQ ID NO: 3099645 - DNA, 25 bp, Homo sapien
agcccatgcagatccgtgagctccc

SEQ ID NO: 3099646 - DNA, 25 bp, Homo sapien
agcttctgtcggacagactccacag

SEQ ID NO: 3099647 - DNA, 25 bp, Homo sapien
aagctcgcattggtgatgtcctcaa

SEQ ID NO: 3099648 - DNA, 25 bp, Homo sapien
cacatgtccagatgaaagctcgcat

SEQ ID NO: 3099649 - DNA, 25 bp, Homo sapien
gatgaaagctcgcattggtgatgtc

SEQ ID NO: 3099650 - DNA, 25 bp, Homo sapien
tccagatgaaagctcgcattggtga

SEQ ID NO: 3099651 - DNA, 25 bp, Homo sapien
tggagaaaagggcgtggttgagggc

SEQ ID NO: 3099652 - DNA, 25 bp, Homo sapien
gtatggagaaaagggcgtggttgag

SEQ ID NO: 3099653 - DNA, 25 bp, Homo sapien
tatggagaaaagggcgtggttgagg

SEQ ID NO: 3099654 - DNA, 25 bp, Homo sapien
tgtatggagaaaagggcgtggttga

SEQ ID NO: 3099655 - DNA, 25 bp, Homo sapien
ggagttgtagcctatccctgccaaa

SEQ ID NO: 3099656 - DNA, 25 bp, Homo sapien
gtggatgcccccagacgaagcagta

SEQ ID NO: 3099657 - DNA, 25 bp, Homo sapien
ccccagacgaagcagtaagtgacca

SEQ ID NO: 3099658 - DNA, 25 bp, Homo sapien
cagagccatggagttgtagcctatc

SEQ ID NO: 3099659 - DNA, 25 bp, Homo sapien
tttcactgtgttggccacactggtc

SEQ ID NO: 3099660 - DNA, 25 bp, Homo sapien
tgcagtggcaggatctaactcactg

SEQ ID NO: 3099661 - DNA, 25 bp, Homo sapien
aattttcctgcctcagccttccaag

SEQ ID NO: 3099662 - DNA, 25 bp, Homo sapien
tctgcctcctgggttcaagcaattt

SEQ ID NO: 3099663 - DNA, 25 bp, Homo sapien
gtgggggctggagcacggccacgta

SEQ ID NO: 3099664 - DNA, 25 bp, Homo sapien
agacctggatagagtgggggctgga

SEQ ID NO: 3099665 - DNA, 25 bp, Homo sapien
tgggggctggagcacggccacgtac

SEQ ID NO: 3099666 - DNA, 25 bp, Homo sapien
aagacctggatagagtgggggctgg

SEQ ID NO: 3099667 - DNA, 25 bp, Homo sapien
ttgagtgtctgggtgatgacctgcg

SEQ ID NO: 3099668 - DNA, 25 bp, Homo sapien
acctgcgtgcggtgggtctcctcct

SEQ ID NO: 3099669 - DNA, 25 bp, Homo sapien
aggatgaaggtctcgtcccagacgg

SEQ ID NO: 3099670 - DNA, 25 bp, Homo sapien
tcctcggggatggtgtgcctcacca

SEQ ID NO: 3099671 - DNA, 25 bp, Homo sapien
cagaatgcccttggcctgtttcact

SEQ ID NO: 3099672 - DNA, 25 bp, Homo sapien
tgttgccttcagacaaaatattggc

SEQ ID NO: 3099673 - DNA, 25 bp, Homo sapien
ccagaatgcccttggcctgtttcac

SEQ ID NO: 3099674 - DNA, 25 bp, Homo sapien
tttcactgttgccttcagacaaaat

SEQ ID NO: 3099675 - DNA, 25 bp, Homo sapien
gtgctcctcgggctccacgtggaag

SEQ ID NO: 3099676 - DNA, 25 bp, Homo sapien
caagctccctgacccgctgcagtgt

SEQ ID NO: 3099677 - DNA, 25 bp, Homo sapien
ctgacccgctgcagtgtctgctggt

SEQ ID NO: 3099678 - DNA, 25 bp, Homo sapien
gctcctcgggctccacgtggaaggc

SEQ ID NO: 3099679 - DNA, 25 bp, Homo sapien
ctcaggatgacccaggcggtgcaag

SEQ ID NO: 3099680 - DNA, 25 bp, Homo sapien
agtgcgtcctcgtagagcagggccc

SEQ ID NO: 3099681 - DNA, 25 bp, Homo sapien
tcagaggcctccgtcacatggttgg

SEQ ID NO: 3099682 - DNA, 25 bp, Homo sapien
tgcaagacagtgtagagtgcgtcct

SEQ ID NO: 3099683 - DNA, 25 bp, Homo sapien
ctgctcgggggagaagtggtgggat

SEQ ID NO: 3099684 - DNA, 25 bp, Homo sapien
ctcgggggagaagtggtgggatgga

SEQ ID NO: 3099685 - DNA, 25 bp, Homo sapien
tgctcgggggagaagtggtgggatg

SEQ ID NO: 3099686 - DNA, 25 bp, Homo sapien
gctcgggggagaagtggtgggatgg

SEQ ID NO: 3099687 - DNA, 25 bp, Homo sapien
caggctcagatggacaggaatggct

SEQ ID NO: 3099688 - DNA, 25 bp, Homo sapien
cccagagcaggctcagatggacagg

SEQ ID NO: 3099689 - DNA, 25 bp, Homo sapien
gagcaaggtggaaaggcagtgtccc

SEQ ID NO: 3099690 - DNA, 25 bp, Homo sapien
tctgaggcctgatccaggccaaggg

SEQ ID NO: 3099691 - DNA, 25 bp, Homo sapien
tcctcacccagcagcggaagtgagg

SEQ ID NO: 3099692 - DNA, 25 bp, Homo sapien
cacctaatggagtcggctcttctga

SEQ ID NO: 3099693 - DNA, 25 bp, Homo sapien
ccagtcccagccttcgagaggtggg

SEQ ID NO: 3099694 - DNA, 25 bp, Homo sapien
tctgcttatcagtggcggctgctcc

SEQ ID NO: 3099695 - DNA, 25 bp, Homo sapien
cctggcgcaagaagggagggcgctg

SEQ ID NO: 3099696 - DNA, 25 bp, Homo sapien
actctgcggcgccttatcttgatgg

SEQ ID NO: 3099697 - DNA, 25 bp, Homo sapien
gatctctgactctgcggcgccttat

SEQ ID NO: 3099698 - DNA, 25 bp, Homo sapien
gatcctgtagatctctgactctgcg

SEQ ID NO: 3099699 - DNA, 25 bp, Homo sapien
tgcggatgggagaggagtgtcgcca

SEQ ID NO: 3099700 - DNA, 25 bp, Homo sapien
gcggatgggagaggagtgtcgccat

SEQ ID NO: 3099701 - DNA, 25 bp, Homo sapien
ctgcggatgggagaggagtgtcgcc

SEQ ID NO: 3099702 - DNA, 25 bp, Homo sapien
ctctgcccttccctgtccgctggtg

SEQ ID NO: 3099703 - DNA, 25 bp, Homo sapien
gccttctctgcccttccctgtccgc

SEQ ID NO: 3099704 - DNA, 25 bp, Homo sapien
ggtggccttctctgcccttccctgt

SEQ ID NO: 3099705 - DNA, 25 bp, Homo sapien
ttctctgcccttccctgtccgctgg

SEQ ID NO: 3099706 - DNA, 25 bp, Homo sapien
agacagcgaagccacaggattatgc

SEQ ID NO: 3099707 - DNA, 25 bp, Homo sapien
agggtttcaccgcttcggagaggca

SEQ ID NO: 3099708 - DNA, 25 bp, Homo sapien
tgggaaggggacaacgctctcagca

SEQ ID NO: 3099709 - DNA, 25 bp, Homo sapien
ccaccctcctacagaggccctggga

SEQ ID NO: 3099710 - DNA, 25 bp, Homo sapien
tgggatccctacaggaccctcctct

SEQ ID NO: 3099711 - DNA, 25 bp, Homo sapien
aggacttaggccagggctgccattc

SEQ ID NO: 3099712 - DNA, 25 bp, Homo sapien
tgtcacaggtcctgacgtgctccag

SEQ ID NO: 3099713 - DNA, 25 bp, Homo sapien
cagcaaccaggacttaggccagggc

SEQ ID NO: 3099714 - DNA, 25 bp, Homo sapien
gtccctgtcacaggtcctgacgtgc

SEQ ID NO: 3099715 - DNA, 25 bp, Homo sapien
atttttactatttcacattttcagc

SEQ ID NO: 3099716 - DNA, 25 bp, Homo sapien
cagttatttcatttttactatttca

SEQ ID NO: 3099717 - DNA, 25 bp, Homo sapien
tcatttttactatttcacattttca

SEQ ID NO: 3099718 - DNA, 25 bp, Homo sapien
ttactatttcacattttcagcaaac

SEQ ID NO: 3099719 - DNA, 25 bp, Homo sapien
tgtcaaataaatagggaattctctt

SEQ ID NO: 3099720 - DNA, 25 bp, Homo sapien
agagtgaatgttagcgcatccaggg

SEQ ID NO: 3099721 - DNA, 25 bp, Homo sapien
tatttcacattaatatattaactgg

SEQ ID NO: 3099722 - DNA, 25 bp, Homo sapien
tcctcacttcatggccagtccaggg

SEQ ID NO: 3099723 - DNA, 25 bp, Homo sapien
ggacagacatgcattctctggttcc

SEQ ID NO: 3099724 - DNA, 25 bp, Homo sapien
tggacagacatgcattctctggttc

SEQ ID NO: 3099725 - DNA, 25 bp, Homo sapien
ccttctgagaccagcacagaccagc

SEQ ID NO: 3099726 - DNA, 25 bp, Homo sapien
cacacagggtggcaacaacatgacc

SEQ ID NO: 3099727 - DNA, 25 bp, Homo sapien
cattttacagcttcaaaagtcacac

SEQ ID NO: 3099728 - DNA, 25 bp, Homo sapien
ccctggctgagtggaatgcgggcgc

SEQ ID NO: 3099729 - DNA, 25 bp, Homo sapien
gggccctaatgtcccacaatgctag

SEQ ID NO: 3099730 - DNA, 25 bp, Homo sapien
ctggtctgaagtggctcatgaggct

SEQ ID NO: 3099731 - DNA, 25 bp, Homo sapien
cctggtaattgtttatgatcagacc

SEQ ID NO: 3099732 - DNA, 25 bp, Homo sapien
ccccagacggtgagggaggtacgct

SEQ ID NO: 3099733 - DNA, 25 bp, Homo sapien
tcttcttatcttccggtgggtagta

SEQ ID NO: 3099734 - DNA, 25 bp, Homo sapien
cttcttatcttccggtgggtagtag

SEQ ID NO: 3099735 - DNA, 25 bp, Homo sapien
cgtgggcatgtagacgttgtgagga

SEQ ID NO: 3099736 - DNA, 25 bp, Homo sapien
catgtagacgttgtgaggattgcct

SEQ ID NO: 3099737 - DNA, 25 bp, Homo sapien
gattgcctgggttgtaataggcgct

SEQ ID NO: 3099738 - DNA, 25 bp, Homo sapien
cgctggcggctgcttctgcggcctt

SEQ ID NO: 3099739 - DNA, 25 bp, Homo sapien
cagttccaccaatgagagcagcagg

SEQ ID NO: 3099740 - DNA, 25 bp, Homo sapien
tctaatccttgagccaatgccccag

SEQ ID NO: 3099741 - DNA, 25 bp, Homo sapien
gatcgagaggcacacagggtgacct

SEQ ID NO: 3099742 - DNA, 25 bp, Homo sapien
cagggcacatggatagctaagggat

SEQ ID NO: 3099743 - DNA, 25 bp, Homo sapien
gctgaccggaggttccatgggccca

SEQ ID NO: 3099744 - DNA, 25 bp, Homo sapien
acatggtgagcacccggctgcggcc

SEQ ID NO: 3099745 - DNA, 25 bp, Homo sapien
tgctcggtgagagagtaacaaggac

SEQ ID NO: 3099746 - DNA, 25 bp, Homo sapien
gctccttcgttggtcctgaagcagc

SEQ ID NO: 3099747 - DNA, 25 bp, Homo sapien
gagcctgggtaggtgggctcatgag

SEQ ID NO: 3099748 - DNA, 25 bp, Homo sapien
ggcaggggtacattccattggcgac

SEQ ID NO: 3099749 - DNA, 25 bp, Homo sapien
aagagtagccataggctccactggg

SEQ ID NO: 3099750 - DNA, 25 bp, Homo sapien
gtacattccattggcgactggcggg

SEQ ID NO: 3099751 - DNA, 25 bp, Homo sapien
cgctgggcatgtaagagtagccata

SEQ ID NO: 3099752 - DNA, 25 bp, Homo sapien
gctttgtcaaaacgtcatccacctg

SEQ ID NO: 3099753 - DNA, 25 bp, Homo sapien
attttcaatggctgcggaaccgcag

SEQ ID NO: 3099754 - DNA, 25 bp, Homo sapien
gaaagagaaatgagcgtggcctgcc

SEQ ID NO: 3099755 - DNA, 25 bp, Homo sapien
tagcccctaatcttcggagcctgga

SEQ ID NO: 3099756 - DNA, 25 bp, Homo sapien
ctggagcatccgctgtccgaactca

SEQ ID NO: 3099757 - DNA, 25 bp, Homo sapien
atccgctgtccgaactcaatggcgc

SEQ ID NO: 3099758 - DNA, 25 bp, Homo sapien
gccacctggagcatccgctgtccga

SEQ ID NO: 3099759 - DNA, 25 bp, Homo sapien
gagcatccgctgtccgaactcaatg

SEQ ID NO: 3099760 - DNA, 25 bp, Homo sapien
gtaggaagcagagccttcccagcca

SEQ ID NO: 3099761 - DNA, 25 bp, Homo sapien
taggaagcagagccttcccagccac

SEQ ID NO: 3099762 - DNA, 25 bp, Homo sapien
catgcgtgtccctgagttcccatca

SEQ ID NO: 3099763 - DNA, 25 bp, Homo sapien
tcttgactcagtccgcaggcttctg

SEQ ID NO: 3099764 - DNA, 25 bp, Homo sapien
tatgcgctcgccaagttgcactaag

SEQ ID NO: 3099765 - DNA, 25 bp, Homo sapien
agtgtctcaatagcaagggcgggcc

SEQ ID NO: 3099766 - DNA, 25 bp, Homo sapien
tcccgcttccgccttcactgttccc

SEQ ID NO: 3099767 - DNA, 25 bp, Homo sapien
ctcccgcttccgccttcactgttcc

SEQ ID NO: 3099768 - DNA, 25 bp, Homo sapien
ccgcttccgccttcactgttccctt

SEQ ID NO: 3099769 - DNA, 25 bp, Homo sapien
gcttccgccttcactgttcccttga

SEQ ID NO: 3099770 - DNA, 25 bp, Homo sapien
gtagtttgcaccaaatacgggctgc

SEQ ID NO: 3099771 - DNA, 25 bp, Homo sapien
tcacagtctttcatgagataaaatg

SEQ ID NO: 3099772 - DNA, 25 bp, Homo sapien
ttgcaccaaatacgggctgcttgat

SEQ ID NO: 3099773 - DNA, 25 bp, Homo sapien
gtctttcatgagataaaatggcatc

SEQ ID NO: 3099774 - DNA, 25 bp, Homo sapien
gcagactgctttgtcactgacgtgg

SEQ ID NO: 3099775 - DNA, 25 bp, Homo sapien
cctacgaagctagggaaggacaggc

SEQ ID NO: 3099776 - DNA, 25 bp, Homo sapien
cacgggagaaaaacgtgctggtcac

SEQ ID NO: 3099777 - DNA, 25 bp, Homo sapien
agtaggtcgctagctcccattgagg

SEQ ID NO: 3099778 - DNA, 25 bp, Homo sapien
gtcacctccaacagcaacaagcctc

SEQ ID NO: 3099779 - DNA, 25 bp, Homo sapien
cacctccaacagcaacaagcctctc

SEQ ID NO: 3099780 - DNA, 25 bp, Homo sapien
tcacctccaacagcaacaagcctct

SEQ ID NO: 3099781 - DNA, 25 bp, Homo sapien
cattgaatgtgagttccacgtgatc

SEQ ID NO: 3099782 - DNA, 25 bp, Homo sapien
tgaatgtgagttccacgtgatcata

SEQ ID NO: 3099783 - DNA, 25 bp, Homo sapien
atgtgagttccacgtgatcatagga

SEQ ID NO: 3099784 - DNA, 25 bp, Homo sapien
tcattgaatgtgagttccacgtgat

SEQ ID NO: 3099785 - DNA, 25 bp, Homo sapien
agacgcgacgtcacccagacactgg

SEQ ID NO: 3099786 - DNA, 25 bp, Homo sapien
tctcataacctctcaatagtgcggc

SEQ ID NO: 3099787 - DNA, 25 bp, Homo sapien
aggcgagcggatgacccctggtcag

SEQ ID NO: 3099788 - DNA, 25 bp, Homo sapien
caatgagacagtatggagacgcgac

SEQ ID NO: 3099789 - DNA, 25 bp, Homo sapien
aagtccttgtgatagatgttctgtt

SEQ ID NO: 3099790 - DNA, 25 bp, Homo sapien
tcttttaagtccttgtgatagatgt

SEQ ID NO: 3099791 - DNA, 25 bp, Homo sapien
ttttaagtccttgtgatagatgttc

SEQ ID NO: 3099792 - DNA, 25 bp, Homo sapien
ttaagtccttgtgatagatgttctg

SEQ ID NO: 3099793 - DNA, 25 bp, Homo sapien
tcactccatcagtgctccctcttca

SEQ ID NO: 3099794 - DNA, 25 bp, Homo sapien
actccatcagtgctccctcttcagg

SEQ ID NO: 3099795 - DNA, 25 bp, Homo sapien
tcaggggcttattccccaccaccca

SEQ ID NO: 3099796 - DNA, 25 bp, Homo sapien
ctcttcaggggcttattccccacca

SEQ ID NO: 3099797 - DNA, 25 bp, Homo sapien
cgcccacttcctcgacacccgaact

SEQ ID NO: 3099798 - DNA, 25 bp, Homo sapien
cacttcctcgacacccgaactttgg

SEQ ID NO: 3099799 - DNA, 25 bp, Homo sapien
tcgacacccgaactttggtcctcca

SEQ ID NO: 3099800 - DNA, 25 bp, Homo sapien
cacccgaactttggtcctccaggat

SEQ ID NO: 3099801 - DNA, 25 bp, Homo sapien
cgccgccctccgagtgattcttgtt

SEQ ID NO: 3099802 - DNA, 25 bp, Homo sapien
gtgttattgacgatcactccgccgc

SEQ ID NO: 3099803 - DNA, 25 bp, Homo sapien
ctctcggtgttattgacgatcactc

SEQ ID NO: 3099804 - DNA, 25 bp, Homo sapien
ctccgagtgattcttgttgagcgcc

SEQ ID NO: 3099805 - DNA, 25 bp, Homo sapien
caggggtcccgagactcaaaacgca

SEQ ID NO: 3099806 - DNA, 25 bp, Homo sapien
tctccaacaggggtcccgagactca

SEQ ID NO: 3099807 - DNA, 25 bp, Homo sapien
aacgcaatgagcttgcgcccctctt

SEQ ID NO: 3099808 - DNA, 25 bp, Homo sapien
actcaaaacgcaatgagcttgcgcc

SEQ ID NO: 3099809 - DNA, 25 bp, Homo sapien
agatgtccgcatcccagtactgagg

SEQ ID NO: 3099810 - DNA, 25 bp, Homo sapien
gagtgtttatacacacctcgagtgc

SEQ ID NO: 3099811 - DNA, 25 bp, Homo sapien
tcgagtgcatttccgcttctgagcc

SEQ ID NO: 3099812 - DNA, 25 bp, Homo sapien
ttggccgtgggtatttcaagaacac

SEQ ID NO: 3099813 - DNA, 25 bp, Homo sapien
ttccaggacatgccaacacttcctg

SEQ ID NO: 3099814 - DNA, 25 bp, Homo sapien
attccaggacatgccaacacttcct

SEQ ID NO: 3099815 - DNA, 25 bp, Homo sapien
ccagaaggttccctggcgaggggcg

SEQ ID NO: 3099816 - DNA, 25 bp, Homo sapien
cagaaggttccctggcgaggggcgc

SEQ ID NO: 3099817 - DNA, 25 bp, Homo sapien
aaggctgagtgtataaaaaggtgga

SEQ ID NO: 3099818 - DNA, 25 bp, Homo sapien
aaaaaggtggaagcctctagaaatg

SEQ ID NO: 3099819 - DNA, 25 bp, Homo sapien
ctgtctcccagaagtgaggtctgca

SEQ ID NO: 3099820 - DNA, 25 bp, Homo sapien
tgtgtgggactcatgctggtgcctt

SEQ ID NO: 3099821 - DNA, 25 bp, Homo sapien
ttcagcacggatatgcaggacttct

SEQ ID NO: 3099822 - DNA, 25 bp, Homo sapien
caggacttcttgaggggcccgatct

SEQ ID NO: 3099823 - DNA, 25 bp, Homo sapien
ggcccgatctgcaagtgggcgtcca

SEQ ID NO: 3099824 - DNA, 25 bp, Homo sapien
gcaagtgggcgtccacactctccag

SEQ ID NO: 3099825 - DNA, 25 bp, Homo sapien
gccgggaggccttcagcctccgcag

SEQ ID NO: 3099826 - DNA, 25 bp, Homo sapien
aagagccccgcaaagtgactgtcca

SEQ ID NO: 3099827 - DNA, 25 bp, Homo sapien
aggaggctcatcttgccgtcccgta

SEQ ID NO: 3099828 - DNA, 25 bp, Homo sapien
tgggtgaagagccccgcaaagtgac

SEQ ID NO: 3099829 - DNA, 25 bp, Homo sapien
caaggcacggtcagcgtattccagg

SEQ ID NO: 3099830 - DNA, 25 bp, Homo sapien
tcccagtagtaggtgcctcggtcca

SEQ ID NO: 3099831 - DNA, 25 bp, Homo sapien
gagaagctgcgtccattccactgca

SEQ ID NO: 3099832 - DNA, 25 bp, Homo sapien
cagcccatgaaaccagacggagaag

SEQ ID NO: 3099833 - DNA, 25 bp, Homo sapien
gaggttcgtactctcgaggtcttgg

SEQ ID NO: 3099834 - DNA, 25 bp, Homo sapien
tagtccctgggagcttcactctcca

SEQ ID NO: 3099835 - DNA, 25 bp, Homo sapien
actctccaagaggttcgtactctcg

SEQ ID NO: 3099836 - DNA, 25 bp, Homo sapien
gagcttcactctccaagaggttcgt

SEQ ID NO: 3099837 - DNA, 25 bp, Homo sapien
agacagtggtgagaacgcccccaga

SEQ ID NO: 3099838 - DNA, 25 bp, Homo sapien
cctgtgactacaatccctaccccct

SEQ ID NO: 3099839 - DNA, 25 bp, Homo sapien
tgtgactacaatccctacccccttc

SEQ ID NO: 3099840 - DNA, 25 bp, Homo sapien
aggagacagtggtgagaacgccccc

SEQ ID NO: 3099841 - DNA, 25 bp, Homo sapien
agggtgagtcatcgggggggcgtgg

SEQ ID NO: 3099842 - DNA, 25 bp, Homo sapien
agggccagccttagtgccagcagct

SEQ ID NO: 3099843 - DNA, 25 bp, Homo sapien
agcttctgtggcccatcctcgttgc

SEQ ID NO: 3099844 - DNA, 25 bp, Homo sapien
gccagcatgtctctcactgcacgga

SEQ ID NO: 3099845 - DNA, 25 bp, Homo sapien
cactggttgacgcaggccacggcca

SEQ ID NO: 3099846 - DNA, 25 bp, Homo sapien
cagacaaatgcccattaaagtgctg

SEQ ID NO: 3099847 - DNA, 25 bp, Homo sapien
tgttcctcctgtcgccgcaggtcac

SEQ ID NO: 3099848 - DNA, 25 bp, Homo sapien
agcatctgcaaacagccggctcacc

SEQ ID NO: 3099849 - DNA, 25 bp, Homo sapien
acctggctgagattctggcgggctc

SEQ ID NO: 3099850 - DNA, 25 bp, Homo sapien
tgggagcggcctagcatggcagctt

SEQ ID NO: 3099851 - DNA, 25 bp, Homo sapien
tgcacaggacgacagtagagggggc

SEQ ID NO: 3099852 - DNA, 25 bp, Homo sapien
ccaggtcaggggacacttgtgctca

SEQ ID NO: 3099853 - DNA, 25 bp, Homo sapien
gggacacttgtgctcagtaggtatg

SEQ ID NO: 3099854 - DNA, 25 bp, Homo sapien
ctcagtaggtatgggcatggtttgt

SEQ ID NO: 3099855 - DNA, 25 bp, Homo sapien
gccactgtgcgcctggactgtgcaa

SEQ ID NO: 3099856 - DNA, 25 bp, Homo sapien
gcgcctggactgtgcaatgccagca

SEQ ID NO: 3099857 - DNA, 25 bp, Homo sapien
tgtgcgcctggactgtgcaatgcca

SEQ ID NO: 3099858 - DNA, 25 bp, Homo sapien
ctggactgtgcaatgccagcaccca

SEQ ID NO: 3099859 - DNA, 25 bp, Homo sapien
ggcgctcaggactttggactgctca

SEQ ID NO: 3099860 - DNA, 25 bp, Homo sapien
cgctcaggactttggactgctcagc

SEQ ID NO: 3099861 - DNA, 25 bp, Homo sapien
tcctccacggcgctcaggactttgg

SEQ ID NO: 3099862 - DNA, 25 bp, Homo sapien
cacggcgctcaggactttggactgc

SEQ ID NO: 3099863 - DNA, 25 bp, Homo sapien
gacaacaccctccatgagtgtgagg

SEQ ID NO: 3099864 - DNA, 25 bp, Homo sapien
tgcacaaggaggcattaagctgtcc

SEQ ID NO: 3099865 - DNA, 25 bp, Homo sapien
gggcaaatcccctaggtcttatgag

SEQ ID NO: 3099866 - DNA, 25 bp, Homo sapien
tgaatttgagaacttcctccggcgg

SEQ ID NO: 3099867 - DNA, 25 bp, Homo sapien
accaggcggtgtccgcggagggcgg

SEQ ID NO: 3099868 - DNA, 25 bp, Homo sapien
gccgcggtgctcctgtgcggcgcag

SEQ ID NO: 3099869 - DNA, 25 bp, Homo sapien
cggcagtagcgctcgagcggccgta

SEQ ID NO: 3099870 - DNA, 25 bp, Homo sapien
acaggctctcctctagccggcgcag

SEQ ID NO: 3099871 - DNA, 25 bp, Homo sapien
gggagcgcagggggccgacggctcc

SEQ ID NO: 3099872 - DNA, 25 bp, Homo sapien
ctcgggagcgcagggggccgacggc

SEQ ID NO: 3099873 - DNA, 25 bp, Homo sapien
acggctccgggacactgggcagcgc

SEQ ID NO: 3099874 - DNA, 25 bp, Homo sapien
gcgcagggggccgacggctccggga

SEQ ID NO: 3099875 - DNA, 25 bp, Homo sapien
ccggggcccgagccctggcggagct

SEQ ID NO: 3099876 - DNA, 25 bp, Homo sapien
cggggcccgagccctggcggagctg

SEQ ID NO: 3099877 - DNA, 25 bp, Homo sapien
cccaggcaggcgagacagaagttgt

SEQ ID NO: 3099878 - DNA, 25 bp, Homo sapien
ggttcttgcggagctgaaggccgtc

SEQ ID NO: 3099879 - DNA, 25 bp, Homo sapien
acgatgcggccagagcgcgcccagg

SEQ ID NO: 3099880 - DNA, 25 bp, Homo sapien
gggtccgccggctccactcgcgcca

SEQ ID NO: 3099881 - DNA, 25 bp, Homo sapien
cggctcccggagtggctctaggcag

SEQ ID NO: 3099882 - DNA, 25 bp, Homo sapien
gcagctgaagggtccactgccgtcc

SEQ ID NO: 3099883 - DNA, 25 bp, Homo sapien
agctgaagggtccactgccgtccat

SEQ ID NO: 3099884 - DNA, 25 bp, Homo sapien
ctcccggagtggctctaggcagatg

SEQ ID NO: 3099885 - DNA, 25 bp, Homo sapien
agggcgccgccgattgtgctccggc

SEQ ID NO: 3099886 - DNA, 25 bp, Homo sapien
cagggcgccgccgattgtgctccgg

SEQ ID NO: 3099887 - DNA, 25 bp, Homo sapien
ccagggcgccgccgattgtgctccg

SEQ ID NO: 3099888 - DNA, 25 bp, Homo sapien
cccagggcgccgccgattgtgctcc

SEQ ID NO: 3099889 - DNA, 25 bp, Homo sapien
taccactctggtgtattctctccat

SEQ ID NO: 3099890 - DNA, 25 bp, Homo sapien
tgcaggatctgagggagactctgtc

SEQ ID NO: 3099891 - DNA, 25 bp, Homo sapien
tcagtaaggtgctgcagcgtggctt

SEQ ID NO: 3099892 - DNA, 25 bp, Homo sapien
caaagtcacaggtaactgctcatac

SEQ ID NO: 3099893 - DNA, 25 bp, Homo sapien
ttaggatccgaatacgtctttttca

SEQ ID NO: 3099894 - DNA, 25 bp, Homo sapien
caccagttgttggattagggcacgc

SEQ ID NO: 3099895 - DNA, 25 bp, Homo sapien
tagggcacgctctactccagtatgc

SEQ ID NO: 3099896 - DNA, 25 bp, Homo sapien
gttggattagggcacgctctactcc

SEQ ID NO: 3099897 - DNA, 25 bp, Homo sapien
ccccagctctctaggcttggggggt

SEQ ID NO: 3099898 - DNA, 25 bp, Homo sapien
agttcagagctaaagaggagaaaac

SEQ ID NO: 3099899 - DNA, 25 bp, Homo sapien
ctcccaccgggtctgcattcctgcc

SEQ ID NO: 3099900 - DNA, 25 bp, Homo sapien
aaaagagcacaaatgtgccgggtgt

SEQ ID NO: 3099901 - DNA, 25 bp, Homo sapien
tgagtacatataacatagatgtcca

SEQ ID NO: 3099902 - DNA, 25 bp, Homo sapien
cagtttttcaagttacaaaaagcag

SEQ ID NO: 3099903 - DNA, 25 bp, Homo sapien
acatagatgtccagtttttcaagtt

SEQ ID NO: 3099904 - DNA, 25 bp, Homo sapien
gaaatatttatccatgagtacatat

SEQ ID NO: 3099905 - DNA, 25 bp, Homo sapien
gactcacttgaggtaacagcctaca

SEQ ID NO: 3099906 - DNA, 25 bp, Homo sapien
ttagtcggcttgactcaaggtggcc

SEQ ID NO: 3099907 - DNA, 25 bp, Homo sapien
caaaagcagacacccttggaaccac

SEQ ID NO: 3099908 - DNA, 25 bp, Homo sapien
gaaatattcatcataagccaggcgt

SEQ ID NO: 3099909 - DNA, 25 bp, Homo sapien
ggagaatcccatgagcccatgaccg

SEQ ID NO: 3099910 - DNA, 25 bp, Homo sapien
gactacaagacaggacggacgtctc

SEQ ID NO: 3099911 - DNA, 25 bp, Homo sapien
tcaaaaaggctgcaacagtgaactc

SEQ ID NO: 3099912 - DNA, 25 bp, Homo sapien
tcctgtaagcccagaagtcccctgg

SEQ ID NO: 3099913 - DNA, 25 bp, Homo sapien
agagggaacacagcccctggctgat

SEQ ID NO: 3099914 - DNA, 25 bp, Homo sapien
tcagctgagcacctcttcctggggc

SEQ ID NO: 3099915 - DNA, 25 bp, Homo sapien
ctgagcacctcttcctggggcccca

SEQ ID NO: 3099916 - DNA, 25 bp, Homo sapien
ggaacacagcccctggctgatggca

SEQ ID NO: 3099917 - DNA, 25 bp, Homo sapien
tgtcaccgagtggtctgacgcgcgc

SEQ ID NO: 3099918 - DNA, 25 bp, Homo sapien
agggtccccggccaatgttgtctgt

SEQ ID NO: 3099919 - DNA, 25 bp, Homo sapien
tgggcttccccgttgtgccaggcct

SEQ ID NO: 3099920 - DNA, 25 bp, Homo sapien
gtaggagacgcccagtgtcaccgag

SEQ ID NO: 3099921 - DNA, 25 bp, Homo sapien
ctcccagtagtggtgcccggcctgg

SEQ ID NO: 3099922 - DNA, 25 bp, Homo sapien
cccggcctggaagctctgggcacat

SEQ ID NO: 3099923 - DNA, 25 bp, Homo sapien
tgcccggcctggaagctctgggcac

SEQ ID NO: 3099924 - DNA, 25 bp, Homo sapien
cccagtagtggtgcccggcctggaa

SEQ ID NO: 3099925 - DNA, 25 bp, Homo sapien
cccgggactgacgacagtgcttcac

SEQ ID NO: 3099926 - DNA, 25 bp, Homo sapien
ccccgggactgacgacagtgcttca

SEQ ID NO: 3099927 - DNA, 25 bp, Homo sapien
acagatagaagtgacggttggcgct

SEQ ID NO: 3099928 - DNA, 25 bp, Homo sapien
tggtcctggcgcgacagatagaagt

SEQ ID NO: 3099929 - DNA, 25 bp, Homo sapien
gacggttggcgctgactggatcaaa

SEQ ID NO: 3099930 - DNA, 25 bp, Homo sapien
gactggatcaaaggtcagattgcga

SEQ ID NO: 3099931 - DNA, 25 bp, Homo sapien
ttggggaaaggaggacagcagtggg

SEQ ID NO: 3099932 - DNA, 25 bp, Homo sapien
gttggggaaaggaggacagcagtgg

SEQ ID NO: 3099933 - DNA, 25 bp, Homo sapien
ctgttggggaaaggaggacagcagt

SEQ ID NO: 3099934 - DNA, 25 bp, Homo sapien
tgttggggaaaggaggacagcagtg

SEQ ID NO: 3099935 - DNA, 25 bp, Homo sapien
caggctcagatgtcccggcaggaca

SEQ ID NO: 3099936 - DNA, 25 bp, Homo sapien
cacactggctgcgtctgcttcaggg

SEQ ID NO: 3099937 - DNA, 25 bp, Homo sapien
gactctgtccttcaacgcacactgg

SEQ ID NO: 3099938 - DNA, 25 bp, Homo sapien
gaagaattacgggtctgtgccccag

SEQ ID NO: 3099939 - DNA, 25 bp, Homo sapien
acaaactgtgcttgggaccggtgcc

SEQ ID NO: 3099940 - DNA, 25 bp, Homo sapien
gacaaactgtgcttgggaccggtgc

SEQ ID NO: 3099941 - DNA, 25 bp, Homo sapien
caaactgtgcttgggaccggtgcca

SEQ ID NO: 3099942 - DNA, 25 bp, Homo sapien
aaactgtgcttgggaccggtgccag

SEQ ID NO: 3099943 - DNA, 25 bp, Homo sapien
agggtggctcccctcttccaagagg

SEQ ID NO: 3099944 - DNA, 25 bp, Homo sapien
ggccacacagccggcttagcaactg

SEQ ID NO: 3099945 - DNA, 25 bp, Homo sapien
gggtggctcccctcttccaagagga

SEQ ID NO: 3099946 - DNA, 25 bp, Homo sapien
cacagccggcttagcaactgcttca

SEQ ID NO: 3099947 - DNA, 25 bp, Homo sapien
agaggggtcagtggcccaagaggcc

SEQ ID NO: 3099948 - DNA, 25 bp, Homo sapien
ggctgctgaacttgccggagaccca

SEQ ID NO: 3099949 - DNA, 25 bp, Homo sapien
ctgtcgtgtgctgtatttccagggc

SEQ ID NO: 3099950 - DNA, 25 bp, Homo sapien
tgctcctcgtctcgagcctgtgcca

SEQ ID NO: 3099951 - DNA, 25 bp, Homo sapien
tgtgccagcgcctgcgtcttggcca

SEQ ID NO: 3099952 - DNA, 25 bp, Homo sapien
gctgcctggtgttccagggaccagc

SEQ ID NO: 3099953 - DNA, 25 bp, Homo sapien
accagctggtggccgccccaggatg

SEQ ID NO: 3099954 - DNA, 25 bp, Homo sapien
tgcctggtgttccagggaccagctg

SEQ ID NO: 3099955 - DNA, 25 bp, Homo sapien
ccaggatgcagtgtgaggccatggt

SEQ ID NO: 3099956 - DNA, 25 bp, Homo sapien
gctttgcttgcgcagctctagtagc

SEQ ID NO: 3099957 - DNA, 25 bp, Homo sapien
ttgcttgcgcagctctagtagctgg

SEQ ID NO: 3099958 - DNA, 25 bp, Homo sapien
gcttgcgcagctctagtagctggcc

SEQ ID NO: 3099959 - DNA, 25 bp, Homo sapien
tggctgctttgcttgcgcagctcta

SEQ ID NO: 3099960 - DNA, 25 bp, Homo sapien
tcgcgcttgaggcgctcggcatcca

SEQ ID NO: 3099961 - DNA, 25 bp, Homo sapien
tccagcagcgcccgctcgtggaggc

SEQ ID NO: 3099962 - DNA, 25 bp, Homo sapien
gcagcgcccgctcgtggaggcgaca

SEQ ID NO: 3099963 - DNA, 25 bp, Homo sapien
agcgcccgctcgtggaggcgacact

SEQ ID NO: 3099964 - DNA, 25 bp, Homo sapien
cagcgcgcggcagggtcggggccgg

SEQ ID NO: 3099965 - DNA, 25 bp, Homo sapien
ctccagcggccgcccgtggcggggg

SEQ ID NO: 3099966 - DNA, 25 bp, Homo sapien
ccgtggcgggggcagcgcgcggcag

SEQ ID NO: 3099967 - DNA, 25 bp, Homo sapien
ggccgcccgtggcgggggcagcgcg

SEQ ID NO: 3099968 - DNA, 25 bp, Homo sapien
cctccagcacgccgctgagggccac

SEQ ID NO: 3099969 - DNA, 25 bp, Homo sapien
acctccagcacgccgctgagggcca

SEQ ID NO: 3099970 - DNA, 25 bp, Homo sapien
cacctccagcacgccgctgagggcc

SEQ ID NO: 3099971 - DNA, 25 bp, Homo sapien
tcggggcacgcctttccgcagcggt

SEQ ID NO: 3099972 - DNA, 25 bp, Homo sapien
gcagcggtcccaccagtcccggatg

SEQ ID NO: 3099973 - DNA, 25 bp, Homo sapien
tcactgggtcctggtagagccccag

SEQ ID NO: 3099974 - DNA, 25 bp, Homo sapien
agtcccggatgcaggccccgcagaa

SEQ ID NO: 3099975 - DNA, 25 bp, Homo sapien
gcggcggcgagagccaggcgggccc

SEQ ID NO: 3099976 - DNA, 25 bp, Homo sapien
ggcccggcggcggcgagagccaggc

SEQ ID NO: 3099977 - DNA, 25 bp, Homo sapien
ccggcggcggcgagagccaggcggg

SEQ ID NO: 3099978 - DNA, 25 bp, Homo sapien
gcggcgagagccaggcgggccccgg

SEQ ID NO: 3099979 - DNA, 25 bp, Homo sapien
ctctgaaatgcgcacactctggctc

SEQ ID NO: 3099980 - DNA, 25 bp, Homo sapien
tcaatcccatgctctgaaatgcgca

SEQ ID NO: 3099981 - DNA, 25 bp, Homo sapien
gcctctggagctgtgtctttactct

SEQ ID NO: 3099982 - DNA, 25 bp, Homo sapien
actcttgctgccgatcaatcccatg

SEQ ID NO: 3099983 - DNA, 25 bp, Homo sapien
gggggcggccgcacgaactcaaaca

SEQ ID NO: 3099984 - DNA, 25 bp, Homo sapien
ttagtagatgccataggtgggctca

SEQ ID NO: 3099985 - DNA, 25 bp, Homo sapien
cataggtgggctcatgactgtccct

SEQ ID NO: 3099986 - DNA, 25 bp, Homo sapien
gactgtccctgtaccggtccaggta

SEQ ID NO: 3099987 - DNA, 25 bp, Homo sapien
gtctgctggcctgcgccccctcagg

SEQ ID NO: 3099988 - DNA, 25 bp, Homo sapien
ccaccagggacctgccgcagccttc

SEQ ID NO: 3099989 - DNA, 25 bp, Homo sapien
tgcccaccagggacctgccgcagcc

SEQ ID NO: 3099990 - DNA, 25 bp, Homo sapien
gtggtctgctggcctgcgccccctc

SEQ ID NO: 3099991 - DNA, 25 bp, Homo sapien
tggtgtttcttgtagaaatcaaaag

SEQ ID NO: 3099992 - DNA, 25 bp, Homo sapien
tagaaatcaaaagtgcggaaggtcc

SEQ ID NO: 3099993 - DNA, 25 bp, Homo sapien
tcatcccagcggcactggaagaagg

SEQ ID NO: 3099994 - DNA, 25 bp, Homo sapien
gaagatgtaggtgacggagtcatcc

SEQ ID NO: 3099995 - DNA, 25 bp, Homo sapien
tatgagaagatagagagcgtatgag

SEQ ID NO: 3099996 - DNA, 25 bp, Homo sapien
caacaggtaaccctgagaggcccct

SEQ ID NO: 3099997 - DNA, 25 bp, Homo sapien
caagagagaactgagcaagagtgac

SEQ ID NO: 3099998 - DNA, 25 bp, Homo sapien
ggagtctgctagcaccctatcctgc

SEQ ID NO: 3099999 - DNA, 25 bp, Homo sapien
gcgtcctcagagaagtcaatcggct

SEQ ID NO: 3100000 - DNA, 25 bp, Homo sapien
cctcagagaagtcaatcggctggtc

SEQ ID NO: 3100001 - DNA, 25 bp, Homo sapien
cgtgcgtcctcagagaagtcaatcg

SEQ ID NO: 3100002 - DNA, 25 bp, Homo sapien
ggcgtgcgtcctcagagaagtcaat

SEQ ID NO: 3100003 - DNA, 25 bp, Homo sapien
ggaggtagggacacgtcacctgtcc

SEQ ID NO: 3100004 - DNA, 25 bp, Homo sapien
gcaagacggtggatgccggagcctc

SEQ ID NO: 3100005 - DNA, 25 bp, Homo sapien
gagcaggaaggcaagacggtggatg

SEQ ID NO: 3100006 - DNA, 25 bp, Homo sapien
tagggacacgtcacctgtccttcag

SEQ ID NO: 3100007 - DNA, 25 bp, Homo sapien
ggttaattaccactccagggaggca

SEQ ID NO: 3100008 - DNA, 25 bp, Homo sapien
cagcaggagtgtcccctcagctcca

SEQ ID NO: 3100009 - DNA, 25 bp, Homo sapien
caggagtgtcccctcagctccatgc

SEQ ID NO: 3100010 - DNA, 25 bp, Homo sapien
aggcagcaggagtgtcccctcagct

SEQ ID NO: 3100011 - DNA, 25 bp, Homo sapien
gtgaacgccgggacatgctgcaaat

SEQ ID NO: 3100012 - DNA, 25 bp, Homo sapien
gtccccagttaaccagaaggctcaa

SEQ ID NO: 3100013 - DNA, 25 bp, Homo sapien
tccaggacctcgtcagggagtgtgt

SEQ ID NO: 3100014 - DNA, 25 bp, Homo sapien
aaagctaccaagatggaaggccgcc

SEQ ID NO: 3100015 - DNA, 25 bp, Homo sapien
tccttctcccacgtgactgtcacag

SEQ ID NO: 3100016 - DNA, 25 bp, Homo sapien
acagtccacctcacgctgagtaagg

SEQ ID NO: 3100017 - DNA, 25 bp, Homo sapien
aatgagtttagagacgaagggccca

SEQ ID NO: 3100018 - DNA, 25 bp, Homo sapien
ggcatgtggtgccattatcccagtt

SEQ ID NO: 3100019 - DNA, 25 bp, Homo sapien
cttgagctcaggagaccagcctggg

SEQ ID NO: 3100020 - DNA, 25 bp, Homo sapien
gcttgagctcaggagaccagcctgg

SEQ ID NO: 3100021 - DNA, 25 bp, Homo sapien
gcctgggcaacatggtgaaaccctg

SEQ ID NO: 3100022 - DNA, 25 bp, Homo sapien
tgggcaacatggtgaaaccctgtct

SEQ ID NO: 3100023 - DNA, 25 bp, Homo sapien
gttagcggctgcaattagccatgat

SEQ ID NO: 3100024 - DNA, 25 bp, Homo sapien
tagcggctgcaattagccatgattg

SEQ ID NO: 3100025 - DNA, 25 bp, Homo sapien
gcccaggagttagcggctgcaatta

SEQ ID NO: 3100026 - DNA, 25 bp, Homo sapien
ggagttagcggctgcaattagccat

SEQ ID NO: 3100027 - DNA, 25 bp, Homo sapien
tgggtagtccatgaaactcaggagc

SEQ ID NO: 3100028 - DNA, 25 bp, Homo sapien
actttgtctcctgtagctgtcttca

SEQ ID NO: 3100029 - DNA, 25 bp, Homo sapien
caagtagacacgtggatcccagggc

SEQ ID NO: 3100030 - DNA, 25 bp, Homo sapien
aggtggcaggtgaattcaaggtccc

SEQ ID NO: 3100031 - DNA, 25 bp, Homo sapien
cagtggaggtactcagcatctggct

SEQ ID NO: 3100032 - DNA, 25 bp, Homo sapien
ggaggtactcagcatctggctccag

SEQ ID NO: 3100033 - DNA, 25 bp, Homo sapien
gtggaggtactcagcatctggctcc

SEQ ID NO: 3100034 - DNA, 25 bp, Homo sapien
agtggaggtactcagcatctggctc

SEQ ID NO: 3100035 - DNA, 25 bp, Homo sapien
cagggccctggctcataggaggtga

SEQ ID NO: 3100036 - DNA, 25 bp, Homo sapien
ccctcccttgttaggagccagcgct

SEQ ID NO: 3100037 - DNA, 25 bp, Homo sapien
gccagcgctggagatctccacctgg

SEQ ID NO: 3100038 - DNA, 25 bp, Homo sapien
acggcccagccgaccacggccctgc

SEQ ID NO: 3100039 - DNA, 25 bp, Homo sapien
tcataggtcacctctggcgcttggg

SEQ ID NO: 3100040 - DNA, 25 bp, Homo sapien
ccaagctagtgagtagcaacgtcca

SEQ ID NO: 3100041 - DNA, 25 bp, Homo sapien
tcttctgcctcataggtcacctctg

SEQ ID NO: 3100042 - DNA, 25 bp, Homo sapien
agtagcaacgtccacaaggagccct

SEQ ID NO: 3100043 - DNA, 25 bp, Homo sapien
aaaacgaacatgtgccaaggccggg

SEQ ID NO: 3100044 - DNA, 25 bp, Homo sapien
ggaatgtgctaagacagagcctctt

SEQ ID NO: 3100045 - DNA, 25 bp, Homo sapien
gaaattgtcatggtgtcgtcttcca

SEQ ID NO: 3100046 - DNA, 25 bp, Homo sapien
gaagcagccctgcagagttgcctgt

SEQ ID NO: 3100047 - DNA, 25 bp, Homo sapien
ggttggagtcacctcattgccacag

SEQ ID NO: 3100048 - DNA, 25 bp, Homo sapien
aaaggtggcaccgtggaacaggtct

SEQ ID NO: 3100049 - DNA, 25 bp, Homo sapien
ggccgtaatactcagccagacgctg

SEQ ID NO: 3100050 - DNA, 25 bp, Homo sapien
gaacaggtctcggtagaggccgtaa

SEQ ID NO: 3100051 - DNA, 25 bp, Homo sapien
tcctggatggcctgtttccgttcca

SEQ ID NO: 3100052 - DNA, 25 bp, Homo sapien
tttccgttccagtagctgttgggtc

SEQ ID NO: 3100053 - DNA, 25 bp, Homo sapien
tgggtggaggcagcccaatatcaat

SEQ ID NO: 3100054 - DNA, 25 bp, Homo sapien
ctcttccacattggcccgaagctcc

SEQ ID NO: 3100055 - DNA, 25 bp, Homo sapien
gcaaagtattgcacatgtacatcct

SEQ ID NO: 3100056 - DNA, 25 bp, Homo sapien
cactgttcgggtgcaaggatccaat

SEQ ID NO: 3100057 - DNA, 25 bp, Homo sapien
tggagggcaagacaagcaggatccc

SEQ ID NO: 3100058 - DNA, 25 bp, Homo sapien
gtcaacagggcgcttacaatctggg

SEQ ID NO: 3100059 - DNA, 25 bp, Homo sapien
acagagtatttgaggcgcacagaac

SEQ ID NO: 3100060 - DNA, 25 bp, Homo sapien
tcaggtggtcaagattttaggagca

SEQ ID NO: 3100061 - DNA, 25 bp, Homo sapien
caatccggaaagtcaggtggtcaag

SEQ ID NO: 3100062 - DNA, 25 bp, Homo sapien
agaacggcatcccaatccggaaagt

SEQ ID NO: 3100063 - DNA, 25 bp, Homo sapien
cgatagcgcacacaggtctgcaggc

SEQ ID NO: 3100064 - DNA, 25 bp, Homo sapien
tgcagaaggtgtgaaaaatcctggg

SEQ ID NO: 3100065 - DNA, 25 bp, Homo sapien
cagcatccacaagggcgccggcaag

SEQ ID NO: 3100066 - DNA, 25 bp, Homo sapien
ttttccaagaatgaggtgcagaagg

SEQ ID NO: 3100067 - DNA, 25 bp, Homo sapien
gctcaagtcgatgtcactgttgggc

SEQ ID NO: 3100068 - DNA, 25 bp, Homo sapien
tgctcggcgccggtagcggtcgaag

SEQ ID NO: 3100069 - DNA, 25 bp, Homo sapien
tgtcttctccccgaaatactctcgg

SEQ ID NO: 3100070 - DNA, 25 bp, Homo sapien
actctcggtaggtccgccaccagtg

SEQ ID NO: 3100071 - DNA, 25 bp, Homo sapien
ccagcgggggtgtccggcggcccag

SEQ ID NO: 3100072 - DNA, 25 bp, Homo sapien
cagcgggggtgtccggcggcccagg

SEQ ID NO: 3100073 - DNA, 25 bp, Homo sapien
gagaagacgtaaggccggcgcccca

SEQ ID NO: 3100074 - DNA, 25 bp, Homo sapien
ccccgcagagctgcccacccctcac

SEQ ID NO: 3100075 - DNA, 25 bp, Homo sapien
cacagcgcggctcgccaccagggcg

SEQ ID NO: 3100076 - DNA, 25 bp, Homo sapien
ctgaagccccgccatctccgacact

SEQ ID NO: 3100077 - DNA, 25 bp, Homo sapien
ccatctccgacactcgcacagcgcg

SEQ ID NO: 3100078 - DNA, 25 bp, Homo sapien
cgaggtgctgaagccccgccatctc

SEQ ID NO: 3100079 - DNA, 25 bp, Homo sapien
ttccctccggcctgcgacactgcgg

SEQ ID NO: 3100080 - DNA, 25 bp, Homo sapien
tgcggccgccactaggacccgggca

SEQ ID NO: 3100081 - DNA, 25 bp, Homo sapien
tgcgacactgcggccgccactagga

SEQ ID NO: 3100082 - DNA, 25 bp, Homo sapien
ggcctgcgacactgcggccgccact

SEQ ID NO: 3100083 - DNA, 25 bp, Homo sapien
ggcctcagacgcctgtcccggaggc

SEQ ID NO: 3100084 - DNA, 25 bp, Homo sapien
gtagacgcccggctccggaagtgcc

SEQ ID NO: 3100085 - DNA, 25 bp, Homo sapien
gcggagccgagagcagtcatatgct

SEQ ID NO: 3100086 - DNA, 25 bp, Homo sapien
tggacgctgcgtcctgatttcccca

SEQ ID NO: 3100087 - DNA, 25 bp, Homo sapien
aaggtggccgcggtctgtagacgcc

SEQ ID NO: 3100088 - DNA, 25 bp, Homo sapien
gaaggggtgcgagctccgattccgg

SEQ ID NO: 3100089 - DNA, 25 bp, Homo sapien
cgagctccgattccggactctgctt

SEQ ID NO: 3100090 - DNA, 25 bp, Homo sapien
ctgcttgggtttaaaacccagattg

SEQ ID NO: 3100091 - DNA, 25 bp, Homo sapien
ctctgcttgggtttaaaacccagat

SEQ ID NO: 3100092 - DNA, 25 bp, Homo sapien
catctgaggtaattagtttgagacc

SEQ ID NO: 3100093 - DNA, 25 bp, Homo sapien
ggatcatctgaggtaattagtttga

SEQ ID NO: 3100094 - DNA, 25 bp, Homo sapien
tcatctgaggtaattagtttgagac

SEQ ID NO: 3100095 - DNA, 25 bp, Homo sapien
cggatcatctgaggtaattagtttg

SEQ ID NO: 3100096 - DNA, 25 bp, Homo sapien
gcgcccggccgcaatatttctctct

SEQ ID NO: 3100097 - DNA, 25 bp, Homo sapien
cgcgcccggccgcaatatttctctc

SEQ ID NO: 3100098 - DNA, 25 bp, Homo sapien
cgcccggccgcaatatttctctctc

SEQ ID NO: 3100099 - DNA, 25 bp, Homo sapien
cggggtggctgacagcgtggagctt

SEQ ID NO: 3100100 - DNA, 25 bp, Homo sapien
ttggggattggccagagcagaactc

SEQ ID NO: 3100101 - DNA, 25 bp, Homo sapien
agaactcaaatccaggcgcagctac

SEQ ID NO: 3100102 - DNA, 25 bp, Homo sapien
aactcaaatccaggcgcagctactc

SEQ ID NO: 3100103 - DNA, 25 bp, Homo sapien
tgtttgaagcagggctaatagtacc

SEQ ID NO: 3100104 - DNA, 25 bp, Homo sapien
ctgccaggtgccaccgcagaccgca

SEQ ID NO: 3100105 - DNA, 25 bp, Homo sapien
gctaatagtacccttctcctggctg

SEQ ID NO: 3100106 - DNA, 25 bp, Homo sapien
caggtgccaccgcagaccgcaggtg

SEQ ID NO: 3100107 - DNA, 25 bp, Homo sapien
aggcacgtggccagaggcgcctggt

SEQ ID NO: 3100108 - DNA, 25 bp, Homo sapien
gaggcacgtggccagaggcgcctgg

SEQ ID NO: 3100109 - DNA, 25 bp, Homo sapien
ttttaagcttagtcaagttgaagca

SEQ ID NO: 3100110 - DNA, 25 bp, Homo sapien
tgcctgttctttgggacttgtccag

SEQ ID NO: 3100111 - DNA, 25 bp, Homo sapien
gaaataagtataaactccgatgagc

SEQ ID NO: 3100112 - DNA, 25 bp, Homo sapien
taaactccgatgagccatggcaaaa

SEQ ID NO: 3100113 - DNA, 25 bp, Homo sapien
cctccactgcgtacccgctgagctg

SEQ ID NO: 3100114 - DNA, 25 bp, Homo sapien
cctctgtagttgtgattggttcctt

SEQ ID NO: 3100115 - DNA, 25 bp, Homo sapien
tgtgattggttccttgtcgcctcca

SEQ ID NO: 3100116 - DNA, 25 bp, Homo sapien
tcagagaaacctctgtagttgtgat

SEQ ID NO: 3100117 - DNA, 25 bp, Homo sapien
caaactggttggtccttcgggcaat

SEQ ID NO: 3100118 - DNA, 25 bp, Homo sapien
tgtcatcaggcctcaagcatctcag

SEQ ID NO: 3100119 - DNA, 25 bp, Homo sapien
catttggaaaggatgcacttgcacc

SEQ ID NO: 3100120 - DNA, 25 bp, Homo sapien
tgtttgtggcatccctcaagaaagc

SEQ ID NO: 3100121 - DNA, 25 bp, Homo sapien
tgaatgagatgtcaaattgtaggac

SEQ ID NO: 3100122 - DNA, 25 bp, Homo sapien
gatgtcaaattgtaggaccctttct

SEQ ID NO: 3100123 - DNA, 25 bp, Homo sapien
caaattgtaggaccctttcttcagg

SEQ ID NO: 3100124 - DNA, 25 bp, Homo sapien
aggctgaatgagatgtcaaattgta

SEQ ID NO: 3100125 - DNA, 25 bp, Homo sapien
tccaggccagttggcggctggctgc

SEQ ID NO: 3100126 - DNA, 25 bp, Homo sapien
cctggcatggaggtgcaaggggctg

SEQ ID NO: 3100127 - DNA, 25 bp, Homo sapien
ggcggctggctgcaccaacgggtgg

SEQ ID NO: 3100128 - DNA, 25 bp, Homo sapien
ctgcaccaacgggtggtgggagcag

SEQ ID NO: 3100129 - DNA, 25 bp, Homo sapien
gctggccgccttaactggagcggct

SEQ ID NO: 3100130 - DNA, 25 bp, Homo sapien
ggcgactataaaacccagctggccg

SEQ ID NO: 3100131 - DNA, 25 bp, Homo sapien
tataaaacccagctggccgccttaa

SEQ ID NO: 3100132 - DNA, 25 bp, Homo sapien
aataaggcgactataaaacccagct

SEQ ID NO: 3100133 - DNA, 25 bp, Homo sapien
agggcaggtcctgtcgtgcgcggtc

SEQ ID NO: 3100134 - DNA, 25 bp, Homo sapien
acagacccacgaggctagagggcag

SEQ ID NO: 3100135 - DNA, 25 bp, Homo sapien
ccctggggaacagacccacgaggct

SEQ ID NO: 3100136 - DNA, 25 bp, Homo sapien
tgtcgtgcgcggtccagttgcagcc

SEQ ID NO: 3100137 - DNA, 25 bp, Homo sapien
agaaagaaggactcagctgtgaggt

SEQ ID NO: 3100138 - DNA, 25 bp, Homo sapien
gttcccccagaaagaaggactcagc

SEQ ID NO: 3100139 - DNA, 25 bp, Homo sapien
ccagaaagaaggactcagctgtgag

SEQ ID NO: 3100140 - DNA, 25 bp, Homo sapien
ccccagaaagaaggactcagctgtg

SEQ ID NO: 3100141 - DNA, 25 bp, Homo sapien
tgctgggcctcgcgcaatgcccgct

SEQ ID NO: 3100142 - DNA, 25 bp, Homo sapien
accgcctgcaaccgggcctgctgct

SEQ ID NO: 3100143 - DNA, 25 bp, Homo sapien
cctgctgggcctcgcgcaatgcccg

SEQ ID NO: 3100144 - DNA, 25 bp, Homo sapien
tgggcctcgcgcaatgcccgctccc

SEQ ID NO: 3100145 - DNA, 25 bp, Homo sapien
tgggctcagatgcgcccacgcccat

SEQ ID NO: 3100146 - DNA, 25 bp, Homo sapien
ctgggctcagatgcgcccacgccca

SEQ ID NO: 3100147 - DNA, 25 bp, Homo sapien
cctgggctcagatgcgcccacgccc

SEQ ID NO: 3100148 - DNA, 25 bp, Homo sapien
gggctcagatgcgcccacgcccatg

SEQ ID NO: 3100149 - DNA, 25 bp, Homo sapien
cctcggcgcggagcttgacacgcag

SEQ ID NO: 3100150 - DNA, 25 bp, Homo sapien
gcttgacacgcagggcggtggcgtt

SEQ ID NO: 3100151 - DNA, 25 bp, Homo sapien
cggtggcgttgatcctctccttctc

SEQ ID NO: 3100152 - DNA, 25 bp, Homo sapien
cagggcggtggcgttgatcctctcc

SEQ ID NO: 3100153 - DNA, 25 bp, Homo sapien
cctaagactggaagcggatgtgtcc

SEQ ID NO: 3100154 - DNA, 25 bp, Homo sapien
gcaggctcaactctgaagttcggtt

SEQ ID NO: 3100155 - DNA, 25 bp, Homo sapien
tataatgcacctgggacaatacgag

SEQ ID NO: 3100156 - DNA, 25 bp, Homo sapien
caggaattgcgctgcactctgtgca

SEQ ID NO: 3100157 - DNA, 25 bp, Homo sapien
gccaggctgatgagggtgccctccc

SEQ ID NO: 3100158 - DNA, 25 bp, Homo sapien
ccaggctgatgagggtgccctcccg

SEQ ID NO: 3100159 - DNA, 25 bp, Homo sapien
acctgcaatgcccgctcggcctcgc

SEQ ID NO: 3100160 - DNA, 25 bp, Homo sapien
tcagcttttgctgcgcggagaactc

SEQ ID NO: 3100161 - DNA, 25 bp, Homo sapien
gcttttgctgcgcggagaactccgc

SEQ ID NO: 3100162 - DNA, 25 bp, Homo sapien
agaactccgcccactcggcagccag

SEQ ID NO: 3100163 - DNA, 25 bp, Homo sapien
tttgctgcgcggagaactccgccca

SEQ ID NO: 3100164 - DNA, 25 bp, Homo sapien
ccctgggcataatggcaggggcagg

SEQ ID NO: 3100165 - DNA, 25 bp, Homo sapien
gtccctgggcataatggcaggggca

SEQ ID NO: 3100166 - DNA, 25 bp, Homo sapien
gtgtccctgggcataatggcagggg

SEQ ID NO: 3100167 - DNA, 25 bp, Homo sapien
tccctgggcataatggcaggggcag

SEQ ID NO: 3100168 - DNA, 25 bp, Homo sapien
tctagggcgcgctgcatggactccg

SEQ ID NO: 3100169 - DNA, 25 bp, Homo sapien
gctgcatggactccgccttggactg

SEQ ID NO: 3100170 - DNA, 25 bp, Homo sapien
tgctcggcagtcacccgccagcgtt

SEQ ID NO: 3100171 - DNA, 25 bp, Homo sapien
actccgccttggactgctcggcagt

SEQ ID NO: 3100172 - DNA, 25 bp, Homo sapien
tctgctcattcagccgtgcctccat

SEQ ID NO: 3100173 - DNA, 25 bp, Homo sapien
cgatgacctcctgttgccggctccg

SEQ ID NO: 3100174 - DNA, 25 bp, Homo sapien
catcttcccgatgacctcctgttgc

SEQ ID NO: 3100175 - DNA, 25 bp, Homo sapien
cagccgtgcctccatcttcccgatg

SEQ ID NO: 3100176 - DNA, 25 bp, Homo sapien
tgtcccgctgctgctggcccagccg

SEQ ID NO: 3100177 - DNA, 25 bp, Homo sapien
ctcctccatgtcccgctgctgctgg

SEQ ID NO: 3100178 - DNA, 25 bp, Homo sapien
cccgctgctgctggcccagccgctc

SEQ ID NO: 3100179 - DNA, 25 bp, Homo sapien
atgtcccgctgctgctggcccagcc

SEQ ID NO: 3100180 - DNA, 25 bp, Homo sapien
gcagctgctcgtcacgctgccggat

SEQ ID NO: 3100181 - DNA, 25 bp, Homo sapien
aggacaactcgtgcaggctgctgga

SEQ ID NO: 3100182 - DNA, 25 bp, Homo sapien
tggtgaggtgcgaggcctccacgcg

SEQ ID NO: 3100183 - DNA, 25 bp, Homo sapien
ctggtggatgatgctattcagggac

SEQ ID NO: 3100184 - DNA, 25 bp, Homo sapien
ccccaacgtcaggcgggcatggttg

SEQ ID NO: 3100185 - DNA, 25 bp, Homo sapien
cggcccccaacgtcaggcgggcatg

SEQ ID NO: 3100186 - DNA, 25 bp, Homo sapien
gcccccaacgtcaggcgggcatggt

SEQ ID NO: 3100187 - DNA, 25 bp, Homo sapien
ggcgggcatggttggggcagcgcac

SEQ ID NO: 3100188 - DNA, 25 bp, Homo sapien
ctggtggccgcatcgacctctcggt

SEQ ID NO: 3100189 - DNA, 25 bp, Homo sapien
ctgcagctgctcctcgtggtctctg

SEQ ID NO: 3100190 - DNA, 25 bp, Homo sapien
ggtccttcagcagctttagccgctg

SEQ ID NO: 3100191 - DNA, 25 bp, Homo sapien
cctcgtggtctctgcgcatgtctag

SEQ ID NO: 3100192 - DNA, 25 bp, Homo sapien
cgctgcagctcccggagccgctcca

SEQ ID NO: 3100193 - DNA, 25 bp, Homo sapien
gctgcagctcccggagccgctccat

SEQ ID NO: 3100194 - DNA, 25 bp, Homo sapien
tggtccttctcctgcgctatggccg

SEQ ID NO: 3100195 - DNA, 25 bp, Homo sapien
ccgttgctggtacgatgtttctagc

SEQ ID NO: 3100196 - DNA, 25 bp, Homo sapien
tcctggcactgcgacagataccgag

SEQ ID NO: 3100197 - DNA, 25 bp, Homo sapien
tgacagctcttcgttctctctccgg

SEQ ID NO: 3100198 - DNA, 25 bp, Homo sapien
gtgcactctcgatgagctccaggtc

SEQ ID NO: 3100199 - DNA, 25 bp, Homo sapien
tgtgtgcactctcgatgagctccag

SEQ ID NO: 3100200 - DNA, 25 bp, Homo sapien
ctgtgtgcactctcgatgagctcca

SEQ ID NO: 3100201 - DNA, 25 bp, Homo sapien
tcatgctgggcccgttctagctcca

SEQ ID NO: 3100202 - DNA, 25 bp, Homo sapien
gtgtcccctcctgtcgcaaccctgc

SEQ ID NO: 3100203 - DNA, 25 bp, Homo sapien
cagcaccaacggccccgctgcccct

SEQ ID NO: 3100204 - DNA, 25 bp, Homo sapien
ccctgtgccaacagcccttcctccc

SEQ ID NO: 3100205 - DNA, 25 bp, Homo sapien
ggaggtggctgtactccacgctgcc

SEQ ID NO: 3100206 - DNA, 25 bp, Homo sapien
ggctgcactgaagttgcacctgtgc

SEQ ID NO: 3100207 - DNA, 25 bp, Homo sapien
tgcactgaagttgcacctgtgctgc

SEQ ID NO: 3100208 - DNA, 25 bp, Homo sapien
ctgcactgaagttgcacctgtgctg

SEQ ID NO: 3100209 - DNA, 25 bp, Homo sapien
ggagctgcttctggtattctgtgct

SEQ ID NO: 3100210 - DNA, 25 bp, Homo sapien
cgggcacggaaggctctgtgggttt

SEQ ID NO: 3100211 - DNA, 25 bp, Homo sapien
ctggacgggcacggaaggctctgtg

SEQ ID NO: 3100212 - DNA, 25 bp, Homo sapien
tggacgggcacggaaggctctgtgg

SEQ ID NO: 3100213 - DNA, 25 bp, Homo sapien
gacgggcacggaaggctctgtgggt

SEQ ID NO: 3100214 - DNA, 25 bp, Homo sapien
ggtgctcgggaaacacgtggcaggc

SEQ ID NO: 3100215 - DNA, 25 bp, Homo sapien
ctgggtgctcgggaaacacgtggca

SEQ ID NO: 3100216 - DNA, 25 bp, Homo sapien
tgggtgctcgggaaacacgtggcag

SEQ ID NO: 3100217 - DNA, 25 bp, Homo sapien
gtgctcgggaaacacgtggcaggct

SEQ ID NO: 3100218 - DNA, 25 bp, Homo sapien
tgaggcggcatggttctgagtcaca

SEQ ID NO: 3100219 - DNA, 25 bp, Homo sapien
gaggcggcatggttctgagtcacag

SEQ ID NO: 3100220 - DNA, 25 bp, Homo sapien
ctgaggcggcatggttctgagtcac

SEQ ID NO: 3100221 - DNA, 25 bp, Homo sapien
cacacggtctttctcgtgcagttgt

SEQ ID NO: 3100222 - DNA, 25 bp, Homo sapien
gctgcgtgctcaagcccttgtgtgc

SEQ ID NO: 3100223 - DNA, 25 bp, Homo sapien
cggtctttctcgtgcagttgttcca

SEQ ID NO: 3100224 - DNA, 25 bp, Homo sapien
agcagctgcgtgctcaagcccttgt

SEQ ID NO: 3100225 - DNA, 25 bp, Homo sapien
ctgaggaaaggcagcgttcaaggtg

SEQ ID NO: 3100226 - DNA, 25 bp, Homo sapien
tcaaggtgaaggtgacagaaggccc

SEQ ID NO: 3100227 - DNA, 25 bp, Homo sapien
gaaaggcagcgttcaaggtgaaggt

SEQ ID NO: 3100228 - DNA, 25 bp, Homo sapien
cagcgttcaaggtgaaggtgacaga

SEQ ID NO: 3100229 - DNA, 25 bp, Homo sapien
tcttccgagacagggcatggctcag

SEQ ID NO: 3100230 - DNA, 25 bp, Homo sapien
gccaggccttgggacttcttccgag

SEQ ID NO: 3100231 - DNA, 25 bp, Homo sapien
gctgtccccgccaaatgcaggccct

SEQ ID NO: 3100232 - DNA, 25 bp, Homo sapien
tccttggaggctcgcagcttggaag

SEQ ID NO: 3100233 - DNA, 25 bp, Homo sapien
ctggaagccattggagggctctgtt

SEQ ID NO: 3100234 - DNA, 25 bp, Homo sapien
gtctgcgccactgtctgcgaagaac

SEQ ID NO: 3100235 - DNA, 25 bp, Homo sapien
gagggcgtgacaggcactgaacttt

SEQ ID NO: 3100236 - DNA, 25 bp, Homo sapien
gtccttgaggcccaaccagtcagct

SEQ ID NO: 3100237 - DNA, 25 bp, Homo sapien
aaggtgaagtcctcgtcaccccaca

SEQ ID NO: 3100238 - DNA, 25 bp, Homo sapien
actgccggccctcagaggagaccac

SEQ ID NO: 3100239 - DNA, 25 bp, Homo sapien
ctgacagactgccggcgggactgcc

SEQ ID NO: 3100240 - DNA, 25 bp, Homo sapien
ccacagtgggctgataggctccaaa

SEQ ID NO: 3100241 - DNA, 25 bp, Homo sapien
tttggtggccatgcctcgacccagc

SEQ ID NO: 3100242 - DNA, 25 bp, Homo sapien
ttcttgtctagcttgaactccctgt

SEQ ID NO: 3100243 - DNA, 25 bp, Homo sapien
gagtttggtggccatgcctcgaccc

SEQ ID NO: 3100244 - DNA, 25 bp, Homo sapien
agctcatccagcgtggagcgagcag

SEQ ID NO: 3100245 - DNA, 25 bp, Homo sapien
tgtctccaaaccccaaggtggccat

SEQ ID NO: 3100246 - DNA, 25 bp, Homo sapien
ccaggagttagaggaatagagggac

SEQ ID NO: 3100247 - DNA, 25 bp, Homo sapien
ggctgtctccaaaccccaaggtggc

SEQ ID NO: 3100248 - DNA, 25 bp, Homo sapien
ctccaaaccccaaggtggccatgat

SEQ ID NO: 3100249 - DNA, 25 bp, Homo sapien
agaagtcctctcaatgggtcttcca

SEQ ID NO: 3100250 - DNA, 25 bp, Homo sapien
agtcctctcaatgggtcttccaagt

SEQ ID NO: 3100251 - DNA, 25 bp, Homo sapien
ctccttcatcataggagagaagtcc

SEQ ID NO: 3100252 - DNA, 25 bp, Homo sapien
ttcctccttcatcataggagagaag

SEQ ID NO: 3100253 - DNA, 25 bp, Homo sapien
tgacttcttggtgggaatggcaccc

SEQ ID NO: 3100254 - DNA, 25 bp, Homo sapien
ggaaaacctcctgttctgatgccca

SEQ ID NO: 3100255 - DNA, 25 bp, Homo sapien
agaggaaaacctcctgttctgatgc

SEQ ID NO: 3100256 - DNA, 25 bp, Homo sapien
tgggagacggaagtgacttcttggt

SEQ ID NO: 3100257 - DNA, 25 bp, Homo sapien
tcctttgcagcttttttgctagggg

SEQ ID NO: 3100258 - DNA, 25 bp, Homo sapien
ttgctaggggctgaattagatttct

SEQ ID NO: 3100259 - DNA, 25 bp, Homo sapien
gcttttttgctaggggctgaattag

SEQ ID NO: 3100260 - DNA, 25 bp, Homo sapien
tgcagcttttttgctaggggctgaa

SEQ ID NO: 3100261 - DNA, 25 bp, Homo sapien
tatcagcatccatgccgtccaggtc

SEQ ID NO: 3100262 - DNA, 25 bp, Homo sapien
taagatatcagcatccatgccgtcc

SEQ ID NO: 3100263 - DNA, 25 bp, Homo sapien
gatatcagcatccatgccgtccagg

SEQ ID NO: 3100264 - DNA, 25 bp, Homo sapien
ctaagatatcagcatccatgccgtc

SEQ ID NO: 3100265 - DNA, 25 bp, Homo sapien
tgaaaccctgtctctacaaaaaata

SEQ ID NO: 3100266 - DNA, 25 bp, Homo sapien
accatcctggccaacatgatgaaac

SEQ ID NO: 3100267 - DNA, 25 bp, Homo sapien
tggatcaccaggtcaagaaatcgag

SEQ ID NO: 3100268 - DNA, 25 bp, Homo sapien
aggtggatcaccaggtcaagaaatc

SEQ ID NO: 3100269 - DNA, 25 bp, Homo sapien
aaacgcggctttgtcctagggactg

SEQ ID NO: 3100270 - DNA, 25 bp, Homo sapien
gaacaaggtgtcttaggccaagcta

SEQ ID NO: 3100271 - DNA, 25 bp, Homo sapien
cattgcaaagattggcgctgggctt

SEQ ID NO: 3100272 - DNA, 25 bp, Homo sapien
cagggctgtaaccaaaaacgcggct

SEQ ID NO: 3100273 - DNA, 25 bp, Homo sapien
tgtgggtctgcctctgagatacctg

SEQ ID NO: 3100274 - DNA, 25 bp, Homo sapien
agcagagcctgtgggtctgcctctg

SEQ ID NO: 3100275 - DNA, 25 bp, Homo sapien
cttcatggcctggagcagagcctgt

SEQ ID NO: 3100276 - DNA, 25 bp, Homo sapien
gggtctgcctctgagatacctgaaa

SEQ ID NO: 3100277 - DNA, 25 bp, Homo sapien
cagatgaggaggcacattagtcaag

SEQ ID NO: 3100278 - DNA, 25 bp, Homo sapien
tgaggaggcacattagtcaaggccc

SEQ ID NO: 3100279 - DNA, 25 bp, Homo sapien
gcacattagtcaaggcccaataaaa

SEQ ID NO: 3100280 - DNA, 25 bp, Homo sapien
tcaaggcccaataaaactcagggtc

SEQ ID NO: 3100281 - DNA, 25 bp, Homo sapien
ggtgctgaagacatcatcacccagg

SEQ ID NO: 3100282 - DNA, 25 bp, Homo sapien
catggtgctgaagacatcatcaccc

SEQ ID NO: 3100283 - DNA, 25 bp, Homo sapien
gcctgccatggtgctgaagacatca

SEQ ID NO: 3100284 - DNA, 25 bp, Homo sapien
tgccatggtgctgaagacatcatca

SEQ ID NO: 3100285 - DNA, 25 bp, Homo sapien
tttgttctcgcctttgaagaaggga

SEQ ID NO: 3100286 - DNA, 25 bp, Homo sapien
ctctggtatgtgaagctagtttaac

SEQ ID NO: 3100287 - DNA, 25 bp, Homo sapien
gtggtgtctctggtatgtgaagcta

SEQ ID NO: 3100288 - DNA, 25 bp, Homo sapien
ggtgtctctggtatgtgaagctagt

SEQ ID NO: 3100289 - DNA, 25 bp, Homo sapien
tcatcccctagaaggtcaccaagaa

SEQ ID NO: 3100290 - DNA, 25 bp, Homo sapien
catcccctagaaggtcaccaagaaa

SEQ ID NO: 3100291 - DNA, 25 bp, Homo sapien
tagaaggtcaccaagaaaatcatca

SEQ ID NO: 3100292 - DNA, 25 bp, Homo sapien
ccctagaaggtcaccaagaaaatca

SEQ ID NO: 3100293 - DNA, 25 bp, Homo sapien
tacatcctttcttggtttttggtgc

SEQ ID NO: 3100294 - DNA, 25 bp, Homo sapien
gctaaccagcgatgggtgccaatgg

SEQ ID NO: 3100295 - DNA, 25 bp, Homo sapien
cagaggcaagagcaccaatggcatt

SEQ ID NO: 3100296 - DNA, 25 bp, Homo sapien
gagaacggactcattcagagcgtgg

SEQ ID NO: 3100297 - DNA, 25 bp, Homo sapien
cccagagtgttgcatgcagtcaaga

SEQ ID NO: 3100298 - DNA, 25 bp, Homo sapien
ggattctgcccacatcaggctcata

SEQ ID NO: 3100299 - DNA, 25 bp, Homo sapien
ctctcgggggtgctctcagctcctt

SEQ ID NO: 3100300 - DNA, 25 bp, Homo sapien
cactggccagctcatctggattctg

SEQ ID NO: 3100301 - DNA, 25 bp, Homo sapien
ctcacggctctcgggggtgctctca

SEQ ID NO: 3100302 - DNA, 25 bp, Homo sapien
ggttatctgggcttacctacagagc

SEQ ID NO: 3100303 - DNA, 25 bp, Homo sapien
ggtcctctttatgtcccaagtattg

SEQ ID NO: 3100304 - DNA, 25 bp, Homo sapien
cctgtcctgttattggaatgcaagg

SEQ ID NO: 3100305 - DNA, 25 bp, Homo sapien
gatgtcctggaagaaaggagtcaga

SEQ ID NO: 3100306 - DNA, 25 bp, Homo sapien
catgccaggcgttttacagatcccg

SEQ ID NO: 3100307 - DNA, 25 bp, Homo sapien
tctgcaatggcgacttcacgaccta

SEQ ID NO: 3100308 - DNA, 25 bp, Homo sapien
gtattcagccgactccatgccaggc

SEQ ID NO: 3100309 - DNA, 25 bp, Homo sapien
ggcatctcctatcgatcctgtacgg

SEQ ID NO: 3100310 - DNA, 25 bp, Homo sapien
agcgcccggcctatctggccccgga

SEQ ID NO: 3100311 - DNA, 25 bp, Homo sapien
gagcgcagcctgtaacgctctcagc

SEQ ID NO: 3100312 - DNA, 25 bp, Homo sapien
cggaagcctcctgttacgcgccgtg

SEQ ID NO: 3100313 - DNA, 25 bp, Homo sapien
gaggtgcggccgctgggaccagcgc

SEQ ID NO: 3100314 - DNA, 25 bp, Homo sapien
ccgccctcacagaggaggtggggac

SEQ ID NO: 3100315 - DNA, 25 bp, Homo sapien
cgccctcacagaggaggtggggacg

SEQ ID NO: 3100316 - DNA, 25 bp, Homo sapien
gccctcacagaggaggtggggacgc

SEQ ID NO: 3100317 - DNA, 25 bp, Homo sapien
tatgaagtgtagtccgcagtctgaa

SEQ ID NO: 3100318 - DNA, 25 bp, Homo sapien
aaagatgtgcaggtgttacagacca

SEQ ID NO: 3100319 - DNA, 25 bp, Homo sapien
cagggctgggtaacaacatatgctc

SEQ ID NO: 3100320 - DNA, 25 bp, Homo sapien
tcaggtgagaaccaaactcgagcca

SEQ ID NO: 3100321 - DNA, 25 bp, Homo sapien
tcatgacgggcccaaggcaacatag

SEQ ID NO: 3100322 - DNA, 25 bp, Homo sapien
caaggactcctaaagtgactggagc

SEQ ID NO: 3100323 - DNA, 25 bp, Homo sapien
catgttggcccagtgcagtagctca

SEQ ID NO: 3100324 - DNA, 25 bp, Homo sapien
taaagacaagaacatgagggcccca

SEQ ID NO: 3100325 - DNA, 25 bp, Homo sapien
tctcccagtggaacgattaaggctt

SEQ ID NO: 3100326 - DNA, 25 bp, Homo sapien
agtctcatattaccagttccccagg

SEQ ID NO: 3100327 - DNA, 25 bp, Homo sapien
tatgtcaggtcccaagataggagtt

SEQ ID NO: 3100328 - DNA, 25 bp, Homo sapien
ggtcgatgatctcctcaaacctgca

SEQ ID NO: 3100329 - DNA, 25 bp, Homo sapien
ggtttttctgtgctacgtctgggag

SEQ ID NO: 3100330 - DNA, 25 bp, Homo sapien
tctgggagtgctgacctaagtgaca

SEQ ID NO: 3100331 - DNA, 25 bp, Homo sapien
gaaatagaacctatggaacttccat

SEQ ID NO: 3100332 - DNA, 25 bp, Homo sapien
ggacaattagcgattcagagaaagc

SEQ ID NO: 3100333 - DNA, 25 bp, Homo sapien
cagtaggcccgtgcggaataagttc

SEQ ID NO: 3100334 - DNA, 25 bp, Homo sapien
gttccctcgttggaaaaatgctagc

SEQ ID NO: 3100335 - DNA, 25 bp, Homo sapien
cagtgccacagctgagaggtttccc

SEQ ID NO: 3100336 - DNA, 25 bp, Homo sapien
gagacaatggtcctacagtaggccc

SEQ ID NO: 3100337 - DNA, 25 bp, Homo sapien
aatcctgcttttaagccaggcccca

SEQ ID NO: 3100338 - DNA, 25 bp, Homo sapien
caatcctgcttttaagccaggcccc

SEQ ID NO: 3100339 - DNA, 25 bp, Homo sapien
caaaatttgagttgcacacaggcgc

SEQ ID NO: 3100340 - DNA, 25 bp, Homo sapien
ggatcagcagcattacaaaaggaag

SEQ ID NO: 3100341 - DNA, 25 bp, Homo sapien
tggaagggttctacaccacttcaaa

SEQ ID NO: 3100342 - DNA, 25 bp, Homo sapien
gaatggtttaacaggtctctttcag

SEQ ID NO: 3100343 - DNA, 25 bp, Homo sapien
cagagcttggactgcagtgacttca

SEQ ID NO: 3100344 - DNA, 25 bp, Homo sapien
tcagagcttggactgcagtgacttc

SEQ ID NO: 3100345 - DNA, 25 bp, Homo sapien
gacttcaggtgcttgtaagattcgt

SEQ ID NO: 3100346 - DNA, 25 bp, Homo sapien
tcaggtgcttgtaagattcgtggac

SEQ ID NO: 3100347 - DNA, 25 bp, Homo sapien
atacacattcccatcatagcggcca

SEQ ID NO: 3100348 - DNA, 25 bp, Homo sapien
caacagcatctgagcgaatcagagt

SEQ ID NO: 3100349 - DNA, 25 bp, Homo sapien
gagtgagtaactcctttacacgctg

SEQ ID NO: 3100350 - DNA, 25 bp, Homo sapien
atagcggccaagcacagagccaagt

SEQ ID NO: 3100351 - DNA, 25 bp, Homo sapien
tgaaaagagcttaactaccacatag

SEQ ID NO: 3100352 - DNA, 25 bp, Homo sapien
taaactccttaagacagcttgaatg

SEQ ID NO: 3100353 - DNA, 25 bp, Homo sapien
cccgcgttctgactgattccataca

SEQ ID NO: 3100354 - DNA, 25 bp, Homo sapien
taactaccacatagtggcaatgtgc

SEQ ID NO: 3100355 - DNA, 25 bp, Homo sapien
taggttccaagctacctccttgctt

SEQ ID NO: 3100356 - DNA, 25 bp, Homo sapien
agttaggttccaagctacctccttg

SEQ ID NO: 3100357 - DNA, 25 bp, Homo sapien
aggttccaagctacctccttgcttt

SEQ ID NO: 3100358 - DNA, 25 bp, Homo sapien
gttaggttccaagctacctccttgc

SEQ ID NO: 3100359 - DNA, 25 bp, Homo sapien
ctgtgaatcacttctttttgaaggt

SEQ ID NO: 3100360 - DNA, 25 bp, Homo sapien
ggttttttgcagcaatttctactaa

SEQ ID NO: 3100361 - DNA, 25 bp, Homo sapien
tgtgaatcacttctttttgaaggtt

SEQ ID NO: 3100362 - DNA, 25 bp, Homo sapien
tttgaaggttttttgcagcaatttc

SEQ ID NO: 3100363 - DNA, 25 bp, Homo sapien
gggctgttgatatccaccatggttg

SEQ ID NO: 3100364 - DNA, 25 bp, Homo sapien
tatatgcttcggttaggctttcggg

SEQ ID NO: 3100365 - DNA, 25 bp, Homo sapien
cctgctgtggctggatgcgctgact

SEQ ID NO: 3100366 - DNA, 25 bp, Homo sapien
cgctgactgggcaggtcgttcaaat

SEQ ID NO: 3100367 - DNA, 25 bp, Homo sapien
cagcccagtaactctatccttgata

SEQ ID NO: 3100368 - DNA, 25 bp, Homo sapien
ccttgatacaactgcaagctatgta

SEQ ID NO: 3100369 - DNA, 25 bp, Homo sapien
gtaacaggtgcttcatactctctag

SEQ ID NO: 3100370 - DNA, 25 bp, Homo sapien
gtgcccagcccagtaactctatcct

SEQ ID NO: 3100371 - DNA, 25 bp, Homo sapien
tagccgtctggagcatcatgacagt

SEQ ID NO: 3100372 - DNA, 25 bp, Homo sapien
aagccttcagtccagcggtgagggc

SEQ ID NO: 3100373 - DNA, 25 bp, Homo sapien
gcaatgagaatagccatgcccacca

SEQ ID NO: 3100374 - DNA, 25 bp, Homo sapien
tgcagtccaggaggtgaaagccttc

SEQ ID NO: 3100375 - DNA, 25 bp, Homo sapien
gacaagcacagatctgtcaggacat

SEQ ID NO: 3100376 - DNA, 25 bp, Homo sapien
gagagcccgagaaccaatgagaaaa

SEQ ID NO: 3100377 - DNA, 25 bp, Homo sapien
taacatcttggccactgtcaaaaca

SEQ ID NO: 3100378 - DNA, 25 bp, Homo sapien
tgtggtgctgagagcccgagaacca

SEQ ID NO: 3100379 - DNA, 25 bp, Homo sapien
gtctccttcatgtatgcgcccacaa

SEQ ID NO: 3100380 - DNA, 25 bp, Homo sapien
caggagtggaaagagtttatactgc

SEQ ID NO: 3100381 - DNA, 25 bp, Homo sapien
tcgttaatccggtgataggtctcct

SEQ ID NO: 3100382 - DNA, 25 bp, Homo sapien
tgcgcccacaaactggaaggcatag

SEQ ID NO: 3100383 - DNA, 25 bp, Homo sapien
tatttagtcctcttaagggcactgt

SEQ ID NO: 3100384 - DNA, 25 bp, Homo sapien
atttagtcctcttaagggcactgtg

SEQ ID NO: 3100385 - DNA, 25 bp, Homo sapien
acatttgggaattctgggatctgaa

SEQ ID NO: 3100386 - DNA, 25 bp, Homo sapien
tatagcaagggtggttatttctgtc

SEQ ID NO: 3100387 - DNA, 25 bp, Homo sapien
gttatcaccctagccaattttgcag

SEQ ID NO: 3100388 - DNA, 25 bp, Homo sapien
cctagatatgaaattacaggcccag

SEQ ID NO: 3100389 - DNA, 25 bp, Homo sapien
aaacaccatggtcccgtaagtcagc

SEQ ID NO: 3100390 - DNA, 25 bp, Homo sapien
tcacagcgctgtatcggatggcaat

SEQ ID NO: 3100391 - DNA, 25 bp, Homo sapien
cagcggtttcacgtatgtgccatca

SEQ ID NO: 3100392 - DNA, 25 bp, Homo sapien
gcttgatttcagactggtgcctcac

SEQ ID NO: 3100393 - DNA, 25 bp, Homo sapien
caggtgattctaacgcatgcaaaag

SEQ ID NO: 3100394 - DNA, 25 bp, Homo sapien
cactgtcgcagtaaaagaagcatca

SEQ ID NO: 3100395 - DNA, 25 bp, Homo sapien
gaaactccagggtagggcctagcaa

SEQ ID NO: 3100396 - DNA, 25 bp, Homo sapien
tggaagaagaacgtggaactgatac

SEQ ID NO: 3100397 - DNA, 25 bp, Homo sapien
gatggttgtccattttgaggtagcc

SEQ ID NO: 3100398 - DNA, 25 bp, Homo sapien
cattgtctatctcatcataaccaaa

SEQ ID NO: 3100399 - DNA, 25 bp, Homo sapien
agcatgttttctctgggaatacgat

SEQ ID NO: 3100400 - DNA, 25 bp, Homo sapien
gggccgatgtcaccaacggtaattc

SEQ ID NO: 3100401 - DNA, 25 bp, Homo sapien
cacgaataggtacgataaaggcatg

SEQ ID NO: 3100402 - DNA, 25 bp, Homo sapien
taatccatagcatttccccttagtg

SEQ ID NO: 3100403 - DNA, 25 bp, Homo sapien
tatgggtcccgatttcacgaatagg

SEQ ID NO: 3100404 - DNA, 25 bp, Homo sapien
tgagctgggcaagaactattgcatg

SEQ ID NO: 3100405 - DNA, 25 bp, Homo sapien
aataaatgctgaaaaattcacttac

SEQ ID NO: 3100406 - DNA, 25 bp, Homo sapien
tccaataaatgctgaaaaattcact

SEQ ID NO: 3100407 - DNA, 25 bp, Homo sapien
cttcaaaacatccaataaatgctga

SEQ ID NO: 3100408 - DNA, 25 bp, Homo sapien
catccaataaatgctgaaaaattca

SEQ ID NO: 3100409 - DNA, 25 bp, Homo sapien
gactgttgagaatgaactcctgggt

SEQ ID NO: 3100410 - DNA, 25 bp, Homo sapien
catttaatggaggtcacagtaggac

SEQ ID NO: 3100411 - DNA, 25 bp, Homo sapien
tttcagggtcatacgtggctgtggt

SEQ ID NO: 3100412 - DNA, 25 bp, Homo sapien
gtttccaagcctcgaaggtgagttc

SEQ ID NO: 3100413 - DNA, 25 bp, Homo sapien
ccatctctgtctgggcataagtgcc

SEQ ID NO: 3100414 - DNA, 25 bp, Homo sapien
ctccaagttccaggcgggcatgaag

SEQ ID NO: 3100415 - DNA, 25 bp, Homo sapien
gctgctccgcagttgcctggtgaag

SEQ ID NO: 3100416 - DNA, 25 bp, Homo sapien
acatgcccaagtgaagatccagagg

SEQ ID NO: 3100417 - DNA, 25 bp, Homo sapien
tgtgtaattgccagctccaaatccg

SEQ ID NO: 3100418 - DNA, 25 bp, Homo sapien
tcatgtcaaatattcggccacgctc

SEQ ID NO: 3100419 - DNA, 25 bp, Homo sapien
tctctcagagtgacagtatgacccc

SEQ ID NO: 3100420 - DNA, 25 bp, Homo sapien
ggaagtcgttctataggcctttgca

SEQ ID NO: 3100421 - DNA, 25 bp, Homo sapien
tactgaccatcttgaagttgaagtc

SEQ ID NO: 3100422 - DNA, 25 bp, Homo sapien
tctttcaggcttataatttcagtac

SEQ ID NO: 3100423 - DNA, 25 bp, Homo sapien
aatttcagtactgaccatcttgaag

SEQ ID NO: 3100424 - DNA, 25 bp, Homo sapien
gaagttgaagtcttgagtgtttagt

SEQ ID NO: 3100425 - DNA, 25 bp, Homo sapien
actgttaactgatgtcctgaggtgg

SEQ ID NO: 3100426 - DNA, 25 bp, Homo sapien
tagaatcccaaacaggtagcagcag

SEQ ID NO: 3100427 - DNA, 25 bp, Homo sapien
cagtgaatgacgtttataggccaga

SEQ ID NO: 3100428 - DNA, 25 bp, Homo sapien
gaaaaaagtcaaatgccagcaatca

SEQ ID NO: 3100429 - DNA, 25 bp, Homo sapien
cgtggcccatttccgtctgggcgta

SEQ ID NO: 3100430 - DNA, 25 bp, Homo sapien
gagtcctttggatgaaagcagccat

SEQ ID NO: 3100431 - DNA, 25 bp, Homo sapien
catggagtaattgaggcccacaggt

SEQ ID NO: 3100432 - DNA, 25 bp, Homo sapien
ggtgccaattatctggagtcctttg

SEQ ID NO: 3100433 - DNA, 25 bp, Homo sapien
tcatacatcgctaaaggtcttcagg

SEQ ID NO: 3100434 - DNA, 25 bp, Homo sapien
gcgctgttaacaagagctccaagga

SEQ ID NO: 3100435 - DNA, 25 bp, Homo sapien
aatccacagtagttggccttggctg

SEQ ID NO: 3100436 - DNA, 25 bp, Homo sapien
gagtaaatacatattccagggcaga

SEQ ID NO: 3100437 - DNA, 25 bp, Homo sapien
aaagaaataatagtagccgggcgcg

SEQ ID NO: 3100438 - DNA, 25 bp, Homo sapien
aagaaataatagtagccgggcgcgg

SEQ ID NO: 3100439 - DNA, 25 bp, Homo sapien
gagatcgagaccatcagatcgagac

SEQ ID NO: 3100440 - DNA, 25 bp, Homo sapien
cagtgctgggggaccctgaaaccaa

SEQ ID NO: 3100441 - DNA, 25 bp, Homo sapien
ggcgtgtgccaccaagcccggttaa

SEQ ID NO: 3100442 - DNA, 25 bp, Homo sapien
taggcgtgtgccaccaagcccggtt

SEQ ID NO: 3100443 - DNA, 25 bp, Homo sapien
gcgtgtgccaccaagcccggttaat

SEQ ID NO: 3100444 - DNA, 25 bp, Homo sapien
ataggcgtgtgccaccaagcccggt

SEQ ID NO: 3100445 - DNA, 25 bp, Homo sapien
cgataccaaaggcactagaggcagt

SEQ ID NO: 3100446 - DNA, 25 bp, Homo sapien
caagtcaagctgaaaatcgatacca

SEQ ID NO: 3100447 - DNA, 25 bp, Homo sapien
tagaggcagtgaccattattaccat

SEQ ID NO: 3100448 - DNA, 25 bp, Homo sapien
tgaggaaagtccaaagtgccagagt

SEQ ID NO: 3100449 - DNA, 25 bp, Homo sapien
atactggagttcctttaaaatggag

SEQ ID NO: 3100450 - DNA, 25 bp, Homo sapien
gatgaaaatactggagttcctttaa

SEQ ID NO: 3100451 - DNA, 25 bp, Homo sapien
cgatgaaaatactggagttccttta

SEQ ID NO: 3100452 - DNA, 25 bp, Homo sapien
tactggagttcctttaaaatggaga

SEQ ID NO: 3100453 - DNA, 25 bp, Homo sapien
tcagcattctacaaacacgtcatcc

SEQ ID NO: 3100454 - DNA, 25 bp, Homo sapien
catcccacgaaaaggcttggataca

SEQ ID NO: 3100455 - DNA, 25 bp, Homo sapien
tacaaacacgtcatcccacgaaaag

SEQ ID NO: 3100456 - DNA, 25 bp, Homo sapien
tattatcagcattctacaaacacgt

SEQ ID NO: 3100457 - DNA, 25 bp, Homo sapien
agtttaggcttaacaacacttgctc

SEQ ID NO: 3100458 - DNA, 25 bp, Homo sapien
gtttaggcttaacaacacttgctct

SEQ ID NO: 3100459 - DNA, 25 bp, Homo sapien
ggtcagcgatgccaaactccctcat

SEQ ID NO: 3100460 - DNA, 25 bp, Homo sapien
gggtcagcgatgccaaactccctca

SEQ ID NO: 3100461 - DNA, 25 bp, Homo sapien
cagggtcagcgatgccaaactccct

SEQ ID NO: 3100462 - DNA, 25 bp, Homo sapien
agggtcagcgatgccaaactccctc

SEQ ID NO: 3100463 - DNA, 25 bp, Homo sapien
cctcatgctggaagtctgggtcgtt

SEQ ID NO: 3100464 - DNA, 25 bp, Homo sapien
gtctgggtcgttcaggatcatgttc

SEQ ID NO: 3100465 - DNA, 25 bp, Homo sapien
gctgcgagtgaggaagttcaagtcc

SEQ ID NO: 3100466 - DNA, 25 bp, Homo sapien
gccacctcataacgctggctgcgag

SEQ ID NO: 3100467 - DNA, 25 bp, Homo sapien
gctccctgcgcaggtccgggttcat

SEQ ID NO: 3100468 - DNA, 25 bp, Homo sapien
ctgccgtccaggatgtgtgtaagca

SEQ ID NO: 3100469 - DNA, 25 bp, Homo sapien
tgtgtaagcagctccgggttgaagc

SEQ ID NO: 3100470 - DNA, 25 bp, Homo sapien
ttgaagctggcggaatcccgctccc

SEQ ID NO: 3100471 - DNA, 25 bp, Homo sapien
agcgaagtaagcaccgaccgaggtg

SEQ ID NO: 3100472 - DNA, 25 bp, Homo sapien
cgacgaccagctggcagcgaagtaa

SEQ ID NO: 3100473 - DNA, 25 bp, Homo sapien
cctttggcgcgtgagtgacagcggc

SEQ ID NO: 3100474 - DNA, 25 bp, Homo sapien
tgacaatctaaatccgcagctccag

SEQ ID NO: 3100475 - DNA, 25 bp, Homo sapien
ggagagcatcctggctgactgtgct

SEQ ID NO: 3100476 - DNA, 25 bp, Homo sapien
ggcaccctgtggctgctttaaacct

SEQ ID NO: 3100477 - DNA, 25 bp, Homo sapien
cctccctgtgaaaaccaagtgtggt

SEQ ID NO: 3100478 - DNA, 25 bp, Homo sapien
tctgtccaccctgacctctggcctg

SEQ ID NO: 3100479 - DNA, 25 bp, Homo sapien
tcttggagccacatttctctcctta

SEQ ID NO: 3100480 - DNA, 25 bp, Homo sapien
tcttgcccacaaagtcttggagcca

SEQ ID NO: 3100481 - DNA, 25 bp, Homo sapien
gcccacaaagtcttggagccacatt

SEQ ID NO: 3100482 - DNA, 25 bp, Homo sapien
caaagtcttggagccacatttctct

SEQ ID NO: 3100483 - DNA, 25 bp, Homo sapien
ccataatctctttccatgacctgcc

SEQ ID NO: 3100484 - DNA, 25 bp, Homo sapien
cctgagtagcgggaattttaggtgt

SEQ ID NO: 3100485 - DNA, 25 bp, Homo sapien
cataatctctttccatgacctgcca

SEQ ID NO: 3100486 - DNA, 25 bp, Homo sapien
gggagacagaattcgtttattggga

SEQ ID NO: 3100487 - DNA, 25 bp, Homo sapien
gagacagaattcgtttattgggatc

SEQ ID NO: 3100488 - DNA, 25 bp, Homo sapien
acagaattcgtttattgggatcact

SEQ ID NO: 3100489 - DNA, 25 bp, Homo sapien
acggggagacagaattcgtttattg

SEQ ID NO: 3100490 - DNA, 25 bp, Homo sapien
gatggatcaggcaccaaggttaggg

SEQ ID NO: 3100491 - DNA, 25 bp, Homo sapien
tgctgtcctggtctggggatggatc

SEQ ID NO: 3100492 - DNA, 25 bp, Homo sapien
gaggcaagaggtgtacgtatcctac

SEQ ID NO: 3100493 - DNA, 25 bp, Homo sapien
tgaggcaagaggtgtacgtatccta

SEQ ID NO: 3100494 - DNA, 25 bp, Homo sapien
ccaacacacgcacttccccactggc

SEQ ID NO: 3100495 - DNA, 25 bp, Homo sapien
aacacacgcacttccccactggctc

SEQ ID NO: 3100496 - DNA, 25 bp, Homo sapien
gcccaacacacgcacttccccactg

SEQ ID NO: 3100497 - DNA, 25 bp, Homo sapien
ctggcccaacacacgcacttcccca

SEQ ID NO: 3100498 - DNA, 25 bp, Homo sapien
tacaagcagcgcaaactcggagatg

SEQ ID NO: 3100499 - DNA, 25 bp, Homo sapien
tgtgcacagagtagcgctcacggct

SEQ ID NO: 3100500 - DNA, 25 bp, Homo sapien
ggttgtgtcatagatcccggcgata

SEQ ID NO: 3100501 - DNA, 25 bp, Homo sapien
gctttctggaggacgtcaatctgga

SEQ ID NO: 3100502 - DNA, 25 bp, Homo sapien
tccctgcttgggcagggctctcgga

SEQ ID NO: 3100503 - DNA, 25 bp, Homo sapien
cctgctttgcatcatgggtccttcg

SEQ ID NO: 3100504 - DNA, 25 bp, Homo sapien
gcatcatgggtccttcggatgtcct

SEQ ID NO: 3100505 - DNA, 25 bp, Homo sapien
ctctcggagccctgctttgcatcat

SEQ ID NO: 3100506 - DNA, 25 bp, Homo sapien
gaaagctgtaggtgttgtctgtgta

SEQ ID NO: 3100507 - DNA, 25 bp, Homo sapien
ggaaagctgtaggtgttgtctgtgt

SEQ ID NO: 3100508 - DNA, 25 bp, Homo sapien
aaagctgtaggtgttgtctgtgtac

SEQ ID NO: 3100509 - DNA, 25 bp, Homo sapien
ctgctgcaacctcagtataggcctt

SEQ ID NO: 3100510 - DNA, 25 bp, Homo sapien
aacctcagtataggcctttgcaagg

SEQ ID NO: 3100511 - DNA, 25 bp, Homo sapien
gctgcaacctcagtataggcctttg

SEQ ID NO: 3100512 - DNA, 25 bp, Homo sapien
gcaacctcagtataggcctttgcaa

SEQ ID NO: 3100513 - DNA, 25 bp, Homo sapien
aaagagcagcggtaggtgtctgcct

SEQ ID NO: 3100514 - DNA, 25 bp, Homo sapien
gctccaaagagcagcggtaggtgtc

SEQ ID NO: 3100515 - DNA, 25 bp, Homo sapien
tccaaagagcagcggtaggtgtctg

SEQ ID NO: 3100516 - DNA, 25 bp, Homo sapien
caaagagcagcggtaggtgtctgcc

SEQ ID NO: 3100517 - DNA, 25 bp, Homo sapien
tcccgctctcggctctggatctcct

SEQ ID NO: 3100518 - DNA, 25 bp, Homo sapien
tctcggctctggatctcctgcgtca

SEQ ID NO: 3100519 - DNA, 25 bp, Homo sapien
cccgctctcggctctggatctcctg

SEQ ID NO: 3100520 - DNA, 25 bp, Homo sapien
ctcggctctggatctcctgcgtcag

SEQ ID NO: 3100521 - DNA, 25 bp, Homo sapien
aggccaggaaatgccaatcaccctg

SEQ ID NO: 3100522 - DNA, 25 bp, Homo sapien
gccaggaaatgccaatcaccctgac

SEQ ID NO: 3100523 - DNA, 25 bp, Homo sapien
ggaaatgccaatcaccctgactctc

SEQ ID NO: 3100524 - DNA, 25 bp, Homo sapien
caggaaatgccaatcaccctgactc

SEQ ID NO: 3100525 - DNA, 25 bp, Homo sapien
tcttgaactgctggtaggtgagggc

SEQ ID NO: 3100526 - DNA, 25 bp, Homo sapien
taggtgagggcggcatcctgcacca

SEQ ID NO: 3100527 - DNA, 25 bp, Homo sapien
cctgcagcttgtaggcgatctggct

SEQ ID NO: 3100528 - DNA, 25 bp, Homo sapien
aggttatccttgcagttcttgaact

SEQ ID NO: 3100529 - DNA, 25 bp, Homo sapien
tgcagggcagcgcatgcgtgctccg

SEQ ID NO: 3100530 - DNA, 25 bp, Homo sapien
tcgcacctggcgctgctggcgaggc

SEQ ID NO: 3100531 - DNA, 25 bp, Homo sapien
ttcagcgcgcggtgtagccgcagca

SEQ ID NO: 3100532 - DNA, 25 bp, Homo sapien
cctacggcgtggtagcggtcggtga

SEQ ID NO: 3100533 - DNA, 25 bp, Homo sapien
tcgaagcctcggatgaccctgtccg

SEQ ID NO: 3100534 - DNA, 25 bp, Homo sapien
tgaccctgtccgcatcctggatctg

SEQ ID NO: 3100535 - DNA, 25 bp, Homo sapien
cagggtggcctcgaagcctcggatg

SEQ ID NO: 3100536 - DNA, 25 bp, Homo sapien
cagagcccccggttcagcagggatg

SEQ ID NO: 3100537 - DNA, 25 bp, Homo sapien
agaaacgcctcgcactccttctggg

SEQ ID NO: 3100538 - DNA, 25 bp, Homo sapien
cccacgggccgcgtggacagaaacg

SEQ ID NO: 3100539 - DNA, 25 bp, Homo sapien
ttcttcacgctgttgagggctacgg

SEQ ID NO: 3100540 - DNA, 25 bp, Homo sapien
ggctgcacagaacctgcacgtcact

SEQ ID NO: 3100541 - DNA, 25 bp, Homo sapien
tccatccagccgggtcatctgtgtc

SEQ ID NO: 3100542 - DNA, 25 bp, Homo sapien
ccatccagccgggtcatctgtgtca

SEQ ID NO: 3100543 - DNA, 25 bp, Homo sapien
gctgggccgaagagactccacagca

SEQ ID NO: 3100544 - DNA, 25 bp, Homo sapien
tgctggctgggccgaagagactcca

SEQ ID NO: 3100545 - DNA, 25 bp, Homo sapien
tgggccgaagagactccacagcact

SEQ ID NO: 3100546 - DNA, 25 bp, Homo sapien
tggctgggccgaagagactccacag

SEQ ID NO: 3100547 - DNA, 25 bp, Homo sapien
gatgcagaagcaggcggcgggagca

SEQ ID NO: 3100548 - DNA, 25 bp, Homo sapien
gcgggagcacgcttggtctccccgc

SEQ ID NO: 3100549 - DNA, 25 bp, Homo sapien
ccaggcgtgcgggtcagtgttatct

SEQ ID NO: 3100550 - DNA, 25 bp, Homo sapien
agggccctgcacgacccaggcgtgc

SEQ ID NO: 3100551 - DNA, 25 bp, Homo sapien
tcgcagatgctgtccacgtgcaggg

SEQ ID NO: 3100552 - DNA, 25 bp, Homo sapien
tcctgagtcccagtcgcagatgctg

SEQ ID NO: 3100553 - DNA, 25 bp, Homo sapien
tgacggccagccgtttttcctctgc

SEQ ID NO: 3100554 - DNA, 25 bp, Homo sapien
cccagtggccctctcggtgacggcc

SEQ ID NO: 3100555 - DNA, 25 bp, Homo sapien
cagggtctggctgactgagtcggcc

SEQ ID NO: 3100556 - DNA, 25 bp, Homo sapien
gctgtacttggcatccaagttggag

SEQ ID NO: 3100557 - DNA, 25 bp, Homo sapien
ggtgcagggctgtacttggcatcca

SEQ ID NO: 3100558 - DNA, 25 bp, Homo sapien
tctggctgactgagtcggcctcttc

SEQ ID NO: 3100559 - DNA, 25 bp, Homo sapien
cggcggtagtcctccacgtgctgca

SEQ ID NO: 3100560 - DNA, 25 bp, Homo sapien
tctcctggcagatacacaggttcag

SEQ ID NO: 3100561 - DNA, 25 bp, Homo sapien
tggcagatacacaggttcaggaagt

SEQ ID NO: 3100562 - DNA, 25 bp, Homo sapien
tgggtctcctggcagatacacaggt

SEQ ID NO: 3100563 - DNA, 25 bp, Homo sapien
cggggtgccgcagctccaccatgcg

SEQ ID NO: 3100564 - DNA, 25 bp, Homo sapien
cgcggggtgccgcagctccaccatg

SEQ ID NO: 3100565 - DNA, 25 bp, Homo sapien
gggtgccgcagctccaccatgcgct

SEQ ID NO: 3100566 - DNA, 25 bp, Homo sapien
ggggtgccgcagctccaccatgcgc

SEQ ID NO: 3100567 - DNA, 25 bp, Homo sapien
acgcccgcagggtcggccatgaggt

SEQ ID NO: 3100568 - DNA, 25 bp, Homo sapien
ccatgaggtcgctccagtcctgctg

SEQ ID NO: 3100569 - DNA, 25 bp, Homo sapien
cagggtcggccatgaggtcgctcca

SEQ ID NO: 3100570 - DNA, 25 bp, Homo sapien
tcggccatgaggtcgctccagtcct

SEQ ID NO: 3100571 - DNA, 25 bp, Homo sapien
gaggtgcgtgtacaggctgcccagg

SEQ ID NO: 3100572 - DNA, 25 bp, Homo sapien
tggaggtgcgtgtacaggctgccca

SEQ ID NO: 3100573 - DNA, 25 bp, Homo sapien
ctggaggtgcgtgtacaggctgccc

SEQ ID NO: 3100574 - DNA, 25 bp, Homo sapien
ggtgcgtgtacaggctgcccaggct

SEQ ID NO: 3100575 - DNA, 25 bp, Homo sapien
cagtaggtctcggtattggctccgg

SEQ ID NO: 3100576 - DNA, 25 bp, Homo sapien
tctcggtattggctccggatggtgg

SEQ ID NO: 3100577 - DNA, 25 bp, Homo sapien
ctcggtattggctccggatggtggc

SEQ ID NO: 3100578 - DNA, 25 bp, Homo sapien
taggtctcggtattggctccggatg

SEQ ID NO: 3100579 - DNA, 25 bp, Homo sapien
tgttgtgctcggcgatctgttgctc

SEQ ID NO: 3100580 - DNA, 25 bp, Homo sapien
gatgttgtgctcggcgatctgttgc

SEQ ID NO: 3100581 - DNA, 25 bp, Homo sapien
aggatgttgtgctcggcgatctgtt

SEQ ID NO: 3100582 - DNA, 25 bp, Homo sapien
gttgtgctcggcgatctgttgctcc

SEQ ID NO: 3100583 - DNA, 25 bp, Homo sapien
agcaccatcttctcgtacagggcac

SEQ ID NO: 3100584 - DNA, 25 bp, Homo sapien
ctcagcctgcgggtgcttgagccgc

SEQ ID NO: 3100585 - DNA, 25 bp, Homo sapien
ctcctcagcctgcgggtgcttgagc

SEQ ID NO: 3100586 - DNA, 25 bp, Homo sapien
tccaggaagaggtccttgagcagca

SEQ ID NO: 3100587 - DNA, 25 bp, Homo sapien
tcagcctgcgggtgcttgagccgcc

SEQ ID NO: 3100588 - DNA, 25 bp, Homo sapien
gttggcttgcatgcgggagatgaga

SEQ ID NO: 3100589 - DNA, 25 bp, Homo sapien
ttgcatgcgggagatgagaagggcc

SEQ ID NO: 3100590 - DNA, 25 bp, Homo sapien
cttgcatgcgggagatgagaagggc

SEQ ID NO: 3100591 - DNA, 25 bp, Homo sapien
tgcatgcgggagatgagaagggcca

SEQ ID NO: 3100592 - DNA, 25 bp, Homo sapien
tgccacttccctccccgagccagtg

SEQ ID NO: 3100593 - DNA, 25 bp, Homo sapien
ccgagccagtgaatcaccggctcag

SEQ ID NO: 3100594 - DNA, 25 bp, Homo sapien
tgaatcaccggctcagccactagca

SEQ ID NO: 3100595 - DNA, 25 bp, Homo sapien
agccagtgaatcaccggctcagcca

SEQ ID NO: 3100596 - DNA, 25 bp, Homo sapien
ctgggagcctttgctcagccccttg

SEQ ID NO: 3100597 - DNA, 25 bp, Homo sapien
agcctttgctcagccccttgaacat

SEQ ID NO: 3100598 - DNA, 25 bp, Homo sapien
cccttcccctgggagcctttgctca

SEQ ID NO: 3100599 - DNA, 25 bp, Homo sapien
ggagcctttgctcagccccttgaac

SEQ ID NO: 3100600 - DNA, 25 bp, Homo sapien
ggctggcgaaagacggcaggagggc

SEQ ID NO: 3100601 - DNA, 25 bp, Homo sapien
gctggcgaaagacggcaggagggca

SEQ ID NO: 3100602 - DNA, 25 bp, Homo sapien
tactcaggaactggtaggcccaagg

SEQ ID NO: 3100603 - DNA, 25 bp, Homo sapien
tctgccacctttaagataatagctg

SEQ ID NO: 3100604 - DNA, 25 bp, Homo sapien
tgcagccatctcgtgcatgagccat

SEQ ID NO: 3100605 - DNA, 25 bp, Homo sapien
gctgtccttactagctaggtccggg

SEQ ID NO: 3100606 - DNA, 25 bp, Homo sapien
tcagcacagagacgagacaagggag

SEQ ID NO: 3100607 - DNA, 25 bp, Homo sapien
gatgctgcaggcaacggcctgagac

SEQ ID NO: 3100608 - DNA, 25 bp, Homo sapien
ctgcaattgggttcttggagctgga

SEQ ID NO: 3100609 - DNA, 25 bp, Homo sapien
gcacagcagggcctgcaattgggtt

SEQ ID NO: 3100610 - DNA, 25 bp, Homo sapien
tagttgccggtaagtcaggttacac

SEQ ID NO: 3100611 - DNA, 25 bp, Homo sapien
cgcaactaggctcccgaggagagaa

SEQ ID NO: 3100612 - DNA, 25 bp, Homo sapien
tagtgcctctaacatgtgtatctgg

SEQ ID NO: 3100613 - DNA, 25 bp, Homo sapien
tgtatctggcatcagcctcacctag

SEQ ID NO: 3100614 - DNA, 25 bp, Homo sapien
aaacttcttagcgttcactgggagg

SEQ ID NO: 3100615 - DNA, 25 bp, Homo sapien
tactgaagaagcatgacaaagcgtt

SEQ ID NO: 3100616 - DNA, 25 bp, Homo sapien
gataaacttctcaagggctcctgga

SEQ ID NO: 3100617 - DNA, 25 bp, Homo sapien
gaataaggctgaccgtaattctggg

SEQ ID NO: 3100618 - DNA, 25 bp, Homo sapien
ggtgctctcctgacacgctgcttaa

SEQ ID NO: 3100619 - DNA, 25 bp, Homo sapien
cacaagatgtaggaatgcagggccg

SEQ ID NO: 3100620 - DNA, 25 bp, Homo sapien
tgaacgcattactgaccaaaggcaa

SEQ ID NO: 3100621 - DNA, 25 bp, Homo sapien
gatgttaaactcttgccccgggcca

SEQ ID NO: 3100622 - DNA, 25 bp, Homo sapien
ctgaatccaaagatgcccttgatgt

SEQ ID NO: 3100623 - DNA, 25 bp, Homo sapien
tgtatccagtgaggccactcttggt

SEQ ID NO: 3100624 - DNA, 25 bp, Homo sapien
tgagggccaggtcaaagaacaaagg

SEQ ID NO: 3100625 - DNA, 25 bp, Homo sapien
tgtcctcaaggggtgggaaagccac

SEQ ID NO: 3100626 - DNA, 25 bp, Homo sapien
aaggttggcttgcttggtgacaagg

SEQ ID NO: 3100627 - DNA, 25 bp, Homo sapien
cacaaggttggcttgcttggtgaca

SEQ ID NO: 3100628 - DNA, 25 bp, Homo sapien
gtgcacaaggttggcttgcttggtg

SEQ ID NO: 3100629 - DNA, 25 bp, Homo sapien
caaggttggcttgcttggtgacaag

SEQ ID NO: 3100630 - DNA, 25 bp, Homo sapien
cttattgtccttgacttgggaggag

SEQ ID NO: 3100631 - DNA, 25 bp, Homo sapien
cttgacttgggaggaggaggtctct

SEQ ID NO: 3100632 - DNA, 25 bp, Homo sapien
tccttgacttgggaggaggaggtct

SEQ ID NO: 3100633 - DNA, 25 bp, Homo sapien
tattgtccttgacttgggaggagga

SEQ ID NO: 3100634 - DNA, 25 bp, Homo sapien
ggccagtgtaacagtgcactcgaaa

SEQ ID NO: 3100635 - DNA, 25 bp, Homo sapien
ttacagatgaaccaagacaaccctt

SEQ ID NO: 3100636 - DNA, 25 bp, Homo sapien
tctacacaatctgatgcccagctgg

SEQ ID NO: 3100637 - DNA, 25 bp, Homo sapien
taaaggccaggaacatcttacagat

SEQ ID NO: 3100638 - DNA, 25 bp, Homo sapien
gcagggagcacttctctgaccgcac

SEQ ID NO: 3100639 - DNA, 25 bp, Homo sapien
tctgaccgcacttgagtgatgagct

SEQ ID NO: 3100640 - DNA, 25 bp, Homo sapien
gagcacttctctgaccgcacttgag

SEQ ID NO: 3100641 - DNA, 25 bp, Homo sapien
ttctctgaccgcacttgagtgatga

SEQ ID NO: 3100642 - DNA, 25 bp, Homo sapien
ttacatcccactgcttcaacgaggg

SEQ ID NO: 3100643 - DNA, 25 bp, Homo sapien
taatcctgaggcagtttgcactccc

SEQ ID NO: 3100644 - DNA, 25 bp, Homo sapien
gattcagaaaacgtgtactcccgag

SEQ ID NO: 3100645 - DNA, 25 bp, Homo sapien
tcaaatgggaaaagctatgccacgg

SEQ ID NO: 3100646 - DNA, 25 bp, Homo sapien
ttgcaaacaaggagaggccaacctc

SEQ ID NO: 3100647 - DNA, 25 bp, Homo sapien
tcaagtctgagagcagtacttcagg

SEQ ID NO: 3100648 - DNA, 25 bp, Homo sapien
cctaagagatttcaacgtgcagtca

SEQ ID NO: 3100649 - DNA, 25 bp, Homo sapien
tgaggtggcgcccagctgttgtacc

SEQ ID NO: 3100650 - DNA, 25 bp, Homo sapien
gactctgtcatacaggacaagggct

SEQ ID NO: 3100651 - DNA, 25 bp, Homo sapien
ggacaagggcttcgctccacttctt

SEQ ID NO: 3100652 - DNA, 25 bp, Homo sapien
ctgttcttgaaggcgccagcatcag

SEQ ID NO: 3100653 - DNA, 25 bp, Homo sapien
tcttgaaggcgccagcatcagaatt

SEQ ID NO: 3100654 - DNA, 25 bp, Homo sapien
ggtaaccatacactcaaggccaacg

SEQ ID NO: 3100655 - DNA, 25 bp, Homo sapien
ccttgaacatgctgggctgaccttc

SEQ ID NO: 3100656 - DNA, 25 bp, Homo sapien
tgctcccaatgcttatagaacctgg

SEQ ID NO: 3100657 - DNA, 25 bp, Homo sapien
caagtttaacgtgtgtgctccactc

SEQ ID NO: 3100658 - DNA, 25 bp, Homo sapien
gaagctggagcaattccaccagatt

SEQ ID NO: 3100659 - DNA, 25 bp, Homo sapien
caggaagctggagcaattccaccag

SEQ ID NO: 3100660 - DNA, 25 bp, Homo sapien
tttgtgtccgacacaggcaaaggaa

SEQ ID NO: 3100661 - DNA, 25 bp, Homo sapien
tgccttcccggtcctcaagggtcac

SEQ ID NO: 3100662 - DNA, 25 bp, Homo sapien
tgtgtccgacacaggcaaaggaaaa

SEQ ID NO: 3100663 - DNA, 25 bp, Homo sapien
cacaggcccttgccttcccggtcct

SEQ ID NO: 3100664 - DNA, 25 bp, Homo sapien
ttacgcttgattgccgttgatagct

SEQ ID NO: 3100665 - DNA, 25 bp, Homo sapien
gtcatagagtcggatcaggtcctgg

SEQ ID NO: 3100666 - DNA, 25 bp, Homo sapien
cggggtgagcgcttgctgtcatcct

SEQ ID NO: 3100667 - DNA, 25 bp, Homo sapien
gccgttgatagcttgatgtaagtca

SEQ ID NO: 3100668 - DNA, 25 bp, Homo sapien
ctatgcaagtattgaagattagaca

SEQ ID NO: 3100669 - DNA, 25 bp, Homo sapien
gaagattagacaccttccctggctc

SEQ ID NO: 3100670 - DNA, 25 bp, Homo sapien
ggctctccttcaaggatataatctc

SEQ ID NO: 3100671 - DNA, 25 bp, Homo sapien
cctggctctccttcaaggatataat

SEQ ID NO: 3100672 - DNA, 25 bp, Homo sapien
cagactaaggaaggcttgtacacca

SEQ ID NO: 3100673 - DNA, 25 bp, Homo sapien
tgctagcctccgtgcaatctgggaa

SEQ ID NO: 3100674 - DNA, 25 bp, Homo sapien
gaaagattacccaagtgtgcggagg

SEQ ID NO: 3100675 - DNA, 25 bp, Homo sapien
tgtggctggccgaataacatacgcc

SEQ ID NO: 3100676 - DNA, 25 bp, Homo sapien
gaaccacctggatggcgtcccgaca

SEQ ID NO: 3100677 - DNA, 25 bp, Homo sapien
aacaggcgctccttagtttcttcgc

SEQ ID NO: 3100678 - DNA, 25 bp, Homo sapien
cattgattcaaacaggcgctcctta

SEQ ID NO: 3100679 - DNA, 25 bp, Homo sapien
cgtcccgacactcgctgagcattga

SEQ ID NO: 3100680 - DNA, 25 bp, Homo sapien
agtatagtgccgtgatctcgtctca

SEQ ID NO: 3100681 - DNA, 25 bp, Homo sapien
tccaatagaactctctgccacgggc

SEQ ID NO: 3100682 - DNA, 25 bp, Homo sapien
atctagtaaagcaaacacggccacc

SEQ ID NO: 3100683 - DNA, 25 bp, Homo sapien
gggcaatgtcctctacgtgcaccgt

SEQ ID NO: 3100684 - DNA, 25 bp, Homo sapien
taagcctctgcatcaaggtgctgaa

SEQ ID NO: 3100685 - DNA, 25 bp, Homo sapien
tttaaaacctcttgactgccacgta

SEQ ID NO: 3100686 - DNA, 25 bp, Homo sapien
gctccctttaactaagcctctgcat

SEQ ID NO: 3100687 - DNA, 25 bp, Homo sapien
ttcctgtcggtagggtacagttcaa

SEQ ID NO: 3100688 - DNA, 25 bp, Homo sapien
ttcacttgtctatggaaattgctgg

SEQ ID NO: 3100689 - DNA, 25 bp, Homo sapien
aattgctggaaggtggtagtatgac

SEQ ID NO: 3100690 - DNA, 25 bp, Homo sapien
gaggataagaatcaccaagcctgag

SEQ ID NO: 3100691 - DNA, 25 bp, Homo sapien
gacacacaaggcaagtctgaccaca

SEQ ID NO: 3100692 - DNA, 25 bp, Homo sapien
catggataagttcttctatggtgat

SEQ ID NO: 3100693 - DNA, 25 bp, Homo sapien
tcttctatggtgatttctgagactc

SEQ ID NO: 3100694 - DNA, 25 bp, Homo sapien
ctatggtgatttctgagactctggt

SEQ ID NO: 3100695 - DNA, 25 bp, Homo sapien
gttcttctatggtgatttctgagac

SEQ ID NO: 3100696 - DNA, 25 bp, Homo sapien
tgtcaatcttcactggaaccgttct

SEQ ID NO: 3100697 - DNA, 25 bp, Homo sapien
cctaataagaaaatgcgcactttgt

SEQ ID NO: 3100698 - DNA, 25 bp, Homo sapien
tggacaatagctgcttcgttatcag

SEQ ID NO: 3100699 - DNA, 25 bp, Homo sapien
cacttcactcatggtagctgcctgt

SEQ ID NO: 3100700 - DNA, 25 bp, Homo sapien
tttcagccaagagaccctcagtgcc

SEQ ID NO: 3100701 - DNA, 25 bp, Homo sapien
tcagccaagagaccctcagtgcccc

SEQ ID NO: 3100702 - DNA, 25 bp, Homo sapien
ttcagccaagagaccctcagtgccc

SEQ ID NO: 3100703 - DNA, 25 bp, Homo sapien
cctccacatgctacttcaatgaatc

SEQ ID NO: 3100704 - DNA, 25 bp, Homo sapien
cactagattcaactcagacttaaag

SEQ ID NO: 3100705 - DNA, 25 bp, Homo sapien
ggtgtgtctataaagggccatcaat

SEQ ID NO: 3100706 - DNA, 25 bp, Homo sapien
tgtacaacatcaagcgtgaaccctg

SEQ ID NO: 3100707 - DNA, 25 bp, Homo sapien
attatatgcacaatagcggatgttg

SEQ ID NO: 3100708 - DNA, 25 bp, Homo sapien
agcggatgttgggtgaaatctcttc

SEQ ID NO: 3100709 - DNA, 25 bp, Homo sapien
tccacacgttggttatacagcacag

SEQ ID NO: 3100710 - DNA, 25 bp, Homo sapien
ggtgaaatctcttccacacgttggt

SEQ ID NO: 3100711 - DNA, 25 bp, Homo sapien
ttaaaagcctcaatggcagctttcc

SEQ ID NO: 3100712 - DNA, 25 bp, Homo sapien
ttcctgagaggtaagctgtgtaagc

SEQ ID NO: 3100713 - DNA, 25 bp, Homo sapien
caagcgttccaattcctctgcatgc

SEQ ID NO: 3100714 - DNA, 25 bp, Homo sapien
tggcatccacgcgattgctctcaca

SEQ ID NO: 3100715 - DNA, 25 bp, Homo sapien
aggcgagataacaagtgaaaccgtt

SEQ ID NO: 3100716 - DNA, 25 bp, Homo sapien
ctgcatgcttcacggctttgcgtag

SEQ ID NO: 3100717 - DNA, 25 bp, Homo sapien
ctattatcggtcagaagctcttcag

SEQ ID NO: 3100718 - DNA, 25 bp, Homo sapien
atcttgaagttgagtgtttttcgaa

SEQ ID NO: 3100719 - DNA, 25 bp, Homo sapien
tgagtgtttttcgaagacgtctttg

SEQ ID NO: 3100720 - DNA, 25 bp, Homo sapien
cctgtgaatttgtgtctgttaccca

SEQ ID NO: 3100721 - DNA, 25 bp, Homo sapien
cagccaagctgagagtattttgaat

SEQ ID NO: 3100722 - DNA, 25 bp, Homo sapien
agccaagctgagagtattttgaata

SEQ ID NO: 3100723 - DNA, 25 bp, Homo sapien
gccaagctgagagtattttgaataa

SEQ ID NO: 3100724 - DNA, 25 bp, Homo sapien
tcagccaagctgagagtattttgaa

SEQ ID NO: 3100725 - DNA, 25 bp, Homo sapien
tgaaaatctccatgccgtaaaccat

SEQ ID NO: 3100726 - DNA, 25 bp, Homo sapien
gaaaatctccatgccgtaaaccatg

SEQ ID NO: 3100727 - DNA, 25 bp, Homo sapien
tctccatgccgtaaaccatgctgct

SEQ ID NO: 3100728 - DNA, 25 bp, Homo sapien
aatctccatgccgtaaaccatgctg

SEQ ID NO: 3100729 - DNA, 25 bp, Homo sapien
tccaaactcaggctatccccaaatt

SEQ ID NO: 3100730 - DNA, 25 bp, Homo sapien
tttgccttcgatccggccgaagggc

SEQ ID NO: 3100731 - DNA, 25 bp, Homo sapien
tctttgtttgccttcgatccggccg

SEQ ID NO: 3100732 - DNA, 25 bp, Homo sapien
caaactcaggctatccccaaattct

SEQ ID NO: 3100733 - DNA, 25 bp, Homo sapien
tgcgccgcagagcaagacgggatag

SEQ ID NO: 3100734 - DNA, 25 bp, Homo sapien
cgcagagcaagacgggataggggag

SEQ ID NO: 3100735 - DNA, 25 bp, Homo sapien
ctgcgccgcagagcaagacgggata

SEQ ID NO: 3100736 - DNA, 25 bp, Homo sapien
cgccgcagagcaagacgggataggg

SEQ ID NO: 3100737 - DNA, 25 bp, Homo sapien
ggccgggctgatgggatagcggcgg

SEQ ID NO: 3100738 - DNA, 25 bp, Homo sapien
tggccgggctgatgggatagcggcg

SEQ ID NO: 3100739 - DNA, 25 bp, Homo sapien
ccgggctgatgggatagcggcggac

SEQ ID NO: 3100740 - DNA, 25 bp, Homo sapien
gccgggctgatgggatagcggcgga

SEQ ID NO: 3100741 - DNA, 25 bp, Homo sapien
ggcgccatgtgctggagcgcgcctg

SEQ ID NO: 3100742 - DNA, 25 bp, Homo sapien
gccgccgtcggcccttgctgcagca

SEQ ID NO: 3100743 - DNA, 25 bp, Homo sapien
cagggcgccatgtgctggagcgcgc

SEQ ID NO: 3100744 - DNA, 25 bp, Homo sapien
tgcagcagggcgccatgtgctggag

SEQ ID NO: 3100745 - DNA, 25 bp, Homo sapien
gaaagagggctgatcacacctcagg

SEQ ID NO: 3100746 - DNA, 25 bp, Homo sapien
tgtgtgttcccagccgcatttgtgc

SEQ ID NO: 3100747 - DNA, 25 bp, Homo sapien
cagtcagtccccgtccatttttggc

SEQ ID NO: 3100748 - DNA, 25 bp, Homo sapien
tcaggcagccgggttacaatccgca

SEQ ID NO: 3100749 - DNA, 25 bp, Homo sapien
acaatgaaagctcatctatgaatct

SEQ ID NO: 3100750 - DNA, 25 bp, Homo sapien
tttttacaatgaaagctcatctatg

SEQ ID NO: 3100751 - DNA, 25 bp, Homo sapien
tttacaatgaaagctcatctatgaa

SEQ ID NO: 3100752 - DNA, 25 bp, Homo sapien
tacaatgaaagctcatctatgaatc

SEQ ID NO: 3100753 - DNA, 25 bp, Homo sapien
atcaaaagtctccatcacccctggg

SEQ ID NO: 3100754 - DNA, 25 bp, Homo sapien
tgggaagcccttctatggatcggtt

SEQ ID NO: 3100755 - DNA, 25 bp, Homo sapien
cgatggagttagagttccaggccca

SEQ ID NO: 3100756 - DNA, 25 bp, Homo sapien
gtgtccaagtctgtccctgccaaaa

SEQ ID NO: 3100757 - DNA, 25 bp, Homo sapien
ccattgagcgcataggctacaaggt

SEQ ID NO: 3100758 - DNA, 25 bp, Homo sapien
cctgcttccaggtgacggtgagtca

SEQ ID NO: 3100759 - DNA, 25 bp, Homo sapien
tacgtagtttatgatctgaagaccc

SEQ ID NO: 3100760 - DNA, 25 bp, Homo sapien
gctacaaggtgacattgctgctgag

SEQ ID NO: 3100761 - DNA, 25 bp, Homo sapien
cagtgcaagtgtgcctcaagggtca

SEQ ID NO: 3100762 - DNA, 25 bp, Homo sapien
tgtgctggactctagggaaaatggc

SEQ ID NO: 3100763 - DNA, 25 bp, Homo sapien
tgacagggcctctggattaagccac

SEQ ID NO: 3100764 - DNA, 25 bp, Homo sapien
cctgggctgcacaccttaggatgaa

SEQ ID NO: 3100765 - DNA, 25 bp, Homo sapien
tctctgtcccagaggacttcaagct

SEQ ID NO: 3100766 - DNA, 25 bp, Homo sapien
cccggaggcgtggagacaggtctct

SEQ ID NO: 3100767 - DNA, 25 bp, Homo sapien
aggacttcaagctcacccagcccag

SEQ ID NO: 3100768 - DNA, 25 bp, Homo sapien
cagctcccggaggcgtggagacagg

SEQ ID NO: 3100769 - DNA, 25 bp, Homo sapien
atctgtccaatgacacgccagtctg

SEQ ID NO: 3100770 - DNA, 25 bp, Homo sapien
cacgccagtctggtggaaccaggca

SEQ ID NO: 3100771 - DNA, 25 bp, Homo sapien
tgtccaatgacacgccagtctggtg

SEQ ID NO: 3100772 - DNA, 25 bp, Homo sapien
caatgacacgccagtctggtggaac

SEQ ID NO: 3100773 - DNA, 25 bp, Homo sapien
tctccgggttcttggtgaagggcac

SEQ ID NO: 3100774 - DNA, 25 bp, Homo sapien
tcaggcagaggtgtcgaaaaggcga

SEQ ID NO: 3100775 - DNA, 25 bp, Homo sapien
tcgaaaaggcgatcgatcatgtcgc

SEQ ID NO: 3100776 - DNA, 25 bp, Homo sapien
tgctccaccccgtacttgatgtact

SEQ ID NO: 3100777 - DNA, 25 bp, Homo sapien
ccgtaggtctccttgacaatggtct

SEQ ID NO: 3100778 - DNA, 25 bp, Homo sapien
ggtctccttgacaatggtcttctgg

SEQ ID NO: 3100779 - DNA, 25 bp, Homo sapien
gccccgtaggtctccttgacaatgg

SEQ ID NO: 3100780 - DNA, 25 bp, Homo sapien
tcttctgggcctggcgaatcctgtc

SEQ ID NO: 3100781 - DNA, 25 bp, Homo sapien
aggccttctggattttgcacagttc

SEQ ID NO: 3100782 - DNA, 25 bp, Homo sapien
gttcttcgaggccatcattgaagcc

SEQ ID NO: 3100783 - DNA, 25 bp, Homo sapien
cttctggattttgcacagttcttcg

SEQ ID NO: 3100784 - DNA, 25 bp, Homo sapien
tgcacagttcttcgaggccatcatt

SEQ ID NO: 3100785 - DNA, 25 bp, Homo sapien
cttaaaacgctccttgataatctgc

SEQ ID NO: 3100786 - DNA, 25 bp, Homo sapien
agcagagaaagctcacttcagagca

SEQ ID NO: 3100787 - DNA, 25 bp, Homo sapien
atcccagagggatgcttgtccactt

SEQ ID NO: 3100788 - DNA, 25 bp, Homo sapien
tcccagagacacgacaaaaagtatc

SEQ ID NO: 3100789 - DNA, 25 bp, Homo sapien
gacaaaaagtatcccgtctgccaga

SEQ ID NO: 3100790 - DNA, 25 bp, Homo sapien
tcttctctgcgatgtaatcagtcac

SEQ ID NO: 3100791 - DNA, 25 bp, Homo sapien
cacaggtagattcttctctgcgatg

SEQ ID NO: 3100792 - DNA, 25 bp, Homo sapien
gcgatgtaatcagtcacctttaacc

SEQ ID NO: 3100793 - DNA, 25 bp, Homo sapien
ttgactcccggctggaacacaggta

SEQ ID NO: 3100794 - DNA, 25 bp, Homo sapien
agtggcctggcttgtttcgtttgct

SEQ ID NO: 3100795 - DNA, 25 bp, Homo sapien
cctggcttgtttcgtttgctaaatc

SEQ ID NO: 3100796 - DNA, 25 bp, Homo sapien
tctctggatctacttggtgggtggt

SEQ ID NO: 3100797 - DNA, 25 bp, Homo sapien
gctaaatctctggatctacttggtg

SEQ ID NO: 3100798 - DNA, 25 bp, Homo sapien
ggatctgctgctcaatgtgctcccg

SEQ ID NO: 3100799 - DNA, 25 bp, Homo sapien
gctgctcaatgtgctcccggtagga

SEQ ID NO: 3100800 - DNA, 25 bp, Homo sapien
aatgtgctcccggtaggagcgctca

SEQ ID NO: 3100801 - DNA, 25 bp, Homo sapien
ggtaggagcgctcagcagtcttctg

SEQ ID NO: 3100802 - DNA, 25 bp, Homo sapien
taattgtagttgttgtgcaggaaga

SEQ ID NO: 3100803 - DNA, 25 bp, Homo sapien
ctccagggacttgaggatgtaattg

SEQ ID NO: 3100804 - DNA, 25 bp, Homo sapien
gagctgggtcctcgtacaccttgga

SEQ ID NO: 3100805 - DNA, 25 bp, Homo sapien
agagctgggtcctcgtacaccttgg

SEQ ID NO: 3100806 - DNA, 25 bp, Homo sapien
cgcttgctgaactcagagctgtagc

SEQ ID NO: 3100807 - DNA, 25 bp, Homo sapien
taggtgcttagcagccgcttgctga

SEQ ID NO: 3100808 - DNA, 25 bp, Homo sapien
tataggtgcttagcagccgcttgct

SEQ ID NO: 3100809 - DNA, 25 bp, Homo sapien
agatataggtgcttagcagccgctt

SEQ ID NO: 3100810 - DNA, 25 bp, Homo sapien
ggaatattgtatgtgtccccaagaa

SEQ ID NO: 3100811 - DNA, 25 bp, Homo sapien
cctgccgtctcctggaagtccaaaa

SEQ ID NO: 3100812 - DNA, 25 bp, Homo sapien
gcctgccgtctcctggaagtccaaa

SEQ ID NO: 3100813 - DNA, 25 bp, Homo sapien
agcatggcgcctgccgtctcctgga

SEQ ID NO: 3100814 - DNA, 25 bp, Homo sapien
ggaggccagcatggcgcctgccgtc

SEQ ID NO: 3100815 - DNA, 25 bp, Homo sapien
ccagggctgggatccgcccagtgaa

SEQ ID NO: 3100816 - DNA, 25 bp, Homo sapien
acactaaacatgtcactgtccatcc

SEQ ID NO: 3100817 - DNA, 25 bp, Homo sapien
ccctgtctgctagagacactaaaca

SEQ ID NO: 3100818 - DNA, 25 bp, Homo sapien
tcattttcactctagcctgccagga

SEQ ID NO: 3100819 - DNA, 25 bp, Homo sapien
gtgagctcgtgtacggtgccgtcct

SEQ ID NO: 3100820 - DNA, 25 bp, Homo sapien
ttgctggtgagctcgtgtacggtgc

SEQ ID NO: 3100821 - DNA, 25 bp, Homo sapien
cgtccttcggcatgttgtactcctt

SEQ ID NO: 3100822 - DNA, 25 bp, Homo sapien
tgtacggtgccgtccttcggcatgt

SEQ ID NO: 3100823 - DNA, 25 bp, Homo sapien
gacgggtgctaggacacctctcagg

SEQ ID NO: 3100824 - DNA, 25 bp, Homo sapien
gccgcctcctggcagacgggtgcta

SEQ ID NO: 3100825 - DNA, 25 bp, Homo sapien
ccgggacaacgcaccctcttggagg

SEQ ID NO: 3100826 - DNA, 25 bp, Homo sapien
tggcagacgggtgctaggacacctc

SEQ ID NO: 3100827 - DNA, 25 bp, Homo sapien
gcaccgatggtctccatggatgtga

SEQ ID NO: 3100828 - DNA, 25 bp, Homo sapien
gatgttgtctgcgaagtcctccagc

SEQ ID NO: 3100829 - DNA, 25 bp, Homo sapien
tgttctttgtgctggcagccgtgcc

SEQ ID NO: 3100830 - DNA, 25 bp, Homo sapien
gtcctccagcgctttggcaccgatg

SEQ ID NO: 3100831 - DNA, 25 bp, Homo sapien
tcaaactcaggcttggtctgcttga

SEQ ID NO: 3100832 - DNA, 25 bp, Homo sapien
agcaccgtggagaagtcgtgtcgca

SEQ ID NO: 3100833 - DNA, 25 bp, Homo sapien
tggagaagtcgtgtcgcacaatggc

SEQ ID NO: 3100834 - DNA, 25 bp, Homo sapien
tctgcttgaggtgtcgcaggatggg

SEQ ID NO: 3100835 - DNA, 25 bp, Homo sapien
cttccgggcagcagacacgatgttc

SEQ ID NO: 3100836 - DNA, 25 bp, Homo sapien
gatgttctccccttcaagcatcagc

SEQ ID NO: 3100837 - DNA, 25 bp, Homo sapien
cagacacgatgttctccccttcaag

SEQ ID NO: 3100838 - DNA, 25 bp, Homo sapien
tccgggcagcagacacgatgttctc

SEQ ID NO: 3100839 - DNA, 25 bp, Homo sapien
gcttgacgaaggcactgacgcagtg

SEQ ID NO: 3100840 - DNA, 25 bp, Homo sapien
atgtaggcatcggtctccacgtcca

SEQ ID NO: 3100841 - DNA, 25 bp, Homo sapien
tgtatcagggagtcgaaggtcttct

SEQ ID NO: 3100842 - DNA, 25 bp, Homo sapien
tggtactcgctctgcgccagcttga

SEQ ID NO: 3100843 - DNA, 25 bp, Homo sapien
gaatcagcgtcctggataaggtggt

SEQ ID NO: 3100844 - DNA, 25 bp, Homo sapien
cgcagacagtgggatcagacaccag

SEQ ID NO: 3100845 - DNA, 25 bp, Homo sapien
ttcattctcggctctgcgcagacag

SEQ ID NO: 3100846 - DNA, 25 bp, Homo sapien
aaatctaagaggctggtaagtccca

SEQ ID NO: 3100847 - DNA, 25 bp, Homo sapien
cctcggacaggtgcttaactcggaa

SEQ ID NO: 3100848 - DNA, 25 bp, Homo sapien
cagcggcccgtgcttgtcgttcaag

SEQ ID NO: 3100849 - DNA, 25 bp, Homo sapien
gtcgttcaaggcctcggacaggtgc

SEQ ID NO: 3100850 - DNA, 25 bp, Homo sapien
ttaactcggaaatcatgctcgtgac

SEQ ID NO: 3100851 - DNA, 25 bp, Homo sapien
gccgcacaaacacaagcagcgttta

SEQ ID NO: 3100852 - DNA, 25 bp, Homo sapien
ctggcgagatgtcggccgcacaaac

SEQ ID NO: 3100853 - DNA, 25 bp, Homo sapien
agatgtcggccgcacaaacacaagc

SEQ ID NO: 3100854 - DNA, 25 bp, Homo sapien
caaacacaagcagcgtttatccagg

SEQ ID NO: 3100855 - DNA, 25 bp, Homo sapien
ctcgctgtatttggggaaagcccca

SEQ ID NO: 3100856 - DNA, 25 bp, Homo sapien
tttgcctgtcctctgctgcacacac

SEQ ID NO: 3100857 - DNA, 25 bp, Homo sapien
tggggaaagccccagtttgcctgtc

SEQ ID NO: 3100858 - DNA, 25 bp, Homo sapien
tcctctgctgcacacactccccttt

SEQ ID NO: 3100859 - DNA, 25 bp, Homo sapien
aggttctgagccttacggatcgtcc

SEQ ID NO: 3100860 - DNA, 25 bp, Homo sapien
ctgggaatactgtttcagaaggttc

SEQ ID NO: 3100861 - DNA, 25 bp, Homo sapien
gggaatactgtttcagaaggttctg

SEQ ID NO: 3100862 - DNA, 25 bp, Homo sapien
ttcagaaggttctgagccttacgga

SEQ ID NO: 3100863 - DNA, 25 bp, Homo sapien
cccagctccccaacagtgagcaggc

SEQ ID NO: 3100864 - DNA, 25 bp, Homo sapien
aggcctttccctgagaccaccagag

SEQ ID NO: 3100865 - DNA, 25 bp, Homo sapien
ccaacagtgagcaggcctttccctg

SEQ ID NO: 3100866 - DNA, 25 bp, Homo sapien
agtgagcaggcctttccctgagacc

SEQ ID NO: 3100867 - DNA, 25 bp, Homo sapien
cctgactgaacttccgggggagcgc

SEQ ID NO: 3100868 - DNA, 25 bp, Homo sapien
caaggcggacggctcagagacccag

SEQ ID NO: 3100869 - DNA, 25 bp, Homo sapien
gagcgctgtgcccaaggcggacggc

SEQ ID NO: 3100870 - DNA, 25 bp, Homo sapien
tgcccaaggcggacggctcagagac

SEQ ID NO: 3100871 - DNA, 25 bp, Homo sapien
gatgacgagatgttcacccaggaca

SEQ ID NO: 3100872 - DNA, 25 bp, Homo sapien
cgctgcgaacgctagattggactaa

SEQ ID NO: 3100873 - DNA, 25 bp, Homo sapien
gggttaccacgacgacaagctctgg

SEQ ID NO: 3100874 - DNA, 25 bp, Homo sapien
tcttaaggcagtgcaaatagggctc

SEQ ID NO: 3100875 - DNA, 25 bp, Homo sapien
cagtcctttgatggagcggtccagc

SEQ ID NO: 3100876 - DNA, 25 bp, Homo sapien
cgtatctggtagtagacgttcatga

SEQ ID NO: 3100877 - DNA, 25 bp, Homo sapien
tgctcttatggaaatgctccttcag

SEQ ID NO: 3100878 - DNA, 25 bp, Homo sapien
ccagctggctggagcgtatctggta

SEQ ID NO: 3100879 - DNA, 25 bp, Homo sapien
cagattcaacttggtaaggggtcaa

SEQ ID NO: 3100880 - DNA, 25 bp, Homo sapien
atatccagattcaacttggtaaggg

SEQ ID NO: 3100881 - DNA, 25 bp, Homo sapien
taatatccagattcaacttggtaag

SEQ ID NO: 3100882 - DNA, 25 bp, Homo sapien
atgaaaaacacacatctttagccat

SEQ ID NO: 3100883 - DNA, 25 bp, Homo sapien
tcctggagcacgctctcgggcaggt

SEQ ID NO: 3100884 - DNA, 25 bp, Homo sapien
agccagcgggagatgcgaatgacat

SEQ ID NO: 3100885 - DNA, 25 bp, Homo sapien
gcctccagatcatcgtcaccactga

SEQ ID NO: 3100886 - DNA, 25 bp, Homo sapien
cgggagatgcgaatgacatcctgga

SEQ ID NO: 3100887 - DNA, 25 bp, Homo sapien
gagacgaccttactgtgccgcgtca

SEQ ID NO: 3100888 - DNA, 25 bp, Homo sapien
tccttcccgcgctcaaagagcagtt

SEQ ID NO: 3100889 - DNA, 25 bp, Homo sapien
atgagcacgggcgagacgaccttac

SEQ ID NO: 3100890 - DNA, 25 bp, Homo sapien
ctgcgaaattcggactccagggcct

SEQ ID NO: 3100891 - DNA, 25 bp, Homo sapien
aagcagagatcctaatgcctatagg

SEQ ID NO: 3100892 - DNA, 25 bp, Homo sapien
tgtactgtgctatatccttctgtgt

SEQ ID NO: 3100893 - DNA, 25 bp, Homo sapien
tcacgttattctgcggaccccttac

SEQ ID NO: 3100894 - DNA, 25 bp, Homo sapien
ccagggcagagactgatatccccaa

SEQ ID NO: 3100895 - DNA, 25 bp, Homo sapien
cactttgttgagttccgggctgtct

SEQ ID NO: 3100896 - DNA, 25 bp, Homo sapien
tttgttgagttccgggctgtctggg

SEQ ID NO: 3100897 - DNA, 25 bp, Homo sapien
actttgttgagttccgggctgtctg

SEQ ID NO: 3100898 - DNA, 25 bp, Homo sapien
ttgttgagttccgggctgtctgggc

SEQ ID NO: 3100899 - DNA, 25 bp, Homo sapien
gatgaagaaggactaaggacacagt

SEQ ID NO: 3100900 - DNA, 25 bp, Homo sapien
tgatgatcttctcagtgtcactggc

SEQ ID NO: 3100901 - DNA, 25 bp, Homo sapien
ccctctctgatgatcttctcagtgt

SEQ ID NO: 3100902 - DNA, 25 bp, Homo sapien
ctctctgatgatcttctcagtgtca

SEQ ID NO: 3100903 - DNA, 25 bp, Homo sapien
tctgatgatcttctcagtgtcactg

SEQ ID NO: 3100904 - DNA, 25 bp, Homo sapien
agcgtcttctcaacattctcctgca

SEQ ID NO: 3100905 - DNA, 25 bp, Homo sapien
atggtccaggcaggacagcgtcttc

SEQ ID NO: 3100906 - DNA, 25 bp, Homo sapien
ccgctgcagattctccgtctgcttg

SEQ ID NO: 3100907 - DNA, 25 bp, Homo sapien
tgcagccgctgcagattctccgtct

SEQ ID NO: 3100908 - DNA, 25 bp, Homo sapien
atgatggagttctccagcttcataa

SEQ ID NO: 3100909 - DNA, 25 bp, Homo sapien
gggatgatggagttctccagcttca

SEQ ID NO: 3100910 - DNA, 25 bp, Homo sapien
agttctccagcttcataaggcggct

SEQ ID NO: 3100911 - DNA, 25 bp, Homo sapien
tggagttctccagcttcataaggcg

SEQ ID NO: 3100912 - DNA, 25 bp, Homo sapien
taaactccacaagcgaaggaacagg

SEQ ID NO: 3100913 - DNA, 25 bp, Homo sapien
ggcatatagtaggtggtctaagaca

SEQ ID NO: 3100914 - DNA, 25 bp, Homo sapien
cagggtgtacctgttccccactgta

SEQ ID NO: 3100915 - DNA, 25 bp, Homo sapien
gaaggcaaaccaagcatcaaattaa

SEQ ID NO: 3100916 - DNA, 25 bp, Homo sapien
tctcggatgaaggacagagtctcct

SEQ ID NO: 3100917 - DNA, 25 bp, Homo sapien
gttcttagtgagctggtcgctcttc

SEQ ID NO: 3100918 - DNA, 25 bp, Homo sapien
ggatgaaggacagagtctcctcctc

SEQ ID NO: 3100919 - DNA, 25 bp, Homo sapien
catgttcttagtgagctggtcgctc

SEQ ID NO: 3100920 - DNA, 25 bp, Homo sapien
cccagcctccccaggcccacgccca

SEQ ID NO: 3100921 - DNA, 25 bp, Homo sapien
tccccagcctccccaggcccacgcc

SEQ ID NO: 3100922 - DNA, 25 bp, Homo sapien
cctccccagcctccccaggcccacg

SEQ ID NO: 3100923 - DNA, 25 bp, Homo sapien
ccagcctccccaggcccacgcccac

SEQ ID NO: 3100924 - DNA, 25 bp, Homo sapien
ttgtcctcaatctcccgccgtcgag

SEQ ID NO: 3100925 - DNA, 25 bp, Homo sapien
tctcccgccgtcgagcggatgcctc

SEQ ID NO: 3100926 - DNA, 25 bp, Homo sapien
tcaatctcccgccgtcgagcggatg

SEQ ID NO: 3100927 - DNA, 25 bp, Homo sapien
aatctcccgccgtcgagcggatgcc

SEQ ID NO: 3100928 - DNA, 25 bp, Homo sapien
gcggctcccactccccagtatcttt

SEQ ID NO: 3100929 - DNA, 25 bp, Homo sapien
actccccagtatctttcctccgcgg

SEQ ID NO: 3100930 - DNA, 25 bp, Homo sapien
cgctctgaaccccgcggctcccact

SEQ ID NO: 3100931 - DNA, 25 bp, Homo sapien
cagtatctttcctccgcgggcccac

SEQ ID NO: 3100932 - DNA, 25 bp, Homo sapien
gttgcagtgagtagaggttgcacca

SEQ ID NO: 3100933 - DNA, 25 bp, Homo sapien
aaatgcaaatattatctgggtgtgg

SEQ ID NO: 3100934 - DNA, 25 bp, Homo sapien
ctaaaaatgcaaatattatctgggt

SEQ ID NO: 3100935 - DNA, 25 bp, Homo sapien
ttgcagtgagtagaggttgcaccac

SEQ ID NO: 3100936 - DNA, 25 bp, Homo sapien
tactgcggacacatgttcccatggg

SEQ ID NO: 3100937 - DNA, 25 bp, Homo sapien
ccatgggagaatgttgcacgtggca

SEQ ID NO: 3100938 - DNA, 25 bp, Homo sapien
cagctgatttctgtccaaatcacag

SEQ ID NO: 3100939 - DNA, 25 bp, Homo sapien
tgagataggtactgcggacacatgt

SEQ ID NO: 3100940 - DNA, 25 bp, Homo sapien
ttctggcaccttttagacatctctc

SEQ ID NO: 3100941 - DNA, 25 bp, Homo sapien
ggctggatagtcaccttctggcacc

SEQ ID NO: 3100942 - DNA, 25 bp, Homo sapien
ccagtgaggccattcgtgaagatca

SEQ ID NO: 3100943 - DNA, 25 bp, Homo sapien
tcaaagaaacgaaatcaccaggcag

SEQ ID NO: 3100944 - DNA, 25 bp, Homo sapien
tcgtggacgtggctgtgccgcaggg

SEQ ID NO: 3100945 - DNA, 25 bp, Homo sapien
cgggaggggcttcgtggacgtggct

SEQ ID NO: 3100946 - DNA, 25 bp, Homo sapien
tcctcccgccgtgctcgggggtcga

SEQ ID NO: 3100947 - DNA, 25 bp, Homo sapien
tgctcgggggtcgaaccccgagcgc

SEQ ID NO: 3100948 - DNA, 25 bp, Homo sapien
cctcctgggcttgaatctgatggca

SEQ ID NO: 3100949 - DNA, 25 bp, Homo sapien
cagtagttccagcaagctcggcatc

SEQ ID NO: 3100950 - DNA, 25 bp, Homo sapien
gaagacgcggagcaatgaaacactg

SEQ ID NO: 3100951 - DNA, 25 bp, Homo sapien
tgtcctgccccatacagcttggctg

SEQ ID NO: 3100952 - DNA, 25 bp, Homo sapien
tctcccgaggcactttgatgaagca

SEQ ID NO: 3100953 - DNA, 25 bp, Homo sapien
tcgaagatggcctcccagtcaaagt

SEQ ID NO: 3100954 - DNA, 25 bp, Homo sapien
tctcatcgaagtccaggctgtcggc

SEQ ID NO: 3100955 - DNA, 25 bp, Homo sapien
gatggtgaggtccacgtccacgtgt

SEQ ID NO: 3100956 - DNA, 25 bp, Homo sapien
cacgcagagtctagccctggtcttt

SEQ ID NO: 3100957 - DNA, 25 bp, Homo sapien
gacttgggacaagaatgcgccttca

SEQ ID NO: 3100958 - DNA, 25 bp, Homo sapien
gaatggcaggttatttccccttgaa

SEQ ID NO: 3100959 - DNA, 25 bp, Homo sapien
cccaaggagattctgtccacgcaga

SEQ ID NO: 3100960 - DNA, 25 bp, Homo sapien
gccgctgaacctggcacctggtggt

SEQ ID NO: 3100961 - DNA, 25 bp, Homo sapien
gattggtggcgtagtccacgtcgtc

SEQ ID NO: 3100962 - DNA, 25 bp, Homo sapien
tccacttgtagatggccgacagggt

SEQ ID NO: 3100963 - DNA, 25 bp, Homo sapien
aagtagcagaagttgtccgtgatcc

SEQ ID NO: 3100964 - DNA, 25 bp, Homo sapien
ggcgcctcctccgaataagtatgtg

SEQ ID NO: 3100965 - DNA, 25 bp, Homo sapien
cggtcagcatccacgggctgagccg

SEQ ID NO: 3100966 - DNA, 25 bp, Homo sapien
ctctggcccgctgagtcccgcagct

SEQ ID NO: 3100967 - DNA, 25 bp, Homo sapien
ggacgcgcgcttccatctcgcgacc

SEQ ID NO: 3100968 - DNA, 25 bp, Homo sapien
ctgcgaggaccacggtgggagctga

SEQ ID NO: 3100969 - DNA, 25 bp, Homo sapien
gaaggttctggaagaagttgctccc

SEQ ID NO: 3100970 - DNA, 25 bp, Homo sapien
cattggccagcacgtctccaaggag

SEQ ID NO: 3100971 - DNA, 25 bp, Homo sapien
ccgggaccggcattaagtagccgct

SEQ ID NO: 3100972 - DNA, 25 bp, Homo sapien
tctccaaggagaccgcgggcacttg

SEQ ID NO: 3100973 - DNA, 25 bp, Homo sapien
aggaccccaactcccaggtgaggtg

SEQ ID NO: 3100974 - DNA, 25 bp, Homo sapien
gaccacaagtgtactccagggagag

SEQ ID NO: 3100975 - DNA, 25 bp, Homo sapien
ccaaagcaaagtgagcgaccagcgt

SEQ ID NO: 3100976 - DNA, 25 bp, Homo sapien
cagcgtgctaaactccaggtgggca

SEQ ID NO: 3100977 - DNA, 25 bp, Homo sapien
gacgtgactatgtgactgtctccag

SEQ ID NO: 3100978 - DNA, 25 bp, Homo sapien
aaagggttggccactgacctgtcct

SEQ ID NO: 3100979 - DNA, 25 bp, Homo sapien
ctgggtctccatagttaggctgtgc

SEQ ID NO: 3100980 - DNA, 25 bp, Homo sapien
gacctgtcctcatcaggctgactga

SEQ ID NO: 3100981 - DNA, 25 bp, Homo sapien
taaatgacagccaagagaaggcagg

SEQ ID NO: 3100982 - DNA, 25 bp, Homo sapien
gaggactaagcacctgctgcgagga

SEQ ID NO: 3100983 - DNA, 25 bp, Homo sapien
tctttccgtgcttctccctaggaga

SEQ ID NO: 3100984 - DNA, 25 bp, Homo sapien
taacctaggtatgccttggacatgg

SEQ ID NO: 3100985 - DNA, 25 bp, Homo sapien
ccctcctcccaggtaacaccacact

SEQ ID NO: 3100986 - DNA, 25 bp, Homo sapien
tccctcctcccaggtaacaccacac

SEQ ID NO: 3100987 - DNA, 25 bp, Homo sapien
cctcctcccaggtaacaccacactg

SEQ ID NO: 3100988 - DNA, 25 bp, Homo sapien
tgtgagccacaaccactaggcagtg

SEQ ID NO: 3100989 - DNA, 25 bp, Homo sapien
catgctgctgcctgaacttagctca

SEQ ID NO: 3100990 - DNA, 25 bp, Homo sapien
gggattctcagattcaagggctcct

SEQ ID NO: 3100991 - DNA, 25 bp, Homo sapien
tctgggctcatatttcagggaaatc

SEQ ID NO: 3100992 - DNA, 25 bp, Homo sapien
gctccttcttaaccgcacaggcatg

SEQ ID NO: 3100993 - DNA, 25 bp, Homo sapien
tccttcttaaccgcacaggcatgtg

SEQ ID NO: 3100994 - DNA, 25 bp, Homo sapien
agctccttcttaaccgcacaggcat

SEQ ID NO: 3100995 - DNA, 25 bp, Homo sapien
gagctccttcttaaccgcacaggca

SEQ ID NO: 3100996 - DNA, 25 bp, Homo sapien
tgtgtaagaaattagcccatggacc

SEQ ID NO: 3100997 - DNA, 25 bp, Homo sapien
tcctagtgcttgtagagggaaacgc

SEQ ID NO: 3100998 - DNA, 25 bp, Homo sapien
tataccgtgaggacattccagagtc

SEQ ID NO: 3100999 - DNA, 25 bp, Homo sapien
gaaacgctacgtccgtgcagtatgg

SEQ ID NO: 3101000 - DNA, 25 bp, Homo sapien
ctgctggatgacaagcgccggcgct

SEQ ID NO: 3101001 - DNA, 25 bp, Homo sapien
tgacggcattgtcatcagcctgcca

SEQ ID NO: 3101002 - DNA, 25 bp, Homo sapien
gccggcgctgggcattccgactgac

SEQ ID NO: 3101003 - DNA, 25 bp, Homo sapien
gctgggcattccgactgacggcatt

SEQ ID NO: 3101004 - DNA, 25 bp, Homo sapien
gggccttcatagaactatcacttgc

SEQ ID NO: 3101005 - DNA, 25 bp, Homo sapien
atcactgactaccccagggccttca

SEQ ID NO: 3101006 - DNA, 25 bp, Homo sapien
tgcccggcctatctttgcctttttc

SEQ ID NO: 3101007 - DNA, 25 bp, Homo sapien
ccccagggccttcatagaactatca

SEQ ID NO: 3101008 - DNA, 25 bp, Homo sapien
gacacttaacatgcctatacctgag

SEQ ID NO: 3101009 - DNA, 25 bp, Homo sapien
cctctggtgaggatataatgggaca

SEQ ID NO: 3101010 - DNA, 25 bp, Homo sapien
ttgtccttgccacagaagcgttccc

SEQ ID NO: 3101011 - DNA, 25 bp, Homo sapien
catggagtaactatcaacaagcagg

SEQ ID NO: 3101012 - DNA, 25 bp, Homo sapien
aggcctgggcagtgtctttagaaca

SEQ ID NO: 3101013 - DNA, 25 bp, Homo sapien
tccaggcctaactggcaggaggctg

SEQ ID NO: 3101014 - DNA, 25 bp, Homo sapien
actgcctcttttggtctcactgaaa

SEQ ID NO: 3101015 - DNA, 25 bp, Homo sapien
ggagaaagtatctctagagaattcc

SEQ ID NO: 3101016 - DNA, 25 bp, Homo sapien
gatgaaaacaagactgggccacctg

SEQ ID NO: 3101017 - DNA, 25 bp, Homo sapien
ggtaagagcacagggatcgtctccc

SEQ ID NO: 3101018 - DNA, 25 bp, Homo sapien
gcttcacttttaaagggcgcaggca

SEQ ID NO: 3101019 - DNA, 25 bp, Homo sapien
caaggctggctcattgcaaaaagct

SEQ ID NO: 3101020 - DNA, 25 bp, Homo sapien
tcatgttcagcagactgacactcac

SEQ ID NO: 3101021 - DNA, 25 bp, Homo sapien
gttcatgttcagcagactgacactc

SEQ ID NO: 3101022 - DNA, 25 bp, Homo sapien
caagttcatgttcagcagactgaca

SEQ ID NO: 3101023 - DNA, 25 bp, Homo sapien
aagttcatgttcagcagactgacac

SEQ ID NO: 3101024 - DNA, 25 bp, Homo sapien
catacctagaaatgcgcacgtcctc

SEQ ID NO: 3101025 - DNA, 25 bp, Homo sapien
ggtaagcagacctcagagcacagct

SEQ ID NO: 3101026 - DNA, 25 bp, Homo sapien
gttattgtcacactccatacctaga

SEQ ID NO: 3101027 - DNA, 25 bp, Homo sapien
cacgcttgcgatgtcaaagtcattg

SEQ ID NO: 3101028 - DNA, 25 bp, Homo sapien
ctctgcgttgctgtccttaaaataa

SEQ ID NO: 3101029 - DNA, 25 bp, Homo sapien
ctgtaacggagttaatgcagttaga

SEQ ID NO: 3101030 - DNA, 25 bp, Homo sapien
taaaaatcttaaggatggagacaaa

SEQ ID NO: 3101031 - DNA, 25 bp, Homo sapien
tgtgtttttctctgcgttgctgtcc

SEQ ID NO: 3101032 - DNA, 25 bp, Homo sapien
ttcctgcgtgggtgatccatcctct

SEQ ID NO: 3101033 - DNA, 25 bp, Homo sapien
cttcctgcgtgggtgatccatcctc

SEQ ID NO: 3101034 - DNA, 25 bp, Homo sapien
cctcttcctctataacatcatttcc

SEQ ID NO: 3101035 - DNA, 25 bp, Homo sapien
cctgcgtgggtgatccatcctcttc

SEQ ID NO: 3101036 - DNA, 25 bp, Homo sapien
tgctgtctggagactccgctggcag

SEQ ID NO: 3101037 - DNA, 25 bp, Homo sapien
ttgctgtctggagactccgctggca

SEQ ID NO: 3101038 - DNA, 25 bp, Homo sapien
gaggagacggtgtcagtgctgatct

SEQ ID NO: 3101039 - DNA, 25 bp, Homo sapien
tggacatgacagactgggccaagct

SEQ ID NO: 3101040 - DNA, 25 bp, Homo sapien
ggaggatgccatggacatgacagac

SEQ ID NO: 3101041 - DNA, 25 bp, Homo sapien
gatgccatggacatgacagactggg

SEQ ID NO: 3101042 - DNA, 25 bp, Homo sapien
cctgtgcaagacgactggtcaatag

SEQ ID NO: 3101043 - DNA, 25 bp, Homo sapien
gacgactggtcaatagctccagatg

SEQ ID NO: 3101044 - DNA, 25 bp, Homo sapien
gatgacagaggcgtccctgtgcaag

SEQ ID NO: 3101045 - DNA, 25 bp, Homo sapien
tccagatgacgacaaggtgagattc

SEQ ID NO: 3101046 - DNA, 25 bp, Homo sapien
ctgtgctggaggaaggggtcagggc

SEQ ID NO: 3101047 - DNA, 25 bp, Homo sapien
tgctggaggaaggggtcagggcgga

SEQ ID NO: 3101048 - DNA, 25 bp, Homo sapien
ctggaggaaggggtcagggcggagg

SEQ ID NO: 3101049 - DNA, 25 bp, Homo sapien
tgtgctggaggaaggggtcagggcg

SEQ ID NO: 3101050 - DNA, 25 bp, Homo sapien
tctccgagatgctgaaccgacggtc

SEQ ID NO: 3101051 - DNA, 25 bp, Homo sapien
gagagctgtgtctccgactcgctgc

SEQ ID NO: 3101052 - DNA, 25 bp, Homo sapien
catgcagcacggaagagttttggga

SEQ ID NO: 3101053 - DNA, 25 bp, Homo sapien
gactcgctgcaggaatgctcatctt

SEQ ID NO: 3101054 - DNA, 25 bp, Homo sapien
tcaagaggcgagatcgtcctgacgg

SEQ ID NO: 3101055 - DNA, 25 bp, Homo sapien
ggtggccatctccaagcacgtgaag

SEQ ID NO: 3101056 - DNA, 25 bp, Homo sapien
ttgagtttgagtccctgactgctgc

SEQ ID NO: 3101057 - DNA, 25 bp, Homo sapien
tcactgccatatgaagggagcattc

SEQ ID NO: 3101058 - DNA, 25 bp, Homo sapien
catagcctggtggaatattctctga

SEQ ID NO: 3101059 - DNA, 25 bp, Homo sapien
gcctccagaagagatactacttcat

SEQ ID NO: 3101060 - DNA, 25 bp, Homo sapien
gatactacttcatagcctggtggaa

SEQ ID NO: 3101061 - DNA, 25 bp, Homo sapien
gggcccgttgagggcctccagaaga

SEQ ID NO: 3101062 - DNA, 25 bp, Homo sapien
cctcatggctcggatctgaagcagt

SEQ ID NO: 3101063 - DNA, 25 bp, Homo sapien
tggctcggatctgaagcagtgcccg

SEQ ID NO: 3101064 - DNA, 25 bp, Homo sapien
attttttcctcatggctcggatctg

SEQ ID NO: 3101065 - DNA, 25 bp, Homo sapien
tcggatctgaagcagtgcccggaag

SEQ ID NO: 3101066 - DNA, 25 bp, Homo sapien
cagtccccctgccgctctggggctt

SEQ ID NO: 3101067 - DNA, 25 bp, Homo sapien
agtccccctgccgctctggggctta

SEQ ID NO: 3101068 - DNA, 25 bp, Homo sapien
gtccccctgccgctctggggcttac

SEQ ID NO: 3101069 - DNA, 25 bp, Homo sapien
gtagcgcagcgtgtctgcacaggtg

SEQ ID NO: 3101070 - DNA, 25 bp, Homo sapien
caaggtgtcccggacatccgagaga

SEQ ID NO: 3101071 - DNA, 25 bp, Homo sapien
ggcagaatcaaggtgtcccggacat

SEQ ID NO: 3101072 - DNA, 25 bp, Homo sapien
ggacatccgagagacacaccacaca

SEQ ID NO: 3101073 - DNA, 25 bp, Homo sapien
ttatcactcacttcgtcttcagcca

SEQ ID NO: 3101074 - DNA, 25 bp, Homo sapien
gttatcactcacttcgtcttcagcc

SEQ ID NO: 3101075 - DNA, 25 bp, Homo sapien
tatcactcacttcgtcttcagccac

SEQ ID NO: 3101076 - DNA, 25 bp, Homo sapien
aattacgaacaaaatctgcattgac

SEQ ID NO: 3101077 - DNA, 25 bp, Homo sapien
tactttactgacaaggcagcgtggc

SEQ ID NO: 3101078 - DNA, 25 bp, Homo sapien
actgacaaggcagcgtggctgaaga

SEQ ID NO: 3101079 - DNA, 25 bp, Homo sapien
ataattacgaacaaaatctgcattg

SEQ ID NO: 3101080 - DNA, 25 bp, Homo sapien
ttccatagatctcctgaaggaggta

SEQ ID NO: 3101081 - DNA, 25 bp, Homo sapien
gttgtacttgttttcaattccatag

SEQ ID NO: 3101082 - DNA, 25 bp, Homo sapien
tagaatcttgtgtgttgtacttgtt

SEQ ID NO: 3101083 - DNA, 25 bp, Homo sapien
gaaggaggtagctgaccccgtctac

SEQ ID NO: 3101084 - DNA, 25 bp, Homo sapien
gatgcaaagggcgatagcaagacct

SEQ ID NO: 3101085 - DNA, 25 bp, Homo sapien
tatctatcacccatctacaggaagg

SEQ ID NO: 3101086 - DNA, 25 bp, Homo sapien
gagaggctaatggtgtgtaccccac

SEQ ID NO: 3101087 - DNA, 25 bp, Homo sapien
tcaggctcccgaactgctaggataa

SEQ ID NO: 3101088 - DNA, 25 bp, Homo sapien
tctgtttgaggggcttgacacagaa

SEQ ID NO: 3101089 - DNA, 25 bp, Homo sapien
ttctgtttgaggggcttgacacaga

SEQ ID NO: 3101090 - DNA, 25 bp, Homo sapien
tttctgtttgaggggcttgacacag

SEQ ID NO: 3101091 - DNA, 25 bp, Homo sapien
tacccagcagtacatggcaatggcc

SEQ ID NO: 3101092 - DNA, 25 bp, Homo sapien
cccagcagtacatggcaatggccaa

SEQ ID NO: 3101093 - DNA, 25 bp, Homo sapien
acccagcagtacatggcaatggcca

SEQ ID NO: 3101094 - DNA, 25 bp, Homo sapien
agttccctgcaatctggcaaaccaa

SEQ ID NO: 3101095 - DNA, 25 bp, Homo sapien
cgtgagtgaagaagcccaaacagca

SEQ ID NO: 3101096 - DNA, 25 bp, Homo sapien
gcaaaccaaatgtgccagtctgtct

SEQ ID NO: 3101097 - DNA, 25 bp, Homo sapien
gaaagaaacaaaggcacgtgagtga

SEQ ID NO: 3101098 - DNA, 25 bp, Homo sapien
atccaccacggcatgtaccactaga

SEQ ID NO: 3101099 - DNA, 25 bp, Homo sapien
taaacttctcggtctaaatcaaagc

SEQ ID NO: 3101100 - DNA, 25 bp, Homo sapien
cacggcatgtaccactagagggtaa

SEQ ID NO: 3101101 - DNA, 25 bp, Homo sapien
gtctccttcatccaccacggcatgt

SEQ ID NO: 3101102 - DNA, 25 bp, Homo sapien
acactcctcgcttgtactgcacagt

SEQ ID NO: 3101103 - DNA, 25 bp, Homo sapien
tgacacactcctcgcttgtactgca

SEQ ID NO: 3101104 - DNA, 25 bp, Homo sapien
agaactgctgacacactcctcgctt

SEQ ID NO: 3101105 - DNA, 25 bp, Homo sapien
cccactcggagggatccacggtgtg

SEQ ID NO: 3101106 - DNA, 25 bp, Homo sapien
cgactggaggctgttgtctttggga

SEQ ID NO: 3101107 - DNA, 25 bp, Homo sapien
ctccgactggaggctgttgtctttg

SEQ ID NO: 3101108 - DNA, 25 bp, Homo sapien
tccgactggaggctgttgtctttgg

SEQ ID NO: 3101109 - DNA, 25 bp, Homo sapien
ccgactggaggctgttgtctttggg

SEQ ID NO: 3101110 - DNA, 25 bp, Homo sapien
ggaactcttccgtggcctggtaata

SEQ ID NO: 3101111 - DNA, 25 bp, Homo sapien
tggtgatggctacccgagcatctgt

SEQ ID NO: 3101112 - DNA, 25 bp, Homo sapien
cctggtaatagatggtgatggctac

SEQ ID NO: 3101113 - DNA, 25 bp, Homo sapien
gtgaactcaacattgtagtggactt

SEQ ID NO: 3101114 - DNA, 25 bp, Homo sapien
cagggctcttcacttcctcagcaca

SEQ ID NO: 3101115 - DNA, 25 bp, Homo sapien
ctccagggctcttcacttcctcagc

SEQ ID NO: 3101116 - DNA, 25 bp, Homo sapien
agggctcttcacttcctcagcacat

SEQ ID NO: 3101117 - DNA, 25 bp, Homo sapien
tccagggctcttcacttcctcagca

SEQ ID NO: 3101118 - DNA, 25 bp, Homo sapien
cagtgtgtcctttcggatattgacc

SEQ ID NO: 3101119 - DNA, 25 bp, Homo sapien
ctttcggatattgaccaggcttctc

SEQ ID NO: 3101120 - DNA, 25 bp, Homo sapien
ggatattgaccaggcttctcagagt

SEQ ID NO: 3101121 - DNA, 25 bp, Homo sapien
ttgacgagcctcagtgtgtcctttc

SEQ ID NO: 3101122 - DNA, 25 bp, Homo sapien
tgtggccgagttaatcacaaaaggc

SEQ ID NO: 3101123 - DNA, 25 bp, Homo sapien
cacactgtggccgagttaatcacaa

SEQ ID NO: 3101124 - DNA, 25 bp, Homo sapien
tggccgagttaatcacaaaaggctt

SEQ ID NO: 3101125 - DNA, 25 bp, Homo sapien
aaaggacacactgtggccgagttaa

SEQ ID NO: 3101126 - DNA, 25 bp, Homo sapien
tctgccgtatacgtcagtgtcctct

SEQ ID NO: 3101127 - DNA, 25 bp, Homo sapien
cagcataggttctgccgtatacgtc

SEQ ID NO: 3101128 - DNA, 25 bp, Homo sapien
taggttctgccgtatacgtcagtgt

SEQ ID NO: 3101129 - DNA, 25 bp, Homo sapien
gccgtatacgtcagtgtcctcttca

SEQ ID NO: 3101130 - DNA, 25 bp, Homo sapien
ttcaaacaagtcacaacaatgatca

SEQ ID NO: 3101131 - DNA, 25 bp, Homo sapien
gccttctctgcaaggttataaattg

SEQ ID NO: 3101132 - DNA, 25 bp, Homo sapien
acaatgatcatcagccctggggcct

SEQ ID NO: 3101133 - DNA, 25 bp, Homo sapien
ttctagggatctcaccaggggttgg

SEQ ID NO: 3101134 - DNA, 25 bp, Homo sapien
gtctgccagccagcataaacttcaa

SEQ ID NO: 3101135 - DNA, 25 bp, Homo sapien
gccagccagcataaacttcaagttg

SEQ ID NO: 3101136 - DNA, 25 bp, Homo sapien
ggcataggcaaacttaggaaaagtc

SEQ ID NO: 3101137 - DNA, 25 bp, Homo sapien
tcataggtcggcataggcaaactta

SEQ ID NO: 3101138 - DNA, 25 bp, Homo sapien
aagagatcccatacaaccaaggagg

SEQ ID NO: 3101139 - DNA, 25 bp, Homo sapien
tggccacttaagctccaagtaggag

SEQ ID NO: 3101140 - DNA, 25 bp, Homo sapien
aacttacgttctagaggaggaggca

SEQ ID NO: 3101141 - DNA, 25 bp, Homo sapien
taagggcttaacattacgtgccagg

SEQ ID NO: 3101142 - DNA, 25 bp, Homo sapien
aaagttcagatcgctgttctctcca

SEQ ID NO: 3101143 - DNA, 25 bp, Homo sapien
tcagatcgctgttctctccaaacag

SEQ ID NO: 3101144 - DNA, 25 bp, Homo sapien
tcaggatgagttgagtcaaacttct

SEQ ID NO: 3101145 - DNA, 25 bp, Homo sapien
caggatgagttgagtcaaacttctc

SEQ ID NO: 3101146 - DNA, 25 bp, Homo sapien
atgaagtggctggcaaaatagcttc

SEQ ID NO: 3101147 - DNA, 25 bp, Homo sapien
atcaacactctcatataccccattt

SEQ ID NO: 3101148 - DNA, 25 bp, Homo sapien
ttatcaacactctcatataccccat

SEQ ID NO: 3101149 - DNA, 25 bp, Homo sapien
ctttatcaacactctcatatacccc

SEQ ID NO: 3101150 - DNA, 25 bp, Homo sapien
tatcaacactctcatataccccatt

SEQ ID NO: 3101151 - DNA, 25 bp, Homo sapien
taaaaatccatggatgattggctta

SEQ ID NO: 3101152 - DNA, 25 bp, Homo sapien
gtaaaaatccatggatgattggctt

SEQ ID NO: 3101153 - DNA, 25 bp, Homo sapien
aaaaatccatggatgattggcttag

SEQ ID NO: 3101154 - DNA, 25 bp, Homo sapien
tacaagcacgttgacactcctgacc

SEQ ID NO: 3101155 - DNA, 25 bp, Homo sapien
aagcacgttgacactcctgacctac

SEQ ID NO: 3101156 - DNA, 25 bp, Homo sapien
cgttgacactcctgacctaccctca

SEQ ID NO: 3101157 - DNA, 25 bp, Homo sapien
gttgacactcctgacctaccctcaa

SEQ ID NO: 3101158 - DNA, 25 bp, Homo sapien
gagggatcatggcaacgtaagcagt

SEQ ID NO: 3101159 - DNA, 25 bp, Homo sapien
tcctcctttatgcactgagggatca

SEQ ID NO: 3101160 - DNA, 25 bp, Homo sapien
gcactgagggatcatggcaacgtaa

SEQ ID NO: 3101161 - DNA, 25 bp, Homo sapien
tgtcttcctcctttatgcactgagg

SEQ ID NO: 3101162 - DNA, 25 bp, Homo sapien
gctgttgttggagggactgaccaac

SEQ ID NO: 3101163 - DNA, 25 bp, Homo sapien
cccgactggtcgaagggggacatca

SEQ ID NO: 3101164 - DNA, 25 bp, Homo sapien
ctggtcgaagggggacatcaagtcc

SEQ ID NO: 3101165 - DNA, 25 bp, Homo sapien
tggtcgaagggggacatcaagtccc

SEQ ID NO: 3101166 - DNA, 25 bp, Homo sapien
actggtcgaagggggacatcaagtc

SEQ ID NO: 3101167 - DNA, 25 bp, Homo sapien
ttcgaaggtgtctttgtcggttaca

SEQ ID NO: 3101168 - DNA, 25 bp, Homo sapien
aaggtgtctttgtcggttacagcaa

SEQ ID NO: 3101169 - DNA, 25 bp, Homo sapien
gaaggtgtctttgtcggttacagca

SEQ ID NO: 3101170 - DNA, 25 bp, Homo sapien
cgaaggtgtctttgtcggttacagc

SEQ ID NO: 3101171 - DNA, 25 bp, Homo sapien
ttttcatccagatagcccatctttg

SEQ ID NO: 3101172 - DNA, 25 bp, Homo sapien
ttcatccagatagcccatctttgcc

SEQ ID NO: 3101173 - DNA, 25 bp, Homo sapien
ccatctttgcctcaaactcaataac

SEQ ID NO: 3101174 - DNA, 25 bp, Homo sapien
aatcacctgccatatcttttcatcc

SEQ ID NO: 3101175 - DNA, 25 bp, Homo sapien
tccaatgctgataccacaatccaga

SEQ ID NO: 3101176 - DNA, 25 bp, Homo sapien
tcatactggccggtgctcacataac

SEQ ID NO: 3101177 - DNA, 25 bp, Homo sapien
tactggccggtgctcacataactga

SEQ ID NO: 3101178 - DNA, 25 bp, Homo sapien
actgaactaccttgtgattctctgc

SEQ ID NO: 3101179 - DNA, 25 bp, Homo sapien
ttggatgccgaggtcgcctccctcg

SEQ ID NO: 3101180 - DNA, 25 bp, Homo sapien
tgtttggatgccgaggtcgcctccc

SEQ ID NO: 3101181 - DNA, 25 bp, Homo sapien
gccgacctcgcctacgacgccgcag

SEQ ID NO: 3101182 - DNA, 25 bp, Homo sapien
gggcgccgacctcgcctacgacgcc

SEQ ID NO: 3101183 - DNA, 25 bp, Homo sapien
gcgggtagcggtacacggaattaga

SEQ ID NO: 3101184 - DNA, 25 bp, Homo sapien
acgcccgcgtgctgccggctcgtca

SEQ ID NO: 3101185 - DNA, 25 bp, Homo sapien
tagcggtacacggaattagacggga

SEQ ID NO: 3101186 - DNA, 25 bp, Homo sapien
cacggaattagacgggatgtccacc

SEQ ID NO: 3101187 - DNA, 25 bp, Homo sapien
cgccctccgcgcttcaccgcggccg

SEQ ID NO: 3101188 - DNA, 25 bp, Homo sapien
ccgccctccgcgcttcaccgcggcc

SEQ ID NO: 3101189 - DNA, 25 bp, Homo sapien
gccctccgcgcttcaccgcggccgc

SEQ ID NO: 3101190 - DNA, 25 bp, Homo sapien
gccgccctccgcgcttcaccgcggc

SEQ ID NO: 3101191 - DNA, 25 bp, Homo sapien
tgtccaggtccaaagtggagagcct

SEQ ID NO: 3101192 - DNA, 25 bp, Homo sapien
taactaatgtgcgtgagaatgggcc

SEQ ID NO: 3101193 - DNA, 25 bp, Homo sapien
tgattgctggttgtggccccatagc

SEQ ID NO: 3101194 - DNA, 25 bp, Homo sapien
gggtttcccgaagatcgcactggaa

SEQ ID NO: 3101195 - DNA, 25 bp, Homo sapien
ttgctgtgggatggtcacaccaggg

SEQ ID NO: 3101196 - DNA, 25 bp, Homo sapien
gaaaagcggtctcctcagaagaggg

SEQ ID NO: 3101197 - DNA, 25 bp, Homo sapien
cggggtccgtcctgagtttctgtga

SEQ ID NO: 3101198 - DNA, 25 bp, Homo sapien
tcttggccccatcggtgtagccccc

SEQ ID NO: 3101199 - DNA, 25 bp, Homo sapien
gccaagacctttagtgagtcccttg

SEQ ID NO: 3101200 - DNA, 25 bp, Homo sapien
acctttagtgagtcccttgcctgca

SEQ ID NO: 3101201 - DNA, 25 bp, Homo sapien
ctgccaagacctttagtgagtccct

SEQ ID NO: 3101202 - DNA, 25 bp, Homo sapien
aagacctttagtgagtcccttgcct

SEQ ID NO: 3101203 - DNA, 25 bp, Homo sapien
gtgttcggctgggagagacggccct

SEQ ID NO: 3101204 - DNA, 25 bp, Homo sapien
tgggcgggtgggctgtgttcggctg

SEQ ID NO: 3101205 - DNA, 25 bp, Homo sapien
aatgtttatttacacctccgctcac

SEQ ID NO: 3101206 - DNA, 25 bp, Homo sapien
tccgctcactgagcggtgctggacc

SEQ ID NO: 3101207 - DNA, 25 bp, Homo sapien
tacagacacgaggtgacatccacac

SEQ ID NO: 3101208 - DNA, 25 bp, Homo sapien
gaattttcctgagactaccagtccc

SEQ ID NO: 3101209 - DNA, 25 bp, Homo sapien
tgagctcctaagcagtcatgaagca

SEQ ID NO: 3101210 - DNA, 25 bp, Homo sapien
ttctgttcgccatgctgggctgaca

SEQ ID NO: 3101211 - DNA, 25 bp, Homo sapien
tccatgacagtgagtgcacgtgagc

SEQ ID NO: 3101212 - DNA, 25 bp, Homo sapien
tccatgacagggtcgtggcctcttg

SEQ ID NO: 3101213 - DNA, 25 bp, Homo sapien
ggttcgtccatgtaaagctcctaaa

SEQ ID NO: 3101214 - DNA, 25 bp, Homo sapien
gacccaagggatcttccaggcggga

SEQ ID NO: 3101215 - DNA, 25 bp, Homo sapien
ctgaggtgttgccagccgaaatctg

SEQ ID NO: 3101216 - DNA, 25 bp, Homo sapien
ctctgtggccgagagggcagctggc

SEQ ID NO: 3101217 - DNA, 25 bp, Homo sapien
cagccgaaatctgggcgctctgtgg

SEQ ID NO: 3101218 - DNA, 25 bp, Homo sapien
ctgctgggacttgcgctttgaggtc

SEQ ID NO: 3101219 - DNA, 25 bp, Homo sapien
agggaggcatctagaaaggcgcata

SEQ ID NO: 3101220 - DNA, 25 bp, Homo sapien
aaagcgcaggcttcgggcattgcca

SEQ ID NO: 3101221 - DNA, 25 bp, Homo sapien
atacacagctaaatgcatgatggga

SEQ ID NO: 3101222 - DNA, 25 bp, Homo sapien
atgggaagtgacaaagcgcaggctt

SEQ ID NO: 3101223 - DNA, 25 bp, Homo sapien
tgtcttttcggaggatgcctggcag

SEQ ID NO: 3101224 - DNA, 25 bp, Homo sapien
tcttttcggaggatgcctggcagcc

SEQ ID NO: 3101225 - DNA, 25 bp, Homo sapien
ttttcggaggatgcctggcagcctt

SEQ ID NO: 3101226 - DNA, 25 bp, Homo sapien
ttcggaggatgcctggcagccttgt

SEQ ID NO: 3101227 - DNA, 25 bp, Homo sapien
aggcccaagatgtccacctcatcat

SEQ ID NO: 3101228 - DNA, 25 bp, Homo sapien
cttgtaaatgtggccatccaggccc

SEQ ID NO: 3101229 - DNA, 25 bp, Homo sapien
ggcccaagatgtccacctcatcatg

SEQ ID NO: 3101230 - DNA, 25 bp, Homo sapien
aatgtggccatccaggcccaagatg

SEQ ID NO: 3101231 - DNA, 25 bp, Homo sapien
gaagtgaacagataccgtcgccact

SEQ ID NO: 3101232 - DNA, 25 bp, Homo sapien
tgaacagataccgtcgccactgtag

SEQ ID NO: 3101233 - DNA, 25 bp, Homo sapien
aacagataccgtcgccactgtagca

SEQ ID NO: 3101234 - DNA, 25 bp, Homo sapien
gataccgtcgccactgtagcagcca

SEQ ID NO: 3101235 - DNA, 25 bp, Homo sapien
gagtaggtgtaatcagccatatctg

SEQ ID NO: 3101236 - DNA, 25 bp, Homo sapien
cagttgagtaggtgtaatcagccat

SEQ ID NO: 3101237 - DNA, 25 bp, Homo sapien
gggcacagttgagtaggtgtaatca

SEQ ID NO: 3101238 - DNA, 25 bp, Homo sapien
cagtaggatacaggccccggggaag

SEQ ID NO: 3101239 - DNA, 25 bp, Homo sapien
agccgtgcacgagcagaagccaagc

SEQ ID NO: 3101240 - DNA, 25 bp, Homo sapien
caaggcatttgcacagccgtgcacg

SEQ ID NO: 3101241 - DNA, 25 bp, Homo sapien
gggcaaggcatttgcacagccgtgc

SEQ ID NO: 3101242 - DNA, 25 bp, Homo sapien
aagcctggtcactgggtgcctgctc

SEQ ID NO: 3101243 - DNA, 25 bp, Homo sapien
gcagctcgcggattatctggctgct

SEQ ID NO: 3101244 - DNA, 25 bp, Homo sapien
tgcagcagctcgcggattatctggc

SEQ ID NO: 3101245 - DNA, 25 bp, Homo sapien
gctcgcggattatctggctgctggc

SEQ ID NO: 3101246 - DNA, 25 bp, Homo sapien
cagcagctcgcggattatctggctg

SEQ ID NO: 3101247 - DNA, 25 bp, Homo sapien
ttggtggagcccccgaagtggatct

SEQ ID NO: 3101248 - DNA, 25 bp, Homo sapien
cttggtggagcccccgaagtggatc

SEQ ID NO: 3101249 - DNA, 25 bp, Homo sapien
ggtggagcccccgaagtggatctgc

SEQ ID NO: 3101250 - DNA, 25 bp, Homo sapien
tggagcccccgaagtggatctgcac

SEQ ID NO: 3101251 - DNA, 25 bp, Homo sapien
ccaggtcaccccgagggaaggcgct

SEQ ID NO: 3101252 - DNA, 25 bp, Homo sapien
agcatcttggagtgcatggagcgca

SEQ ID NO: 3101253 - DNA, 25 bp, Homo sapien
aggcgccccacgctctgctccatct

SEQ ID NO: 3101254 - DNA, 25 bp, Homo sapien
tctgcgccaggtcaccccgagggaa

SEQ ID NO: 3101255 - DNA, 25 bp, Homo sapien
tgaagtcctctgaactatggactcc

SEQ ID NO: 3101256 - DNA, 25 bp, Homo sapien
gaagtcctctgaactatggactccc

SEQ ID NO: 3101257 - DNA, 25 bp, Homo sapien
ccatatgtcccatatgctgtcccat

SEQ ID NO: 3101258 - DNA, 25 bp, Homo sapien
tcccatatgctgtcccatagcatac

SEQ ID NO: 3101259 - DNA, 25 bp, Homo sapien
tatgtcccatatgctgtcccatagc

SEQ ID NO: 3101260 - DNA, 25 bp, Homo sapien
tgtcccatatgctgtcccatagcat

SEQ ID NO: 3101261 - DNA, 25 bp, Homo sapien
atgctgccggacctgctccagttca

SEQ ID NO: 3101262 - DNA, 25 bp, Homo sapien
ttgcggctatgctgccggacctgct

SEQ ID NO: 3101263 - DNA, 25 bp, Homo sapien
aatggtgcccaggtaggcctggacc

SEQ ID NO: 3101264 - DNA, 25 bp, Homo sapien
gctccagttcaaacaccgtgtaggg

SEQ ID NO: 3101265 - DNA, 25 bp, Homo sapien
gcagtggaaatgtgccaggagctgc

SEQ ID NO: 3101266 - DNA, 25 bp, Homo sapien
tctccaagggccggtcacatgagag

SEQ ID NO: 3101267 - DNA, 25 bp, Homo sapien
tccaagggccggtcacatgagaggc

SEQ ID NO: 3101268 - DNA, 25 bp, Homo sapien
acatgagaggcagtggaaatgtgcc

SEQ ID NO: 3101269 - DNA, 25 bp, Homo sapien
gagctgctgtcgcagcgatttccac

SEQ ID NO: 3101270 - DNA, 25 bp, Homo sapien
tgtcgcagcgatttccaccgatcct

SEQ ID NO: 3101271 - DNA, 25 bp, Homo sapien
catggcagccgcctcgtctgcctgg

SEQ ID NO: 3101272 - DNA, 25 bp, Homo sapien
gcaactgcttcactgggtccagctc

SEQ ID NO: 3101273 - DNA, 25 bp, Homo sapien
tgtggttcagctgctccgtggtggc

SEQ ID NO: 3101274 - DNA, 25 bp, Homo sapien
tggacacggctcactttggtggcca

SEQ ID NO: 3101275 - DNA, 25 bp, Homo sapien
ttccttttcgagcttctccagaccc

SEQ ID NO: 3101276 - DNA, 25 bp, Homo sapien
tttccttttcgagcttctccagacc

SEQ ID NO: 3101277 - DNA, 25 bp, Homo sapien
ttttccttttcgagcttctccagac

SEQ ID NO: 3101278 - DNA, 25 bp, Homo sapien
tccttttcgagcttctccagaccct

SEQ ID NO: 3101279 - DNA, 25 bp, Homo sapien
agcaatgtccttctgtttctgccga

SEQ ID NO: 3101280 - DNA, 25 bp, Homo sapien
tgatgttgagcttctcgcagtcacc

SEQ ID NO: 3101281 - DNA, 25 bp, Homo sapien
ccgatggtcctcgatgaggttgctg

SEQ ID NO: 3101282 - DNA, 25 bp, Homo sapien
ttgagcttctcgcagtcaccctgca

SEQ ID NO: 3101283 - DNA, 25 bp, Homo sapien
cagcgtgctgacctgatggctcaca

SEQ ID NO: 3101284 - DNA, 25 bp, Homo sapien
caatgatcatcctgagcttgtccaa

SEQ ID NO: 3101285 - DNA, 25 bp, Homo sapien
tcttggagttgctcatagcgccgca

SEQ ID NO: 3101286 - DNA, 25 bp, Homo sapien
cggccaggctgttgaccatgtcttg

SEQ ID NO: 3101287 - DNA, 25 bp, Homo sapien
cttttctatgtcagccacggtgact

SEQ ID NO: 3101288 - DNA, 25 bp, Homo sapien
ctggtcctgcaggtaaagggaggct

SEQ ID NO: 3101289 - DNA, 25 bp, Homo sapien
gaggcttcagagacagaattttcca

SEQ ID NO: 3101290 - DNA, 25 bp, Homo sapien
ctgtcttggctctccctcaactcgg

SEQ ID NO: 3101291 - DNA, 25 bp, Homo sapien
gagtcccgggctatgcctctgtcct

SEQ ID NO: 3101292 - DNA, 25 bp, Homo sapien
caatggattttgtctagggagtccc

SEQ ID NO: 3101293 - DNA, 25 bp, Homo sapien
tcaggccagacccatgcagagcctg

SEQ ID NO: 3101294 - DNA, 25 bp, Homo sapien
ctgtggtgcacgatgagagactgcc

SEQ ID NO: 3101295 - DNA, 25 bp, Homo sapien
ccagctttcagttccttccctgctt

SEQ ID NO: 3101296 - DNA, 25 bp, Homo sapien
tccctgcttcttgattcccttcccc

SEQ ID NO: 3101297 - DNA, 25 bp, Homo sapien
ctgaggacacccagctgcaatctca

SEQ ID NO: 3101298 - DNA, 25 bp, Homo sapien
aggacacccagctgcaatctcagct

SEQ ID NO: 3101299 - DNA, 25 bp, Homo sapien
ctttggctagcgtctttacggtctt

SEQ ID NO: 3101300 - DNA, 25 bp, Homo sapien
ccaaacttctttggctagcgtcttt

SEQ ID NO: 3101301 - DNA, 25 bp, Homo sapien
tgccaaacttctttggctagcgtct

SEQ ID NO: 3101302 - DNA, 25 bp, Homo sapien
gcgtctttacggtcttcagctgctc

SEQ ID NO: 3101303 - DNA, 25 bp, Homo sapien
tgtgtagcagccaggagttgaggcc

SEQ ID NO: 3101304 - DNA, 25 bp, Homo sapien
gactcagggagatgtgtagcagcca

SEQ ID NO: 3101305 - DNA, 25 bp, Homo sapien
aatggtttctcctctatcggcaagc

SEQ ID NO: 3101306 - DNA, 25 bp, Homo sapien
gacatgctgttttcagggactcagg

SEQ ID NO: 3101307 - DNA, 25 bp, Homo sapien
gagctctcccatcagatgaaatgtc

SEQ ID NO: 3101308 - DNA, 25 bp, Homo sapien
tccaagtcggtttggccggcctgct

SEQ ID NO: 3101309 - DNA, 25 bp, Homo sapien
caggaactggatcttctccaagtcg

SEQ ID NO: 3101310 - DNA, 25 bp, Homo sapien
gatcttctccaagtcggtttggccg

SEQ ID NO: 3101311 - DNA, 25 bp, Homo sapien
tgaattgcgtcgctcactcaggact

SEQ ID NO: 3101312 - DNA, 25 bp, Homo sapien
gctgatcagcacttagataccctgg

SEQ ID NO: 3101313 - DNA, 25 bp, Homo sapien
ttctgataagactcggtcgacggag

SEQ ID NO: 3101314 - DNA, 25 bp, Homo sapien
caggaattccatgtcggtccgaggc

SEQ ID NO: 3101315 - DNA, 25 bp, Homo sapien
agctgcatctgggtatacctggtca

SEQ ID NO: 3101316 - DNA, 25 bp, Homo sapien
tgcatctgggtatacctggtcatgc

SEQ ID NO: 3101317 - DNA, 25 bp, Homo sapien
tctgggtatacctggtcatgctcac

SEQ ID NO: 3101318 - DNA, 25 bp, Homo sapien
tgagctgcatctgggtatacctggt

SEQ ID NO: 3101319 - DNA, 25 bp, Homo sapien
gctgataagtttctggtggtaccaa

SEQ ID NO: 3101320 - DNA, 25 bp, Homo sapien
tagatcccaaacctgtactcagtgg

SEQ ID NO: 3101321 - DNA, 25 bp, Homo sapien
ttgactggctaggagtggtgacacc

SEQ ID NO: 3101322 - DNA, 25 bp, Homo sapien
tgccaggatgcatcaaaccttgctg

SEQ ID NO: 3101323 - DNA, 25 bp, Homo sapien
ctgccaggaggtaccataccatgtt

SEQ ID NO: 3101324 - DNA, 25 bp, Homo sapien
ctgatataaaacctgtagaatctgc

SEQ ID NO: 3101325 - DNA, 25 bp, Homo sapien
gaggtaccataccatgttgatatgg

SEQ ID NO: 3101326 - DNA, 25 bp, Homo sapien
catgttgatatggacgtactgatat

SEQ ID NO: 3101327 - DNA, 25 bp, Homo sapien
caggttgtaccaggccatgtggatc

SEQ ID NO: 3101328 - DNA, 25 bp, Homo sapien
ccaaaccaagaggataggcaccagg

SEQ ID NO: 3101329 - DNA, 25 bp, Homo sapien
gaagagccacgaagctttgtgcctg

SEQ ID NO: 3101330 - DNA, 25 bp, Homo sapien
ttgtgcctggtgctatcaagcctgg

SEQ ID NO: 3101331 - DNA, 25 bp, Homo sapien
cgctgatgatctgcacgaggttgtg

SEQ ID NO: 3101332 - DNA, 25 bp, Homo sapien
gcacgaggttgtgccaaaccacgct

SEQ ID NO: 3101333 - DNA, 25 bp, Homo sapien
gttggatcaaaccacgctggtccat

SEQ ID NO: 3101334 - DNA, 25 bp, Homo sapien
aggtgggaccaaaccacgctgatga

SEQ ID NO: 3101335 - DNA, 25 bp, Homo sapien
tgcaccaggttgcaccacatcaatc

SEQ ID NO: 3101336 - DNA, 25 bp, Homo sapien
ggttgcaccacatcaatctgatctg

SEQ ID NO: 3101337 - DNA, 25 bp, Homo sapien
gcaccaggttgagccaaatcactct

SEQ ID NO: 3101338 - DNA, 25 bp, Homo sapien
ccaggctgatatgcaccaggctgca

SEQ ID NO: 3101339 - DNA, 25 bp, Homo sapien
gacaccctgacctgtgccagattgg

SEQ ID NO: 3101340 - DNA, 25 bp, Homo sapien
tggaccaaatcatgctgacctgtgc

SEQ ID NO: 3101341 - DNA, 25 bp, Homo sapien
tctgtaaaaggtagaaccaggccat

SEQ ID NO: 3101342 - DNA, 25 bp, Homo sapien
aactgggctgcacaaaaccttgctg

SEQ ID NO: 3101343 - DNA, 25 bp, Homo sapien
gaagtgaaccctccgtgcttagaaa

SEQ ID NO: 3101344 - DNA, 25 bp, Homo sapien
ccatgtgggtaagtgctagcaggca

SEQ ID NO: 3101345 - DNA, 25 bp, Homo sapien
cgatcatccatttcaggtggtggca

SEQ ID NO: 3101346 - DNA, 25 bp, Homo sapien
actggaccaggacgtgcatttcttc

SEQ ID NO: 3101347 - DNA, 25 bp, Homo sapien
actaataaggaaagatccctgcatt

SEQ ID NO: 3101348 - DNA, 25 bp, Homo sapien
taataaggaaagatccctgcatttc

SEQ ID NO: 3101349 - DNA, 25 bp, Homo sapien
ccactaataaggaaagatccctgca

SEQ ID NO: 3101350 - DNA, 25 bp, Homo sapien
cactaataaggaaagatccctgcat

SEQ ID NO: 3101351 - DNA, 25 bp, Homo sapien
aagaccacggcccaggcccccactg

SEQ ID NO: 3101352 - DNA, 25 bp, Homo sapien
caagaccacggcccaggcccccact

SEQ ID NO: 3101353 - DNA, 25 bp, Homo sapien
agaccacggcccaggcccccactgg

SEQ ID NO: 3101354 - DNA, 25 bp, Homo sapien
cacggcccaggcccccactggttca

SEQ ID NO: 3101355 - DNA, 25 bp, Homo sapien
aggtgaccatggtgacttcttctgc

SEQ ID NO: 3101356 - DNA, 25 bp, Homo sapien
ttgtgaggctctccagccgtccgta

SEQ ID NO: 3101357 - DNA, 25 bp, Homo sapien
caaactcagcttccggctgactagt

SEQ ID NO: 3101358 - DNA, 25 bp, Homo sapien
tgcaccaggaaccaaactcagcttc

SEQ ID NO: 3101359 - DNA, 25 bp, Homo sapien
cctggatggacaagccctggagaga

SEQ ID NO: 3101360 - DNA, 25 bp, Homo sapien
tgagagacggccagccccctggaga

SEQ ID NO: 3101361 - DNA, 25 bp, Homo sapien
gagccctttcccatggaactggctg

SEQ ID NO: 3101362 - DNA, 25 bp, Homo sapien
agagggccacactgagagacggcca

SEQ ID NO: 3101363 - DNA, 25 bp, Homo sapien
gaatagcttctctagttcatcaacc

SEQ ID NO: 3101364 - DNA, 25 bp, Homo sapien
tgctcccgatctttgaatagcttct

SEQ ID NO: 3101365 - DNA, 25 bp, Homo sapien
ctagttcatcaacccgctgtaaaag

SEQ ID NO: 3101366 - DNA, 25 bp, Homo sapien
ggaattgctcccgatctttgaatag

SEQ ID NO: 3101367 - DNA, 25 bp, Homo sapien
tgaaagcctgtaggatgaggcccac

SEQ ID NO: 3101368 - DNA, 25 bp, Homo sapien
aggaagggtgccaggtacctcaaca

SEQ ID NO: 3101369 - DNA, 25 bp, Homo sapien
ggtcctgggattcagtttgctccaa

SEQ ID NO: 3101370 - DNA, 25 bp, Homo sapien
gctccaacccacttgtgaaagcctg

SEQ ID NO: 3101371 - DNA, 25 bp, Homo sapien
aagctgagctcctcggcggcgtcct

SEQ ID NO: 3101372 - DNA, 25 bp, Homo sapien
agctgagctcctcggcggcgtcctt

SEQ ID NO: 3101373 - DNA, 25 bp, Homo sapien
aaagctgagctcctcggcggcgtcc

SEQ ID NO: 3101374 - DNA, 25 bp, Homo sapien
gtccgcaccctatcgaacgcccgca

SEQ ID NO: 3101375 - DNA, 25 bp, Homo sapien
gcaccctatcgaacgcccgcacgcc

SEQ ID NO: 3101376 - DNA, 25 bp, Homo sapien
tcccagtccgcaccctatcgaacgc

SEQ ID NO: 3101377 - DNA, 25 bp, Homo sapien
gatactcccagtccgcaccctatcg

SEQ ID NO: 3101378 - DNA, 25 bp, Homo sapien
tgctgcacgtgcgtggcgatgccct

SEQ ID NO: 3101379 - DNA, 25 bp, Homo sapien
tagcgcggccaggtcaagcccgctg

SEQ ID NO: 3101380 - DNA, 25 bp, Homo sapien
tggccgtccacacgcttgagctgct

SEQ ID NO: 3101381 - DNA, 25 bp, Homo sapien
tccggccactctagcgcggccaggt

SEQ ID NO: 3101382 - DNA, 25 bp, Homo sapien
gccgtgaagttgacggcgcccacct

SEQ ID NO: 3101383 - DNA, 25 bp, Homo sapien
ggttcttgagcatggccacgatgag

SEQ ID NO: 3101384 - DNA, 25 bp, Homo sapien
gctgaacgagctccggacggactgc

SEQ ID NO: 3101385 - DNA, 25 bp, Homo sapien
gctggaagtcgatccgggtattttg

SEQ ID NO: 3101386 - DNA, 25 bp, Homo sapien
gacctgactgctgttctgtatccat

SEQ ID NO: 3101387 - DNA, 25 bp, Homo sapien
tgtatccatggtcttctgctgtcta

SEQ ID NO: 3101388 - DNA, 25 bp, Homo sapien
aaggatttagcttcaacacttagga

SEQ ID NO: 3101389 - DNA, 25 bp, Homo sapien
ccacagacctgactgctgttctgta

SEQ ID NO: 3101390 - DNA, 25 bp, Homo sapien
tagtaatagggccacaggcgctcag

SEQ ID NO: 3101391 - DNA, 25 bp, Homo sapien
atttccctggagctgaaacaactaa

SEQ ID NO: 3101392 - DNA, 25 bp, Homo sapien
tattttctaatctgacatccttgga

SEQ ID NO: 3101393 - DNA, 25 bp, Homo sapien
gccactcagatacccagaggtggga

SEQ ID NO: 3101394 - DNA, 25 bp, Homo sapien
aagaagatatctaactccaggctgt

SEQ ID NO: 3101395 - DNA, 25 bp, Homo sapien
tccagggtcgagaccctcgtgaaag

SEQ ID NO: 3101396 - DNA, 25 bp, Homo sapien
aggctgtttcgagtcctcccttgca

SEQ ID NO: 3101397 - DNA, 25 bp, Homo sapien
tccatgtttccctcaggaggtccag

SEQ ID NO: 3101398 - DNA, 25 bp, Homo sapien
ttatcttgggacattgcagcttctg

SEQ ID NO: 3101399 - DNA, 25 bp, Homo sapien
tggattctccgaatggcttcagaaa

SEQ ID NO: 3101400 - DNA, 25 bp, Homo sapien
gatgtttcggaaaaggtaggccatg

SEQ ID NO: 3101401 - DNA, 25 bp, Homo sapien
gagggacagtattcgtcaccaccac

SEQ ID NO: 3101402 - DNA, 25 bp, Homo sapien
tcttggctcaagatttagaagcagc

SEQ ID NO: 3101403 - DNA, 25 bp, Homo sapien
tggctcaagatttagaagcagcctg

SEQ ID NO: 3101404 - DNA, 25 bp, Homo sapien
ttggctcaagatttagaagcagcct

SEQ ID NO: 3101405 - DNA, 25 bp, Homo sapien
cttggctcaagatttagaagcagcc

SEQ ID NO: 3101406 - DNA, 25 bp, Homo sapien
catagatcttataggcgcctctctc

SEQ ID NO: 3101407 - DNA, 25 bp, Homo sapien
tcgtctacggaggactcctcaatca

SEQ ID NO: 3101408 - DNA, 25 bp, Homo sapien
tctctctttcaggatctccgcggca

SEQ ID NO: 3101409 - DNA, 25 bp, Homo sapien
cgtgggtggccataacatagatctt

SEQ ID NO: 3101410 - DNA, 25 bp, Homo sapien
tgctactgcaaaggactcatgaccc

SEQ ID NO: 3101411 - DNA, 25 bp, Homo sapien
gagtggacaacctactgaccaagag

SEQ ID NO: 3101412 - DNA, 25 bp, Homo sapien
cctgtgacattacggctggagctga

SEQ ID NO: 3101413 - DNA, 25 bp, Homo sapien
tgcctgggtcaaagaacgagcatcc

SEQ ID NO: 3101414 - DNA, 25 bp, Homo sapien
tacagttatcggtggcttctctttg

SEQ ID NO: 3101415 - DNA, 25 bp, Homo sapien
tccaactacagttatcggtggcttc

SEQ ID NO: 3101416 - DNA, 25 bp, Homo sapien
cacgatgattgcgatgcggcctcca

SEQ ID NO: 3101417 - DNA, 25 bp, Homo sapien
gatgattgcgatgcggcctccaaca

SEQ ID NO: 3101418 - DNA, 25 bp, Homo sapien
gcacagtagcatttttgaccatagg

SEQ ID NO: 3101419 - DNA, 25 bp, Homo sapien
gagtgacgaccatcgtccatgtcca

SEQ ID NO: 3101420 - DNA, 25 bp, Homo sapien
tgcactgagcttccccgtgaatgac

SEQ ID NO: 3101421 - DNA, 25 bp, Homo sapien
tccatgtccagttccgtgcactgag

SEQ ID NO: 3101422 - DNA, 25 bp, Homo sapien
ggaagaaatcccacgcatcactacg

SEQ ID NO: 3101423 - DNA, 25 bp, Homo sapien
gaggcccaggccagcatgtaaatga

SEQ ID NO: 3101424 - DNA, 25 bp, Homo sapien
ttcagggacatacaaaggcattatt

SEQ ID NO: 3101425 - DNA, 25 bp, Homo sapien
gtaaatgactcaaagggcacgtgag

SEQ ID NO: 3101426 - DNA, 25 bp, Homo sapien
aaagcagctcattctgacttcggga

SEQ ID NO: 3101427 - DNA, 25 bp, Homo sapien
cgatcatgtgtgctgtctggaggct

SEQ ID NO: 3101428 - DNA, 25 bp, Homo sapien
taaagctgtgtgtggcatgggacat

SEQ ID NO: 3101429 - DNA, 25 bp, Homo sapien
ggatcaggacccatgtctagcttac

SEQ ID NO: 3101430 - DNA, 25 bp, Homo sapien
tttgcagcatcaggagacttagcta

SEQ ID NO: 3101431 - DNA, 25 bp, Homo sapien
gagacttagctacaatgactgcatt

SEQ ID NO: 3101432 - DNA, 25 bp, Homo sapien
gcagcatcaggagacttagctacaa

SEQ ID NO: 3101433 - DNA, 25 bp, Homo sapien
tcaggagacttagctacaatgactg

SEQ ID NO: 3101434 - DNA, 25 bp, Homo sapien
catcactggaaaaagcactcctacg

SEQ ID NO: 3101435 - DNA, 25 bp, Homo sapien
gctcatttgatgtgccttccagtaa

SEQ ID NO: 3101436 - DNA, 25 bp, Homo sapien
ttttaaagctatgatcgtccacgac

SEQ ID NO: 3101437 - DNA, 25 bp, Homo sapien
caggcattgtgacttaagggagagc

SEQ ID NO: 3101438 - DNA, 25 bp, Homo sapien
gctctaaggttgtccacaggaaagc

SEQ ID NO: 3101439 - DNA, 25 bp, Homo sapien
cttttgatgaagatccatagtgata

SEQ ID NO: 3101440 - DNA, 25 bp, Homo sapien
tccatagtgataatgtgagttaaac

SEQ ID NO: 3101441 - DNA, 25 bp, Homo sapien
ggtgaggctctaaggttgtccacag

SEQ ID NO: 3101442 - DNA, 25 bp, Homo sapien
gcttgcacacaatggaacccctctt

SEQ ID NO: 3101443 - DNA, 25 bp, Homo sapien
ttcagtgcgtaagccatgatgagca

SEQ ID NO: 3101444 - DNA, 25 bp, Homo sapien
tgaccccaataatgttcctggcaca

SEQ ID NO: 3101445 - DNA, 25 bp, Homo sapien
agcatggatgctagcagcttgcaca

SEQ ID NO: 3101446 - DNA, 25 bp, Homo sapien
tggccacgaacagattcttttattt

SEQ ID NO: 3101447 - DNA, 25 bp, Homo sapien
tgaaaatatcttggccacgaacaga

SEQ ID NO: 3101448 - DNA, 25 bp, Homo sapien
ctgggtattgtctgtataatgaaaa

SEQ ID NO: 3101449 - DNA, 25 bp, Homo sapien
aatgaaaatatcttggccacgaaca

SEQ ID NO: 3101450 - DNA, 25 bp, Homo sapien
atgttctgaagttttaagaaaagct

SEQ ID NO: 3101451 - DNA, 25 bp, Homo sapien
tgttctgaagttttaagaaaagctc

SEQ ID NO: 3101452 - DNA, 25 bp, Homo sapien
ctgaaaaataaaaatgttctgaagt

SEQ ID NO: 3101453 - DNA, 25 bp, Homo sapien
aacagacttccccaattcagcacca

SEQ ID NO: 3101454 - DNA, 25 bp, Homo sapien
agacttccccaattcagcaccaagg

SEQ ID NO: 3101455 - DNA, 25 bp, Homo sapien
tggtctcttgatatacaacagactt

SEQ ID NO: 3101456 - DNA, 25 bp, Homo sapien
ctcttgatatacaacagacttcccc

SEQ ID NO: 3101457 - DNA, 25 bp, Homo sapien
gcccgcgggtctcactgcagtgaga

SEQ ID NO: 3101458 - DNA, 25 bp, Homo sapien
tccaagctttgtccggctgggaagg

SEQ ID NO: 3101459 - DNA, 25 bp, Homo sapien
tgaggtcaccgagagtccgccccaa

SEQ ID NO: 3101460 - DNA, 25 bp, Homo sapien
caggtcaactccagccgtgggaaag

SEQ ID NO: 3101461 - DNA, 25 bp, Homo sapien
ggtagccggtgcgagcggcgttcat

SEQ ID NO: 3101462 - DNA, 25 bp, Homo sapien
cagctccgtgcaggcggccgtggag

SEQ ID NO: 3101463 - DNA, 25 bp, Homo sapien
agttggccgagaagactcggtagcc

SEQ ID NO: 3101464 - DNA, 25 bp, Homo sapien
ggccgtggagttggccgagaagact

SEQ ID NO: 3101465 - DNA, 25 bp, Homo sapien
acgcggaaagccgaggacgcggagg

SEQ ID NO: 3101466 - DNA, 25 bp, Homo sapien
gcgcgggacgcggaaagccgaggac

SEQ ID NO: 3101467 - DNA, 25 bp, Homo sapien
gcggaaagccgaggacgcggagggc

SEQ ID NO: 3101468 - DNA, 25 bp, Homo sapien
cgggacgcggaaagccgaggacgcg

SEQ ID NO: 3101469 - DNA, 25 bp, Homo sapien
gaaggcgctgagaaactcggcgcaa

SEQ ID NO: 3101470 - DNA, 25 bp, Homo sapien
cgactgcgagaccccggtttgggtg

SEQ ID NO: 3101471 - DNA, 25 bp, Homo sapien
gggctgcactctgagtgcttccgac

SEQ ID NO: 3101472 - DNA, 25 bp, Homo sapien
cactctgagtgcttccgactgcgag

SEQ ID NO: 3101473 - DNA, 25 bp, Homo sapien
tgactacagcggccgagccttcgca

SEQ ID NO: 3101474 - DNA, 25 bp, Homo sapien
gtgcccttgcgcaccccacaccact

SEQ ID NO: 3101475 - DNA, 25 bp, Homo sapien
ggagagctccgaggtccgtgccctt

SEQ ID NO: 3101476 - DNA, 25 bp, Homo sapien
cacaccactgactacagcggccgag

SEQ ID NO: 3101477 - DNA, 25 bp, Homo sapien
gacccaacatgtccgcctccgagga

SEQ ID NO: 3101478 - DNA, 25 bp, Homo sapien
caggacccaacatgtccgcctccga

SEQ ID NO: 3101479 - DNA, 25 bp, Homo sapien
tggccaggacccaacatgtccgcct

SEQ ID NO: 3101480 - DNA, 25 bp, Homo sapien
tcggtagtggccccaggtgtttcca

SEQ ID NO: 3101481 - DNA, 25 bp, Homo sapien
aaaaaagactcaggcctccgagaca

SEQ ID NO: 3101482 - DNA, 25 bp, Homo sapien
caggcggcatgctcctataccacta

SEQ ID NO: 3101483 - DNA, 25 bp, Homo sapien
taccactaaaggctgcaaattgagg

SEQ ID NO: 3101484 - DNA, 25 bp, Homo sapien
caaattgaggtgacagatctgctag

SEQ ID NO: 3101485 - DNA, 25 bp, Homo sapien
tcccagtagatcacaccttggcaag

SEQ ID NO: 3101486 - DNA, 25 bp, Homo sapien
gccagcataggcataaacaactcct

SEQ ID NO: 3101487 - DNA, 25 bp, Homo sapien
aacatctgaaagtcaagggagcagg

SEQ ID NO: 3101488 - DNA, 25 bp, Homo sapien
gaggatgccatacgccaaggtgtaa

SEQ ID NO: 3101489 - DNA, 25 bp, Homo sapien
tcgctccgacacgagttcgcgcgga

SEQ ID NO: 3101490 - DNA, 25 bp, Homo sapien
ccttctagccagacgcctaggacga

SEQ ID NO: 3101491 - DNA, 25 bp, Homo sapien
ctaggcggcctcaggctcggtagcc

SEQ ID NO: 3101492 - DNA, 25 bp, Homo sapien
ccagctgcagcgtcgggaagttaaa

SEQ ID NO: 3101493 - DNA, 25 bp, Homo sapien
gtgtctacttgcaggacccttcctc

SEQ ID NO: 3101494 - DNA, 25 bp, Homo sapien
tgtgccttagtgtctacttgcagga

SEQ ID NO: 3101495 - DNA, 25 bp, Homo sapien
gaagagcccttatgacccctgggcc

SEQ ID NO: 3101496 - DNA, 25 bp, Homo sapien
cctgggccgcgctgtgccttagtgt

SEQ ID NO: 3101497 - DNA, 25 bp, Homo sapien
ttgtcttgctaatgagccaacacaa

SEQ ID NO: 3101498 - DNA, 25 bp, Homo sapien
ttaatggtgtcaccttgtcttgcta

SEQ ID NO: 3101499 - DNA, 25 bp, Homo sapien
aatggcagagggaggtttaatggtg

SEQ ID NO: 3101500 - DNA, 25 bp, Homo sapien
cagagggaggtttaatggtgtcacc

SEQ ID NO: 3101501 - DNA, 25 bp, Homo sapien
cctgagggctataacgtggtcgaca

SEQ ID NO: 3101502 - DNA, 25 bp, Homo sapien
tgtacaatgcactgggaagcacagc

SEQ ID NO: 3101503 - DNA, 25 bp, Homo sapien
taggccttctagtccaagagagggc

SEQ ID NO: 3101504 - DNA, 25 bp, Homo sapien
gactcggttccaaatgccacggtgt

SEQ ID NO: 3101505 - DNA, 25 bp, Homo sapien
ggacaccccggatgctcttgatgaa

SEQ ID NO: 3101506 - DNA, 25 bp, Homo sapien
taaagtgttgcctgatctcctgctc

SEQ ID NO: 3101507 - DNA, 25 bp, Homo sapien
ggaagccgatgtcagggtagccact

SEQ ID NO: 3101508 - DNA, 25 bp, Homo sapien
tccagccaggactcgatacggttca

SEQ ID NO: 3101509 - DNA, 25 bp, Homo sapien
ctccaccggccctcccttgtccgca

SEQ ID NO: 3101510 - DNA, 25 bp, Homo sapien
acctgccagggggactatcagagtc

SEQ ID NO: 3101511 - DNA, 25 bp, Homo sapien
cagggggactatcagagtcactttc

SEQ ID NO: 3101512 - DNA, 25 bp, Homo sapien
gagagaggcccacaatgcaggccta

SEQ ID NO: 3101513 - DNA, 25 bp, Homo sapien
tgagcacctggagaaggctggactt

SEQ ID NO: 3101514 - DNA, 25 bp, Homo sapien
ggacttgcttgtccacctctctgtc

SEQ ID NO: 3101515 - DNA, 25 bp, Homo sapien
acctggagaaggctggacttgcttg

SEQ ID NO: 3101516 - DNA, 25 bp, Homo sapien
cttggatggagatgagcacctggag

SEQ ID NO: 3101517 - DNA, 25 bp, Homo sapien
aaacacacagggcaccatcaattct

SEQ ID NO: 3101518 - DNA, 25 bp, Homo sapien
ttccccaggcccctatccaccagtg

SEQ ID NO: 3101519 - DNA, 25 bp, Homo sapien
caggcccctatccaccagtggctct

SEQ ID NO: 3101520 - DNA, 25 bp, Homo sapien
ctgttccccaggcccctatccacca

SEQ ID NO: 3101521 - DNA, 25 bp, Homo sapien
tgtcaaacaagtagaggccatcctc

SEQ ID NO: 3101522 - DNA, 25 bp, Homo sapien
gggagctggatgtcaaacaagtaga

SEQ ID NO: 3101523 - DNA, 25 bp, Homo sapien
tgcattgggagaggtagcagaagtg

SEQ ID NO: 3101524 - DNA, 25 bp, Homo sapien
acaagtagaggccatcctcgtaggg

SEQ ID NO: 3101525 - DNA, 25 bp, Homo sapien
ccagctactcaaaaagcttagatgg

SEQ ID NO: 3101526 - DNA, 25 bp, Homo sapien
gctactcaaaaagcttagatgggag

SEQ ID NO: 3101527 - DNA, 25 bp, Homo sapien
tcaaaaagcttagatgggaggatca

SEQ ID NO: 3101528 - DNA, 25 bp, Homo sapien
tactcaaaaagcttagatgggagga

SEQ ID NO: 3101529 - DNA, 25 bp, Homo sapien
aggactctgcctagccctgttccag

SEQ ID NO: 3101530 - DNA, 25 bp, Homo sapien
tgctcttatcggtgccaccctggga

SEQ ID NO: 3101531 - DNA, 25 bp, Homo sapien
tattaagaatctcaagcagcactgg

SEQ ID NO: 3101532 - DNA, 25 bp, Homo sapien
agggttgtggctactccgggcccat

SEQ ID NO: 3101533 - DNA, 25 bp, Homo sapien
tcagcgctgcctcagtaaacatgac

SEQ ID NO: 3101534 - DNA, 25 bp, Homo sapien
gcaaacgggcttgcctgttccggaa

SEQ ID NO: 3101535 - DNA, 25 bp, Homo sapien
aattagagatgatgtgtacgacgac

SEQ ID NO: 3101536 - DNA, 25 bp, Homo sapien
tgttccggaaggatgcactcagcgc

SEQ ID NO: 3101537 - DNA, 25 bp, Homo sapien
gaaccatctggcctggacacacggc

SEQ ID NO: 3101538 - DNA, 25 bp, Homo sapien
catctggcctggacacacggctgag

SEQ ID NO: 3101539 - DNA, 25 bp, Homo sapien
tggacacacggctgagtcagccctc

SEQ ID NO: 3101540 - DNA, 25 bp, Homo sapien
tggcctggacacacggctgagtcag

SEQ ID NO: 3101541 - DNA, 25 bp, Homo sapien
gcctcttgggcactgggtgcccaca

SEQ ID NO: 3101542 - DNA, 25 bp, Homo sapien
gtgtcctcgcaggtgccagtcagcc

SEQ ID NO: 3101543 - DNA, 25 bp, Homo sapien
cccaaggttggtggcctcttgggca

SEQ ID NO: 3101544 - DNA, 25 bp, Homo sapien
gtgggtgagtgtcctcgcaggtgcc

SEQ ID NO: 3101545 - DNA, 25 bp, Homo sapien
cgccatctccttccgcactgtgctg

SEQ ID NO: 3101546 - DNA, 25 bp, Homo sapien
cgcactgtgctgaagaacttcttgg

SEQ ID NO: 3101547 - DNA, 25 bp, Homo sapien
cttccgcactgtgctgaagaacttc

SEQ ID NO: 3101548 - DNA, 25 bp, Homo sapien
tccgcactgtgctgaagaacttctt

SEQ ID NO: 3101549 - DNA, 25 bp, Homo sapien
tctggtgacacaaacaggagccccg

SEQ ID NO: 3101550 - DNA, 25 bp, Homo sapien
tgaccacacagggaaatggtttgcc

SEQ ID NO: 3101551 - DNA, 25 bp, Homo sapien
gacaggtgagcacacccacagactt

SEQ ID NO: 3101552 - DNA, 25 bp, Homo sapien
gaagagaatagtcagtccctcatgg

SEQ ID NO: 3101553 - DNA, 25 bp, Homo sapien
aactccagtacggagaagacctcgc

SEQ ID NO: 3101554 - DNA, 25 bp, Homo sapien
ggcttgtcctccttgcgctctacgt

SEQ ID NO: 3101555 - DNA, 25 bp, Homo sapien
tgaaggtgacgccaggcttgccgcc

SEQ ID NO: 3101556 - DNA, 25 bp, Homo sapien
cagaaacttcttctcccgagttggc

SEQ ID NO: 3101557 - DNA, 25 bp, Homo sapien
gaatcgtagtctgactcctcaatct

SEQ ID NO: 3101558 - DNA, 25 bp, Homo sapien
attcatccgaggatgccccgctggt

SEQ ID NO: 3101559 - DNA, 25 bp, Homo sapien
ggtgctgccttctaccgaatcgtag

SEQ ID NO: 3101560 - DNA, 25 bp, Homo sapien
aagctcttgggtggcccgtccttgc

SEQ ID NO: 3101561 - DNA, 25 bp, Homo sapien
tgctgctgacgtccacacgggccac

SEQ ID NO: 3101562 - DNA, 25 bp, Homo sapien
ctgacgtccacacgggccacctggc

SEQ ID NO: 3101563 - DNA, 25 bp, Homo sapien
tctttgagttgtcagcccacaccac

SEQ ID NO: 3101564 - DNA, 25 bp, Homo sapien
ggtctttgagttgtcagcccacacc

SEQ ID NO: 3101565 - DNA, 25 bp, Homo sapien
aagtcagggtggtcagcaatgtcgt

SEQ ID NO: 3101566 - DNA, 25 bp, Homo sapien
attgccgatgcggatgacgatgtca

SEQ ID NO: 3101567 - DNA, 25 bp, Homo sapien
catcctcagtattgccgatgcggat

SEQ ID NO: 3101568 - DNA, 25 bp, Homo sapien
cagttgtacggaacctaaagtcagg

SEQ ID NO: 3101569 - DNA, 25 bp, Homo sapien
cggccgatgtggtccccagactgta

SEQ ID NO: 3101570 - DNA, 25 bp, Homo sapien
agcttgaaccacttcaccatgcagg

SEQ ID NO: 3101571 - DNA, 25 bp, Homo sapien
ttcaccatgcaggtacggccgatgt

SEQ ID NO: 3101572 - DNA, 25 bp, Homo sapien
tgtaccacaccgtagacagcagggt

SEQ ID NO: 3101573 - DNA, 25 bp, Homo sapien
cagaactcgttgttgtccaggtggt

SEQ ID NO: 3101574 - DNA, 25 bp, Homo sapien
gcggatgttgcattccacggagcca

SEQ ID NO: 3101575 - DNA, 25 bp, Homo sapien
gccacatcacgtcggctgaggtcat

SEQ ID NO: 3101576 - DNA, 25 bp, Homo sapien
tatctaccacgaagtctccagggca

SEQ ID NO: 3101577 - DNA, 25 bp, Homo sapien
cgtggtcaccacctccactgccacc

SEQ ID NO: 3101578 - DNA, 25 bp, Homo sapien
tggtgtcgtccgtgtcatcagcagc

SEQ ID NO: 3101579 - DNA, 25 bp, Homo sapien
cagaggaggtcaccgaactggtgtc

SEQ ID NO: 3101580 - DNA, 25 bp, Homo sapien
gatgctctttttgcgactcgtgccg

SEQ ID NO: 3101581 - DNA, 25 bp, Homo sapien
tgtcccctggcttgaagtctcgagt

SEQ ID NO: 3101582 - DNA, 25 bp, Homo sapien
tgccgctgagcatggtcaaagcatc

SEQ ID NO: 3101583 - DNA, 25 bp, Homo sapien
cccaagctgccgctgagcatggtca

SEQ ID NO: 3101584 - DNA, 25 bp, Homo sapien
agacatacagacagcgctccccaag

SEQ ID NO: 3101585 - DNA, 25 bp, Homo sapien
tggtcaaagcatccgagacgcttca

SEQ ID NO: 3101586 - DNA, 25 bp, Homo sapien
catgtaactttcaactctacaacct

SEQ ID NO: 3101587 - DNA, 25 bp, Homo sapien
tgtaactttcaactctacaacctgc

SEQ ID NO: 3101588 - DNA, 25 bp, Homo sapien
atgtaactttcaactctacaacctg

SEQ ID NO: 3101589 - DNA, 25 bp, Homo sapien
ccactcggaacttgctcttggtgct

SEQ ID NO: 3101590 - DNA, 25 bp, Homo sapien
ctgagcacgggcttgacacctgaca

SEQ ID NO: 3101591 - DNA, 25 bp, Homo sapien
ttggcagggccaatgagcacctggc

SEQ ID NO: 3101592 - DNA, 25 bp, Homo sapien
cataggaatcatcgaagaagagacc

SEQ ID NO: 3101593 - DNA, 25 bp, Homo sapien
gccatcttccgtgttcatggagcac

SEQ ID NO: 3101594 - DNA, 25 bp, Homo sapien
gagtcgctgacgtgcgggcagacgt

SEQ ID NO: 3101595 - DNA, 25 bp, Homo sapien
gacgtcgtagagcttggcgccatct

SEQ ID NO: 3101596 - DNA, 25 bp, Homo sapien
cgtgcgggcagacgtcgtagagctt

SEQ ID NO: 3101597 - DNA, 25 bp, Homo sapien
gatctggttcttcaagtcgtagacc

SEQ ID NO: 3101598 - DNA, 25 bp, Homo sapien
tggttcttcaagtcgtagaccttcc

SEQ ID NO: 3101599 - DNA, 25 bp, Homo sapien
tccccagccagcagtcataggcaat

SEQ ID NO: 3101600 - DNA, 25 bp, Homo sapien
taggcaatgtagtccccatacatga

SEQ ID NO: 3101601 - DNA, 25 bp, Homo sapien
tgagcttgacggcacagtcgatgtt

SEQ ID NO: 3101602 - DNA, 25 bp, Homo sapien
aggtccttgctgttgacgggataga

SEQ ID NO: 3101603 - DNA, 25 bp, Homo sapien
tgttgacgggatagatgatgcagtt

SEQ ID NO: 3101604 - DNA, 25 bp, Homo sapien
gtcgatcaccgtgccacactgactg

SEQ ID NO: 3101605 - DNA, 25 bp, Homo sapien
ggtggatcgcatgtgccggaccaca

SEQ ID NO: 3101606 - DNA, 25 bp, Homo sapien
gtggatcgcatgtgccggaccacat

SEQ ID NO: 3101607 - DNA, 25 bp, Homo sapien
tcggggcaccacagaacggtcctct

SEQ ID NO: 3101608 - DNA, 25 bp, Homo sapien
ccacagaacggtcctctagtttcag

SEQ ID NO: 3101609 - DNA, 25 bp, Homo sapien
gaggctgacccccaataacacagca

SEQ ID NO: 3101610 - DNA, 25 bp, Homo sapien
cttgactgaccaggtggaatccaaa

SEQ ID NO: 3101611 - DNA, 25 bp, Homo sapien
tcattcataacactgaccttgactg

SEQ ID NO: 3101612 - DNA, 25 bp, Homo sapien
tctgagctgcagtcttgaggctgac

SEQ ID NO: 3101613 - DNA, 25 bp, Homo sapien
aaaaggcggctttgtgcctggccac

SEQ ID NO: 3101614 - DNA, 25 bp, Homo sapien
ggcctgcatggagcctaagcactta

SEQ ID NO: 3101615 - DNA, 25 bp, Homo sapien
tgattgtcatgtccctgtaggagcg

SEQ ID NO: 3101616 - DNA, 25 bp, Homo sapien
tttgaacactaaatgggctcccagt

SEQ ID NO: 3101617 - DNA, 25 bp, Homo sapien
tgcctggccccaatactaggttttc

SEQ ID NO: 3101618 - DNA, 25 bp, Homo sapien
atcaccgcctggaaactcggctgca

SEQ ID NO: 3101619 - DNA, 25 bp, Homo sapien
tctctgatctcacaacgcagactct

SEQ ID NO: 3101620 - DNA, 25 bp, Homo sapien
gctcgccagcttgctggaatggcct

SEQ ID NO: 3101621 - DNA, 25 bp, Homo sapien
tctcacaacgcagactctcaggctg

SEQ ID NO: 3101622 - DNA, 25 bp, Homo sapien
tagaggccatcactaaaaccacctg

SEQ ID NO: 3101623 - DNA, 25 bp, Homo sapien
gaagggccttcgactacaggaggaa

SEQ ID NO: 3101624 - DNA, 25 bp, Homo sapien
ccaggagagctatctgaagagaacc

SEQ ID NO: 3101625 - DNA, 25 bp, Homo sapien
tcctttttatgagtgtggacacacc

SEQ ID NO: 3101626 - DNA, 25 bp, Homo sapien
tttccgctggtatttgagtcctggc

SEQ ID NO: 3101627 - DNA, 25 bp, Homo sapien
gatggtgctgtttccgctggtattt

SEQ ID NO: 3101628 - DNA, 25 bp, Homo sapien
tgcagaattgggcagaaactcctcc

SEQ ID NO: 3101629 - DNA, 25 bp, Homo sapien
cctggctcactgcatttagaggagc

SEQ ID NO: 3101630 - DNA, 25 bp, Homo sapien
ctctgctcaggtggtccagatccca

SEQ ID NO: 3101631 - DNA, 25 bp, Homo sapien
ctcaggtggtccagatcccagcctg

SEQ ID NO: 3101632 - DNA, 25 bp, Homo sapien
tgctcaggtggtccagatcccagcc

SEQ ID NO: 3101633 - DNA, 25 bp, Homo sapien
tctgctcaggtggtccagatcccag

SEQ ID NO: 3101634 - DNA, 25 bp, Homo sapien
tcccagggatggagtaattagcacc

SEQ ID NO: 3101635 - DNA, 25 bp, Homo sapien
caaaatgctagttctcgtggcctct

SEQ ID NO: 3101636 - DNA, 25 bp, Homo sapien
gaggaagtcaacaagtcgctggcca

SEQ ID NO: 3101637 - DNA, 25 bp, Homo sapien
tttaagggacaaccaagccacagga

SEQ ID NO: 3101638 - DNA, 25 bp, Homo sapien
catgcccagccaaaagaactttttt

SEQ ID NO: 3101639 - DNA, 25 bp, Homo sapien
caacgcctctggataccattactgt

SEQ ID NO: 3101640 - DNA, 25 bp, Homo sapien
gctggttgctgaaaactaagccaac

SEQ ID NO: 3101641 - DNA, 25 bp, Homo sapien
ttcccgaagtacagcgaaggtctct

SEQ ID NO: 3101642 - DNA, 25 bp, Homo sapien
tagtgacgatcactttcagaagcga

SEQ ID NO: 3101643 - DNA, 25 bp, Homo sapien
taatgggagcggttctaactttagc

SEQ ID NO: 3101644 - DNA, 25 bp, Homo sapien
ttgttagggtcgatttcagggtcca

SEQ ID NO: 3101645 - DNA, 25 bp, Homo sapien
caagctaccatgtcactgaaacagg

SEQ ID NO: 3101646 - DNA, 25 bp, Homo sapien
tcagggtccaatgaacccaccttgc

SEQ ID NO: 3101647 - DNA, 25 bp, Homo sapien
cggccatgcttgtagatgagtttat

SEQ ID NO: 3101648 - DNA, 25 bp, Homo sapien
gccacagtatagagctcatgaatca

SEQ ID NO: 3101649 - DNA, 25 bp, Homo sapien
tttgccacggccatgcttgtagatg

SEQ ID NO: 3101650 - DNA, 25 bp, Homo sapien
gaccatgagactgatcaatcaaagt

SEQ ID NO: 3101651 - DNA, 25 bp, Homo sapien
ttaactgaaggtctgctgaacttca

SEQ ID NO: 3101652 - DNA, 25 bp, Homo sapien
gttaactgaaggtctgctgaacttc

SEQ ID NO: 3101653 - DNA, 25 bp, Homo sapien
taactgaaggtctgctgaacttcac

SEQ ID NO: 3101654 - DNA, 25 bp, Homo sapien
tgcctagattccttgtggtagtgct

SEQ ID NO: 3101655 - DNA, 25 bp, Homo sapien
cctagattccttgtggtagtgcttc

SEQ ID NO: 3101656 - DNA, 25 bp, Homo sapien
atctgcctagattccttgtggtagt

SEQ ID NO: 3101657 - DNA, 25 bp, Homo sapien
tagattccttgtggtagtgcttcac

SEQ ID NO: 3101658 - DNA, 25 bp, Homo sapien
ttcttcgtgcataagtttcctccct

SEQ ID NO: 3101659 - DNA, 25 bp, Homo sapien
ttcgtgcataagtttcctccctgcc

SEQ ID NO: 3101660 - DNA, 25 bp, Homo sapien
cgtgcataagtttcctccctgcctt

SEQ ID NO: 3101661 - DNA, 25 bp, Homo sapien
tcttcgtgcataagtttcctccctg

SEQ ID NO: 3101662 - DNA, 25 bp, Homo sapien
gggacaggctaaatacacgcttcga

SEQ ID NO: 3101663 - DNA, 25 bp, Homo sapien
aatatcttttttgcgagatgcagtc

SEQ ID NO: 3101664 - DNA, 25 bp, Homo sapien
gatacgaggactttctgtatgatct

SEQ ID NO: 3101665 - DNA, 25 bp, Homo sapien
gaggtgtctctcgttgcctggatgc

SEQ ID NO: 3101666 - DNA, 25 bp, Homo sapien
aggttcgatagatttcagattttac

SEQ ID NO: 3101667 - DNA, 25 bp, Homo sapien
tccatcagtaagaccaacataacca

SEQ ID NO: 3101668 - DNA, 25 bp, Homo sapien
acataaccagtgtttcctcttgcac

SEQ ID NO: 3101669 - DNA, 25 bp, Homo sapien
gaaaaatcccttaaatccatcagta

SEQ ID NO: 3101670 - DNA, 25 bp, Homo sapien
ttggacaattcccggttcattaaca

SEQ ID NO: 3101671 - DNA, 25 bp, Homo sapien
gacaattcccggttcattaacactg

SEQ ID NO: 3101672 - DNA, 25 bp, Homo sapien
caattcccggttcattaacactggc

SEQ ID NO: 3101673 - DNA, 25 bp, Homo sapien
tggacaattcccggttcattaacac

SEQ ID NO: 3101674 - DNA, 25 bp, Homo sapien
gacgttcctgattgtaacttgcccc

SEQ ID NO: 3101675 - DNA, 25 bp, Homo sapien
ttccatcagaataggagcacagatc

SEQ ID NO: 3101676 - DNA, 25 bp, Homo sapien
ttttaaatcagcaactccccatcgc

SEQ ID NO: 3101677 - DNA, 25 bp, Homo sapien
gatagcctcttgtaaactggaaagc

SEQ ID NO: 3101678 - DNA, 25 bp, Homo sapien
catctggggaaagtacccttgagtc

SEQ ID NO: 3101679 - DNA, 25 bp, Homo sapien
aagtacccttgagtcaggcagcagc

SEQ ID NO: 3101680 - DNA, 25 bp, Homo sapien
acccttgagtcaggcagcagccaga

SEQ ID NO: 3101681 - DNA, 25 bp, Homo sapien
gggaaagtacccttgagtcaggcag

SEQ ID NO: 3101682 - DNA, 25 bp, Homo sapien
ctacctcgctgaacaggtcagaaga

SEQ ID NO: 3101683 - DNA, 25 bp, Homo sapien
gctacctcgctgaacaggtcagaag

SEQ ID NO: 3101684 - DNA, 25 bp, Homo sapien
ggctacctcgctgaacaggtcagaa

SEQ ID NO: 3101685 - DNA, 25 bp, Homo sapien
tggctacctcgctgaacaggtcaga

SEQ ID NO: 3101686 - DNA, 25 bp, Homo sapien
caaaaattttcaataggtagcagct

SEQ ID NO: 3101687 - DNA, 25 bp, Homo sapien
cccgggaagttgaggttgtaatgag

SEQ ID NO: 3101688 - DNA, 25 bp, Homo sapien
cacaaaaattttcaataggtagcag

SEQ ID NO: 3101689 - DNA, 25 bp, Homo sapien
aaattttcaataggtagcagcttat

SEQ ID NO: 3101690 - DNA, 25 bp, Homo sapien
tagaagtcccctcaagtcgggaagc

SEQ ID NO: 3101691 - DNA, 25 bp, Homo sapien
ccggcacggccttcatttctggatg

SEQ ID NO: 3101692 - DNA, 25 bp, Homo sapien
taggagtcatcaatcccggtcgcag

SEQ ID NO: 3101693 - DNA, 25 bp, Homo sapien
aaaacgccgcactggtgtaacgccg

SEQ ID NO: 3101694 - DNA, 25 bp, Homo sapien
gtaacggcccgacaccaggtcgtga

SEQ ID NO: 3101695 - DNA, 25 bp, Homo sapien
acatgctgcttgacgccctccgggt

SEQ ID NO: 3101696 - DNA, 25 bp, Homo sapien
gtcgtgagaaaacagcaggcgctgc

SEQ ID NO: 3101697 - DNA, 25 bp, Homo sapien
gagtccgagtcctcgccgtggatga

SEQ ID NO: 3101698 - DNA, 25 bp, Homo sapien
cggcccggaggccgagtccgaggcg

SEQ ID NO: 3101699 - DNA, 25 bp, Homo sapien
actgctctgcgcgagtctcgggcgg

SEQ ID NO: 3101700 - DNA, 25 bp, Homo sapien
ctgctctgcgcgagtctcgggcggc

SEQ ID NO: 3101701 - DNA, 25 bp, Homo sapien
aactgctctgcgcgagtctcgggcg

SEQ ID NO: 3101702 - DNA, 25 bp, Homo sapien
tgctctgcgcgagtctcgggcggcg

SEQ ID NO: 3101703 - DNA, 25 bp, Homo sapien
cttctcattggtggtggtatgtggt

SEQ ID NO: 3101704 - DNA, 25 bp, Homo sapien
tcattggtggtggtatgtggttttc

SEQ ID NO: 3101705 - DNA, 25 bp, Homo sapien
ttggtggtggtatgtggttttcttc

SEQ ID NO: 3101706 - DNA, 25 bp, Homo sapien
tctcattggtggtggtatgtggttt

SEQ ID NO: 3101707 - DNA, 25 bp, Homo sapien
aaccagcaggagaatcatgaagaca

SEQ ID NO: 3101708 - DNA, 25 bp, Homo sapien
ccagcaggagaatcatgaagacagg

SEQ ID NO: 3101709 - DNA, 25 bp, Homo sapien
cagcaggagaatcatgaagacagga

SEQ ID NO: 3101710 - DNA, 25 bp, Homo sapien
gaaaaccagcaggagaatcatgaag

SEQ ID NO: 3101711 - DNA, 25 bp, Homo sapien
gacatcgtccgtacaaagttagcgt

SEQ ID NO: 3101712 - DNA, 25 bp, Homo sapien
ggtctcagcaaggagcgggatatta

SEQ ID NO: 3101713 - DNA, 25 bp, Homo sapien
taaaaaacgggcctgatgcgcctcg

SEQ ID NO: 3101714 - DNA, 25 bp, Homo sapien
caagggcacgctccagtagtagtgg

SEQ ID NO: 3101715 - DNA, 25 bp, Homo sapien
tgaggtgctcgatccagggccagtt

SEQ ID NO: 3101716 - DNA, 25 bp, Homo sapien
tacttgtcgctggtgccgaaggtga

SEQ ID NO: 3101717 - DNA, 25 bp, Homo sapien
tacttctcgcagaagcggctggtga

SEQ ID NO: 3101718 - DNA, 25 bp, Homo sapien
gcaggccactgaggaagccgaagat

SEQ ID NO: 3101719 - DNA, 25 bp, Homo sapien
gattaagagaccagccagtaagccc

SEQ ID NO: 3101720 - DNA, 25 bp, Homo sapien
tgtgggtccgtagcaataagcaaga

SEQ ID NO: 3101721 - DNA, 25 bp, Homo sapien
gattagctgtccctccgctgtggag

SEQ ID NO: 3101722 - DNA, 25 bp, Homo sapien
tggaactgatcagactgccgacggc

SEQ ID NO: 3101723 - DNA, 25 bp, Homo sapien
tgaaagaccacagacacgaggcagt

SEQ ID NO: 3101724 - DNA, 25 bp, Homo sapien
ccaggtccctcaggatggtcatttg

SEQ ID NO: 3101725 - DNA, 25 bp, Homo sapien
ctctgcccggtatgggagaaagatg

SEQ ID NO: 3101726 - DNA, 25 bp, Homo sapien
cactggcgaggttgcctgtgatgcc

SEQ ID NO: 3101727 - DNA, 25 bp, Homo sapien
gtggccatcacaggggtcgggttcg

SEQ ID NO: 3101728 - DNA, 25 bp, Homo sapien
tcaggagcagtaggcttcggcaggt

SEQ ID NO: 3101729 - DNA, 25 bp, Homo sapien
agcagtaggcttcggcaggttgggc

SEQ ID NO: 3101730 - DNA, 25 bp, Homo sapien
cttcggcaggttgggccggccatgc

SEQ ID NO: 3101731 - DNA, 25 bp, Homo sapien
acagccagagcctgtagaactgatc

SEQ ID NO: 3101732 - DNA, 25 bp, Homo sapien
agcctgtagaactgatctgggacct

SEQ ID NO: 3101733 - DNA, 25 bp, Homo sapien
cagagcctgtagaactgatctggga

SEQ ID NO: 3101734 - DNA, 25 bp, Homo sapien
cacacaccttgtccaagcagtgcac

SEQ ID NO: 3101735 - DNA, 25 bp, Homo sapien
gagtgttgcttcctcatggaaatag

SEQ ID NO: 3101736 - DNA, 25 bp, Homo sapien
gagcagagtgttgcttcctcatgga

SEQ ID NO: 3101737 - DNA, 25 bp, Homo sapien
gcatgaactcacagtattcccgggt

SEQ ID NO: 3101738 - DNA, 25 bp, Homo sapien
atggaaatagccgtgcatgaactca

SEQ ID NO: 3101739 - DNA, 25 bp, Homo sapien
agcaggggcggcccttgatctcgca

SEQ ID NO: 3101740 - DNA, 25 bp, Homo sapien
gcctgtgtggttgctcctggcctgc

SEQ ID NO: 3101741 - DNA, 25 bp, Homo sapien
tgtggttgctcctggcctgctctgt

SEQ ID NO: 3101742 - DNA, 25 bp, Homo sapien
cgcagtccatgtgcaggaagcctgt

SEQ ID NO: 3101743 - DNA, 25 bp, Homo sapien
cggccacttagtgatgtcatcgggc

SEQ ID NO: 3101744 - DNA, 25 bp, Homo sapien
gccacttagtgatgtcatcgggcca

SEQ ID NO: 3101745 - DNA, 25 bp, Homo sapien
cacttagtgatgtcatcgggccaga

SEQ ID NO: 3101746 - DNA, 25 bp, Homo sapien
tagtgatgtcatcgggccagatgtg

SEQ ID NO: 3101747 - DNA, 25 bp, Homo sapien
cacttgacaaaagtggccaaagtct

SEQ ID NO: 3101748 - DNA, 25 bp, Homo sapien
tggcccagatcagacttgtccatgg

SEQ ID NO: 3101749 - DNA, 25 bp, Homo sapien
cttctggcccagatcagacttgtcc

SEQ ID NO: 3101750 - DNA, 25 bp, Homo sapien
agacagcccccgaagtccgcttctg

SEQ ID NO: 3101751 - DNA, 25 bp, Homo sapien
gcaggggtaggagggagggcctgcc

SEQ ID NO: 3101752 - DNA, 25 bp, Homo sapien
tggcaggggtaggagggagggcctg

SEQ ID NO: 3101753 - DNA, 25 bp, Homo sapien
tctggcaggggtaggagggagggcc

SEQ ID NO: 3101754 - DNA, 25 bp, Homo sapien
agggtctggcaggggtaggagggag

SEQ ID NO: 3101755 - DNA, 25 bp, Homo sapien
ccttccggatgcagggtgagaactt

SEQ ID NO: 3101756 - DNA, 25 bp, Homo sapien
gatctgcccgtccttccggatgcag

SEQ ID NO: 3101757 - DNA, 25 bp, Homo sapien
catccggagtggtcattctggacac

SEQ ID NO: 3101758 - DNA, 25 bp, Homo sapien
ttccgctgggtctggatgcatccgg

SEQ ID NO: 3101759 - DNA, 25 bp, Homo sapien
ctggatgtacttcacgctctcgtac

SEQ ID NO: 3101760 - DNA, 25 bp, Homo sapien
gctctcgtacacacctttgttccgc

SEQ ID NO: 3101761 - DNA, 25 bp, Homo sapien
tcgtacacacctttgttccgcagca

SEQ ID NO: 3101762 - DNA, 25 bp, Homo sapien
ggatgtacttcacgctctcgtacac

SEQ ID NO: 3101763 - DNA, 25 bp, Homo sapien
tgacatggacgaaggtcagccagta

SEQ ID NO: 3101764 - DNA, 25 bp, Homo sapien
cgtgctgggcaaagcccacgggtgc

SEQ ID NO: 3101765 - DNA, 25 bp, Homo sapien
tgatgatgacatggacgaaggtcag

SEQ ID NO: 3101766 - DNA, 25 bp, Homo sapien
gatgccatacgtgcaaatcaccagc

SEQ ID NO: 3101767 - DNA, 25 bp, Homo sapien
ccagtgtttattgggctgctgcaaa

SEQ ID NO: 3101768 - DNA, 25 bp, Homo sapien
tcctgatccgcagaagatgctcatg

SEQ ID NO: 3101769 - DNA, 25 bp, Homo sapien
acagggtgcgccttcgagcttgtca

SEQ ID NO: 3101770 - DNA, 25 bp, Homo sapien
ggtcatgtgcacaacccttgggaca

SEQ ID NO: 3101771 - DNA, 25 bp, Homo sapien
gccgtagtgccgcttcttccgatca

SEQ ID NO: 3101772 - DNA, 25 bp, Homo sapien
ggtggctgtcgaagctctccagctg

SEQ ID NO: 3101773 - DNA, 25 bp, Homo sapien
gtagctgcggttcagccagttgccc

SEQ ID NO: 3101774 - DNA, 25 bp, Homo sapien
gcttcttccgatcaaaggcaaagtg

SEQ ID NO: 3101775 - DNA, 25 bp, Homo sapien
gggactggggctcggccatactcct

SEQ ID NO: 3101776 - DNA, 25 bp, Homo sapien
accttggaggcgatgcgcttgccgc

SEQ ID NO: 3101777 - DNA, 25 bp, Homo sapien
cttcaccttggaggcgatgcgcttg

SEQ ID NO: 3101778 - DNA, 25 bp, Homo sapien
cggggactggggctcggccatactc

SEQ ID NO: 3101779 - DNA, 25 bp, Homo sapien
gaccccaccagggtgctcagaaggg

SEQ ID NO: 3101780 - DNA, 25 bp, Homo sapien
agaccccaccagggtgctcagaagg

SEQ ID NO: 3101781 - DNA, 25 bp, Homo sapien
accccaccagggtgctcagaagggg

SEQ ID NO: 3101782 - DNA, 25 bp, Homo sapien
agtgtgggatccctcggaagtagct

SEQ ID NO: 3101783 - DNA, 25 bp, Homo sapien
ctgagtgtgggatccctcggaagta

SEQ ID NO: 3101784 - DNA, 25 bp, Homo sapien
tgggatccctcggaagtagctggca

SEQ ID NO: 3101785 - DNA, 25 bp, Homo sapien
ccctcggaagtagctggcagagagt

SEQ ID NO: 3101786 - DNA, 25 bp, Homo sapien
agtcaaacgtgtctgccccatcgac

SEQ ID NO: 3101787 - DNA, 25 bp, Homo sapien
aaaaaggaggagtcaaacgtgtctg

SEQ ID NO: 3101788 - DNA, 25 bp, Homo sapien
ggaaggcaaagctgcgcttgaccac

SEQ ID NO: 3101789 - DNA, 25 bp, Homo sapien
ggcaccgctgtccggtggcatccag

SEQ ID NO: 3101790 - DNA, 25 bp, Homo sapien
cagcggcagcttgcaagctcatgtg

SEQ ID NO: 3101791 - DNA, 25 bp, Homo sapien
gcagcttgcaagctcatgtgggcca

SEQ ID NO: 3101792 - DNA, 25 bp, Homo sapien
agcttgcaagctcatgtgggccaca

SEQ ID NO: 3101793 - DNA, 25 bp, Homo sapien
cggcagcttgcaagctcatgtgggc

SEQ ID NO: 3101794 - DNA, 25 bp, Homo sapien
tctcttgcggcgtggcaggtgggag

SEQ ID NO: 3101795 - DNA, 25 bp, Homo sapien
tgtccatctcctccgggtggcggaa

SEQ ID NO: 3101796 - DNA, 25 bp, Homo sapien
tagccagaacggacactggtgaagg

SEQ ID NO: 3101797 - DNA, 25 bp, Homo sapien
ggtgggagtagccagaacggacact

SEQ ID NO: 3101798 - DNA, 25 bp, Homo sapien
gtaagcagagccattagggtcccca

SEQ ID NO: 3101799 - DNA, 25 bp, Homo sapien
aagcagagccattagggtccccacc

SEQ ID NO: 3101800 - DNA, 25 bp, Homo sapien
gggcggtaagcagagccattagggt

SEQ ID NO: 3101801 - DNA, 25 bp, Homo sapien
gcggtaagcagagccattagggtcc

SEQ ID NO: 3101802 - DNA, 25 bp, Homo sapien
ggagctccaggtcacgctggcacga

SEQ ID NO: 3101803 - DNA, 25 bp, Homo sapien
ctgactccaaaccactgggctgcgc

SEQ ID NO: 3101804 - DNA, 25 bp, Homo sapien
cagtggtgcaggctgcggcgctgcc

SEQ ID NO: 3101805 - DNA, 25 bp, Homo sapien
ttcaggcggccgtagcgcatgctgc

SEQ ID NO: 3101806 - DNA, 25 bp, Homo sapien
gtgcccgcgtgcctacagggaggtg

SEQ ID NO: 3101807 - DNA, 25 bp, Homo sapien
taccatgataataggccacagggag

SEQ ID NO: 3101808 - DNA, 25 bp, Homo sapien
acaggtgggcatacgcttgtctacg

SEQ ID NO: 3101809 - DNA, 25 bp, Homo sapien
tccacaccgtgatattccgcaaagc

SEQ ID NO: 3101810 - DNA, 25 bp, Homo sapien
tcttcaagtaggctgggttcttcct

SEQ ID NO: 3101811 - DNA, 25 bp, Homo sapien
ctgccatcggctgcgtggctcctgg

SEQ ID NO: 3101812 - DNA, 25 bp, Homo sapien
cctggcggcggaagccagggcgctt

SEQ ID NO: 3101813 - DNA, 25 bp, Homo sapien
agccagggcgcttctctgaactctc

SEQ ID NO: 3101814 - DNA, 25 bp, Homo sapien
tctttagcctcctattctgaaaacc

SEQ ID NO: 3101815 - DNA, 25 bp, Homo sapien
ttctttagcctcctattctgaaaac

SEQ ID NO: 3101816 - DNA, 25 bp, Homo sapien
tctctttctcgggtggcgggatggt

SEQ ID NO: 3101817 - DNA, 25 bp, Homo sapien
ggctgctggacacagaggacacgct

SEQ ID NO: 3101818 - DNA, 25 bp, Homo sapien
cagcatgctgtcctgctcgccaggg

SEQ ID NO: 3101819 - DNA, 25 bp, Homo sapien
acacgctcccgccattcttgtcagc

SEQ ID NO: 3101820 - DNA, 25 bp, Homo sapien
ctgacgccagggcacgcagcccaga

SEQ ID NO: 3101821 - DNA, 25 bp, Homo sapien
gttcaaacatctctgggcggctggg

SEQ ID NO: 3101822 - DNA, 25 bp, Homo sapien
acttgcctaaagttggttcaaacat

SEQ ID NO: 3101823 - DNA, 25 bp, Homo sapien
ctggaatggagaccgggagagcagc

SEQ ID NO: 3101824 - DNA, 25 bp, Homo sapien
gatctctccgcttgaggcaagaacc

SEQ ID NO: 3101825 - DNA, 25 bp, Homo sapien
ttctgatctctccgcttgaggcaag

SEQ ID NO: 3101826 - DNA, 25 bp, Homo sapien
ctctccgcttgaggcaagaaccaaa

SEQ ID NO: 3101827 - DNA, 25 bp, Homo sapien
ctgatctctccgcttgaggcaagaa

SEQ ID NO: 3101828 - DNA, 25 bp, Homo sapien
tgagatgtagtctcactctgcagcc

SEQ ID NO: 3101829 - DNA, 25 bp, Homo sapien
cgtgagccagcatgcctggcaaatt

SEQ ID NO: 3101830 - DNA, 25 bp, Homo sapien
aactcctggcctccacccgccttgg

SEQ ID NO: 3101831 - DNA, 25 bp, Homo sapien
agatgtagtctcactctgcagccca

SEQ ID NO: 3101832 - DNA, 25 bp, Homo sapien
tcaagcctcagtctgtggaagggtg

SEQ ID NO: 3101833 - DNA, 25 bp, Homo sapien
tgtacagatgctccggtgtcaagcc

SEQ ID NO: 3101834 - DNA, 25 bp, Homo sapien
ttcgagtctgagtttgcccgcggct

SEQ ID NO: 3101835 - DNA, 25 bp, Homo sapien
gaaggacagatagacagctccaggc

SEQ ID NO: 3101836 - DNA, 25 bp, Homo sapien
cgcacagctgggtaagcaaggccac

SEQ ID NO: 3101837 - DNA, 25 bp, Homo sapien
tgaagtgcagagttcagatcacccc

SEQ ID NO: 3101838 - DNA, 25 bp, Homo sapien
ggagacagcataacccagctggcag

SEQ ID NO: 3101839 - DNA, 25 bp, Homo sapien
ttagggtgggacagactctatttcc

SEQ ID NO: 3101840 - DNA, 25 bp, Homo sapien
gagctccaccggcagagttagcaga

SEQ ID NO: 3101841 - DNA, 25 bp, Homo sapien
aagtgggcgcagacacgatctcaac

SEQ ID NO: 3101842 - DNA, 25 bp, Homo sapien
tgggcctcacgtagccagtgacgct

SEQ ID NO: 3101843 - DNA, 25 bp, Homo sapien
ggaaggacagctcatggcacagctg

SEQ ID NO: 3101844 - DNA, 25 bp, Homo sapien
gctgggcgcccggatacatttgctg

SEQ ID NO: 3101845 - DNA, 25 bp, Homo sapien
tactgagcacacacatggacgactg

SEQ ID NO: 3101846 - DNA, 25 bp, Homo sapien
gacacggtggcgctttgtacttccc

SEQ ID NO: 3101847 - DNA, 25 bp, Homo sapien
tagattactgttagtgagcccactg

SEQ ID NO: 3101848 - DNA, 25 bp, Homo sapien
tccacagccggtgcagatgcctgag

SEQ ID NO: 3101849 - DNA, 25 bp, Homo sapien
cctgctccagagtgcgaggcacaga

SEQ ID NO: 3101850 - DNA, 25 bp, Homo sapien
tcagctggataggaaactgggagcc

SEQ ID NO: 3101851 - DNA, 25 bp, Homo sapien
gagctcactctggaaatcccctggg

SEQ ID NO: 3101852 - DNA, 25 bp, Homo sapien
actcgcacactcacgggcaggcgtg

SEQ ID NO: 3101853 - DNA, 25 bp, Homo sapien
gcagagtttacacagcaaggacaga

SEQ ID NO: 3101854 - DNA, 25 bp, Homo sapien
aagtgcgtcacccaaagcatttgta

SEQ ID NO: 3101855 - DNA, 25 bp, Homo sapien
ccaggagggcacacgtcttccctgt

SEQ ID NO: 3101856 - DNA, 25 bp, Homo sapien
caagtccccgggacgcaactccgtg

SEQ ID NO: 3101857 - DNA, 25 bp, Homo sapien
cccgggacgcaactccgtgcggcgc

SEQ ID NO: 3101858 - DNA, 25 bp, Homo sapien
actccgtgcggcgcctgcgagcggc

SEQ ID NO: 3101859 - DNA, 25 bp, Homo sapien
tccccgggacgcaactccgtgcggc

SEQ ID NO: 3101860 - DNA, 25 bp, Homo sapien
gcggccgggaggcggggctgggctc

SEQ ID NO: 3101861 - DNA, 25 bp, Homo sapien
ggccgggaggcggggctgggctcca

SEQ ID NO: 3101862 - DNA, 25 bp, Homo sapien
gggctgggctccagggggcgtggcc

SEQ ID NO: 3101863 - DNA, 25 bp, Homo sapien
gctccagggggcgtggccgggctca

SEQ ID NO: 3101864 - DNA, 25 bp, Homo sapien
agaacaagaacgaagacacagccgg

SEQ ID NO: 3101865 - DNA, 25 bp, Homo sapien
gtgctatggcttggctacatcgcag

SEQ ID NO: 3101866 - DNA, 25 bp, Homo sapien
acaagaacgaagacacagccgggaa

SEQ ID NO: 3101867 - DNA, 25 bp, Homo sapien
gaagcttctggtgctatggcttggc

SEQ ID NO: 3101868 - DNA, 25 bp, Homo sapien
ccttccccgttagctgctgctggtg

SEQ ID NO: 3101869 - DNA, 25 bp, Homo sapien
ggccgacgaggtcaattttcctgaa

SEQ ID NO: 3101870 - DNA, 25 bp, Homo sapien
agcaggggccgacgaggtcaatttt

SEQ ID NO: 3101871 - DNA, 25 bp, Homo sapien
cctcatcatccttccccgttagctg

SEQ ID NO: 3101872 - DNA, 25 bp, Homo sapien
cttgcaaggcaggcttcatgttcac

SEQ ID NO: 3101873 - DNA, 25 bp, Homo sapien
tgcaaggcaggcttcatgttcactc

SEQ ID NO: 3101874 - DNA, 25 bp, Homo sapien
ttgcaaggcaggcttcatgttcact

SEQ ID NO: 3101875 - DNA, 25 bp, Homo sapien
gccgcctccatcgtcgggtgggggc

SEQ ID NO: 3101876 - DNA, 25 bp, Homo sapien
tgccgcctccatcgtcgggtggggg

SEQ ID NO: 3101877 - DNA, 25 bp, Homo sapien
ccgcctccatcgtcgggtgggggct

SEQ ID NO: 3101878 - DNA, 25 bp, Homo sapien
tcgaggtttctggactgaggcccct

SEQ ID NO: 3101879 - DNA, 25 bp, Homo sapien
tgaagacgacacacgtgaccaaggg

SEQ ID NO: 3101880 - DNA, 25 bp, Homo sapien
tgacgcagatgaatagacagggccg

SEQ ID NO: 3101881 - DNA, 25 bp, Homo sapien
tgcccattctaggacagccggtgag

SEQ ID NO: 3101882 - DNA, 25 bp, Homo sapien
acggccccgaagagggcagtgtggc

SEQ ID NO: 3101883 - DNA, 25 bp, Homo sapien
cgaagagggcagtgtggccggtggg

SEQ ID NO: 3101884 - DNA, 25 bp, Homo sapien
ctacggccccgaagagggcagtgtg

SEQ ID NO: 3101885 - DNA, 25 bp, Homo sapien
ccccgaagagggcagtgtggccggt

SEQ ID NO: 3101886 - DNA, 25 bp, Homo sapien
gaggaggagacttcggccgtttcaa

SEQ ID NO: 3101887 - DNA, 25 bp, Homo sapien
gagagatcttagtccctagggcagg

SEQ ID NO: 3101888 - DNA, 25 bp, Homo sapien
tgaaacgtggcgcattctgtccggc

SEQ ID NO: 3101889 - DNA, 25 bp, Homo sapien
tccattcagtccacaaggagcagaa

SEQ ID NO: 3101890 - DNA, 25 bp, Homo sapien
ttgtgtcctggctgtaaacaaactc

SEQ ID NO: 3101891 - DNA, 25 bp, Homo sapien
cttgtgtcctggctgtaaacaaact

SEQ ID NO: 3101892 - DNA, 25 bp, Homo sapien
caggctctctgcgtctcaggtggga

SEQ ID NO: 3101893 - DNA, 25 bp, Homo sapien
caggtgggaagtcactggcaaattc

SEQ ID NO: 3101894 - DNA, 25 bp, Homo sapien
tgtagatgaggccacgcagcttggc

SEQ ID NO: 3101895 - DNA, 25 bp, Homo sapien
ttccttgtaggcagcggtcacgtgg

SEQ ID NO: 3101896 - DNA, 25 bp, Homo sapien
tgagggcgtgggctttccccacaag

SEQ ID NO: 3101897 - DNA, 25 bp, Homo sapien
tgaagtacaccggttccaccttgtg

SEQ ID NO: 3101898 - DNA, 25 bp, Homo sapien
gcaggttctccacgacagtgttgag

SEQ ID NO: 3101899 - DNA, 25 bp, Homo sapien
tcctccatgtgcttgaactggctga

SEQ ID NO: 3101900 - DNA, 25 bp, Homo sapien
cagcatagaccctcctccctctggc

SEQ ID NO: 3101901 - DNA, 25 bp, Homo sapien
ccctcctccctctggccaagccggc

SEQ ID NO: 3101902 - DNA, 25 bp, Homo sapien
cctcctccctctggccaagccggct

SEQ ID NO: 3101903 - DNA, 25 bp, Homo sapien
cctccctctggccaagccggctcac

SEQ ID NO: 3101904 - DNA, 25 bp, Homo sapien
aggccattggcactactcaggtgac

SEQ ID NO: 3101905 - DNA, 25 bp, Homo sapien
tcatagccgagagggtaagaactca

SEQ ID NO: 3101906 - DNA, 25 bp, Homo sapien
cagcggctttacttacagttgggaa

SEQ ID NO: 3101907 - DNA, 25 bp, Homo sapien
ggaaaatgttcctcgggtgagccac

SEQ ID NO: 3101908 - DNA, 25 bp, Homo sapien
cccacgtcctcgcagttggcataga

SEQ ID NO: 3101909 - DNA, 25 bp, Homo sapien
tcgatctccatctcgcctggcactt

SEQ ID NO: 3101910 - DNA, 25 bp, Homo sapien
agttggcatagagccgggcccacat

SEQ ID NO: 3101911 - DNA, 25 bp, Homo sapien
gtcctcgcagttggcatagagccgg

SEQ ID NO: 3101912 - DNA, 25 bp, Homo sapien
ggcggggatgtggtctgctggaaaa

SEQ ID NO: 3101913 - DNA, 25 bp, Homo sapien
gtaagagccaatgccggcaaggtga

SEQ ID NO: 3101914 - DNA, 25 bp, Homo sapien
cccgtgtgggtaagagccaatgccg

SEQ ID NO: 3101915 - DNA, 25 bp, Homo sapien
agccccgtgtgggtaagagccaatg

SEQ ID NO: 3101916 - DNA, 25 bp, Homo sapien
atgccctcggtgcacgaacgcggcg

SEQ ID NO: 3101917 - DNA, 25 bp, Homo sapien
gccgctgccctgaattctagcccag

SEQ ID NO: 3101918 - DNA, 25 bp, Homo sapien
tgaatgacacggacaggcaagaacc

SEQ ID NO: 3101919 - DNA, 25 bp, Homo sapien
gaagtcccccgtggcttatgaatga

SEQ ID NO: 3101920 - DNA, 25 bp, Homo sapien
ggtgctcggaaacatccactctgaa

SEQ ID NO: 3101921 - DNA, 25 bp, Homo sapien
gaagtgctgatctgctctggttttc

SEQ ID NO: 3101922 - DNA, 25 bp, Homo sapien
gctcaggtcctggttcgtcccctag

SEQ ID NO: 3101923 - DNA, 25 bp, Homo sapien
gagaaccaggtgtagtttgaccaca

SEQ ID NO: 3101924 - DNA, 25 bp, Homo sapien
tcctccgtgtgaatgctaatatctc

SEQ ID NO: 3101925 - DNA, 25 bp, Homo sapien
tccgtgtgaatgctaatatctctgc

SEQ ID NO: 3101926 - DNA, 25 bp, Homo sapien
cttcctccgtgtgaatgctaatatc

SEQ ID NO: 3101927 - DNA, 25 bp, Homo sapien
tgtgaatgctaatatctctgctggg

SEQ ID NO: 3101928 - DNA, 25 bp, Homo sapien
tgccgacgacatgggtaaattgaga

SEQ ID NO: 3101929 - DNA, 25 bp, Homo sapien
tattcctcgacgtgggaacagataa

SEQ ID NO: 3101930 - DNA, 25 bp, Homo sapien
catgtacacggaattctagaacagg

SEQ ID NO: 3101931 - DNA, 25 bp, Homo sapien
gaaatgaactgctgatgccgacgac

SEQ ID NO: 3101932 - DNA, 25 bp, Homo sapien
gggaattgttgcagcgtctcagtca

SEQ ID NO: 3101933 - DNA, 25 bp, Homo sapien
gtctcagtcaaaacttcgcaggaag

SEQ ID NO: 3101934 - DNA, 25 bp, Homo sapien
ggaaggtgccacgatgaaacagctc

SEQ ID NO: 3101935 - DNA, 25 bp, Homo sapien
tgcagacaatgtgctaatccacctg

SEQ ID NO: 3101936 - DNA, 25 bp, Homo sapien
gtttcacggtcctaagaactctcag

SEQ ID NO: 3101937 - DNA, 25 bp, Homo sapien
gaaacttaaagcagtgatcccaggt

SEQ ID NO: 3101938 - DNA, 25 bp, Homo sapien
gttaagcaaaaacggtccactgtca

SEQ ID NO: 3101939 - DNA, 25 bp, Homo sapien
tgagtaatactctagaggcagtggc

SEQ ID NO: 3101940 - DNA, 25 bp, Homo sapien
gaagcctaggttcaccagacggagg

SEQ ID NO: 3101941 - DNA, 25 bp, Homo sapien
cagatgaatcaaggtttgcccctgg

SEQ ID NO: 3101942 - DNA, 25 bp, Homo sapien
gctgctgccaccgttccaaatgtaa

SEQ ID NO: 3101943 - DNA, 25 bp, Homo sapien
tcaaaacgaggtctgaagttcaggg

SEQ ID NO: 3101944 - DNA, 25 bp, Homo sapien
ccagcgctccttgccgcccgcgcct

SEQ ID NO: 3101945 - DNA, 25 bp, Homo sapien
tttctcttctcggaatgccccgggc

SEQ ID NO: 3101946 - DNA, 25 bp, Homo sapien
gcccgcgcctcggcttcaccggcct

SEQ ID NO: 3101947 - DNA, 25 bp, Homo sapien
aggccgagccccgtcgctctccagc

SEQ ID NO: 3101948 - DNA, 25 bp, Homo sapien
agagattgccgagaagacttgcgcg

SEQ ID NO: 3101949 - DNA, 25 bp, Homo sapien
ttcttttcgaggtcggccgcgtggc

SEQ ID NO: 3101950 - DNA, 25 bp, Homo sapien
catggccactccagtcggtgttgag

SEQ ID NO: 3101951 - DNA, 25 bp, Homo sapien
tcaacatcgcgagagttccggagag

SEQ ID NO: 3101952 - DNA, 25 bp, Homo sapien
ttggagtgtcttgaggacggcccca

SEQ ID NO: 3101953 - DNA, 25 bp, Homo sapien
gattccgcttggagtgtcttgagga

SEQ ID NO: 3101954 - DNA, 25 bp, Homo sapien
cccaatcggtagttcatatttagct

SEQ ID NO: 3101955 - DNA, 25 bp, Homo sapien
gattgtaaacttctggaaagccgta

SEQ ID NO: 3101956 - DNA, 25 bp, Homo sapien
tatcaagtggttattgtctgctgag

SEQ ID NO: 3101957 - DNA, 25 bp, Homo sapien
gagtggacttgactacagaactcaa

SEQ ID NO: 3101958 - DNA, 25 bp, Homo sapien
aaatgtttctatccagagggagtgc

SEQ ID NO: 3101959 - DNA, 25 bp, Homo sapien
ggccccagtagtttacagcctgcaa

SEQ ID NO: 3101960 - DNA, 25 bp, Homo sapien
acgcgcacatgcctgccggtggtga

SEQ ID NO: 3101961 - DNA, 25 bp, Homo sapien
tctccaccagcctgcaccaaaatgg

SEQ ID NO: 3101962 - DNA, 25 bp, Homo sapien
aatgagtcatcctggatctccacca

SEQ ID NO: 3101963 - DNA, 25 bp, Homo sapien
aaatggtgtgatagtgccccgttac

SEQ ID NO: 3101964 - DNA, 25 bp, Homo sapien
gatgggactgcaaggattgtaaact

SEQ ID NO: 3101965 - DNA, 25 bp, Homo sapien
ggcagttagtgaaattagagtacaa

SEQ ID NO: 3101966 - DNA, 25 bp, Homo sapien
aatgaacatgattatactctgttgg

SEQ ID NO: 3101967 - DNA, 25 bp, Homo sapien
cctgggtataatctcacaaatcgat

SEQ ID NO: 3101968 - DNA, 25 bp, Homo sapien
tatcatagagaccaaggagggactg

SEQ ID NO: 3101969 - DNA, 25 bp, Homo sapien
tcaaagctgcagaaccagaccgtgc

SEQ ID NO: 3101970 - DNA, 25 bp, Homo sapien
tgcaaagccgtgtagtcatcaagac

SEQ ID NO: 3101971 - DNA, 25 bp, Homo sapien
acttgggaaactaccgtcagctgag

SEQ ID NO: 3101972 - DNA, 25 bp, Homo sapien
cctggtgacatcatcctgttggtga

SEQ ID NO: 3101973 - DNA, 25 bp, Homo sapien
gaaggtttattacctggtgacatca

SEQ ID NO: 3101974 - DNA, 25 bp, Homo sapien
ctggtgacatcatcctgttggtgac

SEQ ID NO: 3101975 - DNA, 25 bp, Homo sapien
ggatgaaggtttattacctggtgac

SEQ ID NO: 3101976 - DNA, 25 bp, Homo sapien
aaaaatggtccatcatgtacgcagt

SEQ ID NO: 3101977 - DNA, 25 bp, Homo sapien
tgagagtcatctccatgctaaacag

SEQ ID NO: 3101978 - DNA, 25 bp, Homo sapien
aacagcctgcgttttatatgatttc

SEQ ID NO: 3101979 - DNA, 25 bp, Homo sapien
aggcaggctgccaagcaactaaccc

SEQ ID NO: 3101980 - DNA, 25 bp, Homo sapien
ttagaaaggctcttaagaggtgtcc

SEQ ID NO: 3101981 - DNA, 25 bp, Homo sapien
cctggagtccttgaatcactttagc

SEQ ID NO: 3101982 - DNA, 25 bp, Homo sapien
gactgctgtctgatcttgctgaaca

SEQ ID NO: 3101983 - DNA, 25 bp, Homo sapien
catttcctaaagttgctcagtgcca

SEQ ID NO: 3101984 - DNA, 25 bp, Homo sapien
gggtgtcctatattgaacagacctc

SEQ ID NO: 3101985 - DNA, 25 bp, Homo sapien
gaacagacctcgatgaaaatcttga

SEQ ID NO: 3101986 - DNA, 25 bp, Homo sapien
ttgagaggatcagggccgcaactct

SEQ ID NO: 3101987 - DNA, 25 bp, Homo sapien
gagttcttggatgagccaaggacaa

SEQ ID NO: 3101988 - DNA, 25 bp, Homo sapien
ggacagatcgtggtttgcataaaat

SEQ ID NO: 3101989 - DNA, 25 bp, Homo sapien
catttttcgttcgaaatagtggtcg

SEQ ID NO: 3101990 - DNA, 25 bp, Homo sapien
cagctgaaggatgccggccttgtgc

SEQ ID NO: 3101991 - DNA, 25 bp, Homo sapien
tccagtagttgcttgtgatgaatcc

SEQ ID NO: 3101992 - DNA, 25 bp, Homo sapien
taggcatatataggtctccaaaatg

SEQ ID NO: 3101993 - DNA, 25 bp, Homo sapien
ggtactaggcatatataggtctcca

SEQ ID NO: 3101994 - DNA, 25 bp, Homo sapien
tgtgtgttaatcaactttgatttca

SEQ ID NO: 3101995 - DNA, 25 bp, Homo sapien
atgagagccccggtactaggcatat

SEQ ID NO: 3101996 - DNA, 25 bp, Homo sapien
ttcacatcgagctgtgccaggccga

SEQ ID NO: 3101997 - DNA, 25 bp, Homo sapien
cagtcagttctttattcggtccaag

SEQ ID NO: 3101998 - DNA, 25 bp, Homo sapien
gtcttcctctgtagcacgggactaa

SEQ ID NO: 3101999 - DNA, 25 bp, Homo sapien
gacgaggaccatatgcacatccaca

SEQ ID NO: 3102000 - DNA, 25 bp, Homo sapien
gaagtccggatgtagcagcttgaat

SEQ ID NO: 3102001 - DNA, 25 bp, Homo sapien
aggtagctgatgaagtccggatgta

SEQ ID NO: 3102002 - DNA, 25 bp, Homo sapien
gtccggatgtagcagcttgaattta

SEQ ID NO: 3102003 - DNA, 25 bp, Homo sapien
tgatgaagtccggatgtagcagctt

SEQ ID NO: 3102004 - DNA, 25 bp, Homo sapien
cttctggtccaaaataggcgtgcgg

SEQ ID NO: 3102005 - DNA, 25 bp, Homo sapien
gcttctggtccaaaataggcgtgcg

SEQ ID NO: 3102006 - DNA, 25 bp, Homo sapien
ttctggtccaaaataggcgtgcggc

SEQ ID NO: 3102007 - DNA, 25 bp, Homo sapien
ggcttctggtccaaaataggcgtgc

SEQ ID NO: 3102008 - DNA, 25 bp, Homo sapien
cagagcgcccagagccgtcgtattg

SEQ ID NO: 3102009 - DNA, 25 bp, Homo sapien
gcgcccagagccgtcgtattgcaag

SEQ ID NO: 3102010 - DNA, 25 bp, Homo sapien
tcagggcgccggagtagccgcggta

SEQ ID NO: 3102011 - DNA, 25 bp, Homo sapien
acccatgatagaagtggacagagcg

SEQ ID NO: 3102012 - DNA, 25 bp, Homo sapien
gagaggtaagtagagtgagtcagga

SEQ ID NO: 3102013 - DNA, 25 bp, Homo sapien
gctccttcagaaagcggggcacata

SEQ ID NO: 3102014 - DNA, 25 bp, Homo sapien
ttggcccgatataggaagatgaggt

SEQ ID NO: 3102015 - DNA, 25 bp, Homo sapien
gatataggacgggatgttctgaatt

SEQ ID NO: 3102016 - DNA, 25 bp, Homo sapien
gtttcgagagagggatttgaaacca

SEQ ID NO: 3102017 - DNA, 25 bp, Homo sapien
tgaggactggggttcagggacgaag

SEQ ID NO: 3102018 - DNA, 25 bp, Homo sapien
caatgttgttggaacgggactggga

SEQ ID NO: 3102019 - DNA, 25 bp, Homo sapien
gacgaagtccgggaagagggctgtg

SEQ ID NO: 3102020 - DNA, 25 bp, Homo sapien
tgtttccgcctctcaggacactggg

SEQ ID NO: 3102021 - DNA, 25 bp, Homo sapien
ggaggcttaggtccacccgatgtct

SEQ ID NO: 3102022 - DNA, 25 bp, Homo sapien
cagctcagaccagcagtggaagcaa

SEQ ID NO: 3102023 - DNA, 25 bp, Homo sapien
tcctcagcgagacgccgagatagga

SEQ ID NO: 3102024 - DNA, 25 bp, Homo sapien
cagaatggccgatctcagcatcaca

SEQ ID NO: 3102025 - DNA, 25 bp, Homo sapien
tcacatagtcgcggatgtctgaggg

SEQ ID NO: 3102026 - DNA, 25 bp, Homo sapien
tcagggacaggcacgcccagaatgg

SEQ ID NO: 3102027 - DNA, 25 bp, Homo sapien
ctgaggggatgaagatatactgcag

SEQ ID NO: 3102028 - DNA, 25 bp, Homo sapien
tggacttagcgactcatgcacagga

SEQ ID NO: 3102029 - DNA, 25 bp, Homo sapien
tcaaatagcctacagagggcccaag

SEQ ID NO: 3102030 - DNA, 25 bp, Homo sapien
cccgtgagacgccatcttgatgtca

SEQ ID NO: 3102031 - DNA, 25 bp, Homo sapien
ccctgagccgactggagaatttccc

SEQ ID NO: 3102032 - DNA, 25 bp, Homo sapien
gagggagttcttcatcgtgttcaca

SEQ ID NO: 3102033 - DNA, 25 bp, Homo sapien
ccttgtggcacggaggtgaagccca

SEQ ID NO: 3102034 - DNA, 25 bp, Homo sapien
ttggtgcccacatcgcgctcgaagc

SEQ ID NO: 3102035 - DNA, 25 bp, Homo sapien
agtgaaaccatagaaggaagtcttg

SEQ ID NO: 3102036 - DNA, 25 bp, Homo sapien
tggttggcacagaggcccatcagtg

SEQ ID NO: 3102037 - DNA, 25 bp, Homo sapien
ggttggcacagaggcccatcagtgt

SEQ ID NO: 3102038 - DNA, 25 bp, Homo sapien
ctggttggcacagaggcccatcagt

SEQ ID NO: 3102039 - DNA, 25 bp, Homo sapien
acggcacaccggatacactttggag

SEQ ID NO: 3102040 - DNA, 25 bp, Homo sapien
catagtcatgggcatcgatgttggg

SEQ ID NO: 3102041 - DNA, 25 bp, Homo sapien
ggacccattcagaatgcctccgttg

SEQ ID NO: 3102042 - DNA, 25 bp, Homo sapien
atgttgggaccctggcgggacccat

SEQ ID NO: 3102043 - DNA, 25 bp, Homo sapien
ggctcaggcggtcccagagcgctgg

SEQ ID NO: 3102044 - DNA, 25 bp, Homo sapien
ccgccagccatacggggctttgtgt

SEQ ID NO: 3102045 - DNA, 25 bp, Homo sapien
cagcactggaatggagagattgaac

SEQ ID NO: 3102046 - DNA, 25 bp, Homo sapien
agagattgaacaggccacggaagtg

SEQ ID NO: 3102047 - DNA, 25 bp, Homo sapien
caggtgaagcaggtgtcggcaggcc

SEQ ID NO: 3102048 - DNA, 25 bp, Homo sapien
ctgaatggccaggtgaagcaggtgt

SEQ ID NO: 3102049 - DNA, 25 bp, Homo sapien
gtgaagcaggtgtcggcaggcctgg

SEQ ID NO: 3102050 - DNA, 25 bp, Homo sapien
tggccaggtgaagcaggtgtcggca

SEQ ID NO: 3102051 - DNA, 25 bp, Homo sapien
ccaggttccagacaagaggctcaaa

SEQ ID NO: 3102052 - DNA, 25 bp, Homo sapien
cacattctagggttgctgcgaggct

SEQ ID NO: 3102053 - DNA, 25 bp, Homo sapien
ttacggttataaggcagggccctga

SEQ ID NO: 3102054 - DNA, 25 bp, Homo sapien
tatcgcgcaatggttctgagccagg

SEQ ID NO: 3102055 - DNA, 25 bp, Homo sapien
tcgatgccttggattgaaagaatgc

SEQ ID NO: 3102056 - DNA, 25 bp, Homo sapien
ctgtccaagaattcgatgccttgga

SEQ ID NO: 3102057 - DNA, 25 bp, Homo sapien
caagaattcgatgccttggattgaa

SEQ ID NO: 3102058 - DNA, 25 bp, Homo sapien
gccttggattgaaagaatgcttcaa

SEQ ID NO: 3102059 - DNA, 25 bp, Homo sapien
tgtctgtgcccatcgtggtggctca

SEQ ID NO: 3102060 - DNA, 25 bp, Homo sapien
cccttagctctaggggcggacaaag

SEQ ID NO: 3102061 - DNA, 25 bp, Homo sapien
tggaagcttttggactgaccgaccc

SEQ ID NO: 3102062 - DNA, 25 bp, Homo sapien
agctctgacctaccccttggaagct

SEQ ID NO: 3102063 - DNA, 25 bp, Homo sapien
aggcttctctcagacccctcccttc

SEQ ID NO: 3102064 - DNA, 25 bp, Homo sapien
ccacaggtggaggggactctgggtt

SEQ ID NO: 3102065 - DNA, 25 bp, Homo sapien
cctttcaaaaggtggccaggcttct

SEQ ID NO: 3102066 - DNA, 25 bp, Homo sapien
agcagccacaggtggaggggactct

SEQ ID NO: 3102067 - DNA, 25 bp, Homo sapien
caatacgtgtatgtaatgtgtaata

SEQ ID NO: 3102068 - DNA, 25 bp, Homo sapien
tatttcaatacgtgtatgtaatgtg

SEQ ID NO: 3102069 - DNA, 25 bp, Homo sapien
gtgatatttcaatacgtgtatgtaa

SEQ ID NO: 3102070 - DNA, 25 bp, Homo sapien
cgtgttagccaggtgaaagccaggt

SEQ ID NO: 3102071 - DNA, 25 bp, Homo sapien
cttggtcagctcccggaatagatag

SEQ ID NO: 3102072 - DNA, 25 bp, Homo sapien
tgcccaggcttatatcaaacatgta

SEQ ID NO: 3102073 - DNA, 25 bp, Homo sapien
ctttgcattgagatactttgtgttt

SEQ ID NO: 3102074 - DNA, 25 bp, Homo sapien
gtcagctcccggaatagatagatgg

SEQ ID NO: 3102075 - DNA, 25 bp, Homo sapien
gggtaccgctgcaccgccgagaagt

SEQ ID NO: 3102076 - DNA, 25 bp, Homo sapien
caccgccgagaagtacagggcaaag

SEQ ID NO: 3102077 - DNA, 25 bp, Homo sapien
ccagaagaacgacccgcgcgggagc

SEQ ID NO: 3102078 - DNA, 25 bp, Homo sapien
ggagccccgagcaggcagccgtgag

SEQ ID NO: 3102079 - DNA, 25 bp, Homo sapien
gtggcacttgcggaggcggccgtct

SEQ ID NO: 3102080 - DNA, 25 bp, Homo sapien
gaggccgccagtctcgggttgggca

SEQ ID NO: 3102081 - DNA, 25 bp, Homo sapien
tctcggccccggctgagtggccaga

SEQ ID NO: 3102082 - DNA, 25 bp, Homo sapien
ttgggcagggcgctttcctcgcgcc

SEQ ID NO: 3102083 - DNA, 25 bp, Homo sapien
tcaaacgtgcctatccaatgaagcc

SEQ ID NO: 3102084 - DNA, 25 bp, Homo sapien
ttcatttctacatggtcgtcaaacg

SEQ ID NO: 3102085 - DNA, 25 bp, Homo sapien
gtatctattgtgatatcctttacaa

SEQ ID NO: 3102086 - DNA, 25 bp, Homo sapien
gatagcggagcatgtggaggttcca

SEQ ID NO: 3102087 - DNA, 25 bp, Homo sapien
ggtaaggggtgatactgtgggacta

SEQ ID NO: 3102088 - DNA, 25 bp, Homo sapien
tagtttttgtgactcggtgcatgtt

SEQ ID NO: 3102089 - DNA, 25 bp, Homo sapien
gtttttgtgactcggtgcatgttga

SEQ ID NO: 3102090 - DNA, 25 bp, Homo sapien
actgtgggactattagaagaaacat

SEQ ID NO: 3102091 - DNA, 25 bp, Homo sapien
gacttgggccatacagtgagtgttg

SEQ ID NO: 3102092 - DNA, 25 bp, Homo sapien
ggacttgggccatacagtgagtgtt

SEQ ID NO: 3102093 - DNA, 25 bp, Homo sapien
acaccacttcactctgttatgggcg

SEQ ID NO: 3102094 - DNA, 25 bp, Homo sapien
cacttcactctgttatgggcgggtc

SEQ ID NO: 3102095 - DNA, 25 bp, Homo sapien
gcctttggattgtgagtcctagtta

SEQ ID NO: 3102096 - DNA, 25 bp, Homo sapien
tgagtcctagttagaaatctttttc

SEQ ID NO: 3102097 - DNA, 25 bp, Homo sapien
taccagtctggtattgcctttggat

SEQ ID NO: 3102098 - DNA, 25 bp, Homo sapien
aaaatttaccagtctggtattgcct

SEQ ID NO: 3102099 - DNA, 25 bp, Homo sapien
ctgcaactctgccccccaggttcaa

SEQ ID NO: 3102100 - DNA, 25 bp, Homo sapien
ctcactgcaactctgccccccaggt

SEQ ID NO: 3102101 - DNA, 25 bp, Homo sapien
aggttcaagtgattctcctgtctca

SEQ ID NO: 3102102 - DNA, 25 bp, Homo sapien
ggagcttagtctgagccatgggaaa

SEQ ID NO: 3102103 - DNA, 25 bp, Homo sapien
taaagacaaggacaagtatagaccc

SEQ ID NO: 3102104 - DNA, 25 bp, Homo sapien
tggcctcaggacctacagcaatgta

SEQ ID NO: 3102105 - DNA, 25 bp, Homo sapien
gattcccactgtatcctgtgccttg

SEQ ID NO: 3102106 - DNA, 25 bp, Homo sapien
gattatcccttcatcgtgtagccgc

SEQ ID NO: 3102107 - DNA, 25 bp, Homo sapien
gctttggcagttccgggaccaggac

SEQ ID NO: 3102108 - DNA, 25 bp, Homo sapien
tcatagtagtgatcagaaaagcgct

SEQ ID NO: 3102109 - DNA, 25 bp, Homo sapien
tgtaaaagatcagccgcttccatga

SEQ ID NO: 3102110 - DNA, 25 bp, Homo sapien
cagcccatgcactgtcctatgctga

SEQ ID NO: 3102111 - DNA, 25 bp, Homo sapien
ccatgcactgtcctatgctgaacag

SEQ ID NO: 3102112 - DNA, 25 bp, Homo sapien
acccagcccatgcactgtcctatgc

SEQ ID NO: 3102113 - DNA, 25 bp, Homo sapien
gcccatgcactgtcctatgctgaac

SEQ ID NO: 3102114 - DNA, 25 bp, Homo sapien
tggtggggcggtatatcctccagtg

SEQ ID NO: 3102115 - DNA, 25 bp, Homo sapien
gggcggtatatcctccagtgggcac

SEQ ID NO: 3102116 - DNA, 25 bp, Homo sapien
tatatcctccagtgggcaccatcca

SEQ ID NO: 3102117 - DNA, 25 bp, Homo sapien
ccccagtggtggggcggtatatcct

SEQ ID NO: 3102118 - DNA, 25 bp, Homo sapien
ctgggctacgtgtcacgtgctttct

SEQ ID NO: 3102119 - DNA, 25 bp, Homo sapien
ggacctgggctacgtgtcacgtgct

SEQ ID NO: 3102120 - DNA, 25 bp, Homo sapien
ctgcaaggataacagggacctgggc

SEQ ID NO: 3102121 - DNA, 25 bp, Homo sapien
caaacccccaactgtcaggaggctg

SEQ ID NO: 3102122 - DNA, 25 bp, Homo sapien
gtctgggtgcagcaacaggtacctg

SEQ ID NO: 3102123 - DNA, 25 bp, Homo sapien
ttcatgtatcggagaaagtctgggt

SEQ ID NO: 3102124 - DNA, 25 bp, Homo sapien
tacctgtccatgtgcagggcttccc

SEQ ID NO: 3102125 - DNA, 25 bp, Homo sapien
tgttcttcatgtatcggagaaagtc

SEQ ID NO: 3102126 - DNA, 25 bp, Homo sapien
gtctgattcataagcagtgcttcca

SEQ ID NO: 3102127 - DNA, 25 bp, Homo sapien
tctgattcataagcagtgcttccag

SEQ ID NO: 3102128 - DNA, 25 bp, Homo sapien
cgtctgattcataagcagtgcttcc

SEQ ID NO: 3102129 - DNA, 25 bp, Homo sapien
ccaggaagtgcaagtagcggacgtc

SEQ ID NO: 3102130 - DNA, 25 bp, Homo sapien
gccttccaggaagtgcaagtagcgg

SEQ ID NO: 3102131 - DNA, 25 bp, Homo sapien
tcatagtcccgggtgccttccagga

SEQ ID NO: 3102132 - DNA, 25 bp, Homo sapien
cttccaggaagtgcaagtagcggac

SEQ ID NO: 3102133 - DNA, 25 bp, Homo sapien
ccccgattgcccaatataaggagtg

SEQ ID NO: 3102134 - DNA, 25 bp, Homo sapien
gtagaaggatgtccgagtccccaca

SEQ ID NO: 3102135 - DNA, 25 bp, Homo sapien
tagcctttaatgagagctccgctca

SEQ ID NO: 3102136 - DNA, 25 bp, Homo sapien
aggcacgttcttgaaaccccgattg

SEQ ID NO: 3102137 - DNA, 25 bp, Homo sapien
cggaacacgtagtcgtgactgtcta

SEQ ID NO: 3102138 - DNA, 25 bp, Homo sapien
tgggagttgttcaggatgcccccgt

SEQ ID NO: 3102139 - DNA, 25 bp, Homo sapien
cactggagggaagcgtgtcacgacc

SEQ ID NO: 3102140 - DNA, 25 bp, Homo sapien
gcacaggtgatgcaccggaggctcc

SEQ ID NO: 3102141 - DNA, 25 bp, Homo sapien
aacaagagtgggggtgctccattca

SEQ ID NO: 3102142 - DNA, 25 bp, Homo sapien
gagtgggggtgctccattcagagcc

SEQ ID NO: 3102143 - DNA, 25 bp, Homo sapien
caagagtgggggtgctccattcaga

SEQ ID NO: 3102144 - DNA, 25 bp, Homo sapien
ctggaacaagagtgggggtgctcca

SEQ ID NO: 3102145 - DNA, 25 bp, Homo sapien
aggagtagttgagctccatgaagcc

SEQ ID NO: 3102146 - DNA, 25 bp, Homo sapien
gacttggaggctttgatcttcacag

SEQ ID NO: 3102147 - DNA, 25 bp, Homo sapien
agccaaagggtggtgcaaagtgttc

SEQ ID NO: 3102148 - DNA, 25 bp, Homo sapien
gtgcaaagtgttccaggcggtccca

SEQ ID NO: 3102149 - DNA, 25 bp, Homo sapien
tatttcgaagctgtatttttcctca

SEQ ID NO: 3102150 - DNA, 25 bp, Homo sapien
ctcaaaatcccaccgaggctcagat

SEQ ID NO: 3102151 - DNA, 25 bp, Homo sapien
cgtctgaaggcctcctatttcgaag

SEQ ID NO: 3102152 - DNA, 25 bp, Homo sapien
ccgaggctcagatttgaagttggcg

SEQ ID NO: 3102153 - DNA, 25 bp, Homo sapien
ctttggtttctctgcgtcgtggggc

SEQ ID NO: 3102154 - DNA, 25 bp, Homo sapien
tctttggtttctctgcgtcgtgggg

SEQ ID NO: 3102155 - DNA, 25 bp, Homo sapien
gtctttggtttctctgcgtcgtggg

SEQ ID NO: 3102156 - DNA, 25 bp, Homo sapien
tttggtttctctgcgtcgtggggct

SEQ ID NO: 3102157 - DNA, 25 bp, Homo sapien
tcctgtgggagccagcattctgtgc

SEQ ID NO: 3102158 - DNA, 25 bp, Homo sapien
tgtggttgccgctttgccctggtgc

SEQ ID NO: 3102159 - DNA, 25 bp, Homo sapien
tgcttctctgacaccgtcctggagg

SEQ ID NO: 3102160 - DNA, 25 bp, Homo sapien
tccttgttgacactgctcctgtggg

SEQ ID NO: 3102161 - DNA, 25 bp, Homo sapien
gctttgccagggactgtagagacct

SEQ ID NO: 3102162 - DNA, 25 bp, Homo sapien
ggtgcctgggacttaggctttgcca

SEQ ID NO: 3102163 - DNA, 25 bp, Homo sapien
ctctgtctccggtggtgtgggcctt

SEQ ID NO: 3102164 - DNA, 25 bp, Homo sapien
gcattgttctctggcactggctctg

SEQ ID NO: 3102165 - DNA, 25 bp, Homo sapien
aggctgaagattgtggaaacaggtc

SEQ ID NO: 3102166 - DNA, 25 bp, Homo sapien
ggtcagaagcataagtagttttttg

SEQ ID NO: 3102167 - DNA, 25 bp, Homo sapien
gaagattgtggaaacaggtcagaag

SEQ ID NO: 3102168 - DNA, 25 bp, Homo sapien
aaacaggtcagaagcataagtagtt

SEQ ID NO: 3102169 - DNA, 25 bp, Homo sapien
taaaacatgaaaggatagcaacctc

SEQ ID NO: 3102170 - DNA, 25 bp, Homo sapien
tattagtcatacgtgtgcgaggcag

SEQ ID NO: 3102171 - DNA, 25 bp, Homo sapien
cactggttttaagaggctcacagtc

SEQ ID NO: 3102172 - DNA, 25 bp, Homo sapien
cagacatgagtataagcagctgcct

SEQ ID NO: 3102173 - DNA, 25 bp, Homo sapien
atcatacaattatgtaagcttttgg

SEQ ID NO: 3102174 - DNA, 25 bp, Homo sapien
catacaattatgtaagcttttggta

SEQ ID NO: 3102175 - DNA, 25 bp, Homo sapien
atgcaatcatacaattatgtaagct

SEQ ID NO: 3102176 - DNA, 25 bp, Homo sapien
gcaatcatacaattatgtaagcttt

SEQ ID NO: 3102177 - DNA, 25 bp, Homo sapien
tcagcagctactcaatagcgaaggg

SEQ ID NO: 3102178 - DNA, 25 bp, Homo sapien
ccaggtggacctgaaagagccaagg

SEQ ID NO: 3102179 - DNA, 25 bp, Homo sapien
catgccttggcaccgcatcagatgt

SEQ ID NO: 3102180 - DNA, 25 bp, Homo sapien
gcatcagatgtcctggagcccttga

SEQ ID NO: 3102181 - DNA, 25 bp, Homo sapien
cgggaagtgctgaactttccttcca

SEQ ID NO: 3102182 - DNA, 25 bp, Homo sapien
ggaagtgctgaactttccttccact

SEQ ID NO: 3102183 - DNA, 25 bp, Homo sapien
gaagtgctgaactttccttccactg

SEQ ID NO: 3102184 - DNA, 25 bp, Homo sapien
gggaagtgctgaactttccttccac

SEQ ID NO: 3102185 - DNA, 25 bp, Homo sapien
accactggacgccttggctcaggtg

SEQ ID NO: 3102186 - DNA, 25 bp, Homo sapien
gaagcaaggaccactggacgccttg

SEQ ID NO: 3102187 - DNA, 25 bp, Homo sapien
aaggaccactggacgccttggctca

SEQ ID NO: 3102188 - DNA, 25 bp, Homo sapien
cactggacgccttggctcaggtgcc

SEQ ID NO: 3102189 - DNA, 25 bp, Homo sapien
tgtcttaacaatgagccactccggc

SEQ ID NO: 3102190 - DNA, 25 bp, Homo sapien
tcgggttctagaggaaggttctgca

SEQ ID NO: 3102191 - DNA, 25 bp, Homo sapien
gagtctcaccgctcaggtttcctgg

SEQ ID NO: 3102192 - DNA, 25 bp, Homo sapien
tggccaggaagtgcacaccctttgt

SEQ ID NO: 3102193 - DNA, 25 bp, Homo sapien
ggtctcattctattttgcttcaaag

SEQ ID NO: 3102194 - DNA, 25 bp, Homo sapien
aaatgatttggtgtgtcttgatagg

SEQ ID NO: 3102195 - DNA, 25 bp, Homo sapien
gcttcaaaggccacaagctataatt

SEQ ID NO: 3102196 - DNA, 25 bp, Homo sapien
aatgtctttgtcaatattcccggag

SEQ ID NO: 3102197 - DNA, 25 bp, Homo sapien
tctttttctatgagacgatttgcca

SEQ ID NO: 3102198 - DNA, 25 bp, Homo sapien
tatgagacgatttgccagtagaata

SEQ ID NO: 3102199 - DNA, 25 bp, Homo sapien
gaatactccatttcaacaaacaggt

SEQ ID NO: 3102200 - DNA, 25 bp, Homo sapien
gacgatttgccagtagaatactcca

SEQ ID NO: 3102201 - DNA, 25 bp, Homo sapien
cttgtccttgcctggtggtctggtg

SEQ ID NO: 3102202 - DNA, 25 bp, Homo sapien
tcttgtccttgcctggtggtctggt

SEQ ID NO: 3102203 - DNA, 25 bp, Homo sapien
ttagaaaatacggctgtcatgtcct

SEQ ID NO: 3102204 - DNA, 25 bp, Homo sapien
tgagctaaggcttctgatccatcag

SEQ ID NO: 3102205 - DNA, 25 bp, Homo sapien
gatggtattcagtagaaaatgggac

SEQ ID NO: 3102206 - DNA, 25 bp, Homo sapien
tgggacaagacatgaatggacagtt

SEQ ID NO: 3102207 - DNA, 25 bp, Homo sapien
gaagaatgcaaacgaaaacctcact

SEQ ID NO: 3102208 - DNA, 25 bp, Homo sapien
gaaggatttctggtaccctgccgct

SEQ ID NO: 3102209 - DNA, 25 bp, Homo sapien
ctagacccggaaaggcatgtttggc

SEQ ID NO: 3102210 - DNA, 25 bp, Homo sapien
cagctgactctgtggcgttaagaaa

SEQ ID NO: 3102211 - DNA, 25 bp, Homo sapien
taccgttagcaaaaagaagcactga

SEQ ID NO: 3102212 - DNA, 25 bp, Homo sapien
tggaccagttcccttacgcctagag

SEQ ID NO: 3102213 - DNA, 25 bp, Homo sapien
aacacaggagctttgcagtgcagcc

SEQ ID NO: 3102214 - DNA, 25 bp, Homo sapien
gaaggaggccctgaaacgtctctag

SEQ ID NO: 3102215 - DNA, 25 bp, Homo sapien
tttccatgaagtgtccaaggccagg

SEQ ID NO: 3102216 - DNA, 25 bp, Homo sapien
tggttaaatgcttttgacaaaacac

SEQ ID NO: 3102217 - DNA, 25 bp, Homo sapien
cttaaatcataacatggttaaatgc

SEQ ID NO: 3102218 - DNA, 25 bp, Homo sapien
tcttaaatcataacatggttaaatg

SEQ ID NO: 3102219 - DNA, 25 bp, Homo sapien
attcttaaatcataacatggttaaa

SEQ ID NO: 3102220 - DNA, 25 bp, Homo sapien
gcgacggcgggaagttaacctcatg

SEQ ID NO: 3102221 - DNA, 25 bp, Homo sapien
cacagagagtgaatggtcagcaaga

SEQ ID NO: 3102222 - DNA, 25 bp, Homo sapien
aacaaaaggaatcagagtggaacag

SEQ ID NO: 3102223 - DNA, 25 bp, Homo sapien
tatttggatccaacaacagacacag

SEQ ID NO: 3102224 - DNA, 25 bp, Homo sapien
taaaggcctctaacctgctggaaga

SEQ ID NO: 3102225 - DNA, 25 bp, Homo sapien
ggcctcagagcccaataacagctgg

SEQ ID NO: 3102226 - DNA, 25 bp, Homo sapien
taagagtgtagtattggccgggcat

SEQ ID NO: 3102227 - DNA, 25 bp, Homo sapien
taatatacacactgcaagaactcgg

SEQ ID NO: 3102228 - DNA, 25 bp, Homo sapien
tacatgtcgtagagccggagctgct

SEQ ID NO: 3102229 - DNA, 25 bp, Homo sapien
ggacatctcgccaaacgtctccttg

SEQ ID NO: 3102230 - DNA, 25 bp, Homo sapien
ctgcacgtcgccgtcggacatctcg

SEQ ID NO: 3102231 - DNA, 25 bp, Homo sapien
gccaaacgtctccttgttgtctttc

SEQ ID NO: 3102232 - DNA, 25 bp, Homo sapien
agaggaagaaggtgctcctagccca

SEQ ID NO: 3102233 - DNA, 25 bp, Homo sapien
tcctctctcttgtgtgactgcggtt

SEQ ID NO: 3102234 - DNA, 25 bp, Homo sapien
cagccggcggagttgggactctcct

SEQ ID NO: 3102235 - DNA, 25 bp, Homo sapien
ataaaacccacttagaacatcggag

SEQ ID NO: 3102236 - DNA, 25 bp, Homo sapien
gaatacagagatccaagccatgagg

SEQ ID NO: 3102237 - DNA, 25 bp, Homo sapien
tctactaggagggagtcaacgacct

SEQ ID NO: 3102238 - DNA, 25 bp, Homo sapien
tgcctataagccagggtcggaaact

SEQ ID NO: 3102239 - DNA, 25 bp, Homo sapien
tcctgctagccaagggacaagtcct

SEQ ID NO: 3102240 - DNA, 25 bp, Homo sapien
gatttgcttctcatcgcttgcagca

SEQ ID NO: 3102241 - DNA, 25 bp, Homo sapien
agcaagacagtctgtgccgccaagc

SEQ ID NO: 3102242 - DNA, 25 bp, Homo sapien
tgggcatttgagttgccaagggcct

SEQ ID NO: 3102243 - DNA, 25 bp, Homo sapien
tctgcagggtacttaaggaaggaac

SEQ ID NO: 3102244 - DNA, 25 bp, Homo sapien
atttgcaagaatatttgtggctcag

SEQ ID NO: 3102245 - DNA, 25 bp, Homo sapien
caagaatatttgtggctcaggacct

SEQ ID NO: 3102246 - DNA, 25 bp, Homo sapien
gacctaaggaacttgctacagggaa

SEQ ID NO: 3102247 - DNA, 25 bp, Homo sapien
tggctcaggacctaaggaacttgct

SEQ ID NO: 3102248 - DNA, 25 bp, Homo sapien
gggctgtatttgaaggagaagcctt

SEQ ID NO: 3102249 - DNA, 25 bp, Homo sapien
gctgtatttgaaggagaagccttct

SEQ ID NO: 3102250 - DNA, 25 bp, Homo sapien
tcccggggctgtatttgaaggagaa

SEQ ID NO: 3102251 - DNA, 25 bp, Homo sapien
agcttcccggggctgtatttgaagg

SEQ ID NO: 3102252 - DNA, 25 bp, Homo sapien
cccttctcaccatccaagtcctgct

SEQ ID NO: 3102253 - DNA, 25 bp, Homo sapien
caggcccttccgatgatggcccctt

SEQ ID NO: 3102254 - DNA, 25 bp, Homo sapien
gcccttccgatgatggccccttctc

SEQ ID NO: 3102255 - DNA, 25 bp, Homo sapien
tggccccttctcaccatccaagtcc

SEQ ID NO: 3102256 - DNA, 25 bp, Homo sapien
ggccctcgaaggtccagcctgccca

SEQ ID NO: 3102257 - DNA, 25 bp, Homo sapien
gaaggtccagcctgcccacgccctg

SEQ ID NO: 3102258 - DNA, 25 bp, Homo sapien
cacagactgggtgatgggaagtggt

SEQ ID NO: 3102259 - DNA, 25 bp, Homo sapien
gacagggtcagtgcccttggcacag

SEQ ID NO: 3102260 - DNA, 25 bp, Homo sapien
agtgactcggctcacaaatgctgag

SEQ ID NO: 3102261 - DNA, 25 bp, Homo sapien
gctgtgtacaaacgatgggccaaag

SEQ ID NO: 3102262 - DNA, 25 bp, Homo sapien
ccatttggagaagtgggcccaggac

SEQ ID NO: 3102263 - DNA, 25 bp, Homo sapien
gcgtgttcttgactgtgcaccccaa

SEQ ID NO: 3102264 - DNA, 25 bp, Homo sapien
tgatcagaggaatggcccgggatgg

SEQ ID NO: 3102265 - DNA, 25 bp, Homo sapien
cagagacacaataaacagatgatca

SEQ ID NO: 3102266 - DNA, 25 bp, Homo sapien
agccccacctcttcagccagttctc

SEQ ID NO: 3102267 - DNA, 25 bp, Homo sapien
ggccttggtggaaggaagaagtgac

SEQ ID NO: 3102268 - DNA, 25 bp, Homo sapien
tatataatgactctgaccgcgtgca

SEQ ID NO: 3102269 - DNA, 25 bp, Homo sapien
ttgactacacaaaatgctgcctggg

SEQ ID NO: 3102270 - DNA, 25 bp, Homo sapien
gggaggctccctaacaaaacactga

SEQ ID NO: 3102271 - DNA, 25 bp, Homo sapien
ttggaagggcccacgagaaactgtc

SEQ ID NO: 3102272 - DNA, 25 bp, Homo sapien
tgctgaatgcattcccgtgcgcagg

SEQ ID NO: 3102273 - DNA, 25 bp, Homo sapien
cctatgtgatgaggcctccgtcaac

SEQ ID NO: 3102274 - DNA, 25 bp, Homo sapien
gcacagagctcctaagtccgttgga

SEQ ID NO: 3102275 - DNA, 25 bp, Homo sapien
taatgaggtaactcctgggtgggct

SEQ ID NO: 3102276 - DNA, 25 bp, Homo sapien
tggtgggtgcgaccaggatcatttc

SEQ ID NO: 3102277 - DNA, 25 bp, Homo sapien
catggtgggtgcgaccaggatcatt

SEQ ID NO: 3102278 - DNA, 25 bp, Homo sapien
aatgaatccgtgaaggtgcggccag

SEQ ID NO: 3102279 - DNA, 25 bp, Homo sapien
cttcagctcagcgttgaatgaatcc

SEQ ID NO: 3102280 - DNA, 25 bp, Homo sapien
cccgatcaagggcacattcacaagc

SEQ ID NO: 3102281 - DNA, 25 bp, Homo sapien
tcctatcagatttaacagtttctgg

SEQ ID NO: 3102282 - DNA, 25 bp, Homo sapien
gccctaaacaaactcttgctcagat

SEQ ID NO: 3102283 - DNA, 25 bp, Homo sapien
tgactggagcatgccagattcaatc

SEQ ID NO: 3102284 - DNA, 25 bp, Homo sapien
aaagccagttaactttagcagtagg

SEQ ID NO: 3102285 - DNA, 25 bp, Homo sapien
tagcagtagggggttgtatatcaag

SEQ ID NO: 3102286 - DNA, 25 bp, Homo sapien
cagtagggggttgtatatcaagttt

SEQ ID NO: 3102287 - DNA, 25 bp, Homo sapien
aagccagttaactttagcagtaggg

SEQ ID NO: 3102288 - DNA, 25 bp, Homo sapien
tagccaagcatagtggtgcatgact

SEQ ID NO: 3102289 - DNA, 25 bp, Homo sapien
attagccaagcatagtggtgcatga

SEQ ID NO: 3102290 - DNA, 25 bp, Homo sapien
aatcccagctatttgggaggctgag

SEQ ID NO: 3102291 - DNA, 25 bp, Homo sapien
gccaagcatagtggtgcatgactgt

SEQ ID NO: 3102292 - DNA, 25 bp, Homo sapien
ctaagagaacagaaagtaggaccac

SEQ ID NO: 3102293 - DNA, 25 bp, Homo sapien
gagaacagaaagtaggaccacactg

SEQ ID NO: 3102294 - DNA, 25 bp, Homo sapien
gaccacactgccatcacgaaggccc

SEQ ID NO: 3102295 - DNA, 25 bp, Homo sapien
aagagaacagaaagtaggaccacac

SEQ ID NO: 3102296 - DNA, 25 bp, Homo sapien
aaaggcccacgctgccatcacaaag

SEQ ID NO: 3102297 - DNA, 25 bp, Homo sapien
aaggcccacgctgccatcacaaagg

SEQ ID NO: 3102298 - DNA, 25 bp, Homo sapien
cacactgccatcaaaaaggaccaca

SEQ ID NO: 3102299 - DNA, 25 bp, Homo sapien
agaggcccacgctgccatcacaaag

SEQ ID NO: 3102300 - DNA, 25 bp, Homo sapien
aaggctggggtctctgtagcttcca

SEQ ID NO: 3102301 - DNA, 25 bp, Homo sapien
gggaagttcacctgctcctgggtca

SEQ ID NO: 3102302 - DNA, 25 bp, Homo sapien
ctgccatcacaaaggcaggagagat

SEQ ID NO: 3102303 - DNA, 25 bp, Homo sapien
tgctcctgggtcattctgggaaggc

SEQ ID NO: 3102304 - DNA, 25 bp, Homo sapien
tccaggagggctttatcctgcatct

SEQ ID NO: 3102305 - DNA, 25 bp, Homo sapien
gtgctccaggagggctttatcctgc

SEQ ID NO: 3102306 - DNA, 25 bp, Homo sapien
tgcatcttcactccatccaggccca

SEQ ID NO: 3102307 - DNA, 25 bp, Homo sapien
gctccaggagggctttatcctgcat

SEQ ID NO: 3102308 - DNA, 25 bp, Homo sapien
ggctcggcggggaacggcagcggca

SEQ ID NO: 3102309 - DNA, 25 bp, Homo sapien
ctgcgggccgcgggttctgcgcttc

SEQ ID NO: 3102310 - DNA, 25 bp, Homo sapien
cctgcgggccgcgggttctgcgctt

SEQ ID NO: 3102311 - DNA, 25 bp, Homo sapien
gctccctggctcggcggggaacggc

SEQ ID NO: 3102312 - DNA, 25 bp, Homo sapien
gcgccgccgcgggatcccctggccc

SEQ ID NO: 3102313 - DNA, 25 bp, Homo sapien
cgccgcgggatcccctggcccttcg

SEQ ID NO: 3102314 - DNA, 25 bp, Homo sapien
cccggtcccgcaggctccccgagct

SEQ ID NO: 3102315 - DNA, 25 bp, Homo sapien
ctggcgccgccgcgggatcccctgg

SEQ ID NO: 3102316 - DNA, 25 bp, Homo sapien
cgccggctcgggggcgcaggggcgg

SEQ ID NO: 3102317 - DNA, 25 bp, Homo sapien
gccccgcgggcgaggccgccggctc

SEQ ID NO: 3102318 - DNA, 25 bp, Homo sapien
gcgcgggcaggctccgggctcgcgg

SEQ ID NO: 3102319 - DNA, 25 bp, Homo sapien
ggggcgcgcgggcaggctccgggct

SEQ ID NO: 3102320 - DNA, 25 bp, Homo sapien
aggcgagcagaagggccagcgcggt

SEQ ID NO: 3102321 - DNA, 25 bp, Homo sapien
ggccagcgcggtggccagcgcaggc

SEQ ID NO: 3102322 - DNA, 25 bp, Homo sapien
gccaggcgagcagaagggccagcgc

SEQ ID NO: 3102323 - DNA, 25 bp, Homo sapien
cagtagccaggcgagcagaagggcc

SEQ ID NO: 3102324 - DNA, 25 bp, Homo sapien
gaattattaagacacggacagctgc

SEQ ID NO: 3102325 - DNA, 25 bp, Homo sapien
tgtgcttacataacggacagcctgg

SEQ ID NO: 3102326 - DNA, 25 bp, Homo sapien
cattcaatggagtagctcacgccag

SEQ ID NO: 3102327 - DNA, 25 bp, Homo sapien
tggctagcccacagagacagtaacg

SEQ ID NO: 3102328 - DNA, 25 bp, Homo sapien
cccggcctccacaagtgtccctaat

SEQ ID NO: 3102329 - DNA, 25 bp, Homo sapien
gcccggcctccacaagtgtccctaa

SEQ ID NO: 3102330 - DNA, 25 bp, Homo sapien
tcaggggtgagcccggcctccacaa

SEQ ID NO: 3102331 - DNA, 25 bp, Homo sapien
gggtgagcccggcctccacaagtgt

SEQ ID NO: 3102332 - DNA, 25 bp, Homo sapien
gataaattcacttgagtaagtcact

SEQ ID NO: 3102333 - DNA, 25 bp, Homo sapien
ttacaaagtcacagatcaagtgcag

SEQ ID NO: 3102334 - DNA, 25 bp, Homo sapien
cgagggttgagaaatgcacattcca

SEQ ID NO: 3102335 - DNA, 25 bp, Homo sapien
gcaggaagagtctaagtatggctgt

SEQ ID NO: 3102336 - DNA, 25 bp, Homo sapien
caaacgctaagtgaatgggttcccg

SEQ ID NO: 3102337 - DNA, 25 bp, Homo sapien
tcttgcctgagtaaaacaagccgcg

SEQ ID NO: 3102338 - DNA, 25 bp, Homo sapien
ggaaagctactggagcaaacgctaa

SEQ ID NO: 3102339 - DNA, 25 bp, Homo sapien
caagccgcgtttatctgcattggta

SEQ ID NO: 3102340 - DNA, 25 bp, Homo sapien
gctgcgctctttgctgacacagtcg

SEQ ID NO: 3102341 - DNA, 25 bp, Homo sapien
aggagctgcgctctttgctgacaca

SEQ ID NO: 3102342 - DNA, 25 bp, Homo sapien
gctctttgctgacacagtcgtcctg

SEQ ID NO: 3102343 - DNA, 25 bp, Homo sapien
ttgctgacacagtcgtcctgggagg

SEQ ID NO: 3102344 - DNA, 25 bp, Homo sapien
catcgccctcggatccagactcgca

SEQ ID NO: 3102345 - DNA, 25 bp, Homo sapien
gtcccatcgccctcggatccagact

SEQ ID NO: 3102346 - DNA, 25 bp, Homo sapien
tcttcctgcggtgcactgtcccatc

SEQ ID NO: 3102347 - DNA, 25 bp, Homo sapien
gtgcactgtcccatcgccctcggat

SEQ ID NO: 3102348 - DNA, 25 bp, Homo sapien
aaacctctgacctcgggagacagca

SEQ ID NO: 3102349 - DNA, 25 bp, Homo sapien
cagaaaacaaggagtcaacctggat

SEQ ID NO: 3102350 - DNA, 25 bp, Homo sapien
gagtcaacctggatgcaacccactt

SEQ ID NO: 3102351 - DNA, 25 bp, Homo sapien
aacaaggagtcaacctggatgcaac

SEQ ID NO: 3102352 - DNA, 25 bp, Homo sapien
agtcggagtctgacgaactggagct

SEQ ID NO: 3102353 - DNA, 25 bp, Homo sapien
tcctgaaggtcaaccgagtctgcga

SEQ ID NO: 3102354 - DNA, 25 bp, Homo sapien
gagctgtcggaagctatccctgtgg

SEQ ID NO: 3102355 - DNA, 25 bp, Homo sapien
gagtctgcgaggactgccaactcgg

SEQ ID NO: 3102356 - DNA, 25 bp, Homo sapien
gaggcaagaagtgttgttctcagtg

SEQ ID NO: 3102357 - DNA, 25 bp, Homo sapien
agccatacccactcacaaagactca

SEQ ID NO: 3102358 - DNA, 25 bp, Homo sapien
gagaggcaagaagtgttgttctcag

SEQ ID NO: 3102359 - DNA, 25 bp, Homo sapien
ctgagaggcaagaagtgttgttctc

SEQ ID NO: 3102360 - DNA, 25 bp, Homo sapien
gagtcgaggcctgtgtctctcagaa

SEQ ID NO: 3102361 - DNA, 25 bp, Homo sapien
cagagtcgaggcctgtgtctctcag

SEQ ID NO: 3102362 - DNA, 25 bp, Homo sapien
tcagagtcgaggcctgtgtctctca

SEQ ID NO: 3102363 - DNA, 25 bp, Homo sapien
gtcgaggcctgtgtctctcagaaac

SEQ ID NO: 3102364 - DNA, 25 bp, Homo sapien
ctgggaatgccaggtgtgtccgttc

SEQ ID NO: 3102365 - DNA, 25 bp, Homo sapien
cactgggagcgtaaaactgaactga

SEQ ID NO: 3102366 - DNA, 25 bp, Homo sapien
tcagatgcccaagagtccagggaga

SEQ ID NO: 3102367 - DNA, 25 bp, Homo sapien
tatcataaggcctgcggtgtgacca

SEQ ID NO: 3102368 - DNA, 25 bp, Homo sapien
tgtgaccaaatcacagcacgcagtg

SEQ ID NO: 3102369 - DNA, 25 bp, Homo sapien
gtgggtggcttgcactgccgctgcc

SEQ ID NO: 3102370 - DNA, 25 bp, Homo sapien
gctgtgggtggcttgcactgccgct

SEQ ID NO: 3102371 - DNA, 25 bp, Homo sapien
ttgggacacagtggcacggggtggc

SEQ ID NO: 3102372 - DNA, 25 bp, Homo sapien
ggttgggacacagtggcacggggtg

SEQ ID NO: 3102373 - DNA, 25 bp, Homo sapien
tggattcaacatgcagagtctcacc

SEQ ID NO: 3102374 - DNA, 25 bp, Homo sapien
aggctggcgaacaccctgaggactt

SEQ ID NO: 3102375 - DNA, 25 bp, Homo sapien
tgcccaggcctgtgtacgatcagca

SEQ ID NO: 3102376 - DNA, 25 bp, Homo sapien
gatcagcacacatcatcgcagcagt

SEQ ID NO: 3102377 - DNA, 25 bp, Homo sapien
ttgataactttggtctccctcttac

SEQ ID NO: 3102378 - DNA, 25 bp, Homo sapien
agattgaggacaacatgccaccagc

SEQ ID NO: 3102379 - DNA, 25 bp, Homo sapien
tgctggcaaaattttgggtgatggc

SEQ ID NO: 3102380 - DNA, 25 bp, Homo sapien
cgatagtagtgtcgagattgaggac

SEQ ID NO: 3102381 - DNA, 25 bp, Homo sapien
tgtgccataccacagggaagttggt

SEQ ID NO: 3102382 - DNA, 25 bp, Homo sapien
ttcccagagggtcgatgtgaatccc

SEQ ID NO: 3102383 - DNA, 25 bp, Homo sapien
taatagcttcgtcttgctggttccc

SEQ ID NO: 3102384 - DNA, 25 bp, Homo sapien
tgtgaatcccagttccggagcgtgg

SEQ ID NO: 3102385 - DNA, 25 bp, Homo sapien
tgaactaaggcattccaggcactgg

SEQ ID NO: 3102386 - DNA, 25 bp, Homo sapien
ccacgggcttgtaaggtctttcata

SEQ ID NO: 3102387 - DNA, 25 bp, Homo sapien
cccagcatactggaaaaggtcatca

SEQ ID NO: 3102388 - DNA, 25 bp, Homo sapien
tgcgcattcaacaaaaccacgggct

SEQ ID NO: 3102389 - DNA, 25 bp, Homo sapien
tatttcctttttaggcgctccagag

SEQ ID NO: 3102390 - DNA, 25 bp, Homo sapien
tccagtggcagataagggtgtcccc

SEQ ID NO: 3102391 - DNA, 25 bp, Homo sapien
gtccagtggcagataagggtgtccc

SEQ ID NO: 3102392 - DNA, 25 bp, Homo sapien
tgaggccacgtcgttcctagagcca

SEQ ID NO: 3102393 - DNA, 25 bp, Homo sapien
aaggaagttgactctcgtctggctc

SEQ ID NO: 3102394 - DNA, 25 bp, Homo sapien
aggaagttgactctcgtctggctcc

SEQ ID NO: 3102395 - DNA, 25 bp, Homo sapien
cgtgcgtgaggccacgtcgttccta

SEQ ID NO: 3102396 - DNA, 25 bp, Homo sapien
gggtccaatccagcgagtccttgag

SEQ ID NO: 3102397 - DNA, 25 bp, Homo sapien
tcgtagtagttgtgccgggtccaat

SEQ ID NO: 3102398 - DNA, 25 bp, Homo sapien
ctcgcggatgcgcttcttgctcttg

SEQ ID NO: 3102399 - DNA, 25 bp, Homo sapien
ggctcagcgagaagctctcgtagta

SEQ ID NO: 3102400 - DNA, 25 bp, Homo sapien
ttccattggctttggctcccctggg

SEQ ID NO: 3102401 - DNA, 25 bp, Homo sapien
gggtactccttcacatacggcgggc

SEQ ID NO: 3102402 - DNA, 25 bp, Homo sapien
agctggttccgctacgacctcggcg

SEQ ID NO: 3102403 - DNA, 25 bp, Homo sapien
gcgcctttaaagtcgccttccagaa

SEQ ID NO: 3102404 - DNA, 25 bp, Homo sapien
tcatggcagaggaatcaagtgcccc

SEQ ID NO: 3102405 - DNA, 25 bp, Homo sapien
tactgtcagacagctcagaactgcc

SEQ ID NO: 3102406 - DNA, 25 bp, Homo sapien
tctggaagtctgtcggcaaagctgc

SEQ ID NO: 3102407 - DNA, 25 bp, Homo sapien
tatcttgggatcttctggctctacc

SEQ ID NO: 3102408 - DNA, 25 bp, Homo sapien
cagaccacttcagcttgagaatgca

SEQ ID NO: 3102409 - DNA, 25 bp, Homo sapien
ccttccaggaagacatacagttgaa

SEQ ID NO: 3102410 - DNA, 25 bp, Homo sapien
tatagcagaatctacccttccagga

SEQ ID NO: 3102411 - DNA, 25 bp, Homo sapien
tgagcaacctggcacacaaactatg

SEQ ID NO: 3102412 - DNA, 25 bp, Homo sapien
cagccatttgtttctgcacgacaag

SEQ ID NO: 3102413 - DNA, 25 bp, Homo sapien
gcacgacaaggcatctttacacagg

SEQ ID NO: 3102414 - DNA, 25 bp, Homo sapien
gttatttatatgcaaggcccgggtg

SEQ ID NO: 3102415 - DNA, 25 bp, Homo sapien
tacacaggagcaatcgggagaaaac

SEQ ID NO: 3102416 - DNA, 25 bp, Homo sapien
aaatcaagtcttttcacctgaaaag

SEQ ID NO: 3102417 - DNA, 25 bp, Homo sapien
caaatttgggttcagattaccattt

SEQ ID NO: 3102418 - DNA, 25 bp, Homo sapien
gaattgtgtttgataaacaatcctt

SEQ ID NO: 3102419 - DNA, 25 bp, Homo sapien
gattaccatttagatctgaaggtaa

SEQ ID NO: 3102420 - DNA, 25 bp, Homo sapien
ttccttaaaagtcaggaggccacaa

SEQ ID NO: 3102421 - DNA, 25 bp, Homo sapien
tccttaaaagtcaggaggccacaaa

SEQ ID NO: 3102422 - DNA, 25 bp, Homo sapien
tttccttaaaagtcaggaggccaca

SEQ ID NO: 3102423 - DNA, 25 bp, Homo sapien
aagtcagcactatataacaaaatga

SEQ ID NO: 3102424 - DNA, 25 bp, Homo sapien
ccaactgaggcaaagcttaaacaag

SEQ ID NO: 3102425 - DNA, 25 bp, Homo sapien
tacaagaaatttgaataacagcaac

SEQ ID NO: 3102426 - DNA, 25 bp, Homo sapien
tgaaatctgaagtcgttcacctcac

SEQ ID NO: 3102427 - DNA, 25 bp, Homo sapien
ccgtttacactgcttgccgatacat

SEQ ID NO: 3102428 - DNA, 25 bp, Homo sapien
gatggactatgtggtcctttttccc

SEQ ID NO: 3102429 - DNA, 25 bp, Homo sapien
ccaagtcctccgtttacactgcttg

SEQ ID NO: 3102430 - DNA, 25 bp, Homo sapien
actcttcttcgatggactatgtggt

SEQ ID NO: 3102431 - DNA, 25 bp, Homo sapien
tacttactaaggctctggtcaaacc

SEQ ID NO: 3102432 - DNA, 25 bp, Homo sapien
tacagaaatgttccacccagccatg

SEQ ID NO: 3102433 - DNA, 25 bp, Homo sapien
taatatctgagctacttagggccct

SEQ ID NO: 3102434 - DNA, 25 bp, Homo sapien
tcctggccaaataaccaaggtgaag

SEQ ID NO: 3102435 - DNA, 25 bp, Homo sapien
caaatgttcactgcttcttattgca

SEQ ID NO: 3102436 - DNA, 25 bp, Homo sapien
ccacccagtgcaatacctgtaactt

SEQ ID NO: 3102437 - DNA, 25 bp, Homo sapien
gtttctctaagaggatagtgcatct

SEQ ID NO: 3102438 - DNA, 25 bp, Homo sapien
gaagtcccagtcagtacaacaatag

SEQ ID NO: 3102439 - DNA, 25 bp, Homo sapien
ctgctccaatacacgcccacagaaa

SEQ ID NO: 3102440 - DNA, 25 bp, Homo sapien
gatcagccaaatcagttaaaatctg

SEQ ID NO: 3102441 - DNA, 25 bp, Homo sapien
aatacacgcccacagaaactggtcc

SEQ ID NO: 3102442 - DNA, 25 bp, Homo sapien
ggaggatcagccaaatcagttaaaa

SEQ ID NO: 3102443 - DNA, 25 bp, Homo sapien
ggttatgtgtctcggattcccagac

SEQ ID NO: 3102444 - DNA, 25 bp, Homo sapien
caaaggtgagtaacctccgagcagc

SEQ ID NO: 3102445 - DNA, 25 bp, Homo sapien
aatgcagacgttggataaaaacagc

SEQ ID NO: 3102446 - DNA, 25 bp, Homo sapien
tccgagcagcactcctaatgatagg

SEQ ID NO: 3102447 - DNA, 25 bp, Homo sapien
tcctggaccgagaccgggacctgga

SEQ ID NO: 3102448 - DNA, 25 bp, Homo sapien
actcctggaccgagaccgggacctg

SEQ ID NO: 3102449 - DNA, 25 bp, Homo sapien
ctcctggaccgagaccgggacctgg

SEQ ID NO: 3102450 - DNA, 25 bp, Homo sapien
gaggactcctggaccgagaccggga

SEQ ID NO: 3102451 - DNA, 25 bp, Homo sapien
acttggacttggaccttcgtgcgga

SEQ ID NO: 3102452 - DNA, 25 bp, Homo sapien
gaccgagacttcgagcggctgtagc

SEQ ID NO: 3102453 - DNA, 25 bp, Homo sapien
acttggaggtcgaccgagatcgaga

SEQ ID NO: 3102454 - DNA, 25 bp, Homo sapien
tctggagaccgacgaggacttggac

SEQ ID NO: 3102455 - DNA, 25 bp, Homo sapien
cgagcaagcacagcggggttaattc

SEQ ID NO: 3102456 - DNA, 25 bp, Homo sapien
ctgcgggcgggacgagcaagcacag

SEQ ID NO: 3102457 - DNA, 25 bp, Homo sapien
gacgagcaagcacagcggggttaat

SEQ ID NO: 3102458 - DNA, 25 bp, Homo sapien
gggcgggacgagcaagcacagcggg

SEQ ID NO: 3102459 - DNA, 25 bp, Homo sapien
ctgtggtgtgagtccggggggcggc

SEQ ID NO: 3102460 - DNA, 25 bp, Homo sapien
cggctgtggtgtgagtccggggggc

SEQ ID NO: 3102461 - DNA, 25 bp, Homo sapien
gcggctgtggtgtgagtccgggggg

SEQ ID NO: 3102462 - DNA, 25 bp, Homo sapien
ccggcggctgtggtgtgagtccggg

SEQ ID NO: 3102463 - DNA, 25 bp, Homo sapien
catttgcacccgcagctcgcggccg

SEQ ID NO: 3102464 - DNA, 25 bp, Homo sapien
atttgcacccgcagctcgcggccgt

SEQ ID NO: 3102465 - DNA, 25 bp, Homo sapien
agcgcgccatttgcacccgcagctc

SEQ ID NO: 3102466 - DNA, 25 bp, Homo sapien
gcgccatttgcacccgcagctcgcg

SEQ ID NO: 3102467 - DNA, 25 bp, Homo sapien
cctcagcgtcgcgcttgtcgtgaaa

SEQ ID NO: 3102468 - DNA, 25 bp, Homo sapien
gtcctcagcgtcgcgcttgtcgtga

SEQ ID NO: 3102469 - DNA, 25 bp, Homo sapien
tcctcagcgtcgcgcttgtcgtgaa

SEQ ID NO: 3102470 - DNA, 25 bp, Homo sapien
cgtcctcagcgtcgcgcttgtcgtg

SEQ ID NO: 3102471 - DNA, 25 bp, Homo sapien
actccttggtgtagcggtcccgcgg

SEQ ID NO: 3102472 - DNA, 25 bp, Homo sapien
tcgaagacgcgcctcagcgtgtcgg

SEQ ID NO: 3102473 - DNA, 25 bp, Homo sapien
cgtgtcgggcgaggtgcggtaggtc

SEQ ID NO: 3102474 - DNA, 25 bp, Homo sapien
cgaagccgcgggactccttggtgta

SEQ ID NO: 3102475 - DNA, 25 bp, Homo sapien
ctccacatcgggaggggggcggccg

SEQ ID NO: 3102476 - DNA, 25 bp, Homo sapien
gctagcgcacctgagtaacaactgg

SEQ ID NO: 3102477 - DNA, 25 bp, Homo sapien
gaattagcgggcagttggaaagccc

SEQ ID NO: 3102478 - DNA, 25 bp, Homo sapien
tatatcgctcctcacaaaatggcgc

SEQ ID NO: 3102479 - DNA, 25 bp, Homo sapien
gtcagccccgtctccgtctgaagag

SEQ ID NO: 3102480 - DNA, 25 bp, Homo sapien
ttctgcaaatagattgatgggtttt

SEQ ID NO: 3102481 - DNA, 25 bp, Homo sapien
aagtagagttcccatgtggccccta

SEQ ID NO: 3102482 - DNA, 25 bp, Homo sapien
gcaaatagattgatgggttttttaa

SEQ ID NO: 3102483 - DNA, 25 bp, Homo sapien
tatgctcataacaaaactgggcaga

SEQ ID NO: 3102484 - DNA, 25 bp, Homo sapien
caccgcacctggtctatttttttat

SEQ ID NO: 3102485 - DNA, 25 bp, Homo sapien
gcagtagcgcaatcttgactcgctg

SEQ ID NO: 3102486 - DNA, 25 bp, Homo sapien
aaagtgctggggattatatgcgtga

SEQ ID NO: 3102487 - DNA, 25 bp, Homo sapien
agtgctggggattatatgcgtgagc

SEQ ID NO: 3102488 - DNA, 25 bp, Homo sapien
tctatggctctgattagagatttcc

SEQ ID NO: 3102489 - DNA, 25 bp, Homo sapien
gattttatgttctggtctctatggc

SEQ ID NO: 3102490 - DNA, 25 bp, Homo sapien
tttaaataccaggaactgtggcagg

SEQ ID NO: 3102491 - DNA, 25 bp, Homo sapien
gactagaattaggaagcaatgagca

SEQ ID NO: 3102492 - DNA, 25 bp, Homo sapien
aaggcagtgtcttatcttgcccagg

SEQ ID NO: 3102493 - DNA, 25 bp, Homo sapien
gagcatcttacaaggctgcccacct

SEQ ID NO: 3102494 - DNA, 25 bp, Homo sapien
tttaatctgaggaagccatggcatc

SEQ ID NO: 3102495 - DNA, 25 bp, Homo sapien
catggcatcttgtcacccctaggat

SEQ ID NO: 3102496 - DNA, 25 bp, Homo sapien
tactgggagactgcaggtccctgga

SEQ ID NO: 3102497 - DNA, 25 bp, Homo sapien
tagtgcacatgtttgaaccgactcg

SEQ ID NO: 3102498 - DNA, 25 bp, Homo sapien
gaagctgctgatcactagctccagg

SEQ ID NO: 3102499 - DNA, 25 bp, Homo sapien
gatggttgcctgacgacctgatagg

SEQ ID NO: 3102500 - DNA, 25 bp, Homo sapien
ctagcttgccataattgccaggtcc

SEQ ID NO: 3102501 - DNA, 25 bp, Homo sapien
gcttgccataattgccaggtcccat

SEQ ID NO: 3102502 - DNA, 25 bp, Homo sapien
agcttgccataattgccaggtccca

SEQ ID NO: 3102503 - DNA, 25 bp, Homo sapien
tagcttgccataattgccaggtccc

SEQ ID NO: 3102504 - DNA, 25 bp, Homo sapien
cctggccggagtgatggtgcatttc

SEQ ID NO: 3102505 - DNA, 25 bp, Homo sapien
tgtggcgtcttgttacaggagtgct

SEQ ID NO: 3102506 - DNA, 25 bp, Homo sapien
gagatggaaccatcactgtggcgtc

SEQ ID NO: 3102507 - DNA, 25 bp, Homo sapien
agcaccggaagtggaaggcacgctc

SEQ ID NO: 3102508 - DNA, 25 bp, Homo sapien
tccgaggatgggttcgagtctttct

SEQ ID NO: 3102509 - DNA, 25 bp, Homo sapien
aataatatgtcagaggcccttggga

SEQ ID NO: 3102510 - DNA, 25 bp, Homo sapien
aattaaaccagcagccaagggacac

SEQ ID NO: 3102511 - DNA, 25 bp, Homo sapien
tgtcttcaccgtgggaatccgagga

SEQ ID NO: 3102512 - DNA, 25 bp, Homo sapien
cagtgactgcgtaaagcaactctgg

SEQ ID NO: 3102513 - DNA, 25 bp, Homo sapien
taaagcagctcattagatgtccagt

SEQ ID NO: 3102514 - DNA, 25 bp, Homo sapien
tgggtacagggaggtcagtccatcc

SEQ ID NO: 3102515 - DNA, 25 bp, Homo sapien
tgctgcaggacggtgtaattctttc

SEQ ID NO: 3102516 - DNA, 25 bp, Homo sapien
tctgctccatgtcacttggggcaca

SEQ ID NO: 3102517 - DNA, 25 bp, Homo sapien
cttttcctgcggcatccggagctcg

SEQ ID NO: 3102518 - DNA, 25 bp, Homo sapien
ggattctcgtcttttcctgcggcat

SEQ ID NO: 3102519 - DNA, 25 bp, Homo sapien
tgctccaagccgcccaaaggaagtc

SEQ ID NO: 3102520 - DNA, 25 bp, Homo sapien
tgactgcaggcaccctgacaagcag

SEQ ID NO: 3102521 - DNA, 25 bp, Homo sapien
actcagtcatgttcacctcaggctg

SEQ ID NO: 3102522 - DNA, 25 bp, Homo sapien
acagtggccgcacgaggtcagagaa

SEQ ID NO: 3102523 - DNA, 25 bp, Homo sapien
caagcagtggtgaactcagtcatgt

SEQ ID NO: 3102524 - DNA, 25 bp, Homo sapien
gagcaaatggctggatagagtgaca

SEQ ID NO: 3102525 - DNA, 25 bp, Homo sapien
caggacagccataccacgtaggatg

SEQ ID NO: 3102526 - DNA, 25 bp, Homo sapien
atttgagtcactgcacaatcagggc

SEQ ID NO: 3102527 - DNA, 25 bp, Homo sapien
tggtgaccctgcatgcacgtcttcg

SEQ ID NO: 3102528 - DNA, 25 bp, Homo sapien
catgtgttccaatctatgagcctac

SEQ ID NO: 3102529 - DNA, 25 bp, Homo sapien
tatggcaccatacagagtggttcca

SEQ ID NO: 3102530 - DNA, 25 bp, Homo sapien
catgatcttccgaccatctccgtag

SEQ ID NO: 3102531 - DNA, 25 bp, Homo sapien
aacacagttcacattagggctcact

SEQ ID NO: 3102532 - DNA, 25 bp, Homo sapien
ccagatcatcaggtagttggagccc

SEQ ID NO: 3102533 - DNA, 25 bp, Homo sapien
gttggagccctacagtttgtagcct

SEQ ID NO: 3102534 - DNA, 25 bp, Homo sapien
taacatgcatctaacattcctctgc

SEQ ID NO: 3102535 - DNA, 25 bp, Homo sapien
tttgtagccttctcagattggctcc

SEQ ID NO: 3102536 - DNA, 25 bp, Homo sapien
ccatccatgtaggcctttccaagga

SEQ ID NO: 3102537 - DNA, 25 bp, Homo sapien
agaataaggtggaagtgaaaggcat

SEQ ID NO: 3102538 - DNA, 25 bp, Homo sapien
caaggactcttgtgcttccgtgcag

SEQ ID NO: 3102539 - DNA, 25 bp, Homo sapien
gcaagttggtgctgtcggctgggga

SEQ ID NO: 3102540 - DNA, 25 bp, Homo sapien
tgtatcgtctttggcgaagtgtctg

SEQ ID NO: 3102541 - DNA, 25 bp, Homo sapien
ccaaaatatctaggcagggcggctc

SEQ ID NO: 3102542 - DNA, 25 bp, Homo sapien
gtattaccagccctgaatgagaatt

SEQ ID NO: 3102543 - DNA, 25 bp, Homo sapien
gaaagaatttgcagcccagatgtca

SEQ ID NO: 3102544 - DNA, 25 bp, Homo sapien
gctgttgatgactgcaagacactca

SEQ ID NO: 3102545 - DNA, 25 bp, Homo sapien
tgtccttgggcagaacaacacagaa

SEQ ID NO: 3102546 - DNA, 25 bp, Homo sapien
gcaggtaagattccaggtgctgcct

SEQ ID NO: 3102547 - DNA, 25 bp, Homo sapien
aaagatgcattgaaggcacccctgg

SEQ ID NO: 3102548 - DNA, 25 bp, Homo sapien
ccacagccggtggtaagtgactata

SEQ ID NO: 3102549 - DNA, 25 bp, Homo sapien
tgtgaggaaatacgctcccgcggtt

SEQ ID NO: 3102550 - DNA, 25 bp, Homo sapien
aaacactaaggcctgctggtgaccg

SEQ ID NO: 3102551 - DNA, 25 bp, Homo sapien
gcagcccgctttgtcttttcgcaga

SEQ ID NO: 3102552 - DNA, 25 bp, Homo sapien
ccccaagcctgacttttcaggttga

SEQ ID NO: 3102553 - DNA, 25 bp, Homo sapien
gaatccaggcgcttacagcaggaga

SEQ ID NO: 3102554 - DNA, 25 bp, Homo sapien
gggtgcagaatccaggcgcttacag

SEQ ID NO: 3102555 - DNA, 25 bp, Homo sapien
gattctgcgctcctctgggactggg

SEQ ID NO: 3102556 - DNA, 25 bp, Homo sapien
gatgaaatccctggtgccaaactca

SEQ ID NO: 3102557 - DNA, 25 bp, Homo sapien
gtgaccatttgctaccgagggagag

SEQ ID NO: 3102558 - DNA, 25 bp, Homo sapien
caaagatcagagtgggccttcagtc

SEQ ID NO: 3102559 - DNA, 25 bp, Homo sapien
tattaggcccaatgccctgtgctcc

SEQ ID NO: 3102560 - DNA, 25 bp, Homo sapien
tgaggcaggtgcaagatggaggaaa

SEQ ID NO: 3102561 - DNA, 25 bp, Homo sapien
cacaatggagagacgcttagatggc

SEQ ID NO: 3102562 - DNA, 25 bp, Homo sapien
tacagtggtaaacatagccatcctc

SEQ ID NO: 3102563 - DNA, 25 bp, Homo sapien
gctggtggtgaggtatgtggctccc

SEQ ID NO: 3102564 - DNA, 25 bp, Homo sapien
cctcccggaggtgggctgccatcag

SEQ ID NO: 3102565 - DNA, 25 bp, Homo sapien
gataatgattgggtccttccctcct

SEQ ID NO: 3102566 - DNA, 25 bp, Homo sapien
cctgttcactggctcttgatctttc

SEQ ID NO: 3102567 - DNA, 25 bp, Homo sapien
caaggctaacgaaagctccatgagg

SEQ ID NO: 3102568 - DNA, 25 bp, Homo sapien
gaccacacctgtagggcctgagcta

SEQ ID NO: 3102569 - DNA, 25 bp, Homo sapien
ccaagactcagggtttgctcattca

SEQ ID NO: 3102570 - DNA, 25 bp, Homo sapien
tccaaggagcttcgctaactagcag

SEQ ID NO: 3102571 - DNA, 25 bp, Homo sapien
aattcaagaggaatctccaaggagc

SEQ ID NO: 3102572 - DNA, 25 bp, Homo sapien
tgtttaccaggcacccgttacgcta

SEQ ID NO: 3102573 - DNA, 25 bp, Homo sapien
ccttgactcccgagaggctggcggt

SEQ ID NO: 3102574 - DNA, 25 bp, Homo sapien
gggacataggccttgaaaatctcct

SEQ ID NO: 3102575 - DNA, 25 bp, Homo sapien
gaccgcagggctgatctctccagct

SEQ ID NO: 3102576 - DNA, 25 bp, Homo sapien
gaaagagagtaaagcgtagccttga

SEQ ID NO: 3102577 - DNA, 25 bp, Homo sapien
gaggggctttttttgcccgctggca

SEQ ID NO: 3102578 - DNA, 25 bp, Homo sapien
aaaataaagtattctggagctggag

SEQ ID NO: 3102579 - DNA, 25 bp, Homo sapien
tgaaatttatctgcggggatgcgaa

SEQ ID NO: 3102580 - DNA, 25 bp, Homo sapien
ggttctgctcagagaacacttgtgg

SEQ ID NO: 3102581 - DNA, 25 bp, Homo sapien
atcccaccacgagtgcccaggcttg

SEQ ID NO: 3102582 - DNA, 25 bp, Homo sapien
tgtttaaaccccacctgttctcatc

SEQ ID NO: 3102583 - DNA, 25 bp, Homo sapien
gccagaatcccaccacgagtgccca

SEQ ID NO: 3102584 - DNA, 25 bp, Homo sapien
ctgcccctccttgtaccgtcagtcc

SEQ ID NO: 3102585 - DNA, 25 bp, Homo sapien
gtcagtcctaactgccagcccacgc

SEQ ID NO: 3102586 - DNA, 25 bp, Homo sapien
agtcctaactgccagcccacgcagc

SEQ ID NO: 3102587 - DNA, 25 bp, Homo sapien
gtggccgcctcctcgtgtcaccttg

SEQ ID NO: 3102588 - DNA, 25 bp, Homo sapien
ttgttgagactgcttcgtccaaacc

SEQ ID NO: 3102589 - DNA, 25 bp, Homo sapien
gggccaaagagtttgttgagactgc

SEQ ID NO: 3102590 - DNA, 25 bp, Homo sapien
gagtttgttgagactgcttcgtcca

SEQ ID NO: 3102591 - DNA, 25 bp, Homo sapien
cttgaggcttgacgagggccaaaga

SEQ ID NO: 3102592 - DNA, 25 bp, Homo sapien
ttggaggacagtgtccgagtacccg

SEQ ID NO: 3102593 - DNA, 25 bp, Homo sapien
gaggagcaatttaattcctgctgga

SEQ ID NO: 3102594 - DNA, 25 bp, Homo sapien
tagcaactgggatccccggatgtag

SEQ ID NO: 3102595 - DNA, 25 bp, Homo sapien
ctctgcagtgaccaggtagttggag

SEQ ID NO: 3102596 - DNA, 25 bp, Homo sapien
gatgtgtgatgagacgccggacatc

SEQ ID NO: 3102597 - DNA, 25 bp, Homo sapien
tcctgccacacggatgtgtgatgag

SEQ ID NO: 3102598 - DNA, 25 bp, Homo sapien
tgtgtgatgagacgccggacatcgc

SEQ ID NO: 3102599 - DNA, 25 bp, Homo sapien
cacacggatgtgtgatgagacgccg

SEQ ID NO: 3102600 - DNA, 25 bp, Homo sapien
tagtcccatgtgacgtccagcagaa

SEQ ID NO: 3102601 - DNA, 25 bp, Homo sapien
tcctcaaatcctgagtagtcccatg

SEQ ID NO: 3102602 - DNA, 25 bp, Homo sapien
ttgggtagccccttgtgattctctc

SEQ ID NO: 3102603 - DNA, 25 bp, Homo sapien
tccagacggccccactggtagggtc

SEQ ID NO: 3102604 - DNA, 25 bp, Homo sapien
tgcagccagctatattgtaatcagt

SEQ ID NO: 3102605 - DNA, 25 bp, Homo sapien
gccgcagccccagtcaatataatag

SEQ ID NO: 3102606 - DNA, 25 bp, Homo sapien
cagtcacattacagagaaacgttcc

SEQ ID NO: 3102607 - DNA, 25 bp, Homo sapien
tatctctgggttgtgttggctcacc

SEQ ID NO: 3102608 - DNA, 25 bp, Homo sapien
gcgaagccgcgcaggcacagtgtct

SEQ ID NO: 3102609 - DNA, 25 bp, Homo sapien
cccctcgtggcgaagccgcgcaggc

SEQ ID NO: 3102610 - DNA, 25 bp, Homo sapien
cttctttttcaggcccacgaaggag

SEQ ID NO: 3102611 - DNA, 25 bp, Homo sapien
cacgaaggagctcctcgcggtgccg

SEQ ID NO: 3102612 - DNA, 25 bp, Homo sapien
gcaggttgggttcaggttggcccca

SEQ ID NO: 3102613 - DNA, 25 bp, Homo sapien
agctctccgggttggccgggatcat

SEQ ID NO: 3102614 - DNA, 25 bp, Homo sapien
ctccgggttggccgggatcatctcc

SEQ ID NO: 3102615 - DNA, 25 bp, Homo sapien
ttgcaggttgggttcaggttggccc

SEQ ID NO: 3102616 - DNA, 25 bp, Homo sapien
cattacagcagctcgatgagcctcc

SEQ ID NO: 3102617 - DNA, 25 bp, Homo sapien
gggatgatgaataaacgcccagcca

SEQ ID NO: 3102618 - DNA, 25 bp, Homo sapien
gccattaagtatttgttgtgctgac

SEQ ID NO: 3102619 - DNA, 25 bp, Homo sapien
tgactgtcaaggctagaagcagcat

SEQ ID NO: 3102620 - DNA, 25 bp, Homo sapien
caagctttacttggagcttgctgac

SEQ ID NO: 3102621 - DNA, 25 bp, Homo sapien
cgcgctgacggctgagttggttttc

SEQ ID NO: 3102622 - DNA, 25 bp, Homo sapien
ctaaaggtttcccacgcgctgacgg

SEQ ID NO: 3102623 - DNA, 25 bp, Homo sapien
cactatcacagatgcctgaaagtcc

SEQ ID NO: 3102624 - DNA, 25 bp, Homo sapien
gttttacaagtctgagaagtagtac

SEQ ID NO: 3102625 - DNA, 25 bp, Homo sapien
aactgaaaggctcatatttttcatc

SEQ ID NO: 3102626 - DNA, 25 bp, Homo sapien
tcattgtttgcatattgtgttttac

SEQ ID NO: 3102627 - DNA, 25 bp, Homo sapien
ctggttttcagcccctggctcttgg

SEQ ID NO: 3102628 - DNA, 25 bp, Homo sapien
tgtagaagtcccctgtctcatccac

SEQ ID NO: 3102629 - DNA, 25 bp, Homo sapien
gggactgtagaagtcccctgtctca

SEQ ID NO: 3102630 - DNA, 25 bp, Homo sapien
gactgtagaagtcccctgtctcatc

SEQ ID NO: 3102631 - DNA, 25 bp, Homo sapien
taagtgggactgtagaagtcccctg

SEQ ID NO: 3102632 - DNA, 25 bp, Homo sapien
ttcagcaggttggaactggctgcag

SEQ ID NO: 3102633 - DNA, 25 bp, Homo sapien
ccctttcagcatgtcgtacagtcgc

SEQ ID NO: 3102634 - DNA, 25 bp, Homo sapien
tccagcattgcaaagttgagggttg

SEQ ID NO: 3102635 - DNA, 25 bp, Homo sapien
gcagctcaggtttactgagtccata

SEQ ID NO: 3102636 - DNA, 25 bp, Homo sapien
ccggtgttgactccaccctgttcag

SEQ ID NO: 3102637 - DNA, 25 bp, Homo sapien
cccggtgttgactccaccctgttca

SEQ ID NO: 3102638 - DNA, 25 bp, Homo sapien
tgcccggtgttgactccaccctgtt

SEQ ID NO: 3102639 - DNA, 25 bp, Homo sapien
cctgcccggtgttgactccaccctg

SEQ ID NO: 3102640 - DNA, 25 bp, Homo sapien
ctgggcgcgcgtctcagtttcaagc

SEQ ID NO: 3102641 - DNA, 25 bp, Homo sapien
gcggcccgacactagagccgtctgg

SEQ ID NO: 3102642 - DNA, 25 bp, Homo sapien
ccctgggcgcgcgtctcagtttcaa

SEQ ID NO: 3102643 - DNA, 25 bp, Homo sapien
ccgtctggatgtgttgacaaggatg

SEQ ID NO: 3102644 - DNA, 25 bp, Homo sapien
gtgagaacggaaccgtagcttccgc

SEQ ID NO: 3102645 - DNA, 25 bp, Homo sapien
ccggcggacttgtgagcacgtcaga

SEQ ID NO: 3102646 - DNA, 25 bp, Homo sapien
tcagttcagcattcagagtgaggaa

SEQ ID NO: 3102647 - DNA, 25 bp, Homo sapien
gcacgtcagaaagcgaatgtgcctc

SEQ ID NO: 3102648 - DNA, 25 bp, Homo sapien
acacgtccccgatgcctctgaagat

SEQ ID NO: 3102649 - DNA, 25 bp, Homo sapien
ttccacacgtccccgatgcctctga

SEQ ID NO: 3102650 - DNA, 25 bp, Homo sapien
ccacacgtccccgatgcctctgaag

SEQ ID NO: 3102651 - DNA, 25 bp, Homo sapien
ccttccacacgtccccgatgcctct

SEQ ID NO: 3102652 - DNA, 25 bp, Homo sapien
tctcgggtaaacctcactgactatg

SEQ ID NO: 3102653 - DNA, 25 bp, Homo sapien
tattgcaagttatcttgtggtattg

SEQ ID NO: 3102654 - DNA, 25 bp, Homo sapien
ggccggtgccagctctattgcaagt

SEQ ID NO: 3102655 - DNA, 25 bp, Homo sapien
tgagcaataatcacgtctcgggtaa

SEQ ID NO: 3102656 - DNA, 25 bp, Homo sapien
acgaacatgggtggcccaacgggca

SEQ ID NO: 3102657 - DNA, 25 bp, Homo sapien
ccagaattctgcaggtcgtctatga

SEQ ID NO: 3102658 - DNA, 25 bp, Homo sapien
ccgtctgcctgggtgggattctgac

SEQ ID NO: 3102659 - DNA, 25 bp, Homo sapien
gaccggctctctgaggccattggag

SEQ ID NO: 3102660 - DNA, 25 bp, Homo sapien
tcctgaggataaaaagtctctgccc

SEQ ID NO: 3102661 - DNA, 25 bp, Homo sapien
taagggaggcgcttgctaactgccc

SEQ ID NO: 3102662 - DNA, 25 bp, Homo sapien
catgccaaggtaaagtgaacgtctg

SEQ ID NO: 3102663 - DNA, 25 bp, Homo sapien
gcattgaagtcctcgttctcctgag

SEQ ID NO: 3102664 - DNA, 25 bp, Homo sapien
atccctggttcttttagcctgtgct

SEQ ID NO: 3102665 - DNA, 25 bp, Homo sapien
cccatccctggttcttttagcctgt

SEQ ID NO: 3102666 - DNA, 25 bp, Homo sapien
tttagcctgtgctccaagttttctt

SEQ ID NO: 3102667 - DNA, 25 bp, Homo sapien
cctggttcttttagcctgtgctcca

SEQ ID NO: 3102668 - DNA, 25 bp, Homo sapien
ttttgtaataagacagtgaccaatt

SEQ ID NO: 3102669 - DNA, 25 bp, Homo sapien
tctgttttgtaataagacagtgacc

SEQ ID NO: 3102670 - DNA, 25 bp, Homo sapien
ttgtaataagacagtgaccaattat

SEQ ID NO: 3102671 - DNA, 25 bp, Homo sapien
tgttttgtaataagacagtgaccaa

SEQ ID NO: 3102672 - DNA, 25 bp, Homo sapien
tagaacacaggcgaacacatattcc

SEQ ID NO: 3102673 - DNA, 25 bp, Homo sapien
cagaaagacttttaagcgcccctag

SEQ ID NO: 3102674 - DNA, 25 bp, Homo sapien
accaaaggcttggtgagagcgctcg

SEQ ID NO: 3102675 - DNA, 25 bp, Homo sapien
gaagccctgctgagatacgtaagtg

SEQ ID NO: 3102676 - DNA, 25 bp, Homo sapien
gaagcaagggcgttccgtgttcctg

SEQ ID NO: 3102677 - DNA, 25 bp, Homo sapien
tcagctaggacaaggttcgtggccc

SEQ ID NO: 3102678 - DNA, 25 bp, Homo sapien
tgttcctgtgcatgccatatgtctg

SEQ ID NO: 3102679 - DNA, 25 bp, Homo sapien
gcatcacgagtgacctgaagcagga

SEQ ID NO: 3102680 - DNA, 25 bp, Homo sapien
tgtttgctcttagagatcgagctcc

SEQ ID NO: 3102681 - DNA, 25 bp, Homo sapien
ttgcccggtcgggtcagccctagtg

SEQ ID NO: 3102682 - DNA, 25 bp, Homo sapien
gctcctcagtggtacctgaagcctt

SEQ ID NO: 3102683 - DNA, 25 bp, Homo sapien
atcacctgcctttggaccacatttg

SEQ ID NO: 3102684 - DNA, 25 bp, Homo sapien
tatacccaaagactgtagtgcatct

SEQ ID NO: 3102685 - DNA, 25 bp, Homo sapien
catgaccgcacaaatgcttacaggg

SEQ ID NO: 3102686 - DNA, 25 bp, Homo sapien
tgaagagctcaaagcacatgaccgc

SEQ ID NO: 3102687 - DNA, 25 bp, Homo sapien
aatcacaagggcctgaaggtggtcc

SEQ ID NO: 3102688 - DNA, 25 bp, Homo sapien
ccacctgctggagtgtgcgcgtctg

SEQ ID NO: 3102689 - DNA, 25 bp, Homo sapien
tggcccggcgtgaaaggtcaccctg

SEQ ID NO: 3102690 - DNA, 25 bp, Homo sapien
tccgcagggcgatgttttagcagtt

SEQ ID NO: 3102691 - DNA, 25 bp, Homo sapien
atcccggttgccacaggcatcggag

SEQ ID NO: 3102692 - DNA, 25 bp, Homo sapien
gaaaggcactggctgcggaaaagca

SEQ ID NO: 3102693 - DNA, 25 bp, Homo sapien
gaacgcttggtagcatctccacgca

SEQ ID NO: 3102694 - DNA, 25 bp, Homo sapien
tcataggatcaactggacccgcgaa

SEQ ID NO: 3102695 - DNA, 25 bp, Homo sapien
caatgtgattggaggttcggaacga

SEQ ID NO: 3102696 - DNA, 25 bp, Homo sapien
tattcagcacgtgagttcctgaccc

SEQ ID NO: 3102697 - DNA, 25 bp, Homo sapien
tcactggtcagtgggtcgctgcgtc

SEQ ID NO: 3102698 - DNA, 25 bp, Homo sapien
aagcagagaggtgcagtcgctcatc

SEQ ID NO: 3102699 - DNA, 25 bp, Homo sapien
caggcctggtgctcgttctttctca

SEQ ID NO: 3102700 - DNA, 25 bp, Homo sapien
cagggtgggcgctgcgtccccagag

SEQ ID NO: 3102701 - DNA, 25 bp, Homo sapien
ctgggcagggtgggcgctgcgtccc

SEQ ID NO: 3102702 - DNA, 25 bp, Homo sapien
gcagggtgggcgctgcgtccccaga

SEQ ID NO: 3102703 - DNA, 25 bp, Homo sapien
gggcagggtgggcgctgcgtcccca

SEQ ID NO: 3102704 - DNA, 25 bp, Homo sapien
tcacttggccacactcagcctttga

SEQ ID NO: 3102705 - DNA, 25 bp, Homo sapien
tgggcagggtggacgcctctgcagg

SEQ ID NO: 3102706 - DNA, 25 bp, Homo sapien
gcaggtgcccgcacaggggctttct

SEQ ID NO: 3102707 - DNA, 25 bp, Homo sapien
ttctccttcacttggccacactcag

SEQ ID NO: 3102708 - DNA, 25 bp, Homo sapien
ggtccttcccgagcccgtgtgtggc

SEQ ID NO: 3102709 - DNA, 25 bp, Homo sapien
tcactggtccttcccgagcccgtgt

SEQ ID NO: 3102710 - DNA, 25 bp, Homo sapien
cccctgagtcactggtccttcccga

SEQ ID NO: 3102711 - DNA, 25 bp, Homo sapien
ctgagtcactggtccttcccgagcc

SEQ ID NO: 3102712 - DNA, 25 bp, Homo sapien
agcagcgtgagcctcggcctgcaaa

SEQ ID NO: 3102713 - DNA, 25 bp, Homo sapien
cggatactgtatgtgagtgttggca

SEQ ID NO: 3102714 - DNA, 25 bp, Homo sapien
ggcaccaagccccatcgccttggta

SEQ ID NO: 3102715 - DNA, 25 bp, Homo sapien
gcctgcaaactcaggacggcaccaa

SEQ ID NO: 3102716 - DNA, 25 bp, Homo sapien
gacaggtgagaacttgtcacaggct

SEQ ID NO: 3102717 - DNA, 25 bp, Homo sapien
tacaggctacgcagttacacctgaa

SEQ ID NO: 3102718 - DNA, 25 bp, Homo sapien
ggtcagcagtgatctcttttagggc

SEQ ID NO: 3102719 - DNA, 25 bp, Homo sapien
tattttatcaggcagtcctcgccaa

SEQ ID NO: 3102720 - DNA, 25 bp, Homo sapien
cctggagtggcagtttcctcacaga

SEQ ID NO: 3102721 - DNA, 25 bp, Homo sapien
tggcagtttcctcacagaaagccca

SEQ ID NO: 3102722 - DNA, 25 bp, Homo sapien
tcacagaaagcccatcctggctcct

SEQ ID NO: 3102723 - DNA, 25 bp, Homo sapien
gagtggcagtttcctcacagaaagc

SEQ ID NO: 3102724 - DNA, 25 bp, Homo sapien
ggagcccagagaacacagtagcagc

SEQ ID NO: 3102725 - DNA, 25 bp, Homo sapien
tgactcccacttggtagctccgggc

SEQ ID NO: 3102726 - DNA, 25 bp, Homo sapien
ccttctctgacacaagccttgggct

SEQ ID NO: 3102727 - DNA, 25 bp, Homo sapien
gatgactaatacagtccctagggca

SEQ ID NO: 3102728 - DNA, 25 bp, Homo sapien
ccagcagtatgagcccgatgagcct

SEQ ID NO: 3102729 - DNA, 25 bp, Homo sapien
tggtgccagcagtatgagcccgatg

SEQ ID NO: 3102730 - DNA, 25 bp, Homo sapien
tgccagcagtatgagcccgatgagc

SEQ ID NO: 3102731 - DNA, 25 bp, Homo sapien
agtatgagcccgatgagccttcagc

SEQ ID NO: 3102732 - DNA, 25 bp, Homo sapien
gaagcgtgagcatccgcagaggaac

SEQ ID NO: 3102733 - DNA, 25 bp, Homo sapien
gtgtccaacatcactccacgcaggt

SEQ ID NO: 3102734 - DNA, 25 bp, Homo sapien
gaaaattcggatatccaggaaccat

SEQ ID NO: 3102735 - DNA, 25 bp, Homo sapien
ggaggcacccatgtgatgtgtccaa

SEQ ID NO: 3102736 - DNA, 25 bp, Homo sapien
agattcttgagacaccgctggactt

SEQ ID NO: 3102737 - DNA, 25 bp, Homo sapien
aggcattaggctcgtggcagtgtca

SEQ ID NO: 3102738 - DNA, 25 bp, Homo sapien
gacttgtgctgagtaaaatggacaa

SEQ ID NO: 3102739 - DNA, 25 bp, Homo sapien
aatcccaggcattaggctcgtggca

SEQ ID NO: 3102740 - DNA, 25 bp, Homo sapien
cagtgtcatcatggtgcttgctggc

SEQ ID NO: 3102741 - DNA, 25 bp, Homo sapien
ctgggggcagtgtcatcatggtgct

SEQ ID NO: 3102742 - DNA, 25 bp, Homo sapien
gggggcagtgtcatcatggtgcttg

SEQ ID NO: 3102743 - DNA, 25 bp, Homo sapien
gggcagtgtcatcatggtgcttgct

SEQ ID NO: 3102744 - DNA, 25 bp, Homo sapien
tgactttccaggtcggccgggtgct

SEQ ID NO: 3102745 - DNA, 25 bp, Homo sapien
tccagcccttgctcgagtgtcggag

SEQ ID NO: 3102746 - DNA, 25 bp, Homo sapien
cgggcacactgcaggtcgagttcct

SEQ ID NO: 3102747 - DNA, 25 bp, Homo sapien
cttgcaccctcgcaggaatcgctga

SEQ ID NO: 3102748 - DNA, 25 bp, Homo sapien
actggtgggtccagacagtgggggt

SEQ ID NO: 3102749 - DNA, 25 bp, Homo sapien
tctgcttttcccagcgctgcacctg

SEQ ID NO: 3102750 - DNA, 25 bp, Homo sapien
ctgtgacgaggcctgcgccatggcc

SEQ ID NO: 3102751 - DNA, 25 bp, Homo sapien
aagccgaggatgtccctgaatgcca

SEQ ID NO: 3102752 - DNA, 25 bp, Homo sapien
ttgggccccggaagccgaggatgtc

SEQ ID NO: 3102753 - DNA, 25 bp, Homo sapien
gtgaaacgcatctacccctttggtg

SEQ ID NO: 3102754 - DNA, 25 bp, Homo sapien
cctgtgttatactctgatggctgga

SEQ ID NO: 3102755 - DNA, 25 bp, Homo sapien
ggcccggccgttgagattaccttca

SEQ ID NO: 3102756 - DNA, 25 bp, Homo sapien
tcagaagggatccaaggctggcgta

SEQ ID NO: 3102757 - DNA, 25 bp, Homo sapien
cctgcccatcggagtcagtggttgt

SEQ ID NO: 3102758 - DNA, 25 bp, Homo sapien
caggccacacatccgagatcagggt

SEQ ID NO: 3102759 - DNA, 25 bp, Homo sapien
cgtctgtggcgctgcatcagtttcc

SEQ ID NO: 3102760 - DNA, 25 bp, Homo sapien
gcagctgctgtaacgagtggccaca

SEQ ID NO: 3102761 - DNA, 25 bp, Homo sapien
gatgaactccgtctcagaagctaag

SEQ ID NO: 3102762 - DNA, 25 bp, Homo sapien
tctttttgacggttccaagctcgtg

SEQ ID NO: 3102763 - DNA, 25 bp, Homo sapien
cactgtcaatgctgaggctgttggc

SEQ ID NO: 3102764 - DNA, 25 bp, Homo sapien
tcttgcatgtcatggccactgtcaa

SEQ ID NO: 3102765 - DNA, 25 bp, Homo sapien
tgggccgcagttccgtcatctgcaa

SEQ ID NO: 3102766 - DNA, 25 bp, Homo sapien
tctcgtcctgggcaaactttagcgc

SEQ ID NO: 3102767 - DNA, 25 bp, Homo sapien
taaactggctgccttccgaatgaac

SEQ ID NO: 3102768 - DNA, 25 bp, Homo sapien
gaatgaacacgacagtcccggagct

SEQ ID NO: 3102769 - DNA, 25 bp, Homo sapien
agggtaaagcccagctcctcttacg

SEQ ID NO: 3102770 - DNA, 25 bp, Homo sapien
gaagtggccgtctgtgcatggtcat

SEQ ID NO: 3102771 - DNA, 25 bp, Homo sapien
tccttccagccaagggtcggagctt

SEQ ID NO: 3102772 - DNA, 25 bp, Homo sapien
tctggaacggctttgtggcttttac

SEQ ID NO: 3102773 - DNA, 25 bp, Homo sapien
caccagcaatggatacgagttctag

SEQ ID NO: 3102774 - DNA, 25 bp, Homo sapien
tgctgagtaacgtccactgtgtgaa

SEQ ID NO: 3102775 - DNA, 25 bp, Homo sapien
ggctcttatgagtaaacctgttacg

SEQ ID NO: 3102776 - DNA, 25 bp, Homo sapien
tctgtagaaacacctagagtaggta

SEQ ID NO: 3102777 - DNA, 25 bp, Homo sapien
taactattgtctgtcctgttgcggt

SEQ ID NO: 3102778 - DNA, 25 bp, Homo sapien
tattcgtggtgactaaacatctctt

SEQ ID NO: 3102779 - DNA, 25 bp, Homo sapien
taacttgaaattggccggctgggca

SEQ ID NO: 3102780 - DNA, 25 bp, Homo sapien
tatgatagaaacactatattcgtgg

SEQ ID NO: 3102781 - DNA, 25 bp, Homo sapien
gaaaagtcaccactagctagcaggg

SEQ ID NO: 3102782 - DNA, 25 bp, Homo sapien
tcagttcctaacagaaagtgtcggg

SEQ ID NO: 3102783 - DNA, 25 bp, Homo sapien
gaagaactctcgtgtctcaacggga

SEQ ID NO: 3102784 - DNA, 25 bp, Homo sapien
taagcccttatggagagaggccctg

SEQ ID NO: 3102785 - DNA, 25 bp, Homo sapien
taaaggtcatgtgccgtatccgtgg

SEQ ID NO: 3102786 - DNA, 25 bp, Homo sapien
cacaggcgttggtcattaaaggtca

SEQ ID NO: 3102787 - DNA, 25 bp, Homo sapien
ttcttaagaattcctcagctgcaaa

SEQ ID NO: 3102788 - DNA, 25 bp, Homo sapien
tatatccgcattcatgtgagggcac

SEQ ID NO: 3102789 - DNA, 25 bp, Homo sapien
gaagtttgcctcctcggaacacttg

SEQ ID NO: 3102790 - DNA, 25 bp, Homo sapien
gctggtggttctgcgaggcccctac

SEQ ID NO: 3102791 - DNA, 25 bp, Homo sapien
gaacacttgcgtgcttctgcatgtg

SEQ ID NO: 3102792 - DNA, 25 bp, Homo sapien
gaggcccctactgggctgcgtcatg

SEQ ID NO: 3102793 - DNA, 25 bp, Homo sapien
tcccctcatttctggtctctgggcc

SEQ ID NO: 3102794 - DNA, 25 bp, Homo sapien
ggcggccaggacagtagcagtggct

SEQ ID NO: 3102795 - DNA, 25 bp, Homo sapien
ttcctgggaggtcagcccattggcg

SEQ ID NO: 3102796 - DNA, 25 bp, Homo sapien
ccagcgaatggggaggggagcttct

SEQ ID NO: 3102797 - DNA, 25 bp, Homo sapien
gctgttccattatatgttgtggaca

SEQ ID NO: 3102798 - DNA, 25 bp, Homo sapien
cattatatgttgtggacacctccac

SEQ ID NO: 3102799 - DNA, 25 bp, Homo sapien
tatatgttgtggacacctccacggc

SEQ ID NO: 3102800 - DNA, 25 bp, Homo sapien
tccattatatgttgtggacacctcc

SEQ ID NO: 3102801 - DNA, 25 bp, Homo sapien
ggtggacactgtacctactggcaga

SEQ ID NO: 3102802 - DNA, 25 bp, Homo sapien
ggatttagccggatctctgactcca

SEQ ID NO: 3102803 - DNA, 25 bp, Homo sapien
gaagcaaggtatgaacactggccct

SEQ ID NO: 3102804 - DNA, 25 bp, Homo sapien
caccacgtaactagcctttgcagca

SEQ ID NO: 3102805 - DNA, 25 bp, Homo sapien
tgtggcctgaccacagtcactgttc

SEQ ID NO: 3102806 - DNA, 25 bp, Homo sapien
tgacagaaggtggaacgctttttct

SEQ ID NO: 3102807 - DNA, 25 bp, Homo sapien
gagcagagttgctgacttgtgagct

SEQ ID NO: 3102808 - DNA, 25 bp, Homo sapien
gtcactgttctcatgagcgaggccc

SEQ ID NO: 3102809 - DNA, 25 bp, Homo sapien
tccgttcaccctgtccacccgcagg

SEQ ID NO: 3102810 - DNA, 25 bp, Homo sapien
ttgtgcctccgttcaccctgtccac

SEQ ID NO: 3102811 - DNA, 25 bp, Homo sapien
tcaccctgtccacccgcagggcctg

SEQ ID NO: 3102812 - DNA, 25 bp, Homo sapien
cttgtgcctccgttcaccctgtcca

SEQ ID NO: 3102813 - DNA, 25 bp, Homo sapien
cgtccaaggcatttgtgggcacccc

SEQ ID NO: 3102814 - DNA, 25 bp, Homo sapien
ccgtcaaagctcacgtccaaggcat

SEQ ID NO: 3102815 - DNA, 25 bp, Homo sapien
cagacgtgagggttggcatcttctc

SEQ ID NO: 3102816 - DNA, 25 bp, Homo sapien
ccctgtggttgaaggtgccctggca

SEQ ID NO: 3102817 - DNA, 25 bp, Homo sapien
ctgcacccagccaactagtcttaaa

SEQ ID NO: 3102818 - DNA, 25 bp, Homo sapien
gcacccagccaactagtcttaaaaa

SEQ ID NO: 3102819 - DNA, 25 bp, Homo sapien
tgcacccagccaactagtcttaaaa

SEQ ID NO: 3102820 - DNA, 25 bp, Homo sapien
aagggactgatttgagacaccggga

SEQ ID NO: 3102821 - DNA, 25 bp, Homo sapien
aagaaacagccagtaggactttggt

SEQ ID NO: 3102822 - DNA, 25 bp, Homo sapien
ctgatttgagacaccgggaagaaac

SEQ ID NO: 3102823 - DNA, 25 bp, Homo sapien
tctgggcaggaagggactgatttga

SEQ ID NO: 3102824 - DNA, 25 bp, Homo sapien
gaagagtcgtcgtcagtcacagtaa

SEQ ID NO: 3102825 - DNA, 25 bp, Homo sapien
gcgggctgcctttgagtcctgagca

SEQ ID NO: 3102826 - DNA, 25 bp, Homo sapien
gagtatccctctttgcaaatggccc

SEQ ID NO: 3102827 - DNA, 25 bp, Homo sapien
tcagcactgtctagcgccagaactt

SEQ ID NO: 3102828 - DNA, 25 bp, Homo sapien
gtcttatgagagatgccgctgtgtg

SEQ ID NO: 3102829 - DNA, 25 bp, Homo sapien
gagagatgccgctgtgtgtttcacc

SEQ ID NO: 3102830 - DNA, 25 bp, Homo sapien
gtgtgtttcaccaagctgtatccta

SEQ ID NO: 3102831 - DNA, 25 bp, Homo sapien
ccaagctgtatcctattgtcctcta

SEQ ID NO: 3102832 - DNA, 25 bp, Homo sapien
taaggttgcgtctgtggcccatgtg

SEQ ID NO: 3102833 - DNA, 25 bp, Homo sapien
tggagggttggaccgagggccagcc

SEQ ID NO: 3102834 - DNA, 25 bp, Homo sapien
tggggctgctctacctgaatgctga

SEQ ID NO: 3102835 - DNA, 25 bp, Homo sapien
tgtgctgagcggtagagaactttga

SEQ ID NO: 3102836 - DNA, 25 bp, Homo sapien
gagcccagctgtggcgatgtctgag

SEQ ID NO: 3102837 - DNA, 25 bp, Homo sapien
agcccagctgtggcgatgtctgagc

SEQ ID NO: 3102838 - DNA, 25 bp, Homo sapien
gagggatctccctaacggacctgct

SEQ ID NO: 3102839 - DNA, 25 bp, Homo sapien
gaaccccagagactaaatcatgcag

SEQ ID NO: 3102840 - DNA, 25 bp, Homo sapien
tacaatggcatgctgcgtgtcggcc

SEQ ID NO: 3102841 - DNA, 25 bp, Homo sapien
gatagtctcaatgctcgaaatgccg

SEQ ID NO: 3102842 - DNA, 25 bp, Homo sapien
cattgccaccttgccttgaaactta

SEQ ID NO: 3102843 - DNA, 25 bp, Homo sapien
tgtggctcgccttttttaatgctcg

SEQ ID NO: 3102844 - DNA, 25 bp, Homo sapien
tctagtatacgagtccttgttggaa

SEQ ID NO: 3102845 - DNA, 25 bp, Homo sapien
taatgctcgtctctggagacctgag

SEQ ID NO: 3102846 - DNA, 25 bp, Homo sapien
gtagggacctgttcccggagctcag

SEQ ID NO: 3102847 - DNA, 25 bp, Homo sapien
tttattgagtgccagcccggttccc

SEQ ID NO: 3102848 - DNA, 25 bp, Homo sapien
ttccggcgccgagctttgatttgtt

SEQ ID NO: 3102849 - DNA, 25 bp, Homo sapien
tgcccagtccgctgtacgtgtgagt

SEQ ID NO: 3102850 - DNA, 25 bp, Homo sapien
cagaaaaagggccaaagagcagcat

SEQ ID NO: 3102851 - DNA, 25 bp, Homo sapien
ttcccatgcgccacgtgactaggag

SEQ ID NO: 3102852 - DNA, 25 bp, Homo sapien
aaacactgcccgtggccggtgtcat

SEQ ID NO: 3102853 - DNA, 25 bp, Homo sapien
agggagaatcgctgctgtctgtagc

SEQ ID NO: 3102854 - DNA, 25 bp, Homo sapien
ggcactactggctccccgaagccag

SEQ ID NO: 3102855 - DNA, 25 bp, Homo sapien
catagacaatactgagtccctgcag

SEQ ID NO: 3102856 - DNA, 25 bp, Homo sapien
cgaagccagggacagaccccataga

SEQ ID NO: 3102857 - DNA, 25 bp, Homo sapien
ttttgctgtcaggatcctccagcac

SEQ ID NO: 3102858 - DNA, 25 bp, Homo sapien
tcagctcagatataggggcaacggg

SEQ ID NO: 3102859 - DNA, 25 bp, Homo sapien
gagactgcaaaggccttgtggcgca

SEQ ID NO: 3102860 - DNA, 25 bp, Homo sapien
tgagaaaatggcttggcgtctggaa

SEQ ID NO: 3102861 - DNA, 25 bp, Homo sapien
gggctctctagaatttcaccagagc

SEQ ID NO: 3102862 - DNA, 25 bp, Homo sapien
tgagatgcggctgtggttaagaccc

SEQ ID NO: 3102863 - DNA, 25 bp, Homo sapien
tgaggacctcgcagttgccatttcc

SEQ ID NO: 3102864 - DNA, 25 bp, Homo sapien
gctttttgggcatccactcagcaat

SEQ ID NO: 3102865 - DNA, 25 bp, Homo sapien
gcacattcacccagcagtgcttttt

SEQ ID NO: 3102866 - DNA, 25 bp, Homo sapien
gctgctgacttccagtttcctttgc

SEQ ID NO: 3102867 - DNA, 25 bp, Homo sapien
tgcagctgggtcctggctgctgact

SEQ ID NO: 3102868 - DNA, 25 bp, Homo sapien
cctggctgctgacttccagtttcct

SEQ ID NO: 3102869 - DNA, 25 bp, Homo sapien
cctgcagctgggtcctggctgctga

SEQ ID NO: 3102870 - DNA, 25 bp, Homo sapien
ttccaggaggtcaccgttggagtcc

SEQ ID NO: 3102871 - DNA, 25 bp, Homo sapien
agcttccaggttccggctgctgcct

SEQ ID NO: 3102872 - DNA, 25 bp, Homo sapien
gctgctgcctgtgttagctgcgtga

SEQ ID NO: 3102873 - DNA, 25 bp, Homo sapien
tcaccgttggagtcccacagtaggt

SEQ ID NO: 3102874 - DNA, 25 bp, Homo sapien
tagacgggaaccgtggctgccccca

SEQ ID NO: 3102875 - DNA, 25 bp, Homo sapien
cgaagccgcggagacgccgtgggaa

SEQ ID NO: 3102876 - DNA, 25 bp, Homo sapien
agacgccgtgggaaaggactctggc

SEQ ID NO: 3102877 - DNA, 25 bp, Homo sapien
ggcacagagggagcggtgttaccgg

SEQ ID NO: 3102878 - DNA, 25 bp, Homo sapien
ccaagtccagagatgcatctgagct

SEQ ID NO: 3102879 - DNA, 25 bp, Homo sapien
ggtggtcgtcattccctgcagctag

SEQ ID NO: 3102880 - DNA, 25 bp, Homo sapien
gaaagtggctatctcaaggtgtgac

SEQ ID NO: 3102881 - DNA, 25 bp, Homo sapien
ccccaggcggtgttccagagaggat

SEQ ID NO: 3102882 - DNA, 25 bp, Homo sapien
tctttcggacatgcaggattctgag

SEQ ID NO: 3102883 - DNA, 25 bp, Homo sapien
tgattggtctttctttcggacatgc

SEQ ID NO: 3102884 - DNA, 25 bp, Homo sapien
gcgtcataagctttcataggcctct

SEQ ID NO: 3102885 - DNA, 25 bp, Homo sapien
gggtgtgcacttggaaaatgcgtca

SEQ ID NO: 3102886 - DNA, 25 bp, Homo sapien
gcagtccaggtaggctgcctgcaaa

SEQ ID NO: 3102887 - DNA, 25 bp, Homo sapien
ccaaggcactgtgggttcccaaggc

SEQ ID NO: 3102888 - DNA, 25 bp, Homo sapien
tgcctgcaaagctaggaccgaggga

SEQ ID NO: 3102889 - DNA, 25 bp, Homo sapien
ctgtgggttcccaaggcgatggcac

SEQ ID NO: 3102890 - DNA, 25 bp, Homo sapien
ctaaaggaatctctggttgacaggc

SEQ ID NO: 3102891 - DNA, 25 bp, Homo sapien
ctttgtaagtttgcagatttgccag

SEQ ID NO: 3102892 - DNA, 25 bp, Homo sapien
gaactaaaggaatctctggttgaca

SEQ ID NO: 3102893 - DNA, 25 bp, Homo sapien
tctctttgtaagtttgcagatttgc

SEQ ID NO: 3102894 - DNA, 25 bp, Homo sapien
ccatagtggaaaccggaaagagctc

SEQ ID NO: 3102895 - DNA, 25 bp, Homo sapien
taagcagggtttcagagtgtctcag

SEQ ID NO: 3102896 - DNA, 25 bp, Homo sapien
gctgcagttttgtttaagccccata

SEQ ID NO: 3102897 - DNA, 25 bp, Homo sapien
cattgtgctcgatttctaagcaggg

SEQ ID NO: 3102898 - DNA, 25 bp, Homo sapien
tgctcctaagggtagaaaactccag

SEQ ID NO: 3102899 - DNA, 25 bp, Homo sapien
gagcagcttcggtgtgcagatcatc

SEQ ID NO: 3102900 - DNA, 25 bp, Homo sapien
ggcctccctccgagtgagtcagtga

SEQ ID NO: 3102901 - DNA, 25 bp, Homo sapien
tgaaaaggtctaagcaagtgagtct

SEQ ID NO: 3102902 - DNA, 25 bp, Homo sapien
gactctgttgatctacccgtgcctg

SEQ ID NO: 3102903 - DNA, 25 bp, Homo sapien
cctagaaaggagagaacgggcgtca

SEQ ID NO: 3102904 - DNA, 25 bp, Homo sapien
agagcccatggtaacgaacccctag

SEQ ID NO: 3102905 - DNA, 25 bp, Homo sapien
tagttacattaatgcccagccagcc

SEQ ID NO: 3102906 - DNA, 25 bp, Homo sapien
caagagaggaaggacccctcaccac

SEQ ID NO: 3102907 - DNA, 25 bp, Homo sapien
cacccaagagaggaaggacccctca

SEQ ID NO: 3102908 - DNA, 25 bp, Homo sapien
cactggtgagacagtttactttgcc

SEQ ID NO: 3102909 - DNA, 25 bp, Homo sapien
ccccactggtgagacagtttacttt

SEQ ID NO: 3102910 - DNA, 25 bp, Homo sapien
cttttgctacgtgcctcccgagaaa

SEQ ID NO: 3102911 - DNA, 25 bp, Homo sapien
catcccagccttgagatgcttcact

SEQ ID NO: 3102912 - DNA, 25 bp, Homo sapien
cagcctcaatgtcacttggtggcgg

SEQ ID NO: 3102913 - DNA, 25 bp, Homo sapien
cgtgcctcccgagaaatttgtcttt

SEQ ID NO: 3102914 - DNA, 25 bp, Homo sapien
aaagtggcgtgtacaatgggaaatg

SEQ ID NO: 3102915 - DNA, 25 bp, Homo sapien
aaaagtggcgtgtacaatgggaaat

SEQ ID NO: 3102916 - DNA, 25 bp, Homo sapien
caaaagtggcgtgtacaatgggaaa

SEQ ID NO: 3102917 - DNA, 25 bp, Homo sapien
aactcacttagaaggagcaagaagc

SEQ ID NO: 3102918 - DNA, 25 bp, Homo sapien
tctttcccatcgagtctctggtctc

SEQ ID NO: 3102919 - DNA, 25 bp, Homo sapien
gtggaatagtctgttgtaaacgaag

SEQ ID NO: 3102920 - DNA, 25 bp, Homo sapien
tgttgtaaacgaagagacaagagga

SEQ ID NO: 3102921 - DNA, 25 bp, Homo sapien
tctggagcccgggtttgtgtttagc

SEQ ID NO: 3102922 - DNA, 25 bp, Homo sapien
catgtgatgcagaaagtcctcgaca

SEQ ID NO: 3102923 - DNA, 25 bp, Homo sapien
ggcaagcctcagattccactgggat

SEQ ID NO: 3102924 - DNA, 25 bp, Homo sapien
gctgcagcatcgtccggttttaaca

SEQ ID NO: 3102925 - DNA, 25 bp, Homo sapien
gggtggcggcatcggcctgatcagc

SEQ ID NO: 3102926 - DNA, 25 bp, Homo sapien
acgtagagcagtgccacggcctcct

SEQ ID NO: 3102927 - DNA, 25 bp, Homo sapien
agccagtcctggcacgtagagcagt

SEQ ID NO: 3102928 - DNA, 25 bp, Homo sapien
atcggcctgatcagccagtcctggc

SEQ ID NO: 3102929 - DNA, 25 bp, Homo sapien
aattcacttctctctgcccgacaac

SEQ ID NO: 3102930 - DNA, 25 bp, Homo sapien
cagtcctggaaattgtcatattctt

SEQ ID NO: 3102931 - DNA, 25 bp, Homo sapien
tggaaattgtcatattcttgagctg

SEQ ID NO: 3102932 - DNA, 25 bp, Homo sapien
ttcacttctctctgcccgacaacag

SEQ ID NO: 3102933 - DNA, 25 bp, Homo sapien
caggtaaaaatctccgggtctgagg

SEQ ID NO: 3102934 - DNA, 25 bp, Homo sapien
ttctataaggacttgcctgtcaggg

SEQ ID NO: 3102935 - DNA, 25 bp, Homo sapien
tctgaggagactgggtctgacagcc

SEQ ID NO: 3102936 - DNA, 25 bp, Homo sapien
tgatggagacgttcacacaggtgcc

SEQ ID NO: 3102937 - DNA, 25 bp, Homo sapien
tgcctctcttctggtttctgagcct

SEQ ID NO: 3102938 - DNA, 25 bp, Homo sapien
ctcttctggtttctgagcctcccca

SEQ ID NO: 3102939 - DNA, 25 bp, Homo sapien
gcctctcttctggtttctgagcctc

SEQ ID NO: 3102940 - DNA, 25 bp, Homo sapien
ctctcttctggtttctgagcctccc

SEQ ID NO: 3102941 - DNA, 25 bp, Homo sapien
accctgttgtaaatcagccatgatg

SEQ ID NO: 3102942 - DNA, 25 bp, Homo sapien
ctttggagaatgctgaataatgtac

SEQ ID NO: 3102943 - DNA, 25 bp, Homo sapien
cagagaatttaattaaaccctgttg

SEQ ID NO: 3102944 - DNA, 25 bp, Homo sapien
catgttgaaatgagaattagtccac

SEQ ID NO: 3102945 - DNA, 25 bp, Homo sapien
tctgagggctctctcggcaggtctg

SEQ ID NO: 3102946 - DNA, 25 bp, Homo sapien
gagaacctctcaaaatgtcctgtga

SEQ ID NO: 3102947 - DNA, 25 bp, Homo sapien
ctgagggctctctcggcaggtctga

SEQ ID NO: 3102948 - DNA, 25 bp, Homo sapien
tttttgttgagaggagaacctctca

SEQ ID NO: 3102949 - DNA, 25 bp, Homo sapien
ccctgaagatcacctcagtttttga

SEQ ID NO: 3102950 - DNA, 25 bp, Homo sapien
taacatcgacgagtgcaaacctgat

SEQ ID NO: 3102951 - DNA, 25 bp, Homo sapien
ctttgctaccactagaatttgtaac

SEQ ID NO: 3102952 - DNA, 25 bp, Homo sapien
gtgcccagcaagcctgtgagcatga

SEQ ID NO: 3102953 - DNA, 25 bp, Homo sapien
cagccctccttgtgcccaagatcct

SEQ ID NO: 3102954 - DNA, 25 bp, Homo sapien
gttcagccctccttgtgcccaagat

SEQ ID NO: 3102955 - DNA, 25 bp, Homo sapien
ttcagccctccttgtgcccaagatc

SEQ ID NO: 3102956 - DNA, 25 bp, Homo sapien
tgttcagccctccttgtgcccaaga

SEQ ID NO: 3102957 - DNA, 25 bp, Homo sapien
caggccctgaccagtgtgtttgagc

SEQ ID NO: 3102958 - DNA, 25 bp, Homo sapien
ttaaagctcgcaggtacatcaaagg

SEQ ID NO: 3102959 - DNA, 25 bp, Homo sapien
gctcatgtgccccaagttgtgtgaa

SEQ ID NO: 3102960 - DNA, 25 bp, Homo sapien
ttgtgtgaaccaccgactctgtgct

SEQ ID NO: 3102961 - DNA, 25 bp, Homo sapien
cacttttaggctattgagagtgaaa

SEQ ID NO: 3102962 - DNA, 25 bp, Homo sapien
tacacttttaggctattgagagtga

SEQ ID NO: 3102963 - DNA, 25 bp, Homo sapien
tttaggctattgagagtgaaaacaa

SEQ ID NO: 3102964 - DNA, 25 bp, Homo sapien
gctattgagagtgaaaacaagcact

SEQ ID NO: 3102965 - DNA, 25 bp, Homo sapien
tgccggtgacatcgtccccttctga

SEQ ID NO: 3102966 - DNA, 25 bp, Homo sapien
cggtgacatcgtccccttctgagat

SEQ ID NO: 3102967 - DNA, 25 bp, Homo sapien
aaccacctgccggtgacatcgtctc

SEQ ID NO: 3102968 - DNA, 25 bp, Homo sapien
gatctgaggacatgaacacccaacc

SEQ ID NO: 3102969 - DNA, 25 bp, Homo sapien
gccggtgatatcgtccccttctgag

SEQ ID NO: 3102970 - DNA, 25 bp, Homo sapien
gatctgaggacatgaacaccaaacc

SEQ ID NO: 3102971 - DNA, 25 bp, Homo sapien
gatctgaggacatgaacacccaacc

SEQ ID NO: 3102972 - DNA, 25 bp, Homo sapien
gatctgaggacgtggatatccaacc

SEQ ID NO: 3102973 - DNA, 25 bp, Homo sapien
ctgaggacatgaacaccaaaccacc

SEQ ID NO: 3102974 - DNA, 25 bp, Homo sapien
cagtgacatcgtccccttctgagat

SEQ ID NO: 3102975 - DNA, 25 bp, Homo sapien
tgccagtgacatcgtccccttctga

SEQ ID NO: 3102976 - DNA, 25 bp, Homo sapien
tgaacaccaaaccacctgccagtga

SEQ ID NO: 3102977 - DNA, 25 bp, Homo sapien
cggtgacatcgtccccttctgagat

SEQ ID NO: 3102978 - DNA, 25 bp, Homo sapien
aaaccacctgccggtgacatcgtct

SEQ ID NO: 3102979 - DNA, 25 bp, Homo sapien
gatctgaggacatgaacacccaacc

SEQ ID NO: 3102980 - DNA, 25 bp, Homo sapien
ctgccggtgacatcatcttcttctg

SEQ ID NO: 3102981 - DNA, 25 bp, Homo sapien
agatctgaggacatgaacacccaac

SEQ ID NO: 3102982 - DNA, 25 bp, Homo sapien
cggtgacatcgtccccttctgagat

SEQ ID NO: 3102983 - DNA, 25 bp, Homo sapien
ggacaccaaaccacctgccggtgac

SEQ ID NO: 3102984 - DNA, 25 bp, Homo sapien
aaaccacctgccggtgacatcgtct

SEQ ID NO: 3102985 - DNA, 25 bp, Homo sapien
cggtgacatcgtccccttctgagat

SEQ ID NO: 3102986 - DNA, 25 bp, Homo sapien
acaccaaaccacctgccagtgacat

SEQ ID NO: 3102987 - DNA, 25 bp, Homo sapien
gctgccggtgacatcgtccccttct

SEQ ID NO: 3102988 - DNA, 25 bp, Homo sapien
caaaccacctgccagtgacatcgtc

SEQ ID NO: 3102989 - DNA, 25 bp, Homo sapien
acacccaaccacctgccggtgacat

SEQ ID NO: 3102990 - DNA, 25 bp, Homo sapien
gaggacatggacacccaaccacctg

SEQ ID NO: 3102991 - DNA, 25 bp, Homo sapien
tggacacccaaccacctgccggtga

SEQ ID NO: 3102992 - DNA, 25 bp, Homo sapien
ctgaggacatggacacccaaccacc

SEQ ID NO: 3102993 - DNA, 25 bp, Homo sapien
tgagaaggtgcaaccctgtgagccc

SEQ ID NO: 3102994 - DNA, 25 bp, Homo sapien
catagcaaggttcactccagccgtg

SEQ ID NO: 3102995 - DNA, 25 bp, Homo sapien
cctgctgatgaatgaccgagtctcg

SEQ ID NO: 3102996 - DNA, 25 bp, Homo sapien
tcaaaatccatttgctggccgagca

SEQ ID NO: 3102997 - DNA, 25 bp, Homo sapien
gactactgacaatagcccaaaactg

SEQ ID NO: 3102998 - DNA, 25 bp, Homo sapien
aatgttgtacacgaatgcccgcagc

SEQ ID NO: 3102999 - DNA, 25 bp, Homo sapien
cgtagctgggaacagctatttaaac

SEQ ID NO: 3103000 - DNA, 25 bp, Homo sapien
tgcccgcagcaggactactgacaat

SEQ ID NO: 3103001 - DNA, 25 bp, Homo sapien
tggactggattttgagaagcctcct

SEQ ID NO: 3103002 - DNA, 25 bp, Homo sapien
tccttgccgactccactgtggactg

SEQ ID NO: 3103003 - DNA, 25 bp, Homo sapien
tcctggagggctgtcacgttcccgc

SEQ ID NO: 3103004 - DNA, 25 bp, Homo sapien
ctctcctgccctgcaaaggctgtgt

SEQ ID NO: 3103005 - DNA, 25 bp, Homo sapien
cattctttattatgccgtcgtgttt

SEQ ID NO: 3103006 - DNA, 25 bp, Homo sapien
atttgaagggcacccaatcgctccg

SEQ ID NO: 3103007 - DNA, 25 bp, Homo sapien
cgcagctgggctgtaagtcattggt

SEQ ID NO: 3103008 - DNA, 25 bp, Homo sapien
gttgccctcgctgcatgaaattgta

SEQ ID NO: 3103009 - DNA, 25 bp, Homo sapien
tgcagcaatatgcaaaggcatcggg

SEQ ID NO: 3103010 - DNA, 25 bp, Homo sapien
gctattttgggcatcggattttgcg

SEQ ID NO: 3103011 - DNA, 25 bp, Homo sapien
accattttcctgcaacggttggact

SEQ ID NO: 3103012 - DNA, 25 bp, Homo sapien
ttgccagggcaacgatggggctatt

SEQ ID NO: 3103013 - DNA, 25 bp, Homo sapien
cttgtgctctttgggtaggtggacc

SEQ ID NO: 3103014 - DNA, 25 bp, Homo sapien
taatggagtcaaatagaagttcact

SEQ ID NO: 3103015 - DNA, 25 bp, Homo sapien
tgcagagccctggatacgtaccaac

SEQ ID NO: 3103016 - DNA, 25 bp, Homo sapien
aactgcccctcaggtgcagtaggcc

SEQ ID NO: 3103017 - DNA, 25 bp, Homo sapien
ccccaggaccatcttctcagtcgag

SEQ ID NO: 3103018 - DNA, 25 bp, Homo sapien
ccaggaccatcttctcagtcgagct

SEQ ID NO: 3103019 - DNA, 25 bp, Homo sapien
aggaccatcttctcagtcgagctca

SEQ ID NO: 3103020 - DNA, 25 bp, Homo sapien
ggaccatcttctcagtcgagctcat

SEQ ID NO: 3103021 - DNA, 25 bp, Homo sapien
agtcggaactcctttggcctttctg

SEQ ID NO: 3103022 - DNA, 25 bp, Homo sapien
gatgacgtcaacctgcacaatttct

SEQ ID NO: 3103023 - DNA, 25 bp, Homo sapien
cgtgagtgccacaagagtcggaact

SEQ ID NO: 3103024 - DNA, 25 bp, Homo sapien
ttctccacactttctaggatgacgt

SEQ ID NO: 3103025 - DNA, 25 bp, Homo sapien
gaaagaaatttccagagccaactga

SEQ ID NO: 3103026 - DNA, 25 bp, Homo sapien
gagccaactgacatttaccatcatg

SEQ ID NO: 3103027 - DNA, 25 bp, Homo sapien
cattcttgcaggaggaaagaaattt

SEQ ID NO: 3103028 - DNA, 25 bp, Homo sapien
aatttccagagccaactgacattta

SEQ ID NO: 3103029 - DNA, 25 bp, Homo sapien
taaccaaagataaagtaaggcagcc

SEQ ID NO: 3103030 - DNA, 25 bp, Homo sapien
taaggcagccttaatattctgaagg

SEQ ID NO: 3103031 - DNA, 25 bp, Homo sapien
aattgaagttaatgtaaccaaagat

SEQ ID NO: 3103032 - DNA, 25 bp, Homo sapien
gaagggattatggagacccgtgaaa

SEQ ID NO: 3103033 - DNA, 25 bp, Homo sapien
tgcaattgcctccacatgtctctca

SEQ ID NO: 3103034 - DNA, 25 bp, Homo sapien
ctcactgcctattctgaagcttaga

SEQ ID NO: 3103035 - DNA, 25 bp, Homo sapien
ttttctgcagcgcatgtctattgca

SEQ ID NO: 3103036 - DNA, 25 bp, Homo sapien
gaagcttagagcaatgttcttgtga

SEQ ID NO: 3103037 - DNA, 25 bp, Homo sapien
tgcttgaaggtggtaactgttcccc

SEQ ID NO: 3103038 - DNA, 25 bp, Homo sapien
tccagtgagacgcattccctgcagg

SEQ ID NO: 3103039 - DNA, 25 bp, Homo sapien
tcaggacatttgattccgacacggc

SEQ ID NO: 3103040 - DNA, 25 bp, Homo sapien
cagcctgtgcagtgtcagtgcgaca

SEQ ID NO: 3103041 - DNA, 25 bp, Homo sapien
cactaagttccccttgattgataaa

SEQ ID NO: 3103042 - DNA, 25 bp, Homo sapien
tccccttgattgataaactgctcgg

SEQ ID NO: 3103043 - DNA, 25 bp, Homo sapien
gctgttcactaagttccccttgatt

SEQ ID NO: 3103044 - DNA, 25 bp, Homo sapien
tgttggtgttcccacaggttctgct

SEQ ID NO: 3103045 - DNA, 25 bp, Homo sapien
acacacgaaatgcactctttgcctg

SEQ ID NO: 3103046 - DNA, 25 bp, Homo sapien
taggcacacacgaaatgcactcttt

SEQ ID NO: 3103047 - DNA, 25 bp, Homo sapien
caggtctctatttggcagtaggcac

SEQ ID NO: 3103048 - DNA, 25 bp, Homo sapien
ttggcagtaggcacacacgaaatgc

SEQ ID NO: 3103049 - DNA, 25 bp, Homo sapien
tgccatggttcatatcatatactcc

SEQ ID NO: 3103050 - DNA, 25 bp, Homo sapien
gacaaacggtcacatcttgcacacg

SEQ ID NO: 3103051 - DNA, 25 bp, Homo sapien
actccatctcggtgacaaacggtca

SEQ ID NO: 3103052 - DNA, 25 bp, Homo sapien
tacggtgtttgccatggttcatatc

SEQ ID NO: 3103053 - DNA, 25 bp, Homo sapien
atgctctctcgttggaaattggcac

SEQ ID NO: 3103054 - DNA, 25 bp, Homo sapien
caaaccacaaccacgatggcggctt

SEQ ID NO: 3103055 - DNA, 25 bp, Homo sapien
gaaattggcacgcaaaccacaacca

SEQ ID NO: 3103056 - DNA, 25 bp, Homo sapien
ctcgttggaaattggcacgcaaacc

SEQ ID NO: 3103057 - DNA, 25 bp, Homo sapien
ccagctgggacagtgaaggttccct

SEQ ID NO: 3103058 - DNA, 25 bp, Homo sapien
cctgttcaagggtaagtaggccttg

SEQ ID NO: 3103059 - DNA, 25 bp, Homo sapien
tcaagggtaagtaggccttgatcac

SEQ ID NO: 3103060 - DNA, 25 bp, Homo sapien
tgttcaagggtaagtaggccttgat

SEQ ID NO: 3103061 - DNA, 25 bp, Homo sapien
catctttgatgtatgatcaggaaca

SEQ ID NO: 3103062 - DNA, 25 bp, Homo sapien
ggtttgtggcagatgaactgataaa

SEQ ID NO: 3103063 - DNA, 25 bp, Homo sapien
agcccaagtggctgttttaactcag

SEQ ID NO: 3103064 - DNA, 25 bp, Homo sapien
gccagtgtcagcacgtaacacgcat

SEQ ID NO: 3103065 - DNA, 25 bp, Homo sapien
ttcattgagatgctgtgtgacagac

SEQ ID NO: 3103066 - DNA, 25 bp, Homo sapien
attcattgagatgctgtgtgacaga

SEQ ID NO: 3103067 - DNA, 25 bp, Homo sapien
cattcattgagatgctgtgtgacag

SEQ ID NO: 3103068 - DNA, 25 bp, Homo sapien
acaacaaagccactgggtacccact

SEQ ID NO: 3103069 - DNA, 25 bp, Homo sapien
ccattataacgtttgttccgcaatt

SEQ ID NO: 3103070 - DNA, 25 bp, Homo sapien
tttgttccgcaatttaacaacaaca

SEQ ID NO: 3103071 - DNA, 25 bp, Homo sapien
tagaaggcccagatgaaaagaacag

SEQ ID NO: 3103072 - DNA, 25 bp, Homo sapien
tatgcatcatcaacaccagggcacg

SEQ ID NO: 3103073 - DNA, 25 bp, Homo sapien
tttacgctcattgtccctcactggg

SEQ ID NO: 3103074 - DNA, 25 bp, Homo sapien
actgggcttgccccatgcagagggt

SEQ ID NO: 3103075 - DNA, 25 bp, Homo sapien
ccagggcacgtatgtttacgctcat

SEQ ID NO: 3103076 - DNA, 25 bp, Homo sapien
ggaaacactgttggctctctaagga

SEQ ID NO: 3103077 - DNA, 25 bp, Homo sapien
ccgcaatgagaacgaagggaccctg

SEQ ID NO: 3103078 - DNA, 25 bp, Homo sapien
caaggacgttaccaagattcgcggg

SEQ ID NO: 3103079 - DNA, 25 bp, Homo sapien
ggatacctgttcctcgtgagccaaa

SEQ ID NO: 3103080 - DNA, 25 bp, Homo sapien
agcctggctcggcaattcaggtgct

SEQ ID NO: 3103081 - DNA, 25 bp, Homo sapien
tgcagcctggctcggcaattcaggt

SEQ ID NO: 3103082 - DNA, 25 bp, Homo sapien
gttccccctcggtgcacacaggtgt

SEQ ID NO: 3103083 - DNA, 25 bp, Homo sapien
tggctcggcaattcaggtgctcgtc

SEQ ID NO: 3103084 - DNA, 25 bp, Homo sapien
gtcagcacaaatgctgtggtcaaaa

SEQ ID NO: 3103085 - DNA, 25 bp, Homo sapien
aaagtcagcacaaatgctgtggtca

SEQ ID NO: 3103086 - DNA, 25 bp, Homo sapien
gaaagtcagcacaaatgctgtggtc

SEQ ID NO: 3103087 - DNA, 25 bp, Homo sapien
aagtcagcacaaatgctgtggtcaa

SEQ ID NO: 3103088 - DNA, 25 bp, Homo sapien
ctgacatggcctcgcacctcagaaa

SEQ ID NO: 3103089 - DNA, 25 bp, Homo sapien
accaggtgccgagaaccacgtgttg

SEQ ID NO: 3103090 - DNA, 25 bp, Homo sapien
tgtgcctccgaaggcaacaccaggt

SEQ ID NO: 3103091 - DNA, 25 bp, Homo sapien
gtttctagaacgtcctctgtgcctc

SEQ ID NO: 3103092 - DNA, 25 bp, Homo sapien
ggcttttcacagtcaggctagttgt

SEQ ID NO: 3103093 - DNA, 25 bp, Homo sapien
tgggcctacccatcaagagtggtac

SEQ ID NO: 3103094 - DNA, 25 bp, Homo sapien
agacctggtcaggtttcaaggtgcg

SEQ ID NO: 3103095 - DNA, 25 bp, Homo sapien
tcccctgtaggaaggattctccagg

SEQ ID NO: 3103096 - DNA, 25 bp, Homo sapien
aaatctagtcctaaatcccctggtg

SEQ ID NO: 3103097 - DNA, 25 bp, Homo sapien
acatcaaatctagtcctaaatcccc

SEQ ID NO: 3103098 - DNA, 25 bp, Homo sapien
aatctagtcctaaatcccctggtgg

SEQ ID NO: 3103099 - DNA, 25 bp, Homo sapien
tcaaatctagtcctaaatcccctgg

SEQ ID NO: 3103100 - DNA, 25 bp, Homo sapien
tgactatcacgttcacgtctccagc

SEQ ID NO: 3103101 - DNA, 25 bp, Homo sapien
ctatcacgttcacgtctccagcagc

SEQ ID NO: 3103102 - DNA, 25 bp, Homo sapien
gactatcacgttcacgtctccagca

SEQ ID NO: 3103103 - DNA, 25 bp, Homo sapien
actatcacgttcacgtctccagcag

SEQ ID NO: 3103104 - DNA, 25 bp, Homo sapien
ccatggcggagaagcatcattagac

SEQ ID NO: 3103105 - DNA, 25 bp, Homo sapien
catagatggtggcaggcacggccag

SEQ ID NO: 3103106 - DNA, 25 bp, Homo sapien
gaagcatcattagacttccactgga

SEQ ID NO: 3103107 - DNA, 25 bp, Homo sapien
tcattagacttccactggaaatgca

SEQ ID NO: 3103108 - DNA, 25 bp, Homo sapien
tgtctggagaaacgtctctccagag

SEQ ID NO: 3103109 - DNA, 25 bp, Homo sapien
cttgagtgtctggagaaacgtctct

SEQ ID NO: 3103110 - DNA, 25 bp, Homo sapien
ccatcaagagcaggatcgtgaagag

SEQ ID NO: 3103111 - DNA, 25 bp, Homo sapien
catcaagagcaggatcgtgaagagc

SEQ ID NO: 3103112 - DNA, 25 bp, Homo sapien
acatccaggaaccctggaaggctgg

SEQ ID NO: 3103113 - DNA, 25 bp, Homo sapien
catccaggaaccctggaaggctggc

SEQ ID NO: 3103114 - DNA, 25 bp, Homo sapien
tgctgagccgcaagcagaagaaata

SEQ ID NO: 3103115 - DNA, 25 bp, Homo sapien
gcacaccaccaaaccagcaagcttt

SEQ ID NO: 3103116 - DNA, 25 bp, Homo sapien
tatgttactctgaagttttattctc

SEQ ID NO: 3103117 - DNA, 25 bp, Homo sapien
cttttctgctgagccgcaagcagaa

SEQ ID NO: 3103118 - DNA, 25 bp, Homo sapien
tgtgggcatctgctcggtggctgaa

SEQ ID NO: 3103119 - DNA, 25 bp, Homo sapien
aaatcaggggatctttgcggagctg

SEQ ID NO: 3103120 - DNA, 25 bp, Homo sapien
gaaatcaggggatctttgcggagct

SEQ ID NO: 3103121 - DNA, 25 bp, Homo sapien
catctgctcggtggctgaagagttg

SEQ ID NO: 3103122 - DNA, 25 bp, Homo sapien
cacttactgggccagtgtttcccag

SEQ ID NO: 3103123 - DNA, 25 bp, Homo sapien
gcttctccgtagggtgctctgaggc

SEQ ID NO: 3103124 - DNA, 25 bp, Homo sapien
tgcggttcatgaagtcttgaccact

SEQ ID NO: 3103125 - DNA, 25 bp, Homo sapien
catagggtgcactggactctttctc

SEQ ID NO: 3103126 - DNA, 25 bp, Homo sapien
ttctcacctctgacgcagaccccga

SEQ ID NO: 3103127 - DNA, 25 bp, Homo sapien
tcacctctgacgcagaccccgaagg

SEQ ID NO: 3103128 - DNA, 25 bp, Homo sapien
ttcttctcacctctgacgcagaccc

SEQ ID NO: 3103129 - DNA, 25 bp, Homo sapien
cacctctgacgcagaccccgaagga

SEQ ID NO: 3103130 - DNA, 25 bp, Homo sapien
tgggcgtcctctgcttctgacgggc

SEQ ID NO: 3103131 - DNA, 25 bp, Homo sapien
gacaccagctgttgggcgtcctctg

SEQ ID NO: 3103132 - DNA, 25 bp, Homo sapien
tgacgggccccgttgcattctggct

SEQ ID NO: 3103133 - DNA, 25 bp, Homo sapien
aaatgccagcttttgccgaatctcc

SEQ ID NO: 3103134 - DNA, 25 bp, Homo sapien
gtgcccggacggatgctggtgacca

SEQ ID NO: 3103135 - DNA, 25 bp, Homo sapien
tgaccatggcaagggagggctcaac

SEQ ID NO: 3103136 - DNA, 25 bp, Homo sapien
ttcatcaggggcctccgggtgcccg

SEQ ID NO: 3103137 - DNA, 25 bp, Homo sapien
agggctcaacggtgctgccacagcg

SEQ ID NO: 3103138 - DNA, 25 bp, Homo sapien
actgtcatcgcccttgcactgaaca

SEQ ID NO: 3103139 - DNA, 25 bp, Homo sapien
ctcttgtttacactgtcatcgccct

SEQ ID NO: 3103140 - DNA, 25 bp, Homo sapien
agaggcgtggactccttttggctga

SEQ ID NO: 3103141 - DNA, 25 bp, Homo sapien
agcagccgagcatcctcattcagct

SEQ ID NO: 3103142 - DNA, 25 bp, Homo sapien
ctggatttccaacatgatgctaata

SEQ ID NO: 3103143 - DNA, 25 bp, Homo sapien
tgtgaagaacttaatcatgttagcg

SEQ ID NO: 3103144 - DNA, 25 bp, Homo sapien
gatgctaataaattgtgtgaagaac

SEQ ID NO: 3103145 - DNA, 25 bp, Homo sapien
tgaagaacttaatcatgttagcgtc

SEQ ID NO: 3103146 - DNA, 25 bp, Homo sapien
gcccctgtgctgaccgctgcagcct

SEQ ID NO: 3103147 - DNA, 25 bp, Homo sapien
acacacgcccgttcatacgctcctc

SEQ ID NO: 3103148 - DNA, 25 bp, Homo sapien
tcttcgcgcatccagcatccattca

SEQ ID NO: 3103149 - DNA, 25 bp, Homo sapien
ctcctcgcccaggtcttcgcgcatc

SEQ ID NO: 3103150 - DNA, 25 bp, Homo sapien
gtatgcgctgcactttctcattagg

SEQ ID NO: 3103151 - DNA, 25 bp, Homo sapien
catcttccaagcattgtgatgcttt

SEQ ID NO: 3103152 - DNA, 25 bp, Homo sapien
catttgcatcttccaagcattgtga

SEQ ID NO: 3103153 - DNA, 25 bp, Homo sapien
aagtatgcgctgcactttctcatta

SEQ ID NO: 3103154 - DNA, 25 bp, Homo sapien
tcagggacggcaggtcgttttatgc

SEQ ID NO: 3103155 - DNA, 25 bp, Homo sapien
gggtaactggtgaacagtcttgagc

SEQ ID NO: 3103156 - DNA, 25 bp, Homo sapien
ccgaggctcttccacacatgatgga

SEQ ID NO: 3103157 - DNA, 25 bp, Homo sapien
ggttgtagcagaaatttgatcctct

SEQ ID NO: 3103158 - DNA, 25 bp, Homo sapien
ctggctgagggttgctcccaggtac

SEQ ID NO: 3103159 - DNA, 25 bp, Homo sapien
gcttcacggactgagtcccaggtgt

SEQ ID NO: 3103160 - DNA, 25 bp, Homo sapien
tcactcatcagtactgtctcctgca

SEQ ID NO: 3103161 - DNA, 25 bp, Homo sapien
tcctgcttcacggactgagtcccag

SEQ ID NO: 3103162 - DNA, 25 bp, Homo sapien
tgtaaggtccttggtgagtccccac

SEQ ID NO: 3103163 - DNA, 25 bp, Homo sapien
cctgaccagatgacgccaacaactg

SEQ ID NO: 3103164 - DNA, 25 bp, Homo sapien
cccacggcgcaggaagaaagatgat

SEQ ID NO: 3103165 - DNA, 25 bp, Homo sapien
tgatataaagagatgattgccaccc

SEQ ID NO: 3103166 - DNA, 25 bp, Homo sapien
tagctgcctttttaaggcgccctgg

SEQ ID NO: 3103167 - DNA, 25 bp, Homo sapien
ttaaggcgccctggacataaacagc

SEQ ID NO: 3103168 - DNA, 25 bp, Homo sapien
ggaaacaagcgaagaggaccgcagc

SEQ ID NO: 3103169 - DNA, 25 bp, Homo sapien
tctttcctgcgctcccagatctgct

SEQ ID NO: 3103170 - DNA, 25 bp, Homo sapien
cgtcgtcgaacttcagatcctactt

SEQ ID NO: 3103171 - DNA, 25 bp, Homo sapien
gatcctacttcttgagtatttccac

SEQ ID NO: 3103172 - DNA, 25 bp, Homo sapien
tgagctgttgcaattgcctcctgat

SEQ ID NO: 3103173 - DNA, 25 bp, Homo sapien
cgggtctgtctatacgtcgtcgaac

SEQ ID NO: 3103174 - DNA, 25 bp, Homo sapien
tctgggaagagtcggcatccagtag

SEQ ID NO: 3103175 - DNA, 25 bp, Homo sapien
gaagagtcggcatccagtaggcagt

SEQ ID NO: 3103176 - DNA, 25 bp, Homo sapien
aagagtcggcatccagtaggcagta

SEQ ID NO: 3103177 - DNA, 25 bp, Homo sapien
ggattctgggaagagtcggcatcca

SEQ ID NO: 3103178 - DNA, 25 bp, Homo sapien
catggcgctctctgaagtccgtggc

SEQ ID NO: 3103179 - DNA, 25 bp, Homo sapien
tgagcgttcggaagcatggcgctct

SEQ ID NO: 3103180 - DNA, 25 bp, Homo sapien
ttctcagagagtgagcgttcggaag

SEQ ID NO: 3103181 - DNA, 25 bp, Homo sapien
gaagcatggcgctctctgaagtccg

SEQ ID NO: 3103182 - DNA, 25 bp, Homo sapien
agtctctctgttcgttgtcctatct

SEQ ID NO: 3103183 - DNA, 25 bp, Homo sapien
ctgttcgttgtcctatctgtttctg

SEQ ID NO: 3103184 - DNA, 25 bp, Homo sapien
tctcattgatatccaaggggatggg

SEQ ID NO: 3103185 - DNA, 25 bp, Homo sapien
ggagctggccacattattgaatata

SEQ ID NO: 3103186 - DNA, 25 bp, Homo sapien
gatcaagcagtctcagagccttagg

SEQ ID NO: 3103187 - DNA, 25 bp, Homo sapien
gatagacccctaaccaagagggata

SEQ ID NO: 3103188 - DNA, 25 bp, Homo sapien
gaagggcttcgttgaggaacttgac

SEQ ID NO: 3103189 - DNA, 25 bp, Homo sapien
gagaaagcggcttcatcaaagatct

SEQ ID NO: 3103190 - DNA, 25 bp, Homo sapien
tagggggccttcagagtggtttcca

SEQ ID NO: 3103191 - DNA, 25 bp, Homo sapien
agaaatgaagtaagtgtgacaaata

SEQ ID NO: 3103192 - DNA, 25 bp, Homo sapien
caccttgcgtcaccaagctggagga

SEQ ID NO: 3103193 - DNA, 25 bp, Homo sapien
tccatggcacccgtgccttcataat

SEQ ID NO: 3103194 - DNA, 25 bp, Homo sapien
tcttgggttcatctcagaggtatca

SEQ ID NO: 3103195 - DNA, 25 bp, Homo sapien
tcttcttgggttcatctcagaggta

SEQ ID NO: 3103196 - DNA, 25 bp, Homo sapien
ggttcatctcagaggtatcatcatg

SEQ ID NO: 3103197 - DNA, 25 bp, Homo sapien
tcatctcagaggtatcatcatggtc

SEQ ID NO: 3103198 - DNA, 25 bp, Homo sapien
atcttcacgcagacccagtagtacc

SEQ ID NO: 3103199 - DNA, 25 bp, Homo sapien
gttcctgagcttttatcttcacgca

SEQ ID NO: 3103200 - DNA, 25 bp, Homo sapien
caagaaattattgacgggcttcctg

SEQ ID NO: 3103201 - DNA, 25 bp, Homo sapien
taggcaggactgaaacgaaacctcg

SEQ ID NO: 3103202 - DNA, 25 bp, Homo sapien
tcaccagtgggacaacagtgcaggc

SEQ ID NO: 3103203 - DNA, 25 bp, Homo sapien
gcagcaggcaattgaaaaggacttc

SEQ ID NO: 3103204 - DNA, 25 bp, Homo sapien
cctcctgaacctcgctgctgggggg

SEQ ID NO: 3103205 - DNA, 25 bp, Homo sapien
ggctgggaagctagaggaggcccgc

SEQ ID NO: 3103206 - DNA, 25 bp, Homo sapien
gaagctagaggaggcccgctcttct

SEQ ID NO: 3103207 - DNA, 25 bp, Homo sapien
tgcgagaggttcttcccctcctgaa

SEQ ID NO: 3103208 - DNA, 25 bp, Homo sapien
tcttggaagatctcggactagtgct

SEQ ID NO: 3103209 - DNA, 25 bp, Homo sapien
gaaaccaacctttgcagagcgagag

SEQ ID NO: 3103210 - DNA, 25 bp, Homo sapien
caagggtagtatctgctcaatgccg

SEQ ID NO: 3103211 - DNA, 25 bp, Homo sapien
tgttggagccacaatagggacctgg

SEQ ID NO: 3103212 - DNA, 25 bp, Homo sapien
ccagcacagggtagatgtccatgaa

SEQ ID NO: 3103213 - DNA, 25 bp, Homo sapien
gaccgactgagattgagacttgact

SEQ ID NO: 3103214 - DNA, 25 bp, Homo sapien
tatacatggaccagtgaccgactga

SEQ ID NO: 3103215 - DNA, 25 bp, Homo sapien
gactacagtccccttgagagtgaga

SEQ ID NO: 3103216 - DNA, 25 bp, Homo sapien
gccaagctcgcgctccaaggcagct

SEQ ID NO: 3103217 - DNA, 25 bp, Homo sapien
atctgatgcagactcgtcagctgtt

SEQ ID NO: 3103218 - DNA, 25 bp, Homo sapien
aagtccctgccgtcacagccaagct

SEQ ID NO: 3103219 - DNA, 25 bp, Homo sapien
tgatgcagactcgtcagctgttgcc

SEQ ID NO: 3103220 - DNA, 25 bp, Homo sapien
catacgtggcctcaagtagcaagct

SEQ ID NO: 3103221 - DNA, 25 bp, Homo sapien
gcctcaagtagcaagctggtcacct

SEQ ID NO: 3103222 - DNA, 25 bp, Homo sapien
gagcaacgccaggtagaagcctgag

SEQ ID NO: 3103223 - DNA, 25 bp, Homo sapien
tggtcaccttgaatcccgagagcaa

SEQ ID NO: 3103224 - DNA, 25 bp, Homo sapien
gctgtggctgtccagatttgccgtg

SEQ ID NO: 3103225 - DNA, 25 bp, Homo sapien
gcgtacacgcggctttcttttataa

SEQ ID NO: 3103226 - DNA, 25 bp, Homo sapien
cagatttgccgtggcgtacacgcgg

SEQ ID NO: 3103227 - DNA, 25 bp, Homo sapien
tcagcaggcataaaggtgaaataca

SEQ ID NO: 3103228 - DNA, 25 bp, Homo sapien
cattgtttagaagtgcggatgcacg

SEQ ID NO: 3103229 - DNA, 25 bp, Homo sapien
aaaaccagtggccatccttgtgctg

SEQ ID NO: 3103230 - DNA, 25 bp, Homo sapien
cacactgatttctcgtggtgcagga

SEQ ID NO: 3103231 - DNA, 25 bp, Homo sapien
ggttacatagactacacccaaggcg

SEQ ID NO: 3103232 - DNA, 25 bp, Homo sapien
gtctcttttatgcaggtactgatga

SEQ ID NO: 3103233 - DNA, 25 bp, Homo sapien
tctcttttatgcaggtactgatgac

SEQ ID NO: 3103234 - DNA, 25 bp, Homo sapien
agtctcttttatgcaggtactgatg

SEQ ID NO: 3103235 - DNA, 25 bp, Homo sapien
gttcctgtggtctgatcctctgggt

SEQ ID NO: 3103236 - DNA, 25 bp, Homo sapien
caggctgctgtcgaagggccacaag

SEQ ID NO: 3103237 - DNA, 25 bp, Homo sapien
gccacaagggagtagctggctttga

SEQ ID NO: 3103238 - DNA, 25 bp, Homo sapien
tgatggtgttcctgtggtctgatcc

SEQ ID NO: 3103239 - DNA, 25 bp, Homo sapien
gatctttcgacacaggtctttgggc

SEQ ID NO: 3103240 - DNA, 25 bp, Homo sapien
gtgtttggccccgacacacaaaggc

SEQ ID NO: 3103241 - DNA, 25 bp, Homo sapien
agaggcccattgtttatgctgccaa

SEQ ID NO: 3103242 - DNA, 25 bp, Homo sapien
tgctgccaattaggaaccgtgtttg

SEQ ID NO: 3103243 - DNA, 25 bp, Homo sapien
tgctagggatgccactggctcccat

SEQ ID NO: 3103244 - DNA, 25 bp, Homo sapien
catgacatccctccgctgacggctc

SEQ ID NO: 3103245 - DNA, 25 bp, Homo sapien
gagctggcgatctggctgggacctg

SEQ ID NO: 3103246 - DNA, 25 bp, Homo sapien
agagtgcaggttgctagggatgcca

SEQ ID NO: 3103247 - DNA, 25 bp, Homo sapien
aacaggaatccattgcctccatagg

SEQ ID NO: 3103248 - DNA, 25 bp, Homo sapien
caggtaaactgagcctgtcaaaggc

SEQ ID NO: 3103249 - DNA, 25 bp, Homo sapien
gctccccatcaacaggaatccattg

SEQ ID NO: 3103250 - DNA, 25 bp, Homo sapien
ctgggcagggaaatgtttgcatgct

SEQ ID NO: 3103251 - DNA, 25 bp, Homo sapien
tccatggggcatccggtgggattca

SEQ ID NO: 3103252 - DNA, 25 bp, Homo sapien
cttgtggcccctctagttccatggg

SEQ ID NO: 3103253 - DNA, 25 bp, Homo sapien
ggcatccggtgggattcagcatctc

SEQ ID NO: 3103254 - DNA, 25 bp, Homo sapien
tgctcctttctcgaacccattcccc

SEQ ID NO: 3103255 - DNA, 25 bp, Homo sapien
tacttcggccagtacaaggtagcca

SEQ ID NO: 3103256 - DNA, 25 bp, Homo sapien
taatccattgtgtagccgaggttcg

SEQ ID NO: 3103257 - DNA, 25 bp, Homo sapien
tatggtgatcgctgtgagagcctcg

SEQ ID NO: 3103258 - DNA, 25 bp, Homo sapien
gagagcctcgtacgtccctgaatgt

SEQ ID NO: 3103259 - DNA, 25 bp, Homo sapien
ggtcgagtgaactctgatagcacca

SEQ ID NO: 3103260 - DNA, 25 bp, Homo sapien
caggaggtcgagtgaactctgatag

SEQ ID NO: 3103261 - DNA, 25 bp, Homo sapien
gaggtcgagtgaactctgatagcac

SEQ ID NO: 3103262 - DNA, 25 bp, Homo sapien
gtcgagtgaactctgatagcaccac

SEQ ID NO: 3103263 - DNA, 25 bp, Homo sapien
ccgactgtaacagaaaaatagcctt

SEQ ID NO: 3103264 - DNA, 25 bp, Homo sapien
ggctcccgactgtaacagaaaaata

SEQ ID NO: 3103265 - DNA, 25 bp, Homo sapien
tcccgactgtaacagaaaaatagcc

SEQ ID NO: 3103266 - DNA, 25 bp, Homo sapien
atagcctttgcaggaggccagcgcc

SEQ ID NO: 3103267 - DNA, 25 bp, Homo sapien
caaaccttcatatgtacctcctaac

SEQ ID NO: 3103268 - DNA, 25 bp, Homo sapien
caggtgtcagtaggtcagtataagc

SEQ ID NO: 3103269 - DNA, 25 bp, Homo sapien
gccaggcagataagcaaatatatgt

SEQ ID NO: 3103270 - DNA, 25 bp, Homo sapien
tgtaactgctttatctcagccaggt

SEQ ID NO: 3103271 - DNA, 25 bp, Homo sapien
gactttagatcttctggaccagaga

SEQ ID NO: 3103272 - DNA, 25 bp, Homo sapien
ggaagctagctcatagagtccttga

SEQ ID NO: 3103273 - DNA, 25 bp, Homo sapien
cagttgtgccctaagtttgctatga

SEQ ID NO: 3103274 - DNA, 25 bp, Homo sapien
ttaaaactgagcacccttaccaagc

SEQ ID NO: 3103275 - DNA, 25 bp, Homo sapien
cattccagcgtgtgagtggtagccc

SEQ ID NO: 3103276 - DNA, 25 bp, Homo sapien
caaacacggaacaaatagtggctgc

SEQ ID NO: 3103277 - DNA, 25 bp, Homo sapien
gcttctcgccagtccgtttgtgaca

SEQ ID NO: 3103278 - DNA, 25 bp, Homo sapien
ccgacatgttgtagcgagaggccag

SEQ ID NO: 3103279 - DNA, 25 bp, Homo sapien
gctcataggtttggatcaagcagtg

SEQ ID NO: 3103280 - DNA, 25 bp, Homo sapien
tccagctgactgtcacgagtggaca

SEQ ID NO: 3103281 - DNA, 25 bp, Homo sapien
tacagagaagattcgcgtggttcct

SEQ ID NO: 3103282 - DNA, 25 bp, Homo sapien
tctgaagtggaaactcgatagtcac

SEQ ID NO: 3103283 - DNA, 25 bp, Homo sapien
gtttggtcagtaaaagtattcagat

SEQ ID NO: 3103284 - DNA, 25 bp, Homo sapien
gagcaggagttttgccgctgccaat

SEQ ID NO: 3103285 - DNA, 25 bp, Homo sapien
tcctagtctactctgaactgtactt

SEQ ID NO: 3103286 - DNA, 25 bp, Homo sapien
tgtataatcgaccaaatcaacatat

SEQ ID NO: 3103287 - DNA, 25 bp, Homo sapien
tccagcaggccaatagtgaaatgtg

SEQ ID NO: 3103288 - DNA, 25 bp, Homo sapien
gattatgcacatgaccagaggcggc

SEQ ID NO: 3103289 - DNA, 25 bp, Homo sapien
tccaggactgaagacgaaccttggc

SEQ ID NO: 3103290 - DNA, 25 bp, Homo sapien
tgttcgcaaaacagtgcgggctgcg

SEQ ID NO: 3103291 - DNA, 25 bp, Homo sapien
ggcgcattggtcaaacggttgttat

SEQ ID NO: 3103292 - DNA, 25 bp, Homo sapien
ggactctgtgactgcgtttaaaaag

SEQ ID NO: 3103293 - DNA, 25 bp, Homo sapien
taactttgcactgagtgtcctcgcc

SEQ ID NO: 3103294 - DNA, 25 bp, Homo sapien
cctaggacagggctggcgacaattc

SEQ ID NO: 3103295 - DNA, 25 bp, Homo sapien
gaactgtggccatagatacttgtaa

SEQ ID NO: 3103296 - DNA, 25 bp, Homo sapien
gaatgcagatgcgttccttcagagc

SEQ ID NO: 3103297 - DNA, 25 bp, Homo sapien
ccttcagagctctgggacgggacag

SEQ ID NO: 3103298 - DNA, 25 bp, Homo sapien
tgctttcgccccttcgtcaaggtga

SEQ ID NO: 3103299 - DNA, 25 bp, Homo sapien
tatattcgatggacatacacctgcg

SEQ ID NO: 3103300 - DNA, 25 bp, Homo sapien
gccggcgagcattgagttgtagaaa

SEQ ID NO: 3103301 - DNA, 25 bp, Homo sapien
gaaaaaccaaccttcctcagagtga

SEQ ID NO: 3103302 - DNA, 25 bp, Homo sapien
catgcgtgtgcgtatgtgcgtccga

SEQ ID NO: 3103303 - DNA, 25 bp, Homo sapien
cacgctgcgattgggagagctgtcc

SEQ ID NO: 3103304 - DNA, 25 bp, Homo sapien
taatcatcatcgagaggcacagcca

SEQ ID NO: 3103305 - DNA, 25 bp, Homo sapien
catacgtacctctctcacgagtgaa

SEQ ID NO: 3103306 - DNA, 25 bp, Homo sapien
tggatgtctactttgcacgctgcga

SEQ ID NO: 3103307 - DNA, 25 bp, Homo sapien
cagcaagaagatgccggggcttgcc

SEQ ID NO: 3103308 - DNA, 25 bp, Homo sapien
ctggagtcctggcagaggagtgcca

SEQ ID NO: 3103309 - DNA, 25 bp, Homo sapien
ctggcagaggagtgccactcacttt

SEQ ID NO: 3103310 - DNA, 25 bp, Homo sapien
tcacttttgcctagggtccagttgg

SEQ ID NO: 3103311 - DNA, 25 bp, Homo sapien
gtgaccagtcagtgccaccgggttg

SEQ ID NO: 3103312 - DNA, 25 bp, Homo sapien
tccttcgaaaagatgggacccgcac

SEQ ID NO: 3103313 - DNA, 25 bp, Homo sapien
gacaggcctctgaagacaaaccgag

SEQ ID NO: 3103314 - DNA, 25 bp, Homo sapien
gcggcccctcaaactaagcaaggat

SEQ ID NO: 3103315 - DNA, 25 bp, Homo sapien
ggccgagcctcagcaagagttcgtt

SEQ ID NO: 3103316 - DNA, 25 bp, Homo sapien
taagctaaagccctgtgtagggacc

SEQ ID NO: 3103317 - DNA, 25 bp, Homo sapien
cctgtgcgctgggagaacaaggtca

SEQ ID NO: 3103318 - DNA, 25 bp, Homo sapien
cacccatgggtgaaaaagaggcttg

SEQ ID NO: 3103319 - DNA, 25 bp, Homo sapien
acctcaaggttaagctccagcgatc

SEQ ID NO: 3103320 - DNA, 25 bp, Homo sapien
cttgacctcaaggttaagctccagc

SEQ ID NO: 3103321 - DNA, 25 bp, Homo sapien
tgacctcaaggttaagctccagcga

SEQ ID NO: 3103322 - DNA, 25 bp, Homo sapien
gacctcaaggttaagctccagcgat

SEQ ID NO: 3103323 - DNA, 25 bp, Homo sapien
ttggcaacatcacggcagaacggta

SEQ ID NO: 3103324 - DNA, 25 bp, Homo sapien
caagtgtagtatgcctgggccccag

SEQ ID NO: 3103325 - DNA, 25 bp, Homo sapien
gtagattccgttgtgcagcccaggc

SEQ ID NO: 3103326 - DNA, 25 bp, Homo sapien
gattcaaaacacctgggctcggcag

SEQ ID NO: 3103327 - DNA, 25 bp, Homo sapien
gaaagactgactagcacacacggta

SEQ ID NO: 3103328 - DNA, 25 bp, Homo sapien
ctttcagctgataggatgaggccca

SEQ ID NO: 3103329 - DNA, 25 bp, Homo sapien
ggaagccgccgtctcaaggcagaat

SEQ ID NO: 3103330 - DNA, 25 bp, Homo sapien
caatggttgacgcatcgctctggtc

SEQ ID NO: 3103331 - DNA, 25 bp, Homo sapien
cagctgcggctttcgagaggcgaaa

SEQ ID NO: 3103332 - DNA, 25 bp, Homo sapien
cagaataaatagagtcccaggcagg

SEQ ID NO: 3103333 - DNA, 25 bp, Homo sapien
agctccagcctaggcgcagctgcgg

SEQ ID NO: 3103334 - DNA, 25 bp, Homo sapien
tcactgggaggcaacagtgtggtct

SEQ ID NO: 3103335 - DNA, 25 bp, Homo sapien
ccgcagcctcctcggttgtcccaac

SEQ ID NO: 3103336 - DNA, 25 bp, Homo sapien
gtgccgcagcctcctcggttgtccc

SEQ ID NO: 3103337 - DNA, 25 bp, Homo sapien
gggtgccgcagcctcctcggttgtc

SEQ ID NO: 3103338 - DNA, 25 bp, Homo sapien
agggggtgccgcagcctcctcggtt

SEQ ID NO: 3103339 - DNA, 25 bp, Homo sapien
gcttgttgattaagaagattttgtc

SEQ ID NO: 3103340 - DNA, 25 bp, Homo sapien
aagcttgttgattaagaagattttg

SEQ ID NO: 3103341 - DNA, 25 bp, Homo sapien
agcttgttgattaagaagattttgt

SEQ ID NO: 3103342 - DNA, 25 bp, Homo sapien
gtagatggagtgaagcttgttgatt

SEQ ID NO: 3103343 - DNA, 25 bp, Homo sapien
caggaagtgggcgtatgtgtggatc

SEQ ID NO: 3103344 - DNA, 25 bp, Homo sapien
ggtgtattcaacatcgcaagcagca

SEQ ID NO: 3103345 - DNA, 25 bp, Homo sapien
cagagccagcctgactcaatttaaa

SEQ ID NO: 3103346 - DNA, 25 bp, Homo sapien
gcatttgagggaaaactcacgaggt

SEQ ID NO: 3103347 - DNA, 25 bp, Homo sapien
ggctacttcgtcacttgatctgaag

SEQ ID NO: 3103348 - DNA, 25 bp, Homo sapien
cttgatctgaagtgcacgtattgat

SEQ ID NO: 3103349 - DNA, 25 bp, Homo sapien
tattgatcagggtcacttgtttggc

SEQ ID NO: 3103350 - DNA, 25 bp, Homo sapien
tgcacgtattgatcagggtcacttg

SEQ ID NO: 3103351 - DNA, 25 bp, Homo sapien
ctgagagggtgggggctgagagcag

SEQ ID NO: 3103352 - DNA, 25 bp, Homo sapien
agagcagcccaggaggggcactcac

SEQ ID NO: 3103353 - DNA, 25 bp, Homo sapien
gagagcagcccaggaggggcactca

SEQ ID NO: 3103354 - DNA, 25 bp, Homo sapien
tgggggctgagagcagcccaggagg

SEQ ID NO: 3103355 - DNA, 25 bp, Homo sapien
tgctccttgagcaggcagatgacct

SEQ ID NO: 3103356 - DNA, 25 bp, Homo sapien
tgagcaggcagatgaccttgcgctg

SEQ ID NO: 3103357 - DNA, 25 bp, Homo sapien
ggcagatgaccttgcgctggccccg

SEQ ID NO: 3103358 - DNA, 25 bp, Homo sapien
tggccccgcaccacctggatgttga

SEQ ID NO: 3103359 - DNA, 25 bp, Homo sapien
aggtaccggtgcacccagggcagcc

SEQ ID NO: 3103360 - DNA, 25 bp, Homo sapien
agaaggtgttttccatcaggtaccg

SEQ ID NO: 3103361 - DNA, 25 bp, Homo sapien
gtgttttccatcaggtaccggtgca

SEQ ID NO: 3103362 - DNA, 25 bp, Homo sapien
ccgcctccaggtggcgcacccacac

SEQ ID NO: 3103363 - DNA, 25 bp, Homo sapien
ggccgcaggtgctcgagggcttcac

SEQ ID NO: 3103364 - DNA, 25 bp, Homo sapien
gggccgcaggtgctcgagggcttca

SEQ ID NO: 3103365 - DNA, 25 bp, Homo sapien
gaggaagacggtgctcatgtgtgag

SEQ ID NO: 3103366 - DNA, 25 bp, Homo sapien
aagacggtgctcatgtgtgaggcca

SEQ ID NO: 3103367 - DNA, 25 bp, Homo sapien
gtgaggaagacggtgctcatgtgtg

SEQ ID NO: 3103368 - DNA, 25 bp, Homo sapien
ggaagacggtgctcatgtgtgaggc

SEQ ID NO: 3103369 - DNA, 25 bp, Homo sapien
gcacgcaaacgggtgatgccaacag

SEQ ID NO: 3103370 - DNA, 25 bp, Homo sapien
gggagctcaagagggaagggcgacc

SEQ ID NO: 3103371 - DNA, 25 bp, Homo sapien
ccatctgctgaaggtcgctgccatg

SEQ ID NO: 3103372 - DNA, 25 bp, Homo sapien
gaagcctgccggtcacttgcacgca

SEQ ID NO: 3103373 - DNA, 25 bp, Homo sapien
cttgacatagaagacgagcagcagc

SEQ ID NO: 3103374 - DNA, 25 bp, Homo sapien
cttcttgacatagaagacgagcagc

SEQ ID NO: 3103375 - DNA, 25 bp, Homo sapien
agcagcttgatgatctgcacggcgg

SEQ ID NO: 3103376 - DNA, 25 bp, Homo sapien
ggaggaggggcgagaagagcacccc

SEQ ID NO: 3103377 - DNA, 25 bp, Homo sapien
cagagtctgcccataaatcagctcc

SEQ ID NO: 3103378 - DNA, 25 bp, Homo sapien
tgcccataaatcagctccaggacat

SEQ ID NO: 3103379 - DNA, 25 bp, Homo sapien
agctccaggacattccgggcaatgt

SEQ ID NO: 3103380 - DNA, 25 bp, Homo sapien
ggcaatgtcaaactccggcttccgc

SEQ ID NO: 3103381 - DNA, 25 bp, Homo sapien
atctaaaaatgagttcggttctatt

SEQ ID NO: 3103382 - DNA, 25 bp, Homo sapien
aatgagttcggttctatttcctgag

SEQ ID NO: 3103383 - DNA, 25 bp, Homo sapien
gccatacacatcactttgaaacctg

SEQ ID NO: 3103384 - DNA, 25 bp, Homo sapien
ggccatacacatcactttgaaacct

SEQ ID NO: 3103385 - DNA, 25 bp, Homo sapien
aaggggagaacactcaccacccagt

SEQ ID NO: 3103386 - DNA, 25 bp, Homo sapien
atgggaaaggtccaggcctgagaac

SEQ ID NO: 3103387 - DNA, 25 bp, Homo sapien
gcctgagaacctcccggccacacgt

SEQ ID NO: 3103388 - DNA, 25 bp, Homo sapien
cacacgtcccggccactaaggggag

SEQ ID NO: 3103389 - DNA, 25 bp, Homo sapien
caacatgaggacgaagtccatcacc

SEQ ID NO: 3103390 - DNA, 25 bp, Homo sapien
caccaggaaccggtacagctcctgg

SEQ ID NO: 3103391 - DNA, 25 bp, Homo sapien
aggaaccggtacagctcctggccca

SEQ ID NO: 3103392 - DNA, 25 bp, Homo sapien
ccagttccccaaaaagcgtgtccag

SEQ ID NO: 3103393 - DNA, 25 bp, Homo sapien
tacacccggagctaaacaaccagta

SEQ ID NO: 3103394 - DNA, 25 bp, Homo sapien
accaggggcttggtcacaccggcct

SEQ ID NO: 3103395 - DNA, 25 bp, Homo sapien
taggtttggatacacccggagctaa

SEQ ID NO: 3103396 - DNA, 25 bp, Homo sapien
cggcctcatcctaagtaggtttgga

SEQ ID NO: 3103397 - DNA, 25 bp, Homo sapien
aaatgatgttttcatgtgcggccac

SEQ ID NO: 3103398 - DNA, 25 bp, Homo sapien
tgatgttttcatgtgcggccacaca

SEQ ID NO: 3103399 - DNA, 25 bp, Homo sapien
aatgatgttttcatgtgcggccaca

SEQ ID NO: 3103400 - DNA, 25 bp, Homo sapien
gatgttttcatgtgcggccacacac

SEQ ID NO: 3103401 - DNA, 25 bp, Homo sapien
acctccagtaccggggagtcatgcg

SEQ ID NO: 3103402 - DNA, 25 bp, Homo sapien
gcccccaggttgaggaggccaacca

SEQ ID NO: 3103403 - DNA, 25 bp, Homo sapien
gggcggccaggacacggcacaggta

SEQ ID NO: 3103404 - DNA, 25 bp, Homo sapien
gcggccaggacacggcacaggtagg

SEQ ID NO: 3103405 - DNA, 25 bp, Homo sapien
agcccagcgcggtccccagacacag

SEQ ID NO: 3103406 - DNA, 25 bp, Homo sapien
gagaagacgtggacggccacggcgc

SEQ ID NO: 3103407 - DNA, 25 bp, Homo sapien
gggctgtgccgcagctgccactcgg

SEQ ID NO: 3103408 - DNA, 25 bp, Homo sapien
ctggatcatgaactccgagaagacg

SEQ ID NO: 3103409 - DNA, 25 bp, Homo sapien
agctctccccgaaagagtgagccat

SEQ ID NO: 3103410 - DNA, 25 bp, Homo sapien
cttcagccgggtgcgaatattgtcc

SEQ ID NO: 3103411 - DNA, 25 bp, Homo sapien
agccgggtgcgaatattgtcctgct

SEQ ID NO: 3103412 - DNA, 25 bp, Homo sapien
tagctctccccgaaagagtgagcca

SEQ ID NO: 3103413 - DNA, 25 bp, Homo sapien
attcaccgcggacttggctggctgc

SEQ ID NO: 3103414 - DNA, 25 bp, Homo sapien
cctcccagcgagacatggaccagaa

SEQ ID NO: 3103415 - DNA, 25 bp, Homo sapien
agccacatctgcctagaagaggggg

SEQ ID NO: 3103416 - DNA, 25 bp, Homo sapien
ggcagggctgcattcaccgcggact

SEQ ID NO: 3103417 - DNA, 25 bp, Homo sapien
tcagcgtggcgttactgtagtggcc

SEQ ID NO: 3103418 - DNA, 25 bp, Homo sapien
gataaagaagctcacgcccacagtg

SEQ ID NO: 3103419 - DNA, 25 bp, Homo sapien
ctgggtgtgcactggctgccatcca

SEQ ID NO: 3103420 - DNA, 25 bp, Homo sapien
acatgacggtgtgggtgaagcaacc

SEQ ID NO: 3103421 - DNA, 25 bp, Homo sapien
cagccgagtcagggactttccccac

SEQ ID NO: 3103422 - DNA, 25 bp, Homo sapien
gagatccagccgagtcagggacttt

SEQ ID NO: 3103423 - DNA, 25 bp, Homo sapien
ccagccgagtcagggactttcccca

SEQ ID NO: 3103424 - DNA, 25 bp, Homo sapien
agggagatccagccgagtcagggac

SEQ ID NO: 3103425 - DNA, 25 bp, Homo sapien
agggaacacggtaccagggtagcag

SEQ ID NO: 3103426 - DNA, 25 bp, Homo sapien
cacggtaccagggtagcagaagaca

SEQ ID NO: 3103427 - DNA, 25 bp, Homo sapien
tgagcatccagggtcattgaggggg

SEQ ID NO: 3103428 - DNA, 25 bp, Homo sapien
gtagcagaagacaggcaccccccgt

SEQ ID NO: 3103429 - DNA, 25 bp, Homo sapien
ggaaggcgacctgagggcccatgat

SEQ ID NO: 3103430 - DNA, 25 bp, Homo sapien
agcaggagggcattgaaagccagca

SEQ ID NO: 3103431 - DNA, 25 bp, Homo sapien
gggaaggcgacctgagggcccatga

SEQ ID NO: 3103432 - DNA, 25 bp, Homo sapien
gagcacgctggagccgaactggccc

SEQ ID NO: 3103433 - DNA, 25 bp, Homo sapien
gaactggcccccgatgcgcttcagg

SEQ ID NO: 3103434 - DNA, 25 bp, Homo sapien
agaggaagtaggagagcacgctgga

SEQ ID NO: 3103435 - DNA, 25 bp, Homo sapien
aactggcccccgatgcgcttcaggg

SEQ ID NO: 3103436 - DNA, 25 bp, Homo sapien
gcgccaggcccaggctgtgcaaggc

SEQ ID NO: 3103437 - DNA, 25 bp, Homo sapien
cagcgccaggcccaggctgtgcaag

SEQ ID NO: 3103438 - DNA, 25 bp, Homo sapien
ctgcagggcggagagcagcgccagg

SEQ ID NO: 3103439 - DNA, 25 bp, Homo sapien
agcagcgccaggcccaggctgtgca

SEQ ID NO: 3103440 - DNA, 25 bp, Homo sapien
caggcatatctgagccggccacagc

SEQ ID NO: 3103441 - DNA, 25 bp, Homo sapien
agcacgcaggcatatctgagccggc

SEQ ID NO: 3103442 - DNA, 25 bp, Homo sapien
acgcaggcatatctgagccggccac

SEQ ID NO: 3103443 - DNA, 25 bp, Homo sapien
cagcacgcaggcatatctgagccgg

SEQ ID NO: 3103444 - DNA, 25 bp, Homo sapien
agccataggtgcctggaccaatgag

SEQ ID NO: 3103445 - DNA, 25 bp, Homo sapien
ccataggtgcctggaccaatgaggg

SEQ ID NO: 3103446 - DNA, 25 bp, Homo sapien
ggcagccataggtgcctggaccaat

SEQ ID NO: 3103447 - DNA, 25 bp, Homo sapien
ctggaccaatgaggggcctgactct

SEQ ID NO: 3103448 - DNA, 25 bp, Homo sapien
cccgcgaagcatgtggtcccgctgt

SEQ ID NO: 3103449 - DNA, 25 bp, Homo sapien
caggcttaagggcatcccgcgaagc

SEQ ID NO: 3103450 - DNA, 25 bp, Homo sapien
agggcatcccgcgaagcatgtggtc

SEQ ID NO: 3103451 - DNA, 25 bp, Homo sapien
gcgaagcatgtggtcccgctgtgcc

SEQ ID NO: 3103452 - DNA, 25 bp, Homo sapien
tccagctccaggtcgtacaggcgga

SEQ ID NO: 3103453 - DNA, 25 bp, Homo sapien
gctccaggtcgtacaggcggaggct

SEQ ID NO: 3103454 - DNA, 25 bp, Homo sapien
ccaggtcgtacaggcggaggctggg

SEQ ID NO: 3103455 - DNA, 25 bp, Homo sapien
ccagctccaggtcgtacaggcggag

SEQ ID NO: 3103456 - DNA, 25 bp, Homo sapien
gcggacaaagttcccgagcaggggc

SEQ ID NO: 3103457 - DNA, 25 bp, Homo sapien
ctgcaccgtgcggttgtagtactgg

SEQ ID NO: 3103458 - DNA, 25 bp, Homo sapien
aagctgcaccgtgcggttgtagtac

SEQ ID NO: 3103459 - DNA, 25 bp, Homo sapien
tgcaccgaagctgcaccgtgcggtt

SEQ ID NO: 3103460 - DNA, 25 bp, Homo sapien
agcagatgggatgggctaggagccc

SEQ ID NO: 3103461 - DNA, 25 bp, Homo sapien
agatgggatgggctaggagcccgcc

SEQ ID NO: 3103462 - DNA, 25 bp, Homo sapien
tgggatgggctaggagcccgccctg

SEQ ID NO: 3103463 - DNA, 25 bp, Homo sapien
gatgggctaggagcccgccctgggc

SEQ ID NO: 3103464 - DNA, 25 bp, Homo sapien
caatggtgcggctgggcatgctggc

SEQ ID NO: 3103465 - DNA, 25 bp, Homo sapien
tgcggctgggcatgctggccaggat

SEQ ID NO: 3103466 - DNA, 25 bp, Homo sapien
atggtgcggctgggcatgctggcca

SEQ ID NO: 3103467 - DNA, 25 bp, Homo sapien
ggtgcggctgggcatgctggccagg

SEQ ID NO: 3103468 - DNA, 25 bp, Homo sapien
gtggccgtgctctgggtgccctcgg

SEQ ID NO: 3103469 - DNA, 25 bp, Homo sapien
tgccctcgggccgccagagtgtctg

SEQ ID NO: 3103470 - DNA, 25 bp, Homo sapien
cgccagagtgtctgctggctacttc

SEQ ID NO: 3103471 - DNA, 25 bp, Homo sapien
ggagtgtggccgtgctctgggtgcc

SEQ ID NO: 3103472 - DNA, 25 bp, Homo sapien
acttcgctttcatcataggggctgg

SEQ ID NO: 3103473 - DNA, 25 bp, Homo sapien
ctgctggaaggagtcgtgcacttcg

SEQ ID NO: 3103474 - DNA, 25 bp, Homo sapien
aggagtcgtgcacttcgctttcatc

SEQ ID NO: 3103475 - DNA, 25 bp, Homo sapien
tcctgggccgtgcactggctctgct

SEQ ID NO: 3103476 - DNA, 25 bp, Homo sapien
tcagggacatcgaggatgaaggcca

SEQ ID NO: 3103477 - DNA, 25 bp, Homo sapien
gacatcgaggatgaaggccagtggc

SEQ ID NO: 3103478 - DNA, 25 bp, Homo sapien
acatcgaggatgaaggccagtggct

SEQ ID NO: 3103479 - DNA, 25 bp, Homo sapien
gggtctcagggacatcgaggatgaa

SEQ ID NO: 3103480 - DNA, 25 bp, Homo sapien
tctctggccaatgcccgctagtctg

SEQ ID NO: 3103481 - DNA, 25 bp, Homo sapien
agacctagggtagctcagagcctgg

SEQ ID NO: 3103482 - DNA, 25 bp, Homo sapien
aatgcccgctagtctgcagacctag

SEQ ID NO: 3103483 - DNA, 25 bp, Homo sapien
cgctagtctgcagacctagggtagc

SEQ ID NO: 3103484 - DNA, 25 bp, Homo sapien
ggtcttcaacgcctggcagctgtcc

SEQ ID NO: 3103485 - DNA, 25 bp, Homo sapien
tggtcttcaacgcctggcagctgtc

SEQ ID NO: 3103486 - DNA, 25 bp, Homo sapien
tgtcctgggtgccatcttcgggccc

SEQ ID NO: 3103487 - DNA, 25 bp, Homo sapien
cagacaggcccttctaagctcaggg

SEQ ID NO: 3103488 - DNA, 25 bp, Homo sapien
ggttgaagggcgctttcctcggaca

SEQ ID NO: 3103489 - DNA, 25 bp, Homo sapien
ctaacacgggacagctgccgaaaga

SEQ ID NO: 3103490 - DNA, 25 bp, Homo sapien
caagtccagcggagtttccaggcgc

SEQ ID NO: 3103491 - DNA, 25 bp, Homo sapien
gagaggctgggtggcgcccgtttcc

SEQ ID NO: 3103492 - DNA, 25 bp, Homo sapien
tccaggcgcaccattcctgagctag

SEQ ID NO: 3103493 - DNA, 25 bp, Homo sapien
ccggcagcgagcttcccgggagcag

SEQ ID NO: 3103494 - DNA, 25 bp, Homo sapien
ggccgcgcgcgcagccagggctcac

SEQ ID NO: 3103495 - DNA, 25 bp, Homo sapien
gggccgcgcgcgcagccagggctca

SEQ ID NO: 3103496 - DNA, 25 bp, Homo sapien
ggggccgcgcgcgcagccagggctc

SEQ ID NO: 3103497 - DNA, 25 bp, Homo sapien
tgtgccccgcaagagccgccgggaa

SEQ ID NO: 3103498 - DNA, 25 bp, Homo sapien
tgccccgcaagagccgccgggaact

SEQ ID NO: 3103499 - DNA, 25 bp, Homo sapien
ctgtgccccgcaagagccgccggga

SEQ ID NO: 3103500 - DNA, 25 bp, Homo sapien
cccgcaagagccgccgggaactgag

SEQ ID NO: 3103501 - DNA, 25 bp, Homo sapien
tcggctctccttgccaagggagtgg

SEQ ID NO: 3103502 - DNA, 25 bp, Homo sapien
tctcggctctccttgccaagggagt

SEQ ID NO: 3103503 - DNA, 25 bp, Homo sapien
tgggccagtcgcaggtctgccgggg

SEQ ID NO: 3103504 - DNA, 25 bp, Homo sapien
agtcgcaggtctgccggggccgggg

SEQ ID NO: 3103505 - DNA, 25 bp, Homo sapien
agagcaggcaagcaaaagcgaggac

SEQ ID NO: 3103506 - DNA, 25 bp, Homo sapien
gcaagcaaaagcgaggaccaggcag

SEQ ID NO: 3103507 - DNA, 25 bp, Homo sapien
gagacttagtggtccacctgggaac

SEQ ID NO: 3103508 - DNA, 25 bp, Homo sapien
gaaggtatgcactgatattcccatt

SEQ ID NO: 3103509 - DNA, 25 bp, Homo sapien
caggaattcggtcctacttcacctt

SEQ ID NO: 3103510 - DNA, 25 bp, Homo sapien
tcttcggcacaggaattcggtccta

SEQ ID NO: 3103511 - DNA, 25 bp, Homo sapien
aggcctcttcggcacaggaattcgg

SEQ ID NO: 3103512 - DNA, 25 bp, Homo sapien
ggcacaggaattcggtcctacttca

SEQ ID NO: 3103513 - DNA, 25 bp, Homo sapien
gtcttgctactgcaatcctgcctgg

SEQ ID NO: 3103514 - DNA, 25 bp, Homo sapien
tcacgccgaggcgtgaagagtgctt

SEQ ID NO: 3103515 - DNA, 25 bp, Homo sapien
ggctcacgccgaggcgtgaagagtg

SEQ ID NO: 3103516 - DNA, 25 bp, Homo sapien
gtggctcacgccgaggcgtgaagag

SEQ ID NO: 3103517 - DNA, 25 bp, Homo sapien
gtgattgaccggtcaggagccacag

SEQ ID NO: 3103518 - DNA, 25 bp, Homo sapien
cagagagtgtgattgaccggtcagg

SEQ ID NO: 3103519 - DNA, 25 bp, Homo sapien
ggcagagagtgtgattgaccggtca

SEQ ID NO: 3103520 - DNA, 25 bp, Homo sapien
agtgtgattgaccggtcaggagcca

SEQ ID NO: 3103521 - DNA, 25 bp, Homo sapien
ggggagtttgctgtaccgggcctgc

SEQ ID NO: 3103522 - DNA, 25 bp, Homo sapien
agtttgctgtaccgggcctgccggg

SEQ ID NO: 3103523 - DNA, 25 bp, Homo sapien
gagtttgctgtaccgggcctgccgg

SEQ ID NO: 3103524 - DNA, 25 bp, Homo sapien
tgagggggagtttgctgtaccgggc

SEQ ID NO: 3103525 - DNA, 25 bp, Homo sapien
tgggctgttctgcttggccgtgctg

SEQ ID NO: 3103526 - DNA, 25 bp, Homo sapien
cttggccgtgctgggtgagtccacc

SEQ ID NO: 3103527 - DNA, 25 bp, Homo sapien
tctgcttggccgtgctgggtgagtc

SEQ ID NO: 3103528 - DNA, 25 bp, Homo sapien
gtgagtccaccagggacgtgatggt

SEQ ID NO: 3103529 - DNA, 25 bp, Homo sapien
taagtggcatagcctgctgcaggga

SEQ ID NO: 3103530 - DNA, 25 bp, Homo sapien
gagaagtcccccagctgggaccctg

SEQ ID NO: 3103531 - DNA, 25 bp, Homo sapien
tgggaccctggtgtcagaaccccca

SEQ ID NO: 3103532 - DNA, 25 bp, Homo sapien
cagcttctccaaggcacgggaggaa

SEQ ID NO: 3103533 - DNA, 25 bp, Homo sapien
tcaggccgtgggagccgctattatc

SEQ ID NO: 3103534 - DNA, 25 bp, Homo sapien
tttgaacaaggcagtggcaatccgc

SEQ ID NO: 3103535 - DNA, 25 bp, Homo sapien
ggtgcccatgtgctactgacaagtg

SEQ ID NO: 3103536 - DNA, 25 bp, Homo sapien
tccagtcattggttgagccacagcc

SEQ ID NO: 3103537 - DNA, 25 bp, Homo sapien
cagagggagctgtcatcggcaagtc

SEQ ID NO: 3103538 - DNA, 25 bp, Homo sapien
aaacaagagggcgtgaatccaggcc

SEQ ID NO: 3103539 - DNA, 25 bp, Homo sapien
gaaatgtgcgtccaccaaccagtga

SEQ ID NO: 3103540 - DNA, 25 bp, Homo sapien
caagtcccagcaaggttggtgccac

SEQ ID NO: 3103541 - DNA, 25 bp, Homo sapien
ggccaaggctcaaaggtgctggcac

SEQ ID NO: 3103542 - DNA, 25 bp, Homo sapien
agcctgggcgatcgtcccagcagct

SEQ ID NO: 3103543 - DNA, 25 bp, Homo sapien
cagagaggcctaagcctcagtgtgg

SEQ ID NO: 3103544 - DNA, 25 bp, Homo sapien
caaggagagggagtgtgccagatcc

SEQ ID NO: 3103545 - DNA, 25 bp, Homo sapien
agggcagcgtccagtaggcggcagt

SEQ ID NO: 3103546 - DNA, 25 bp, Homo sapien
atgcagggcagcgtccagtaggcgg

SEQ ID NO: 3103547 - DNA, 25 bp, Homo sapien
gcatgcagggcagcgtccagtaggc

SEQ ID NO: 3103548 - DNA, 25 bp, Homo sapien
gcagcgtccagtaggcggcagtggc

SEQ ID NO: 3103549 - DNA, 25 bp, Homo sapien
tggcagggctgcattgcagaatctg

SEQ ID NO: 3103550 - DNA, 25 bp, Homo sapien
tcagttggcagggctgcattgcaga

SEQ ID NO: 3103551 - DNA, 25 bp, Homo sapien
agttggcagggctgcattgcagaat

SEQ ID NO: 3103552 - DNA, 25 bp, Homo sapien
ttggcagggctgcattgcagaatct

SEQ ID NO: 3103553 - DNA, 25 bp, Homo sapien
cacacggagtggtacttgtctgctc

SEQ ID NO: 3103554 - DNA, 25 bp, Homo sapien
tctctttgttgtccggcccggcagg

SEQ ID NO: 3103555 - DNA, 25 bp, Homo sapien
tgggcagttctctttgttgtccggc

SEQ ID NO: 3103556 - DNA, 25 bp, Homo sapien
ggcctgaggccttcttgaagtagca

SEQ ID NO: 3103557 - DNA, 25 bp, Homo sapien
ccgccggcctgcagggaaggcaggt

SEQ ID NO: 3103558 - DNA, 25 bp, Homo sapien
gcagggacaggggatgggtgaaggg

SEQ ID NO: 3103559 - DNA, 25 bp, Homo sapien
acaggaaggaggcagagccataccc

SEQ ID NO: 3103560 - DNA, 25 bp, Homo sapien
gggatgggtgaagggccaggacagg

SEQ ID NO: 3103561 - DNA, 25 bp, Homo sapien
gtcagcttcaccacgctctcggcca

SEQ ID NO: 3103562 - DNA, 25 bp, Homo sapien
ggcggcttcccggaagcactccatg

SEQ ID NO: 3103563 - DNA, 25 bp, Homo sapien
ctccttctctgtgccgagcctcttg

SEQ ID NO: 3103564 - DNA, 25 bp, Homo sapien
tgccgagcctcttggtataggcggc

SEQ ID NO: 3103565 - DNA, 25 bp, Homo sapien
ccagtgcagccacaattacggtctt

SEQ ID NO: 3103566 - DNA, 25 bp, Homo sapien
cacaattacggtcttcccggcgttg

SEQ ID NO: 3103567 - DNA, 25 bp, Homo sapien
cccggcgttggccatggcctcgcag

SEQ ID NO: 3103568 - DNA, 25 bp, Homo sapien
cgcagaactccacgatgtcagggaa

SEQ ID NO: 3103569 - DNA, 25 bp, Homo sapien
gggccacgtctcggagcaggcaggc

SEQ ID NO: 3103570 - DNA, 25 bp, Homo sapien
tgcccctcgtcgatgcctatgacag

SEQ ID NO: 3103571 - DNA, 25 bp, Homo sapien
ccctcgtcgatgcctatgacagcca

SEQ ID NO: 3103572 - DNA, 25 bp, Homo sapien
ggccacgtctcggagcaggcaggcg

SEQ ID NO: 3103573 - DNA, 25 bp, Homo sapien
ctgctgctgtagcgagtgtctttgg

SEQ ID NO: 3103574 - DNA, 25 bp, Homo sapien
gctgctgctgtagcgagtgtctttg

SEQ ID NO: 3103575 - DNA, 25 bp, Homo sapien
tactgagcaatctggaagcgacgga

SEQ ID NO: 3103576 - DNA, 25 bp, Homo sapien
ggaagcgacggacgcgtctcatcaa

SEQ ID NO: 3103577 - DNA, 25 bp, Homo sapien
gcacttgtactgagcaatctggaag

SEQ ID NO: 3103578 - DNA, 25 bp, Homo sapien
caatctggaagcgacggacgcgtct

SEQ ID NO: 3103579 - DNA, 25 bp, Homo sapien
ctttttcctgagaacatcggcccga

SEQ ID NO: 3103580 - DNA, 25 bp, Homo sapien
ctgagaacatcggcccgagaatcac

SEQ ID NO: 3103581 - DNA, 25 bp, Homo sapien
cctgagaacatcggcccgagaatca

SEQ ID NO: 3103582 - DNA, 25 bp, Homo sapien
gcggatgcctggacacaggctatca

SEQ ID NO: 3103583 - DNA, 25 bp, Homo sapien
gccctgcgcggatgcctggacacag

SEQ ID NO: 3103584 - DNA, 25 bp, Homo sapien
aggtcatttgagggcccgccctgcg

SEQ ID NO: 3103585 - DNA, 25 bp, Homo sapien
tggacacaggctatcaccacgacca

SEQ ID NO: 3103586 - DNA, 25 bp, Homo sapien
agcacagtgggcaggttaatgcagc

SEQ ID NO: 3103587 - DNA, 25 bp, Homo sapien
cagtgggcaggttaatgcagctcat

SEQ ID NO: 3103588 - DNA, 25 bp, Homo sapien
tggatctgcccccgggtcttgctgg

SEQ ID NO: 3103589 - DNA, 25 bp, Homo sapien
ctggatctgcccccgggtcttgctg

SEQ ID NO: 3103590 - DNA, 25 bp, Homo sapien
tctccaaggccgtcccgcagtaagc

SEQ ID NO: 3103591 - DNA, 25 bp, Homo sapien
tcacgaacccgagtactctccaagg

SEQ ID NO: 3103592 - DNA, 25 bp, Homo sapien
tgcgcctccgggaagttcacgaacc

SEQ ID NO: 3103593 - DNA, 25 bp, Homo sapien
ttaaaccacggcgtgctggccaatc

SEQ ID NO: 3103594 - DNA, 25 bp, Homo sapien
tggcgggagatttggccgcagcccg

SEQ ID NO: 3103595 - DNA, 25 bp, Homo sapien
aatccgggacgtgcgcccagggact

SEQ ID NO: 3103596 - DNA, 25 bp, Homo sapien
ctggcgggagatttggccgcagccc

SEQ ID NO: 3103597 - DNA, 25 bp, Homo sapien
cctcgtgggaggaatccgggacgtg

SEQ ID NO: 3103598 - DNA, 25 bp, Homo sapien
tgccagctggctaaaggcacagcgg

SEQ ID NO: 3103599 - DNA, 25 bp, Homo sapien
ggcctcccctggtcgtaactgctgt

SEQ ID NO: 3103600 - DNA, 25 bp, Homo sapien
atctccccttaaggctgccagctgg

SEQ ID NO: 3103601 - DNA, 25 bp, Homo sapien
aaggcacagcggtcgctggtatacc

SEQ ID NO: 3103602 - DNA, 25 bp, Homo sapien
gaacacctggtaatgcatccgtgct

SEQ ID NO: 3103603 - DNA, 25 bp, Homo sapien
cctggtaatgcatccgtgctgggat

SEQ ID NO: 3103604 - DNA, 25 bp, Homo sapien
cacgatctgaacacctggtaatgca

SEQ ID NO: 3103605 - DNA, 25 bp, Homo sapien
aggaagtgtaggtgaggacgcagcc

SEQ ID NO: 3103606 - DNA, 25 bp, Homo sapien
tacgtagatagcttctcgtcagtac

SEQ ID NO: 3103607 - DNA, 25 bp, Homo sapien
agatagcttctcgtcagtacgtcag

SEQ ID NO: 3103608 - DNA, 25 bp, Homo sapien
tcagtacgtcagtacgcagggagcc

SEQ ID NO: 3103609 - DNA, 25 bp, Homo sapien
tcctcatctgtacgtagatagcttc

SEQ ID NO: 3103610 - DNA, 25 bp, Homo sapien
tcaaactcctaaccttgtgattcgc

SEQ ID NO: 3103611 - DNA, 25 bp, Homo sapien
gtctcaaactcctaaccttgtgatt

SEQ ID NO: 3103612 - DNA, 25 bp, Homo sapien
cctaaccttgtgattcgcccgcctt

SEQ ID NO: 3103613 - DNA, 25 bp, Homo sapien
caaactcctaaccttgtgattcgcc

SEQ ID NO: 3103614 - DNA, 25 bp, Homo sapien
tatgtacttggtacgcactgatcgt

SEQ ID NO: 3103615 - DNA, 25 bp, Homo sapien
cgcaggaatgatatgtacttggtac

SEQ ID NO: 3103616 - DNA, 25 bp, Homo sapien
tgctgatcgcaggaatgatatgtac

SEQ ID NO: 3103617 - DNA, 25 bp, Homo sapien
tcatgcacctgctgatcgcaggaat

SEQ ID NO: 3103618 - DNA, 25 bp, Homo sapien
cttgaaatcagagctggggtccaaa

SEQ ID NO: 3103619 - DNA, 25 bp, Homo sapien
gcagcttgaaatcagagctggggtc

SEQ ID NO: 3103620 - DNA, 25 bp, Homo sapien
caccccaggcagcttgaaatcagag

SEQ ID NO: 3103621 - DNA, 25 bp, Homo sapien
ccaccccaggcagcttgaaatcaga

SEQ ID NO: 3103622 - DNA, 25 bp, Homo sapien
tcggttttgagggtgttcaggtcca

SEQ ID NO: 3103623 - DNA, 25 bp, Homo sapien
tcgggctcgggaggatgctgggggc

SEQ ID NO: 3103624 - DNA, 25 bp, Homo sapien
cggtgcccatgagcttttgaagctc

SEQ ID NO: 3103625 - DNA, 25 bp, Homo sapien
cccggtgcccatgagcttttgaagc

SEQ ID NO: 3103626 - DNA, 25 bp, Homo sapien
caggtgcctgttgaatctgagctgc

SEQ ID NO: 3103627 - DNA, 25 bp, Homo sapien
ggttccttatctgtcacacctgtgc

SEQ ID NO: 3103628 - DNA, 25 bp, Homo sapien
aaggcagtgtcccttttgctagagc

SEQ ID NO: 3103629 - DNA, 25 bp, Homo sapien
tgacagctttgttcgcgtgggcaga

SEQ ID NO: 3103630 - DNA, 25 bp, Homo sapien
tgtgtgattagacaggcccagtgag

SEQ ID NO: 3103631 - DNA, 25 bp, Homo sapien
taggaagcgtctggcagatactcct

SEQ ID NO: 3103632 - DNA, 25 bp, Homo sapien
gatgcatgacttgtgtgtgatgaga

SEQ ID NO: 3103633 - DNA, 25 bp, Homo sapien
taaatgacttggctcgatgctgtgg

SEQ ID NO: 3103634 - DNA, 25 bp, Homo sapien
ttgttacagcttcgctggaaacctc

SEQ ID NO: 3103635 - DNA, 25 bp, Homo sapien
tccacacgggggagagacgcagtcc

SEQ ID NO: 3103636 - DNA, 25 bp, Homo sapien
gggagagacgcagtccgcccaggtc

SEQ ID NO: 3103637 - DNA, 25 bp, Homo sapien
ctgaagtctggcgtaagatgatgga

SEQ ID NO: 3103638 - DNA, 25 bp, Homo sapien
cggctgttcctgagaaataaaaagc

SEQ ID NO: 3103639 - DNA, 25 bp, Homo sapien
ctcggctgttcctgagaaataaaaa

SEQ ID NO: 3103640 - DNA, 25 bp, Homo sapien
gctgttcctgagaaataaaaagcct

SEQ ID NO: 3103641 - DNA, 25 bp, Homo sapien
ctgttcctgagaaataaaaagcctg

SEQ ID NO: 3103642 - DNA, 25 bp, Homo sapien
cgacgctcagctgctccgacagtga

SEQ ID NO: 3103643 - DNA, 25 bp, Homo sapien
tgtagcatacgcgacgctcagctgc

SEQ ID NO: 3103644 - DNA, 25 bp, Homo sapien
aatgctgtgaaatcagttgtagcat

SEQ ID NO: 3103645 - DNA, 25 bp, Homo sapien
atcagttgtagcatacgcgacgctc

SEQ ID NO: 3103646 - DNA, 25 bp, Homo sapien
tgtcccttccgcctgtgtggctgcc

SEQ ID NO: 3103647 - DNA, 25 bp, Homo sapien
cagcccgtgccaggctcctatgctt

SEQ ID NO: 3103648 - DNA, 25 bp, Homo sapien
cctatgcttccaggagcacgggtgg

SEQ ID NO: 3103649 - DNA, 25 bp, Homo sapien
cgtgccaggctcctatgcttccagg

SEQ ID NO: 3103650 - DNA, 25 bp, Homo sapien
caggagcacgggtgggtggtcctgc

SEQ ID NO: 3103651 - DNA, 25 bp, Homo sapien
gggattacagatgcgtgctaccgtg

SEQ ID NO: 3103652 - DNA, 25 bp, Homo sapien
tgggattacagatgcgtgctaccgt

SEQ ID NO: 3103653 - DNA, 25 bp, Homo sapien
gattacagatgcgtgctaccgtgcc

SEQ ID NO: 3103654 - DNA, 25 bp, Homo sapien
ttacagatgcgtgctaccgtgcctg

SEQ ID NO: 3103655 - DNA, 25 bp, Homo sapien
tccttctgacgtttcccttcctgaa

SEQ ID NO: 3103656 - DNA, 25 bp, Homo sapien
tctctgacctagagcgaaggcctgc

SEQ ID NO: 3103657 - DNA, 25 bp, Homo sapien
cctgaactcaggaagctgtaactgg

SEQ ID NO: 3103658 - DNA, 25 bp, Homo sapien
aagccctgaccatcaagttcccatg

SEQ ID NO: 3103659 - DNA, 25 bp, Homo sapien
tacaccgagacgtcgcggtgccaca

SEQ ID NO: 3103660 - DNA, 25 bp, Homo sapien
gaagcacggactgctctgtccatag

SEQ ID NO: 3103661 - DNA, 25 bp, Homo sapien
tgtccataggaacagtggcacgcac

SEQ ID NO: 3103662 - DNA, 25 bp, Homo sapien
caccagttcagtgtcctacaccgag

SEQ ID NO: 3103663 - DNA, 25 bp, Homo sapien
caccatgttcgtctccacgaaggtg

SEQ ID NO: 3103664 - DNA, 25 bp, Homo sapien
gtgtgggccagctcatcagcactca

SEQ ID NO: 3103665 - DNA, 25 bp, Homo sapien
ccaccaccatgttcgtctccacgaa

SEQ ID NO: 3103666 - DNA, 25 bp, Homo sapien
gcccgcaacccagccatgctcacca

SEQ ID NO: 3103667 - DNA, 25 bp, Homo sapien
ctgagcagacggacaacaccagctc

SEQ ID NO: 3103668 - DNA, 25 bp, Homo sapien
ggaagcacagggaagcgagggtggg

SEQ ID NO: 3103669 - DNA, 25 bp, Homo sapien
cgagggtggggcgtcctgtccaggc

SEQ ID NO: 3103670 - DNA, 25 bp, Homo sapien
agcgagggtggggcgtcctgtccag

SEQ ID NO: 3103671 - DNA, 25 bp, Homo sapien
cagaggaagcacagggaagcgaggg

SEQ ID NO: 3103672 - DNA, 25 bp, Homo sapien
cttgggtgaatctctgggcgttccc

SEQ ID NO: 3103673 - DNA, 25 bp, Homo sapien
ttttggaggcgccaggcttcttcaa

SEQ ID NO: 3103674 - DNA, 25 bp, Homo sapien
cacagtgcctgctttgtgtcaacca

SEQ ID NO: 3103675 - DNA, 25 bp, Homo sapien
tccccacctggtgcatgcttccacc

SEQ ID NO: 3103676 - DNA, 25 bp, Homo sapien
tgggcgggacatgcagggccagcac

SEQ ID NO: 3103677 - DNA, 25 bp, Homo sapien
cacagagtcacagtgctccacaatg

SEQ ID NO: 3103678 - DNA, 25 bp, Homo sapien
tccacaatgtaggtgggcgggacat

SEQ ID NO: 3103679 - DNA, 25 bp, Homo sapien
gccagcaccacgttcatcagctggg

SEQ ID NO: 3103680 - DNA, 25 bp, Homo sapien
gggtgaggtgcaggcagagtcagag

SEQ ID NO: 3103681 - DNA, 25 bp, Homo sapien
gtgaggtgcaggcagagtcagaggg

SEQ ID NO: 3103682 - DNA, 25 bp, Homo sapien
gaggtgcaggcagagtcagaggggc

SEQ ID NO: 3103683 - DNA, 25 bp, Homo sapien
gtgcaggcagagtcagaggggccag

SEQ ID NO: 3103684 - DNA, 25 bp, Homo sapien
ggctggtgactggctctggtgatct

SEQ ID NO: 3103685 - DNA, 25 bp, Homo sapien
gctctggtgatctgggacccaagca

SEQ ID NO: 3103686 - DNA, 25 bp, Homo sapien
gggacccaagcagtcaggctgtgct

SEQ ID NO: 3103687 - DNA, 25 bp, Homo sapien
ccccgagatgctgtgtgagttctcc

SEQ ID NO: 3103688 - DNA, 25 bp, Homo sapien
cgtaggtagttgatggggaggatcc

SEQ ID NO: 3103689 - DNA, 25 bp, Homo sapien
tctccaggcaaatgagctcgcagac

SEQ ID NO: 3103690 - DNA, 25 bp, Homo sapien
gagttctccaggcaaatgagctcgc

SEQ ID NO: 3103691 - DNA, 25 bp, Homo sapien
ggccccgcgtgatcatcctctccag

SEQ ID NO: 3103692 - DNA, 25 bp, Homo sapien
tctggaggccccgcgtgatcatcct

SEQ ID NO: 3103693 - DNA, 25 bp, Homo sapien
agctcagccagtccagagtgcagtg

SEQ ID NO: 3103694 - DNA, 25 bp, Homo sapien
tccagctcagccagtccagagtgca

SEQ ID NO: 3103695 - DNA, 25 bp, Homo sapien
ctgggagggagtgggagtgcactcc

SEQ ID NO: 3103696 - DNA, 25 bp, Homo sapien
gggagggagtgggagtgcactccag

SEQ ID NO: 3103697 - DNA, 25 bp, Homo sapien
gagggagtgggagtgcactccagcc

SEQ ID NO: 3103698 - DNA, 25 bp, Homo sapien
gggagtgggagtgcactccagccct

SEQ ID NO: 3103699 - DNA, 25 bp, Homo sapien
ggccccaggtgagcaatgcctgctc

SEQ ID NO: 3103700 - DNA, 25 bp, Homo sapien
aagggggtttgcccctgagcagcct

SEQ ID NO: 3103701 - DNA, 25 bp, Homo sapien
agggccccaggtgagcaatgcctgc

SEQ ID NO: 3103702 - DNA, 25 bp, Homo sapien
tgggaagggggtttgcccctgagca

SEQ ID NO: 3103703 - DNA, 25 bp, Homo sapien
ctcatagacgtggaggtggcactcc

SEQ ID NO: 3103704 - DNA, 25 bp, Homo sapien
cccaccctgctcatagacgtggagg

SEQ ID NO: 3103705 - DNA, 25 bp, Homo sapien
caccctgctcatagacgtggaggtg

SEQ ID NO: 3103706 - DNA, 25 bp, Homo sapien
cctgctcatagacgtggaggtggca

SEQ ID NO: 3103707 - DNA, 25 bp, Homo sapien
agagcccccccatatgcactgagga

SEQ ID NO: 3103708 - DNA, 25 bp, Homo sapien
cctgctaggcagacagaagtcgccc

SEQ ID NO: 3103709 - DNA, 25 bp, Homo sapien
gcagacagaagtcgccctgcgctca

SEQ ID NO: 3103710 - DNA, 25 bp, Homo sapien
aatgtggtccatgagtgtcagagcc

SEQ ID NO: 3103711 - DNA, 25 bp, Homo sapien
gttggccatagtgttggagggcaca

SEQ ID NO: 3103712 - DNA, 25 bp, Homo sapien
aggttggccatagtgttggagggca

SEQ ID NO: 3103713 - DNA, 25 bp, Homo sapien
tgaggttggccatagtgttggaggg

SEQ ID NO: 3103714 - DNA, 25 bp, Homo sapien
gatgaggttggccatagtgttggag

SEQ ID NO: 3103715 - DNA, 25 bp, Homo sapien
tcctgtggcaggtgttcattacacc

SEQ ID NO: 3103716 - DNA, 25 bp, Homo sapien
cagacggcaagcctatcctgtggca

SEQ ID NO: 3103717 - DNA, 25 bp, Homo sapien
ggacataaatacctcccagatgctt

SEQ ID NO: 3103718 - DNA, 25 bp, Homo sapien
ctttcaggtaacagcagcacgcacg

SEQ ID NO: 3103719 - DNA, 25 bp, Homo sapien
taagcgccaagggagccacttcccc

SEQ ID NO: 3103720 - DNA, 25 bp, Homo sapien
aagcgccaagggagccacttcccct

SEQ ID NO: 3103721 - DNA, 25 bp, Homo sapien
ttaagcgccaagggagccacttccc

SEQ ID NO: 3103722 - DNA, 25 bp, Homo sapien
atcacggacagcgctccgctgccgc

SEQ ID NO: 3103723 - DNA, 25 bp, Homo sapien
tcacggacagcgctccgctgccgcc

SEQ ID NO: 3103724 - DNA, 25 bp, Homo sapien
catcacggacagcgctccgctgccg

SEQ ID NO: 3103725 - DNA, 25 bp, Homo sapien
ccgctcgggccagtctgcggagcat

SEQ ID NO: 3103726 - DNA, 25 bp, Homo sapien
gccggtcttcgccgtagtcgtcgtc

SEQ ID NO: 3103727 - DNA, 25 bp, Homo sapien
atgacgcacctcatggccggcccgg

SEQ ID NO: 3103728 - DNA, 25 bp, Homo sapien
ttgtcgctgcgcaggcccaccacgt

SEQ ID NO: 3103729 - DNA, 25 bp, Homo sapien
tactccccagcgaaggcggcgagag

SEQ ID NO: 3103730 - DNA, 25 bp, Homo sapien
ggtcggtgcggccagaattcctaga

SEQ ID NO: 3103731 - DNA, 25 bp, Homo sapien
tgcggccagaattcctagagctggg

SEQ ID NO: 3103732 - DNA, 25 bp, Homo sapien
cgagagcgacgtggtcggtgcggcc

SEQ ID NO: 3103733 - DNA, 25 bp, Homo sapien
tggtcccaaggacacccatgtgatg

SEQ ID NO: 3103734 - DNA, 25 bp, Homo sapien
ggaattgtaagtacccgcagggtca

SEQ ID NO: 3103735 - DNA, 25 bp, Homo sapien
tgtgaccctggctgcaactgagatc

SEQ ID NO: 3103736 - DNA, 25 bp, Homo sapien
gccctgggcgagcttttataacaca

SEQ ID NO: 3103737 - DNA, 25 bp, Homo sapien
tggccccgctgagataaagggaggc

SEQ ID NO: 3103738 - DNA, 25 bp, Homo sapien
tgtgcggattcctgtaacgctgggc

SEQ ID NO: 3103739 - DNA, 25 bp, Homo sapien
cagatcgcagctggagatagcggcc

SEQ ID NO: 3103740 - DNA, 25 bp, Homo sapien
tcctgtaacgctgggctgctggcag

SEQ ID NO: 3103741 - DNA, 25 bp, Homo sapien
actccatcagctcaccgtgggctag

SEQ ID NO: 3103742 - DNA, 25 bp, Homo sapien
atcagctcaccgtgggctagcggga

SEQ ID NO: 3103743 - DNA, 25 bp, Homo sapien
ctgcactccatcagctcaccgtggg

SEQ ID NO: 3103744 - DNA, 25 bp, Homo sapien
gtgggctagcgggagctcggcatgg

SEQ ID NO: 3103745 - DNA, 25 bp, Homo sapien
gccgtttgaattcctctttgtgaag

SEQ ID NO: 3103746 - DNA, 25 bp, Homo sapien
ctttgtgaagagcatgttctggtct

SEQ ID NO: 3103747 - DNA, 25 bp, Homo sapien
gcgttgcaaagatttcaccccaggg

SEQ ID NO: 3103748 - DNA, 25 bp, Homo sapien
gatccttgcgggttctgtgcgttgc

SEQ ID NO: 3103749 - DNA, 25 bp, Homo sapien
gggtctggcgttatttactgcggca

SEQ ID NO: 3103750 - DNA, 25 bp, Homo sapien
tctggcgttatttactgcggcagct

SEQ ID NO: 3103751 - DNA, 25 bp, Homo sapien
acgctggggtctggcgttatttact

SEQ ID NO: 3103752 - DNA, 25 bp, Homo sapien
tggcgttatttactgcggcagcttc

SEQ ID NO: 3103753 - DNA, 25 bp, Homo sapien
acagagggtcagatgccgggcctca

SEQ ID NO: 3103754 - DNA, 25 bp, Homo sapien
ggatctcgtttaccggcattggcct

SEQ ID NO: 3103755 - DNA, 25 bp, Homo sapien
ttcctgttgctaggcctggaccgag

SEQ ID NO: 3103756 - DNA, 25 bp, Homo sapien
gcagcgaggcctctaatctttcgga

SEQ ID NO: 3103757 - DNA, 25 bp, Homo sapien
cctgcacacttatcccagagatggg

SEQ ID NO: 3103758 - DNA, 25 bp, Homo sapien
gttgcccagcgcagagaaacagcat

SEQ ID NO: 3103759 - DNA, 25 bp, Homo sapien
gaagtctcaggagtttgggcacaga

SEQ ID NO: 3103760 - DNA, 25 bp, Homo sapien
cagagcgtcatggaaggtggccttc

SEQ ID NO: 3103761 - DNA, 25 bp, Homo sapien
gcgtcatcgcttaagaacctaattc

SEQ ID NO: 3103762 - DNA, 25 bp, Homo sapien
ctatgttggacaggttcctctcgaa

SEQ ID NO: 3103763 - DNA, 25 bp, Homo sapien
ttgccgagctgccctgggatccctg

SEQ ID NO: 3103764 - DNA, 25 bp, Homo sapien
tgattaggaacccaagagccccttc

SEQ ID NO: 3103765 - DNA, 25 bp, Homo sapien
aggacctcgaatggacgcctgggac

SEQ ID NO: 3103766 - DNA, 25 bp, Homo sapien
tgagagtcaggtgccttcctggacc

SEQ ID NO: 3103767 - DNA, 25 bp, Homo sapien
ggaagataactccaaggtcctcaat

SEQ ID NO: 3103768 - DNA, 25 bp, Homo sapien
aagacgccagcggtcctgagagtca

SEQ ID NO: 3103769 - DNA, 25 bp, Homo sapien
tgaggaccactccacggtggtgctg

SEQ ID NO: 3103770 - DNA, 25 bp, Homo sapien
gaccctgcctggtggtttgggctct

SEQ ID NO: 3103771 - DNA, 25 bp, Homo sapien
taaatggcttattgggaaccgacag

SEQ ID NO: 3103772 - DNA, 25 bp, Homo sapien
tggtcctcctagaagagagagtctg

SEQ ID NO: 3103773 - DNA, 25 bp, Homo sapien
cttcggaggcttcagcaaggcattg

SEQ ID NO: 3103774 - DNA, 25 bp, Homo sapien
gtgccccgcgttcccttggcctgat

SEQ ID NO: 3103775 - DNA, 25 bp, Homo sapien
ggcctgatccccgatcccgtgcacc

SEQ ID NO: 3103776 - DNA, 25 bp, Homo sapien
agcccgccgtgtctgctctcaagtg

SEQ ID NO: 3103777 - DNA, 25 bp, Homo sapien
ggggagcttcgtttatggcatccct

SEQ ID NO: 3103778 - DNA, 25 bp, Homo sapien
gtcggggagcttcgtttatggcatc

SEQ ID NO: 3103779 - DNA, 25 bp, Homo sapien
cctgggctccctccgttgagttgtg

SEQ ID NO: 3103780 - DNA, 25 bp, Homo sapien
ggctccctccgttgagttgtgttgg

SEQ ID NO: 3103781 - DNA, 25 bp, Homo sapien
caggctcgctccacaggaaaagctc

SEQ ID NO: 3103782 - DNA, 25 bp, Homo sapien
gctcttccaagagggagattccctg

SEQ ID NO: 3103783 - DNA, 25 bp, Homo sapien
cccaggctttgaagtcaggctcgct

SEQ ID NO: 3103784 - DNA, 25 bp, Homo sapien
tggtaattggcgcttcgattaacag

SEQ ID NO: 3103785 - DNA, 25 bp, Homo sapien
tgttcccacagccagaagttgccat

SEQ ID NO: 3103786 - DNA, 25 bp, Homo sapien
ctgttcccacagccagaagttgcca

SEQ ID NO: 3103787 - DNA, 25 bp, Homo sapien
cttcagctacagcttttccagtaaa

SEQ ID NO: 3103788 - DNA, 25 bp, Homo sapien
cagaaatccatacttcccgacaggc

SEQ ID NO: 3103789 - DNA, 25 bp, Homo sapien
actctgcgcggtcttggagcctcgg

SEQ ID NO: 3103790 - DNA, 25 bp, Homo sapien
tacagcttttccagtaaaaccactg

SEQ ID NO: 3103791 - DNA, 25 bp, Homo sapien
ggcactgcgtacctggagcccggct

SEQ ID NO: 3103792 - DNA, 25 bp, Homo sapien
ttgaactccagaagtcgctgcctgc

SEQ ID NO: 3103793 - DNA, 25 bp, Homo sapien
tgccctagggggctgttgaactcca

SEQ ID NO: 3103794 - DNA, 25 bp, Homo sapien
gcccggctttgcatccacaggtctg

SEQ ID NO: 3103795 - DNA, 25 bp, Homo sapien
ggccctgtcctaagcacactgcatg

SEQ ID NO: 3103796 - DNA, 25 bp, Homo sapien
acatgtcgatgtccctggtgaggct

SEQ ID NO: 3103797 - DNA, 25 bp, Homo sapien
agggccggttctcatggaatggaca

SEQ ID NO: 3103798 - DNA, 25 bp, Homo sapien
aaatgctggatcactagccccgggt

SEQ ID NO: 3103799 - DNA, 25 bp, Homo sapien
cacatgtatctgcaaatgaggcggg

SEQ ID NO: 3103800 - DNA, 25 bp, Homo sapien
gaacctggtgacttgtggacctgcg

SEQ ID NO: 3103801 - DNA, 25 bp, Homo sapien
tttaagctggctcaaggatccgtgc

SEQ ID NO: 3103802 - DNA, 25 bp, Homo sapien
tgactccaggtatctcccgacatga

SEQ ID NO: 3103803 - DNA, 25 bp, Homo sapien
ctaaagcaggagccgggagtagggc

SEQ ID NO: 3103804 - DNA, 25 bp, Homo sapien
aagcaggagccgggagtagggccca

SEQ ID NO: 3103805 - DNA, 25 bp, Homo sapien
taaagcaggagccgggagtagggcc

SEQ ID NO: 3103806 - DNA, 25 bp, Homo sapien
gcaggagccgggagtagggcccagg

SEQ ID NO: 3103807 - DNA, 25 bp, Homo sapien
tgcttgaagacagcctgtcccctct

SEQ ID NO: 3103808 - DNA, 25 bp, Homo sapien
ggaggaggcggctttccccaggtgc

SEQ ID NO: 3103809 - DNA, 25 bp, Homo sapien
cgacctcgtagttgactcctgggct

SEQ ID NO: 3103810 - DNA, 25 bp, Homo sapien
ggacctgggaggctctcctcatttc

SEQ ID NO: 3103811 - DNA, 25 bp, Homo sapien
gaagacccctgctgacctgtggcac

SEQ ID NO: 3103812 - DNA, 25 bp, Homo sapien
tgaagacccctgctgacctgtggca

SEQ ID NO: 3103813 - DNA, 25 bp, Homo sapien
ctgaagacccctgctgacctgtggc

SEQ ID NO: 3103814 - DNA, 25 bp, Homo sapien
agacccctgctgacctgtggcacca

SEQ ID NO: 3103815 - DNA, 25 bp, Homo sapien
cacgtctgaaagctgggacatggca

SEQ ID NO: 3103816 - DNA, 25 bp, Homo sapien
cccgagttctgtgacccgctccggg

SEQ ID NO: 3103817 - DNA, 25 bp, Homo sapien
cgagttctgtgacccgctccgggga

SEQ ID NO: 3103818 - DNA, 25 bp, Homo sapien
ggagcggggcatctcatgtcctctc

SEQ ID NO: 3103819 - DNA, 25 bp, Homo sapien
tttgcagccgccaatggagtgatcg

SEQ ID NO: 3103820 - DNA, 25 bp, Homo sapien
tacacactgcaactcggatgagcct

SEQ ID NO: 3103821 - DNA, 25 bp, Homo sapien
catcgcctgatgagtgcacggatac

SEQ ID NO: 3103822 - DNA, 25 bp, Homo sapien
caagtcagcccgtctcagagaacgt

SEQ ID NO: 3103823 - DNA, 25 bp, Homo sapien
ttttggtgagtcaatatcgtgccac

SEQ ID NO: 3103824 - DNA, 25 bp, Homo sapien
tttggtgagtcaatatcgtgccact

SEQ ID NO: 3103825 - DNA, 25 bp, Homo sapien
gttttggtgagtcaatatcgtgcca

SEQ ID NO: 3103826 - DNA, 25 bp, Homo sapien
tcatcggaagtccccctccctcatc

SEQ ID NO: 3103827 - DNA, 25 bp, Homo sapien
catcggaagtccccctccctcatcc

SEQ ID NO: 3103828 - DNA, 25 bp, Homo sapien
tggacggctgcagccgtggactccg

SEQ ID NO: 3103829 - DNA, 25 bp, Homo sapien
tgtggccagtactcatggctcctct

SEQ ID NO: 3103830 - DNA, 25 bp, Homo sapien
ctccaggcatgtggccagtactcat

SEQ ID NO: 3103831 - DNA, 25 bp, Homo sapien
gaggaagtgctttgttgatctggag

SEQ ID NO: 3103832 - DNA, 25 bp, Homo sapien
aggccgggatagcagctcaggcccc

SEQ ID NO: 3103833 - DNA, 25 bp, Homo sapien
ggccgggatagcagctcaggcccca

SEQ ID NO: 3103834 - DNA, 25 bp, Homo sapien
gaggccgggatagcagctcaggccc

SEQ ID NO: 3103835 - DNA, 25 bp, Homo sapien
ggaggccgggatagcagctcaggcc

SEQ ID NO: 3103836 - DNA, 25 bp, Homo sapien
cagtgacgccgtgatccggaatttc

SEQ ID NO: 3103837 - DNA, 25 bp, Homo sapien
ggcagctcagtgtttctaacccaca

SEQ ID NO: 3103838 - DNA, 25 bp, Homo sapien
tctattgaataagagtgagtcacca

SEQ ID NO: 3103839 - DNA, 25 bp, Homo sapien
tcagaaatgagatcactgggtgggt

SEQ ID NO: 3103840 - DNA, 25 bp, Homo sapien
cctggtgtgggcacaaggtctcttg

SEQ ID NO: 3103841 - DNA, 25 bp, Homo sapien
cagctccttctcttagactggagag

SEQ ID NO: 3103842 - DNA, 25 bp, Homo sapien
ggcacaaggtctcttgctgcagctg

SEQ ID NO: 3103843 - DNA, 25 bp, Homo sapien
tcaggtctgaccagctctgtttcca

SEQ ID NO: 3103844 - DNA, 25 bp, Homo sapien
gaggatttcacaaacgcctggcctg

SEQ ID NO: 3103845 - DNA, 25 bp, Homo sapien
caatcagagcgctcaggagtgggaa

SEQ ID NO: 3103846 - DNA, 25 bp, Homo sapien
tgttaactggaagagcccaacgtct

SEQ ID NO: 3103847 - DNA, 25 bp, Homo sapien
cctgaatagtgctgtgaataccggc

SEQ ID NO: 3103848 - DNA, 25 bp, Homo sapien
agagtccaggctttctgagcagccg

SEQ ID NO: 3103849 - DNA, 25 bp, Homo sapien
tcacggccgggaaagagtccaggct

SEQ ID NO: 3103850 - DNA, 25 bp, Homo sapien
cacggccgggaaagagtccaggctt

SEQ ID NO: 3103851 - DNA, 25 bp, Homo sapien
gtccaggctttctgagcagccgccc

SEQ ID NO: 3103852 - DNA, 25 bp, Homo sapien
ccccgtactcggcgcggacattctt

SEQ ID NO: 3103853 - DNA, 25 bp, Homo sapien
tactcggcgcggacattcttcgcat

SEQ ID NO: 3103854 - DNA, 25 bp, Homo sapien
ccgtactcggcgcggacattcttcg

SEQ ID NO: 3103855 - DNA, 25 bp, Homo sapien
ccgcggcgatgcgggcccgggaggt

SEQ ID NO: 3103856 - DNA, 25 bp, Homo sapien
ttcctggcagagggcggcctcgagg

SEQ ID NO: 3103857 - DNA, 25 bp, Homo sapien
gcctcgaggcgacgcgcctgcccgc

SEQ ID NO: 3103858 - DNA, 25 bp, Homo sapien
ccgcggtgtccgggaagtgactctt

SEQ ID NO: 3103859 - DNA, 25 bp, Homo sapien
gcggtgtccgggaagtgactcttcc

SEQ ID NO: 3103860 - DNA, 25 bp, Homo sapien
tctagaagcaaggtaatagggcaca

SEQ ID NO: 3103861 - DNA, 25 bp, Homo sapien
taagactaggacacatcgtgcaggc

SEQ ID NO: 3103862 - DNA, 25 bp, Homo sapien
cattcttggctctagcctcaggagg

SEQ ID NO: 3103863 - DNA, 25 bp, Homo sapien
ggtggagtcttacagctctagaagc

SEQ ID NO: 3103864 - DNA, 25 bp, Homo sapien
tgggtttacattgccagtctggagt

SEQ ID NO: 3103865 - DNA, 25 bp, Homo sapien
ggtttacattgccagtctggagttc

SEQ ID NO: 3103866 - DNA, 25 bp, Homo sapien
tttacattgccagtctggagttcct

SEQ ID NO: 3103867 - DNA, 25 bp, Homo sapien
ctgggtttacattgccagtctggag

SEQ ID NO: 3103868 - DNA, 25 bp, Homo sapien
tcctaatagcctcaagggcctgagt

SEQ ID NO: 3103869 - DNA, 25 bp, Homo sapien
tcttagccagacatagtcaggaggc

SEQ ID NO: 3103870 - DNA, 25 bp, Homo sapien
ggtgaaagatgtcccgtctcctcca

SEQ ID NO: 3103871 - DNA, 25 bp, Homo sapien
tcaggaggcacagagtagaatcccc

SEQ ID NO: 3103872 - DNA, 25 bp, Homo sapien
caccaggtagactttggaacctgtg

SEQ ID NO: 3103873 - DNA, 25 bp, Homo sapien
ttttcggtgactgtcccggaggaga

SEQ ID NO: 3103874 - DNA, 25 bp, Homo sapien
accaggatggttcccttcaggtcac

SEQ ID NO: 3103875 - DNA, 25 bp, Homo sapien
tcaggcaccaggtagactttggaac

SEQ ID NO: 3103876 - DNA, 25 bp, Homo sapien
tagttcagcattcccgaagtgtccc

SEQ ID NO: 3103877 - DNA, 25 bp, Homo sapien
gggggtgtgaccatttccttcgcca

SEQ ID NO: 3103878 - DNA, 25 bp, Homo sapien
tcaaagagcaaacaagttccgttgg

SEQ ID NO: 3103879 - DNA, 25 bp, Homo sapien
cacaaccagctcaggtttaaaccaa

SEQ ID NO: 3103880 - DNA, 25 bp, Homo sapien
aggagaatccacttgtggttgctat

SEQ ID NO: 3103881 - DNA, 25 bp, Homo sapien
gagaatccacttgtggttgctatcg

SEQ ID NO: 3103882 - DNA, 25 bp, Homo sapien
aatccacttgtggttgctatcgtcc

SEQ ID NO: 3103883 - DNA, 25 bp, Homo sapien
tccacttgtggttgctatcgtccca

SEQ ID NO: 3103884 - DNA, 25 bp, Homo sapien
acacattccaggtccgcctgccaca

SEQ ID NO: 3103885 - DNA, 25 bp, Homo sapien
agctggagactcaggtggtactccc

SEQ ID NO: 3103886 - DNA, 25 bp, Homo sapien
cacattccaggtccgcctgccacat

SEQ ID NO: 3103887 - DNA, 25 bp, Homo sapien
gagactcaggtggtactcccccttc

SEQ ID NO: 3103888 - DNA, 25 bp, Homo sapien
cttgtgccatgtgccacggaggaga

SEQ ID NO: 3103889 - DNA, 25 bp, Homo sapien
ttcttgtgcttgtgccatgtgccac

SEQ ID NO: 3103890 - DNA, 25 bp, Homo sapien
gacccatgccctttgcgccctttac

SEQ ID NO: 3103891 - DNA, 25 bp, Homo sapien
tgtgcttgtgccatgtgccacggag

SEQ ID NO: 3103892 - DNA, 25 bp, Homo sapien
gacggtcttccgacagagatgctga

SEQ ID NO: 3103893 - DNA, 25 bp, Homo sapien
cgggaaacttgctgtgggtgaccat

SEQ ID NO: 3103894 - DNA, 25 bp, Homo sapien
gatgcgcaggttcttggtcccagac

SEQ ID NO: 3103895 - DNA, 25 bp, Homo sapien
ccggcagctgggtgactttctcata

SEQ ID NO: 3103896 - DNA, 25 bp, Homo sapien
gagccagcgtggatctgcgcggcgg

SEQ ID NO: 3103897 - DNA, 25 bp, Homo sapien
gccagcgtggatctgcgcggcggcg

SEQ ID NO: 3103898 - DNA, 25 bp, Homo sapien
ccagcgtggatctgcgcggcggcgg

SEQ ID NO: 3103899 - DNA, 25 bp, Homo sapien
cagccggagtattccgggaacctgg

SEQ ID NO: 3103900 - DNA, 25 bp, Homo sapien
gggaacctgggatctccggcttcca

SEQ ID NO: 3103901 - DNA, 25 bp, Homo sapien
actcgcgcgcggaagttaggtctcc

SEQ ID NO: 3103902 - DNA, 25 bp, Homo sapien
gagcgcgttgagtgcccggaaccct

SEQ ID NO: 3103903 - DNA, 25 bp, Homo sapien
tccccaaggcgacgcggcggcgaga

SEQ ID NO: 3103904 - DNA, 25 bp, Homo sapien
cggcgagacggccagcggtggcccg

SEQ ID NO: 3103905 - DNA, 25 bp, Homo sapien
ctggtcccgaatcgaagtctccgtc

SEQ ID NO: 3103906 - DNA, 25 bp, Homo sapien
ccgaatcgaagtctccgtccttggg

SEQ ID NO: 3103907 - DNA, 25 bp, Homo sapien
ggagcagggagtccaagtcggagcc

SEQ ID NO: 3103908 - DNA, 25 bp, Homo sapien
cttcgcgcgcgcgtccctcgagctt

SEQ ID NO: 3103909 - DNA, 25 bp, Homo sapien
gcgtccctcgagcttcccctgggcg

SEQ ID NO: 3103910 - DNA, 25 bp, Homo sapien
ttggcggccgtgaagtccacaaagg

SEQ ID NO: 3103911 - DNA, 25 bp, Homo sapien
gtgaacacaggctcgccgacccggg

SEQ ID NO: 3103912 - DNA, 25 bp, Homo sapien
ggtggtcgcgggaagccgtggcatg

SEQ ID NO: 3103913 - DNA, 25 bp, Homo sapien
cgcggggtggtcgcgggaagccgtg

SEQ ID NO: 3103914 - DNA, 25 bp, Homo sapien
ggtgaacacaggctcgccgacccgg

SEQ ID NO: 3103915 - DNA, 25 bp, Homo sapien
tctttcctgcttcgcataggggcgg

SEQ ID NO: 3103916 - DNA, 25 bp, Homo sapien
ctgggatggcccgtgggactaacct

SEQ ID NO: 3103917 - DNA, 25 bp, Homo sapien
cgtgggactaaccttgcagcctgca

SEQ ID NO: 3103918 - DNA, 25 bp, Homo sapien
caggttgaccccgagccctctcttt

SEQ ID NO: 3103919 - DNA, 25 bp, Homo sapien
gccttctcggattcctcgttccctc

SEQ ID NO: 3103920 - DNA, 25 bp, Homo sapien
cttctcggattcctcgttccctctg

SEQ ID NO: 3103921 - DNA, 25 bp, Homo sapien
tctcggattcctcgttccctctggg

SEQ ID NO: 3103922 - DNA, 25 bp, Homo sapien
cgccttctcggattcctcgttccct

SEQ ID NO: 3103923 - DNA, 25 bp, Homo sapien
cagcagggcagttctgggaagtgag

SEQ ID NO: 3103924 - DNA, 25 bp, Homo sapien
gggaagtgaggctgtggtgaaccat

SEQ ID NO: 3103925 - DNA, 25 bp, Homo sapien
tgggaagtgaggctgtggtgaacca

SEQ ID NO: 3103926 - DNA, 25 bp, Homo sapien
gggcagcagggcagttctgggaagt

SEQ ID NO: 3103927 - DNA, 25 bp, Homo sapien
ggatgctctgcccaaaaggcatttc

SEQ ID NO: 3103928 - DNA, 25 bp, Homo sapien
cttctttgtggcgagggagccattg

SEQ ID NO: 3103929 - DNA, 25 bp, Homo sapien
gctctgcccaaaaggcatttccaga

SEQ ID NO: 3103930 - DNA, 25 bp, Homo sapien
gggcttctttgtggcgagggagcca

SEQ ID NO: 3103931 - DNA, 25 bp, Homo sapien
cacaggcgcgatctcgttactgacc

SEQ ID NO: 3103932 - DNA, 25 bp, Homo sapien
cgttactgacctgcatgagaatttt

SEQ ID NO: 3103933 - DNA, 25 bp, Homo sapien
gcatgagaattttcacctgtccctt

SEQ ID NO: 3103934 - DNA, 25 bp, Homo sapien
tgagaattttcacctgtcccttttc

SEQ ID NO: 3103935 - DNA, 25 bp, Homo sapien
gagcacacaaagattcatgagctcg

SEQ ID NO: 3103936 - DNA, 25 bp, Homo sapien
gcacacaaagattcatgagctcgcc

SEQ ID NO: 3103937 - DNA, 25 bp, Homo sapien
gttctggggccagatcctattcaca

SEQ ID NO: 3103938 - DNA, 25 bp, Homo sapien
acacaaagattcatgagctcgcctt

SEQ ID NO: 3103939 - DNA, 25 bp, Homo sapien
ggaaccatgcaatggatggcctcat

SEQ ID NO: 3103940 - DNA, 25 bp, Homo sapien
aggatgataaccaggctcccatagc

SEQ ID NO: 3103941 - DNA, 25 bp, Homo sapien
tgacggtgtagccatacagcaagtg

SEQ ID NO: 3103942 - DNA, 25 bp, Homo sapien
caggaacagtgcaaaagtggaacca

SEQ ID NO: 3103943 - DNA, 25 bp, Homo sapien
tctcctgggttgctatgtgccaagg

SEQ ID NO: 3103944 - DNA, 25 bp, Homo sapien
tctgcctcagccacgggcggctaat

SEQ ID NO: 3103945 - DNA, 25 bp, Homo sapien
caagttgaacttgccctctcctggg

SEQ ID NO: 3103946 - DNA, 25 bp, Homo sapien
tgtaccctccatggtatgtcatatg

SEQ ID NO: 3103947 - DNA, 25 bp, Homo sapien
gtaaaacaatactgcggccatttcc

SEQ ID NO: 3103948 - DNA, 25 bp, Homo sapien
tctgatgtgcacacgtgtccgtatt

SEQ ID NO: 3103949 - DNA, 25 bp, Homo sapien
tacctaaatggtgttcacaattcca

SEQ ID NO: 3103950 - DNA, 25 bp, Homo sapien
caaaacagcaccagtgtcactcctg

SEQ ID NO: 3103951 - DNA, 25 bp, Homo sapien
actgaagtgagttgcccggtggccc

SEQ ID NO: 3103952 - DNA, 25 bp, Homo sapien
ctgtgttccccgtcgctggagtgca

SEQ ID NO: 3103953 - DNA, 25 bp, Homo sapien
gccagcagaggtattggcccagcca

SEQ ID NO: 3103954 - DNA, 25 bp, Homo sapien
ccctactgggcgctaagattgttgt

SEQ ID NO: 3103955 - DNA, 25 bp, Homo sapien
ctgggctcaagtaagattgccgtcc

SEQ ID NO: 3103956 - DNA, 25 bp, Homo sapien
taagattgccgtcctgggattagag

SEQ ID NO: 3103957 - DNA, 25 bp, Homo sapien
gctgctgcagcggcctgcttttctt

SEQ ID NO: 3103958 - DNA, 25 bp, Homo sapien
ctcaagtaagattgccgtcctggga

SEQ ID NO: 3103959 - DNA, 25 bp, Homo sapien
ctctggttccgatgtgcttggttac

SEQ ID NO: 3103960 - DNA, 25 bp, Homo sapien
gctccactggctttaatctgcccca

SEQ ID NO: 3103961 - DNA, 25 bp, Homo sapien
caccagttcctgtaaagaataagtc

SEQ ID NO: 3103962 - DNA, 25 bp, Homo sapien
cacaggtgcacaggtgaagggctga

SEQ ID NO: 3103963 - DNA, 25 bp, Homo sapien
tccatgcggtccacaggaatggcct

SEQ ID NO: 3103964 - DNA, 25 bp, Homo sapien
tacacgggacactcatagatgttct

SEQ ID NO: 3103965 - DNA, 25 bp, Homo sapien
gcttcagcgatgactccagtctggg

SEQ ID NO: 3103966 - DNA, 25 bp, Homo sapien
gtcagctctttcagccgcgcttcag

SEQ ID NO: 3103967 - DNA, 25 bp, Homo sapien
ctgcagggacagtatggctgagggt

SEQ ID NO: 3103968 - DNA, 25 bp, Homo sapien
ggcctgcatgttgtaactaccccgt

SEQ ID NO: 3103969 - DNA, 25 bp, Homo sapien
ggaacagctcagctaaagccctcgg

SEQ ID NO: 3103970 - DNA, 25 bp, Homo sapien
tcagtggcaggaagtcataactcca

SEQ ID NO: 3103971 - DNA, 25 bp, Homo sapien
gagctgggctctaccccaaaaggct

SEQ ID NO: 3103972 - DNA, 25 bp, Homo sapien
gacagacagacacatcttgtccagg

SEQ ID NO: 3103973 - DNA, 25 bp, Homo sapien
tgaagagtccgtacacgtaggagcc

SEQ ID NO: 3103974 - DNA, 25 bp, Homo sapien
aaagtctgtcgtccaggcctcgagt

SEQ ID NO: 3103975 - DNA, 25 bp, Homo sapien
ttttcttggtcacctcgacagacag

SEQ ID NO: 3103976 - DNA, 25 bp, Homo sapien
aggagctgatggaagctgctctgcg

SEQ ID NO: 3103977 - DNA, 25 bp, Homo sapien
ctttgagggtcgcttgaggaggagc

SEQ ID NO: 3103978 - DNA, 25 bp, Homo sapien
gctgatggaagctgctctgcggcct

SEQ ID NO: 3103979 - DNA, 25 bp, Homo sapien
tggaagctgctctgcggcctggctt

SEQ ID NO: 3103980 - DNA, 25 bp, Homo sapien
cacgtatcaggcacggtgtcataga

SEQ ID NO: 3103981 - DNA, 25 bp, Homo sapien
cgtcggtcgtgatggtcagttctcc

SEQ ID NO: 3103982 - DNA, 25 bp, Homo sapien
agcaggtctgcgtaccaggccgcca

SEQ ID NO: 3103983 - DNA, 25 bp, Homo sapien
aagagagccgtggacagatcttcca

SEQ ID NO: 3103984 - DNA, 25 bp, Homo sapien
gcaccagccccagtgcgtgtcatga

SEQ ID NO: 3103985 - DNA, 25 bp, Homo sapien
catgagttgtcaacacagtgtggct

SEQ ID NO: 3103986 - DNA, 25 bp, Homo sapien
ccagtgcgtgtcatgagttgtcaac

SEQ ID NO: 3103987 - DNA, 25 bp, Homo sapien
tgcgtgtcatgagttgtcaacacag

SEQ ID NO: 3103988 - DNA, 25 bp, Homo sapien
gaacggcgcatttcgttggtcagga

SEQ ID NO: 3103989 - DNA, 25 bp, Homo sapien
tcttgaaaggcgactaccacgtagg

SEQ ID NO: 3103990 - DNA, 25 bp, Homo sapien
gatctcagccatgttgaaagtctcc

SEQ ID NO: 3103991 - DNA, 25 bp, Homo sapien
gaaagtctccggaatcttctccagg

SEQ ID NO: 3103992 - DNA, 25 bp, Homo sapien
ctggaagccagtccccggacagccc

SEQ ID NO: 3103993 - DNA, 25 bp, Homo sapien
gggtcagggagcctgcccaaaatgt

SEQ ID NO: 3103994 - DNA, 25 bp, Homo sapien
tcagggagcctgcccaaaatgttcc

SEQ ID NO: 3103995 - DNA, 25 bp, Homo sapien
ggtcagggagcctgcccaaaatgtt

SEQ ID NO: 3103996 - DNA, 25 bp, Homo sapien
agggagcctgcccaaaatgttccca

SEQ ID NO: 3103997 - DNA, 25 bp, Homo sapien
gccattgtggccactgagcggctct

SEQ ID NO: 3103998 - DNA, 25 bp, Homo sapien
cggctgcccggtgcgagctgctact

SEQ ID NO: 3103999 - DNA, 25 bp, Homo sapien
gagtacctgcctgcacatccggctg

SEQ ID NO: 3104000 - DNA, 25 bp, Homo sapien
tgcccggtgcgagctgctactgctg

SEQ ID NO: 3104001 - DNA, 25 bp, Homo sapien
tgcagctgccacgtctgaggacctg

SEQ ID NO: 3104002 - DNA, 25 bp, Homo sapien
tgaggacctgctgaccagcctgcgg

SEQ ID NO: 3104003 - DNA, 25 bp, Homo sapien
ggcagagtgtacctcaccagcaagt

SEQ ID NO: 3104004 - DNA, 25 bp, Homo sapien
gtttctgatacccaagcccaaggct

SEQ ID NO: 3104005 - DNA, 25 bp, Homo sapien
tctcgcttgggagcagtttcaaaga

SEQ ID NO: 3104006 - DNA, 25 bp, Homo sapien
cgcttgggagcagtttcaaagatcc

SEQ ID NO: 3104007 - DNA, 25 bp, Homo sapien
tcgcttgggagcagtttcaaagatc

SEQ ID NO: 3104008 - DNA, 25 bp, Homo sapien
ctcagttctagatcctcccccttcc

SEQ ID NO: 3104009 - DNA, 25 bp, Homo sapien
aggacagtgcggaacagcttctctg

SEQ ID NO: 3104010 - DNA, 25 bp, Homo sapien
gtccgtctcttttggctgcatttcc

SEQ ID NO: 3104011 - DNA, 25 bp, Homo sapien
atttccaggacagtgcggaacagct

SEQ ID NO: 3104012 - DNA, 25 bp, Homo sapien
ttccaggacagtgcggaacagcttc

SEQ ID NO: 3104013 - DNA, 25 bp, Homo sapien
tgcaggccatacagatagggactct

SEQ ID NO: 3104014 - DNA, 25 bp, Homo sapien
tctcatcgatgtattcgtggtaacc

SEQ ID NO: 3104015 - DNA, 25 bp, Homo sapien
ctctgcgttggggtgcaggccatac

SEQ ID NO: 3104016 - DNA, 25 bp, Homo sapien
gggcaggttctcatcgatgtattcg

SEQ ID NO: 3104017 - DNA, 25 bp, Homo sapien
aaaaggtagcggagatcgtcccagg

SEQ ID NO: 3104018 - DNA, 25 bp, Homo sapien
gatttcaccaaaaaggtagcggaga

SEQ ID NO: 3104019 - DNA, 25 bp, Homo sapien
gcacagccgacggtcccagtcatct

SEQ ID NO: 3104020 - DNA, 25 bp, Homo sapien
tctccgtccggatgtattcagccag

SEQ ID NO: 3104021 - DNA, 25 bp, Homo sapien
cacacgccaggcgaccacacgcttc

SEQ ID NO: 3104022 - DNA, 25 bp, Homo sapien
gagcacacgccaggcgaccacacgc

SEQ ID NO: 3104023 - DNA, 25 bp, Homo sapien
cagagcacacgccaggcgaccacac

SEQ ID NO: 3104024 - DNA, 25 bp, Homo sapien
acgccaggcgaccacacgcttccca

SEQ ID NO: 3104025 - DNA, 25 bp, Homo sapien
ggtcatcacaactgtttgcgggctg

SEQ ID NO: 3104026 - DNA, 25 bp, Homo sapien
tctggtcatcacaactgtttgcggg

SEQ ID NO: 3104027 - DNA, 25 bp, Homo sapien
ctgtctggtcatcacaactgtttgc

SEQ ID NO: 3104028 - DNA, 25 bp, Homo sapien
catcacaactgtttgcgggctgctt

SEQ ID NO: 3104029 - DNA, 25 bp, Homo sapien
agtgtgctaacaagcagaagagctg

SEQ ID NO: 3104030 - DNA, 25 bp, Homo sapien
gggcaggtggcgtggagtgtgctaa

SEQ ID NO: 3104031 - DNA, 25 bp, Homo sapien
caggtggcgtggagtgtgctaacaa

SEQ ID NO: 3104032 - DNA, 25 bp, Homo sapien
gcgtggagtgtgctaacaagcagaa

SEQ ID NO: 3104033 - DNA, 25 bp, Homo sapien
gagatggtgaggtccccgttgttga

SEQ ID NO: 3104034 - DNA, 25 bp, Homo sapien
ccaggtagttgtagagcacgttgat

SEQ ID NO: 3104035 - DNA, 25 bp, Homo sapien
gttccagccctgggcgccgaacttg

SEQ ID NO: 3104036 - DNA, 25 bp, Homo sapien
caccacagcgtggaagtagcacagg

SEQ ID NO: 3104037 - DNA, 25 bp, Homo sapien
gcgctgatgaacacccggtagtcct

SEQ ID NO: 3104038 - DNA, 25 bp, Homo sapien
ttgtccagtgttcccagccaccggg

SEQ ID NO: 3104039 - DNA, 25 bp, Homo sapien
gctccgcgctgatgaacacccggta

SEQ ID NO: 3104040 - DNA, 25 bp, Homo sapien
tgaacacccggtagtcctcatggct

SEQ ID NO: 3104041 - DNA, 25 bp, Homo sapien
gagttttccattgtctatggtaaac

SEQ ID NO: 3104042 - DNA, 25 bp, Homo sapien
cattgtctatggtaaaccctagttt

SEQ ID NO: 3104043 - DNA, 25 bp, Homo sapien
tgccccagggacacattatggagtt

SEQ ID NO: 3104044 - DNA, 25 bp, Homo sapien
acgtccagggcgttctcagccacca

SEQ ID NO: 3104045 - DNA, 25 bp, Homo sapien
ggcttccacgtctttcaaggggtca

SEQ ID NO: 3104046 - DNA, 25 bp, Homo sapien
tccacgaacttgctgcccatctttt

SEQ ID NO: 3104047 - DNA, 25 bp, Homo sapien
tcgtaggacttagaaaactcaacac

SEQ ID NO: 3104048 - DNA, 25 bp, Homo sapien
ggatgaagaagattgacgtggaggg

SEQ ID NO: 3104049 - DNA, 25 bp, Homo sapien
tcaaagtcctcgaatgctgatgggt

SEQ ID NO: 3104050 - DNA, 25 bp, Homo sapien
gaccccaggctcgtttctgtgctaa

SEQ ID NO: 3104051 - DNA, 25 bp, Homo sapien
ttgactttacgttttgccacagagg

SEQ ID NO: 3104052 - DNA, 25 bp, Homo sapien
tgagtgtcctttgggaaacctggct

SEQ ID NO: 3104053 - DNA, 25 bp, Homo sapien
taggtcatgcgatctggccgcaggc

SEQ ID NO: 3104054 - DNA, 25 bp, Homo sapien
cagatccttcgatgtcactgtccag

SEQ ID NO: 3104055 - DNA, 25 bp, Homo sapien
cactgtccagatttttgaactcatc

SEQ ID NO: 3104056 - DNA, 25 bp, Homo sapien
ttgaactcatccatctccgagaggg

SEQ ID NO: 3104057 - DNA, 25 bp, Homo sapien
ggtcccgagagccttcctgtacagt

SEQ ID NO: 3104058 - DNA, 25 bp, Homo sapien
gagaggccattaccctccgaggaaa

SEQ ID NO: 3104059 - DNA, 25 bp, Homo sapien
gagccttcctgtacagttcattcaa

SEQ ID NO: 3104060 - DNA, 25 bp, Homo sapien
cagttcattcaaggaggagaggcca

SEQ ID NO: 3104061 - DNA, 25 bp, Homo sapien
ggaagtccactggtgagaccactcc

SEQ ID NO: 3104062 - DNA, 25 bp, Homo sapien
tggtgagaccactccggccttaaaa

SEQ ID NO: 3104063 - DNA, 25 bp, Homo sapien
tgatcccgccccagccttgatgctg

SEQ ID NO: 3104064 - DNA, 25 bp, Homo sapien
ggaaccgcaggaggaaatccagctc

SEQ ID NO: 3104065 - DNA, 25 bp, Homo sapien
agaaacatcagtcaccccacagtgg

SEQ ID NO: 3104066 - DNA, 25 bp, Homo sapien
gcaggactatttactcagcacaact

SEQ ID NO: 3104067 - DNA, 25 bp, Homo sapien
aaatatcaactaggagagccccagg

SEQ ID NO: 3104068 - DNA, 25 bp, Homo sapien
tagctcccattggaatactgtgcca

SEQ ID NO: 3104069 - DNA, 25 bp, Homo sapien
gagtaggtgatctcgtccgtcaggt

SEQ ID NO: 3104070 - DNA, 25 bp, Homo sapien
tgaaacgtaacttgtgccaggaaaa

SEQ ID NO: 3104071 - DNA, 25 bp, Homo sapien
aaatgagtttgtccctctcgaagag

SEQ ID NO: 3104072 - DNA, 25 bp, Homo sapien
tccccgggccgtgtacatgtagacg

SEQ ID NO: 3104073 - DNA, 25 bp, Homo sapien
tgtggtggcctccagtttgttttgt

SEQ ID NO: 3104074 - DNA, 25 bp, Homo sapien
ggatccgccaccgagagccatggag

SEQ ID NO: 3104075 - DNA, 25 bp, Homo sapien
gccaggccatccagtttgttttgat

SEQ ID NO: 3104076 - DNA, 25 bp, Homo sapien
tgttttgattgggttgtgagtgcct

SEQ ID NO: 3104077 - DNA, 25 bp, Homo sapien
gggagaatgggtgtaggactgatgg

SEQ ID NO: 3104078 - DNA, 25 bp, Homo sapien
tggcactgcccgatggctgtgtggg

SEQ ID NO: 3104079 - DNA, 25 bp, Homo sapien
ctgcccgatggctgtgtgggcaaca

SEQ ID NO: 3104080 - DNA, 25 bp, Homo sapien
ggagaatgggtgtaggactgatggg

SEQ ID NO: 3104081 - DNA, 25 bp, Homo sapien
gatcgttcagtatgaagtagagcag

SEQ ID NO: 3104082 - DNA, 25 bp, Homo sapien
gggttgattttgttgagatcgttca

SEQ ID NO: 3104083 - DNA, 25 bp, Homo sapien
cggtagttctctctcgcttcgttga

SEQ ID NO: 3104084 - DNA, 25 bp, Homo sapien
gcttcgttgattttaacttctgtga

SEQ ID NO: 3104085 - DNA, 25 bp, Homo sapien
cgttttgagacttggtgaggtttgc

SEQ ID NO: 3104086 - DNA, 25 bp, Homo sapien
tggtctccagattctccaccaaggc

SEQ ID NO: 3104087 - DNA, 25 bp, Homo sapien
caccaaggccgtgtctcccagaaag

SEQ ID NO: 3104088 - DNA, 25 bp, Homo sapien
cgggccaggagcgaatcttccagct

SEQ ID NO: 3104089 - DNA, 25 bp, Homo sapien
gggtggtactccacctccttgtcac

SEQ ID NO: 3104090 - DNA, 25 bp, Homo sapien
caagagttggtcctcgagtccatcc

SEQ ID NO: 3104091 - DNA, 25 bp, Homo sapien
tgggcgctctttggccaccacagcg

SEQ ID NO: 3104092 - DNA, 25 bp, Homo sapien
aagtacttggtgtgtaggatcaggc

SEQ ID NO: 3104093 - DNA, 25 bp, Homo sapien
ggagccctgaccgaaaccttctgct

SEQ ID NO: 3104094 - DNA, 25 bp, Homo sapien
tttacacccctctggcgatactctg

SEQ ID NO: 3104095 - DNA, 25 bp, Homo sapien
tccctggcctgtgacgtgggccctt

SEQ ID NO: 3104096 - DNA, 25 bp, Homo sapien
tctttccttgggtgatcaggctcat

SEQ ID NO: 3104097 - DNA, 25 bp, Homo sapien
agccacggaggcggaaacaactcac

SEQ ID NO: 3104098 - DNA, 25 bp, Homo sapien
caagccacggaggcggaaacaactc

SEQ ID NO: 3104099 - DNA, 25 bp, Homo sapien
tcaagccacggaggcggaaacaact

SEQ ID NO: 3104100 - DNA, 25 bp, Homo sapien
aagccacggaggcggaaacaactca

SEQ ID NO: 3104101 - DNA, 25 bp, Homo sapien
gttctcaatgagcaaggtgtcccct

SEQ ID NO: 3104102 - DNA, 25 bp, Homo sapien
gagatggcctgctcgatgacatcca

SEQ ID NO: 3104103 - DNA, 25 bp, Homo sapien
tttaatcgtgttcctgcccagtaga

SEQ ID NO: 3104104 - DNA, 25 bp, Homo sapien
ggtccacggtttcgccgatgttctc

SEQ ID NO: 3104105 - DNA, 25 bp, Homo sapien
acgtccgcgtcatctgtcagcaggc

SEQ ID NO: 3104106 - DNA, 25 bp, Homo sapien
agctgggcgtccacgatcagcggcc

SEQ ID NO: 3104107 - DNA, 25 bp, Homo sapien
tcttctgtcccaggcggatggcttt

SEQ ID NO: 3104108 - DNA, 25 bp, Homo sapien
ggctcaagggatccaggccattcgt

SEQ ID NO: 3104109 - DNA, 25 bp, Homo sapien
cagctcattccggtatttcttggtg

SEQ ID NO: 3104110 - DNA, 25 bp, Homo sapien
ccacgtaggacacgaaggcagagat

SEQ ID NO: 3104111 - DNA, 25 bp, Homo sapien
taagttatgtatgtaagggatccag

SEQ ID NO: 3104112 - DNA, 25 bp, Homo sapien
gaatttctccatcagctcattccgg

SEQ ID NO: 3104113 - DNA, 25 bp, Homo sapien
ttccgatgctaatcccccgaccagc

SEQ ID NO: 3104114 - DNA, 25 bp, Homo sapien
ctcagcccagcggatgttttccgat

SEQ ID NO: 3104115 - DNA, 25 bp, Homo sapien
agcccagcggatgttttccgatgct

SEQ ID NO: 3104116 - DNA, 25 bp, Homo sapien
tgttttccgatgctaatcccccgac

SEQ ID NO: 3104117 - DNA, 25 bp, Homo sapien
tgttcgccagtaagatcaccctgtt

SEQ ID NO: 3104118 - DNA, 25 bp, Homo sapien
caaacgctgaggttaggttgctcag

SEQ ID NO: 3104119 - DNA, 25 bp, Homo sapien
tgttcgtggcatcggcctcttgctg

SEQ ID NO: 3104120 - DNA, 25 bp, Homo sapien
ttttcaaacgctgaggttaggttgc

SEQ ID NO: 3104121 - DNA, 25 bp, Homo sapien
ccgtggacttggagcggatgaactc

SEQ ID NO: 3104122 - DNA, 25 bp, Homo sapien
gccacgtcgcagtagacctcgtaga

SEQ ID NO: 3104123 - DNA, 25 bp, Homo sapien
cctcttgggcgccacgtcgcagtag

SEQ ID NO: 3104124 - DNA, 25 bp, Homo sapien
gtagacctcgtagaagcggacgatg

SEQ ID NO: 3104125 - DNA, 25 bp, Homo sapien
gcttcacctcagcatcgtgccttgg

SEQ ID NO: 3104126 - DNA, 25 bp, Homo sapien
tgagcttgtcagctgtgttcttggg

SEQ ID NO: 3104127 - DNA, 25 bp, Homo sapien
tagcctgaaggttcccgctgctgag

SEQ ID NO: 3104128 - DNA, 25 bp, Homo sapien
tagattttgagccacaggccccaag

SEQ ID NO: 3104129 - DNA, 25 bp, Homo sapien
cgaacttcttcagggagtctaggaa

SEQ ID NO: 3104130 - DNA, 25 bp, Homo sapien
ccccaggtgcggtcagaatcatgac

SEQ ID NO: 3104131 - DNA, 25 bp, Homo sapien
cggcggtgacgttgaccacagcatc

SEQ ID NO: 3104132 - DNA, 25 bp, Homo sapien
catcatgatcttggccgccttccag

SEQ ID NO: 3104133 - DNA, 25 bp, Homo sapien
tgccagcagggccggttctgctttg

SEQ ID NO: 3104134 - DNA, 25 bp, Homo sapien
gccagcagggccggttctgctttgg

SEQ ID NO: 3104135 - DNA, 25 bp, Homo sapien
cagcagggccggttctgctttggcc

SEQ ID NO: 3104136 - DNA, 25 bp, Homo sapien
ccagcagggccggttctgctttggc

SEQ ID NO: 3104137 - DNA, 25 bp, Homo sapien
gatgccgaccacctggatcagttgg

SEQ ID NO: 3104138 - DNA, 25 bp, Homo sapien
agcctcctgaatcgccaacttggct

SEQ ID NO: 3104139 - DNA, 25 bp, Homo sapien
tggtctgcgctctcattcttctgct

SEQ ID NO: 3104140 - DNA, 25 bp, Homo sapien
cttattgatgacctcgaccttgact

SEQ ID NO: 3104141 - DNA, 25 bp, Homo sapien
cgagaaacagcaagtgtgggccgca

SEQ ID NO: 3104142 - DNA, 25 bp, Homo sapien
gtgtgggccgcagccgacacacgcc

SEQ ID NO: 3104143 - DNA, 25 bp, Homo sapien
accgagaaacagcaagtgtgggccg

SEQ ID NO: 3104144 - DNA, 25 bp, Homo sapien
gtgggccgcagccgacacacgccgc

SEQ ID NO: 3104145 - DNA, 25 bp, Homo sapien
tacagtttgatctgctccagaaagg

SEQ ID NO: 3104146 - DNA, 25 bp, Homo sapien
tccagcctctcgattttggcaacaa

SEQ ID NO: 3104147 - DNA, 25 bp, Homo sapien
tagttgtagcgcctctcagtagcca

SEQ ID NO: 3104148 - DNA, 25 bp, Homo sapien
tataccctggacatctcgttgacgg

SEQ ID NO: 3104149 - DNA, 25 bp, Homo sapien
ttctggctcgtacccgcagcacgga

SEQ ID NO: 3104150 - DNA, 25 bp, Homo sapien
cagtcgatggccgtgcagttgacca

SEQ ID NO: 3104151 - DNA, 25 bp, Homo sapien
gcgctgacggacaccagcgcatctt

SEQ ID NO: 3104152 - DNA, 25 bp, Homo sapien
tgggaactttctggctcgtacccgc

SEQ ID NO: 3104153 - DNA, 25 bp, Homo sapien
ttgaggccctgccgaagacgggagc

SEQ ID NO: 3104154 - DNA, 25 bp, Homo sapien
tcttgaggccctgccgaagacggga

SEQ ID NO: 3104155 - DNA, 25 bp, Homo sapien
cttgaggccctgccgaagacgggag

SEQ ID NO: 3104156 - DNA, 25 bp, Homo sapien
ctcttgaggccctgccgaagacggg

SEQ ID NO: 3104157 - DNA, 25 bp, Homo sapien
ggaacgttcttcacggcagccttta

SEQ ID NO: 3104158 - DNA, 25 bp, Homo sapien
tcggccacctgggagtctgtcatca

SEQ ID NO: 3104159 - DNA, 25 bp, Homo sapien
tcatcaggaacaccgagggaacgtt

SEQ ID NO: 3104160 - DNA, 25 bp, Homo sapien
gaacttccaacatgtttcccgagtg

SEQ ID NO: 3104161 - DNA, 25 bp, Homo sapien
tgtcccatatggagtggcccttacc

SEQ ID NO: 3104162 - DNA, 25 bp, Homo sapien
tgcccactgtgaccgctgggctgtc

SEQ ID NO: 3104163 - DNA, 25 bp, Homo sapien
ggcccgtctggctttcacagccaca

SEQ ID NO: 3104164 - DNA, 25 bp, Homo sapien
catgtgtcccgctgtgcgatggccg

SEQ ID NO: 3104165 - DNA, 25 bp, Homo sapien
cccgaggtcacgcacgctgtctcgg

SEQ ID NO: 3104166 - DNA, 25 bp, Homo sapien
acgcacgctgtctcggcaggcacag

SEQ ID NO: 3104167 - DNA, 25 bp, Homo sapien
gtcacgcacgctgtctcggcaggca

SEQ ID NO: 3104168 - DNA, 25 bp, Homo sapien
aggtcacgcacgctgtctcggcagg

SEQ ID NO: 3104169 - DNA, 25 bp, Homo sapien
cacacgggctggaaggtttcacact

SEQ ID NO: 3104170 - DNA, 25 bp, Homo sapien
tgtactcgctggcttcattttggaa

SEQ ID NO: 3104171 - DNA, 25 bp, Homo sapien
gactattggtgatgctcggattccc

SEQ ID NO: 3104172 - DNA, 25 bp, Homo sapien
ggcacgcacgctggctggaaggttt

SEQ ID NO: 3104173 - DNA, 25 bp, Homo sapien
ccttcttgagggtgatctgaaacac

SEQ ID NO: 3104174 - DNA, 25 bp, Homo sapien
ctgaaacacgtcaagcccgctgatg

SEQ ID NO: 3104175 - DNA, 25 bp, Homo sapien
gagaggctctgtttgccactgccgc

SEQ ID NO: 3104176 - DNA, 25 bp, Homo sapien
gagactccaggatgcgattaatcct

SEQ ID NO: 3104177 - DNA, 25 bp, Homo sapien
cacggactctgcacatgctgaggtg

SEQ ID NO: 3104178 - DNA, 25 bp, Homo sapien
accagcacggactctgcacatgctg

SEQ ID NO: 3104179 - DNA, 25 bp, Homo sapien
ataatgcaaccggagagggtgaccc

SEQ ID NO: 3104180 - DNA, 25 bp, Homo sapien
ccacacaatgccactcggatgtcga

SEQ ID NO: 3104181 - DNA, 25 bp, Homo sapien
gatcgccaatcccttgagcaaagtg

SEQ ID NO: 3104182 - DNA, 25 bp, Homo sapien
cacgaggagcttgttcagaggagcc

SEQ ID NO: 3104183 - DNA, 25 bp, Homo sapien
gcttggcaaataagagttcatcacc

SEQ ID NO: 3104184 - DNA, 25 bp, Homo sapien
cagaggagccatgtcggttacagga

SEQ ID NO: 3104185 - DNA, 25 bp, Homo sapien
ggtgactctatgcaatgtttcctgg

SEQ ID NO: 3104186 - DNA, 25 bp, Homo sapien
cagaacttctgctgtggaaaataag

SEQ ID NO: 3104187 - DNA, 25 bp, Homo sapien
tagccaaaggcggacgaggtccagt

SEQ ID NO: 3104188 - DNA, 25 bp, Homo sapien
ctcgttcagtctcatgtagccaaag

SEQ ID NO: 3104189 - DNA, 25 bp, Homo sapien
aaacacaggatgatcagcaccgtca

SEQ ID NO: 3104190 - DNA, 25 bp, Homo sapien
caaacacaggatgatcagcaccgtc

SEQ ID NO: 3104191 - DNA, 25 bp, Homo sapien
gccccaaacacaggatgatcagcac

SEQ ID NO: 3104192 - DNA, 25 bp, Homo sapien
aacacaggatgatcagcaccgtcag

SEQ ID NO: 3104193 - DNA, 25 bp, Homo sapien
taatggccgtgggaagaaatgttgc

SEQ ID NO: 3104194 - DNA, 25 bp, Homo sapien
gacataatgaaacttaatggccgtg

SEQ ID NO: 3104195 - DNA, 25 bp, Homo sapien
ccctgaggttgaagacataatgaaa

SEQ ID NO: 3104196 - DNA, 25 bp, Homo sapien
gttgccgtgattttctgatgcaaag

SEQ ID NO: 3104197 - DNA, 25 bp, Homo sapien
ccaggtgctgcgtcaggattgtgtt

SEQ ID NO: 3104198 - DNA, 25 bp, Homo sapien
tggccggggaagctcacagcaaaca

SEQ ID NO: 3104199 - DNA, 25 bp, Homo sapien
ctgcttatcctctggatagccatgg

SEQ ID NO: 3104200 - DNA, 25 bp, Homo sapien
tagccatggagaccgagcggaaggc

SEQ ID NO: 3104201 - DNA, 25 bp, Homo sapien
gagtcgatggtgaaggatccggaag

SEQ ID NO: 3104202 - DNA, 25 bp, Homo sapien
ggatatcttttaacgtcagcttatg

SEQ ID NO: 3104203 - DNA, 25 bp, Homo sapien
caattatggatatcttttaacgtca

SEQ ID NO: 3104204 - DNA, 25 bp, Homo sapien
caggccacgtactgacaattatgga

SEQ ID NO: 3104205 - DNA, 25 bp, Homo sapien
ttcttagtgcctggcggcccgtagt

SEQ ID NO: 3104206 - DNA, 25 bp, Homo sapien
catgtgctgccggatgagggtgtgc

SEQ ID NO: 3104207 - DNA, 25 bp, Homo sapien
gttcatgtcgtcgatgaagtagacg

SEQ ID NO: 3104208 - DNA, 25 bp, Homo sapien
tgcggggccaccgtcccatacttgt

SEQ ID NO: 3104209 - DNA, 25 bp, Homo sapien
gcatggctgaggtcgtgtagaagtt

SEQ ID NO: 3104210 - DNA, 25 bp, Homo sapien
ccatgagcaggtccatgaagtagcg

SEQ ID NO: 3104211 - DNA, 25 bp, Homo sapien
ccaggtagttgtccgtgttcaggct

SEQ ID NO: 3104212 - DNA, 25 bp, Homo sapien
gaagtagcggatgcggatggtttcc

SEQ ID NO: 3104213 - DNA, 25 bp, Homo sapien
gatagtcttgaattcgttgatccac

SEQ ID NO: 3104214 - DNA, 25 bp, Homo sapien
tgtgtcaggatcaatgtagtagtca

SEQ ID NO: 3104215 - DNA, 25 bp, Homo sapien
catcgggatccagctcaaaggaggg

SEQ ID NO: 3104216 - DNA, 25 bp, Homo sapien
aaggagggcactttatctgtccagg

SEQ ID NO: 3104217 - DNA, 25 bp, Homo sapien
tgagacacagaagtaaaaatcaggg

SEQ ID NO: 3104218 - DNA, 25 bp, Homo sapien
acacagaagtaaaaatcagggccca

SEQ ID NO: 3104219 - DNA, 25 bp, Homo sapien
agcaggatgctgagagaccctgtgt

SEQ ID NO: 3104220 - DNA, 25 bp, Homo sapien
gctgagagaccctgtgtgggtggcc

SEQ ID NO: 3104221 - DNA, 25 bp, Homo sapien
tacagaatcgtttggatcaccgtga

SEQ ID NO: 3104222 - DNA, 25 bp, Homo sapien
gcaggtgaacacgaagtacagctcg

SEQ ID NO: 3104223 - DNA, 25 bp, Homo sapien
aaagcgcaacttgtccaggcacgtg

SEQ ID NO: 3104224 - DNA, 25 bp, Homo sapien
tcaaagaggatcatcaggttggcct

SEQ ID NO: 3104225 - DNA, 25 bp, Homo sapien
aatgggtccaaacgagggtgccaga

SEQ ID NO: 3104226 - DNA, 25 bp, Homo sapien
ccatgcctgcatggcaatgggtcca

SEQ ID NO: 3104227 - DNA, 25 bp, Homo sapien
cctcagggtcaccatgcctgcatgg

SEQ ID NO: 3104228 - DNA, 25 bp, Homo sapien
catggcaatgggtccaaacgagggt

SEQ ID NO: 3104229 - DNA, 25 bp, Homo sapien
atccgctcgttgctggccagggtga

SEQ ID NO: 3104230 - DNA, 25 bp, Homo sapien
accagcctcatggtgcggttcaggg

SEQ ID NO: 3104231 - DNA, 25 bp, Homo sapien
caggtggctgatttcgaacaccagc

SEQ ID NO: 3104232 - DNA, 25 bp, Homo sapien
ttccatcccaggtcggctgggttga

SEQ ID NO: 3104233 - DNA, 25 bp, Homo sapien
tgagcccccgttgtccctgccttgg

SEQ ID NO: 3104234 - DNA, 25 bp, Homo sapien
gagtgctccgtaggcgcctccctgt

SEQ ID NO: 3104235 - DNA, 25 bp, Homo sapien
gggcctgagtgctccgtaggcgcct

SEQ ID NO: 3104236 - DNA, 25 bp, Homo sapien
gcctccctgtgagcccccgttgtcc

SEQ ID NO: 3104237 - DNA, 25 bp, Homo sapien
tgttgagagactcgatccacatggg

SEQ ID NO: 3104238 - DNA, 25 bp, Homo sapien
gttggccaggtctcgcatgatggtg

SEQ ID NO: 3104239 - DNA, 25 bp, Homo sapien
tgtcatccatgactgtgttgagaga

SEQ ID NO: 3104240 - DNA, 25 bp, Homo sapien
gggtctatgtctccgtcaaggatga

SEQ ID NO: 3104241 - DNA, 25 bp, Homo sapien
gttctgataggtcttgttgagggat

SEQ ID NO: 3104242 - DNA, 25 bp, Homo sapien
gatgccaaagagctcgtcgcaggtg

SEQ ID NO: 3104243 - DNA, 25 bp, Homo sapien
aggtccacggcgaccggcttcctct

SEQ ID NO: 3104244 - DNA, 25 bp, Homo sapien
agagctcgtcgcaggtgacggcctt

SEQ ID NO: 3104245 - DNA, 25 bp, Homo sapien
tgagatttgccgctgcccgcattcc

SEQ ID NO: 3104246 - DNA, 25 bp, Homo sapien
cattcccgacgatgaacacggagtg

SEQ ID NO: 3104247 - DNA, 25 bp, Homo sapien
tcccgacgatgaacacggagtggcg

SEQ ID NO: 3104248 - DNA, 25 bp, Homo sapien
ccgcattcccgacgatgaacacgga

SEQ ID NO: 3104249 - DNA, 25 bp, Homo sapien
tgcagcttgagctccacgatgctct

SEQ ID NO: 3104250 - DNA, 25 bp, Homo sapien
ttgagctccacgatgctctgcttga

SEQ ID NO: 3104251 - DNA, 25 bp, Homo sapien
agcacgaagctgtcctccgcctgca

SEQ ID NO: 3104252 - DNA, 25 bp, Homo sapien
tgcaccaccttcagcacgaagctgt

SEQ ID NO: 3104253 - DNA, 25 bp, Homo sapien
cgggcaggtcgtctgtcacaatctt

SEQ ID NO: 3104254 - DNA, 25 bp, Homo sapien
attcaggtcccgtttccgaggcacg

SEQ ID NO: 3104255 - DNA, 25 bp, Homo sapien
tccccgatcagtcccatgaatacgg

SEQ ID NO: 3104256 - DNA, 25 bp, Homo sapien
cagcacagacttgatggctctcagg

SEQ ID NO: 3104257 - DNA, 25 bp, Homo sapien
gccctcggccatgagcatgatctca

SEQ ID NO: 3104258 - DNA, 25 bp, Homo sapien
acttcctggccagaaggcgggcttc

SEQ ID NO: 3104259 - DNA, 25 bp, Homo sapien
cacaaggtgtacagggtgatgaact

SEQ ID NO: 3104260 - DNA, 25 bp, Homo sapien
tctcacatatcagttcgaagtcggg

SEQ ID NO: 3104261 - DNA, 25 bp, Homo sapien
gaataaggcttttaggttctcaggc

SEQ ID NO: 3104262 - DNA, 25 bp, Homo sapien
tctcccaggaaattgaatgcttttt

SEQ ID NO: 3104263 - DNA, 25 bp, Homo sapien
gaatgaggcctatgatctctcccag

SEQ ID NO: 3104264 - DNA, 25 bp, Homo sapien
tcttggcccgaattgcatcctggac

SEQ ID NO: 3104265 - DNA, 25 bp, Homo sapien
cattctcttggtcatggggcctcca

SEQ ID NO: 3104266 - DNA, 25 bp, Homo sapien
gagagggtccccacggtaacagcca

SEQ ID NO: 3104267 - DNA, 25 bp, Homo sapien
cagagtaggggctatataaatattc

SEQ ID NO: 3104268 - DNA, 25 bp, Homo sapien
tgttcatggacgtcggaggtgctca

SEQ ID NO: 3104269 - DNA, 25 bp, Homo sapien
tcacaggaaagctgacgagccagtc

SEQ ID NO: 3104270 - DNA, 25 bp, Homo sapien
ccttcggtgcttggaacgttgcaga

SEQ ID NO: 3104271 - DNA, 25 bp, Homo sapien
tggagggcaagagctcaatggcacc

SEQ ID NO: 3104272 - DNA, 25 bp, Homo sapien
agaaatgctcctcctaacaagtggg

SEQ ID NO: 3104273 - DNA, 25 bp, Homo sapien
acgtgaccccgaggccgcaggcagg

SEQ ID NO: 3104274 - DNA, 25 bp, Homo sapien
ccgaggccgcaggcaggggacttta

SEQ ID NO: 3104275 - DNA, 25 bp, Homo sapien
cgaggccgcaggcaggggactttac

SEQ ID NO: 3104276 - DNA, 25 bp, Homo sapien
ccgacgtgaccccgaggccgcaggc

SEQ ID NO: 3104277 - DNA, 25 bp, Homo sapien
tgcacggcaatcacagacaagactt

SEQ ID NO: 3104278 - DNA, 25 bp, Homo sapien
gacttccactgagatgcgattaaac

SEQ ID NO: 3104279 - DNA, 25 bp, Homo sapien
tgagatgcgattaaactcgtcaaag

SEQ ID NO: 3104280 - DNA, 25 bp, Homo sapien
gggccaggcccttgtagatatttcc

SEQ ID NO: 3104281 - DNA, 25 bp, Homo sapien
gaaaggaagagctgggagggtgaca

SEQ ID NO: 3104282 - DNA, 25 bp, Homo sapien
agaaaggaagagctgggagggtgac

SEQ ID NO: 3104283 - DNA, 25 bp, Homo sapien
tggagaaaggaagagctgggagggt

SEQ ID NO: 3104284 - DNA, 25 bp, Homo sapien
ctggaaagggcgagatggagaaagg

SEQ ID NO: 3104285 - DNA, 25 bp, Homo sapien
ttccaggtggatgttaagtcccttc

SEQ ID NO: 3104286 - DNA, 25 bp, Homo sapien
aggaggcggatgtggactgcgtggc

SEQ ID NO: 3104287 - DNA, 25 bp, Homo sapien
gtggatgttaagtcccttccaggga

SEQ ID NO: 3104288 - DNA, 25 bp, Homo sapien
gggattccaggtggatgttaagtcc

SEQ ID NO: 3104289 - DNA, 25 bp, Homo sapien
aagacgtagaccatggtgcccaggg

SEQ ID NO: 3104290 - DNA, 25 bp, Homo sapien
gctccacccatgatgagatggaggg

SEQ ID NO: 3104291 - DNA, 25 bp, Homo sapien
tgcccaggtccttggtcgtctcagt

SEQ ID NO: 3104292 - DNA, 25 bp, Homo sapien
gtcgtctcagtcttgccggtcccag

SEQ ID NO: 3104293 - DNA, 25 bp, Homo sapien
cttcgtcccagcgatgccggagctg

SEQ ID NO: 3104294 - DNA, 25 bp, Homo sapien
ggcaaagcagtgtcgcttctcttcg

SEQ ID NO: 3104295 - DNA, 25 bp, Homo sapien
tactcataggaatactggatttggg

SEQ ID NO: 3104296 - DNA, 25 bp, Homo sapien
ggcgtgttgcccagatactcatagg

SEQ ID NO: 3104297 - DNA, 25 bp, Homo sapien
cgtgatgagtacgttcagctggcta

SEQ ID NO: 3104298 - DNA, 25 bp, Homo sapien
tgatcttcatcctgtcgccagcgtt

SEQ ID NO: 3104299 - DNA, 25 bp, Homo sapien
cgtcccgtgcgtgcacatcgatggt

SEQ ID NO: 3104300 - DNA, 25 bp, Homo sapien
cagcgttgaggttccccatgagcag

SEQ ID NO: 3104301 - DNA, 25 bp, Homo sapien
gggagagtgccttcgatgagacacc

SEQ ID NO: 3104302 - DNA, 25 bp, Homo sapien
ttcgatgagacaccacgggtgccca

SEQ ID NO: 3104303 - DNA, 25 bp, Homo sapien
gagtgccttcgatgagacaccacgg

SEQ ID NO: 3104304 - DNA, 25 bp, Homo sapien
gtgccttcgatgagacaccacgggt

SEQ ID NO: 3104305 - DNA, 25 bp, Homo sapien
gcaggtttcagaaggatacacgggc

SEQ ID NO: 3104306 - DNA, 25 bp, Homo sapien
taaagactctcagtagcatctgcca

SEQ ID NO: 3104307 - DNA, 25 bp, Homo sapien
tctgaaggtgtctgttactcgtggg

SEQ ID NO: 3104308 - DNA, 25 bp, Homo sapien
gagtaacaggttgcataagggccct

SEQ ID NO: 3104309 - DNA, 25 bp, Homo sapien
ggcccacctcggtcgtccaccagat

SEQ ID NO: 3104310 - DNA, 25 bp, Homo sapien
taatctctgatagcgttttcatagc

SEQ ID NO: 3104311 - DNA, 25 bp, Homo sapien
ttgttataatctctgatagcgtttt

SEQ ID NO: 3104312 - DNA, 25 bp, Homo sapien
ctctgatagcgttttcatagccttc

SEQ ID NO: 3104313 - DNA, 25 bp, Homo sapien
ttctcttcgtaggtcaccacggcct

SEQ ID NO: 3104314 - DNA, 25 bp, Homo sapien
accacggcctctgggatttcgtgcc

SEQ ID NO: 3104315 - DNA, 25 bp, Homo sapien
atttcgtgccggagggtagagcaca

SEQ ID NO: 3104316 - DNA, 25 bp, Homo sapien
ttcggtccagcactcgattcagcca

SEQ ID NO: 3104317 - DNA, 25 bp, Homo sapien
tgatcaaaaaccatgtactcgtcct

SEQ ID NO: 3104318 - DNA, 25 bp, Homo sapien
caccttgagaggtttgtcactggca

SEQ ID NO: 3104319 - DNA, 25 bp, Homo sapien
ggcatcgagccggaacttcagttta

SEQ ID NO: 3104320 - DNA, 25 bp, Homo sapien
ccgagaggtcgcattcctgatcaaa

SEQ ID NO: 3104321 - DNA, 25 bp, Homo sapien
agagaatgtccaggaggtcagccga

SEQ ID NO: 3104322 - DNA, 25 bp, Homo sapien
tcgtctctaaatactctgccaaagc

SEQ ID NO: 3104323 - DNA, 25 bp, Homo sapien
gggaaagccagtcttttcgtctcta

SEQ ID NO: 3104324 - DNA, 25 bp, Homo sapien
ccattggagagaatgtccaggaggt

SEQ ID NO: 3104325 - DNA, 25 bp, Homo sapien
gtagaggccgggtttgctggtggct

SEQ ID NO: 3104326 - DNA, 25 bp, Homo sapien
agaggccgggtttgctggtggcttc

SEQ ID NO: 3104327 - DNA, 25 bp, Homo sapien
ttgggtgttttcactgcatcttcca

SEQ ID NO: 3104328 - DNA, 25 bp, Homo sapien
acgttgggtgttttcactgcatctt

SEQ ID NO: 3104329 - DNA, 25 bp, Homo sapien
ccagatggagatgacggagtccgcc

SEQ ID NO: 3104330 - DNA, 25 bp, Homo sapien
tcatgctccaggtactgtccagggc

SEQ ID NO: 3104331 - DNA, 25 bp, Homo sapien
gatgtcgtcaaagcgctgggagtcc

SEQ ID NO: 3104332 - DNA, 25 bp, Homo sapien
ggtgcggctcgtgctggaattccat

SEQ ID NO: 3104333 - DNA, 25 bp, Homo sapien
agacagcaccgccagcacggcctac

SEQ ID NO: 3104334 - DNA, 25 bp, Homo sapien
cagacagcaccgccagcacggccta

SEQ ID NO: 3104335 - DNA, 25 bp, Homo sapien
ttgcacagacagcaccgccagcacg

SEQ ID NO: 3104336 - DNA, 25 bp, Homo sapien
cagggtcgtctcttctgacatttta

SEQ ID NO: 3104337 - DNA, 25 bp, Homo sapien
ttcacggccttgtccacgatgttgc

SEQ ID NO: 3104338 - DNA, 25 bp, Homo sapien
atgcccgactccttcacggccttgt

SEQ ID NO: 3104339 - DNA, 25 bp, Homo sapien
gatgttgcggacctcatcctcgtaa

SEQ ID NO: 3104340 - DNA, 25 bp, Homo sapien
cccacgaaggcatcccaggttttca

SEQ ID NO: 3104341 - DNA, 25 bp, Homo sapien
gaatggcagggttctgcagctcgct

SEQ ID NO: 3104342 - DNA, 25 bp, Homo sapien
tctatgtccatctgctcaacgttga

SEQ ID NO: 3104343 - DNA, 25 bp, Homo sapien
tttcacggtgttgtcgagccccacg

SEQ ID NO: 3104344 - DNA, 25 bp, Homo sapien
cagggaacaatcttctggaatggaa

SEQ ID NO: 3104345 - DNA, 25 bp, Homo sapien
tggaggcactggcaacatcaagctc

SEQ ID NO: 3104346 - DNA, 25 bp, Homo sapien
tcagggaacaatcttctggaatgga

SEQ ID NO: 3104347 - DNA, 25 bp, Homo sapien
agggtggaggcactggcaacatcaa

SEQ ID NO: 3104348 - DNA, 25 bp, Homo sapien
acccacgcggcgtgccctgcactca

SEQ ID NO: 3104349 - DNA, 25 bp, Homo sapien
ctccctgcagaatcccgggccccac

SEQ ID NO: 3104350 - DNA, 25 bp, Homo sapien
cagagcctgccctcttgttgccggg

SEQ ID NO: 3104351 - DNA, 25 bp, Homo sapien
cattcttacaaccaaagggtgccca

SEQ ID NO: 3104352 - DNA, 25 bp, Homo sapien
agagctccttcagtaggcggacctc

SEQ ID NO: 3104353 - DNA, 25 bp, Homo sapien
acaacaaccatgtcccagagctcct

SEQ ID NO: 3104354 - DNA, 25 bp, Homo sapien
ccttccatggcggagatgctctttt

SEQ ID NO: 3104355 - DNA, 25 bp, Homo sapien
aacaggcccccggacttggacagcg

SEQ ID NO: 3104356 - DNA, 25 bp, Homo sapien
agaggaactgacaagggccccactg

SEQ ID NO: 3104357 - DNA, 25 bp, Homo sapien
gaactgacaagggccccactgggcc

SEQ ID NO: 3104358 - DNA, 25 bp, Homo sapien
ctgggcaccgtactgggagcaaaga

SEQ ID NO: 3104359 - DNA, 25 bp, Homo sapien
aggaactgacaagggccccactggg

SEQ ID NO: 3104360 - DNA, 25 bp, Homo sapien
ggcctgagcttgagtgggctgccag

SEQ ID NO: 3104361 - DNA, 25 bp, Homo sapien
gcctgagcttgagtgggctgccagg

SEQ ID NO: 3104362 - DNA, 25 bp, Homo sapien
acagagtgggaacacgagtgaagcc

SEQ ID NO: 3104363 - DNA, 25 bp, Homo sapien
cagagtgggaacacgagtgaagcct

SEQ ID NO: 3104364 - DNA, 25 bp, Homo sapien
gccccaaggtcagtccggcggagac

SEQ ID NO: 3104365 - DNA, 25 bp, Homo sapien
gcatgtgctcgcacacgtatgtgca

SEQ ID NO: 3104366 - DNA, 25 bp, Homo sapien
gtcagtccggcggagaccacgtttc

SEQ ID NO: 3104367 - DNA, 25 bp, Homo sapien
tgcatacacataagagcactcgtgc

SEQ ID NO: 3104368 - DNA, 25 bp, Homo sapien
cctgatctcacccttgagcaaaaat

SEQ ID NO: 3104369 - DNA, 25 bp, Homo sapien
cccctgatctcacccttgagcaaaa

SEQ ID NO: 3104370 - DNA, 25 bp, Homo sapien
tgatctcacccttgagcaaaaatac

SEQ ID NO: 3104371 - DNA, 25 bp, Homo sapien
ctgatctcacccttgagcaaaaata

SEQ ID NO: 3104372 - DNA, 25 bp, Homo sapien
gctgaaggagaacggggcctcgcgc

SEQ ID NO: 3104373 - DNA, 25 bp, Homo sapien
gacttgtaggggttggggtcgctga

SEQ ID NO: 3104374 - DNA, 25 bp, Homo sapien
tcgctgaaggagaacggggcctcgc

SEQ ID NO: 3104375 - DNA, 25 bp, Homo sapien
ggtcgctgaaggagaacggggcctc

SEQ ID NO: 3104376 - DNA, 25 bp, Homo sapien
cgaattgctggcatttccgccgcag

SEQ ID NO: 3104377 - DNA, 25 bp, Homo sapien
gtatttgcccagtgctccggcagct

SEQ ID NO: 3104378 - DNA, 25 bp, Homo sapien
ggagtggtgccacggtcagcttcac

SEQ ID NO: 3104379 - DNA, 25 bp, Homo sapien
cgcaggatgctgacctcgttggcct

SEQ ID NO: 3104380 - DNA, 25 bp, Homo sapien
atctcctccccgtaggtcttgagca

SEQ ID NO: 3104381 - DNA, 25 bp, Homo sapien
ggctcaaacatgttgtcggtggctg

SEQ ID NO: 3104382 - DNA, 25 bp, Homo sapien
cagcttcaagtggatctcctctggc

SEQ ID NO: 3104383 - DNA, 25 bp, Homo sapien
ttggtcaagcccattctggcgactt

SEQ ID NO: 3104384 - DNA, 25 bp, Homo sapien
atgtttgctcgcagcccggtgacac

SEQ ID NO: 3104385 - DNA, 25 bp, Homo sapien
gtttggagaagggataatgtttgct

SEQ ID NO: 3104386 - DNA, 25 bp, Homo sapien
agcaggtgctcggtacaccgggttt

SEQ ID NO: 3104387 - DNA, 25 bp, Homo sapien
tgacacctttctgctcacgcttggt

SEQ ID NO: 3104388 - DNA, 25 bp, Homo sapien
gccagccgtggaacaccttggtgtt

SEQ ID NO: 3104389 - DNA, 25 bp, Homo sapien
ggcagtcgcactgcagccagccgtg

SEQ ID NO: 3104390 - DNA, 25 bp, Homo sapien
ggttgctcaggtgccgcttgaacat

SEQ ID NO: 3104391 - DNA, 25 bp, Homo sapien
ccccagcgccggattgtgctgagca

SEQ ID NO: 3104392 - DNA, 25 bp, Homo sapien
gtccgtccagaggtaggagtacctc

SEQ ID NO: 3104393 - DNA, 25 bp, Homo sapien
tccctcatctctatgaggtctgtgt

SEQ ID NO: 3104394 - DNA, 25 bp, Homo sapien
gactgcacacccatatatcaggaaa

SEQ ID NO: 3104395 - DNA, 25 bp, Homo sapien
gtgtccaagtcctccgcagtgactg

SEQ ID NO: 3104396 - DNA, 25 bp, Homo sapien
atgccaaacttagtggatagcacac

SEQ ID NO: 3104397 - DNA, 25 bp, Homo sapien
tctttttccagcctgggccgatcac

SEQ ID NO: 3104398 - DNA, 25 bp, Homo sapien
tttttccagcctgggccgatcaccc

SEQ ID NO: 3104399 - DNA, 25 bp, Homo sapien
caaacttagtggatagcacactaca

SEQ ID NO: 3104400 - DNA, 25 bp, Homo sapien
gaaataggaacctttgccgatttgc

SEQ ID NO: 3104401 - DNA, 25 bp, Homo sapien
aaataggaacctttgccgatttgca

SEQ ID NO: 3104402 - DNA, 25 bp, Homo sapien
tcagtgccaggaagccgcgatctga

SEQ ID NO: 3104403 - DNA, 25 bp, Homo sapien
tgtagatgtcgttgaccaggccctc

SEQ ID NO: 3104404 - DNA, 25 bp, Homo sapien
tccagggtcgggttgaaggtcagcc

SEQ ID NO: 3104405 - DNA, 25 bp, Homo sapien
gatgagcctggctacgttgtagatg

SEQ ID NO: 3104406 - DNA, 25 bp, Homo sapien
tcagagatttgcgaatgaactggtc

SEQ ID NO: 3104407 - DNA, 25 bp, Homo sapien
tgtgtctgccctgaatagttctgcg

SEQ ID NO: 3104408 - DNA, 25 bp, Homo sapien
catgttgtccattaggaaactcaga

SEQ ID NO: 3104409 - DNA, 25 bp, Homo sapien
catctaagaccatgtcgtcaatgta

SEQ ID NO: 3104410 - DNA, 25 bp, Homo sapien
atttttatgaaatctccagccctgg

SEQ ID NO: 3104411 - DNA, 25 bp, Homo sapien
gtgtcactaatcatttttatgaaat

SEQ ID NO: 3104412 - DNA, 25 bp, Homo sapien
tcatttttatgaaatctccagccct

SEQ ID NO: 3104413 - DNA, 25 bp, Homo sapien
ttttatgaaatctccagccctgggt

SEQ ID NO: 3104414 - DNA, 25 bp, Homo sapien
gctaaaagcaagtgggttctcaaaa

SEQ ID NO: 3104415 - DNA, 25 bp, Homo sapien
ctccctgctaaaagcaagtgggttc

SEQ ID NO: 3104416 - DNA, 25 bp, Homo sapien
tcctccctgctaaaagcaagtgggt

SEQ ID NO: 3104417 - DNA, 25 bp, Homo sapien
tctcctccctgctaaaagcaagtgg

SEQ ID NO: 3104418 - DNA, 25 bp, Homo sapien
cgtagcgcttgttgaggttggcaat

SEQ ID NO: 3104419 - DNA, 25 bp, Homo sapien
catccctgactgctgcgtagcgctt

SEQ ID NO: 3104420 - DNA, 25 bp, Homo sapien
catggcttggatcttcactccagca

SEQ ID NO: 3104421 - DNA, 25 bp, Homo sapien
ttcaaacagcgggttggccgaccag

SEQ ID NO: 3104422 - DNA, 25 bp, Homo sapien
cacgtgggagtaagtcccttttgtg

SEQ ID NO: 3104423 - DNA, 25 bp, Homo sapien
catagctgcaaacggagggccacgt

SEQ ID NO: 3104424 - DNA, 25 bp, Homo sapien
tactgggtggatcgtccatagctgc

SEQ ID NO: 3104425 - DNA, 25 bp, Homo sapien
tgtggtcaatactgggtggatcgtc

SEQ ID NO: 3104426 - DNA, 25 bp, Homo sapien
tgcaagttgtgcagaatttctcgca

SEQ ID NO: 3104427 - DNA, 25 bp, Homo sapien
tctgcaagttgtgcagaatttctcg

SEQ ID NO: 3104428 - DNA, 25 bp, Homo sapien
tgcagaatttctcgcacctcttgaa

SEQ ID NO: 3104429 - DNA, 25 bp, Homo sapien
tcgcacctcttgaatgtactgaaac

SEQ ID NO: 3104430 - DNA, 25 bp, Homo sapien
taacttgacatcaattgcttccagt

SEQ ID NO: 3104431 - DNA, 25 bp, Homo sapien
ctgactttattagtagaaattctac

SEQ ID NO: 3104432 - DNA, 25 bp, Homo sapien
cttcgccattccagaataatgtcgt

SEQ ID NO: 3104433 - DNA, 25 bp, Homo sapien
cgtttcagcgctcaataacttgaca

SEQ ID NO: 3104434 - DNA, 25 bp, Homo sapien
tataccagccaacgatgagctccag

SEQ ID NO: 3104435 - DNA, 25 bp, Homo sapien
acagactctccgcactgtctggaat

SEQ ID NO: 3104436 - DNA, 25 bp, Homo sapien
tccaggttgcccacaaacttccgga

SEQ ID NO: 3104437 - DNA, 25 bp, Homo sapien
tccggaaagtttcgttctctgagaa

SEQ ID NO: 3104438 - DNA, 25 bp, Homo sapien
tacttctgataggtcagcttggcct

SEQ ID NO: 3104439 - DNA, 25 bp, Homo sapien
ggtagatcttctcgcggtggcacct

SEQ ID NO: 3104440 - DNA, 25 bp, Homo sapien
tgccccaggttaaagtggcagtcct

SEQ ID NO: 3104441 - DNA, 25 bp, Homo sapien
atgaggttgctagcggcgtcccgca

SEQ ID NO: 3104442 - DNA, 25 bp, Homo sapien
gatcttagcattgtctagctcagcg

SEQ ID NO: 3104443 - DNA, 25 bp, Homo sapien
tctgggcatcgtacaagatcttagc

SEQ ID NO: 3104444 - DNA, 25 bp, Homo sapien
agcatgactgaatacctgggcgcca

SEQ ID NO: 3104445 - DNA, 25 bp, Homo sapien
tgtttcatggacacctctagcctct

SEQ ID NO: 3104446 - DNA, 25 bp, Homo sapien
ttggcaaaagatcgtggccagcctc

SEQ ID NO: 3104447 - DNA, 25 bp, Homo sapien
gacttgatacagctgcagtcatcaa

SEQ ID NO: 3104448 - DNA, 25 bp, Homo sapien
tcatcaaatccttggcaaaagatcg

SEQ ID NO: 3104449 - DNA, 25 bp, Homo sapien
tggccagcctcctatccaggtcttg

SEQ ID NO: 3104450 - DNA, 25 bp, Homo sapien
catccaaccctgcccgaggacctac

SEQ ID NO: 3104451 - DNA, 25 bp, Homo sapien
tcatccaaccctgcccgaggaccta

SEQ ID NO: 3104452 - DNA, 25 bp, Homo sapien
caaagacctcatcatagatacgggt

SEQ ID NO: 3104453 - DNA, 25 bp, Homo sapien
ggtcaccaggctcccgaggaggttc

SEQ ID NO: 3104454 - DNA, 25 bp, Homo sapien
gggtccaagggatcatatttgcagt

SEQ ID NO: 3104455 - DNA, 25 bp, Homo sapien
tgcagtcggcaaaaaccttcaccag

SEQ ID NO: 3104456 - DNA, 25 bp, Homo sapien
aattcccaaggcacgggctctttgt

SEQ ID NO: 3104457 - DNA, 25 bp, Homo sapien
attcccaaggcacgggctctttgtc

SEQ ID NO: 3104458 - DNA, 25 bp, Homo sapien
gaattcccaaggcacgggctctttg

SEQ ID NO: 3104459 - DNA, 25 bp, Homo sapien
gccctcgccctgcgaggaaggggta

SEQ ID NO: 3104460 - DNA, 25 bp, Homo sapien
tggccctcgccctgcgaggaagggg

SEQ ID NO: 3104461 - DNA, 25 bp, Homo sapien
ggagatgccactcaggacttcctcg

SEQ ID NO: 3104462 - DNA, 25 bp, Homo sapien
gaaaagcttcatgttcacgcagcag

SEQ ID NO: 3104463 - DNA, 25 bp, Homo sapien
ggacttcctcgatttcaccttgcag

SEQ ID NO: 3104464 - DNA, 25 bp, Homo sapien
gaagtcgtacgtctggtagagctcc

SEQ ID NO: 3104465 - DNA, 25 bp, Homo sapien
catctcgatgatttggttgcagaac

SEQ ID NO: 3104466 - DNA, 25 bp, Homo sapien
cagaactcctgcaggatgacgatga

SEQ ID NO: 3104467 - DNA, 25 bp, Homo sapien
gatgacgatgatcctggcaggtgtg

SEQ ID NO: 3104468 - DNA, 25 bp, Homo sapien
ggcaggtgtgttatagtactcagag

SEQ ID NO: 3104469 - DNA, 25 bp, Homo sapien
gggcttcaaatagagcacgatgtcg

SEQ ID NO: 3104470 - DNA, 25 bp, Homo sapien
gcacgatgtcgttggcttccttcag

SEQ ID NO: 3104471 - DNA, 25 bp, Homo sapien
caaatagagcacgatgtcgttggct

SEQ ID NO: 3104472 - DNA, 25 bp, Homo sapien
cagcaggatccgtaggggcttcaaa

SEQ ID NO: 3104473 - DNA, 25 bp, Homo sapien
ttggtgtaaacgttttgcagggctg

SEQ ID NO: 3104474 - DNA, 25 bp, Homo sapien
gtgacgttggtgtaaacgttttgca

SEQ ID NO: 3104475 - DNA, 25 bp, Homo sapien
gtgtaaacgttttgcagggctggcc

SEQ ID NO: 3104476 - DNA, 25 bp, Homo sapien
tgacgttggtgtaaacgttttgcag

SEQ ID NO: 3104477 - DNA, 25 bp, Homo sapien
taggatctcaacaatcttgttcact

SEQ ID NO: 3104478 - DNA, 25 bp, Homo sapien
gatctcaacaatcttgttcactttg

SEQ ID NO: 3104479 - DNA, 25 bp, Homo sapien
tctcaacaatcttgttcactttggg

SEQ ID NO: 3104480 - DNA, 25 bp, Homo sapien
ctctaggatctcaacaatcttgttc

SEQ ID NO: 3104481 - DNA, 25 bp, Homo sapien
cctcaggactcctgggaggttggca

SEQ ID NO: 3104482 - DNA, 25 bp, Homo sapien
gaatttacgcaggtcatcagagccc

SEQ ID NO: 3104483 - DNA, 25 bp, Homo sapien
ttacgcaggtcatcagagccctcag

SEQ ID NO: 3104484 - DNA, 25 bp, Homo sapien
ggagctgcagaatttacgcaggtca

SEQ ID NO: 3104485 - DNA, 25 bp, Homo sapien
aatggcgtgcaggagcaagttgtcc

SEQ ID NO: 3104486 - DNA, 25 bp, Homo sapien
tgagtctttgctcagcacatcccgg

SEQ ID NO: 3104487 - DNA, 25 bp, Homo sapien
tgtcccagaactcgaactccacttg

SEQ ID NO: 3104488 - DNA, 25 bp, Homo sapien
acttgaggttcagcagccgagtgtc

SEQ ID NO: 3104489 - DNA, 25 bp, Homo sapien
ctgcccaggtgctccggaataggca

SEQ ID NO: 3104490 - DNA, 25 bp, Homo sapien
gatcttgccactcatcacaaacatt

SEQ ID NO: 3104491 - DNA, 25 bp, Homo sapien
cctgcttcacgatgtcttccgagac

SEQ ID NO: 3104492 - DNA, 25 bp, Homo sapien
tgctccggaataggcagcaaggttt

SEQ ID NO: 3104493 - DNA, 25 bp, Homo sapien
atgttctcactttggtttaacagag

SEQ ID NO: 3104494 - DNA, 25 bp, Homo sapien
agccatgttctcactttggtttaac

SEQ ID NO: 3104495 - DNA, 25 bp, Homo sapien
gccatgttctcactttggtttaaca

SEQ ID NO: 3104496 - DNA, 25 bp, Homo sapien
ctggggccatccagccatgttctca

SEQ ID NO: 3104497 - DNA, 25 bp, Homo sapien
cagggtatgatcatgccggctgcat

SEQ ID NO: 3104498 - DNA, 25 bp, Homo sapien
gaacttcaggacgatggaggcaact

SEQ ID NO: 3104499 - DNA, 25 bp, Homo sapien
ttcaaagaactctgtgaacagggcc

SEQ ID NO: 3104500 - DNA, 25 bp, Homo sapien
gcacctggacgtcgggcttttcaaa

SEQ ID NO: 3104501 - DNA, 25 bp, Homo sapien
cggggacgcgtcacgtcgtcatttc

SEQ ID NO: 3104502 - DNA, 25 bp, Homo sapien
ccacccaggatctccgagacccggg

SEQ ID NO: 3104503 - DNA, 25 bp, Homo sapien
caggatctccgagacccggggacgc

SEQ ID NO: 3104504 - DNA, 25 bp, Homo sapien
ctccacccaggatctccgagacccg

SEQ ID NO: 3104505 - DNA, 25 bp, Homo sapien
aactcaggggagcccgagtcctgga

SEQ ID NO: 3104506 - DNA, 25 bp, Homo sapien
tcaggaactcaggggagcccgagtc

SEQ ID NO: 3104507 - DNA, 25 bp, Homo sapien
aggaactcaggggagcccgagtcct

SEQ ID NO: 3104508 - DNA, 25 bp, Homo sapien
caggggagcccgagtcctggaaggt

SEQ ID NO: 3104509 - DNA, 25 bp, Homo sapien
ccttggcctccgactcccccagcat

SEQ ID NO: 3104510 - DNA, 25 bp, Homo sapien
ccatcctctgaaggcctccctgctc

SEQ ID NO: 3104511 - DNA, 25 bp, Homo sapien
caccttggcctccgactcccccagc

SEQ ID NO: 3104512 - DNA, 25 bp, Homo sapien
ctccatcctctgaaggcctccctgc

SEQ ID NO: 3104513 - DNA, 25 bp, Homo sapien
cagacacaggggtactcagcaagcc

SEQ ID NO: 3104514 - DNA, 25 bp, Homo sapien
gttctgcatatcaccccagagctcc

SEQ ID NO: 3104515 - DNA, 25 bp, Homo sapien
agctagtaaccaggcccctctggag

SEQ ID NO: 3104516 - DNA, 25 bp, Homo sapien
cctctggagacgtcagcttcctcgg

SEQ ID NO: 3104517 - DNA, 25 bp, Homo sapien
ccagctttttggggtggatgcacca

SEQ ID NO: 3104518 - DNA, 25 bp, Homo sapien
agctttttggggtggatgcaccatg

SEQ ID NO: 3104519 - DNA, 25 bp, Homo sapien
cagctttttggggtggatgcaccat

SEQ ID NO: 3104520 - DNA, 25 bp, Homo sapien
caggtggcatcggtccatctgacgc

SEQ ID NO: 3104521 - DNA, 25 bp, Homo sapien
ggtggcatcggtccatctgacgcgt

SEQ ID NO: 3104522 - DNA, 25 bp, Homo sapien
tcaggtggcatcggtccatctgacg

SEQ ID NO: 3104523 - DNA, 25 bp, Homo sapien
gtggcatcggtccatctgacgcgtg

SEQ ID NO: 3104524 - DNA, 25 bp, Homo sapien
tgagttgccttcaacaagccccacg

SEQ ID NO: 3104525 - DNA, 25 bp, Homo sapien
gagttgccttcaacaagccccacgg

SEQ ID NO: 3104526 - DNA, 25 bp, Homo sapien
ctgagttgccttcaacaagccccac

SEQ ID NO: 3104527 - DNA, 25 bp, Homo sapien
cacctgggacgctttgagaattaag

SEQ ID NO: 3104528 - DNA, 25 bp, Homo sapien
gaatcacctgggacgctttgagaat

SEQ ID NO: 3104529 - DNA, 25 bp, Homo sapien
tgcttagccacgggcagaatcacct

SEQ ID NO: 3104530 - DNA, 25 bp, Homo sapien
ctttgagaattaagggcactggagg

SEQ ID NO: 3104531 - DNA, 25 bp, Homo sapien
tcacagcgagaacctgcgaaggtcc

SEQ ID NO: 3104532 - DNA, 25 bp, Homo sapien
acttacaaacagctgaaagtctccc

SEQ ID NO: 3104533 - DNA, 25 bp, Homo sapien
cgaaggtccaggtcgggagattcca

SEQ ID NO: 3104534 - DNA, 25 bp, Homo sapien
tacagagtgcccatgaactccaact

SEQ ID NO: 3104535 - DNA, 25 bp, Homo sapien
acaccattcgtcttttccattatct

SEQ ID NO: 3104536 - DNA, 25 bp, Homo sapien
tccattatcttttatctcgtcctct

SEQ ID NO: 3104537 - DNA, 25 bp, Homo sapien
ttctaaacaccattcgtcttttcca

SEQ ID NO: 3104538 - DNA, 25 bp, Homo sapien
cattatcttttatctcgtcctcttg

SEQ ID NO: 3104539 - DNA, 25 bp, Homo sapien
gacagccaaagataggtccagagcc

SEQ ID NO: 3104540 - DNA, 25 bp, Homo sapien
aatccttggcggttgagcatagtcc

SEQ ID NO: 3104541 - DNA, 25 bp, Homo sapien
tgatgccagtaacagcatccgggcc

SEQ ID NO: 3104542 - DNA, 25 bp, Homo sapien
tgtgtgtacccagaacatgtcttct

SEQ ID NO: 3104543 - DNA, 25 bp, Homo sapien
aagctgtcgatggccagtagggttt

SEQ ID NO: 3104544 - DNA, 25 bp, Homo sapien
ctctatctttgcccgggaaacactg

SEQ ID NO: 3104545 - DNA, 25 bp, Homo sapien
aagtccacatagggcaacgattcaa

SEQ ID NO: 3104546 - DNA, 25 bp, Homo sapien
gtccacatagggcaacgattcaatt

SEQ ID NO: 3104547 - DNA, 25 bp, Homo sapien
ccacatagggcaacgattcaattat

SEQ ID NO: 3104548 - DNA, 25 bp, Homo sapien
tccacatagggcaacgattcaatta

SEQ ID NO: 3104549 - DNA, 25 bp, Homo sapien
ctgcgacaccgcgaacgtggcaggc

SEQ ID NO: 3104550 - DNA, 25 bp, Homo sapien
tttacctgcgacaccgcgaacgtgg

SEQ ID NO: 3104551 - DNA, 25 bp, Homo sapien
caccgcgaacgtggcaggccacgat

SEQ ID NO: 3104552 - DNA, 25 bp, Homo sapien
gacaccgcgaacgtggcaggccacg

SEQ ID NO: 3104553 - DNA, 25 bp, Homo sapien
tcgagggatactgtcctccacagcc

SEQ ID NO: 3104554 - DNA, 25 bp, Homo sapien
tcctgagtgtcaacagagatgacaa

SEQ ID NO: 3104555 - DNA, 25 bp, Homo sapien
cattgtccctaagaaggtccagagg

SEQ ID NO: 3104556 - DNA, 25 bp, Homo sapien
gggtgctcgagggatactgtcctcc

SEQ ID NO: 3104557 - DNA, 25 bp, Homo sapien
tccccgcagtaggacttctccgaag

SEQ ID NO: 3104558 - DNA, 25 bp, Homo sapien
agtaggacttctccgaagacacggg

SEQ ID NO: 3104559 - DNA, 25 bp, Homo sapien
ccgcagtaggacttctccgaagaca

SEQ ID NO: 3104560 - DNA, 25 bp, Homo sapien
tctgtgtccccgcagtaggacttct

SEQ ID NO: 3104561 - DNA, 25 bp, Homo sapien
tggcagtcctcataacgcccaggaa

SEQ ID NO: 3104562 - DNA, 25 bp, Homo sapien
caaaaatctcagaatgacatcttgc

SEQ ID NO: 3104563 - DNA, 25 bp, Homo sapien
tactgtcttgcaatcctaaggagaa

SEQ ID NO: 3104564 - DNA, 25 bp, Homo sapien
taaaggacagggaactactgtcttg

SEQ ID NO: 3104565 - DNA, 25 bp, Homo sapien
tccctacaaagctatgagagacaac

SEQ ID NO: 3104566 - DNA, 25 bp, Homo sapien
tgaaaaggacccatgaggcctgatg

SEQ ID NO: 3104567 - DNA, 25 bp, Homo sapien
tttcagaaccctggcttaggcctga

SEQ ID NO: 3104568 - DNA, 25 bp, Homo sapien
gagacaacaggactaatccgccagc

SEQ ID NO: 3104569 - DNA, 25 bp, Homo sapien
ccctgggatcagatcgctgtgcaaa

SEQ ID NO: 3104570 - DNA, 25 bp, Homo sapien
agatgagagggccacacaacctggc

SEQ ID NO: 3104571 - DNA, 25 bp, Homo sapien
aagctgaccccaatctgaacctgca

SEQ ID NO: 3104572 - DNA, 25 bp, Homo sapien
gacagcatagcccacaccatcttgt

SEQ ID NO: 3104573 - DNA, 25 bp, Homo sapien
gactttgcccatgagtatgttacca

SEQ ID NO: 3104574 - DNA, 25 bp, Homo sapien
atatcggagacggtgggcaaagcca

SEQ ID NO: 3104575 - DNA, 25 bp, Homo sapien
tgagtgcgccacgtgagagatccaa

SEQ ID NO: 3104576 - DNA, 25 bp, Homo sapien
tgttggtcagcactcaggagggtaa

SEQ ID NO: 3104577 - DNA, 25 bp, Homo sapien
atgtctgcctaacttcctcctctaa

SEQ ID NO: 3104578 - DNA, 25 bp, Homo sapien
tctaacaagcagagccatggaatga

SEQ ID NO: 3104579 - DNA, 25 bp, Homo sapien
tcaggcagggtcggccagcctgcac

SEQ ID NO: 3104580 - DNA, 25 bp, Homo sapien
acaagcagagccatggaatgaagac

SEQ ID NO: 3104581 - DNA, 25 bp, Homo sapien
ccagggaggcagcgttctccccaac

SEQ ID NO: 3104582 - DNA, 25 bp, Homo sapien
tccagggaggcagcgttctccccaa

SEQ ID NO: 3104583 - DNA, 25 bp, Homo sapien
agggatgtcacctcaataaaggagg

SEQ ID NO: 3104584 - DNA, 25 bp, Homo sapien
ccagctcctttctgtaggccccagg

SEQ ID NO: 3104585 - DNA, 25 bp, Homo sapien
cagctcctttctgtaggccccagga

SEQ ID NO: 3104586 - DNA, 25 bp, Homo sapien
cctcaataaaggaggcctcccagcc

SEQ ID NO: 3104587 - DNA, 25 bp, Homo sapien
taaaatcacttgagaaatacgcctg

SEQ ID NO: 3104588 - DNA, 25 bp, Homo sapien
cagtgaaaaggctacccacagagtt

SEQ ID NO: 3104589 - DNA, 25 bp, Homo sapien
agataccactttacaacctctaggg

SEQ ID NO: 3104590 - DNA, 25 bp, Homo sapien
tctctgataaggatctagcatctgg

SEQ ID NO: 3104591 - DNA, 25 bp, Homo sapien
gggtactgtcctccgattagatggt

SEQ ID NO: 3104592 - DNA, 25 bp, Homo sapien
gtggctttcctatgatgcccatgaa

SEQ ID NO: 3104593 - DNA, 25 bp, Homo sapien
cctccgattagatggtcagcctggg

SEQ ID NO: 3104594 - DNA, 25 bp, Homo sapien
ctgggccttgccgtgtggctttcct

SEQ ID NO: 3104595 - DNA, 25 bp, Homo sapien
tcagtgacataaacatcctcctctc

SEQ ID NO: 3104596 - DNA, 25 bp, Homo sapien
tggatgcctcttgtgttctgtggtc

SEQ ID NO: 3104597 - DNA, 25 bp, Homo sapien
catgctgtgcccgatgggctcagtg

SEQ ID NO: 3104598 - DNA, 25 bp, Homo sapien
tctatctgctgcatctgactcctgg

SEQ ID NO: 3104599 - DNA, 25 bp, Homo sapien
ggtttcaatggaatgcaaataccca

SEQ ID NO: 3104600 - DNA, 25 bp, Homo sapien
atggaatgcaaatacccacctgccc

SEQ ID NO: 3104601 - DNA, 25 bp, Homo sapien
cacagacaggtttcaatggaatgca

SEQ ID NO: 3104602 - DNA, 25 bp, Homo sapien
acaagcacagacaggtttcaatgga

SEQ ID NO: 3104603 - DNA, 25 bp, Homo sapien
ctccgtctttgtccaggaaatgctg

SEQ ID NO: 3104604 - DNA, 25 bp, Homo sapien
aattcctgctccttcaaaaggtaca

SEQ ID NO: 3104605 - DNA, 25 bp, Homo sapien
tccgtctttgtccaggaaatgctgg

SEQ ID NO: 3104606 - DNA, 25 bp, Homo sapien
aatgctgggaaattcctgctccttc

SEQ ID NO: 3104607 - DNA, 25 bp, Homo sapien
catggaagtcaatagcatgtcctgc

SEQ ID NO: 3104608 - DNA, 25 bp, Homo sapien
agtcaatagcatgtcctgcactggg

SEQ ID NO: 3104609 - DNA, 25 bp, Homo sapien
gaagtcaatagcatgtcctgcactg

SEQ ID NO: 3104610 - DNA, 25 bp, Homo sapien
tctcatggaagtcaatagcatgtcc

SEQ ID NO: 3104611 - DNA, 25 bp, Homo sapien
tcactgtcctccttccaaaacccta

SEQ ID NO: 3104612 - DNA, 25 bp, Homo sapien
gggctcctgcactctgccatgcact

SEQ ID NO: 3104613 - DNA, 25 bp, Homo sapien
actgagctgagcttaggacggggac

SEQ ID NO: 3104614 - DNA, 25 bp, Homo sapien
gccagccaagacttcaagttcactg

SEQ ID NO: 3104615 - DNA, 25 bp, Homo sapien
aacagtggccatgcagagaagcagg

SEQ ID NO: 3104616 - DNA, 25 bp, Homo sapien
ccggatgctgcggaggacatgaaca

SEQ ID NO: 3104617 - DNA, 25 bp, Homo sapien
gaaaacatcatcatcgggtctgcaa

SEQ ID NO: 3104618 - DNA, 25 bp, Homo sapien
caggtaggtgtgcattgtgccggat

SEQ ID NO: 3104619 - DNA, 25 bp, Homo sapien
cacctaagcctgtgagttcgaggct

SEQ ID NO: 3104620 - DNA, 25 bp, Homo sapien
ctaagcctgtgagttcgaggctgca

SEQ ID NO: 3104621 - DNA, 25 bp, Homo sapien
atcacctaagcctgtgagttcgagg

SEQ ID NO: 3104622 - DNA, 25 bp, Homo sapien
cctaagcctgtgagttcgaggctgc

SEQ ID NO: 3104623 - DNA, 25 bp, Homo sapien
tccttcctggcagttgatcatagaa

SEQ ID NO: 3104624 - DNA, 25 bp, Homo sapien
gcagttgatcatagaagttcatggt

SEQ ID NO: 3104625 - DNA, 25 bp, Homo sapien
tttggtctgataatgtgtcatatgg

SEQ ID NO: 3104626 - DNA, 25 bp, Homo sapien
atccccagatccgaaaaccaagagc

SEQ ID NO: 3104627 - DNA, 25 bp, Homo sapien
tgtgcagggcccgtacgcatgcact

SEQ ID NO: 3104628 - DNA, 25 bp, Homo sapien
gcacctgtcgttgtggagattccac

SEQ ID NO: 3104629 - DNA, 25 bp, Homo sapien
cagtgacattcagcgtgtgcagggc

SEQ ID NO: 3104630 - DNA, 25 bp, Homo sapien
ggagatggtgagccgcagacatcac

SEQ ID NO: 3104631 - DNA, 25 bp, Homo sapien
cccgagacctcgaatgcaacgtctt

SEQ ID NO: 3104632 - DNA, 25 bp, Homo sapien
cgaatgcaacgtcttcagatcccaa

SEQ ID NO: 3104633 - DNA, 25 bp, Homo sapien
gagacctcgaatgcaacgtcttcag

SEQ ID NO: 3104634 - DNA, 25 bp, Homo sapien
ggagccccgagacctcgaatgcaac

SEQ ID NO: 3104635 - DNA, 25 bp, Homo sapien
ctttcattaagctgaggccatattg

SEQ ID NO: 3104636 - DNA, 25 bp, Homo sapien
tctcaaaaactcacgcccacgagaa

SEQ ID NO: 3104637 - DNA, 25 bp, Homo sapien
cacgcccacgagaagtctcagaatg

SEQ ID NO: 3104638 - DNA, 25 bp, Homo sapien
gagtgagggtggatcccaatccagt

SEQ ID NO: 3104639 - DNA, 25 bp, Homo sapien
ctggatatcagactttggcctccag

SEQ ID NO: 3104640 - DNA, 25 bp, Homo sapien
ggcctccagaactgtaagatggtac

SEQ ID NO: 3104641 - DNA, 25 bp, Homo sapien
tttggcctccagaactgtaagatgg

SEQ ID NO: 3104642 - DNA, 25 bp, Homo sapien
tggatatcagactttggcctccaga

SEQ ID NO: 3104643 - DNA, 25 bp, Homo sapien
tgttgttaaagccaggggtcctcaa

SEQ ID NO: 3104644 - DNA, 25 bp, Homo sapien
tctgttgttaaagccaggggtcctc

SEQ ID NO: 3104645 - DNA, 25 bp, Homo sapien
ggtcctcaacccctggggccacaga

SEQ ID NO: 3104646 - DNA, 25 bp, Homo sapien
tcctcaacccctggggccacagaca

SEQ ID NO: 3104647 - DNA, 25 bp, Homo sapien
ttggcgttccaacaccctgatggtg

SEQ ID NO: 3104648 - DNA, 25 bp, Homo sapien
tccctcgtgtagagttctgtcttgc

SEQ ID NO: 3104649 - DNA, 25 bp, Homo sapien
gacagtccggccctttctctgaatt

SEQ ID NO: 3104650 - DNA, 25 bp, Homo sapien
tctctgaattagttgctccctcgtg

SEQ ID NO: 3104651 - DNA, 25 bp, Homo sapien
ctgcctgaacacgatgtcatctgtg

SEQ ID NO: 3104652 - DNA, 25 bp, Homo sapien
aacaaggccaaccaatctggctggg

SEQ ID NO: 3104653 - DNA, 25 bp, Homo sapien
ggacatttggtccttgaggaactgc

SEQ ID NO: 3104654 - DNA, 25 bp, Homo sapien
tctggctgggacatttggtccttga

SEQ ID NO: 3104655 - DNA, 25 bp, Homo sapien
cggagtggcgggatcaggtatgttc

SEQ ID NO: 3104656 - DNA, 25 bp, Homo sapien
ggagtggcgggatcaggtatgttca

SEQ ID NO: 3104657 - DNA, 25 bp, Homo sapien
gagtggcgggatcaggtatgttcat

SEQ ID NO: 3104658 - DNA, 25 bp, Homo sapien
ggcatccggtatcttcccacattgg

SEQ ID NO: 3104659 - DNA, 25 bp, Homo sapien
gagttccagtgaggacacctttgca

SEQ ID NO: 3104660 - DNA, 25 bp, Homo sapien
tgagtgaggccttattcaaacggta

SEQ ID NO: 3104661 - DNA, 25 bp, Homo sapien
aacggtaaagggtgaagctgctgcc

SEQ ID NO: 3104662 - DNA, 25 bp, Homo sapien
atccgggtgccctggaatggcccca

SEQ ID NO: 3104663 - DNA, 25 bp, Homo sapien
tcatatgcagtcaccggatccgggt

SEQ ID NO: 3104664 - DNA, 25 bp, Homo sapien
cattcgagtaacgtccttctggcag

SEQ ID NO: 3104665 - DNA, 25 bp, Homo sapien
aaaacatgagattcaggagcctcat

SEQ ID NO: 3104666 - DNA, 25 bp, Homo sapien
tgcccagcacaatgtgagaacttag

SEQ ID NO: 3104667 - DNA, 25 bp, Homo sapien
tgatgtctgctgtcaccgacggtgc

SEQ ID NO: 3104668 - DNA, 25 bp, Homo sapien
tgggctcgggctgtgatgtgtgatg

SEQ ID NO: 3104669 - DNA, 25 bp, Homo sapien
cttgagtgaggccaatgggctcggg

SEQ ID NO: 3104670 - DNA, 25 bp, Homo sapien
gaatgagcagggctaaggcagcagc

SEQ ID NO: 3104671 - DNA, 25 bp, Homo sapien
ggaatgagcagggctaaggcagcag

SEQ ID NO: 3104672 - DNA, 25 bp, Homo sapien
gtgggcgagacccatggctgggaat

SEQ ID NO: 3104673 - DNA, 25 bp, Homo sapien
agaggggtgggcgagacccatggct

SEQ ID NO: 3104674 - DNA, 25 bp, Homo sapien
tgcatccagagtagtccagttaggg

SEQ ID NO: 3104675 - DNA, 25 bp, Homo sapien
gatgctcgccaaccctaaaggatca

SEQ ID NO: 3104676 - DNA, 25 bp, Homo sapien
aaacacttgagaaccaggccagggc

SEQ ID NO: 3104677 - DNA, 25 bp, Homo sapien
caggaaaatgctgcgtgtcacggct

SEQ ID NO: 3104678 - DNA, 25 bp, Homo sapien
ggacgctctgctcggcagcagtgca

SEQ ID NO: 3104679 - DNA, 25 bp, Homo sapien
ctagtctctaggaatccagggcggg

SEQ ID NO: 3104680 - DNA, 25 bp, Homo sapien
ggcctggcagaggacgctctgctcg

SEQ ID NO: 3104681 - DNA, 25 bp, Homo sapien
cccgcagaccaacgcccttggctgc

SEQ ID NO: 3104682 - DNA, 25 bp, Homo sapien
tccgtgctgcgagcatttcgtagaa

SEQ ID NO: 3104683 - DNA, 25 bp, Homo sapien
catttcgtagaaagggtccctgctg

SEQ ID NO: 3104684 - DNA, 25 bp, Homo sapien
gagaccttctttttccgtgctgcga

SEQ ID NO: 3104685 - DNA, 25 bp, Homo sapien
cgagcatttcgtagaaagggtccct

SEQ ID NO: 3104686 - DNA, 25 bp, Homo sapien
gagcacctgcagtggactggcaaca

SEQ ID NO: 3104687 - DNA, 25 bp, Homo sapien
gacacacttcgaaagagacacagga

SEQ ID NO: 3104688 - DNA, 25 bp, Homo sapien
catcactgcaaaggccaagttagcg

SEQ ID NO: 3104689 - DNA, 25 bp, Homo sapien
taatcaagccgtgtcacatgcagtc

SEQ ID NO: 3104690 - DNA, 25 bp, Homo sapien
cagcagctgctatggctctcctggg

SEQ ID NO: 3104691 - DNA, 25 bp, Homo sapien
ccctgctgaacggtggcaccagcag

SEQ ID NO: 3104692 - DNA, 25 bp, Homo sapien
gctgaacggtggcaccagcagctgc

SEQ ID NO: 3104693 - DNA, 25 bp, Homo sapien
agcagctgctatggctctcctgggc

SEQ ID NO: 3104694 - DNA, 25 bp, Homo sapien
gaaacatgtcccgatgggatctcac

SEQ ID NO: 3104695 - DNA, 25 bp, Homo sapien
aatgctaggaactgaagagcactag

SEQ ID NO: 3104696 - DNA, 25 bp, Homo sapien
agagcactagaaacatgtcccgatg

SEQ ID NO: 3104697 - DNA, 25 bp, Homo sapien
ctccccggggaatgctaggaactga

SEQ ID NO: 3104698 - DNA, 25 bp, Homo sapien
ctttcacgagggaatctggcggccg

SEQ ID NO: 3104699 - DNA, 25 bp, Homo sapien
tggcggccgggacacctgctttcat

SEQ ID NO: 3104700 - DNA, 25 bp, Homo sapien
tgggaagcggtctgaccacctgaag

SEQ ID NO: 3104701 - DNA, 25 bp, Homo sapien
tgttggggtgaatctcccttggctt

SEQ ID NO: 3104702 - DNA, 25 bp, Homo sapien
tcctcacatgcaagctggagatgcc

SEQ ID NO: 3104703 - DNA, 25 bp, Homo sapien
cagaggcagagtgtcaggcgatgag

SEQ ID NO: 3104704 - DNA, 25 bp, Homo sapien
ggctgggctgcggtcggacaccagg

SEQ ID NO: 3104705 - DNA, 25 bp, Homo sapien
tgcttctcaactcccgcttcctcac

SEQ ID NO: 3104706 - DNA, 25 bp, Homo sapien
gcctagccgacacactcgatggcag

SEQ ID NO: 3104707 - DNA, 25 bp, Homo sapien
cacctccctgggttccggagagtca

SEQ ID NO: 3104708 - DNA, 25 bp, Homo sapien
gatcccatattcaaagagcacatct

SEQ ID NO: 3104709 - DNA, 25 bp, Homo sapien
cgatggcagccgctgttaccgctga

SEQ ID NO: 3104710 - DNA, 25 bp, Homo sapien
ggtacagcgtgaagaaagtcccagc

SEQ ID NO: 3104711 - DNA, 25 bp, Homo sapien
caagaaggtttgaggacagtgtgcc

SEQ ID NO: 3104712 - DNA, 25 bp, Homo sapien
tacagaaccgaatgctgggaccacc

SEQ ID NO: 3104713 - DNA, 25 bp, Homo sapien
taatggtcccacctcgcactgggtg

SEQ ID NO: 3104714 - DNA, 25 bp, Homo sapien
ggatattgcacaccctcgggaacgg

SEQ ID NO: 3104715 - DNA, 25 bp, Homo sapien
ggaaaacagctaggtgaactctcat

SEQ ID NO: 3104716 - DNA, 25 bp, Homo sapien
cagaggacttacagggaccttcgca

SEQ ID NO: 3104717 - DNA, 25 bp, Homo sapien
tcacacagaagaggtaggttaccca

SEQ ID NO: 3104718 - DNA, 25 bp, Homo sapien
agagaaggcaaagtcagaatgctca

SEQ ID NO: 3104719 - DNA, 25 bp, Homo sapien
tcagaatgctcactgctgaccctcg

SEQ ID NO: 3104720 - DNA, 25 bp, Homo sapien
gcaaagtcagaatgctcactgctga

SEQ ID NO: 3104721 - DNA, 25 bp, Homo sapien
gctcactgctgaccctcgcacaggg

SEQ ID NO: 3104722 - DNA, 25 bp, Homo sapien
gaagaacattaagcaagagaagcca

SEQ ID NO: 3104723 - DNA, 25 bp, Homo sapien
ggaagaacattaagcaagagaagcc

SEQ ID NO: 3104724 - DNA, 25 bp, Homo sapien
aagaacattaagcaagagaagccaa

SEQ ID NO: 3104725 - DNA, 25 bp, Homo sapien
caggattcacaaattacagaacatg

SEQ ID NO: 3104726 - DNA, 25 bp, Homo sapien
tatgagaatgagagcggcttcgtca

SEQ ID NO: 3104727 - DNA, 25 bp, Homo sapien
tcacaggattcacaaattacagaac

SEQ ID NO: 3104728 - DNA, 25 bp, Homo sapien
tctcacaggattcacaaattacaga

SEQ ID NO: 3104729 - DNA, 25 bp, Homo sapien
ttaatgcacttaatccactcctcct

SEQ ID NO: 3104730 - DNA, 25 bp, Homo sapien
gcgtcggagctgagatccggtaaac

SEQ ID NO: 3104731 - DNA, 25 bp, Homo sapien
gctgagatccggtaaacagtgtggt

SEQ ID NO: 3104732 - DNA, 25 bp, Homo sapien
ttctcctcgggcgtcggagctgaga

SEQ ID NO: 3104733 - DNA, 25 bp, Homo sapien
ttgtcggggatataaagctcaaagc

SEQ ID NO: 3104734 - DNA, 25 bp, Homo sapien
tattgtcggggatataaagctcaaa

SEQ ID NO: 3104735 - DNA, 25 bp, Homo sapien
ctttattgtcggggatataaagctc

SEQ ID NO: 3104736 - DNA, 25 bp, Homo sapien
ttattgtcggggatataaagctcaa

SEQ ID NO: 3104737 - DNA, 25 bp, Homo sapien
gatactcagattctctaaagggatg

SEQ ID NO: 3104738 - DNA, 25 bp, Homo sapien
tcccggatactcagattctctaaag

SEQ ID NO: 3104739 - DNA, 25 bp, Homo sapien
tccacttcccggatactcagattct

SEQ ID NO: 3104740 - DNA, 25 bp, Homo sapien
taaagggatgattccacggggctcc

SEQ ID NO: 3104741 - DNA, 25 bp, Homo sapien
gtagtaaaggcagttgtcagtcaga

SEQ ID NO: 3104742 - DNA, 25 bp, Homo sapien
taaaggcagttgtcagtcagaatga

SEQ ID NO: 3104743 - DNA, 25 bp, Homo sapien
aaggcagttgtcagtcagaatgaac

SEQ ID NO: 3104744 - DNA, 25 bp, Homo sapien
tagtaaaggcagttgtcagtcagaa

SEQ ID NO: 3104745 - DNA, 25 bp, Homo sapien
tttctctcttgccctcatcacaaat

SEQ ID NO: 3104746 - DNA, 25 bp, Homo sapien
ctccgatcatgctttctctcttgcc

SEQ ID NO: 3104747 - DNA, 25 bp, Homo sapien
gctttctctcttgccctcatcacaa

SEQ ID NO: 3104748 - DNA, 25 bp, Homo sapien
tctctcttgccctcatcacaaatag

SEQ ID NO: 3104749 - DNA, 25 bp, Homo sapien
tagtatctgggctgtcaaagctaac

SEQ ID NO: 3104750 - DNA, 25 bp, Homo sapien
caagataatctttgtactgttctaa

SEQ ID NO: 3104751 - DNA, 25 bp, Homo sapien
taaaatacgagatgcctcatgaatt

SEQ ID NO: 3104752 - DNA, 25 bp, Homo sapien
tgtcatcctggtctaagaaccaaga

SEQ ID NO: 3104753 - DNA, 25 bp, Homo sapien
agatgcagaaggaagtgacgatgca

SEQ ID NO: 3104754 - DNA, 25 bp, Homo sapien
gtgggggcaggagcgccaggtacaa

SEQ ID NO: 3104755 - DNA, 25 bp, Homo sapien
tgcagaaggaagtgacgatgcactg

SEQ ID NO: 3104756 - DNA, 25 bp, Homo sapien
ggcttgccatgcacactgcctgtgg

SEQ ID NO: 3104757 - DNA, 25 bp, Homo sapien
cattcccgtcgtcttctgggatttt

SEQ ID NO: 3104758 - DNA, 25 bp, Homo sapien
cgagtttcaatagccagccttctcg

SEQ ID NO: 3104759 - DNA, 25 bp, Homo sapien
gaggtcattcccgtcgtcttctggg

SEQ ID NO: 3104760 - DNA, 25 bp, Homo sapien
tcaatagccagccttctcggtctgg

SEQ ID NO: 3104761 - DNA, 25 bp, Homo sapien
gacgatcctgttcccagtgaactct

SEQ ID NO: 3104762 - DNA, 25 bp, Homo sapien
aaaagacgatcctgttcccagtgaa

SEQ ID NO: 3104763 - DNA, 25 bp, Homo sapien
gacttgaatgaagaccattcttcct

SEQ ID NO: 3104764 - DNA, 25 bp, Homo sapien
tgacttgaatgaagaccattcttcc

SEQ ID NO: 3104765 - DNA, 25 bp, Homo sapien
acagtgggcttatctttgacattgg

SEQ ID NO: 3104766 - DNA, 25 bp, Homo sapien
tggcaaaggagaggacgtaacaagt

SEQ ID NO: 3104767 - DNA, 25 bp, Homo sapien
catcattgatgcctcggttcatggc

SEQ ID NO: 3104768 - DNA, 25 bp, Homo sapien
cagactggtgttcaacatgatgatg

SEQ ID NO: 3104769 - DNA, 25 bp, Homo sapien
gatgagagaaaagcaaaggggagcc

SEQ ID NO: 3104770 - DNA, 25 bp, Homo sapien
gagaaaagcaaaggggagccgttgc

SEQ ID NO: 3104771 - DNA, 25 bp, Homo sapien
tgagagaaaagcaaaggggagccgt

SEQ ID NO: 3104772 - DNA, 25 bp, Homo sapien
gaaaagcaaaggggagccgttgcat

SEQ ID NO: 3104773 - DNA, 25 bp, Homo sapien
aaactaggatgaatgatcgtattta

SEQ ID NO: 3104774 - DNA, 25 bp, Homo sapien
taaactaggatgaatgatcgtattt

SEQ ID NO: 3104775 - DNA, 25 bp, Homo sapien
aactaggatgaatgatcgtatttac

SEQ ID NO: 3104776 - DNA, 25 bp, Homo sapien
tgcactgacaatatcgctgggcaaa

SEQ ID NO: 3104777 - DNA, 25 bp, Homo sapien
ggaacacgccattattgcactgaca

SEQ ID NO: 3104778 - DNA, 25 bp, Homo sapien
aatatcgctgggcaaacgcctccat

SEQ ID NO: 3104779 - DNA, 25 bp, Homo sapien
ccgtggactggaacacgccattatt

SEQ ID NO: 3104780 - DNA, 25 bp, Homo sapien
tatttctctatgaattgttaaactg

SEQ ID NO: 3104781 - DNA, 25 bp, Homo sapien
agtgggtaaagacagagtgttccag

SEQ ID NO: 3104782 - DNA, 25 bp, Homo sapien
tctctatgaattgttaaactgccaa

SEQ ID NO: 3104783 - DNA, 25 bp, Homo sapien
ctgagtgggtaaagacagagtgttc

SEQ ID NO: 3104784 - DNA, 25 bp, Homo sapien
cctggacgagattaagatcagtgaa

SEQ ID NO: 3104785 - DNA, 25 bp, Homo sapien
tcatgcagctccacaaatgcatgaa

SEQ ID NO: 3104786 - DNA, 25 bp, Homo sapien
cgtagtgcctggacgagattaagat

SEQ ID NO: 3104787 - DNA, 25 bp, Homo sapien
taagatcagtgaactcatgcagctc

SEQ ID NO: 3104788 - DNA, 25 bp, Homo sapien
cgcctttatataagaactgggcaat

SEQ ID NO: 3104789 - DNA, 25 bp, Homo sapien
cttgttgagcccttcgcctttatat

SEQ ID NO: 3104790 - DNA, 25 bp, Homo sapien
cgttctctattaagaactggatccc

SEQ ID NO: 3104791 - DNA, 25 bp, Homo sapien
ttcacaagtgttcttcaggaggtcg

SEQ ID NO: 3104792 - DNA, 25 bp, Homo sapien
tttttcctgcccatggctacctgtt

SEQ ID NO: 3104793 - DNA, 25 bp, Homo sapien
ttaaattttttcctgcccatggcta

SEQ ID NO: 3104794 - DNA, 25 bp, Homo sapien
tcctgcccatggctacctgtttgtt

SEQ ID NO: 3104795 - DNA, 25 bp, Homo sapien
ctgcccatggctacctgtttgttcc

SEQ ID NO: 3104796 - DNA, 25 bp, Homo sapien
gctacttctgctatctcatccttca

SEQ ID NO: 3104797 - DNA, 25 bp, Homo sapien
tctgtggatcccaggttttcaattt

SEQ ID NO: 3104798 - DNA, 25 bp, Homo sapien
tggatcccaggttttcaatttcatt

SEQ ID NO: 3104799 - DNA, 25 bp, Homo sapien
tttcaatttcattagctacttctgc

SEQ ID NO: 3104800 - DNA, 25 bp, Homo sapien
ttttctccgtcggatgttctccagt

SEQ ID NO: 3104801 - DNA, 25 bp, Homo sapien
gctcctgttttctccgtcggatgtt

SEQ ID NO: 3104802 - DNA, 25 bp, Homo sapien
gacgctcctctgctgtcaggtcact

SEQ ID NO: 3104803 - DNA, 25 bp, Homo sapien
tccagttcttgacgctcctctgctg

SEQ ID NO: 3104804 - DNA, 25 bp, Homo sapien
tgtgtattggaggacggagccttaa

SEQ ID NO: 3104805 - DNA, 25 bp, Homo sapien
taaactgcgtccctgagaactcaag

SEQ ID NO: 3104806 - DNA, 25 bp, Homo sapien
gaactcaagggtgatcactcaggtg

SEQ ID NO: 3104807 - DNA, 25 bp, Homo sapien
taaataagttcacctacacacctgc

SEQ ID NO: 3104808 - DNA, 25 bp, Homo sapien
ctattcatgccgcttctctcctgtg

SEQ ID NO: 3104809 - DNA, 25 bp, Homo sapien
ctcctgtgtagccattagggttaaa

SEQ ID NO: 3104810 - DNA, 25 bp, Homo sapien
tattcatgccgcttctctcctgtgt

SEQ ID NO: 3104811 - DNA, 25 bp, Homo sapien
cagagggggagccgccctgacacac

SEQ ID NO: 3104812 - DNA, 25 bp, Homo sapien
gaggggcacccggaatccatgccca

SEQ ID NO: 3104813 - DNA, 25 bp, Homo sapien
cccacaaaggttaatctgcaaggtg

SEQ ID NO: 3104814 - DNA, 25 bp, Homo sapien
gccctcctcgcccattgccagaggg

SEQ ID NO: 3104815 - DNA, 25 bp, Homo sapien
ccatgcccacaaaggttaatctgca

SEQ ID NO: 3104816 - DNA, 25 bp, Homo sapien
cacactgtcctaaatccccgtgggt

SEQ ID NO: 3104817 - DNA, 25 bp, Homo sapien
gatgcccggggatatgccataaagt

SEQ ID NO: 3104818 - DNA, 25 bp, Homo sapien
gttccacggaaaacgcagctctctg

SEQ ID NO: 3104819 - DNA, 25 bp, Homo sapien
cgtcaaatgaacgtgtccaaggcat

SEQ ID NO: 3104820 - DNA, 25 bp, Homo sapien
aggtcacagctctccacgtcagagg

SEQ ID NO: 3104821 - DNA, 25 bp, Homo sapien
gagccggagcaaggacagcatgtgt

SEQ ID NO: 3104822 - DNA, 25 bp, Homo sapien
cagcaacatcaaagcctcggcaggt

SEQ ID NO: 3104823 - DNA, 25 bp, Homo sapien
ccctgcaggtggaaactcgctgggc

SEQ ID NO: 3104824 - DNA, 25 bp, Homo sapien
aagcctcctggcgagtgcatccttc

SEQ ID NO: 3104825 - DNA, 25 bp, Homo sapien
gaagaaagacgagacctatggcagg

SEQ ID NO: 3104826 - DNA, 25 bp, Homo sapien
tcatgaggctgctcttggaccgtcc

SEQ ID NO: 3104827 - DNA, 25 bp, Homo sapien
tccttctggtgccaactcagtgtgt

SEQ ID NO: 3104828 - DNA, 25 bp, Homo sapien
gaatcagaatgccagatgagacgaa

SEQ ID NO: 3104829 - DNA, 25 bp, Homo sapien
ttggcactagcaaaacataaagagc

SEQ ID NO: 3104830 - DNA, 25 bp, Homo sapien
cacttaagagtggatatgctcccca

SEQ ID NO: 3104831 - DNA, 25 bp, Homo sapien
gggctacacaggcagtctcccgtgc

SEQ ID NO: 3104832 - DNA, 25 bp, Homo sapien
accagcagtaaactgcatgcaggtt

SEQ ID NO: 3104833 - DNA, 25 bp, Homo sapien
cagcagtaaactgcatgcaggttct

SEQ ID NO: 3104834 - DNA, 25 bp, Homo sapien
agcagtaaactgcatgcaggttctg

SEQ ID NO: 3104835 - DNA, 25 bp, Homo sapien
tgcatgcaggttctgtcagcctgca

SEQ ID NO: 3104836 - DNA, 25 bp, Homo sapien
gacaggcatgtaagcccgtagcagc

SEQ ID NO: 3104837 - DNA, 25 bp, Homo sapien
gaattccaggcgatgccaagaggct

SEQ ID NO: 3104838 - DNA, 25 bp, Homo sapien
tactgagcatctgccataggcgcag

SEQ ID NO: 3104839 - DNA, 25 bp, Homo sapien
gaaggaccaacggattccccagatg

SEQ ID NO: 3104840 - DNA, 25 bp, Homo sapien
gacacgaaaagtccgttctgtgctt

SEQ ID NO: 3104841 - DNA, 25 bp, Homo sapien
catcttgtttccttacagcgggaca

SEQ ID NO: 3104842 - DNA, 25 bp, Homo sapien
ctcttcggttttaaggaccatcttg

SEQ ID NO: 3104843 - DNA, 25 bp, Homo sapien
gagagcggtaacttactgggagcca

SEQ ID NO: 3104844 - DNA, 25 bp, Homo sapien
gctcctccagaccttttgactttga

SEQ ID NO: 3104845 - DNA, 25 bp, Homo sapien
cattcttgttatacttccagttcac

SEQ ID NO: 3104846 - DNA, 25 bp, Homo sapien
tgctcccactattcaatgcctcatt

SEQ ID NO: 3104847 - DNA, 25 bp, Homo sapien
gactctgactggctcgtttaatagc

SEQ ID NO: 3104848 - DNA, 25 bp, Homo sapien
gttctcgtccacagtacaccagact

SEQ ID NO: 3104849 - DNA, 25 bp, Homo sapien
ctctgttctcgtccacagtacacca

SEQ ID NO: 3104850 - DNA, 25 bp, Homo sapien
tgttctcgtccacagtacaccagac

SEQ ID NO: 3104851 - DNA, 25 bp, Homo sapien
ttactttccagcttcgctcccgtgt

SEQ ID NO: 3104852 - DNA, 25 bp, Homo sapien
caacctcaccacagccctcggaggc

SEQ ID NO: 3104853 - DNA, 25 bp, Homo sapien
tcgccaacctcaccacagccctcgg

SEQ ID NO: 3104854 - DNA, 25 bp, Homo sapien
gccaacctcaccacagccctcggag

SEQ ID NO: 3104855 - DNA, 25 bp, Homo sapien
catcgccaacctcaccacagccctc

SEQ ID NO: 3104856 - DNA, 25 bp, Homo sapien
cagcagttttatacacaatagccca

SEQ ID NO: 3104857 - DNA, 25 bp, Homo sapien
tcatacatgaatgttcccagcagtt

SEQ ID NO: 3104858 - DNA, 25 bp, Homo sapien
cagccattccatgtgtaggtataac

SEQ ID NO: 3104859 - DNA, 25 bp, Homo sapien
aatggtctgtcacacaatccagcca

SEQ ID NO: 3104860 - DNA, 25 bp, Homo sapien
catgtctaaattgcaaggcccatag

SEQ ID NO: 3104861 - DNA, 25 bp, Homo sapien
tagagtgtccagctcattataggtg

SEQ ID NO: 3104862 - DNA, 25 bp, Homo sapien
accatgcccggactcaaggtttgaa

SEQ ID NO: 3104863 - DNA, 25 bp, Homo sapien
tcttggttagaggtcaaagttctcc

SEQ ID NO: 3104864 - DNA, 25 bp, Homo sapien
tcagctgtaggcaaacccaattcat

SEQ ID NO: 3104865 - DNA, 25 bp, Homo sapien
aattgtagccaatcgaagcccactg

SEQ ID NO: 3104866 - DNA, 25 bp, Homo sapien
catgtcaccccacgagacttgaggt

SEQ ID NO: 3104867 - DNA, 25 bp, Homo sapien
tttcggcatccacggagttatggca

SEQ ID NO: 3104868 - DNA, 25 bp, Homo sapien
tctttactctcagagtacaaaaaca

SEQ ID NO: 3104869 - DNA, 25 bp, Homo sapien
tcaaggtccattgttcagggacatt

SEQ ID NO: 3104870 - DNA, 25 bp, Homo sapien
aaaaattatctttactctcagagta

SEQ ID NO: 3104871 - DNA, 25 bp, Homo sapien
gacatttccattacctgacaacagg

SEQ ID NO: 3104872 - DNA, 25 bp, Homo sapien
tctctgttccggtaatttgatgaca

SEQ ID NO: 3104873 - DNA, 25 bp, Homo sapien
tggaaagggcggcttttttgcacat

SEQ ID NO: 3104874 - DNA, 25 bp, Homo sapien
gctgatcagcagaatatagagtgga

SEQ ID NO: 3104875 - DNA, 25 bp, Homo sapien
caacataaccttctgactcaagata

SEQ ID NO: 3104876 - DNA, 25 bp, Homo sapien
taataatgtatattgtcttaagcca

SEQ ID NO: 3104877 - DNA, 25 bp, Homo sapien
ctgtaagataataatgtatattgtc

SEQ ID NO: 3104878 - DNA, 25 bp, Homo sapien
aatacaatggaaatgtccgtccggc

SEQ ID NO: 3104879 - DNA, 25 bp, Homo sapien
aacacaaccctgctgaaatacattt

SEQ ID NO: 3104880 - DNA, 25 bp, Homo sapien
gcagacagaataacagcccctaaag

SEQ ID NO: 3104881 - DNA, 25 bp, Homo sapien
cacaaggatcttaataagagggagg

SEQ ID NO: 3104882 - DNA, 25 bp, Homo sapien
ttctcatcttcgtgtgtggcagaca

SEQ ID NO: 3104883 - DNA, 25 bp, Homo sapien
tagccttgattatccaggtgggtcc

SEQ ID NO: 3104884 - DNA, 25 bp, Homo sapien
gctccgcgctccggctcgccgctcg

SEQ ID NO: 3104885 - DNA, 25 bp, Homo sapien
tcgtgaatcagcaccgcttgatcat

SEQ ID NO: 3104886 - DNA, 25 bp, Homo sapien
cagtcagaacggtggtatataatac

SEQ ID NO: 3104887 - DNA, 25 bp, Homo sapien
cagtcgctgaacaaatctccgttag

SEQ ID NO: 3104888 - DNA, 25 bp, Homo sapien
tatacatgctactcgtttacaggtg

SEQ ID NO: 3104889 - DNA, 25 bp, Homo sapien
gagaacctttccatactgttatggg

SEQ ID NO: 3104890 - DNA, 25 bp, Homo sapien
tcatgtcccaacaaaagatatgttg

SEQ ID NO: 3104891 - DNA, 25 bp, Homo sapien
tgagtcatgtcccaacaaaagatat

SEQ ID NO: 3104892 - DNA, 25 bp, Homo sapien
tgtgaggtagagattgggagccaca

SEQ ID NO: 3104893 - DNA, 25 bp, Homo sapien
tttagctgggcatgccagccttcac

SEQ ID NO: 3104894 - DNA, 25 bp, Homo sapien
tcacttgcccaatcactgtgtgagt

SEQ ID NO: 3104895 - DNA, 25 bp, Homo sapien
atgccagccttcacttgcccaatca

SEQ ID NO: 3104896 - DNA, 25 bp, Homo sapien
atgaggtttagctgggcatgccagc

SEQ ID NO: 3104897 - DNA, 25 bp, Homo sapien
gagtaggctgaacagtggttagaca

SEQ ID NO: 3104898 - DNA, 25 bp, Homo sapien
attttgcagcatagaccttgcagag

SEQ ID NO: 3104899 - DNA, 25 bp, Homo sapien
cctcctggacttgctaattttgcag

SEQ ID NO: 3104900 - DNA, 25 bp, Homo sapien
agacaggcctttaattcagggttct

SEQ ID NO: 3104901 - DNA, 25 bp, Homo sapien
catgatgctaactcatggcagaccc

SEQ ID NO: 3104902 - DNA, 25 bp, Homo sapien
taaatacctagatcctgcttaaggg

SEQ ID NO: 3104903 - DNA, 25 bp, Homo sapien
gaatttcctacacacatttcgcagc

SEQ ID NO: 3104904 - DNA, 25 bp, Homo sapien
gcaagacatgtatcgtgagagtgac

SEQ ID NO: 3104905 - DNA, 25 bp, Homo sapien
tacagtagagatcctgacagagggt

SEQ ID NO: 3104906 - DNA, 25 bp, Homo sapien
tgaggccaggatcctatactgaggg

SEQ ID NO: 3104907 - DNA, 25 bp, Homo sapien
tgagatcccagaacaacgggctgga

SEQ ID NO: 3104908 - DNA, 25 bp, Homo sapien
tctctgaacaggagtgagaaacctt

SEQ ID NO: 3104909 - DNA, 25 bp, Homo sapien
gagctctccagggtgcggaggtcaa

SEQ ID NO: 3104910 - DNA, 25 bp, Homo sapien
tctccagggtgcggaggtcaacagt

SEQ ID NO: 3104911 - DNA, 25 bp, Homo sapien
gctctccagggtgcggaggtcaaca

SEQ ID NO: 3104912 - DNA, 25 bp, Homo sapien
tccagggtgcggaggtcaacagtgt

SEQ ID NO: 3104913 - DNA, 25 bp, Homo sapien
tcggtggcaagagtgggaattaggt

SEQ ID NO: 3104914 - DNA, 25 bp, Homo sapien
ctgggaagaagtcggtggcaagagt

SEQ ID NO: 3104915 - DNA, 25 bp, Homo sapien
gtgggaattaggtcactgagaagtg

SEQ ID NO: 3104916 - DNA, 25 bp, Homo sapien
tcactgagaagtgatgatggcagaa

SEQ ID NO: 3104917 - DNA, 25 bp, Homo sapien
gagatgcctgaacatgttcctaagg

SEQ ID NO: 3104918 - DNA, 25 bp, Homo sapien
gaagaagttggcctcaagggcacag

SEQ ID NO: 3104919 - DNA, 25 bp, Homo sapien
aatgtcaaccaaaggagagggcagc

SEQ ID NO: 3104920 - DNA, 25 bp, Homo sapien
gaagagtgagacacgggagcagaca

SEQ ID NO: 3104921 - DNA, 25 bp, Homo sapien
cacatatgcaatgagagagcaaaat

SEQ ID NO: 3104922 - DNA, 25 bp, Homo sapien
tgggcacatatgcaatgagagagca

SEQ ID NO: 3104923 - DNA, 25 bp, Homo sapien
tagtgggcacatatgcaatgagaga

SEQ ID NO: 3104924 - DNA, 25 bp, Homo sapien
aagagtagtgggcacatatgcaatg

SEQ ID NO: 3104925 - DNA, 25 bp, Homo sapien
caggctacaacgcaaatgccttcag

SEQ ID NO: 3104926 - DNA, 25 bp, Homo sapien
aagaatggaaaagcctgtcaggcgc

SEQ ID NO: 3104927 - DNA, 25 bp, Homo sapien
gctgcccaggctacaacgcaaatgc

SEQ ID NO: 3104928 - DNA, 25 bp, Homo sapien
acccagcgttggtgtcagatcacca

SEQ ID NO: 3104929 - DNA, 25 bp, Homo sapien
tgtcctcattttggggtgtccagcc

SEQ ID NO: 3104930 - DNA, 25 bp, Homo sapien
tcattttggggtgtccagccaaacc

SEQ ID NO: 3104931 - DNA, 25 bp, Homo sapien
ctcgcttgttcttacttggctgtcc

SEQ ID NO: 3104932 - DNA, 25 bp, Homo sapien
tcgcttgttcttacttggctgtcct

SEQ ID NO: 3104933 - DNA, 25 bp, Homo sapien
taaacgctgcagaaagtcatctcgt

SEQ ID NO: 3104934 - DNA, 25 bp, Homo sapien
taacgaatgtatgtaccccaggaaa

SEQ ID NO: 3104935 - DNA, 25 bp, Homo sapien
tcacacggtaaacatggcagaggga

SEQ ID NO: 3104936 - DNA, 25 bp, Homo sapien
gacgtgactccacccaacagtgata

SEQ ID NO: 3104937 - DNA, 25 bp, Homo sapien
cattcagagactggtccgcaggaga

SEQ ID NO: 3104938 - DNA, 25 bp, Homo sapien
ttacaaagccagagcacggaagcca

SEQ ID NO: 3104939 - DNA, 25 bp, Homo sapien
cctgcccgtgaaggcatgtgctttc

SEQ ID NO: 3104940 - DNA, 25 bp, Homo sapien
gctttcccttccagataagttacaa

SEQ ID NO: 3104941 - DNA, 25 bp, Homo sapien
ttcacacttcccactactatgaggg

SEQ ID NO: 3104942 - DNA, 25 bp, Homo sapien
gaggaaggatgttcacggtcacctt

SEQ ID NO: 3104943 - DNA, 25 bp, Homo sapien
aaaagcaattccatctacacgccag

SEQ ID NO: 3104944 - DNA, 25 bp, Homo sapien
ccacactgaaggaggtctaagtcca

SEQ ID NO: 3104945 - DNA, 25 bp, Homo sapien
caaagaggttccgatctagagaagc

SEQ ID NO: 3104946 - DNA, 25 bp, Homo sapien
gagaagcctcaaagcctctgtgttg

SEQ ID NO: 3104947 - DNA, 25 bp, Homo sapien
tgtattcgcaggtatcgagggctcc

SEQ ID NO: 3104948 - DNA, 25 bp, Homo sapien
cacctcagtgaagacctgcgggtta

SEQ ID NO: 3104949 - DNA, 25 bp, Homo sapien
agagagctccctcagatccagaccg

SEQ ID NO: 3104950 - DNA, 25 bp, Homo sapien
ccgggaagggacgccttgtctccag

SEQ ID NO: 3104951 - DNA, 25 bp, Homo sapien
ctcagatccagaccgacagctcccg

SEQ ID NO: 3104952 - DNA, 25 bp, Homo sapien
gggaagggacgccttgtctccagga

SEQ ID NO: 3104953 - DNA, 25 bp, Homo sapien
ggtatgagtccaacctaggaaccca

SEQ ID NO: 3104954 - DNA, 25 bp, Homo sapien
taggaacccaatgcatggcatctcg

SEQ ID NO: 3104955 - DNA, 25 bp, Homo sapien
tctcgatgcggctggcaagaagtca

SEQ ID NO: 3104956 - DNA, 25 bp, Homo sapien
tgacagagagaaacgagacccgaat

SEQ ID NO: 3104957 - DNA, 25 bp, Homo sapien
tcagcggcgatagctgaggctggca

SEQ ID NO: 3104958 - DNA, 25 bp, Homo sapien
cagcggcgatagctgaggctggcag

SEQ ID NO: 3104959 - DNA, 25 bp, Homo sapien
gaagttccgtcgagtctgaagtttc

SEQ ID NO: 3104960 - DNA, 25 bp, Homo sapien
aagttccgtcgagtctgaagtttct

SEQ ID NO: 3104961 - DNA, 25 bp, Homo sapien
cagaagttccgtcgagtctgaagtt

SEQ ID NO: 3104962 - DNA, 25 bp, Homo sapien
agaagttccgtcgagtctgaagttt

SEQ ID NO: 3104963 - DNA, 25 bp, Homo sapien
tctggagacccactcttcacaatga

SEQ ID NO: 3104964 - DNA, 25 bp, Homo sapien
gaatcacaggcatcacagttcccaa

SEQ ID NO: 3104965 - DNA, 25 bp, Homo sapien
gaagctgcgaggatgcatgccctgt

SEQ ID NO: 3104966 - DNA, 25 bp, Homo sapien
cacaggccgggctctcatgagctct

SEQ ID NO: 3104967 - DNA, 25 bp, Homo sapien
tcatcaaccacggtctcagtccggg

SEQ ID NO: 3104968 - DNA, 25 bp, Homo sapien
tgactgaccgccgacatcttgccat

SEQ ID NO: 3104969 - DNA, 25 bp, Homo sapien
tcggtcaaactcttcgtcccagtca

SEQ ID NO: 3104970 - DNA, 25 bp, Homo sapien
gctgtcttcaatagcatcctgactg

SEQ ID NO: 3104971 - DNA, 25 bp, Homo sapien
catgtttggtctcgaagtctgaata

SEQ ID NO: 3104972 - DNA, 25 bp, Homo sapien
gcgatgccctcttagctaaacccta

SEQ ID NO: 3104973 - DNA, 25 bp, Homo sapien
tgccctcgtctgaggaacaaagatg

SEQ ID NO: 3104974 - DNA, 25 bp, Homo sapien
gaagagcttcgtcactctgcccctt

SEQ ID NO: 3104975 - DNA, 25 bp, Homo sapien
agtgcaccaggatccattccacacc

SEQ ID NO: 3104976 - DNA, 25 bp, Homo sapien
ccaggatccattccacacccttccc

SEQ ID NO: 3104977 - DNA, 25 bp, Homo sapien
gtgcaccaggatccattccacaccc

SEQ ID NO: 3104978 - DNA, 25 bp, Homo sapien
gcaccaggatccattccacaccctt

SEQ ID NO: 3104979 - DNA, 25 bp, Homo sapien
cttttctcccgtaagctttatcaga

SEQ ID NO: 3104980 - DNA, 25 bp, Homo sapien
gctctccattccaagacacaggagg

SEQ ID NO: 3104981 - DNA, 25 bp, Homo sapien
cgctctccattccaagacacaggag

SEQ ID NO: 3104982 - DNA, 25 bp, Homo sapien
atcagatgagtatttgagcagttcc

SEQ ID NO: 3104983 - DNA, 25 bp, Homo sapien
aacccactggggaagcaatcgcaca

SEQ ID NO: 3104984 - DNA, 25 bp, Homo sapien
gaagcaatcgcacaccttaaattat

SEQ ID NO: 3104985 - DNA, 25 bp, Homo sapien
caacttacagtaagtggatgcttgc

SEQ ID NO: 3104986 - DNA, 25 bp, Homo sapien
ctgcaatcggagcagccaagaaaca

SEQ ID NO: 3104987 - DNA, 25 bp, Homo sapien
ccaagtcaattcatgagaaagaaaa

SEQ ID NO: 3104988 - DNA, 25 bp, Homo sapien
caagtcaattcatgagaaagaaaac

SEQ ID NO: 3104989 - DNA, 25 bp, Homo sapien
ttctgagagcatgctggccagcaaa

SEQ ID NO: 3104990 - DNA, 25 bp, Homo sapien
ggcactagctagcacccacgttttg

SEQ ID NO: 3104991 - DNA, 25 bp, Homo sapien
caaatgtgttctgtggcgggtgcct

SEQ ID NO: 3104992 - DNA, 25 bp, Homo sapien
gctatgttctgaatggcccagctac

SEQ ID NO: 3104993 - DNA, 25 bp, Homo sapien
tctggatcaccatcacccatgggag

SEQ ID NO: 3104994 - DNA, 25 bp, Homo sapien
cattcgcggatggtgcgcagctgct

SEQ ID NO: 3104995 - DNA, 25 bp, Homo sapien
tgagatgcccatcctcttctactgc

SEQ ID NO: 3104996 - DNA, 25 bp, Homo sapien
gcagctgctggactcggggacaaca

SEQ ID NO: 3104997 - DNA, 25 bp, Homo sapien
tggaagtgagaggcagcagtcagct

SEQ ID NO: 3104998 - DNA, 25 bp, Homo sapien
ttggaagtgagaggcagcagtcagc

SEQ ID NO: 3104999 - DNA, 25 bp, Homo sapien
cttggaagtgagaggcagcagtcag

SEQ ID NO: 3105000 - DNA, 25 bp, Homo sapien
aggggagcaggagcgcacagacacc

SEQ ID NO: 3105001 - DNA, 25 bp, Homo sapien
ggagcaggagcgcacagacacccgc

SEQ ID NO: 3105002 - DNA, 25 bp, Homo sapien
tgagcaaattggaaggggagcagga

SEQ ID NO: 3105003 - DNA, 25 bp, Homo sapien
ctgagcaaattggaaggggagcagg

SEQ ID NO: 3105004 - DNA, 25 bp, Homo sapien
cagtagagggaaaaccagtcgcgtt

SEQ ID NO: 3105005 - DNA, 25 bp, Homo sapien
taactgagccaagcctgttgacgcc

SEQ ID NO: 3105006 - DNA, 25 bp, Homo sapien
ctgatgaaacggcagatcctggcct

SEQ ID NO: 3105007 - DNA, 25 bp, Homo sapien
gaacggccctgcacatacaatgatg

SEQ ID NO: 3105008 - DNA, 25 bp, Homo sapien
tggtggccgtccgtaacacatccca

SEQ ID NO: 3105009 - DNA, 25 bp, Homo sapien
tcctgctgctcgcgtggtggccgtc

SEQ ID NO: 3105010 - DNA, 25 bp, Homo sapien
ctgctcgcgtggtggccgtccgtaa

SEQ ID NO: 3105011 - DNA, 25 bp, Homo sapien
cctgctggccattcacctgtggctg

SEQ ID NO: 3105012 - DNA, 25 bp, Homo sapien
agcgggcagctgtgcctggccctcc

SEQ ID NO: 3105013 - DNA, 25 bp, Homo sapien
ctgacagcgggcagctgtgcctggc

SEQ ID NO: 3105014 - DNA, 25 bp, Homo sapien
gggcagctgtgcctggccctccctc

SEQ ID NO: 3105015 - DNA, 25 bp, Homo sapien
acagcgggcagctgtgcctggccct

SEQ ID NO: 3105016 - DNA, 25 bp, Homo sapien
ctgtacatggggctcccaggctgtc

SEQ ID NO: 3105017 - DNA, 25 bp, Homo sapien
tgcccctcctgcagggcgctggcag

SEQ ID NO: 3105018 - DNA, 25 bp, Homo sapien
tgtctctgtgtctgcccctcctgca

SEQ ID NO: 3105019 - DNA, 25 bp, Homo sapien
ccaggctgtctctgtgtctgcccct

SEQ ID NO: 3105020 - DNA, 25 bp, Homo sapien
tgtgctgtgggaggcgcgtctctga

SEQ ID NO: 3105021 - DNA, 25 bp, Homo sapien
cagtggcctccctgatgtgctgtgg

SEQ ID NO: 3105022 - DNA, 25 bp, Homo sapien
tcctcttcccgtggggagccgcagt

SEQ ID NO: 3105023 - DNA, 25 bp, Homo sapien
tgtgggaggcgcgtctctgagccca

SEQ ID NO: 3105024 - DNA, 25 bp, Homo sapien
gaagagacacaaggtcctcgttgac

SEQ ID NO: 3105025 - DNA, 25 bp, Homo sapien
ggaagagacacaaggtcctcgttga

SEQ ID NO: 3105026 - DNA, 25 bp, Homo sapien
gcagctccgtggttctgacgtccct

SEQ ID NO: 3105027 - DNA, 25 bp, Homo sapien
gctccgtggttctgacgtccctggg

SEQ ID NO: 3105028 - DNA, 25 bp, Homo sapien
aggagcagctccgtggttctgacgt

SEQ ID NO: 3105029 - DNA, 25 bp, Homo sapien
agcgccgtcgagatggaggagcagc

SEQ ID NO: 3105030 - DNA, 25 bp, Homo sapien
caggcggctggatgattggggagca

SEQ ID NO: 3105031 - DNA, 25 bp, Homo sapien
tgcaggcggctggatgattggggag

SEQ ID NO: 3105032 - DNA, 25 bp, Homo sapien
ttgcaggcggctggatgattgggga

SEQ ID NO: 3105033 - DNA, 25 bp, Homo sapien
gttgcaggcggctggatgattgggg

SEQ ID NO: 3105034 - DNA, 25 bp, Homo sapien
tcattaggacgctgaaaccgggaca

SEQ ID NO: 3105035 - DNA, 25 bp, Homo sapien
tctagtgccgaacccagtgaggctc

SEQ ID NO: 3105036 - DNA, 25 bp, Homo sapien
gaaagtctcagggtgttcccgggca

SEQ ID NO: 3105037 - DNA, 25 bp, Homo sapien
aaccgggacacagatgcgtagagca

SEQ ID NO: 3105038 - DNA, 25 bp, Homo sapien
gtagggatacaggacaggtcagtcc

SEQ ID NO: 3105039 - DNA, 25 bp, Homo sapien
caaccacagggagaaccagttggca

SEQ ID NO: 3105040 - DNA, 25 bp, Homo sapien
ccacaaggatgtcgcagacagacca

SEQ ID NO: 3105041 - DNA, 25 bp, Homo sapien
gaccaccaacaaagacagaactaag

SEQ ID NO: 3105042 - DNA, 25 bp, Homo sapien
tggctctatggacgggccaagtgga

SEQ ID NO: 3105043 - DNA, 25 bp, Homo sapien
ccaagtggaggcaacgacggggtga

SEQ ID NO: 3105044 - DNA, 25 bp, Homo sapien
gccggtcgccctccacagggtgctg

SEQ ID NO: 3105045 - DNA, 25 bp, Homo sapien
ggtggacggaggtcattgccggtcg

SEQ ID NO: 3105046 - DNA, 25 bp, Homo sapien
tctgctccacttggcggcgttttgg

SEQ ID NO: 3105047 - DNA, 25 bp, Homo sapien
tggccagcggtggaacagttcgttt

SEQ ID NO: 3105048 - DNA, 25 bp, Homo sapien
tgagaatcgcagagatgggccgctc

SEQ ID NO: 3105049 - DNA, 25 bp, Homo sapien
gggacttcagcttcaccgtcttaga

SEQ ID NO: 3105050 - DNA, 25 bp, Homo sapien
ctattcgagttgctggtcccaggca

SEQ ID NO: 3105051 - DNA, 25 bp, Homo sapien
gatctgctgctattcgagttgctgg

SEQ ID NO: 3105052 - DNA, 25 bp, Homo sapien
tgctattcgagttgctggtcccagg

SEQ ID NO: 3105053 - DNA, 25 bp, Homo sapien
ctgctgctattcgagttgctggtcc

SEQ ID NO: 3105054 - DNA, 25 bp, Homo sapien
tcttcagtggtgtgcggcttcttca

SEQ ID NO: 3105055 - DNA, 25 bp, Homo sapien
ctttggaggaatgcagccgttctgg

SEQ ID NO: 3105056 - DNA, 25 bp, Homo sapien
tctttccagggtcgtctaggatggt

SEQ ID NO: 3105057 - DNA, 25 bp, Homo sapien
gatatgggcacaccaatctcttcag

SEQ ID NO: 3105058 - DNA, 25 bp, Homo sapien
ttccccgttaaatgtgagaacaggc

SEQ ID NO: 3105059 - DNA, 25 bp, Homo sapien
ctactcacattttccccgttaaatg

SEQ ID NO: 3105060 - DNA, 25 bp, Homo sapien
taacattggtacaaactactcacat

SEQ ID NO: 3105061 - DNA, 25 bp, Homo sapien
ccacagcagaattacccaaatcagg

SEQ ID NO: 3105062 - DNA, 25 bp, Homo sapien
ggagatgaggccctcgggacttttc

SEQ ID NO: 3105063 - DNA, 25 bp, Homo sapien
tgaggccctcgggacttttcttaga

SEQ ID NO: 3105064 - DNA, 25 bp, Homo sapien
gaaataatcccattgccgatgttct

SEQ ID NO: 3105065 - DNA, 25 bp, Homo sapien
gtgatctggaatcacactcgggcgg

SEQ ID NO: 3105066 - DNA, 25 bp, Homo sapien
cgcagatagaacagcacgtaggcct

SEQ ID NO: 3105067 - DNA, 25 bp, Homo sapien
tgctggaatggaccaaggaatcatt

SEQ ID NO: 3105068 - DNA, 25 bp, Homo sapien
accaccttgacgttgctggaatgga

SEQ ID NO: 3105069 - DNA, 25 bp, Homo sapien
tgacgttgctggaatggaccaagga

SEQ ID NO: 3105070 - DNA, 25 bp, Homo sapien
gtccatacatgacaggatcaccatt

SEQ ID NO: 3105071 - DNA, 25 bp, Homo sapien
acagcatagagtccatacatgacag

SEQ ID NO: 3105072 - DNA, 25 bp, Homo sapien
ctgtagcccgagtgcaccaggacag

SEQ ID NO: 3105073 - DNA, 25 bp, Homo sapien
cagtaatagtgcccggcatggcagc

SEQ ID NO: 3105074 - DNA, 25 bp, Homo sapien
tatacggacgtatgttgaggaattc

SEQ ID NO: 3105075 - DNA, 25 bp, Homo sapien
tgaggaattccggatagcctacatc

SEQ ID NO: 3105076 - DNA, 25 bp, Homo sapien
gacgtatgttgaggaattccggata

SEQ ID NO: 3105077 - DNA, 25 bp, Homo sapien
ctgggacatatacggacgtatgttg

SEQ ID NO: 3105078 - DNA, 25 bp, Homo sapien
aagcaatcctcctatctctacctcc

SEQ ID NO: 3105079 - DNA, 25 bp, Homo sapien
caagcaatcctcctatctctacctc

SEQ ID NO: 3105080 - DNA, 25 bp, Homo sapien
gcaatcctcctatctctacctccca

SEQ ID NO: 3105081 - DNA, 25 bp, Homo sapien
ctcaagcaatcctcctatctctacc

SEQ ID NO: 3105082 - DNA, 25 bp, Homo sapien
catgcaacggcacctgttctagaca

SEQ ID NO: 3105083 - DNA, 25 bp, Homo sapien
cataaaaagccagagcatgcaacgg

SEQ ID NO: 3105084 - DNA, 25 bp, Homo sapien
gacatggacaatgcaagtcccaccg

SEQ ID NO: 3105085 - DNA, 25 bp, Homo sapien
gtgctcatcacactcatctggagaa

SEQ ID NO: 3105086 - DNA, 25 bp, Homo sapien
cagcagctatcaaactcgtggctat

SEQ ID NO: 3105087 - DNA, 25 bp, Homo sapien
tattctgatgccgactgtggcccac

SEQ ID NO: 3105088 - DNA, 25 bp, Homo sapien
cagggacaggtactgtgtaaacagc

SEQ ID NO: 3105089 - DNA, 25 bp, Homo sapien
ctgggatggtgtcacgagcgctcac

SEQ ID NO: 3105090 - DNA, 25 bp, Homo sapien
taagacgttggatgttctgtggatg

SEQ ID NO: 3105091 - DNA, 25 bp, Homo sapien
gcaaagcgcttgagggaaagggtta

SEQ ID NO: 3105092 - DNA, 25 bp, Homo sapien
tgtggatggtgaagcgcttgctggc

SEQ ID NO: 3105093 - DNA, 25 bp, Homo sapien
gaagttggcaaagcgcttgagggaa

SEQ ID NO: 3105094 - DNA, 25 bp, Homo sapien
aaaaagttccagagcacgcacaata

SEQ ID NO: 3105095 - DNA, 25 bp, Homo sapien
cactcaggacatctgctttcacaaa

SEQ ID NO: 3105096 - DNA, 25 bp, Homo sapien
gagcacgcacaatattcgcagcttg

SEQ ID NO: 3105097 - DNA, 25 bp, Homo sapien
ttagcacacatgtaggcattctctc

SEQ ID NO: 3105098 - DNA, 25 bp, Homo sapien
tctccagcgcgacgtccaagtaggg

SEQ ID NO: 3105099 - DNA, 25 bp, Homo sapien
gtgtccgagacgctcttgcacacgg

SEQ ID NO: 3105100 - DNA, 25 bp, Homo sapien
gatctccagcgcgacgtccaagtag

SEQ ID NO: 3105101 - DNA, 25 bp, Homo sapien
acgctcttgcacacggagcacttca

SEQ ID NO: 3105102 - DNA, 25 bp, Homo sapien
tcccaagaccgagacccagcaggga

SEQ ID NO: 3105103 - DNA, 25 bp, Homo sapien
atgagattcccactagcccctgaag

SEQ ID NO: 3105104 - DNA, 25 bp, Homo sapien
tgcctggactgctgaccaccacgtg

SEQ ID NO: 3105105 - DNA, 25 bp, Homo sapien
tggtgtccgaacagagagctctctt

SEQ ID NO: 3105106 - DNA, 25 bp, Homo sapien
gataccctccaaaaatttgatggac

SEQ ID NO: 3105107 - DNA, 25 bp, Homo sapien
tagtagcctgcgtttgacgatccaa

SEQ ID NO: 3105108 - DNA, 25 bp, Homo sapien
aatttgatggaccaaggtagtagcc

SEQ ID NO: 3105109 - DNA, 25 bp, Homo sapien
cgcgtgatctgagataccctccaaa

SEQ ID NO: 3105110 - DNA, 25 bp, Homo sapien
taagtacccaaatctagagtgaggc

SEQ ID NO: 3105111 - DNA, 25 bp, Homo sapien
tcagcaagatgacacgagggatggc

SEQ ID NO: 3105112 - DNA, 25 bp, Homo sapien
cactaactgggatctgaggcactct

SEQ ID NO: 3105113 - DNA, 25 bp, Homo sapien
tatggtagctactcacgctggaagg

SEQ ID NO: 3105114 - DNA, 25 bp, Homo sapien
gggaccaatacaggatcattcaatt

SEQ ID NO: 3105115 - DNA, 25 bp, Homo sapien
tacttgggggaccaatacaggatca

SEQ ID NO: 3105116 - DNA, 25 bp, Homo sapien
ctccgggagctctgaaatacttggg

SEQ ID NO: 3105117 - DNA, 25 bp, Homo sapien
cagactccgggagctctgaaatact

SEQ ID NO: 3105118 - DNA, 25 bp, Homo sapien
ccaccatctactgtcccaccattct

SEQ ID NO: 3105119 - DNA, 25 bp, Homo sapien
caccatctactgtcccaccattctt

SEQ ID NO: 3105120 - DNA, 25 bp, Homo sapien
gccaccatctactgtcccaccattc

SEQ ID NO: 3105121 - DNA, 25 bp, Homo sapien
tgccaccatctactgtcccaccatt

SEQ ID NO: 3105122 - DNA, 25 bp, Homo sapien
tccatggtaagaactgaatgcccct

SEQ ID NO: 3105123 - DNA, 25 bp, Homo sapien
taagaatatcatccactgaggccag

SEQ ID NO: 3105124 - DNA, 25 bp, Homo sapien
tatttctacgatcctaagctgaggc

SEQ ID NO: 3105125 - DNA, 25 bp, Homo sapien
cacatataagggcttacgtggcgtg

SEQ ID NO: 3105126 - DNA, 25 bp, Homo sapien
agtttgagtacccagaggcaaattc

SEQ ID NO: 3105127 - DNA, 25 bp, Homo sapien
caacagtttgagtacccagaggcaa

SEQ ID NO: 3105128 - DNA, 25 bp, Homo sapien
tgagtacccagaggcaaattctgcc

SEQ ID NO: 3105129 - DNA, 25 bp, Homo sapien
tccaacagtttgagtacccagaggc

SEQ ID NO: 3105130 - DNA, 25 bp, Homo sapien
gaatgttctgctgccaccatgtaga

SEQ ID NO: 3105131 - DNA, 25 bp, Homo sapien
ggctgttgccataggaatgttctgc

SEQ ID NO: 3105132 - DNA, 25 bp, Homo sapien
tgtagaaaaggtgtccaaagccctg

SEQ ID NO: 3105133 - DNA, 25 bp, Homo sapien
cagcctgggtagaaaggtgccgggc

SEQ ID NO: 3105134 - DNA, 25 bp, Homo sapien
tctgcatggcgtcgatggtgtaccg

SEQ ID NO: 3105135 - DNA, 25 bp, Homo sapien
ccaaagcggaagtgtcgggcgatct

SEQ ID NO: 3105136 - DNA, 25 bp, Homo sapien
taccgcaggaactcatgcgcgtcct

SEQ ID NO: 3105137 - DNA, 25 bp, Homo sapien
ttggcacagccattcaggcaggctt

SEQ ID NO: 3105138 - DNA, 25 bp, Homo sapien
tggttctgcatgacacacagcatgc

SEQ ID NO: 3105139 - DNA, 25 bp, Homo sapien
gtggttctgcatgacacacagcatg

SEQ ID NO: 3105140 - DNA, 25 bp, Homo sapien
gggcttgatggcgttgccgctgttg

SEQ ID NO: 3105141 - DNA, 25 bp, Homo sapien
ggtctcggatgaaggagacgggctt

SEQ ID NO: 3105142 - DNA, 25 bp, Homo sapien
tgaccgattcaccttcatggcccat

SEQ ID NO: 3105143 - DNA, 25 bp, Homo sapien
gaccgattcaccttcatggcccatt

SEQ ID NO: 3105144 - DNA, 25 bp, Homo sapien
gctgcgagcatgctccttggagagc

SEQ ID NO: 3105145 - DNA, 25 bp, Homo sapien
cagctctcatacgtgtgctcactgc

SEQ ID NO: 3105146 - DNA, 25 bp, Homo sapien
acctcagagacagtcgctccgtggg

SEQ ID NO: 3105147 - DNA, 25 bp, Homo sapien
aaggttgtggagtcctgcgcccacg

SEQ ID NO: 3105148 - DNA, 25 bp, Homo sapien
tccacttcgtcaccccggagtgagg

SEQ ID NO: 3105149 - DNA, 25 bp, Homo sapien
tcgtcaccccggagtgagggcctct

SEQ ID NO: 3105150 - DNA, 25 bp, Homo sapien
gtccatccacttcgtcaccccggag

SEQ ID NO: 3105151 - DNA, 25 bp, Homo sapien
ttcgtcaccccggagtgagggcctc

SEQ ID NO: 3105152 - DNA, 25 bp, Homo sapien
cttgctggctggctcgaactcgatt

SEQ ID NO: 3105153 - DNA, 25 bp, Homo sapien
tcagccgagtccttgcggccgggtt

SEQ ID NO: 3105154 - DNA, 25 bp, Homo sapien
ggtcatctccactcttgtggcgact

SEQ ID NO: 3105155 - DNA, 25 bp, Homo sapien
tctgtaaaaggaccttcttggcaga

SEQ ID NO: 3105156 - DNA, 25 bp, Homo sapien
gctcctgaatgtaagcgctcctgga

SEQ ID NO: 3105157 - DNA, 25 bp, Homo sapien
aaccaggatcttaacggagggctga

SEQ ID NO: 3105158 - DNA, 25 bp, Homo sapien
cctgttcaaacaccgaagccgcaga

SEQ ID NO: 3105159 - DNA, 25 bp, Homo sapien
tgctgtcctactgcggcatggaacc

SEQ ID NO: 3105160 - DNA, 25 bp, Homo sapien
atcctgcacagacagcgggccccgg

SEQ ID NO: 3105161 - DNA, 25 bp, Homo sapien
gggacggcggagaccggcgaggaca

SEQ ID NO: 3105162 - DNA, 25 bp, Homo sapien
ggagaccggcgaggacagcccggcc

SEQ ID NO: 3105163 - DNA, 25 bp, Homo sapien
tctccgaagttgacctgaatcctgc

SEQ ID NO: 3105164 - DNA, 25 bp, Homo sapien
cgggctctggagaagcgagctcgcg

SEQ ID NO: 3105165 - DNA, 25 bp, Homo sapien
agcgggcggagcatcccgggtcctc

SEQ ID NO: 3105166 - DNA, 25 bp, Homo sapien
cgcgcccacgttctccctgagcgtc

SEQ ID NO: 3105167 - DNA, 25 bp, Homo sapien
gggacggccgaagccctgcgcggac

SEQ ID NO: 3105168 - DNA, 25 bp, Homo sapien
ttaaaggcgccgcacccagcgttcg

SEQ ID NO: 3105169 - DNA, 25 bp, Homo sapien
acaagcctacgcagccctggcgact

SEQ ID NO: 3105170 - DNA, 25 bp, Homo sapien
agcgttcgcgctgcgctaactccga

SEQ ID NO: 3105171 - DNA, 25 bp, Homo sapien
gtgtcaccgcgacgcttaaaggcgc

SEQ ID NO: 3105172 - DNA, 25 bp, Homo sapien
aattttgaacatactaggacgtgtc

SEQ ID NO: 3105173 - DNA, 25 bp, Homo sapien
gttggttgctgggaacggtcttcat

SEQ ID NO: 3105174 - DNA, 25 bp, Homo sapien
ggacagtgcttcctccaaaagcgaa

SEQ ID NO: 3105175 - DNA, 25 bp, Homo sapien
actttagagcggaccaaccctcaga

SEQ ID NO: 3105176 - DNA, 25 bp, Homo sapien
atactgtttattgtccacggaccga

SEQ ID NO: 3105177 - DNA, 25 bp, Homo sapien
aatactgtttattgtccacggaccg

SEQ ID NO: 3105178 - DNA, 25 bp, Homo sapien
cagcaccggaaggtctcagacttca

SEQ ID NO: 3105179 - DNA, 25 bp, Homo sapien
aactcttgtgtgttcccagcaccgg

SEQ ID NO: 3105180 - DNA, 25 bp, Homo sapien
cagagctttaaattacggcagcaag

SEQ ID NO: 3105181 - DNA, 25 bp, Homo sapien
gcatcagagacatgcgcagtctgct

SEQ ID NO: 3105182 - DNA, 25 bp, Homo sapien
tatcaccatacaggaagcgaacagg

SEQ ID NO: 3105183 - DNA, 25 bp, Homo sapien
gaagcattttgcaagaccacgccca

SEQ ID NO: 3105184 - DNA, 25 bp, Homo sapien
tgtacagcatgaaaacgcccgtggg

SEQ ID NO: 3105185 - DNA, 25 bp, Homo sapien
tggcgtcacatgcagaaagccccgt

SEQ ID NO: 3105186 - DNA, 25 bp, Homo sapien
tggaccagtcgaaacccttggaggc

SEQ ID NO: 3105187 - DNA, 25 bp, Homo sapien
gctgtttccaggaagggatgtcaga

SEQ ID NO: 3105188 - DNA, 25 bp, Homo sapien
ctgtttccaggaagggatgtcagag

SEQ ID NO: 3105189 - DNA, 25 bp, Homo sapien
atgtcagagctggaccagtcgaaac

SEQ ID NO: 3105190 - DNA, 25 bp, Homo sapien
cgatgtcgagaaactcctgcttggg

SEQ ID NO: 3105191 - DNA, 25 bp, Homo sapien
gcctggtgcccgttgatgttcttct

SEQ ID NO: 3105192 - DNA, 25 bp, Homo sapien
ctgtgacccagtccatccagaggca

SEQ ID NO: 3105193 - DNA, 25 bp, Homo sapien
aggagccgtcacttctcttgatgca

SEQ ID NO: 3105194 - DNA, 25 bp, Homo sapien
caatttggccaaggaaccctaggct

SEQ ID NO: 3105195 - DNA, 25 bp, Homo sapien
gaaacagcgtaaggcctgcagtgcc

SEQ ID NO: 3105196 - DNA, 25 bp, Homo sapien
cctaggctacaagaggatgaccgcc

SEQ ID NO: 3105197 - DNA, 25 bp, Homo sapien
cgaggtcatcggcaactagcaattt

SEQ ID NO: 3105198 - DNA, 25 bp, Homo sapien
cttgcactcgcagcccatctggtac

SEQ ID NO: 3105199 - DNA, 25 bp, Homo sapien
cccagggcacgatgaagtcacagag

SEQ ID NO: 3105200 - DNA, 25 bp, Homo sapien
tcacagagggtgatgtgcatcttgc

SEQ ID NO: 3105201 - DNA, 25 bp, Homo sapien
gtgtcccagggcacgatgaagtcac

SEQ ID NO: 3105202 - DNA, 25 bp, Homo sapien
aagtcacagagggtgatgtgcatct

SEQ ID NO: 3105203 - DNA, 25 bp, Homo sapien
gacagatggaaaggaacccattcct

SEQ ID NO: 3105204 - DNA, 25 bp, Homo sapien
tggcgcccatacaggtataccgcag

SEQ ID NO: 3105205 - DNA, 25 bp, Homo sapien
gttgattctggcatttggcgcccat

SEQ ID NO: 3105206 - DNA, 25 bp, Homo sapien
cactgtatgtatcacttgaccagca

SEQ ID NO: 3105207 - DNA, 25 bp, Homo sapien
tctgtctccgagaaaagcgaggcat

SEQ ID NO: 3105208 - DNA, 25 bp, Homo sapien
tattgggctaacatgaacgtggctg

SEQ ID NO: 3105209 - DNA, 25 bp, Homo sapien
tgtacacaccgtgagcatctgcagc

SEQ ID NO: 3105210 - DNA, 25 bp, Homo sapien
gatttctggttagcccctggataaa

SEQ ID NO: 3105211 - DNA, 25 bp, Homo sapien
tcctccaacgtccagcgagacccca

SEQ ID NO: 3105212 - DNA, 25 bp, Homo sapien
cgagaccccacacactgccgaggag

SEQ ID NO: 3105213 - DNA, 25 bp, Homo sapien
gagggggccgtgtagataaactcta

SEQ ID NO: 3105214 - DNA, 25 bp, Homo sapien
ggccgtgtagataaactctatatcc

SEQ ID NO: 3105215 - DNA, 25 bp, Homo sapien
acacaacttttcaggcattcgagga

SEQ ID NO: 3105216 - DNA, 25 bp, Homo sapien
caacgcccggacaggtttctgaagg

SEQ ID NO: 3105217 - DNA, 25 bp, Homo sapien
ccacaggtggccagatcgtgttcca

SEQ ID NO: 3105218 - DNA, 25 bp, Homo sapien
gaaatcggatctatttgcagcttga

SEQ ID NO: 3105219 - DNA, 25 bp, Homo sapien
agtgcagcccgggatgccggcagcc

SEQ ID NO: 3105220 - DNA, 25 bp, Homo sapien
tcatactggatcctcttgatagggt

SEQ ID NO: 3105221 - DNA, 25 bp, Homo sapien
cataaatgtcgtttccagagtccac

SEQ ID NO: 3105222 - DNA, 25 bp, Homo sapien
tatctgcttgatctcatactggatc

SEQ ID NO: 3105223 - DNA, 25 bp, Homo sapien
tcactgaccgctttggccctgatca

SEQ ID NO: 3105224 - DNA, 25 bp, Homo sapien
gctaaggagagggataagacgtcca

SEQ ID NO: 3105225 - DNA, 25 bp, Homo sapien
agagttcctgaaacacgctcctggg

SEQ ID NO: 3105226 - DNA, 25 bp, Homo sapien
acagaggtgaggagagttcctgaaa

SEQ ID NO: 3105227 - DNA, 25 bp, Homo sapien
agagggataagacgtccaggcctgc

SEQ ID NO: 3105228 - DNA, 25 bp, Homo sapien
ggcaaggggcatggtgatcccagcc

SEQ ID NO: 3105229 - DNA, 25 bp, Homo sapien
ccagcccccggcatggcgtctcctc

SEQ ID NO: 3105230 - DNA, 25 bp, Homo sapien
agcagcaaggtgcgagacgggcaag

SEQ ID NO: 3105231 - DNA, 25 bp, Homo sapien
acgggcaaggggcatggtgatccca

SEQ ID NO: 3105232 - DNA, 25 bp, Homo sapien
gtggctggggcaagcaggtacccca

SEQ ID NO: 3105233 - DNA, 25 bp, Homo sapien
ggtggctggggcaagcaggtacccc

SEQ ID NO: 3105234 - DNA, 25 bp, Homo sapien
tggtggctggggcaagcaggtaccc

SEQ ID NO: 3105235 - DNA, 25 bp, Homo sapien
tggctggggcaagcaggtaccccat

SEQ ID NO: 3105236 - DNA, 25 bp, Homo sapien
ctttgccagatggagctgagatgac

SEQ ID NO: 3105237 - DNA, 25 bp, Homo sapien
tgcagaacagttggtgctcactaac

SEQ ID NO: 3105238 - DNA, 25 bp, Homo sapien
tgagatgacgctgacaactttgggc

SEQ ID NO: 3105239 - DNA, 25 bp, Homo sapien
tctgcagcacttggtatattcccca

SEQ ID NO: 3105240 - DNA, 25 bp, Homo sapien
tagccacgtggggttaggactagaa

SEQ ID NO: 3105241 - DNA, 25 bp, Homo sapien
taggactagaaagtgaactggcgag

SEQ ID NO: 3105242 - DNA, 25 bp, Homo sapien
tggtcaaatcaagggtccagggtag

SEQ ID NO: 3105243 - DNA, 25 bp, Homo sapien
aggaggctggtcaaatcaagggtcc

SEQ ID NO: 3105244 - DNA, 25 bp, Homo sapien
ttggcatagcgggatctgcaccgct

SEQ ID NO: 3105245 - DNA, 25 bp, Homo sapien
tagcgggatctgcaccgctgacctg

SEQ ID NO: 3105246 - DNA, 25 bp, Homo sapien
cagttggcatagcgggatctgcacc

SEQ ID NO: 3105247 - DNA, 25 bp, Homo sapien
ggcatagcgggatctgcaccgctga

SEQ ID NO: 3105248 - DNA, 25 bp, Homo sapien
cagggtgaatcctgcatacagcagg

SEQ ID NO: 3105249 - DNA, 25 bp, Homo sapien
tactggaatgtacaaccgtcggctg

SEQ ID NO: 3105250 - DNA, 25 bp, Homo sapien
tgaattcaccgccagatgccggcta

SEQ ID NO: 3105251 - DNA, 25 bp, Homo sapien
tgagatcaagggtgatacactggct

SEQ ID NO: 3105252 - DNA, 25 bp, Homo sapien
aagactctcgttctaactgccctga

SEQ ID NO: 3105253 - DNA, 25 bp, Homo sapien
tgctctcggaggggagcagacagtg

SEQ ID NO: 3105254 - DNA, 25 bp, Homo sapien
gctgctctcggaggggagcagacag

SEQ ID NO: 3105255 - DNA, 25 bp, Homo sapien
ctgctctcggaggggagcagacagt

SEQ ID NO: 3105256 - DNA, 25 bp, Homo sapien
tgctgctctcggaggggagcagaca

SEQ ID NO: 3105257 - DNA, 25 bp, Homo sapien
ggaggggcggcactctccacagact

SEQ ID NO: 3105258 - DNA, 25 bp, Homo sapien
gagacgccacggcttctgtggcacg

SEQ ID NO: 3105259 - DNA, 25 bp, Homo sapien
tgctgccatcaacacgtgggtcctg

SEQ ID NO: 3105260 - DNA, 25 bp, Homo sapien
tgtggcacggtcctcccttgttctc

SEQ ID NO: 3105261 - DNA, 25 bp, Homo sapien
gggcccaactgctcgctggaggaat

SEQ ID NO: 3105262 - DNA, 25 bp, Homo sapien
tgtaacagcatagcgcctgtctcgg

SEQ ID NO: 3105263 - DNA, 25 bp, Homo sapien
tgggacaggcaaaccggtggatatc

SEQ ID NO: 3105264 - DNA, 25 bp, Homo sapien
tgggactcagaaacacattcggctg

SEQ ID NO: 3105265 - DNA, 25 bp, Homo sapien
cttgtgtgcacactgactcggactg

SEQ ID NO: 3105266 - DNA, 25 bp, Homo sapien
cacactgactcggactgggagggtt

SEQ ID NO: 3105267 - DNA, 25 bp, Homo sapien
actgggagggtttgctcagtatcac

SEQ ID NO: 3105268 - DNA, 25 bp, Homo sapien
ggagggtttgctcagtatcactgga

SEQ ID NO: 3105269 - DNA, 25 bp, Homo sapien
ggcgcccataggaccagcactggca

SEQ ID NO: 3105270 - DNA, 25 bp, Homo sapien
tactggcccacatcactagtgggtg

SEQ ID NO: 3105271 - DNA, 25 bp, Homo sapien
tgtcctgcttatggcccagcggaga

SEQ ID NO: 3105272 - DNA, 25 bp, Homo sapien
catgttctcaacatgggtcattcct

SEQ ID NO: 3105273 - DNA, 25 bp, Homo sapien
acgcaaacgcggtaactgcaggccg

SEQ ID NO: 3105274 - DNA, 25 bp, Homo sapien
gagccgcagacgtcttctgagcgtc

SEQ ID NO: 3105275 - DNA, 25 bp, Homo sapien
ctgagcgtcatttggttcatttggc

SEQ ID NO: 3105276 - DNA, 25 bp, Homo sapien
cctggaggactccacactgcgtaga

SEQ ID NO: 3105277 - DNA, 25 bp, Homo sapien
gaaaggactgtgacgttccacgcct

SEQ ID NO: 3105278 - DNA, 25 bp, Homo sapien
cagttgcaggtggactcagctttgt

SEQ ID NO: 3105279 - DNA, 25 bp, Homo sapien
tagtaacgcccttgctaacatctgt

SEQ ID NO: 3105280 - DNA, 25 bp, Homo sapien
gggtgccatgagtgccaatgtccac

SEQ ID NO: 3105281 - DNA, 25 bp, Homo sapien
tctaggtttggaggccacgcctctc

SEQ ID NO: 3105282 - DNA, 25 bp, Homo sapien
ttttagcaggatggggccgacctcg

SEQ ID NO: 3105283 - DNA, 25 bp, Homo sapien
cacaaacgccaccagggatggcaga

SEQ ID NO: 3105284 - DNA, 25 bp, Homo sapien
agcagcagaagtggccacaaacgcc

SEQ ID NO: 3105285 - DNA, 25 bp, Homo sapien
tgctcagccacggaggccttcctgg

SEQ ID NO: 3105286 - DNA, 25 bp, Homo sapien
cagccacggaggccttcctgggtcc

SEQ ID NO: 3105287 - DNA, 25 bp, Homo sapien
ctcagccacggaggccttcctgggt

SEQ ID NO: 3105288 - DNA, 25 bp, Homo sapien
cactgctcagccacggaggccttcc

SEQ ID NO: 3105289 - DNA, 25 bp, Homo sapien
ctgggatcctcaccgctgctggcat

SEQ ID NO: 3105290 - DNA, 25 bp, Homo sapien
ctggaagtgccttaggatgaaggtg

SEQ ID NO: 3105291 - DNA, 25 bp, Homo sapien
gccaccgcgtccagtatctttttgt

SEQ ID NO: 3105292 - DNA, 25 bp, Homo sapien
tcgtggaccaatgatactaatgtgt

SEQ ID NO: 3105293 - DNA, 25 bp, Homo sapien
cataagtaaggccattcgtggacca

SEQ ID NO: 3105294 - DNA, 25 bp, Homo sapien
agccatcagcaggtatatgtccaag

SEQ ID NO: 3105295 - DNA, 25 bp, Homo sapien
atcagtgatgtatttaccccgggtg

SEQ ID NO: 3105296 - DNA, 25 bp, Homo sapien
cagtgatgtatttaccccgggtggg

SEQ ID NO: 3105297 - DNA, 25 bp, Homo sapien
tcagtgatgtatttaccccgggtgg

SEQ ID NO: 3105298 - DNA, 25 bp, Homo sapien
ttagcatatgttctgaaactcccgc

SEQ ID NO: 3105299 - DNA, 25 bp, Homo sapien
tgttctgaaactcccgcaagcattt

SEQ ID NO: 3105300 - DNA, 25 bp, Homo sapien
gcatttccgggcttcttcaagaaac

SEQ ID NO: 3105301 - DNA, 25 bp, Homo sapien
tgaaactcccgcaagcatttccggg

SEQ ID NO: 3105302 - DNA, 25 bp, Homo sapien
taaacgtgggcttgaccgtgccctg

SEQ ID NO: 3105303 - DNA, 25 bp, Homo sapien
tcgttatcaggacagaggctcagcc

SEQ ID NO: 3105304 - DNA, 25 bp, Homo sapien
gtgagaattcatccgacccgtggct

SEQ ID NO: 3105305 - DNA, 25 bp, Homo sapien
tgataaatatacctgcctcgggaga

SEQ ID NO: 3105306 - DNA, 25 bp, Homo sapien
tctgttcctgtctgcgaacccagca

SEQ ID NO: 3105307 - DNA, 25 bp, Homo sapien
gggaaggtgcttggagccaagagtg

SEQ ID NO: 3105308 - DNA, 25 bp, Homo sapien
cctgtctgcgaacccagcagataca

SEQ ID NO: 3105309 - DNA, 25 bp, Homo sapien
agaagccacaacgttccacagcaaa

SEQ ID NO: 3105310 - DNA, 25 bp, Homo sapien
tccaattaggtgtggtgaggtcggg

SEQ ID NO: 3105311 - DNA, 25 bp, Homo sapien
cccctctgtgtgtctcggaaggtgc

SEQ ID NO: 3105312 - DNA, 25 bp, Homo sapien
gggctgctgtgaatgcccctctgtg

SEQ ID NO: 3105313 - DNA, 25 bp, Homo sapien
aagaccaccaggaacggccacaggg

SEQ ID NO: 3105314 - DNA, 25 bp, Homo sapien
caccaggtgcatagtcctgcggcta

SEQ ID NO: 3105315 - DNA, 25 bp, Homo sapien
tgcacgtgcccatctagagccttgg

SEQ ID NO: 3105316 - DNA, 25 bp, Homo sapien
taccaggctgtgttgtgacgaggct

SEQ ID NO: 3105317 - DNA, 25 bp, Homo sapien
tcagggcggttgtaacaaaggctca

SEQ ID NO: 3105318 - DNA, 25 bp, Homo sapien
aggacaccacggttggtgcctctga

SEQ ID NO: 3105319 - DNA, 25 bp, Homo sapien
ttctgtgtgcatcgacccaggacac

SEQ ID NO: 3105320 - DNA, 25 bp, Homo sapien
gtgcattctgtgtgcatcgacccag

SEQ ID NO: 3105321 - DNA, 25 bp, Homo sapien
tgcaaggggcctgcgtgcattctgt

SEQ ID NO: 3105322 - DNA, 25 bp, Homo sapien
catcagacgagacggcccgtgtgaa

SEQ ID NO: 3105323 - DNA, 25 bp, Homo sapien
tcggcagagacacccacgtggtgct

SEQ ID NO: 3105324 - DNA, 25 bp, Homo sapien
ccgacgggcagacgtggagctaaat

SEQ ID NO: 3105325 - DNA, 25 bp, Homo sapien
gatggtcaacagctacgaagtgcct

SEQ ID NO: 3105326 - DNA, 25 bp, Homo sapien
cagatgactgagctagaccacccag

SEQ ID NO: 3105327 - DNA, 25 bp, Homo sapien
ccagatgactgagctagaccaccca

SEQ ID NO: 3105328 - DNA, 25 bp, Homo sapien
tccagggctgtcttgaaatcactgg

SEQ ID NO: 3105329 - DNA, 25 bp, Homo sapien
cgtccattaccgcttccctgcaaac

SEQ ID NO: 3105330 - DNA, 25 bp, Homo sapien
tcaagatcctaagcacccagcctag

SEQ ID NO: 3105331 - DNA, 25 bp, Homo sapien
cctgcaaacctcaagatcctaagca

SEQ ID NO: 3105332 - DNA, 25 bp, Homo sapien
actaaacatacctcgacagcgtcca

SEQ ID NO: 3105333 - DNA, 25 bp, Homo sapien
gctggccttgcgaacccacggcttg

SEQ ID NO: 3105334 - DNA, 25 bp, Homo sapien
ggactttgccgctggccttgcgaac

SEQ ID NO: 3105335 - DNA, 25 bp, Homo sapien
gactttgccgctggccttgcgaacc

SEQ ID NO: 3105336 - DNA, 25 bp, Homo sapien
gccttgcgaacccacggcttggagc

SEQ ID NO: 3105337 - DNA, 25 bp, Homo sapien
ctgggcatggaaagaaccccaccct

SEQ ID NO: 3105338 - DNA, 25 bp, Homo sapien
cctcagccccgcagtggtctcaggg

SEQ ID NO: 3105339 - DNA, 25 bp, Homo sapien
ccctcaccacagatgggaacagaca

SEQ ID NO: 3105340 - DNA, 25 bp, Homo sapien
aacagctgggcatggaaagaacccc

SEQ ID NO: 3105341 - DNA, 25 bp, Homo sapien
cggaatcgcttccccgcctccacct

SEQ ID NO: 3105342 - DNA, 25 bp, Homo sapien
gccggaatcgcttccccgcctccac

SEQ ID NO: 3105343 - DNA, 25 bp, Homo sapien
ggaatcgcttccccgcctccacctg

SEQ ID NO: 3105344 - DNA, 25 bp, Homo sapien
tggccggaatcgcttccccgcctcc

SEQ ID NO: 3105345 - DNA, 25 bp, Homo sapien
cttaaggtctgtggtaaagtgatga

SEQ ID NO: 3105346 - DNA, 25 bp, Homo sapien
ggtaaagtgatgactggcattgtca

SEQ ID NO: 3105347 - DNA, 25 bp, Homo sapien
ggcatcttaaggtctgtggtaaagt

SEQ ID NO: 3105348 - DNA, 25 bp, Homo sapien
tggtaaagtgatgactggcattgtc

SEQ ID NO: 3105349 - DNA, 25 bp, Homo sapien
aaggttatctggtccctgactcagg

SEQ ID NO: 3105350 - DNA, 25 bp, Homo sapien
gagctgaacctgagacaaagccctt

SEQ ID NO: 3105351 - DNA, 25 bp, Homo sapien
caagatatgttttagtaagccgcca

SEQ ID NO: 3105352 - DNA, 25 bp, Homo sapien
ggatcatctgtaagcaactcactag

SEQ ID NO: 3105353 - DNA, 25 bp, Homo sapien
cctttgtgctgaaaagccctcgaca

SEQ ID NO: 3105354 - DNA, 25 bp, Homo sapien
tttccagaactagtgcacagaaggg

SEQ ID NO: 3105355 - DNA, 25 bp, Homo sapien
cccgcagagcctttgtaaataagga

SEQ ID NO: 3105356 - DNA, 25 bp, Homo sapien
acctcacaagggagagtcaggccag

SEQ ID NO: 3105357 - DNA, 25 bp, Homo sapien
ttgccccaaaacagtaggtaggtca

SEQ ID NO: 3105358 - DNA, 25 bp, Homo sapien
gtccatctaagcctttgccccaaaa

SEQ ID NO: 3105359 - DNA, 25 bp, Homo sapien
gtgtccatctaagcctttgccccaa

SEQ ID NO: 3105360 - DNA, 25 bp, Homo sapien
aaacagtaggtaggtcaggtgcagt

SEQ ID NO: 3105361 - DNA, 25 bp, Homo sapien
gaactcttgatctggactgagggaa

SEQ ID NO: 3105362 - DNA, 25 bp, Homo sapien
gaaacagaatattgcgagccagccg

SEQ ID NO: 3105363 - DNA, 25 bp, Homo sapien
gagactgcaggtttctcagaagcac

SEQ ID NO: 3105364 - DNA, 25 bp, Homo sapien
gaaccaggctgtcgcaggagaaaca

SEQ ID NO: 3105365 - DNA, 25 bp, Homo sapien
taatttagactttgaggcccataca

SEQ ID NO: 3105366 - DNA, 25 bp, Homo sapien
cttcagcatcggcttggagaatgac

SEQ ID NO: 3105367 - DNA, 25 bp, Homo sapien
cagccagctggtaagtaatttagac

SEQ ID NO: 3105368 - DNA, 25 bp, Homo sapien
gaaaaggtttctatgaacagccagc

SEQ ID NO: 3105369 - DNA, 25 bp, Homo sapien
ttttctaggtcataaacacaaatct

SEQ ID NO: 3105370 - DNA, 25 bp, Homo sapien
ttgaaagtactgtgctctgaacatt

SEQ ID NO: 3105371 - DNA, 25 bp, Homo sapien
ttctaggtcataaacacaaatctgt

SEQ ID NO: 3105372 - DNA, 25 bp, Homo sapien
cttttgaaagtactgtgctctgaac

SEQ ID NO: 3105373 - DNA, 25 bp, Homo sapien
tcaggcgatccacatgcctcggcct

SEQ ID NO: 3105374 - DNA, 25 bp, Homo sapien
aggcgatccacatgcctcggcctcc

SEQ ID NO: 3105375 - DNA, 25 bp, Homo sapien
ctcaggcgatccacatgcctcggcc

SEQ ID NO: 3105376 - DNA, 25 bp, Homo sapien
gcgatccacatgcctcggcctcccc

SEQ ID NO: 3105377 - DNA, 25 bp, Homo sapien
cagcccgcgcttttgttgtgcccgg

SEQ ID NO: 3105378 - DNA, 25 bp, Homo sapien
gcaaaacgcctgttgcgggtgcacc

SEQ ID NO: 3105379 - DNA, 25 bp, Homo sapien
tctacggatgtgtttgctgcgggct

SEQ ID NO: 3105380 - DNA, 25 bp, Homo sapien
tattgcgctcggaggattttctgct

SEQ ID NO: 3105381 - DNA, 25 bp, Homo sapien
tgtctgggaggtgacacttcagtca

SEQ ID NO: 3105382 - DNA, 25 bp, Homo sapien
ccagagacagcatggacgttggccc

SEQ ID NO: 3105383 - DNA, 25 bp, Homo sapien
tggccccacacacccgggaaattga

SEQ ID NO: 3105384 - DNA, 25 bp, Homo sapien
cttcagtcaggtgacacgtggctgt

SEQ ID NO: 3105385 - DNA, 25 bp, Homo sapien
gtggggctgttcaccacaggacatc

SEQ ID NO: 3105386 - DNA, 25 bp, Homo sapien
gcccacgtgtccgtccccaacatcc

SEQ ID NO: 3105387 - DNA, 25 bp, Homo sapien
gtctcagactcttggtcacaatggg

SEQ ID NO: 3105388 - DNA, 25 bp, Homo sapien
ctggtggggctgttcaccacaggac

SEQ ID NO: 3105389 - DNA, 25 bp, Homo sapien
gagcaggtaatgtaatattccgatg

SEQ ID NO: 3105390 - DNA, 25 bp, Homo sapien
tcctgttccgtgtggagcaggtaat

SEQ ID NO: 3105391 - DNA, 25 bp, Homo sapien
cttctgtcctgttccgtgtggagca

SEQ ID NO: 3105392 - DNA, 25 bp, Homo sapien
gtaatattccgatgagggtccggcc

SEQ ID NO: 3105393 - DNA, 25 bp, Homo sapien
tctttgactcggaagcatctcctat

SEQ ID NO: 3105394 - DNA, 25 bp, Homo sapien
ttgcctcctctttgactcggaagca

SEQ ID NO: 3105395 - DNA, 25 bp, Homo sapien
tcctctttgactcggaagcatctcc

SEQ ID NO: 3105396 - DNA, 25 bp, Homo sapien
cttgcttcacgtgggctgaaatggc

SEQ ID NO: 3105397 - DNA, 25 bp, Homo sapien
tcctggatcctcctgtagactggtt

SEQ ID NO: 3105398 - DNA, 25 bp, Homo sapien
cctggatcctcctgtagactggttc

SEQ ID NO: 3105399 - DNA, 25 bp, Homo sapien
tcctctggaaccggcttcctgaagc

SEQ ID NO: 3105400 - DNA, 25 bp, Homo sapien
tcacgtcctctggaaccggcttcct

SEQ ID NO: 3105401 - DNA, 25 bp, Homo sapien
ctctggaaccggcttcctgaagcct

SEQ ID NO: 3105402 - DNA, 25 bp, Homo sapien
acgtcctctggaaccggcttcctga

SEQ ID NO: 3105403 - DNA, 25 bp, Homo sapien
cgctgtcggtgctgcctgtcctgtg

SEQ ID NO: 3105404 - DNA, 25 bp, Homo sapien
gctctgggtcgctgtcggtgctgcc

SEQ ID NO: 3105405 - DNA, 25 bp, Homo sapien
ggtcgctgtcggtgctgcctgtcct

SEQ ID NO: 3105406 - DNA, 25 bp, Homo sapien
ctctgggtcgctgtcggtgctgcct

SEQ ID NO: 3105407 - DNA, 25 bp, Homo sapien
agctgagagtgaggcgatgcgctgc

SEQ ID NO: 3105408 - DNA, 25 bp, Homo sapien
agagtgaggcgatgcgctgcagccc

SEQ ID NO: 3105409 - DNA, 25 bp, Homo sapien
gctgagagtgaggcgatgcgctgca

SEQ ID NO: 3105410 - DNA, 25 bp, Homo sapien
tgagagtgaggcgatgcgctgcagc

SEQ ID NO: 3105411 - DNA, 25 bp, Homo sapien
tggggcggggcggagatgcagtcgt

SEQ ID NO: 3105412 - DNA, 25 bp, Homo sapien
ggggcggggcggagatgcagtcgtc

SEQ ID NO: 3105413 - DNA, 25 bp, Homo sapien
ctggggcggggcggagatgcagtcg

SEQ ID NO: 3105414 - DNA, 25 bp, Homo sapien
ttctcttcttctggatagagaagca

SEQ ID NO: 3105415 - DNA, 25 bp, Homo sapien
cttctcttcttctggatagagaagc

SEQ ID NO: 3105416 - DNA, 25 bp, Homo sapien
tctcttcttctggatagagaagcat

SEQ ID NO: 3105417 - DNA, 25 bp, Homo sapien
ggaccgctccatggccttgtcagga

SEQ ID NO: 3105418 - DNA, 25 bp, Homo sapien
agacagggaccgctccatggccttg

SEQ ID NO: 3105419 - DNA, 25 bp, Homo sapien
ggacagacagggaccgctccatggc

SEQ ID NO: 3105420 - DNA, 25 bp, Homo sapien
agggaccgctccatggccttgtcag

SEQ ID NO: 3105421 - DNA, 25 bp, Homo sapien
cacacgaaccacacgcatccactgt

SEQ ID NO: 3105422 - DNA, 25 bp, Homo sapien
acgaaccacacgcatccactgtgat

SEQ ID NO: 3105423 - DNA, 25 bp, Homo sapien
ctctgagccaggacccacacgaacc

SEQ ID NO: 3105424 - DNA, 25 bp, Homo sapien
caggacccacacgaaccacacgcat

SEQ ID NO: 3105425 - DNA, 25 bp, Homo sapien
ggccggctggttcgcaagccccatg

SEQ ID NO: 3105426 - DNA, 25 bp, Homo sapien
tgagatactgtgatcactttgctct

SEQ ID NO: 3105427 - DNA, 25 bp, Homo sapien
ctctctgtgatcgtggagtgtttga

SEQ ID NO: 3105428 - DNA, 25 bp, Homo sapien
tgctctctgtgatcgtggagtgttt

SEQ ID NO: 3105429 - DNA, 25 bp, Homo sapien
tcagggtgagcatcaggcacccgct

SEQ ID NO: 3105430 - DNA, 25 bp, Homo sapien
cctcagggtgagcatcaggcacccg

SEQ ID NO: 3105431 - DNA, 25 bp, Homo sapien
gggtgagcatcaggcacccgctggc

SEQ ID NO: 3105432 - DNA, 25 bp, Homo sapien
ccctcagggtgagcatcaggcaccc

SEQ ID NO: 3105433 - DNA, 25 bp, Homo sapien
gagcaatttctagatttgatccaat

SEQ ID NO: 3105434 - DNA, 25 bp, Homo sapien
ctaggtgtctaagtcatcaatatct

SEQ ID NO: 3105435 - DNA, 25 bp, Homo sapien
gatccaataatctcattcccatctc

SEQ ID NO: 3105436 - DNA, 25 bp, Homo sapien
tctcctgaagaaccaaccccaaata

SEQ ID NO: 3105437 - DNA, 25 bp, Homo sapien
gggataacaggaagacgtctgatga

SEQ ID NO: 3105438 - DNA, 25 bp, Homo sapien
tgcatccgcagttgggataacagga

SEQ ID NO: 3105439 - DNA, 25 bp, Homo sapien
ggaaggttttccctgcatccgcagt

SEQ ID NO: 3105440 - DNA, 25 bp, Homo sapien
tgggaaggttttccctgcatccgca

SEQ ID NO: 3105441 - DNA, 25 bp, Homo sapien
cctgagcactcatacactgaggagg

SEQ ID NO: 3105442 - DNA, 25 bp, Homo sapien
caggacactgttattcttggaggct

SEQ ID NO: 3105443 - DNA, 25 bp, Homo sapien
ctcaggacactgttattcttggagg

SEQ ID NO: 3105444 - DNA, 25 bp, Homo sapien
ctctcaggacactgttattcttgga

SEQ ID NO: 3105445 - DNA, 25 bp, Homo sapien
tctcaggacactgttattcttggag

SEQ ID NO: 3105446 - DNA, 25 bp, Homo sapien
ggaaatcaggcttgtcaaagttaac

SEQ ID NO: 3105447 - DNA, 25 bp, Homo sapien
cagcaaagctttatgtgccaaagct

SEQ ID NO: 3105448 - DNA, 25 bp, Homo sapien
gggctgggtatgtaggaggaaatca

SEQ ID NO: 3105449 - DNA, 25 bp, Homo sapien
tttatgtgccaaagctgcgggacgg

SEQ ID NO: 3105450 - DNA, 25 bp, Homo sapien
gtcccacacaggtcctagagagtct

SEQ ID NO: 3105451 - DNA, 25 bp, Homo sapien
aagaggctctaagcaccaggctggc

SEQ ID NO: 3105452 - DNA, 25 bp, Homo sapien
tctgccgatggcctgggaaagcagt

SEQ ID NO: 3105453 - DNA, 25 bp, Homo sapien
ggctccctggtgccaaccaaattgc

SEQ ID NO: 3105454 - DNA, 25 bp, Homo sapien
acgttgctcgttgggctgtagttgc

SEQ ID NO: 3105455 - DNA, 25 bp, Homo sapien
ggaacccagaggtcacgttgctcgt

SEQ ID NO: 3105456 - DNA, 25 bp, Homo sapien
cagaggtcacgttgctcgttgggct

SEQ ID NO: 3105457 - DNA, 25 bp, Homo sapien
ttgcagagtgagaggcaggcgtggt

SEQ ID NO: 3105458 - DNA, 25 bp, Homo sapien
cggagacaccggcagggatctgcca

SEQ ID NO: 3105459 - DNA, 25 bp, Homo sapien
tcccgggaaagacgaattcagcctg

SEQ ID NO: 3105460 - DNA, 25 bp, Homo sapien
ggcagtgacggagacaccggcaggg

SEQ ID NO: 3105461 - DNA, 25 bp, Homo sapien
cgggaaagacgaattcagcctggca

SEQ ID NO: 3105462 - DNA, 25 bp, Homo sapien
tgctgtctatttctaaggtcaaatt

SEQ ID NO: 3105463 - DNA, 25 bp, Homo sapien
aggttggcgctggtcctccatgcaa

SEQ ID NO: 3105464 - DNA, 25 bp, Homo sapien
tgatacctcccacggaggttggcgc

SEQ ID NO: 3105465 - DNA, 25 bp, Homo sapien
tatttctaaggtcaaatttgcagcc

SEQ ID NO: 3105466 - DNA, 25 bp, Homo sapien
gaaacagctcgagacgttcagattc

SEQ ID NO: 3105467 - DNA, 25 bp, Homo sapien
tgccaaagttatgtcgaagagcctg

SEQ ID NO: 3105468 - DNA, 25 bp, Homo sapien
ggatctcaaagtgagccgtctcccg

SEQ ID NO: 3105469 - DNA, 25 bp, Homo sapien
tcagattctgaacatccgctccaca

SEQ ID NO: 3105470 - DNA, 25 bp, Homo sapien
aagaagcccaggaggcccccatggg

SEQ ID NO: 3105471 - DNA, 25 bp, Homo sapien
ccccatgggctctgacatccaggag

SEQ ID NO: 3105472 - DNA, 25 bp, Homo sapien
gaagcccaggaggcccccatgggct

SEQ ID NO: 3105473 - DNA, 25 bp, Homo sapien
ggcccccatgggctctgacatccag

SEQ ID NO: 3105474 - DNA, 25 bp, Homo sapien
agcatccagcggtttggagctgagc

SEQ ID NO: 3105475 - DNA, 25 bp, Homo sapien
ccagcacaaccagctttggcccaaa

SEQ ID NO: 3105476 - DNA, 25 bp, Homo sapien
gaagctatgctgatgggcgtgaggg

SEQ ID NO: 3105477 - DNA, 25 bp, Homo sapien
cgctgggaggaccacccaggagcat

SEQ ID NO: 3105478 - DNA, 25 bp, Homo sapien
ctccatccagtacagggagcagctg

SEQ ID NO: 3105479 - DNA, 25 bp, Homo sapien
caggcaggaggttttgtgagactgc

SEQ ID NO: 3105480 - DNA, 25 bp, Homo sapien
aggcctccatccagtacagggagca

SEQ ID NO: 3105481 - DNA, 25 bp, Homo sapien
tcacaggcaggaggttttgtgagac

SEQ ID NO: 3105482 - DNA, 25 bp, Homo sapien
tgaacctccctcccattaggggagc

SEQ ID NO: 3105483 - DNA, 25 bp, Homo sapien
ctgaacctccctcccattaggggag

SEQ ID NO: 3105484 - DNA, 25 bp, Homo sapien
tcccagaccgtggcacagcggcagg

SEQ ID NO: 3105485 - DNA, 25 bp, Homo sapien
acactgttgtcctcccagaccgtgg

SEQ ID NO: 3105486 - DNA, 25 bp, Homo sapien
gccagcctgagctcggcccagcagg

SEQ ID NO: 3105487 - DNA, 25 bp, Homo sapien
gtgccagcctgagctcggcccagca

SEQ ID NO: 3105488 - DNA, 25 bp, Homo sapien
ccagagcaacctcgagggcgtcctg

SEQ ID NO: 3105489 - DNA, 25 bp, Homo sapien
ctcgagggcgtcctggtgcttacca

SEQ ID NO: 3105490 - DNA, 25 bp, Homo sapien
aacctcgagggcgtcctggtgctta

SEQ ID NO: 3105491 - DNA, 25 bp, Homo sapien
ggcgtcctggtgcttaccacctgga

SEQ ID NO: 3105492 - DNA, 25 bp, Homo sapien
ggagaactcctggtggaccctagtg

SEQ ID NO: 3105493 - DNA, 25 bp, Homo sapien
cgctcaggtgagtagggcgacatct

SEQ ID NO: 3105494 - DNA, 25 bp, Homo sapien
gtggaagccttccagtaatttcttg

SEQ ID NO: 3105495 - DNA, 25 bp, Homo sapien
tggccggttgttgaaggtcattgca

SEQ ID NO: 3105496 - DNA, 25 bp, Homo sapien
gggcggatgaccgtgcggaagccgt

SEQ ID NO: 3105497 - DNA, 25 bp, Homo sapien
cgtgcggaagccgttgaagtgccct

SEQ ID NO: 3105498 - DNA, 25 bp, Homo sapien
aagccgttgaagtgccctgccgggc

SEQ ID NO: 3105499 - DNA, 25 bp, Homo sapien
atgaccgtgcggaagccgttgaagt

SEQ ID NO: 3105500 - DNA, 25 bp, Homo sapien
gccttccagccctcgaaatcggtga

SEQ ID NO: 3105501 - DNA, 25 bp, Homo sapien
gatctgagccgccagacttggtgag

SEQ ID NO: 3105502 - DNA, 25 bp, Homo sapien
aaatcggtgacgtctgccacgaaga

SEQ ID NO: 3105503 - DNA, 25 bp, Homo sapien
ggagaagccgtagttccagcagctc

SEQ ID NO: 3105504 - DNA, 25 bp, Homo sapien
gttgtgacttccgtgcactccagga

SEQ ID NO: 3105505 - DNA, 25 bp, Homo sapien
cactccaggaactgtctgtcacaaa

SEQ ID NO: 3105506 - DNA, 25 bp, Homo sapien
gaagtaatcagaagaatatttgacc

SEQ ID NO: 3105507 - DNA, 25 bp, Homo sapien
tctggactgatagaccagttgtgac

SEQ ID NO: 3105508 - DNA, 25 bp, Homo sapien
tacagggacaggttgaactgcagct

SEQ ID NO: 3105509 - DNA, 25 bp, Homo sapien
aagcacttgactgacgacagggtga

SEQ ID NO: 3105510 - DNA, 25 bp, Homo sapien
tgaggttcaggcctttgtaccgggc

SEQ ID NO: 3105511 - DNA, 25 bp, Homo sapien
cactgcataggcatacaggtccagg

SEQ ID NO: 3105512 - DNA, 25 bp, Homo sapien
tgtgtgtgcaactgcgtgagtgcat

SEQ ID NO: 3105513 - DNA, 25 bp, Homo sapien
gccacctgagtgcacacagtgtggg

SEQ ID NO: 3105514 - DNA, 25 bp, Homo sapien
catgcatgagtatgtgcaggtgtgt

SEQ ID NO: 3105515 - DNA, 25 bp, Homo sapien
cagagcctgaggacgagacggctca

SEQ ID NO: 3105516 - DNA, 25 bp, Homo sapien
tcaggatgaccgtgtggccacagaa

SEQ ID NO: 3105517 - DNA, 25 bp, Homo sapien
gcctgggcctccaggttggcagtca

SEQ ID NO: 3105518 - DNA, 25 bp, Homo sapien
tcagcatccacactcatggtgacat

SEQ ID NO: 3105519 - DNA, 25 bp, Homo sapien
ccacagaagcccagggcgtcctcgc

SEQ ID NO: 3105520 - DNA, 25 bp, Homo sapien
tctggccaagggcctccgagagctc

SEQ ID NO: 3105521 - DNA, 25 bp, Homo sapien
tggctgtcaaagatctggccaaggg

SEQ ID NO: 3105522 - DNA, 25 bp, Homo sapien
tccgagagctccctggagaggtcca

SEQ ID NO: 3105523 - DNA, 25 bp, Homo sapien
agccccgctggctgtcaaagatctg

SEQ ID NO: 3105524 - DNA, 25 bp, Homo sapien
agtgggctgcgttaggagccggggc

SEQ ID NO: 3105525 - DNA, 25 bp, Homo sapien
gggaagtgggctgcgttaggagccg

SEQ ID NO: 3105526 - DNA, 25 bp, Homo sapien
gaagtgggctgcgttaggagccggg

SEQ ID NO: 3105527 - DNA, 25 bp, Homo sapien
gagggaagtgggctgcgttaggagc

SEQ ID NO: 3105528 - DNA, 25 bp, Homo sapien
cggtagtggaaggaacctttgtgtg

SEQ ID NO: 3105529 - DNA, 25 bp, Homo sapien
gagctggtgggctcttgggacgtct

SEQ ID NO: 3105530 - DNA, 25 bp, Homo sapien
catggagacttggtggttctgggtg

SEQ ID NO: 3105531 - DNA, 25 bp, Homo sapien
ggaaggaacctttgtgtgcttcatg

SEQ ID NO: 3105532 - DNA, 25 bp, Homo sapien
cagcgtctctctcgtgcctgcagtt

SEQ ID NO: 3105533 - DNA, 25 bp, Homo sapien
gtgaggcctcggttcccgtgcactg

SEQ ID NO: 3105534 - DNA, 25 bp, Homo sapien
ccgtgcactggacctcatccagcat

SEQ ID NO: 3105535 - DNA, 25 bp, Homo sapien
cagggacttgcagtcggccagtgag

SEQ ID NO: 3105536 - DNA, 25 bp, Homo sapien
cacagcgcgactcagccctttgttc

SEQ ID NO: 3105537 - DNA, 25 bp, Homo sapien
ccccggccgtgtgggtccatctgct

SEQ ID NO: 3105538 - DNA, 25 bp, Homo sapien
ggcgtgacgactgcacccaggagtc

SEQ ID NO: 3105539 - DNA, 25 bp, Homo sapien
cgaaccacggaggatattccagcat

SEQ ID NO: 3105540 - DNA, 25 bp, Homo sapien
cggcagacgacgctggcatcagtca

SEQ ID NO: 3105541 - DNA, 25 bp, Homo sapien
tgggtggcgttctcgaagcccaggg

SEQ ID NO: 3105542 - DNA, 25 bp, Homo sapien
gacgacgctggcatcagtcaggtcc

SEQ ID NO: 3105543 - DNA, 25 bp, Homo sapien
ggcccggcagacgacgctggcatca

SEQ ID NO: 3105544 - DNA, 25 bp, Homo sapien
gcctctgtagaagatctccacgcgg

SEQ ID NO: 3105545 - DNA, 25 bp, Homo sapien
ccccatcggccagccgcatgtcacc

SEQ ID NO: 3105546 - DNA, 25 bp, Homo sapien
tccacgcggccctggttggtggcgc

SEQ ID NO: 3105547 - DNA, 25 bp, Homo sapien
gccccactggcctctgtagaagatc

SEQ ID NO: 3105548 - DNA, 25 bp, Homo sapien
ggcacctccatgagggaggagtgga

SEQ ID NO: 3105549 - DNA, 25 bp, Homo sapien
ctgggtctcccctgctgagcttgta

SEQ ID NO: 3105550 - DNA, 25 bp, Homo sapien
ggccccatatgctgtcctgggtctc

SEQ ID NO: 3105551 - DNA, 25 bp, Homo sapien
aggagtggaagatacatacagcccc

SEQ ID NO: 3105552 - DNA, 25 bp, Homo sapien
cctagtgtcctctctataacctgca

SEQ ID NO: 3105553 - DNA, 25 bp, Homo sapien
tggtttgatcagcccctctggttcc

SEQ ID NO: 3105554 - DNA, 25 bp, Homo sapien
ttgatcagcccctctggttccctct

SEQ ID NO: 3105555 - DNA, 25 bp, Homo sapien
ctagtgtcctctctataacctgcat

SEQ ID NO: 3105556 - DNA, 25 bp, Homo sapien
cccgggaacctccaagtcatcatca

SEQ ID NO: 3105557 - DNA, 25 bp, Homo sapien
gtcatcatcactggggatacctggt

SEQ ID NO: 3105558 - DNA, 25 bp, Homo sapien
agtcatcatcactggggatacctgg

SEQ ID NO: 3105559 - DNA, 25 bp, Homo sapien
tgagcccccgggaacctccaagtca

SEQ ID NO: 3105560 - DNA, 25 bp, Homo sapien
gagaagatctggctaaccgctgggc

SEQ ID NO: 3105561 - DNA, 25 bp, Homo sapien
ggagagaagatctggctaaccgctg

SEQ ID NO: 3105562 - DNA, 25 bp, Homo sapien
gagagaagatctggctaaccgctgg

SEQ ID NO: 3105563 - DNA, 25 bp, Homo sapien
aagatctggctaaccgctgggcccc

SEQ ID NO: 3105564 - DNA, 25 bp, Homo sapien
acacccagaagagcctcggaggggt

SEQ ID NO: 3105565 - DNA, 25 bp, Homo sapien
cccagaagagcctcggaggggtcat

SEQ ID NO: 3105566 - DNA, 25 bp, Homo sapien
tgggttcctgcaaccagcagccaca

SEQ ID NO: 3105567 - DNA, 25 bp, Homo sapien
cttgggttcctgcaaccagcagcca

SEQ ID NO: 3105568 - DNA, 25 bp, Homo sapien
gaaggatgtgtaacacttggctaga

SEQ ID NO: 3105569 - DNA, 25 bp, Homo sapien
cctggaaggatgtgtaacacttggc

SEQ ID NO: 3105570 - DNA, 25 bp, Homo sapien
tgtgtaacacttggctagatgaagc

SEQ ID NO: 3105571 - DNA, 25 bp, Homo sapien
ggtcctggaaggatgtgtaacactt

SEQ ID NO: 3105572 - DNA, 25 bp, Homo sapien
cgggcgcggtggctcacacctgtaa

SEQ ID NO: 3105573 - DNA, 25 bp, Homo sapien
gggtggatcaccagaggtcaggagt

SEQ ID NO: 3105574 - DNA, 25 bp, Homo sapien
tccctacactttgggaggccgaggc

SEQ ID NO: 3105575 - DNA, 25 bp, Homo sapien
tgtgtagagagaggggtgccctggc

SEQ ID NO: 3105576 - DNA, 25 bp, Homo sapien
ctgagagctagaggcaggagcttac

SEQ ID NO: 3105577 - DNA, 25 bp, Homo sapien
gaagcctctcccagtatggagcgtg

SEQ ID NO: 3105578 - DNA, 25 bp, Homo sapien
tgcttcagaaaagagtctactttcg

SEQ ID NO: 3105579 - DNA, 25 bp, Homo sapien
acggccgtgtggagcctcctcgctt

SEQ ID NO: 3105580 - DNA, 25 bp, Homo sapien
cgtggtcaggctgatcccaggaaat

SEQ ID NO: 3105581 - DNA, 25 bp, Homo sapien
ttgttctgtggatcctcgccgagaa

SEQ ID NO: 3105582 - DNA, 25 bp, Homo sapien
agctgtgtgccggacccatgagtgt

SEQ ID NO: 3105583 - DNA, 25 bp, Homo sapien
gcttacatgcggttccttatcccaa

SEQ ID NO: 3105584 - DNA, 25 bp, Homo sapien
taaacagatggtcaagagcttacat

SEQ ID NO: 3105585 - DNA, 25 bp, Homo sapien
gcaaatcactgcctatgcgaagagg

SEQ ID NO: 3105586 - DNA, 25 bp, Homo sapien
tacatcagcaaggtctcaattcagc

SEQ ID NO: 3105587 - DNA, 25 bp, Homo sapien
gctatgcccggtgacagctgagctc

SEQ ID NO: 3105588 - DNA, 25 bp, Homo sapien
tcaaggacaatgatctaggaggcgg

SEQ ID NO: 3105589 - DNA, 25 bp, Homo sapien
accgtggcacccctgacgatcgcgg

SEQ ID NO: 3105590 - DNA, 25 bp, Homo sapien
gagaggtttgtgagggaccggcaca

SEQ ID NO: 3105591 - DNA, 25 bp, Homo sapien
cctcgcagctgtgcttgagtttcaa

SEQ ID NO: 3105592 - DNA, 25 bp, Homo sapien
gacaaccatgagagaggggtccctc

SEQ ID NO: 3105593 - DNA, 25 bp, Homo sapien
ctcgttcacagaccctaggcaggga

SEQ ID NO: 3105594 - DNA, 25 bp, Homo sapien
tttctgacagttcctagaaaaaggc

SEQ ID NO: 3105595 - DNA, 25 bp, Homo sapien
caacgctcgtgaagtttccacagag

SEQ ID NO: 3105596 - DNA, 25 bp, Homo sapien
tggagtacactccagcgaagccgag

SEQ ID NO: 3105597 - DNA, 25 bp, Homo sapien
ctttgtatccattggccaagaacgc

SEQ ID NO: 3105598 - DNA, 25 bp, Homo sapien
aacgccgacatgtgagacttgcttc

SEQ ID NO: 3105599 - DNA, 25 bp, Homo sapien
cattggccaagaacgccgacatgtg

SEQ ID NO: 3105600 - DNA, 25 bp, Homo sapien
agccgccaccgcttccttacaatct

SEQ ID NO: 3105601 - DNA, 25 bp, Homo sapien
tgagaaccaacagatgtgcctgcgc

SEQ ID NO: 3105602 - DNA, 25 bp, Homo sapien
gcggtcactggccatatgatgcgga

SEQ ID NO: 3105603 - DNA, 25 bp, Homo sapien
gatggaagaaacgacccagccagtt

SEQ ID NO: 3105604 - DNA, 25 bp, Homo sapien
ttcttgaagggagaaagcggtcact

SEQ ID NO: 3105605 - DNA, 25 bp, Homo sapien
cgatcttggtctccggcaacaggaa

SEQ ID NO: 3105606 - DNA, 25 bp, Homo sapien
tgagggccacaatgatctggtcgtc

SEQ ID NO: 3105607 - DNA, 25 bp, Homo sapien
tgaacttgaaggacgagaagccgtg

SEQ ID NO: 3105608 - DNA, 25 bp, Homo sapien
gaagaaccagcgctgcagcgtgtca

SEQ ID NO: 3105609 - DNA, 25 bp, Homo sapien
cacaggctgggatgctaggaggcca

SEQ ID NO: 3105610 - DNA, 25 bp, Homo sapien
ctgccagggcgagtggggcaggaaa

SEQ ID NO: 3105611 - DNA, 25 bp, Homo sapien
cagtgcagacaaccgggccacaggc

SEQ ID NO: 3105612 - DNA, 25 bp, Homo sapien
atgctaggaggccagctgccagggc

SEQ ID NO: 3105613 - DNA, 25 bp, Homo sapien
gcccgcagggcgttgtagttggaca

SEQ ID NO: 3105614 - DNA, 25 bp, Homo sapien
agcagcccgcagggcgttgtagttg

SEQ ID NO: 3105615 - DNA, 25 bp, Homo sapien
cccgcagggcgttgtagttggacac

SEQ ID NO: 3105616 - DNA, 25 bp, Homo sapien
cagcccgcagggcgttgtagttgga

SEQ ID NO: 3105617 - DNA, 25 bp, Homo sapien
acccgtagtggtcgtccactccttg

SEQ ID NO: 3105618 - DNA, 25 bp, Homo sapien
gctgcccttgtagcccaccaccttc

SEQ ID NO: 3105619 - DNA, 25 bp, Homo sapien
tccgggttctcgttcaccacatcac

SEQ ID NO: 3105620 - DNA, 25 bp, Homo sapien
gcccacgtacagacgctcgtccttc

SEQ ID NO: 3105621 - DNA, 25 bp, Homo sapien
gctccactccaggggggttggcaca

SEQ ID NO: 3105622 - DNA, 25 bp, Homo sapien
tccaggggggttggcacagctcaca

SEQ ID NO: 3105623 - DNA, 25 bp, Homo sapien
tccactccaggggggttggcacagc

SEQ ID NO: 3105624 - DNA, 25 bp, Homo sapien
actccaggggggttggcacagctca

SEQ ID NO: 3105625 - DNA, 25 bp, Homo sapien
tccataaaacctcagggtccagtta

SEQ ID NO: 3105626 - DNA, 25 bp, Homo sapien
ctccataaaacctcagggtccagtt

SEQ ID NO: 3105627 - DNA, 25 bp, Homo sapien
tttgctgccttcgatctggtagacg

SEQ ID NO: 3105628 - DNA, 25 bp, Homo sapien
aatcacccagggcacggctttgctg

SEQ ID NO: 3105629 - DNA, 25 bp, Homo sapien
gtcatccacggagtagagtttccca

SEQ ID NO: 3105630 - DNA, 25 bp, Homo sapien
gaaaacaatcaggtcggatagctcc

SEQ ID NO: 3105631 - DNA, 25 bp, Homo sapien
acagggggtaggtgtcattgtacca

SEQ ID NO: 3105632 - DNA, 25 bp, Homo sapien
cacccacaaagaacgtcaggatcac

SEQ ID NO: 3105633 - DNA, 25 bp, Homo sapien
tcattgtaccagttggcgggcgcct

SEQ ID NO: 3105634 - DNA, 25 bp, Homo sapien
gatggcagcacccacaaagaacgtc

SEQ ID NO: 3105635 - DNA, 25 bp, Homo sapien
agcgggggtccgcggccttggtcat

SEQ ID NO: 3105636 - DNA, 25 bp, Homo sapien
cggagggagtgcatagactcattcc

SEQ ID NO: 3105637 - DNA, 25 bp, Homo sapien
ccccacactgatccggagggagtgc

SEQ ID NO: 3105638 - DNA, 25 bp, Homo sapien
tccattccgggtgctcagacagctg

SEQ ID NO: 3105639 - DNA, 25 bp, Homo sapien
attccattccgggtgctcagacagc

SEQ ID NO: 3105640 - DNA, 25 bp, Homo sapien
atcttagttccggaagctgcaggcg

SEQ ID NO: 3105641 - DNA, 25 bp, Homo sapien
gaaacagtatttcactactctgtgg

SEQ ID NO: 3105642 - DNA, 25 bp, Homo sapien
cccttggcttaatgaattcccgact

SEQ ID NO: 3105643 - DNA, 25 bp, Homo sapien
gattcccgactctagcagtatcttt

SEQ ID NO: 3105644 - DNA, 25 bp, Homo sapien
tcattcggcaagacgtgaagtcttt

SEQ ID NO: 3105645 - DNA, 25 bp, Homo sapien
tttcattcggcaagacgtgaagtct

SEQ ID NO: 3105646 - DNA, 25 bp, Homo sapien
ttcattcggcaagacgtgaagtctt

SEQ ID NO: 3105647 - DNA, 25 bp, Homo sapien
tgtcccagctggcaacgtgggaagc

SEQ ID NO: 3105648 - DNA, 25 bp, Homo sapien
ctgtcccagctggcaacgtgggaag

SEQ ID NO: 3105649 - DNA, 25 bp, Homo sapien
cctgtcccagctggcaacgtgggaa

SEQ ID NO: 3105650 - DNA, 25 bp, Homo sapien
ccctgtcccagctggcaacgtggga

SEQ ID NO: 3105651 - DNA, 25 bp, Homo sapien
tggcctggagcagacagatgtgcag

SEQ ID NO: 3105652 - DNA, 25 bp, Homo sapien
gacagatgtgcagtaaaggagtctc

SEQ ID NO: 3105653 - DNA, 25 bp, Homo sapien
ctgacgttagagtattgtatacagt

SEQ ID NO: 3105654 - DNA, 25 bp, Homo sapien
tgtatacagttatcggtttgtttgt

SEQ ID NO: 3105655 - DNA, 25 bp, Homo sapien
cgggcatacagcatgatggctcagt

SEQ ID NO: 3105656 - DNA, 25 bp, Homo sapien
ccacttcccgggcatacagcatgat

SEQ ID NO: 3105657 - DNA, 25 bp, Homo sapien
cactgctgtcgccaagcccacttcc

SEQ ID NO: 3105658 - DNA, 25 bp, Homo sapien
cgtctgcgccgccttggtgagagct

SEQ ID NO: 3105659 - DNA, 25 bp, Homo sapien
tcccggtgcttcgatcgagaacact

SEQ ID NO: 3105660 - DNA, 25 bp, Homo sapien
ggtgcttcgatcgagaacactggcc

SEQ ID NO: 3105661 - DNA, 25 bp, Homo sapien
acagctcccggtgcttcgatcgaga

SEQ ID NO: 3105662 - DNA, 25 bp, Homo sapien
gggagacagctcccggtgcttcgat

SEQ ID NO: 3105663 - DNA, 25 bp, Homo sapien
gagtgatcctcctaacagcacaggg

SEQ ID NO: 3105664 - DNA, 25 bp, Homo sapien
tccaggcccgcagggaagactccat

SEQ ID NO: 3105665 - DNA, 25 bp, Homo sapien
ggcccgcagggaagactccatgctc

SEQ ID NO: 3105666 - DNA, 25 bp, Homo sapien
cagagtgatcctcctaacagcacag

SEQ ID NO: 3105667 - DNA, 25 bp, Homo sapien
gccaacacacctggggcacagctaa

SEQ ID NO: 3105668 - DNA, 25 bp, Homo sapien
cacacctggggcacagctaattttt

SEQ ID NO: 3105669 - DNA, 25 bp, Homo sapien
caacacacctggggcacagctaatt

SEQ ID NO: 3105670 - DNA, 25 bp, Homo sapien
agccaacacacctggggcacagcta

SEQ ID NO: 3105671 - DNA, 25 bp, Homo sapien
ctgcatttctgacatgcgtcttaga

SEQ ID NO: 3105672 - DNA, 25 bp, Homo sapien
ttcaagacacgagtcctgtgcagct

SEQ ID NO: 3105673 - DNA, 25 bp, Homo sapien
cctcaagcctacttgctcctcgtct

SEQ ID NO: 3105674 - DNA, 25 bp, Homo sapien
tcttagacatttcaagacacgagtc

SEQ ID NO: 3105675 - DNA, 25 bp, Homo sapien
tagtggtgacgggtggccaccgtgt

SEQ ID NO: 3105676 - DNA, 25 bp, Homo sapien
ggccaccgtgtccacagtggtctgg

SEQ ID NO: 3105677 - DNA, 25 bp, Homo sapien
cagtggtctggttcaagctctctca

SEQ ID NO: 3105678 - DNA, 25 bp, Homo sapien
agctctctcaggatcctgggagatg

SEQ ID NO: 3105679 - DNA, 25 bp, Homo sapien
caggcctgccgctgcactctgagca

SEQ ID NO: 3105680 - DNA, 25 bp, Homo sapien
ggagtggcgactccctggacagcag

SEQ ID NO: 3105681 - DNA, 25 bp, Homo sapien
cagcagacagccaagagggtttgtt

SEQ ID NO: 3105682 - DNA, 25 bp, Homo sapien
ctctgagcaaggctataatgaaggg

SEQ ID NO: 3105683 - DNA, 25 bp, Homo sapien
ccgaggacgggccatatgtacttgg

SEQ ID NO: 3105684 - DNA, 25 bp, Homo sapien
gagactccgaggacgggccatatgt

SEQ ID NO: 3105685 - DNA, 25 bp, Homo sapien
ctatacggttgccagaaagtaccga

SEQ ID NO: 3105686 - DNA, 25 bp, Homo sapien
cagaaagtaccgagactccgaggac

SEQ ID NO: 3105687 - DNA, 25 bp, Homo sapien
catccaggtggcagggtaaaaacac

SEQ ID NO: 3105688 - DNA, 25 bp, Homo sapien
tcgaaagccacatccaggtggcagg

SEQ ID NO: 3105689 - DNA, 25 bp, Homo sapien
tcctcacgtactctgcagctcaggg

SEQ ID NO: 3105690 - DNA, 25 bp, Homo sapien
ggccaggagaactgctgctaccaca

SEQ ID NO: 3105691 - DNA, 25 bp, Homo sapien
ccaagagcttttacaccaacacatt

SEQ ID NO: 3105692 - DNA, 25 bp, Homo sapien
tgcagaccaggtgcacagtgacggg

SEQ ID NO: 3105693 - DNA, 25 bp, Homo sapien
cagtgacgggtgagtgaaaacgttc

SEQ ID NO: 3105694 - DNA, 25 bp, Homo sapien
aaacgttctggagtaccaagagctt

SEQ ID NO: 3105695 - DNA, 25 bp, Homo sapien
gcgtgtgctaggatagagggctcat

SEQ ID NO: 3105696 - DNA, 25 bp, Homo sapien
caggaaacccttgccacgtccagag

SEQ ID NO: 3105697 - DNA, 25 bp, Homo sapien
ggctgccccgacaggaaacccttgc

SEQ ID NO: 3105698 - DNA, 25 bp, Homo sapien
cttcagtgtgcctttcagcaggggc

SEQ ID NO: 3105699 - DNA, 25 bp, Homo sapien
tttttttccgtcctgcgcctgcgcg

SEQ ID NO: 3105700 - DNA, 25 bp, Homo sapien
gagggccgtcttccaccgcgttgcg

SEQ ID NO: 3105701 - DNA, 25 bp, Homo sapien
gcttggctgggctaacggccgggac

SEQ ID NO: 3105702 - DNA, 25 bp, Homo sapien
gggctggctccggtgcccgcgatcg

SEQ ID NO: 3105703 - DNA, 25 bp, Homo sapien
tagtgcttttcagtaagggtttgta

SEQ ID NO: 3105704 - DNA, 25 bp, Homo sapien
ttttcacttcacaatatagcttgga

SEQ ID NO: 3105705 - DNA, 25 bp, Homo sapien
tttcacttcacaatatagcttggag

SEQ ID NO: 3105706 - DNA, 25 bp, Homo sapien
tcacttcacaatatagcttggagat

SEQ ID NO: 3105707 - DNA, 25 bp, Homo sapien
tctctaaagagctacacggtgttcc

SEQ ID NO: 3105708 - DNA, 25 bp, Homo sapien
ttatactacggcaatgcttcagagg

SEQ ID NO: 3105709 - DNA, 25 bp, Homo sapien
gaggctgtaccataaaatcactttc

SEQ ID NO: 3105710 - DNA, 25 bp, Homo sapien
tttaccaggcccctaatgatgtcct

SEQ ID NO: 3105711 - DNA, 25 bp, Homo sapien
gacttcaccatagactccttttgga

SEQ ID NO: 3105712 - DNA, 25 bp, Homo sapien
agctgccagtcctgatctccacctg

SEQ ID NO: 3105713 - DNA, 25 bp, Homo sapien
acctgtcccaagctgctcagaacgt

SEQ ID NO: 3105714 - DNA, 25 bp, Homo sapien
ccaagctgctcagaacgtggcagcg

SEQ ID NO: 3105715 - DNA, 25 bp, Homo sapien
gctgctcagaacgtggcagcgccat

SEQ ID NO: 3105716 - DNA, 25 bp, Homo sapien
caagtttccacttttccatcttagc

SEQ ID NO: 3105717 - DNA, 25 bp, Homo sapien
agcagcttctccgaagctctgtgga

SEQ ID NO: 3105718 - DNA, 25 bp, Homo sapien
agccacgagcatgggccagtggcca

SEQ ID NO: 3105719 - DNA, 25 bp, Homo sapien
ttggcagtgggacgtcaccatcgga

SEQ ID NO: 3105720 - DNA, 25 bp, Homo sapien
gaactttgcactatattgggcctct

SEQ ID NO: 3105721 - DNA, 25 bp, Homo sapien
gaagctaaggcccactgaagtttgg

SEQ ID NO: 3105722 - DNA, 25 bp, Homo sapien
caatgtggcttgaactatcctgaga

SEQ ID NO: 3105723 - DNA, 25 bp, Homo sapien
ctcaaggtaggacagagccgggaca

SEQ ID NO: 3105724 - DNA, 25 bp, Homo sapien
ccagggatgtaggttttgccaagcc

SEQ ID NO: 3105725 - DNA, 25 bp, Homo sapien
caagcctcagacacgtatgccaaga

SEQ ID NO: 3105726 - DNA, 25 bp, Homo sapien
gacgaaggtctcataagggctgcaa

SEQ ID NO: 3105727 - DNA, 25 bp, Homo sapien
gaagccttctcattgcactgaggga

SEQ ID NO: 3105728 - DNA, 25 bp, Homo sapien
gctgctcacatctggctgggcttcg

SEQ ID NO: 3105729 - DNA, 25 bp, Homo sapien
tccgcggctgctgtttggacgaaaa

SEQ ID NO: 3105730 - DNA, 25 bp, Homo sapien
ggcacacacggttaatcctccgcgg

SEQ ID NO: 3105731 - DNA, 25 bp, Homo sapien
gcttctggtcgcagagacctcggag

SEQ ID NO: 3105732 - DNA, 25 bp, Homo sapien
cttggccggcgggagatgctctacg

SEQ ID NO: 3105733 - DNA, 25 bp, Homo sapien
ttctgcactgccgtcctccggaaga

SEQ ID NO: 3105734 - DNA, 25 bp, Homo sapien
ggacctgtggctgctcgtaccgccc

SEQ ID NO: 3105735 - DNA, 25 bp, Homo sapien
tttccttcaccgagtctgtgcatcg

SEQ ID NO: 3105736 - DNA, 25 bp, Homo sapien
tggaagggccagtcctgagcttaag

SEQ ID NO: 3105737 - DNA, 25 bp, Homo sapien
ccactttagagagcagtctggaaga

SEQ ID NO: 3105738 - DNA, 25 bp, Homo sapien
caagccgctctcatgagccagggat

SEQ ID NO: 3105739 - DNA, 25 bp, Homo sapien
tctggaagaaacagcgacgtcagct

SEQ ID NO: 3105740 - DNA, 25 bp, Homo sapien
ctcctctacgtcctgcgtgtagcct

SEQ ID NO: 3105741 - DNA, 25 bp, Homo sapien
tgtcctcctctacgtcctgcgtgta

SEQ ID NO: 3105742 - DNA, 25 bp, Homo sapien
cctgtcctcctctacgtcctgcgtg

SEQ ID NO: 3105743 - DNA, 25 bp, Homo sapien
gtcctcctctacgtcctgcgtgtag

SEQ ID NO: 3105744 - DNA, 25 bp, Homo sapien
ggcctgcgacatttcgagttttaca

SEQ ID NO: 3105745 - DNA, 25 bp, Homo sapien
cacagtcgctgtgcccctcggtggg

SEQ ID NO: 3105746 - DNA, 25 bp, Homo sapien
ttgaatgaggtgttcccacggggcc

SEQ ID NO: 3105747 - DNA, 25 bp, Homo sapien
ttcggcccacctgaaacggctgggc

SEQ ID NO: 3105748 - DNA, 25 bp, Homo sapien
ggctcccgtggacagggactcttgc

SEQ ID NO: 3105749 - DNA, 25 bp, Homo sapien
ctcccgtggacagggactcttgctg

SEQ ID NO: 3105750 - DNA, 25 bp, Homo sapien
gctcccgtggacagggactcttgct

SEQ ID NO: 3105751 - DNA, 25 bp, Homo sapien
gggactgaggagctgccgtcgcctc

SEQ ID NO: 3105752 - DNA, 25 bp, Homo sapien
ggtcctgagtcgtgtgccccatgtc

SEQ ID NO: 3105753 - DNA, 25 bp, Homo sapien
ggactgaggagctgccgtcgcctcc

SEQ ID NO: 3105754 - DNA, 25 bp, Homo sapien
gccccatgtccagggggaacagcag

SEQ ID NO: 3105755 - DNA, 25 bp, Homo sapien
ctggtctatgcggaagatcccggcg

SEQ ID NO: 3105756 - DNA, 25 bp, Homo sapien
tgtgtccgctccgtgcacagtaagg

SEQ ID NO: 3105757 - DNA, 25 bp, Homo sapien
cctatctcagaaatacgggtgcaaa

SEQ ID NO: 3105758 - DNA, 25 bp, Homo sapien
gtgcgtgacccctgcctatctcaga

SEQ ID NO: 3105759 - DNA, 25 bp, Homo sapien
ccatgtctcttgtgtggtcccagaa

SEQ ID NO: 3105760 - DNA, 25 bp, Homo sapien
taatatgccggcgtttaagcctgtg

SEQ ID NO: 3105761 - DNA, 25 bp, Homo sapien
gctcgcgtgcgggaaaactaatatg

SEQ ID NO: 3105762 - DNA, 25 bp, Homo sapien
tgcctgggtactcatgccaagcaga

SEQ ID NO: 3105763 - DNA, 25 bp, Homo sapien
agttctaacctttctgcttcctggg

SEQ ID NO: 3105764 - DNA, 25 bp, Homo sapien
tccgtgctctttgttgcactgggtc

SEQ ID NO: 3105765 - DNA, 25 bp, Homo sapien
ctgggtcgaccaagcacagctgtgt

SEQ ID NO: 3105766 - DNA, 25 bp, Homo sapien
cagccatctatgcctctgtgccatg

SEQ ID NO: 3105767 - DNA, 25 bp, Homo sapien
cttaataatactgttagtttgaatg

SEQ ID NO: 3105768 - DNA, 25 bp, Homo sapien
ttaataatactgttagtttgaatgg

SEQ ID NO: 3105769 - DNA, 25 bp, Homo sapien
aataatactgttagtttgaatggtc

SEQ ID NO: 3105770 - DNA, 25 bp, Homo sapien
taataatactgttagtttgaatggt

SEQ ID NO: 3105771 - DNA, 25 bp, Homo sapien
tgctgcaagaaaagggtccggaaca

SEQ ID NO: 3105772 - DNA, 25 bp, Homo sapien
gttgagctgctgcaagaaaagggtc

SEQ ID NO: 3105773 - DNA, 25 bp, Homo sapien
cagaatggtaagaaaggaagcccgg

SEQ ID NO: 3105774 - DNA, 25 bp, Homo sapien
cttggaagcatacagaatggtaaga

SEQ ID NO: 3105775 - DNA, 25 bp, Homo sapien
tcagccttggtgtacacaggccccg

SEQ ID NO: 3105776 - DNA, 25 bp, Homo sapien
cacactgtctgtcttgggagttggg

SEQ ID NO: 3105777 - DNA, 25 bp, Homo sapien
cacttcatgagacagtggagccacg

SEQ ID NO: 3105778 - DNA, 25 bp, Homo sapien
ttcatggtccgagaaggaaacggtg

SEQ ID NO: 3105779 - DNA, 25 bp, Homo sapien
tgaaggcgacaggaccacgtggcac

SEQ ID NO: 3105780 - DNA, 25 bp, Homo sapien
ccagcacaggcttcgaggcggcctg

SEQ ID NO: 3105781 - DNA, 25 bp, Homo sapien
cttgcagcttctcgggggaggcaca

SEQ ID NO: 3105782 - DNA, 25 bp, Homo sapien
gtgggcggcaggacttcagccctca

SEQ ID NO: 3105783 - DNA, 25 bp, Homo sapien
gctcaagtgaggtcccagccagtgt

SEQ ID NO: 3105784 - DNA, 25 bp, Homo sapien
agccgtggcacactcagaacctgag

SEQ ID NO: 3105785 - DNA, 25 bp, Homo sapien
tgcctgcagtctccctaatgcaggg

SEQ ID NO: 3105786 - DNA, 25 bp, Homo sapien
catggaggtacagatctgtgtgccc

SEQ ID NO: 3105787 - DNA, 25 bp, Homo sapien
cgaccaggacgtgcctttccacatt

SEQ ID NO: 3105788 - DNA, 25 bp, Homo sapien
tgcagcagtgctaaggagtcgcaga

SEQ ID NO: 3105789 - DNA, 25 bp, Homo sapien
tgcacaccacgcgacacgcttgtga

SEQ ID NO: 3105790 - DNA, 25 bp, Homo sapien
gagtcgcagagactggcgtgaccac

SEQ ID NO: 3105791 - DNA, 25 bp, Homo sapien
cctgccaggcgtttctgttgttctg

SEQ ID NO: 3105792 - DNA, 25 bp, Homo sapien
ggcgctaccgctactcccaggttgg

SEQ ID NO: 3105793 - DNA, 25 bp, Homo sapien
cctccctgcgtcagggtgctggaca

SEQ ID NO: 3105794 - DNA, 25 bp, Homo sapien
gcagtggctactcctgtggttggct

SEQ ID NO: 3105795 - DNA, 25 bp, Homo sapien
aaaataggaaatcacggttgcagac

SEQ ID NO: 3105796 - DNA, 25 bp, Homo sapien
caatggcttgggtagtacaacatca

SEQ ID NO: 3105797 - DNA, 25 bp, Homo sapien
tgcagacatacaggaaaaaccaggg

SEQ ID NO: 3105798 - DNA, 25 bp, Homo sapien
caacatcaacaaagtcaaaatagga

SEQ ID NO: 3105799 - DNA, 25 bp, Homo sapien
agcggctgtaccctcctcggcagag

SEQ ID NO: 3105800 - DNA, 25 bp, Homo sapien
tagtagggggtgaagcggctgtacc

SEQ ID NO: 3105801 - DNA, 25 bp, Homo sapien
gggtgaagcggctgtaccctcctcg

SEQ ID NO: 3105802 - DNA, 25 bp, Homo sapien
tgaagcggctgtaccctcctcggca

SEQ ID NO: 3105803 - DNA, 25 bp, Homo sapien
atgaaaaacagccaatcagtaccgt

SEQ ID NO: 3105804 - DNA, 25 bp, Homo sapien
agatgaaaaacagccaatcagtacc

SEQ ID NO: 3105805 - DNA, 25 bp, Homo sapien
ctgcaacatcaaagatgaaaaacag

SEQ ID NO: 3105806 - DNA, 25 bp, Homo sapien
aaagatgaaaaacagccaatcagta

SEQ ID NO: 3105807 - DNA, 25 bp, Homo sapien
tccaatgctgtaggtcgccgcgggc

SEQ ID NO: 3105808 - DNA, 25 bp, Homo sapien
gttccaatgctgtaggtcgccgcgg

SEQ ID NO: 3105809 - DNA, 25 bp, Homo sapien
gatggtgtgatggtacgggtcggca

SEQ ID NO: 3105810 - DNA, 25 bp, Homo sapien
cgccgcgggcccgatggtgtgatgg

SEQ ID NO: 3105811 - DNA, 25 bp, Homo sapien
tgagcgtatctgtaggctgcgtagc

SEQ ID NO: 3105812 - DNA, 25 bp, Homo sapien
agcgggctgagcgtatctgtaggct

SEQ ID NO: 3105813 - DNA, 25 bp, Homo sapien
cgtatctgtaggctgcgtagcctcc

SEQ ID NO: 3105814 - DNA, 25 bp, Homo sapien
gctgagcgtatctgtaggctgcgta

SEQ ID NO: 3105815 - DNA, 25 bp, Homo sapien
taagtgggaggagagagagcagagg

SEQ ID NO: 3105816 - DNA, 25 bp, Homo sapien
ctgcagggtaagtgggaggagagag

SEQ ID NO: 3105817 - DNA, 25 bp, Homo sapien
agtgggaggagagagagcagaggga

SEQ ID NO: 3105818 - DNA, 25 bp, Homo sapien
ggtaagtgggaggagagagagcaga

SEQ ID NO: 3105819 - DNA, 25 bp, Homo sapien
taaatctcagcaccataaaatccat

SEQ ID NO: 3105820 - DNA, 25 bp, Homo sapien
atctcagcaccataaaatccatcct

SEQ ID NO: 3105821 - DNA, 25 bp, Homo sapien
ataaaatccatcctgatacacgacc

SEQ ID NO: 3105822 - DNA, 25 bp, Homo sapien
ccataaaatccatcctgatacacga

SEQ ID NO: 3105823 - DNA, 25 bp, Homo sapien
tttaacaagcgtttgctccagtgcc

SEQ ID NO: 3105824 - DNA, 25 bp, Homo sapien
tggaagcaaacggacaagaaagtgg

SEQ ID NO: 3105825 - DNA, 25 bp, Homo sapien
cggctccggtgtctgctgaggaggg

SEQ ID NO: 3105826 - DNA, 25 bp, Homo sapien
gccccgcccatgggactggcatttt

SEQ ID NO: 3105827 - DNA, 25 bp, Homo sapien
gtggcgcagcccgaaatgtattata

SEQ ID NO: 3105828 - DNA, 25 bp, Homo sapien
ggccccgaagatgtgcgccccggta

SEQ ID NO: 3105829 - DNA, 25 bp, Homo sapien
gtaggcaacggctgtgccggtggtg

SEQ ID NO: 3105830 - DNA, 25 bp, Homo sapien
gaaatgtattatacacggcccggcc

SEQ ID NO: 3105831 - DNA, 25 bp, Homo sapien
ctgcaggaaacggggcccgagacac

SEQ ID NO: 3105832 - DNA, 25 bp, Homo sapien
acgtgtgagaggcacaaggggaccc

SEQ ID NO: 3105833 - DNA, 25 bp, Homo sapien
cgtgtgagaggcacaaggggaccca

SEQ ID NO: 3105834 - DNA, 25 bp, Homo sapien
cggggcccgagacacgtgtgagagg

SEQ ID NO: 3105835 - DNA, 25 bp, Homo sapien
gggccaagtagctggtctcatccca

SEQ ID NO: 3105836 - DNA, 25 bp, Homo sapien
ggccaagtagctggtctcatcccat

SEQ ID NO: 3105837 - DNA, 25 bp, Homo sapien
ggggccaagtagctggtctcatccc

SEQ ID NO: 3105838 - DNA, 25 bp, Homo sapien
agactgcgccgaccactggatttag

SEQ ID NO: 3105839 - DNA, 25 bp, Homo sapien
gtagactgcgccgaccactggattt

SEQ ID NO: 3105840 - DNA, 25 bp, Homo sapien
ctgcatagaattcaggcccgtagac

SEQ ID NO: 3105841 - DNA, 25 bp, Homo sapien
aattcaggcccgtagactgcgccga

SEQ ID NO: 3105842 - DNA, 25 bp, Homo sapien
gatgaaacggctcttgctgcaaagg

SEQ ID NO: 3105843 - DNA, 25 bp, Homo sapien
tgggaagacctccagtccgaagaac

SEQ ID NO: 3105844 - DNA, 25 bp, Homo sapien
gaaaggcgcttggactctgcccata

SEQ ID NO: 3105845 - DNA, 25 bp, Homo sapien
agatcacagaagagtcacacccagg

SEQ ID NO: 3105846 - DNA, 25 bp, Homo sapien
gactccacgtatggccgatcacatg

SEQ ID NO: 3105847 - DNA, 25 bp, Homo sapien
ctgactccacgtatggccgatcaca

SEQ ID NO: 3105848 - DNA, 25 bp, Homo sapien
gaaagtccacggcaacagggagatc

SEQ ID NO: 3105849 - DNA, 25 bp, Homo sapien
gggggtgacaccgtctgaaagtcca

SEQ ID NO: 3105850 - DNA, 25 bp, Homo sapien
ggagttaagactcgcagtggccacc

SEQ ID NO: 3105851 - DNA, 25 bp, Homo sapien
gtacgcctgctctgctcaaagcagg

SEQ ID NO: 3105852 - DNA, 25 bp, Homo sapien
cagcacttagcgtcggcagatccat

SEQ ID NO: 3105853 - DNA, 25 bp, Homo sapien
ggccccttgccggatggagttaaga

SEQ ID NO: 3105854 - DNA, 25 bp, Homo sapien
ctccaaggaagaccggccacctccg

SEQ ID NO: 3105855 - DNA, 25 bp, Homo sapien
ggaagaccggccacctccgtttgca

SEQ ID NO: 3105856 - DNA, 25 bp, Homo sapien
gaccggccacctccgtttgcagtgg

SEQ ID NO: 3105857 - DNA, 25 bp, Homo sapien
gcacacacacaagattcctcagtct

SEQ ID NO: 3105858 - DNA, 25 bp, Homo sapien
cctccctgagcctgcttacactggg

SEQ ID NO: 3105859 - DNA, 25 bp, Homo sapien
gcttacactgggaatcggtgcagca

SEQ ID NO: 3105860 - DNA, 25 bp, Homo sapien
ggaatcggtgcagcaggtctcagca

SEQ ID NO: 3105861 - DNA, 25 bp, Homo sapien
gcacagaagccttcaaactctggcc

SEQ ID NO: 3105862 - DNA, 25 bp, Homo sapien
cagggcctctgtcccagccagtgac

SEQ ID NO: 3105863 - DNA, 25 bp, Homo sapien
aggatccaggaaggtcagcctgcag

SEQ ID NO: 3105864 - DNA, 25 bp, Homo sapien
gggcctctgtcccagccagtgaccc

SEQ ID NO: 3105865 - DNA, 25 bp, Homo sapien
gccagtgaccccagcagccttgtgg

SEQ ID NO: 3105866 - DNA, 25 bp, Homo sapien
ttgttggtcatcactcgggccgtgg

SEQ ID NO: 3105867 - DNA, 25 bp, Homo sapien
tcttcttgttggtcatcactcgggc

SEQ ID NO: 3105868 - DNA, 25 bp, Homo sapien
gttccccgtcttcttgttggtcatc

SEQ ID NO: 3105869 - DNA, 25 bp, Homo sapien
ccccgtcttcttgttggtcatcact

SEQ ID NO: 3105870 - DNA, 25 bp, Homo sapien
caatgctgcagagtacagaggtctc

SEQ ID NO: 3105871 - DNA, 25 bp, Homo sapien
gatggccacatacccctcctggatg

SEQ ID NO: 3105872 - DNA, 25 bp, Homo sapien
cccgaggccagagtcctcaatgctg

SEQ ID NO: 3105873 - DNA, 25 bp, Homo sapien
aagatggccacatacccctcctgga

SEQ ID NO: 3105874 - DNA, 25 bp, Homo sapien
tcaattttccgtccctctacgatcg

SEQ ID NO: 3105875 - DNA, 25 bp, Homo sapien
tctgagctagtttcaaaagttacaa

SEQ ID NO: 3105876 - DNA, 25 bp, Homo sapien
ttctcccgggctcggtcagcatctg

SEQ ID NO: 3105877 - DNA, 25 bp, Homo sapien
tctacgatcgtcccattcagcttct

SEQ ID NO: 3105878 - DNA, 25 bp, Homo sapien
ggtgcaggcaagaggtcctggtggc

SEQ ID NO: 3105879 - DNA, 25 bp, Homo sapien
gcaagaggtcctggtggctcagaaa

SEQ ID NO: 3105880 - DNA, 25 bp, Homo sapien
ggcaagaggtcctggtggctcagaa

SEQ ID NO: 3105881 - DNA, 25 bp, Homo sapien
cttggagccccgctcgttaaaaatg

SEQ ID NO: 3105882 - DNA, 25 bp, Homo sapien
taaaaatgatctccacgtctaaaat

SEQ ID NO: 3105883 - DNA, 25 bp, Homo sapien
gagccccgctcgttaaaaatgatct

SEQ ID NO: 3105884 - DNA, 25 bp, Homo sapien
tgatctccacgtctaaaatttttcc

SEQ ID NO: 3105885 - DNA, 25 bp, Homo sapien
cctgaaccggaaggggatgttggag

SEQ ID NO: 3105886 - DNA, 25 bp, Homo sapien
tggctgtccgtctgtgccgcctcgt

SEQ ID NO: 3105887 - DNA, 25 bp, Homo sapien
tttgccgcaagtcggggtccctgaa

SEQ ID NO: 3105888 - DNA, 25 bp, Homo sapien
acgtgtagccgcttgggctgctgct

SEQ ID NO: 3105889 - DNA, 25 bp, Homo sapien
ctgcctctgtgtgcggggttgccca

SEQ ID NO: 3105890 - DNA, 25 bp, Homo sapien
ctgtggaggctgcctctgtgtgcgg

SEQ ID NO: 3105891 - DNA, 25 bp, Homo sapien
gggagaggactgggctgtggaggct

SEQ ID NO: 3105892 - DNA, 25 bp, Homo sapien
aggctgcctctgtgtgcggggttgc

SEQ ID NO: 3105893 - DNA, 25 bp, Homo sapien
gctgaagccactttccggagggcat

SEQ ID NO: 3105894 - DNA, 25 bp, Homo sapien
ggcatgcgctgcaggacctgtctca

SEQ ID NO: 3105895 - DNA, 25 bp, Homo sapien
gcatgcgctgcaggacctgtctcag

SEQ ID NO: 3105896 - DNA, 25 bp, Homo sapien
ctgggcatgcgctgcaggacctgtc

SEQ ID NO: 3105897 - DNA, 25 bp, Homo sapien
ggacctgtctcagcagacgcgccat

SEQ ID NO: 3105898 - DNA, 25 bp, Homo sapien
gctgtacgtgttcccaaggtgtgag

SEQ ID NO: 3105899 - DNA, 25 bp, Homo sapien
ccgacaagcatgtgttctgagctgt

SEQ ID NO: 3105900 - DNA, 25 bp, Homo sapien
gtgaggctccgggtggatcctgcat

SEQ ID NO: 3105901 - DNA, 25 bp, Homo sapien
tatgctgtcccaattccgacaagca

SEQ ID NO: 3105902 - DNA, 25 bp, Homo sapien
gggttccctgacatgtgccaccccc

SEQ ID NO: 3105903 - DNA, 25 bp, Homo sapien
ggttccctgacatgtgccaccccca

SEQ ID NO: 3105904 - DNA, 25 bp, Homo sapien
gttccctgacatgtgccacccccat

SEQ ID NO: 3105905 - DNA, 25 bp, Homo sapien
ggctcaggcccgacggacagcagaa

SEQ ID NO: 3105906 - DNA, 25 bp, Homo sapien
gggcaagtgcgggagtttccgagga

SEQ ID NO: 3105907 - DNA, 25 bp, Homo sapien
gacctgggcgcacaggcatctatgc

SEQ ID NO: 3105908 - DNA, 25 bp, Homo sapien
agtgcgggagtttccgaggaggctc

SEQ ID NO: 3105909 - DNA, 25 bp, Homo sapien
tgagcggtgagagaaacggagccta

SEQ ID NO: 3105910 - DNA, 25 bp, Homo sapien
acggatgagcagagacgcccctgcc

SEQ ID NO: 3105911 - DNA, 25 bp, Homo sapien
caggtgatgtcgtggtgagcggtga

SEQ ID NO: 3105912 - DNA, 25 bp, Homo sapien
tgtcccttcccatcacggatgagca

SEQ ID NO: 3105913 - DNA, 25 bp, Homo sapien
accaattgctggctggaaaccctcc

SEQ ID NO: 3105914 - DNA, 25 bp, Homo sapien
cgtggttccagaaattccaggaagg

SEQ ID NO: 3105915 - DNA, 25 bp, Homo sapien
gccctgagttggatgaacacggact

SEQ ID NO: 3105916 - DNA, 25 bp, Homo sapien
caggaagaggcctcgtggttccaga

SEQ ID NO: 3105917 - DNA, 25 bp, Homo sapien
agcgtccagggggttgtgtgccctg

SEQ ID NO: 3105918 - DNA, 25 bp, Homo sapien
cgtccagggggttgtgtgccctgac

SEQ ID NO: 3105919 - DNA, 25 bp, Homo sapien
agaaggaagtccccttgggcgagag

SEQ ID NO: 3105920 - DNA, 25 bp, Homo sapien
ggagcgtccagggggttgtgtgccc

SEQ ID NO: 3105921 - DNA, 25 bp, Homo sapien
cctcgagtgccccgggagctcagga

SEQ ID NO: 3105922 - DNA, 25 bp, Homo sapien
gctgggtaggacttcagggatggtg

SEQ ID NO: 3105923 - DNA, 25 bp, Homo sapien
gacctaggcaggtctggaccaaagc

SEQ ID NO: 3105924 - DNA, 25 bp, Homo sapien
tcatcccacttcctatcccgaagat

SEQ ID NO: 3105925 - DNA, 25 bp, Homo sapien
tcgagtgagctgaaagggccctgct

SEQ ID NO: 3105926 - DNA, 25 bp, Homo sapien
aaagggccctgctgatgacccaggg

SEQ ID NO: 3105927 - DNA, 25 bp, Homo sapien
ccaaggggaggctcgagtgagctga

SEQ ID NO: 3105928 - DNA, 25 bp, Homo sapien
tgatgacccagggacagggtctggg

SEQ ID NO: 3105929 - DNA, 25 bp, Homo sapien
gccgatgccgtaacttctgcctgca

SEQ ID NO: 3105930 - DNA, 25 bp, Homo sapien
gatgaaagatctgcagaccatgacc

SEQ ID NO: 3105931 - DNA, 25 bp, Homo sapien
ggaatctagaacaccctctccagct

SEQ ID NO: 3105932 - DNA, 25 bp, Homo sapien
ggctctgcatgaacaaatactccaa

SEQ ID NO: 3105933 - DNA, 25 bp, Homo sapien
tggtacacctcatgcccttctgggc

SEQ ID NO: 3105934 - DNA, 25 bp, Homo sapien
ctggtacacctcatgcccttctggg

SEQ ID NO: 3105935 - DNA, 25 bp, Homo sapien
ggtacacctcatgcccttctgggcc

SEQ ID NO: 3105936 - DNA, 25 bp, Homo sapien
tctggccggagtagtcctgcgtggg

SEQ ID NO: 3105937 - DNA, 25 bp, Homo sapien
gggcgtactcggcagggatgccgtt

SEQ ID NO: 3105938 - DNA, 25 bp, Homo sapien
gtgtgtacagggtcatgccatgctc

SEQ ID NO: 3105939 - DNA, 25 bp, Homo sapien
gcactgtctgggtcccggcgatggg

SEQ ID NO: 3105940 - DNA, 25 bp, Homo sapien
cttcaggcggagccgtggcgtcctg

SEQ ID NO: 3105941 - DNA, 25 bp, Homo sapien
tcaggcggagccgtggcgtcctgat

SEQ ID NO: 3105942 - DNA, 25 bp, Homo sapien
gcggagccgtggcgtcctgatcgct

SEQ ID NO: 3105943 - DNA, 25 bp, Homo sapien
aggcggagccgtggcgtcctgatcg

SEQ ID NO: 3105944 - DNA, 25 bp, Homo sapien
ccaatgtttcccaggagactgacat

SEQ ID NO: 3105945 - DNA, 25 bp, Homo sapien
gagactgacatgcagccctggtgga

SEQ ID NO: 3105946 - DNA, 25 bp, Homo sapien
caatgtttcccaggagactgacatg

SEQ ID NO: 3105947 - DNA, 25 bp, Homo sapien
accaatgtttcccaggagactgaca

SEQ ID NO: 3105948 - DNA, 25 bp, Homo sapien
taaaggctaatgtccacgtgtctgg

SEQ ID NO: 3105949 - DNA, 25 bp, Homo sapien
tctggcaaaagtgaaccaggggcca

SEQ ID NO: 3105950 - DNA, 25 bp, Homo sapien
gctccataaaggctaatgtccacgt

SEQ ID NO: 3105951 - DNA, 25 bp, Homo sapien
ggtggtgagctccataaaggctaat

SEQ ID NO: 3105952 - DNA, 25 bp, Homo sapien
tcattggctcgtgaagagctctctg

SEQ ID NO: 3105953 - DNA, 25 bp, Homo sapien
ttacaccttctcattggctcgtgaa

SEQ ID NO: 3105954 - DNA, 25 bp, Homo sapien
tcctgctgaccgggatgtgggctcc

SEQ ID NO: 3105955 - DNA, 25 bp, Homo sapien
ttccccgtgaggctggccggaactg

SEQ ID NO: 3105956 - DNA, 25 bp, Homo sapien
tacgaagttgttgaaagatgggtct

SEQ ID NO: 3105957 - DNA, 25 bp, Homo sapien
gggctgcaacgctgcaactaaactc

SEQ ID NO: 3105958 - DNA, 25 bp, Homo sapien
gctgcaactaaactccgccagcggg

SEQ ID NO: 3105959 - DNA, 25 bp, Homo sapien
ctggatggtggagagtctgtcttct

SEQ ID NO: 3105960 - DNA, 25 bp, Homo sapien
ccacagcgtgggggtctcctcccag

SEQ ID NO: 3105961 - DNA, 25 bp, Homo sapien
ggtctcctcccaggctcgccactac

SEQ ID NO: 3105962 - DNA, 25 bp, Homo sapien
cagcgtgggggtctcctcccaggct

SEQ ID NO: 3105963 - DNA, 25 bp, Homo sapien
gggtctcctcccaggctcgccacta

SEQ ID NO: 3105964 - DNA, 25 bp, Homo sapien
cagagcagttccttgatgaggctgg

SEQ ID NO: 3105965 - DNA, 25 bp, Homo sapien
tggccacaggtgacccccttcgctc

SEQ ID NO: 3105966 - DNA, 25 bp, Homo sapien
ccttggccaccagaatcggggttct

SEQ ID NO: 3105967 - DNA, 25 bp, Homo sapien
tcggcaccaacgccacgtgcaggag

SEQ ID NO: 3105968 - DNA, 25 bp, Homo sapien
tctgcccgtgacaccctccagagga

SEQ ID NO: 3105969 - DNA, 25 bp, Homo sapien
atctaagccacaggcccggcactgg

SEQ ID NO: 3105970 - DNA, 25 bp, Homo sapien
ccagaggaggacacatctaagccac

SEQ ID NO: 3105971 - DNA, 25 bp, Homo sapien
cttggccggtgcctggatggtaaca

SEQ ID NO: 3105972 - DNA, 25 bp, Homo sapien
aggagacgagcgcacctgtgctccc

SEQ ID NO: 3105973 - DNA, 25 bp, Homo sapien
cctgtgctcccacacgctggttccc

SEQ ID NO: 3105974 - DNA, 25 bp, Homo sapien
tccgagtccaaaggagacgagcgca

SEQ ID NO: 3105975 - DNA, 25 bp, Homo sapien
tgtcaccaggttccgagtccaaagg

SEQ ID NO: 3105976 - DNA, 25 bp, Homo sapien
caatgatgcctcgaggctctcagca

SEQ ID NO: 3105977 - DNA, 25 bp, Homo sapien
gatgcctcgaggctctcagcaggga

SEQ ID NO: 3105978 - DNA, 25 bp, Homo sapien
gggaaggagaatccacaatgatgcc

SEQ ID NO: 3105979 - DNA, 25 bp, Homo sapien
gaatccacaatgatgcctcgaggct

SEQ ID NO: 3105980 - DNA, 25 bp, Homo sapien
ctgaatcgcagcaaggtgggggcgg

SEQ ID NO: 3105981 - DNA, 25 bp, Homo sapien
gcggggtccttagtcgctgcctgtc

SEQ ID NO: 3105982 - DNA, 25 bp, Homo sapien
tgtgcggggtccttagtcgctgcct

SEQ ID NO: 3105983 - DNA, 25 bp, Homo sapien
agggtgtgcggggtccttagtcgct

SEQ ID NO: 3105984 - DNA, 25 bp, Homo sapien
gtagctggtgcaagctttgccaagc

SEQ ID NO: 3105985 - DNA, 25 bp, Homo sapien
aagctttgccaagcgccttcgatcc

SEQ ID NO: 3105986 - DNA, 25 bp, Homo sapien
tgccggtgggcgacgaggcagtagc

SEQ ID NO: 3105987 - DNA, 25 bp, Homo sapien
ggcgacgaggcagtagctggtgcaa

SEQ ID NO: 3105988 - DNA, 25 bp, Homo sapien
gaatatttcattacccaaaatgctg

SEQ ID NO: 3105989 - DNA, 25 bp, Homo sapien
ggagggcggatgtacagggccaggc

SEQ ID NO: 3105990 - DNA, 25 bp, Homo sapien
agatttcctcaccgtgggaccccag

SEQ ID NO: 3105991 - DNA, 25 bp, Homo sapien
ctcaccgtgggaccccagggtgcgt

SEQ ID NO: 3105992 - DNA, 25 bp, Homo sapien
gggatgtcgagtggggtcagtaaac

SEQ ID NO: 3105993 - DNA, 25 bp, Homo sapien
atgtcgagtggggtcagtaaacgga

SEQ ID NO: 3105994 - DNA, 25 bp, Homo sapien
tgtcgagtggggtcagtaaacggac

SEQ ID NO: 3105995 - DNA, 25 bp, Homo sapien
cctgggatgtcgagtggggtcagta

SEQ ID NO: 3105996 - DNA, 25 bp, Homo sapien
tgggcatcgccatgagctgagcttc

SEQ ID NO: 3105997 - DNA, 25 bp, Homo sapien
gggcatcgccatgagctgagcttcc

SEQ ID NO: 3105998 - DNA, 25 bp, Homo sapien
acctccccagtccacgctccgcaag

SEQ ID NO: 3105999 - DNA, 25 bp, Homo sapien
tccacgctccgcaagtgctcagcac

SEQ ID NO: 3106000 - DNA, 25 bp, Homo sapien
ctccccagtccacgctccgcaagtg

SEQ ID NO: 3106001 - DNA, 25 bp, Homo sapien
ccagtccacgctccgcaagtgctca

SEQ ID NO: 3106002 - DNA, 25 bp, Homo sapien
tggtcccgacggctctgggtccaga

SEQ ID NO: 3106003 - DNA, 25 bp, Homo sapien
gggacgcgtggtcccgacggctctg

SEQ ID NO: 3106004 - DNA, 25 bp, Homo sapien
gggagaagcgaaatccagtgccggg

SEQ ID NO: 3106005 - DNA, 25 bp, Homo sapien
cagacacgttcggtgtcacgggaag

SEQ ID NO: 3106006 - DNA, 25 bp, Homo sapien
tctcctgccacatgcccacacaggc

SEQ ID NO: 3106007 - DNA, 25 bp, Homo sapien
cacaggcctgagccccggctgccca

SEQ ID NO: 3106008 - DNA, 25 bp, Homo sapien
gccctctcctgccacatgcccacac

SEQ ID NO: 3106009 - DNA, 25 bp, Homo sapien
ctgccacatgcccacacaggcctga

SEQ ID NO: 3106010 - DNA, 25 bp, Homo sapien
tgccacggggctcgggtgtcaggcc

SEQ ID NO: 3106011 - DNA, 25 bp, Homo sapien
caaagccttggtgccaattcagcat

SEQ ID NO: 3106012 - DNA, 25 bp, Homo sapien
tctctgactgccacggggctcgggt

SEQ ID NO: 3106013 - DNA, 25 bp, Homo sapien
gctcgggtgtcaggccaaagccttg

SEQ ID NO: 3106014 - DNA, 25 bp, Homo sapien
aaagtcacggaggagaccgaggtct

SEQ ID NO: 3106015 - DNA, 25 bp, Homo sapien
tgacatgcagctctcgggtgctcct

SEQ ID NO: 3106016 - DNA, 25 bp, Homo sapien
acatgcagctctcgggtgctcctga

SEQ ID NO: 3106017 - DNA, 25 bp, Homo sapien
gccacctggagagggacaaagtcac

SEQ ID NO: 3106018 - DNA, 25 bp, Homo sapien
atgcagaacgggtctcctgcgttga

SEQ ID NO: 3106019 - DNA, 25 bp, Homo sapien
gaccgccagatgcagaacgggtctc

SEQ ID NO: 3106020 - DNA, 25 bp, Homo sapien
ctcaggcacctgggaccgccagatg

SEQ ID NO: 3106021 - DNA, 25 bp, Homo sapien
ccagatgcagaacgggtctcctgcg

SEQ ID NO: 3106022 - DNA, 25 bp, Homo sapien
catgagacgccctgagattgtgggc

SEQ ID NO: 3106023 - DNA, 25 bp, Homo sapien
gataccatgagacgccctgagattg

SEQ ID NO: 3106024 - DNA, 25 bp, Homo sapien
cagcagataccatgagacgccctga

SEQ ID NO: 3106025 - DNA, 25 bp, Homo sapien
gcagataccatgagacgccctgaga

SEQ ID NO: 3106026 - DNA, 25 bp, Homo sapien
tctccccacgctgagtacagagctt

SEQ ID NO: 3106027 - DNA, 25 bp, Homo sapien
tctagttccttgtgaagtcccatcc

SEQ ID NO: 3106028 - DNA, 25 bp, Homo sapien
gagctttgcacacgccacgtgctga

SEQ ID NO: 3106029 - DNA, 25 bp, Homo sapien
tgtcagcgacctcttagtcaccctt

SEQ ID NO: 3106030 - DNA, 25 bp, Homo sapien
gctgttcagaaagcctggattggtg

SEQ ID NO: 3106031 - DNA, 25 bp, Homo sapien
gggtggcgcctctgagggtgattaa

SEQ ID NO: 3106032 - DNA, 25 bp, Homo sapien
cacgcccgagttgccggctcttggg

SEQ ID NO: 3106033 - DNA, 25 bp, Homo sapien
tcagaagctgggcacgcccgagttg

SEQ ID NO: 3106034 - DNA, 25 bp, Homo sapien
agctgtgcagggaccccagggcgag

SEQ ID NO: 3106035 - DNA, 25 bp, Homo sapien
ctcctcttctgtggattccctgagc

SEQ ID NO: 3106036 - DNA, 25 bp, Homo sapien
tcttctgtggattccctgagctgtg

SEQ ID NO: 3106037 - DNA, 25 bp, Homo sapien
ttctcctcttctgtggattccctga

SEQ ID NO: 3106038 - DNA, 25 bp, Homo sapien
gctcctccagcagccgcccccaccc

SEQ ID NO: 3106039 - DNA, 25 bp, Homo sapien
caggctcctccagcagccgccccca

SEQ ID NO: 3106040 - DNA, 25 bp, Homo sapien
aggctcctccagcagccgcccccac

SEQ ID NO: 3106041 - DNA, 25 bp, Homo sapien
ggctcctccagcagccgcccccacc

SEQ ID NO: 3106042 - DNA, 25 bp, Homo sapien
aggcagcccgagttcgccatggagc

SEQ ID NO: 3106043 - DNA, 25 bp, Homo sapien
ggaggcagcccgagttcgccatgga

SEQ ID NO: 3106044 - DNA, 25 bp, Homo sapien
agcatgctgccggagttggacagca

SEQ ID NO: 3106045 - DNA, 25 bp, Homo sapien
gcgggcagggcacggagtgcgggag

SEQ ID NO: 3106046 - DNA, 25 bp, Homo sapien
tcaagatggttgaggctggccgtca

SEQ ID NO: 3106047 - DNA, 25 bp, Homo sapien
tatccgttttgagtaggtcccagag

SEQ ID NO: 3106048 - DNA, 25 bp, Homo sapien
caaacgagggctctatagcaggtcc

SEQ ID NO: 3106049 - DNA, 25 bp, Homo sapien
gctcattgagctagacgggcaggaa

SEQ ID NO: 3106050 - DNA, 25 bp, Homo sapien
aacccctggctgacttctctcttgg

SEQ ID NO: 3106051 - DNA, 25 bp, Homo sapien
tgtttccccaggtggtatctttgaa

SEQ ID NO: 3106052 - DNA, 25 bp, Homo sapien
tccagcttctggctgtttccccagg

SEQ ID NO: 3106053 - DNA, 25 bp, Homo sapien
tgacttctctcttgggatgacttcc

SEQ ID NO: 3106054 - DNA, 25 bp, Homo sapien
ccaaacacaatgagggtgccgagtt

SEQ ID NO: 3106055 - DNA, 25 bp, Homo sapien
tatttctcagggatatggtcccggg

SEQ ID NO: 3106056 - DNA, 25 bp, Homo sapien
tgttctgccagttgcccttcaagag

SEQ ID NO: 3106057 - DNA, 25 bp, Homo sapien
gatgatatacagagacggcttccct

SEQ ID NO: 3106058 - DNA, 25 bp, Homo sapien
cctgcagagacacagcaagaggtgg

SEQ ID NO: 3106059 - DNA, 25 bp, Homo sapien
ctgcagagacacagcaagaggtggg

SEQ ID NO: 3106060 - DNA, 25 bp, Homo sapien
ggttgcctgcagagacacagcaaga

SEQ ID NO: 3106061 - DNA, 25 bp, Homo sapien
tgcctgcagagacacagcaagaggt

SEQ ID NO: 3106062 - DNA, 25 bp, Homo sapien
cctgggccacggagcagacggtggg

SEQ ID NO: 3106063 - DNA, 25 bp, Homo sapien
cagcgtccggcggtctcagtcctgg

SEQ ID NO: 3106064 - DNA, 25 bp, Homo sapien
gtccggcggtctcagtcctgggcca

SEQ ID NO: 3106065 - DNA, 25 bp, Homo sapien
ttctccagcgtccggcggtctcagt

SEQ ID NO: 3106066 - DNA, 25 bp, Homo sapien
gctgtggcttccgtcgtggggaggc

SEQ ID NO: 3106067 - DNA, 25 bp, Homo sapien
ttccgtcgtggggaggcacaagccc

SEQ ID NO: 3106068 - DNA, 25 bp, Homo sapien
ggaggcacaagccctgaatcaggat

SEQ ID NO: 3106069 - DNA, 25 bp, Homo sapien
tcgtggggaggcacaagccctgaat

SEQ ID NO: 3106070 - DNA, 25 bp, Homo sapien
gagatcatcgtatgctgaacccagg

SEQ ID NO: 3106071 - DNA, 25 bp, Homo sapien
tgagcaggacgttccagatccgagc

SEQ ID NO: 3106072 - DNA, 25 bp, Homo sapien
caggaagataaatggaagggtcctt

SEQ ID NO: 3106073 - DNA, 25 bp, Homo sapien
agatccgagctgctgacaagccaca

SEQ ID NO: 3106074 - DNA, 25 bp, Homo sapien
tcccacgctcagactccggggggct

SEQ ID NO: 3106075 - DNA, 25 bp, Homo sapien
gactccggggggctggacagacagg

SEQ ID NO: 3106076 - DNA, 25 bp, Homo sapien
tgggagagccctgctactcatcccc

SEQ ID NO: 3106077 - DNA, 25 bp, Homo sapien
tcatcccctgcggatgcctccttcc

SEQ ID NO: 3106078 - DNA, 25 bp, Homo sapien
tgattccagcgctcatcaagcaggg

SEQ ID NO: 3106079 - DNA, 25 bp, Homo sapien
tagaacaattctcataaggtccctc

SEQ ID NO: 3106080 - DNA, 25 bp, Homo sapien
ctagcagatctcacggataccggaa

SEQ ID NO: 3106081 - DNA, 25 bp, Homo sapien
gctgtcttaggaagtgcggctctcc

SEQ ID NO: 3106082 - DNA, 25 bp, Homo sapien
gaagaagacttcatacgctgacgga

SEQ ID NO: 3106083 - DNA, 25 bp, Homo sapien
cagtttacagcggtggcatctcagg

SEQ ID NO: 3106084 - DNA, 25 bp, Homo sapien
taatgtcaggtctagctccaggcca

SEQ ID NO: 3106085 - DNA, 25 bp, Homo sapien
gatttttgaaaaacgcagcgctggc

SEQ ID NO: 3106086 - DNA, 25 bp, Homo sapien
agagtagatttatttggcattgtac

SEQ ID NO: 3106087 - DNA, 25 bp, Homo sapien
gatttatttggcattgtacgagttc

SEQ ID NO: 3106088 - DNA, 25 bp, Homo sapien
tatttggcattgtacgagttcctgc

SEQ ID NO: 3106089 - DNA, 25 bp, Homo sapien
ggcattgtacgagttcctgcagcag

SEQ ID NO: 3106090 - DNA, 25 bp, Homo sapien
agcatggtggccctttcttcacggt

SEQ ID NO: 3106091 - DNA, 25 bp, Homo sapien
ggcctggttcccagagcatggtggc

SEQ ID NO: 3106092 - DNA, 25 bp, Homo sapien
atggtggccctttcttcacggtcat

SEQ ID NO: 3106093 - DNA, 25 bp, Homo sapien
cccagagcatggtggccctttcttc

SEQ ID NO: 3106094 - DNA, 25 bp, Homo sapien
gggccagaacccagagcgaggctgc

SEQ ID NO: 3106095 - DNA, 25 bp, Homo sapien
atgcggtgcggtcttccgccagcgg

SEQ ID NO: 3106096 - DNA, 25 bp, Homo sapien
aggctgcctcccctgggtcggcaac

SEQ ID NO: 3106097 - DNA, 25 bp, Homo sapien
ggacctgcctccatcggctgggatg

SEQ ID NO: 3106098 - DNA, 25 bp, Homo sapien
ccaccgtttgtgcttgggctgcgga

SEQ ID NO: 3106099 - DNA, 25 bp, Homo sapien
tctggaaccaccctgaagctaggga

SEQ ID NO: 3106100 - DNA, 25 bp, Homo sapien
gggactcggctcaggaactgctgct

SEQ ID NO: 3106101 - DNA, 25 bp, Homo sapien
aagccaagcgcgctcaggtcttcaa

SEQ ID NO: 3106102 - DNA, 25 bp, Homo sapien
gccctagagggttttcacatgccat

SEQ ID NO: 3106103 - DNA, 25 bp, Homo sapien
ctcagagaggttggacaccctgcct

SEQ ID NO: 3106104 - DNA, 25 bp, Homo sapien
aatttcaaatccctggctggccagt

SEQ ID NO: 3106105 - DNA, 25 bp, Homo sapien
cacagtagcagatggatgaagagcc

SEQ ID NO: 3106106 - DNA, 25 bp, Homo sapien
acatcccagggacggtggatgttgc

SEQ ID NO: 3106107 - DNA, 25 bp, Homo sapien
aggaagaccctcctgtacatcccag

SEQ ID NO: 3106108 - DNA, 25 bp, Homo sapien
gaatcgacaccacttctgggactcc

SEQ ID NO: 3106109 - DNA, 25 bp, Homo sapien
tgctggtgtagggactgaatcgaca

SEQ ID NO: 3106110 - DNA, 25 bp, Homo sapien
ccaatacgcagctggtgtctggccc

SEQ ID NO: 3106111 - DNA, 25 bp, Homo sapien
tgtagggatgacgacagcagagcac

SEQ ID NO: 3106112 - DNA, 25 bp, Homo sapien
tctccctgaaatactgacccaatac

SEQ ID NO: 3106113 - DNA, 25 bp, Homo sapien
tcaggctaaactgtctgtagggatg

SEQ ID NO: 3106114 - DNA, 25 bp, Homo sapien
cagcaccgatctcgggtagggtcca

SEQ ID NO: 3106115 - DNA, 25 bp, Homo sapien
tgctgtcctcgggtcgagggtggag

SEQ ID NO: 3106116 - DNA, 25 bp, Homo sapien
gggagtgggcacagcaccgatctcg

SEQ ID NO: 3106117 - DNA, 25 bp, Homo sapien
gtgggcacagcaccgatctcgggta

SEQ ID NO: 3106118 - DNA, 25 bp, Homo sapien
gggaaggtgagggcaggggcaggag

SEQ ID NO: 3106119 - DNA, 25 bp, Homo sapien
gaaggtgagggcaggggcaggaggc

SEQ ID NO: 3106120 - DNA, 25 bp, Homo sapien
cccagaggcgaatgggaaggtgagg

SEQ ID NO: 3106121 - DNA, 25 bp, Homo sapien
aggtgagggcaggggcaggaggcac

SEQ ID NO: 3106122 - DNA, 25 bp, Homo sapien
gagaagacaagctgcaaaccagctg

SEQ ID NO: 3106123 - DNA, 25 bp, Homo sapien
tgagaagacaagctgcaaaccagct

SEQ ID NO: 3106124 - DNA, 25 bp, Homo sapien
tggcaatcctgcgttccccgggagc

SEQ ID NO: 3106125 - DNA, 25 bp, Homo sapien
ctcggtgtggcctgggtgtctaggt

SEQ ID NO: 3106126 - DNA, 25 bp, Homo sapien
cctgggtgtctaggtgcccccgcat

SEQ ID NO: 3106127 - DNA, 25 bp, Homo sapien
gctgagcctggcaatcctgcgttcc

SEQ ID NO: 3106128 - DNA, 25 bp, Homo sapien
caagcccgagatgcggcggttctga

SEQ ID NO: 3106129 - DNA, 25 bp, Homo sapien
aatgtggctaagcggcggccaggcc

SEQ ID NO: 3106130 - DNA, 25 bp, Homo sapien
aagcccgagatgcggcggttctgag

SEQ ID NO: 3106131 - DNA, 25 bp, Homo sapien
ccaagcccgagatgcggcggttctg

SEQ ID NO: 3106132 - DNA, 25 bp, Homo sapien
tcctgtgtatactgccagaggcggt

SEQ ID NO: 3106133 - DNA, 25 bp, Homo sapien
tggaaggttctgctcccctgtacgg

SEQ ID NO: 3106134 - DNA, 25 bp, Homo sapien
cctgggaccttagcaagcatgggcc

SEQ ID NO: 3106135 - DNA, 25 bp, Homo sapien
tacagtctctgtgattggtgggtcc

SEQ ID NO: 3106136 - DNA, 25 bp, Homo sapien
gacaccaactttgtgattagagggc

SEQ ID NO: 3106137 - DNA, 25 bp, Homo sapien
ttcaatcaggtgtccagtaatgtca

SEQ ID NO: 3106138 - DNA, 25 bp, Homo sapien
tggtggcccctagataagatagctt

SEQ ID NO: 3106139 - DNA, 25 bp, Homo sapien
ggacttcagactggctcaacctcag

SEQ ID NO: 3106140 - DNA, 25 bp, Homo sapien
tcctggaggcggagtagatgcgttt

SEQ ID NO: 3106141 - DNA, 25 bp, Homo sapien
gtctgcgagtctgcgagggtgtccc

SEQ ID NO: 3106142 - DNA, 25 bp, Homo sapien
agatgcgtttcctggctgccgtgag

SEQ ID NO: 3106143 - DNA, 25 bp, Homo sapien
gcatcatccgttgtctctcccatct

SEQ ID NO: 3106144 - DNA, 25 bp, Homo sapien
gtcctggggcacataggtggtccca

SEQ ID NO: 3106145 - DNA, 25 bp, Homo sapien
tggggcacataggtggtcccaagat

SEQ ID NO: 3106146 - DNA, 25 bp, Homo sapien
cataggtggtcccaagatgggcatt

SEQ ID NO: 3106147 - DNA, 25 bp, Homo sapien
gtggtcccaagatgggcattggtac

SEQ ID NO: 3106148 - DNA, 25 bp, Homo sapien
cccattggcagtgatgtccgagcgg

SEQ ID NO: 3106149 - DNA, 25 bp, Homo sapien
tccgagcggggcaggtccaggatgg

SEQ ID NO: 3106150 - DNA, 25 bp, Homo sapien
cagttaaagtccgaggacagaaaga

SEQ ID NO: 3106151 - DNA, 25 bp, Homo sapien
agccccattggcagtgatgtccgag

SEQ ID NO: 3106152 - DNA, 25 bp, Homo sapien
cagaggctgttcctggtcgtggggc

SEQ ID NO: 3106153 - DNA, 25 bp, Homo sapien
cctgggcagaggctgttcctggtcg

SEQ ID NO: 3106154 - DNA, 25 bp, Homo sapien
ggcagaggctgttcctggtcgtggg

SEQ ID NO: 3106155 - DNA, 25 bp, Homo sapien
tgggcagaggctgttcctggtcgtg

SEQ ID NO: 3106156 - DNA, 25 bp, Homo sapien
aatgccaagtcagggcaccagcgag

SEQ ID NO: 3106157 - DNA, 25 bp, Homo sapien
tgccaagtcagggcaccagcgaggg

SEQ ID NO: 3106158 - DNA, 25 bp, Homo sapien
atgccaagtcagggcaccagcgagg

SEQ ID NO: 3106159 - DNA, 25 bp, Homo sapien
cggtcccgccagcacaatccaacca

SEQ ID NO: 3106160 - DNA, 25 bp, Homo sapien
tgcagcttcagcgaaagcccaggag

SEQ ID NO: 3106161 - DNA, 25 bp, Homo sapien
aggaggcacgcttggctcctgccca

SEQ ID NO: 3106162 - DNA, 25 bp, Homo sapien
agcttcagcgaaagcccaggaggca

SEQ ID NO: 3106163 - DNA, 25 bp, Homo sapien
ccatcatcggggaaacgaacaagcc

SEQ ID NO: 3106164 - DNA, 25 bp, Homo sapien
aacaagccattaggctgcagaaaga

SEQ ID NO: 3106165 - DNA, 25 bp, Homo sapien
gagtcccagtgaaggaagccatcat

SEQ ID NO: 3106166 - DNA, 25 bp, Homo sapien
tggcattgggtgcttaggagtccca

SEQ ID NO: 3106167 - DNA, 25 bp, Homo sapien
ttcatcatcactgagcgggtccgtg

SEQ ID NO: 3106168 - DNA, 25 bp, Homo sapien
ggtgcagcccgttaatttcatcatc

SEQ ID NO: 3106169 - DNA, 25 bp, Homo sapien
cactgagcgggtccgtggactttgc

SEQ ID NO: 3106170 - DNA, 25 bp, Homo sapien
tcagaacaggtgcagcccgttaatt

SEQ ID NO: 3106171 - DNA, 25 bp, Homo sapien
aatgcaaagagaataggggtgtggg

SEQ ID NO: 3106172 - DNA, 25 bp, Homo sapien
tcccagagggttcagacagaaggtg

SEQ ID NO: 3106173 - DNA, 25 bp, Homo sapien
ggtgagttcccagagggttcagaca

SEQ ID NO: 3106174 - DNA, 25 bp, Homo sapien
agttcccagagggttcagacagaag

SEQ ID NO: 3106175 - DNA, 25 bp, Homo sapien
gagaagcaagatgcccagggggtct

SEQ ID NO: 3106176 - DNA, 25 bp, Homo sapien
tgtgtccatcccacaaggatggatg

SEQ ID NO: 3106177 - DNA, 25 bp, Homo sapien
ggatgagccaagctgctcaggcaca

SEQ ID NO: 3106178 - DNA, 25 bp, Homo sapien
cagcttgagggtgggatctagtacc

SEQ ID NO: 3106179 - DNA, 25 bp, Homo sapien
tgagggtgggatctagtaccttccc

SEQ ID NO: 3106180 - DNA, 25 bp, Homo sapien
cacagaaagcacagaggcggtgctg

SEQ ID NO: 3106181 - DNA, 25 bp, Homo sapien
ttcacgatgggcgagcacagaaagc

SEQ ID NO: 3106182 - DNA, 25 bp, Homo sapien
tggctagcttctccgggagaggaca

SEQ ID NO: 3106183 - DNA, 25 bp, Homo sapien
gcatttaatgggcagtttattaaac

SEQ ID NO: 3106184 - DNA, 25 bp, Homo sapien
atcaggcagttgaagcagagccact

SEQ ID NO: 3106185 - DNA, 25 bp, Homo sapien
agcagagccactaaagggttcttgc

SEQ ID NO: 3106186 - DNA, 25 bp, Homo sapien
tggctcagttcctgaagatcaggca

SEQ ID NO: 3106187 - DNA, 25 bp, Homo sapien
tagtcaatcatcaacccctccgatg

SEQ ID NO: 3106188 - DNA, 25 bp, Homo sapien
caggttcccagctggaggggctgca

SEQ ID NO: 3106189 - DNA, 25 bp, Homo sapien
gtttgcagagggatggctccaggag

SEQ ID NO: 3106190 - DNA, 25 bp, Homo sapien
agagggatggctccaggagcaggtt

SEQ ID NO: 3106191 - DNA, 25 bp, Homo sapien
caggagcaggttcccagctggaggg

SEQ ID NO: 3106192 - DNA, 25 bp, Homo sapien
aaaatggtggcagaatttcctctgg

SEQ ID NO: 3106193 - DNA, 25 bp, Homo sapien
cctagctaggccctcgatgggaagt

SEQ ID NO: 3106194 - DNA, 25 bp, Homo sapien
cttcttggtcttaggcttctctggg

SEQ ID NO: 3106195 - DNA, 25 bp, Homo sapien
catcctagaggaaattgtaacggcc

SEQ ID NO: 3106196 - DNA, 25 bp, Homo sapien
ggtttgtacttgcagcctagctagg

SEQ ID NO: 3106197 - DNA, 25 bp, Homo sapien
ctgctccttgctccctctgccccac

SEQ ID NO: 3106198 - DNA, 25 bp, Homo sapien
gatttgacctcagggtccttgcaca

SEQ ID NO: 3106199 - DNA, 25 bp, Homo sapien
ggatttgacctcagggtccttgcac

SEQ ID NO: 3106200 - DNA, 25 bp, Homo sapien
atttgacctcagggtccttgcacat

SEQ ID NO: 3106201 - DNA, 25 bp, Homo sapien
gctctctgtagctgctgtaatctcc

SEQ ID NO: 3106202 - DNA, 25 bp, Homo sapien
cttggcctgagcacatgtgaggatg

SEQ ID NO: 3106203 - DNA, 25 bp, Homo sapien
tattggcttaataaactgtgctgct

SEQ ID NO: 3106204 - DNA, 25 bp, Homo sapien
gctgctgcccgcaggtcttccttgg

SEQ ID NO: 3106205 - DNA, 25 bp, Homo sapien
ttgcatgtccggctcttgcccgcaa

SEQ ID NO: 3106206 - DNA, 25 bp, Homo sapien
tgcccgcaactgctgggagggtcct

SEQ ID NO: 3106207 - DNA, 25 bp, Homo sapien
ccccacatggtgtttcagtcacagg

SEQ ID NO: 3106208 - DNA, 25 bp, Homo sapien
ggagggtcctgcaaactggcctggg

SEQ ID NO: 3106209 - DNA, 25 bp, Homo sapien
gagctggggtaaccatggctccctg

SEQ ID NO: 3106210 - DNA, 25 bp, Homo sapien
gctctaaatctttctgaggtgcagg

SEQ ID NO: 3106211 - DNA, 25 bp, Homo sapien
tcccgagtgacaaagtaggagctgg

SEQ ID NO: 3106212 - DNA, 25 bp, Homo sapien
gctccctgggagtgtgcaggacccc

SEQ ID NO: 3106213 - DNA, 25 bp, Homo sapien
gctggtgggataggcaggtgcagat

SEQ ID NO: 3106214 - DNA, 25 bp, Homo sapien
ggcacagtgagaacgatcggcctca

SEQ ID NO: 3106215 - DNA, 25 bp, Homo sapien
gactgagatcgcatacggagctggt

SEQ ID NO: 3106216 - DNA, 25 bp, Homo sapien
agctgggctctctcgtgggcacagt

SEQ ID NO: 3106217 - DNA, 25 bp, Homo sapien
gacaagatcggccactcacagccag

SEQ ID NO: 3106218 - DNA, 25 bp, Homo sapien
ctggacaagatcggccactcacagc

SEQ ID NO: 3106219 - DNA, 25 bp, Homo sapien
caagatcggccactcacagccaggt

SEQ ID NO: 3106220 - DNA, 25 bp, Homo sapien
tggacaagatcggccactcacagcc

SEQ ID NO: 3106221 - DNA, 25 bp, Homo sapien
ggctggtggcctgacgaccaagtaa

SEQ ID NO: 3106222 - DNA, 25 bp, Homo sapien
taaatggatgacgtacacgatggag

SEQ ID NO: 3106223 - DNA, 25 bp, Homo sapien
ctgacgaccaagtaaatggatgacg

SEQ ID NO: 3106224 - DNA, 25 bp, Homo sapien
cgtacacgatggagtgattccggag

SEQ ID NO: 3106225 - DNA, 25 bp, Homo sapien
taagcctggcgtttctgcgggctgc

SEQ ID NO: 3106226 - DNA, 25 bp, Homo sapien
tcgacagcgacagtttcaaaccaat

SEQ ID NO: 3106227 - DNA, 25 bp, Homo sapien
taatggagacgcttaaatggcgcgc

SEQ ID NO: 3106228 - DNA, 25 bp, Homo sapien
gagcaagatgcaggaaatgttaatg

SEQ ID NO: 3106229 - DNA, 25 bp, Homo sapien
taattttcccatggagcgcaggtga

SEQ ID NO: 3106230 - DNA, 25 bp, Homo sapien
gagaaagttctcatccaaacggtgg

SEQ ID NO: 3106231 - DNA, 25 bp, Homo sapien
cccatggagcgcaggtgagaaagtt

SEQ ID NO: 3106232 - DNA, 25 bp, Homo sapien
tgatgtgggagctctaccatcgcca

SEQ ID NO: 3106233 - DNA, 25 bp, Homo sapien
cctggggactgccaccctctcaggg

SEQ ID NO: 3106234 - DNA, 25 bp, Homo sapien
ctgcatccttcagtgggtcaggcct

SEQ ID NO: 3106235 - DNA, 25 bp, Homo sapien
gggactgccaccctctcagggcctc

SEQ ID NO: 3106236 - DNA, 25 bp, Homo sapien
cttagctctgcatccttcagtgggt

SEQ ID NO: 3106237 - DNA, 25 bp, Homo sapien
atgtagcttatcctcacatcctggc

SEQ ID NO: 3106238 - DNA, 25 bp, Homo sapien
agtgccccttcttcgatggagggca

SEQ ID NO: 3106239 - DNA, 25 bp, Homo sapien
ttttcaagggctagtgaggagtcac

SEQ ID NO: 3106240 - DNA, 25 bp, Homo sapien
ggaagcctccgaagcaaactctgtt

SEQ ID NO: 3106241 - DNA, 25 bp, Homo sapien
tgccaggaccctggtgttctccaag

SEQ ID NO: 3106242 - DNA, 25 bp, Homo sapien
agcagcagcgaccacggatgaatgc

SEQ ID NO: 3106243 - DNA, 25 bp, Homo sapien
cgaccacggatgaatgctccagagc

SEQ ID NO: 3106244 - DNA, 25 bp, Homo sapien
gccaggaccctggtgttctccaaga

SEQ ID NO: 3106245 - DNA, 25 bp, Homo sapien
gttttgccaagcctgctatagtcat

SEQ ID NO: 3106246 - DNA, 25 bp, Homo sapien
tctggttttgccaagcctgctatag

SEQ ID NO: 3106247 - DNA, 25 bp, Homo sapien
tggttttgccaagcctgctatagtc

SEQ ID NO: 3106248 - DNA, 25 bp, Homo sapien
ctggttttgccaagcctgctatagt

SEQ ID NO: 3106249 - DNA, 25 bp, Homo sapien
tagtgcttggtccagtgtacccgtc

SEQ ID NO: 3106250 - DNA, 25 bp, Homo sapien
tcactagtgcttggtccagtgtacc

SEQ ID NO: 3106251 - DNA, 25 bp, Homo sapien
gtgcttggtccagtgtacccgtcat

SEQ ID NO: 3106252 - DNA, 25 bp, Homo sapien
tcatcttcactagtgcttggtccag

SEQ ID NO: 3106253 - DNA, 25 bp, Homo sapien
gccgtctgggctggaattctgtctc

SEQ ID NO: 3106254 - DNA, 25 bp, Homo sapien
caggccctcaggactggaatttgag

SEQ ID NO: 3106255 - DNA, 25 bp, Homo sapien
gtcatccgaaaaccagagcagccat

SEQ ID NO: 3106256 - DNA, 25 bp, Homo sapien
aattggagatcactccaggccctca

SEQ ID NO: 3106257 - DNA, 25 bp, Homo sapien
ctgcactccacgtagcctgcagcca

SEQ ID NO: 3106258 - DNA, 25 bp, Homo sapien
cccctgcactccacgtagcctgcag

SEQ ID NO: 3106259 - DNA, 25 bp, Homo sapien
cctgcactccacgtagcctgcagcc

SEQ ID NO: 3106260 - DNA, 25 bp, Homo sapien
ccctgcactccacgtagcctgcagc

SEQ ID NO: 3106261 - DNA, 25 bp, Homo sapien
cctggcattagaggcgataaaagcc

SEQ ID NO: 3106262 - DNA, 25 bp, Homo sapien
catgtgcttccctcacctcgtggtg

SEQ ID NO: 3106263 - DNA, 25 bp, Homo sapien
ttgtcagggtgactgcggctactct

SEQ ID NO: 3106264 - DNA, 25 bp, Homo sapien
tggtgcagctcgtgtttagggcctt

SEQ ID NO: 3106265 - DNA, 25 bp, Homo sapien
ttcctcattgggcttctcaatcatt

SEQ ID NO: 3106266 - DNA, 25 bp, Homo sapien
gccctctccctctatccccttcctc

SEQ ID NO: 3106267 - DNA, 25 bp, Homo sapien
tcctcattgggcttctcaatcattt

SEQ ID NO: 3106268 - DNA, 25 bp, Homo sapien
ccttcctcattgggcttctcaatca

SEQ ID NO: 3106269 - DNA, 25 bp, Homo sapien
tgggtagcccagtaagcctgagtga

SEQ ID NO: 3106270 - DNA, 25 bp, Homo sapien
tctcctggtcgtctgcagaaaagcg

SEQ ID NO: 3106271 - DNA, 25 bp, Homo sapien
tagccacaggtatagacaggcatgg

SEQ ID NO: 3106272 - DNA, 25 bp, Homo sapien
agatgcggcattcagagggacctcc

SEQ ID NO: 3106273 - DNA, 25 bp, Homo sapien
ctccagaaaatcacagtccacatcg

SEQ ID NO: 3106274 - DNA, 25 bp, Homo sapien
gctccagaaaatcacagtccacatc

SEQ ID NO: 3106275 - DNA, 25 bp, Homo sapien
tccagaaaatcacagtccacatcgt

SEQ ID NO: 3106276 - DNA, 25 bp, Homo sapien
ggctccagaaaatcacagtccacat

SEQ ID NO: 3106277 - DNA, 25 bp, Homo sapien
tatctgctgcacaggagggacatcg

SEQ ID NO: 3106278 - DNA, 25 bp, Homo sapien
gactgcctcgggacatcaggatgac

SEQ ID NO: 3106279 - DNA, 25 bp, Homo sapien
tcatcaacacaaaggcgcttggagc

SEQ ID NO: 3106280 - DNA, 25 bp, Homo sapien
tgtctgcactgggaatgggtcctcc

SEQ ID NO: 3106281 - DNA, 25 bp, Homo sapien
aggcatgacgcttgcacatgcgagg

SEQ ID NO: 3106282 - DNA, 25 bp, Homo sapien
catgcgaggtttctgggccatagtg

SEQ ID NO: 3106283 - DNA, 25 bp, Homo sapien
gcacatgcgaggtttctgggccata

SEQ ID NO: 3106284 - DNA, 25 bp, Homo sapien
aagtaaaaattcagaggcatgacgc

SEQ ID NO: 3106285 - DNA, 25 bp, Homo sapien
tcaaggggctatagtgtctgctgcc

SEQ ID NO: 3106286 - DNA, 25 bp, Homo sapien
ctggcagggtcaaggggctatagtg

SEQ ID NO: 3106287 - DNA, 25 bp, Homo sapien
agggtcaaggggctatagtgtctgc

SEQ ID NO: 3106288 - DNA, 25 bp, Homo sapien
ggtcaaggggctatagtgtctgctg

SEQ ID NO: 3106289 - DNA, 25 bp, Homo sapien
aaagacgccatcagcgtcatgacca

SEQ ID NO: 3106290 - DNA, 25 bp, Homo sapien
atcagcgtcatgaccacgccacgga

SEQ ID NO: 3106291 - DNA, 25 bp, Homo sapien
tcttgcaccaaagacgccatcagcg

SEQ ID NO: 3106292 - DNA, 25 bp, Homo sapien
tcatgaccacgccacggatgtcctg

SEQ ID NO: 3106293 - DNA, 25 bp, Homo sapien
ccagcatagaggtagagctgcgtgt

SEQ ID NO: 3106294 - DNA, 25 bp, Homo sapien
aggtagagctgcgtgtccaactggc

SEQ ID NO: 3106295 - DNA, 25 bp, Homo sapien
tgcgtgtccaactggccgcaggtgt

SEQ ID NO: 3106296 - DNA, 25 bp, Homo sapien
gaggaaccagcatagaggtagagct

SEQ ID NO: 3106297 - DNA, 25 bp, Homo sapien
ttctggtgcaattgcgtgaaatgag

SEQ ID NO: 3106298 - DNA, 25 bp, Homo sapien
tttctggtgcaattgcgtgaaatga

SEQ ID NO: 3106299 - DNA, 25 bp, Homo sapien
tctggtgcaattgcgtgaaatgagt

SEQ ID NO: 3106300 - DNA, 25 bp, Homo sapien
ttttctggtgcaattgcgtgaaatg

SEQ ID NO: 3106301 - DNA, 25 bp, Homo sapien
cgtgggagcatgtcacgtgctcaga

SEQ ID NO: 3106302 - DNA, 25 bp, Homo sapien
gcaccagcctgaacccatcctggct

SEQ ID NO: 3106303 - DNA, 25 bp, Homo sapien
gctcagagcctctgatcatgaatgg

SEQ ID NO: 3106304 - DNA, 25 bp, Homo sapien
ggctccattcagaacacacctgaaa

SEQ ID NO: 3106305 - DNA, 25 bp, Homo sapien
tccatctgaggacttgacgcctgct

SEQ ID NO: 3106306 - DNA, 25 bp, Homo sapien
gagcatttcgcaaacactccatctg

SEQ ID NO: 3106307 - DNA, 25 bp, Homo sapien
tctgtctcggtggttttacagccca

SEQ ID NO: 3106308 - DNA, 25 bp, Homo sapien
gaacacacatctgagcatttcgcaa

SEQ ID NO: 3106309 - DNA, 25 bp, Homo sapien
agagctccccctcaacccccgagca

SEQ ID NO: 3106310 - DNA, 25 bp, Homo sapien
acagagctccccctcaacccccgag

SEQ ID NO: 3106311 - DNA, 25 bp, Homo sapien
ctggacagagctccccctcaacccc

SEQ ID NO: 3106312 - DNA, 25 bp, Homo sapien
gctccccctcaacccccgagcagga

SEQ ID NO: 3106313 - DNA, 25 bp, Homo sapien
taaagacgagaagccgcagcttccc

SEQ ID NO: 3106314 - DNA, 25 bp, Homo sapien
cgtgagagaagtaaagacgagaagc

SEQ ID NO: 3106315 - DNA, 25 bp, Homo sapien
ggagagtgggcgtgagagaagtaaa

SEQ ID NO: 3106316 - DNA, 25 bp, Homo sapien
ttcctctacatggagcagattccag

SEQ ID NO: 3106317 - DNA, 25 bp, Homo sapien
tgcactcaggcggttccacggtgac

SEQ ID NO: 3106318 - DNA, 25 bp, Homo sapien
ccctttggtaggacgcagagctgca

SEQ ID NO: 3106319 - DNA, 25 bp, Homo sapien
tgcagaagcccacggctttctaggt

SEQ ID NO: 3106320 - DNA, 25 bp, Homo sapien
agccagaacggcattgtgtccacgg

SEQ ID NO: 3106321 - DNA, 25 bp, Homo sapien
gggatgacctcctacttccgagagc

SEQ ID NO: 3106322 - DNA, 25 bp, Homo sapien
agctccacgcaaataagggtttgcc

SEQ ID NO: 3106323 - DNA, 25 bp, Homo sapien
ctcaggatgggcccgcacattgtgg

SEQ ID NO: 3106324 - DNA, 25 bp, Homo sapien
gggtcactgccagaattcccgactc

SEQ ID NO: 3106325 - DNA, 25 bp, Homo sapien
gcatccagctgtgcggaacaggcac

SEQ ID NO: 3106326 - DNA, 25 bp, Homo sapien
atccagctgtgcggaacaggcactt

SEQ ID NO: 3106327 - DNA, 25 bp, Homo sapien
catccagctgtgcggaacaggcact

SEQ ID NO: 3106328 - DNA, 25 bp, Homo sapien
gacgatggtcacattcactgaagca

SEQ ID NO: 3106329 - DNA, 25 bp, Homo sapien
ttcactgaagcaagctttgggcacc

SEQ ID NO: 3106330 - DNA, 25 bp, Homo sapien
ttgggcaccaggcactcgttcatct

SEQ ID NO: 3106331 - DNA, 25 bp, Homo sapien
tcttgtgccaccacccaacgggaga

SEQ ID NO: 3106332 - DNA, 25 bp, Homo sapien
ccagttgtcaggacagcagcatcca

SEQ ID NO: 3106333 - DNA, 25 bp, Homo sapien
ctgtccatggaaaccagttgtcagg

SEQ ID NO: 3106334 - DNA, 25 bp, Homo sapien
ggaaaccagttgtcaggacagcagc

SEQ ID NO: 3106335 - DNA, 25 bp, Homo sapien
catggaaaccagttgtcaggacagc

SEQ ID NO: 3106336 - DNA, 25 bp, Homo sapien
tccaaggcttcagtgccagcatcct

SEQ ID NO: 3106337 - DNA, 25 bp, Homo sapien
cagcatcctcgcaaacagcttctga

SEQ ID NO: 3106338 - DNA, 25 bp, Homo sapien
cattcacccaatgtggtcctgggca

SEQ ID NO: 3106339 - DNA, 25 bp, Homo sapien
ctatcgcctcccaggctccttgcag

SEQ ID NO: 3106340 - DNA, 25 bp, Homo sapien
ccatcctggcgtccatgctttgggt

SEQ ID NO: 3106341 - DNA, 25 bp, Homo sapien
gccatcctggcgtccatgctttggg

SEQ ID NO: 3106342 - DNA, 25 bp, Homo sapien
ctgccatcctggcgtccatgctttg

SEQ ID NO: 3106343 - DNA, 25 bp, Homo sapien
tcctgccatcctggcgtccatgctt

SEQ ID NO: 3106344 - DNA, 25 bp, Homo sapien
ggcggtcaatacagttgatgcctcg

SEQ ID NO: 3106345 - DNA, 25 bp, Homo sapien
tctggggaccaaggcggtcaataca

SEQ ID NO: 3106346 - DNA, 25 bp, Homo sapien
atacaccagcgctgacccagctggc

SEQ ID NO: 3106347 - DNA, 25 bp, Homo sapien
atgcctcgggaagtccacagacggc

SEQ ID NO: 3106348 - DNA, 25 bp, Homo sapien
gaagagcttcaactttgccaagaag

SEQ ID NO: 3106349 - DNA, 25 bp, Homo sapien
ccatcatccatcgagggtgcaggat

SEQ ID NO: 3106350 - DNA, 25 bp, Homo sapien
caggatgcaggacaatcagcgagcc

SEQ ID NO: 3106351 - DNA, 25 bp, Homo sapien
gaaaccatcatccatcgagggtgca

SEQ ID NO: 3106352 - DNA, 25 bp, Homo sapien
catagatgaaggctccacgatttcc

SEQ ID NO: 3106353 - DNA, 25 bp, Homo sapien
tttcccgttataggtgagggctcca

SEQ ID NO: 3106354 - DNA, 25 bp, Homo sapien
gaaggctccacgatttcccgttata

SEQ ID NO: 3106355 - DNA, 25 bp, Homo sapien
cacgatttcccgttataggtgaggg

SEQ ID NO: 3106356 - DNA, 25 bp, Homo sapien
gcagaaggccatccctagcagccat

SEQ ID NO: 3106357 - DNA, 25 bp, Homo sapien
tggcagaaggccatccctagcagcc

SEQ ID NO: 3106358 - DNA, 25 bp, Homo sapien
cccgcctagtggcagaaggccatcc

SEQ ID NO: 3106359 - DNA, 25 bp, Homo sapien
agtggcagaaggccatccctagcag

SEQ ID NO: 3106360 - DNA, 25 bp, Homo sapien
cagggctggagactagcgttttctg

SEQ ID NO: 3106361 - DNA, 25 bp, Homo sapien
tgcagggctggagactagcgttttc

SEQ ID NO: 3106362 - DNA, 25 bp, Homo sapien
atactgcagggctggagactagcgt

SEQ ID NO: 3106363 - DNA, 25 bp, Homo sapien
ggctggagactagcgttttctgttt

SEQ ID NO: 3106364 - DNA, 25 bp, Homo sapien
ccgggtctccgcagcctccgggtct

SEQ ID NO: 3106365 - DNA, 25 bp, Homo sapien
cgggtctccgcagcctccgggtctc

SEQ ID NO: 3106366 - DNA, 25 bp, Homo sapien
caggtctccgcagcctccaggtctc

SEQ ID NO: 3106367 - DNA, 25 bp, Homo sapien
aagtccacagagttctgaggtgtcc

SEQ ID NO: 3106368 - DNA, 25 bp, Homo sapien
tgaggtgtccaacctccgggacgct

SEQ ID NO: 3106369 - DNA, 25 bp, Homo sapien
tgactttcaagtgcccagaggtcct

SEQ ID NO: 3106370 - DNA, 25 bp, Homo sapien
tccgggacgctgcactgactttcaa

SEQ ID NO: 3106371 - DNA, 25 bp, Homo sapien
cactctgagtttggctttgccacgc

SEQ ID NO: 3106372 - DNA, 25 bp, Homo sapien
tgccacgctgtggtttcatcacgac

SEQ ID NO: 3106373 - DNA, 25 bp, Homo sapien
ttggctttgccacgctgtggtttca

SEQ ID NO: 3106374 - DNA, 25 bp, Homo sapien
cacgctgtggtttcatcacgaccat

SEQ ID NO: 3106375 - DNA, 25 bp, Homo sapien
tgcatgacaacgagaaccagtacgc

SEQ ID NO: 3106376 - DNA, 25 bp, Homo sapien
cacgattggtgaacactcgggcagg

SEQ ID NO: 3106377 - DNA, 25 bp, Homo sapien
tgcatcgtgatggagaccaaagccc

SEQ ID NO: 3106378 - DNA, 25 bp, Homo sapien
tgagccagaaatcaacccgcaattg

SEQ ID NO: 3106379 - DNA, 25 bp, Homo sapien
ggagatgctggacgaagcaagcctc

SEQ ID NO: 3106380 - DNA, 25 bp, Homo sapien
ttacaatacactgggagggagatgc

SEQ ID NO: 3106381 - DNA, 25 bp, Homo sapien
tagaagacaggagagtcgtggttac

SEQ ID NO: 3106382 - DNA, 25 bp, Homo sapien
tgctggacgaagcaagcctctcagg

SEQ ID NO: 3106383 - DNA, 25 bp, Homo sapien
ggagctggctcctggtcggcaatct

SEQ ID NO: 3106384 - DNA, 25 bp, Homo sapien
tcgtgtggtccctggcgccacctcg

SEQ ID NO: 3106385 - DNA, 25 bp, Homo sapien
gaaacgctctccgttcgtgtggtcc

SEQ ID NO: 3106386 - DNA, 25 bp, Homo sapien
ccagtgagcagccgcagggaaacgc

SEQ ID NO: 3106387 - DNA, 25 bp, Homo sapien
ggccagggcaatagcacactggatg

SEQ ID NO: 3106388 - DNA, 25 bp, Homo sapien
tggccagggcaatagcacactggat

SEQ ID NO: 3106389 - DNA, 25 bp, Homo sapien
ctggccagggcaatagcacactgga

SEQ ID NO: 3106390 - DNA, 25 bp, Homo sapien
cacacatgatctgagcctgtcgcca

SEQ ID NO: 3106391 - DNA, 25 bp, Homo sapien
agtcatcacatacatcggagccggt

SEQ ID NO: 3106392 - DNA, 25 bp, Homo sapien
gtcgccacacatcgtctgagccggt

SEQ ID NO: 3106393 - DNA, 25 bp, Homo sapien
tcagagatggccatcaatgcacatc

SEQ ID NO: 3106394 - DNA, 25 bp, Homo sapien
cacatcatctgagccggtcactatg

SEQ ID NO: 3106395 - DNA, 25 bp, Homo sapien
catctgagccggtcactatgcacat

SEQ ID NO: 3106396 - DNA, 25 bp, Homo sapien
atcatctgagccggtcactatgcac

SEQ ID NO: 3106397 - DNA, 25 bp, Homo sapien
atacacatcatctgagccggtcact

SEQ ID NO: 3106398 - DNA, 25 bp, Homo sapien
gggctgcagctaggccatggggcat

SEQ ID NO: 3106399 - DNA, 25 bp, Homo sapien
agcggggctgcagctaggccatggg

SEQ ID NO: 3106400 - DNA, 25 bp, Homo sapien
ccagcggggctgcagctaggccatg

SEQ ID NO: 3106401 - DNA, 25 bp, Homo sapien
cggggctgcagctaggccatggggc

SEQ ID NO: 3106402 - DNA, 25 bp, Homo sapien
tctagaatgacagcggttcggcagg

SEQ ID NO: 3106403 - DNA, 25 bp, Homo sapien
tccaaagctagagatccgggcgtgt

SEQ ID NO: 3106404 - DNA, 25 bp, Homo sapien
cacaaccctacttccaaagctagag

SEQ ID NO: 3106405 - DNA, 25 bp, Homo sapien
gccacgctggtgctcgcttctggag

SEQ ID NO: 3106406 - DNA, 25 bp, Homo sapien
ccccgcggggcggacacagacaaag

SEQ ID NO: 3106407 - DNA, 25 bp, Homo sapien
gtagggctcccgctggagtgagcgc

SEQ ID NO: 3106408 - DNA, 25 bp, Homo sapien
ggctcccgctggagtgagcgcaggg

SEQ ID NO: 3106409 - DNA, 25 bp, Homo sapien
ccgcggggcggacacagacaaagca

SEQ ID NO: 3106410 - DNA, 25 bp, Homo sapien
tggtcgccctttagcttgccagact

SEQ ID NO: 3106411 - DNA, 25 bp, Homo sapien
tcgccctttagcttgccagactgtc

SEQ ID NO: 3106412 - DNA, 25 bp, Homo sapien
gcccttggctggcaaggcccacacc

SEQ ID NO: 3106413 - DNA, 25 bp, Homo sapien
tgctggtcgccctttagcttgccag

SEQ ID NO: 3106414 - DNA, 25 bp, Homo sapien
gaatctgcaaatgcacacagctgca

SEQ ID NO: 3106415 - DNA, 25 bp, Homo sapien
tcacctgccaagatgcagaccatgc

SEQ ID NO: 3106416 - DNA, 25 bp, Homo sapien
tatcctgcactttgggtagatcact

SEQ ID NO: 3106417 - DNA, 25 bp, Homo sapien
tacaatgaaatgcatgagtctgggc

SEQ ID NO: 3106418 - DNA, 25 bp, Homo sapien
ctgcacggacttccatgccaggctg

SEQ ID NO: 3106419 - DNA, 25 bp, Homo sapien
aaatacccgaagctggctccagact

SEQ ID NO: 3106420 - DNA, 25 bp, Homo sapien
tccagactcctctatgcagctgaag

SEQ ID NO: 3106421 - DNA, 25 bp, Homo sapien
gggatgcaaagaaatacccgaagct

SEQ ID NO: 3106422 - DNA, 25 bp, Homo sapien
gtgtttccgcatcttcattgaagtg

SEQ ID NO: 3106423 - DNA, 25 bp, Homo sapien
ttcaaggtagtatgtaatttggctg

SEQ ID NO: 3106424 - DNA, 25 bp, Homo sapien
gcatcttcattgaagtgctgtgagc

SEQ ID NO: 3106425 - DNA, 25 bp, Homo sapien
gatgtgtttccgcatcttcattgaa

SEQ ID NO: 3106426 - DNA, 25 bp, Homo sapien
aataaatgaggctccgcatttggct

SEQ ID NO: 3106427 - DNA, 25 bp, Homo sapien
tccattcaaaccagaaggagcgagt

SEQ ID NO: 3106428 - DNA, 25 bp, Homo sapien
cattcaaaccagaaggagcgagttg

SEQ ID NO: 3106429 - DNA, 25 bp, Homo sapien
aatgaggctccgcatttggcttcca

SEQ ID NO: 3106430 - DNA, 25 bp, Homo sapien
tggggaggacttctgcaggattgca

SEQ ID NO: 3106431 - DNA, 25 bp, Homo sapien
tcaggattgggggacaaggcgtggg

SEQ ID NO: 3106432 - DNA, 25 bp, Homo sapien
cctcaggattgggggacaaggcgtg

SEQ ID NO: 3106433 - DNA, 25 bp, Homo sapien
tccctcaggattgggggacaaggcg

SEQ ID NO: 3106434 - DNA, 25 bp, Homo sapien
caatgaaggctcatactggggccaa

SEQ ID NO: 3106435 - DNA, 25 bp, Homo sapien
tgcagcgtgtatgcacgtgttgtgt

SEQ ID NO: 3106436 - DNA, 25 bp, Homo sapien
catactggggccaattaaatggaaa

SEQ ID NO: 3106437 - DNA, 25 bp, Homo sapien
tagcactcaggggacgtttgctgaa

SEQ ID NO: 3106438 - DNA, 25 bp, Homo sapien
tgagtgtatggtatatgtgtatatg

SEQ ID NO: 3106439 - DNA, 25 bp, Homo sapien
tgtgaaggcatggtgttatgtgtgt

SEQ ID NO: 3106440 - DNA, 25 bp, Homo sapien
tgtgatatgtgtgagtgtatggtat

SEQ ID NO: 3106441 - DNA, 25 bp, Homo sapien
atatgtgtatgtgtgagggcatggt

SEQ ID NO: 3106442 - DNA, 25 bp, Homo sapien
cacctggagcgtggagactctgaag

SEQ ID NO: 3106443 - DNA, 25 bp, Homo sapien
caaaagtgacacctgggctactggg

SEQ ID NO: 3106444 - DNA, 25 bp, Homo sapien
ttccagaacctgctgcatccagagg

SEQ ID NO: 3106445 - DNA, 25 bp, Homo sapien
agccccagtgagagatccttctgca

SEQ ID NO: 3106446 - DNA, 25 bp, Homo sapien
aggaagagctcgcacctgggcaccc

SEQ ID NO: 3106447 - DNA, 25 bp, Homo sapien
gtccaggaagagctcgcacctgggc

SEQ ID NO: 3106448 - DNA, 25 bp, Homo sapien
cgcgagcccacagggtccaggaaga

SEQ ID NO: 3106449 - DNA, 25 bp, Homo sapien
agcaggccgcgagcccacagggtcc

SEQ ID NO: 3106450 - DNA, 25 bp, Homo sapien
ccttctgcggcctggccagcagcca

SEQ ID NO: 3106451 - DNA, 25 bp, Homo sapien
cttctgcggcctggccagcagccat

SEQ ID NO: 3106452 - DNA, 25 bp, Homo sapien
agcacttctggtgtggcccctgcga

SEQ ID NO: 3106453 - DNA, 25 bp, Homo sapien
aggatccaagacagcgacgtggccc

SEQ ID NO: 3106454 - DNA, 25 bp, Homo sapien
aagacagcgacgtggcccagcactt

SEQ ID NO: 3106455 - DNA, 25 bp, Homo sapien
tgaccagagagagcgaagacacttg

SEQ ID NO: 3106456 - DNA, 25 bp, Homo sapien
cttggcatggtttgcagcagggttc

SEQ ID NO: 3106457 - DNA, 25 bp, Homo sapien
ccgcatccgaggaataccacagttg

SEQ ID NO: 3106458 - DNA, 25 bp, Homo sapien
cacagttgcctggtaagccccaggc

SEQ ID NO: 3106459 - DNA, 25 bp, Homo sapien
gcatggtttgcagcagggttcgcat

SEQ ID NO: 3106460 - DNA, 25 bp, Homo sapien
gactgtgcctatgtcatctgcacag

SEQ ID NO: 3106461 - DNA, 25 bp, Homo sapien
gcataaggggcacatctctcctggc

SEQ ID NO: 3106462 - DNA, 25 bp, Homo sapien
ccagctctgcataaggggcacatct

SEQ ID NO: 3106463 - DNA, 25 bp, Homo sapien
ctgtgactgtgcctatgtcatctgc

SEQ ID NO: 3106464 - DNA, 25 bp, Homo sapien
ccagaaaaccaaagatgagccaacg

SEQ ID NO: 3106465 - DNA, 25 bp, Homo sapien
gaaaaccaaagatgagccaacgcct

SEQ ID NO: 3106466 - DNA, 25 bp, Homo sapien
cagaaaaccaaagatgagccaacgc

SEQ ID NO: 3106467 - DNA, 25 bp, Homo sapien
aaccaaagatgagccaacgcctcac

SEQ ID NO: 3106468 - DNA, 25 bp, Homo sapien
aagacctacgtcttggcagggttct

SEQ ID NO: 3106469 - DNA, 25 bp, Homo sapien
cttgcagatgcaggaggtcaaacag

SEQ ID NO: 3106470 - DNA, 25 bp, Homo sapien
gaccacccagtgctcacaatggttg

SEQ ID NO: 3106471 - DNA, 25 bp, Homo sapien
caggagcttcggaagtgcatagcag

SEQ ID NO: 3106472 - DNA, 25 bp, Homo sapien
aaggaacatggacccctgaccaggg

SEQ ID NO: 3106473 - DNA, 25 bp, Homo sapien
cgaacgcggtcaccataggaccaaa

SEQ ID NO: 3106474 - DNA, 25 bp, Homo sapien
taggaccaaacaagatgaccatagg

SEQ ID NO: 3106475 - DNA, 25 bp, Homo sapien
gaggcgaggctcaaatgacccatgc

SEQ ID NO: 3106476 - DNA, 25 bp, Homo sapien
cctacacaccccttcatttgcggaa

SEQ ID NO: 3106477 - DNA, 25 bp, Homo sapien
cggaagccgccaggcagacactcgg

SEQ ID NO: 3106478 - DNA, 25 bp, Homo sapien
tacacaccccttcatttgcggaagc

SEQ ID NO: 3106479 - DNA, 25 bp, Homo sapien
cccttcatttgcggaagccgccagg

SEQ ID NO: 3106480 - DNA, 25 bp, Homo sapien
taccagggtgctgcacagccttcag

SEQ ID NO: 3106481 - DNA, 25 bp, Homo sapien
agtccgagtcaggagccccttctgt

SEQ ID NO: 3106482 - DNA, 25 bp, Homo sapien
tatgccctctacacggaatggctcc

SEQ ID NO: 3106483 - DNA, 25 bp, Homo sapien
tgcaacttctccatcgtccacgagg

SEQ ID NO: 3106484 - DNA, 25 bp, Homo sapien
gcagcaatatcctcgctgtcctcgt

SEQ ID NO: 3106485 - DNA, 25 bp, Homo sapien
taactgaatgtccaggtcaacccct

SEQ ID NO: 3106486 - DNA, 25 bp, Homo sapien
ggcagccactgtgccgagacagact

SEQ ID NO: 3106487 - DNA, 25 bp, Homo sapien
tcagccttaagaaatgggcccacaa

SEQ ID NO: 3106488 - DNA, 25 bp, Homo sapien
gaacaaacatatctctgaaccatta

SEQ ID NO: 3106489 - DNA, 25 bp, Homo sapien
gaaccattactatcttgagtgtaca

SEQ ID NO: 3106490 - DNA, 25 bp, Homo sapien
catcaactgaacaaacatatctctg

SEQ ID NO: 3106491 - DNA, 25 bp, Homo sapien
cagtcagtggcattcggaacatttg

SEQ ID NO: 3106492 - DNA, 25 bp, Homo sapien
tggtgtggttggcaagcttgcctgt

SEQ ID NO: 3106493 - DNA, 25 bp, Homo sapien
gttggcaagcttgcctgtgtcacca

SEQ ID NO: 3106494 - DNA, 25 bp, Homo sapien
ctggtgttggtgtggttggcaagct

SEQ ID NO: 3106495 - DNA, 25 bp, Homo sapien
gtgttggtgtggttggcaagcttgc

SEQ ID NO: 3106496 - DNA, 25 bp, Homo sapien
gtaggcagccgctgggcatctgctg

SEQ ID NO: 3106497 - DNA, 25 bp, Homo sapien
tgtgagtgggcactgtgcaaacgta

SEQ ID NO: 3106498 - DNA, 25 bp, Homo sapien
gggtaggcagccgctgggcatctgc

SEQ ID NO: 3106499 - DNA, 25 bp, Homo sapien
tcagcaaacacccccgggtaggcag

SEQ ID NO: 3106500 - DNA, 25 bp, Homo sapien
cattggcagctgctctaaggcagtg

SEQ ID NO: 3106501 - DNA, 25 bp, Homo sapien
gcaggcagctccattggcagctgct

SEQ ID NO: 3106502 - DNA, 25 bp, Homo sapien
tgcccacaggatgcctggcttgggt

SEQ ID NO: 3106503 - DNA, 25 bp, Homo sapien
gggctgcccacaggatgcctggctt

SEQ ID NO: 3106504 - DNA, 25 bp, Homo sapien
gagccgccatcttctgtcctgggaa

SEQ ID NO: 3106505 - DNA, 25 bp, Homo sapien
cacttggcccctggtgatgctttga

SEQ ID NO: 3106506 - DNA, 25 bp, Homo sapien
gctttgacctctccggggagctggg

SEQ ID NO: 3106507 - DNA, 25 bp, Homo sapien
gcccctggtgatgctttgacctctc

SEQ ID NO: 3106508 - DNA, 25 bp, Homo sapien
tttgcttggcttctcggccatgacc

SEQ ID NO: 3106509 - DNA, 25 bp, Homo sapien
ttggcttctcggccatgaccatcac

SEQ ID NO: 3106510 - DNA, 25 bp, Homo sapien
tgcttggcttctcggccatgaccat

SEQ ID NO: 3106511 - DNA, 25 bp, Homo sapien
ggcttctcggccatgaccatcacct

SEQ ID NO: 3106512 - DNA, 25 bp, Homo sapien
agggaggagtgcccccgagcaggag

SEQ ID NO: 3106513 - DNA, 25 bp, Homo sapien
ctagaagggaggagtgcccccgagc

SEQ ID NO: 3106514 - DNA, 25 bp, Homo sapien
tagaagggaggagtgcccccgagca

SEQ ID NO: 3106515 - DNA, 25 bp, Homo sapien
gaagggaggagtgcccccgagcagg

SEQ ID NO: 3106516 - DNA, 25 bp, Homo sapien
gagataaagccgtgtctaatttgca

SEQ ID NO: 3106517 - DNA, 25 bp, Homo sapien
cgaacagagataaagccgtgtctaa

SEQ ID NO: 3106518 - DNA, 25 bp, Homo sapien
aaagccgtgtctaatttgcagctga

SEQ ID NO: 3106519 - DNA, 25 bp, Homo sapien
gaacagagataaagccgtgtctaat

SEQ ID NO: 3106520 - DNA, 25 bp, Homo sapien
gcttcctttagggtcacatttattg

SEQ ID NO: 3106521 - DNA, 25 bp, Homo sapien
cagagacagcgctgtcctgcggacg

SEQ ID NO: 3106522 - DNA, 25 bp, Homo sapien
ggttaatagcgtccgtctgagctgc

SEQ ID NO: 3106523 - DNA, 25 bp, Homo sapien
ttccacggcatttcccatgtcccag

SEQ ID NO: 3106524 - DNA, 25 bp, Homo sapien
cagggagaggatgccgagtggatca

SEQ ID NO: 3106525 - DNA, 25 bp, Homo sapien
gtcagcggaggcaaccagagacaca

SEQ ID NO: 3106526 - DNA, 25 bp, Homo sapien
agacacagcggaaggatttgtggaa

SEQ ID NO: 3106527 - DNA, 25 bp, Homo sapien
aggaccccaggaaagggcgtcagcg

SEQ ID NO: 3106528 - DNA, 25 bp, Homo sapien
gaagcttccaagagcaaagatgctc

SEQ ID NO: 3106529 - DNA, 25 bp, Homo sapien
agggaagcttccaagagcaaagatg

SEQ ID NO: 3106530 - DNA, 25 bp, Homo sapien
agccccaaacttctcagggaagctt

SEQ ID NO: 3106531 - DNA, 25 bp, Homo sapien
cagccccaaacttctcagggaagct

SEQ ID NO: 3106532 - DNA, 25 bp, Homo sapien
gacgtgttgggagacctgaccatcc

SEQ ID NO: 3106533 - DNA, 25 bp, Homo sapien
gttgggagacctgaccatccacggc

SEQ ID NO: 3106534 - DNA, 25 bp, Homo sapien
tgaaagggacgtgttgggagacctg

SEQ ID NO: 3106535 - DNA, 25 bp, Homo sapien
gaccatccacggccctctcctctgt

SEQ ID NO: 3106536 - DNA, 25 bp, Homo sapien
agagctccaaatggcggtggctgct

SEQ ID NO: 3106537 - DNA, 25 bp, Homo sapien
ccttgtggtgagaggcgtatggtaa

SEQ ID NO: 3106538 - DNA, 25 bp, Homo sapien
tgagaggcgtatggtaagagctcca

SEQ ID NO: 3106539 - DNA, 25 bp, Homo sapien
gtaagagctccaaatggcggtggct

SEQ ID NO: 3106540 - DNA, 25 bp, Homo sapien
agagaggaccctgcactgcttccct

SEQ ID NO: 3106541 - DNA, 25 bp, Homo sapien
gagaggaccctgcactgcttccctg

SEQ ID NO: 3106542 - DNA, 25 bp, Homo sapien
ccagagaggaccctgcactgcttcc

SEQ ID NO: 3106543 - DNA, 25 bp, Homo sapien
cccagagaggaccctgcactgcttc

SEQ ID NO: 3106544 - DNA, 25 bp, Homo sapien
gctcccgggtagaatcaggtccgtg

SEQ ID NO: 3106545 - DNA, 25 bp, Homo sapien
agctcccgggtagaatcaggtccgt

SEQ ID NO: 3106546 - DNA, 25 bp, Homo sapien
cccgggtagaatcaggtccgtgcat

SEQ ID NO: 3106547 - DNA, 25 bp, Homo sapien
tcccgggtagaatcaggtccgtgca

SEQ ID NO: 3106548 - DNA, 25 bp, Homo sapien
caatggaaaatctgactgacttggc

SEQ ID NO: 3106549 - DNA, 25 bp, Homo sapien
gctcggcattggtcagaagcctcca

SEQ ID NO: 3106550 - DNA, 25 bp, Homo sapien
ctgacttggccttaaagaggtccca

SEQ ID NO: 3106551 - DNA, 25 bp, Homo sapien
ggtcccaggccatgaagcagcgccc

SEQ ID NO: 3106552 - DNA, 25 bp, Homo sapien
tcccatactccaaggacacaggatt

SEQ ID NO: 3106553 - DNA, 25 bp, Homo sapien
ctagagatggtcaggagcctccagg

SEQ ID NO: 3106554 - DNA, 25 bp, Homo sapien
gattccacacgtccaaaaattccag

SEQ ID NO: 3106555 - DNA, 25 bp, Homo sapien
tccagggccctggcgatgctgcctc

SEQ ID NO: 3106556 - DNA, 25 bp, Homo sapien
cctccaggcagcaatgcggcagacc

SEQ ID NO: 3106557 - DNA, 25 bp, Homo sapien
ctcctccaggcagcaatgcggcaga

SEQ ID NO: 3106558 - DNA, 25 bp, Homo sapien
ctccaggcagcaatgcggcagaccc

SEQ ID NO: 3106559 - DNA, 25 bp, Homo sapien
tcctccaggcagcaatgcggcagac

SEQ ID NO: 3106560 - DNA, 25 bp, Homo sapien
gagcacctgtatatgggcctaagga

SEQ ID NO: 3106561 - DNA, 25 bp, Homo sapien
ggtgtgacccatcataattccagga

SEQ ID NO: 3106562 - DNA, 25 bp, Homo sapien
tctggcaaggattcgacggagctcc

SEQ ID NO: 3106563 - DNA, 25 bp, Homo sapien
ccagggtagcctgccaagaaaatag

SEQ ID NO: 3106564 - DNA, 25 bp, Homo sapien
tgcacccactcagactgggctgcta

SEQ ID NO: 3106565 - DNA, 25 bp, Homo sapien
tcagactgggctgctacagagccag

SEQ ID NO: 3106566 - DNA, 25 bp, Homo sapien
ccacgtgcacgaggcccgacagcat

SEQ ID NO: 3106567 - DNA, 25 bp, Homo sapien
ggctgctacagagccagccacgtgc

SEQ ID NO: 3106568 - DNA, 25 bp, Homo sapien
agccccgtggccagcttctggcctg

SEQ ID NO: 3106569 - DNA, 25 bp, Homo sapien
tggagggctcccgtcggggcctgcc

SEQ ID NO: 3106570 - DNA, 25 bp, Homo sapien
tcagcctcggaggagcagccccgtg

SEQ ID NO: 3106571 - DNA, 25 bp, Homo sapien
ggagcagccccgtggccagcttctg

SEQ ID NO: 3106572 - DNA, 25 bp, Homo sapien
ggaagccctaggcttgtgaggcccc

SEQ ID NO: 3106573 - DNA, 25 bp, Homo sapien
cccgcaccctctcccggattgttct

SEQ ID NO: 3106574 - DNA, 25 bp, Homo sapien
caggccttggtgatcaggaagagtc

SEQ ID NO: 3106575 - DNA, 25 bp, Homo sapien
cctctcccggattgttctctggttg

SEQ ID NO: 3106576 - DNA, 25 bp, Homo sapien
tctctcaccagccacaccgtgctgc

SEQ ID NO: 3106577 - DNA, 25 bp, Homo sapien
ggtctctcaccagccacaccgtgct

SEQ ID NO: 3106578 - DNA, 25 bp, Homo sapien
gtctctcaccagccacaccgtgctg

SEQ ID NO: 3106579 - DNA, 25 bp, Homo sapien
ctgctgcagacggggggtcctaggg

SEQ ID NO: 3106580 - DNA, 25 bp, Homo sapien
gccccggtggccaaaatgccgtgtg

SEQ ID NO: 3106581 - DNA, 25 bp, Homo sapien
atcctggccccggtggccaaaatgc

SEQ ID NO: 3106582 - DNA, 25 bp, Homo sapien
ggtggccaaaatgccgtgtgtccac

SEQ ID NO: 3106583 - DNA, 25 bp, Homo sapien
ccggtggccaaaatgccgtgtgtcc

SEQ ID NO: 3106584 - DNA, 25 bp, Homo sapien
gaagaggccaggacacacgaagggt

SEQ ID NO: 3106585 - DNA, 25 bp, Homo sapien
cacgaagggtctctcatgggaagca

SEQ ID NO: 3106586 - DNA, 25 bp, Homo sapien
aagaggccaggacacacgaagggtc

SEQ ID NO: 3106587 - DNA, 25 bp, Homo sapien
gaagggtctctcatgggaagcagcc

SEQ ID NO: 3106588 - DNA, 25 bp, Homo sapien
atgtgatgaaggtaagaggtgggcc

SEQ ID NO: 3106589 - DNA, 25 bp, Homo sapien
tgtgatgaaggtaagaggtgggccc

SEQ ID NO: 3106590 - DNA, 25 bp, Homo sapien
atcagaatgagggactgaagtggct

SEQ ID NO: 3106591 - DNA, 25 bp, Homo sapien
aggagagaccccagcaacgtccttc

SEQ ID NO: 3106592 - DNA, 25 bp, Homo sapien
gtggcagaattaggcaggatcagaa

SEQ ID NO: 3106593 - DNA, 25 bp, Homo sapien
gaaggaaataagatgcccctgtagg

SEQ ID NO: 3106594 - DNA, 25 bp, Homo sapien
ctcgcctgcagtgatggggagtctc

SEQ ID NO: 3106595 - DNA, 25 bp, Homo sapien
ccacactctcctttgaagcaaggac

SEQ ID NO: 3106596 - DNA, 25 bp, Homo sapien
gagtctcggtcgaagggctccttgc

SEQ ID NO: 3106597 - DNA, 25 bp, Homo sapien
gtctcggtcgaagggctccttgcca

SEQ ID NO: 3106598 - DNA, 25 bp, Homo sapien
acatgccagagctctggtagcccaa

SEQ ID NO: 3106599 - DNA, 25 bp, Homo sapien
gacggcatccacatgccagagctct

SEQ ID NO: 3106600 - DNA, 25 bp, Homo sapien
ttttggcggccccttctctgaagcc

SEQ ID NO: 3106601 - DNA, 25 bp, Homo sapien
gcatccacatgccagagctctggta

SEQ ID NO: 3106602 - DNA, 25 bp, Homo sapien
acctcagatgtgtgtacatggccct

SEQ ID NO: 3106603 - DNA, 25 bp, Homo sapien
cactgttgatgaccccgaggattta

SEQ ID NO: 3106604 - DNA, 25 bp, Homo sapien
tttcactgttgatgaccccgaggat

SEQ ID NO: 3106605 - DNA, 25 bp, Homo sapien
tgggctggtcttgtactttcactgt

SEQ ID NO: 3106606 - DNA, 25 bp, Homo sapien
gaagcagctcaggtccaaaagagct

SEQ ID NO: 3106607 - DNA, 25 bp, Homo sapien
ggggagcttgcggttggtgaacttg

SEQ ID NO: 3106608 - DNA, 25 bp, Homo sapien
gggagcttgcggttggtgaacttgt

SEQ ID NO: 3106609 - DNA, 25 bp, Homo sapien
ttctggaccgtccttggcaaggagg

SEQ ID NO: 3106610 - DNA, 25 bp, Homo sapien
tggggctccttctggaccgtccttg

SEQ ID NO: 3106611 - DNA, 25 bp, Homo sapien
tccttctggaccgtccttggcaagg

SEQ ID NO: 3106612 - DNA, 25 bp, Homo sapien
gctccttctggaccgtccttggcaa

SEQ ID NO: 3106613 - DNA, 25 bp, Homo sapien
gggccacatggacacccatgctgcc

SEQ ID NO: 3106614 - DNA, 25 bp, Homo sapien
gttctcttgcctttgaggcggatgg

SEQ ID NO: 3106615 - DNA, 25 bp, Homo sapien
ttgaggcggatggagccctccttcc

SEQ ID NO: 3106616 - DNA, 25 bp, Homo sapien
tggaaacagagtccatccctgggga

SEQ ID NO: 3106617 - DNA, 25 bp, Homo sapien
atggagacacgagcgatccacaggc

SEQ ID NO: 3106618 - DNA, 25 bp, Homo sapien
tgcagccgccggcttagaagatgga

SEQ ID NO: 3106619 - DNA, 25 bp, Homo sapien
aggccgccgagtccggagggcaggg

SEQ ID NO: 3106620 - DNA, 25 bp, Homo sapien
tgcctgcgctcgagcctccttggcg

SEQ ID NO: 3106621 - DNA, 25 bp, Homo sapien
accaacaccagcatccggtccaggg

SEQ ID NO: 3106622 - DNA, 25 bp, Homo sapien
tatctgtggccagcggcacagtcac

SEQ ID NO: 3106623 - DNA, 25 bp, Homo sapien
gtatctgtggccagcggcacagtca

SEQ ID NO: 3106624 - DNA, 25 bp, Homo sapien
agtatctgtggccagcggcacagtc

SEQ ID NO: 3106625 - DNA, 25 bp, Homo sapien
ggcacaagaggacccacgcaggagc

SEQ ID NO: 3106626 - DNA, 25 bp, Homo sapien
aggcacaagaggacccacgcaggag

SEQ ID NO: 3106627 - DNA, 25 bp, Homo sapien
cagaggcacaagaggacccacgcag

SEQ ID NO: 3106628 - DNA, 25 bp, Homo sapien
agaggcacaagaggacccacgcagg

SEQ ID NO: 3106629 - DNA, 25 bp, Homo sapien
gcagagctggaggtcgatgattttc

SEQ ID NO: 3106630 - DNA, 25 bp, Homo sapien
cagagctggaggtcgatgattttca

SEQ ID NO: 3106631 - DNA, 25 bp, Homo sapien
agagctggaggtcgatgattttcat

SEQ ID NO: 3106632 - DNA, 25 bp, Homo sapien
attccctccacggaggcttctgagc

SEQ ID NO: 3106633 - DNA, 25 bp, Homo sapien
tccctccacggaggcttctgagcca

SEQ ID NO: 3106634 - DNA, 25 bp, Homo sapien
ttattccctccacggaggcttctga

SEQ ID NO: 3106635 - DNA, 25 bp, Homo sapien
attattccctccacggaggcttctg

SEQ ID NO: 3106636 - DNA, 25 bp, Homo sapien
acttagcaatcgtttgcgcagagcc

SEQ ID NO: 3106637 - DNA, 25 bp, Homo sapien
ctccttggaagaacgggcagattcc

SEQ ID NO: 3106638 - DNA, 25 bp, Homo sapien
tctccttggaagaacgggcagattc

SEQ ID NO: 3106639 - DNA, 25 bp, Homo sapien
gctcctccccgccaggacttagcaa

SEQ ID NO: 3106640 - DNA, 25 bp, Homo sapien
ttcacttttcggcagccagtgaagg

SEQ ID NO: 3106641 - DNA, 25 bp, Homo sapien
gcagcttggcggctaagtgttctcg

SEQ ID NO: 3106642 - DNA, 25 bp, Homo sapien
ggcttcacttttcggcagccagtga

SEQ ID NO: 3106643 - DNA, 25 bp, Homo sapien
tctcggcatctgaggcggcttcact

SEQ ID NO: 3106644 - DNA, 25 bp, Homo sapien
ctgtaaatttagaacgcgtgatggc

SEQ ID NO: 3106645 - DNA, 25 bp, Homo sapien
gtaaatttagaacgcgtgatggctg

SEQ ID NO: 3106646 - DNA, 25 bp, Homo sapien
ttagaacgcgtgatggctggctgct

SEQ ID NO: 3106647 - DNA, 25 bp, Homo sapien
aatttagaacgcgtgatggctggct

SEQ ID NO: 3106648 - DNA, 25 bp, Homo sapien
gctgaccacccgctccgcacacagc

SEQ ID NO: 3106649 - DNA, 25 bp, Homo sapien
gctggacagtgccggcctgcagcaa

SEQ ID NO: 3106650 - DNA, 25 bp, Homo sapien
cagctgaccgccaggccgctgacca

SEQ ID NO: 3106651 - DNA, 25 bp, Homo sapien
catctgggatgcgtccctcacagct

SEQ ID NO: 3106652 - DNA, 25 bp, Homo sapien
cctccgtgctcaacataaaagccac

SEQ ID NO: 3106653 - DNA, 25 bp, Homo sapien
aaagccacagctccatgctcaacat

SEQ ID NO: 3106654 - DNA, 25 bp, Homo sapien
ccctccgtgctcaacataaaagcca

SEQ ID NO: 3106655 - DNA, 25 bp, Homo sapien
agccacagctccatgctcaacatgg

SEQ ID NO: 3106656 - DNA, 25 bp, Homo sapien
tgttttcccctgaaggagccggcca

SEQ ID NO: 3106657 - DNA, 25 bp, Homo sapien
ttttcccctgaaggagccggccaca

SEQ ID NO: 3106658 - DNA, 25 bp, Homo sapien
tcccctgaaggagccggccacaggg

SEQ ID NO: 3106659 - DNA, 25 bp, Homo sapien
cctgaaggagccggccacagggcat

SEQ ID NO: 3106660 - DNA, 25 bp, Homo sapien
gagggatcccaatgaatcagcgaag

SEQ ID NO: 3106661 - DNA, 25 bp, Homo sapien
tagaaatagcatggcagtcccacgg

SEQ ID NO: 3106662 - DNA, 25 bp, Homo sapien
taacgaaactatgcagtgtgagcgc

SEQ ID NO: 3106663 - DNA, 25 bp, Homo sapien
tcaggaagagattaggagggatccc

SEQ ID NO: 3106664 - DNA, 25 bp, Homo sapien
aaagaaagaagtccacgtagatcct

SEQ ID NO: 3106665 - DNA, 25 bp, Homo sapien
ccttgtgcttgcatgcacgctaaga

SEQ ID NO: 3106666 - DNA, 25 bp, Homo sapien
aaggtatcagaatcccgctctggga

SEQ ID NO: 3106667 - DNA, 25 bp, Homo sapien
gaagtccacgtagatccttgtgctt

SEQ ID NO: 3106668 - DNA, 25 bp, Homo sapien
tgtgtgcttcactttcggggaacat

SEQ ID NO: 3106669 - DNA, 25 bp, Homo sapien
gtgcttcactttcggggaacatcca

SEQ ID NO: 3106670 - DNA, 25 bp, Homo sapien
tgtgcttcactttcggggaacatcc

SEQ ID NO: 3106671 - DNA, 25 bp, Homo sapien
gcttcactttcggggaacatccact

SEQ ID NO: 3106672 - DNA, 25 bp, Homo sapien
cagtccaggggctgccgtccagcac

SEQ ID NO: 3106673 - DNA, 25 bp, Homo sapien
ccagtccaggggctgccgtccagca

SEQ ID NO: 3106674 - DNA, 25 bp, Homo sapien
attcacagccttagccaacatcccg

SEQ ID NO: 3106675 - DNA, 25 bp, Homo sapien
ccggcaccccagtgaaggactcgga

SEQ ID NO: 3106676 - DNA, 25 bp, Homo sapien
cagccagtgggttcatctgatggag

SEQ ID NO: 3106677 - DNA, 25 bp, Homo sapien
ggctgtactcgcacccacaccgatt

SEQ ID NO: 3106678 - DNA, 25 bp, Homo sapien
ctcacgcatccctgagtcaattgct

SEQ ID NO: 3106679 - DNA, 25 bp, Homo sapien
atccagagctctcacgcatccctga

SEQ ID NO: 3106680 - DNA, 25 bp, Homo sapien
ccctgagtcaattgctccctgttgg

SEQ ID NO: 3106681 - DNA, 25 bp, Homo sapien
tctgaggtctacaccgggacaactt

SEQ ID NO: 3106682 - DNA, 25 bp, Homo sapien
ggttggttgagcaatacactccagc

SEQ ID NO: 3106683 - DNA, 25 bp, Homo sapien
tgggtcaaacccgaaagctattatc

SEQ ID NO: 3106684 - DNA, 25 bp, Homo sapien
gctattatcttcctccgagccgcta

SEQ ID NO: 3106685 - DNA, 25 bp, Homo sapien
ggctcaaaggtcgattttccatggt

SEQ ID NO: 3106686 - DNA, 25 bp, Homo sapien
tagcccgaggtctgacccggtattg

SEQ ID NO: 3106687 - DNA, 25 bp, Homo sapien
agcagctagcccgaggtctgacccg

SEQ ID NO: 3106688 - DNA, 25 bp, Homo sapien
agctagcccgaggtctgacccggta

SEQ ID NO: 3106689 - DNA, 25 bp, Homo sapien
cccgaggtctgacccggtattgatc

SEQ ID NO: 3106690 - DNA, 25 bp, Homo sapien
acttagcaatcgtttgcgcagagcc

SEQ ID NO: 3106691 - DNA, 25 bp, Homo sapien
tctccttggaagaacgggcagattc

SEQ ID NO: 3106692 - DNA, 25 bp, Homo sapien
gctcctccccgccaggacttagcaa

SEQ ID NO: 3106693 - DNA, 25 bp, Homo sapien
ctccttggaagaacgggcagattcc

SEQ ID NO: 3106694 - DNA, 25 bp, Homo sapien
ttcacttttcggcagccagtgaagg

SEQ ID NO: 3106695 - DNA, 25 bp, Homo sapien
ggcttcacttttcggcagccagtga

SEQ ID NO: 3106696 - DNA, 25 bp, Homo sapien
gcagcttggcggctaagtgttctcg

SEQ ID NO: 3106697 - DNA, 25 bp, Homo sapien
tctcggcatctgaggcggcttcact

SEQ ID NO: 3106698 - DNA, 25 bp, Homo sapien
gctggacagtgccggcctgcagcaa

SEQ ID NO: 3106699 - DNA, 25 bp, Homo sapien
gctgaccacccgctccgcacacagc

SEQ ID NO: 3106700 - DNA, 25 bp, Homo sapien
cagctgaccgccaggccgctgacca

SEQ ID NO: 3106701 - DNA, 25 bp, Homo sapien
catctgggatgcgtccctcacagct

SEQ ID NO: 3106702 - DNA, 25 bp, Homo sapien
tcagtgaggccaagagacagagaag

SEQ ID NO: 3106703 - DNA, 25 bp, Homo sapien
ctttcagtgaggccaagagacagag

SEQ ID NO: 3106704 - DNA, 25 bp, Homo sapien
gattccagtcctcccccaatccaca

SEQ ID NO: 3106705 - DNA, 25 bp, Homo sapien
gctgtctgggcctgattccagtcct

SEQ ID NO: 3106706 - DNA, 25 bp, Homo sapien
cctcatggagctcacggtcaaacca

SEQ ID NO: 3106707 - DNA, 25 bp, Homo sapien
tggagctcacggtcaaaccagactc

SEQ ID NO: 3106708 - DNA, 25 bp, Homo sapien
gtggtagtgggctcttctcgcagtc

SEQ ID NO: 3106709 - DNA, 25 bp, Homo sapien
gccaagtggtagtgggctcttctcg

SEQ ID NO: 3106710 - DNA, 25 bp, Homo sapien
caccgctttgccgacctgcatgtga

SEQ ID NO: 3106711 - DNA, 25 bp, Homo sapien
gctttgccgacctgcatgtgagtgg

SEQ ID NO: 3106712 - DNA, 25 bp, Homo sapien
ctgaagccggcaccaagccagctct

SEQ ID NO: 3106713 - DNA, 25 bp, Homo sapien
gcctcccggcagcaccgctttgccg

SEQ ID NO: 3106714 - DNA, 25 bp, Homo sapien
tgggaactcaagaaccaagccagcc

SEQ ID NO: 3106715 - DNA, 25 bp, Homo sapien
tgtccctcgtgtgttcattctgaag

SEQ ID NO: 3106716 - DNA, 25 bp, Homo sapien
tgctgcagctgcgttccaggagagc

SEQ ID NO: 3106717 - DNA, 25 bp, Homo sapien
ctctgctggttagagcgggctccac

SEQ ID NO: 3106718 - DNA, 25 bp, Homo sapien
gttggcttctgtttgccgatgtctg

SEQ ID NO: 3106719 - DNA, 25 bp, Homo sapien
ggttggcttctgtttgccgatgtct

SEQ ID NO: 3106720 - DNA, 25 bp, Homo sapien
ggttggaaacgtccattgtgccgct

SEQ ID NO: 3106721 - DNA, 25 bp, Homo sapien
tccgggatgtgtggacgcagccgct

SEQ ID NO: 3106722 - DNA, 25 bp, Homo sapien
gacgcagccgctggttggaaacgtc

SEQ ID NO: 3106723 - DNA, 25 bp, Homo sapien
tccattgtgccgctggctggtggag

SEQ ID NO: 3106724 - DNA, 25 bp, Homo sapien
caccactgcaattggcatctgcctg

SEQ ID NO: 3106725 - DNA, 25 bp, Homo sapien
cctgctggggaggactcattgtcat

SEQ ID NO: 3106726 - DNA, 25 bp, Homo sapien
ccagacggcaagtgtggtcaccact

SEQ ID NO: 3106727 - DNA, 25 bp, Homo sapien
ctggaatcctcccagacggcaagtg

SEQ ID NO: 3106728 - DNA, 25 bp, Homo sapien
accacagactgagggcgttgagcca

SEQ ID NO: 3106729 - DNA, 25 bp, Homo sapien
gagggcagagccattacggccttct

SEQ ID NO: 3106730 - DNA, 25 bp, Homo sapien
tccatgttgatgatcaggcgacccg

SEQ ID NO: 3106731 - DNA, 25 bp, Homo sapien
tgtcctgaggcgacaggtccttgct

SEQ ID NO: 3106732 - DNA, 25 bp, Homo sapien
ggctctgcagaggtcccgtccttgc

SEQ ID NO: 3106733 - DNA, 25 bp, Homo sapien
tccagagaggccgtgctcactctgc

SEQ ID NO: 3106734 - DNA, 25 bp, Homo sapien
caggctctgcagaggtcccgtcctt

SEQ ID NO: 3106735 - DNA, 25 bp, Homo sapien
agaggccgtgctcactctgcaggct

SEQ ID NO: 3106736 - DNA, 25 bp, Homo sapien
gttgaggccctaactcccagcagct

SEQ ID NO: 3106737 - DNA, 25 bp, Homo sapien
ttgtggtggccctaacccaacagga

SEQ ID NO: 3106738 - DNA, 25 bp, Homo sapien
tggagagaggaactttaacaaggta

SEQ ID NO: 3106739 - DNA, 25 bp, Homo sapien
cccgcaaatccatatgttgaggccc

SEQ ID NO: 3106740 - DNA, 25 bp, Homo sapien
ggtactcaggcaaacgcaaatccag

SEQ ID NO: 3106741 - DNA, 25 bp, Homo sapien
caagccgaagccatgtgagtgacgc

SEQ ID NO: 3106742 - DNA, 25 bp, Homo sapien
tgaaaagaagcaactccgcctgtgg

SEQ ID NO: 3106743 - DNA, 25 bp, Homo sapien
aatacacgacgggaatagccagtgc

SEQ ID NO: 3106744 - DNA, 25 bp, Homo sapien
gcgccacattgttctggatctcggg

SEQ ID NO: 3106745 - DNA, 25 bp, Homo sapien
tgccatggtgctacggtgccactgc

SEQ ID NO: 3106746 - DNA, 25 bp, Homo sapien
gggctgccttgcaaagcggtgatca

SEQ ID NO: 3106747 - DNA, 25 bp, Homo sapien
gcggtgatcatcagcctggcgtcta

SEQ ID NO: 3106748 - DNA, 25 bp, Homo sapien
tcagaactgtgttgaggaggttgcc

SEQ ID NO: 3106749 - DNA, 25 bp, Homo sapien
acaaggagagtcatgtgccagcagc

SEQ ID NO: 3106750 - DNA, 25 bp, Homo sapien
tgctagcacttcatgaccctggagg

SEQ ID NO: 3106751 - DNA, 25 bp, Homo sapien
gatgtttgcccagataattaccagg

SEQ ID NO: 3106752 - DNA, 25 bp, Homo sapien
tgcagcctccacctcccgatttgaa

SEQ ID NO: 3106753 - DNA, 25 bp, Homo sapien
gcctccacctcccgatttgaagcaa

SEQ ID NO: 3106754 - DNA, 25 bp, Homo sapien
agcctccacctcccgatttgaagca

SEQ ID NO: 3106755 - DNA, 25 bp, Homo sapien
cagcctccacctcccgatttgaagc

SEQ ID NO: 3106756 - DNA, 25 bp, Homo sapien
gctccctccaaatccaagtccagca

SEQ ID NO: 3106757 - DNA, 25 bp, Homo sapien
ccgatgctccctccaaatccaagtc

SEQ ID NO: 3106758 - DNA, 25 bp, Homo sapien
atgctccctccaaatccaagtccag

SEQ ID NO: 3106759 - DNA, 25 bp, Homo sapien
tccctccaaatccaagtccagcagt

SEQ ID NO: 3106760 - DNA, 25 bp, Homo sapien
cagggggcctcactgccttgttggt

SEQ ID NO: 3106761 - DNA, 25 bp, Homo sapien
tgggcaggcttggaagggacttctc

SEQ ID NO: 3106762 - DNA, 25 bp, Homo sapien
ggagtgggtggcctccttgatgggc

SEQ ID NO: 3106763 - DNA, 25 bp, Homo sapien
ctctgtcccaggacatagggcaggg

SEQ ID NO: 3106764 - DNA, 25 bp, Homo sapien
cagctggagtagagcgagcccagca

SEQ ID NO: 3106765 - DNA, 25 bp, Homo sapien
cagggcagcatccatagcccacaag

SEQ ID NO: 3106766 - DNA, 25 bp, Homo sapien
tggcattgcctgagccggcagtgat

SEQ ID NO: 3106767 - DNA, 25 bp, Homo sapien
agaggcaggctatggctgccaccct

SEQ ID NO: 3106768 - DNA, 25 bp, Homo sapien
catgtccatggcttcgttgagggcc

SEQ ID NO: 3106769 - DNA, 25 bp, Homo sapien
gctaagagtcccagatagctaggcc

SEQ ID NO: 3106770 - DNA, 25 bp, Homo sapien
tgagggccatccatatgccagctgg

SEQ ID NO: 3106771 - DNA, 25 bp, Homo sapien
ccacctcggcgaattgaagggctaa

SEQ ID NO: 3106772 - DNA, 25 bp, Homo sapien
tgcgcattcttggatgaaaaccccg

SEQ ID NO: 3106773 - DNA, 25 bp, Homo sapien
aaatagatacactcggtcaacggcg

SEQ ID NO: 3106774 - DNA, 25 bp, Homo sapien
ggatacagacattcacgaccgcaga

SEQ ID NO: 3106775 - DNA, 25 bp, Homo sapien
ccgcagaagataggtaccgaagctt

SEQ ID NO: 3106776 - DNA, 25 bp, Homo sapien
taaaaatcactatgccaagctcacg

SEQ ID NO: 3106777 - DNA, 25 bp, Homo sapien
agagagcaaatctgggccgggcctt

SEQ ID NO: 3106778 - DNA, 25 bp, Homo sapien
tctcctggcaaagctagaggacgcg

SEQ ID NO: 3106779 - DNA, 25 bp, Homo sapien
cctggccaatgggaagagagagcaa

SEQ ID NO: 3106780 - DNA, 25 bp, Homo sapien
ctttatcaccctggccgggaaggtg

SEQ ID NO: 3106781 - DNA, 25 bp, Homo sapien
cattgggatctagggcaccctggcc

SEQ ID NO: 3106782 - DNA, 25 bp, Homo sapien
tactttccttaatggtgacggtcaa

SEQ ID NO: 3106783 - DNA, 25 bp, Homo sapien
tggatcacactgtggccggctggaa

SEQ ID NO: 3106784 - DNA, 25 bp, Homo sapien
tcttcgagctgtcccccggtgagct

SEQ ID NO: 3106785 - DNA, 25 bp, Homo sapien
ggcttggggcctcgcttcttcgagc

SEQ ID NO: 3106786 - DNA, 25 bp, Homo sapien
gctgggcttgtcatccactctgctg

SEQ ID NO: 3106787 - DNA, 25 bp, Homo sapien
gagctgggcttgtcatccactctgc

SEQ ID NO: 3106788 - DNA, 25 bp, Homo sapien
tccctctcacgttcccgctccctct

SEQ ID NO: 3106789 - DNA, 25 bp, Homo sapien
tctcacgttcccgctccctctctcg

SEQ ID NO: 3106790 - DNA, 25 bp, Homo sapien
ctcacgttcccgctccctctctcgc

SEQ ID NO: 3106791 - DNA, 25 bp, Homo sapien
cctctcacgttcccgctccctctct

SEQ ID NO: 3106792 - DNA, 25 bp, Homo sapien
tcccgaggggcctctgcgcggcagg

SEQ ID NO: 3106793 - DNA, 25 bp, Homo sapien
ggggcctctgcgcggcaggtgctgc

SEQ ID NO: 3106794 - DNA, 25 bp, Homo sapien
cgaggggcctctgcgcggcaggtgc

SEQ ID NO: 3106795 - DNA, 25 bp, Homo sapien
ccgaggggcctctgcgcggcaggtg

SEQ ID NO: 3106796 - DNA, 25 bp, Homo sapien
ggcgagcggccagggtaggggatcc

SEQ ID NO: 3106797 - DNA, 25 bp, Homo sapien
tggctgagtcacttcgaaactcgta

SEQ ID NO: 3106798 - DNA, 25 bp, Homo sapien
ggatccggatgcccctggctgagtc

SEQ ID NO: 3106799 - DNA, 25 bp, Homo sapien
tgagtcacttcgaaactcgtaagtt

SEQ ID NO: 3106800 - DNA, 25 bp, Homo sapien
tttttggggccatagagctccatct

SEQ ID NO: 3106801 - DNA, 25 bp, Homo sapien
tccacgctttttggggccatagagc

SEQ ID NO: 3106802 - DNA, 25 bp, Homo sapien
gctttttggggccatagagctccat

SEQ ID NO: 3106803 - DNA, 25 bp, Homo sapien
tgggtccacgctttttggggccata

SEQ ID NO: 3106804 - DNA, 25 bp, Homo sapien
cgagcaagcgagcatccaggatgtt

SEQ ID NO: 3106805 - DNA, 25 bp, Homo sapien
ttcctcaaaggctgcgagcaagcga

SEQ ID NO: 3106806 - DNA, 25 bp, Homo sapien
gttttcctccggttcccatgtgctg

SEQ ID NO: 3106807 - DNA, 25 bp, Homo sapien
tttcctccggttcccatgtgctgta

SEQ ID NO: 3106808 - DNA, 25 bp, Homo sapien
tcccttccatttcacgaggtattcc

SEQ ID NO: 3106809 - DNA, 25 bp, Homo sapien
ttctgcgaccatcccttccatttca

SEQ ID NO: 3106810 - DNA, 25 bp, Homo sapien
tgcgaccatcccttccatttcacga

SEQ ID NO: 3106811 - DNA, 25 bp, Homo sapien
gaccatcccttccatttcacgaggt

SEQ ID NO: 3106812 - DNA, 25 bp, Homo sapien
gctcccccaccgctgaaagctccat

SEQ ID NO: 3106813 - DNA, 25 bp, Homo sapien
tttccgtatgcgccgcttcaggagg

SEQ ID NO: 3106814 - DNA, 25 bp, Homo sapien
cgtatgcgccgcttcaggagggctt

SEQ ID NO: 3106815 - DNA, 25 bp, Homo sapien
ttcaggagggcttcggccgcgaaca

SEQ ID NO: 3106816 - DNA, 25 bp, Homo sapien
tgactcgccgcttccccccttggcc

SEQ ID NO: 3106817 - DNA, 25 bp, Homo sapien
ttgactcgccgcttccccccttggc

SEQ ID NO: 3106818 - DNA, 25 bp, Homo sapien
gcacgacagaccataatactctccc

SEQ ID NO: 3106819 - DNA, 25 bp, Homo sapien
aatactctcccgctgacgtcagttc

SEQ ID NO: 3106820 - DNA, 25 bp, Homo sapien
aaagcagcagccagcgcacgacaga

SEQ ID NO: 3106821 - DNA, 25 bp, Homo sapien
gaccataatactctcccgctgacgt

SEQ ID NO: 3106822 - DNA, 25 bp, Homo sapien
gggctaagggcatctgggcggagcc

SEQ ID NO: 3106823 - DNA, 25 bp, Homo sapien
ccggcagaggatggggcgagcggct

SEQ ID NO: 3106824 - DNA, 25 bp, Homo sapien
cctgctcggggcctgggtgggctaa

SEQ ID NO: 3106825 - DNA, 25 bp, Homo sapien
gctaagggcatctgggcggagccgg

SEQ ID NO: 3106826 - DNA, 25 bp, Homo sapien
tcttcccaacgtgggcggcggacat

SEQ ID NO: 3106827 - DNA, 25 bp, Homo sapien
atcctgcgagaaacgccagcgcggg

SEQ ID NO: 3106828 - DNA, 25 bp, Homo sapien
aagatggcgggctcctggaaaggga

SEQ ID NO: 3106829 - DNA, 25 bp, Homo sapien
cttgccgtgcgcacacaagcacgtg

SEQ ID NO: 3106830 - DNA, 25 bp, Homo sapien
agagcggtgattttccttcagatag

SEQ ID NO: 3106831 - DNA, 25 bp, Homo sapien
ttgatgcctttactgatcatggggt

SEQ ID NO: 3106832 - DNA, 25 bp, Homo sapien
cccttgatgcctttactgatcatgg

SEQ ID NO: 3106833 - DNA, 25 bp, Homo sapien
gagcggtgattttccttcagatagg

SEQ ID NO: 3106834 - DNA, 25 bp, Homo sapien
gggtgacccgacattctggaaactg

SEQ ID NO: 3106835 - DNA, 25 bp, Homo sapien
tgccgcctgctgcgggaatgccgca

SEQ ID NO: 3106836 - DNA, 25 bp, Homo sapien
gcagcgctgcttcctagacgccgag

SEQ ID NO: 3106837 - DNA, 25 bp, Homo sapien
ttcctagacgccgagctagggctgg

SEQ ID NO: 3106838 - DNA, 25 bp, Homo sapien
atccccggactgctcgctggtgctg

SEQ ID NO: 3106839 - DNA, 25 bp, Homo sapien
gctggtgctgcttgtgagacccatt

SEQ ID NO: 3106840 - DNA, 25 bp, Homo sapien
ccaatccccggactgctcgctggtg

SEQ ID NO: 3106841 - DNA, 25 bp, Homo sapien
ccggactgctcgctggtgctgcttg

SEQ ID NO: 3106842 - DNA, 25 bp, Homo sapien
ggtcattcgagaaggcacaagctgc

SEQ ID NO: 3106843 - DNA, 25 bp, Homo sapien
tcagaaaatcctaagtgcagggcct

SEQ ID NO: 3106844 - DNA, 25 bp, Homo sapien
ttttgctgggacgtcgggacctcaa

SEQ ID NO: 3106845 - DNA, 25 bp, Homo sapien
gattgttaacgccaagagccacagt

SEQ ID NO: 3106846 - DNA, 25 bp, Homo sapien
cagacgtttgggagctgaccgagaa

SEQ ID NO: 3106847 - DNA, 25 bp, Homo sapien
tgaccgagaaaacgcgacggtgccg

SEQ ID NO: 3106848 - DNA, 25 bp, Homo sapien
cggcaaacccgagggcagacgtttg

SEQ ID NO: 3106849 - DNA, 25 bp, Homo sapien
ccagaagccgtgttgccggttccgg

SEQ ID NO: 3106850 - DNA, 25 bp, Homo sapien
agaagtaattatgcaaacatctggg

SEQ ID NO: 3106851 - DNA, 25 bp, Homo sapien
gccgctaccggcaccgtcttattca

SEQ ID NO: 3106852 - DNA, 25 bp, Homo sapien
gcacaacttcctcccttgacatttt

SEQ ID NO: 3106853 - DNA, 25 bp, Homo sapien
gacattttgcactctcgaagttggg

SEQ ID NO: 3106854 - DNA, 25 bp, Homo sapien
aagtcccagcagatacccccaccat

SEQ ID NO: 3106855 - DNA, 25 bp, Homo sapien
ccgtggaagtcccagcagatacccc

SEQ ID NO: 3106856 - DNA, 25 bp, Homo sapien
gccaaacggatgaaggggtaagcca

SEQ ID NO: 3106857 - DNA, 25 bp, Homo sapien
tggccaaacggatgaaggggtaagc

SEQ ID NO: 3106858 - DNA, 25 bp, Homo sapien
agaggagagtggagccgtcagcacc

SEQ ID NO: 3106859 - DNA, 25 bp, Homo sapien
ccggctttgcggagtcagcagggcc

SEQ ID NO: 3106860 - DNA, 25 bp, Homo sapien
tgtgctgggagtcctcccagaccag

SEQ ID NO: 3106861 - DNA, 25 bp, Homo sapien
ccactggcagtgtcggtgctgtgct

SEQ ID NO: 3106862 - DNA, 25 bp, Homo sapien
taccttgcggaggaaccttgcggag

SEQ ID NO: 3106863 - DNA, 25 bp, Homo sapien
ccgcacaaggtactgcggaggtacc

SEQ ID NO: 3106864 - DNA, 25 bp, Homo sapien
ccttgcggaggaggtactgcggtgg

SEQ ID NO: 3106865 - DNA, 25 bp, Homo sapien
gaggaggaggtactgtctccgcaca

SEQ ID NO: 3106866 - DNA, 25 bp, Homo sapien
cagtttctagagagctcgtgtagcc

SEQ ID NO: 3106867 - DNA, 25 bp, Homo sapien
tgaaatcaaccgaaatactggatgg

SEQ ID NO: 3106868 - DNA, 25 bp, Homo sapien
ggtggtcgggccttttgagctcaaa

SEQ ID NO: 3106869 - DNA, 25 bp, Homo sapien
caaacgggagtagagtcagcacttg

SEQ ID NO: 3106870 - DNA, 25 bp, Homo sapien
tgaaagtaacggtgaggcagttcgc

SEQ ID NO: 3106871 - DNA, 25 bp, Homo sapien
ttgaaagtaacggtgaggcagttcg

SEQ ID NO: 3106872 - DNA, 25 bp, Homo sapien
gtcggtgataattatattcccaaag

SEQ ID NO: 3106873 - DNA, 25 bp, Homo sapien
cagttcgcggtgacgtcggtgataa

SEQ ID NO: 3106874 - DNA, 25 bp, Homo sapien
cagcgactctgcaggttcgtcctgg

SEQ ID NO: 3106875 - DNA, 25 bp, Homo sapien
gcgactctgcaggttcgtcctgggc

SEQ ID NO: 3106876 - DNA, 25 bp, Homo sapien
tcagcgactctgcaggttcgtcctg

SEQ ID NO: 3106877 - DNA, 25 bp, Homo sapien
agcgactctgcaggttcgtcctggg

SEQ ID NO: 3106878 - DNA, 25 bp, Homo sapien
caccgccgccgacgccggtgtctcg

SEQ ID NO: 3106879 - DNA, 25 bp, Homo sapien
ggaggcttctccgccgtcgtggtgg

SEQ ID NO: 3106880 - DNA, 25 bp, Homo sapien
gccgacgccggtgtctcgggcttca

SEQ ID NO: 3106881 - DNA, 25 bp, Homo sapien
gcttctccgccgtcgtggtgggtgc

SEQ ID NO: 3106882 - DNA, 25 bp, Homo sapien
tccaggtctgagtctagcaggatga

SEQ ID NO: 3106883 - DNA, 25 bp, Homo sapien
gctgcgcgtcttgacgcagcgcaag

SEQ ID NO: 3106884 - DNA, 25 bp, Homo sapien
gcgcaagtctatgggttcatccagg

SEQ ID NO: 3106885 - DNA, 25 bp, Homo sapien
tctgagtctagcaggatgacctcgg

SEQ ID NO: 3106886 - DNA, 25 bp, Homo sapien
tcagccgcttcttgcagggctcgcg

SEQ ID NO: 3106887 - DNA, 25 bp, Homo sapien
tgatgctgcgcgcagtcagccgctt

SEQ ID NO: 3106888 - DNA, 25 bp, Homo sapien
tcgccgtgggtctcggagaggcagc

SEQ ID NO: 3106889 - DNA, 25 bp, Homo sapien
ttcttgcagggctcgcgctcgccgt

SEQ ID NO: 3106890 - DNA, 25 bp, Homo sapien
tgggagagattcaggccgacggcgt

SEQ ID NO: 3106891 - DNA, 25 bp, Homo sapien
ggagagattcaggccgacggcgtgg

SEQ ID NO: 3106892 - DNA, 25 bp, Homo sapien
gggagagattcaggccgacggcgtg

SEQ ID NO: 3106893 - DNA, 25 bp, Homo sapien
acagcttgcgggagccggcatcctg

SEQ ID NO: 3106894 - DNA, 25 bp, Homo sapien
ggtcccaggcaagcaggtcgggctt

SEQ ID NO: 3106895 - DNA, 25 bp, Homo sapien
ttccgggccgggtcccaggcaagca

SEQ ID NO: 3106896 - DNA, 25 bp, Homo sapien
tgtgagggcgggtgcgtgttccggg

SEQ ID NO: 3106897 - DNA, 25 bp, Homo sapien
ctcctccctcctcttgggcggcgcc

SEQ ID NO: 3106898 - DNA, 25 bp, Homo sapien
tcctccctcctcttgggcggcgcct

SEQ ID NO: 3106899 - DNA, 25 bp, Homo sapien
tcctcctccctcctcttgggcggcg

SEQ ID NO: 3106900 - DNA, 25 bp, Homo sapien
ctccctcctcttgggcggcgcctcc

SEQ ID NO: 3106901 - DNA, 25 bp, Homo sapien
cccctctgccacctcgccggacttg

SEQ ID NO: 3106902 - DNA, 25 bp, Homo sapien
ctgcccgcttcttgtggctggggga

SEQ ID NO: 3106903 - DNA, 25 bp, Homo sapien
tgccacctcgccggacttgatcttc

SEQ ID NO: 3106904 - DNA, 25 bp, Homo sapien
tcttcaccgcctgcatgccgttctc

SEQ ID NO: 3106905 - DNA, 25 bp, Homo sapien
tttgggggccggcatcattccgttg

SEQ ID NO: 3106906 - DNA, 25 bp, Homo sapien
ttcttgttcttgactatcttcatct

SEQ ID NO: 3106907 - DNA, 25 bp, Homo sapien
gatcacgatgcgtccgttcttgttc

SEQ ID NO: 3106908 - DNA, 25 bp, Homo sapien
cgttgcccgtcacagcctctttggg

SEQ ID NO: 3106909 - DNA, 25 bp, Homo sapien
tcaccgcccccaggtagcctttggc

SEQ ID NO: 3106910 - DNA, 25 bp, Homo sapien
ggagcacccgccgcaccggccaggg

SEQ ID NO: 3106911 - DNA, 25 bp, Homo sapien
ctggagcacccgccgcaccggccag

SEQ ID NO: 3106912 - DNA, 25 bp, Homo sapien
cttcaccgcccccaggtagcctttg

SEQ ID NO: 3106913 - DNA, 25 bp, Homo sapien
tggccgccctggtactgcaggtcgt

SEQ ID NO: 3106914 - DNA, 25 bp, Homo sapien
tagtacttgccgctcttgcccggcg

SEQ ID NO: 3106915 - DNA, 25 bp, Homo sapien
cttgctgttgagctggtagtagtac

SEQ ID NO: 3106916 - DNA, 25 bp, Homo sapien
cccgctccttgctgtgcggctggta

SEQ ID NO: 3106917 - DNA, 25 bp, Homo sapien
gcacggttgtcagtggaggagtcct

SEQ ID NO: 3106918 - DNA, 25 bp, Homo sapien
gacattggaacgacgggcaaaggta

SEQ ID NO: 3106919 - DNA, 25 bp, Homo sapien
gcgcccaaatccagcttggcacggt

SEQ ID NO: 3106920 - DNA, 25 bp, Homo sapien
tgctgttgagctcgtactgatgccc

SEQ ID NO: 3106921 - DNA, 25 bp, Homo sapien
acagccccaccgcatgccgggagtt

SEQ ID NO: 3106922 - DNA, 25 bp, Homo sapien
accgcatgccgggagtttctggagc

SEQ ID NO: 3106923 - DNA, 25 bp, Homo sapien
catgccgggagtttctggagcgtcc

SEQ ID NO: 3106924 - DNA, 25 bp, Homo sapien
gggagtttctggagcgtcccagccc

SEQ ID NO: 3106925 - DNA, 25 bp, Homo sapien
cttccgatatcccatcagctgctcc

SEQ ID NO: 3106926 - DNA, 25 bp, Homo sapien
gggcttcggccctctcttccgatat

SEQ ID NO: 3106927 - DNA, 25 bp, Homo sapien
tagcggtttgggcttcggccctctc

SEQ ID NO: 3106928 - DNA, 25 bp, Homo sapien
gcaccactagcggtttgggcttcgg

SEQ ID NO: 3106929 - DNA, 25 bp, Homo sapien
tttgatgcccacacccgaaccagca

SEQ ID NO: 3106930 - DNA, 25 bp, Homo sapien
agggctggccggacacaggaatcaa

SEQ ID NO: 3106931 - DNA, 25 bp, Homo sapien
atcaagagttcagggcaggtcaggc

SEQ ID NO: 3106932 - DNA, 25 bp, Homo sapien
attccggaatcttctgtgatgcccc

SEQ ID NO: 3106933 - DNA, 25 bp, Homo sapien
tatacggtcacgggtggcaggcggt

SEQ ID NO: 3106934 - DNA, 25 bp, Homo sapien
ccatatacggtcacgggtggcaggc

SEQ ID NO: 3106935 - DNA, 25 bp, Homo sapien
catatacggtcacgggtggcaggcg

SEQ ID NO: 3106936 - DNA, 25 bp, Homo sapien
atatacggtcacgggtggcaggcgg

SEQ ID NO: 3106937 - DNA, 25 bp, Homo sapien
tctcctccggttcccacgtgttata

SEQ ID NO: 3106938 - DNA, 25 bp, Homo sapien
ctcctccggttcccacgtgttatat

SEQ ID NO: 3106939 - DNA, 25 bp, Homo sapien
atgttctcctccggttcccacgtgt

SEQ ID NO: 3106940 - DNA, 25 bp, Homo sapien
ttgggcgaccagcctctccatttca

SEQ ID NO: 3106941 - DNA, 25 bp, Homo sapien
tctccatttcaccagatactccact

SEQ ID NO: 3106942 - DNA, 25 bp, Homo sapien
agcctctccatttcaccagatactc

SEQ ID NO: 3106943 - DNA, 25 bp, Homo sapien
atttcaccagatactccactctgcc

SEQ ID NO: 3106944 - DNA, 25 bp, Homo sapien
atccgcttcttctcgatgctctcca

SEQ ID NO: 3106945 - DNA, 25 bp, Homo sapien
tgcggatccgcttcttctcgatgct

SEQ ID NO: 3106946 - DNA, 25 bp, Homo sapien
ggatccgcttcttctcgatgctctc

SEQ ID NO: 3106947 - DNA, 25 bp, Homo sapien
cttgcggatccgcttcttctcgatg

SEQ ID NO: 3106948 - DNA, 25 bp, Homo sapien
cgaagacgtgctcgccaacagctgg

SEQ ID NO: 3106949 - DNA, 25 bp, Homo sapien
aagacgtgctcgccaacagctggca

SEQ ID NO: 3106950 - DNA, 25 bp, Homo sapien
cgcgaagacgtgctcgccaacagct

SEQ ID NO: 3106951 - DNA, 25 bp, Homo sapien
agacgtgctcgccaacagctggcag

SEQ ID NO: 3106952 - DNA, 25 bp, Homo sapien
gcggctgcagacgctgctagctccc

SEQ ID NO: 3106953 - DNA, 25 bp, Homo sapien
tacacttggtcctcttattgacggg

SEQ ID NO: 3106954 - DNA, 25 bp, Homo sapien
tcaatggctccgaatttacacttgg

SEQ ID NO: 3106955 - DNA, 25 bp, Homo sapien
gcgcccaagaacctcggcagaaagg

SEQ ID NO: 3106956 - DNA, 25 bp, Homo sapien
gggcgagatgtcctgtttctagcag

SEQ ID NO: 3106957 - DNA, 25 bp, Homo sapien
aagacggtctggtgttgaacgcaca

SEQ ID NO: 3106958 - DNA, 25 bp, Homo sapien
tgaacgcacacgtggactccatttc

SEQ ID NO: 3106959 - DNA, 25 bp, Homo sapien
gtgttcgcccaggaatcccggagaa

SEQ ID NO: 3106960 - DNA, 25 bp, Homo sapien
tcccggagaagctcgaagacggtct

SEQ ID NO: 3106961 - DNA, 25 bp, Homo sapien
gtcggactccgcttcgctcactacg

SEQ ID NO: 3106962 - DNA, 25 bp, Homo sapien
gtgccccgacgacgagtttgcgcag

SEQ ID NO: 3106963 - DNA, 25 bp, Homo sapien
acgctcaggacttcggggccacaca

SEQ ID NO: 3106964 - DNA, 25 bp, Homo sapien
tctgtttgcaatgggtgtttccgcg

SEQ ID NO: 3106965 - DNA, 25 bp, Homo sapien
ttagaaaaacttcgcgctggcgttg

SEQ ID NO: 3106966 - DNA, 25 bp, Homo sapien
gttgatcatatcgtacttgtagcgg

SEQ ID NO: 3106967 - DNA, 25 bp, Homo sapien
gatcatatcgtacttgtagcggcag

SEQ ID NO: 3106968 - DNA, 25 bp, Homo sapien
tcgcgctggcgttgatcatatcgta

SEQ ID NO: 3106969 - DNA, 25 bp, Homo sapien
tgttcgcctggctgataaagccgcc

SEQ ID NO: 3106970 - DNA, 25 bp, Homo sapien
tcccctgggttgctaattgaggaca

SEQ ID NO: 3106971 - DNA, 25 bp, Homo sapien
gatattacagggcaaatgttcccag

SEQ ID NO: 3106972 - DNA, 25 bp, Homo sapien
agccctaagagataccccaggtcgg

SEQ ID NO: 3106973 - DNA, 25 bp, Homo sapien
cgagttaattccgtggggctctgaa

SEQ ID NO: 3106974 - DNA, 25 bp, Homo sapien
ggctctgaaccagctccagtactat

SEQ ID NO: 3106975 - DNA, 25 bp, Homo sapien
gatttctcccggatgtccatctggc

SEQ ID NO: 3106976 - DNA, 25 bp, Homo sapien
ctttctctcgtggttttattccgag

SEQ ID NO: 3106977 - DNA, 25 bp, Homo sapien
tcttggttacccacgggcaaagata

SEQ ID NO: 3106978 - DNA, 25 bp, Homo sapien
ccacgggcaaagatacgttctcatt

SEQ ID NO: 3106979 - DNA, 25 bp, Homo sapien
aagatacgttctcatttgcactaag

SEQ ID NO: 3106980 - DNA, 25 bp, Homo sapien
tcatttgcactaagcctgacttctg

SEQ ID NO: 3106981 - DNA, 25 bp, Homo sapien
tctgctggtgcatgcatggcctggt

SEQ ID NO: 3106982 - DNA, 25 bp, Homo sapien
tggtcccttcgtcgggggtcatgca

SEQ ID NO: 3106983 - DNA, 25 bp, Homo sapien
atgcatggcctggtcccttcgtcgg

SEQ ID NO: 3106984 - DNA, 25 bp, Homo sapien
ttctgctggtgcatgcatggcctgg

SEQ ID NO: 3106985 - DNA, 25 bp, Homo sapien
aggtcccatgtgacaggccctgtcc

SEQ ID NO: 3106986 - DNA, 25 bp, Homo sapien
gcaggtcccatgtgacaggccctgt

SEQ ID NO: 3106987 - DNA, 25 bp, Homo sapien
ggtcccatgtgacaggccctgtccc

SEQ ID NO: 3106988 - DNA, 25 bp, Homo sapien
ggtctctgctggctttccgtggctg

SEQ ID NO: 3106989 - DNA, 25 bp, Homo sapien
tgctcggtgagatgtgaagggccgg

SEQ ID NO: 3106990 - DNA, 25 bp, Homo sapien
ctcggtgccgtcagctgctcggtga

SEQ ID NO: 3106991 - DNA, 25 bp, Homo sapien
gacgggtctgcgcatgtgcttctcg

SEQ ID NO: 3106992 - DNA, 25 bp, Homo sapien
cagaggcctgggattggaatgcgaa

SEQ ID NO: 3106993 - DNA, 25 bp, Homo sapien
cttggacttcctgttgctgcttggt

SEQ ID NO: 3106994 - DNA, 25 bp, Homo sapien
aatgtgctggagctatagattgggt

SEQ ID NO: 3106995 - DNA, 25 bp, Homo sapien
ctggagctatagattgggtcactct

SEQ ID NO: 3106996 - DNA, 25 bp, Homo sapien
cccttggacttcctgttgctgcttg

SEQ ID NO: 3106997 - DNA, 25 bp, Homo sapien
acgtctcctcggcaggcttggtggt

SEQ ID NO: 3106998 - DNA, 25 bp, Homo sapien
tgcagaggatcccaacgtctcctcg

SEQ ID NO: 3106999 - DNA, 25 bp, Homo sapien
gaggatcccaacgtctcctcggcag

SEQ ID NO: 3107000 - DNA, 25 bp, Homo sapien
ggtggacgtgctgggccatgttcca

SEQ ID NO: 3107001 - DNA, 25 bp, Homo sapien
aattgagtgagccaattcccttcca

SEQ ID NO: 3107002 - DNA, 25 bp, Homo sapien
gagtgagccaattcccttccaaact

SEQ ID NO: 3107003 - DNA, 25 bp, Homo sapien
tgctcagcgtgtgtccagggacagg

SEQ ID NO: 3107004 - DNA, 25 bp, Homo sapien
ccagggacaggttcctttcatgccc

SEQ ID NO: 3107005 - DNA, 25 bp, Homo sapien
gcatccccatcagcaggactcagct

SEQ ID NO: 3107006 - DNA, 25 bp, Homo sapien
gctgagcagacagagacatccgcct

SEQ ID NO: 3107007 - DNA, 25 bp, Homo sapien
caggactcagctcccaatttagaga

SEQ ID NO: 3107008 - DNA, 25 bp, Homo sapien
agacagagacatccgcctttgcatc

SEQ ID NO: 3107009 - DNA, 25 bp, Homo sapien
gcttctgtcctaacagcagagctgg

SEQ ID NO: 3107010 - DNA, 25 bp, Homo sapien
caccatacgtttattgagccagctc

SEQ ID NO: 3107011 - DNA, 25 bp, Homo sapien
gctcctttgcaaagctccgggtcac

SEQ ID NO: 3107012 - DNA, 25 bp, Homo sapien
ggtaggactccctgtctcgtgcgct

SEQ ID NO: 3107013 - DNA, 25 bp, Homo sapien
gccagccacgcccgctgtggcctca

SEQ ID NO: 3107014 - DNA, 25 bp, Homo sapien
tgccagccacgcccgctgtggcctc

SEQ ID NO: 3107015 - DNA, 25 bp, Homo sapien
ggggctgacccctggccgctggatg

SEQ ID NO: 3107016 - DNA, 25 bp, Homo sapien
tggccgctggatgccgctgcagctg

SEQ ID NO: 3107017 - DNA, 25 bp, Homo sapien
ggccgctggatgccgctgcagctga

SEQ ID NO: 3107018 - DNA, 25 bp, Homo sapien
ccccatatgaaacggctgtcggtga

SEQ ID NO: 3107019 - DNA, 25 bp, Homo sapien
tagtgtgttaccaatagaccccagc

SEQ ID NO: 3107020 - DNA, 25 bp, Homo sapien
gacaccagggttgcatcaggaactc

SEQ ID NO: 3107021 - DNA, 25 bp, Homo sapien
taaggctgcaaagtaccgggacagc

SEQ ID NO: 3107022 - DNA, 25 bp, Homo sapien
cacctcctcggtggaaggcacagta

SEQ ID NO: 3107023 - DNA, 25 bp, Homo sapien
gcacagtagtgaccctggcatttcg

SEQ ID NO: 3107024 - DNA, 25 bp, Homo sapien
ttctagtttggttttgtccaagctg

SEQ ID NO: 3107025 - DNA, 25 bp, Homo sapien
tccaagctggcttgtgaggtgcagg

SEQ ID NO: 3107026 - DNA, 25 bp, Homo sapien
gacagatgaaggtggaagctcgcac

SEQ ID NO: 3107027 - DNA, 25 bp, Homo sapien
tgtccctcgcaataacgcctcaggt

SEQ ID NO: 3107028 - DNA, 25 bp, Homo sapien
cagcaagctagtcaccgagtgggca

SEQ ID NO: 3107029 - DNA, 25 bp, Homo sapien
tcaggtatgttacggaccactcagc

SEQ ID NO: 3107030 - DNA, 25 bp, Homo sapien
agctgctctccggcactggggcacc

SEQ ID NO: 3107031 - DNA, 25 bp, Homo sapien
ccccagagccagccgggaagtcctt

SEQ ID NO: 3107032 - DNA, 25 bp, Homo sapien
gctgctctccggcactggggcacct

SEQ ID NO: 3107033 - DNA, 25 bp, Homo sapien
gagctgctctccggcactggggcac

SEQ ID NO: 3107034 - DNA, 25 bp, Homo sapien
ctttgcctttacacacctgggcttc

SEQ ID NO: 3107035 - DNA, 25 bp, Homo sapien
ccctttgcctttacacacctgggct

SEQ ID NO: 3107036 - DNA, 25 bp, Homo sapien
ctccagcaaggacttcccggctggc

SEQ ID NO: 3107037 - DNA, 25 bp, Homo sapien
ttgcctttacacacctgggcttctg

SEQ ID NO: 3107038 - DNA, 25 bp, Homo sapien
gagttgagctctcagaacccttggc

SEQ ID NO: 3107039 - DNA, 25 bp, Homo sapien
tggcctttccgcagggcctccgagg

SEQ ID NO: 3107040 - DNA, 25 bp, Homo sapien
gtctggtggatcctgtgcgtgctct

SEQ ID NO: 3107041 - DNA, 25 bp, Homo sapien
cctccgagggcgtctggtggatcct

SEQ ID NO: 3107042 - DNA, 25 bp, Homo sapien
ttgcccaacgcaaatctcatcctcg

SEQ ID NO: 3107043 - DNA, 25 bp, Homo sapien
gctgacatcactggcgtttatgcac

SEQ ID NO: 3107044 - DNA, 25 bp, Homo sapien
cgtttatgcactgctccttgcccaa

SEQ ID NO: 3107045 - DNA, 25 bp, Homo sapien
tcctcgttctctctgaatcaattca

SEQ ID NO: 3107046 - DNA, 25 bp, Homo sapien
cttctccgagctgggatcatgctgg

SEQ ID NO: 3107047 - DNA, 25 bp, Homo sapien
ctccgagctgggatcatgctgggaa

SEQ ID NO: 3107048 - DNA, 25 bp, Homo sapien
aagactgaatgggacgcagccggtg

SEQ ID NO: 3107049 - DNA, 25 bp, Homo sapien
tgaatgggacgcagccggtgaaaac

SEQ ID NO: 3107050 - DNA, 25 bp, Homo sapien
aggtcctggacgctggctccgcgca

SEQ ID NO: 3107051 - DNA, 25 bp, Homo sapien
gggccacatagctatgccgcccagg

SEQ ID NO: 3107052 - DNA, 25 bp, Homo sapien
gatgtgactggctgccgctacgtcg

SEQ ID NO: 3107053 - DNA, 25 bp, Homo sapien
gcctccggaggacacgatgtgactg

SEQ ID NO: 3107054 - DNA, 25 bp, Homo sapien
gacgccgccgagatgctctgagatg

SEQ ID NO: 3107055 - DNA, 25 bp, Homo sapien
caaggccccgagatagctaagctag

SEQ ID NO: 3107056 - DNA, 25 bp, Homo sapien
tccaggtgcgttatgcaacaggacg

SEQ ID NO: 3107057 - DNA, 25 bp, Homo sapien
taagaagggaatctagcaatgccgc

SEQ ID NO: 3107058 - DNA, 25 bp, Homo sapien
tgaatttcagactccgggtccccag

SEQ ID NO: 3107059 - DNA, 25 bp, Homo sapien
tcagagacactgggaccgctttggg

SEQ ID NO: 3107060 - DNA, 25 bp, Homo sapien
gagaggatcggtgcagaggctcaga

SEQ ID NO: 3107061 - DNA, 25 bp, Homo sapien
gctgaatttcagactccgggtcccc

SEQ ID NO: 3107062 - DNA, 25 bp, Homo sapien
ggtgccacccacctgagatgtggtc

SEQ ID NO: 3107063 - DNA, 25 bp, Homo sapien
tgccacccacctgagatgtggtcat

SEQ ID NO: 3107064 - DNA, 25 bp, Homo sapien
tggtgggagggtgacccaggtgcca

SEQ ID NO: 3107065 - DNA, 25 bp, Homo sapien
ccaggtgccacccacctgagatgtg

SEQ ID NO: 3107066 - DNA, 25 bp, Homo sapien
ggtacatatgtgtctgccccgggaa

SEQ ID NO: 3107067 - DNA, 25 bp, Homo sapien
aataaggtaagggacacgtgctcgc

SEQ ID NO: 3107068 - DNA, 25 bp, Homo sapien
tgtcccgacgacgataaagagccag

SEQ ID NO: 3107069 - DNA, 25 bp, Homo sapien
tgttgcagagtccacggtaagagcc

SEQ ID NO: 3107070 - DNA, 25 bp, Homo sapien
ggaatccatgagagccggaagcatc

SEQ ID NO: 3107071 - DNA, 25 bp, Homo sapien
tggaatccatgagagccggaagcat

SEQ ID NO: 3107072 - DNA, 25 bp, Homo sapien
tgtggaatccatgagagccggaagc

SEQ ID NO: 3107073 - DNA, 25 bp, Homo sapien
gctgtggaatccatgagagccggaa

SEQ ID NO: 3107074 - DNA, 25 bp, Homo sapien
tgaaatgctaccttcctacccggaa

SEQ ID NO: 3107075 - DNA, 25 bp, Homo sapien
tcacgatgcacacggctgatggctg

SEQ ID NO: 3107076 - DNA, 25 bp, Homo sapien
ggtgtgctgactccgaaccaaggga

SEQ ID NO: 3107077 - DNA, 25 bp, Homo sapien
ggttccctctgactggagacaggac

SEQ ID NO: 3107078 - DNA, 25 bp, Homo sapien
caaacacagcggttcaaaggcacga

SEQ ID NO: 3107079 - DNA, 25 bp, Homo sapien
ttaagtatgcgcacacacgtacgcc

SEQ ID NO: 3107080 - DNA, 25 bp, Homo sapien
ttggaagtacctgctggacgacctg

SEQ ID NO: 3107081 - DNA, 25 bp, Homo sapien
tataactggtttctagcggagggtc

SEQ ID NO: 3107082 - DNA, 25 bp, Homo sapien
ggaactggtacagcaaactcctcgc

SEQ ID NO: 3107083 - DNA, 25 bp, Homo sapien
tcctgcggcgtctttgggcccttct

SEQ ID NO: 3107084 - DNA, 25 bp, Homo sapien
atggtggccggtgcactccaccgcg

SEQ ID NO: 3107085 - DNA, 25 bp, Homo sapien
gcttacacagatcgtgcaggctgca

SEQ ID NO: 3107086 - DNA, 25 bp, Homo sapien
cgagctccccgttcatgtgcatggc

SEQ ID NO: 3107087 - DNA, 25 bp, Homo sapien
aggagcatctggtccgtggccagct

SEQ ID NO: 3107088 - DNA, 25 bp, Homo sapien
cgtcatccccgtagatggccacgat

SEQ ID NO: 3107089 - DNA, 25 bp, Homo sapien
caggtttccgaagtgcaggagcatc

SEQ ID NO: 3107090 - DNA, 25 bp, Homo sapien
tgccgtgcttcccttcgttaatgca

SEQ ID NO: 3107091 - DNA, 25 bp, Homo sapien
tgggaatgaagcctctcagaccgtc

SEQ ID NO: 3107092 - DNA, 25 bp, Homo sapien
gttaatgcagatcgtccaccctgca

SEQ ID NO: 3107093 - DNA, 25 bp, Homo sapien
gcaatgaggcacgattttttttaat

SEQ ID NO: 3107094 - DNA, 25 bp, Homo sapien
tcagactcgctttcatcagacatca

SEQ ID NO: 3107095 - DNA, 25 bp, Homo sapien
ggcgagccgatgaccgcatgcaaag

SEQ ID NO: 3107096 - DNA, 25 bp, Homo sapien
tgtggtaccggcactcggtggcttc

SEQ ID NO: 3107097 - DNA, 25 bp, Homo sapien
tgcaaaggcggcgtgtggtaccggc

SEQ ID NO: 3107098 - DNA, 25 bp, Homo sapien
gacgctgacgcaaatgtcttccagc

SEQ ID NO: 3107099 - DNA, 25 bp, Homo sapien
tgaggacaggagacgctgacgcaaa

SEQ ID NO: 3107100 - DNA, 25 bp, Homo sapien
caggagacgctgacgcaaatgtctt

SEQ ID NO: 3107101 - DNA, 25 bp, Homo sapien
ctgacgcaaatgtcttccagcagat

SEQ ID NO: 3107102 - DNA, 25 bp, Homo sapien
gagctgccgtggtggatagagccag

SEQ ID NO: 3107103 - DNA, 25 bp, Homo sapien
ccgtggtggatagagccagctcctg

SEQ ID NO: 3107104 - DNA, 25 bp, Homo sapien
gctcctgcaaaagggtccagccctc

SEQ ID NO: 3107105 - DNA, 25 bp, Homo sapien
ctgccgtggtggatagagccagctc

SEQ ID NO: 3107106 - DNA, 25 bp, Homo sapien
tcgcccagcgagaccaggtgctggt

SEQ ID NO: 3107107 - DNA, 25 bp, Homo sapien
cgcttgaagcacagaaggagccagc

SEQ ID NO: 3107108 - DNA, 25 bp, Homo sapien
agccagcggtggcagaagagcatct

SEQ ID NO: 3107109 - DNA, 25 bp, Homo sapien
tggtagaagcgcacgtgcgtcagcc

SEQ ID NO: 3107110 - DNA, 25 bp, Homo sapien
tgtctgactcatccaggacctcggc

SEQ ID NO: 3107111 - DNA, 25 bp, Homo sapien
ccaggtccgacatcccttgggaata

SEQ ID NO: 3107112 - DNA, 25 bp, Homo sapien
gaagatcgtgttctgcatcaaaccc

SEQ ID NO: 3107113 - DNA, 25 bp, Homo sapien
atagccgacggcagggttgtacacg

SEQ ID NO: 3107114 - DNA, 25 bp, Homo sapien
tcatgctctccacattgggattgtc

SEQ ID NO: 3107115 - DNA, 25 bp, Homo sapien
gaactggttgttccgatctgtccgg

SEQ ID NO: 3107116 - DNA, 25 bp, Homo sapien
cggaccacgtctttgtccacagtga

SEQ ID NO: 3107117 - DNA, 25 bp, Homo sapien
tgcacattacgccagaacgctctgt

SEQ ID NO: 3107118 - DNA, 25 bp, Homo sapien
tcctccgacgtggactcgtggctgt

SEQ ID NO: 3107119 - DNA, 25 bp, Homo sapien
cgtggctgtaatagcgcagcaggaa

SEQ ID NO: 3107120 - DNA, 25 bp, Homo sapien
tcagagtactcctttcgcttctgca

SEQ ID NO: 3107121 - DNA, 25 bp, Homo sapien
ctgctggatctcagagtactccttt

SEQ ID NO: 3107122 - DNA, 25 bp, Homo sapien
gacacatcaataccgccaaagaaaa

SEQ ID NO: 3107123 - DNA, 25 bp, Homo sapien
tgacacatcaataccgccaaagaaa

SEQ ID NO: 3107124 - DNA, 25 bp, Homo sapien
cacatcaataccgccaaagaaaatg

SEQ ID NO: 3107125 - DNA, 25 bp, Homo sapien
catcaataccgccaaagaaaatggc

SEQ ID NO: 3107126 - DNA, 25 bp, Homo sapien
cctggcccagctcattcaggtggtt

SEQ ID NO: 3107127 - DNA, 25 bp, Homo sapien
gcctcttgtacatgctctcctcggg

SEQ ID NO: 3107128 - DNA, 25 bp, Homo sapien
actgcatgcatgtcttatcgggggc

SEQ ID NO: 3107129 - DNA, 25 bp, Homo sapien
ggtggttgagccaggcggagacgcc

SEQ ID NO: 3107130 - DNA, 25 bp, Homo sapien
aaatcggtttccctctgcggctctc

SEQ ID NO: 3107131 - DNA, 25 bp, Homo sapien
taaaatcggtttccctctgcggctc

SEQ ID NO: 3107132 - DNA, 25 bp, Homo sapien
cggtttccctctgcggctctctcct

SEQ ID NO: 3107133 - DNA, 25 bp, Homo sapien
aatcggtttccctctgcggctctct

SEQ ID NO: 3107134 - DNA, 25 bp, Homo sapien
acagcttgtccaggccgccgtggtg

SEQ ID NO: 3107135 - DNA, 25 bp, Homo sapien
tggaagtggaaaaccttgtactggc

SEQ ID NO: 3107136 - DNA, 25 bp, Homo sapien
tccactgctggaacacgtcagacag

SEQ ID NO: 3107137 - DNA, 25 bp, Homo sapien
tgtactggctctctcggctggcaac

SEQ ID NO: 3107138 - DNA, 25 bp, Homo sapien
taagcccgggcctctcattggtgat

SEQ ID NO: 3107139 - DNA, 25 bp, Homo sapien
ccttcgttgcgtgtgggtggaactc

SEQ ID NO: 3107140 - DNA, 25 bp, Homo sapien
agtaaacatccgtcagtgctgtcag

SEQ ID NO: 3107141 - DNA, 25 bp, Homo sapien
cccggctgcccttagatgaaaggct

SEQ ID NO: 3107142 - DNA, 25 bp, Homo sapien
cagcctgagaactgtcagggagctg

SEQ ID NO: 3107143 - DNA, 25 bp, Homo sapien
gccgtgcactgcaccggctgcaaag

SEQ ID NO: 3107144 - DNA, 25 bp, Homo sapien
tcactgcccacaagatcagcgaggg

SEQ ID NO: 3107145 - DNA, 25 bp, Homo sapien
cagacgcttgggaagactccatcca

SEQ ID NO: 3107146 - DNA, 25 bp, Homo sapien
aggccgttgctgtccgggaaccgca

SEQ ID NO: 3107147 - DNA, 25 bp, Homo sapien
gaagaaaaggcggagggagcgcatg

SEQ ID NO: 3107148 - DNA, 25 bp, Homo sapien
ggaacacgccgcaaatctgctccag

SEQ ID NO: 3107149 - DNA, 25 bp, Homo sapien
acccgctgcggctcgtcccagcgtg

SEQ ID NO: 3107150 - DNA, 25 bp, Homo sapien
tggtggaacaggttatgtgatgatc

SEQ ID NO: 3107151 - DNA, 25 bp, Homo sapien
ggttatgtgatgatcgccacacttc

SEQ ID NO: 3107152 - DNA, 25 bp, Homo sapien
gaacaggttatgtgatgatcgccac

SEQ ID NO: 3107153 - DNA, 25 bp, Homo sapien
tgtgatgatcgccacacttctccct

SEQ ID NO: 3107154 - DNA, 25 bp, Homo sapien
gacgggcccagaagaccgagggctc

SEQ ID NO: 3107155 - DNA, 25 bp, Homo sapien
gcccagaagaccgagggctcctgac

SEQ ID NO: 3107156 - DNA, 25 bp, Homo sapien
ccagaagaccgagggctcctgacat

SEQ ID NO: 3107157 - DNA, 25 bp, Homo sapien
cgcggacgggcccagaagaccgagg

SEQ ID NO: 3107158 - DNA, 25 bp, Homo sapien
tgattctaaaccaaagcgccctcgt

SEQ ID NO: 3107159 - DNA, 25 bp, Homo sapien
cagagggatcaagggctcaggcatc

SEQ ID NO: 3107160 - DNA, 25 bp, Homo sapien
tataggagcttaacgtgggcaaacc

SEQ ID NO: 3107161 - DNA, 25 bp, Homo sapien
gattctgcccaacctagggaaagga

SEQ ID NO: 3107162 - DNA, 25 bp, Homo sapien
ccaggttattcggtgccataaaaag

SEQ ID NO: 3107163 - DNA, 25 bp, Homo sapien
ggttcctgtcgcaggtccaggttat

SEQ ID NO: 3107164 - DNA, 25 bp, Homo sapien
cataaaaaggcacacgtcgaccttc

SEQ ID NO: 3107165 - DNA, 25 bp, Homo sapien
gtcgaccttcactgtttcctgcaaa

SEQ ID NO: 3107166 - DNA, 25 bp, Homo sapien
ttcaatgcccacaacaaactgccaa

SEQ ID NO: 3107167 - DNA, 25 bp, Homo sapien
gcagccacaacttcaatgcccacaa

SEQ ID NO: 3107168 - DNA, 25 bp, Homo sapien
aatgcccacaacaaactgccaatca

SEQ ID NO: 3107169 - DNA, 25 bp, Homo sapien
gcccacaacaaactgccaatcaagg

SEQ ID NO: 3107170 - DNA, 25 bp, Homo sapien
tcatgtccatcagtccgtgagcgcg

SEQ ID NO: 3107171 - DNA, 25 bp, Homo sapien
taatacccgtgagacctgtggactg

SEQ ID NO: 3107172 - DNA, 25 bp, Homo sapien
catgcagggttccagttacgtaaaa

SEQ ID NO: 3107173 - DNA, 25 bp, Homo sapien
aagctacatgtatcccagtggcaca

SEQ ID NO: 3107174 - DNA, 25 bp, Homo sapien
gtacagcccatgaacgaagactttt

SEQ ID NO: 3107175 - DNA, 25 bp, Homo sapien
tttaaatcacagaggtggctcacgt

SEQ ID NO: 3107176 - DNA, 25 bp, Homo sapien
gagtacagcgagtttcccctcaatg

SEQ ID NO: 3107177 - DNA, 25 bp, Homo sapien
cacgttacatttctattgggcactg

SEQ ID NO: 3107178 - DNA, 25 bp, Homo sapien
cataaacaatattcccttgcaggga

SEQ ID NO: 3107179 - DNA, 25 bp, Homo sapien
caccgcgcccgtatgaatgaagtgg

SEQ ID NO: 3107180 - DNA, 25 bp, Homo sapien
caccacagggtatcctgactgcttc

SEQ ID NO: 3107181 - DNA, 25 bp, Homo sapien
gcttcttccacgtagcaatgtacat

SEQ ID NO: 3107182 - DNA, 25 bp, Homo sapien
tgaccacactgatgtcgggagctgt

SEQ ID NO: 3107183 - DNA, 25 bp, Homo sapien
tgaaggcttgagctctgcgtcaccc

SEQ ID NO: 3107184 - DNA, 25 bp, Homo sapien
catagagcatatgccgcggtgaaca

SEQ ID NO: 3107185 - DNA, 25 bp, Homo sapien
gattcaggttggcacccatagagca

SEQ ID NO: 3107186 - DNA, 25 bp, Homo sapien
ggcatcccagtcgaattctttggca

SEQ ID NO: 3107187 - DNA, 25 bp, Homo sapien
ggtggcatcccagtcgaattctttg

SEQ ID NO: 3107188 - DNA, 25 bp, Homo sapien
gtggcatcccagtcgaattctttgg

SEQ ID NO: 3107189 - DNA, 25 bp, Homo sapien
atcccagtcgaattctttggcagcc

SEQ ID NO: 3107190 - DNA, 25 bp, Homo sapien
ctgcccttcccgtaacagcttccct

SEQ ID NO: 3107191 - DNA, 25 bp, Homo sapien
tggcatcggccactctctgggtgca

SEQ ID NO: 3107192 - DNA, 25 bp, Homo sapien
ccactctctgggtgcaggcggagca

SEQ ID NO: 3107193 - DNA, 25 bp, Homo sapien
cctcagacccctggcatcggccact

SEQ ID NO: 3107194 - DNA, 25 bp, Homo sapien
ggttcctggagcatcctcagggggc

SEQ ID NO: 3107195 - DNA, 25 bp, Homo sapien
gtgggcgggggttcctggagcatcc

SEQ ID NO: 3107196 - DNA, 25 bp, Homo sapien
ggcgggggttcctggagcatcctca

SEQ ID NO: 3107197 - DNA, 25 bp, Homo sapien
gcgctctcggggtatccccgggcgc

SEQ ID NO: 3107198 - DNA, 25 bp, Homo sapien
tctgccgttggattcttatgttctg

SEQ ID NO: 3107199 - DNA, 25 bp, Homo sapien
gaccttagtcggtccacctcctctg

SEQ ID NO: 3107200 - DNA, 25 bp, Homo sapien
cgttggattcttatgttctgctcct

SEQ ID NO: 3107201 - DNA, 25 bp, Homo sapien
acctcctctgccgttggattcttat

SEQ ID NO: 3107202 - DNA, 25 bp, Homo sapien
cattggcgacagcagctctccgtat

SEQ ID NO: 3107203 - DNA, 25 bp, Homo sapien
agcctcgaatactcacttggtcaag

SEQ ID NO: 3107204 - DNA, 25 bp, Homo sapien
tggacggtagcttccagcacagaaa

SEQ ID NO: 3107205 - DNA, 25 bp, Homo sapien
ccaactggccttttaggctggacgg

SEQ ID NO: 3107206 - DNA, 25 bp, Homo sapien
gatactgccatttctaacccctaag

SEQ ID NO: 3107207 - DNA, 25 bp, Homo sapien
tagtttaattggtctgggtgcagcc

SEQ ID NO: 3107208 - DNA, 25 bp, Homo sapien
gatctccagtcccatcatacgaagg

SEQ ID NO: 3107209 - DNA, 25 bp, Homo sapien
taattattaatagacgccccaccgc

SEQ ID NO: 3107210 - DNA, 25 bp, Homo sapien
gagcatgcggtctggaacactctgg

SEQ ID NO: 3107211 - DNA, 25 bp, Homo sapien
tctcgggtgtgatgtagcgcagggc

SEQ ID NO: 3107212 - DNA, 25 bp, Homo sapien
tgaccgtcgacaagatcccggaggg

SEQ ID NO: 3107213 - DNA, 25 bp, Homo sapien
tcctcggtgacatcctgcggactga

SEQ ID NO: 3107214 - DNA, 25 bp, Homo sapien
ccagcctgccatgagccagacttaa

SEQ ID NO: 3107215 - DNA, 25 bp, Homo sapien
aaataacctgggctgtgcgaccctg

SEQ ID NO: 3107216 - DNA, 25 bp, Homo sapien
gctgctgttagttacacgttctgga

SEQ ID NO: 3107217 - DNA, 25 bp, Homo sapien
gaggaaccaaatgcactctcacgtg

SEQ ID NO: 3107218 - DNA, 25 bp, Homo sapien
cgggtgcacgcagacattgttcttg

SEQ ID NO: 3107219 - DNA, 25 bp, Homo sapien
cagacattgttcttggagtagatga

SEQ ID NO: 3107220 - DNA, 25 bp, Homo sapien
cctccggcgggtgcacgcagacatt

SEQ ID NO: 3107221 - DNA, 25 bp, Homo sapien
tcaggaggtccgaggctttggagga

SEQ ID NO: 3107222 - DNA, 25 bp, Homo sapien
tgcgaaggaggcggcccagagacat

SEQ ID NO: 3107223 - DNA, 25 bp, Homo sapien
ctgcgaaggaggcggcccagagaca

SEQ ID NO: 3107224 - DNA, 25 bp, Homo sapien
ccgggcagggctcgtcaagacctgc

SEQ ID NO: 3107225 - DNA, 25 bp, Homo sapien
tgccgggcaagtgtttccatcctcc

SEQ ID NO: 3107226 - DNA, 25 bp, Homo sapien
cctccgcatgcgtcggcccgggcag

SEQ ID NO: 3107227 - DNA, 25 bp, Homo sapien
tccatcctccgcatgcgtcggcccg

SEQ ID NO: 3107228 - DNA, 25 bp, Homo sapien
gatatggaatcttgtaggcagccag

SEQ ID NO: 3107229 - DNA, 25 bp, Homo sapien
ctggctttgcgggtcaaagggcgat

SEQ ID NO: 3107230 - DNA, 25 bp, Homo sapien
caggcttggggaaggtagctccttc

SEQ ID NO: 3107231 - DNA, 25 bp, Homo sapien
aggatcaggacccagtccccgggca

SEQ ID NO: 3107232 - DNA, 25 bp, Homo sapien
tattcaccaattttactgttagcgt

SEQ ID NO: 3107233 - DNA, 25 bp, Homo sapien
tttgcgcccaccctctggcaatatg

SEQ ID NO: 3107234 - DNA, 25 bp, Homo sapien
taaccacgctcaggatgcaaacaac

SEQ ID NO: 3107235 - DNA, 25 bp, Homo sapien
gaaaaagtgttctgatcaatcagta

SEQ ID NO: 3107236 - DNA, 25 bp, Homo sapien
caggatttcaggattcagcggcttc

SEQ ID NO: 3107237 - DNA, 25 bp, Homo sapien
ccagcttccgagtgtgggaatcaca

SEQ ID NO: 3107238 - DNA, 25 bp, Homo sapien
tttgtggccaatatacgacaccagc

SEQ ID NO: 3107239 - DNA, 25 bp, Homo sapien
gatcttcaggatcaagtcgcagagg

SEQ ID NO: 3107240 - DNA, 25 bp, Homo sapien
gtcccgctgcgggggccggattcgc

SEQ ID NO: 3107241 - DNA, 25 bp, Homo sapien
ccgagagccgccaccgtcgcctccg

SEQ ID NO: 3107242 - DNA, 25 bp, Homo sapien
cgctgcgggggccggattcgcgccg

SEQ ID NO: 3107243 - DNA, 25 bp, Homo sapien
tgccgccgccagtgaggcgcggcgg

SEQ ID NO: 3107244 - DNA, 25 bp, Homo sapien
ccttctgtgcaagggatgccactcg

SEQ ID NO: 3107245 - DNA, 25 bp, Homo sapien
agttcgtctcgcaggagccaggtgc

SEQ ID NO: 3107246 - DNA, 25 bp, Homo sapien
ttgccatagacaggatccacagagg

SEQ ID NO: 3107247 - DNA, 25 bp, Homo sapien
gcgacatcgagtcctcagacctgga

SEQ ID NO: 3107248 - DNA, 25 bp, Homo sapien
tggaagattccggaaactccccaca

SEQ ID NO: 3107249 - DNA, 25 bp, Homo sapien
taaagcggccccacatgtgaggagt

SEQ ID NO: 3107250 - DNA, 25 bp, Homo sapien
ggctggctgcaaacgctgacagcat

SEQ ID NO: 3107251 - DNA, 25 bp, Homo sapien
tgtgttatcaaagctccagggcatg

SEQ ID NO: 3107252 - DNA, 25 bp, Homo sapien
gatgaggaggcctgctagcatagca

SEQ ID NO: 3107253 - DNA, 25 bp, Homo sapien
tgttttggaggctccagcaacgcaa

SEQ ID NO: 3107254 - DNA, 25 bp, Homo sapien
aatccaacaaggaatgatgagcctg

SEQ ID NO: 3107255 - DNA, 25 bp, Homo sapien
tagcagttaccccagactgttttgg

SEQ ID NO: 3107256 - DNA, 25 bp, Homo sapien
tgcaagagctctacaactaagagga

SEQ ID NO: 3107257 - DNA, 25 bp, Homo sapien
caactaagaggaagttttcgtctct

SEQ ID NO: 3107258 - DNA, 25 bp, Homo sapien
cctccgcagaggcaacgtagattct

SEQ ID NO: 3107259 - DNA, 25 bp, Homo sapien
tgttttcttcgagacagcgagacgc

SEQ ID NO: 3107260 - DNA, 25 bp, Homo sapien
caacaacactttattctcaacaaat

SEQ ID NO: 3107261 - DNA, 25 bp, Homo sapien
caacactttattctcaacaaattga

SEQ ID NO: 3107262 - DNA, 25 bp, Homo sapien
atttagaagactaaatgcacaaaaa

SEQ ID NO: 3107263 - DNA, 25 bp, Homo sapien
ttagaagactaaatgcacaaaaata

SEQ ID NO: 3107264 - DNA, 25 bp, Homo sapien
tacggacgtgcaccaacacatcctg

SEQ ID NO: 3107265 - DNA, 25 bp, Homo sapien
acggacgtgcaccaacacatcctgt

SEQ ID NO: 3107266 - DNA, 25 bp, Homo sapien
ttactttggaatttagctactgcaa

SEQ ID NO: 3107267 - DNA, 25 bp, Homo sapien
caagctatattaatgcacaggttgc

SEQ ID NO: 3107268 - DNA, 25 bp, Homo sapien
tgcccagaacggctgttccctgctt

SEQ ID NO: 3107269 - DNA, 25 bp, Homo sapien
gggtgcccagaacggctgttccctg

SEQ ID NO: 3107270 - DNA, 25 bp, Homo sapien
gaagggtgcccagaacggctgttcc

SEQ ID NO: 3107271 - DNA, 25 bp, Homo sapien
gcaggaagggtgcccagaacggctg

SEQ ID NO: 3107272 - DNA, 25 bp, Homo sapien
tctagtcgcttcatgaccgccaagg

SEQ ID NO: 3107273 - DNA, 25 bp, Homo sapien
cagtgagtgaggtaaaagcagtccc

SEQ ID NO: 3107274 - DNA, 25 bp, Homo sapien
cagcaagttccttagcctgcaggga

SEQ ID NO: 3107275 - DNA, 25 bp, Homo sapien
tagatactgacaggtggacagcccg

SEQ ID NO: 3107276 - DNA, 25 bp, Homo sapien
catttaacagcgtgtccctagagcg

SEQ ID NO: 3107277 - DNA, 25 bp, Homo sapien
gaatgctaacgctcaccaggatgct

SEQ ID NO: 3107278 - DNA, 25 bp, Homo sapien
tatattgcctatcaagcccggaatg

SEQ ID NO: 3107279 - DNA, 25 bp, Homo sapien
tgctgctgtagataaccggatccgc

SEQ ID NO: 3107280 - DNA, 25 bp, Homo sapien
gttcttgagccaaacgagttactgc

SEQ ID NO: 3107281 - DNA, 25 bp, Homo sapien
cctgggcatgggtctggaacccacc

SEQ ID NO: 3107282 - DNA, 25 bp, Homo sapien
ggtctggaacccaccctagtggatc

SEQ ID NO: 3107283 - DNA, 25 bp, Homo sapien
ccagattccccacagagtctgtcta

SEQ ID NO: 3107284 - DNA, 25 bp, Homo sapien
tgaaataagagcacgctggggcgtc

SEQ ID NO: 3107285 - DNA, 25 bp, Homo sapien
gaccttggggcttctttgcagttta

SEQ ID NO: 3107286 - DNA, 25 bp, Homo sapien
taacccagcgctctttctccctgga

SEQ ID NO: 3107287 - DNA, 25 bp, Homo sapien
tggccccagacacacgtaacagggt

SEQ ID NO: 3107288 - DNA, 25 bp, Homo sapien
tgatgagcccatccacgcagattta

SEQ ID NO: 3107289 - DNA, 25 bp, Homo sapien
ctttcatttacagcagaaggactcc

SEQ ID NO: 3107290 - DNA, 25 bp, Homo sapien
aattttagcctcgttggaactgatg

SEQ ID NO: 3107291 - DNA, 25 bp, Homo sapien
tacacgtctgtatccatgatgagcc

SEQ ID NO: 3107292 - DNA, 25 bp, Homo sapien
tcccgatggtgtgtctaggtgtaga

SEQ ID NO: 3107293 - DNA, 25 bp, Homo sapien
gggacttccgttccacacattggta

SEQ ID NO: 3107294 - DNA, 25 bp, Homo sapien
cacattggtatgcttgacggtgccc

SEQ ID NO: 3107295 - DNA, 25 bp, Homo sapien
caaacttgggcggtttttcagccat

SEQ ID NO: 3107296 - DNA, 25 bp, Homo sapien
tccctagatcgcactgtgggccggg

SEQ ID NO: 3107297 - DNA, 25 bp, Homo sapien
aagattgtaaggtttgccctcctca

SEQ ID NO: 3107298 - DNA, 25 bp, Homo sapien
ggcatgcgggtagtattagccaccc

SEQ ID NO: 3107299 - DNA, 25 bp, Homo sapien
ccgagcaagcctgggaactcaggaa

SEQ ID NO: 3107300 - DNA, 25 bp, Homo sapien
tcaaatattagagcccggtctgtgg

SEQ ID NO: 3107301 - DNA, 25 bp, Homo sapien
gaactcattaagctgcctgggcctg

SEQ ID NO: 3107302 - DNA, 25 bp, Homo sapien
cattgtggtaagtcatgatcctgcc

SEQ ID NO: 3107303 - DNA, 25 bp, Homo sapien
gcaagggtccagtcacagtttcagt

SEQ ID NO: 3107304 - DNA, 25 bp, Homo sapien
gactacacagtaagttactagagaa

SEQ ID NO: 3107305 - DNA, 25 bp, Homo sapien
agaaggtggtggcaccttagaagta

SEQ ID NO: 3107306 - DNA, 25 bp, Homo sapien
ggtggtggcaccttagaagtataga

SEQ ID NO: 3107307 - DNA, 25 bp, Homo sapien
gtgagtgaaatgacccaagactaca

SEQ ID NO: 3107308 - DNA, 25 bp, Homo sapien
agacggcaggccatttatgagaaga

SEQ ID NO: 3107309 - DNA, 25 bp, Homo sapien
gtagaatctggatctaaatacttcc

SEQ ID NO: 3107310 - DNA, 25 bp, Homo sapien
tacacagcaggtgaacagtctccct

SEQ ID NO: 3107311 - DNA, 25 bp, Homo sapien
tataaaccccattaagtagaatctg

SEQ ID NO: 3107312 - DNA, 25 bp, Homo sapien
actaaaacctcacaacagacttctc

SEQ ID NO: 3107313 - DNA, 25 bp, Homo sapien
taactaaaacctcacaacagacttc

SEQ ID NO: 3107314 - DNA, 25 bp, Homo sapien
taaaacctcacaacagacttctcaa

SEQ ID NO: 3107315 - DNA, 25 bp, Homo sapien
aactaaaacctcacaacagacttct

SEQ ID NO: 3107316 - DNA, 25 bp, Homo sapien
gcggatgtcgtcattctttacaaag

SEQ ID NO: 3107317 - DNA, 25 bp, Homo sapien
caatctgagtggaatagtactgctc

SEQ ID NO: 3107318 - DNA, 25 bp, Homo sapien
tagtactgctcgatatctctgagga

SEQ ID NO: 3107319 - DNA, 25 bp, Homo sapien
cgttcatcggcatctcatcaatctg

SEQ ID NO: 3107320 - DNA, 25 bp, Homo sapien
cacagaagtgaagccaatgagagct

SEQ ID NO: 3107321 - DNA, 25 bp, Homo sapien
gtgtcacagaagtgaagccaatgag

SEQ ID NO: 3107322 - DNA, 25 bp, Homo sapien
caagatttagtaaatgtgtcacaga

SEQ ID NO: 3107323 - DNA, 25 bp, Homo sapien
gtcacagaagtgaagccaatgagag

SEQ ID NO: 3107324 - DNA, 25 bp, Homo sapien
attagggagatcatagttaatgatg

SEQ ID NO: 3107325 - DNA, 25 bp, Homo sapien
aattctctgttattagggagatcat

SEQ ID NO: 3107326 - DNA, 25 bp, Homo sapien
ctgttattagggagatcatagttaa

SEQ ID NO: 3107327 - DNA, 25 bp, Homo sapien
tctctgttattagggagatcatagt

SEQ ID NO: 3107328 - DNA, 25 bp, Homo sapien
aggtccaaaatatacgagattctcc

SEQ ID NO: 3107329 - DNA, 25 bp, Homo sapien
aaagagtgtttgaggcgattaaatt

SEQ ID NO: 3107330 - DNA, 25 bp, Homo sapien
ggtccaaaatatacgagattctcct

SEQ ID NO: 3107331 - DNA, 25 bp, Homo sapien
taaattactcatacaagtgtaagac

SEQ ID NO: 3107332 - DNA, 25 bp, Homo sapien
tatgttaagctgaccacaaggtggg

SEQ ID NO: 3107333 - DNA, 25 bp, Homo sapien
tagacacagtctagcaaaccctgac

SEQ ID NO: 3107334 - DNA, 25 bp, Homo sapien
gaagacacacgcttgtaaccaaggt

SEQ ID NO: 3107335 - DNA, 25 bp, Homo sapien
ctaagtattacaggagcacagcgga

SEQ ID NO: 3107336 - DNA, 25 bp, Homo sapien
ccggaactccttcatgatggactcc

SEQ ID NO: 3107337 - DNA, 25 bp, Homo sapien
gtctccatgcattgaggatacagtg

SEQ ID NO: 3107338 - DNA, 25 bp, Homo sapien
tcatgatggactcccgctctttctg

SEQ ID NO: 3107339 - DNA, 25 bp, Homo sapien
tacagtgaagttggcttccctcatt

SEQ ID NO: 3107340 - DNA, 25 bp, Homo sapien
cagagatgtgcattcgggactttac

SEQ ID NO: 3107341 - DNA, 25 bp, Homo sapien
tactgcaagctagtataccaaagca

SEQ ID NO: 3107342 - DNA, 25 bp, Homo sapien
cagatgctactgcaagctagtatac

SEQ ID NO: 3107343 - DNA, 25 bp, Homo sapien
gcattcgggactttaccgcatcatt

SEQ ID NO: 3107344 - DNA, 25 bp, Homo sapien
ctggccctttactgaaaaatcttga

SEQ ID NO: 3107345 - DNA, 25 bp, Homo sapien
ttttacaagagaacacataccctga

SEQ ID NO: 3107346 - DNA, 25 bp, Homo sapien
tgaagttttaatggtcacagccacg

SEQ ID NO: 3107347 - DNA, 25 bp, Homo sapien
ggtggctgatatcgctgttctgtaa

SEQ ID NO: 3107348 - DNA, 25 bp, Homo sapien
atggtcagtgtgtcgtagaggtcac

SEQ ID NO: 3107349 - DNA, 25 bp, Homo sapien
gaaaaattgcttgatgccttccaga

SEQ ID NO: 3107350 - DNA, 25 bp, Homo sapien
cacacagagtgtcaaatttccactc

SEQ ID NO: 3107351 - DNA, 25 bp, Homo sapien
gatgaccgcctgagtgatggtcagt

SEQ ID NO: 3107352 - DNA, 25 bp, Homo sapien
ggcctccattctgtatcctacttaa

SEQ ID NO: 3107353 - DNA, 25 bp, Homo sapien
caccgtgatatctggtgcagaccca

SEQ ID NO: 3107354 - DNA, 25 bp, Homo sapien
cctggtggaaaaggtcacaccgtga

SEQ ID NO: 3107355 - DNA, 25 bp, Homo sapien
gaatacgattctaaacgaaacactg

SEQ ID NO: 3107356 - DNA, 25 bp, Homo sapien
aatctcgtgtggcagcgtggcactg

SEQ ID NO: 3107357 - DNA, 25 bp, Homo sapien
catctccagaatctcgtgtggcagc

SEQ ID NO: 3107358 - DNA, 25 bp, Homo sapien
gattgggtcggtcatgaacttgttg

SEQ ID NO: 3107359 - DNA, 25 bp, Homo sapien
caagatgcggattgggtcggtcatg

SEQ ID NO: 3107360 - DNA, 25 bp, Homo sapien
tgtgtggctggaggcaggtacctgt

SEQ ID NO: 3107361 - DNA, 25 bp, Homo sapien
gtatacatcgtaaatctgctctttg

SEQ ID NO: 3107362 - DNA, 25 bp, Homo sapien
ggcaggtacctgtatacatcgtaaa

SEQ ID NO: 3107363 - DNA, 25 bp, Homo sapien
tggaggcaggtacctgtatacatcg

SEQ ID NO: 3107364 - DNA, 25 bp, Homo sapien
catccaaaaccaacattttgatagc

SEQ ID NO: 3107365 - DNA, 25 bp, Homo sapien
cacgtgtccttaggcttctgcgacg

SEQ ID NO: 3107366 - DNA, 25 bp, Homo sapien
cattttgatagcacgtgtccttagg

SEQ ID NO: 3107367 - DNA, 25 bp, Homo sapien
ccttaggcttctgcgacgaatcata

SEQ ID NO: 3107368 - DNA, 25 bp, Homo sapien
tgtccgtaatccagcttcctgatgt

SEQ ID NO: 3107369 - DNA, 25 bp, Homo sapien
caacattggtgcctccaatgcaggc

SEQ ID NO: 3107370 - DNA, 25 bp, Homo sapien
ttcatgtagtcaccgagagcaagca

SEQ ID NO: 3107371 - DNA, 25 bp, Homo sapien
ggagtgcccgcgacaacatgctgtc

SEQ ID NO: 3107372 - DNA, 25 bp, Homo sapien
tccaccgaagaaaccagcattaaca

SEQ ID NO: 3107373 - DNA, 25 bp, Homo sapien
catccaccgaagaaaccagcattaa

SEQ ID NO: 3107374 - DNA, 25 bp, Homo sapien
cccatccaccgaagaaaccagcatt

SEQ ID NO: 3107375 - DNA, 25 bp, Homo sapien
catacatctttatactacgttaagt

SEQ ID NO: 3107376 - DNA, 25 bp, Homo sapien
aatcggacaccgctatctttagcca

SEQ ID NO: 3107377 - DNA, 25 bp, Homo sapien
agcagtacttgttaatcggacaccg

SEQ ID NO: 3107378 - DNA, 25 bp, Homo sapien
gacaccgctatctttagccatctca

SEQ ID NO: 3107379 - DNA, 25 bp, Homo sapien
cttgttaatcggacaccgctatctt

SEQ ID NO: 3107380 - DNA, 25 bp, Homo sapien
ctgcacagccaactctcttgtggga

SEQ ID NO: 3107381 - DNA, 25 bp, Homo sapien
tctgcacagccaactctcttgtggg

SEQ ID NO: 3107382 - DNA, 25 bp, Homo sapien
tcttacaggttagcaaatattgtca

SEQ ID NO: 3107383 - DNA, 25 bp, Homo sapien
gtcagcatcctcgtctgcagacaag

SEQ ID NO: 3107384 - DNA, 25 bp, Homo sapien
caagagcttcctctagttaaataga

SEQ ID NO: 3107385 - DNA, 25 bp, Homo sapien
tcagaaaatagagaatccgcagtat

SEQ ID NO: 3107386 - DNA, 25 bp, Homo sapien
ctgagatactgaaggtggctgtttt

SEQ ID NO: 3107387 - DNA, 25 bp, Homo sapien
gactgagatactgaaggtggctgtt

SEQ ID NO: 3107388 - DNA, 25 bp, Homo sapien
agatactgaaggtggctgtttttcc

SEQ ID NO: 3107389 - DNA, 25 bp, Homo sapien
gaggactgagatactgaaggtggct

SEQ ID NO: 3107390 - DNA, 25 bp, Homo sapien
tccctttgatgatctgcttgattgc

SEQ ID NO: 3107391 - DNA, 25 bp, Homo sapien
tcgttgctggattgctgatggtttt

SEQ ID NO: 3107392 - DNA, 25 bp, Homo sapien
tctgcttgattgctcgttgctggat

SEQ ID NO: 3107393 - DNA, 25 bp, Homo sapien
gacatctctccctttgatgatctgc

SEQ ID NO: 3107394 - DNA, 25 bp, Homo sapien
cgtaagcgtagatgccccgcagcag

SEQ ID NO: 3107395 - DNA, 25 bp, Homo sapien
gcgtagatgccccgcagcaggtcct

SEQ ID NO: 3107396 - DNA, 25 bp, Homo sapien
aagcgtagatgccccgcagcaggtc

SEQ ID NO: 3107397 - DNA, 25 bp, Homo sapien
gtaagcgtagatgccccgcagcagg

SEQ ID NO: 3107398 - DNA, 25 bp, Homo sapien
tcctctttgagcagccgctttcgcg

SEQ ID NO: 3107399 - DNA, 25 bp, Homo sapien
tcgccatcgtggccgtggtcgccat

SEQ ID NO: 3107400 - DNA, 25 bp, Homo sapien
gccgagcccgaggtcgccatcgtgg

SEQ ID NO: 3107401 - DNA, 25 bp, Homo sapien
ggtctcgaattccactttagtcatg

SEQ ID NO: 3107402 - DNA, 25 bp, Homo sapien
tcagagtccgcggaagagcacagcg

SEQ ID NO: 3107403 - DNA, 25 bp, Homo sapien
gagtccgcggaagagcacagcgcgc

SEQ ID NO: 3107404 - DNA, 25 bp, Homo sapien
cagagtccgcggaagagcacagcgc

SEQ ID NO: 3107405 - DNA, 25 bp, Homo sapien
gattcagagtccgcggaagagcaca

SEQ ID NO: 3107406 - DNA, 25 bp, Homo sapien
tgtgccgctgccgagaacagacgcc

SEQ ID NO: 3107407 - DNA, 25 bp, Homo sapien
ccgctgccgagaacagacgccttaa

SEQ ID NO: 3107408 - DNA, 25 bp, Homo sapien
ctgccgagaacagacgccttaagta

SEQ ID NO: 3107409 - DNA, 25 bp, Homo sapien
tgccgctgccgagaacagacgcctt

SEQ ID NO: 3107410 - DNA, 25 bp, Homo sapien
atgcccagcccttctttacatttct

SEQ ID NO: 3107411 - DNA, 25 bp, Homo sapien
ttacatttctagttgtcctcttaag

SEQ ID NO: 3107412 - DNA, 25 bp, Homo sapien
gcccagcccttctttacatttctag

SEQ ID NO: 3107413 - DNA, 25 bp, Homo sapien
tctttacatttctagttgtcctctt

SEQ ID NO: 3107414 - DNA, 25 bp, Homo sapien
tgtgtgacccgggtcctgatggacc

SEQ ID NO: 3107415 - DNA, 25 bp, Homo sapien
acagagccccttgacgatgttcagg

SEQ ID NO: 3107416 - DNA, 25 bp, Homo sapien
tatcagctctgaggtagttcaagca

SEQ ID NO: 3107417 - DNA, 25 bp, Homo sapien
ggagatagtcccgatatcctaaggg

SEQ ID NO: 3107418 - DNA, 25 bp, Homo sapien
ggttgattacgaagcctcagagccc

SEQ ID NO: 3107419 - DNA, 25 bp, Homo sapien
tcagcatcctgtagggcccggtata

SEQ ID NO: 3107420 - DNA, 25 bp, Homo sapien
tgttttgaccaaggcgtgcaggcag

SEQ ID NO: 3107421 - DNA, 25 bp, Homo sapien
tcactagaggtgtgaaggccccaca

SEQ ID NO: 3107422 - DNA, 25 bp, Homo sapien
tataagaggctactccaggacctgg

SEQ ID NO: 3107423 - DNA, 25 bp, Homo sapien
cgcagaggctcgtatctgtggctca

SEQ ID NO: 3107424 - DNA, 25 bp, Homo sapien
ctgtgaaggtcaacacggacggtac

SEQ ID NO: 3107425 - DNA, 25 bp, Homo sapien
tgcaggtgcattgcaacgaggtcct

SEQ ID NO: 3107426 - DNA, 25 bp, Homo sapien
tgccgcgcacggcaccatccccaac

SEQ ID NO: 3107427 - DNA, 25 bp, Homo sapien
gtgagcagctgcctcgagctcggtg

SEQ ID NO: 3107428 - DNA, 25 bp, Homo sapien
gcgcacggcaccatccccaactact

SEQ ID NO: 3107429 - DNA, 25 bp, Homo sapien
agctcggtgcgtccccagagaggcc

SEQ ID NO: 3107430 - DNA, 25 bp, Homo sapien
cactgaaagccccacttgcagggaa

SEQ ID NO: 3107431 - DNA, 25 bp, Homo sapien
ccaagtttcaagtgcacggaacgca

SEQ ID NO: 3107432 - DNA, 25 bp, Homo sapien
tctagatcagcctatgggaggctcc

SEQ ID NO: 3107433 - DNA, 25 bp, Homo sapien
tctctataggttgccaagggtcccc

SEQ ID NO: 3107434 - DNA, 25 bp, Homo sapien
tagccctcatccaggacatgactca

SEQ ID NO: 3107435 - DNA, 25 bp, Homo sapien
caccgtgacccgcaaggtgaggctc

SEQ ID NO: 3107436 - DNA, 25 bp, Homo sapien
agtgcaccgtgacccgcaaggtgag

SEQ ID NO: 3107437 - DNA, 25 bp, Homo sapien
gacatgactcagcagtgcaccgtga

SEQ ID NO: 3107438 - DNA, 25 bp, Homo sapien
tgattggagggtaaccccacctgtc

SEQ ID NO: 3107439 - DNA, 25 bp, Homo sapien
gagtgggctgctgattggagggtaa

SEQ ID NO: 3107440 - DNA, 25 bp, Homo sapien
cagcctgcaggctcttgcacaagtg

SEQ ID NO: 3107441 - DNA, 25 bp, Homo sapien
gcctgcaggctcttgcacaagtgca

SEQ ID NO: 3107442 - DNA, 25 bp, Homo sapien
catcgtcagtatggacaaagccaag

SEQ ID NO: 3107443 - DNA, 25 bp, Homo sapien
acagaagctggtccgcatcgtcagt

SEQ ID NO: 3107444 - DNA, 25 bp, Homo sapien
caggtcgccctagtgccaatcatct

SEQ ID NO: 3107445 - DNA, 25 bp, Homo sapien
gggatgccactcatttaggccagga

SEQ ID NO: 3107446 - DNA, 25 bp, Homo sapien
aactgggagtgagtcctgtgaccgc

SEQ ID NO: 3107447 - DNA, 25 bp, Homo sapien
gggtgccactctcccagatcctttg

SEQ ID NO: 3107448 - DNA, 25 bp, Homo sapien
tgcccctggaattctaggtgctggg

SEQ ID NO: 3107449 - DNA, 25 bp, Homo sapien
tttcaggagaggagtacaggacaga

SEQ ID NO: 3107450 - DNA, 25 bp, Homo sapien
agcacgtgcttctgggccgagagct

SEQ ID NO: 3107451 - DNA, 25 bp, Homo sapien
tggtgccctataccctggtgcggcc

SEQ ID NO: 3107452 - DNA, 25 bp, Homo sapien
tcctcgtgcccagggcggttgggaa

SEQ ID NO: 3107453 - DNA, 25 bp, Homo sapien
gatcctgagcgagaaactgtgcctc

SEQ ID NO: 3107454 - DNA, 25 bp, Homo sapien
agtggacatcctaagaagagcttct

SEQ ID NO: 3107455 - DNA, 25 bp, Homo sapien
gtggacatcctaagaagagcttctc

SEQ ID NO: 3107456 - DNA, 25 bp, Homo sapien
gacaggggtgtttaccatgggactc

SEQ ID NO: 3107457 - DNA, 25 bp, Homo sapien
cacacagctggtctatgatggcccc

SEQ ID NO: 3107458 - DNA, 25 bp, Homo sapien
tgtttaccatgggactcccccagac

SEQ ID NO: 3107459 - DNA, 25 bp, Homo sapien
agctggtctatgatggccccgtcca

SEQ ID NO: 3107460 - DNA, 25 bp, Homo sapien
tctcagccagttaggatccacgtga

SEQ ID NO: 3107461 - DNA, 25 bp, Homo sapien
ggcgcaaacgcgtgaaaagcagctc

SEQ ID NO: 3107462 - DNA, 25 bp, Homo sapien
tgagataaaggtacagggaccgacc

SEQ ID NO: 3107463 - DNA, 25 bp, Homo sapien
tgtggagtccctcatggaaaaggtg

SEQ ID NO: 3107464 - DNA, 25 bp, Homo sapien
gagagaagaaagtggcaagctctat

SEQ ID NO: 3107465 - DNA, 25 bp, Homo sapien
tcagcctgtccggagggcccttctg

SEQ ID NO: 3107466 - DNA, 25 bp, Homo sapien
ctgacctgggcgttggctccctttg

SEQ ID NO: 3107467 - DNA, 25 bp, Homo sapien
caccctgcacaggatggacatcttc

SEQ ID NO: 3107468 - DNA, 25 bp, Homo sapien
caaagaagctcaagtaggtgcacgc

SEQ ID NO: 3107469 - DNA, 25 bp, Homo sapien
tctggagtgtgctctgcggtttgca

SEQ ID NO: 3107470 - DNA, 25 bp, Homo sapien
acagggccgtttccgcacaactttg

SEQ ID NO: 3107471 - DNA, 25 bp, Homo sapien
caaagcccacggcaggtgcctctgg

SEQ ID NO: 3107472 - DNA, 25 bp, Homo sapien
tacagtgggcaaaagtagcctagtc

SEQ ID NO: 3107473 - DNA, 25 bp, Homo sapien
ctccagaatcttgataccaggatga

SEQ ID NO: 3107474 - DNA, 25 bp, Homo sapien
tcttgataccaggatgacggtgcct

SEQ ID NO: 3107475 - DNA, 25 bp, Homo sapien
ttttacagtgggcaaaagtagccta

SEQ ID NO: 3107476 - DNA, 25 bp, Homo sapien
gcctacagcggttgggcacctcaga

SEQ ID NO: 3107477 - DNA, 25 bp, Homo sapien
tggagcgacctggacggcctgctca

SEQ ID NO: 3107478 - DNA, 25 bp, Homo sapien
cctggctcctgacggctggagcgac

SEQ ID NO: 3107479 - DNA, 25 bp, Homo sapien
ggaccgggcgccctgtctatacagc

SEQ ID NO: 3107480 - DNA, 25 bp, Homo sapien
tctaaccttgaaccctcaccacgtg

SEQ ID NO: 3107481 - DNA, 25 bp, Homo sapien
taaccttgaaccctcaccacgtgca

SEQ ID NO: 3107482 - DNA, 25 bp, Homo sapien
gctggggtctaaccttgaaccctca

SEQ ID NO: 3107483 - DNA, 25 bp, Homo sapien
ctaaccttgaaccctcaccacgtgc

SEQ ID NO: 3107484 - DNA, 25 bp, Homo sapien
tctgaactggaaaccctgagaatgt

SEQ ID NO: 3107485 - DNA, 25 bp, Homo sapien
ggacttctctggaaaaccgcctgtc

SEQ ID NO: 3107486 - DNA, 25 bp, Homo sapien
tgagaatgtttctgcagtgggacag

SEQ ID NO: 3107487 - DNA, 25 bp, Homo sapien
gacaggagggacgtcttcccatgcc

SEQ ID NO: 3107488 - DNA, 25 bp, Homo sapien
aggctgcgatgcctcaggaactcca

SEQ ID NO: 3107489 - DNA, 25 bp, Homo sapien
aataaagcctctgcgtggtggagac

SEQ ID NO: 3107490 - DNA, 25 bp, Homo sapien
tccagtttacagagaccagtgtgtt

SEQ ID NO: 3107491 - DNA, 25 bp, Homo sapien
acatatgctgtgacgctggccacct

SEQ ID NO: 3107492 - DNA, 25 bp, Homo sapien
tggtatcatcataaatgagttcaga

SEQ ID NO: 3107493 - DNA, 25 bp, Homo sapien
ttctagaattcaggttggtatcatc

SEQ ID NO: 3107494 - DNA, 25 bp, Homo sapien
cagcccaccccagtatggagtgata

SEQ ID NO: 3107495 - DNA, 25 bp, Homo sapien
ttttacaatagctggcctgtggcct

SEQ ID NO: 3107496 - DNA, 25 bp, Homo sapien
gtatgtctagaattcccgtgctggg

SEQ ID NO: 3107497 - DNA, 25 bp, Homo sapien
tgggacatggttcagacacaaggac

SEQ ID NO: 3107498 - DNA, 25 bp, Homo sapien
aggcaatggcaagagtgaccccaca

SEQ ID NO: 3107499 - DNA, 25 bp, Homo sapien
tgtcaccgaagaattaacccaaggc

SEQ ID NO: 3107500 - DNA, 25 bp, Homo sapien
gacatggtgacctcgtggtggctct

SEQ ID NO: 3107501 - DNA, 25 bp, Homo sapien
catcttgaagttgaggttgtgcacg

SEQ ID NO: 3107502 - DNA, 25 bp, Homo sapien
ccagcgcgcccggtagtagtaatga

SEQ ID NO: 3107503 - DNA, 25 bp, Homo sapien
taatgacggaggtccttgtaccagc

SEQ ID NO: 3107504 - DNA, 25 bp, Homo sapien
tccaatccaatcagcagcgggaggt

SEQ ID NO: 3107505 - DNA, 25 bp, Homo sapien
ttgaatggtataacaagaggccctg

SEQ ID NO: 3107506 - DNA, 25 bp, Homo sapien
gagcccgccaagatctactgaatcg

SEQ ID NO: 3107507 - DNA, 25 bp, Homo sapien
gacaccctgggatttgcaatttgga

SEQ ID NO: 3107508 - DNA, 25 bp, Homo sapien
aatcctgagcagcttacttcacctc

SEQ ID NO: 3107509 - DNA, 25 bp, Homo sapien
agctgtgcaatcctgagcagcttac

SEQ ID NO: 3107510 - DNA, 25 bp, Homo sapien
tgtgcaatcctgagcagcttacttc

SEQ ID NO: 3107511 - DNA, 25 bp, Homo sapien
gcaatcctgagcagcttacttcacc

SEQ ID NO: 3107512 - DNA, 25 bp, Homo sapien
ccttcctcacccagatgatatgaga

SEQ ID NO: 3107513 - DNA, 25 bp, Homo sapien
ctgtagagtgggagtgacagtccct

SEQ ID NO: 3107514 - DNA, 25 bp, Homo sapien
cacattaggtaatgggtgtggagca

SEQ ID NO: 3107515 - DNA, 25 bp, Homo sapien
tatgagagccacattaggtaatggg

SEQ ID NO: 3107516 - DNA, 25 bp, Homo sapien
gaagatcaccagtgtgtcgttcagg

SEQ ID NO: 3107517 - DNA, 25 bp, Homo sapien
tgacttggccccagcgttttgggtg

SEQ ID NO: 3107518 - DNA, 25 bp, Homo sapien
tcccgttgtcggacgtgaagatcac

SEQ ID NO: 3107519 - DNA, 25 bp, Homo sapien
tgacaccagtaagggttcagcagtg

SEQ ID NO: 3107520 - DNA, 25 bp, Homo sapien
gcggccgacggtggtgtactgagcg

SEQ ID NO: 3107521 - DNA, 25 bp, Homo sapien
ccgacggtggtgtactgagcggcca

SEQ ID NO: 3107522 - DNA, 25 bp, Homo sapien
ggtggtgtactgagcggccaggtcg

SEQ ID NO: 3107523 - DNA, 25 bp, Homo sapien
tactgagcggccaggtcggctcggg

SEQ ID NO: 3107524 - DNA, 25 bp, Homo sapien
ctggggcaggcggtggggagccagg

SEQ ID NO: 3107525 - DNA, 25 bp, Homo sapien
ctgacgggcgtcctgaaacacagga

SEQ ID NO: 3107526 - DNA, 25 bp, Homo sapien
tgaatccgatttggtcagagcctct

SEQ ID NO: 3107527 - DNA, 25 bp, Homo sapien
ttcttcatcatctagggccagggct

SEQ ID NO: 3107528 - DNA, 25 bp, Homo sapien
caagctcgtaggaggccagggtccc

SEQ ID NO: 3107529 - DNA, 25 bp, Homo sapien
tctccgttgccaaacttctcacaga

SEQ ID NO: 3107530 - DNA, 25 bp, Homo sapien
ggtccagtctgggatacgacccatg

SEQ ID NO: 3107531 - DNA, 25 bp, Homo sapien
ttctcacagaaggttccgtactggg

SEQ ID NO: 3107532 - DNA, 25 bp, Homo sapien
cagcacgtccagtgggtcgtaggcc

SEQ ID NO: 3107533 - DNA, 25 bp, Homo sapien
tctgaccaggctaactcgagtacct

SEQ ID NO: 3107534 - DNA, 25 bp, Homo sapien
tcccgccggaagactccgggctgtg

SEQ ID NO: 3107535 - DNA, 25 bp, Homo sapien
ttcgagccacgtgggggcccatgca

SEQ ID NO: 3107536 - DNA, 25 bp, Homo sapien
ctgtgctctggtaccggccgccagg

SEQ ID NO: 3107537 - DNA, 25 bp, Homo sapien
gagccattctcctccgtgtacgcaa

SEQ ID NO: 3107538 - DNA, 25 bp, Homo sapien
ttaattctagtgatgttccgcccca

SEQ ID NO: 3107539 - DNA, 25 bp, Homo sapien
cctgagtctgcaggaatttccggac

SEQ ID NO: 3107540 - DNA, 25 bp, Homo sapien
ttccggacgagcagcttaattctag

SEQ ID NO: 3107541 - DNA, 25 bp, Homo sapien
ttgaagtggtgcacgtcctggtgca

SEQ ID NO: 3107542 - DNA, 25 bp, Homo sapien
tggtgcagcccgtacatcccattct

SEQ ID NO: 3107543 - DNA, 25 bp, Homo sapien
gctccgcaccttgtcgaaggagttg

SEQ ID NO: 3107544 - DNA, 25 bp, Homo sapien
ctgtgcgcacaccagcttggctgag

SEQ ID NO: 3107545 - DNA, 25 bp, Homo sapien
cctgatttagacttcgagtggccag

SEQ ID NO: 3107546 - DNA, 25 bp, Homo sapien
tgcgtatccgtacttttgaactctt

SEQ ID NO: 3107547 - DNA, 25 bp, Homo sapien
agagacactggctgtacctcccact

SEQ ID NO: 3107548 - DNA, 25 bp, Homo sapien
tcccgtgaaaggaggacttcgccag

SEQ ID NO: 3107549 - DNA, 25 bp, Homo sapien
ggttaaccctgaggacattgtgctg

SEQ ID NO: 3107550 - DNA, 25 bp, Homo sapien
cgtgctacagcatatggttaaccct

SEQ ID NO: 3107551 - DNA, 25 bp, Homo sapien
cactgacggatgaatatggagaagc

SEQ ID NO: 3107552 - DNA, 25 bp, Homo sapien
tccactggaatatgagtcagccctg

SEQ ID NO: 3107553 - DNA, 25 bp, Homo sapien
gcattgcgaaagaggaggctgcggc

SEQ ID NO: 3107554 - DNA, 25 bp, Homo sapien
tgttgtacgcgccactctcaaagcc

SEQ ID NO: 3107555 - DNA, 25 bp, Homo sapien
tgcggcgggccaaggcgtccaggtg

SEQ ID NO: 3107556 - DNA, 25 bp, Homo sapien
ctgaccgaggtgaaggcattgcgaa

SEQ ID NO: 3107557 - DNA, 25 bp, Homo sapien
ggactagcagcagcgcgcagcaggc

SEQ ID NO: 3107558 - DNA, 25 bp, Homo sapien
cagtgcgttccggggacgcgcccgg

SEQ ID NO: 3107559 - DNA, 25 bp, Homo sapien
gcgttccggggacgcgcccggcaga

SEQ ID NO: 3107560 - DNA, 25 bp, Homo sapien
aggactagcagcagcgcgcagcagg

SEQ ID NO: 3107561 - DNA, 25 bp, Homo sapien
gctccggctctctggtctcccgctc

SEQ ID NO: 3107562 - DNA, 25 bp, Homo sapien
tccggctctctggtctcccgctcgg

SEQ ID NO: 3107563 - DNA, 25 bp, Homo sapien
tcggactcgggatcgggatccggct

SEQ ID NO: 3107564 - DNA, 25 bp, Homo sapien
cggcggctcggactcgggatcggga

SEQ ID NO: 3107565 - DNA, 25 bp, Homo sapien
gtcaagcacgtcttcagattgtgtg

SEQ ID NO: 3107566 - DNA, 25 bp, Homo sapien
gaccgcggacaacttcaatgacatt

SEQ ID NO: 3107567 - DNA, 25 bp, Homo sapien
tctgctcacgttggcagatgtcaag

SEQ ID NO: 3107568 - DNA, 25 bp, Homo sapien
agtcctggcctaggaccgcggacaa

SEQ ID NO: 3107569 - DNA, 25 bp, Homo sapien
cagaggatgccaagaggctgatagc

SEQ ID NO: 3107570 - DNA, 25 bp, Homo sapien
taagtggcacgattttagttggaca

SEQ ID NO: 3107571 - DNA, 25 bp, Homo sapien
tagctgttgccgactctgtgttgac

SEQ ID NO: 3107572 - DNA, 25 bp, Homo sapien
gacgaaagttgttggtgacctccta

SEQ ID NO: 3107573 - DNA, 25 bp, Homo sapien
cccaggatgaacaatgtgctgtgga

SEQ ID NO: 3107574 - DNA, 25 bp, Homo sapien
gatagtctcctgaagatgtgtggga

SEQ ID NO: 3107575 - DNA, 25 bp, Homo sapien
tgtgtgggaacgtgaaacatctgat

SEQ ID NO: 3107576 - DNA, 25 bp, Homo sapien
aaagtctttcaccccaggatgaaca

SEQ ID NO: 3107577 - DNA, 25 bp, Homo sapien
gggcttagagccacacatttctggt

SEQ ID NO: 3107578 - DNA, 25 bp, Homo sapien
ggttaaatcatcaggacccacacgg

SEQ ID NO: 3107579 - DNA, 25 bp, Homo sapien
tttgcctggcacctgggttagacgt

SEQ ID NO: 3107580 - DNA, 25 bp, Homo sapien
gatttttccggagtcagcatgagct

SEQ ID NO: 3107581 - DNA, 25 bp, Homo sapien
gacctcagcagtaaaagattaaatg

SEQ ID NO: 3107582 - DNA, 25 bp, Homo sapien
acctcctcgaactcgcagagggcaa

SEQ ID NO: 3107583 - DNA, 25 bp, Homo sapien
agtaagacactcacaagacctcagc

SEQ ID NO: 3107584 - DNA, 25 bp, Homo sapien
cgcagagggcaacgcattaccacct

SEQ ID NO: 3107585 - DNA, 25 bp, Homo sapien
gatcatagagttcacaccggtacag

SEQ ID NO: 3107586 - DNA, 25 bp, Homo sapien
gactttcgccgtgaaacactggacc

SEQ ID NO: 3107587 - DNA, 25 bp, Homo sapien
gagaaagttttcagatggcgcactg

SEQ ID NO: 3107588 - DNA, 25 bp, Homo sapien
gagttccagtccacagtagagcttt

SEQ ID NO: 3107589 - DNA, 25 bp, Homo sapien
ggctctgtgagccaacctcatggtt

SEQ ID NO: 3107590 - DNA, 25 bp, Homo sapien
tatgctgttcaggacgtggatcgcc

SEQ ID NO: 3107591 - DNA, 25 bp, Homo sapien
gaggccttgtgagcgcagatcatgc

SEQ ID NO: 3107592 - DNA, 25 bp, Homo sapien
tgttgcagagtagcgtgttaccctc

SEQ ID NO: 3107593 - DNA, 25 bp, Homo sapien
tcggcggcagccgtgttcaatgacc

SEQ ID NO: 3107594 - DNA, 25 bp, Homo sapien
atcagctgagctacgaggtggcacg

SEQ ID NO: 3107595 - DNA, 25 bp, Homo sapien
gccaagcggaggagcttttccacaa

SEQ ID NO: 3107596 - DNA, 25 bp, Homo sapien
gagaagactaccagctcgtcatggt

SEQ ID NO: 3107597 - DNA, 25 bp, Homo sapien
tcttgacccacccttcgtttgccat

SEQ ID NO: 3107598 - DNA, 25 bp, Homo sapien
gcctgaagtttacttcttctgccct

SEQ ID NO: 3107599 - DNA, 25 bp, Homo sapien
gacccacccttcgtttgccatcttg

SEQ ID NO: 3107600 - DNA, 25 bp, Homo sapien
ttgatgttggtcgtgtgagcaaggg

SEQ ID NO: 3107601 - DNA, 25 bp, Homo sapien
gactctggcctgcatattatagctg

SEQ ID NO: 3107602 - DNA, 25 bp, Homo sapien
gatcatatggtggatggccagcctc

SEQ ID NO: 3107603 - DNA, 25 bp, Homo sapien
tctgaggcagctggtataccgggtc

SEQ ID NO: 3107604 - DNA, 25 bp, Homo sapien
tatagctgcctgcaatccataccgg

SEQ ID NO: 3107605 - DNA, 25 bp, Homo sapien
gaccagcagccggagattatttttg

SEQ ID NO: 3107606 - DNA, 25 bp, Homo sapien
caaggaattcttcgggcttcgtgac

SEQ ID NO: 3107607 - DNA, 25 bp, Homo sapien
aaacggtgtgtaagcgccaggacaa

SEQ ID NO: 3107608 - DNA, 25 bp, Homo sapien
ttgccaaagcctacgaaacggtgtg

SEQ ID NO: 3107609 - DNA, 25 bp, Homo sapien
ggaacgcaccgatacgcctgtttgg

SEQ ID NO: 3107610 - DNA, 25 bp, Homo sapien
tcgtggagaatggaaggcagacctt

SEQ ID NO: 3107611 - DNA, 25 bp, Homo sapien
tttttccaaggaatggtcaccagct

SEQ ID NO: 3107612 - DNA, 25 bp, Homo sapien
tgcatgggtgaaagaaccacaggcc

SEQ ID NO: 3107613 - DNA, 25 bp, Homo sapien
tgtccacatcgatgacctccggaga

SEQ ID NO: 3107614 - DNA, 25 bp, Homo sapien
tgggtggcttcactcttcacagggc

SEQ ID NO: 3107615 - DNA, 25 bp, Homo sapien
gcagaactgactggtggctcatcat

SEQ ID NO: 3107616 - DNA, 25 bp, Homo sapien
accgtgtttcgtccctcggcaggag

SEQ ID NO: 3107617 - DNA, 25 bp, Homo sapien
tggaagtgagcacctagaacacgcc

SEQ ID NO: 3107618 - DNA, 25 bp, Homo sapien
cacagtaggtctggacagtggccaa

SEQ ID NO: 3107619 - DNA, 25 bp, Homo sapien
caggaggcgggcacattcaggtact

SEQ ID NO: 3107620 - DNA, 25 bp, Homo sapien
tcttgaatgaggatgacgcgtgcca

SEQ ID NO: 3107621 - DNA, 25 bp, Homo sapien
caataccccaactgaccctgctttt

SEQ ID NO: 3107622 - DNA, 25 bp, Homo sapien
catgagcatattcctttctcaggac

SEQ ID NO: 3107623 - DNA, 25 bp, Homo sapien
aaagcagtctctctcctcatgagca

SEQ ID NO: 3107624 - DNA, 25 bp, Homo sapien
catttggaagactcagggtggcctt

SEQ ID NO: 3107625 - DNA, 25 bp, Homo sapien
gatgaactgaaccacctagaagagg

SEQ ID NO: 3107626 - DNA, 25 bp, Homo sapien
tgcagatttcctctcggagcctgag

SEQ ID NO: 3107627 - DNA, 25 bp, Homo sapien
gaatacctgcaagaggtggcccgga

SEQ ID NO: 3107628 - DNA, 25 bp, Homo sapien
aacgaggcctcggttgaatacctgc

SEQ ID NO: 3107629 - DNA, 25 bp, Homo sapien
tcagtggaaaagacgggtccaggcc

SEQ ID NO: 3107630 - DNA, 25 bp, Homo sapien
tagttttgccactgagagcatcggc

SEQ ID NO: 3107631 - DNA, 25 bp, Homo sapien
tgagaaagtgcagcgtgccaaagcg

SEQ ID NO: 3107632 - DNA, 25 bp, Homo sapien
tctggtccaccggaaaggcgagtct

SEQ ID NO: 3107633 - DNA, 25 bp, Homo sapien
aataatatatggtgacccagtgacc

SEQ ID NO: 3107634 - DNA, 25 bp, Homo sapien
agaattacagttgagtacctccagc

SEQ ID NO: 3107635 - DNA, 25 bp, Homo sapien
cctgccccggaaaagtgtggtccat

SEQ ID NO: 3107636 - DNA, 25 bp, Homo sapien
tatcagctctaaccctgtggccaaa

SEQ ID NO: 3107637 - DNA, 25 bp, Homo sapien
tgtaattggctgtgaggactccgct

SEQ ID NO: 3107638 - DNA, 25 bp, Homo sapien
tgaatgggatatgcacaaatacctg

SEQ ID NO: 3107639 - DNA, 25 bp, Homo sapien
caggccacgatgatgtgacaatatc

SEQ ID NO: 3107640 - DNA, 25 bp, Homo sapien
cagagtgactgcctgtgcatggtct

SEQ ID NO: 3107641 - DNA, 25 bp, Homo sapien
ttttgtgagtgccttaagatcaaac

SEQ ID NO: 3107642 - DNA, 25 bp, Homo sapien
tctaattctgtactcacaaaagaga

SEQ ID NO: 3107643 - DNA, 25 bp, Homo sapien
tatatttctgggttcccacgatgat

SEQ ID NO: 3107644 - DNA, 25 bp, Homo sapien
ccttaaattctgagtactgtacata

SEQ ID NO: 3107645 - DNA, 25 bp, Homo sapien
cattccgactgcctatgaacgggtg

SEQ ID NO: 3107646 - DNA, 25 bp, Homo sapien
catggtgccaccagtgtctgatgaa

SEQ ID NO: 3107647 - DNA, 25 bp, Homo sapien
ttgggcctaaggagtgagaactaca

SEQ ID NO: 3107648 - DNA, 25 bp, Homo sapien
tgctccgttctcctcactgtcatgg

SEQ ID NO: 3107649 - DNA, 25 bp, Homo sapien
ggcctgcaccggaagactcactttg

SEQ ID NO: 3107650 - DNA, 25 bp, Homo sapien
ctgacgttggagtgctaaaaatgcc

SEQ ID NO: 3107651 - DNA, 25 bp, Homo sapien
ccttcacatgtgagacggtggactt

SEQ ID NO: 3107652 - DNA, 25 bp, Homo sapien
gatctgggactgaaacgcttacacc

SEQ ID NO: 3107653 - DNA, 25 bp, Homo sapien
tatcactcgcctgttatagcatggc

SEQ ID NO: 3107654 - DNA, 25 bp, Homo sapien
tccaaaaactggacaagccttacag

SEQ ID NO: 3107655 - DNA, 25 bp, Homo sapien
ccagatcccttactagattgagaca

SEQ ID NO: 3107656 - DNA, 25 bp, Homo sapien
attgtcttgcctatccaccctgtgg

SEQ ID NO: 3107657 - DNA, 25 bp, Homo sapien
tggcctcagctatccgctgaaaaag

SEQ ID NO: 3107658 - DNA, 25 bp, Homo sapien
cggcccgggaaagcgcaagcgtctc

SEQ ID NO: 3107659 - DNA, 25 bp, Homo sapien
tcccgggatccgagccgatatcgcg

SEQ ID NO: 3107660 - DNA, 25 bp, Homo sapien
gggcaacctgaagccgtgtgcgtgc

SEQ ID NO: 3107661 - DNA, 25 bp, Homo sapien
gacagaaagtggatccttgggcctt

SEQ ID NO: 3107662 - DNA, 25 bp, Homo sapien
caaagcacctgctacttcgtcggta

SEQ ID NO: 3107663 - DNA, 25 bp, Homo sapien
tgaatgcacatgctgttagagcgct

SEQ ID NO: 3107664 - DNA, 25 bp, Homo sapien
gaaacagattccgtaggcacatcca

SEQ ID NO: 3107665 - DNA, 25 bp, Homo sapien
tactacagtcatctcggcgggaaaa

SEQ ID NO: 3107666 - DNA, 25 bp, Homo sapien
caggtggtcgcctcactaagtggga

SEQ ID NO: 3107667 - DNA, 25 bp, Homo sapien
ggaatctaaccccatatgacaggag

SEQ ID NO: 3107668 - DNA, 25 bp, Homo sapien
caacaggatgtactgccgggctgga

SEQ ID NO: 3107669 - DNA, 25 bp, Homo sapien
tacacaagggctccgagatggctgg

SEQ ID NO: 3107670 - DNA, 25 bp, Homo sapien
tacacgggtggtcacagaacactgg

SEQ ID NO: 3107671 - DNA, 25 bp, Homo sapien
tctggtctagagaggcgactccaag

SEQ ID NO: 3107672 - DNA, 25 bp, Homo sapien
gactcaagtgggatctaagcccctg

SEQ ID NO: 3107673 - DNA, 25 bp, Homo sapien
tgttgaacaacaacgcgcagcacgg

SEQ ID NO: 3107674 - DNA, 25 bp, Homo sapien
gatgcactaggttcttgacacaacg

SEQ ID NO: 3107675 - DNA, 25 bp, Homo sapien
tgtggccaggtcttcatcgaaacac

SEQ ID NO: 3107676 - DNA, 25 bp, Homo sapien
caaatgcgtgtactgaggttgcacc

SEQ ID NO: 3107677 - DNA, 25 bp, Homo sapien
tgttcaagacgttgcagcacccact

SEQ ID NO: 3107678 - DNA, 25 bp, Homo sapien
atgcctgagagagtccgggctccta

SEQ ID NO: 3107679 - DNA, 25 bp, Homo sapien
aaaacagatcatcgccgcacaagca

SEQ ID NO: 3107680 - DNA, 25 bp, Homo sapien
gtgtgcatgaggacaaaaccaggct

SEQ ID NO: 3107681 - DNA, 25 bp, Homo sapien
gcttgcggtcccagatgttgaagtg

SEQ ID NO: 3107682 - DNA, 25 bp, Homo sapien
tgggattcagcccaggcgatgacat

SEQ ID NO: 3107683 - DNA, 25 bp, Homo sapien
tgacattgccggacagagccttggt

SEQ ID NO: 3107684 - DNA, 25 bp, Homo sapien
agttgatctggcgacaggcctcgaa

SEQ ID NO: 3107685 - DNA, 25 bp, Homo sapien
agcaccagcacgccctggggcttga

SEQ ID NO: 3107686 - DNA, 25 bp, Homo sapien
ggtgatagggcgccaagttctcgcc

SEQ ID NO: 3107687 - DNA, 25 bp, Homo sapien
gatagggcgccaagttctcgccact

SEQ ID NO: 3107688 - DNA, 25 bp, Homo sapien
gcttgatggggtgatagggcgccaa

SEQ ID NO: 3107689 - DNA, 25 bp, Homo sapien
tacatatagttggtccgcagtggga

SEQ ID NO: 3107690 - DNA, 25 bp, Homo sapien
agtgaaggcgtacatctctggcagg

SEQ ID NO: 3107691 - DNA, 25 bp, Homo sapien
tctccagggcggttgtctttctgac

SEQ ID NO: 3107692 - DNA, 25 bp, Homo sapien
tcaatgaggaccagctcgttggcct

SEQ ID NO: 3107693 - DNA, 25 bp, Homo sapien
caaggtgactgctctaggatgccgc

SEQ ID NO: 3107694 - DNA, 25 bp, Homo sapien
tgtctgagttgagttcggtccccac

SEQ ID NO: 3107695 - DNA, 25 bp, Homo sapien
tgagagtaaccgacctgattccagg

SEQ ID NO: 3107696 - DNA, 25 bp, Homo sapien
ggaacgaggctagctaccctgagag

SEQ ID NO: 3107697 - DNA, 25 bp, Homo sapien
tccagggtgttcacccgggacagca

SEQ ID NO: 3107698 - DNA, 25 bp, Homo sapien
gcagatccttgaggctgttggtctg

SEQ ID NO: 3107699 - DNA, 25 bp, Homo sapien
tcatcgatcttgctctgcagcagat

SEQ ID NO: 3107700 - DNA, 25 bp, Homo sapien
ttctcgagctcgctgatccgctggt

SEQ ID NO: 3107701 - DNA, 25 bp, Homo sapien
caaagtttgcccgagttggctgagc

SEQ ID NO: 3107702 - DNA, 25 bp, Homo sapien
gtccagcgtgctctggctctcgcag

SEQ ID NO: 3107703 - DNA, 25 bp, Homo sapien
gacaggtcgcccatggtgttcttgc

SEQ ID NO: 3107704 - DNA, 25 bp, Homo sapien
ccaggcgggttttgagcgattgcaa

SEQ ID NO: 3107705 - DNA, 25 bp, Homo sapien
acggacgcggcgcacatgtcggcgt

SEQ ID NO: 3107706 - DNA, 25 bp, Homo sapien
acgctgctccggagctcctcggcgc

SEQ ID NO: 3107707 - DNA, 25 bp, Homo sapien
ccacgggcaccgaggtgcagatgaa

SEQ ID NO: 3107708 - DNA, 25 bp, Homo sapien
agatgaagcgcgtcggcccgaaatc

SEQ ID NO: 3107709 - DNA, 25 bp, Homo sapien
gcagagggcgagcagcgcacaggtg

SEQ ID NO: 3107710 - DNA, 25 bp, Homo sapien
gagcagcgcacaggtgcgcgcggcg

SEQ ID NO: 3107711 - DNA, 25 bp, Homo sapien
ggcgagcagcgcacaggtgcgcgcg

SEQ ID NO: 3107712 - DNA, 25 bp, Homo sapien
agagggcgagcagcgcacaggtgcg

SEQ ID NO: 3107713 - DNA, 25 bp, Homo sapien
tgtggctccgcgagcggcccgcgct

SEQ ID NO: 3107714 - DNA, 25 bp, Homo sapien
ggcgccgcgctcttcggccgcgcgg

SEQ ID NO: 3107715 - DNA, 25 bp, Homo sapien
gctgcgggcaccgggcgctccgggc

SEQ ID NO: 3107716 - DNA, 25 bp, Homo sapien
gcgcggtccacaccgccgcgctatc

SEQ ID NO: 3107717 - DNA, 25 bp, Homo sapien
ctcgagccgccgacgtcagcggggg

SEQ ID NO: 3107718 - DNA, 25 bp, Homo sapien
ggaggggcctcgagccgccgacgtc

SEQ ID NO: 3107719 - DNA, 25 bp, Homo sapien
tgcggagcccgcgccttttatgccg

SEQ ID NO: 3107720 - DNA, 25 bp, Homo sapien
cgccttttatgccgccgcgggaggg

SEQ ID NO: 3107721 - DNA, 25 bp, Homo sapien
tgagaagctccgctctcgctcagac

SEQ ID NO: 3107722 - DNA, 25 bp, Homo sapien
gggctgtttcccgtctgtccagccg

SEQ ID NO: 3107723 - DNA, 25 bp, Homo sapien
ctgagaagctccgctctcgctcaga

SEQ ID NO: 3107724 - DNA, 25 bp, Homo sapien
ctgtgcgtggggggctgtttcccgt

SEQ ID NO: 3107725 - DNA, 25 bp, Homo sapien
ccggcacccgcgcactcgcgccttc

SEQ ID NO: 3107726 - DNA, 25 bp, Homo sapien
cggcacccgcgcactcgcgccttca

SEQ ID NO: 3107727 - DNA, 25 bp, Homo sapien
ggcacccgcgcactcgcgccttcat

SEQ ID NO: 3107728 - DNA, 25 bp, Homo sapien
gccgtctgcgttcagcatctcagct

SEQ ID NO: 3107729 - DNA, 25 bp, Homo sapien
gcgttctcgttgtctccttcggccg

SEQ ID NO: 3107730 - DNA, 25 bp, Homo sapien
ctcggagggtgtgcgggttcccgct

SEQ ID NO: 3107731 - DNA, 25 bp, Homo sapien
catctcagcttttaagcctccctga

SEQ ID NO: 3107732 - DNA, 25 bp, Homo sapien
ttctgcccactatgcaagtgtggcg

SEQ ID NO: 3107733 - DNA, 25 bp, Homo sapien
ctatgcaagtgtggcgaagcctgca

SEQ ID NO: 3107734 - DNA, 25 bp, Homo sapien
tgccccattctcctgcgacagctga

SEQ ID NO: 3107735 - DNA, 25 bp, Homo sapien
aggactacgcgcttctgcccactat

SEQ ID NO: 3107736 - DNA, 25 bp, Homo sapien
aggaagagtgtggtcgcctgccgaa

SEQ ID NO: 3107737 - DNA, 25 bp, Homo sapien
cagccctccgggagcatccagtgct

SEQ ID NO: 3107738 - DNA, 25 bp, Homo sapien
gtcgcctgccgaaggaggcagcagc

SEQ ID NO: 3107739 - DNA, 25 bp, Homo sapien
gtgtggtcgcctgccgaaggaggca

SEQ ID NO: 3107740 - DNA, 25 bp, Homo sapien
ctccagtcttggtttctccacctct

SEQ ID NO: 3107741 - DNA, 25 bp, Homo sapien
ccacctctgaaagaatcacttttcc

SEQ ID NO: 3107742 - DNA, 25 bp, Homo sapien
cagtcttggtttctccacctctgaa

SEQ ID NO: 3107743 - DNA, 25 bp, Homo sapien
tctccacctctgaaagaatcacttt

SEQ ID NO: 3107744 - DNA, 25 bp, Homo sapien
taagctggccttcatcatcggtgct

SEQ ID NO: 3107745 - DNA, 25 bp, Homo sapien
gtctagacttcactctcttccagag

SEQ ID NO: 3107746 - DNA, 25 bp, Homo sapien
gcctgcagacccgtccctgggattt

SEQ ID NO: 3107747 - DNA, 25 bp, Homo sapien
actgggtagcagaccctccggaaag

SEQ ID NO: 3107748 - DNA, 25 bp, Homo sapien
gggcacaggtccaaagtgtcccaaa

SEQ ID NO: 3107749 - DNA, 25 bp, Homo sapien
agggcacaggtccaaagtgtcccaa

SEQ ID NO: 3107750 - DNA, 25 bp, Homo sapien
cagggcacaggtccaaagtgtccca

SEQ ID NO: 3107751 - DNA, 25 bp, Homo sapien
ttctgggctcagcagacgtttggtc

SEQ ID NO: 3107752 - DNA, 25 bp, Homo sapien
ttggtctcttgtggattgatgatgt

SEQ ID NO: 3107753 - DNA, 25 bp, Homo sapien
gctgatgaggctggattccgaacaa

SEQ ID NO: 3107754 - DNA, 25 bp, Homo sapien
tgtcaggatgcttctgtcgggccgt

SEQ ID NO: 3107755 - DNA, 25 bp, Homo sapien
aatggccaagacaggggctgccttt

SEQ ID NO: 3107756 - DNA, 25 bp, Homo sapien
aaaatggccaagacaggggctgcct

SEQ ID NO: 3107757 - DNA, 25 bp, Homo sapien
caagacaggggctgccttttctggg

SEQ ID NO: 3107758 - DNA, 25 bp, Homo sapien
caacctcgtctccctctctacagac

SEQ ID NO: 3107759 - DNA, 25 bp, Homo sapien
tgctttggccctcccggtgtggccg

SEQ ID NO: 3107760 - DNA, 25 bp, Homo sapien
tcgggcgtcttcgttggtgacttct

SEQ ID NO: 3107761 - DNA, 25 bp, Homo sapien
tgcatcctgtcctgacttgcctcca

SEQ ID NO: 3107762 - DNA, 25 bp, Homo sapien
gcgtttgccgcctgccgagcggttc

SEQ ID NO: 3107763 - DNA, 25 bp, Homo sapien
tccacaaagaatccgtagggccgta

SEQ ID NO: 3107764 - DNA, 25 bp, Homo sapien
tgccgtaaagccttgcagatggctc

SEQ ID NO: 3107765 - DNA, 25 bp, Homo sapien
tagggccgtagacagcagcgtctga

SEQ ID NO: 3107766 - DNA, 25 bp, Homo sapien
atccggactcatcggtcagggcgcc

SEQ ID NO: 3107767 - DNA, 25 bp, Homo sapien
cctggtaaaggctatttatctgagc

SEQ ID NO: 3107768 - DNA, 25 bp, Homo sapien
ggtaaaggctatttatctgagccat

SEQ ID NO: 3107769 - DNA, 25 bp, Homo sapien
cttcctggtaaaggctatttatctg

SEQ ID NO: 3107770 - DNA, 25 bp, Homo sapien
cttagttcttcctggtaaaggctat

SEQ ID NO: 3107771 - DNA, 25 bp, Homo sapien
tctcaggactcgttctcaggcagga

SEQ ID NO: 3107772 - DNA, 25 bp, Homo sapien
gtttcactgtagctccaaaccagag

SEQ ID NO: 3107773 - DNA, 25 bp, Homo sapien
cattctgggtcctggcaatatggcg

SEQ ID NO: 3107774 - DNA, 25 bp, Homo sapien
caatatggcgtcctccttgatgggc

SEQ ID NO: 3107775 - DNA, 25 bp, Homo sapien
gcggaggatggacaatgaattcaca

SEQ ID NO: 3107776 - DNA, 25 bp, Homo sapien
cattgagatggtgtctgttctgcac

SEQ ID NO: 3107777 - DNA, 25 bp, Homo sapien
gagacttggctgagctcctagctgg

SEQ ID NO: 3107778 - DNA, 25 bp, Homo sapien
ccatggtggctggacgaagatctgt

SEQ ID NO: 3107779 - DNA, 25 bp, Homo sapien
caagcggtcttccccgcttagcctc

SEQ ID NO: 3107780 - DNA, 25 bp, Homo sapien
gggaataacaaggacgtctctggaa

SEQ ID NO: 3107781 - DNA, 25 bp, Homo sapien
tctggaaagtgctgcaggttcccct

SEQ ID NO: 3107782 - DNA, 25 bp, Homo sapien
cccctgaggaaagctattgtagagt

SEQ ID NO: 3107783 - DNA, 25 bp, Homo sapien
agctctccgatgatatgcaggtgca

SEQ ID NO: 3107784 - DNA, 25 bp, Homo sapien
gtgaaggtgctgttggttgtttgct

SEQ ID NO: 3107785 - DNA, 25 bp, Homo sapien
gtgctgttggttgtttgctcccaga

SEQ ID NO: 3107786 - DNA, 25 bp, Homo sapien
tgaaggtgctgttggttgtttgctc

SEQ ID NO: 3107787 - DNA, 25 bp, Homo sapien
gaaggtgctgttggttgtttgctcc

SEQ ID NO: 3107788 - DNA, 25 bp, Homo sapien
tcagtggtggccgtgagctaacatt

SEQ ID NO: 3107789 - DNA, 25 bp, Homo sapien
tattgttccgaggtcttctgagccc

SEQ ID NO: 3107790 - DNA, 25 bp, Homo sapien
catctgtcacaatgttgtttgcagt

SEQ ID NO: 3107791 - DNA, 25 bp, Homo sapien
ccgctaggcaggatgttgcgagtct

SEQ ID NO: 3107792 - DNA, 25 bp, Homo sapien
atgaacacacgagccggtcatgggc

SEQ ID NO: 3107793 - DNA, 25 bp, Homo sapien
tcatgggccacgtcagcaatgttct

SEQ ID NO: 3107794 - DNA, 25 bp, Homo sapien
aagcaggtcctgcatagcatgctca

SEQ ID NO: 3107795 - DNA, 25 bp, Homo sapien
tggactggattttcacgggctcgct

SEQ ID NO: 3107796 - DNA, 25 bp, Homo sapien
ctgtttttaaggcctggagctttgg

SEQ ID NO: 3107797 - DNA, 25 bp, Homo sapien
aaggcctggagctttggtattcctg

SEQ ID NO: 3107798 - DNA, 25 bp, Homo sapien
aaaagaggatttagatcctggcatt

SEQ ID NO: 3107799 - DNA, 25 bp, Homo sapien
ttagatcctggcattttagcagctg

SEQ ID NO: 3107800 - DNA, 25 bp, Homo sapien
gcagccgcagcgccggcgggccgct

SEQ ID NO: 3107801 - DNA, 25 bp, Homo sapien
agcgccggcgggccgctctcccaca

SEQ ID NO: 3107802 - DNA, 25 bp, Homo sapien
cagccgcagcgccggcgggccgctc

SEQ ID NO: 3107803 - DNA, 25 bp, Homo sapien
gcgccggcgggccgctctcccacat

SEQ ID NO: 3107804 - DNA, 25 bp, Homo sapien
tcttctcgccatccttttctgcggg

SEQ ID NO: 3107805 - DNA, 25 bp, Homo sapien
acattttctggataaccacgcacgg

SEQ ID NO: 3107806 - DNA, 25 bp, Homo sapien
gataaccacgcacggatgcggtagg

SEQ ID NO: 3107807 - DNA, 25 bp, Homo sapien
tcgccatccttttctgcgggagcca

SEQ ID NO: 3107808 - DNA, 25 bp, Homo sapien
tgatcatcccagatgggttctttgt

SEQ ID NO: 3107809 - DNA, 25 bp, Homo sapien
tcttgggttgtccattggatgatca

SEQ ID NO: 3107810 - DNA, 25 bp, Homo sapien
gtacttctcgtgttcacatggttta

SEQ ID NO: 3107811 - DNA, 25 bp, Homo sapien
gatgggttctttgtacttctcgtgt

SEQ ID NO: 3107812 - DNA, 25 bp, Homo sapien
tgggggtcccagaggtgtgctcagg

SEQ ID NO: 3107813 - DNA, 25 bp, Homo sapien
ggggtcccagaggtgtgctcaggcc

SEQ ID NO: 3107814 - DNA, 25 bp, Homo sapien
gggggtcccagaggtgtgctcaggc

SEQ ID NO: 3107815 - DNA, 25 bp, Homo sapien
cctcttctcgtttccttttgatcag

SEQ ID NO: 3107816 - DNA, 25 bp, Homo sapien
gcgaaggtcgccgtgggcgaggcct

SEQ ID NO: 3107817 - DNA, 25 bp, Homo sapien
ctcatccctgaggccgaaattttcc

SEQ ID NO: 3107818 - DNA, 25 bp, Homo sapien
cctgaggccgaaattttcctcttct

SEQ ID NO: 3107819 - DNA, 25 bp, Homo sapien
gcagtgattgggctgctgaacatgt

SEQ ID NO: 3107820 - DNA, 25 bp, Homo sapien
ggcagtgattgggctgctgaacatg

SEQ ID NO: 3107821 - DNA, 25 bp, Homo sapien
gaaatttgcacttcatctagtaggc

SEQ ID NO: 3107822 - DNA, 25 bp, Homo sapien
cacaactaatgagtggcagagtcct

SEQ ID NO: 3107823 - DNA, 25 bp, Homo sapien
caaagattgtccgagcagtgagtgc

SEQ ID NO: 3107824 - DNA, 25 bp, Homo sapien
caagctttgcgcctgagctgaggaa

SEQ ID NO: 3107825 - DNA, 25 bp, Homo sapien
gtccccgagagattgcctccgagcg

SEQ ID NO: 3107826 - DNA, 25 bp, Homo sapien
tctgagtcccgattgtggaatggtg

SEQ ID NO: 3107827 - DNA, 25 bp, Homo sapien
gggaatctgagtcccgattgtggaa

SEQ ID NO: 3107828 - DNA, 25 bp, Homo sapien
ctggagcccatgagtggtccccgag

SEQ ID NO: 3107829 - DNA, 25 bp, Homo sapien
gctgagacagaaaccttggaggagt

SEQ ID NO: 3107830 - DNA, 25 bp, Homo sapien
tgacagccgcgtgggcatttgctct

SEQ ID NO: 3107831 - DNA, 25 bp, Homo sapien
ttccccgtgacagccgcgtgggcat

SEQ ID NO: 3107832 - DNA, 25 bp, Homo sapien
tgcatcttccccgtgacagccgcgt

SEQ ID NO: 3107833 - DNA, 25 bp, Homo sapien
ccatcttggctgtggagcgccctgt

SEQ ID NO: 3107834 - DNA, 25 bp, Homo sapien
catcttggctgtggagcgccctgtt

SEQ ID NO: 3107835 - DNA, 25 bp, Homo sapien
tcttggctgtggagcgccctgttgc

SEQ ID NO: 3107836 - DNA, 25 bp, Homo sapien
ttggctgtggagcgccctgttgcct

SEQ ID NO: 3107837 - DNA, 25 bp, Homo sapien
gtagtgtagcagcacctggcgtttg

SEQ ID NO: 3107838 - DNA, 25 bp, Homo sapien
tcagctctggtatacgatagatgtg

SEQ ID NO: 3107839 - DNA, 25 bp, Homo sapien
gatgtgtagtgtagcagcacctggc

SEQ ID NO: 3107840 - DNA, 25 bp, Homo sapien
tacgatagatgtgtagtgtagcagc

SEQ ID NO: 3107841 - DNA, 25 bp, Homo sapien
tctgccgtgttgctccacgggcccc

SEQ ID NO: 3107842 - DNA, 25 bp, Homo sapien
ggcacagtaggaagcgccaatgttc

SEQ ID NO: 3107843 - DNA, 25 bp, Homo sapien
ctgtgctcttcgtccttgtgctgcc

SEQ ID NO: 3107844 - DNA, 25 bp, Homo sapien
tcctggcctttagtgccctctgcag

SEQ ID NO: 3107845 - DNA, 25 bp, Homo sapien
ggagcctgaatccaccacattgctg

SEQ ID NO: 3107846 - DNA, 25 bp, Homo sapien
tgaatttcagaacgtgcccctgcct

SEQ ID NO: 3107847 - DNA, 25 bp, Homo sapien
tctcacaccagcacatccgtgaatt

SEQ ID NO: 3107848 - DNA, 25 bp, Homo sapien
caagcattttcacttgttagtgaga

SEQ ID NO: 3107849 - DNA, 25 bp, Homo sapien
tagtcgtaagcgtaagatggacccc

SEQ ID NO: 3107850 - DNA, 25 bp, Homo sapien
ggctgttgaactccctctagtcgta

SEQ ID NO: 3107851 - DNA, 25 bp, Homo sapien
gatggacccccagagtcgtcctggg

SEQ ID NO: 3107852 - DNA, 25 bp, Homo sapien
cctgggagcagcactcggaaatgcc

SEQ ID NO: 3107853 - DNA, 25 bp, Homo sapien
cagaaacgggcttggtctgaacgga

SEQ ID NO: 3107854 - DNA, 25 bp, Homo sapien
acagactgtggatcaggtgggcacg

SEQ ID NO: 3107855 - DNA, 25 bp, Homo sapien
atggtccggagcgtccacgcagcca

SEQ ID NO: 3107856 - DNA, 25 bp, Homo sapien
aatgtctggagagcccggcatggtc

SEQ ID NO: 3107857 - DNA, 25 bp, Homo sapien
catcagggtagtgagcaggaagcct

SEQ ID NO: 3107858 - DNA, 25 bp, Homo sapien
tttgttcatgacgttgccaggtcga

SEQ ID NO: 3107859 - DNA, 25 bp, Homo sapien
cacgggcagctatatccaaggaggg

SEQ ID NO: 3107860 - DNA, 25 bp, Homo sapien
aatgcatgtgcccaagacagaggct

SEQ ID NO: 3107861 - DNA, 25 bp, Homo sapien
caggcctcactgactcctgtgggag

SEQ ID NO: 3107862 - DNA, 25 bp, Homo sapien
gagccatctaggtacagcaaccacg

SEQ ID NO: 3107863 - DNA, 25 bp, Homo sapien
ggccagcgagtagacaaggatccca

SEQ ID NO: 3107864 - DNA, 25 bp, Homo sapien
caaccacgtggaggatagcgtgaaa

SEQ ID NO: 3107865 - DNA, 25 bp, Homo sapien
gaatgtggccgccaaagcttttgct

SEQ ID NO: 3107866 - DNA, 25 bp, Homo sapien
catctttagtctgcgcagctgagct

SEQ ID NO: 3107867 - DNA, 25 bp, Homo sapien
tgtggccgccaaagcttttgctgct

SEQ ID NO: 3107868 - DNA, 25 bp, Homo sapien
tcatccatctttagtctgcgcagct

SEQ ID NO: 3107869 - DNA, 25 bp, Homo sapien
ctactttgccctcggcagcaagggt

SEQ ID NO: 3107870 - DNA, 25 bp, Homo sapien
tttgccctcggcagcaagggttgag

SEQ ID NO: 3107871 - DNA, 25 bp, Homo sapien
ctttgccctcggcagcaagggttga

SEQ ID NO: 3107872 - DNA, 25 bp, Homo sapien
tttgctactttgccctcggcagcaa

SEQ ID NO: 3107873 - DNA, 25 bp, Homo sapien
ctccaggaggcattgggccaagcgc

SEQ ID NO: 3107874 - DNA, 25 bp, Homo sapien
agaatgcttccagtgtccagtgtgc

SEQ ID NO: 3107875 - DNA, 25 bp, Homo sapien
tgtccgactgctccctcggcaacca

SEQ ID NO: 3107876 - DNA, 25 bp, Homo sapien
tccctcggcaaccacagaatgcttc

SEQ ID NO: 3107877 - DNA, 25 bp, Homo sapien
acactttcttctgcccgttcagtgc

SEQ ID NO: 3107878 - DNA, 25 bp, Homo sapien
cagtgctctcgggtcttttgccgct

SEQ ID NO: 3107879 - DNA, 25 bp, Homo sapien
ttttgccgcttcctttcaacaacag

SEQ ID NO: 3107880 - DNA, 25 bp, Homo sapien
ctgctttgccagagaacacactttc

SEQ ID NO: 3107881 - DNA, 25 bp, Homo sapien
gttgaaaggactctgtgcaatgaga

SEQ ID NO: 3107882 - DNA, 25 bp, Homo sapien
gaaaggactctgtgcaatgagaact

SEQ ID NO: 3107883 - DNA, 25 bp, Homo sapien
atcctgtcccaggtagccagtaaac

SEQ ID NO: 3107884 - DNA, 25 bp, Homo sapien
cctgtcccaggtagccagtaaacac

SEQ ID NO: 3107885 - DNA, 25 bp, Homo sapien
gacacgcagggctatgcggcctgcc

SEQ ID NO: 3107886 - DNA, 25 bp, Homo sapien
cagtgtgttctgttgtgcatcagag

SEQ ID NO: 3107887 - DNA, 25 bp, Homo sapien
gctgaatcctgacaaaggccctctt

SEQ ID NO: 3107888 - DNA, 25 bp, Homo sapien
agacgtcgaccgcttctgattccct

SEQ ID NO: 3107889 - DNA, 25 bp, Homo sapien
cttcaacccaaaggtggaacacctg

SEQ ID NO: 3107890 - DNA, 25 bp, Homo sapien
tgtccgtcctccactgtcttgctgt

SEQ ID NO: 3107891 - DNA, 25 bp, Homo sapien
ctgtttcctgcagtggagaagatgg

SEQ ID NO: 3107892 - DNA, 25 bp, Homo sapien
cagccgctgcttcaacccaaaggtg

SEQ ID NO: 3107893 - DNA, 25 bp, Homo sapien
catgttgaacaacgcagtgtgcatt

SEQ ID NO: 3107894 - DNA, 25 bp, Homo sapien
tgagttcacttgtttgccaccagaa

SEQ ID NO: 3107895 - DNA, 25 bp, Homo sapien
tgggaaactcgctcctcgtggacat

SEQ ID NO: 3107896 - DNA, 25 bp, Homo sapien
cagtttttgcggtggcttaaggctc

SEQ ID NO: 3107897 - DNA, 25 bp, Homo sapien
tgcaagttaggaaagtcgcttctac

SEQ ID NO: 3107898 - DNA, 25 bp, Homo sapien
ggcctcacactcgtgtcctcaagtg

SEQ ID NO: 3107899 - DNA, 25 bp, Homo sapien
ttctgtacattacaaagtgcagctg

SEQ ID NO: 3107900 - DNA, 25 bp, Homo sapien
taccggcctagaagctcctaaatag

SEQ ID NO: 3107901 - DNA, 25 bp, Homo sapien
tagaggcttcgttataggactaggc

SEQ ID NO: 3107902 - DNA, 25 bp, Homo sapien
gaatattatcctgtgtgcgtgccct

SEQ ID NO: 3107903 - DNA, 25 bp, Homo sapien
gccctgtagtttggcaggacctgat

SEQ ID NO: 3107904 - DNA, 25 bp, Homo sapien
tgtcctcagatgtgatcaagccctg

SEQ ID NO: 3107905 - DNA, 25 bp, Homo sapien
tgttccattcatgccgttcacattc

SEQ ID NO: 3107906 - DNA, 25 bp, Homo sapien
atgtgtcagtctggtgcctggcgtc

SEQ ID NO: 3107907 - DNA, 25 bp, Homo sapien
tacttgttcaccgtggtagtccctg

SEQ ID NO: 3107908 - DNA, 25 bp, Homo sapien
taaaagctgccgaattaaggaaatc

SEQ ID NO: 3107909 - DNA, 25 bp, Homo sapien
cacgcctccatctccgtgtgggaca

SEQ ID NO: 3107910 - DNA, 25 bp, Homo sapien
cgtgtgggacagtgtctcgtctcca

SEQ ID NO: 3107911 - DNA, 25 bp, Homo sapien
tccgtgtgggacagtgtctcgtctc

SEQ ID NO: 3107912 - DNA, 25 bp, Homo sapien
tgggacagtgtctcgtctccatcct

SEQ ID NO: 3107913 - DNA, 25 bp, Homo sapien
tggatatctctaaaggaagccctcg

SEQ ID NO: 3107914 - DNA, 25 bp, Homo sapien
aaaggcctccccgttctgatgtgcg

SEQ ID NO: 3107915 - DNA, 25 bp, Homo sapien
tcgcataaccgggatgaggctcagc

SEQ ID NO: 3107916 - DNA, 25 bp, Homo sapien
tgagtaacgaggcactagacgctga

SEQ ID NO: 3107917 - DNA, 25 bp, Homo sapien
gaaggcgggcgagcactccttttgc

SEQ ID NO: 3107918 - DNA, 25 bp, Homo sapien
ccatggatgatgacccaaacagatt

SEQ ID NO: 3107919 - DNA, 25 bp, Homo sapien
cagaatgtgcctccccgaaatatga

SEQ ID NO: 3107920 - DNA, 25 bp, Homo sapien
caaacagatttagtgtggctgcgtg

SEQ ID NO: 3107921 - DNA, 25 bp, Homo sapien
cgtccctctgcgtgtttgtgagtgc

SEQ ID NO: 3107922 - DNA, 25 bp, Homo sapien
tggcgtgtggaaggacgtccatccc

SEQ ID NO: 3107923 - DNA, 25 bp, Homo sapien
gagttttctgcatcaagatgcctgg

SEQ ID NO: 3107924 - DNA, 25 bp, Homo sapien
cagagccgggtctgtgtgatgccac

SEQ ID NO: 3107925 - DNA, 25 bp, Homo sapien
gactctgcttggaggtggcttctcc

SEQ ID NO: 3107926 - DNA, 25 bp, Homo sapien
tctctgtcagaaccgtggagtgttc

SEQ ID NO: 3107927 - DNA, 25 bp, Homo sapien
gaaaggtctgtctgaaggtcggccc

SEQ ID NO: 3107928 - DNA, 25 bp, Homo sapien
gacacaatttacaaccaggctagga

SEQ ID NO: 3107929 - DNA, 25 bp, Homo sapien
taagccttcgaagcactaaaagcaa

SEQ ID NO: 3107930 - DNA, 25 bp, Homo sapien
cattaatgatgcttgtgccagggtg

SEQ ID NO: 3107931 - DNA, 25 bp, Homo sapien
tcatgactggtagagtggcctaaga

SEQ ID NO: 3107932 - DNA, 25 bp, Homo sapien
tttacatgaggagaatcatgactgg

SEQ ID NO: 3107933 - DNA, 25 bp, Homo sapien
ggtaattgatagtccagcactgaag

SEQ ID NO: 3107934 - DNA, 25 bp, Homo sapien
tgcggaaccgctgtcactagctggg

SEQ ID NO: 3107935 - DNA, 25 bp, Homo sapien
cactgaaggacgagagaaaacatcc

SEQ ID NO: 3107936 - DNA, 25 bp, Homo sapien
aatttactgtgcttgggagcggtgc

SEQ ID NO: 3107937 - DNA, 25 bp, Homo sapien
gaagtggtctcatatcacctgcctg

SEQ ID NO: 3107938 - DNA, 25 bp, Homo sapien
tgaactgcagtagtccataaaccct

SEQ ID NO: 3107939 - DNA, 25 bp, Homo sapien
ccgtcactgcagtgtggagactgaa

SEQ ID NO: 3107940 - DNA, 25 bp, Homo sapien
gagactgaacgccacaatgagaagg

SEQ ID NO: 3107941 - DNA, 25 bp, Homo sapien
tattagctagtttacacagtgttcg

SEQ ID NO: 3107942 - DNA, 25 bp, Homo sapien
cacgagcctgcggaagttttgagga

SEQ ID NO: 3107943 - DNA, 25 bp, Homo sapien
gaggaagaatgctcactggcgactt

SEQ ID NO: 3107944 - DNA, 25 bp, Homo sapien
tgagctaagctcacatgaacggccc

SEQ ID NO: 3107945 - DNA, 25 bp, Homo sapien
tgttggcctcccctgaatcgaaggg

SEQ ID NO: 3107946 - DNA, 25 bp, Homo sapien
cccagtgggtgttcgctttgtcgga

SEQ ID NO: 3107947 - DNA, 25 bp, Homo sapien
ttccccttgaataacagacgtggcc

SEQ ID NO: 3107948 - DNA, 25 bp, Homo sapien
ttccatcggcgcaaatcaagagggc

SEQ ID NO: 3107949 - DNA, 25 bp, Homo sapien
gcttttgtagatgtcgccccaggcc

SEQ ID NO: 3107950 - DNA, 25 bp, Homo sapien
tggatacacgtgagtgcctctcgcc

SEQ ID NO: 3107951 - DNA, 25 bp, Homo sapien
tgaagctgctgcgtgaacggtgcct

SEQ ID NO: 3107952 - DNA, 25 bp, Homo sapien
tgctcaatacacataaacgggcacg

SEQ ID NO: 3107953 - DNA, 25 bp, Homo sapien
ccttgattgcagtgaggttacagcc

SEQ ID NO: 3107954 - DNA, 25 bp, Homo sapien
gactttttatgatgcctttggtgcc

SEQ ID NO: 3107955 - DNA, 25 bp, Homo sapien
ggttacagccttgcagccttacaga

SEQ ID NO: 3107956 - DNA, 25 bp, Homo sapien
gccttacagactcgccttgtgtcgt

SEQ ID NO: 3107957 - DNA, 25 bp, Homo sapien
accgagccccaagtgcagggtcagc

SEQ ID NO: 3107958 - DNA, 25 bp, Homo sapien
ctttccgtgtctcggcagaggagga

SEQ ID NO: 3107959 - DNA, 25 bp, Homo sapien
aggaggagcgagaatcaccaccgag

SEQ ID NO: 3107960 - DNA, 25 bp, Homo sapien
cagcccacctggactttccgtgtct

SEQ ID NO: 3107961 - DNA, 25 bp, Homo sapien
taactagagattcgcaaatggcgcc

SEQ ID NO: 3107962 - DNA, 25 bp, Homo sapien
gacacagatgtgcatacgacggaga

SEQ ID NO: 3107963 - DNA, 25 bp, Homo sapien
cctaaggaagcgctcatgacaacat

SEQ ID NO: 3107964 - DNA, 25 bp, Homo sapien
tgcaaaatgcagaccaagaagccag

SEQ ID NO: 3107965 - DNA, 25 bp, Homo sapien
gatcccagaagagcacgacctggag

SEQ ID NO: 3107966 - DNA, 25 bp, Homo sapien
cgctgggcttaactgggtgttttct

SEQ ID NO: 3107967 - DNA, 25 bp, Homo sapien
ctggagagtcagatccgcaaggagc

SEQ ID NO: 3107968 - DNA, 25 bp, Homo sapien
tgtttcatcgctgggcttaactggg

SEQ ID NO: 3107969 - DNA, 25 bp, Homo sapien
ggggcggtgtctgttgccgcagaca

SEQ ID NO: 3107970 - DNA, 25 bp, Homo sapien
cgcagacagcggagggagctccttg

SEQ ID NO: 3107971 - DNA, 25 bp, Homo sapien
gctccttgcggaagggatccaggct

SEQ ID NO: 3107972 - DNA, 25 bp, Homo sapien
ctggagggggcggtgtctgttgccg

SEQ ID NO: 3107973 - DNA, 25 bp, Homo sapien
agctctctctgtgaaagactgcggt

SEQ ID NO: 3107974 - DNA, 25 bp, Homo sapien
ggttcatctcgcattaacgcagacg

SEQ ID NO: 3107975 - DNA, 25 bp, Homo sapien
gctctgctgatcaccgaaaacactg

SEQ ID NO: 3107976 - DNA, 25 bp, Homo sapien
tggtaccagcaacgtttctgaagcg

SEQ ID NO: 3107977 - DNA, 25 bp, Homo sapien
cctgcaggcgctttgggaactttcc

SEQ ID NO: 3107978 - DNA, 25 bp, Homo sapien
tcccgacggccacatcgtgagtgtg

SEQ ID NO: 3107979 - DNA, 25 bp, Homo sapien
tgaggagcgccgatatttagcagcc

SEQ ID NO: 3107980 - DNA, 25 bp, Homo sapien
gcatttcgggcagtaattaactcct

SEQ ID NO: 3107981 - DNA, 25 bp, Homo sapien
tcacatttggccagagacacacctg

SEQ ID NO: 3107982 - DNA, 25 bp, Homo sapien
tttttggaatgcgagctcccaccag

SEQ ID NO: 3107983 - DNA, 25 bp, Homo sapien
ccagaagaaggttccggcacgaatc

SEQ ID NO: 3107984 - DNA, 25 bp, Homo sapien
ttcattctggcggtgagaggcccac

SEQ ID NO: 3107985 - DNA, 25 bp, Homo sapien
aacagtaaacaacacgcgcagactc

SEQ ID NO: 3107986 - DNA, 25 bp, Homo sapien
tcgagtgtgcaaaggtctcggtcct

SEQ ID NO: 3107987 - DNA, 25 bp, Homo sapien
gaattgagacggactttgacaaaac

SEQ ID NO: 3107988 - DNA, 25 bp, Homo sapien
tattttaccaaacgcgaattgagac

SEQ ID NO: 3107989 - DNA, 25 bp, Homo sapien
caccagggcgatatgtggagcaacc

SEQ ID NO: 3107990 - DNA, 25 bp, Homo sapien
tctgcattgaaatctgggccacgtc

SEQ ID NO: 3107991 - DNA, 25 bp, Homo sapien
gaaaggctcccgtttccagatcaca

SEQ ID NO: 3107992 - DNA, 25 bp, Homo sapien
ttttcccaagcagcaaggtccgtgc

SEQ ID NO: 3107993 - DNA, 25 bp, Homo sapien
tttgtttcaggcaaggacgcccggc

SEQ ID NO: 3107994 - DNA, 25 bp, Homo sapien
gctgtcggtaaacaagtggatcccc

SEQ ID NO: 3107995 - DNA, 25 bp, Homo sapien
tcctggaatcctgcgctgaattgca

SEQ ID NO: 3107996 - DNA, 25 bp, Homo sapien
agctggcaccatgtccgggtccttg

SEQ ID NO: 3107997 - DNA, 25 bp, Homo sapien
gaagcacccaatggacactgtccga

SEQ ID NO: 3107998 - DNA, 25 bp, Homo sapien
tccaccttgggaaagaacctcactg

SEQ ID NO: 3107999 - DNA, 25 bp, Homo sapien
tgaggacttcacaactgcgggtgcc

SEQ ID NO: 3108000 - DNA, 25 bp, Homo sapien
tacataatgagctagagggtccctc

SEQ ID NO: 3108001 - DNA, 25 bp, Homo sapien
agtgaggcgaggagaaccatggagc

SEQ ID NO: 3108002 - DNA, 25 bp, Homo sapien
gaggagaaccatggagctgggccct

SEQ ID NO: 3108003 - DNA, 25 bp, Homo sapien
tgtggccaccgggtccctgaggctc

SEQ ID NO: 3108004 - DNA, 25 bp, Homo sapien
gggaaccaagcactcgccctttgca

SEQ ID NO: 3108005 - DNA, 25 bp, Homo sapien
cagcatcgctgaaaggagaaaaggc

SEQ ID NO: 3108006 - DNA, 25 bp, Homo sapien
ccaagctcgtgggttctctcaagat

SEQ ID NO: 3108007 - DNA, 25 bp, Homo sapien
gaaattgattgcagtccctggatgt

SEQ ID NO: 3108008 - DNA, 25 bp, Homo sapien
agctgtgcagagagcgctccgaatg

SEQ ID NO: 3108009 - DNA, 25 bp, Homo sapien
caggttccaccctgtagccaggggc

SEQ ID NO: 3108010 - DNA, 25 bp, Homo sapien
ggccaaccaggttccaccctgtagc

SEQ ID NO: 3108011 - DNA, 25 bp, Homo sapien
cgtggtcagtttgcccccacagaga

SEQ ID NO: 3108012 - DNA, 25 bp, Homo sapien
tggtcagtttgcccccacagagaac

SEQ ID NO: 3108013 - DNA, 25 bp, Homo sapien
attgccgcgccccagggagtgtctg

SEQ ID NO: 3108014 - DNA, 25 bp, Homo sapien
atttctaccgtagctctcaagcacc

SEQ ID NO: 3108015 - DNA, 25 bp, Homo sapien
tgacttgctccagaatgttcgtcgg

SEQ ID NO: 3108016 - DNA, 25 bp, Homo sapien
gggctctcgcccattccttgaggat

SEQ ID NO: 3108017 - DNA, 25 bp, Homo sapien
gaagttgtcacgtgccaaacgcttg

SEQ ID NO: 3108018 - DNA, 25 bp, Homo sapien
catgggtcacctttctggcgccttt

SEQ ID NO: 3108019 - DNA, 25 bp, Homo sapien
aaaacagaagccgaccatgggtcac

SEQ ID NO: 3108020 - DNA, 25 bp, Homo sapien
tgctgggtaatactcccggtgccgc

SEQ ID NO: 3108021 - DNA, 25 bp, Homo sapien
caaagagctatctggaaaatccaca

SEQ ID NO: 3108022 - DNA, 25 bp, Homo sapien
gaaacaatagtgagtggacatcagc

SEQ ID NO: 3108023 - DNA, 25 bp, Homo sapien
cataatatcaatccaaaagccagta

SEQ ID NO: 3108024 - DNA, 25 bp, Homo sapien
aagagcagatccaaagcaagcagga

SEQ ID NO: 3108025 - DNA, 25 bp, Homo sapien
tcaacatccgtttgtgataaaaact

SEQ ID NO: 3108026 - DNA, 25 bp, Homo sapien
aagattggatgctttccccataagg

SEQ ID NO: 3108027 - DNA, 25 bp, Homo sapien
ggttggttcaaccttcaaacatcag

SEQ ID NO: 3108028 - DNA, 25 bp, Homo sapien
aatgaggtttatcctggaaatgcaa

SEQ ID NO: 3108029 - DNA, 25 bp, Homo sapien
gcagaattgtttacctcgctcaggg

SEQ ID NO: 3108030 - DNA, 25 bp, Homo sapien
tgacacacgggagattcgaagggca

SEQ ID NO: 3108031 - DNA, 25 bp, Homo sapien
ggagggctctagttgtccacagcaa

SEQ ID NO: 3108032 - DNA, 25 bp, Homo sapien
tcgaagggcagctaatcttggcaag

SEQ ID NO: 3108033 - DNA, 25 bp, Homo sapien
gaaacaagcaacacagagataggct

SEQ ID NO: 3108034 - DNA, 25 bp, Homo sapien
taggctcaccgaaagggcagcttgt

SEQ ID NO: 3108035 - DNA, 25 bp, Homo sapien
ctgattggagcgaggaggtcaccct

SEQ ID NO: 3108036 - DNA, 25 bp, Homo sapien
tcagctcagtccctgattggagcga

SEQ ID NO: 3108037 - DNA, 25 bp, Homo sapien
aaccgtgctgctgtagggcacacgc

SEQ ID NO: 3108038 - DNA, 25 bp, Homo sapien
tccgccggctggaacacagcgtcat

SEQ ID NO: 3108039 - DNA, 25 bp, Homo sapien
tccttagccgggtagtagaagtggc

SEQ ID NO: 3108040 - DNA, 25 bp, Homo sapien
ctctgcctactgaaccgtgctgctg

SEQ ID NO: 3108041 - DNA, 25 bp, Homo sapien
ggaaaacctcactgagtatggagac

SEQ ID NO: 3108042 - DNA, 25 bp, Homo sapien
tgaggacccaggtctttatccttgg

SEQ ID NO: 3108043 - DNA, 25 bp, Homo sapien
ccttggggcaatggatgtcagcaca

SEQ ID NO: 3108044 - DNA, 25 bp, Homo sapien
ggcgggagctctgtatcacatggtc

SEQ ID NO: 3108045 - DNA, 25 bp, Homo sapien
tttcacacgcgggagcttctcttcc

SEQ ID NO: 3108046 - DNA, 25 bp, Homo sapien
tggagctgtttcacacgcgggagct

SEQ ID NO: 3108047 - DNA, 25 bp, Homo sapien
ggaacacaccgctcgtctgcaggcg

SEQ ID NO: 3108048 - DNA, 25 bp, Homo sapien
tgcaggcgcttggtggtggagctgt

SEQ ID NO: 3108049 - DNA, 25 bp, Homo sapien
gagtgcctcggcttttgcaatcctg

SEQ ID NO: 3108050 - DNA, 25 bp, Homo sapien
caatgacgccgtgtcctagctggag

SEQ ID NO: 3108051 - DNA, 25 bp, Homo sapien
tgaggccgcacaaaggactctgttg

SEQ ID NO: 3108052 - DNA, 25 bp, Homo sapien
gaattacggctgaatccaacaccac

SEQ ID NO: 3108053 - DNA, 25 bp, Homo sapien
cagcctgcagtgaaaacgtcgctct

SEQ ID NO: 3108054 - DNA, 25 bp, Homo sapien
cacttagagggtgctcagagaggct

SEQ ID NO: 3108055 - DNA, 25 bp, Homo sapien
accatctgtgttggctgggagctct

SEQ ID NO: 3108056 - DNA, 25 bp, Homo sapien
ggaatgtcccatccagttgctgagg

SEQ ID NO: 3108057 - DNA, 25 bp, Homo sapien
tgagccaggcttcccgcggcaagga

SEQ ID NO: 3108058 - DNA, 25 bp, Homo sapien
ttatgctggacaaagccgaagtgtg

SEQ ID NO: 3108059 - DNA, 25 bp, Homo sapien
cttcccgcggcaaggagcgggactc

SEQ ID NO: 3108060 - DNA, 25 bp, Homo sapien
tggctcccaccctcgatgtgctcct

SEQ ID NO: 3108061 - DNA, 25 bp, Homo sapien
agttctgattgggtggacccttctc

SEQ ID NO: 3108062 - DNA, 25 bp, Homo sapien
gacaccatgcggatagcttcacccg

SEQ ID NO: 3108063 - DNA, 25 bp, Homo sapien
agagaggaagctcccttgacaggca

SEQ ID NO: 3108064 - DNA, 25 bp, Homo sapien
agagaagaggctcgccctcctggct

SEQ ID NO: 3108065 - DNA, 25 bp, Homo sapien
tcaactttcctccaggcgagcagag

SEQ ID NO: 3108066 - DNA, 25 bp, Homo sapien
gctgcgttctgagtcggtcaccgaa

SEQ ID NO: 3108067 - DNA, 25 bp, Homo sapien
cacagtctggattgcgaaacctacc

SEQ ID NO: 3108068 - DNA, 25 bp, Homo sapien
taaatgcgtcgggacaagagtgccc

SEQ ID NO: 3108069 - DNA, 25 bp, Homo sapien
ttctccaagtcgtcccccactccag

SEQ ID NO: 3108070 - DNA, 25 bp, Homo sapien
tcctctcctcacgatgctcccccga

SEQ ID NO: 3108071 - DNA, 25 bp, Homo sapien
gatgctcccccgaaatcctccttct

SEQ ID NO: 3108072 - DNA, 25 bp, Homo sapien
agtcgtcccccactccagggccgag

SEQ ID NO: 3108073 - DNA, 25 bp, Homo sapien
gcccgccccgaagtgccacttcgcg

SEQ ID NO: 3108074 - DNA, 25 bp, Homo sapien
gcggcgtcctgcgtccgagccgctc

SEQ ID NO: 3108075 - DNA, 25 bp, Homo sapien
gaagtgccacttcgcgaagtgccgc

SEQ ID NO: 3108076 - DNA, 25 bp, Homo sapien
tctcccacctgtaagcccggcccgc

SEQ ID NO: 3108077 - DNA, 25 bp, Homo sapien
tggacgtggtcttgtgccgcagaac

SEQ ID NO: 3108078 - DNA, 25 bp, Homo sapien
tcaggcggcggcaataccaagtaat

SEQ ID NO: 3108079 - DNA, 25 bp, Homo sapien
gataaagtgcccagttataggcccc

SEQ ID NO: 3108080 - DNA, 25 bp, Homo sapien
tttgatcagctgtgacgggcgtcct

SEQ ID NO: 3108081 - DNA, 25 bp, Homo sapien
taggccagtcctggcatgtgtagac

SEQ ID NO: 3108082 - DNA, 25 bp, Homo sapien
ttgtgcttgggttgactggcagctc

SEQ ID NO: 3108083 - DNA, 25 bp, Homo sapien
tcttgggctttgtgcttgggttgac

SEQ ID NO: 3108084 - DNA, 25 bp, Homo sapien
actggagtggccggctggatctgag

SEQ ID NO: 3108085 - DNA, 25 bp, Homo sapien
ggttctttgtgcgggtggaggacag

SEQ ID NO: 3108086 - DNA, 25 bp, Homo sapien
gctgtccagtctgcctcaccgacag

SEQ ID NO: 3108087 - DNA, 25 bp, Homo sapien
ctggttctttgtgcgggtggaggac

SEQ ID NO: 3108088 - DNA, 25 bp, Homo sapien
cactggttctttgtgcgggtggagg

SEQ ID NO: 3108089 - DNA, 25 bp, Homo sapien
tgacacggaggtccctggttggtcc

SEQ ID NO: 3108090 - DNA, 25 bp, Homo sapien
ctggttggtcccggacctccagcac

SEQ ID NO: 3108091 - DNA, 25 bp, Homo sapien
ggttggtcccggacctccagcacag

SEQ ID NO: 3108092 - DNA, 25 bp, Homo sapien
atccccgagggggcctgacacggag

SEQ ID NO: 3108093 - DNA, 25 bp, Homo sapien
tcgcagaggcgcgtgctcctgctga

SEQ ID NO: 3108094 - DNA, 25 bp, Homo sapien
cgcctgttcgcagaggcgcgtgctc

SEQ ID NO: 3108095 - DNA, 25 bp, Homo sapien
cagaggcgcgtgctcctgctgaact

SEQ ID NO: 3108096 - DNA, 25 bp, Homo sapien
cctgttcgcagaggcgcgtgctcct

SEQ ID NO: 3108097 - DNA, 25 bp, Homo sapien
ggtctgaatggcttctgtcccctgc

SEQ ID NO: 3108098 - DNA, 25 bp, Homo sapien
tgccatccgggtcacgggtgttctt

SEQ ID NO: 3108099 - DNA, 25 bp, Homo sapien
ggcacgcgtgaggaactggaggtct

SEQ ID NO: 3108100 - DNA, 25 bp, Homo sapien
ggaccctggtcagtgccatccgggt

SEQ ID NO: 3108101 - DNA, 25 bp, Homo sapien
gcacgcgggcacagatagtcctgga

SEQ ID NO: 3108102 - DNA, 25 bp, Homo sapien
tagtcctggatccaagtaccgaggg

SEQ ID NO: 3108103 - DNA, 25 bp, Homo sapien
agccagagcacgcacgcgggcacag

SEQ ID NO: 3108104 - DNA, 25 bp, Homo sapien
ggcggcgctcatgccatctccatgg

SEQ ID NO: 3108105 - DNA, 25 bp, Homo sapien
ccggcagactcagcgcgggggtcgg

SEQ ID NO: 3108106 - DNA, 25 bp, Homo sapien
tcagcgcgggggtcggatgccttct

SEQ ID NO: 3108107 - DNA, 25 bp, Homo sapien
tcccggcagactcagcgcgggggtc

SEQ ID NO: 3108108 - DNA, 25 bp, Homo sapien
gggtcggatgccttctccgcaccat

SEQ ID NO: 3108109 - DNA, 25 bp, Homo sapien
cagagatgccgtgagactggttccc

SEQ ID NO: 3108110 - DNA, 25 bp, Homo sapien
tgatgaaagtgtccgggcagtcagc

SEQ ID NO: 3108111 - DNA, 25 bp, Homo sapien
gaagtgttgggaataggccgctcca

SEQ ID NO: 3108112 - DNA, 25 bp, Homo sapien
ggcagtcagctagctcaactggtga

SEQ ID NO: 3108113 - DNA, 25 bp, Homo sapien
tgggtgcgggtgccgtattgggtgg

SEQ ID NO: 3108114 - DNA, 25 bp, Homo sapien
gtgcgggtgccgtattgggtgggag

SEQ ID NO: 3108115 - DNA, 25 bp, Homo sapien
ggtgcgggtgccgtattgggtggga

SEQ ID NO: 3108116 - DNA, 25 bp, Homo sapien
cgggtgccgtattgggtgggagccg

SEQ ID NO: 3108117 - DNA, 25 bp, Homo sapien
tcagcggcattagcgcattcatggg

SEQ ID NO: 3108118 - DNA, 25 bp, Homo sapien
aatcggtagctggatctggaagctc

SEQ ID NO: 3108119 - DNA, 25 bp, Homo sapien
tcttagtaccctccgtcctggtgtg

SEQ ID NO: 3108120 - DNA, 25 bp, Homo sapien
gaagctctgtcaggttgagactcag

SEQ ID NO: 3108121 - DNA, 25 bp, Homo sapien
accccagcaagatcccggagcgcgc

SEQ ID NO: 3108122 - DNA, 25 bp, Homo sapien
caacaggcctgtgccgaccccagca

SEQ ID NO: 3108123 - DNA, 25 bp, Homo sapien
agcaagatcccggagcgcgcggtgc

SEQ ID NO: 3108124 - DNA, 25 bp, Homo sapien
caggcctgtgccgaccccagcaaga

SEQ ID NO: 3108125 - DNA, 25 bp, Homo sapien
tgcagtgtctgtggcactcactgct

SEQ ID NO: 3108126 - DNA, 25 bp, Homo sapien
cgtgagccaggtctaaagtttgaag

SEQ ID NO: 3108127 - DNA, 25 bp, Homo sapien
ttttctaaggctcgccgtgagccag

SEQ ID NO: 3108128 - DNA, 25 bp, Homo sapien
gtttacgcgccccatcctgtgtgtc

SEQ ID NO: 3108129 - DNA, 25 bp, Homo sapien
tgcacgagttgggtatggacctcct

SEQ ID NO: 3108130 - DNA, 25 bp, Homo sapien
tccccaagttgctaggagggcggct

SEQ ID NO: 3108131 - DNA, 25 bp, Homo sapien
tgtgtttccttgcagcgccgatgtg

SEQ ID NO: 3108132 - DNA, 25 bp, Homo sapien
gataacctgggcttgcacacggtgc

SEQ ID NO: 3108133 - DNA, 25 bp, Homo sapien
tcctcccttccgagacgctgtttct

SEQ ID NO: 3108134 - DNA, 25 bp, Homo sapien
ccttccgagacgctgtttctgggag

SEQ ID NO: 3108135 - DNA, 25 bp, Homo sapien
cttccgagacgctgtttctgggagg

SEQ ID NO: 3108136 - DNA, 25 bp, Homo sapien
tcccttccgagacgctgtttctggg

SEQ ID NO: 3108137 - DNA, 25 bp, Homo sapien
tgaagacacgaagaaacagctgacg

SEQ ID NO: 3108138 - DNA, 25 bp, Homo sapien
tctggagtcacccaactggtcgaaa

SEQ ID NO: 3108139 - DNA, 25 bp, Homo sapien
acagaaaacaggtgctgtccgcccg

SEQ ID NO: 3108140 - DNA, 25 bp, Homo sapien
tcgaaatgcatttgtgacggctccg

SEQ ID NO: 3108141 - DNA, 25 bp, Homo sapien
gcattccagcccggaagacagagca

SEQ ID NO: 3108142 - DNA, 25 bp, Homo sapien
accactgcattccagcccggaagac

SEQ ID NO: 3108143 - DNA, 25 bp, Homo sapien
cattccagcccggaagacagagcaa

SEQ ID NO: 3108144 - DNA, 25 bp, Homo sapien
actgcattccagcccggaagacaga

SEQ ID NO: 3108145 - DNA, 25 bp, Homo sapien
tagttcgtggcaatcgctgcccagg

SEQ ID NO: 3108146 - DNA, 25 bp, Homo sapien
tattctattggctcagttaggcccc

SEQ ID NO: 3108147 - DNA, 25 bp, Homo sapien
tccgctcttggacacgtctggtgac

SEQ ID NO: 3108148 - DNA, 25 bp, Homo sapien
taacgtgtggtgaccttgcagtggc

SEQ ID NO: 3108149 - DNA, 25 bp, Homo sapien
tggtgggaacacagctcactactgc

SEQ ID NO: 3108150 - DNA, 25 bp, Homo sapien
tgggaacacagctcactactgcctc

SEQ ID NO: 3108151 - DNA, 25 bp, Homo sapien
ggaacacagctcactactgcctcgc

SEQ ID NO: 3108152 - DNA, 25 bp, Homo sapien
acacagctcactactgcctcgccct

SEQ ID NO: 3108153 - DNA, 25 bp, Homo sapien
tagagacgggtacgctttgctgccc

SEQ ID NO: 3108154 - DNA, 25 bp, Homo sapien
ccttaggagtgggtctagcctggca

SEQ ID NO: 3108155 - DNA, 25 bp, Homo sapien
tcctcaggaaagcttagggagctgc

SEQ ID NO: 3108156 - DNA, 25 bp, Homo sapien
tgccaatgcttagacgccatctggg

SEQ ID NO: 3108157 - DNA, 25 bp, Homo sapien
cagctggacggaaccctgcctgccc

SEQ ID NO: 3108158 - DNA, 25 bp, Homo sapien
gggcagctggacggaaccctgcctg

SEQ ID NO: 3108159 - DNA, 25 bp, Homo sapien
ggcagctggacggaaccctgcctgc

SEQ ID NO: 3108160 - DNA, 25 bp, Homo sapien
tgtgcccggttcaggcctgtcttga

SEQ ID NO: 3108161 - DNA, 25 bp, Homo sapien
tcgtatttgtgcatcagctgtggcc

SEQ ID NO: 3108162 - DNA, 25 bp, Homo sapien
tgctccaggtaatggctccagagtc

SEQ ID NO: 3108163 - DNA, 25 bp, Homo sapien
tgagatcggaccgtaggcatccagc

SEQ ID NO: 3108164 - DNA, 25 bp, Homo sapien
gagcatggccgatctaccatccagg

SEQ ID NO: 3108165 - DNA, 25 bp, Homo sapien
ccacggactttgagataagggcagc

SEQ ID NO: 3108166 - DNA, 25 bp, Homo sapien
gggccatgcctcgtcctggtttaag

SEQ ID NO: 3108167 - DNA, 25 bp, Homo sapien
gcaagcctaaaagcccagacgaatt

SEQ ID NO: 3108168 - DNA, 25 bp, Homo sapien
ttctcggtcaccatcctcgctgctg

SEQ ID NO: 3108169 - DNA, 25 bp, Homo sapien
tgctgccaacagccaccaggacgtg

SEQ ID NO: 3108170 - DNA, 25 bp, Homo sapien
tccccaccttctcggtcaccatcct

SEQ ID NO: 3108171 - DNA, 25 bp, Homo sapien
ggtcaccatcctcgctgctgcctgg

SEQ ID NO: 3108172 - DNA, 25 bp, Homo sapien
ttgaggggcaggagctgcccaggtc

SEQ ID NO: 3108173 - DNA, 25 bp, Homo sapien
cttgaggggcaggagctgcccaggt

SEQ ID NO: 3108174 - DNA, 25 bp, Homo sapien
ctctttactctcacccccggcacca

SEQ ID NO: 3108175 - DNA, 25 bp, Homo sapien
tctttactctcacccccggcaccag

SEQ ID NO: 3108176 - DNA, 25 bp, Homo sapien
ctggcccacatacaggccgggcccc

SEQ ID NO: 3108177 - DNA, 25 bp, Homo sapien
tcagcaaatgcctccgagtcctgtt

SEQ ID NO: 3108178 - DNA, 25 bp, Homo sapien
gagtcctgttttacgcataaggaaa

SEQ ID NO: 3108179 - DNA, 25 bp, Homo sapien
cagatctggctgtgtctaggtgaga

SEQ ID NO: 3108180 - DNA, 25 bp, Homo sapien
gggtgaggctgacaggcccttcccc

SEQ ID NO: 3108181 - DNA, 25 bp, Homo sapien
gccaggacagctagggaagaggaag

SEQ ID NO: 3108182 - DNA, 25 bp, Homo sapien
gtgaggctgacaggcccttccccca

SEQ ID NO: 3108183 - DNA, 25 bp, Homo sapien
ccacaggccaggacagctagggaag

SEQ ID NO: 3108184 - DNA, 25 bp, Homo sapien
acctggcagagatgagcccagcctg

SEQ ID NO: 3108185 - DNA, 25 bp, Homo sapien
gcggatagtggagggccatggccgg

SEQ ID NO: 3108186 - DNA, 25 bp, Homo sapien
agcagggctccacctgggcaccgtg

SEQ ID NO: 3108187 - DNA, 25 bp, Homo sapien
acttgtcaggcacgtgggcagaggc

SEQ ID NO: 3108188 - DNA, 25 bp, Homo sapien
ctggctgggaaggttccggtgagag

SEQ ID NO: 3108189 - DNA, 25 bp, Homo sapien
tctggctgggaaggttccggtgaga

SEQ ID NO: 3108190 - DNA, 25 bp, Homo sapien
tggctgggaaggttccggtgagagg

SEQ ID NO: 3108191 - DNA, 25 bp, Homo sapien
aggcggggtccaggctaggtctggg

SEQ ID NO: 3108192 - DNA, 25 bp, Homo sapien
gtccaggctaggtctggggccggga

SEQ ID NO: 3108193 - DNA, 25 bp, Homo sapien
gcggggtccaggctaggtctggggc

SEQ ID NO: 3108194 - DNA, 25 bp, Homo sapien
ccaggctaggtctggggccgggaag

SEQ ID NO: 3108195 - DNA, 25 bp, Homo sapien
ccccaccctcggagctccgtgccct

SEQ ID NO: 3108196 - DNA, 25 bp, Homo sapien
ctgcctcccgcgtgcccttctgcca

SEQ ID NO: 3108197 - DNA, 25 bp, Homo sapien
accctcggagctccgtgccctgcct

SEQ ID NO: 3108198 - DNA, 25 bp, Homo sapien
cgtgccctgcctcccgcgtgccctt

SEQ ID NO: 3108199 - DNA, 25 bp, Homo sapien
cacgtgcgtgatggagaagcgggac

SEQ ID NO: 3108200 - DNA, 25 bp, Homo sapien
gcgacaccgtgaagcgcgagaaggg

SEQ ID NO: 3108201 - DNA, 25 bp, Homo sapien
cggcgtccgagtcagacacgtgcgt

SEQ ID NO: 3108202 - DNA, 25 bp, Homo sapien
cgtcatcagcgggaagtcgtcgtcc

SEQ ID NO: 3108203 - DNA, 25 bp, Homo sapien
ctcttccgctgtggagccatttggg

SEQ ID NO: 3108204 - DNA, 25 bp, Homo sapien
ctgctgcggccggttgggggcgctg

SEQ ID NO: 3108205 - DNA, 25 bp, Homo sapien
agcctgctgcggccggttgggggcg

SEQ ID NO: 3108206 - DNA, 25 bp, Homo sapien
cctcttccgctgtggagccatttgg

SEQ ID NO: 3108207 - DNA, 25 bp, Homo sapien
gcagaccccgggtggcggcggccca

SEQ ID NO: 3108208 - DNA, 25 bp, Homo sapien
ctgcgggagcgcgacccccagcccc

SEQ ID NO: 3108209 - DNA, 25 bp, Homo sapien
gcgcgacccccagccccgggcagac

SEQ ID NO: 3108210 - DNA, 25 bp, Homo sapien
ggagcgcgacccccagccccgggca

SEQ ID NO: 3108211 - DNA, 25 bp, Homo sapien
tcctcgcagaaggtctcggacagca

SEQ ID NO: 3108212 - DNA, 25 bp, Homo sapien
atcttgagcaggctgcgcaggttgc

SEQ ID NO: 3108213 - DNA, 25 bp, Homo sapien
cgtcgtcgaagaaggacacggcctt

SEQ ID NO: 3108214 - DNA, 25 bp, Homo sapien
gctgtcctcgctaggctcctggacg

SEQ ID NO: 3108215 - DNA, 25 bp, Homo sapien
tagcagcggagctcctcgtcagact

SEQ ID NO: 3108216 - DNA, 25 bp, Homo sapien
agctcctcgtcagactcgtcgctgt

SEQ ID NO: 3108217 - DNA, 25 bp, Homo sapien
agcggagctcctcgtcagactcgtc

SEQ ID NO: 3108218 - DNA, 25 bp, Homo sapien
ctgtagcagcggagctcctcgtcag

SEQ ID NO: 3108219 - DNA, 25 bp, Homo sapien
agagccaggcggagtggggctctgg

SEQ ID NO: 3108220 - DNA, 25 bp, Homo sapien
cagagccaggcggagtggggctctg

SEQ ID NO: 3108221 - DNA, 25 bp, Homo sapien
tctgatctcagcggaaccggggtca

SEQ ID NO: 3108222 - DNA, 25 bp, Homo sapien
atctcagcggaaccggggtcagcag

SEQ ID NO: 3108223 - DNA, 25 bp, Homo sapien
tgatctcagcggaaccggggtcagc

SEQ ID NO: 3108224 - DNA, 25 bp, Homo sapien
ctcagcggaaccggggtcagcagga

SEQ ID NO: 3108225 - DNA, 25 bp, Homo sapien
gaggacccttcaagctgcagcagtg

SEQ ID NO: 3108226 - DNA, 25 bp, Homo sapien
ggctctgggaccaggcccgaggggc

SEQ ID NO: 3108227 - DNA, 25 bp, Homo sapien
ccggaaaccccaggcctgagacaga

SEQ ID NO: 3108228 - DNA, 25 bp, Homo sapien
gggccagagccttgtgcctccccgg

SEQ ID NO: 3108229 - DNA, 25 bp, Homo sapien
gtagggattcttctcgttgaggcca

SEQ ID NO: 3108230 - DNA, 25 bp, Homo sapien
tcggcctcagcctcgaggtctgaga

SEQ ID NO: 3108231 - DNA, 25 bp, Homo sapien
taggcagagtctcggtagggattct

SEQ ID NO: 3108232 - DNA, 25 bp, Homo sapien
gtccccgccgcacttcttctctggg

SEQ ID NO: 3108233 - DNA, 25 bp, Homo sapien
tcactggctgaggacgggatgtcca

SEQ ID NO: 3108234 - DNA, 25 bp, Homo sapien
gtgtcatagccactgtccagcgctc

SEQ ID NO: 3108235 - DNA, 25 bp, Homo sapien
tcctgcgcctccttgagcacaaact

SEQ ID NO: 3108236 - DNA, 25 bp, Homo sapien
gggactcatagttctcggtgtcata

SEQ ID NO: 3108237 - DNA, 25 bp, Homo sapien
cctgcaggccgtcgctggacgtgtc

SEQ ID NO: 3108238 - DNA, 25 bp, Homo sapien
ttgatggcagacacctcgccaccag

SEQ ID NO: 3108239 - DNA, 25 bp, Homo sapien
agatgcctgaggtggcctcggccgt

SEQ ID NO: 3108240 - DNA, 25 bp, Homo sapien
ctcgccaccagtagcaggcgtggga

SEQ ID NO: 3108241 - DNA, 25 bp, Homo sapien
ttgggctctgcctgcgggtggtcac

SEQ ID NO: 3108242 - DNA, 25 bp, Homo sapien
cggggtccggtagtgccctcagcct

SEQ ID NO: 3108243 - DNA, 25 bp, Homo sapien
gcctccgtggcaagcttgggctctg

SEQ ID NO: 3108244 - DNA, 25 bp, Homo sapien
ctcagcctccgtggcaagcttgggc

SEQ ID NO: 3108245 - DNA, 25 bp, Homo sapien
ggccctgggcagagcatagatgagg

SEQ ID NO: 3108246 - DNA, 25 bp, Homo sapien
ctcagcgtggccgcccgcagagacg

SEQ ID NO: 3108247 - DNA, 25 bp, Homo sapien
aggctctccagggtaccccggctcg

SEQ ID NO: 3108248 - DNA, 25 bp, Homo sapien
cagagcatagatgagggaggccggg

SEQ ID NO: 3108249 - DNA, 25 bp, Homo sapien
tgttgttgttggctgacacgttgga

SEQ ID NO: 3108250 - DNA, 25 bp, Homo sapien
acgttggagcgccagtgcccgcgct

SEQ ID NO: 3108251 - DNA, 25 bp, Homo sapien
ttgttggctgacacgttggagcgcc

SEQ ID NO: 3108252 - DNA, 25 bp, Homo sapien
gctgacacgttggagcgccagtgcc

SEQ ID NO: 3108253 - DNA, 25 bp, Homo sapien
tgctgccgtcagagtcgtcgtcctg

SEQ ID NO: 3108254 - DNA, 25 bp, Homo sapien
caaaattgaggcctcggctggtctc

SEQ ID NO: 3108255 - DNA, 25 bp, Homo sapien
tcctctaggcggatgaagtactcgc

SEQ ID NO: 3108256 - DNA, 25 bp, Homo sapien
cgcgccaagcttctgcgagggtagt

SEQ ID NO: 3108257 - DNA, 25 bp, Homo sapien
cagcggcgagctccaccacgccgcc

SEQ ID NO: 3108258 - DNA, 25 bp, Homo sapien
acgaggcagcggcgagctccaccac

SEQ ID NO: 3108259 - DNA, 25 bp, Homo sapien
gacgaggcagcggcgagctccacca

SEQ ID NO: 3108260 - DNA, 25 bp, Homo sapien
ctcggctgtgggccgctgctcgggc

SEQ ID NO: 3108261 - DNA, 25 bp, Homo sapien
ctctgcttcggtggcgcccttggca

SEQ ID NO: 3108262 - DNA, 25 bp, Homo sapien
cggtggcgcccttggcacacaggta

SEQ ID NO: 3108263 - DNA, 25 bp, Homo sapien
ccagcgccgttcaaactcctcctct

SEQ ID NO: 3108264 - DNA, 25 bp, Homo sapien
ggccacgtcagaggcaacgctggcc

SEQ ID NO: 3108265 - DNA, 25 bp, Homo sapien
gggggccacgtcagaggcaacgctg

SEQ ID NO: 3108266 - DNA, 25 bp, Homo sapien
ccgggggccacgtcagaggcaacgc

SEQ ID NO: 3108267 - DNA, 25 bp, Homo sapien
ccacgtcagaggcaacgctggccag

SEQ ID NO: 3108268 - DNA, 25 bp, Homo sapien
agcacctgctggtccgagtgctggg

SEQ ID NO: 3108269 - DNA, 25 bp, Homo sapien
aaagagctcccagatggtcacgccc

SEQ ID NO: 3108270 - DNA, 25 bp, Homo sapien
tgctgctcccggaccgtgtacgcca

SEQ ID NO: 3108271 - DNA, 25 bp, Homo sapien
gctgcgtgcccagctcaaagagctc

SEQ ID NO: 3108272 - DNA, 25 bp, Homo sapien
tggtcggcagtcacgaagtagtcct

SEQ ID NO: 3108273 - DNA, 25 bp, Homo sapien
ggttgctatgcacctcgtccaccag

SEQ ID NO: 3108274 - DNA, 25 bp, Homo sapien
tcttggtctggtccacgacgagcag

SEQ ID NO: 3108275 - DNA, 25 bp, Homo sapien
tctggcgcgatccagcgcagaggca

SEQ ID NO: 3108276 - DNA, 25 bp, Homo sapien
atagtcaccaatcttcaccgtcagg

SEQ ID NO: 3108277 - DNA, 25 bp, Homo sapien
ttcaccgtcaggtcagccgtgagca

SEQ ID NO: 3108278 - DNA, 25 bp, Homo sapien
ggccatagtcaccaatcttcaccgt

SEQ ID NO: 3108279 - DNA, 25 bp, Homo sapien
catagtcaccaatcttcaccgtcag

SEQ ID NO: 3108280 - DNA, 25 bp, Homo sapien
gcacgaaattgttgcgatgaaggtg

SEQ ID NO: 3108281 - DNA, 25 bp, Homo sapien
ctcacaggccatgcgctgcagggtc

SEQ ID NO: 3108282 - DNA, 25 bp, Homo sapien
aaattgttgcgatgaaggtgcagga

SEQ ID NO: 3108283 - DNA, 25 bp, Homo sapien
acctcacaggccatgcgctgcaggg

SEQ ID NO: 3108284 - DNA, 25 bp, Homo sapien
ctccgcaggtagcccttgaggtccc

SEQ ID NO: 3108285 - DNA, 25 bp, Homo sapien
tccgcaggtagcccttgaggtcccc

SEQ ID NO: 3108286 - DNA, 25 bp, Homo sapien
aggtagggcgtcacctcggcgcact

SEQ ID NO: 3108287 - DNA, 25 bp, Homo sapien
agcaggtagggcgtcacctcggcgc

SEQ ID NO: 3108288 - DNA, 25 bp, Homo sapien
accagcaggtagggcgtcacctcgg

SEQ ID NO: 3108289 - DNA, 25 bp, Homo sapien
ctggagcaggttgctgtgcttcagg

SEQ ID NO: 3108290 - DNA, 25 bp, Homo sapien
actgctgatgccagagttcacctcc

SEQ ID NO: 3108291 - DNA, 25 bp, Homo sapien
cctgggcactgctgatgccagagtt

SEQ ID NO: 3108292 - DNA, 25 bp, Homo sapien
atctgctcctgcacgctggcactag

SEQ ID NO: 3108293 - DNA, 25 bp, Homo sapien
tgcacgctggcactagcctgcagct

SEQ ID NO: 3108294 - DNA, 25 bp, Homo sapien
cttcccgaaccagccacggccgatt

SEQ ID NO: 3108295 - DNA, 25 bp, Homo sapien
ccagccacggccgatttccttcagg

SEQ ID NO: 3108296 - DNA, 25 bp, Homo sapien
cggcccacgtctgtggacttgagga

SEQ ID NO: 3108297 - DNA, 25 bp, Homo sapien
ctgtgccggcccacgtctgtggact

SEQ ID NO: 3108298 - DNA, 25 bp, Homo sapien
gcgccaggtcggctgcgtactcgtc

SEQ ID NO: 3108299 - DNA, 25 bp, Homo sapien
ccgtgagtggcaggacgtacacgtc

SEQ ID NO: 3108300 - DNA, 25 bp, Homo sapien
ctgcttggccatgggcaaggagacc

SEQ ID NO: 3108301 - DNA, 25 bp, Homo sapien
acgtcgggcccgttctgtgctgccg

SEQ ID NO: 3108302 - DNA, 25 bp, Homo sapien
agcagccttggaccttcacctggtg

SEQ ID NO: 3108303 - DNA, 25 bp, Homo sapien
cccagcagccttggaccttcacctg

SEQ ID NO: 3108304 - DNA, 25 bp, Homo sapien
ccccagcagccttggaccttcacct

SEQ ID NO: 3108305 - DNA, 25 bp, Homo sapien
ctgctgcccgggggccagccgggtc

SEQ ID NO: 3108306 - DNA, 25 bp, Homo sapien
gccgatacagcgtgcaatcaggtag

SEQ ID NO: 3108307 - DNA, 25 bp, Homo sapien
gcgtgcaatcaggtagcacagggtc

SEQ ID NO: 3108308 - DNA, 25 bp, Homo sapien
tacagcgtgcaatcaggtagcacag

SEQ ID NO: 3108309 - DNA, 25 bp, Homo sapien
cgatacagcgtgcaatcaggtagca

SEQ ID NO: 3108310 - DNA, 25 bp, Homo sapien
ggaaggttgaatgggctggaaaatg

SEQ ID NO: 3108311 - DNA, 25 bp, Homo sapien
tggaaggttgaatgggctggaaaat

SEQ ID NO: 3108312 - DNA, 25 bp, Homo sapien
aaaaaggccacatccagcaccgtca

SEQ ID NO: 3108313 - DNA, 25 bp, Homo sapien
aggcaaaaaggccacatccagcacc

SEQ ID NO: 3108314 - DNA, 25 bp, Homo sapien
gatggccaggacagctcgctgagcg

SEQ ID NO: 3108315 - DNA, 25 bp, Homo sapien
accacggcgagggaggatggccagg

SEQ ID NO: 3108316 - DNA, 25 bp, Homo sapien
catgaggacgatgacggcgaagagc

SEQ ID NO: 3108317 - DNA, 25 bp, Homo sapien
aagagcccggagaaagacacagcca

SEQ ID NO: 3108318 - DNA, 25 bp, Homo sapien
caaatccacagaagcggtcagtttc

SEQ ID NO: 3108319 - DNA, 25 bp, Homo sapien
acagaagcggtcagtttctggagcc

SEQ ID NO: 3108320 - DNA, 25 bp, Homo sapien
agaagcggtcagtttctggagcccc

SEQ ID NO: 3108321 - DNA, 25 bp, Homo sapien
ttcaaatccacagaagcggtcagtt

SEQ ID NO: 3108322 - DNA, 25 bp, Homo sapien
tcatcagaggcacctgctacctggg

SEQ ID NO: 3108323 - DNA, 25 bp, Homo sapien
ctcatcagaggcacctgctacctgg

SEQ ID NO: 3108324 - DNA, 25 bp, Homo sapien
ctggctgtcagcttgtaagacagac

SEQ ID NO: 3108325 - DNA, 25 bp, Homo sapien
tgtcagcttgtaagacagaccaggc

SEQ ID NO: 3108326 - DNA, 25 bp, Homo sapien
gctcaaaacacaggcgtggtccagg

SEQ ID NO: 3108327 - DNA, 25 bp, Homo sapien
tatccacggaggtgtggacgcatca

SEQ ID NO: 3108328 - DNA, 25 bp, Homo sapien
acaggctgccggctttgagtcagtc

SEQ ID NO: 3108329 - DNA, 25 bp, Homo sapien
tttacacacgcagtggaaaggacag

SEQ ID NO: 3108330 - DNA, 25 bp, Homo sapien
tgccttagatgaagctcccgggtga

SEQ ID NO: 3108331 - DNA, 25 bp, Homo sapien
aaaaatgtctgttccggctgggcac

SEQ ID NO: 3108332 - DNA, 25 bp, Homo sapien
gaatcacaagctacgaagtccagcg

SEQ ID NO: 3108333 - DNA, 25 bp, Homo sapien
tcccgggtgaaagaagctaacagcg

SEQ ID NO: 3108334 - DNA, 25 bp, Homo sapien
gaaggcactggatacagtgtgggag

SEQ ID NO: 3108335 - DNA, 25 bp, Homo sapien
tgggaggggacaccaacgccctgag

SEQ ID NO: 3108336 - DNA, 25 bp, Homo sapien
tctgggttgaatgcgtcccatgact

SEQ ID NO: 3108337 - DNA, 25 bp, Homo sapien
tagtgaggagcttgggaatagcccc

SEQ ID NO: 3108338 - DNA, 25 bp, Homo sapien
cgtcccatgactggtgagcaaaagg

SEQ ID NO: 3108339 - DNA, 25 bp, Homo sapien
cagttgggcagttggcgaggtgtcc

SEQ ID NO: 3108340 - DNA, 25 bp, Homo sapien
gttgcaggctgaagtagtaagattc

SEQ ID NO: 3108341 - DNA, 25 bp, Homo sapien
caggctgaagtagtaagattcttgg

SEQ ID NO: 3108342 - DNA, 25 bp, Homo sapien
tgcaggctgaagtagtaagattctt

SEQ ID NO: 3108343 - DNA, 25 bp, Homo sapien
tcagttgcaggctgaagtagtaaga

SEQ ID NO: 3108344 - DNA, 25 bp, Homo sapien
gtgaaccaccacacccagcctttcc

SEQ ID NO: 3108345 - DNA, 25 bp, Homo sapien
gaaccaccacacccagcctttccta

SEQ ID NO: 3108346 - DNA, 25 bp, Homo sapien
tggagcacagtggcacaatttcagc

SEQ ID NO: 3108347 - DNA, 25 bp, Homo sapien
gagcacagtggcacaatttcagctc

SEQ ID NO: 3108348 - DNA, 25 bp, Homo sapien
tgccaaggaggaaacgggcaggtcc

SEQ ID NO: 3108349 - DNA, 25 bp, Homo sapien
ccaaggaggaaacgggcaggtccat

SEQ ID NO: 3108350 - DNA, 25 bp, Homo sapien
aaggaggaaacgggcaggtccatgg

SEQ ID NO: 3108351 - DNA, 25 bp, Homo sapien
cttgccaaggaggaaacgggcaggt

SEQ ID NO: 3108352 - DNA, 25 bp, Homo sapien
tgtcgctcccgcgtggctctgaccg

SEQ ID NO: 3108353 - DNA, 25 bp, Homo sapien
ggtgtcgctcccgcgtggctctgac

SEQ ID NO: 3108354 - DNA, 25 bp, Homo sapien
tcgctcccgcgtggctctgaccgtg

SEQ ID NO: 3108355 - DNA, 25 bp, Homo sapien
tcccgcgtggctctgaccgtggctg

SEQ ID NO: 3108356 - DNA, 25 bp, Homo sapien
gaccacgcgggggacgccagcccac

SEQ ID NO: 3108357 - DNA, 25 bp, Homo sapien
gaggcagccacggagtcacgaccac

SEQ ID NO: 3108358 - DNA, 25 bp, Homo sapien
gcccacaggcggaggccggtttgtg

SEQ ID NO: 3108359 - DNA, 25 bp, Homo sapien
cccacaggcggaggccggtttgtgc

SEQ ID NO: 3108360 - DNA, 25 bp, Homo sapien
tttccatgcaaaccgggagccgtgg

SEQ ID NO: 3108361 - DNA, 25 bp, Homo sapien
taatttccatgcaaaccgggagccg

SEQ ID NO: 3108362 - DNA, 25 bp, Homo sapien
gcatcacgtccgcagcggagggagg

SEQ ID NO: 3108363 - DNA, 25 bp, Homo sapien
atcacgtccgcagcggagggaggca

SEQ ID NO: 3108364 - DNA, 25 bp, Homo sapien
agtgcgagctgaaggcgaagctggg

SEQ ID NO: 3108365 - DNA, 25 bp, Homo sapien
tcgaagtgcgagctgaaggcgaagc

SEQ ID NO: 3108366 - DNA, 25 bp, Homo sapien
ctggggttgaagaaggacgacgaca

SEQ ID NO: 3108367 - DNA, 25 bp, Homo sapien
gggtcgaagtgcgagctgaaggcga

SEQ ID NO: 3108368 - DNA, 25 bp, Homo sapien
gagccgccgcatcacccagcggccg

SEQ ID NO: 3108369 - DNA, 25 bp, Homo sapien
cggcgggcatcccgggagggcgctg

SEQ ID NO: 3108370 - DNA, 25 bp, Homo sapien
cgcagagcccgcaccggtgggggcg

SEQ ID NO: 3108371 - DNA, 25 bp, Homo sapien
ggcggcggcgacagacgaggcgctc

SEQ ID NO: 3108372 - DNA, 25 bp, Homo sapien
agcatgatttcccactccacatatt

SEQ ID NO: 3108373 - DNA, 25 bp, Homo sapien
ttaaaagcatgatttcccactccac

SEQ ID NO: 3108374 - DNA, 25 bp, Homo sapien
atttcccactccacatatttccttt

SEQ ID NO: 3108375 - DNA, 25 bp, Homo sapien
tgatttcccactccacatatttcct

SEQ ID NO: 3108376 - DNA, 25 bp, Homo sapien
tgtgttcagtccccatggaccggcc

SEQ ID NO: 3108377 - DNA, 25 bp, Homo sapien
acgttccattgtgtggacggactgc

SEQ ID NO: 3108378 - DNA, 25 bp, Homo sapien
tgccacatgcctttctacagctgag

SEQ ID NO: 3108379 - DNA, 25 bp, Homo sapien
tgtttatccggccacaccctgaggt

SEQ ID NO: 3108380 - DNA, 25 bp, Homo sapien
gatatgatgttatatgtaaagaatc

SEQ ID NO: 3108381 - DNA, 25 bp, Homo sapien
aaaatgtctaattacctctgtttgc

SEQ ID NO: 3108382 - DNA, 25 bp, Homo sapien
actgctagagctaattaatgatatc

SEQ ID NO: 3108383 - DNA, 25 bp, Homo sapien
agaatcttaaatatgccacaaaaaa

SEQ ID NO: 3108384 - DNA, 25 bp, Homo sapien
atcagcacaacacgtgaggccacgt

SEQ ID NO: 3108385 - DNA, 25 bp, Homo sapien
tcagcacaacacgtgaggccacgtg

SEQ ID NO: 3108386 - DNA, 25 bp, Homo sapien
cagcacaacacgtgaggccacgtga

SEQ ID NO: 3108387 - DNA, 25 bp, Homo sapien
gaccagggacgatgccacctggaag

SEQ ID NO: 3108388 - DNA, 25 bp, Homo sapien
ctggtcaccgaagcccgcaagggga

SEQ ID NO: 3108389 - DNA, 25 bp, Homo sapien
gcgctgggcacgaggacctaagcct

SEQ ID NO: 3108390 - DNA, 25 bp, Homo sapien
taaagacgtaaggaccaggacatgc

SEQ ID NO: 3108391 - DNA, 25 bp, Homo sapien
gggtgagttctgctgagttcctcct

SEQ ID NO: 3108392 - DNA, 25 bp, Homo sapien
tctccagccataggagcacgctggc

SEQ ID NO: 3108393 - DNA, 25 bp, Homo sapien
ctccagccataggagcacgctggca

SEQ ID NO: 3108394 - DNA, 25 bp, Homo sapien
gagttctgctgagttcctcctgcgc

SEQ ID NO: 3108395 - DNA, 25 bp, Homo sapien
gccttccgttcttcgacagtgttcc

SEQ ID NO: 3108396 - DNA, 25 bp, Homo sapien
ttagccgtgggcatctcaaccacca

SEQ ID NO: 3108397 - DNA, 25 bp, Homo sapien
aaaatgcagccacaggtgcttagcc

SEQ ID NO: 3108398 - DNA, 25 bp, Homo sapien
tctgccttccgttcttcgacagtgt

SEQ ID NO: 3108399 - DNA, 25 bp, Homo sapien
aggtggtcggcccgcttcaccgcag

SEQ ID NO: 3108400 - DNA, 25 bp, Homo sapien
tccaggtggtcggcccgcttcaccg

SEQ ID NO: 3108401 - DNA, 25 bp, Homo sapien
ggtggtcggcccgcttcaccgcagc

SEQ ID NO: 3108402 - DNA, 25 bp, Homo sapien
caggtggtcggcccgcttcaccgca

SEQ ID NO: 3108403 - DNA, 25 bp, Homo sapien
tgctcccagccccgaggtccagcag

SEQ ID NO: 3108404 - DNA, 25 bp, Homo sapien
tcatgttgtgtccggaggctgctca

SEQ ID NO: 3108405 - DNA, 25 bp, Homo sapien
ctcatgttgtgtccggaggctgctc

SEQ ID NO: 3108406 - DNA, 25 bp, Homo sapien
catgttgtgtccggaggctgctcac

SEQ ID NO: 3108407 - DNA, 25 bp, Homo sapien
tcctccttcctcgcgagggctgtct

SEQ ID NO: 3108408 - DNA, 25 bp, Homo sapien
ccttcctcgcgagggctgtcttcac

SEQ ID NO: 3108409 - DNA, 25 bp, Homo sapien
tccttcctcgcgagggctgtcttca

SEQ ID NO: 3108410 - DNA, 25 bp, Homo sapien
ctccttcctcgcgagggctgtcttc

SEQ ID NO: 3108411 - DNA, 25 bp, Homo sapien
tgggtagtacatggtaggcttcagt

SEQ ID NO: 3108412 - DNA, 25 bp, Homo sapien
gtagtacatggtaggcttcagtgtg

SEQ ID NO: 3108413 - DNA, 25 bp, Homo sapien
tagtacatggtaggcttcagtgtgg

SEQ ID NO: 3108414 - DNA, 25 bp, Homo sapien
ggtagtacatggtaggcttcagtgt

SEQ ID NO: 3108415 - DNA, 25 bp, Homo sapien
ggccaggttgctgcgctcgctagaa

SEQ ID NO: 3108416 - DNA, 25 bp, Homo sapien
gaactcctggcggatcacctgggcc

SEQ ID NO: 3108417 - DNA, 25 bp, Homo sapien
gctgcgctcgctagaaagctgctcg

SEQ ID NO: 3108418 - DNA, 25 bp, Homo sapien
gctcgctagaaagctgctcgttcac

SEQ ID NO: 3108419 - DNA, 25 bp, Homo sapien
gtacttgtcccgtaagcgcttgatg

SEQ ID NO: 3108420 - DNA, 25 bp, Homo sapien
tgcagacgcagattctcgccctcgg

SEQ ID NO: 3108421 - DNA, 25 bp, Homo sapien
gctcggagagctcggcctcgtactt

SEQ ID NO: 3108422 - DNA, 25 bp, Homo sapien
gagcaccgctcctgaagcttccgct

SEQ ID NO: 3108423 - DNA, 25 bp, Homo sapien
ccctcagctcctgttcccggttcag

SEQ ID NO: 3108424 - DNA, 25 bp, Homo sapien
gcctccagccggtgaatgaccagct

SEQ ID NO: 3108425 - DNA, 25 bp, Homo sapien
cttggccagcgccatgtcggcctcc

SEQ ID NO: 3108426 - DNA, 25 bp, Homo sapien
tcaatctccttgtcccggcctttcc

SEQ ID NO: 3108427 - DNA, 25 bp, Homo sapien
gggccagggccagcctcagggggtc

SEQ ID NO: 3108428 - DNA, 25 bp, Homo sapien
gccagggccagcctcagggggtcct

SEQ ID NO: 3108429 - DNA, 25 bp, Homo sapien
agggccagcctcagggggtcctggg

SEQ ID NO: 3108430 - DNA, 25 bp, Homo sapien
ctgcctgggggttgccacccggagc

SEQ ID NO: 3108431 - DNA, 25 bp, Homo sapien
tgaaaccaggtgacgggcacggtca

SEQ ID NO: 3108432 - DNA, 25 bp, Homo sapien
tgttgtgcgtgtccctctcggtaca

SEQ ID NO: 3108433 - DNA, 25 bp, Homo sapien
tgagaatgtgtgtgggactgtcacc

SEQ ID NO: 3108434 - DNA, 25 bp, Homo sapien
tgttctcggaccacagaggatgcgc

SEQ ID NO: 3108435 - DNA, 25 bp, Homo sapien
ctccttcctggtgcggccggcctcc

SEQ ID NO: 3108436 - DNA, 25 bp, Homo sapien
gctgctgcttcagggtattcagctc

SEQ ID NO: 3108437 - DNA, 25 bp, Homo sapien
ttcctggtgcggccggcctcccacg

SEQ ID NO: 3108438 - DNA, 25 bp, Homo sapien
gctgcttcagggtattcagctccat

SEQ ID NO: 3108439 - DNA, 25 bp, Homo sapien
ggcccagcacagccctccggtggta

SEQ ID NO: 3108440 - DNA, 25 bp, Homo sapien
ccgtgcagccccctggccaggccca

SEQ ID NO: 3108441 - DNA, 25 bp, Homo sapien
caggcccagcacagccctccggtgg

SEQ ID NO: 3108442 - DNA, 25 bp, Homo sapien
ccagcacagccctccggtggtagac

SEQ ID NO: 3108443 - DNA, 25 bp, Homo sapien
gggctcgggtcagtgcagagctgct

SEQ ID NO: 3108444 - DNA, 25 bp, Homo sapien
cctcagggctcgggtcagtgcagag

SEQ ID NO: 3108445 - DNA, 25 bp, Homo sapien
tcaaactcagccctcagggctcggg

SEQ ID NO: 3108446 - DNA, 25 bp, Homo sapien
tcagccctcagggctcgggtcagtg

SEQ ID NO: 3108447 - DNA, 25 bp, Homo sapien
actgtacagccgctgccgttgctgc

SEQ ID NO: 3108448 - DNA, 25 bp, Homo sapien
tgtacagccgctgccgttgctgctg

SEQ ID NO: 3108449 - DNA, 25 bp, Homo sapien
tcactgtacagccgctgccgttgct

SEQ ID NO: 3108450 - DNA, 25 bp, Homo sapien
acctcactgtacagccgctgccgtt

SEQ ID NO: 3108451 - DNA, 25 bp, Homo sapien
agctccgcctcgtgcaggctcttga

SEQ ID NO: 3108452 - DNA, 25 bp, Homo sapien
tcttgagcctccgcacttcctgctt

SEQ ID NO: 3108453 - DNA, 25 bp, Homo sapien
gaggcccgctcatccgactgcagca

SEQ ID NO: 3108454 - DNA, 25 bp, Homo sapien
tgccgagcacgttcgcgctcctgct

SEQ ID NO: 3108455 - DNA, 25 bp, Homo sapien
tcggacagtgacctccttgatcttc

SEQ ID NO: 3108456 - DNA, 25 bp, Homo sapien
tcccggcgggctttctcggtggcgc

SEQ ID NO: 3108457 - DNA, 25 bp, Homo sapien
ttctcggtggcgctcattaattctt

SEQ ID NO: 3108458 - DNA, 25 bp, Homo sapien
ctcggacagtgacctccttgatctt

SEQ ID NO: 3108459 - DNA, 25 bp, Homo sapien
cacagcctcgcacttttcactcagg

SEQ ID NO: 3108460 - DNA, 25 bp, Homo sapien
tgggccacacgctcggtgcatctct

SEQ ID NO: 3108461 - DNA, 25 bp, Homo sapien
gccacacgctcggtgcatctctggt

SEQ ID NO: 3108462 - DNA, 25 bp, Homo sapien
tcgcacttttcactcaggaccttct

SEQ ID NO: 3108463 - DNA, 25 bp, Homo sapien
ctggatggtggcctcgtagtgctcc

SEQ ID NO: 3108464 - DNA, 25 bp, Homo sapien
caatgaaggccaagtgccgctggat

SEQ ID NO: 3108465 - DNA, 25 bp, Homo sapien
aatgaaggccaagtgccgctggatg

SEQ ID NO: 3108466 - DNA, 25 bp, Homo sapien
tggtggcctcgtagtgctccctctg

SEQ ID NO: 3108467 - DNA, 25 bp, Homo sapien
cagcttcagccgcatcacagacgtg

SEQ ID NO: 3108468 - DNA, 25 bp, Homo sapien
ttcagccgcatcacagacgtgctca

SEQ ID NO: 3108469 - DNA, 25 bp, Homo sapien
ctccagcttcagccgcatcacagac

SEQ ID NO: 3108470 - DNA, 25 bp, Homo sapien
gcatcacagacgtgctcacctcgga

SEQ ID NO: 3108471 - DNA, 25 bp, Homo sapien
ccaagttgtcagctgtcagagagct

SEQ ID NO: 3108472 - DNA, 25 bp, Homo sapien
gtagcttggcctccgatagcagcgt

SEQ ID NO: 3108473 - DNA, 25 bp, Homo sapien
ccatctcgtccaagaagctcatgat

SEQ ID NO: 3108474 - DNA, 25 bp, Homo sapien
agcagcgtcccatcctcaggaggtt

SEQ ID NO: 3108475 - DNA, 25 bp, Homo sapien
ggcggggcagcacgtccggctcctt

SEQ ID NO: 3108476 - DNA, 25 bp, Homo sapien
tggcccaggcgtatctgcccctgtg

SEQ ID NO: 3108477 - DNA, 25 bp, Homo sapien
ctcgctggcccaggcgtatctgccc

SEQ ID NO: 3108478 - DNA, 25 bp, Homo sapien
ccaggcgtatctgcccctgtgatgg

SEQ ID NO: 3108479 - DNA, 25 bp, Homo sapien
atcatctccaggttgtccccagctg

SEQ ID NO: 3108480 - DNA, 25 bp, Homo sapien
catcatctccaggttgtccccagct

SEQ ID NO: 3108481 - DNA, 25 bp, Homo sapien
ctggggatgagtcggaggtgggcag

SEQ ID NO: 3108482 - DNA, 25 bp, Homo sapien
ttctggggatgagtcggaggtgggc

SEQ ID NO: 3108483 - DNA, 25 bp, Homo sapien
tctggggatgagtcggaggtgggca

SEQ ID NO: 3108484 - DNA, 25 bp, Homo sapien
gggatgagtcggaggtgggcaggca

SEQ ID NO: 3108485 - DNA, 25 bp, Homo sapien
acagcaccattccacagggagcatc

SEQ ID NO: 3108486 - DNA, 25 bp, Homo sapien
attccacagggagcatcccggggcg

SEQ ID NO: 3108487 - DNA, 25 bp, Homo sapien
agaacacagcaccattccacaggga

SEQ ID NO: 3108488 - DNA, 25 bp, Homo sapien
agcagaacacagcaccattccacag

SEQ ID NO: 3108489 - DNA, 25 bp, Homo sapien
agggcgggcgtggagccactctcac

SEQ ID NO: 3108490 - DNA, 25 bp, Homo sapien
ctcggcagtgctcgccttctgggct

SEQ ID NO: 3108491 - DNA, 25 bp, Homo sapien
ggcctggtgggcagtgccgcctggt

SEQ ID NO: 3108492 - DNA, 25 bp, Homo sapien
ctcaggtggcccacgctcggcagtg

SEQ ID NO: 3108493 - DNA, 25 bp, Homo sapien
cagtattgttggccttgagggcctg

SEQ ID NO: 3108494 - DNA, 25 bp, Homo sapien
ctgcagtgggagcatcgctgagcac

SEQ ID NO: 3108495 - DNA, 25 bp, Homo sapien
tgcagtgggagcatcgctgagcact

SEQ ID NO: 3108496 - DNA, 25 bp, Homo sapien
cagtgggagcatcgctgagcactgt

SEQ ID NO: 3108497 - DNA, 25 bp, Homo sapien
gtgggagcatcgctgagcactgtcc

SEQ ID NO: 3108498 - DNA, 25 bp, Homo sapien
ctggtgcaggtccaagagggtcccc

SEQ ID NO: 3108499 - DNA, 25 bp, Homo sapien
gctggtgcaggtccaagagggtccc

SEQ ID NO: 3108500 - DNA, 25 bp, Homo sapien
ggcctggttcacctggtggataaac

SEQ ID NO: 3108501 - DNA, 25 bp, Homo sapien
cctggtgccggtaccagcgctggat

SEQ ID NO: 3108502 - DNA, 25 bp, Homo sapien
gcacctggtgccggtaccagcgctg

SEQ ID NO: 3108503 - DNA, 25 bp, Homo sapien
ccggtaccagcgctggatggtgaca

SEQ ID NO: 3108504 - DNA, 25 bp, Homo sapien
tggcactggagacattcttcggcag

SEQ ID NO: 3108505 - DNA, 25 bp, Homo sapien
gacattcttcggcagcttcccaaag

SEQ ID NO: 3108506 - DNA, 25 bp, Homo sapien
cttccgcctgggcaagcccgtgctg

SEQ ID NO: 3108507 - DNA, 25 bp, Homo sapien
ccccagtattgttccgggctgagtg

SEQ ID NO: 3108508 - DNA, 25 bp, Homo sapien
accatggtggtgacgcagttgccca

SEQ ID NO: 3108509 - DNA, 25 bp, Homo sapien
ggcagtctggttggagctcttgagc

SEQ ID NO: 3108510 - DNA, 25 bp, Homo sapien
ttggagctcttgagcggaggcgccc

SEQ ID NO: 3108511 - DNA, 25 bp, Homo sapien
tgtagcggttgtgcaccatggtggt

SEQ ID NO: 3108512 - DNA, 25 bp, Homo sapien
cacggtgcattctttcctccgcggg

SEQ ID NO: 3108513 - DNA, 25 bp, Homo sapien
ctccgcgggcccgctggtgagtcaa

SEQ ID NO: 3108514 - DNA, 25 bp, Homo sapien
gccagggccacggtgcattctttcc

SEQ ID NO: 3108515 - DNA, 25 bp, Homo sapien
cgggcccgctggtgagtcaagggca

SEQ ID NO: 3108516 - DNA, 25 bp, Homo sapien
ttggatggcaaggtgaagccccggg

SEQ ID NO: 3108517 - DNA, 25 bp, Homo sapien
cattggatggcaaggtgaagccccg

SEQ ID NO: 3108518 - DNA, 25 bp, Homo sapien
ggaactccgggcattggatggcaag

SEQ ID NO: 3108519 - DNA, 25 bp, Homo sapien
ctggaactccgggcattggatggca

SEQ ID NO: 3108520 - DNA, 25 bp, Homo sapien
ggctgccctcgaagagcatcaggaa

SEQ ID NO: 3108521 - DNA, 25 bp, Homo sapien
cactggggctgccctcgaagagcat

SEQ ID NO: 3108522 - DNA, 25 bp, Homo sapien
gggctgccctcgaagagcatcagga

SEQ ID NO: 3108523 - DNA, 25 bp, Homo sapien
tggggctgccctcgaagagcatcag

SEQ ID NO: 3108524 - DNA, 25 bp, Homo sapien
acctgcgtggtgctgttggatcttc

SEQ ID NO: 3108525 - DNA, 25 bp, Homo sapien
ctgacctgcgtggtgctgttggatc

SEQ ID NO: 3108526 - DNA, 25 bp, Homo sapien
gacctgcgtggtgctgttggatctt

SEQ ID NO: 3108527 - DNA, 25 bp, Homo sapien
tggctgacctgcgtggtgctgttgg

SEQ ID NO: 3108528 - DNA, 25 bp, Homo sapien
accacggagacagagcggacgatgg

SEQ ID NO: 3108529 - DNA, 25 bp, Homo sapien
cccgggtgcctttcatggtggacaa

SEQ ID NO: 3108530 - DNA, 25 bp, Homo sapien
aggacgccgggacacaggcggaggg

SEQ ID NO: 3108531 - DNA, 25 bp, Homo sapien
cgggacgctgccgatggcccgggtg

SEQ ID NO: 3108532 - DNA, 25 bp, Homo sapien
tcgcgcccaaacctcgggtcggcga

SEQ ID NO: 3108533 - DNA, 25 bp, Homo sapien
ggtcggcgacctggcgccccgccac

SEQ ID NO: 3108534 - DNA, 25 bp, Homo sapien
ggggcctgcagattcggccggcggg

SEQ ID NO: 3108535 - DNA, 25 bp, Homo sapien
gggatgcggaaccagtcgcgcccaa

SEQ ID NO: 3108536 - DNA, 25 bp, Homo sapien
cggacggccggggtgagcagcggcg

SEQ ID NO: 3108537 - DNA, 25 bp, Homo sapien
agcagcggcggcagctagcaaccag

SEQ ID NO: 3108538 - DNA, 25 bp, Homo sapien
gacaatgaagcggccggacggccgg

SEQ ID NO: 3108539 - DNA, 25 bp, Homo sapien
gcagcggcggcagctagcaaccagc

SEQ ID NO: 3108540 - DNA, 25 bp, Homo sapien
tcccgggagctcattgggccgctcg

SEQ ID NO: 3108541 - DNA, 25 bp, Homo sapien
gctcaggccgtcccgggagctcatt

SEQ ID NO: 3108542 - DNA, 25 bp, Homo sapien
gcgccgactccggattggcccttca

SEQ ID NO: 3108543 - DNA, 25 bp, Homo sapien
acgccggcccgcctttcctgcgcgc

SEQ ID NO: 3108544 - DNA, 25 bp, Homo sapien
cgccccgtgcgtagccgctctgtga

SEQ ID NO: 3108545 - DNA, 25 bp, Homo sapien
agttttaacgctgcgccccgtgcgt

SEQ ID NO: 3108546 - DNA, 25 bp, Homo sapien
tccttctccaaagttttaacgctgc

SEQ ID NO: 3108547 - DNA, 25 bp, Homo sapien
cttcccttcgcgctgctttgttgtt

SEQ ID NO: 3108548 - DNA, 25 bp, Homo sapien
gagccctgagatcgacatttctgaa

SEQ ID NO: 3108549 - DNA, 25 bp, Homo sapien
taaggaacctggtagtcgcttccgc

SEQ ID NO: 3108550 - DNA, 25 bp, Homo sapien
gaggctccaatcagaggcttcgtgt

SEQ ID NO: 3108551 - DNA, 25 bp, Homo sapien
tagggtcgtcctctcaagtcaagct

SEQ ID NO: 3108552 - DNA, 25 bp, Homo sapien
tggacggcatcccagatgagggagc

SEQ ID NO: 3108553 - DNA, 25 bp, Homo sapien
ggaacgcgaaagctgacggctctga

SEQ ID NO: 3108554 - DNA, 25 bp, Homo sapien
ggagtcgcggctccacgcacagctg

SEQ ID NO: 3108555 - DNA, 25 bp, Homo sapien
catgccagcaaacaaggagtcgcgg

SEQ ID NO: 3108556 - DNA, 25 bp, Homo sapien
aggaggcctcaaagtgcctcaggat

SEQ ID NO: 3108557 - DNA, 25 bp, Homo sapien
gaagaaagaagctgggaatgcccac

SEQ ID NO: 3108558 - DNA, 25 bp, Homo sapien
tgagctagcagatggccaatgacag

SEQ ID NO: 3108559 - DNA, 25 bp, Homo sapien
tgaacacgtggcctggcacatctgg

SEQ ID NO: 3108560 - DNA, 25 bp, Homo sapien
ccaactgttggacgcagggttcttc

SEQ ID NO: 3108561 - DNA, 25 bp, Homo sapien
cactgtacccttggaccccggtgtg

SEQ ID NO: 3108562 - DNA, 25 bp, Homo sapien
tgtgcgtgtggcctccgcagctgcc

SEQ ID NO: 3108563 - DNA, 25 bp, Homo sapien
ggactgcagcgtatctcccactgta

SEQ ID NO: 3108564 - DNA, 25 bp, Homo sapien
gtggactgcagcgtatctcccactg

SEQ ID NO: 3108565 - DNA, 25 bp, Homo sapien
ccgggtgcggaggaggatgtgctcc

SEQ ID NO: 3108566 - DNA, 25 bp, Homo sapien
cgggtgcggaggaggatgtgctcct

SEQ ID NO: 3108567 - DNA, 25 bp, Homo sapien
tggccttgttggtcacaggtcccgg

SEQ ID NO: 3108568 - DNA, 25 bp, Homo sapien
cgtgcattcactggtcccacgcagg

SEQ ID NO: 3108569 - DNA, 25 bp, Homo sapien
gtgcattcactggtcccacgcaggt

SEQ ID NO: 3108570 - DNA, 25 bp, Homo sapien
tgcattcactggtcccacgcaggtg

SEQ ID NO: 3108571 - DNA, 25 bp, Homo sapien
gagtcacagtcctcaccaagctcaa

SEQ ID NO: 3108572 - DNA, 25 bp, Homo sapien
tcgcggctcaggaaggcgcgtggtc

SEQ ID NO: 3108573 - DNA, 25 bp, Homo sapien
aagtgctgtgcctcctcgcggctca

SEQ ID NO: 3108574 - DNA, 25 bp, Homo sapien
aaggcgcgtggtccccgagtcacag

SEQ ID NO: 3108575 - DNA, 25 bp, Homo sapien
acagtcactcagggccaccacctcg

SEQ ID NO: 3108576 - DNA, 25 bp, Homo sapien
ctgacagtcactcagggccaccacc

SEQ ID NO: 3108577 - DNA, 25 bp, Homo sapien
gtcactcagggccaccacctcgacc

SEQ ID NO: 3108578 - DNA, 25 bp, Homo sapien
gacagtcactcagggccaccacctc

SEQ ID NO: 3108579 - DNA, 25 bp, Homo sapien
gaccctgctcaggtcgctgttctgg

SEQ ID NO: 3108580 - DNA, 25 bp, Homo sapien
atgactgcccgagtccgagaccctg

SEQ ID NO: 3108581 - DNA, 25 bp, Homo sapien
ctggcccctgaatggctgtcgctgc

SEQ ID NO: 3108582 - DNA, 25 bp, Homo sapien
ctgtcgctgccggaatgactgcccg

SEQ ID NO: 3108583 - DNA, 25 bp, Homo sapien
aaggcatcatggcaggctggtaggt

SEQ ID NO: 3108584 - DNA, 25 bp, Homo sapien
catcatggcaggctggtaggtgtca

SEQ ID NO: 3108585 - DNA, 25 bp, Homo sapien
ctggctgaaggcatcatggcaggct

SEQ ID NO: 3108586 - DNA, 25 bp, Homo sapien
gctggtaggtgtcaccccgcggcag

SEQ ID NO: 3108587 - DNA, 25 bp, Homo sapien
tgggagcagggtgcccgcatcggct

SEQ ID NO: 3108588 - DNA, 25 bp, Homo sapien
tctgggagcagggtgcccgcatcgg

SEQ ID NO: 3108589 - DNA, 25 bp, Homo sapien
tgctcaagcttggagaggtcggggt

SEQ ID NO: 3108590 - DNA, 25 bp, Homo sapien
caagcttggagaggtcggggtacat

SEQ ID NO: 3108591 - DNA, 25 bp, Homo sapien
agcagttgtccactggtactgcccc

SEQ ID NO: 3108592 - DNA, 25 bp, Homo sapien
gctccacacgggactgcctgagtca

SEQ ID NO: 3108593 - DNA, 25 bp, Homo sapien
ggtactgccccacctcataacagct

SEQ ID NO: 3108594 - DNA, 25 bp, Homo sapien
ctcataacagctccacacgggactg

SEQ ID NO: 3108595 - DNA, 25 bp, Homo sapien
ccttgctgtagccgaaaccctggag

SEQ ID NO: 3108596 - DNA, 25 bp, Homo sapien
ctgtagccgaaaccctggagggtgc

SEQ ID NO: 3108597 - DNA, 25 bp, Homo sapien
ttgctgtagccgaaaccctggaggg

SEQ ID NO: 3108598 - DNA, 25 bp, Homo sapien
ttccttgctgtagccgaaaccctgg

SEQ ID NO: 3108599 - DNA, 25 bp, Homo sapien
cacggtgtccgagaacagggtgctc

SEQ ID NO: 3108600 - DNA, 25 bp, Homo sapien
ctgggagggagccagcggcaacacg

SEQ ID NO: 3108601 - DNA, 25 bp, Homo sapien
agcggcaacacggtgtccgagaaca

SEQ ID NO: 3108602 - DNA, 25 bp, Homo sapien
tgtccgagaacagggtgctccccaa

SEQ ID NO: 3108603 - DNA, 25 bp, Homo sapien
gcgcggccgcgcgaaccttctggta

SEQ ID NO: 3108604 - DNA, 25 bp, Homo sapien
gctgttcccgtgcagaggatctggg

SEQ ID NO: 3108605 - DNA, 25 bp, Homo sapien
ttctggtacaagctgttcccgtgca

SEQ ID NO: 3108606 - DNA, 25 bp, Homo sapien
gcgcgaaccttctggtacaagctgt

SEQ ID NO: 3108607 - DNA, 25 bp, Homo sapien
cctcgagagcctctgtcacaggcga

SEQ ID NO: 3108608 - DNA, 25 bp, Homo sapien
tgtgcctctgagaacccctcgagag

SEQ ID NO: 3108609 - DNA, 25 bp, Homo sapien
ggccgcggcatcctttcagggctca

SEQ ID NO: 3108610 - DNA, 25 bp, Homo sapien
gaaaccagcgttcttatcacagcct

SEQ ID NO: 3108611 - DNA, 25 bp, Homo sapien
caggctggtcccgtgattcggagac

SEQ ID NO: 3108612 - DNA, 25 bp, Homo sapien
ggccacaagctgagtcaatggctgg

SEQ ID NO: 3108613 - DNA, 25 bp, Homo sapien
ttcggagacgatgctcctggctgtc

SEQ ID NO: 3108614 - DNA, 25 bp, Homo sapien
ggatgaactgacaccctgaggctgc

SEQ ID NO: 3108615 - DNA, 25 bp, Homo sapien
ttcctgagcgcgtgcgcggcccctg

SEQ ID NO: 3108616 - DNA, 25 bp, Homo sapien
tcctgagcgcgtgcgcggcccctgt

SEQ ID NO: 3108617 - DNA, 25 bp, Homo sapien
cctgagcgcgtgcgcggcccctgta

SEQ ID NO: 3108618 - DNA, 25 bp, Homo sapien
ctgagcgcgtgcgcggcccctgtac

SEQ ID NO: 3108619 - DNA, 25 bp, Homo sapien
gaaggaggagccgtggctgcacaga

SEQ ID NO: 3108620 - DNA, 25 bp, Homo sapien
aagaaggaggagccgtggctgcaca

SEQ ID NO: 3108621 - DNA, 25 bp, Homo sapien
agaaggaggagccgtggctgcacag

SEQ ID NO: 3108622 - DNA, 25 bp, Homo sapien
gggagtggggcggtcagcagtgctg

SEQ ID NO: 3108623 - DNA, 25 bp, Homo sapien
accctgggccgctcgtctgctcctc

SEQ ID NO: 3108624 - DNA, 25 bp, Homo sapien
tgggcaggccggacacgggacaccc

SEQ ID NO: 3108625 - DNA, 25 bp, Homo sapien
ggccggacacgggacacccagggca

SEQ ID NO: 3108626 - DNA, 25 bp, Homo sapien
tgcaggcggctcaggaggtactcca

SEQ ID NO: 3108627 - DNA, 25 bp, Homo sapien
tgctgcccggagactcgtgggagat

SEQ ID NO: 3108628 - DNA, 25 bp, Homo sapien
ggctgctgcccggagactcgtggga

SEQ ID NO: 3108629 - DNA, 25 bp, Homo sapien
ctgcccggagactcgtgggagattt

SEQ ID NO: 3108630 - DNA, 25 bp, Homo sapien
tgtcatcagtattgcagccttcaga

SEQ ID NO: 3108631 - DNA, 25 bp, Homo sapien
cctggaggcgcctactggaggctct

SEQ ID NO: 3108632 - DNA, 25 bp, Homo sapien
aataataaaggagccgtgcatcccc

SEQ ID NO: 3108633 - DNA, 25 bp, Homo sapien
aggaaccctttgcaccactctggga

SEQ ID NO: 3108634 - DNA, 25 bp, Homo sapien
acaggtagcccggacacgggacatc

SEQ ID NO: 3108635 - DNA, 25 bp, Homo sapien
atcatcatcggacgtccccttcagg

SEQ ID NO: 3108636 - DNA, 25 bp, Homo sapien
acacgggacatcatcatcggacgtc

SEQ ID NO: 3108637 - DNA, 25 bp, Homo sapien
gacgtccccttcaggagaatcggga

SEQ ID NO: 3108638 - DNA, 25 bp, Homo sapien
tgaaagggaacaagagcccctacca

SEQ ID NO: 3108639 - DNA, 25 bp, Homo sapien
gccatttcccacaggggtgaatccg

SEQ ID NO: 3108640 - DNA, 25 bp, Homo sapien
ttcccacaggggtgaatccgcagcc

SEQ ID NO: 3108641 - DNA, 25 bp, Homo sapien
tttcccacaggggtgaatccgcagc

SEQ ID NO: 3108642 - DNA, 25 bp, Homo sapien
catttcccacaggggtgaatccgca

SEQ ID NO: 3108643 - DNA, 25 bp, Homo sapien
tgagaactgtgctactggccacagg

SEQ ID NO: 3108644 - DNA, 25 bp, Homo sapien
ctctcactgttgacatggccggaga

SEQ ID NO: 3108645 - DNA, 25 bp, Homo sapien
tcactgttgacatggccggagagag

SEQ ID NO: 3108646 - DNA, 25 bp, Homo sapien
ctctcaacagtcagggatgaacagc

SEQ ID NO: 3108647 - DNA, 25 bp, Homo sapien
caatggtggttctccacggaggagc

SEQ ID NO: 3108648 - DNA, 25 bp, Homo sapien
ggagctgcgccacttgggttaagaa

SEQ ID NO: 3108649 - DNA, 25 bp, Homo sapien
tactgactagcaaagccaaacaagg

SEQ ID NO: 3108650 - DNA, 25 bp, Homo sapien
gctccccgagaaccgactgatgtcg

SEQ ID NO: 3108651 - DNA, 25 bp, Homo sapien
caccgcgtgaggtgccgaagccttt

SEQ ID NO: 3108652 - DNA, 25 bp, Homo sapien
cacaaagatgtacggtttataggga

SEQ ID NO: 3108653 - DNA, 25 bp, Homo sapien
tttaacaggacaagcatgggaccca

SEQ ID NO: 3108654 - DNA, 25 bp, Homo sapien
cagtatcaggacagaatagagttca

SEQ ID NO: 3108655 - DNA, 25 bp, Homo sapien
tatgtcgaaaccttgcactgagagc

SEQ ID NO: 3108656 - DNA, 25 bp, Homo sapien
gagggcagtttgctcaggacgacac

SEQ ID NO: 3108657 - DNA, 25 bp, Homo sapien
tcagggctgacaaaagagggcagtt

SEQ ID NO: 3108658 - DNA, 25 bp, Homo sapien
tgtggacacgcatcactgacactgt

SEQ ID NO: 3108659 - DNA, 25 bp, Homo sapien
tgtcccttcgagacgtctgtgttct

SEQ ID NO: 3108660 - DNA, 25 bp, Homo sapien
tccaggaccggagtcctctgaaacg

SEQ ID NO: 3108661 - DNA, 25 bp, Homo sapien
tctctgtcccttcgagacgtctgtg

SEQ ID NO: 3108662 - DNA, 25 bp, Homo sapien
tctgaaacgccaccgtcagggagga

SEQ ID NO: 3108663 - DNA, 25 bp, Homo sapien
agcggctccacgtccaccgggtccg

SEQ ID NO: 3108664 - DNA, 25 bp, Homo sapien
cagcagcacggacacagcggctcca

SEQ ID NO: 3108665 - DNA, 25 bp, Homo sapien
tggctgtgcccatcgcccttgcgct

SEQ ID NO: 3108666 - DNA, 25 bp, Homo sapien
ctcccgtcggaggccactgaatgct

SEQ ID NO: 3108667 - DNA, 25 bp, Homo sapien
agctcaggggcgtcggcgcgggcga

SEQ ID NO: 3108668 - DNA, 25 bp, Homo sapien
gctcaggggcgtcggcgcgggcgaa

SEQ ID NO: 3108669 - DNA, 25 bp, Homo sapien
ctacccggcgcggagacgcaaggtc

SEQ ID NO: 3108670 - DNA, 25 bp, Homo sapien
ggcccgggcggaccgccctcactca

SEQ ID NO: 3108671 - DNA, 25 bp, Homo sapien
cgcggagacgcaaggtcaatggctc

SEQ ID NO: 3108672 - DNA, 25 bp, Homo sapien
gaatgcggcgctcgagaggagccgt

SEQ ID NO: 3108673 - DNA, 25 bp, Homo sapien
gtgtagaaagctcaggcggtcccgt

SEQ ID NO: 3108674 - DNA, 25 bp, Homo sapien
gtagaaagctcaggcggtcccgtag

SEQ ID NO: 3108675 - DNA, 25 bp, Homo sapien
ccggtgtagaaagctcaggcggtcc

SEQ ID NO: 3108676 - DNA, 25 bp, Homo sapien
aaagctcaggcggtcccgtagcggc

SEQ ID NO: 3108677 - DNA, 25 bp, Homo sapien
tcacaactggcacgatagggcttct

SEQ ID NO: 3108678 - DNA, 25 bp, Homo sapien
ttcaaggtttgagcgcctgccgcgt

SEQ ID NO: 3108679 - DNA, 25 bp, Homo sapien
catgtttgtaaagcgggactggcac

SEQ ID NO: 3108680 - DNA, 25 bp, Homo sapien
tagacgccggctgacaaaatcaccg

SEQ ID NO: 3108681 - DNA, 25 bp, Homo sapien
cattcctcggtgttagatcctgttt

SEQ ID NO: 3108682 - DNA, 25 bp, Homo sapien
gcccctggtggcacatatcgaatgc

SEQ ID NO: 3108683 - DNA, 25 bp, Homo sapien
tgtgacattcctcggtgttagatcc

SEQ ID NO: 3108684 - DNA, 25 bp, Homo sapien
ggcacatatcgaatgcctagggcag

SEQ ID NO: 3108685 - DNA, 25 bp, Homo sapien
tggacacccggcttgtctggcccct

SEQ ID NO: 3108686 - DNA, 25 bp, Homo sapien
gacaatggagggctgggccaaccat

SEQ ID NO: 3108687 - DNA, 25 bp, Homo sapien
tgggccaaccatgaggagtgcaaag

SEQ ID NO: 3108688 - DNA, 25 bp, Homo sapien
tgcaaagggcggcaccggccagtgc

SEQ ID NO: 3108689 - DNA, 25 bp, Homo sapien
tcagaggacctcagactaagagctg

SEQ ID NO: 3108690 - DNA, 25 bp, Homo sapien
accacactgtgggaagcatcgataa

SEQ ID NO: 3108691 - DNA, 25 bp, Homo sapien
aggccgtttctcctcacaggctgga

SEQ ID NO: 3108692 - DNA, 25 bp, Homo sapien
cctgtgttgggaccatgagcagcca

SEQ ID NO: 3108693 - DNA, 25 bp, Homo sapien
ggttaaggccaatgatgaccccatc

SEQ ID NO: 3108694 - DNA, 25 bp, Homo sapien
ggcgcctgtctaagctgccggctgt

SEQ ID NO: 3108695 - DNA, 25 bp, Homo sapien
cctgcagtttcaggtcccggttggg

SEQ ID NO: 3108696 - DNA, 25 bp, Homo sapien
gaggtcgttcacctggacatcaggc

SEQ ID NO: 3108697 - DNA, 25 bp, Homo sapien
agagatgacccgcagttccggctgg

SEQ ID NO: 3108698 - DNA, 25 bp, Homo sapien
cccgggacagctcgtttgagcccca

SEQ ID NO: 3108699 - DNA, 25 bp, Homo sapien
tccggctggcgtaacacagcctggg

SEQ ID NO: 3108700 - DNA, 25 bp, Homo sapien
atctccaggtgaccgccatggtcca

SEQ ID NO: 3108701 - DNA, 25 bp, Homo sapien
aggtctcggctcacttgcttgggct

SEQ ID NO: 3108702 - DNA, 25 bp, Homo sapien
cgagggtcccccgtctctgctcctg

SEQ ID NO: 3108703 - DNA, 25 bp, Homo sapien
gcgagggtcccccgtctctgctcct

SEQ ID NO: 3108704 - DNA, 25 bp, Homo sapien
gagggtcccccgtctctgctcctgg

SEQ ID NO: 3108705 - DNA, 25 bp, Homo sapien
agggtcccccgtctctgctcctggc

SEQ ID NO: 3108706 - DNA, 25 bp, Homo sapien
ctgccacgagccagttggcttcctt

SEQ ID NO: 3108707 - DNA, 25 bp, Homo sapien
tgccacgagccagttggcttccttc

SEQ ID NO: 3108708 - DNA, 25 bp, Homo sapien
tttgcccagggaattcctctgcgag

SEQ ID NO: 3108709 - DNA, 25 bp, Homo sapien
gagcgctggttaaggtcctgggatg

SEQ ID NO: 3108710 - DNA, 25 bp, Homo sapien
aaccgccagtaacgtcctgactttg

SEQ ID NO: 3108711 - DNA, 25 bp, Homo sapien
aggctctgtgtcagggccgccgtca

SEQ ID NO: 3108712 - DNA, 25 bp, Homo sapien
gaagtcggtcatcaatttagccaca

SEQ ID NO: 3108713 - DNA, 25 bp, Homo sapien
cggtcatcaatttagccacagcact

SEQ ID NO: 3108714 - DNA, 25 bp, Homo sapien
ctgcaaatgaagtcggtcatcaatt

SEQ ID NO: 3108715 - DNA, 25 bp, Homo sapien
aatgaagtcggtcatcaatttagcc

SEQ ID NO: 3108716 - DNA, 25 bp, Homo sapien
tgctgctcctcgatcaccgccagca

SEQ ID NO: 3108717 - DNA, 25 bp, Homo sapien
gcaagcgcttttgctgcacctgctg

SEQ ID NO: 3108718 - DNA, 25 bp, Homo sapien
ctgctggtccagcaagcgcttttgc

SEQ ID NO: 3108719 - DNA, 25 bp, Homo sapien
ctgcctctgctggtggatctccttg

SEQ ID NO: 3108720 - DNA, 25 bp, Homo sapien
tggtccagcatctccgccctgccag

SEQ ID NO: 3108721 - DNA, 25 bp, Homo sapien
ctgaagcaggacggcgtggtccagc

SEQ ID NO: 3108722 - DNA, 25 bp, Homo sapien
agcaggacggcgtggtccagcatct

SEQ ID NO: 3108723 - DNA, 25 bp, Homo sapien
gtggtccagcatctccgccctgcca

SEQ ID NO: 3108724 - DNA, 25 bp, Homo sapien
accgtgctgggccagggacggcgcg

SEQ ID NO: 3108725 - DNA, 25 bp, Homo sapien
gggccagggacggcgcggcccacag

SEQ ID NO: 3108726 - DNA, 25 bp, Homo sapien
cacagcaaggcaacgcacaggtcac

SEQ ID NO: 3108727 - DNA, 25 bp, Homo sapien
ggctgctcatgcaccgtgctgggcc

SEQ ID NO: 3108728 - DNA, 25 bp, Homo sapien
acccatcatgactgtgaccgtgaag

SEQ ID NO: 3108729 - DNA, 25 bp, Homo sapien
ggacagctcagtgatgcacgcaggc

SEQ ID NO: 3108730 - DNA, 25 bp, Homo sapien
ctgcagggagtgtgcccgaacactg

SEQ ID NO: 3108731 - DNA, 25 bp, Homo sapien
cgtgaagcccggacagctcagtgat

SEQ ID NO: 3108732 - DNA, 25 bp, Homo sapien
gcaagcctgctcgttgcccatggaa

SEQ ID NO: 3108733 - DNA, 25 bp, Homo sapien
gtgtccagagcaacagtcaaaagga

SEQ ID NO: 3108734 - DNA, 25 bp, Homo sapien
cattcagttgttctaggacaagcac

SEQ ID NO: 3108735 - DNA, 25 bp, Homo sapien
agtcaaaaggaatgtgccagaatgt

SEQ ID NO: 3108736 - DNA, 25 bp, Homo sapien
tgcatgccaggcatagactgacgtg

SEQ ID NO: 3108737 - DNA, 25 bp, Homo sapien
cataaaagttcaatccaggagcgag

SEQ ID NO: 3108738 - DNA, 25 bp, Homo sapien
gggttccgaaagagcaggcaccatg

SEQ ID NO: 3108739 - DNA, 25 bp, Homo sapien
tcaatggtacaaggacgagatccca

SEQ ID NO: 3108740 - DNA, 25 bp, Homo sapien
tgcgctcaggtctgtggcccgccag

SEQ ID NO: 3108741 - DNA, 25 bp, Homo sapien
ggctgagaaggaccacggcatttgt

SEQ ID NO: 3108742 - DNA, 25 bp, Homo sapien
ggcccgccagacaggctcttgactt

SEQ ID NO: 3108743 - DNA, 25 bp, Homo sapien
ggcatttgtaacacaagggagcaga

SEQ ID NO: 3108744 - DNA, 25 bp, Homo sapien
catggccagactaaaaccggagaca

SEQ ID NO: 3108745 - DNA, 25 bp, Homo sapien
tgctcgtcccgttgagaggcatacg

SEQ ID NO: 3108746 - DNA, 25 bp, Homo sapien
taacagagcataggaattggaacca

SEQ ID NO: 3108747 - DNA, 25 bp, Homo sapien
tgtgtcttacgaacatcctgggagg

SEQ ID NO: 3108748 - DNA, 25 bp, Homo sapien
caaaggcgtaaggagctttcctgga

SEQ ID NO: 3108749 - DNA, 25 bp, Homo sapien
tagatgaacacagccgagctccgag

SEQ ID NO: 3108750 - DNA, 25 bp, Homo sapien
cctggctggctttaaatactccgag

SEQ ID NO: 3108751 - DNA, 25 bp, Homo sapien
gaaatggtaatcacaagccaagtga

SEQ ID NO: 3108752 - DNA, 25 bp, Homo sapien
gtgacgatgccgcaggtgtttaaag

SEQ ID NO: 3108753 - DNA, 25 bp, Homo sapien
taaaacggtaatcacaagccatgtg

SEQ ID NO: 3108754 - DNA, 25 bp, Homo sapien
taaggcagataaaaggttcccagaa

SEQ ID NO: 3108755 - DNA, 25 bp, Homo sapien
ggatgacctgggcatcaccccaggg

SEQ ID NO: 3108756 - DNA, 25 bp, Homo sapien
gtttccacccgctcgctccacgtcc

SEQ ID NO: 3108757 - DNA, 25 bp, Homo sapien
cacccgctcgctccacgtccctctg

SEQ ID NO: 3108758 - DNA, 25 bp, Homo sapien
cctggtttccacccgctcgctccac

SEQ ID NO: 3108759 - DNA, 25 bp, Homo sapien
tggtttccacccgctcgctccacgt

SEQ ID NO: 3108760 - DNA, 25 bp, Homo sapien
ggagccggcttctccgctgggaggg

SEQ ID NO: 3108761 - DNA, 25 bp, Homo sapien
cggcttctccgctgggaggggaggc

SEQ ID NO: 3108762 - DNA, 25 bp, Homo sapien
cctggagccggcttctccgctggga

SEQ ID NO: 3108763 - DNA, 25 bp, Homo sapien
aggccctggagccggcttctccgct

SEQ ID NO: 3108764 - DNA, 25 bp, Homo sapien
tagtggtctggcaaacaactgtgtg

SEQ ID NO: 3108765 - DNA, 25 bp, Homo sapien
taacaacgtgttacctgtcaggcgc

SEQ ID NO: 3108766 - DNA, 25 bp, Homo sapien
gcagctcttagacgggcacttaaca

SEQ ID NO: 3108767 - DNA, 25 bp, Homo sapien
ggaggaaccatcgattctgctgccc

SEQ ID NO: 3108768 - DNA, 25 bp, Homo sapien
tgcctggcggcggtccccccttggc

SEQ ID NO: 3108769 - DNA, 25 bp, Homo sapien
tgtccccggcggcgttgcctggcgg

SEQ ID NO: 3108770 - DNA, 25 bp, Homo sapien
gcggcgttgcctggcggcggtcccc

SEQ ID NO: 3108771 - DNA, 25 bp, Homo sapien
gccgttctgctgctcagacagcact

SEQ ID NO: 3108772 - DNA, 25 bp, Homo sapien
ccgttctgctgctcagacagcactg

SEQ ID NO: 3108773 - DNA, 25 bp, Homo sapien
ccaggccgttctgctgctcagacag

SEQ ID NO: 3108774 - DNA, 25 bp, Homo sapien
aggccgttctgctgctcagacagca

SEQ ID NO: 3108775 - DNA, 25 bp, Homo sapien
taccaccaccttgtcgtgaggaaca

SEQ ID NO: 3108776 - DNA, 25 bp, Homo sapien
ctttccgcccgcgtgtctggatgga

SEQ ID NO: 3108777 - DNA, 25 bp, Homo sapien
ttctctctttctgagtcgggcagag

SEQ ID NO: 3108778 - DNA, 25 bp, Homo sapien
ggcacctctcggtcttggccttcat

SEQ ID NO: 3108779 - DNA, 25 bp, Homo sapien
tctctccttcggcagcttcggcttc

SEQ ID NO: 3108780 - DNA, 25 bp, Homo sapien
acgggccccttgatctgggcctgct

SEQ ID NO: 3108781 - DNA, 25 bp, Homo sapien
ttcccgtccaggcacatccacgggc

SEQ ID NO: 3108782 - DNA, 25 bp, Homo sapien
cttgcccagggcgatcgagctgtgc

SEQ ID NO: 3108783 - DNA, 25 bp, Homo sapien
actgcactgccaagcagctccagga

SEQ ID NO: 3108784 - DNA, 25 bp, Homo sapien
gctctccctggactgttaccatatt

SEQ ID NO: 3108785 - DNA, 25 bp, Homo sapien
gggagcagggcacagttagggaact

SEQ ID NO: 3108786 - DNA, 25 bp, Homo sapien
tctttttcctgttcgatcattagca

SEQ ID NO: 3108787 - DNA, 25 bp, Homo sapien
tgaacacaggttgcgcaaagacaga

SEQ ID NO: 3108788 - DNA, 25 bp, Homo sapien
cagggacagtttgccggcagtgcct

SEQ ID NO: 3108789 - DNA, 25 bp, Homo sapien
aactgaaaaacgtccgagtgctgcc

SEQ ID NO: 3108790 - DNA, 25 bp, Homo sapien
aacggagcccatctttgcgtcaggg

SEQ ID NO: 3108791 - DNA, 25 bp, Homo sapien
tgttacagcctcgtggaagaaacag

SEQ ID NO: 3108792 - DNA, 25 bp, Homo sapien
gttacagcctcgtggaagaaacaga

SEQ ID NO: 3108793 - DNA, 25 bp, Homo sapien
tttgttacagcctcgtggaagaaac

SEQ ID NO: 3108794 - DNA, 25 bp, Homo sapien
ttacagcctcgtggaagaaacagaa

SEQ ID NO: 3108795 - DNA, 25 bp, Homo sapien
gcctcatgacgggatacagctgctt

SEQ ID NO: 3108796 - DNA, 25 bp, Homo sapien
gcccgcacaagcctcatgacgggat

SEQ ID NO: 3108797 - DNA, 25 bp, Homo sapien
catgacgggatacagctgcttgcac

SEQ ID NO: 3108798 - DNA, 25 bp, Homo sapien
ttgcaccggccgcaggcagaggcgg

SEQ ID NO: 3108799 - DNA, 25 bp, Homo sapien
tggacgagggcgacacccctcactg

SEQ ID NO: 3108800 - DNA, 25 bp, Homo sapien
cctgctggacgagggcgacacccct

SEQ ID NO: 3108801 - DNA, 25 bp, Homo sapien
ctggcaccgagaagtccactccccg

SEQ ID NO: 3108802 - DNA, 25 bp, Homo sapien
tggcaccgagaagtccactccccgg

SEQ ID NO: 3108803 - DNA, 25 bp, Homo sapien
ttcgccatccgggaacagtcatcct

SEQ ID NO: 3108804 - DNA, 25 bp, Homo sapien
catccgggaacagtcatccttggca

SEQ ID NO: 3108805 - DNA, 25 bp, Homo sapien
gcaaatatgagcacagcggatccag

SEQ ID NO: 3108806 - DNA, 25 bp, Homo sapien
atgagcacagcggatccaggaagac

SEQ ID NO: 3108807 - DNA, 25 bp, Homo sapien
gggcttcctctgccaagtcctcggg

SEQ ID NO: 3108808 - DNA, 25 bp, Homo sapien
cagtgtggtgacagtgctcaccacc

SEQ ID NO: 3108809 - DNA, 25 bp, Homo sapien
gctgcctccaccttcatcaaaccct

SEQ ID NO: 3108810 - DNA, 25 bp, Homo sapien
cttcatcaaaccctcggcctctcca

SEQ ID NO: 3108811 - DNA, 25 bp, Homo sapien
accatgaactcactccatgctggga

SEQ ID NO: 3108812 - DNA, 25 bp, Homo sapien
atttcaacccccaactttctgagct

SEQ ID NO: 3108813 - DNA, 25 bp, Homo sapien
tatttcaacccccaactttctgagc

SEQ ID NO: 3108814 - DNA, 25 bp, Homo sapien
tcagtagttccctcggaatcccgaa

SEQ ID NO: 3108815 - DNA, 25 bp, Homo sapien
ctggagtgtgggaatccaaccacgg

SEQ ID NO: 3108816 - DNA, 25 bp, Homo sapien
catagacaagggaacggtcagtagt

SEQ ID NO: 3108817 - DNA, 25 bp, Homo sapien
ccacgggacgtgtgacatagacaag

SEQ ID NO: 3108818 - DNA, 25 bp, Homo sapien
ctggtttcagagcaccccgtgactt

SEQ ID NO: 3108819 - DNA, 25 bp, Homo sapien
tttcatttcggcagttatcagatca

SEQ ID NO: 3108820 - DNA, 25 bp, Homo sapien
tatcagatcaatacagccgcagaac

SEQ ID NO: 3108821 - DNA, 25 bp, Homo sapien
ggaatgcaagcccactccagacgtc

SEQ ID NO: 3108822 - DNA, 25 bp, Homo sapien
cgctgagagtactcagacaggccaa

SEQ ID NO: 3108823 - DNA, 25 bp, Homo sapien
cacaggcccagggtacggccttgcg

SEQ ID NO: 3108824 - DNA, 25 bp, Homo sapien
tgggtacaggcaccatatcgctgag

SEQ ID NO: 3108825 - DNA, 25 bp, Homo sapien
tggccacgccgagatgtggcgccac

SEQ ID NO: 3108826 - DNA, 25 bp, Homo sapien
ccacgacctactgcggagccgtagg

SEQ ID NO: 3108827 - DNA, 25 bp, Homo sapien
ggaaacagggcatgctgagcggatg

SEQ ID NO: 3108828 - DNA, 25 bp, Homo sapien
atggcacacggtggtccgctggccc

SEQ ID NO: 3108829 - DNA, 25 bp, Homo sapien
cgacctactgcggagccgtaggagc

SEQ ID NO: 3108830 - DNA, 25 bp, Homo sapien
ttttcttgtagatcagcgccgggca

SEQ ID NO: 3108831 - DNA, 25 bp, Homo sapien
gaggaaagtgcgttcttgtggattt

SEQ ID NO: 3108832 - DNA, 25 bp, Homo sapien
ggcttcccatggtcgctcctgtgag

SEQ ID NO: 3108833 - DNA, 25 bp, Homo sapien
atcagcgccgggcagatgaagcaga

SEQ ID NO: 3108834 - DNA, 25 bp, Homo sapien
ccactgcgcccagcaagctgccaga

SEQ ID NO: 3108835 - DNA, 25 bp, Homo sapien
cactgcgcccagcaagctgccagat

SEQ ID NO: 3108836 - DNA, 25 bp, Homo sapien
ttggttgatgccgaagccccgggtc

SEQ ID NO: 3108837 - DNA, 25 bp, Homo sapien
atggtctctgtgcaggtctcgtaac

SEQ ID NO: 3108838 - DNA, 25 bp, Homo sapien
cgcacctggctcaagttgccagatt

SEQ ID NO: 3108839 - DNA, 25 bp, Homo sapien
caggtctcgtaactgtgcaggtctt

SEQ ID NO: 3108840 - DNA, 25 bp, Homo sapien
tgctttaaaccggagagggggcatg

SEQ ID NO: 3108841 - DNA, 25 bp, Homo sapien
caaccatggttccaaacaccacaga

SEQ ID NO: 3108842 - DNA, 25 bp, Homo sapien
ccaaccatggttccaaacaccacag

SEQ ID NO: 3108843 - DNA, 25 bp, Homo sapien
gggcatgtagccccctgctgcaaag

SEQ ID NO: 3108844 - DNA, 25 bp, Homo sapien
tcaaacactgaaagttggcctggcc

SEQ ID NO: 3108845 - DNA, 25 bp, Homo sapien
aggactctactgatctgcaccggga

SEQ ID NO: 3108846 - DNA, 25 bp, Homo sapien
taagttaacacacaggacggactgg

SEQ ID NO: 3108847 - DNA, 25 bp, Homo sapien
ttaaacgggaacctgcagcatgcca

SEQ ID NO: 3108848 - DNA, 25 bp, Homo sapien
tatggtggagcggtcatggcccact

SEQ ID NO: 3108849 - DNA, 25 bp, Homo sapien
ctggcctacatgtgttacagtgaaa

SEQ ID NO: 3108850 - DNA, 25 bp, Homo sapien
gaactaagtagctgcctggcctaca

SEQ ID NO: 3108851 - DNA, 25 bp, Homo sapien
gatggagtcaagtgatgttgcccag

SEQ ID NO: 3108852 - DNA, 25 bp, Homo sapien
atcatgaagcccacacggagcatct

SEQ ID NO: 3108853 - DNA, 25 bp, Homo sapien
tcacacagcagcgtgctcagggcct

SEQ ID NO: 3108854 - DNA, 25 bp, Homo sapien
aaagtgcatgagcacgttgccggcc

SEQ ID NO: 3108855 - DNA, 25 bp, Homo sapien
tgaagctgacgtagccgaaaaaccc

SEQ ID NO: 3108856 - DNA, 25 bp, Homo sapien
tggtgaccacattaagggaggaagc

SEQ ID NO: 3108857 - DNA, 25 bp, Homo sapien
aatatggagctcatggttttcactg

SEQ ID NO: 3108858 - DNA, 25 bp, Homo sapien
catccaggctgtcgtaggtgggcag

SEQ ID NO: 3108859 - DNA, 25 bp, Homo sapien
ttcactgacggctcatccaggctgt

SEQ ID NO: 3108860 - DNA, 25 bp, Homo sapien
gacccacagctacagaagaaggcca

SEQ ID NO: 3108861 - DNA, 25 bp, Homo sapien
cacaccagggagtcttggcttgagg

SEQ ID NO: 3108862 - DNA, 25 bp, Homo sapien
gttggtgccccatgacacgtgctta

SEQ ID NO: 3108863 - DNA, 25 bp, Homo sapien
tgcggcatgaacttcccagtgctaa

SEQ ID NO: 3108864 - DNA, 25 bp, Homo sapien
gaagagcccgatccacatttacaga

SEQ ID NO: 3108865 - DNA, 25 bp, Homo sapien
gatttacgcctctcttttcagccgg

SEQ ID NO: 3108866 - DNA, 25 bp, Homo sapien
gttaccatgttccaaccgggcacga

SEQ ID NO: 3108867 - DNA, 25 bp, Homo sapien
aatgcatgcccactaacgctacagg

SEQ ID NO: 3108868 - DNA, 25 bp, Homo sapien
tgaagaggccgtgcttgagagagga

SEQ ID NO: 3108869 - DNA, 25 bp, Homo sapien
agcggacgtagctgacccgccgcag

SEQ ID NO: 3108870 - DNA, 25 bp, Homo sapien
actggcaggcgaaggacatgccgaa

SEQ ID NO: 3108871 - DNA, 25 bp, Homo sapien
acgccctcccagcggacgtagctga

SEQ ID NO: 3108872 - DNA, 25 bp, Homo sapien
acacggcgaacagcaggaacatgcg

SEQ ID NO: 3108873 - DNA, 25 bp, Homo sapien
cacgaacatgaacacggtgtagaag

SEQ ID NO: 3108874 - DNA, 25 bp, Homo sapien
caggaacatgcggaaggtgccgccc

SEQ ID NO: 3108875 - DNA, 25 bp, Homo sapien
agcgggagcacgatgcacagcgaca

SEQ ID NO: 3108876 - DNA, 25 bp, Homo sapien
aagttggaccccaagtcgccgatca

SEQ ID NO: 3108877 - DNA, 25 bp, Homo sapien
tagaaggcgatgcaggtgcccagca

SEQ ID NO: 3108878 - DNA, 25 bp, Homo sapien
tgaaacccgaacagccgggcaaaga

SEQ ID NO: 3108879 - DNA, 25 bp, Homo sapien
ccaagtcgccgatcacgacgtagaa

SEQ ID NO: 3108880 - DNA, 25 bp, Homo sapien
cttgcctgccttcccgtaggcgtgg

SEQ ID NO: 3108881 - DNA, 25 bp, Homo sapien
cctgccttcccgtaggcgtggaatg

SEQ ID NO: 3108882 - DNA, 25 bp, Homo sapien
gcctgccttcccgtaggcgtggaat

SEQ ID NO: 3108883 - DNA, 25 bp, Homo sapien
tgtcaagggcgatttcacagaaacc

SEQ ID NO: 3108884 - DNA, 25 bp, Homo sapien
tggagactcctttcgagcatggtgc

SEQ ID NO: 3108885 - DNA, 25 bp, Homo sapien
tgagaagctcgtccagaacaaaggt

SEQ ID NO: 3108886 - DNA, 25 bp, Homo sapien
gacagctaatgaggagccttgccga

SEQ ID NO: 3108887 - DNA, 25 bp, Homo sapien
ttcctccatggaattccgagttggg

SEQ ID NO: 3108888 - DNA, 25 bp, Homo sapien
gaattccgagttggggagaacagca

SEQ ID NO: 3108889 - DNA, 25 bp, Homo sapien
ggacggctgtcttggtctgagttta

SEQ ID NO: 3108890 - DNA, 25 bp, Homo sapien
accagcacggtgaggacggctgtct

SEQ ID NO: 3108891 - DNA, 25 bp, Homo sapien
gtaggtcctccgcttgctcaggctg

SEQ ID NO: 3108892 - DNA, 25 bp, Homo sapien
acgactggtgcgtcatccatgagca

SEQ ID NO: 3108893 - DNA, 25 bp, Homo sapien
ggctggccgacttcaccaagaacat

SEQ ID NO: 3108894 - DNA, 25 bp, Homo sapien
caggccggcgtaggtcctccgcttg

SEQ ID NO: 3108895 - DNA, 25 bp, Homo sapien
gtgaggacactgacccctacgatgc

SEQ ID NO: 3108896 - DNA, 25 bp, Homo sapien
tacgatgctgttcacgatgttcgtg

SEQ ID NO: 3108897 - DNA, 25 bp, Homo sapien
gacccctacgatgctgttcacgatg

SEQ ID NO: 3108898 - DNA, 25 bp, Homo sapien
ctgttcacgatgttcgtgatcagcc

SEQ ID NO: 3108899 - DNA, 25 bp, Homo sapien
tttggaagcccagcccgaggccacg

SEQ ID NO: 3108900 - DNA, 25 bp, Homo sapien
tcacaggtcccaacgtccgggacgc

SEQ ID NO: 3108901 - DNA, 25 bp, Homo sapien
ggtcgccgggctgcggccggctttg

SEQ ID NO: 3108902 - DNA, 25 bp, Homo sapien
cacggtcacaggtcccaacgtccgg

SEQ ID NO: 3108903 - DNA, 25 bp, Homo sapien
agggtctcgcagctgtccggttcgc

SEQ ID NO: 3108904 - DNA, 25 bp, Homo sapien
tgcctcagccgaaaaatagtctgtt

SEQ ID NO: 3108905 - DNA, 25 bp, Homo sapien
ctccgttgcccggaagtgacggcca

SEQ ID NO: 3108906 - DNA, 25 bp, Homo sapien
tagtctgttgtgaggaattagcacc

SEQ ID NO: 3108907 - DNA, 25 bp, Homo sapien
gggtgccaccatgtcacctgacaca

SEQ ID NO: 3108908 - DNA, 25 bp, Homo sapien
tggctcccatgctaggccaaggctt

SEQ ID NO: 3108909 - DNA, 25 bp, Homo sapien
caggcactgcctgtcatgactgaag

SEQ ID NO: 3108910 - DNA, 25 bp, Homo sapien
tttagatccatagcccttcttaacg

SEQ ID NO: 3108911 - DNA, 25 bp, Homo sapien
gagccaggcagccaaaagacccttg

SEQ ID NO: 3108912 - DNA, 25 bp, Homo sapien
gctccacagactgacggtccagtcc

SEQ ID NO: 3108913 - DNA, 25 bp, Homo sapien
caggcagccaaaagacccttgttgg

SEQ ID NO: 3108914 - DNA, 25 bp, Homo sapien
ctggcggccaccactggggtttggg

SEQ ID NO: 3108915 - DNA, 25 bp, Homo sapien
tggggagacggcgcagctgagaatc

SEQ ID NO: 3108916 - DNA, 25 bp, Homo sapien
ggggagacggcgcagctgagaatcc

SEQ ID NO: 3108917 - DNA, 25 bp, Homo sapien
gggagacggcgcagctgagaatcct

SEQ ID NO: 3108918 - DNA, 25 bp, Homo sapien
tatacttagttacgatgaggccgtg

SEQ ID NO: 3108919 - DNA, 25 bp, Homo sapien
gacaccaacatgcacacagggagga

SEQ ID NO: 3108920 - DNA, 25 bp, Homo sapien
gagggccacagggtattttccacga

SEQ ID NO: 3108921 - DNA, 25 bp, Homo sapien
tgggccctatcctcgacgacagttg

SEQ ID NO: 3108922 - DNA, 25 bp, Homo sapien
cctccacggtaggtccaggtgagca

SEQ ID NO: 3108923 - DNA, 25 bp, Homo sapien
aatgtccttgattaaagcgtgcgca

SEQ ID NO: 3108924 - DNA, 25 bp, Homo sapien
gatgagctgccctgtaccatggctg

SEQ ID NO: 3108925 - DNA, 25 bp, Homo sapien
ttccttgggcacttgcaggcgctct

SEQ ID NO: 3108926 - DNA, 25 bp, Homo sapien
caggccgaggagcacgggaaccagg

SEQ ID NO: 3108927 - DNA, 25 bp, Homo sapien
acaggccgaggagcacgggaaccag

SEQ ID NO: 3108928 - DNA, 25 bp, Homo sapien
ccacaggccgaggagcacgggaacc

SEQ ID NO: 3108929 - DNA, 25 bp, Homo sapien
cacaggccgaggagcacgggaacca

SEQ ID NO: 3108930 - DNA, 25 bp, Homo sapien
tgtgggggacctcaagacaggtggg

SEQ ID NO: 3108931 - DNA, 25 bp, Homo sapien
tgttcagtggttctggggtctccga

SEQ ID NO: 3108932 - DNA, 25 bp, Homo sapien
gaagcacaggtgtgggggacctcaa

SEQ ID NO: 3108933 - DNA, 25 bp, Homo sapien
acctgtgctgttgtgagcctgccac

SEQ ID NO: 3108934 - DNA, 25 bp, Homo sapien
cagctgaaagcttttcagtagtctt

SEQ ID NO: 3108935 - DNA, 25 bp, Homo sapien
accctcggggtctccaagagaggca

SEQ ID NO: 3108936 - DNA, 25 bp, Homo sapien
cagcagggtgccctgagggactggc

SEQ ID NO: 3108937 - DNA, 25 bp, Homo sapien
tggcctggcgccataccctcggggt

SEQ ID NO: 3108938 - DNA, 25 bp, Homo sapien
gaaaagaagacgtaatgctcacact

SEQ ID NO: 3108939 - DNA, 25 bp, Homo sapien
aggtcccaggcagtcgtgggtaaca

SEQ ID NO: 3108940 - DNA, 25 bp, Homo sapien
aggcagtcgtgggtaacaccgcaga

SEQ ID NO: 3108941 - DNA, 25 bp, Homo sapien
cagtcgtgggtaacaccgcagacgt

SEQ ID NO: 3108942 - DNA, 25 bp, Homo sapien
cccaggcagtcgtgggtaacaccgc

SEQ ID NO: 3108943 - DNA, 25 bp, Homo sapien
tgatggccgccagcattagtagcgt

SEQ ID NO: 3108944 - DNA, 25 bp, Homo sapien
cgcctggtgtcatgagggtgaaaca

SEQ ID NO: 3108945 - DNA, 25 bp, Homo sapien
tcatcaaacactcgtgacaggccgg

SEQ ID NO: 3108946 - DNA, 25 bp, Homo sapien
tcgtctctgccacgcctggtgtcat

SEQ ID NO: 3108947 - DNA, 25 bp, Homo sapien
tctgcaccggtgatctgaggaccct

SEQ ID NO: 3108948 - DNA, 25 bp, Homo sapien
cttgatttctcagcggacggaggct

SEQ ID NO: 3108949 - DNA, 25 bp, Homo sapien
gatttaatagaattcccgcagggtg

SEQ ID NO: 3108950 - DNA, 25 bp, Homo sapien
tgtgcgtttgcctgaccgggagtca

SEQ ID NO: 3108951 - DNA, 25 bp, Homo sapien
ctccctctaatccctgcaccccggc

SEQ ID NO: 3108952 - DNA, 25 bp, Homo sapien
tccctctaatccctgcaccccggcc

SEQ ID NO: 3108953 - DNA, 25 bp, Homo sapien
tggggagacgtcctcgggccctgca

SEQ ID NO: 3108954 - DNA, 25 bp, Homo sapien
tcttatcttcatctcacagaggcag

SEQ ID NO: 3108955 - DNA, 25 bp, Homo sapien
gcccccctgcaagaaagccagactg

SEQ ID NO: 3108956 - DNA, 25 bp, Homo sapien
gagggaaccaggtgcagcccccctg

SEQ ID NO: 3108957 - DNA, 25 bp, Homo sapien
aggagataaatcagctgcccgatca

SEQ ID NO: 3108958 - DNA, 25 bp, Homo sapien
gataaatcagctgcccgatcacatt

SEQ ID NO: 3108959 - DNA, 25 bp, Homo sapien
atcagctgcccgatcacatttcctg

SEQ ID NO: 3108960 - DNA, 25 bp, Homo sapien
gtaaggagataaatcagctgcccga

SEQ ID NO: 3108961 - DNA, 25 bp, Homo sapien
ctgtaaaacatgagagaaaattgac

SEQ ID NO: 3108962 - DNA, 25 bp, Homo sapien
tggggtggccggaggcttcaaggac

SEQ ID NO: 3108963 - DNA, 25 bp, Homo sapien
gggtggccggaggcttcaaggacgc

SEQ ID NO: 3108964 - DNA, 25 bp, Homo sapien
ggtggccggaggcttcaaggacgcc

SEQ ID NO: 3108965 - DNA, 25 bp, Homo sapien
tctggggcgctgtgcgagggatgga

SEQ ID NO: 3108966 - DNA, 25 bp, Homo sapien
cagtctggggcgctgtgcgagggat

SEQ ID NO: 3108967 - DNA, 25 bp, Homo sapien
gctaagggtgtgcttggctgcgagg

SEQ ID NO: 3108968 - DNA, 25 bp, Homo sapien
ctggggctaagggtgtgcttggctg

SEQ ID NO: 3108969 - DNA, 25 bp, Homo sapien
ctgcctctcaatgcagatcaaggtc

SEQ ID NO: 3108970 - DNA, 25 bp, Homo sapien
gcctctcaatgcagatcaaggtcac

SEQ ID NO: 3108971 - DNA, 25 bp, Homo sapien
tctcaatgcagatcaaggtcacact

SEQ ID NO: 3108972 - DNA, 25 bp, Homo sapien
tcaatgcagatcaaggtcacacttc

SEQ ID NO: 3108973 - DNA, 25 bp, Homo sapien
cactcgcaacttggcgttccgttta

SEQ ID NO: 3108974 - DNA, 25 bp, Homo sapien
catttactgtcacatggacatcgtc

SEQ ID NO: 3108975 - DNA, 25 bp, Homo sapien
gacccacacgccatgtttcatgact

SEQ ID NO: 3108976 - DNA, 25 bp, Homo sapien
tccatagtagtaccgagacccacac

SEQ ID NO: 3108977 - DNA, 25 bp, Homo sapien
gtgtggcagcccccgcagtctgggt

SEQ ID NO: 3108978 - DNA, 25 bp, Homo sapien
ccgcgtgtggcagcccccgcagtct

SEQ ID NO: 3108979 - DNA, 25 bp, Homo sapien
agtctgggtgccccgcgtgtggcag

SEQ ID NO: 3108980 - DNA, 25 bp, Homo sapien
gtctgggtgccccgcgtgtggcagc

SEQ ID NO: 3108981 - DNA, 25 bp, Homo sapien
tccactttttgagaggccaacaaac

SEQ ID NO: 3108982 - DNA, 25 bp, Homo sapien
gcacccggcctatgctccacttttt

SEQ ID NO: 3108983 - DNA, 25 bp, Homo sapien
ggcctatgctccactttttgagagg

SEQ ID NO: 3108984 - DNA, 25 bp, Homo sapien
agaggccaacaaaccccacttgctt

SEQ ID NO: 3108985 - DNA, 25 bp, Homo sapien
cgccagaggagggaggagggaggag

SEQ ID NO: 3108986 - DNA, 25 bp, Homo sapien
gccagaggagggaggagggaggagg

SEQ ID NO: 3108987 - DNA, 25 bp, Homo sapien
cagaggagggaggagggaggagggt

SEQ ID NO: 3108988 - DNA, 25 bp, Homo sapien
cccgccagaggagggaggagggagg

SEQ ID NO: 3108989 - DNA, 25 bp, Homo sapien
caggcttgtccccatgcgtattctt

SEQ ID NO: 3108990 - DNA, 25 bp, Homo sapien
tggagggccaggagcaaactcccag

SEQ ID NO: 3108991 - DNA, 25 bp, Homo sapien
gagccacgggaacaggagttcctcc

SEQ ID NO: 3108992 - DNA, 25 bp, Homo sapien
tggccgggctactgctacctggctt

SEQ ID NO: 3108993 - DNA, 25 bp, Homo sapien
gaccaactggacatgaagaggccac

SEQ ID NO: 3108994 - DNA, 25 bp, Homo sapien
caggattggctgtatggtgcacaca

SEQ ID NO: 3108995 - DNA, 25 bp, Homo sapien
ttgtcacagccacgtacctggggta

SEQ ID NO: 3108996 - DNA, 25 bp, Homo sapien
taaatacatttatgggcaggaagag

SEQ ID NO: 3108997 - DNA, 25 bp, Homo sapien
cagctcgagggcagaagtgtccccg

SEQ ID NO: 3108998 - DNA, 25 bp, Homo sapien
tcaagcctcattcgtgctggagact

SEQ ID NO: 3108999 - DNA, 25 bp, Homo sapien
cctgcagtggtgtcttaaaggaggc

SEQ ID NO: 3109000 - DNA, 25 bp, Homo sapien
cctgatgtaaggctctgaaggccgg

SEQ ID NO: 3109001 - DNA, 25 bp, Homo sapien
gccacgcaccgcacgcacgcgtcct

SEQ ID NO: 3109002 - DNA, 25 bp, Homo sapien
gccacgtggagcagccgcggtgcct

SEQ ID NO: 3109003 - DNA, 25 bp, Homo sapien
gcctggctcccgatgccgcgaaggg

SEQ ID NO: 3109004 - DNA, 25 bp, Homo sapien
gatttaatttcaagcgcgtccccgc

SEQ ID NO: 3109005 - DNA, 25 bp, Homo sapien
agtttttggcacaaagtagcgccga

SEQ ID NO: 3109006 - DNA, 25 bp, Homo sapien
tttcaaacgagccagcagagcgggc

SEQ ID NO: 3109007 - DNA, 25 bp, Homo sapien
tgacagcagaatgggccgctgagac

SEQ ID NO: 3109008 - DNA, 25 bp, Homo sapien
accccggatcgtgcgctgagaatgt

SEQ ID NO: 3109009 - DNA, 25 bp, Homo sapien
tgtccgggccagacaaaggagtcgc

SEQ ID NO: 3109010 - DNA, 25 bp, Homo sapien
tcctgtgcatgataccctggctggg

SEQ ID NO: 3109011 - DNA, 25 bp, Homo sapien
gatcgatgcgttcctgagttcccag

SEQ ID NO: 3109012 - DNA, 25 bp, Homo sapien
gcgtaataaaatcagccggagctcc

SEQ ID NO: 3109013 - DNA, 25 bp, Homo sapien
cattttattggtcaccacccataag

SEQ ID NO: 3109014 - DNA, 25 bp, Homo sapien
ggaatcaggagcctttatggcttgt

SEQ ID NO: 3109015 - DNA, 25 bp, Homo sapien
taaaaacagggataattagagtgtg

SEQ ID NO: 3109016 - DNA, 25 bp, Homo sapien
aatctgcggcgccttttccactgga

SEQ ID NO: 3109017 - DNA, 25 bp, Homo sapien
cctcgaaggcggcaggagaaaccgc

SEQ ID NO: 3109018 - DNA, 25 bp, Homo sapien
ggagacttgcgcagtcagggagccg

SEQ ID NO: 3109019 - DNA, 25 bp, Homo sapien
agggagccgcgaaccccgagtctcg

SEQ ID NO: 3109020 - DNA, 25 bp, Homo sapien
cccgagtctcggtcctcgaaggcgg

SEQ ID NO: 3109021 - DNA, 25 bp, Homo sapien
tctgatgagctatttgggagtgcgc

SEQ ID NO: 3109022 - DNA, 25 bp, Homo sapien
catgggtaccaaacccgactctagg

SEQ ID NO: 3109023 - DNA, 25 bp, Homo sapien
tctaggcggtcattcactttgtccc

SEQ ID NO: 3109024 - DNA, 25 bp, Homo sapien
tccaatcttccgcaaaatggcctgg

SEQ ID NO: 3109025 - DNA, 25 bp, Homo sapien
tgaaagacccctgtccttcctagga

SEQ ID NO: 3109026 - DNA, 25 bp, Homo sapien
caaatgcaaacatcgtgtgaaaccc

SEQ ID NO: 3109027 - DNA, 25 bp, Homo sapien
ccgcagccttgcctttgttgaaaga

SEQ ID NO: 3109028 - DNA, 25 bp, Homo sapien
tgtgaaaccccattaatcaggtaag

SEQ ID NO: 3109029 - DNA, 25 bp, Homo sapien
gctcaggccacccggcctcctcgga

SEQ ID NO: 3109030 - DNA, 25 bp, Homo sapien
cccggcctcctcggaccccgctcag

SEQ ID NO: 3109031 - DNA, 25 bp, Homo sapien
cccgctcaggccacccggcctcctc

SEQ ID NO: 3109032 - DNA, 25 bp, Homo sapien
tcaggccacccggcctcctcggacc

SEQ ID NO: 3109033 - DNA, 25 bp, Homo sapien
catgggcgtctcctaaccgtgtaag

SEQ ID NO: 3109034 - DNA, 25 bp, Homo sapien
cgaatcccgcagaaagacacgtttg

SEQ ID NO: 3109035 - DNA, 25 bp, Homo sapien
gaaaggctcttacacaccagccggg

SEQ ID NO: 3109036 - DNA, 25 bp, Homo sapien
tattcgttccctaccgagagtgcgc

SEQ ID NO: 3109037 - DNA, 25 bp, Homo sapien
cggagacctggctcgcctttccggg

SEQ ID NO: 3109038 - DNA, 25 bp, Homo sapien
ttctgcgtccgagttcccaggttcc

SEQ ID NO: 3109039 - DNA, 25 bp, Homo sapien
tttccgggcgctgcgtccgtcttcg

SEQ ID NO: 3109040 - DNA, 25 bp, Homo sapien
tggctcgggcgcgtccttctgcgtc

SEQ ID NO: 3109041 - DNA, 25 bp, Homo sapien
tccaagaagcgagaaacctgggcgg

SEQ ID NO: 3109042 - DNA, 25 bp, Homo sapien
ttgccagggacccactacaagcagg

SEQ ID NO: 3109043 - DNA, 25 bp, Homo sapien
gcaaaggtttggaatgtgccagcaa

SEQ ID NO: 3109044 - DNA, 25 bp, Homo sapien
aatggagaacgcagataactgacgg

SEQ ID NO: 3109045 - DNA, 25 bp, Homo sapien
acacgtcccctggtgtgccgaggta

SEQ ID NO: 3109046 - DNA, 25 bp, Homo sapien
ggtgtgccgaggtaaaggcttggga

SEQ ID NO: 3109047 - DNA, 25 bp, Homo sapien
tgaattgaagatgatgccacacgtc

SEQ ID NO: 3109048 - DNA, 25 bp, Homo sapien
aaacggatgtggtgaattgaagatg

SEQ ID NO: 3109049 - DNA, 25 bp, Homo sapien
cagctctgccgcagcgtggggccat

SEQ ID NO: 3109050 - DNA, 25 bp, Homo sapien
ctgaacgggcacctgcaggcgcccc

SEQ ID NO: 3109051 - DNA, 25 bp, Homo sapien
cgggcacctgcaggcgcccctgcct

SEQ ID NO: 3109052 - DNA, 25 bp, Homo sapien
tggaggccgccgtcccagctctgcc

SEQ ID NO: 3109053 - DNA, 25 bp, Homo sapien
ggagtttaacatggcacaaccgcct

SEQ ID NO: 3109054 - DNA, 25 bp, Homo sapien
tgctgaggacgtggaacaatcacag

SEQ ID NO: 3109055 - DNA, 25 bp, Homo sapien
tctgcatgagatgacccggtgctct

SEQ ID NO: 3109056 - DNA, 25 bp, Homo sapien
tctggttctttggagaccccggcta

SEQ ID NO: 3109057 - DNA, 25 bp, Homo sapien
tcagataccgcagagagtgccaagc

SEQ ID NO: 3109058 - DNA, 25 bp, Homo sapien
tgggcggctacacatcagggttcag

SEQ ID NO: 3109059 - DNA, 25 bp, Homo sapien
tgatgggagcattttaccgcctgga

SEQ ID NO: 3109060 - DNA, 25 bp, Homo sapien
catctgtcaaatgggcgagtgagcc

SEQ ID NO: 3109061 - DNA, 25 bp, Homo sapien
ggacctgccgggcatctgagctgcc

SEQ ID NO: 3109062 - DNA, 25 bp, Homo sapien
tatggctggataggaggtgtcccag

SEQ ID NO: 3109063 - DNA, 25 bp, Homo sapien
aagtgacgtgtcatgggtgaacagc

SEQ ID NO: 3109064 - DNA, 25 bp, Homo sapien
tgttgagccagtcctgggcggcgta

SEQ ID NO: 3109065 - DNA, 25 bp, Homo sapien
gagtctaggccaggtgacagctcag

SEQ ID NO: 3109066 - DNA, 25 bp, Homo sapien
agctcagggcaagttctcaagggcc

SEQ ID NO: 3109067 - DNA, 25 bp, Homo sapien
tgccctgaaagtggctgggagtcta

SEQ ID NO: 3109068 - DNA, 25 bp, Homo sapien
tgtgccctgaaagtggctgggagtc

SEQ ID NO: 3109069 - DNA, 25 bp, Homo sapien
tctaggagcatgtccagagtctgcc

SEQ ID NO: 3109070 - DNA, 25 bp, Homo sapien
gaagggaccctgaacgttgatcatt

SEQ ID NO: 3109071 - DNA, 25 bp, Homo sapien
ttaaatgaggtgactcgagaccctc

SEQ ID NO: 3109072 - DNA, 25 bp, Homo sapien
gagaccctctgagatgaagggaccc

SEQ ID NO: 3109073 - DNA, 25 bp, Homo sapien
cccgtgctttggcgccgctcccgct

SEQ ID NO: 3109074 - DNA, 25 bp, Homo sapien
tccccgtgctttggcgccgctcccg

SEQ ID NO: 3109075 - DNA, 25 bp, Homo sapien
ccgtgctttggcgccgctcccgctc

SEQ ID NO: 3109076 - DNA, 25 bp, Homo sapien
ccccgtgctttggcgccgctcccgc

SEQ ID NO: 3109077 - DNA, 25 bp, Homo sapien
tctagagcctacaatcactccaggg

SEQ ID NO: 3109078 - DNA, 25 bp, Homo sapien
cctgggcccatttgcctggacgctg

SEQ ID NO: 3109079 - DNA, 25 bp, Homo sapien
tttccccgtcaagccctgagtggag

SEQ ID NO: 3109080 - DNA, 25 bp, Homo sapien
cctctcgcgggcaggaatgccatct

SEQ ID NO: 3109081 - DNA, 25 bp, Homo sapien
caacccatcatgctatacccaggaa

SEQ ID NO: 3109082 - DNA, 25 bp, Homo sapien
catcatgctatacccaggaacacta

SEQ ID NO: 3109083 - DNA, 25 bp, Homo sapien
ccatcatgctatacccaggaacact

SEQ ID NO: 3109084 - DNA, 25 bp, Homo sapien
catcaacccatcatgctatacccag

SEQ ID NO: 3109085 - DNA, 25 bp, Homo sapien
ctcagccaagggtctccacatactt

SEQ ID NO: 3109086 - DNA, 25 bp, Homo sapien
ctgtaattgggtcttcccgcggagg

SEQ ID NO: 3109087 - DNA, 25 bp, Homo sapien
gccaagggtctccacatacttctct

SEQ ID NO: 3109088 - DNA, 25 bp, Homo sapien
taattgggtcttcccgcggaggctg

SEQ ID NO: 3109089 - DNA, 25 bp, Homo sapien
ggggctacctcctctggactgccga

SEQ ID NO: 3109090 - DNA, 25 bp, Homo sapien
gtgggggctacctcctctggactgc

SEQ ID NO: 3109091 - DNA, 25 bp, Homo sapien
cagaccaggaccggggtgaactcac

SEQ ID NO: 3109092 - DNA, 25 bp, Homo sapien
ggctacctcctctggactgccgaga

SEQ ID NO: 3109093 - DNA, 25 bp, Homo sapien
tgatttctacccttccgtgtggccc

SEQ ID NO: 3109094 - DNA, 25 bp, Homo sapien
catgagcttctgttgccgtctgggc

SEQ ID NO: 3109095 - DNA, 25 bp, Homo sapien
gaaggccaagcatgtttcagagtca

SEQ ID NO: 3109096 - DNA, 25 bp, Homo sapien
gctgttccagacctcctgacctgaa

SEQ ID NO: 3109097 - DNA, 25 bp, Homo sapien
tccggaaggaccacataagcagtgc

SEQ ID NO: 3109098 - DNA, 25 bp, Homo sapien
gctgaaggtaaccaggccaaggact

SEQ ID NO: 3109099 - DNA, 25 bp, Homo sapien
ctgttaacaaaagaggcggtggccg

SEQ ID NO: 3109100 - DNA, 25 bp, Homo sapien
tgtaactgatgctcagaggaccggg

SEQ ID NO: 3109101 - DNA, 25 bp, Homo sapien
accttccttgatcccctctaataat

SEQ ID NO: 3109102 - DNA, 25 bp, Homo sapien
ggagccggcctttagggaaggcagc

SEQ ID NO: 3109103 - DNA, 25 bp, Homo sapien
ttgcaacaataacactgtcactaat

SEQ ID NO: 3109104 - DNA, 25 bp, Homo sapien
agcagatccccaaagcgcatccctt

SEQ ID NO: 3109105 - DNA, 25 bp, Homo sapien
tgagcaccctgaattatactttccg

SEQ ID NO: 3109106 - DNA, 25 bp, Homo sapien
gtttaacaagcaactttgagagtgg

SEQ ID NO: 3109107 - DNA, 25 bp, Homo sapien
cccagatgggtcttgttgataacct

SEQ ID NO: 3109108 - DNA, 25 bp, Homo sapien
ctttccgtgagaacacactagttat

SEQ ID NO: 3109109 - DNA, 25 bp, Homo sapien
tctgctcctaggaagggtaagcctc

SEQ ID NO: 3109110 - DNA, 25 bp, Homo sapien
cccagtcgatagcagagggacccgt

SEQ ID NO: 3109111 - DNA, 25 bp, Homo sapien
caaaaccggcaactgcagcaatgga

SEQ ID NO: 3109112 - DNA, 25 bp, Homo sapien
tcatgaaaagaactcgccccagtcg

SEQ ID NO: 3109113 - DNA, 25 bp, Homo sapien
tgtgtgggcacacattcaagactgt

SEQ ID NO: 3109114 - DNA, 25 bp, Homo sapien
gactaatggcccagggaacaatgga

SEQ ID NO: 3109115 - DNA, 25 bp, Homo sapien
ggagcagcggctaattcacaatttc

SEQ ID NO: 3109116 - DNA, 25 bp, Homo sapien
ggagagatacccaacacacgattat

SEQ ID NO: 3109117 - DNA, 25 bp, Homo sapien
ggcagggagcttccgcactgccctg

SEQ ID NO: 3109118 - DNA, 25 bp, Homo sapien
gaagccagtgctcatcctaggaatc

SEQ ID NO: 3109119 - DNA, 25 bp, Homo sapien
tctcaaatggtgattgatgactggg

SEQ ID NO: 3109120 - DNA, 25 bp, Homo sapien
tgagccagaagggtctaaaccagct

SEQ ID NO: 3109121 - DNA, 25 bp, Homo sapien
tcgatcgacacccagcattaaaaac

SEQ ID NO: 3109122 - DNA, 25 bp, Homo sapien
tcatggcgagtttttcgggtcttcg

SEQ ID NO: 3109123 - DNA, 25 bp, Homo sapien
tgagcgcttgttgtctcgatcgaca

SEQ ID NO: 3109124 - DNA, 25 bp, Homo sapien
cgggtcttcgttcccaattcagaat

SEQ ID NO: 3109125 - DNA, 25 bp, Homo sapien
cagttctcatgactctcccagggag

SEQ ID NO: 3109126 - DNA, 25 bp, Homo sapien
gcagacgggccagagtcctggtctc

SEQ ID NO: 3109127 - DNA, 25 bp, Homo sapien
ggtcaggcgcgaccccagttctcat

SEQ ID NO: 3109128 - DNA, 25 bp, Homo sapien
gttctgcggcgacggccgagccact

SEQ ID NO: 3109129 - DNA, 25 bp, Homo sapien
tcgccgctgcgggactgtgggactc

SEQ ID NO: 3109130 - DNA, 25 bp, Homo sapien
gactgtgggactcccagctcgggcc

SEQ ID NO: 3109131 - DNA, 25 bp, Homo sapien
cagctcgggccgtgtggccgccctt

SEQ ID NO: 3109132 - DNA, 25 bp, Homo sapien
gcgggtggcggcgtcgccgctgcgg

SEQ ID NO: 3109133 - DNA, 25 bp, Homo sapien
ccgaagccctgtttggaatgtgggt

SEQ ID NO: 3109134 - DNA, 25 bp, Homo sapien
caaagttgccgcgagcccaaaggag

SEQ ID NO: 3109135 - DNA, 25 bp, Homo sapien
ctgattatcccggtacggagccgcc

SEQ ID NO: 3109136 - DNA, 25 bp, Homo sapien
cgagcccaaaggagctacgggaatc

SEQ ID NO: 3109137 - DNA, 25 bp, Homo sapien
gccttccgggtctactgggctctgg

SEQ ID NO: 3109138 - DNA, 25 bp, Homo sapien
acgggcagtgcagacgctctggacc

SEQ ID NO: 3109139 - DNA, 25 bp, Homo sapien
tctgaggcaccacgggtcgaggcac

SEQ ID NO: 3109140 - DNA, 25 bp, Homo sapien
ttttggtgtgaaggtggacgcccac

SEQ ID NO: 3109141 - DNA, 25 bp, Homo sapien
gggtgccttctgagccctgacccgt

SEQ ID NO: 3109142 - DNA, 25 bp, Homo sapien
ctcgatgtccgccttggcagcagag

SEQ ID NO: 3109143 - DNA, 25 bp, Homo sapien
tctgagcgtgtctctagactctcct

SEQ ID NO: 3109144 - DNA, 25 bp, Homo sapien
acctggcctgctggatccatgtggt

SEQ ID NO: 3109145 - DNA, 25 bp, Homo sapien
gatgaataagatgaacgtgtgtgtc

SEQ ID NO: 3109146 - DNA, 25 bp, Homo sapien
tgtgttccctggatcccggtgtggt

SEQ ID NO: 3109147 - DNA, 25 bp, Homo sapien
cgccgagtttttacctcagaggctg

SEQ ID NO: 3109148 - DNA, 25 bp, Homo sapien
gccacgctgcgctgagaagtcctgt

SEQ ID NO: 3109149 - DNA, 25 bp, Homo sapien
ttccagggccaccagatgctgcgcg

SEQ ID NO: 3109150 - DNA, 25 bp, Homo sapien
tggttcccattggagctctgccctt

SEQ ID NO: 3109151 - DNA, 25 bp, Homo sapien
gtgcactctgcacgtttgccccctg

SEQ ID NO: 3109152 - DNA, 25 bp, Homo sapien
ccccggcgtactgtcctcgccagca

SEQ ID NO: 3109153 - DNA, 25 bp, Homo sapien
cacagaaccatcgaggacggcccag

SEQ ID NO: 3109154 - DNA, 25 bp, Homo sapien
agaaccatcgaggacggcccaggat

SEQ ID NO: 3109155 - DNA, 25 bp, Homo sapien
acccacagaaccatcgaggacggcc

SEQ ID NO: 3109156 - DNA, 25 bp, Homo sapien
aaccatcgaggacggcccaggatgg

SEQ ID NO: 3109157 - DNA, 25 bp, Homo sapien
caggagttaggagcacgctcgcagc

SEQ ID NO: 3109158 - DNA, 25 bp, Homo sapien
acgctcgcagcctgtggctggtcca

SEQ ID NO: 3109159 - DNA, 25 bp, Homo sapien
gctggtccacttggaggatgggaga

SEQ ID NO: 3109160 - DNA, 25 bp, Homo sapien
cattgacgtcgcctgtttgggccag

SEQ ID NO: 3109161 - DNA, 25 bp, Homo sapien
ggtgagcgccatccgcagctctgtg

SEQ ID NO: 3109162 - DNA, 25 bp, Homo sapien
gaaggagcctctcgcggcctccacc

SEQ ID NO: 3109163 - DNA, 25 bp, Homo sapien
aagtgcggggtatcctggcggtgcc

SEQ ID NO: 3109164 - DNA, 25 bp, Homo sapien
ctgccaggagaagtgcggggtatcc

SEQ ID NO: 3109165 - DNA, 25 bp, Homo sapien
tgagggacacgcatagctgcccacc

SEQ ID NO: 3109166 - DNA, 25 bp, Homo sapien
gacacgcatagctgcccacccgcag

SEQ ID NO: 3109167 - DNA, 25 bp, Homo sapien
cagctgagggacacgcatagctgcc

SEQ ID NO: 3109168 - DNA, 25 bp, Homo sapien
ggacacgcatagctgcccacccgca

SEQ ID NO: 3109169 - DNA, 25 bp, Homo sapien
ttgtctttgctgagaagtcagagcc

SEQ ID NO: 3109170 - DNA, 25 bp, Homo sapien
atgcagactttgtctttgctgagaa

SEQ ID NO: 3109171 - DNA, 25 bp, Homo sapien
ctttgctgagaagtcagagccggtg

SEQ ID NO: 3109172 - DNA, 25 bp, Homo sapien
gactttgtctttgctgagaagtcag

SEQ ID NO: 3109173 - DNA, 25 bp, Homo sapien
ttccagtgagaagcgatacaggtgt

SEQ ID NO: 3109174 - DNA, 25 bp, Homo sapien
ccacaggggccggcatcggtgatat

SEQ ID NO: 3109175 - DNA, 25 bp, Homo sapien
gttccagtgagaagcgatacaggtg

SEQ ID NO: 3109176 - DNA, 25 bp, Homo sapien
ggccccacaggggccggcatcggtg

SEQ ID NO: 3109177 - DNA, 25 bp, Homo sapien
gagcccgagatttgctaaggctcag

SEQ ID NO: 3109178 - DNA, 25 bp, Homo sapien
ctgcaggagcccgagatttgctaag

SEQ ID NO: 3109179 - DNA, 25 bp, Homo sapien
ggccttgcccttgtcagccagctgc

SEQ ID NO: 3109180 - DNA, 25 bp, Homo sapien
ccgagatttgctaaggctcaggagg

SEQ ID NO: 3109181 - DNA, 25 bp, Homo sapien
tcgcccggatccacccaccgagcag

SEQ ID NO: 3109182 - DNA, 25 bp, Homo sapien
ttcgcccggatccacccaccgagca

SEQ ID NO: 3109183 - DNA, 25 bp, Homo sapien
accgcgtagagttcgcccggatcca

SEQ ID NO: 3109184 - DNA, 25 bp, Homo sapien
aagaccgcgtagagttcgcccggat

SEQ ID NO: 3109185 - DNA, 25 bp, Homo sapien
gttccccgtgcacagcgtggccaca

SEQ ID NO: 3109186 - DNA, 25 bp, Homo sapien
cacacccatatttggcaacggcttc

SEQ ID NO: 3109187 - DNA, 25 bp, Homo sapien
gccctgttccccgtgcacagcgtgg

SEQ ID NO: 3109188 - DNA, 25 bp, Homo sapien
cgcgccgactccttcagcagcctgg

SEQ ID NO: 3109189 - DNA, 25 bp, Homo sapien
gaggactcgtcctacagctcagacg

SEQ ID NO: 3109190 - DNA, 25 bp, Homo sapien
tggctggcaccggtgcgggctcagg

SEQ ID NO: 3109191 - DNA, 25 bp, Homo sapien
tgctcctccgacaacgaggactcgt

SEQ ID NO: 3109192 - DNA, 25 bp, Homo sapien
agacgacgaggacccggctctgctg

SEQ ID NO: 3109193 - DNA, 25 bp, Homo sapien
tagaaatggcttcatgtcgggccgg

SEQ ID NO: 3109194 - DNA, 25 bp, Homo sapien
cacgttgataagtggcgtggccagc

SEQ ID NO: 3109195 - DNA, 25 bp, Homo sapien
ctgcactccgcatggtgtggcctca

SEQ ID NO: 3109196 - DNA, 25 bp, Homo sapien
agctggagagctgtgtatccccgca

SEQ ID NO: 3109197 - DNA, 25 bp, Homo sapien
ccggtgagtgcggagagaggtgctc

SEQ ID NO: 3109198 - DNA, 25 bp, Homo sapien
cttggaggacggagtccctgagtca

SEQ ID NO: 3109199 - DNA, 25 bp, Homo sapien
tcacagctgcgtccaaggccaggaa

SEQ ID NO: 3109200 - DNA, 25 bp, Homo sapien
tggccgggccgagcgctgagtaagg

SEQ ID NO: 3109201 - DNA, 25 bp, Homo sapien
gggcactggagctggccggacgccc

SEQ ID NO: 3109202 - DNA, 25 bp, Homo sapien
ggcactggagctggccggacgccca

SEQ ID NO: 3109203 - DNA, 25 bp, Homo sapien
tccacagctgcagacgcccggcaga

SEQ ID NO: 3109204 - DNA, 25 bp, Homo sapien
agtgggtagttccagcgtccactcc

SEQ ID NO: 3109205 - DNA, 25 bp, Homo sapien
gctgcagacgcccggcagaccctca

SEQ ID NO: 3109206 - DNA, 25 bp, Homo sapien
ttagcagtgggtagttccagcgtcc

SEQ ID NO: 3109207 - DNA, 25 bp, Homo sapien
ccgaactcaggaaggtggacatccc

SEQ ID NO: 3109208 - DNA, 25 bp, Homo sapien
tggacatcccagacagcaggcacag

SEQ ID NO: 3109209 - DNA, 25 bp, Homo sapien
caggcacagctgagccgcccagctc

SEQ ID NO: 3109210 - DNA, 25 bp, Homo sapien
aggcacagctgagccgcccagctca

SEQ ID NO: 3109211 - DNA, 25 bp, Homo sapien
gcggccccagcgcttgctggtggct

SEQ ID NO: 3109212 - DNA, 25 bp, Homo sapien
ggcctcggggccttccagtgaccca

SEQ ID NO: 3109213 - DNA, 25 bp, Homo sapien
gatggagaggtagagtgtctccccc

SEQ ID NO: 3109214 - DNA, 25 bp, Homo sapien
cacccagccacgtttcattttctga

SEQ ID NO: 3109215 - DNA, 25 bp, Homo sapien
ttcacacttcaaaacaggtgctgga

SEQ ID NO: 3109216 - DNA, 25 bp, Homo sapien
aatgcgtagccggtagacaagccaa

SEQ ID NO: 3109217 - DNA, 25 bp, Homo sapien
acatgcttgtacgttccacttgaag

SEQ ID NO: 3109218 - DNA, 25 bp, Homo sapien
tcaaataccctgtctgagggtgcca

SEQ ID NO: 3109219 - DNA, 25 bp, Homo sapien
ggaaccgcacagcacccggcgatgg

SEQ ID NO: 3109220 - DNA, 25 bp, Homo sapien
tccccgcctcgccaggtggcaaggc

SEQ ID NO: 3109221 - DNA, 25 bp, Homo sapien
cagcgcctccgagccgggaaccgca

SEQ ID NO: 3109222 - DNA, 25 bp, Homo sapien
tggcaaggccttcgctcctggtccc

SEQ ID NO: 3109223 - DNA, 25 bp, Homo sapien
agcccttggcaaatgagcttgggac

SEQ ID NO: 3109224 - DNA, 25 bp, Homo sapien
tccttcgctgggacgagcgctttca

SEQ ID NO: 3109225 - DNA, 25 bp, Homo sapien
ccttcctaaaacctaagccaatgat

SEQ ID NO: 3109226 - DNA, 25 bp, Homo sapien
tgataggcccgatcttgcctgagag

SEQ ID NO: 3109227 - DNA, 25 bp, Homo sapien
taggacgggccaccgcgctgaagct

SEQ ID NO: 3109228 - DNA, 25 bp, Homo sapien
acacacatccctgggagtaggacgg

SEQ ID NO: 3109229 - DNA, 25 bp, Homo sapien
ccacgtcttcccttagacaacacct

SEQ ID NO: 3109230 - DNA, 25 bp, Homo sapien
cagggctcccaatctgtaggcgagg

SEQ ID NO: 3109231 - DNA, 25 bp, Homo sapien
gctctcacaaggaggcctccggaag

SEQ ID NO: 3109232 - DNA, 25 bp, Homo sapien
tctgtgacccagctgaccgagggac

SEQ ID NO: 3109233 - DNA, 25 bp, Homo sapien
caggcgccggctgctctgtgaccca

SEQ ID NO: 3109234 - DNA, 25 bp, Homo sapien
ctggagcggaagcctccccctcggg

SEQ ID NO: 3109235 - DNA, 25 bp, Homo sapien
cctcgggcaggctgagaatgacgca

SEQ ID NO: 3109236 - DNA, 25 bp, Homo sapien
tatgtcaagtgaccattattgggcc

SEQ ID NO: 3109237 - DNA, 25 bp, Homo sapien
gtcaccctggacagaccacctctgt

SEQ ID NO: 3109238 - DNA, 25 bp, Homo sapien
ctctcagcatggcgcttgcccaggg

SEQ ID NO: 3109239 - DNA, 25 bp, Homo sapien
aggacagtggtcaccgtcaccctgg

SEQ ID NO: 3109240 - DNA, 25 bp, Homo sapien
ctggtttggccgagggacctgcttc

SEQ ID NO: 3109241 - DNA, 25 bp, Homo sapien
cttccgcagcccgaattccaggcca

SEQ ID NO: 3109242 - DNA, 25 bp, Homo sapien
agggaggacggcgtggtcaggacct

SEQ ID NO: 3109243 - DNA, 25 bp, Homo sapien
gcccacatccatggcgtgagccccg

SEQ ID NO: 3109244 - DNA, 25 bp, Homo sapien
tcacgtggagttgtgtgtcctgcga

SEQ ID NO: 3109245 - DNA, 25 bp, Homo sapien
tgcaggagctgtgtcgcgtgttatc

SEQ ID NO: 3109246 - DNA, 25 bp, Homo sapien
tatccccgtcacgtggagttgtgtg

SEQ ID NO: 3109247 - DNA, 25 bp, Homo sapien
tcctgcgaggagcacagcatttcag

SEQ ID NO: 3109248 - DNA, 25 bp, Homo sapien
ccggcgcttctgcgcacgggctcac

SEQ ID NO: 3109249 - DNA, 25 bp, Homo sapien
gccggcgcttctgcgcacgggctca

SEQ ID NO: 3109250 - DNA, 25 bp, Homo sapien
tcagccggcgcttctgcgcacgggc

SEQ ID NO: 3109251 - DNA, 25 bp, Homo sapien
agccggcgcttctgcgcacgggctc

SEQ ID NO: 3109252 - DNA, 25 bp, Homo sapien
gcagcttgaaggagcgaccccgtgg

SEQ ID NO: 3109253 - DNA, 25 bp, Homo sapien
gggcggccgggatcacggactcgct

SEQ ID NO: 3109254 - DNA, 25 bp, Homo sapien
ggagcgaccccgtgggccggcgcat

SEQ ID NO: 3109255 - DNA, 25 bp, Homo sapien
tcgctggcctcgtctccggagcgga

SEQ ID NO: 3109256 - DNA, 25 bp, Homo sapien
gcggaggcccgcgccgagccaggag

SEQ ID NO: 3109257 - DNA, 25 bp, Homo sapien
cggaggcccgcgccgagccaggagc

SEQ ID NO: 3109258 - DNA, 25 bp, Homo sapien
cgcggaggcccgcgccgagccagga

SEQ ID NO: 3109259 - DNA, 25 bp, Homo sapien
gccccaggcgggtcgatcccgctgt

SEQ ID NO: 3109260 - DNA, 25 bp, Homo sapien
ggaaaagggtctcgcacgtgcgccc

SEQ ID NO: 3109261 - DNA, 25 bp, Homo sapien
gacagagtcaggcgcgtgcgcactc

SEQ ID NO: 3109262 - DNA, 25 bp, Homo sapien
ggtcggcggcgaggctgagagcccc

SEQ ID NO: 3109263 - DNA, 25 bp, Homo sapien
gccgagttgtgcctgttgccgtttc

SEQ ID NO: 3109264 - DNA, 25 bp, Homo sapien
gagttgtgcctgttgccgtttccgg

SEQ ID NO: 3109265 - DNA, 25 bp, Homo sapien
gttgtgcctgttgccgtttccggcg

SEQ ID NO: 3109266 - DNA, 25 bp, Homo sapien
tgttccggggccgagttgtgcctgt

SEQ ID NO: 3109267 - DNA, 25 bp, Homo sapien
gccgagttgtgcctgttgccgtttc

SEQ ID NO: 3109268 - DNA, 25 bp, Homo sapien
gagttgtgcctgttgccgtttccgg

SEQ ID NO: 3109269 - DNA, 25 bp, Homo sapien
tgttccggggccgagttgtgcctgt

SEQ ID NO: 3109270 - DNA, 25 bp, Homo sapien
gttgtgcctgttgccgtttccggcg

SEQ ID NO: 3109271 - DNA, 25 bp, Homo sapien
tcctccaacatggaaggagggccat

SEQ ID NO: 3109272 - DNA, 25 bp, Homo sapien
tccaacatggaaggagggccatccc

SEQ ID NO: 3109273 - DNA, 25 bp, Homo sapien
cacaagcatttcctccaacatggaa

SEQ ID NO: 3109274 - DNA, 25 bp, Homo sapien
cacacaagcatttcctccaacatgg

SEQ ID NO: 3109275 - DNA, 25 bp, Homo sapien
cctggaccaggacatcagccatgtg

SEQ ID NO: 3109276 - DNA, 25 bp, Homo sapien
ctggaccaggacatcagccatgtgc

SEQ ID NO: 3109277 - DNA, 25 bp, Homo sapien
gcgcctggaccaggacatcagccat

SEQ ID NO: 3109278 - DNA, 25 bp, Homo sapien
gcctggaccaggacatcagccatgt

SEQ ID NO: 3109279 - DNA, 25 bp, Homo sapien
ctgcgaccagctcgcagcctgacgt

SEQ ID NO: 3109280 - DNA, 25 bp, Homo sapien
agatcggggctttcccctgcgacca

SEQ ID NO: 3109281 - DNA, 25 bp, Homo sapien
cggaggcggtcagccgatggaccag

SEQ ID NO: 3109282 - DNA, 25 bp, Homo sapien
ggaccaggcggtgccgcagcgacag

SEQ ID NO: 3109283 - DNA, 25 bp, Homo sapien
aaaggattccaaacgaccaccagca

SEQ ID NO: 3109284 - DNA, 25 bp, Homo sapien
cagcacggggacacatcctttccag

SEQ ID NO: 3109285 - DNA, 25 bp, Homo sapien
ggattccaaacgaccaccagcaggc

SEQ ID NO: 3109286 - DNA, 25 bp, Homo sapien
gacagcacggggacacatcctttcc

SEQ ID NO: 3109287 - DNA, 25 bp, Homo sapien
caagggtcctgtaagtcagaaaatc

SEQ ID NO: 3109288 - DNA, 25 bp, Homo sapien
ctccaaccaagcaagggtcctgtaa

SEQ ID NO: 3109289 - DNA, 25 bp, Homo sapien
caagcaagggtcctgtaagtcagaa

SEQ ID NO: 3109290 - DNA, 25 bp, Homo sapien
gggtcctgtaagtcagaaaatctct

SEQ ID NO: 3109291 - DNA, 25 bp, Homo sapien
ttaagccgttttctcaccagcccac

SEQ ID NO: 3109292 - DNA, 25 bp, Homo sapien
tacccaatacttccaggttggtctg

SEQ ID NO: 3109293 - DNA, 25 bp, Homo sapien
agcccacttgctacttccccaaaca

SEQ ID NO: 3109294 - DNA, 25 bp, Homo sapien
ccaagactacccaatacttccaggt

SEQ ID NO: 3109295 - DNA, 25 bp, Homo sapien
cacttttatttttccttacacaatg

SEQ ID NO: 3109296 - DNA, 25 bp, Homo sapien
cctgacagacccgcaagacaaaaca

SEQ ID NO: 3109297 - DNA, 25 bp, Homo sapien
agacccgcaagacaaaacaactggt

SEQ ID NO: 3109298 - DNA, 25 bp, Homo sapien
cagacccgcaagacaaaacaactgg

SEQ ID NO: 3109299 - DNA, 25 bp, Homo sapien
gacagacccgcaagacaaaacaact

SEQ ID NO: 3109300 - DNA, 25 bp, Homo sapien
aaggttgaactcaaagatatgtaca

SEQ ID NO: 3109301 - DNA, 25 bp, Homo sapien
gccacacgtactaaaggttgaactc

SEQ ID NO: 3109302 - DNA, 25 bp, Homo sapien
agccacacgtactaaaggttgaact

SEQ ID NO: 3109303 - DNA, 25 bp, Homo sapien
aaaggttgaactcaaagatatgtac

SEQ ID NO: 3109304 - DNA, 25 bp, Homo sapien
aatgctacgcatctgctgagtccgt

SEQ ID NO: 3109305 - DNA, 25 bp, Homo sapien
gccaggggcaaatttctattctcaa

SEQ ID NO: 3109306 - DNA, 25 bp, Homo sapien
ggggcaaatttctattctcaattaa

SEQ ID NO: 3109307 - DNA, 25 bp, Homo sapien
caaatgctacgcatctgctgagtcc

SEQ ID NO: 3109308 - DNA, 25 bp, Homo sapien
tacttgcgctctgggggtgcgatga

SEQ ID NO: 3109309 - DNA, 25 bp, Homo sapien
cgagtacttgcgctctgggggtgcg

SEQ ID NO: 3109310 - DNA, 25 bp, Homo sapien
gacgatggaggggcccgactcgtcg

SEQ ID NO: 3109311 - DNA, 25 bp, Homo sapien
tggaggggcccgactcgtcgtactc

SEQ ID NO: 3109312 - DNA, 25 bp, Homo sapien
gtcagctctcccgagccaggcagag

SEQ ID NO: 3109313 - DNA, 25 bp, Homo sapien
aggcacggcttcagctcacagagcg

SEQ ID NO: 3109314 - DNA, 25 bp, Homo sapien
agagggccaccaacccctcgactca

SEQ ID NO: 3109315 - DNA, 25 bp, Homo sapien
tgcaaagacagccaggcacggcttc

SEQ ID NO: 3109316 - DNA, 25 bp, Homo sapien
gtggtgccgcccgacagcaccgtgt

SEQ ID NO: 3109317 - DNA, 25 bp, Homo sapien
cctgtcggcaatgcccgggtacatg

SEQ ID NO: 3109318 - DNA, 25 bp, Homo sapien
aggtggtctcgtggatgccgcaaga

SEQ ID NO: 3109319 - DNA, 25 bp, Homo sapien
ttgaaggtggtctcgtggatgccgc

SEQ ID NO: 3109320 - DNA, 25 bp, Homo sapien
tcccttagtgatgctgtgtcaccga

SEQ ID NO: 3109321 - DNA, 25 bp, Homo sapien
cagagccctcccttagtgatgctgt

SEQ ID NO: 3109322 - DNA, 25 bp, Homo sapien
gatgctgtgtcaccgaggatgtaag

SEQ ID NO: 3109323 - DNA, 25 bp, Homo sapien
caccgaggatgtaagagtagaaacc

SEQ ID NO: 3109324 - DNA, 25 bp, Homo sapien
acaccggaaccgctcattgccaatg

SEQ ID NO: 3109325 - DNA, 25 bp, Homo sapien
ccgtctccagagtccatgacaatgc

SEQ ID NO: 3109326 - DNA, 25 bp, Homo sapien
ggtgcgcccagaggcgtagagggac

SEQ ID NO: 3109327 - DNA, 25 bp, Homo sapien
agaagaggaggatgcggcggtggcc

SEQ ID NO: 3109328 - DNA, 25 bp, Homo sapien
atgctcacacgccacaacatgctgc

SEQ ID NO: 3109329 - DNA, 25 bp, Homo sapien
caaggggcggcttagtcagggacag

SEQ ID NO: 3109330 - DNA, 25 bp, Homo sapien
cacaacatgctgcatgccagtgtga

SEQ ID NO: 3109331 - DNA, 25 bp, Homo sapien
catgctgcatgccagtgtgatgtgt

SEQ ID NO: 3109332 - DNA, 25 bp, Homo sapien
aggcttcagggaggaaatgccggga

SEQ ID NO: 3109333 - DNA, 25 bp, Homo sapien
cttcagggaggaaatgccgggagag

SEQ ID NO: 3109334 - DNA, 25 bp, Homo sapien
ggcttcagggaggaaatgccgggag

SEQ ID NO: 3109335 - DNA, 25 bp, Homo sapien
gcttcagggaggaaatgccgggaga

SEQ ID NO: 3109336 - DNA, 25 bp, Homo sapien
gtcagaaatcaagccgggcagaaaa

SEQ ID NO: 3109337 - DNA, 25 bp, Homo sapien
aggagcacgggcgtcggccgagcct

SEQ ID NO: 3109338 - DNA, 25 bp, Homo sapien
ctggaacagcgaaagaaacacttaa

SEQ ID NO: 3109339 - DNA, 25 bp, Homo sapien
cagaaaatgactggggaaaggacgg

SEQ ID NO: 3109340 - DNA, 25 bp, Homo sapien
tcttctctctgttggccttggggtt

SEQ ID NO: 3109341 - DNA, 25 bp, Homo sapien
cttctctctgttggccttggggttc

SEQ ID NO: 3109342 - DNA, 25 bp, Homo sapien
catcttctctctgttggccttgggg

SEQ ID NO: 3109343 - DNA, 25 bp, Homo sapien
gtcatcttctctctgttggccttgg

SEQ ID NO: 3109344 - DNA, 25 bp, Homo sapien
tccggggccacgcgcagctcgttgt

SEQ ID NO: 3109345 - DNA, 25 bp, Homo sapien
agcactgggtgctcctccggggcca

SEQ ID NO: 3109346 - DNA, 25 bp, Homo sapien
actgggtgctcctccggggccacgc

SEQ ID NO: 3109347 - DNA, 25 bp, Homo sapien
ccggggccacgcgcagctcgttgta

SEQ ID NO: 3109348 - DNA, 25 bp, Homo sapien
tctgggcctcgtcgcccacgtagga

SEQ ID NO: 3109349 - DNA, 25 bp, Homo sapien
gatgccacgcttgctctgggcctcg

SEQ ID NO: 3109350 - DNA, 25 bp, Homo sapien
gggcctcgtcgcccacgtaggagtc

SEQ ID NO: 3109351 - DNA, 25 bp, Homo sapien
ggatgccacgcttgctctgggcctc

SEQ ID NO: 3109352 - DNA, 25 bp, Homo sapien
cttctggcccatgcccaccatgacg

SEQ ID NO: 3109353 - DNA, 25 bp, Homo sapien
tctggcccatgcccaccatgacgcc

SEQ ID NO: 3109354 - DNA, 25 bp, Homo sapien
ttctggcccatgcccaccatgacgc

SEQ ID NO: 3109355 - DNA, 25 bp, Homo sapien
cccgcaacgcagaacccaggagccc

SEQ ID NO: 3109356 - DNA, 25 bp, Homo sapien
ggcgcccgacgatggaaggaaacac

SEQ ID NO: 3109357 - DNA, 25 bp, Homo sapien
tctggggcgcccgacgatggaagga

SEQ ID NO: 3109358 - DNA, 25 bp, Homo sapien
cgcccgacgatggaaggaaacacgg

SEQ ID NO: 3109359 - DNA, 25 bp, Homo sapien
cgacgatggaaggaaacacggctcg

SEQ ID NO: 3109360 - DNA, 25 bp, Homo sapien
atcgcaaccgcctggaaccgaaggc

SEQ ID NO: 3109361 - DNA, 25 bp, Homo sapien
aggcgggcgcgtctgtaacacggtc

SEQ ID NO: 3109362 - DNA, 25 bp, Homo sapien
aacgtccacggctcggaagtctgca

SEQ ID NO: 3109363 - DNA, 25 bp, Homo sapien
gcggccgtggcctccaagatcgcaa

SEQ ID NO: 3109364 - DNA, 25 bp, Homo sapien
aaggcgcgacgaggcctcggcagct

SEQ ID NO: 3109365 - DNA, 25 bp, Homo sapien
gggaaggcgcgacgaggcctcggca

SEQ ID NO: 3109366 - DNA, 25 bp, Homo sapien
gggcgcaggcctgcgacgtccagct

SEQ ID NO: 3109367 - DNA, 25 bp, Homo sapien
gcgcaggcctgcgacgtccagctca

SEQ ID NO: 3109368 - DNA, 25 bp, Homo sapien
ggcggaagaacagagtgcgagagct

SEQ ID NO: 3109369 - DNA, 25 bp, Homo sapien
ctggcagcggcgactgagaccgacc

SEQ ID NO: 3109370 - DNA, 25 bp, Homo sapien
gcagagaaacgcgacggcggagcgg

SEQ ID NO: 3109371 - DNA, 25 bp, Homo sapien
acgcgacggcggagcggcggaagaa

SEQ ID NO: 3109372 - DNA, 25 bp, Homo sapien
caccataggaaacagcccgcccgtc

SEQ ID NO: 3109373 - DNA, 25 bp, Homo sapien
cccgcccgtccccaagcgcagccac

SEQ ID NO: 3109374 - DNA, 25 bp, Homo sapien
cgcccgtccccaagcgcagccacca

SEQ ID NO: 3109375 - DNA, 25 bp, Homo sapien
ctcgccccggtcaccataggaaaca

SEQ ID NO: 3109376 - DNA, 25 bp, Homo sapien
cgggggcgaggctggcgcctcgaga

SEQ ID NO: 3109377 - DNA, 25 bp, Homo sapien
gcgggggcgaggctggcgcctcgag

SEQ ID NO: 3109378 - DNA, 25 bp, Homo sapien
gggggcgaggctggcgcctcgagac

SEQ ID NO: 3109379 - DNA, 25 bp, Homo sapien
gggcgaggctggcgcctcgagaccc

SEQ ID NO: 3109380 - DNA, 25 bp, Homo sapien
ttggcgcgcgggacagaggggcggc

SEQ ID NO: 3109381 - DNA, 25 bp, Homo sapien
gggcgtaggagtggcccggcgcctc

SEQ ID NO: 3109382 - DNA, 25 bp, Homo sapien
cccgcccggcgctcctggccttatt

SEQ ID NO: 3109383 - DNA, 25 bp, Homo sapien
gcggggatgcgggtctgcctgtccc

SEQ ID NO: 3109384 - DNA, 25 bp, Homo sapien
agtgaagctggtgcccctgtacctg

SEQ ID NO: 3109385 - DNA, 25 bp, Homo sapien
gttcttggggcacagcatccttgtc

SEQ ID NO: 3109386 - DNA, 25 bp, Homo sapien
gctgctcgtgcaggaagcccaagta

SEQ ID NO: 3109387 - DNA, 25 bp, Homo sapien
gcccctgtacctggcatagcacctg

SEQ ID NO: 3109388 - DNA, 25 bp, Homo sapien
cccaggacccgcactcagcacgcac

SEQ ID NO: 3109389 - DNA, 25 bp, Homo sapien
ctctcctgaccgccaggtgcacgca

SEQ ID NO: 3109390 - DNA, 25 bp, Homo sapien
actgtctggcagcggggacgcaccc

SEQ ID NO: 3109391 - DNA, 25 bp, Homo sapien
cgcacccccaggaccacgagctcgg

SEQ ID NO: 3109392 - DNA, 25 bp, Homo sapien
cacccccaggaccacgagctcggag

SEQ ID NO: 3109393 - DNA, 25 bp, Homo sapien
cccccaggaccacgagctcggaggc

SEQ ID NO: 3109394 - DNA, 25 bp, Homo sapien
aggtgggtgccgctatcgccgcgag

SEQ ID NO: 3109395 - DNA, 25 bp, Homo sapien
cgtggagtgggtcccgcgagaaggc

SEQ ID NO: 3109396 - DNA, 25 bp, Homo sapien
cgagaaggccgggaatggcgggccg

SEQ ID NO: 3109397 - DNA, 25 bp, Homo sapien
aatggcgggccgctgtcgttcccac

SEQ ID NO: 3109398 - DNA, 25 bp, Homo sapien
ccactgggcggggccggtcgctgag

SEQ ID NO: 3109399 - DNA, 25 bp, Homo sapien
ccgcacaccggacggtgacagaggc

SEQ ID NO: 3109400 - DNA, 25 bp, Homo sapien
ggcggggccggtcgctgagtcacgg

SEQ ID NO: 3109401 - DNA, 25 bp, Homo sapien
ggccgcacaccggacggtgacagag

SEQ ID NO: 3109402 - DNA, 25 bp, Homo sapien
tgcccacgctagatgtccggggtcc

SEQ ID NO: 3109403 - DNA, 25 bp, Homo sapien
gcccacgctagatgtccggggtccc

SEQ ID NO: 3109404 - DNA, 25 bp, Homo sapien
ccacgctagatgtccggggtccctc

SEQ ID NO: 3109405 - DNA, 25 bp, Homo sapien
cccacgctagatgtccggggtccct

SEQ ID NO: 3109406 - DNA, 25 bp, Homo sapien
ggcttctccggccttcccagggctg

SEQ ID NO: 3109407 - DNA, 25 bp, Homo sapien
acagaggcttctccggccttcccag

SEQ ID NO: 3109408 - DNA, 25 bp, Homo sapien
agaggcttctccggccttcccaggg

SEQ ID NO: 3109409 - DNA, 25 bp, Homo sapien
gacagaggcttctccggccttccca

SEQ ID NO: 3109410 - DNA, 25 bp, Homo sapien
aaggggccaggttgtttgcggctgg

SEQ ID NO: 3109411 - DNA, 25 bp, Homo sapien
ggctggctccgggaaagtcagaggg

SEQ ID NO: 3109412 - DNA, 25 bp, Homo sapien
ggccaggttgtttgcggctgggctg

SEQ ID NO: 3109413 - DNA, 25 bp, Homo sapien
cactgccggacaggggatgtccagt

SEQ ID NO: 3109414 - DNA, 25 bp, Homo sapien
tggggccgtggggacacaggaaggc

SEQ ID NO: 3109415 - DNA, 25 bp, Homo sapien
ctggggccgtggggacacaggaagg

SEQ ID NO: 3109416 - DNA, 25 bp, Homo sapien
cttgggctctcttgaaggttaactg

SEQ ID NO: 3109417 - DNA, 25 bp, Homo sapien
tgcccagcaccttgacaagccccat

SEQ ID NO: 3109418 - DNA, 25 bp, Homo sapien
tctcttgaaggttaactgtgcccag

SEQ ID NO: 3109419 - DNA, 25 bp, Homo sapien
gggctctcttgaaggttaactgtgc

SEQ ID NO: 3109420 - DNA, 25 bp, Homo sapien
tgtgcccctgtgtgtaagtccagct

SEQ ID NO: 3109421 - DNA, 25 bp, Homo sapien
ccaggtgtccatgtctgtggtgtgc

SEQ ID NO: 3109422 - DNA, 25 bp, Homo sapien
agacctgtgggctcgttcacgccag

SEQ ID NO: 3109423 - DNA, 25 bp, Homo sapien
tgtgtgtgtagatgcaggttcgcag

SEQ ID NO: 3109424 - DNA, 25 bp, Homo sapien
gcgtggtcctcagccgcggggtggc

SEQ ID NO: 3109425 - DNA, 25 bp, Homo sapien
atgccaacaggagtggcagcggtca

SEQ ID NO: 3109426 - DNA, 25 bp, Homo sapien
cagggatgccaacaggagtggcagc

SEQ ID NO: 3109427 - DNA, 25 bp, Homo sapien
agacagggatgccaacaggagtggc

SEQ ID NO: 3109428 - DNA, 25 bp, Homo sapien
ctgagggtggacaccaggtgccggt

SEQ ID NO: 3109429 - DNA, 25 bp, Homo sapien
gacaccaggtgccggtgggggcgca

SEQ ID NO: 3109430 - DNA, 25 bp, Homo sapien
acaccaggtgccggtgggggcgcat

SEQ ID NO: 3109431 - DNA, 25 bp, Homo sapien
agggtggacaccaggtgccggtggg

SEQ ID NO: 3109432 - DNA, 25 bp, Homo sapien
gcctgtcgcgcattaaaaccgtgtc

SEQ ID NO: 3109433 - DNA, 25 bp, Homo sapien
tttgggagtactgaggccgcgccca

SEQ ID NO: 3109434 - DNA, 25 bp, Homo sapien
agcctgcgcgggttgaggccaccaa

SEQ ID NO: 3109435 - DNA, 25 bp, Homo sapien
aaaccgtgtctctcccgcagctgtg

SEQ ID NO: 3109436 - DNA, 25 bp, Homo sapien
caccaggtggaaccgcagtggctgg

SEQ ID NO: 3109437 - DNA, 25 bp, Homo sapien
caagttggcagggaacggcagtgac

SEQ ID NO: 3109438 - DNA, 25 bp, Homo sapien
caggtgccacctggtccaagttggc

SEQ ID NO: 3109439 - DNA, 25 bp, Homo sapien
gccctgcctgacgtgaacttggcct

SEQ ID NO: 3109440 - DNA, 25 bp, Homo sapien
cacatggcgtcttgaactaggcgtc

SEQ ID NO: 3109441 - DNA, 25 bp, Homo sapien
tcaaatgccgagtgttgagagcagg

SEQ ID NO: 3109442 - DNA, 25 bp, Homo sapien
catgtgagttgggtacatttcgccc

SEQ ID NO: 3109443 - DNA, 25 bp, Homo sapien
aagaagctgattgtggacctgccac

SEQ ID NO: 3109444 - DNA, 25 bp, Homo sapien
ctcccccaggcgtgtgaacacagac

SEQ ID NO: 3109445 - DNA, 25 bp, Homo sapien
cctcccccaggcgtgtgaacacaga

SEQ ID NO: 3109446 - DNA, 25 bp, Homo sapien
ccctcccccaggcgtgtgaacacag

SEQ ID NO: 3109447 - DNA, 25 bp, Homo sapien
tgtacaaaggtcagagccagaagct

SEQ ID NO: 3109448 - DNA, 25 bp, Homo sapien
tcatctagggccttcttgggagtcc

SEQ ID NO: 3109449 - DNA, 25 bp, Homo sapien
gcaagacacgggcacaagcgctgta

SEQ ID NO: 3109450 - DNA, 25 bp, Homo sapien
tctccgagccctgatgctcagagca

SEQ ID NO: 3109451 - DNA, 25 bp, Homo sapien
tagttgttgagcattccggccacag

SEQ ID NO: 3109452 - DNA, 25 bp, Homo sapien
tgaacagtgtgacaagggtaccgtg

SEQ ID NO: 3109453 - DNA, 25 bp, Homo sapien
ccctgaaaatagtgcacagtgctgg

SEQ ID NO: 3109454 - DNA, 25 bp, Homo sapien
tgaaggttcacggacagacagggtc

SEQ ID NO: 3109455 - DNA, 25 bp, Homo sapien
acacctgtagcagcctctgggcggt

SEQ ID NO: 3109456 - DNA, 25 bp, Homo sapien
agccggtcgcgcagggtctgcacct

SEQ ID NO: 3109457 - DNA, 25 bp, Homo sapien
gcgcagctgccggtacacctgtagc

SEQ ID NO: 3109458 - DNA, 25 bp, Homo sapien
tgccggtacacctgtagcagcctct

SEQ ID NO: 3109459 - DNA, 25 bp, Homo sapien
ccacctggccctggggatgtcactg

SEQ ID NO: 3109460 - DNA, 25 bp, Homo sapien
tgcaggtgaagcagacacagctcag

SEQ ID NO: 3109461 - DNA, 25 bp, Homo sapien
tggccctggggatgtcactgggtac

SEQ ID NO: 3109462 - DNA, 25 bp, Homo sapien
ctgcaggtgaagcagacacagctca

SEQ ID NO: 3109463 - DNA, 25 bp, Homo sapien
gcaggaccctacttgggaagtggca

SEQ ID NO: 3109464 - DNA, 25 bp, Homo sapien
tcatccggaaccttaaaacatggga

SEQ ID NO: 3109465 - DNA, 25 bp, Homo sapien
gaagcccatgcgctgtgaggactct

SEQ ID NO: 3109466 - DNA, 25 bp, Homo sapien
caggtggtccgaggaagaacactca

SEQ ID NO: 3109467 - DNA, 25 bp, Homo sapien
cggaggtactgcacacggagatcag

SEQ ID NO: 3109468 - DNA, 25 bp, Homo sapien
cggagatcaggagcgctggagccct

SEQ ID NO: 3109469 - DNA, 25 bp, Homo sapien
tggatctggcggaggtactgcacac

SEQ ID NO: 3109470 - DNA, 25 bp, Homo sapien
tcgtggttggcgtggatctggcgga

SEQ ID NO: 3109471 - DNA, 25 bp, Homo sapien
cttgctgttcatctcgacttcctgc

SEQ ID NO: 3109472 - DNA, 25 bp, Homo sapien
ccaccccagcgctttgctgttttcc

SEQ ID NO: 3109473 - DNA, 25 bp, Homo sapien
ttgctgttcatctcgacttcctgcc

SEQ ID NO: 3109474 - DNA, 25 bp, Homo sapien
cccaccccagcgctttgctgttttc

SEQ ID NO: 3109475 - DNA, 25 bp, Homo sapien
atctaaattcccagatgggaccagg

SEQ ID NO: 3109476 - DNA, 25 bp, Homo sapien
tggatctaaattcccagatgggacc

SEQ ID NO: 3109477 - DNA, 25 bp, Homo sapien
ctgggcttggatctaaattcccaga

SEQ ID NO: 3109478 - DNA, 25 bp, Homo sapien
gcttggatctaaattcccagatggg

SEQ ID NO: 3109479 - DNA, 25 bp, Homo sapien
cacaaatagaaacccactggccttg

SEQ ID NO: 3109480 - DNA, 25 bp, Homo sapien
actggccttgtagcccgggcagtcc

SEQ ID NO: 3109481 - DNA, 25 bp, Homo sapien
ccgggcagtccttggactcacaggt

SEQ ID NO: 3109482 - DNA, 25 bp, Homo sapien
ctcgcaggtcacaaatagaaaccca

SEQ ID NO: 3109483 - DNA, 25 bp, Homo sapien
tgcatgcgcccgacaacggcatggt

SEQ ID NO: 3109484 - DNA, 25 bp, Homo sapien
tcggccagagaggagctttccactt

SEQ ID NO: 3109485 - DNA, 25 bp, Homo sapien
gcatggtgcgccctgcaaatgtcgg

SEQ ID NO: 3109486 - DNA, 25 bp, Homo sapien
cacttgaatctccacggcctggatg

SEQ ID NO: 3109487 - DNA, 25 bp, Homo sapien
tgcaacacaggagccacctcactgc

SEQ ID NO: 3109488 - DNA, 25 bp, Homo sapien
ctgcaacacaggagccacctcactg

SEQ ID NO: 3109489 - DNA, 25 bp, Homo sapien
ctgtcccttaggaaggttggactga

SEQ ID NO: 3109490 - DNA, 25 bp, Homo sapien
tgtcccttaggaaggttggactgag

SEQ ID NO: 3109491 - DNA, 25 bp, Homo sapien
catttgccattcagcggcttccacg

SEQ ID NO: 3109492 - DNA, 25 bp, Homo sapien
cagcggcttccacgacaggtctgga

SEQ ID NO: 3109493 - DNA, 25 bp, Homo sapien
ctgagtctctggaaaggtgtgcacg

SEQ ID NO: 3109494 - DNA, 25 bp, Homo sapien
tggagaccagcagtgccatttgcca

SEQ ID NO: 3109495 - DNA, 25 bp, Homo sapien
tcctcccgagctccggcccaggggc

SEQ ID NO: 3109496 - DNA, 25 bp, Homo sapien
tggtgccgtggctcgtttccctgaa

SEQ ID NO: 3109497 - DNA, 25 bp, Homo sapien
ctgctggtgccgtggctcgtttccc

SEQ ID NO: 3109498 - DNA, 25 bp, Homo sapien
ggtgccgtggctcgtttccctgaac

SEQ ID NO: 3109499 - DNA, 25 bp, Homo sapien
gctggtgccgtggctcgtttccctg

SEQ ID NO: 3109500 - DNA, 25 bp, Homo sapien
gatgaggtgaacgttggcgccatca

SEQ ID NO: 3109501 - DNA, 25 bp, Homo sapien
ctccctggatggaagatagtgctcg

SEQ ID NO: 3109502 - DNA, 25 bp, Homo sapien
gggccctcacgacgtccacagcagc

SEQ ID NO: 3109503 - DNA, 25 bp, Homo sapien
atggaagatagtgctcgggccctca

SEQ ID NO: 3109504 - DNA, 25 bp, Homo sapien
agggtggcacagcacaggggcacgc

SEQ ID NO: 3109505 - DNA, 25 bp, Homo sapien
gcagggtggcacagcacaggggcac

SEQ ID NO: 3109506 - DNA, 25 bp, Homo sapien
ctgcagggtggcacagcacaggggc

SEQ ID NO: 3109507 - DNA, 25 bp, Homo sapien
cagggtggcacagcacaggggcacg

SEQ ID NO: 3109508 - DNA, 25 bp, Homo sapien
catctgcagcagaacggtgacatct

SEQ ID NO: 3109509 - DNA, 25 bp, Homo sapien
gggacctgctaatgctcctgggagc

SEQ ID NO: 3109510 - DNA, 25 bp, Homo sapien
tctgcacaagcccaaatccagaaac

SEQ ID NO: 3109511 - DNA, 25 bp, Homo sapien
ctcctgggagccgatgttaggagca

SEQ ID NO: 3109512 - DNA, 25 bp, Homo sapien
gactcttctgtatttaggttacgct

SEQ ID NO: 3109513 - DNA, 25 bp, Homo sapien
tcttctgtatttaggttacgcttcc

SEQ ID NO: 3109514 - DNA, 25 bp, Homo sapien
taggttacgcttccatatataggtt

SEQ ID NO: 3109515 - DNA, 25 bp, Homo sapien
tgtatttaggttacgcttccatata

SEQ ID NO: 3109516 - DNA, 25 bp, Homo sapien
aaaaaatccccaaggctgagcaaag

SEQ ID NO: 3109517 - DNA, 25 bp, Homo sapien
atccccaaggctgagcaaagccaag

SEQ ID NO: 3109518 - DNA, 25 bp, Homo sapien
tgagcaaagccaagcagtgccacca

SEQ ID NO: 3109519 - DNA, 25 bp, Homo sapien
gctgagcaaagccaagcagtgccac

SEQ ID NO: 3109520 - DNA, 25 bp, Homo sapien
tgagtggccgtccttcaaggcagct

SEQ ID NO: 3109521 - DNA, 25 bp, Homo sapien
gctccgccgacaccttgatggaagc

SEQ ID NO: 3109522 - DNA, 25 bp, Homo sapien
ctgagtggccgtccttcaaggcagc

SEQ ID NO: 3109523 - DNA, 25 bp, Homo sapien
gccaggctcccgacaagtttccaga

SEQ ID NO: 3109524 - DNA, 25 bp, Homo sapien
gccacagggtctcgggtggggccga

SEQ ID NO: 3109525 - DNA, 25 bp, Homo sapien
acagggtctcgggtggggccgagtg

SEQ ID NO: 3109526 - DNA, 25 bp, Homo sapien
caggctcccgacaagtttccagaaa

SEQ ID NO: 3109527 - DNA, 25 bp, Homo sapien
gccagggaagcgcagacactgcagc

SEQ ID NO: 3109528 - DNA, 25 bp, Homo sapien
gggcccgtgtgtgtggcagggccag

SEQ ID NO: 3109529 - DNA, 25 bp, Homo sapien
ccaggccagggaagcgcagacactg

SEQ ID NO: 3109530 - DNA, 25 bp, Homo sapien
aggccagggaagcgcagacactgca

SEQ ID NO: 3109531 - DNA, 25 bp, Homo sapien
agtccaggtcgagagcacaggagct

SEQ ID NO: 3109532 - DNA, 25 bp, Homo sapien
tcacgggcaggtcgagcccgccgtt

SEQ ID NO: 3109533 - DNA, 25 bp, Homo sapien
tccctgagactgtagaacagcgtgc

SEQ ID NO: 3109534 - DNA, 25 bp, Homo sapien
ggcaaacaccctcttgctcgggcag

SEQ ID NO: 3109535 - DNA, 25 bp, Homo sapien
tgtgtctgcaggcggctccaggtgg

SEQ ID NO: 3109536 - DNA, 25 bp, Homo sapien
tgtctgcaggcggctccaggtggtg

SEQ ID NO: 3109537 - DNA, 25 bp, Homo sapien
cctgtgtctgcaggcggctccaggt

SEQ ID NO: 3109538 - DNA, 25 bp, Homo sapien
atcctgtgtctgcaggcggctccag

SEQ ID NO: 3109539 - DNA, 25 bp, Homo sapien
cagcagtgcacagctcacgttcatg

SEQ ID NO: 3109540 - DNA, 25 bp, Homo sapien
tccgctggtcaaccgccttctttag

SEQ ID NO: 3109541 - DNA, 25 bp, Homo sapien
gcctcgttgaggcttgtcagtgcct

SEQ ID NO: 3109542 - DNA, 25 bp, Homo sapien
gcccgtgccgcttgacagcagtgca

SEQ ID NO: 3109543 - DNA, 25 bp, Homo sapien
ctgcgaaggacagacatgacccccg

SEQ ID NO: 3109544 - DNA, 25 bp, Homo sapien
gctccacgacaagcacacggtgggt

SEQ ID NO: 3109545 - DNA, 25 bp, Homo sapien
tgactcaggcctggtaggcaccgag

SEQ ID NO: 3109546 - DNA, 25 bp, Homo sapien
caagcacacggtgggtgtggagcca

SEQ ID NO: 3109547 - DNA, 25 bp, Homo sapien
gcagtcccggcttatcttccagagg

SEQ ID NO: 3109548 - DNA, 25 bp, Homo sapien
ccggaatgttcctagtgggcctctt

SEQ ID NO: 3109549 - DNA, 25 bp, Homo sapien
aacagtgggacgcatgaggctctca

SEQ ID NO: 3109550 - DNA, 25 bp, Homo sapien
catcttaagaggacaagtaacggcc

SEQ ID NO: 3109551 - DNA, 25 bp, Homo sapien
agagatgttgccaattccagacagc

SEQ ID NO: 3109552 - DNA, 25 bp, Homo sapien
gacagcagctcctttattttctgac

SEQ ID NO: 3109553 - DNA, 25 bp, Homo sapien
ctcagagatgttgccaattccagac

SEQ ID NO: 3109554 - DNA, 25 bp, Homo sapien
ctctcagagatgttgccaattccag

SEQ ID NO: 3109555 - DNA, 25 bp, Homo sapien
caggctgcaggtcatcaggcggcct

SEQ ID NO: 3109556 - DNA, 25 bp, Homo sapien
gctgcaggtcatcaggcggcctttg

SEQ ID NO: 3109557 - DNA, 25 bp, Homo sapien
tgcaggtcatcaggcggcctttggc

SEQ ID NO: 3109558 - DNA, 25 bp, Homo sapien
tcatcaggcggcctttggcggacag

SEQ ID NO: 3109559 - DNA, 25 bp, Homo sapien
ctctcttccgcagtggagacagtct

SEQ ID NO: 3109560 - DNA, 25 bp, Homo sapien
tcttccgcagtggagacagtctggc

SEQ ID NO: 3109561 - DNA, 25 bp, Homo sapien
cttccgcagtggagacagtctggcg

SEQ ID NO: 3109562 - DNA, 25 bp, Homo sapien
ctcttccgcagtggagacagtctgg

SEQ ID NO: 3109563 - DNA, 25 bp, Homo sapien
tgcactggtaggaggtgtgtggctc

SEQ ID NO: 3109564 - DNA, 25 bp, Homo sapien
ctgtggcgagatttattagcatgct

SEQ ID NO: 3109565 - DNA, 25 bp, Homo sapien
tgctcacaaggtgagcacacttggg

SEQ ID NO: 3109566 - DNA, 25 bp, Homo sapien
gtgtgtggctctattcctctcaccc

SEQ ID NO: 3109567 - DNA, 25 bp, Homo sapien
aatgccatctgcctttggtccagag

SEQ ID NO: 3109568 - DNA, 25 bp, Homo sapien
gaagaaaggcaagtccggaacagac

SEQ ID NO: 3109569 - DNA, 25 bp, Homo sapien
gactcacgggcaagccacaccatga

SEQ ID NO: 3109570 - DNA, 25 bp, Homo sapien
cacaccatgacacgagcaagcgttt

SEQ ID NO: 3109571 - DNA, 25 bp, Homo sapien
cagcacccgtcagccttgcaaaaga

SEQ ID NO: 3109572 - DNA, 25 bp, Homo sapien
ccttgagacaagagagttaaccact

SEQ ID NO: 3109573 - DNA, 25 bp, Homo sapien
cagacagccaaaaagggtgctccac

SEQ ID NO: 3109574 - DNA, 25 bp, Homo sapien
gaaggcggcctgatagtagcagaca

SEQ ID NO: 3109575 - DNA, 25 bp, Homo sapien
gcagtcacagtgcacatcctcgtca

SEQ ID NO: 3109576 - DNA, 25 bp, Homo sapien
tcaaggcccctatgaagatgacggg

SEQ ID NO: 3109577 - DNA, 25 bp, Homo sapien
cagcgagacgacactgcagatgttc

SEQ ID NO: 3109578 - DNA, 25 bp, Homo sapien
tccaggtgatggaggatcttgacaa

SEQ ID NO: 3109579 - DNA, 25 bp, Homo sapien
cggctgggggcgtgtaggaggacag

SEQ ID NO: 3109580 - DNA, 25 bp, Homo sapien
ggggcgtgtaggaggacagctccac

SEQ ID NO: 3109581 - DNA, 25 bp, Homo sapien
ccacctcaccgatctggcctcctgg

SEQ ID NO: 3109582 - DNA, 25 bp, Homo sapien
cacctcaccgatctggcctcctggc

SEQ ID NO: 3109583 - DNA, 25 bp, Homo sapien
cagcacactgtccagcaaggtgaac

SEQ ID NO: 3109584 - DNA, 25 bp, Homo sapien
tgaacgcgcacagcgcagcatcggg

SEQ ID NO: 3109585 - DNA, 25 bp, Homo sapien
gctgcatcttccatcgggcagggcc

SEQ ID NO: 3109586 - DNA, 25 bp, Homo sapien
caggcatcggggtccacagggatca

SEQ ID NO: 3109587 - DNA, 25 bp, Homo sapien
cacgaaggatactcttgacaagaag

SEQ ID NO: 3109588 - DNA, 25 bp, Homo sapien
cccacgaaggatactcttgacaaga

SEQ ID NO: 3109589 - DNA, 25 bp, Homo sapien
cttccccacgaaggatactcttgac

SEQ ID NO: 3109590 - DNA, 25 bp, Homo sapien
tccccacgaaggatactcttgacaa

SEQ ID NO: 3109591 - DNA, 25 bp, Homo sapien
atccaaaaccagcgtgaaccgacac

SEQ ID NO: 3109592 - DNA, 25 bp, Homo sapien
ggcatccaaaaccagcgtgaaccga

SEQ ID NO: 3109593 - DNA, 25 bp, Homo sapien
caggcatccaaaaccagcgtgaacc

SEQ ID NO: 3109594 - DNA, 25 bp, Homo sapien
gcatccaaaaccagcgtgaaccgac

SEQ ID NO: 3109595 - DNA, 25 bp, Homo sapien
taaggactgtgagcaagacacttgc

SEQ ID NO: 3109596 - DNA, 25 bp, Homo sapien
ggcaggggctccagataatcgggca

SEQ ID NO: 3109597 - DNA, 25 bp, Homo sapien
ggggctccagataatcgggcaggga

SEQ ID NO: 3109598 - DNA, 25 bp, Homo sapien
cccgggtccccaagcgcgatgaggt

SEQ ID NO: 3109599 - DNA, 25 bp, Homo sapien
cagataatcgggcagggatggcggc

SEQ ID NO: 3109600 - DNA, 25 bp, Homo sapien
gagggaggccgcgggcccgccctca

SEQ ID NO: 3109601 - DNA, 25 bp, Homo sapien
ctgaagcagtccgggggcagcagga

SEQ ID NO: 3109602 - DNA, 25 bp, Homo sapien
gcagcaggagtgtgcgggagggagg

SEQ ID NO: 3109603 - DNA, 25 bp, Homo sapien
ggggcagcaggagtgtgcgggaggg

SEQ ID NO: 3109604 - DNA, 25 bp, Homo sapien
gctcctgcccgggtggtccagcgac

SEQ ID NO: 3109605 - DNA, 25 bp, Homo sapien
ctgctcctgcccgggtggtccagcg

SEQ ID NO: 3109606 - DNA, 25 bp, Homo sapien
tgctcctgcccgggtggtccagcga

SEQ ID NO: 3109607 - DNA, 25 bp, Homo sapien
tgccacacctggtcggggaaccgga

SEQ ID NO: 3109608 - DNA, 25 bp, Homo sapien
agcgcgtacagcaacctgcgcggcg

SEQ ID NO: 3109609 - DNA, 25 bp, Homo sapien
agtagaggcccctccgggcgcacag

SEQ ID NO: 3109610 - DNA, 25 bp, Homo sapien
tccgggcgcacagcgcgtacagcaa

SEQ ID NO: 3109611 - DNA, 25 bp, Homo sapien
tcatggcacagcacgcggggcttgc

SEQ ID NO: 3109612 - DNA, 25 bp, Homo sapien
agaagcccgccaggtagcggacccg

SEQ ID NO: 3109613 - DNA, 25 bp, Homo sapien
agctcgctcccggtggacaggaaga

SEQ ID NO: 3109614 - DNA, 25 bp, Homo sapien
ccgccctcctggtcgtacacgtaga

SEQ ID NO: 3109615 - DNA, 25 bp, Homo sapien
gcgggcccgtcagagtgaaaagccc

SEQ ID NO: 3109616 - DNA, 25 bp, Homo sapien
gcccgtcagagtgaaaagccccggc

SEQ ID NO: 3109617 - DNA, 25 bp, Homo sapien
gtcagagtgaaaagccccggccgcg

SEQ ID NO: 3109618 - DNA, 25 bp, Homo sapien
gcgcgcgggcccgtcagagtgaaaa

SEQ ID NO: 3109619 - DNA, 25 bp, Homo sapien
caccgtgccgcaggtcgaggttgac

SEQ ID NO: 3109620 - DNA, 25 bp, Homo sapien
cggtcgctggtacccacggggagca

SEQ ID NO: 3109621 - DNA, 25 bp, Homo sapien
agccctcggcggcttcatggccccg

SEQ ID NO: 3109622 - DNA, 25 bp, Homo sapien
atggccccggctgctgcacgggttc

SEQ ID NO: 3109623 - DNA, 25 bp, Homo sapien
aagttaggcagacatcgtggagtcc

SEQ ID NO: 3109624 - DNA, 25 bp, Homo sapien
caagtgcggcacctggagtcagttc

SEQ ID NO: 3109625 - DNA, 25 bp, Homo sapien
tgggttagacagactcaagtgcggc

SEQ ID NO: 3109626 - DNA, 25 bp, Homo sapien
tggagcacaaagcaccacttgcaga

SEQ ID NO: 3109627 - DNA, 25 bp, Homo sapien
cttttattaggttccactgcagggc

SEQ ID NO: 3109628 - DNA, 25 bp, Homo sapien
ggcgcttttattaggttccactgca

SEQ ID NO: 3109629 - DNA, 25 bp, Homo sapien
cgcttttattaggttccactgcagg

SEQ ID NO: 3109630 - DNA, 25 bp, Homo sapien
caggcgcttttattaggttccactg

SEQ ID NO: 3109631 - DNA, 25 bp, Homo sapien
ccacgtagaggcgagaggtctttcc

SEQ ID NO: 3109632 - DNA, 25 bp, Homo sapien
tcaacaggattaggcgtgaggagcc

SEQ ID NO: 3109633 - DNA, 25 bp, Homo sapien
tgcacacctgtgagccgaaacagag

SEQ ID NO: 3109634 - DNA, 25 bp, Homo sapien
ctatcaattgtgcagtgccccaggg

SEQ ID NO: 3109635 - DNA, 25 bp, Homo sapien
tcatgaacgtgcagtgctgacaggc

SEQ ID NO: 3109636 - DNA, 25 bp, Homo sapien
ggaggctgcacatctcgcagtggcc

SEQ ID NO: 3109637 - DNA, 25 bp, Homo sapien
cccgacggcgccgtactcatggaga

SEQ ID NO: 3109638 - DNA, 25 bp, Homo sapien
actcatggagacctgggagctgccc

SEQ ID NO: 3109639 - DNA, 25 bp, Homo sapien
tgccggcccacagggtaatgaattg

SEQ ID NO: 3109640 - DNA, 25 bp, Homo sapien
caaggtacgagagtcccagctgctt

SEQ ID NO: 3109641 - DNA, 25 bp, Homo sapien
tacctaggaatgaatctgccggccc

SEQ ID NO: 3109642 - DNA, 25 bp, Homo sapien
agacacagttctcgcgagggtggca

SEQ ID NO: 3109643 - DNA, 25 bp, Homo sapien
caaggtcctgcatcctgcctaaaag

SEQ ID NO: 3109644 - DNA, 25 bp, Homo sapien
taggtactccgaaagctgatgcagg

SEQ ID NO: 3109645 - DNA, 25 bp, Homo sapien
tgttagaactgcatcaaagggctgg

SEQ ID NO: 3109646 - DNA, 25 bp, Homo sapien
tatgtactgctaatactgcgtcccc

SEQ ID NO: 3109647 - DNA, 25 bp, Homo sapien
ataaagatggcaacgccaggtgtgg

SEQ ID NO: 3109648 - DNA, 25 bp, Homo sapien
tcttttgaaggctgtgttaacagaa

SEQ ID NO: 3109649 - DNA, 25 bp, Homo sapien
gtgtcttttgaaggctgtgttaaca

SEQ ID NO: 3109650 - DNA, 25 bp, Homo sapien
gtcttttgaaggctgtgttaacaga

SEQ ID NO: 3109651 - DNA, 25 bp, Homo sapien
gtagctcccgggcactctggtgctc

SEQ ID NO: 3109652 - DNA, 25 bp, Homo sapien
ctagcatttgtccagggccgtagct

SEQ ID NO: 3109653 - DNA, 25 bp, Homo sapien
ttgtccagggccgtagctcccgggc

SEQ ID NO: 3109654 - DNA, 25 bp, Homo sapien
agggccgtagctcccgggcactctg

SEQ ID NO: 3109655 - DNA, 25 bp, Homo sapien
gagtctctactcgttgcattgccga

SEQ ID NO: 3109656 - DNA, 25 bp, Homo sapien
agggtccggaagacacgcaatgcct

SEQ ID NO: 3109657 - DNA, 25 bp, Homo sapien
gatgttcaaagtgctcctaggatgc

SEQ ID NO: 3109658 - DNA, 25 bp, Homo sapien
tacctaagacgtacggcctggacaa

SEQ ID NO: 3109659 - DNA, 25 bp, Homo sapien
gatgcagctgggtgcggaatccagg

SEQ ID NO: 3109660 - DNA, 25 bp, Homo sapien
gccaggatgcagctgggtgcggaat

SEQ ID NO: 3109661 - DNA, 25 bp, Homo sapien
tgggtgcggaatccagggcaccacc

SEQ ID NO: 3109662 - DNA, 25 bp, Homo sapien
ccagccacggggtgccggggcaggg

SEQ ID NO: 3109663 - DNA, 25 bp, Homo sapien
tctgggcgagctcctcatttctggt

SEQ ID NO: 3109664 - DNA, 25 bp, Homo sapien
ccatgtctgggcgagctcctcattt

SEQ ID NO: 3109665 - DNA, 25 bp, Homo sapien
gagctcctcatttctggtccgcacg

SEQ ID NO: 3109666 - DNA, 25 bp, Homo sapien
ctcttccatgtctgggcgagctcct

SEQ ID NO: 3109667 - DNA, 25 bp, Homo sapien
cacagggtgcctgatgtcaaatacc

SEQ ID NO: 3109668 - DNA, 25 bp, Homo sapien
tgcagtatactagcaaggtggctct

SEQ ID NO: 3109669 - DNA, 25 bp, Homo sapien
gctctggtgtagagggagcctcacc

SEQ ID NO: 3109670 - DNA, 25 bp, Homo sapien
tccctgggctgactagggaaggcac

SEQ ID NO: 3109671 - DNA, 25 bp, Homo sapien
gatggtatccaagaacacagatgag

SEQ ID NO: 3109672 - DNA, 25 bp, Homo sapien
ggaaatctgagatggtatccaagaa

SEQ ID NO: 3109673 - DNA, 25 bp, Homo sapien
attctgagacaaataggtggccaag

SEQ ID NO: 3109674 - DNA, 25 bp, Homo sapien
aataggtggccaagctatggaagtc

SEQ ID NO: 3109675 - DNA, 25 bp, Homo sapien
catcccggttttcaataggaaatgg

SEQ ID NO: 3109676 - DNA, 25 bp, Homo sapien
gatccttggggaaagttgttgtgat

SEQ ID NO: 3109677 - DNA, 25 bp, Homo sapien
ggaaatggattttgcgaaatagaaa

SEQ ID NO: 3109678 - DNA, 25 bp, Homo sapien
tgtgtctcacccaatacatcccggt

SEQ ID NO: 3109679 - DNA, 25 bp, Homo sapien
tgagttgttgagctagctggcccag

SEQ ID NO: 3109680 - DNA, 25 bp, Homo sapien
actattctggttcctttgggactat

SEQ ID NO: 3109681 - DNA, 25 bp, Homo sapien
ctaaagaatgagtgtggttctggtc

SEQ ID NO: 3109682 - DNA, 25 bp, Homo sapien
gcaaaggcagtgagttgttgagcta

SEQ ID NO: 3109683 - DNA, 25 bp, Homo sapien
gctgggtgatctcgttgccaaactt

SEQ ID NO: 3109684 - DNA, 25 bp, Homo sapien
gtctatgatgagatactccacaggc

SEQ ID NO: 3109685 - DNA, 25 bp, Homo sapien
gggtgatctcgttgccaaacttgtc

SEQ ID NO: 3109686 - DNA, 25 bp, Homo sapien
gccagctgggtgatctcgttgccaa

SEQ ID NO: 3109687 - DNA, 25 bp, Homo sapien
cagaaaggaaaacgtgcatattttt

SEQ ID NO: 3109688 - DNA, 25 bp, Homo sapien
gaaaggaaaacgtgcatatttttgc

SEQ ID NO: 3109689 - DNA, 25 bp, Homo sapien
aatcttattgaagtgtatggatagc

SEQ ID NO: 3109690 - DNA, 25 bp, Homo sapien
ggcactgggactccccactgggaga

SEQ ID NO: 3109691 - DNA, 25 bp, Homo sapien
ggagagcacatcaaatgcctcctct

SEQ ID NO: 3109692 - DNA, 25 bp, Homo sapien
aaaagcagtcgtgctctcgggcact

SEQ ID NO: 3109693 - DNA, 25 bp, Homo sapien
ttcttggagctcattataaccacag

SEQ ID NO: 3109694 - DNA, 25 bp, Homo sapien
aaagacacagggcctactgcacggg

SEQ ID NO: 3109695 - DNA, 25 bp, Homo sapien
gcttccgcattctgcgctctgctgg

SEQ ID NO: 3109696 - DNA, 25 bp, Homo sapien
gtgtgtcctccttccacgtgacgag

SEQ ID NO: 3109697 - DNA, 25 bp, Homo sapien
ccacgtgacgagtggctgccagtca

SEQ ID NO: 3109698 - DNA, 25 bp, Homo sapien
tctaagtttggcagccgtcaaagtg

SEQ ID NO: 3109699 - DNA, 25 bp, Homo sapien
aatgtcagttggaatgcgctgggag

SEQ ID NO: 3109700 - DNA, 25 bp, Homo sapien
tttggcagccgtcaaagtgtcagca

SEQ ID NO: 3109701 - DNA, 25 bp, Homo sapien
cgctgggaggaggttgtcttaattc

SEQ ID NO: 3109702 - DNA, 25 bp, Homo sapien
tgtgcacagagccacttcgtcctca

SEQ ID NO: 3109703 - DNA, 25 bp, Homo sapien
tagaaaatagtccagtccgtgtgca

SEQ ID NO: 3109704 - DNA, 25 bp, Homo sapien
cgactggatgcacacagaactggca

SEQ ID NO: 3109705 - DNA, 25 bp, Homo sapien
tgaacctcctaaagcaatcggcaag

SEQ ID NO: 3109706 - DNA, 25 bp, Homo sapien
ctctttagagcagccatccttggag

SEQ ID NO: 3109707 - DNA, 25 bp, Homo sapien
tggcctggattgccaacaccaccag

SEQ ID NO: 3109708 - DNA, 25 bp, Homo sapien
gggaactgacatgtggcctggattg

SEQ ID NO: 3109709 - DNA, 25 bp, Homo sapien
ggaactgacatgtggcctggattgc

SEQ ID NO: 3109710 - DNA, 25 bp, Homo sapien
gccacagggaactgacatgtggcct

SEQ ID NO: 3109711 - DNA, 25 bp, Homo sapien
tacaaaagagttaggtgggcatggt

SEQ ID NO: 3109712 - DNA, 25 bp, Homo sapien
caaaagaaaaatataggtcaggcac

SEQ ID NO: 3109713 - DNA, 25 bp, Homo sapien
atataggtcaggcacagtgtctcat

SEQ ID NO: 3109714 - DNA, 25 bp, Homo sapien
gggcaacctggtgaaatcctgattc

SEQ ID NO: 3109715 - DNA, 25 bp, Homo sapien
cagatggcacccctaaggggttaca

SEQ ID NO: 3109716 - DNA, 25 bp, Homo sapien
tctcagatggcacccctaaggggtt

SEQ ID NO: 3109717 - DNA, 25 bp, Homo sapien
gctctcagatggcacccctaagggg

SEQ ID NO: 3109718 - DNA, 25 bp, Homo sapien
caggctctcagatggcacccctaag

SEQ ID NO: 3109719 - DNA, 25 bp, Homo sapien
tgcgcccagctgacaccctgtctct

SEQ ID NO: 3109720 - DNA, 25 bp, Homo sapien
acgatcttaatgcaagctccgcctc

SEQ ID NO: 3109721 - DNA, 25 bp, Homo sapien
gcgcccagctgacaccctgtctctt

SEQ ID NO: 3109722 - DNA, 25 bp, Homo sapien
cactgcgcccagctgacaccctgtc

SEQ ID NO: 3109723 - DNA, 25 bp, Homo sapien
tccagatcaacgaatgtgaagacta

SEQ ID NO: 3109724 - DNA, 25 bp, Homo sapien
caacgaatgtgaagactaaaagaaa

SEQ ID NO: 3109725 - DNA, 25 bp, Homo sapien
gatcaacgaatgtgaagactaaaag

SEQ ID NO: 3109726 - DNA, 25 bp, Homo sapien
cagatcaacgaatgtgaagactaaa

SEQ ID NO: 3109727 - DNA, 25 bp, Homo sapien
tctcaaagccagtgcatgtagctcc

SEQ ID NO: 3109728 - DNA, 25 bp, Homo sapien
gaagcatgagtagcgaatatccagc

SEQ ID NO: 3109729 - DNA, 25 bp, Homo sapien
tctgtgttgcaatggtcggatttgg

SEQ ID NO: 3109730 - DNA, 25 bp, Homo sapien
gaagccctacgccatggaagcatga

SEQ ID NO: 3109731 - DNA, 25 bp, Homo sapien
tgacaagcagggttcaaccacagct

SEQ ID NO: 3109732 - DNA, 25 bp, Homo sapien
gcagggttcaaccacagctgacaaa

SEQ ID NO: 3109733 - DNA, 25 bp, Homo sapien
ggttcaaccacagctgacaaacggc

SEQ ID NO: 3109734 - DNA, 25 bp, Homo sapien
tttagtgacaagcagggttcaacca

SEQ ID NO: 3109735 - DNA, 25 bp, Homo sapien
aaacacatcaggcacgtactgctca

SEQ ID NO: 3109736 - DNA, 25 bp, Homo sapien
tactgctcactgctagactccttgg

SEQ ID NO: 3109737 - DNA, 25 bp, Homo sapien
gactccttggcgtagccaagctccg

SEQ ID NO: 3109738 - DNA, 25 bp, Homo sapien
agctccggggcgtccttgcatggca

SEQ ID NO: 3109739 - DNA, 25 bp, Homo sapien
aaagtggacttggttgtcaggacca

SEQ ID NO: 3109740 - DNA, 25 bp, Homo sapien
caaagtggacttggttgtcaggacc

SEQ ID NO: 3109741 - DNA, 25 bp, Homo sapien
aagtggacttggttgtcaggaccac

SEQ ID NO: 3109742 - DNA, 25 bp, Homo sapien
ccatgtgcttggtggcataaatgac

SEQ ID NO: 3109743 - DNA, 25 bp, Homo sapien
catgtgcttggtggcataaatgaca

SEQ ID NO: 3109744 - DNA, 25 bp, Homo sapien
cttcccttaagcactcaacccaagc

SEQ ID NO: 3109745 - DNA, 25 bp, Homo sapien
cctaacaggttctgtaatgcagaat

SEQ ID NO: 3109746 - DNA, 25 bp, Homo sapien
tcccagggtgccctaacaggttctg

SEQ ID NO: 3109747 - DNA, 25 bp, Homo sapien
caaaatgtccgtctggagagagccg

SEQ ID NO: 3109748 - DNA, 25 bp, Homo sapien
gttctggaagtctcctgcagtgatg

SEQ ID NO: 3109749 - DNA, 25 bp, Homo sapien
gccactgcagtaacaaacttggatc

SEQ ID NO: 3109750 - DNA, 25 bp, Homo sapien
gatgcactcttctgaacttaggaaa

SEQ ID NO: 3109751 - DNA, 25 bp, Homo sapien
tctgagacgaggtctgtaaatatcc

SEQ ID NO: 3109752 - DNA, 25 bp, Homo sapien
tatttcgactgtagcggacggtacc

SEQ ID NO: 3109753 - DNA, 25 bp, Homo sapien
gtaccctttcgggtatcttctgaga

SEQ ID NO: 3109754 - DNA, 25 bp, Homo sapien
cttatttcgactgtagcggacggta

SEQ ID NO: 3109755 - DNA, 25 bp, Homo sapien
tccaagctacatgaagggagagctc

SEQ ID NO: 3109756 - DNA, 25 bp, Homo sapien
acataaaggttattggtgcccaaca

SEQ ID NO: 3109757 - DNA, 25 bp, Homo sapien
tataacagccagatctgcactggga

SEQ ID NO: 3109758 - DNA, 25 bp, Homo sapien
tgattgatgacggagcagcagaagc

SEQ ID NO: 3109759 - DNA, 25 bp, Homo sapien
tttggatcctcaagaagctccaagc

SEQ ID NO: 3109760 - DNA, 25 bp, Homo sapien
tcatcgaccacttcagcttttggat

SEQ ID NO: 3109761 - DNA, 25 bp, Homo sapien
ggcagcaatttcatcgaccacttca

SEQ ID NO: 3109762 - DNA, 25 bp, Homo sapien
gctccaagctgttctgtgtaccaat

SEQ ID NO: 3109763 - DNA, 25 bp, Homo sapien
tccagctctaggtcacaaggagtgc

SEQ ID NO: 3109764 - DNA, 25 bp, Homo sapien
tcaggagcactcaggactaaggcaa

SEQ ID NO: 3109765 - DNA, 25 bp, Homo sapien
taaggcaaggcaaggtctacacact

SEQ ID NO: 3109766 - DNA, 25 bp, Homo sapien
cagataaaacacatgcgacacgcct

SEQ ID NO: 3109767 - DNA, 25 bp, Homo sapien
gttacagggacactatgaactccac

SEQ ID NO: 3109768 - DNA, 25 bp, Homo sapien
ggcttcacagctaagatactcagtt

SEQ ID NO: 3109769 - DNA, 25 bp, Homo sapien
tgaactccacagagagcgatgagct

SEQ ID NO: 3109770 - DNA, 25 bp, Homo sapien
gagacaatgcttggcttcacagcta

SEQ ID NO: 3109771 - DNA, 25 bp, Homo sapien
tcgatgagttgtagcttcgactggc

SEQ ID NO: 3109772 - DNA, 25 bp, Homo sapien
cacagggcagtcgatgagttgtagc

SEQ ID NO: 3109773 - DNA, 25 bp, Homo sapien
tgtagcttcgactggctcccatgca

SEQ ID NO: 3109774 - DNA, 25 bp, Homo sapien
ggcagtcgatgagttgtagcttcga

SEQ ID NO: 3109775 - DNA, 25 bp, Homo sapien
cccagagtggaccaagcttaccgaa

SEQ ID NO: 3109776 - DNA, 25 bp, Homo sapien
ccaagcttaccgaaatcattaatgt

SEQ ID NO: 3109777 - DNA, 25 bp, Homo sapien
ggaccaagcttaccgaaatcattaa

SEQ ID NO: 3109778 - DNA, 25 bp, Homo sapien
gagtggaccaagcttaccgaaatca

SEQ ID NO: 3109779 - DNA, 25 bp, Homo sapien
actaaaaagatttaggctgagcatg

SEQ ID NO: 3109780 - DNA, 25 bp, Homo sapien
caactaaaaagatttaggctgagca

SEQ ID NO: 3109781 - DNA, 25 bp, Homo sapien
ctaaaaagatttaggctgagcatgg

SEQ ID NO: 3109782 - DNA, 25 bp, Homo sapien
aactaaaaagatttaggctgagcat

SEQ ID NO: 3109783 - DNA, 25 bp, Homo sapien
caggaggccaagatgtgagggtcac

SEQ ID NO: 3109784 - DNA, 25 bp, Homo sapien
ggatgcagtaagctatgactgcaca

SEQ ID NO: 3109785 - DNA, 25 bp, Homo sapien
aatatagcgagaccctgactctacc

SEQ ID NO: 3109786 - DNA, 25 bp, Homo sapien
cttcaggaggccaagatgtgagggt

SEQ ID NO: 3109787 - DNA, 25 bp, Homo sapien
catggttcctaagacagtgactgct

SEQ ID NO: 3109788 - DNA, 25 bp, Homo sapien
gaatgacacaaggactgagcacctg

SEQ ID NO: 3109789 - DNA, 25 bp, Homo sapien
taatcataccgagagggccttccaa

SEQ ID NO: 3109790 - DNA, 25 bp, Homo sapien
tgagcacctggacactacagagtca

SEQ ID NO: 3109791 - DNA, 25 bp, Homo sapien
gtccgtataagtacccaaaatgctg

SEQ ID NO: 3109792 - DNA, 25 bp, Homo sapien
gaatgtctttgtgctccgtgtaccg

SEQ ID NO: 3109793 - DNA, 25 bp, Homo sapien
gaagtcaagaaagcggtcagcgacg

SEQ ID NO: 3109794 - DNA, 25 bp, Homo sapien
tcagcgacggtgtgattctcaaaca

SEQ ID NO: 3109795 - DNA, 25 bp, Homo sapien
ttaatcttgcagctgatgttctcca

SEQ ID NO: 3109796 - DNA, 25 bp, Homo sapien
tctgttcagcgtgatggcgctcggc

SEQ ID NO: 3109797 - DNA, 25 bp, Homo sapien
tcggctggcacttagtacagatgcc

SEQ ID NO: 3109798 - DNA, 25 bp, Homo sapien
atgccattcggccacgggaggtgcc

SEQ ID NO: 3109799 - DNA, 25 bp, Homo sapien
taaaaactactgttgaagactgtca

SEQ ID NO: 3109800 - DNA, 25 bp, Homo sapien
gaatatctactgatctcacctgtgc

SEQ ID NO: 3109801 - DNA, 25 bp, Homo sapien
cactgagcgggcatgaggctcctac

SEQ ID NO: 3109802 - DNA, 25 bp, Homo sapien
tcagaaactttgacattagcccagt

SEQ ID NO: 3109803 - DNA, 25 bp, Homo sapien
ggtttagatagtcctcatcgaatgg

SEQ ID NO: 3109804 - DNA, 25 bp, Homo sapien
gacatgtgcttcacgggaggctcga

SEQ ID NO: 3109805 - DNA, 25 bp, Homo sapien
cctccagtcagcttccggatgtagg

SEQ ID NO: 3109806 - DNA, 25 bp, Homo sapien
taggcgtggaaggacatgtgcttca

SEQ ID NO: 3109807 - DNA, 25 bp, Homo sapien
gtgccggtcactccaggcgctgagc

SEQ ID NO: 3109808 - DNA, 25 bp, Homo sapien
agacacagagtaagcgagtgcagtc

SEQ ID NO: 3109809 - DNA, 25 bp, Homo sapien
agtgcagtctcacacgtgccggtca

SEQ ID NO: 3109810 - DNA, 25 bp, Homo sapien
taagcgagtgcagtctcacacgtgc

SEQ ID NO: 3109811 - DNA, 25 bp, Homo sapien
gtgcacgcatttccccaaagggccg

SEQ ID NO: 3109812 - DNA, 25 bp, Homo sapien
cagtgcacgcatttccccaaagggc

SEQ ID NO: 3109813 - DNA, 25 bp, Homo sapien
gggacgcagtgcacgcatttcccca

SEQ ID NO: 3109814 - DNA, 25 bp, Homo sapien
agagggacgcagtgcacgcatttcc

SEQ ID NO: 3109815 - DNA, 25 bp, Homo sapien
gcataagcacttcatatagccccag

SEQ ID NO: 3109816 - DNA, 25 bp, Homo sapien
ggtcaaaatcatccaaccgctatga

SEQ ID NO: 3109817 - DNA, 25 bp, Homo sapien
tctgcaagtgaaatgcttgctgcag

SEQ ID NO: 3109818 - DNA, 25 bp, Homo sapien
atggagagcgcacactagcgtggca

SEQ ID NO: 3109819 - DNA, 25 bp, Homo sapien
atggatgcgcacacacaaccacctg

SEQ ID NO: 3109820 - DNA, 25 bp, Homo sapien
ctctgcacgggaatcagcatctcca

SEQ ID NO: 3109821 - DNA, 25 bp, Homo sapien
cagtaaagacttggtgtgaggcccc

SEQ ID NO: 3109822 - DNA, 25 bp, Homo sapien
tgattaacaccccactctgcacggg

SEQ ID NO: 3109823 - DNA, 25 bp, Homo sapien
tgggaacatattttgaggtggaaac

SEQ ID NO: 3109824 - DNA, 25 bp, Homo sapien
ggaacatattttgaggtggaaactg

SEQ ID NO: 3109825 - DNA, 25 bp, Homo sapien
catattttgaggtggaaactgataa

SEQ ID NO: 3109826 - DNA, 25 bp, Homo sapien
aacatattttgaggtggaaactgat

SEQ ID NO: 3109827 - DNA, 25 bp, Homo sapien
ccattaagatcaccacaagtaggac

SEQ ID NO: 3109828 - DNA, 25 bp, Homo sapien
ccacaagtaggaccctggaatctca

SEQ ID NO: 3109829 - DNA, 25 bp, Homo sapien
cctttattcacccattaagatcacc

SEQ ID NO: 3109830 - DNA, 25 bp, Homo sapien
ttccctttattcacccattaagatc

SEQ ID NO: 3109831 - DNA, 25 bp, Homo sapien
aagcccggtggaactgacgtctcca

SEQ ID NO: 3109832 - DNA, 25 bp, Homo sapien
tttgctgaggtactgatcaatctca

SEQ ID NO: 3109833 - DNA, 25 bp, Homo sapien
accacgttgggagcgccaaagactt

SEQ ID NO: 3109834 - DNA, 25 bp, Homo sapien
aaatcttcccgtcctgtttgctgag

SEQ ID NO: 3109835 - DNA, 25 bp, Homo sapien
gaaacaggaacaacaaatcgccatg

SEQ ID NO: 3109836 - DNA, 25 bp, Homo sapien
ggaaacaggaacaacaaatcgccat

SEQ ID NO: 3109837 - DNA, 25 bp, Homo sapien
gggaaacaggaacaacaaatcgcca

SEQ ID NO: 3109838 - DNA, 25 bp, Homo sapien
aaacaggaacaacaaatcgccatgc

SEQ ID NO: 3109839 - DNA, 25 bp, Homo sapien
catggacaaagacaataactttctc

SEQ ID NO: 3109840 - DNA, 25 bp, Homo sapien
tcactccacgccgtacatggacaaa

SEQ ID NO: 3109841 - DNA, 25 bp, Homo sapien
acaataactttctcctcagtgacac

SEQ ID NO: 3109842 - DNA, 25 bp, Homo sapien
gccgtacatggacaaagacaataac

SEQ ID NO: 3109843 - DNA, 25 bp, Homo sapien
gttatctctccagtcttgtttctat

SEQ ID NO: 3109844 - DNA, 25 bp, Homo sapien
tgtaaaccgagaagccattattttg

SEQ ID NO: 3109845 - DNA, 25 bp, Homo sapien
gatttttagcaagttgagggatttg

SEQ ID NO: 3109846 - DNA, 25 bp, Homo sapien
cttgtttctattgatgtaaaccgag

SEQ ID NO: 3109847 - DNA, 25 bp, Homo sapien
cagtgagctgtgactttgccagtgc

SEQ ID NO: 3109848 - DNA, 25 bp, Homo sapien
agctgtgactttgccagtgcactcc

SEQ ID NO: 3109849 - DNA, 25 bp, Homo sapien
gtgagctgtgactttgccagtgcac

SEQ ID NO: 3109850 - DNA, 25 bp, Homo sapien
ctgtgactttgccagtgcactccaa

SEQ ID NO: 3109851 - DNA, 25 bp, Homo sapien
ctttgggctcttggtcctataattt

SEQ ID NO: 3109852 - DNA, 25 bp, Homo sapien
tcagctgtgacaaacatctcatcct

SEQ ID NO: 3109853 - DNA, 25 bp, Homo sapien
tgggctcttggtcctataattttga

SEQ ID NO: 3109854 - DNA, 25 bp, Homo sapien
ttgggctcttggtcctataattttg

SEQ ID NO: 3109855 - DNA, 25 bp, Homo sapien
ctttgttgctgtgatccgcttcact

SEQ ID NO: 3109856 - DNA, 25 bp, Homo sapien
tccatccggggactggacacgaatt

SEQ ID NO: 3109857 - DNA, 25 bp, Homo sapien
tgtgatccgcttcactccatccggg

SEQ ID NO: 3109858 - DNA, 25 bp, Homo sapien
catccggggactggacacgaattat

SEQ ID NO: 3109859 - DNA, 25 bp, Homo sapien
gtgagccacaacgccagctattact

SEQ ID NO: 3109860 - DNA, 25 bp, Homo sapien
gccacaacgccagctattacttact

SEQ ID NO: 3109861 - DNA, 25 bp, Homo sapien
aacgtttaaaaatggccagacacag

SEQ ID NO: 3109862 - DNA, 25 bp, Homo sapien
acgccagctattacttactttccct

SEQ ID NO: 3109863 - DNA, 25 bp, Homo sapien
ttgagacagtctttttccgttgccc

SEQ ID NO: 3109864 - DNA, 25 bp, Homo sapien
agacagtctttttccgttgcccagg

SEQ ID NO: 3109865 - DNA, 25 bp, Homo sapien
ttttgagacagtctttttccgttgc

SEQ ID NO: 3109866 - DNA, 25 bp, Homo sapien
cagtctttttccgttgcccagggtg

SEQ ID NO: 3109867 - DNA, 25 bp, Homo sapien
tgctgtcaatgagagcctagcctta

SEQ ID NO: 3109868 - DNA, 25 bp, Homo sapien
acttttcacttgtcaatggttattt

SEQ ID NO: 3109869 - DNA, 25 bp, Homo sapien
gcctagccttatacactagtgggaa

SEQ ID NO: 3109870 - DNA, 25 bp, Homo sapien
tcaatttcaaaagaagagtgtttta

SEQ ID NO: 3109871 - DNA, 25 bp, Homo sapien
ggtttgagcgattcccctccctcaa

SEQ ID NO: 3109872 - DNA, 25 bp, Homo sapien
gagtcaaaggtttcttggccgggca

SEQ ID NO: 3109873 - DNA, 25 bp, Homo sapien
tcaaaggagtcaaaggtttcttggc

SEQ ID NO: 3109874 - DNA, 25 bp, Homo sapien
cactgcatggccacattttattttt

SEQ ID NO: 3109875 - DNA, 25 bp, Homo sapien
ccaagggcctcgcagacccggccgc

SEQ ID NO: 3109876 - DNA, 25 bp, Homo sapien
cggctccgccagccgccgacgtccc

SEQ ID NO: 3109877 - DNA, 25 bp, Homo sapien
cgccccaagggcctcgcagacccgg

SEQ ID NO: 3109878 - DNA, 25 bp, Homo sapien
cctgccgccccaagggcctcgcaga

SEQ ID NO: 3109879 - DNA, 25 bp, Homo sapien
gcttcattgactatggcccctgggt

SEQ ID NO: 3109880 - DNA, 25 bp, Homo sapien
atgtgctccggctcaagtgacccca

SEQ ID NO: 3109881 - DNA, 25 bp, Homo sapien
gccatggcctgacattgcgtgtctt

SEQ ID NO: 3109882 - DNA, 25 bp, Homo sapien
ggctcagtgagagtgtgagcccaag

SEQ ID NO: 3109883 - DNA, 25 bp, Homo sapien
tggagaccgaccaagcctctctgtg

SEQ ID NO: 3109884 - DNA, 25 bp, Homo sapien
cagcatgtccaaactaagggcaccc

SEQ ID NO: 3109885 - DNA, 25 bp, Homo sapien
tgtatccccttacaggcaggacagg

SEQ ID NO: 3109886 - DNA, 25 bp, Homo sapien
tgccatctgggctagggaggcatct

SEQ ID NO: 3109887 - DNA, 25 bp, Homo sapien
gtggttgaaggcctcccaagggcag

SEQ ID NO: 3109888 - DNA, 25 bp, Homo sapien
tgatgccatattgggccagctcgtg

SEQ ID NO: 3109889 - DNA, 25 bp, Homo sapien
tccaggtggttgaaggcctcccaag

SEQ ID NO: 3109890 - DNA, 25 bp, Homo sapien
gatgatgccatattgggccagctcg

SEQ ID NO: 3109891 - DNA, 25 bp, Homo sapien
cgggttggtactggcagccgtcata

SEQ ID NO: 3109892 - DNA, 25 bp, Homo sapien
agacctcgggttggtactggcagcc

SEQ ID NO: 3109893 - DNA, 25 bp, Homo sapien
ctcgggttggtactggcagccgtca

SEQ ID NO: 3109894 - DNA, 25 bp, Homo sapien
ggcagacctcgggttggtactggca

SEQ ID NO: 3109895 - DNA, 25 bp, Homo sapien
ccttccattccagggatgtcgtccc

SEQ ID NO: 3109896 - DNA, 25 bp, Homo sapien
cattccagggatgtcgtccccaaac

SEQ ID NO: 3109897 - DNA, 25 bp, Homo sapien
tccattccagggatgtcgtccccaa

SEQ ID NO: 3109898 - DNA, 25 bp, Homo sapien
ctgttcccaggccttccattccagg

SEQ ID NO: 3109899 - DNA, 25 bp, Homo sapien
aggtcatctctagccttcctaggag

SEQ ID NO: 3109900 - DNA, 25 bp, Homo sapien
gcctagaaaaggaggtgcaagtccc

SEQ ID NO: 3109901 - DNA, 25 bp, Homo sapien
gcatggtctgagtgtagatttgtga

SEQ ID NO: 3109902 - DNA, 25 bp, Homo sapien
gtggcttgtctgtgagtgtgcctca

SEQ ID NO: 3109903 - DNA, 25 bp, Homo sapien
cggtgcgttgatgggagcgcggtgc

SEQ ID NO: 3109904 - DNA, 25 bp, Homo sapien
cataagagtgtcatgcccgtgtgtg

SEQ ID NO: 3109905 - DNA, 25 bp, Homo sapien
tgtgagcgtgtttgtgcataagagt

SEQ ID NO: 3109906 - DNA, 25 bp, Homo sapien
tgtgagtggacactcctcggtgcgt

SEQ ID NO: 3109907 - DNA, 25 bp, Homo sapien
gagtgagtggacactcctcggtgca

SEQ ID NO: 3109908 - DNA, 25 bp, Homo sapien
cacgagtgagtggacactcctcggt

SEQ ID NO: 3109909 - DNA, 25 bp, Homo sapien
tgtgcgcacacgagtgagtggacac

SEQ ID NO: 3109910 - DNA, 25 bp, Homo sapien
cgcacacgagtgagtggacactcct

SEQ ID NO: 3109911 - DNA, 25 bp, Homo sapien
gcttgctcttgaactgcctggtctg

SEQ ID NO: 3109912 - DNA, 25 bp, Homo sapien
cctggtctgtcgctgcttaaattta

SEQ ID NO: 3109913 - DNA, 25 bp, Homo sapien
ttgctcttgaactgcctggtctgtc

SEQ ID NO: 3109914 - DNA, 25 bp, Homo sapien
ggtctgtcgctgcttaaatttaggg

SEQ ID NO: 3109915 - DNA, 25 bp, Homo sapien
cctggtggctgaccggaactcagcc

SEQ ID NO: 3109916 - DNA, 25 bp, Homo sapien
ggagacaccgcggcaaccttggctc

SEQ ID NO: 3109917 - DNA, 25 bp, Homo sapien
agacaccgcggcaaccttggctcct

SEQ ID NO: 3109918 - DNA, 25 bp, Homo sapien
accgcggcaaccttggctcctggac

SEQ ID NO: 3109919 - DNA, 25 bp, Homo sapien
ctgacggagacaccgcggcaacctt

SEQ ID NO: 3109920 - DNA, 25 bp, Homo sapien
ggctgagacccagccccgccagctc

SEQ ID NO: 3109921 - DNA, 25 bp, Homo sapien
gtggaggggctgagacccagccccg

SEQ ID NO: 3109922 - DNA, 25 bp, Homo sapien
gaggggctgagacccagccccgcca

SEQ ID NO: 3109923 - DNA, 25 bp, Homo sapien
ggggctgagacccagccccgccagc

SEQ ID NO: 3109924 - DNA, 25 bp, Homo sapien
caaagtagccccctaggatcctatt

SEQ ID NO: 3109925 - DNA, 25 bp, Homo sapien
agtagccccctaggatcctattcca

SEQ ID NO: 3109926 - DNA, 25 bp, Homo sapien
taatacctgccaaagtagcccccta

SEQ ID NO: 3109927 - DNA, 25 bp, Homo sapien
ctgtggctggaatctcacctttttt

SEQ ID NO: 3109928 - DNA, 25 bp, Homo sapien
agttggggtgctgtcagttcccttc

SEQ ID NO: 3109929 - DNA, 25 bp, Homo sapien
cttgtctgtgctttgcagttggggt

SEQ ID NO: 3109930 - DNA, 25 bp, Homo sapien
aacccctctgattcttattgatggg

SEQ ID NO: 3109931 - DNA, 25 bp, Homo sapien
gctgtcagttcccttcacccactca

SEQ ID NO: 3109932 - DNA, 25 bp, Homo sapien
cccctcagcaccatgacgggcaccc

SEQ ID NO: 3109933 - DNA, 25 bp, Homo sapien
cctcagcaccatgacgggcaccccg

SEQ ID NO: 3109934 - DNA, 25 bp, Homo sapien
agcccctcagcaccatgacgggcac

SEQ ID NO: 3109935 - DNA, 25 bp, Homo sapien
gcccctcagcaccatgacgggcacc

SEQ ID NO: 3109936 - DNA, 25 bp, Homo sapien
agggtgccgggcatgtgttccccct

SEQ ID NO: 3109937 - DNA, 25 bp, Homo sapien
gatggagaatgacccacaaaatggg

SEQ ID NO: 3109938 - DNA, 25 bp, Homo sapien
tcggccgctctggacgagatcagtg

SEQ ID NO: 3109939 - DNA, 25 bp, Homo sapien
ggcgtggcgtggctgaagggcctcg

SEQ ID NO: 3109940 - DNA, 25 bp, Homo sapien
cttcccctaagcctattaacagcag

SEQ ID NO: 3109941 - DNA, 25 bp, Homo sapien
gccaagggcagttcagcttccccta

SEQ ID NO: 3109942 - DNA, 25 bp, Homo sapien
cagctgcacatgctgccggaaagtt

SEQ ID NO: 3109943 - DNA, 25 bp, Homo sapien
taatctcccatcgagctgctgtcag

SEQ ID NO: 3109944 - DNA, 25 bp, Homo sapien
ccagccctgggctactaccagctgt

SEQ ID NO: 3109945 - DNA, 25 bp, Homo sapien
tggaaggaggcacatgacacagaca

SEQ ID NO: 3109946 - DNA, 25 bp, Homo sapien
ctccagccctgggctactaccagct

SEQ ID NO: 3109947 - DNA, 25 bp, Homo sapien
ctggaaggaggcacatgacacagac

SEQ ID NO: 3109948 - DNA, 25 bp, Homo sapien
ggcacccaatcctcatatcctagat

SEQ ID NO: 3109949 - DNA, 25 bp, Homo sapien
tcccatggcacccaatcctcatatc

SEQ ID NO: 3109950 - DNA, 25 bp, Homo sapien
cctcatatcctagatagcacaggcc

SEQ ID NO: 3109951 - DNA, 25 bp, Homo sapien
caatcctcatatcctagatagcaca

SEQ ID NO: 3109952 - DNA, 25 bp, Homo sapien
cctgcgctgccctggcccgacccag

SEQ ID NO: 3109953 - DNA, 25 bp, Homo sapien
gccatccatgtggaaaccgctgcct

SEQ ID NO: 3109954 - DNA, 25 bp, Homo sapien
tccatgtggaaaccgctgcctgcgc

SEQ ID NO: 3109955 - DNA, 25 bp, Homo sapien
atccatgtggaaaccgctgcctgcg

SEQ ID NO: 3109956 - DNA, 25 bp, Homo sapien
gatggtggaagcactggttaccatg

SEQ ID NO: 3109957 - DNA, 25 bp, Homo sapien
ggtggtaaaagcctgtcagctccct

SEQ ID NO: 3109958 - DNA, 25 bp, Homo sapien
cgggtaggcatctgcagacccagac

SEQ ID NO: 3109959 - DNA, 25 bp, Homo sapien
cctctgaataacagggtggcgggta

SEQ ID NO: 3109960 - DNA, 25 bp, Homo sapien
cctaatgagattgttgggccccgag

SEQ ID NO: 3109961 - DNA, 25 bp, Homo sapien
ttccagatggaagcaaccacagtgt

SEQ ID NO: 3109962 - DNA, 25 bp, Homo sapien
cggcctttatctcgctgcttcatga

SEQ ID NO: 3109963 - DNA, 25 bp, Homo sapien
tgattaggcgtctcagtgccaccct

SEQ ID NO: 3109964 - DNA, 25 bp, Homo sapien
ggggcctgtgggtcttcccaagcac

SEQ ID NO: 3109965 - DNA, 25 bp, Homo sapien
gggcctgtgggtcttcccaagcaca

SEQ ID NO: 3109966 - DNA, 25 bp, Homo sapien
gcctgtgggtcttcccaagcacaga

SEQ ID NO: 3109967 - DNA, 25 bp, Homo sapien
cctgtgggtcttcccaagcacagaa

SEQ ID NO: 3109968 - DNA, 25 bp, Homo sapien
ttgctgagaaaagtgcgtcggcaag

SEQ ID NO: 3109969 - DNA, 25 bp, Homo sapien
tcttgctgagaaaagtgcgtcggca

SEQ ID NO: 3109970 - DNA, 25 bp, Homo sapien
ctgagaaaagtgcgtcggcaaggcc

SEQ ID NO: 3109971 - DNA, 25 bp, Homo sapien
gctgagaaaagtgcgtcggcaaggc

SEQ ID NO: 3109972 - DNA, 25 bp, Homo sapien
ttccaggtagtgcttgggccactga

SEQ ID NO: 3109973 - DNA, 25 bp, Homo sapien
tggacctgctcgctttgaagatgca

SEQ ID NO: 3109974 - DNA, 25 bp, Homo sapien
tgaagatgcaacacaagccttacgg

SEQ ID NO: 3109975 - DNA, 25 bp, Homo sapien
tgttgaggccaaatcagcagccatt

SEQ ID NO: 3109976 - DNA, 25 bp, Homo sapien
tgcataatgccgacctggacctgct

SEQ ID NO: 3109977 - DNA, 25 bp, Homo sapien
ctcaggtgaagtcagtaactaattc

SEQ ID NO: 3109978 - DNA, 25 bp, Homo sapien
ccgtcctgcggtagggagtccagca

SEQ ID NO: 3109979 - DNA, 25 bp, Homo sapien
cccgttggacacaaggagtctgtga

SEQ ID NO: 3109980 - DNA, 25 bp, Homo sapien
gctgcggctgcgtcctggactccgt

SEQ ID NO: 3109981 - DNA, 25 bp, Homo sapien
cccaccgtcctggaagtgctgcagc

SEQ ID NO: 3109982 - DNA, 25 bp, Homo sapien
accgtcctggaagtgctgcagcagc

SEQ ID NO: 3109983 - DNA, 25 bp, Homo sapien
ctggtgtgcagccggatctccatcc

SEQ ID NO: 3109984 - DNA, 25 bp, Homo sapien
caccgtcctggaagtgctgcagcag

SEQ ID NO: 3109985 - DNA, 25 bp, Homo sapien
ctgtccgcgtactccacccacacgc

SEQ ID NO: 3109986 - DNA, 25 bp, Homo sapien
tccacccacacgcagttggggcagc

SEQ ID NO: 3109987 - DNA, 25 bp, Homo sapien
ccacccacacgcagttggggcagcc

SEQ ID NO: 3109988 - DNA, 25 bp, Homo sapien
cacccacacgcagttggggcagcca

SEQ ID NO: 3109989 - DNA, 25 bp, Homo sapien
gatggtgcctttgaagaaagctgcc

SEQ ID NO: 3109990 - DNA, 25 bp, Homo sapien
tgggagcccacctctacgtggtctg

SEQ ID NO: 3109991 - DNA, 25 bp, Homo sapien
tggtgccgtccgcacctgcttggga

SEQ ID NO: 3109992 - DNA, 25 bp, Homo sapien
tcccgaattttctgcgcccatcagg

SEQ ID NO: 3109993 - DNA, 25 bp, Homo sapien
cagacaaacatgtgactctccagga

SEQ ID NO: 3109994 - DNA, 25 bp, Homo sapien
agacaaacatgtgactctccaggaa

SEQ ID NO: 3109995 - DNA, 25 bp, Homo sapien
catttcagctctcctgtcattgggc

SEQ ID NO: 3109996 - DNA, 25 bp, Homo sapien
catgggtatgacacggtgtgattca

SEQ ID NO: 3109997 - DNA, 25 bp, Homo sapien
tccccactgtgcaatggaagtcatg

SEQ ID NO: 3109998 - DNA, 25 bp, Homo sapien
tcacttcctgtgactttagacatgt

SEQ ID NO: 3109999 - DNA, 25 bp, Homo sapien
gggaggcactcgacacctccagcta

SEQ ID NO: 3110000 - DNA, 25 bp, Homo sapien
actcgacacctccagctaagatggc

SEQ ID NO: 3110001 - DNA, 25 bp, Homo sapien
cgggtgtgcactcaagcacatggtg

SEQ ID NO: 3110002 - DNA, 25 bp, Homo sapien
ccgggtgtgcactcaagcacatggt

SEQ ID NO: 3110003 - DNA, 25 bp, Homo sapien
gcgagaggtgtaaccctgtaagctc

SEQ ID NO: 3110004 - DNA, 25 bp, Homo sapien
cgagaggtgtaaccctgtaagctcc

SEQ ID NO: 3110005 - DNA, 25 bp, Homo sapien
gagaggtgtaaccctgtaagctcct

SEQ ID NO: 3110006 - DNA, 25 bp, Homo sapien
agaggtgtaaccctgtaagctcctg

SEQ ID NO: 3110007 - DNA, 25 bp, Homo sapien
cacctctaccagtataaccaagccc

SEQ ID NO: 3110008 - DNA, 25 bp, Homo sapien
cagcacctctaccagtataaccaag

SEQ ID NO: 3110009 - DNA, 25 bp, Homo sapien
ctctaccagtataaccaagccccac

SEQ ID NO: 3110010 - DNA, 25 bp, Homo sapien
agcacctctaccagtataaccaagc

SEQ ID NO: 3110011 - DNA, 25 bp, Homo sapien
ggaagaatcgcaccaccctttatcc

SEQ ID NO: 3110012 - DNA, 25 bp, Homo sapien
gaagaatcgcaccaccctttatcca

SEQ ID NO: 3110013 - DNA, 25 bp, Homo sapien
cggaagaatcgcaccaccctttatc

SEQ ID NO: 3110014 - DNA, 25 bp, Homo sapien
aagaatcgcaccaccctttatccaa

SEQ ID NO: 3110015 - DNA, 25 bp, Homo sapien
cagcgtgaatgtcctataggcagtc

SEQ ID NO: 3110016 - DNA, 25 bp, Homo sapien
tgaatgtcctataggcagtcttccg

SEQ ID NO: 3110017 - DNA, 25 bp, Homo sapien
tataggcagtcttccgtcgctgccc

SEQ ID NO: 3110018 - DNA, 25 bp, Homo sapien
tcgctgccctgctctatctacccag

SEQ ID NO: 3110019 - DNA, 25 bp, Homo sapien
cacacaggcgctcggcagatactga

SEQ ID NO: 3110020 - DNA, 25 bp, Homo sapien
gctcgcacacaggcgctcggcagat

SEQ ID NO: 3110021 - DNA, 25 bp, Homo sapien
ttatttaactagtcctgcgaggggc

SEQ ID NO: 3110022 - DNA, 25 bp, Homo sapien
gagaaacaggaaagtggccgttcac

SEQ ID NO: 3110023 - DNA, 25 bp, Homo sapien
aggctaagcggcccctccacagatt

SEQ ID NO: 3110024 - DNA, 25 bp, Homo sapien
ggctccgtccccacatgcgggtgga

SEQ ID NO: 3110025 - DNA, 25 bp, Homo sapien
gactcggtaagagccgatggaggag

SEQ ID NO: 3110026 - DNA, 25 bp, Homo sapien
ggacgtgcccttcggcgctgccaag

SEQ ID NO: 3110027 - DNA, 25 bp, Homo sapien
agccacggaccgcggcggctaccgc

SEQ ID NO: 3110028 - DNA, 25 bp, Homo sapien
cgagccacggaccgcggcggctacc

SEQ ID NO: 3110029 - DNA, 25 bp, Homo sapien
gcggctaccgcccggcctccctcga

SEQ ID NO: 3110030 - DNA, 25 bp, Homo sapien
cacggaccgcggcggctaccgcccg

SEQ ID NO: 3110031 - DNA, 25 bp, Homo sapien
aacccctgaccgtgagcggcgggcg

SEQ ID NO: 3110032 - DNA, 25 bp, Homo sapien
atcgcccgcggacgggatccggcaa

SEQ ID NO: 3110033 - DNA, 25 bp, Homo sapien
tccgcagcagcatcgcccgcggacg

SEQ ID NO: 3110034 - DNA, 25 bp, Homo sapien
gctccggccaatcccggaccttcag

SEQ ID NO: 3110035 - DNA, 25 bp, Homo sapien
gaacctgggaactctgcggagacct

SEQ ID NO: 3110036 - DNA, 25 bp, Homo sapien
tatatccaccgcatgcagcaagagg

SEQ ID NO: 3110037 - DNA, 25 bp, Homo sapien
cagtccccaagttcaaacagaggaa

SEQ ID NO: 3110038 - DNA, 25 bp, Homo sapien
cagaaagccctagccctgtgggaat

SEQ ID NO: 3110039 - DNA, 25 bp, Homo sapien
cttgccaggcttcagtctccagtgc

SEQ ID NO: 3110040 - DNA, 25 bp, Homo sapien
atccagcaatggagtccgacagccc

SEQ ID NO: 3110041 - DNA, 25 bp, Homo sapien
tcacctacctaacagggctctgaga

SEQ ID NO: 3110042 - DNA, 25 bp, Homo sapien
ggaaaaatcctgtcttgggctcaag

SEQ ID NO: 3110043 - DNA, 25 bp, Homo sapien
tctgccgtttagttagcagtagcaa

SEQ ID NO: 3110044 - DNA, 25 bp, Homo sapien
gctctgccgtttagttagcagtagc

SEQ ID NO: 3110045 - DNA, 25 bp, Homo sapien
gccgtttagttagcagtagcaaatt

SEQ ID NO: 3110046 - DNA, 25 bp, Homo sapien
ttggagacggctcacattccttaca

SEQ ID NO: 3110047 - DNA, 25 bp, Homo sapien
aggaggtgagccaaccccaatagca

SEQ ID NO: 3110048 - DNA, 25 bp, Homo sapien
ggaggttgtgctacagcaagaggcc

SEQ ID NO: 3110049 - DNA, 25 bp, Homo sapien
cactgtgcagtccatacgccttggg

SEQ ID NO: 3110050 - DNA, 25 bp, Homo sapien
cactctaagatacagaacactcggc

SEQ ID NO: 3110051 - DNA, 25 bp, Homo sapien
tattggcagcaaagccatactgccc

SEQ ID NO: 3110052 - DNA, 25 bp, Homo sapien
ttcagaggccagatgtcaacttcca

SEQ ID NO: 3110053 - DNA, 25 bp, Homo sapien
tttgggttattctgcccctgtgaga

SEQ ID NO: 3110054 - DNA, 25 bp, Homo sapien
agtttacacatcattgcatctcagc

SEQ ID NO: 3110055 - DNA, 25 bp, Homo sapien
ttcacgggcgctgatttctgccgtg

SEQ ID NO: 3110056 - DNA, 25 bp, Homo sapien
ccgtggacatgtaacagggtaggtc

SEQ ID NO: 3110057 - DNA, 25 bp, Homo sapien
aagccagtgccttcacgggcgctga

SEQ ID NO: 3110058 - DNA, 25 bp, Homo sapien
cctccgtggacatgtaacagggtag

SEQ ID NO: 3110059 - DNA, 25 bp, Homo sapien
ttgaagagtatcagcaccgatgctt

SEQ ID NO: 3110060 - DNA, 25 bp, Homo sapien
tgaagagtatcagcaccgatgcttc

SEQ ID NO: 3110061 - DNA, 25 bp, Homo sapien
ctgggcctcacagacctggcactgg

SEQ ID NO: 3110062 - DNA, 25 bp, Homo sapien
gacgaagtctcgctccgagtgcagt

SEQ ID NO: 3110063 - DNA, 25 bp, Homo sapien
gcctcacagacctggcactgggaga

SEQ ID NO: 3110064 - DNA, 25 bp, Homo sapien
cgaagtctcgctccgagtgcagtgg

SEQ ID NO: 3110065 - DNA, 25 bp, Homo sapien
gtggccatcagttctccatactggt

SEQ ID NO: 3110066 - DNA, 25 bp, Homo sapien
tatgaagacgacctggtgtcactcg

SEQ ID NO: 3110067 - DNA, 25 bp, Homo sapien
ggtgtcactcgtctctgtcctcatg

SEQ ID NO: 3110068 - DNA, 25 bp, Homo sapien
gagggaatcgagttttatgaagacg

SEQ ID NO: 3110069 - DNA, 25 bp, Homo sapien
caaccagaggtacgtataagtccaa

SEQ ID NO: 3110070 - DNA, 25 bp, Homo sapien
aatgtagacacacttccctaaagga

SEQ ID NO: 3110071 - DNA, 25 bp, Homo sapien
gcaggaagcaacactagctaagacc

SEQ ID NO: 3110072 - DNA, 25 bp, Homo sapien
gaagcccatataggattacaaccca

SEQ ID NO: 3110073 - DNA, 25 bp, Homo sapien
agatggggcccatgcaccccccaag

SEQ ID NO: 3110074 - DNA, 25 bp, Homo sapien
ttctctgtgccacgatgtcagtaag

SEQ ID NO: 3110075 - DNA, 25 bp, Homo sapien
ccaagctcccggatggtgatctttc

SEQ ID NO: 3110076 - DNA, 25 bp, Homo sapien
accccccaagctcccggatggtgat

SEQ ID NO: 3110077 - DNA, 25 bp, Homo sapien
aagaacaatacaaccgctgtcccgt

SEQ ID NO: 3110078 - DNA, 25 bp, Homo sapien
tgaagagcaccgtgcccacacctta

SEQ ID NO: 3110079 - DNA, 25 bp, Homo sapien
tacaaccgctgtcccgttgtgaact

SEQ ID NO: 3110080 - DNA, 25 bp, Homo sapien
ctataggaaaaaccacgatgcaaaa

SEQ ID NO: 3110081 - DNA, 25 bp, Homo sapien
cagccacaggaagccgttgcgaggg

SEQ ID NO: 3110082 - DNA, 25 bp, Homo sapien
acggcgagcagggaccgacgcccat

SEQ ID NO: 3110083 - DNA, 25 bp, Homo sapien
ttctccctaacgcaggaacggcgag

SEQ ID NO: 3110084 - DNA, 25 bp, Homo sapien
catcagtagctggactcgctgtggg

SEQ ID NO: 3110085 - DNA, 25 bp, Homo sapien
gccaattatcctcagctcgggccgt

SEQ ID NO: 3110086 - DNA, 25 bp, Homo sapien
cgctcccgaaggctggccttaagtc

SEQ ID NO: 3110087 - DNA, 25 bp, Homo sapien
gagctcttcgccaagcgcagaactg

SEQ ID NO: 3110088 - DNA, 25 bp, Homo sapien
tgcacttagaggagcccggagctct

SEQ ID NO: 3110089 - DNA, 25 bp, Homo sapien
cgcctttcccatcccgggagctcac

SEQ ID NO: 3110090 - DNA, 25 bp, Homo sapien
caggtcgcctttcccatcccgggag

SEQ ID NO: 3110091 - DNA, 25 bp, Homo sapien
agcagctaaagggtgagtccccgcc

SEQ ID NO: 3110092 - DNA, 25 bp, Homo sapien
tcaaggacccgagcagctaaagggt

SEQ ID NO: 3110093 - DNA, 25 bp, Homo sapien
gacccgagcagctaaagggtgagtc

SEQ ID NO: 3110094 - DNA, 25 bp, Homo sapien
tgcgaagcggtcaaggacccgagca

SEQ ID NO: 3110095 - DNA, 25 bp, Homo sapien
tcccgacgcccgtggcccccagcag

SEQ ID NO: 3110096 - DNA, 25 bp, Homo sapien
cagcagcgtcttcccgacgcccgtg

SEQ ID NO: 3110097 - DNA, 25 bp, Homo sapien
cccgacgcccgtggcccccagcagg

SEQ ID NO: 3110098 - DNA, 25 bp, Homo sapien
cagcgtcttcccgacgcccgtggcc

SEQ ID NO: 3110099 - DNA, 25 bp, Homo sapien
tcggcgccgcggctcaaggcccgcc

SEQ ID NO: 3110100 - DNA, 25 bp, Homo sapien
aaggcccgcccaccggccactctca

SEQ ID NO: 3110101 - DNA, 25 bp, Homo sapien
tccgtgcttcgctccacccggcacc

SEQ ID NO: 3110102 - DNA, 25 bp, Homo sapien
acccggcacccgtagctcggcgccg

SEQ ID NO: 3110103 - DNA, 25 bp, Homo sapien
gagacgtggcttgagggcctttaga

SEQ ID NO: 3110104 - DNA, 25 bp, Homo sapien
ggaaaacaagcacctttgatgagga

SEQ ID NO: 3110105 - DNA, 25 bp, Homo sapien
gggcattgctctcgctcgtgctggg

SEQ ID NO: 3110106 - DNA, 25 bp, Homo sapien
tcctctctgggtccgttgccttctg

SEQ ID NO: 3110107 - DNA, 25 bp, Homo sapien
ggttttcccagttgccccgatgtga

SEQ ID NO: 3110108 - DNA, 25 bp, Homo sapien
taatctagagtgttccccagtcagc

SEQ ID NO: 3110109 - DNA, 25 bp, Homo sapien
tctccacgcggtgaccataaggctg

SEQ ID NO: 3110110 - DNA, 25 bp, Homo sapien
tactgtcccaagagcactggcctgt

SEQ ID NO: 3110111 - DNA, 25 bp, Homo sapien
catgagctgcagtccgtggacatgg

SEQ ID NO: 3110112 - DNA, 25 bp, Homo sapien
cagtgccccagaatggtacagcgat

SEQ ID NO: 3110113 - DNA, 25 bp, Homo sapien
tgaaacgcctcgtctctaactgccg

SEQ ID NO: 3110114 - DNA, 25 bp, Homo sapien
tcatttcattcgactgacccaggcc

SEQ ID NO: 3110115 - DNA, 25 bp, Homo sapien
tgttctgatctgaaggcggaggctc

SEQ ID NO: 3110116 - DNA, 25 bp, Homo sapien
tgagcgctgaagaaagaacacctga

SEQ ID NO: 3110117 - DNA, 25 bp, Homo sapien
gaaacgcgcctcctgagtgttgaaa

SEQ ID NO: 3110118 - DNA, 25 bp, Homo sapien
tttagctaggaaagaggatgtcgcc

SEQ ID NO: 3110119 - DNA, 25 bp, Homo sapien
cagccgtggcggctagagcgttcct

SEQ ID NO: 3110120 - DNA, 25 bp, Homo sapien
gggaaccgcgtgtgaccttccagcc

SEQ ID NO: 3110121 - DNA, 25 bp, Homo sapien
tcatttccggctcgaatgcccggca

SEQ ID NO: 3110122 - DNA, 25 bp, Homo sapien
gccttgccaggtacgcgggatcctg

SEQ ID NO: 3110123 - DNA, 25 bp, Homo sapien
aagtaatagtttcgccaccgctggg

SEQ ID NO: 3110124 - DNA, 25 bp, Homo sapien
cagatgaccttggacgattccctgc

SEQ ID NO: 3110125 - DNA, 25 bp, Homo sapien
tttgcgcaggaagatgcacctaagt

SEQ ID NO: 3110126 - DNA, 25 bp, Homo sapien
ggtatggctgcaaataaacacgtgg

SEQ ID NO: 3110127 - DNA, 25 bp, Homo sapien
ggcaccgtggttctggagtagcctc

SEQ ID NO: 3110128 - DNA, 25 bp, Homo sapien
tttgggagaattgcctgcgccacgc

SEQ ID NO: 3110129 - DNA, 25 bp, Homo sapien
ccagctcggaggacttgtgttcagg

SEQ ID NO: 3110130 - DNA, 25 bp, Homo sapien
accggtgaatgtgcctctggtggct

SEQ ID NO: 3110131 - DNA, 25 bp, Homo sapien
accgggagtgccgtggtcagcttgg

SEQ ID NO: 3110132 - DNA, 25 bp, Homo sapien
ggcttgtggacatggggaccgggag

SEQ ID NO: 3110133 - DNA, 25 bp, Homo sapien
ggagtgccgtggtcagcttggagca

SEQ ID NO: 3110134 - DNA, 25 bp, Homo sapien
catggggaccgggagtgccgtggtc

SEQ ID NO: 3110135 - DNA, 25 bp, Homo sapien
gccttgctttgaggacccgtggccg

SEQ ID NO: 3110136 - DNA, 25 bp, Homo sapien
gggctgcagaccccttggtgccact

SEQ ID NO: 3110137 - DNA, 25 bp, Homo sapien
ttggcagccactctcgggctgcaga

SEQ ID NO: 3110138 - DNA, 25 bp, Homo sapien
cccatggcctggctggaacggccag

SEQ ID NO: 3110139 - DNA, 25 bp, Homo sapien
gagagaatcagcgaatttctgtctc

SEQ ID NO: 3110140 - DNA, 25 bp, Homo sapien
tctgtctcagctggcccgtgaccaa

SEQ ID NO: 3110141 - DNA, 25 bp, Homo sapien
tcagctggcccgtgaccaaggccag

SEQ ID NO: 3110142 - DNA, 25 bp, Homo sapien
gaatcagcgaatttctgtctcagct

SEQ ID NO: 3110143 - DNA, 25 bp, Homo sapien
accagaaaggggcaccgtgtgtctg

SEQ ID NO: 3110144 - DNA, 25 bp, Homo sapien
gaaggatcccttggatgggaccaga

SEQ ID NO: 3110145 - DNA, 25 bp, Homo sapien
ctgcttcgggaaacatgcctggtgt

SEQ ID NO: 3110146 - DNA, 25 bp, Homo sapien
tgtgatggccccgtaggctgccatg

SEQ ID NO: 3110147 - DNA, 25 bp, Homo sapien
aggaaaggctgtcccaagccaagcc

SEQ ID NO: 3110148 - DNA, 25 bp, Homo sapien
ggaaaggctgtcccaagccaagcct

SEQ ID NO: 3110149 - DNA, 25 bp, Homo sapien
gaaaggctgtcccaagccaagcctg

SEQ ID NO: 3110150 - DNA, 25 bp, Homo sapien
tctcgattgccaggtagttacggtc

SEQ ID NO: 3110151 - DNA, 25 bp, Homo sapien
ttaagcccagcgtgatccctctgag

SEQ ID NO: 3110152 - DNA, 25 bp, Homo sapien
tttacactgagtgagacaggcgctg

SEQ ID NO: 3110153 - DNA, 25 bp, Homo sapien
tcgggagccgatggatgcaactcat

SEQ ID NO: 3110154 - DNA, 25 bp, Homo sapien
cacgagttgtttttccggtgctcct

SEQ ID NO: 3110155 - DNA, 25 bp, Homo sapien
ctaagtgtgcgtcttgcgcttccga

SEQ ID NO: 3110156 - DNA, 25 bp, Homo sapien
cagccagggcatcgctggatgcgca

SEQ ID NO: 3110157 - DNA, 25 bp, Homo sapien
ttgcgcttccgacacagccagggca

SEQ ID NO: 3110158 - DNA, 25 bp, Homo sapien
gccggacagcagtgaccaagctgga

SEQ ID NO: 3110159 - DNA, 25 bp, Homo sapien
cggacagcagtgaccaagctggagc

SEQ ID NO: 3110160 - DNA, 25 bp, Homo sapien
agcagtgaccaagctggagctgcag

SEQ ID NO: 3110161 - DNA, 25 bp, Homo sapien
gacagcagtgaccaagctggagctg

SEQ ID NO: 3110162 - DNA, 25 bp, Homo sapien
ccttgttcttcgcagggaagtggaa

SEQ ID NO: 3110163 - DNA, 25 bp, Homo sapien
cagcgcctccttgttcttcgcaggg

SEQ ID NO: 3110164 - DNA, 25 bp, Homo sapien
gcctccttgttcttcgcagggaagt

SEQ ID NO: 3110165 - DNA, 25 bp, Homo sapien
gcgcctccttgttcttcgcagggaa

SEQ ID NO: 3110166 - DNA, 25 bp, Homo sapien
gccccacttccagggtggttgcctg

SEQ ID NO: 3110167 - DNA, 25 bp, Homo sapien
tggtcagagccagaccagaactgag

SEQ ID NO: 3110168 - DNA, 25 bp, Homo sapien
cagaccagaactgagcaggagcttc

SEQ ID NO: 3110169 - DNA, 25 bp, Homo sapien
agagccagaccagaactgagcagga

SEQ ID NO: 3110170 - DNA, 25 bp, Homo sapien
agaactgagcaggagcttccgggca

SEQ ID NO: 3110171 - DNA, 25 bp, Homo sapien
ggtggccaccgggtgcaggttcagg

SEQ ID NO: 3110172 - DNA, 25 bp, Homo sapien
gtggccaccgggtgcaggttcaggg

SEQ ID NO: 3110173 - DNA, 25 bp, Homo sapien
cggcggggtggccaccgggtgcagg

SEQ ID NO: 3110174 - DNA, 25 bp, Homo sapien
gggtggccaccgggtgcaggttcag

SEQ ID NO: 3110175 - DNA, 25 bp, Homo sapien
gcgcgtgtcgcgctggtacttcggg

SEQ ID NO: 3110176 - DNA, 25 bp, Homo sapien
cgccgagacgcctgcaaaggcagca

SEQ ID NO: 3110177 - DNA, 25 bp, Homo sapien
cgcgcgcgcgcattggctgtgcggg

SEQ ID NO: 3110178 - DNA, 25 bp, Homo sapien
tggtcgggccgggattgggctctcc

SEQ ID NO: 3110179 - DNA, 25 bp, Homo sapien
atctgcagatggagggaccacattc

SEQ ID NO: 3110180 - DNA, 25 bp, Homo sapien
ctagccagcaaatcccaaaatctgc

SEQ ID NO: 3110181 - DNA, 25 bp, Homo sapien
caaaatctgcagatggagggaccac

SEQ ID NO: 3110182 - DNA, 25 bp, Homo sapien
aaatctgcagatggagggaccacat

SEQ ID NO: 3110183 - DNA, 25 bp, Homo sapien
ggccagaagccagtcagtttcacgc

SEQ ID NO: 3110184 - DNA, 25 bp, Homo sapien
gaagccagtcagtttcacgcttggg

SEQ ID NO: 3110185 - DNA, 25 bp, Homo sapien
tccgaaggccagaagccagtcagtt

SEQ ID NO: 3110186 - DNA, 25 bp, Homo sapien
gccacctggtccgaaggccagaagc

SEQ ID NO: 3110187 - DNA, 25 bp, Homo sapien
cgtggaccacgcagcaaatggcctt

SEQ ID NO: 3110188 - DNA, 25 bp, Homo sapien
gaagctctgctcctgtcgtgcgtgg

SEQ ID NO: 3110189 - DNA, 25 bp, Homo sapien
tgctcctgtcgtgcgtggaccacgc

SEQ ID NO: 3110190 - DNA, 25 bp, Homo sapien
tggaccacgcagcaaatggccttgg

SEQ ID NO: 3110191 - DNA, 25 bp, Homo sapien
ctgccgcctctctggagaccgggtt

SEQ ID NO: 3110192 - DNA, 25 bp, Homo sapien
tgacgacgcgaagacaatgaggaga

SEQ ID NO: 3110193 - DNA, 25 bp, Homo sapien
ccgatctttggtgtgtattggctgt

SEQ ID NO: 3110194 - DNA, 25 bp, Homo sapien
ctggagaccgggttcattatacttt

SEQ ID NO: 3110195 - DNA, 25 bp, Homo sapien
tctgaagatgcaggctctaccttct

SEQ ID NO: 3110196 - DNA, 25 bp, Homo sapien
gatgcaggctctaccttctgcccgg

SEQ ID NO: 3110197 - DNA, 25 bp, Homo sapien
tccttgcggcccaggaggtctctga

SEQ ID NO: 3110198 - DNA, 25 bp, Homo sapien
cacccgagaagtggatgtgaagtca

SEQ ID NO: 3110199 - DNA, 25 bp, Homo sapien
gggctccattgggacttggcagggc

SEQ ID NO: 3110200 - DNA, 25 bp, Homo sapien
accccggcagcttcgagtatggagg

SEQ ID NO: 3110201 - DNA, 25 bp, Homo sapien
tgattgtggggctccattgggactt

SEQ ID NO: 3110202 - DNA, 25 bp, Homo sapien
cagccaccagcgtccgtctgtctgg

SEQ ID NO: 3110203 - DNA, 25 bp, Homo sapien
gatgggctgtctgcaaggggtcccc

SEQ ID NO: 3110204 - DNA, 25 bp, Homo sapien
ccttccgcagcaggtctcttggctg

SEQ ID NO: 3110205 - DNA, 25 bp, Homo sapien
agcaggtctcttggctgcagctcag

SEQ ID NO: 3110206 - DNA, 25 bp, Homo sapien
ctggcggcaggaacagggcagtgat

SEQ ID NO: 3110207 - DNA, 25 bp, Homo sapien
agtcccggtcactgggggctctgca

SEQ ID NO: 3110208 - DNA, 25 bp, Homo sapien
cagagtcccggtcactgggggctct

SEQ ID NO: 3110209 - DNA, 25 bp, Homo sapien
agagtcccggtcactgggggctctg

SEQ ID NO: 3110210 - DNA, 25 bp, Homo sapien
cccagagtcccggtcactgggggct

SEQ ID NO: 3110211 - DNA, 25 bp, Homo sapien
tgataggacagtggccgttgcctag

SEQ ID NO: 3110212 - DNA, 25 bp, Homo sapien
aggggagactctcctaacttccagg

SEQ ID NO: 3110213 - DNA, 25 bp, Homo sapien
cgcaggcggtgcagatgataggaca

SEQ ID NO: 3110214 - DNA, 25 bp, Homo sapien
taacttccaggggtgtgagtcgcag

SEQ ID NO: 3110215 - DNA, 25 bp, Homo sapien
agacagcaagttggctcagccgctg

SEQ ID NO: 3110216 - DNA, 25 bp, Homo sapien
gctcccctgagtttatggctgtcca

SEQ ID NO: 3110217 - DNA, 25 bp, Homo sapien
ctgctgctcccctgagtttatggct

SEQ ID NO: 3110218 - DNA, 25 bp, Homo sapien
caagttggctcagccgctgctgtgt

SEQ ID NO: 3110219 - DNA, 25 bp, Homo sapien
gaatcaagaccgagcatgccgatgt

SEQ ID NO: 3110220 - DNA, 25 bp, Homo sapien
ccaccagggtgacagcagtaaggga

SEQ ID NO: 3110221 - DNA, 25 bp, Homo sapien
tatagcgcagctcacaatggctggg

SEQ ID NO: 3110222 - DNA, 25 bp, Homo sapien
gggctgcgcctgacaattgctaaca

SEQ ID NO: 3110223 - DNA, 25 bp, Homo sapien
gagtcagcccactcttaggaaggtg

SEQ ID NO: 3110224 - DNA, 25 bp, Homo sapien
gcaaacacttgtcgggctaagggca

SEQ ID NO: 3110225 - DNA, 25 bp, Homo sapien
gctggaccagaaagataccctgaga

SEQ ID NO: 3110226 - DNA, 25 bp, Homo sapien
taaactggaatgtagagtcagccca

SEQ ID NO: 3110227 - DNA, 25 bp, Homo sapien
gctcgtggcggaagctccggacctc

SEQ ID NO: 3110228 - DNA, 25 bp, Homo sapien
ggaagtgacgccaccgcgggctgca

SEQ ID NO: 3110229 - DNA, 25 bp, Homo sapien
agggaccacgtgtgtagacccaggc

SEQ ID NO: 3110230 - DNA, 25 bp, Homo sapien
tgggagcggccagagcccagtaatc

SEQ ID NO: 3110231 - DNA, 25 bp, Homo sapien
tgtccgctcccagggagataaggta

SEQ ID NO: 3110232 - DNA, 25 bp, Homo sapien
catcgtcgttggttgcatccctgtc

SEQ ID NO: 3110233 - DNA, 25 bp, Homo sapien
catcgtggtccctttgaagagctcc

SEQ ID NO: 3110234 - DNA, 25 bp, Homo sapien
agctccttgtagtccgggtcgatga

SEQ ID NO: 3110235 - DNA, 25 bp, Homo sapien
tgtaaaggtcgctctggctgaagcg

SEQ ID NO: 3110236 - DNA, 25 bp, Homo sapien
agtcctggggtcacctgtgtgtccc

SEQ ID NO: 3110237 - DNA, 25 bp, Homo sapien
ccaacccgggtcagagggccagagt

SEQ ID NO: 3110238 - DNA, 25 bp, Homo sapien
ggagccaggagagtgctcgccccaa

SEQ ID NO: 3110239 - DNA, 25 bp, Homo sapien
agaaacctgaccctttggaagctgt

SEQ ID NO: 3110240 - DNA, 25 bp, Homo sapien
aagaaacctgaccctttggaagctg

SEQ ID NO: 3110241 - DNA, 25 bp, Homo sapien
cgacaccacccgggctacattttgg

SEQ ID NO: 3110242 - DNA, 25 bp, Homo sapien
tcgggttcaagcctgtgtagaccca

SEQ ID NO: 3110243 - DNA, 25 bp, Homo sapien
gcctctagggttcttgccgacacca

SEQ ID NO: 3110244 - DNA, 25 bp, Homo sapien
gagggttcttgtcacgaactcctga

SEQ ID NO: 3110245 - DNA, 25 bp, Homo sapien
aatgtcagccccgtatttgaccagc

SEQ ID NO: 3110246 - DNA, 25 bp, Homo sapien
gtttccagagagcacggcttcatgc

SEQ ID NO: 3110247 - DNA, 25 bp, Homo sapien
agagcacggcttcatgcaaggcggc

SEQ ID NO: 3110248 - DNA, 25 bp, Homo sapien
gcttcacgcattccaggtttccaga

SEQ ID NO: 3110249 - DNA, 25 bp, Homo sapien
tttccgagtccggatgaagcgcccc

SEQ ID NO: 3110250 - DNA, 25 bp, Homo sapien
gcatagcgggcagttctgctaggca

SEQ ID NO: 3110251 - DNA, 25 bp, Homo sapien
tagggaaacgcacgctgcgatcagc

SEQ ID NO: 3110252 - DNA, 25 bp, Homo sapien
tccaagaacaggacatcattaggga

SEQ ID NO: 3110253 - DNA, 25 bp, Homo sapien
cggtcccgaccagatcagcttgagg

SEQ ID NO: 3110254 - DNA, 25 bp, Homo sapien
ggaccctactgcactggggttaata

SEQ ID NO: 3110255 - DNA, 25 bp, Homo sapien
tgcactggggttaataatgtatccg

SEQ ID NO: 3110256 - DNA, 25 bp, Homo sapien
ttaataatgtatccggtcccgacca

SEQ ID NO: 3110257 - DNA, 25 bp, Homo sapien
tagggcttggactacaggacatgag

SEQ ID NO: 3110258 - DNA, 25 bp, Homo sapien
tcagggacagcgatcgattgtgcta

SEQ ID NO: 3110259 - DNA, 25 bp, Homo sapien
ttaaaactcgtgttccaacaggctc

SEQ ID NO: 3110260 - DNA, 25 bp, Homo sapien
ccagtggaggtccaaagtagggctt

SEQ ID NO: 3110261 - DNA, 25 bp, Homo sapien
ccatgatagacactccctggagctc

SEQ ID NO: 3110262 - DNA, 25 bp, Homo sapien
cctggagctcctcacccttgaaacg

SEQ ID NO: 3110263 - DNA, 25 bp, Homo sapien
ccctggagctcctcacccttgaaac

SEQ ID NO: 3110264 - DNA, 25 bp, Homo sapien
atgatagacactccctggagctcct

SEQ ID NO: 3110265 - DNA, 25 bp, Homo sapien
ggccgtcagcagtcgtgcctgctcc

SEQ ID NO: 3110266 - DNA, 25 bp, Homo sapien
ccggccgtcagcagtcgtgcctgct

SEQ ID NO: 3110267 - DNA, 25 bp, Homo sapien
gccggccgtcagcagtcgtgcctgc

SEQ ID NO: 3110268 - DNA, 25 bp, Homo sapien
agccggccgtcagcagtcgtgcctg

SEQ ID NO: 3110269 - DNA, 25 bp, Homo sapien
catggagttttgtccctgattcttc

SEQ ID NO: 3110270 - DNA, 25 bp, Homo sapien
cctgattcttcttggtccatatgaa

SEQ ID NO: 3110271 - DNA, 25 bp, Homo sapien
cgtgacgtcagagccaaacctgtct

SEQ ID NO: 3110272 - DNA, 25 bp, Homo sapien
tgttcatgcagcgtgacgtcagagc

SEQ ID NO: 3110273 - DNA, 25 bp, Homo sapien
atcctcccacggcacctccagatgc

SEQ ID NO: 3110274 - DNA, 25 bp, Homo sapien
gcacctccagatgccgttgcccact

SEQ ID NO: 3110275 - DNA, 25 bp, Homo sapien
gccgttgcccacttttccgtgagta

SEQ ID NO: 3110276 - DNA, 25 bp, Homo sapien
cacttttccgtgagtacgcggctca

SEQ ID NO: 3110277 - DNA, 25 bp, Homo sapien
agctgaactagccagaaaccagccc

SEQ ID NO: 3110278 - DNA, 25 bp, Homo sapien
tggagctgaactagccagaaaccag

SEQ ID NO: 3110279 - DNA, 25 bp, Homo sapien
ccctggagctgaactagccagaaac

SEQ ID NO: 3110280 - DNA, 25 bp, Homo sapien
caggcatggcacacaaaccctgctg

SEQ ID NO: 3110281 - DNA, 25 bp, Homo sapien
actgccgagctggtgtgagccgtgt

SEQ ID NO: 3110282 - DNA, 25 bp, Homo sapien
gccgagctggtgtgagccgtgtggg

SEQ ID NO: 3110283 - DNA, 25 bp, Homo sapien
gggccggggcagacggcagcaccca

SEQ ID NO: 3110284 - DNA, 25 bp, Homo sapien
agactgccgagctggtgtgagccgt

SEQ ID NO: 3110285 - DNA, 25 bp, Homo sapien
ttgacacaggtcctcgcggcatgct

SEQ ID NO: 3110286 - DNA, 25 bp, Homo sapien
ctggtgctggcgacgtgttgacaca

SEQ ID NO: 3110287 - DNA, 25 bp, Homo sapien
gccggatactccacagcctggagca

SEQ ID NO: 3110288 - DNA, 25 bp, Homo sapien
gctggccggatactccacagcctgg

SEQ ID NO: 3110289 - DNA, 25 bp, Homo sapien
gcctggtctggcttgagagccgtct

SEQ ID NO: 3110290 - DNA, 25 bp, Homo sapien
tagcggggagaacgggagaaccgca

SEQ ID NO: 3110291 - DNA, 25 bp, Homo sapien
ctgtggggccggcaagggaggtagc

SEQ ID NO: 3110292 - DNA, 25 bp, Homo sapien
tgcagccagcccgcaagctcgggaa

SEQ ID NO: 3110293 - DNA, 25 bp, Homo sapien
cttgggctccttcctcctgcctcac

SEQ ID NO: 3110294 - DNA, 25 bp, Homo sapien
cacccttgggctccttcctcctgcc

SEQ ID NO: 3110295 - DNA, 25 bp, Homo sapien
ctgccacctgcacccttgggctcct

SEQ ID NO: 3110296 - DNA, 25 bp, Homo sapien
acccttgggctccttcctcctgcct

SEQ ID NO: 3110297 - DNA, 25 bp, Homo sapien
tctgagaccaccatgagccctgctg

SEQ ID NO: 3110298 - DNA, 25 bp, Homo sapien
gccgttgccctcagggggacccaca

SEQ ID NO: 3110299 - DNA, 25 bp, Homo sapien
ctcagggcctctgccgttgccctca

SEQ ID NO: 3110300 - DNA, 25 bp, Homo sapien
ctctgagaccaccatgagccctgct

SEQ ID NO: 3110301 - DNA, 25 bp, Homo sapien
aagcagcaaatccaggctcagcaga

SEQ ID NO: 3110302 - DNA, 25 bp, Homo sapien
gcagaaaagcagcaaatccaggctc

SEQ ID NO: 3110303 - DNA, 25 bp, Homo sapien
gaaaagcagcaaatccaggctcagc

SEQ ID NO: 3110304 - DNA, 25 bp, Homo sapien
ctgcagaaaagcagcaaatccaggc

SEQ ID NO: 3110305 - DNA, 25 bp, Homo sapien
atggccttggcgtccgcattccagc

SEQ ID NO: 3110306 - DNA, 25 bp, Homo sapien
ccactaaggcctggcagatggcctt

SEQ ID NO: 3110307 - DNA, 25 bp, Homo sapien
tccgggcttggtgagatcataaacc

SEQ ID NO: 3110308 - DNA, 25 bp, Homo sapien
cagcccagctctccgggcttggtga

SEQ ID NO: 3110309 - DNA, 25 bp, Homo sapien
atttggccaatgtgttcaattcgat

SEQ ID NO: 3110310 - DNA, 25 bp, Homo sapien
ttggccaatgtgttcaattcgattg

SEQ ID NO: 3110311 - DNA, 25 bp, Homo sapien
tggccaatgtgttcaattcgattgt

SEQ ID NO: 3110312 - DNA, 25 bp, Homo sapien
ggccaatgtgttcaattcgattgtg

SEQ ID NO: 3110313 - DNA, 25 bp, Homo sapien
cacaggccgtgctgtagagaggcca

SEQ ID NO: 3110314 - DNA, 25 bp, Homo sapien
ccacaggccgtgctgtagagaggcc

SEQ ID NO: 3110315 - DNA, 25 bp, Homo sapien
cgggagtcaagggtcgtggttctgc

SEQ ID NO: 3110316 - DNA, 25 bp, Homo sapien
tcgtggttctgccttgaacaggcca

SEQ ID NO: 3110317 - DNA, 25 bp, Homo sapien
tggccaaggtggaacaaataccctg

SEQ ID NO: 3110318 - DNA, 25 bp, Homo sapien
cagtcatggcgacactgcaggcggt

SEQ ID NO: 3110319 - DNA, 25 bp, Homo sapien
ccctgacaggatccggaagtctcca

SEQ ID NO: 3110320 - DNA, 25 bp, Homo sapien
tactgagtgaccatgtccagtccgg

SEQ ID NO: 3110321 - DNA, 25 bp, Homo sapien
tccggcgacgccctccttcaagcga

SEQ ID NO: 3110322 - DNA, 25 bp, Homo sapien
gggtgaggtgtcacttcagagaggt

SEQ ID NO: 3110323 - DNA, 25 bp, Homo sapien
acgccctccttcaagcgaggccgca

SEQ ID NO: 3110324 - DNA, 25 bp, Homo sapien
cctccttcaagcgaggccgcaggct

SEQ ID NO: 3110325 - DNA, 25 bp, Homo sapien
tgatcatcgtcttcctccatgtctg

SEQ ID NO: 3110326 - DNA, 25 bp, Homo sapien
tctgatcatcgtcttcctccatgtc

SEQ ID NO: 3110327 - DNA, 25 bp, Homo sapien
ctgatcatcgtcttcctccatgtct

SEQ ID NO: 3110328 - DNA, 25 bp, Homo sapien
caccatggagtctacagagggtcca

SEQ ID NO: 3110329 - DNA, 25 bp, Homo sapien
catggaaggcgtatgtgtgtctccc

SEQ ID NO: 3110330 - DNA, 25 bp, Homo sapien
gagggtccacatctcggcagggaca

SEQ ID NO: 3110331 - DNA, 25 bp, Homo sapien
ctatagcaggatgaatcagagcccc

SEQ ID NO: 3110332 - DNA, 25 bp, Homo sapien
tgtttcagcagagcactgggagcac

SEQ ID NO: 3110333 - DNA, 25 bp, Homo sapien
ttaaagatgccttcaacgtcgtccc

SEQ ID NO: 3110334 - DNA, 25 bp, Homo sapien
tcgtcccctaaagaagtgctggcca

SEQ ID NO: 3110335 - DNA, 25 bp, Homo sapien
aaccggtgccatgtgtctgaaaagg

SEQ ID NO: 3110336 - DNA, 25 bp, Homo sapien
ttaaaaccatccagcgtgcgttccc

SEQ ID NO: 3110337 - DNA, 25 bp, Homo sapien
tgcgttccccgttgtaatcaatgac

SEQ ID NO: 3110338 - DNA, 25 bp, Homo sapien
ccagcgtgcgttccccgttgtaatc

SEQ ID NO: 3110339 - DNA, 25 bp, Homo sapien
catccagcgtgcgttccccgttgta

SEQ ID NO: 3110340 - DNA, 25 bp, Homo sapien
catcttggcgatgacgatgttctca

SEQ ID NO: 3110341 - DNA, 25 bp, Homo sapien
tggtccttgtacgtctctcccagtt

SEQ ID NO: 3110342 - DNA, 25 bp, Homo sapien
cctcgttggcagtcgagtccatctt

SEQ ID NO: 3110343 - DNA, 25 bp, Homo sapien
aagctgtgcactttgacggcctcca

SEQ ID NO: 3110344 - DNA, 25 bp, Homo sapien
ctgtttgcagtgaccacaccatggg

SEQ ID NO: 3110345 - DNA, 25 bp, Homo sapien
ttgcagtgaccacaccatggggcat

SEQ ID NO: 3110346 - DNA, 25 bp, Homo sapien
tgtttgcagtgaccacaccatgggg

SEQ ID NO: 3110347 - DNA, 25 bp, Homo sapien
tttgcagtgaccacaccatggggca

SEQ ID NO: 3110348 - DNA, 25 bp, Homo sapien
gaaagcagttctagggtgtgtcctg

SEQ ID NO: 3110349 - DNA, 25 bp, Homo sapien
actggcagacgcttccccaggagtc

SEQ ID NO: 3110350 - DNA, 25 bp, Homo sapien
ctgaaaagaaagcagttctagggtg

SEQ ID NO: 3110351 - DNA, 25 bp, Homo sapien
acaaagccactggcagacgcttccc

SEQ ID NO: 3110352 - DNA, 25 bp, Homo sapien
ttgcgcgtgccctggtggcacggac

SEQ ID NO: 3110353 - DNA, 25 bp, Homo sapien
cttgcgcgtgccctggtggcacgga

SEQ ID NO: 3110354 - DNA, 25 bp, Homo sapien
ggggagctgaaagggcaacacttac

SEQ ID NO: 3110355 - DNA, 25 bp, Homo sapien
tggggagctgaaagggcaacactta

SEQ ID NO: 3110356 - DNA, 25 bp, Homo sapien
ctggggagctgaaagggcaacactt

SEQ ID NO: 3110357 - DNA, 25 bp, Homo sapien
ccggcagctcctggctcatcaggtg

SEQ ID NO: 3110358 - DNA, 25 bp, Homo sapien
caccttgacaggctgcttgtcccag

SEQ ID NO: 3110359 - DNA, 25 bp, Homo sapien
cttcaaagttcttcccaacaagcac

SEQ ID NO: 3110360 - DNA, 25 bp, Homo sapien
tttctcatcaaaagccacgtcttca

SEQ ID NO: 3110361 - DNA, 25 bp, Homo sapien
aggtggcggctctacccgggaggca

SEQ ID NO: 3110362 - DNA, 25 bp, Homo sapien
ccaaggtggcggctctacccgggag

SEQ ID NO: 3110363 - DNA, 25 bp, Homo sapien
caaggtggcggctctacccgggagg

SEQ ID NO: 3110364 - DNA, 25 bp, Homo sapien
tgccgtcagctcctccgattcgggc

SEQ ID NO: 3110365 - DNA, 25 bp, Homo sapien
ctgccgtcagctcctccgattcggg

SEQ ID NO: 3110366 - DNA, 25 bp, Homo sapien
gctcctccgattcgggcttgtactt

SEQ ID NO: 3110367 - DNA, 25 bp, Homo sapien
tcagctcctccgattcgggcttgta

SEQ ID NO: 3110368 - DNA, 25 bp, Homo sapien
cctcctccagggtgatgaggcgcac

SEQ ID NO: 3110369 - DNA, 25 bp, Homo sapien
tcctccagggtgatgaggcgcacgg

SEQ ID NO: 3110370 - DNA, 25 bp, Homo sapien
cgcacggccgggcactcttccttct

SEQ ID NO: 3110371 - DNA, 25 bp, Homo sapien
ccagggtgatgaggcgcacggccgg

SEQ ID NO: 3110372 - DNA, 25 bp, Homo sapien
tcgaggatgcgctggttgtcggtgt

SEQ ID NO: 3110373 - DNA, 25 bp, Homo sapien
gaggatgcgctggttgtcggtgtgg

SEQ ID NO: 3110374 - DNA, 25 bp, Homo sapien
gatgcgctggttgtcggtgtggtcg

SEQ ID NO: 3110375 - DNA, 25 bp, Homo sapien
aactcgaggatgcgctggttgtcgg

SEQ ID NO: 3110376 - DNA, 25 bp, Homo sapien
tgttttgaagttgctcagtttgccg

SEQ ID NO: 3110377 - DNA, 25 bp, Homo sapien
gaagctctcggctgctgttttgaag

SEQ ID NO: 3110378 - DNA, 25 bp, Homo sapien
gtttgccgtcatagtcagacacact

SEQ ID NO: 3110379 - DNA, 25 bp, Homo sapien
cccttgaagctctcggctgctgttt

SEQ ID NO: 3110380 - DNA, 25 bp, Homo sapien
aggatgtgagtcttgatttcacctc

SEQ ID NO: 3110381 - DNA, 25 bp, Homo sapien
cttgggcaagaacagcaggatgtga

SEQ ID NO: 3110382 - DNA, 25 bp, Homo sapien
aagaacagcaggatgtgagtcttga

SEQ ID NO: 3110383 - DNA, 25 bp, Homo sapien
gatgtgagtcttgatttcacctcca

SEQ ID NO: 3110384 - DNA, 25 bp, Homo sapien
ttcaaagttgttccggccttcatca

SEQ ID NO: 3110385 - DNA, 25 bp, Homo sapien
cagctggttgtgtttgataaagtcc

SEQ ID NO: 3110386 - DNA, 25 bp, Homo sapien
tgctcggtgaactcgatgacaaggg

SEQ ID NO: 3110387 - DNA, 25 bp, Homo sapien
ccttcaaagttgttccggccttcat

SEQ ID NO: 3110388 - DNA, 25 bp, Homo sapien
cagtaagactggctctggtcacggc

SEQ ID NO: 3110389 - DNA, 25 bp, Homo sapien
caggtccagcaatgggtacaggaca

SEQ ID NO: 3110390 - DNA, 25 bp, Homo sapien
gtctccctggacgtgggaagtcaca

SEQ ID NO: 3110391 - DNA, 25 bp, Homo sapien
gacatggctgttcctcgacagtaag

SEQ ID NO: 3110392 - DNA, 25 bp, Homo sapien
tgtccatagagtcacagcggccact

SEQ ID NO: 3110393 - DNA, 25 bp, Homo sapien
ccacgtgtgagcctttgcaggcaag

SEQ ID NO: 3110394 - DNA, 25 bp, Homo sapien
tgcaggcaagagcaacgaaaccacc

SEQ ID NO: 3110395 - DNA, 25 bp, Homo sapien
gccttcgcggacacatatcaccaaa

SEQ ID NO: 3110396 - DNA, 25 bp, Homo sapien
gatgctgctgtctaaaaggttcttc

SEQ ID NO: 3110397 - DNA, 25 bp, Homo sapien
acaatagaaacccacaggccccatc

SEQ ID NO: 3110398 - DNA, 25 bp, Homo sapien
tgacactgtgcaaacaaggaccctg

SEQ ID NO: 3110399 - DNA, 25 bp, Homo sapien
cctggtgaccgagaaaagagacaat

SEQ ID NO: 3110400 - DNA, 25 bp, Homo sapien
ccatcttgacactgtgcaaacaagg

SEQ ID NO: 3110401 - DNA, 25 bp, Homo sapien
taaagaggacaaccccatctttgtc

SEQ ID NO: 3110402 - DNA, 25 bp, Homo sapien
cacgtcactgttggaagtgatccca

SEQ ID NO: 3110403 - DNA, 25 bp, Homo sapien
catctttgtcgagctggtatttgga

SEQ ID NO: 3110404 - DNA, 25 bp, Homo sapien
caaatggtatgtcatcgatggcctc

SEQ ID NO: 3110405 - DNA, 25 bp, Homo sapien
gatcccgcagcaccaagcagtaggg

SEQ ID NO: 3110406 - DNA, 25 bp, Homo sapien
gagaagcagaggtcgtcatgatccc

SEQ ID NO: 3110407 - DNA, 25 bp, Homo sapien
aagcagaggtcgtcatgatcccgca

SEQ ID NO: 3110408 - DNA, 25 bp, Homo sapien
agaagcagaggtcgtcatgatcccg

SEQ ID NO: 3110409 - DNA, 25 bp, Homo sapien
gccagttcacgatgtcatcagcctc

SEQ ID NO: 3110410 - DNA, 25 bp, Homo sapien
caaggactctgcagctgcgccgtca

SEQ ID NO: 3110411 - DNA, 25 bp, Homo sapien
gactctgcagctgcgccgtcaggca

SEQ ID NO: 3110412 - DNA, 25 bp, Homo sapien
ggcccgtgcgcttcttcagccagtt

SEQ ID NO: 3110413 - DNA, 25 bp, Homo sapien
cctaaaccccagtgtacgtgagact

SEQ ID NO: 3110414 - DNA, 25 bp, Homo sapien
tgaggacacctgaatcaacctaagt

SEQ ID NO: 3110415 - DNA, 25 bp, Homo sapien
taagtaagatgttctcccaccatgg

SEQ ID NO: 3110416 - DNA, 25 bp, Homo sapien
tactctcaaacagggagtgccgcct

SEQ ID NO: 3110417 - DNA, 25 bp, Homo sapien
ctgcctgaccctcccgcgtagctag

SEQ ID NO: 3110418 - DNA, 25 bp, Homo sapien
ctgcgcccagcaatgtttcttcttt

SEQ ID NO: 3110419 - DNA, 25 bp, Homo sapien
gggattaagcagtccgcccacctcg

SEQ ID NO: 3110420 - DNA, 25 bp, Homo sapien
cctgaccctcccgcgtagctaggat

SEQ ID NO: 3110421 - DNA, 25 bp, Homo sapien
aaacagccaagtgagaggcaaccac

SEQ ID NO: 3110422 - DNA, 25 bp, Homo sapien
gagaggcaaccacggagttgctgcc

SEQ ID NO: 3110423 - DNA, 25 bp, Homo sapien
agccaagtgagaggcaaccacggag

SEQ ID NO: 3110424 - DNA, 25 bp, Homo sapien
agtgagaggcaaccacggagttgct

SEQ ID NO: 3110425 - DNA, 25 bp, Homo sapien
gaatgagctgctttcgggctaccca

SEQ ID NO: 3110426 - DNA, 25 bp, Homo sapien
ccgtcactgatctggctacacaggg

SEQ ID NO: 3110427 - DNA, 25 bp, Homo sapien
cacagaaccggttttatagacgagt

SEQ ID NO: 3110428 - DNA, 25 bp, Homo sapien
agaaccctgctaacactggaatgag

SEQ ID NO: 3110429 - DNA, 25 bp, Homo sapien
cttcagaggcggcagacgagcagct

SEQ ID NO: 3110430 - DNA, 25 bp, Homo sapien
ggcggcagacgagcagctgagggcc

SEQ ID NO: 3110431 - DNA, 25 bp, Homo sapien
aggcggcagacgagcagctgagggc

SEQ ID NO: 3110432 - DNA, 25 bp, Homo sapien
cagaggcggcagacgagcagctgag

SEQ ID NO: 3110433 - DNA, 25 bp, Homo sapien
caccttggccaacctgatctcggaa

SEQ ID NO: 3110434 - DNA, 25 bp, Homo sapien
tcccagcggctttggcatactcagg

SEQ ID NO: 3110435 - DNA, 25 bp, Homo sapien
gatctcggaaccttctgccttcagc

SEQ ID NO: 3110436 - DNA, 25 bp, Homo sapien
acttgatggtgggatagccgcgcac

SEQ ID NO: 3110437 - DNA, 25 bp, Homo sapien
ttccccacaggcaactaaggcaagg

SEQ ID NO: 3110438 - DNA, 25 bp, Homo sapien
gaaagcagccttgatccctaaagca

SEQ ID NO: 3110439 - DNA, 25 bp, Homo sapien
tgttcttgggcaatatcaggacaga

SEQ ID NO: 3110440 - DNA, 25 bp, Homo sapien
cactagctgtgagtatgagatgcac

SEQ ID NO: 3110441 - DNA, 25 bp, Homo sapien
aggaaggcttgggattctcctctga

SEQ ID NO: 3110442 - DNA, 25 bp, Homo sapien
gtgaggaaggcttgggattctcctc

SEQ ID NO: 3110443 - DNA, 25 bp, Homo sapien
gaaggcttgggattctcctctgaga

SEQ ID NO: 3110444 - DNA, 25 bp, Homo sapien
aggcttgggattctcctctgagaca

SEQ ID NO: 3110445 - DNA, 25 bp, Homo sapien
tgctcacacaggtcgatcctgttct

SEQ ID NO: 3110446 - DNA, 25 bp, Homo sapien
ccggggaggactcggcaaggctgga

SEQ ID NO: 3110447 - DNA, 25 bp, Homo sapien
acaggtcgatcctgttcttctcgca

SEQ ID NO: 3110448 - DNA, 25 bp, Homo sapien
ctctgtttgctcacacaggtcgatc

SEQ ID NO: 3110449 - DNA, 25 bp, Homo sapien
ggagcccttcagttccgggcgcgcc

SEQ ID NO: 3110450 - DNA, 25 bp, Homo sapien
agcccggctctcacccccagggagc

SEQ ID NO: 3110451 - DNA, 25 bp, Homo sapien
gcctggctcagcggccccgagcccc

SEQ ID NO: 3110452 - DNA, 25 bp, Homo sapien
agcccttcagttccgggcgcgccgg

SEQ ID NO: 3110453 - DNA, 25 bp, Homo sapien
gccagcgcctccgcgaagttgcttt

SEQ ID NO: 3110454 - DNA, 25 bp, Homo sapien
agttgcttttccgcagcaccaggac

SEQ ID NO: 3110455 - DNA, 25 bp, Homo sapien
gcgcctccgcgaagttgcttttccg

SEQ ID NO: 3110456 - DNA, 25 bp, Homo sapien
tcggcgcgcaccagggcggccacgg

SEQ ID NO: 3110457 - DNA, 25 bp, Homo sapien
ctcgcctttataaatcctgggtccg

SEQ ID NO: 3110458 - DNA, 25 bp, Homo sapien
ccggcctcgcctttataaatcctgg

SEQ ID NO: 3110459 - DNA, 25 bp, Homo sapien
tcggacacggatcaggcggggcgct

SEQ ID NO: 3110460 - DNA, 25 bp, Homo sapien
tataaatcctgggtccggggcgcgc

SEQ ID NO: 3110461 - DNA, 25 bp, Homo sapien
gttgcattctgactggaccgcgtac

SEQ ID NO: 3110462 - DNA, 25 bp, Homo sapien
tgcccctttcggtagcacggactct

SEQ ID NO: 3110463 - DNA, 25 bp, Homo sapien
taattggtggctttcgcctgcacct

SEQ ID NO: 3110464 - DNA, 25 bp, Homo sapien
ttccttcgtcgaacgtggcagtggg

SEQ ID NO: 3110465 - DNA, 25 bp, Homo sapien
ctttcccacgggttgccaaatcctg

SEQ ID NO: 3110466 - DNA, 25 bp, Homo sapien
ggctcaggagacctcgcagctgtta

SEQ ID NO: 3110467 - DNA, 25 bp, Homo sapien
tactccccgctaaggccttcaggga

SEQ ID NO: 3110468 - DNA, 25 bp, Homo sapien
tcagatgctctggtcggctcaggag

SEQ ID NO: 3110469 - DNA, 25 bp, Homo sapien
agtgctccgaggtccctcctgtgtt

SEQ ID NO: 3110470 - DNA, 25 bp, Homo sapien
ctgggcagtgctccgaggtccctcc

SEQ ID NO: 3110471 - DNA, 25 bp, Homo sapien
gcagtgctccgaggtccctcctgtg

SEQ ID NO: 3110472 - DNA, 25 bp, Homo sapien
tgctgtgcccggagtggaggtgaga

SEQ ID NO: 3110473 - DNA, 25 bp, Homo sapien
gatgctaggggactgctgggagcca

SEQ ID NO: 3110474 - DNA, 25 bp, Homo sapien
ggcactgtgacttgtcactctcctg

SEQ ID NO: 3110475 - DNA, 25 bp, Homo sapien
tggaagaagtgtccacctgggggtg

SEQ ID NO: 3110476 - DNA, 25 bp, Homo sapien
tgacttgtcactctcctgaatggaa

SEQ ID NO: 3110477 - DNA, 25 bp, Homo sapien
tctgttggggtgtctgacacggtca

SEQ ID NO: 3110478 - DNA, 25 bp, Homo sapien
gatctgggtctggaccagcttctgc

SEQ ID NO: 3110479 - DNA, 25 bp, Homo sapien
caccattctgttggggtgtctgaca

SEQ ID NO: 3110480 - DNA, 25 bp, Homo sapien
ccagatctgggtctggaccagcttc

SEQ ID NO: 3110481 - DNA, 25 bp, Homo sapien
gaggccctgcgtggttcccccagta

SEQ ID NO: 3110482 - DNA, 25 bp, Homo sapien
aggccctgcgtggttcccccagtag

SEQ ID NO: 3110483 - DNA, 25 bp, Homo sapien
gccctgcgtggttcccccagtagcc

SEQ ID NO: 3110484 - DNA, 25 bp, Homo sapien
caggaggccctgcgtggttccccca

SEQ ID NO: 3110485 - DNA, 25 bp, Homo sapien
atgccctgtctcctgccgatcccat

SEQ ID NO: 3110486 - DNA, 25 bp, Homo sapien
ctgtctcctgccgatcccatcacac

SEQ ID NO: 3110487 - DNA, 25 bp, Homo sapien
cacaccgcagtgaggatgccctgtc

SEQ ID NO: 3110488 - DNA, 25 bp, Homo sapien
accgcagtgaggatgccctgtctcc

SEQ ID NO: 3110489 - DNA, 25 bp, Homo sapien
cttttcgctgttgggctcctggcac

SEQ ID NO: 3110490 - DNA, 25 bp, Homo sapien
taggcgcctccgtggcccccgttgc

SEQ ID NO: 3110491 - DNA, 25 bp, Homo sapien
ggctggtgctctaggcgcctccgtg

SEQ ID NO: 3110492 - DNA, 25 bp, Homo sapien
ctggcactgcccgatcctggagggc

SEQ ID NO: 3110493 - DNA, 25 bp, Homo sapien
gacaggcgcctctgcctgagcctgg

SEQ ID NO: 3110494 - DNA, 25 bp, Homo sapien
tggcagacacaacacgaagaccggg

SEQ ID NO: 3110495 - DNA, 25 bp, Homo sapien
agacggctctcagcaatgtgtgcac

SEQ ID NO: 3110496 - DNA, 25 bp, Homo sapien
tatttcccggtcagaaaagaagcag

SEQ ID NO: 3110497 - DNA, 25 bp, Homo sapien
gcccagggacggcacggacggaggc

SEQ ID NO: 3110498 - DNA, 25 bp, Homo sapien
ccagggacggcacggacggaggcaa

SEQ ID NO: 3110499 - DNA, 25 bp, Homo sapien
gacggcacggacggaggcaataaat

SEQ ID NO: 3110500 - DNA, 25 bp, Homo sapien
agggacggcacggacggaggcaata

SEQ ID NO: 3110501 - DNA, 25 bp, Homo sapien
ccatcgagggctcttgggggggcgt

SEQ ID NO: 3110502 - DNA, 25 bp, Homo sapien
tgaggctgtccatcgagggctcttg

SEQ ID NO: 3110503 - DNA, 25 bp, Homo sapien
gtccatcgagggctcttgggggggc

SEQ ID NO: 3110504 - DNA, 25 bp, Homo sapien
ggtgaggctgtccatcgagggctct

SEQ ID NO: 3110505 - DNA, 25 bp, Homo sapien
gcctcctggatggtactgaggtgac

SEQ ID NO: 3110506 - DNA, 25 bp, Homo sapien
cctcctggatggtactgaggtgact

SEQ ID NO: 3110507 - DNA, 25 bp, Homo sapien
tcctggatggtactgaggtgacttg

SEQ ID NO: 3110508 - DNA, 25 bp, Homo sapien
cagcctcctggatggtactgaggtg

SEQ ID NO: 3110509 - DNA, 25 bp, Homo sapien
cagacacagggagttagaggctagt

SEQ ID NO: 3110510 - DNA, 25 bp, Homo sapien
aggcatcatggttagacgggaccga

SEQ ID NO: 3110511 - DNA, 25 bp, Homo sapien
acggtacactccacatgttaaggca

SEQ ID NO: 3110512 - DNA, 25 bp, Homo sapien
agaggctagtgaggccccacggtac

SEQ ID NO: 3110513 - DNA, 25 bp, Homo sapien
ggcacggagggcctgtcagcacttt

SEQ ID NO: 3110514 - DNA, 25 bp, Homo sapien
ccaggccagggaggcggaccagggt

SEQ ID NO: 3110515 - DNA, 25 bp, Homo sapien
gtccgtccgtcagtctgccctgccc

SEQ ID NO: 3110516 - DNA, 25 bp, Homo sapien
cctgtcagcactttggtatggggag

SEQ ID NO: 3110517 - DNA, 25 bp, Homo sapien
tggtcggtcttgtcgtcgtctgtga

SEQ ID NO: 3110518 - DNA, 25 bp, Homo sapien
ttcttgatggtgagattccactccc

SEQ ID NO: 3110519 - DNA, 25 bp, Homo sapien
caggtggtcggtcttgtcgtcgtct

SEQ ID NO: 3110520 - DNA, 25 bp, Homo sapien
cggtcttgtcgtcgtctgtgaagcg

SEQ ID NO: 3110521 - DNA, 25 bp, Homo sapien
gtgcctcctccacgggggtcaggaa

SEQ ID NO: 3110522 - DNA, 25 bp, Homo sapien
gggtcaggaactcgtactcctcggc

SEQ ID NO: 3110523 - DNA, 25 bp, Homo sapien
ctgcctaccatgtagtcagtcttgt

SEQ ID NO: 3110524 - DNA, 25 bp, Homo sapien
gcctaccatgtagtcagtcttgtca

SEQ ID NO: 3110525 - DNA, 25 bp, Homo sapien
tgcctaccatgtagtcagtcttgtc

SEQ ID NO: 3110526 - DNA, 25 bp, Homo sapien
cctaccatgtagtcagtcttgtcaa

SEQ ID NO: 3110527 - DNA, 25 bp, Homo sapien
ccaagcggccccctctgccctgccc

SEQ ID NO: 3110528 - DNA, 25 bp, Homo sapien
cctctgccctgcccggggccccact

SEQ ID NO: 3110529 - DNA, 25 bp, Homo sapien
aagcggccccctctgccctgcccgg

SEQ ID NO: 3110530 - DNA, 25 bp, Homo sapien
tctgccctgcccggggccccactca

SEQ ID NO: 3110531 - DNA, 25 bp, Homo sapien
tgccggacactatctctcggttaac

SEQ ID NO: 3110532 - DNA, 25 bp, Homo sapien
tacttcatgccggacactatctctc

SEQ ID NO: 3110533 - DNA, 25 bp, Homo sapien
tcttgacgcctttcctgtacgtatg

SEQ ID NO: 3110534 - DNA, 25 bp, Homo sapien
cctgtacgtatgctggatgtacttc

SEQ ID NO: 3110535 - DNA, 25 bp, Homo sapien
gaggatcagggaaggtcggtccgga

SEQ ID NO: 3110536 - DNA, 25 bp, Homo sapien
aagcgaggatcagggaaggtcggtc

SEQ ID NO: 3110537 - DNA, 25 bp, Homo sapien
cccgaagcgaggatcagggaaggtc

SEQ ID NO: 3110538 - DNA, 25 bp, Homo sapien
ctgcaggacccgaagcgaggatcag

SEQ ID NO: 3110539 - DNA, 25 bp, Homo sapien
agagatttttatccggtactccaca

SEQ ID NO: 3110540 - DNA, 25 bp, Homo sapien
cagcacaaacgactgcttcttgaag

SEQ ID NO: 3110541 - DNA, 25 bp, Homo sapien
tccttcagcacaaacgactgcttct

SEQ ID NO: 3110542 - DNA, 25 bp, Homo sapien
cacaaacgactgcttcttgaagctc

SEQ ID NO: 3110543 - DNA, 25 bp, Homo sapien
ggggacctccccctcaatgactgcc

SEQ ID NO: 3110544 - DNA, 25 bp, Homo sapien
agccctgcgcgaagccccagccctg

SEQ ID NO: 3110545 - DNA, 25 bp, Homo sapien
tgcccagcagccctgcgcgaagccc

SEQ ID NO: 3110546 - DNA, 25 bp, Homo sapien
ctggctgcacttcccgagatcccca

SEQ ID NO: 3110547 - DNA, 25 bp, Homo sapien
accagggtcaggccagtcaccacga

SEQ ID NO: 3110548 - DNA, 25 bp, Homo sapien
gccgagctgcacaccagggtcaggc

SEQ ID NO: 3110549 - DNA, 25 bp, Homo sapien
ccggggccgagctgcacaccagggt

SEQ ID NO: 3110550 - DNA, 25 bp, Homo sapien
cagggtcaggccagtcaccacgacg

SEQ ID NO: 3110551 - DNA, 25 bp, Homo sapien
gacagcaggtgagggccccaccccc

SEQ ID NO: 3110552 - DNA, 25 bp, Homo sapien
caggtgagggccccacccccaccag

SEQ ID NO: 3110553 - DNA, 25 bp, Homo sapien
cagcaggtgagggccccacccccac

SEQ ID NO: 3110554 - DNA, 25 bp, Homo sapien
gcaggtgagggccccacccccacca

SEQ ID NO: 3110555 - DNA, 25 bp, Homo sapien
ctggggagcggcaagacagctggag

SEQ ID NO: 3110556 - DNA, 25 bp, Homo sapien
caagacagctggagtgaacgggcgg

SEQ ID NO: 3110557 - DNA, 25 bp, Homo sapien
agacagctggagtgaacgggcggcc

SEQ ID NO: 3110558 - DNA, 25 bp, Homo sapien
agctggagtgaacgggcggccaccc

SEQ ID NO: 3110559 - DNA, 25 bp, Homo sapien
ccagcagggcctccttgtactttcg

SEQ ID NO: 3110560 - DNA, 25 bp, Homo sapien
agcagggcctccttgtactttcgca

SEQ ID NO: 3110561 - DNA, 25 bp, Homo sapien
gcctccttgtactttcgcaggctct

SEQ ID NO: 3110562 - DNA, 25 bp, Homo sapien
cagggcctccttgtactttcgcagg

SEQ ID NO: 3110563 - DNA, 25 bp, Homo sapien
ctcaagcttagcctgggtcgggaca

SEQ ID NO: 3110564 - DNA, 25 bp, Homo sapien
gctcaagcttagcctgggtcgggac

SEQ ID NO: 3110565 - DNA, 25 bp, Homo sapien
tcaagcttagcctgggtcgggacac

SEQ ID NO: 3110566 - DNA, 25 bp, Homo sapien
ctgcagccggagctccaaaagggct

SEQ ID NO: 3110567 - DNA, 25 bp, Homo sapien
tctaagacaaaatgggaactgcagc

SEQ ID NO: 3110568 - DNA, 25 bp, Homo sapien
aacggaggcgcacttctgagcagga

SEQ ID NO: 3110569 - DNA, 25 bp, Homo sapien
ttggacctggatccccaacggaggc

SEQ ID NO: 3110570 - DNA, 25 bp, Homo sapien
ctccccctccacgatggaggaggca

SEQ ID NO: 3110571 - DNA, 25 bp, Homo sapien
tccccctccacgatggaggaggcag

SEQ ID NO: 3110572 - DNA, 25 bp, Homo sapien
ccccctccacgatggaggaggcagc

SEQ ID NO: 3110573 - DNA, 25 bp, Homo sapien
cccctccacgatggaggaggcagca

SEQ ID NO: 3110574 - DNA, 25 bp, Homo sapien
ggcccgcaatccgtgccgggcgtgg

SEQ ID NO: 3110575 - DNA, 25 bp, Homo sapien
gccatgaaagaagctccggaccgct

SEQ ID NO: 3110576 - DNA, 25 bp, Homo sapien
atagccgtaggcgccgggatcctag

SEQ ID NO: 3110577 - DNA, 25 bp, Homo sapien
tccgcgccgcgcgaggatagccgta

SEQ ID NO: 3110578 - DNA, 25 bp, Homo sapien
ttcggccgcgcggttcaggatccct

SEQ ID NO: 3110579 - DNA, 25 bp, Homo sapien
gggttcggccgcgcggttcaggatc

SEQ ID NO: 3110580 - DNA, 25 bp, Homo sapien
gttcggccgcgcggttcaggatccc

SEQ ID NO: 3110581 - DNA, 25 bp, Homo sapien
gagggttcggccgcgcggttcagga

SEQ ID NO: 3110582 - DNA, 25 bp, Homo sapien
atgacgaacgtcgtcggccgccccg

SEQ ID NO: 3110583 - DNA, 25 bp, Homo sapien
taaatgacgaacgtcgtcggccgcc

SEQ ID NO: 3110584 - DNA, 25 bp, Homo sapien
tgacgaacgtcgtcggccgccccgc

SEQ ID NO: 3110585 - DNA, 25 bp, Homo sapien
ttccggggtcacgagacttccgctc

SEQ ID NO: 3110586 - DNA, 25 bp, Homo sapien
tccggggtcacgagacttccgctca

SEQ ID NO: 3110587 - DNA, 25 bp, Homo sapien
ccggggtcacgagacttccgctcac

SEQ ID NO: 3110588 - DNA, 25 bp, Homo sapien
gtggccgggggcacgccgtcgccat

SEQ ID NO: 3110589 - DNA, 25 bp, Homo sapien
cagcacttgttaggactgtggactc

SEQ ID NO: 3110590 - DNA, 25 bp, Homo sapien
tgtggactcgttaacgtggacgcct

SEQ ID NO: 3110591 - DNA, 25 bp, Homo sapien
tgttgaagtatcaggaacggccgca

SEQ ID NO: 3110592 - DNA, 25 bp, Homo sapien
tgagacagaattcgtgcgcagcgcg

SEQ ID NO: 3110593 - DNA, 25 bp, Homo sapien
cctgtgttctggatttgctgggctg

SEQ ID NO: 3110594 - DNA, 25 bp, Homo sapien
aagtctcttcttgcaattgtgtccc

SEQ ID NO: 3110595 - DNA, 25 bp, Homo sapien
aatctggacagaggccgtgctgtgc

SEQ ID NO: 3110596 - DNA, 25 bp, Homo sapien
tctgcgcttggtgccacccaggcgt

SEQ ID NO: 3110597 - DNA, 25 bp, Homo sapien
tgtagtgaggtatggttggttctgg

SEQ ID NO: 3110598 - DNA, 25 bp, Homo sapien
tagtgaggtatggttggttctggga

SEQ ID NO: 3110599 - DNA, 25 bp, Homo sapien
gtagtgaggtatggttggttctggg

SEQ ID NO: 3110600 - DNA, 25 bp, Homo sapien
ctgtagtgaggtatggttggttctg

SEQ ID NO: 3110601 - DNA, 25 bp, Homo sapien
tgccaatttttatgagtcagtgcct

SEQ ID NO: 3110602 - DNA, 25 bp, Homo sapien
aattcgcttcaataacgtgtataga

SEQ ID NO: 3110603 - DNA, 25 bp, Homo sapien
aagcatcatcatgaactcttagatg

SEQ ID NO: 3110604 - DNA, 25 bp, Homo sapien
taggctacatgatcacagacaagct

SEQ ID NO: 3110605 - DNA, 25 bp, Homo sapien
gaaagaaatcgtaggtcaggcgcag

SEQ ID NO: 3110606 - DNA, 25 bp, Homo sapien
gaatgtcctgtcaatctgagagcca

SEQ ID NO: 3110607 - DNA, 25 bp, Homo sapien
taaataaggatagggcacaggagac

SEQ ID NO: 3110608 - DNA, 25 bp, Homo sapien
ccaacagggcgggtaaatgcacaag

SEQ ID NO: 3110609 - DNA, 25 bp, Homo sapien
gacaaaagcttctataaatctgaat

SEQ ID NO: 3110610 - DNA, 25 bp, Homo sapien
aagacaaaagcttctataaatctga

SEQ ID NO: 3110611 - DNA, 25 bp, Homo sapien
caaaagcttctataaatctgaatat

SEQ ID NO: 3110612 - DNA, 25 bp, Homo sapien
aaagacaaaagcttctataaatctg

SEQ ID NO: 3110613 - DNA, 25 bp, Homo sapien
gcacccttcaagaggggaccagaca

SEQ ID NO: 3110614 - DNA, 25 bp, Homo sapien
cagcacccttcaagaggggaccaga

SEQ ID NO: 3110615 - DNA, 25 bp, Homo sapien
gaggactggcagcacccttcaagag

SEQ ID NO: 3110616 - DNA, 25 bp, Homo sapien
ggactggcagcacccttcaagaggg

SEQ ID NO: 3110617 - DNA, 25 bp, Homo sapien
ctggaagggccaagattagtcatcc

SEQ ID NO: 3110618 - DNA, 25 bp, Homo sapien
gcttctggaagggccaagattagtc

SEQ ID NO: 3110619 - DNA, 25 bp, Homo sapien
ttctggaagggccaagattagtcat

SEQ ID NO: 3110620 - DNA, 25 bp, Homo sapien
tgggcttctggaagggccaagatta

SEQ ID NO: 3110621 - DNA, 25 bp, Homo sapien
gcacaggcacaagggtcaacaggtg

SEQ ID NO: 3110622 - DNA, 25 bp, Homo sapien
gctcccgggcaaaggtgtcctccca

SEQ ID NO: 3110623 - DNA, 25 bp, Homo sapien
tccgcacgcggatttgctggtctgt

SEQ ID NO: 3110624 - DNA, 25 bp, Homo sapien
aaccagggagcaagaggagacgcct

SEQ ID NO: 3110625 - DNA, 25 bp, Homo sapien
aacaaatccatcattggccgcacag

SEQ ID NO: 3110626 - DNA, 25 bp, Homo sapien
aataactcggtacaaaacaggtctg

SEQ ID NO: 3110627 - DNA, 25 bp, Homo sapien
cagcgccacggtttctagtcatgcc

SEQ ID NO: 3110628 - DNA, 25 bp, Homo sapien
tctagtcatgccacctctgtttacg

SEQ ID NO: 3110629 - DNA, 25 bp, Homo sapien
ttctagtcatgccacctctgtttac

SEQ ID NO: 3110630 - DNA, 25 bp, Homo sapien
cctccagcgccacggtttctagtca

SEQ ID NO: 3110631 - DNA, 25 bp, Homo sapien
tgtgcgtcaatctgtgacgtgacaa

SEQ ID NO: 3110632 - DNA, 25 bp, Homo sapien
cgtcaatctgtgacgtgacaagctg

SEQ ID NO: 3110633 - DNA, 25 bp, Homo sapien
ggcctccgctgtgcgtcaatctgtg

SEQ ID NO: 3110634 - DNA, 25 bp, Homo sapien
cgctgtgcgtcaatctgtgacgtga

SEQ ID NO: 3110635 - DNA, 25 bp, Homo sapien
tgaatcttccggaaggagctgaagg

SEQ ID NO: 3110636 - DNA, 25 bp, Homo sapien
agtgaatcttccggaaggagctgaa

SEQ ID NO: 3110637 - DNA, 25 bp, Homo sapien
gaatcttccggaaggagctgaagga

SEQ ID NO: 3110638 - DNA, 25 bp, Homo sapien
agaagtgaatcttccggaaggagct

SEQ ID NO: 3110639 - DNA, 25 bp, Homo sapien
aagccccacagtcagcgtgggtcca

SEQ ID NO: 3110640 - DNA, 25 bp, Homo sapien
acagtcagcgtgggtccacccccag

SEQ ID NO: 3110641 - DNA, 25 bp, Homo sapien
agtcagcgtgggtccacccccagac

SEQ ID NO: 3110642 - DNA, 25 bp, Homo sapien
acaagccccacagtcagcgtgggtc

SEQ ID NO: 3110643 - DNA, 25 bp, Homo sapien
gaccagagcgatcatagtgcacagc

SEQ ID NO: 3110644 - DNA, 25 bp, Homo sapien
tgttcctaagctgcgaccagagcga

SEQ ID NO: 3110645 - DNA, 25 bp, Homo sapien
aaagtgcacgtctgctgttcctaag

SEQ ID NO: 3110646 - DNA, 25 bp, Homo sapien
gagggacgccgttgtactgcttcat

SEQ ID NO: 3110647 - DNA, 25 bp, Homo sapien
tgcagagagcagttgtcagaaaagc

SEQ ID NO: 3110648 - DNA, 25 bp, Homo sapien
gagcagttgtcagaaaagcaacaaa

SEQ ID NO: 3110649 - DNA, 25 bp, Homo sapien
caacaaaactgcgttccttctggtg

SEQ ID NO: 3110650 - DNA, 25 bp, Homo sapien
aaagcaacaaaactgcgttccttct

SEQ ID NO: 3110651 - DNA, 25 bp, Homo sapien
tggaagcgtgagttgctttgggggt

SEQ ID NO: 3110652 - DNA, 25 bp, Homo sapien
ctggaagcgtgagttgctttggggg

SEQ ID NO: 3110653 - DNA, 25 bp, Homo sapien
ggaagcgtgagttgctttgggggtg

SEQ ID NO: 3110654 - DNA, 25 bp, Homo sapien
gaagcgtgagttgctttgggggtgg

SEQ ID NO: 3110655 - DNA, 25 bp, Homo sapien
acacagcgggaactggagttcacca

SEQ ID NO: 3110656 - DNA, 25 bp, Homo sapien
ggcacacagcgggaactggagttca

SEQ ID NO: 3110657 - DNA, 25 bp, Homo sapien
tcctactcaagcctgcggcaaagtc

SEQ ID NO: 3110658 - DNA, 25 bp, Homo sapien
gaagtcaagcgctgtcatggaaact

SEQ ID NO: 3110659 - DNA, 25 bp, Homo sapien
tccaaaatccagattggacaccagc

SEQ ID NO: 3110660 - DNA, 25 bp, Homo sapien
tgctgccacttgtcgggaagttgtt

SEQ ID NO: 3110661 - DNA, 25 bp, Homo sapien
ctgaatatcggcgtctgagactcca

SEQ ID NO: 3110662 - DNA, 25 bp, Homo sapien
accgccgaagccactgtcgaaaaga

SEQ ID NO: 3110663 - DNA, 25 bp, Homo sapien
caacaagagcagatctgtgagtctc

SEQ ID NO: 3110664 - DNA, 25 bp, Homo sapien
tttcctgaccctcacggctactccg

SEQ ID NO: 3110665 - DNA, 25 bp, Homo sapien
aaaaaaccgcaacaagagcagatct

SEQ ID NO: 3110666 - DNA, 25 bp, Homo sapien
tgagtctcagtccagggctttcctg

SEQ ID NO: 3110667 - DNA, 25 bp, Homo sapien
cggccgaaacggggccgccagcgct

SEQ ID NO: 3110668 - DNA, 25 bp, Homo sapien
gccgaaacggggccgccagcgctcc

SEQ ID NO: 3110669 - DNA, 25 bp, Homo sapien
gaaacggggccgccagcgctccctc

SEQ ID NO: 3110670 - DNA, 25 bp, Homo sapien
cgaaacggggccgccagcgctccct

SEQ ID NO: 3110671 - DNA, 25 bp, Homo sapien
cctgctgtagggcgccggtcggttc

SEQ ID NO: 3110672 - DNA, 25 bp, Homo sapien
tgggcccgccgcctcgattcactcg

SEQ ID NO: 3110673 - DNA, 25 bp, Homo sapien
gatggccggccggttccggatgggc

SEQ ID NO: 3110674 - DNA, 25 bp, Homo sapien
cctcgattcactcgcgcggcggcct

SEQ ID NO: 3110675 - DNA, 25 bp, Homo sapien
cagtttaatgatgtcgtccagagac

SEQ ID NO: 3110676 - DNA, 25 bp, Homo sapien
ccacggcctcggagcggctgctgat

SEQ ID NO: 3110677 - DNA, 25 bp, Homo sapien
tcggcgggcgctgttgagggagtcg

SEQ ID NO: 3110678 - DNA, 25 bp, Homo sapien
gccgcgactgtggtcgtttttatac

SEQ ID NO: 3110679 - DNA, 25 bp, Homo sapien
tgattggccgctggcggacggctgc

SEQ ID NO: 3110680 - DNA, 25 bp, Homo sapien
tgggccagatgtgggtggtgaatcc

SEQ ID NO: 3110681 - DNA, 25 bp, Homo sapien
gctgcatccgtgggccagatgtggg

SEQ ID NO: 3110682 - DNA, 25 bp, Homo sapien
caagtgactgcagtggtgggtccac

SEQ ID NO: 3110683 - DNA, 25 bp, Homo sapien
catccgtgggccagatgtgggtggt

SEQ ID NO: 3110684 - DNA, 25 bp, Homo sapien
agcttgaaggctgatgtcacctgcc

SEQ ID NO: 3110685 - DNA, 25 bp, Homo sapien
ccaagagaagacatgaccaggacct

SEQ ID NO: 3110686 - DNA, 25 bp, Homo sapien
tgaagaacctggaggccgacgtgcg

SEQ ID NO: 3110687 - DNA, 25 bp, Homo sapien
cccagaaacaagtgccagggctcca

SEQ ID NO: 3110688 - DNA, 25 bp, Homo sapien
aacctgcagaggtgcgagcggctcc

SEQ ID NO: 3110689 - DNA, 25 bp, Homo sapien
aggctgtgtgcgtccaggacgtcgc

SEQ ID NO: 3110690 - DNA, 25 bp, Homo sapien
tgtgtgcgtccaggacgtcgcccca

SEQ ID NO: 3110691 - DNA, 25 bp, Homo sapien
tgtgcgtccaggacgtcgccccaaa

SEQ ID NO: 3110692 - DNA, 25 bp, Homo sapien
gggaccccgcagtccagggttctga

SEQ ID NO: 3110693 - DNA, 25 bp, Homo sapien
tccccaactcgagagccaaatctgt

SEQ ID NO: 3110694 - DNA, 25 bp, Homo sapien
gagatgggtaggttctccctccgcc

SEQ ID NO: 3110695 - DNA, 25 bp, Homo sapien
tgtccagcaccaatctgtctatggg

SEQ ID NO: 3110696 - DNA, 25 bp, Homo sapien
taagcctcattttgaatgcggcgag

SEQ ID NO: 3110697 - DNA, 25 bp, Homo sapien
gtaagaacctcttcggcctctgggc

SEQ ID NO: 3110698 - DNA, 25 bp, Homo sapien
ttattctagcatcgcctgctacagg

SEQ ID NO: 3110699 - DNA, 25 bp, Homo sapien
caggcaatctatggcctccctagac

SEQ ID NO: 3110700 - DNA, 25 bp, Homo sapien
gcagggccaagagggtctccttgct

SEQ ID NO: 3110701 - DNA, 25 bp, Homo sapien
tgctgagtggttccctggtccttcc

SEQ ID NO: 3110702 - DNA, 25 bp, Homo sapien
tccttgctgagtggttccctggtcc

SEQ ID NO: 3110703 - DNA, 25 bp, Homo sapien
agagggtctccttgctgagtggttc

SEQ ID NO: 3110704 - DNA, 25 bp, Homo sapien
ccaaagagatttccgtcagccatgt

SEQ ID NO: 3110705 - DNA, 25 bp, Homo sapien
caaaccaggcaccttgtaggcaggc

SEQ ID NO: 3110706 - DNA, 25 bp, Homo sapien
tccataaggagagtggcgaagctgc

SEQ ID NO: 3110707 - DNA, 25 bp, Homo sapien
gcagagtcctatgtccaaacgcaga

SEQ ID NO: 3110708 - DNA, 25 bp, Homo sapien
ttcttctggtttcgcgcctcatact

SEQ ID NO: 3110709 - DNA, 25 bp, Homo sapien
ttctggtttcgcgcctcatactcca

SEQ ID NO: 3110710 - DNA, 25 bp, Homo sapien
ctggtttcgcgcctcatactccaac

SEQ ID NO: 3110711 - DNA, 25 bp, Homo sapien
ccttcttctggtttcgcgcctcata

SEQ ID NO: 3110712 - DNA, 25 bp, Homo sapien
tgttggtgatgatccgctggacgat

SEQ ID NO: 3110713 - DNA, 25 bp, Homo sapien
tgatccgctggacgatgaggtctgt

SEQ ID NO: 3110714 - DNA, 25 bp, Homo sapien
aatctgacggaagatgccccttctc

SEQ ID NO: 3110715 - DNA, 25 bp, Homo sapien
ctgccactgtcaatctgacggaaga

SEQ ID NO: 3110716 - DNA, 25 bp, Homo sapien
ataatttctgtcttgccgtgacaca

SEQ ID NO: 3110717 - DNA, 25 bp, Homo sapien
ctgtcttgccgtgacacaccaggtc

SEQ ID NO: 3110718 - DNA, 25 bp, Homo sapien
aatttctgtcttgccgtgacacacc

SEQ ID NO: 3110719 - DNA, 25 bp, Homo sapien
ttctgtcttgccgtgacacaccagg

SEQ ID NO: 3110720 - DNA, 25 bp, Homo sapien
ccctgccctttcctcagcccaggta

SEQ ID NO: 3110721 - DNA, 25 bp, Homo sapien
tgaccctgccctttcctcagcccag

SEQ ID NO: 3110722 - DNA, 25 bp, Homo sapien
cctgccctttcctcagcccaggtac

SEQ ID NO: 3110723 - DNA, 25 bp, Homo sapien
accctgccctttcctcagcccaggt

SEQ ID NO: 3110724 - DNA, 25 bp, Homo sapien
agcctgcattcccagcccatgcagg

SEQ ID NO: 3110725 - DNA, 25 bp, Homo sapien
ctgggccccgcctaggagcccacag

SEQ ID NO: 3110726 - DNA, 25 bp, Homo sapien
aacagagggaacgaggtgagcccat

SEQ ID NO: 3110727 - DNA, 25 bp, Homo sapien
aggaacagaggtgaacagagggaac

SEQ ID NO: 3110728 - DNA, 25 bp, Homo sapien
tgctgtgaccgcgtacggggctcca

SEQ ID NO: 3110729 - DNA, 25 bp, Homo sapien
aggagctctgctgtgaccgcgtacg

SEQ ID NO: 3110730 - DNA, 25 bp, Homo sapien
ttaggagctctgctgtgaccgcgta

SEQ ID NO: 3110731 - DNA, 25 bp, Homo sapien
gcgtacggggctccaatcaccactt

SEQ ID NO: 3110732 - DNA, 25 bp, Homo sapien
gcacgctcagagtccgttcatgcag

SEQ ID NO: 3110733 - DNA, 25 bp, Homo sapien
cagattcatgatggggtagttcttc

SEQ ID NO: 3110734 - DNA, 25 bp, Homo sapien
ggccagcacgctcagagtccgttca

SEQ ID NO: 3110735 - DNA, 25 bp, Homo sapien
cagcacgctcagagtccgttcatgc

SEQ ID NO: 3110736 - DNA, 25 bp, Homo sapien
gcggctagctcagcccggagacttt

SEQ ID NO: 3110737 - DNA, 25 bp, Homo sapien
agagtgcggctagctcagcccggag

SEQ ID NO: 3110738 - DNA, 25 bp, Homo sapien
ctgcggccagagtgcggctagctca

SEQ ID NO: 3110739 - DNA, 25 bp, Homo sapien
agtgcggctagctcagcccggagac

SEQ ID NO: 3110740 - DNA, 25 bp, Homo sapien
tgtaagcccgcgatgatgtagggcc

SEQ ID NO: 3110741 - DNA, 25 bp, Homo sapien
gtcaaagtgtaagcccgcgatgatg

SEQ ID NO: 3110742 - DNA, 25 bp, Homo sapien
ctggtcaaagtgtaagcccgcgatg

SEQ ID NO: 3110743 - DNA, 25 bp, Homo sapien
gcccgcgatgatgtagggcctctct

SEQ ID NO: 3110744 - DNA, 25 bp, Homo sapien
agctccctgacagctcatgcccaag

SEQ ID NO: 3110745 - DNA, 25 bp, Homo sapien
tccccgccatcctccctgctgacag

SEQ ID NO: 3110746 - DNA, 25 bp, Homo sapien
ctgacagctcatgcccaagggcctc

SEQ ID NO: 3110747 - DNA, 25 bp, Homo sapien
tgcacccaggttaagaagcagtcgg

SEQ ID NO: 3110748 - DNA, 25 bp, Homo sapien
tggatgatcttctgagatgtctgca

SEQ ID NO: 3110749 - DNA, 25 bp, Homo sapien
aggcaccagccacatagatgactgt

SEQ ID NO: 3110750 - DNA, 25 bp, Homo sapien
tccaggggttccgcccaccagggca

SEQ ID NO: 3110751 - DNA, 25 bp, Homo sapien
aactggatgatcttctgagatgtct

SEQ ID NO: 3110752 - DNA, 25 bp, Homo sapien
ctggtaccctgagaccactgtctgg

SEQ ID NO: 3110753 - DNA, 25 bp, Homo sapien
taccctgagaccactgtctggtcac

SEQ ID NO: 3110754 - DNA, 25 bp, Homo sapien
tggtaccctgagaccactgtctggt

SEQ ID NO: 3110755 - DNA, 25 bp, Homo sapien
ggtaccctgagaccactgtctggtc

SEQ ID NO: 3110756 - DNA, 25 bp, Homo sapien
ccttctgaggaaagtatgtccccgg

SEQ ID NO: 3110757 - DNA, 25 bp, Homo sapien
tatgtccccggcgggtatcgggtga

SEQ ID NO: 3110758 - DNA, 25 bp, Homo sapien
tctgaggaaagtatgtccccggcgg

SEQ ID NO: 3110759 - DNA, 25 bp, Homo sapien
atgtccccggcgggtatcgggtgag

SEQ ID NO: 3110760 - DNA, 25 bp, Homo sapien
ggccaggccacttggttagaggcca

SEQ ID NO: 3110761 - DNA, 25 bp, Homo sapien
acaggcaaatccttgctcctccaag

SEQ ID NO: 3110762 - DNA, 25 bp, Homo sapien
gccacttggttagaggccacctgtc

SEQ ID NO: 3110763 - DNA, 25 bp, Homo sapien
tggctgccgtgaccggccagccggt

SEQ ID NO: 3110764 - DNA, 25 bp, Homo sapien
cttgccaaaactgtctgcatactcc

SEQ ID NO: 3110765 - DNA, 25 bp, Homo sapien
gccaaaactgtctgcatactcccgg

SEQ ID NO: 3110766 - DNA, 25 bp, Homo sapien
actgtctgcatactcccggtactca

SEQ ID NO: 3110767 - DNA, 25 bp, Homo sapien
aaaactgtctgcatactcccggtac

SEQ ID NO: 3110768 - DNA, 25 bp, Homo sapien
tggagacctcgacccaggggcctcg

SEQ ID NO: 3110769 - DNA, 25 bp, Homo sapien
tgccctcccggcgtggccaccccag

SEQ ID NO: 3110770 - DNA, 25 bp, Homo sapien
ctcggggattccgccgccgactcac

SEQ ID NO: 3110771 - DNA, 25 bp, Homo sapien
cgtggccaccccagaaccggctggg

SEQ ID NO: 3110772 - DNA, 25 bp, Homo sapien
cagcatgcggcccacgaggtctgtg

SEQ ID NO: 3110773 - DNA, 25 bp, Homo sapien
ctttggttaccagcagcatgcggcc

SEQ ID NO: 3110774 - DNA, 25 bp, Homo sapien
gacaccccttgcgtgcgcttgcatt

SEQ ID NO: 3110775 - DNA, 25 bp, Homo sapien
tggtggacaccccttgcgtgcgctt

SEQ ID NO: 3110776 - DNA, 25 bp, Homo sapien
tcataggtgtcccggccatctacag

SEQ ID NO: 3110777 - DNA, 25 bp, Homo sapien
acttcctcataggtgtcccggccat

SEQ ID NO: 3110778 - DNA, 25 bp, Homo sapien
ataggtgtcccggccatctacagtc

SEQ ID NO: 3110779 - DNA, 25 bp, Homo sapien
tcctcataggtgtcccggccatcta

SEQ ID NO: 3110780 - DNA, 25 bp, Homo sapien
ggggccccttgtgcttggcgatctc

SEQ ID NO: 3110781 - DNA, 25 bp, Homo sapien
ccagggtctctagtgtagtgacgta

SEQ ID NO: 3110782 - DNA, 25 bp, Homo sapien
accacctcgtccacccatttgatgg

SEQ ID NO: 3110783 - DNA, 25 bp, Homo sapien
tagggagccgctggcaccacctcgt

SEQ ID NO: 3110784 - DNA, 25 bp, Homo sapien
cctccagtaggaggccccttcccag

SEQ ID NO: 3110785 - DNA, 25 bp, Homo sapien
cagctgtagccacacaagagggccg

SEQ ID NO: 3110786 - DNA, 25 bp, Homo sapien
agcacccagctgtagccacacaaga

SEQ ID NO: 3110787 - DNA, 25 bp, Homo sapien
cacccagctgtagccacacaagagg

SEQ ID NO: 3110788 - DNA, 25 bp, Homo sapien
tggccaactgggtggctctcttccc

SEQ ID NO: 3110789 - DNA, 25 bp, Homo sapien
tagcccactagtgctggccaactgg

SEQ ID NO: 3110790 - DNA, 25 bp, Homo sapien
cctgcgagggtctcaggcaaaggca

SEQ ID NO: 3110791 - DNA, 25 bp, Homo sapien
cagagattccttctgacgagcaggt

SEQ ID NO: 3110792 - DNA, 25 bp, Homo sapien
agctggttggagtggccgtaatgca

SEQ ID NO: 3110793 - DNA, 25 bp, Homo sapien
cggtgtgcacgcctacgatgaggta

SEQ ID NO: 3110794 - DNA, 25 bp, Homo sapien
atgaggtagtcacccatggcccgtg

SEQ ID NO: 3110795 - DNA, 25 bp, Homo sapien
tggagtggccgtaatgcaccatgtc

SEQ ID NO: 3110796 - DNA, 25 bp, Homo sapien
ccctgccacagtgcgcggagcccgg

SEQ ID NO: 3110797 - DNA, 25 bp, Homo sapien
atctggcgggcccatgtacccactg

SEQ ID NO: 3110798 - DNA, 25 bp, Homo sapien
cggagcccggcagacatgctgggta

SEQ ID NO: 3110799 - DNA, 25 bp, Homo sapien
agacatgctgggtaaaatctggcgg

SEQ ID NO: 3110800 - DNA, 25 bp, Homo sapien
tacagggacgctcgcccggaggcca

SEQ ID NO: 3110801 - DNA, 25 bp, Homo sapien
caagctggttgctggtggttacgga

SEQ ID NO: 3110802 - DNA, 25 bp, Homo sapien
gctccagatctcagcgcggtggctg

SEQ ID NO: 3110803 - DNA, 25 bp, Homo sapien
accggagccgggcaagctggttgct

SEQ ID NO: 3110804 - DNA, 25 bp, Homo sapien
cggagaggtcggcgtgaccgggcgg

SEQ ID NO: 3110805 - DNA, 25 bp, Homo sapien
ggtcgcccacggcagggcgcggagc

SEQ ID NO: 3110806 - DNA, 25 bp, Homo sapien
gcagcccgaccctcccggcaggcga

SEQ ID NO: 3110807 - DNA, 25 bp, Homo sapien
cggggcctccgccagaggtagacgg

SEQ ID NO: 3110808 - DNA, 25 bp, Homo sapien
gacgaggacgccacccagaacgcgg

SEQ ID NO: 3110809 - DNA, 25 bp, Homo sapien
cggacgaggacgccacccagaacgc

SEQ ID NO: 3110810 - DNA, 25 bp, Homo sapien
acgaggacgccacccagaacgcggg

SEQ ID NO: 3110811 - DNA, 25 bp, Homo sapien
gccggacgaggacgccacccagaac

SEQ ID NO: 3110812 - DNA, 25 bp, Homo sapien
cagccccgcgcccgttccggatcat

SEQ ID NO: 3110813 - DNA, 25 bp, Homo sapien
agcggcggcgcggacagcctggcag

SEQ ID NO: 3110814 - DNA, 25 bp, Homo sapien
cagcctggcagctcccggcgactcc

SEQ ID NO: 3110815 - DNA, 25 bp, Homo sapien
ccccgccaggcgcacgctcagcggc

SEQ ID NO: 3110816 - DNA, 25 bp, Homo sapien
agctcccggcgactccgagcgccgc

SEQ ID NO: 3110817 - DNA, 25 bp, Homo sapien
gcgccgaccactcggggacaccgga

SEQ ID NO: 3110818 - DNA, 25 bp, Homo sapien
gagcccgcgccgaccactcggggac

SEQ ID NO: 3110819 - DNA, 25 bp, Homo sapien
gccaggcggcagacctgagcccggg

SEQ ID NO: 3110820 - DNA, 25 bp, Homo sapien
aagccacgaccgagctgccaggcgg

SEQ ID NO: 3110821 - DNA, 25 bp, Homo sapien
tagaaatacggtgaggccctgagac

SEQ ID NO: 3110822 - DNA, 25 bp, Homo sapien
taaaaaggtctgcatagagccgagg

SEQ ID NO: 3110823 - DNA, 25 bp, Homo sapien
gagaggattctataaagttcacact

SEQ ID NO: 3110824 - DNA, 25 bp, Homo sapien
cactttttcattaagtagtagtaga

SEQ ID NO: 3110825 - DNA, 25 bp, Homo sapien
tggccaggccgtatcagggtacaac

SEQ ID NO: 3110826 - DNA, 25 bp, Homo sapien
ctcttgacacagaggccggatgggc

SEQ ID NO: 3110827 - DNA, 25 bp, Homo sapien
gccaactgttcttcatcgagcacgt

SEQ ID NO: 3110828 - DNA, 25 bp, Homo sapien
tccgttctcacagaaaggtgcggct

SEQ ID NO: 3110829 - DNA, 25 bp, Homo sapien
tttgtgcgttttgtgcagcccctgc

SEQ ID NO: 3110830 - DNA, 25 bp, Homo sapien
tcctttttgtgcgttttgtgcagcc

SEQ ID NO: 3110831 - DNA, 25 bp, Homo sapien
ttttgtgcgttttgtgcagcccctg

SEQ ID NO: 3110832 - DNA, 25 bp, Homo sapien
ctttttgtgcgttttgtgcagcccc

SEQ ID NO: 3110833 - DNA, 25 bp, Homo sapien
ctaggatgggggccgagctaagcgg

SEQ ID NO: 3110834 - DNA, 25 bp, Homo sapien
ggatgggggccgagctaagcggtgc

SEQ ID NO: 3110835 - DNA, 25 bp, Homo sapien
gatgggggccgagctaagcggtgca

SEQ ID NO: 3110836 - DNA, 25 bp, Homo sapien
aggatgggggccgagctaagcggtg

SEQ ID NO: 3110837 - DNA, 25 bp, Homo sapien
gagtcgccagtgagaaaatgggatc

SEQ ID NO: 3110838 - DNA, 25 bp, Homo sapien
acagcgacttccgactgtggctgcc

SEQ ID NO: 3110839 - DNA, 25 bp, Homo sapien
cttctgcacagcgacttccgactgt

SEQ ID NO: 3110840 - DNA, 25 bp, Homo sapien
gggagtcgccagtgagaaaatggga

SEQ ID NO: 3110841 - DNA, 25 bp, Homo sapien
tccctcccgtgtcaactgcggcggg

SEQ ID NO: 3110842 - DNA, 25 bp, Homo sapien
cccagctcgggaaagctgtctgcgg

SEQ ID NO: 3110843 - DNA, 25 bp, Homo sapien
ggctctggttggcggcagcttcatt

SEQ ID NO: 3110844 - DNA, 25 bp, Homo sapien
ggaaagctgtctgcggtccctgcct

SEQ ID NO: 3110845 - DNA, 25 bp, Homo sapien
aggcgtggcctacagacgaccccgt

SEQ ID NO: 3110846 - DNA, 25 bp, Homo sapien
gactagggaggcgtggcctacagac

SEQ ID NO: 3110847 - DNA, 25 bp, Homo sapien
gacgaccccgtgaagaaagcatgtg

SEQ ID NO: 3110848 - DNA, 25 bp, Homo sapien
cttccacttgtaccgctggggcagg

SEQ ID NO: 3110849 - DNA, 25 bp, Homo sapien
cctttgattaaaagaagttattgat

SEQ ID NO: 3110850 - DNA, 25 bp, Homo sapien
aagtgccaggcccagaaggtgaagg

SEQ ID NO: 3110851 - DNA, 25 bp, Homo sapien
gaagttattgatttcccctataaga

SEQ ID NO: 3110852 - DNA, 25 bp, Homo sapien
ggtgaagggatccttaatttcttga

SEQ ID NO: 3110853 - DNA, 25 bp, Homo sapien
caggcatctcggagagctccacggg

SEQ ID NO: 3110854 - DNA, 25 bp, Homo sapien
ttcccaccaggcatctcggagagct

SEQ ID NO: 3110855 - DNA, 25 bp, Homo sapien
tgctcgtcccctccagatgcttccc

SEQ ID NO: 3110856 - DNA, 25 bp, Homo sapien
agatgcttcccaccaggcatctcgg

SEQ ID NO: 3110857 - DNA, 25 bp, Homo sapien
aaccaccgaggtcaggccctctgga

SEQ ID NO: 3110858 - DNA, 25 bp, Homo sapien
tcagctcacgagagaagacagacaa

SEQ ID NO: 3110859 - DNA, 25 bp, Homo sapien
tggagaccaccacgcttcagtcatg

SEQ ID NO: 3110860 - DNA, 25 bp, Homo sapien
actgcaaacacctcagagcttcctc

SEQ ID NO: 3110861 - DNA, 25 bp, Homo sapien
cagggcagcccagtcatccttcggg

SEQ ID NO: 3110862 - DNA, 25 bp, Homo sapien
ggagccgcatgacgtcatcacactt

SEQ ID NO: 3110863 - DNA, 25 bp, Homo sapien
atcacacttcccatgtagcttcagg

SEQ ID NO: 3110864 - DNA, 25 bp, Homo sapien
tataggcggggatctccaagcccag

SEQ ID NO: 3110865 - DNA, 25 bp, Homo sapien
aggacagggaaagccgagtgagagt

SEQ ID NO: 3110866 - DNA, 25 bp, Homo sapien
ggaaagccgagtgagagtaacagca

SEQ ID NO: 3110867 - DNA, 25 bp, Homo sapien
cagggaaagccgagtgagagtaaca

SEQ ID NO: 3110868 - DNA, 25 bp, Homo sapien
agagtaacagcagcccaacccttcc

SEQ ID NO: 3110869 - DNA, 25 bp, Homo sapien
tcacgatgtaaagcttcggccgccg

SEQ ID NO: 3110870 - DNA, 25 bp, Homo sapien
gggcttggtcatgcaccagaggcgt

SEQ ID NO: 3110871 - DNA, 25 bp, Homo sapien
caggttcacgatgtaaagcttcggc

SEQ ID NO: 3110872 - DNA, 25 bp, Homo sapien
ccagaggcgtgggtacttctttaga

SEQ ID NO: 3110873 - DNA, 25 bp, Homo sapien
acacacaagggacaagtctgtacag

SEQ ID NO: 3110874 - DNA, 25 bp, Homo sapien
gcagagctggacaccctcgggcggg

SEQ ID NO: 3110875 - DNA, 25 bp, Homo sapien
tctgtacagtgctgggccgcagagc

SEQ ID NO: 3110876 - DNA, 25 bp, Homo sapien
gctggacaccctcgggcgggcaggg

SEQ ID NO: 3110877 - DNA, 25 bp, Homo sapien
tcgccgcttcccagttcagaggctg

SEQ ID NO: 3110878 - DNA, 25 bp, Homo sapien
tcggtcgccgcttcccagttcagag

SEQ ID NO: 3110879 - DNA, 25 bp, Homo sapien
gtcgccgcttcccagttcagaggct

SEQ ID NO: 3110880 - DNA, 25 bp, Homo sapien
cggtcgccgcttcccagttcagagg

SEQ ID NO: 3110881 - DNA, 25 bp, Homo sapien
ctgtggagggcagtgcgctccgtca

SEQ ID NO: 3110882 - DNA, 25 bp, Homo sapien
gcagtgcgctccgtcacatcgaaca

SEQ ID NO: 3110883 - DNA, 25 bp, Homo sapien
gtcacatcgaacacccgcacgtact

SEQ ID NO: 3110884 - DNA, 25 bp, Homo sapien
gagggcagtgcgctccgtcacatcg

SEQ ID NO: 3110885 - DNA, 25 bp, Homo sapien
ctgttgggaacgcaggaggtacaga

SEQ ID NO: 3110886 - DNA, 25 bp, Homo sapien
tgttgggaacgcaggaggtacagac

SEQ ID NO: 3110887 - DNA, 25 bp, Homo sapien
gcacagtgagtgggacccgcctgcc

SEQ ID NO: 3110888 - DNA, 25 bp, Homo sapien
ctagaggcaagagggcacagtgagt

SEQ ID NO: 3110889 - DNA, 25 bp, Homo sapien
agcccgtcacagttctgagacacca

SEQ ID NO: 3110890 - DNA, 25 bp, Homo sapien
gagctcggagatggccgtgcgcggc

SEQ ID NO: 3110891 - DNA, 25 bp, Homo sapien
gtggagcccgtcacagttctgagac

SEQ ID NO: 3110892 - DNA, 25 bp, Homo sapien
ctcaggtggagcccgtcacagttct

SEQ ID NO: 3110893 - DNA, 25 bp, Homo sapien
catgggagtcaactggcagacagag

SEQ ID NO: 3110894 - DNA, 25 bp, Homo sapien
gccacagcgaggctgttctgagccc

SEQ ID NO: 3110895 - DNA, 25 bp, Homo sapien
ctggaaggcagaacgggtggcaagg

SEQ ID NO: 3110896 - DNA, 25 bp, Homo sapien
caggaggatcaaacccgcggcctaa

SEQ ID NO: 3110897 - DNA, 25 bp, Homo sapien
ctgctcatgcagacgggtgatgctc

SEQ ID NO: 3110898 - DNA, 25 bp, Homo sapien
tgctcatgcagacgggtgatgctca

SEQ ID NO: 3110899 - DNA, 25 bp, Homo sapien
tctgctcatgcagacgggtgatgct

SEQ ID NO: 3110900 - DNA, 25 bp, Homo sapien
cttctgctcatgcagacgggtgatg

SEQ ID NO: 3110901 - DNA, 25 bp, Homo sapien
tctgaagcagtgtccacactccatt

SEQ ID NO: 3110902 - DNA, 25 bp, Homo sapien
ccccggtagtctgggatagacgctg

SEQ ID NO: 3110903 - DNA, 25 bp, Homo sapien
cacactccattagggccccggtagt

SEQ ID NO: 3110904 - DNA, 25 bp, Homo sapien
cctttctgaagcagtgtccacactc

SEQ ID NO: 3110905 - DNA, 25 bp, Homo sapien
ctggcaccgagcacaaagctgggct

SEQ ID NO: 3110906 - DNA, 25 bp, Homo sapien
gaaacggaaagccactgtcactcct

SEQ ID NO: 3110907 - DNA, 25 bp, Homo sapien
tgagcccatatggagtgtaccccaa

SEQ ID NO: 3110908 - DNA, 25 bp, Homo sapien
cactgtaggtactggcagaattccc

SEQ ID NO: 3110909 - DNA, 25 bp, Homo sapien
gagatgagcatctaacttcccaggt

SEQ ID NO: 3110910 - DNA, 25 bp, Homo sapien
tggaagttccataacaggtcacgtg

SEQ ID NO: 3110911 - DNA, 25 bp, Homo sapien
cagcccaggataacttgtcagtgaa

SEQ ID NO: 3110912 - DNA, 25 bp, Homo sapien
gtcacattcaagacgggaacctcaa

SEQ ID NO: 3110913 - DNA, 25 bp, Homo sapien
cctgtgtagacgaccaagtatttgg

SEQ ID NO: 3110914 - DNA, 25 bp, Homo sapien
tagacgaccaagtatttggcgttcc

SEQ ID NO: 3110915 - DNA, 25 bp, Homo sapien
attcccgcgcctgtgtagacgacca

SEQ ID NO: 3110916 - DNA, 25 bp, Homo sapien
agtatttggcgttccggacggcgct

SEQ ID NO: 3110917 - DNA, 25 bp, Homo sapien
accgcccgtcgccccagctgctccc

SEQ ID NO: 3110918 - DNA, 25 bp, Homo sapien
ggaccgcccgtcgccccagctgctc

SEQ ID NO: 3110919 - DNA, 25 bp, Homo sapien
ccgcccgtcgccccagctgctcccg

SEQ ID NO: 3110920 - DNA, 25 bp, Homo sapien
gaccgcccgtcgccccagctgctcc

SEQ ID NO: 3110921 - DNA, 25 bp, Homo sapien
cctcctgccgccgcttcaggccctc

SEQ ID NO: 3110922 - DNA, 25 bp, Homo sapien
gccgcttcaggccctcgcgccgccg

SEQ ID NO: 3110923 - DNA, 25 bp, Homo sapien
gcttcaggccctcgcgccgccggct

SEQ ID NO: 3110924 - DNA, 25 bp, Homo sapien
tgccgccgcttcaggccctcgcgcc

SEQ ID NO: 3110925 - DNA, 25 bp, Homo sapien
ccgccttcctcaggatgcgcgacac

SEQ ID NO: 3110926 - DNA, 25 bp, Homo sapien
caggtccgcgctctcggccagcagc

SEQ ID NO: 3110927 - DNA, 25 bp, Homo sapien
ggccctcctcggcgctgcgctccgc

SEQ ID NO: 3110928 - DNA, 25 bp, Homo sapien
gcgctctcggccagcagccggccct

SEQ ID NO: 3110929 - DNA, 25 bp, Homo sapien
tgcgggcaggcggacggtgagcggc

SEQ ID NO: 3110930 - DNA, 25 bp, Homo sapien
ctgcgggcaggcggacggtgagcgg

SEQ ID NO: 3110931 - DNA, 25 bp, Homo sapien
gcaggcggacggtgagcggcggcgc

SEQ ID NO: 3110932 - DNA, 25 bp, Homo sapien
cgggcaggcggacggtgagcggcgg

SEQ ID NO: 3110933 - DNA, 25 bp, Homo sapien
tttgcgctcggagcggctcagaccc

SEQ ID NO: 3110934 - DNA, 25 bp, Homo sapien
ctggcggaggcgctccctctgctgc

SEQ ID NO: 3110935 - DNA, 25 bp, Homo sapien
tccggacccgctccgccgctttgcg

SEQ ID NO: 3110936 - DNA, 25 bp, Homo sapien
gccgctttgcgctcggagcggctca

SEQ ID NO: 3110937 - DNA, 25 bp, Homo sapien
ttccgcttccgcctcacacggcagg

SEQ ID NO: 3110938 - DNA, 25 bp, Homo sapien
cgcttccgcctcacacggcaggccg

SEQ ID NO: 3110939 - DNA, 25 bp, Homo sapien
cgcctcacacggcaggccgcgctca

SEQ ID NO: 3110940 - DNA, 25 bp, Homo sapien
ttccgcctcacacggcaggccgcgc

SEQ ID NO: 3110941 - DNA, 25 bp, Homo sapien
cagcaggtatggtacacacccagga

SEQ ID NO: 3110942 - DNA, 25 bp, Homo sapien
tgcggctccgactttccagatgtgg

SEQ ID NO: 3110943 - DNA, 25 bp, Homo sapien
caagatcccagagcggaaacggtgc

SEQ ID NO: 3110944 - DNA, 25 bp, Homo sapien
gcattagtctctcagacacgccctg

SEQ ID NO: 3110945 - DNA, 25 bp, Homo sapien
ggccgggccctgatcaccagtcaga

SEQ ID NO: 3110946 - DNA, 25 bp, Homo sapien
ctgtccctgctgggtattcctctga

SEQ ID NO: 3110947 - DNA, 25 bp, Homo sapien
tcactctcctggtgagagctgacct

SEQ ID NO: 3110948 - DNA, 25 bp, Homo sapien
tattcctctgaaatctgagcgtcca

SEQ ID NO: 3110949 - DNA, 25 bp, Homo sapien
ctctcctggtgagagctgacctgtc

SEQ ID NO: 3110950 - DNA, 25 bp, Homo sapien
tctctgaacacctcgagcaaagaaa

SEQ ID NO: 3110951 - DNA, 25 bp, Homo sapien
gacttgtctctgaacacctcgagca

SEQ ID NO: 3110952 - DNA, 25 bp, Homo sapien
ttgtctctgaacacctcgagcaaag

SEQ ID NO: 3110953 - DNA, 25 bp, Homo sapien
aggacttgtctctgaacacctcgag

SEQ ID NO: 3110954 - DNA, 25 bp, Homo sapien
ggcagaggagtaagtcactttcggt

SEQ ID NO: 3110955 - DNA, 25 bp, Homo sapien
agggcagaggagtaagtcactttcg

SEQ ID NO: 3110956 - DNA, 25 bp, Homo sapien
gaggagtaagtcactttcggtacaa

SEQ ID NO: 3110957 - DNA, 25 bp, Homo sapien
cagaggagtaagtcactttcggtac

SEQ ID NO: 3110958 - DNA, 25 bp, Homo sapien
gtggtccacccatcagggccttcaa

SEQ ID NO: 3110959 - DNA, 25 bp, Homo sapien
aacactgggaccctcactgctcggg

SEQ ID NO: 3110960 - DNA, 25 bp, Homo sapien
tcagtgcaacgggtcaggcctgagt

SEQ ID NO: 3110961 - DNA, 25 bp, Homo sapien
aaattcgccatgtgcctagtggccc

SEQ ID NO: 3110962 - DNA, 25 bp, Homo sapien
tcctcatccgtcaggctggtgccat

SEQ ID NO: 3110963 - DNA, 25 bp, Homo sapien
tacgatcgggcatccgtcttggact

SEQ ID NO: 3110964 - DNA, 25 bp, Homo sapien
ttcatgctggcgttctctgaggcca

SEQ ID NO: 3110965 - DNA, 25 bp, Homo sapien
gactttactattgtgatgacgctgg

SEQ ID NO: 3110966 - DNA, 25 bp, Homo sapien
cttcaaggccttgtttcctttattg

SEQ ID NO: 3110967 - DNA, 25 bp, Homo sapien
acccgggggcacagcgagcaggcgc

SEQ ID NO: 3110968 - DNA, 25 bp, Homo sapien
aacccgggggcacagcgagcaggcg

SEQ ID NO: 3110969 - DNA, 25 bp, Homo sapien
cccgggggcacagcgagcaggcgct

SEQ ID NO: 3110970 - DNA, 25 bp, Homo sapien
gggaactgaaggctgttaggaaggc

SEQ ID NO: 3110971 - DNA, 25 bp, Homo sapien
actgaaggctgttaggaaggcaggc

SEQ ID NO: 3110972 - DNA, 25 bp, Homo sapien
ggctgttaggaaggcaggcgcaaga

SEQ ID NO: 3110973 - DNA, 25 bp, Homo sapien
tgaaggctgttaggaaggcaggcgc

SEQ ID NO: 3110974 - DNA, 25 bp, Homo sapien
ccctgagccggcctcggacaaagcc

SEQ ID NO: 3110975 - DNA, 25 bp, Homo sapien
ggcctcggacaaagccccctgctcc

SEQ ID NO: 3110976 - DNA, 25 bp, Homo sapien
ctgagccggcctcggacaaagcccc

SEQ ID NO: 3110977 - DNA, 25 bp, Homo sapien
tcccctgagccggcctcggacaaag

SEQ ID NO: 3110978 - DNA, 25 bp, Homo sapien
ctgggtgcacaggggccccacgggg

SEQ ID NO: 3110979 - DNA, 25 bp, Homo sapien
ctaagcacaatgacagtggtgactt

SEQ ID NO: 3110980 - DNA, 25 bp, Homo sapien
gctaagcacaatgacagtggtgact

SEQ ID NO: 3110981 - DNA, 25 bp, Homo sapien
taagcacaatgacagtggtgacttc

SEQ ID NO: 3110982 - DNA, 25 bp, Homo sapien
tgctaagcacaatgacagtggtgac

SEQ ID NO: 3110983 - DNA, 25 bp, Homo sapien
catggcctctgctccataagctctc

SEQ ID NO: 3110984 - DNA, 25 bp, Homo sapien
gaaactccccggcagtcatggcctc

SEQ ID NO: 3110985 - DNA, 25 bp, Homo sapien
gctgcaaagcccagcggccgaaact

SEQ ID NO: 3110986 - DNA, 25 bp, Homo sapien
ttagtttccactgatgcataagtga

SEQ ID NO: 3110987 - DNA, 25 bp, Homo sapien
cgggccgagcgcactgggaaggccg

SEQ ID NO: 3110988 - DNA, 25 bp, Homo sapien
cgggccggaccaggctcgggatccg

SEQ ID NO: 3110989 - DNA, 25 bp, Homo sapien
gggctcggaggactcgccgcctgcg

SEQ ID NO: 3110990 - DNA, 25 bp, Homo sapien
cgcggggcagggaccggcgcgaggg

SEQ ID NO: 3110991 - DNA, 25 bp, Homo sapien
agataaacgggggatcccgtgtctg

SEQ ID NO: 3110992 - DNA, 25 bp, Homo sapien
tccgcccgggggagacttcgctgct

SEQ ID NO: 3110993 - DNA, 25 bp, Homo sapien
cccgggggagacttcgctgcttgtt

SEQ ID NO: 3110994 - DNA, 25 bp, Homo sapien
gagacttcgctgcttgttggagatg

SEQ ID NO: 3110995 - DNA, 25 bp, Homo sapien
tgtcagagctgctggtgacaggagc

SEQ ID NO: 3110996 - DNA, 25 bp, Homo sapien
tccaggactgagaggtgtcagagct

SEQ ID NO: 3110997 - DNA, 25 bp, Homo sapien
gggctttccaggactgagaggtgtc

SEQ ID NO: 3110998 - DNA, 25 bp, Homo sapien
gtgacaggagcagggaaagcaccat

SEQ ID NO: 3110999 - DNA, 25 bp, Homo sapien
ggcgggccttgtctaatcagttgaa

SEQ ID NO: 3111000 - DNA, 25 bp, Homo sapien
tcagttgaaggcctccactattcca

SEQ ID NO: 3111001 - DNA, 25 bp, Homo sapien
ccttcacgctggacttgggatgcct

SEQ ID NO: 3111002 - DNA, 25 bp, Homo sapien
actgatagcaccctcccagggaggt

SEQ ID NO: 3111003 - DNA, 25 bp, Homo sapien
gggctcccgagctctagaggaaggt

SEQ ID NO: 3111004 - DNA, 25 bp, Homo sapien
gagtgggtgaagaccctccgggctc

SEQ ID NO: 3111005 - DNA, 25 bp, Homo sapien
gctcccgagctctagaggaaggtgg

SEQ ID NO: 3111006 - DNA, 25 bp, Homo sapien
gagtaggagtgggtgaagaccctcc

SEQ ID NO: 3111007 - DNA, 25 bp, Homo sapien
cagtgggaagtgatgtggcccctcc

SEQ ID NO: 3111008 - DNA, 25 bp, Homo sapien
cctgcgctgatcagagccacagaaa

SEQ ID NO: 3111009 - DNA, 25 bp, Homo sapien
gctgggaagcacttgcagaccacag

SEQ ID NO: 3111010 - DNA, 25 bp, Homo sapien
cagaccacagagatttccagtggga

SEQ ID NO: 3111011 - DNA, 25 bp, Homo sapien
ctgcgggggagcagcttggtgtggc

SEQ ID NO: 3111012 - DNA, 25 bp, Homo sapien
gggagcagcttggtgtggccagaag

SEQ ID NO: 3111013 - DNA, 25 bp, Homo sapien
gcgggggagcagcttggtgtggcca

SEQ ID NO: 3111014 - DNA, 25 bp, Homo sapien
cagcttggtgtggccagaaggcgac

SEQ ID NO: 3111015 - DNA, 25 bp, Homo sapien
agagcggtccctgcaggggagtcca

SEQ ID NO: 3111016 - DNA, 25 bp, Homo sapien
tccctgcaggggagtccagcttcac

SEQ ID NO: 3111017 - DNA, 25 bp, Homo sapien
cggtccctgcaggggagtccagctt

SEQ ID NO: 3111018 - DNA, 25 bp, Homo sapien
gagcggtccctgcaggggagtccag

SEQ ID NO: 3111019 - DNA, 25 bp, Homo sapien
tggtcttcttgatggcggctggtga

SEQ ID NO: 3111020 - DNA, 25 bp, Homo sapien
ctggtcagccatggactgcagctcc

SEQ ID NO: 3111021 - DNA, 25 bp, Homo sapien
ccaggatggtcttcttgatggcggc

SEQ ID NO: 3111022 - DNA, 25 bp, Homo sapien
ttgatggcggctggtgacacctgct

SEQ ID NO: 3111023 - DNA, 25 bp, Homo sapien
tctatggatgttccctcctcgcagg

SEQ ID NO: 3111024 - DNA, 25 bp, Homo sapien
ggtgtggcccctggctcaaatgaca

SEQ ID NO: 3111025 - DNA, 25 bp, Homo sapien
tgtgtcctgcgcaacactgggctgg

SEQ ID NO: 3111026 - DNA, 25 bp, Homo sapien
caaatgacactcctagctatgacaa

SEQ ID NO: 3111027 - DNA, 25 bp, Homo sapien
tgtgcggatgcaggaggcctccaca

SEQ ID NO: 3111028 - DNA, 25 bp, Homo sapien
caccaggagagctgacgttgtcctt

SEQ ID NO: 3111029 - DNA, 25 bp, Homo sapien
tccacagcgttgatgagcagggagc

SEQ ID NO: 3111030 - DNA, 25 bp, Homo sapien
aaggcatggatggtggccccaccag

SEQ ID NO: 3111031 - DNA, 25 bp, Homo sapien
tgggccccgaggcggactgccaggc

SEQ ID NO: 3111032 - DNA, 25 bp, Homo sapien
actgccaggcgccttggaagtccca

SEQ ID NO: 3111033 - DNA, 25 bp, Homo sapien
ggactgccaggcgccttggaagtcc

SEQ ID NO: 3111034 - DNA, 25 bp, Homo sapien
cctgggccccgaggcggactgccag

SEQ ID NO: 3111035 - DNA, 25 bp, Homo sapien
tcccacagccttggagccctccacc

SEQ ID NO: 3111036 - DNA, 25 bp, Homo sapien
ggacagatgtgcccggtggtcccgg

SEQ ID NO: 3111037 - DNA, 25 bp, Homo sapien
agggacagatgtgcccggtggtccc

SEQ ID NO: 3111038 - DNA, 25 bp, Homo sapien
cccacagccttggagccctccaccc

SEQ ID NO: 3111039 - DNA, 25 bp, Homo sapien
tgagccccgtgacggcatcaatcag

SEQ ID NO: 3111040 - DNA, 25 bp, Homo sapien
cccgtgacggcatcaatcaggtcct

SEQ ID NO: 3111041 - DNA, 25 bp, Homo sapien
ctccgtgcagaagcccacgctgctc

SEQ ID NO: 3111042 - DNA, 25 bp, Homo sapien
cactgagccccgtgacggcatcaat

SEQ ID NO: 3111043 - DNA, 25 bp, Homo sapien
gttggtcatgcagcggatgaccctg

SEQ ID NO: 3111044 - DNA, 25 bp, Homo sapien
ctcccgcaccacgactggagtgttg

SEQ ID NO: 3111045 - DNA, 25 bp, Homo sapien
cacgactggagtgttggtcatgcag

SEQ ID NO: 3111046 - DNA, 25 bp, Homo sapien
gggcgtgcgtgcctgtggcatacac

SEQ ID NO: 3111047 - DNA, 25 bp, Homo sapien
ctcaatggagctgatggtgacgccg

SEQ ID NO: 3111048 - DNA, 25 bp, Homo sapien
catcactgtgctgcaccgtctcctt

SEQ ID NO: 3111049 - DNA, 25 bp, Homo sapien
aatgtcggcgcctatttcatccagg

SEQ ID NO: 3111050 - DNA, 25 bp, Homo sapien
ggccgcgcaggacaccacaatgtgt

SEQ ID NO: 3111051 - DNA, 25 bp, Homo sapien
gtctggggagctagccattatcttg

SEQ ID NO: 3111052 - DNA, 25 bp, Homo sapien
gggagctagccattatcttgtgggc

SEQ ID NO: 3111053 - DNA, 25 bp, Homo sapien
tggggagctagccattatcttgtgg

SEQ ID NO: 3111054 - DNA, 25 bp, Homo sapien
tgtctggggagctagccattatctt

SEQ ID NO: 3111055 - DNA, 25 bp, Homo sapien
agccagctggccagcgccgatgaag

SEQ ID NO: 3111056 - DNA, 25 bp, Homo sapien
gctgtccggagacccctggcccaaa

SEQ ID NO: 3111057 - DNA, 25 bp, Homo sapien
aaagcccccacagatggcaccggct

SEQ ID NO: 3111058 - DNA, 25 bp, Homo sapien
gcccaaagcccccacagatggcacc

SEQ ID NO: 3111059 - DNA, 25 bp, Homo sapien
ccaaagcccccacagatggcaccgg

SEQ ID NO: 3111060 - DNA, 25 bp, Homo sapien
accggcaggatcgagagcaagttag

SEQ ID NO: 3111061 - DNA, 25 bp, Homo sapien
tgcgggacgagaccggcaggatcga

SEQ ID NO: 3111062 - DNA, 25 bp, Homo sapien
agaccggcaggatcgagagcaagtt

SEQ ID NO: 3111063 - DNA, 25 bp, Homo sapien
ggacgagaccggcaggatcgagagc

SEQ ID NO: 3111064 - DNA, 25 bp, Homo sapien
gctgtccggcccgttaactgcttcg

SEQ ID NO: 3111065 - DNA, 25 bp, Homo sapien
gtcagagcggcggtgcctggcctgc

SEQ ID NO: 3111066 - DNA, 25 bp, Homo sapien
tcccgcacccactggaggggtggag

SEQ ID NO: 3111067 - DNA, 25 bp, Homo sapien
gggcccccagtcagagcggcggtgc

SEQ ID NO: 3111068 - DNA, 25 bp, Homo sapien
tcccaccccgcccagaactgggcta

SEQ ID NO: 3111069 - DNA, 25 bp, Homo sapien
cggcgaccgccgcccaccattcccg

SEQ ID NO: 3111070 - DNA, 25 bp, Homo sapien
tgcggccgccacgcggcacccgcac

SEQ ID NO: 3111071 - DNA, 25 bp, Homo sapien
ggccgccacgcggcacccgcaccca

SEQ ID NO: 3111072 - DNA, 25 bp, Homo sapien
cggccgccacgcggcacccgcaccc

SEQ ID NO: 3111073 - DNA, 25 bp, Homo sapien
gcggccgccacgcggcacccgcacc

SEQ ID NO: 3111074 - DNA, 25 bp, Homo sapien
tcgcctctctcgcgccccgggatcc

SEQ ID NO: 3111075 - DNA, 25 bp, Homo sapien
cctgacccgcgctcctcctggtcgc

SEQ ID NO: 3111076 - DNA, 25 bp, Homo sapien
ccggcacgcggtcccctgacccgcg

SEQ ID NO: 3111077 - DNA, 25 bp, Homo sapien
ccccggatagacaccctctccggca

SEQ ID NO: 3111078 - DNA, 25 bp, Homo sapien
acgtaatgaccaccaccaacactgg

SEQ ID NO: 3111079 - DNA, 25 bp, Homo sapien
cccaccgtgaacacgtaatgaccac

SEQ ID NO: 3111080 - DNA, 25 bp, Homo sapien
taatgaccaccaccaacactgggag

SEQ ID NO: 3111081 - DNA, 25 bp, Homo sapien
caccgtgaacacgtaatgaccacca

SEQ ID NO: 3111082 - DNA, 25 bp, Homo sapien
gggatctgccattgaccccaaaaca

SEQ ID NO: 3111083 - DNA, 25 bp, Homo sapien
accccctctgagtaaaggatgtcgg

SEQ ID NO: 3111084 - DNA, 25 bp, Homo sapien
tatgccccctctgtatcgccctcag

SEQ ID NO: 3111085 - DNA, 25 bp, Homo sapien
aggccctgaacagctgactgccctc

SEQ ID NO: 3111086 - DNA, 25 bp, Homo sapien
gacccctcctcagcggccagtgagg

SEQ ID NO: 3111087 - DNA, 25 bp, Homo sapien
tcagcggccagtgaggccccttcct

SEQ ID NO: 3111088 - DNA, 25 bp, Homo sapien
gcgagacccctcctcagcggccagt

SEQ ID NO: 3111089 - DNA, 25 bp, Homo sapien
tgagcgagacccctcctcagcggcc

SEQ ID NO: 3111090 - DNA, 25 bp, Homo sapien
ggaccgccgtctaaaaggagcaaca

SEQ ID NO: 3111091 - DNA, 25 bp, Homo sapien
aaggagcaacagtgcgtctgtccat

SEQ ID NO: 3111092 - DNA, 25 bp, Homo sapien
ccgccgtctaaaaggagcaacagtg

SEQ ID NO: 3111093 - DNA, 25 bp, Homo sapien
tggggaccgccgtctaaaaggagca

SEQ ID NO: 3111094 - DNA, 25 bp, Homo sapien
gggaggaggtgagtgctgcgggcct

SEQ ID NO: 3111095 - DNA, 25 bp, Homo sapien
cagggcctctcgagacccccagatg

SEQ ID NO: 3111096 - DNA, 25 bp, Homo sapien
tctcgagacccccagatgggcgtgg

SEQ ID NO: 3111097 - DNA, 25 bp, Homo sapien
tgtgtccagggcctctcgagacccc

SEQ ID NO: 3111098 - DNA, 25 bp, Homo sapien
tccagaggcagggtacgtataaatg

SEQ ID NO: 3111099 - DNA, 25 bp, Homo sapien
gaagctgcttcgtcacagccaatgg

SEQ ID NO: 3111100 - DNA, 25 bp, Homo sapien
gcaactggacccttgagcagaggca

SEQ ID NO: 3111101 - DNA, 25 bp, Homo sapien
gcagaggcaagcagtacccagattc

SEQ ID NO: 3111102 - DNA, 25 bp, Homo sapien
ggtgcctcgcaaatgcttctagcct

SEQ ID NO: 3111103 - DNA, 25 bp, Homo sapien
actgtggtctccagacactaatgga

SEQ ID NO: 3111104 - DNA, 25 bp, Homo sapien
ggtactgggtgcctcgcaaatgctt

SEQ ID NO: 3111105 - DNA, 25 bp, Homo sapien
tctccagacactaatggaggtactg

SEQ ID NO: 3111106 - DNA, 25 bp, Homo sapien
tttcccttatgatgttccagtgacc

SEQ ID NO: 3111107 - DNA, 25 bp, Homo sapien
ccccagctgcaaaatgggtcacaac

SEQ ID NO: 3111108 - DNA, 25 bp, Homo sapien
ttatgatgttccagtgaccagcact

SEQ ID NO: 3111109 - DNA, 25 bp, Homo sapien
gtccccagctgcaaaatgggtcaca

SEQ ID NO: 3111110 - DNA, 25 bp, Homo sapien
gcctggagctggtggccagagagca

SEQ ID NO: 3111111 - DNA, 25 bp, Homo sapien
ctgagtttccctcgcagagcctgga

SEQ ID NO: 3111112 - DNA, 25 bp, Homo sapien
gcagaggtgggtgggctgccactgt

SEQ ID NO: 3111113 - DNA, 25 bp, Homo sapien
agtttccctcgcagagcctggagct

SEQ ID NO: 3111114 - DNA, 25 bp, Homo sapien
cgccgggcaaagtacagcggataca

SEQ ID NO: 3111115 - DNA, 25 bp, Homo sapien
cgggcaaagtacagcggatacagga

SEQ ID NO: 3111116 - DNA, 25 bp, Homo sapien
gggcaaagtacagcggatacaggac

SEQ ID NO: 3111117 - DNA, 25 bp, Homo sapien
tcccgccgggcaaagtacagcggat

SEQ ID NO: 3111118 - DNA, 25 bp, Homo sapien
cctcagtcctctgcggtagtggcag

SEQ ID NO: 3111119 - DNA, 25 bp, Homo sapien
gcccctcagtcctctgcggtagtgg

SEQ ID NO: 3111120 - DNA, 25 bp, Homo sapien
ctggccagccacgtttccagctcac

SEQ ID NO: 3111121 - DNA, 25 bp, Homo sapien
ccagctcacacagtcccccaaggcc

SEQ ID NO: 3111122 - DNA, 25 bp, Homo sapien
tcagagccccggaatagcagcttgc

SEQ ID NO: 3111123 - DNA, 25 bp, Homo sapien
aaatagacagccgtgatcagagccc

SEQ ID NO: 3111124 - DNA, 25 bp, Homo sapien
tctgctgtctatgtgaggcggctcc

SEQ ID NO: 3111125 - DNA, 25 bp, Homo sapien
cagtgacgacggtgacattgcagca

SEQ ID NO: 3111126 - DNA, 25 bp, Homo sapien
atggccgcgtggttcagagcctgca

SEQ ID NO: 3111127 - DNA, 25 bp, Homo sapien
gcatgggcttcaggatcctgctgtc

SEQ ID NO: 3111128 - DNA, 25 bp, Homo sapien
cccttctggatggccgcgtggttca

SEQ ID NO: 3111129 - DNA, 25 bp, Homo sapien
ctggatggccgcgtggttcagagcc

SEQ ID NO: 3111130 - DNA, 25 bp, Homo sapien
aagaggtgatttaagtccagaggag

SEQ ID NO: 3111131 - DNA, 25 bp, Homo sapien
aataacatgccattttgtatcaggg

SEQ ID NO: 3111132 - DNA, 25 bp, Homo sapien
tgcaaataacatgccattttgtatc

SEQ ID NO: 3111133 - DNA, 25 bp, Homo sapien
tggattctggtgttttggaggtact

SEQ ID NO: 3111134 - DNA, 25 bp, Homo sapien
acgacaaggctatgcacgtgcaccc

SEQ ID NO: 3111135 - DNA, 25 bp, Homo sapien
agagcttcatgtttttgccccagga

SEQ ID NO: 3111136 - DNA, 25 bp, Homo sapien
gcgcgccccgaaatacagtgtcaag

SEQ ID NO: 3111137 - DNA, 25 bp, Homo sapien
caacgtgtgcacctgtttaccggaa

SEQ ID NO: 3111138 - DNA, 25 bp, Homo sapien
tctggctaccccctcgttgtcagga

SEQ ID NO: 3111139 - DNA, 25 bp, Homo sapien
gctaccccctcgttgtcaggaagga

SEQ ID NO: 3111140 - DNA, 25 bp, Homo sapien
ctggggccctgtcccgaagagacgg

SEQ ID NO: 3111141 - DNA, 25 bp, Homo sapien
gtcccgaagagacgggagggcctgc

SEQ ID NO: 3111142 - DNA, 25 bp, Homo sapien
ccgttgctcagcatccccagcagct

SEQ ID NO: 3111143 - DNA, 25 bp, Homo sapien
ttgctcagcatccccagcagctcac

SEQ ID NO: 3111144 - DNA, 25 bp, Homo sapien
tagcttccgttgctcagcatcccca

SEQ ID NO: 3111145 - DNA, 25 bp, Homo sapien
ctagcttccgttgctcagcatcccc

SEQ ID NO: 3111146 - DNA, 25 bp, Homo sapien
ccttgtggctgtcatggaggctcct

SEQ ID NO: 3111147 - DNA, 25 bp, Homo sapien
gaggaactgggccacgttcatctct

SEQ ID NO: 3111148 - DNA, 25 bp, Homo sapien
tctcttgccccgtgaactggtctcg

SEQ ID NO: 3111149 - DNA, 25 bp, Homo sapien
tctgcatgtcgaagcccatgtgcat

SEQ ID NO: 3111150 - DNA, 25 bp, Homo sapien
gagaggcaggcgggggcaaagctgg

SEQ ID NO: 3111151 - DNA, 25 bp, Homo sapien
ctccggatgatgatctcatgggaga

SEQ ID NO: 3111152 - DNA, 25 bp, Homo sapien
ggatgatgatctcatgggagaggca

SEQ ID NO: 3111153 - DNA, 25 bp, Homo sapien
ggagaggcaggcgggggcaaagctg

SEQ ID NO: 3111154 - DNA, 25 bp, Homo sapien
ggttctggatgtacagccgcaggcc

SEQ ID NO: 3111155 - DNA, 25 bp, Homo sapien
tcagctgtgcctcgtcaaacagcca

SEQ ID NO: 3111156 - DNA, 25 bp, Homo sapien
tgcacgttgtccaccgtcagctgtg

SEQ ID NO: 3111157 - DNA, 25 bp, Homo sapien
cacgtccttgagtgtgtggcgcagc

SEQ ID NO: 3111158 - DNA, 25 bp, Homo sapien
cgcagggtcgggtagaccttgtagc

SEQ ID NO: 3111159 - DNA, 25 bp, Homo sapien
cagggtcgggtagaccttgtagcca

SEQ ID NO: 3111160 - DNA, 25 bp, Homo sapien
agcgcagggtcgggtagaccttgta

SEQ ID NO: 3111161 - DNA, 25 bp, Homo sapien
gcagcgctccgggaccaccccgttc

SEQ ID NO: 3111162 - DNA, 25 bp, Homo sapien
ggttaggctgccgtgggtctcgtcc

SEQ ID NO: 3111163 - DNA, 25 bp, Homo sapien
acagccacaggttaggctgccgtgg

SEQ ID NO: 3111164 - DNA, 25 bp, Homo sapien
cacaggttaggctgccgtgggtctc

SEQ ID NO: 3111165 - DNA, 25 bp, Homo sapien
ttaggctgccgtgggtctcgtcccc

SEQ ID NO: 3111166 - DNA, 25 bp, Homo sapien
aaagctgcagcacgaggacgggccc

SEQ ID NO: 3111167 - DNA, 25 bp, Homo sapien
cttctggggcaaagctgcagcacga

SEQ ID NO: 3111168 - DNA, 25 bp, Homo sapien
gggcaaagctgcagcacgaggacgg

SEQ ID NO: 3111169 - DNA, 25 bp, Homo sapien
agctgcagcacgaggacgggccctc

SEQ ID NO: 3111170 - DNA, 25 bp, Homo sapien
gtctgtgtggcgatactgcttgttg

SEQ ID NO: 3111171 - DNA, 25 bp, Homo sapien
tgtcgacgcagtctgtgtggcgata

SEQ ID NO: 3111172 - DNA, 25 bp, Homo sapien
tcagccaggcctcgcacctggatgg

SEQ ID NO: 3111173 - DNA, 25 bp, Homo sapien
tgatgccacggcggatggcctccgt

SEQ ID NO: 3111174 - DNA, 25 bp, Homo sapien
gatgagggcgcccatgaaggcgtac

SEQ ID NO: 3111175 - DNA, 25 bp, Homo sapien
agggcgcccatgaaggcgtactcgt

SEQ ID NO: 3111176 - DNA, 25 bp, Homo sapien
cctggatgatgagggcgcccatgaa

SEQ ID NO: 3111177 - DNA, 25 bp, Homo sapien
tgagggcgcccatgaaggcgtactc

SEQ ID NO: 3111178 - DNA, 25 bp, Homo sapien
tccaaacatcactggagcagtaggg

SEQ ID NO: 3111179 - DNA, 25 bp, Homo sapien
tcttctcagacttggatgaagcccc

SEQ ID NO: 3111180 - DNA, 25 bp, Homo sapien
gacttggatgaagccccgctccaaa

SEQ ID NO: 3111181 - DNA, 25 bp, Homo sapien
tctcagacttggatgaagccccgct

SEQ ID NO: 3111182 - DNA, 25 bp, Homo sapien
aacaggaccctcagaaaagaccatc

SEQ ID NO: 3111183 - DNA, 25 bp, Homo sapien
tgtcacagcgcctgccgcccggcag

SEQ ID NO: 3111184 - DNA, 25 bp, Homo sapien
aggaccctcagaaaagaccatccca

SEQ ID NO: 3111185 - DNA, 25 bp, Homo sapien
ctcagaaaagaccatcccaggacag

SEQ ID NO: 3111186 - DNA, 25 bp, Homo sapien
ttgcgttccaccagtaggggttctc

SEQ ID NO: 3111187 - DNA, 25 bp, Homo sapien
ccatgtttgcgttccaccagtaggg

SEQ ID NO: 3111188 - DNA, 25 bp, Homo sapien
accatgtttgcgttccaccagtagg

SEQ ID NO: 3111189 - DNA, 25 bp, Homo sapien
tgcgttccaccagtaggggttctcc

SEQ ID NO: 3111190 - DNA, 25 bp, Homo sapien
tggggacacagaggcggtgggtctt

SEQ ID NO: 3111191 - DNA, 25 bp, Homo sapien
ctggggacacagaggcggtgggtct

SEQ ID NO: 3111192 - DNA, 25 bp, Homo sapien
aaggcaagagtgaagggcgcccctt

SEQ ID NO: 3111193 - DNA, 25 bp, Homo sapien
tgttgctagcccgaaccaaggttgc

SEQ ID NO: 3111194 - DNA, 25 bp, Homo sapien
ttgctcttagtaaacccgggcgcca

SEQ ID NO: 3111195 - DNA, 25 bp, Homo sapien
gggtaagcgcctgaatgctaatgtg

SEQ ID NO: 3111196 - DNA, 25 bp, Homo sapien
cgccttccccagggcccgccgctga

SEQ ID NO: 3111197 - DNA, 25 bp, Homo sapien
acgccttccccagggcccgccgctg

SEQ ID NO: 3111198 - DNA, 25 bp, Homo sapien
tcgagacgccttccccagggcccgc

SEQ ID NO: 3111199 - DNA, 25 bp, Homo sapien
gccttccccagggcccgccgctgac

SEQ ID NO: 3111200 - DNA, 25 bp, Homo sapien
cgagtgcgcggccagtcccgggagc

SEQ ID NO: 3111201 - DNA, 25 bp, Homo sapien
tgcgcggccagtcccgggagctcat

SEQ ID NO: 3111202 - DNA, 25 bp, Homo sapien
agtgcgcggccagtcccgggagctc

SEQ ID NO: 3111203 - DNA, 25 bp, Homo sapien
gagtgcgcggccagtcccgggagct

SEQ ID NO: 3111204 - DNA, 25 bp, Homo sapien
cgtatctggagtcgcagttctcgcg

SEQ ID NO: 3111205 - DNA, 25 bp, Homo sapien
tatctggagtcgcagttctcgcggt

SEQ ID NO: 3111206 - DNA, 25 bp, Homo sapien
ctggagtcgcagttctcgcggttga

SEQ ID NO: 3111207 - DNA, 25 bp, Homo sapien
ggtgtcgtatctggagtcgcagttc

SEQ ID NO: 3111208 - DNA, 25 bp, Homo sapien
gcccctggactccttcaggtagtag

SEQ ID NO: 3111209 - DNA, 25 bp, Homo sapien
ccaggaagaggagccaccgccggct

SEQ ID NO: 3111210 - DNA, 25 bp, Homo sapien
ggctgcccctggactccttcaggta

SEQ ID NO: 3111211 - DNA, 25 bp, Homo sapien
ggaagaggagccaccgccggctgcc

SEQ ID NO: 3111212 - DNA, 25 bp, Homo sapien
ggctgccgtcgttgcaggtcaccga

SEQ ID NO: 3111213 - DNA, 25 bp, Homo sapien
gcgccaggctcttgacttgcgccat

SEQ ID NO: 3111214 - DNA, 25 bp, Homo sapien
ccgtcgttgcaggtcaccgaggtgt

SEQ ID NO: 3111215 - DNA, 25 bp, Homo sapien
tgccgtcgttgcaggtcaccgaggt

SEQ ID NO: 3111216 - DNA, 25 bp, Homo sapien
ggaagctctccacgggctgtccggc

SEQ ID NO: 3111217 - DNA, 25 bp, Homo sapien
catgttaccctccacggccgtgaag

SEQ ID NO: 3111218 - DNA, 25 bp, Homo sapien
aagtccagcgggaagctctccacgg

SEQ ID NO: 3111219 - DNA, 25 bp, Homo sapien
tccacggccgtgaagtccagcggga

SEQ ID NO: 3111220 - DNA, 25 bp, Homo sapien
gcccgggtgcccgcgcgttagatgt

SEQ ID NO: 3111221 - DNA, 25 bp, Homo sapien
ggccgaggctgggcttatttgcggg

SEQ ID NO: 3111222 - DNA, 25 bp, Homo sapien
gcggcccgcgccaatgagcggcggg

SEQ ID NO: 3111223 - DNA, 25 bp, Homo sapien
cagggtctgggtgcgctggctgcgg

SEQ ID NO: 3111224 - DNA, 25 bp, Homo sapien
ccgccgcggccgccggaggcgctcc

SEQ ID NO: 3111225 - DNA, 25 bp, Homo sapien
gccgcggccgccggaggcgctcccg

SEQ ID NO: 3111226 - DNA, 25 bp, Homo sapien
cgcggccgccggaggcgctcccggc

SEQ ID NO: 3111227 - DNA, 25 bp, Homo sapien
gcggccgccggaggcgctcccggcc

SEQ ID NO: 3111228 - DNA, 25 bp, Homo sapien
agcgcgggcggcccagtggccccgt

SEQ ID NO: 3111229 - DNA, 25 bp, Homo sapien
cagcgcgggcggcccagtggccccg

SEQ ID NO: 3111230 - DNA, 25 bp, Homo sapien
gcgcgggcggcccagtggccccgtc

SEQ ID NO: 3111231 - DNA, 25 bp, Homo sapien
ccagcgcgggcggcccagtggcccc

SEQ ID NO: 3111232 - DNA, 25 bp, Homo sapien
gcggagccgccagggacttttatcc

SEQ ID NO: 3111233 - DNA, 25 bp, Homo sapien
tggccctgcgccgtcccgctggtgc

SEQ ID NO: 3111234 - DNA, 25 bp, Homo sapien
agggcccggcagcagtggcgccggg

SEQ ID NO: 3111235 - DNA, 25 bp, Homo sapien
gccagggacttttatccagcagggc

SEQ ID NO: 3111236 - DNA, 25 bp, Homo sapien
caggtggggcgcgaggtcctggctc

SEQ ID NO: 3111237 - DNA, 25 bp, Homo sapien
gcgaggtcctggctccctcggagac

SEQ ID NO: 3111238 - DNA, 25 bp, Homo sapien
aagcggacaggtggggcgcgaggtc

SEQ ID NO: 3111239 - DNA, 25 bp, Homo sapien
ctggagaagcggacaggtggggcgc

SEQ ID NO: 3111240 - DNA, 25 bp, Homo sapien
gagagcagaggcgcagggcggtgcc

SEQ ID NO: 3111241 - DNA, 25 bp, Homo sapien
aggagagcagaggcgcagggcggtg

SEQ ID NO: 3111242 - DNA, 25 bp, Homo sapien
agggcggtgcctgcagccaggatgc

SEQ ID NO: 3111243 - DNA, 25 bp, Homo sapien
gagcagaggcgcagggcggtgcctg

SEQ ID NO: 3111244 - DNA, 25 bp, Homo sapien
gccatggcacccaccctgatatttt

SEQ ID NO: 3111245 - DNA, 25 bp, Homo sapien
ccatggcacccaccctgatatttta

SEQ ID NO: 3111246 - DNA, 25 bp, Homo sapien
gagccatggcacccaccctgatatt

SEQ ID NO: 3111247 - DNA, 25 bp, Homo sapien
catggcacccaccctgatattttaa

SEQ ID NO: 3111248 - DNA, 25 bp, Homo sapien
ttcagggaggaccatacagggttcc

SEQ ID NO: 3111249 - DNA, 25 bp, Homo sapien
cagagtccgcgtgaacatcaaaggt

SEQ ID NO: 3111250 - DNA, 25 bp, Homo sapien
tgggtaagaccaacaacgatcaggc

SEQ ID NO: 3111251 - DNA, 25 bp, Homo sapien
gcatggttgcgtgtggtgtccctca

SEQ ID NO: 3111252 - DNA, 25 bp, Homo sapien
cacacggtgaaggtgacgccgagca

SEQ ID NO: 3111253 - DNA, 25 bp, Homo sapien
cacggtgaaggtgacgccgagcacc

SEQ ID NO: 3111254 - DNA, 25 bp, Homo sapien
ggaggctccgcggtgtcggtgctgg

SEQ ID NO: 3111255 - DNA, 25 bp, Homo sapien
ggtgtcggtgctggccccgaacggc

SEQ ID NO: 3111256 - DNA, 25 bp, Homo sapien
ccggcatcccggacagcgtccctgt

SEQ ID NO: 3111257 - DNA, 25 bp, Homo sapien
tctgctgtgaggccgcgcgcccgca

SEQ ID NO: 3111258 - DNA, 25 bp, Homo sapien
ggcatcccggacagcgtccctgtcc

SEQ ID NO: 3111259 - DNA, 25 bp, Homo sapien
ccccggcatcccggacagcgtccct

SEQ ID NO: 3111260 - DNA, 25 bp, Homo sapien
catcattgtggtccggtccttggcg

SEQ ID NO: 3111261 - DNA, 25 bp, Homo sapien
cccttccagtttcggggcatctgga

SEQ ID NO: 3111262 - DNA, 25 bp, Homo sapien
ggcatctggataaatggttagcatc

SEQ ID NO: 3111263 - DNA, 25 bp, Homo sapien
taaatggttagcatcattgtggtcc

SEQ ID NO: 3111264 - DNA, 25 bp, Homo sapien
ctgggtttgcaggagacaggaaggg

SEQ ID NO: 3111265 - DNA, 25 bp, Homo sapien
tgggtttgcaggagacaggaagggg

SEQ ID NO: 3111266 - DNA, 25 bp, Homo sapien
gtcgggtctttcacagctgcccggc

SEQ ID NO: 3111267 - DNA, 25 bp, Homo sapien
gagtcgggtctttcacagctgcccg

SEQ ID NO: 3111268 - DNA, 25 bp, Homo sapien
agtcgggtctttcacagctgcccgg

SEQ ID NO: 3111269 - DNA, 25 bp, Homo sapien
tcgggtctttcacagctgcccggcc

SEQ ID NO: 3111270 - DNA, 25 bp, Homo sapien
acacagcccctgtgaaagtgcagtg

SEQ ID NO: 3111271 - DNA, 25 bp, Homo sapien
tccttgtgtgtcatgtggcagccac

SEQ ID NO: 3111272 - DNA, 25 bp, Homo sapien
cccctgtgaaagtgcagtgccggct

SEQ ID NO: 3111273 - DNA, 25 bp, Homo sapien
cctgtgaaagtgcagtgccggctgc

SEQ ID NO: 3111274 - DNA, 25 bp, Homo sapien
tcacacgccagctttgatgtcgggt

SEQ ID NO: 3111275 - DNA, 25 bp, Homo sapien
tgtgagaacaaatttatagcctggg

SEQ ID NO: 3111276 - DNA, 25 bp, Homo sapien
gtttgtcaaacacacaggctacctg

SEQ ID NO: 3111277 - DNA, 25 bp, Homo sapien
cacaggctggagactcccagagatc

SEQ ID NO: 3111278 - DNA, 25 bp, Homo sapien
gcctgccgcacgccgcggactgctg

SEQ ID NO: 3111279 - DNA, 25 bp, Homo sapien
acggagcgcgtcttctgcctgggcc

SEQ ID NO: 3111280 - DNA, 25 bp, Homo sapien
acgtccacacggagcgcgtcttctg

SEQ ID NO: 3111281 - DNA, 25 bp, Homo sapien
cacacggagcgcgtcttctgcctgg

SEQ ID NO: 3111282 - DNA, 25 bp, Homo sapien
tgcggtgagaaacgcgagaggtggg

SEQ ID NO: 3111283 - DNA, 25 bp, Homo sapien
tgagaaacgcgagaggtgggggatg

SEQ ID NO: 3111284 - DNA, 25 bp, Homo sapien
cggtgagaaacgcgagaggtggggg

SEQ ID NO: 3111285 - DNA, 25 bp, Homo sapien
ctgcggtgagaaacgcgagaggtgg

SEQ ID NO: 3111286 - DNA, 25 bp, Homo sapien
tcttaaacccgagcccagtgagggc

SEQ ID NO: 3111287 - DNA, 25 bp, Homo sapien
gatcttaaacccgagcccagtgagg

SEQ ID NO: 3111288 - DNA, 25 bp, Homo sapien
gggatcttaaacccgagcccagtga

SEQ ID NO: 3111289 - DNA, 25 bp, Homo sapien
taaacccgagcccagtgagggcctc

SEQ ID NO: 3111290 - DNA, 25 bp, Homo sapien
aaacgcaaaattccggatgctgtgc

SEQ ID NO: 3111291 - DNA, 25 bp, Homo sapien
gaaaaacgcaaaattccggatgctg

SEQ ID NO: 3111292 - DNA, 25 bp, Homo sapien
cgcaaaattccggatgctgtgcccg

SEQ ID NO: 3111293 - DNA, 25 bp, Homo sapien
ctggaaaaacgcaaaattccggatg

SEQ ID NO: 3111294 - DNA, 25 bp, Homo sapien
tcagcaactccaccatgagctgcag

SEQ ID NO: 3111295 - DNA, 25 bp, Homo sapien
ttcagcaactccaccatgagctgca

SEQ ID NO: 3111296 - DNA, 25 bp, Homo sapien
cagcaactccaccatgagctgcagc

SEQ ID NO: 3111297 - DNA, 25 bp, Homo sapien
cttcagcaactccaccatgagctgc

SEQ ID NO: 3111298 - DNA, 25 bp, Homo sapien
ggctgggtgctccagacataccccc

SEQ ID NO: 3111299 - DNA, 25 bp, Homo sapien
gccttggccctgcagagttgcagga

SEQ ID NO: 3111300 - DNA, 25 bp, Homo sapien
ccctgaggacagacacggggaccca

SEQ ID NO: 3111301 - DNA, 25 bp, Homo sapien
gaggttatgcgggaccctcacccac

SEQ ID NO: 3111302 - DNA, 25 bp, Homo sapien
tgaagtgcaggtgcagcagcctgct

SEQ ID NO: 3111303 - DNA, 25 bp, Homo sapien
aggtgcagcagcctgctcaccagct

SEQ ID NO: 3111304 - DNA, 25 bp, Homo sapien
agtgcaggtgcagcagcctgctcac

SEQ ID NO: 3111305 - DNA, 25 bp, Homo sapien
ccttgaagtgcaggtgcagcagcct

SEQ ID NO: 3111306 - DNA, 25 bp, Homo sapien
agcatggacgggtgaagccctaaga

SEQ ID NO: 3111307 - DNA, 25 bp, Homo sapien
ggtgaagccctaagatgcagatggt

SEQ ID NO: 3111308 - DNA, 25 bp, Homo sapien
caggtgacaagcagagcatggacgg

SEQ ID NO: 3111309 - DNA, 25 bp, Homo sapien
tggacgggtgaagccctaagatgca

SEQ ID NO: 3111310 - DNA, 25 bp, Homo sapien
tctcttcgccggcttggactccgcc

SEQ ID NO: 3111311 - DNA, 25 bp, Homo sapien
ttggactccgccgtgacggcgccca

SEQ ID NO: 3111312 - DNA, 25 bp, Homo sapien
ggctggacgatctcactgtccccgt

SEQ ID NO: 3111313 - DNA, 25 bp, Homo sapien
gctcctcgggctggacgatctcact

SEQ ID NO: 3111314 - DNA, 25 bp, Homo sapien
agatggagtctgagaacgggcccaa

SEQ ID NO: 3111315 - DNA, 25 bp, Homo sapien
gtctggccctcacagtgtcacgcgt

SEQ ID NO: 3111316 - DNA, 25 bp, Homo sapien
tgtcacgcgtgaggtcgggacggag

SEQ ID NO: 3111317 - DNA, 25 bp, Homo sapien
agctgcgagacaccagcccacgagg

SEQ ID NO: 3111318 - DNA, 25 bp, Homo sapien
ttccggaagccggatccagctcctg

SEQ ID NO: 3111319 - DNA, 25 bp, Homo sapien
cttccggaagccggatccagctcct

SEQ ID NO: 3111320 - DNA, 25 bp, Homo sapien
tccggaagccggatccagctcctgc

SEQ ID NO: 3111321 - DNA, 25 bp, Homo sapien
gaccgcagcctcaacgcgcgcccac

SEQ ID NO: 3111322 - DNA, 25 bp, Homo sapien
gcagcctcaacgcgcgcccaccgga

SEQ ID NO: 3111323 - DNA, 25 bp, Homo sapien
agcctcaacgcgcgcccaccggaac

SEQ ID NO: 3111324 - DNA, 25 bp, Homo sapien
ccgcagcctcaacgcgcgcccaccg

SEQ ID NO: 3111325 - DNA, 25 bp, Homo sapien
tccctcacgtcccgcagccaatgaa

SEQ ID NO: 3111326 - DNA, 25 bp, Homo sapien
ccctccctcacgtcccgcagccaat

SEQ ID NO: 3111327 - DNA, 25 bp, Homo sapien
gcccctccctcacgtcccgcagcca

SEQ ID NO: 3111328 - DNA, 25 bp, Homo sapien
cctccctcacgtcccgcagccaatg

SEQ ID NO: 3111329 - DNA, 25 bp, Homo sapien
tgagccgagtgaaagcagcggcact

SEQ ID NO: 3111330 - DNA, 25 bp, Homo sapien
ggagctgatcaaggccaagagccag

SEQ ID NO: 3111331 - DNA, 25 bp, Homo sapien
gaggaggtgagccacacatgtccgc

SEQ ID NO: 3111332 - DNA, 25 bp, Homo sapien
gactccagagcttcggtctgagtgg

SEQ ID NO: 3111333 - DNA, 25 bp, Homo sapien
ggtggcaggatcctgtcctctctgc

SEQ ID NO: 3111334 - DNA, 25 bp, Homo sapien
tctctgccgcctcattctggggtgt

SEQ ID NO: 3111335 - DNA, 25 bp, Homo sapien
tgttccttgtgccccgaggtggggc

SEQ ID NO: 3111336 - DNA, 25 bp, Homo sapien
tgggtggcaggatcctgtcctctct

SEQ ID NO: 3111337 - DNA, 25 bp, Homo sapien
cctcggttatgtacatctgtgggac

SEQ ID NO: 3111338 - DNA, 25 bp, Homo sapien
tgcatacacgactgttttctctgcc

SEQ ID NO: 3111339 - DNA, 25 bp, Homo sapien
ttaaaagcaaaatcggcaaacgtca

SEQ ID NO: 3111340 - DNA, 25 bp, Homo sapien
cggcaaacgtcacttcctacttatt

SEQ ID NO: 3111341 - DNA, 25 bp, Homo sapien
tagcacaagttgaggaaacgctctt

SEQ ID NO: 3111342 - DNA, 25 bp, Homo sapien
aaagtggctcagatcaccgacgaag

SEQ ID NO: 3111343 - DNA, 25 bp, Homo sapien
ggaagaggagccaactgtacactca

SEQ ID NO: 3111344 - DNA, 25 bp, Homo sapien
cagggtgctgtgtctatgctcatta

SEQ ID NO: 3111345 - DNA, 25 bp, Homo sapien
aatcaggtttattggagggattggg

SEQ ID NO: 3111346 - DNA, 25 bp, Homo sapien
ggggtaggatgagcacggcatgggg

SEQ ID NO: 3111347 - DNA, 25 bp, Homo sapien
ggtaggatgagcacggcatggggct

SEQ ID NO: 3111348 - DNA, 25 bp, Homo sapien
atcaggtttattggagggattgggg

SEQ ID NO: 3111349 - DNA, 25 bp, Homo sapien
ggtcatgccacttcggtcactcagc

SEQ ID NO: 3111350 - DNA, 25 bp, Homo sapien
cgtggtcatgccacttcggtcactc

SEQ ID NO: 3111351 - DNA, 25 bp, Homo sapien
ccggcaaagtggaacccgtggtcat

SEQ ID NO: 3111352 - DNA, 25 bp, Homo sapien
aaagtggaacccgtggtcatgccac

SEQ ID NO: 3111353 - DNA, 25 bp, Homo sapien
ctgccgcccatctttccctcccacc

SEQ ID NO: 3111354 - DNA, 25 bp, Homo sapien
ggcaccacgctggctgggctcccac

SEQ ID NO: 3111355 - DNA, 25 bp, Homo sapien
tggcaccacgctggctgggctccca

SEQ ID NO: 3111356 - DNA, 25 bp, Homo sapien
ctggcaccacgctggctgggctccc

SEQ ID NO: 3111357 - DNA, 25 bp, Homo sapien
tggcccatggacgtcatcaccactg

SEQ ID NO: 3111358 - DNA, 25 bp, Homo sapien
cagcaaacttgccaagtgggattcg

SEQ ID NO: 3111359 - DNA, 25 bp, Homo sapien
ccatggacgtcatcaccactgtggg

SEQ ID NO: 3111360 - DNA, 25 bp, Homo sapien
gtgggattcggttcagcatagtctt

SEQ ID NO: 3111361 - DNA, 25 bp, Homo sapien
tgggggaggtaccccagccctgctc

SEQ ID NO: 3111362 - DNA, 25 bp, Homo sapien
cagggcaagtggggtgtcctaggtt

SEQ ID NO: 3111363 - DNA, 25 bp, Homo sapien
agggcaagtggggtgtcctaggttg

SEQ ID NO: 3111364 - DNA, 25 bp, Homo sapien
gggcccgagctctagggccatcacc

SEQ ID NO: 3111365 - DNA, 25 bp, Homo sapien
tggggcccgagctctagggccatca

SEQ ID NO: 3111366 - DNA, 25 bp, Homo sapien
ccttggtcagcatgtccagggcacc

SEQ ID NO: 3111367 - DNA, 25 bp, Homo sapien
tcaccttggtcagcatgtccagggc

SEQ ID NO: 3111368 - DNA, 25 bp, Homo sapien
ctacgaagaggaacccaagctggct

SEQ ID NO: 3111369 - DNA, 25 bp, Homo sapien
agttactgcccgctgggagcactgg

SEQ ID NO: 3111370 - DNA, 25 bp, Homo sapien
ctggctggagacattcacgatggcc

SEQ ID NO: 3111371 - DNA, 25 bp, Homo sapien
agacattcacgatggcccctgggac

SEQ ID NO: 3111372 - DNA, 25 bp, Homo sapien
gggctattaagcccctggccacaat

SEQ ID NO: 3111373 - DNA, 25 bp, Homo sapien
atcgcagcgagaccgtgaggcagag

SEQ ID NO: 3111374 - DNA, 25 bp, Homo sapien
ggaatcgcagcgagaccgtgaggca

SEQ ID NO: 3111375 - DNA, 25 bp, Homo sapien
aatcgcagcgagaccgtgaggcaga

SEQ ID NO: 3111376 - DNA, 25 bp, Homo sapien
ctggaatcgcagcgagaccgtgagg

SEQ ID NO: 3111377 - DNA, 25 bp, Homo sapien
gagaattcccgtccagcccacaggg

SEQ ID NO: 3111378 - DNA, 25 bp, Homo sapien
agaattcccgtccagcccacagggc

SEQ ID NO: 3111379 - DNA, 25 bp, Homo sapien
tgcgacacctggatgaccgcacgca

SEQ ID NO: 3111380 - DNA, 25 bp, Homo sapien
tggatgaccgcacgcaggttcacct

SEQ ID NO: 3111381 - DNA, 25 bp, Homo sapien
gacacctggatgaccgcacgcaggt

SEQ ID NO: 3111382 - DNA, 25 bp, Homo sapien
cgcacgcaggttcacctcaaaggat

SEQ ID NO: 3111383 - DNA, 25 bp, Homo sapien
aggtccacgcacacgggttctatcc

SEQ ID NO: 3111384 - DNA, 25 bp, Homo sapien
agcagggcgacagcggcgttgttca

SEQ ID NO: 3111385 - DNA, 25 bp, Homo sapien
ctgcagcagggcgacagcggcgttg

SEQ ID NO: 3111386 - DNA, 25 bp, Homo sapien
gacagcggcgttgttcaccagcagg

SEQ ID NO: 3111387 - DNA, 25 bp, Homo sapien
atttcggcctctttctgagcccggg

SEQ ID NO: 3111388 - DNA, 25 bp, Homo sapien
cggagtcgcgcacagaggtaccgcc

SEQ ID NO: 3111389 - DNA, 25 bp, Homo sapien
gggcctgcttcgcagccatttcggc

SEQ ID NO: 3111390 - DNA, 25 bp, Homo sapien
tcagccggacaagtaaaggagttag

SEQ ID NO: 3111391 - DNA, 25 bp, Homo sapien
ccgtcgcgtgcagcgcctggaccgt

SEQ ID NO: 3111392 - DNA, 25 bp, Homo sapien
acccgcgcgcccgtcgcgtgcagcg

SEQ ID NO: 3111393 - DNA, 25 bp, Homo sapien
caaggctgtcaagatccgcctgagt

SEQ ID NO: 3111394 - DNA, 25 bp, Homo sapien
gcctgagtccggctcacagccacca

SEQ ID NO: 3111395 - DNA, 25 bp, Homo sapien
cagtgaaggcgtcccctgcccgcct

SEQ ID NO: 3111396 - DNA, 25 bp, Homo sapien
gggctcagtgaaggcgtcccctgcc

SEQ ID NO: 3111397 - DNA, 25 bp, Homo sapien
ctcagtgaaggcgtcccctgcccgc

SEQ ID NO: 3111398 - DNA, 25 bp, Homo sapien
gcgggctcagtgaaggcgtcccctg

SEQ ID NO: 3111399 - DNA, 25 bp, Homo sapien
ccggcggcccgcgaggaacagctcc

SEQ ID NO: 3111400 - DNA, 25 bp, Homo sapien
agcacccggcggcccgcgaggaaca

SEQ ID NO: 3111401 - DNA, 25 bp, Homo sapien
accagcacccggcggcccgcgagga

SEQ ID NO: 3111402 - DNA, 25 bp, Homo sapien
acccggcggcccgcgaggaacagct

SEQ ID NO: 3111403 - DNA, 25 bp, Homo sapien
cagtctccgccctccgcactggggc

SEQ ID NO: 3111404 - DNA, 25 bp, Homo sapien
gtctccgccctccgcactggggctg

SEQ ID NO: 3111405 - DNA, 25 bp, Homo sapien
agtctccgccctccgcactggggct

SEQ ID NO: 3111406 - DNA, 25 bp, Homo sapien
ctggccacgatgggcggggcgcggc

SEQ ID NO: 3111407 - DNA, 25 bp, Homo sapien
cagggcggccttcagataggcggtg

SEQ ID NO: 3111408 - DNA, 25 bp, Homo sapien
tcagataggcggtggggacattcaa

SEQ ID NO: 3111409 - DNA, 25 bp, Homo sapien
ggcagggcggccttcagataggcgg

SEQ ID NO: 3111410 - DNA, 25 bp, Homo sapien
tggacaggccggaggcaagggtggc

SEQ ID NO: 3111411 - DNA, 25 bp, Homo sapien
tgttctggaggacagccaagtgcat

SEQ ID NO: 3111412 - DNA, 25 bp, Homo sapien
gtttgttctggaggacagccaagtg

SEQ ID NO: 3111413 - DNA, 25 bp, Homo sapien
tcctggtttgttctggaggacagcc

SEQ ID NO: 3111414 - DNA, 25 bp, Homo sapien
cctcctgttcgcgtccggccttctg

SEQ ID NO: 3111415 - DNA, 25 bp, Homo sapien
ttcgcgtccggccttctgagcctct

SEQ ID NO: 3111416 - DNA, 25 bp, Homo sapien
tggggccctcctgttcgcgtccggc

SEQ ID NO: 3111417 - DNA, 25 bp, Homo sapien
tcctgttcgcgtccggccttctgag

SEQ ID NO: 3111418 - DNA, 25 bp, Homo sapien
aggatgccgggaccgtgtggcgcag

SEQ ID NO: 3111419 - DNA, 25 bp, Homo sapien
accctttctggtggcgtgaacgcac

SEQ ID NO: 3111420 - DNA, 25 bp, Homo sapien
tggtggcgtgaacgcactctagtcc

SEQ ID NO: 3111421 - DNA, 25 bp, Homo sapien
gcgtgaacgcactctagtccacgtt

SEQ ID NO: 3111422 - DNA, 25 bp, Homo sapien
gacgcaggggacgtctacagttctg

SEQ ID NO: 3111423 - DNA, 25 bp, Homo sapien
gcaattttcaagaattcgcttttct

SEQ ID NO: 3111424 - DNA, 25 bp, Homo sapien
tcagacttgctgaaattcacccgac

SEQ ID NO: 3111425 - DNA, 25 bp, Homo sapien
tctttcgtttctgttgaaatgcagg

SEQ ID NO: 3111426 - DNA, 25 bp, Homo sapien
caaaagctttactcgtgctcggcaa

SEQ ID NO: 3111427 - DNA, 25 bp, Homo sapien
gtcccagtcaagaggcctccgaatg

SEQ ID NO: 3111428 - DNA, 25 bp, Homo sapien
gcaaagctctggtcgagaacatgac

SEQ ID NO: 3111429 - DNA, 25 bp, Homo sapien
tggaagcctgttcccgtgggatcaa

SEQ ID NO: 3111430 - DNA, 25 bp, Homo sapien
cccactgagcccatagggggctctg

SEQ ID NO: 3111431 - DNA, 25 bp, Homo sapien
tcaccgagaggtcggggcgccctgt

SEQ ID NO: 3111432 - DNA, 25 bp, Homo sapien
gtcggggtggttggtgtcaccgaga

SEQ ID NO: 3111433 - DNA, 25 bp, Homo sapien
tggttggtgtcaccgagaggtcggg

SEQ ID NO: 3111434 - DNA, 25 bp, Homo sapien
ctgggtacagaagacaatggataga

SEQ ID NO: 3111435 - DNA, 25 bp, Homo sapien
cagaagacaatggatagacttaaac

SEQ ID NO: 3111436 - DNA, 25 bp, Homo sapien
tacagaagacaatggatagacttaa

SEQ ID NO: 3111437 - DNA, 25 bp, Homo sapien
ggtacagaagacaatggatagactt

SEQ ID NO: 3111438 - DNA, 25 bp, Homo sapien
cagggccgtgggtagagggagctga

SEQ ID NO: 3111439 - DNA, 25 bp, Homo sapien
ggtcagggccgtgggtacagggaga

SEQ ID NO: 3111440 - DNA, 25 bp, Homo sapien
gccagggccgtgggcggcgggagaa

SEQ ID NO: 3111441 - DNA, 25 bp, Homo sapien
gggtcagggccgtgggcggagagag

SEQ ID NO: 3111442 - DNA, 25 bp, Homo sapien
gggtcttgatgcaggctgaagcctc

SEQ ID NO: 3111443 - DNA, 25 bp, Homo sapien
gccacgttcaccacgttatgtgggt

SEQ ID NO: 3111444 - DNA, 25 bp, Homo sapien
tgtgggttctcaggacccccatggc

SEQ ID NO: 3111445 - DNA, 25 bp, Homo sapien
aagcctccagccacgttcaccacgt

SEQ ID NO: 3111446 - DNA, 25 bp, Homo sapien
tctgtacgtgaggaccctgtgtcca

SEQ ID NO: 3111447 - DNA, 25 bp, Homo sapien
tcactggcccgagaactgtgcttct

SEQ ID NO: 3111448 - DNA, 25 bp, Homo sapien
tccagggcaaagctgaccctcattc

SEQ ID NO: 3111449 - DNA, 25 bp, Homo sapien
tgatgggacctgttccgactcacca

SEQ ID NO: 3111450 - DNA, 25 bp, Homo sapien
gaggcacccagagtggcgcctgtac

SEQ ID NO: 3111451 - DNA, 25 bp, Homo sapien
tgggggagtcagggcggggcaaagc

SEQ ID NO: 3111452 - DNA, 25 bp, Homo sapien
ctgcctgctcagccgggcatcgggc

SEQ ID NO: 3111453 - DNA, 25 bp, Homo sapien
tcagccgggcatcgggccggggcag

SEQ ID NO: 3111454 - DNA, 25 bp, Homo sapien
gcagtcatccggcagccgcacctgc

SEQ ID NO: 3111455 - DNA, 25 bp, Homo sapien
ctccacgatgtagccaactgtgcag

SEQ ID NO: 3111456 - DNA, 25 bp, Homo sapien
tccacgatgtagccaactgtgcagt

SEQ ID NO: 3111457 - DNA, 25 bp, Homo sapien
ctggggggaggccggtcagcacctt

SEQ ID NO: 3111458 - DNA, 25 bp, Homo sapien
gggaggccggtcagcacctttcagg

SEQ ID NO: 3111459 - DNA, 25 bp, Homo sapien
aggccggtcagcacctttcaggtct

SEQ ID NO: 3111460 - DNA, 25 bp, Homo sapien
gggggaggccggtcagcacctttca

SEQ ID NO: 3111461 - DNA, 25 bp, Homo sapien
cagaacccggccccaccagtagcaa

SEQ ID NO: 3111462 - DNA, 25 bp, Homo sapien
ggcctctgctgaggcagaacccggc

SEQ ID NO: 3111463 - DNA, 25 bp, Homo sapien
gtagcaaaccagaacttgaccgtgg

SEQ ID NO: 3111464 - DNA, 25 bp, Homo sapien
cccggccccaccagtagcaaaccag

SEQ ID NO: 3111465 - DNA, 25 bp, Homo sapien
cttaggagatcccacccaggtaaca

SEQ ID NO: 3111466 - DNA, 25 bp, Homo sapien
gactcttcatgggactccccaggca

SEQ ID NO: 3111467 - DNA, 25 bp, Homo sapien
aaggcgtctgctccgatggcgtctg

SEQ ID NO: 3111468 - DNA, 25 bp, Homo sapien
tgcccagtacggtgagggcctcctg

SEQ ID NO: 3111469 - DNA, 25 bp, Homo sapien
cacataattgtcatcatccacgtgg

SEQ ID NO: 3111470 - DNA, 25 bp, Homo sapien
tggaccctctcggtggcctcaatgg

SEQ ID NO: 3111471 - DNA, 25 bp, Homo sapien
ggctcctggcgttcacataattgtc

SEQ ID NO: 3111472 - DNA, 25 bp, Homo sapien
ggaccctctcggtggcctcaatggg

SEQ ID NO: 3111473 - DNA, 25 bp, Homo sapien
tgcgggtcgggtcagcgccgcgtac

SEQ ID NO: 3111474 - DNA, 25 bp, Homo sapien
ttggctctgagctctctgcgggtcg

SEQ ID NO: 3111475 - DNA, 25 bp, Homo sapien
ggcatggctggacaggaggccccca

SEQ ID NO: 3111476 - DNA, 25 bp, Homo sapien
tctgagctctctgcgggtcgggtca

SEQ ID NO: 3111477 - DNA, 25 bp, Homo sapien
tgcgcccggactcaatgaacttgtc

SEQ ID NO: 3111478 - DNA, 25 bp, Homo sapien
cgcccggactcaatgaacttgtcat

SEQ ID NO: 3111479 - DNA, 25 bp, Homo sapien
ttgcgcccggactcaatgaacttgt

SEQ ID NO: 3111480 - DNA, 25 bp, Homo sapien
tgaacttgtcatactccacggacat

SEQ ID NO: 3111481 - DNA, 25 bp, Homo sapien
tgacgagtgcgcaccgccgagcagt

SEQ ID NO: 3111482 - DNA, 25 bp, Homo sapien
agcagttggtgttgatgacacggtc

SEQ ID NO: 3111483 - DNA, 25 bp, Homo sapien
cagttggtgttgatgacacggtcgc

SEQ ID NO: 3111484 - DNA, 25 bp, Homo sapien
cagcagagggcctgacgagtgcgca

SEQ ID NO: 3111485 - DNA, 25 bp, Homo sapien
gtggctgtctgacatgcctggacac

SEQ ID NO: 3111486 - DNA, 25 bp, Homo sapien
cacaacgtggctgtctgacatgcct

SEQ ID NO: 3111487 - DNA, 25 bp, Homo sapien
gccagggcacaacgtggctgtctga

SEQ ID NO: 3111488 - DNA, 25 bp, Homo sapien
cagggcacaacgtggctgtctgaca

SEQ ID NO: 3111489 - DNA, 25 bp, Homo sapien
acaggacggaggcagctcgccctga

SEQ ID NO: 3111490 - DNA, 25 bp, Homo sapien
gaaacaggacggaggcagctcgccc

SEQ ID NO: 3111491 - DNA, 25 bp, Homo sapien
aggcggccatcggttgggatctctt

SEQ ID NO: 3111492 - DNA, 25 bp, Homo sapien
gttgggatctcttgagtggaaacag

SEQ ID NO: 3111493 - DNA, 25 bp, Homo sapien
cctggaagggcggattccctgctgg

SEQ ID NO: 3111494 - DNA, 25 bp, Homo sapien
ggattccctgctggcgcttcttcag

SEQ ID NO: 3111495 - DNA, 25 bp, Homo sapien
ccacgccccgggaagcggctagtgt

SEQ ID NO: 3111496 - DNA, 25 bp, Homo sapien
tcttcaggggacgtggcactagccc

SEQ ID NO: 3111497 - DNA, 25 bp, Homo sapien
ggagcagagcttggctggcagggtg

SEQ ID NO: 3111498 - DNA, 25 bp, Homo sapien
tggtggggagcagagcttggctggc

SEQ ID NO: 3111499 - DNA, 25 bp, Homo sapien
gtgggccctccgcaggccgcgtgac

SEQ ID NO: 3111500 - DNA, 25 bp, Homo sapien
cagggtgggccctccgcaggccgcg

SEQ ID NO: 3111501 - DNA, 25 bp, Homo sapien
tggcttcggagcgagaaaggctcgg

SEQ ID NO: 3111502 - DNA, 25 bp, Homo sapien
gggccgtggcttcggagcgagaaag

SEQ ID NO: 3111503 - DNA, 25 bp, Homo sapien
cgtggcttcggagcgagaaaggctc

SEQ ID NO: 3111504 - DNA, 25 bp, Homo sapien
gctcggggggcagatcccgcgggcg

SEQ ID NO: 3111505 - DNA, 25 bp, Homo sapien
gctcagggtcgtccccgtcggtgaa

SEQ ID NO: 3111506 - DNA, 25 bp, Homo sapien
cgagctcagggtcgtccccgtcggt

SEQ ID NO: 3111507 - DNA, 25 bp, Homo sapien
agctcgagctcagggtcgtccccgt

SEQ ID NO: 3111508 - DNA, 25 bp, Homo sapien
ccctggagctcgagctcagggtcgt

SEQ ID NO: 3111509 - DNA, 25 bp, Homo sapien
tgggggagaaacaatctatgaggct

SEQ ID NO: 3111510 - DNA, 25 bp, Homo sapien
gggagaaacaatctatgaggcttct

SEQ ID NO: 3111511 - DNA, 25 bp, Homo sapien
agaaacaatctatgaggcttctggg

SEQ ID NO: 3111512 - DNA, 25 bp, Homo sapien
ctgcccaggccggagaccgacccgc

SEQ ID NO: 3111513 - DNA, 25 bp, Homo sapien
cagccgcaggcgcggcccgtggttc

SEQ ID NO: 3111514 - DNA, 25 bp, Homo sapien
gccgcaggcgcggcccgtggttctt

SEQ ID NO: 3111515 - DNA, 25 bp, Homo sapien
agccgcaggcgcggcccgtggttct

SEQ ID NO: 3111516 - DNA, 25 bp, Homo sapien
ccgcaggcgcggcccgtggttcttc

SEQ ID NO: 3111517 - DNA, 25 bp, Homo sapien
gcgatgaagacgtcgtcaggccgca

SEQ ID NO: 3111518 - DNA, 25 bp, Homo sapien
gggcgggcgcgcggggcagcggcag

SEQ ID NO: 3111519 - DNA, 25 bp, Homo sapien
gcgggcgcgcggggcagcggcagcg

SEQ ID NO: 3111520 - DNA, 25 bp, Homo sapien
gggcgcgcggggcagcggcagcggc

SEQ ID NO: 3111521 - DNA, 25 bp, Homo sapien
gcagcgggccgggacgggggcgcgc

SEQ ID NO: 3111522 - DNA, 25 bp, Homo sapien
ccagcgcgaggcaggcccggcacag

SEQ ID NO: 3111523 - DNA, 25 bp, Homo sapien
cgcggccagcgcgaggcaggcccgg

SEQ ID NO: 3111524 - DNA, 25 bp, Homo sapien
cggccagcgcgaggcaggcccggca

SEQ ID NO: 3111525 - DNA, 25 bp, Homo sapien
ccgcggccagcgcgaggcaggcccg

SEQ ID NO: 3111526 - DNA, 25 bp, Homo sapien
ccctcacagcagtaggtcagacctc

SEQ ID NO: 3111527 - DNA, 25 bp, Homo sapien
tcacagcagtaggtcagacctcgtc

SEQ ID NO: 3111528 - DNA, 25 bp, Homo sapien
ctcacagcagtaggtcagacctcgt

SEQ ID NO: 3111529 - DNA, 25 bp, Homo sapien
cctcacagcagtaggtcagacctcg

SEQ ID NO: 3111530 - DNA, 25 bp, Homo sapien
cagcaacgtggccatctacggtggc

SEQ ID NO: 3111531 - DNA, 25 bp, Homo sapien
tgtaggagggtgaggtctctcacaa

SEQ ID NO: 3111532 - DNA, 25 bp, Homo sapien
ggtcttaggcattctccgagcgggt

SEQ ID NO: 3111533 - DNA, 25 bp, Homo sapien
tcactgcctgtgacgccaggtctct

SEQ ID NO: 3111534 - DNA, 25 bp, Homo sapien
tcccggatgagcaccaacatgtgag

SEQ ID NO: 3111535 - DNA, 25 bp, Homo sapien
tacgcctcatgtctcaagatgctgg

SEQ ID NO: 3111536 - DNA, 25 bp, Homo sapien
tgtggactcacacagcaaggtggct

SEQ ID NO: 3111537 - DNA, 25 bp, Homo sapien
tggcggcagccttcaataccacggt

SEQ ID NO: 3111538 - DNA, 25 bp, Homo sapien
tcacttttgcacacgcgtgctgagg

SEQ ID NO: 3111539 - DNA, 25 bp, Homo sapien
tttcttaagtaggacgtgtccaggc

SEQ ID NO: 3111540 - DNA, 25 bp, Homo sapien
agtaggacgtgtccaggctccagca

SEQ ID NO: 3111541 - DNA, 25 bp, Homo sapien
gggacatgggcgtgtctttccacat

SEQ ID NO: 3111542 - DNA, 25 bp, Homo sapien
gacttcggagaagccacctggtgtt

SEQ ID NO: 3111543 - DNA, 25 bp, Homo sapien
tgcccatgacttcggagaagccacc

SEQ ID NO: 3111544 - DNA, 25 bp, Homo sapien
cagggcactgcccatgacttcggag

SEQ ID NO: 3111545 - DNA, 25 bp, Homo sapien
gggcctctttccaggccagagactt

SEQ ID NO: 3111546 - DNA, 25 bp, Homo sapien
ttggaggctcgcttcttgcagcagc

SEQ ID NO: 3111547 - DNA, 25 bp, Homo sapien
ggctcgcttcttgcagcagccgcgg

SEQ ID NO: 3111548 - DNA, 25 bp, Homo sapien
ctgcagtctctttggaggctcgctt

SEQ ID NO: 3111549 - DNA, 25 bp, Homo sapien
tctttggaggctcgcttcttgcagc

SEQ ID NO: 3111550 - DNA, 25 bp, Homo sapien
aagcaaggggccgtcctgaggcatc

SEQ ID NO: 3111551 - DNA, 25 bp, Homo sapien
atgccaccttgagccacgttgcaaa

SEQ ID NO: 3111552 - DNA, 25 bp, Homo sapien
ctgggcgggcaccagacctgccacc

SEQ ID NO: 3111553 - DNA, 25 bp, Homo sapien
atccatgccaccttgagccacgttg

SEQ ID NO: 3111554 - DNA, 25 bp, Homo sapien
tggtggcttgcagccggaacccact

SEQ ID NO: 3111555 - DNA, 25 bp, Homo sapien
ccttggtggcttgcagccggaaccc

SEQ ID NO: 3111556 - DNA, 25 bp, Homo sapien
gtggcttgcagccggaacccactca

SEQ ID NO: 3111557 - DNA, 25 bp, Homo sapien
cttggtggcttgcagccggaaccca

SEQ ID NO: 3111558 - DNA, 25 bp, Homo sapien
tttccacactggtcacactttgcat

SEQ ID NO: 3111559 - DNA, 25 bp, Homo sapien
ctttgggtttccacactggtcacac

SEQ ID NO: 3111560 - DNA, 25 bp, Homo sapien
tttgggtttccacactggtcacact

SEQ ID NO: 3111561 - DNA, 25 bp, Homo sapien
gggtttccacactggtcacactttg

SEQ ID NO: 3111562 - DNA, 25 bp, Homo sapien
aaaagaacaaaagggtgctggtgag

SEQ ID NO: 3111563 - DNA, 25 bp, Homo sapien
gaaaagaacaaaagggtgctggtga

SEQ ID NO: 3111564 - DNA, 25 bp, Homo sapien
tcctgcaggaaacggataggaagca

SEQ ID NO: 3111565 - DNA, 25 bp, Homo sapien
tgcaggctggccacgtctgcttttc

SEQ ID NO: 3111566 - DNA, 25 bp, Homo sapien
tttccttccgtgagcaatgggtgag

SEQ ID NO: 3111567 - DNA, 25 bp, Homo sapien
ccgcaggacgagcagccttatctgt

SEQ ID NO: 3111568 - DNA, 25 bp, Homo sapien
cgaaggtcttgtgggggttcctcag

SEQ ID NO: 3111569 - DNA, 25 bp, Homo sapien
ggtcttgtgggggttcctcagctgc

SEQ ID NO: 3111570 - DNA, 25 bp, Homo sapien
ttcttggacaggacctccgtgccac

SEQ ID NO: 3111571 - DNA, 25 bp, Homo sapien
agggcccgcttgctgcgcgcacctg

SEQ ID NO: 3111572 - DNA, 25 bp, Homo sapien
ctgaggggagggcagcgggcagagc

SEQ ID NO: 3111573 - DNA, 25 bp, Homo sapien
gggcagcgggcagagcccaaggaca

SEQ ID NO: 3111574 - DNA, 25 bp, Homo sapien
ggagggcagcgggcagagcccaagg

SEQ ID NO: 3111575 - DNA, 25 bp, Homo sapien
tgaggggagggcagcgggcagagcc

SEQ ID NO: 3111576 - DNA, 25 bp, Homo sapien
tcaggactcgtcactagggagtccg

SEQ ID NO: 3111577 - DNA, 25 bp, Homo sapien
cgtcactagggagtccggggcctct

SEQ ID NO: 3111578 - DNA, 25 bp, Homo sapien
gtgccgctgctgtgaggagtgccct

SEQ ID NO: 3111579 - DNA, 25 bp, Homo sapien
tttccctcgggcagcccattcagga

SEQ ID NO: 3111580 - DNA, 25 bp, Homo sapien
agatccagtggaagggcaagtcgcc

SEQ ID NO: 3111581 - DNA, 25 bp, Homo sapien
cccggccggatgtagggctggcaga

SEQ ID NO: 3111582 - DNA, 25 bp, Homo sapien
cggccggatgtagggctggcagatc

SEQ ID NO: 3111583 - DNA, 25 bp, Homo sapien
gcaagtcgccggtgggcttcgctcc

SEQ ID NO: 3111584 - DNA, 25 bp, Homo sapien
ctgcaaaagcccaaggccctggtca

SEQ ID NO: 3111585 - DNA, 25 bp, Homo sapien
aaagcccaaggccctggtcatggcc

SEQ ID NO: 3111586 - DNA, 25 bp, Homo sapien
aaaagcccaaggccctggtcatggc

SEQ ID NO: 3111587 - DNA, 25 bp, Homo sapien
gcaaaagcccaaggccctggtcatg

SEQ ID NO: 3111588 - DNA, 25 bp, Homo sapien
gccgggctcccaccagccccagcac

SEQ ID NO: 3111589 - DNA, 25 bp, Homo sapien
tgcaaggccgggctcccaccagccc

SEQ ID NO: 3111590 - DNA, 25 bp, Homo sapien
cccctgcaaggccgggctcccacca

SEQ ID NO: 3111591 - DNA, 25 bp, Homo sapien
ctgcaaggccgggctcccaccagcc

SEQ ID NO: 3111592 - DNA, 25 bp, Homo sapien
ctggctcacagcagcgatgccctcc

SEQ ID NO: 3111593 - DNA, 25 bp, Homo sapien
ggctcacagcagcgatgccctccag

SEQ ID NO: 3111594 - DNA, 25 bp, Homo sapien
tggctcacagcagcgatgccctcca

SEQ ID NO: 3111595 - DNA, 25 bp, Homo sapien
agggctccggccctcgaacagggcg

SEQ ID NO: 3111596 - DNA, 25 bp, Homo sapien
cgcacgatgtccagatactcctcgg

SEQ ID NO: 3111597 - DNA, 25 bp, Homo sapien
ggccagctcccacacggcagggctc

SEQ ID NO: 3111598 - DNA, 25 bp, Homo sapien
agaggtgggcccggacgtaggacag

SEQ ID NO: 3111599 - DNA, 25 bp, Homo sapien
ctgggcggtggtatcaggccgtgtg

SEQ ID NO: 3111600 - DNA, 25 bp, Homo sapien
ggcggtggtatcaggccgtgtgcat

SEQ ID NO: 3111601 - DNA, 25 bp, Homo sapien
gcggtggtatcaggccgtgtgcatg

SEQ ID NO: 3111602 - DNA, 25 bp, Homo sapien
gtatcaggccgtgtgcatggggccc

SEQ ID NO: 3111603 - DNA, 25 bp, Homo sapien
aaacacagggatggccacagccttc

SEQ ID NO: 3111604 - DNA, 25 bp, Homo sapien
ctcatgacgccctgcacacccgtgt

SEQ ID NO: 3111605 - DNA, 25 bp, Homo sapien
gcactggatgttcccgttagcaaac

SEQ ID NO: 3111606 - DNA, 25 bp, Homo sapien
ctgcacacccgtgtcccggaggcag

SEQ ID NO: 3111607 - DNA, 25 bp, Homo sapien
gctccttggtgcgtccgtgcaccgt

SEQ ID NO: 3111608 - DNA, 25 bp, Homo sapien
agccttgatatgctcccaggacgct

SEQ ID NO: 3111609 - DNA, 25 bp, Homo sapien
cgcacagccttgatatgctcccagg

SEQ ID NO: 3111610 - DNA, 25 bp, Homo sapien
tggtgcgtccgtgcaccgtcagcaa

SEQ ID NO: 3111611 - DNA, 25 bp, Homo sapien
acagagcagtggtcgcttgacccct

SEQ ID NO: 3111612 - DNA, 25 bp, Homo sapien
gacagagcagtggtcgcttgacccc

SEQ ID NO: 3111613 - DNA, 25 bp, Homo sapien
ggacagagcagtggtcgcttgaccc

SEQ ID NO: 3111614 - DNA, 25 bp, Homo sapien
cgggaagtggcagcatccccactgc

SEQ ID NO: 3111615 - DNA, 25 bp, Homo sapien
tctgcactctgtgggaacctcaggc

SEQ ID NO: 3111616 - DNA, 25 bp, Homo sapien
cccgggtcaccaaggttgctgtcca

SEQ ID NO: 3111617 - DNA, 25 bp, Homo sapien
agggacctttccctcaccatatcag

SEQ ID NO: 3111618 - DNA, 25 bp, Homo sapien
tcagctatgtcctctgcgcaaaggc

SEQ ID NO: 3111619 - DNA, 25 bp, Homo sapien
tgccggcctctgtgacactaggaat

SEQ ID NO: 3111620 - DNA, 25 bp, Homo sapien
tgccgacattactctctccacaggg

SEQ ID NO: 3111621 - DNA, 25 bp, Homo sapien
cactaggaatatgtcagagatgccg

SEQ ID NO: 3111622 - DNA, 25 bp, Homo sapien
cacggtcttgtcaatctccgggaag

SEQ ID NO: 3111623 - DNA, 25 bp, Homo sapien
catctgggcgtacctcacggtcttg

SEQ ID NO: 3111624 - DNA, 25 bp, Homo sapien
cagagagtttctcgtgggccagcaa

SEQ ID NO: 3111625 - DNA, 25 bp, Homo sapien
ggattttgcacgtgacaggaacaga

SEQ ID NO: 3111626 - DNA, 25 bp, Homo sapien
cgtcctgcagaaaggcgccatagtg

SEQ ID NO: 3111627 - DNA, 25 bp, Homo sapien
cactcgtcctgcagaaaggcgccat

SEQ ID NO: 3111628 - DNA, 25 bp, Homo sapien
ctcgtcctgcagaaaggcgccatag

SEQ ID NO: 3111629 - DNA, 25 bp, Homo sapien
gtcctgcagaaaggcgccatagtga

SEQ ID NO: 3111630 - DNA, 25 bp, Homo sapien
gggccgaagccttgcaccccctctg

SEQ ID NO: 3111631 - DNA, 25 bp, Homo sapien
gtgttaaggctggtggggccgaagc

SEQ ID NO: 3111632 - DNA, 25 bp, Homo sapien
tttcctgcatccacgcaggccagga

SEQ ID NO: 3111633 - DNA, 25 bp, Homo sapien
ctgtgttaaggctggtggggccgaa

SEQ ID NO: 3111634 - DNA, 25 bp, Homo sapien
cccccatgctccacatggagctcac

SEQ ID NO: 3111635 - DNA, 25 bp, Homo sapien
gcccccatgctccacatggagctca

SEQ ID NO: 3111636 - DNA, 25 bp, Homo sapien
ggtcaatggcgtcacagtaatcctg

SEQ ID NO: 3111637 - DNA, 25 bp, Homo sapien
caagttcaggtcaatggcgtcacag

SEQ ID NO: 3111638 - DNA, 25 bp, Homo sapien
agcccaagttcaggtcaatggcgtc

SEQ ID NO: 3111639 - DNA, 25 bp, Homo sapien
gttcaggtcaatggcgtcacagtaa

SEQ ID NO: 3111640 - DNA, 25 bp, Homo sapien
gggcacacctcgcagtacaggttct

SEQ ID NO: 3111641 - DNA, 25 bp, Homo sapien
tgggcatgcagcatgggcgtgtagc

SEQ ID NO: 3111642 - DNA, 25 bp, Homo sapien
ttggcgtcgcggacaaagacctggg

SEQ ID NO: 3111643 - DNA, 25 bp, Homo sapien
caggttctccttccggtagttggcg

SEQ ID NO: 3111644 - DNA, 25 bp, Homo sapien
agtaccaccgttgggtcacacgcgg

SEQ ID NO: 3111645 - DNA, 25 bp, Homo sapien
tggagaacggccactccagtgccgc

SEQ ID NO: 3111646 - DNA, 25 bp, Homo sapien
gactcaactcagaggcagcggtcac

SEQ ID NO: 3111647 - DNA, 25 bp, Homo sapien
gggaagaaaccttgacgccagcgtc

SEQ ID NO: 3111648 - DNA, 25 bp, Homo sapien
cctcgcgagactcctccggagccac

SEQ ID NO: 3111649 - DNA, 25 bp, Homo sapien
cccggctggcccgaaacgccacagg

SEQ ID NO: 3111650 - DNA, 25 bp, Homo sapien
acaggggcgcccctcgcgagactcc

SEQ ID NO: 3111651 - DNA, 25 bp, Homo sapien
ccggctggcccgaaacgccacaggg

SEQ ID NO: 3111652 - DNA, 25 bp, Homo sapien
gagcccacacgcctccgcgtcctca

SEQ ID NO: 3111653 - DNA, 25 bp, Homo sapien
gtgtccgccgcgcgcctttggctcc

SEQ ID NO: 3111654 - DNA, 25 bp, Homo sapien
aggtgcccggtcctgcgcggtccgg

SEQ ID NO: 3111655 - DNA, 25 bp, Homo sapien
cgccaccggaaggtgcccggtcctg

SEQ ID NO: 3111656 - DNA, 25 bp, Homo sapien
cgcagccgggcccaaggctccgcgc

SEQ ID NO: 3111657 - DNA, 25 bp, Homo sapien
tgggcctcgctgaggcgcacataag

SEQ ID NO: 3111658 - DNA, 25 bp, Homo sapien
catgtggaaattgggcctcgctgag

SEQ ID NO: 3111659 - DNA, 25 bp, Homo sapien
ctggaaacgaggcatgtggaaattg

SEQ ID NO: 3111660 - DNA, 25 bp, Homo sapien
ctgaggcgcacataaggcccgggcc

SEQ ID NO: 3111661 - DNA, 25 bp, Homo sapien
ccccaagttcgcattgggggcttca

SEQ ID NO: 3111662 - DNA, 25 bp, Homo sapien
agcccccaagttcgcattgggggct

SEQ ID NO: 3111663 - DNA, 25 bp, Homo sapien
cccagcccccaagttcgcattgggg

SEQ ID NO: 3111664 - DNA, 25 bp, Homo sapien
cccaagttcgcattgggggcttcat

SEQ ID NO: 3111665 - DNA, 25 bp, Homo sapien
ttgcggaaaatcaccctccagggac

SEQ ID NO: 3111666 - DNA, 25 bp, Homo sapien
agccttcgatcgactttcctacccg

SEQ ID NO: 3111667 - DNA, 25 bp, Homo sapien
tccgccgctgcgttgcggaaaatca

SEQ ID NO: 3111668 - DNA, 25 bp, Homo sapien
gatcgactttcctacccgccgtgga

SEQ ID NO: 3111669 - DNA, 25 bp, Homo sapien
ctgtgggcatgctgtgccttccgga

SEQ ID NO: 3111670 - DNA, 25 bp, Homo sapien
tgctttgcccattcccgaaatccaa

SEQ ID NO: 3111671 - DNA, 25 bp, Homo sapien
atgctgtgccttccggaaccccggg

SEQ ID NO: 3111672 - DNA, 25 bp, Homo sapien
ttcactgtagtcctggcccactacc

SEQ ID NO: 3111673 - DNA, 25 bp, Homo sapien
ccaaacatggagttggtgcccggcg

SEQ ID NO: 3111674 - DNA, 25 bp, Homo sapien
ggcaggacccttcaatcccgttgca

SEQ ID NO: 3111675 - DNA, 25 bp, Homo sapien
agcccagttcctgcgggcacgggca

SEQ ID NO: 3111676 - DNA, 25 bp, Homo sapien
cataagggcagcaccccacgggtgg

SEQ ID NO: 3111677 - DNA, 25 bp, Homo sapien
ggacggatactttcccgtcgcatac

SEQ ID NO: 3111678 - DNA, 25 bp, Homo sapien
cgtggacggatactttcccgtcgca

SEQ ID NO: 3111679 - DNA, 25 bp, Homo sapien
tgacgtggacggatactttcccgtc

SEQ ID NO: 3111680 - DNA, 25 bp, Homo sapien
gatgacgtggacggatactttcccg

SEQ ID NO: 3111681 - DNA, 25 bp, Homo sapien
ccgttcccgtcaggccccttgcgca

SEQ ID NO: 3111682 - DNA, 25 bp, Homo sapien
cgttcccgtcaggccccttgcgcac

SEQ ID NO: 3111683 - DNA, 25 bp, Homo sapien
cttgtagtagaaggaccgggccgca

SEQ ID NO: 3111684 - DNA, 25 bp, Homo sapien
catcacgttgccatggtacttggcc

SEQ ID NO: 3111685 - DNA, 25 bp, Homo sapien
tcttggcgcgcagtagcatcacgtt

SEQ ID NO: 3111686 - DNA, 25 bp, Homo sapien
ccttgggtgtgtactgctcagcggc

SEQ ID NO: 3111687 - DNA, 25 bp, Homo sapien
ctgccctgtgctacactgcgggtgg

SEQ ID NO: 3111688 - DNA, 25 bp, Homo sapien
ggcctgccctgtgctacactgcggg

SEQ ID NO: 3111689 - DNA, 25 bp, Homo sapien
ctgtgctacactgcgggtgggcttt

SEQ ID NO: 3111690 - DNA, 25 bp, Homo sapien
ccctgtgctacactgcgggtgggct

SEQ ID NO: 3111691 - DNA, 25 bp, Homo sapien
aactgctgcacgaagaagcatatgg

SEQ ID NO: 3111692 - DNA, 25 bp, Homo sapien
gaagaagcatatggcctccgtctca

SEQ ID NO: 3111693 - DNA, 25 bp, Homo sapien
cacgaagaagcatatggcctccgtc

SEQ ID NO: 3111694 - DNA, 25 bp, Homo sapien
gctgcacgaagaagcatatggcctc

SEQ ID NO: 3111695 - DNA, 25 bp, Homo sapien
ctgggtgtaggccagtacgtaggtg

SEQ ID NO: 3111696 - DNA, 25 bp, Homo sapien
taggccagtacgtaggtgggcgagc

SEQ ID NO: 3111697 - DNA, 25 bp, Homo sapien
caggccccgtaggagtagccggcca

SEQ ID NO: 3111698 - DNA, 25 bp, Homo sapien
gtgggcgagccgtcgaacaggaaga

SEQ ID NO: 3111699 - DNA, 25 bp, Homo sapien
ctgatgcagtcgatgtagtaggcag

SEQ ID NO: 3111700 - DNA, 25 bp, Homo sapien
cagtcgatgtagtaggcagccaggc

SEQ ID NO: 3111701 - DNA, 25 bp, Homo sapien
gctgtggatgctgtcaaggggcgca

SEQ ID NO: 3111702 - DNA, 25 bp, Homo sapien
gatgcagtcgatgtagtaggcagcc

SEQ ID NO: 3111703 - DNA, 25 bp, Homo sapien
caccgcttccagaggagggcccggg

SEQ ID NO: 3111704 - DNA, 25 bp, Homo sapien
cgcttccagaggagggcccgggagt

SEQ ID NO: 3111705 - DNA, 25 bp, Homo sapien
ccgcttccagaggagggcccgggag

SEQ ID NO: 3111706 - DNA, 25 bp, Homo sapien
gcttccagaggagggcccgggagta

SEQ ID NO: 3111707 - DNA, 25 bp, Homo sapien
caggctgtggaacacggtggtggag

SEQ ID NO: 3111708 - DNA, 25 bp, Homo sapien
tggagccctcgattgggtgcaccag

SEQ ID NO: 3111709 - DNA, 25 bp, Homo sapien
tccgggttcaccagcagggagcgca

SEQ ID NO: 3111710 - DNA, 25 bp, Homo sapien
tctgcacggagttgagccgcatcag

SEQ ID NO: 3111711 - DNA, 25 bp, Homo sapien
ccactcccgcctggccacccacacg

SEQ ID NO: 3111712 - DNA, 25 bp, Homo sapien
ccccactcccgcctggccacccaca

SEQ ID NO: 3111713 - DNA, 25 bp, Homo sapien
ctcccgcctggccacccacacgcac

SEQ ID NO: 3111714 - DNA, 25 bp, Homo sapien
gaccccactcccgcctggccaccca

SEQ ID NO: 3111715 - DNA, 25 bp, Homo sapien
tccacgctcatgagcgagtccaggc

SEQ ID NO: 3111716 - DNA, 25 bp, Homo sapien
agctgtccaggttgacagcagccaa

SEQ ID NO: 3111717 - DNA, 25 bp, Homo sapien
tttccggagcgtgagttgccgcacc

SEQ ID NO: 3111718 - DNA, 25 bp, Homo sapien
tcatccgcctttgaggacagctcct

SEQ ID NO: 3111719 - DNA, 25 bp, Homo sapien
ctggaagggatgcgccgggtcggca

SEQ ID NO: 3111720 - DNA, 25 bp, Homo sapien
gaagggatgcgccgggtcggcaact

SEQ ID NO: 3111721 - DNA, 25 bp, Homo sapien
ggaagggatgcgccgggtcggcaac

SEQ ID NO: 3111722 - DNA, 25 bp, Homo sapien
tggaagggatgcgccgggtcggcaa

SEQ ID NO: 3111723 - DNA, 25 bp, Homo sapien
ggcagcgtgccactgacgatcgtgt

SEQ ID NO: 3111724 - DNA, 25 bp, Homo sapien
tgacgatcgtgtcgttggtgctcat

SEQ ID NO: 3111725 - DNA, 25 bp, Homo sapien
tgtccctgtccctataggccgcagc

SEQ ID NO: 3111726 - DNA, 25 bp, Homo sapien
ctccaggcaggacgccatgcgctgg

SEQ ID NO: 3111727 - DNA, 25 bp, Homo sapien
aaaatgcccacgtcgccgatggcgc

SEQ ID NO: 3111728 - DNA, 25 bp, Homo sapien
accaaaatgcccacgtcgccgatgg

SEQ ID NO: 3111729 - DNA, 25 bp, Homo sapien
caccaaaatgcccacgtcgccgatg

SEQ ID NO: 3111730 - DNA, 25 bp, Homo sapien
ccgatggcgccccactgcacggcca

SEQ ID NO: 3111731 - DNA, 25 bp, Homo sapien
ttctcacagatacgctccatggcgg

SEQ ID NO: 3111732 - DNA, 25 bp, Homo sapien
tccatggcggaattggcaaagccgt

SEQ ID NO: 3111733 - DNA, 25 bp, Homo sapien
gcaaagccgtagttgctctgtcccg

SEQ ID NO: 3111734 - DNA, 25 bp, Homo sapien
cacaaagtagtccagctcagggcac

SEQ ID NO: 3111735 - DNA, 25 bp, Homo sapien
caggttcagggtgccgctgtacttg

SEQ ID NO: 3111736 - DNA, 25 bp, Homo sapien
tcagggtgccgctgtacttgggctt

SEQ ID NO: 3111737 - DNA, 25 bp, Homo sapien
gtgccgctgtacttgggcttgcaga

SEQ ID NO: 3111738 - DNA, 25 bp, Homo sapien
gccgctgtacttgggcttgcagacg

SEQ ID NO: 3111739 - DNA, 25 bp, Homo sapien
cccacgggcccaagctgcgccgcct

SEQ ID NO: 3111740 - DNA, 25 bp, Homo sapien
cgggccccctccagtgagctgatgt

SEQ ID NO: 3111741 - DNA, 25 bp, Homo sapien
ggccaggttgaagacgccgcccacg

SEQ ID NO: 3111742 - DNA, 25 bp, Homo sapien
ggacacctgcacctgtacgccctgg

SEQ ID NO: 3111743 - DNA, 25 bp, Homo sapien
gccagggtacggtctcttccctaca

SEQ ID NO: 3111744 - DNA, 25 bp, Homo sapien
cagggtacggtctcttccctacacg

SEQ ID NO: 3111745 - DNA, 25 bp, Homo sapien
ttggagatggccgacatcagcttgg

SEQ ID NO: 3111746 - DNA, 25 bp, Homo sapien
gaagtcaacacgagcttctgcaccc

SEQ ID NO: 3111747 - DNA, 25 bp, Homo sapien
agcgatgatgtagctcttgtgggcc

SEQ ID NO: 3111748 - DNA, 25 bp, Homo sapien
gtccggatcccggagcgagaagtca

SEQ ID NO: 3111749 - DNA, 25 bp, Homo sapien
ctgcgtccaagcagcacccaccggc

SEQ ID NO: 3111750 - DNA, 25 bp, Homo sapien
tgcgtccaagcagcacccaccggct

SEQ ID NO: 3111751 - DNA, 25 bp, Homo sapien
ccatggaacaccgtgcacttgaggg

SEQ ID NO: 3111752 - DNA, 25 bp, Homo sapien
tggaatgtcacgttcttcaggaaga

SEQ ID NO: 3111753 - DNA, 25 bp, Homo sapien
gccagtcagcactgctctcgttgaa

SEQ ID NO: 3111754 - DNA, 25 bp, Homo sapien
gttgaagaacgcatccagtaggacc

SEQ ID NO: 3111755 - DNA, 25 bp, Homo sapien
gcttctcttccgccaaggagttcaa

SEQ ID NO: 3111756 - DNA, 25 bp, Homo sapien
aaggtcgaatttgccaatttccagg

SEQ ID NO: 3111757 - DNA, 25 bp, Homo sapien
cgagcgggtggttctgagaaaggtc

SEQ ID NO: 3111758 - DNA, 25 bp, Homo sapien
gtgcgtagccaagcacctcacgctg

SEQ ID NO: 3111759 - DNA, 25 bp, Homo sapien
cgcccgtgtgccacagcacatgctg

SEQ ID NO: 3111760 - DNA, 25 bp, Homo sapien
catgctgctcgaaggatgtgtcccg

SEQ ID NO: 3111761 - DNA, 25 bp, Homo sapien
gggagttggcgaagctggtgctgtc

SEQ ID NO: 3111762 - DNA, 25 bp, Homo sapien
ctggcctggaggtacgcccgcttct

SEQ ID NO: 3111763 - DNA, 25 bp, Homo sapien
ctgtagacgacaggcaccgaggccg

SEQ ID NO: 3111764 - DNA, 25 bp, Homo sapien
caccaccagcgcgtagtaggccgtg

SEQ ID NO: 3111765 - DNA, 25 bp, Homo sapien
cccgagcccgagtggatgagcagcg

SEQ ID NO: 3111766 - DNA, 25 bp, Homo sapien
tgaagacgcggcagcccagactgag

SEQ ID NO: 3111767 - DNA, 25 bp, Homo sapien
gcacatcccagaggaagtccggtga

SEQ ID NO: 3111768 - DNA, 25 bp, Homo sapien
ttggcaggcaccagtcccatcacac

SEQ ID NO: 3111769 - DNA, 25 bp, Homo sapien
ttgccgctggcgtctcggcccgaga

SEQ ID NO: 3111770 - DNA, 25 bp, Homo sapien
actccatacctagcaggctgtcctg

SEQ ID NO: 3111771 - DNA, 25 bp, Homo sapien
tgagggtgctcacaaaggcatgtgc

SEQ ID NO: 3111772 - DNA, 25 bp, Homo sapien
gaggcgtagtagaccgtgcagagct

SEQ ID NO: 3111773 - DNA, 25 bp, Homo sapien
gccagcatgatgtcgcggaagttga

SEQ ID NO: 3111774 - DNA, 25 bp, Homo sapien
gggacagcttgccagtggccagcat

SEQ ID NO: 3111775 - DNA, 25 bp, Homo sapien
tcgcggtagacgttcatcaccaggt

SEQ ID NO: 3111776 - DNA, 25 bp, Homo sapien
caccaggtctccctgcaacaccttc

SEQ ID NO: 3111777 - DNA, 25 bp, Homo sapien
ggccccgtcgcggtagacgttcatc

SEQ ID NO: 3111778 - DNA, 25 bp, Homo sapien
agttctgcggagcccgggtccacct

SEQ ID NO: 3111779 - DNA, 25 bp, Homo sapien
cacacaggccgggaagagtcttcgt

SEQ ID NO: 3111780 - DNA, 25 bp, Homo sapien
gggctctcggcggagacagttcacc

SEQ ID NO: 3111781 - DNA, 25 bp, Homo sapien
accacgcccgaggtggcacagttga

SEQ ID NO: 3111782 - DNA, 25 bp, Homo sapien
aagagtcttcgtcagccaggatgcc

SEQ ID NO: 3111783 - DNA, 25 bp, Homo sapien
cactcggcaagttgggaggtggggt

SEQ ID NO: 3111784 - DNA, 25 bp, Homo sapien
cacactcggcaagttgggaggtggg

SEQ ID NO: 3111785 - DNA, 25 bp, Homo sapien
actcggcaagttgggaggtggggtg

SEQ ID NO: 3111786 - DNA, 25 bp, Homo sapien
acactcggcaagttgggaggtgggg

SEQ ID NO: 3111787 - DNA, 25 bp, Homo sapien
gagactccacccagcggaagctggt

SEQ ID NO: 3111788 - DNA, 25 bp, Homo sapien
agcgtggagccgtagaaggacttct

SEQ ID NO: 3111789 - DNA, 25 bp, Homo sapien
tggtatcgtccaccggcaggaagat

SEQ ID NO: 3111790 - DNA, 25 bp, Homo sapien
cggcggcacaggaagagcgtggagc

SEQ ID NO: 3111791 - DNA, 25 bp, Homo sapien
ctgggatgcgggaatacaggtgacc

SEQ ID NO: 3111792 - DNA, 25 bp, Homo sapien
tcaggatgccctggccatactgcgg

SEQ ID NO: 3111793 - DNA, 25 bp, Homo sapien
gtgaggaaggccacgatgtccccga

SEQ ID NO: 3111794 - DNA, 25 bp, Homo sapien
ggtctgcgggatcccactggccctg

SEQ ID NO: 3111795 - DNA, 25 bp, Homo sapien
tccagtccgggcaccaccatcttca

SEQ ID NO: 3111796 - DNA, 25 bp, Homo sapien
tgggccccatccagtccgggcacca

SEQ ID NO: 3111797 - DNA, 25 bp, Homo sapien
tgttctccacggcagtgtccaggca

SEQ ID NO: 3111798 - DNA, 25 bp, Homo sapien
cagccgacaacagccggggcagttc

SEQ ID NO: 3111799 - DNA, 25 bp, Homo sapien
agggcagcgcgctcagacaggcacc

SEQ ID NO: 3111800 - DNA, 25 bp, Homo sapien
tgtggagcccggagatgtggacgcc

SEQ ID NO: 3111801 - DNA, 25 bp, Homo sapien
ccgcggggccgactcagtgtggagc

SEQ ID NO: 3111802 - DNA, 25 bp, Homo sapien
tggggagtgaagcaaaacttctcca

SEQ ID NO: 3111803 - DNA, 25 bp, Homo sapien
cttggccgagcccaggatggacatc

SEQ ID NO: 3111804 - DNA, 25 bp, Homo sapien
gcatggtgtccatgaagctcaccca

SEQ ID NO: 3111805 - DNA, 25 bp, Homo sapien
tggatggcggtgacacgggtgggca

SEQ ID NO: 3111806 - DNA, 25 bp, Homo sapien
tgggccttgtcctgcagtgtgtaca

SEQ ID NO: 3111807 - DNA, 25 bp, Homo sapien
tggggtcagggtcatcccactggta

SEQ ID NO: 3111808 - DNA, 25 bp, Homo sapien
tgccctggaaatgagggccgtagtc

SEQ ID NO: 3111809 - DNA, 25 bp, Homo sapien
tagtcgtagccacgcagacgcagct

SEQ ID NO: 3111810 - DNA, 25 bp, Homo sapien
ctttccgggtggtcgaagagcctgg

SEQ ID NO: 3111811 - DNA, 25 bp, Homo sapien
gccgttctctgacacctcgaaggca

SEQ ID NO: 3111812 - DNA, 25 bp, Homo sapien
actcactaccaggttgccgttctct

SEQ ID NO: 3111813 - DNA, 25 bp, Homo sapien
acctcgaaggcacgggaggcctcca

SEQ ID NO: 3111814 - DNA, 25 bp, Homo sapien
taccaggttgccgttctctgacacc

SEQ ID NO: 3111815 - DNA, 25 bp, Homo sapien
cgaccgtcgagggtgtggtccacca

SEQ ID NO: 3111816 - DNA, 25 bp, Homo sapien
actatgctcaggtagccagtggcgg

SEQ ID NO: 3111817 - DNA, 25 bp, Homo sapien
gggccagcgtcttccacactatgct

SEQ ID NO: 3111818 - DNA, 25 bp, Homo sapien
tggtggcctggtgcagcaccacatc

SEQ ID NO: 3111819 - DNA, 25 bp, Homo sapien
caaggcattggggttggcgtcgatg

SEQ ID NO: 3111820 - DNA, 25 bp, Homo sapien
cgatgttgtagatggcggctgaggg

SEQ ID NO: 3111821 - DNA, 25 bp, Homo sapien
tgggaactccacaggtgggaacaag

SEQ ID NO: 3111822 - DNA, 25 bp, Homo sapien
ctcggcggccggcacgtcccaggcc

SEQ ID NO: 3111823 - DNA, 25 bp, Homo sapien
ctacggagaagggaggcatgggtag

SEQ ID NO: 3111824 - DNA, 25 bp, Homo sapien
acggagaagggaggcatgggtagca

SEQ ID NO: 3111825 - DNA, 25 bp, Homo sapien
ggagaagggaggcatgggtagcaca

SEQ ID NO: 3111826 - DNA, 25 bp, Homo sapien
gagaagggaggcatgggtagcacac

SEQ ID NO: 3111827 - DNA, 25 bp, Homo sapien
ccactgcctgcggtggaccatccag

SEQ ID NO: 3111828 - DNA, 25 bp, Homo sapien
ccacccactgcctgcggtggaccat

SEQ ID NO: 3111829 - DNA, 25 bp, Homo sapien
acccactgcctgcggtggaccatcc

SEQ ID NO: 3111830 - DNA, 25 bp, Homo sapien
cactgcctgcggtggaccatccagg

SEQ ID NO: 3111831 - DNA, 25 bp, Homo sapien
tgcagcctgccgatgccggccagga

SEQ ID NO: 3111832 - DNA, 25 bp, Homo sapien
atgatggtgcagctcggcttcaggc

SEQ ID NO: 3111833 - DNA, 25 bp, Homo sapien
gaagaactccaggttgtccctgtga

SEQ ID NO: 3111834 - DNA, 25 bp, Homo sapien
agctcggcttcaggccacgcttcag

SEQ ID NO: 3111835 - DNA, 25 bp, Homo sapien
ctgcagcagggcgtggggcgcgatc

SEQ ID NO: 3111836 - DNA, 25 bp, Homo sapien
gggcgtggggcgcgatctccagcac

SEQ ID NO: 3111837 - DNA, 25 bp, Homo sapien
cagggcgtggggcgcgatctccagc

SEQ ID NO: 3111838 - DNA, 25 bp, Homo sapien
gcagcagggcgtggggcgcgatctc

SEQ ID NO: 3111839 - DNA, 25 bp, Homo sapien
tgttgacattgtactcggcggagga

SEQ ID NO: 3111840 - DNA, 25 bp, Homo sapien
tgagccagcgggctgaacgtggctt

SEQ ID NO: 3111841 - DNA, 25 bp, Homo sapien
cggcggaggacgtgcgtgccaggct

SEQ ID NO: 3111842 - DNA, 25 bp, Homo sapien
tgaacgtggcttcggctcccggatc

SEQ ID NO: 3111843 - DNA, 25 bp, Homo sapien
tccatgaagtaggagtggaaggcca

SEQ ID NO: 3111844 - DNA, 25 bp, Homo sapien
atggcctccatgaagtaggagtgga

SEQ ID NO: 3111845 - DNA, 25 bp, Homo sapien
agtaggagtggaaggccataccgcc

SEQ ID NO: 3111846 - DNA, 25 bp, Homo sapien
tggaaggccataccgccggtccgca

SEQ ID NO: 3111847 - DNA, 25 bp, Homo sapien
gagttgtggcaggcgggcaccacgc

SEQ ID NO: 3111848 - DNA, 25 bp, Homo sapien
cggggggcagcgctgtttacactcc

SEQ ID NO: 3111849 - DNA, 25 bp, Homo sapien
agcgctgtttacactcctcccagga

SEQ ID NO: 3111850 - DNA, 25 bp, Homo sapien
gggcagcgctgtttacactcctccc

SEQ ID NO: 3111851 - DNA, 25 bp, Homo sapien
tgtcccctccagtaggcagcgagga

SEQ ID NO: 3111852 - DNA, 25 bp, Homo sapien
acaggcagccgtcggcgtagccaca

SEQ ID NO: 3111853 - DNA, 25 bp, Homo sapien
cagggagtggccgacgatgccatct

SEQ ID NO: 3111854 - DNA, 25 bp, Homo sapien
tgggcttctttgatgcactgtcccc

SEQ ID NO: 3111855 - DNA, 25 bp, Homo sapien
tcaggctcacaaacgaatggacgat

SEQ ID NO: 3111856 - DNA, 25 bp, Homo sapien
gctgtgacaccttcaggccgaatgg

SEQ ID NO: 3111857 - DNA, 25 bp, Homo sapien
taggatggaatctcggaagcggtcc

SEQ ID NO: 3111858 - DNA, 25 bp, Homo sapien
ttcacagcctcatcggagcgtagga

SEQ ID NO: 3111859 - DNA, 25 bp, Homo sapien
agagcgggcgctcgccagcgggcac

SEQ ID NO: 3111860 - DNA, 25 bp, Homo sapien
atgaaccagagcgggcgctcgccag

SEQ ID NO: 3111861 - DNA, 25 bp, Homo sapien
cagagcgggcgctcgccagcgggca

SEQ ID NO: 3111862 - DNA, 25 bp, Homo sapien
cagatgaaccagagcgggcgctcgc

SEQ ID NO: 3111863 - DNA, 25 bp, Homo sapien
ggagttgatgcccacgttgccgcca

SEQ ID NO: 3111864 - DNA, 25 bp, Homo sapien
caggatgatgtgcacgttggagccc

SEQ ID NO: 3111865 - DNA, 25 bp, Homo sapien
gcgatgtcgttcagcatgctcagga

SEQ ID NO: 3111866 - DNA, 25 bp, Homo sapien
gcacagcgtagccacggaagggcat

SEQ ID NO: 3111867 - DNA, 25 bp, Homo sapien
cacagggctcgggtgatgccattca

SEQ ID NO: 3111868 - DNA, 25 bp, Homo sapien
ccgaggctggctccgggtgccccat

SEQ ID NO: 3111869 - DNA, 25 bp, Homo sapien
ccatgttggacttggtggagccgat

SEQ ID NO: 3111870 - DNA, 25 bp, Homo sapien
tggcgggtggcgcacagggctcggg

SEQ ID NO: 3111871 - DNA, 25 bp, Homo sapien
tgcctgtgccgtgggcttcgatgta

SEQ ID NO: 3111872 - DNA, 25 bp, Homo sapien
ctggtacaacgagcggatgagctgc

SEQ ID NO: 3111873 - DNA, 25 bp, Homo sapien
tgtgccgtgggcttcgatgtattca

SEQ ID NO: 3111874 - DNA, 25 bp, Homo sapien
cactccggccgactggtacaacgag

SEQ ID NO: 3111875 - DNA, 25 bp, Homo sapien
gcgttcaggatggtggcgtacaccc

SEQ ID NO: 3111876 - DNA, 25 bp, Homo sapien
acttcttggtcagcaggacggccac

SEQ ID NO: 3111877 - DNA, 25 bp, Homo sapien
atggtggcgtacacccgccgggcca

SEQ ID NO: 3111878 - DNA, 25 bp, Homo sapien
catctgtattggtgccggcgttcag

SEQ ID NO: 3111879 - DNA, 25 bp, Homo sapien
aactgcacggaggtgttgggcttca

SEQ ID NO: 3111880 - DNA, 25 bp, Homo sapien
ggcttcagcaggacattgatgcccc

SEQ ID NO: 3111881 - DNA, 25 bp, Homo sapien
tggatggcctggtaggcgttctgca

SEQ ID NO: 3111882 - DNA, 25 bp, Homo sapien
gctgtgtccagtgcgatgctgggcc

SEQ ID NO: 3111883 - DNA, 25 bp, Homo sapien
accatgctgtagcccacgagtgtct

SEQ ID NO: 3111884 - DNA, 25 bp, Homo sapien
gaaggagagccggttggccatcatc

SEQ ID NO: 3111885 - DNA, 25 bp, Homo sapien
tgttcctcggagtgaatctgggttg

SEQ ID NO: 3111886 - DNA, 25 bp, Homo sapien
agacgccagtgtgtgttcctcggag

SEQ ID NO: 3111887 - DNA, 25 bp, Homo sapien
tgagggggggtccatcccagtggga

SEQ ID NO: 3111888 - DNA, 25 bp, Homo sapien
tggtgtcaccggcagctctgatgag

SEQ ID NO: 3111889 - DNA, 25 bp, Homo sapien
cacggccagagtggctccaggaagg

SEQ ID NO: 3111890 - DNA, 25 bp, Homo sapien
ttgtccccaggcgacgcctttggcc

SEQ ID NO: 3111891 - DNA, 25 bp, Homo sapien
tgagcccgtcggccagtggcctctc

SEQ ID NO: 3111892 - DNA, 25 bp, Homo sapien
gatggcttcataggtgacttccagc

SEQ ID NO: 3111893 - DNA, 25 bp, Homo sapien
gaaggaggcatcaaacctagacagg

SEQ ID NO: 3111894 - DNA, 25 bp, Homo sapien
tgagggtccatcgtgtgtgcctgct

SEQ ID NO: 3111895 - DNA, 25 bp, Homo sapien
ttcagcttgccggaccgccggggca

SEQ ID NO: 3111896 - DNA, 25 bp, Homo sapien
tcctgcaagttctccgactctggca

SEQ ID NO: 3111897 - DNA, 25 bp, Homo sapien
gcagcttcccggacatgccggcaat

SEQ ID NO: 3111898 - DNA, 25 bp, Homo sapien
gtccacaccgccgatgaggttgtcc

SEQ ID NO: 3111899 - DNA, 25 bp, Homo sapien
ttccagcgacggtcatcgtccgtga

SEQ ID NO: 3111900 - DNA, 25 bp, Homo sapien
cgtcaacagcctcggcacccagaac

SEQ ID NO: 3111901 - DNA, 25 bp, Homo sapien
acgacacccccgtcaacagcctcgg

SEQ ID NO: 3111902 - DNA, 25 bp, Homo sapien
ggcggtgtgagtgccccacacatcc

SEQ ID NO: 3111903 - DNA, 25 bp, Homo sapien
ggcgggcggtgtgagtgccccacac

SEQ ID NO: 3111904 - DNA, 25 bp, Homo sapien
tggggtgggggcccgctgtccaggc

SEQ ID NO: 3111905 - DNA, 25 bp, Homo sapien
gtgggggcccgctgtccaggccagc

SEQ ID NO: 3111906 - DNA, 25 bp, Homo sapien
ctgtccaggccagcccaagagccac

SEQ ID NO: 3111907 - DNA, 25 bp, Homo sapien
caggccagcccaagagccaccaggg

SEQ ID NO: 3111908 - DNA, 25 bp, Homo sapien
cctccagcatgagggctggtgcggc

SEQ ID NO: 3111909 - DNA, 25 bp, Homo sapien
cctcctccagcatgagggctggtgc

SEQ ID NO: 3111910 - DNA, 25 bp, Homo sapien
ctggagcccaggtccctaagacccg

SEQ ID NO: 3111911 - DNA, 25 bp, Homo sapien
gaacgggtgcccaggccgccggctc

SEQ ID NO: 3111912 - DNA, 25 bp, Homo sapien
cggagagcgaggctggagcgcggcg

SEQ ID NO: 3111913 - DNA, 25 bp, Homo sapien
cggcggagagcgaggctggagcgcg

SEQ ID NO: 3111914 - DNA, 25 bp, Homo sapien
cggcggagcgggaggctgaagcgcg

SEQ ID NO: 3111915 - DNA, 25 bp, Homo sapien
cgggaggctgaagcgcggcggagag

SEQ ID NO: 3111916 - DNA, 25 bp, Homo sapien
taggcgatagggtgatgggcgggcg

SEQ ID NO: 3111917 - DNA, 25 bp, Homo sapien
gcgggtgggcgttgctaggcgatag

SEQ ID NO: 3111918 - DNA, 25 bp, Homo sapien
agcagcaaccaatcgggcgccaggg

SEQ ID NO: 3111919 - DNA, 25 bp, Homo sapien
cgcggcgcaagtgcgggcgttgacc

SEQ ID NO: 3111920 - DNA, 25 bp, Homo sapien
acctggttttaatgggccctgtgct

SEQ ID NO: 3111921 - DNA, 25 bp, Homo sapien
ctggttttaatgggccctgtgctca

SEQ ID NO: 3111922 - DNA, 25 bp, Homo sapien
cctggttttaatgggccctgtgctc

SEQ ID NO: 3111923 - DNA, 25 bp, Homo sapien
agtcagcagggtcgcctcagcagca

SEQ ID NO: 3111924 - DNA, 25 bp, Homo sapien
tcagtcagcagggtcgcctcagcag

SEQ ID NO: 3111925 - DNA, 25 bp, Homo sapien
agggtcgcctcagcagcatttggga

SEQ ID NO: 3111926 - DNA, 25 bp, Homo sapien
agcagggtcgcctcagcagcatttg

SEQ ID NO: 3111927 - DNA, 25 bp, Homo sapien
aaagcacaggcaccatgcggaggcc

SEQ ID NO: 3111928 - DNA, 25 bp, Homo sapien
cccccacaacacgtaggtgaaagca

SEQ ID NO: 3111929 - DNA, 25 bp, Homo sapien
cggaggccccgagcaccccttagtg

SEQ ID NO: 3111930 - DNA, 25 bp, Homo sapien
ctccaccctgcacgctgtgcccaca

SEQ ID NO: 3111931 - DNA, 25 bp, Homo sapien
ttagcttttgcaggatgagaccggg

SEQ ID NO: 3111932 - DNA, 25 bp, Homo sapien
tagcttttgcaggatgagaccggga

SEQ ID NO: 3111933 - DNA, 25 bp, Homo sapien
tcagtccataatgttgtagttacgg

SEQ ID NO: 3111934 - DNA, 25 bp, Homo sapien
taatgttgtagttacggatcttggg

SEQ ID NO: 3111935 - DNA, 25 bp, Homo sapien
gcctgcatcttgacgggcctcctgt

SEQ ID NO: 3111936 - DNA, 25 bp, Homo sapien
cgggcctcctgtcggctgctggagg

SEQ ID NO: 3111937 - DNA, 25 bp, Homo sapien
tgcctgcatcttgacgggcctcctg

SEQ ID NO: 3111938 - DNA, 25 bp, Homo sapien
ggtgttgtaggtgatcttctttatc

SEQ ID NO: 3111939 - DNA, 25 bp, Homo sapien
cggctaaaaccatcttcgcagaggg

SEQ ID NO: 3111940 - DNA, 25 bp, Homo sapien
aaaggaaaggccgtgctggtgggca

SEQ ID NO: 3111941 - DNA, 25 bp, Homo sapien
tggtgggcaccacgtggccaggcac

SEQ ID NO: 3111942 - DNA, 25 bp, Homo sapien
tctctttctgcgttgggctgactgg

SEQ ID NO: 3111943 - DNA, 25 bp, Homo sapien
ctctttctgcgttgggctgactggg

SEQ ID NO: 3111944 - DNA, 25 bp, Homo sapien
tcctattgcagggaaggtgcggccc

SEQ ID NO: 3111945 - DNA, 25 bp, Homo sapien
aagcccggcttggaggtttgaagct

SEQ ID NO: 3111946 - DNA, 25 bp, Homo sapien
tgggcacacctacgtggcttcctag

SEQ ID NO: 3111947 - DNA, 25 bp, Homo sapien
tcagctcagctcttgaccaagttgg

SEQ ID NO: 3111948 - DNA, 25 bp, Homo sapien
cctcacttgggcgagaagagaccca

SEQ ID NO: 3111949 - DNA, 25 bp, Homo sapien
agagacgcatggccttcctcctggg

SEQ ID NO: 3111950 - DNA, 25 bp, Homo sapien
tgcatcacggaaggcgggcacacag

SEQ ID NO: 3111951 - DNA, 25 bp, Homo sapien
ctgcaggctggtgggtgccgaggag

SEQ ID NO: 3111952 - DNA, 25 bp, Homo sapien
tgagagagcacctgacctgtgatcc

SEQ ID NO: 3111953 - DNA, 25 bp, Homo sapien
ccctcaggaaagaggttcggccctg

SEQ ID NO: 3111954 - DNA, 25 bp, Homo sapien
ccctggtcacagactgggcataaaa

SEQ ID NO: 3111955 - DNA, 25 bp, Homo sapien
tgaaaacgggctcctctgtggacag

SEQ ID NO: 3111956 - DNA, 25 bp, Homo sapien
tgacatttagttgggacagctatag

SEQ ID NO: 3111957 - DNA, 25 bp, Homo sapien
taattcgtcctgacatttagttggg

SEQ ID NO: 3111958 - DNA, 25 bp, Homo sapien
tcgtcctgacatttagttgggacag

SEQ ID NO: 3111959 - DNA, 25 bp, Homo sapien
ggctaattcgtcctgacatttagtt

SEQ ID NO: 3111960 - DNA, 25 bp, Homo sapien
ctatgaccagagagtgaagcgtttc

SEQ ID NO: 3111961 - DNA, 25 bp, Homo sapien
tgggcgcgtgctcacactctttaag

SEQ ID NO: 3111962 - DNA, 25 bp, Homo sapien
taagctgcgactgcttcctttagga

SEQ ID NO: 3111963 - DNA, 25 bp, Homo sapien
gaagcgtttcactgaagaactgtgg

SEQ ID NO: 3111964 - DNA, 25 bp, Homo sapien
atatgcagcctcgttctatcccagg

SEQ ID NO: 3111965 - DNA, 25 bp, Homo sapien
cgaggaggccgatgaagacagaata

SEQ ID NO: 3111966 - DNA, 25 bp, Homo sapien
tcagaagaagccataagagagcaag

SEQ ID NO: 3111967 - DNA, 25 bp, Homo sapien
cacagggcttcctaaacaggcggga

SEQ ID NO: 3111968 - DNA, 25 bp, Homo sapien
gtccttgtaactacggcctggccag

SEQ ID NO: 3111969 - DNA, 25 bp, Homo sapien
ggcagtcatggtttcgtcactacaa

SEQ ID NO: 3111970 - DNA, 25 bp, Homo sapien
tatacatgtacaggctggtcctcag

SEQ ID NO: 3111971 - DNA, 25 bp, Homo sapien
tcagtatgtcatgaccgtgtgcgag

SEQ ID NO: 3111972 - DNA, 25 bp, Homo sapien
tgtttgggtgaagggctccactcca

SEQ ID NO: 3111973 - DNA, 25 bp, Homo sapien
tgtttttgcacactgaggagctgcc

SEQ ID NO: 3111974 - DNA, 25 bp, Homo sapien
taaaatgtcaccagcgtgacctgct

SEQ ID NO: 3111975 - DNA, 25 bp, Homo sapien
caatgggactagaacgacaggagca

SEQ ID NO: 3111976 - DNA, 25 bp, Homo sapien
aagccagcattaacatgggacaccc

SEQ ID NO: 3111977 - DNA, 25 bp, Homo sapien
tttgctcctaaaccatcctctgcag

SEQ ID NO: 3111978 - DNA, 25 bp, Homo sapien
gatgaggctctacatggcggcccta

SEQ ID NO: 3111979 - DNA, 25 bp, Homo sapien
cacagcacagccgaattcctcagaa

SEQ ID NO: 3111980 - DNA, 25 bp, Homo sapien
aatgggatggtagtagctgtacagc

SEQ ID NO: 3111981 - DNA, 25 bp, Homo sapien
tgtacagccttagcctaaagacctg

SEQ ID NO: 3111982 - DNA, 25 bp, Homo sapien
caacaaccaggcaaattaggccagg

SEQ ID NO: 3111983 - DNA, 25 bp, Homo sapien
gtagcgttgggcctcatttctgcat

SEQ ID NO: 3111984 - DNA, 25 bp, Homo sapien
cacgcacaggaggttcactctctta

SEQ ID NO: 3111985 - DNA, 25 bp, Homo sapien
tcttaagagctaaaaacgacaggcc

SEQ ID NO: 3111986 - DNA, 25 bp, Homo sapien
cagttttgacttatcagattggcca

SEQ ID NO: 3111987 - DNA, 25 bp, Homo sapien
ggcaattgggtaacagcgctcagaa

SEQ ID NO: 3111988 - DNA, 25 bp, Homo sapien
atcacagctcactgcggcctagaac

SEQ ID NO: 3111989 - DNA, 25 bp, Homo sapien
ggagtgcagtgtgtaatcacagctc

SEQ ID NO: 3111990 - DNA, 25 bp, Homo sapien
cacagctcactgcggcctagaactc

SEQ ID NO: 3111991 - DNA, 25 bp, Homo sapien
ctggagtgcagtgtgtaatcacagc

SEQ ID NO: 3111992 - DNA, 25 bp, Homo sapien
tgtatgcacctaacagcgaacctca

SEQ ID NO: 3111993 - DNA, 25 bp, Homo sapien
tgttacatactggtaaagggaggaa

SEQ ID NO: 3111994 - DNA, 25 bp, Homo sapien
gaactaatatttccctctcagaaga

SEQ ID NO: 3111995 - DNA, 25 bp, Homo sapien
tgagttataagtcctacaagggaaa

SEQ ID NO: 3111996 - DNA, 25 bp, Homo sapien
tagggagacaccatctctactaaat

SEQ ID NO: 3111997 - DNA, 25 bp, Homo sapien
tgaggcagagtctcattccgtcacc

SEQ ID NO: 3111998 - DNA, 25 bp, Homo sapien
gaggcagagtctcattccgtcaccc

SEQ ID NO: 3111999 - DNA, 25 bp, Homo sapien
agacaccatctctactaaatttttt

SEQ ID NO: 3112000 - DNA, 25 bp, Homo sapien
gcaaaagttccgtgtggctacagga

SEQ ID NO: 3112001 - DNA, 25 bp, Homo sapien
gagcagggccgtctaaagtgcacca

SEQ ID NO: 3112002 - DNA, 25 bp, Homo sapien
gaggcacaccctcatgacggaagac

SEQ ID NO: 3112003 - DNA, 25 bp, Homo sapien
tggctcctaaacacacacgaagatg

SEQ ID NO: 3112004 - DNA, 25 bp, Homo sapien
gatttacaggtcaccgtgtggatgc

SEQ ID NO: 3112005 - DNA, 25 bp, Homo sapien
gattggcgaccatgctcctcagggt

SEQ ID NO: 3112006 - DNA, 25 bp, Homo sapien
ggtctagcaacctccacatgtcctg

SEQ ID NO: 3112007 - DNA, 25 bp, Homo sapien
gaagggctggatcccaggtctagca

SEQ ID NO: 3112008 - DNA, 25 bp, Homo sapien
cttcgggccttgcagggcgtcaagt

SEQ ID NO: 3112009 - DNA, 25 bp, Homo sapien
gggctggtgctttcccaagtgtctg

SEQ ID NO: 3112010 - DNA, 25 bp, Homo sapien
ggagcctcatcctcggcactcttgg

SEQ ID NO: 3112011 - DNA, 25 bp, Homo sapien
gggcgtcaagtctgctgcccacctg

SEQ ID NO: 3112012 - DNA, 25 bp, Homo sapien
ccacaacagtggatgcagagtgtac

SEQ ID NO: 3112013 - DNA, 25 bp, Homo sapien
cccacaacagtggatgcagagtgta

SEQ ID NO: 3112014 - DNA, 25 bp, Homo sapien
gctgggtgcactgactcatgcccat

SEQ ID NO: 3112015 - DNA, 25 bp, Homo sapien
ggctgggtgcactgactcatgccca

SEQ ID NO: 3112016 - DNA, 25 bp, Homo sapien
gtgggctgcgatccaaaggcctcct

SEQ ID NO: 3112017 - DNA, 25 bp, Homo sapien
ctgcacctgtcccaaaggtgggctg

SEQ ID NO: 3112018 - DNA, 25 bp, Homo sapien
taaaatggggctgcacctgtcccaa

SEQ ID NO: 3112019 - DNA, 25 bp, Homo sapien
ccaaaggtgggctgcgatccaaagg

SEQ ID NO: 3112020 - DNA, 25 bp, Homo sapien
ctcgacacccccagaacatccacct

SEQ ID NO: 3112021 - DNA, 25 bp, Homo sapien
gcgatctcgacacccccagaacatc

SEQ ID NO: 3112022 - DNA, 25 bp, Homo sapien
gatctcgacacccccagaacatcca

SEQ ID NO: 3112023 - DNA, 25 bp, Homo sapien
cgcgatctcgacacccccagaacat

SEQ ID NO: 3112024 - DNA, 25 bp, Homo sapien
ccgcctcagcctcttcagtagcttg

SEQ ID NO: 3112025 - DNA, 25 bp, Homo sapien
cccgcctcagcctcttcagtagctt

SEQ ID NO: 3112026 - DNA, 25 bp, Homo sapien
cgcctcagcctcttcagtagcttgg

SEQ ID NO: 3112027 - DNA, 25 bp, Homo sapien
attacaggcacctgccaccatgccc

SEQ ID NO: 3112028 - DNA, 25 bp, Homo sapien
gatggtttcagaaaacaaagcttcc

SEQ ID NO: 3112029 - DNA, 25 bp, Homo sapien
ttcagaaaacaaagcttcccatgct

SEQ ID NO: 3112030 - DNA, 25 bp, Homo sapien
gtcttgatggtttcagaaaacaaag

SEQ ID NO: 3112031 - DNA, 25 bp, Homo sapien
gtttcagaaaacaaagcttcccatg

SEQ ID NO: 3112032 - DNA, 25 bp, Homo sapien
atgatctatgagatgtcctagaagt

SEQ ID NO: 3112033 - DNA, 25 bp, Homo sapien
tgatctatgagatgtcctagaagtt

SEQ ID NO: 3112034 - DNA, 25 bp, Homo sapien
aatgatctatgagatgtcctagaag

SEQ ID NO: 3112035 - DNA, 25 bp, Homo sapien
tagagtcccgaagccatttgccaga

SEQ ID NO: 3112036 - DNA, 25 bp, Homo sapien
tgctgtgctgcacggagacgtcccg

SEQ ID NO: 3112037 - DNA, 25 bp, Homo sapien
gcccacggcgcttctcttcattaga

SEQ ID NO: 3112038 - DNA, 25 bp, Homo sapien
ggtaacttgttcgtctgaggcactg

SEQ ID NO: 3112039 - DNA, 25 bp, Homo sapien
acctcagctgatccatcggcctcag

SEQ ID NO: 3112040 - DNA, 25 bp, Homo sapien
ttagccatggtggtctcaatgtcct

SEQ ID NO: 3112041 - DNA, 25 bp, Homo sapien
tgacctcatgatctgcctgcctcgg

SEQ ID NO: 3112042 - DNA, 25 bp, Homo sapien
catgttagccatggtggtctcaatg

SEQ ID NO: 3112043 - DNA, 25 bp, Homo sapien
tctagcctcaggacagcaagcaaga

SEQ ID NO: 3112044 - DNA, 25 bp, Homo sapien
ggttttctagcctcaggacagcaag

SEQ ID NO: 3112045 - DNA, 25 bp, Homo sapien
tagcctcaggacagcaagcaagagg

SEQ ID NO: 3112046 - DNA, 25 bp, Homo sapien
cagcaagcaagaggcttttatttat

SEQ ID NO: 3112047 - DNA, 25 bp, Homo sapien
gcccagctctgcacggagcctgttc

SEQ ID NO: 3112048 - DNA, 25 bp, Homo sapien
gccactgaccggaggtgcaggaaaa

SEQ ID NO: 3112049 - DNA, 25 bp, Homo sapien
agctttctctggagtcggtgcatag

SEQ ID NO: 3112050 - DNA, 25 bp, Homo sapien
tggagtcggtgcatagataaggtct

SEQ ID NO: 3112051 - DNA, 25 bp, Homo sapien
ccataggccctctcttggtgaggcc

SEQ ID NO: 3112052 - DNA, 25 bp, Homo sapien
taaaacagattgcagatggcctggg

SEQ ID NO: 3112053 - DNA, 25 bp, Homo sapien
caagtgtggtgcagaggctcactca

SEQ ID NO: 3112054 - DNA, 25 bp, Homo sapien
catgagctccgagttcctggaacag

SEQ ID NO: 3112055 - DNA, 25 bp, Homo sapien
caacacaaagggatgcctggaccaa

SEQ ID NO: 3112056 - DNA, 25 bp, Homo sapien
caaaataagatttctacagcctgag

SEQ ID NO: 3112057 - DNA, 25 bp, Homo sapien
ccaagtatctggacgattcgaagaa

SEQ ID NO: 3112058 - DNA, 25 bp, Homo sapien
ttcgaaggaaactttggtctgctga

SEQ ID NO: 3112059 - DNA, 25 bp, Homo sapien
tgaggaggagatgtctccaagtatc

SEQ ID NO: 3112060 - DNA, 25 bp, Homo sapien
gggaccagctttcgtcaggagtgct

SEQ ID NO: 3112061 - DNA, 25 bp, Homo sapien
tgggtgggtgtacacaatacgtgac

SEQ ID NO: 3112062 - DNA, 25 bp, Homo sapien
gcaaatgtcaccaaccgtccagata

SEQ ID NO: 3112063 - DNA, 25 bp, Homo sapien
aatacgtgacctggtccgtggcccg

SEQ ID NO: 3112064 - DNA, 25 bp, Homo sapien
cacgtggcatttctacactgtctct

SEQ ID NO: 3112065 - DNA, 25 bp, Homo sapien
cccacgtggcatttctacactgtct

SEQ ID NO: 3112066 - DNA, 25 bp, Homo sapien
gggtcccacgtggcatttctacact

SEQ ID NO: 3112067 - DNA, 25 bp, Homo sapien
gtcccacgtggcatttctacactgt

SEQ ID NO: 3112068 - DNA, 25 bp, Homo sapien
tacgcaagggccaacagtgagagct

SEQ ID NO: 3112069 - DNA, 25 bp, Homo sapien
ggaaccatggaactagcgcctggaa

SEQ ID NO: 3112070 - DNA, 25 bp, Homo sapien
caacagtctagggtacgaagtcagg

SEQ ID NO: 3112071 - DNA, 25 bp, Homo sapien
tgtgccttagctccaataactggga

SEQ ID NO: 3112072 - DNA, 25 bp, Homo sapien
gaaggctccgctcccccgtgctggg

SEQ ID NO: 3112073 - DNA, 25 bp, Homo sapien
tctcccaagggccacggcgtccgag

SEQ ID NO: 3112074 - DNA, 25 bp, Homo sapien
aagggccacggcgtccgaggctggg

SEQ ID NO: 3112075 - DNA, 25 bp, Homo sapien
gctatcctgagatgcttccccagct

SEQ ID NO: 3112076 - DNA, 25 bp, Homo sapien
ctcacggggaagctcacgctggaga

SEQ ID NO: 3112077 - DNA, 25 bp, Homo sapien
aggtgtacctggtccacctcacggg

SEQ ID NO: 3112078 - DNA, 25 bp, Homo sapien
tgcttccgcagctccaaaacctcca

SEQ ID NO: 3112079 - DNA, 25 bp, Homo sapien
gctccaaaacctccaggtgtacctg

SEQ ID NO: 3112080 - DNA, 25 bp, Homo sapien
tggagcacatgcgtccggttgacca

SEQ ID NO: 3112081 - DNA, 25 bp, Homo sapien
atgcgtccggttgaccaggacccct

SEQ ID NO: 3112082 - DNA, 25 bp, Homo sapien
tgacatggagcacatgcgtccggtt

SEQ ID NO: 3112083 - DNA, 25 bp, Homo sapien
acactgacatggagcacatgcgtcc

SEQ ID NO: 3112084 - DNA, 25 bp, Homo sapien
tgagcgggcaggtggcatcgggcag

SEQ ID NO: 3112085 - DNA, 25 bp, Homo sapien
gagcgggcaggtggcatcgggcagc

SEQ ID NO: 3112086 - DNA, 25 bp, Homo sapien
ctgagcgggcaggtggcatcgggca

SEQ ID NO: 3112087 - DNA, 25 bp, Homo sapien
tgagcgggcaggtggcatcgggcag

SEQ ID NO: 3112088 - DNA, 25 bp, Homo sapien
tctgagcgggcaggtggcatcgggc

SEQ ID NO: 3112089 - DNA, 25 bp, Homo sapien
gagcgggcaggtggcatcgggcagc

SEQ ID NO: 3112090 - DNA, 25 bp, Homo sapien
ctgagcgggcaggtggcatcgggca

SEQ ID NO: 3112091 - DNA, 25 bp, Homo sapien
cagccgctcagagcccacgcgctct

SEQ ID NO: 3112092 - DNA, 25 bp, Homo sapien
ggcagccgctcagagcccacgcgct

SEQ ID NO: 3112093 - DNA, 25 bp, Homo sapien
cgctcagagcccacgcgctctcccc

SEQ ID NO: 3112094 - DNA, 25 bp, Homo sapien
cgggcagccgctcagagcccacgcg

SEQ ID NO: 3112095 - DNA, 25 bp, Homo sapien
ggaggatgaccccacaaacttgact

SEQ ID NO: 3112096 - DNA, 25 bp, Homo sapien
aggatgaccccacaaacttgactgc

SEQ ID NO: 3112097 - DNA, 25 bp, Homo sapien
ctaggaggatgaccccacaaacttg

SEQ ID NO: 3112098 - DNA, 25 bp, Homo sapien
gatgaccccacaaacttgactgcct

SEQ ID NO: 3112099 - DNA, 25 bp, Homo sapien
ctgagtcgtgtcaccagcaggttta

SEQ ID NO: 3112100 - DNA, 25 bp, Homo sapien
cttctgtctgagtcgtgtcaccagc

SEQ ID NO: 3112101 - DNA, 25 bp, Homo sapien
tgtctgagtcgtgtcaccagcaggt

SEQ ID NO: 3112102 - DNA, 25 bp, Homo sapien
tgagtcgtgtcaccagcaggtttag

SEQ ID NO: 3112103 - DNA, 25 bp, Homo sapien
agtgccagtccagaggatactgggc

SEQ ID NO: 3112104 - DNA, 25 bp, Homo sapien
ggcttgaccagcttgggcagaccct

SEQ ID NO: 3112105 - DNA, 25 bp, Homo sapien
agcttggacagaccctccggcttga

SEQ ID NO: 3112106 - DNA, 25 bp, Homo sapien
gccagcttggacagatcctcctgct

SEQ ID NO: 3112107 - DNA, 25 bp, Homo sapien
agagaagagtggcttctgtcagctc

SEQ ID NO: 3112108 - DNA, 25 bp, Homo sapien
aagagtggcttctgtcagctcatac

SEQ ID NO: 3112109 - DNA, 25 bp, Homo sapien
ctgcagagaagagtggcttctgtca

SEQ ID NO: 3112110 - DNA, 25 bp, Homo sapien
gaagagtggcttctgtcagctcata

SEQ ID NO: 3112111 - DNA, 25 bp, Homo sapien
ggaagacctttctggggagacacac

SEQ ID NO: 3112112 - DNA, 25 bp, Homo sapien
aggaagacctttctggggagacaca

SEQ ID NO: 3112113 - DNA, 25 bp, Homo sapien
tcattggagtcagcagatctggtcc

SEQ ID NO: 3112114 - DNA, 25 bp, Homo sapien
gtcagcagatctggtccacgtgaag

SEQ ID NO: 3112115 - DNA, 25 bp, Homo sapien
ggccatggcaccagcggctgacccc

SEQ ID NO: 3112116 - DNA, 25 bp, Homo sapien
gaccccaatgcgaagctgttcttca

SEQ ID NO: 3112117 - DNA, 25 bp, Homo sapien
ccaaaacagggagcgctgactgcag

SEQ ID NO: 3112118 - DNA, 25 bp, Homo sapien
cacaaggaattccattcacaccaaa

SEQ ID NO: 3112119 - DNA, 25 bp, Homo sapien
aaacagggagcgctgactgcagtga

SEQ ID NO: 3112120 - DNA, 25 bp, Homo sapien
gcacaaggaattccattcacaccaa

SEQ ID NO: 3112121 - DNA, 25 bp, Homo sapien
agagttcgtatttctgcttcaaggg

SEQ ID NO: 3112122 - DNA, 25 bp, Homo sapien
aaggatccaacacatcttctagatg

SEQ ID NO: 3112123 - DNA, 25 bp, Homo sapien
ctgagactcagcatgaggtgaggac

SEQ ID NO: 3112124 - DNA, 25 bp, Homo sapien
cagtcgtctctgtcgaggtgcggac

SEQ ID NO: 3112125 - DNA, 25 bp, Homo sapien
ctcagtgatcaggagcaaatgctcc

SEQ ID NO: 3112126 - DNA, 25 bp, Homo sapien
tcagtgatcaggagcaaatgctcca

SEQ ID NO: 3112127 - DNA, 25 bp, Homo sapien
gccagagtgtgccagccagagacca

SEQ ID NO: 3112128 - DNA, 25 bp, Homo sapien
agagaccagcacagtctccatgctc

SEQ ID NO: 3112129 - DNA, 25 bp, Homo sapien
atctcgagaacggaagctctgcctc

SEQ ID NO: 3112130 - DNA, 25 bp, Homo sapien
tcccatctcgagaacggaagctctg

SEQ ID NO: 3112131 - DNA, 25 bp, Homo sapien
gggccaagtcccatctcgagaacgg

SEQ ID NO: 3112132 - DNA, 25 bp, Homo sapien
caagtcccatctcgagaacggaagc

SEQ ID NO: 3112133 - DNA, 25 bp, Homo sapien
aggaggaatctgatggcttagagcc

SEQ ID NO: 3112134 - DNA, 25 bp, Homo sapien
gcaagctcgtgttctgctctcggag

SEQ ID NO: 3112135 - DNA, 25 bp, Homo sapien
tcctcatctgggcaatcgcgtttcg

SEQ ID NO: 3112136 - DNA, 25 bp, Homo sapien
tctgccgctgtctggatgggaggag

SEQ ID NO: 3112137 - DNA, 25 bp, Homo sapien
acttggagttgtcccgcctctgcag

SEQ ID NO: 3112138 - DNA, 25 bp, Homo sapien
tcctccccacttggagttgtcccgc

SEQ ID NO: 3112139 - DNA, 25 bp, Homo sapien
atggaaccactgttcatcttacata

SEQ ID NO: 3112140 - DNA, 25 bp, Homo sapien
agttgtcccgcctctgcagatggaa

SEQ ID NO: 3112141 - DNA, 25 bp, Homo sapien
caaagagccgactgggtactctcac

SEQ ID NO: 3112142 - DNA, 25 bp, Homo sapien
tttcaaagagccgactgggtactct

SEQ ID NO: 3112143 - DNA, 25 bp, Homo sapien
tcaaagagccgactgggtactctca

SEQ ID NO: 3112144 - DNA, 25 bp, Homo sapien
agtttcaaagagccgactgggtact

SEQ ID NO: 3112145 - DNA, 25 bp, Homo sapien
catcctcagggcctgcacggcctgg

SEQ ID NO: 3112146 - DNA, 25 bp, Homo sapien
gttccagggtcacggccttcagcac

SEQ ID NO: 3112147 - DNA, 25 bp, Homo sapien
gcctggtctcgttccagggtcacgg

SEQ ID NO: 3112148 - DNA, 25 bp, Homo sapien
tgctcctgtagcgcctgctctgtct

SEQ ID NO: 3112149 - DNA, 25 bp, Homo sapien
ctctgacttttggatctggtccctt

SEQ ID NO: 3112150 - DNA, 25 bp, Homo sapien
gctgcacctgatcacgctccaggct

SEQ ID NO: 3112151 - DNA, 25 bp, Homo sapien
tttggatctggtccctttcaatgtc

SEQ ID NO: 3112152 - DNA, 25 bp, Homo sapien
tgtcatcacagcggcgctgccagtc

SEQ ID NO: 3112153 - DNA, 25 bp, Homo sapien
acaggagaagccaacaccggctggg

SEQ ID NO: 3112154 - DNA, 25 bp, Homo sapien
gcagggatcccctagaagctgtggc

SEQ ID NO: 3112155 - DNA, 25 bp, Homo sapien
aactcgtgggaacgaagcagccagc

SEQ ID NO: 3112156 - DNA, 25 bp, Homo sapien
tgcgctgattcccagagctcgtcag

SEQ ID NO: 3112157 - DNA, 25 bp, Homo sapien
cgcgcccggcccaccaaacatttat

SEQ ID NO: 3112158 - DNA, 25 bp, Homo sapien
acaggcgtgagccatcacacccggc

SEQ ID NO: 3112159 - DNA, 25 bp, Homo sapien
acgatctgggctcaccaaaacctcc

SEQ ID NO: 3112160 - DNA, 25 bp, Homo sapien
ggcgtgagccatcacacccggccca

SEQ ID NO: 3112161 - DNA, 25 bp, Homo sapien
caacggataagaaacacatgaggac

SEQ ID NO: 3112162 - DNA, 25 bp, Homo sapien
tagaatgctatctttgttcaaggaa

SEQ ID NO: 3112163 - DNA, 25 bp, Homo sapien
tcatcaaaattcatcaagtgtagag

SEQ ID NO: 3112164 - DNA, 25 bp, Homo sapien
ggatgagtttagcatatgtattctg

SEQ ID NO: 3112165 - DNA, 25 bp, Homo sapien
tcctgcagcgtctgaatctgaaggt

SEQ ID NO: 3112166 - DNA, 25 bp, Homo sapien
cttcttcctgcagcgtctgaatctg

SEQ ID NO: 3112167 - DNA, 25 bp, Homo sapien
gatcgggccacctgtgccttgagct

SEQ ID NO: 3112168 - DNA, 25 bp, Homo sapien
ctttcaatgtcctgctgggatcggg

SEQ ID NO: 3112169 - DNA, 25 bp, Homo sapien
aggcagattttacagttgatgcatc

SEQ ID NO: 3112170 - DNA, 25 bp, Homo sapien
gattttacagttgatgcatcttcac

SEQ ID NO: 3112171 - DNA, 25 bp, Homo sapien
tgagcaatttgagcatcccaggcag

SEQ ID NO: 3112172 - DNA, 25 bp, Homo sapien
tccttagatagttgagcaatttgag

SEQ ID NO: 3112173 - DNA, 25 bp, Homo sapien
gacagaccttcagatgctcctgtgc

SEQ ID NO: 3112174 - DNA, 25 bp, Homo sapien
tgtagcatcacacacgacagacctt

SEQ ID NO: 3112175 - DNA, 25 bp, Homo sapien
taggcaagatgatacctgcccactt

SEQ ID NO: 3112176 - DNA, 25 bp, Homo sapien
ggcgtagccctgtttccctaagaga

SEQ ID NO: 3112177 - DNA, 25 bp, Homo sapien
ggcctctggtgctctgggaagcagc

SEQ ID NO: 3112178 - DNA, 25 bp, Homo sapien
acggcctctggtgctctgggaagca

SEQ ID NO: 3112179 - DNA, 25 bp, Homo sapien
caacggcctctggtgctctgggaag

SEQ ID NO: 3112180 - DNA, 25 bp, Homo sapien
cctctggtgctctgggaagcagctt

SEQ ID NO: 3112181 - DNA, 25 bp, Homo sapien
tctccttggcggtgtcagcctgtct

SEQ ID NO: 3112182 - DNA, 25 bp, Homo sapien
tggccagacggtcgagctcctcatg

SEQ ID NO: 3112183 - DNA, 25 bp, Homo sapien
agctgcgcctcgagggtctcgcagt

SEQ ID NO: 3112184 - DNA, 25 bp, Homo sapien
cctgcagctccagaaccctggtctg

SEQ ID NO: 3112185 - DNA, 25 bp, Homo sapien
ctgcctcaaggcttcgcagcagcca

SEQ ID NO: 3112186 - DNA, 25 bp, Homo sapien
cccagaccctctttggaggcgttca

SEQ ID NO: 3112187 - DNA, 25 bp, Homo sapien
tgccctgtctcgtgcacaggtgctg

SEQ ID NO: 3112188 - DNA, 25 bp, Homo sapien
tctttggaggcgttcattgccctgt

SEQ ID NO: 3112189 - DNA, 25 bp, Homo sapien
tcctcgcaggtaaacatggaccaag

SEQ ID NO: 3112190 - DNA, 25 bp, Homo sapien
aaaggaggtgcatagagcacggttt

SEQ ID NO: 3112191 - DNA, 25 bp, Homo sapien
tggaccaagccacttttcgatgcca

SEQ ID NO: 3112192 - DNA, 25 bp, Homo sapien
tccgatcaacctgcgaaaggaggtg

SEQ ID NO: 3112193 - DNA, 25 bp, Homo sapien
gagtgaagtttatcctctaaatcct

SEQ ID NO: 3112194 - DNA, 25 bp, Homo sapien
tggttagctgcacagagtgaagttt

SEQ ID NO: 3112195 - DNA, 25 bp, Homo sapien
ccttcttcctggttagctgcacaga

SEQ ID NO: 3112196 - DNA, 25 bp, Homo sapien
cagagtgaagtttatcctctaaatc

SEQ ID NO: 3112197 - DNA, 25 bp, Homo sapien
atgaaagcaaagaccagcctggaat

SEQ ID NO: 3112198 - DNA, 25 bp, Homo sapien
aggctgccacagagcacgcctcggg

SEQ ID NO: 3112199 - DNA, 25 bp, Homo sapien
tccagtcctggcctgcgaggctgcc

SEQ ID NO: 3112200 - DNA, 25 bp, Homo sapien
ctcgggagatgaaggactcgcgcac

SEQ ID NO: 3112201 - DNA, 25 bp, Homo sapien
ctctccagctcggcgttggtggcct

SEQ ID NO: 3112202 - DNA, 25 bp, Homo sapien
agctcggcgttggtggcctctgccc

SEQ ID NO: 3112203 - DNA, 25 bp, Homo sapien
tttgccccggcttccttcagagcct

SEQ ID NO: 3112204 - DNA, 25 bp, Homo sapien
tccagctcggcgttggtggcctctg

SEQ ID NO: 3112205 - DNA, 25 bp, Homo sapien
ataaaaatgagttcaaaatgaggtg

SEQ ID NO: 3112206 - DNA, 25 bp, Homo sapien
gcattaggggtacatactgctgttt

SEQ ID NO: 3112207 - DNA, 25 bp, Homo sapien
gggtacatactgctgttttatcagg

SEQ ID NO: 3112208 - DNA, 25 bp, Homo sapien
gaggcattaggggtacatactgctg

SEQ ID NO: 3112209 - DNA, 25 bp, Homo sapien
catgttgtcagcctgcagacggaat

SEQ ID NO: 3112210 - DNA, 25 bp, Homo sapien
ggaattcgtgctccctcttccgcat

SEQ ID NO: 3112211 - DNA, 25 bp, Homo sapien
cattttcgattcaaactccagcagc

SEQ ID NO: 3112212 - DNA, 25 bp, Homo sapien
tcttccgcattttcgattcaaactc

SEQ ID NO: 3112213 - DNA, 25 bp, Homo sapien
tttcatgatgaaagaacagtgggaa

SEQ ID NO: 3112214 - DNA, 25 bp, Homo sapien
catgatgaaagaacagtgggaaccc

SEQ ID NO: 3112215 - DNA, 25 bp, Homo sapien
atgatgaaagaacagtgggaaccca

SEQ ID NO: 3112216 - DNA, 25 bp, Homo sapien
tcatgatgaaagaacagtgggaacc

SEQ ID NO: 3112217 - DNA, 25 bp, Homo sapien
ccataatcgacaaagctctttggtt

SEQ ID NO: 3112218 - DNA, 25 bp, Homo sapien
tagacgctggcttcatgcctaaaga

SEQ ID NO: 3112219 - DNA, 25 bp, Homo sapien
tgcctaaagaactccggctgttctc

SEQ ID NO: 3112220 - DNA, 25 bp, Homo sapien
tccaagagaaagtcctctgcaggcc

SEQ ID NO: 3112221 - DNA, 25 bp, Homo sapien
tgcacaaagcccttcatcactgctg

SEQ ID NO: 3112222 - DNA, 25 bp, Homo sapien
cacaaagcccttcatcactgctgca

SEQ ID NO: 3112223 - DNA, 25 bp, Homo sapien
acaaagcccttcatcactgctgcac

SEQ ID NO: 3112224 - DNA, 25 bp, Homo sapien
ctgcacaaagcccttcatcactgct

SEQ ID NO: 3112225 - DNA, 25 bp, Homo sapien
cagcttctagtaacacttacaccta

SEQ ID NO: 3112226 - DNA, 25 bp, Homo sapien
ccatagacacagcttctagtaacac

SEQ ID NO: 3112227 - DNA, 25 bp, Homo sapien
tgcacagacgcagccccttatgaca

SEQ ID NO: 3112228 - DNA, 25 bp, Homo sapien
tatgacacccccatagacacagctt

SEQ ID NO: 3112229 - DNA, 25 bp, Homo sapien
tgttcccggtggtggtcaatctcac

SEQ ID NO: 3112230 - DNA, 25 bp, Homo sapien
cccggtggtggtcaatctcaccatt

SEQ ID NO: 3112231 - DNA, 25 bp, Homo sapien
atactgttcccggtggtggtcaatc

SEQ ID NO: 3112232 - DNA, 25 bp, Homo sapien
tttcatactgttcccggtggtggtc

SEQ ID NO: 3112233 - DNA, 25 bp, Homo sapien
agctggctccgtgtgtcctgcagag

SEQ ID NO: 3112234 - DNA, 25 bp, Homo sapien
cagcttagctgcctctatcttgagc

SEQ ID NO: 3112235 - DNA, 25 bp, Homo sapien
ccagcacctgaaggttgtagacaaa

SEQ ID NO: 3112236 - DNA, 25 bp, Homo sapien
tcctccttgcgaagcagcagctcat

SEQ ID NO: 3112237 - DNA, 25 bp, Homo sapien
aaatcaggttcagggtgcaccgtga

SEQ ID NO: 3112238 - DNA, 25 bp, Homo sapien
cattccctatcaacagttaccacgg

SEQ ID NO: 3112239 - DNA, 25 bp, Homo sapien
ctgcagtaaagagaaatcaggttca

SEQ ID NO: 3112240 - DNA, 25 bp, Homo sapien
tatcaacagttaccacggccgggca

SEQ ID NO: 3112241 - DNA, 25 bp, Homo sapien
gtttgtccagctataagagctaggt

SEQ ID NO: 3112242 - DNA, 25 bp, Homo sapien
tggtttgtccagctataagagctag

SEQ ID NO: 3112243 - DNA, 25 bp, Homo sapien
catggtttgtccagctataagagct

SEQ ID NO: 3112244 - DNA, 25 bp, Homo sapien
aacatggtttgtccagctataagag

SEQ ID NO: 3112245 - DNA, 25 bp, Homo sapien
catctcggggcacagcaatggttgt

SEQ ID NO: 3112246 - DNA, 25 bp, Homo sapien
tctatgtgagatgggtgctcccagg

SEQ ID NO: 3112247 - DNA, 25 bp, Homo sapien
cctcatcatagaacggcctgctctg

SEQ ID NO: 3112248 - DNA, 25 bp, Homo sapien
tacagcaagtgactcggtgcagcac

SEQ ID NO: 3112249 - DNA, 25 bp, Homo sapien
caagggcctgtaagtcagccgggct

SEQ ID NO: 3112250 - DNA, 25 bp, Homo sapien
cataatagaactccgttctcccgca

SEQ ID NO: 3112251 - DNA, 25 bp, Homo sapien
tttgagtcataatagaactccgttc

SEQ ID NO: 3112252 - DNA, 25 bp, Homo sapien
actggccccctacacactaagttat

SEQ ID NO: 3112253 - DNA, 25 bp, Homo sapien
ttcgactccctacgctttcatctcc

SEQ ID NO: 3112254 - DNA, 25 bp, Homo sapien
tgttggaactgaaccgaaggacacc

SEQ ID NO: 3112255 - DNA, 25 bp, Homo sapien
gattcttgtggtatcagagtagagg

SEQ ID NO: 3112256 - DNA, 25 bp, Homo sapien
agtctgcggcagaactgactgctca

SEQ ID NO: 3112257 - DNA, 25 bp, Homo sapien
tctatcctaattcccgtcttggtga

SEQ ID NO: 3112258 - DNA, 25 bp, Homo sapien
gcagcctcgaatgcccatctaaaag

SEQ ID NO: 3112259 - DNA, 25 bp, Homo sapien
tccagagagtgctgctaagccctct

SEQ ID NO: 3112260 - DNA, 25 bp, Homo sapien
gcgatcttcccacgtacttataggt

SEQ ID NO: 3112261 - DNA, 25 bp, Homo sapien
tctaaaagctacagctcaagcgatc

SEQ ID NO: 3112262 - DNA, 25 bp, Homo sapien
ctgactgccgaagagtagccacagc

SEQ ID NO: 3112263 - DNA, 25 bp, Homo sapien
cgaagagtagccacagccatttcta

SEQ ID NO: 3112264 - DNA, 25 bp, Homo sapien
ccactgactgccgaagagtagccac

SEQ ID NO: 3112265 - DNA, 25 bp, Homo sapien
tgccgaagagtagccacagccattt

SEQ ID NO: 3112266 - DNA, 25 bp, Homo sapien
ctgaaataagagagatgggcagtag

SEQ ID NO: 3112267 - DNA, 25 bp, Homo sapien
agatgggcagtaggtctgaattctg

SEQ ID NO: 3112268 - DNA, 25 bp, Homo sapien
agagatgggcagtaggtctgaattc

SEQ ID NO: 3112269 - DNA, 25 bp, Homo sapien
agagagatgggcagtaggtctgaat

SEQ ID NO: 3112270 - DNA, 25 bp, Homo sapien
gcaacctgcgcctctcggtgtggta

SEQ ID NO: 3112271 - DNA, 25 bp, Homo sapien
gaacgcgctcggttgatggtaccca

SEQ ID NO: 3112272 - DNA, 25 bp, Homo sapien
tctcttagctgagagggccggacag

SEQ ID NO: 3112273 - DNA, 25 bp, Homo sapien
tcgctggcaatacaggactcctgag

SEQ ID NO: 3112274 - DNA, 25 bp, Homo sapien
gccaggtcccgccgcgttgccacag

SEQ ID NO: 3112275 - DNA, 25 bp, Homo sapien
ccaggtcccgccgcgttgccacagc

SEQ ID NO: 3112276 - DNA, 25 bp, Homo sapien
caggtcccgccgcgttgccacagcg

SEQ ID NO: 3112277 - DNA, 25 bp, Homo sapien
ctgcctaagggtcggctgcggccac

SEQ ID NO: 3112278 - DNA, 25 bp, Homo sapien
cgaagggttgacttgagcttttgcc

SEQ ID NO: 3112279 - DNA, 25 bp, Homo sapien
ctcgcggtcccgaagggttgacttg

SEQ ID NO: 3112280 - DNA, 25 bp, Homo sapien
gggggcgccacgaagtcctgcctaa

SEQ ID NO: 3112281 - DNA, 25 bp, Homo sapien
gaggcccgaagtcgcccccaccatc

SEQ ID NO: 3112282 - DNA, 25 bp, Homo sapien
ccccaccatcctgtgggaacaacat

SEQ ID NO: 3112283 - DNA, 25 bp, Homo sapien
catcctgtgggaacaacatcctcag

SEQ ID NO: 3112284 - DNA, 25 bp, Homo sapien
gtgggaacaacatcctcaggcacag

SEQ ID NO: 3112285 - DNA, 25 bp, Homo sapien
caaaagctgcttgcttgaggcctcc

SEQ ID NO: 3112286 - DNA, 25 bp, Homo sapien
aaaagctgcttgcttgaggcctcca

SEQ ID NO: 3112287 - DNA, 25 bp, Homo sapien
gaccaggggatgctccctcgaggct

SEQ ID NO: 3112288 - DNA, 25 bp, Homo sapien
tcgaggctggtgtggaacaggccgt

SEQ ID NO: 3112289 - DNA, 25 bp, Homo sapien
aggtcaagacctggaggcagggcca

SEQ ID NO: 3112290 - DNA, 25 bp, Homo sapien
ccaaggccggcttcgtccagaagga

SEQ ID NO: 3112291 - DNA, 25 bp, Homo sapien
cagaaggtaccctccggctgtgcgt

SEQ ID NO: 3112292 - DNA, 25 bp, Homo sapien
agggcagaaggtaccctccggctgt

SEQ ID NO: 3112293 - DNA, 25 bp, Homo sapien
gcagaaggtaccctccggctgtgcg

SEQ ID NO: 3112294 - DNA, 25 bp, Homo sapien
gggcagaaggtaccctccggctgtg

SEQ ID NO: 3112295 - DNA, 25 bp, Homo sapien
cgccgggggcaccgctagggcttgg

SEQ ID NO: 3112296 - DNA, 25 bp, Homo sapien
gaccacgggacttgccactggacat

SEQ ID NO: 3112297 - DNA, 25 bp, Homo sapien
gcttggggaccacgggacttgccac

SEQ ID NO: 3112298 - DNA, 25 bp, Homo sapien
gcaccgctagggcttggggaccacg

SEQ ID NO: 3112299 - DNA, 25 bp, Homo sapien
ggcacgtgccctcatcttgatgttt

SEQ ID NO: 3112300 - DNA, 25 bp, Homo sapien
caggcacgtgccctcatcttgatgt

SEQ ID NO: 3112301 - DNA, 25 bp, Homo sapien
gcacgtgccctcatcttgatgtttg

SEQ ID NO: 3112302 - DNA, 25 bp, Homo sapien
aggcacgtgccctcatcttgatgtt

SEQ ID NO: 3112303 - DNA, 25 bp, Homo sapien
gtgggcagccctcgcctccccgaag

SEQ ID NO: 3112304 - DNA, 25 bp, Homo sapien
cagggctggagtcggtggctttgta

SEQ ID NO: 3112305 - DNA, 25 bp, Homo sapien
aggtccagcgggtgggcagccctcg

SEQ ID NO: 3112306 - DNA, 25 bp, Homo sapien
gcgtcgggttctgggccgcgagagg

SEQ ID NO: 3112307 - DNA, 25 bp, Homo sapien
cctagccaggaagagccgccgtccg

SEQ ID NO: 3112308 - DNA, 25 bp, Homo sapien
gaggccgtgccccacatccaggcag

SEQ ID NO: 3112309 - DNA, 25 bp, Homo sapien
gggagggcgaggccgtgccccacat

SEQ ID NO: 3112310 - DNA, 25 bp, Homo sapien
tagccaggaagagccgccgtccgca

SEQ ID NO: 3112311 - DNA, 25 bp, Homo sapien
tcccgagagccagccgcgcccctcc

SEQ ID NO: 3112312 - DNA, 25 bp, Homo sapien
gctcccgagagccagccgcgcccct

SEQ ID NO: 3112313 - DNA, 25 bp, Homo sapien
cgagggctcccgagagccagccgcg

SEQ ID NO: 3112314 - DNA, 25 bp, Homo sapien
agggctcccgagagccagccgcgcc

SEQ ID NO: 3112315 - DNA, 25 bp, Homo sapien
ggtgccaaatgtgggccacactctg

SEQ ID NO: 3112316 - DNA, 25 bp, Homo sapien
tggcgcagagccattggaggtgccc

SEQ ID NO: 3112317 - DNA, 25 bp, Homo sapien
gggccttccgggcagtggcgcagag

SEQ ID NO: 3112318 - DNA, 25 bp, Homo sapien
gcctgtgccgctccctccagtgagg

SEQ ID NO: 3112319 - DNA, 25 bp, Homo sapien
tgtgaaatgggccacgccgggcagc

SEQ ID NO: 3112320 - DNA, 25 bp, Homo sapien
agacccgcagttcacgagtcgacgc

SEQ ID NO: 3112321 - DNA, 25 bp, Homo sapien
ggcagccgcacgcaacggaaccgaa

SEQ ID NO: 3112322 - DNA, 25 bp, Homo sapien
ggctcctgctccgagacccgcagtt

SEQ ID NO: 3112323 - DNA, 25 bp, Homo sapien
ttacggtagcgtccagtagggcgcc

SEQ ID NO: 3112324 - DNA, 25 bp, Homo sapien
ctgcagcaagtggagtcggccccgc

SEQ ID NO: 3112325 - DNA, 25 bp, Homo sapien
gtagggcgcctactgcgggcaatac

SEQ ID NO: 3112326 - DNA, 25 bp, Homo sapien
cgcgcgccggcaattacggtagcgt

SEQ ID NO: 3112327 - DNA, 25 bp, Homo sapien
aaggtggtgggcgaggtttctggag

SEQ ID NO: 3112328 - DNA, 25 bp, Homo sapien
ctgcaggacggcatttcgagccacc

SEQ ID NO: 3112329 - DNA, 25 bp, Homo sapien
acggcatttcgagccacctggcatg

SEQ ID NO: 3112330 - DNA, 25 bp, Homo sapien
cgagccacctggcatggcgttccag

SEQ ID NO: 3112331 - DNA, 25 bp, Homo sapien
atttctgggtgggttggcatgcttc

SEQ ID NO: 3112332 - DNA, 25 bp, Homo sapien
ccagaggccaggttatttctgggtg

SEQ ID NO: 3112333 - DNA, 25 bp, Homo sapien
atcccagaggccaggttatttctgg

SEQ ID NO: 3112334 - DNA, 25 bp, Homo sapien
tgggagatcagctttctcatcccag

SEQ ID NO: 3112335 - DNA, 25 bp, Homo sapien
ggctggagtgggaactcctggagcc

SEQ ID NO: 3112336 - DNA, 25 bp, Homo sapien
gagccatttcagcatggctggcacc

SEQ ID NO: 3112337 - DNA, 25 bp, Homo sapien
ttgccccaagccatgtgggcagaca

SEQ ID NO: 3112338 - DNA, 25 bp, Homo sapien
tgaggacagacgatggtgccaggtt

SEQ ID NO: 3112339 - DNA, 25 bp, Homo sapien
gccttggggggctctcaccacattc

SEQ ID NO: 3112340 - DNA, 25 bp, Homo sapien
ggtttggcactcaacttccagccct

SEQ ID NO: 3112341 - DNA, 25 bp, Homo sapien
ggttgggtttggcactcaacttcca

SEQ ID NO: 3112342 - DNA, 25 bp, Homo sapien
cagggttgggtttggcactcaactt

SEQ ID NO: 3112343 - DNA, 25 bp, Homo sapien
ccggaaacaagtgtctgagtggctg

SEQ ID NO: 3112344 - DNA, 25 bp, Homo sapien
ttcacaccccggaaacaagtgtctg

SEQ ID NO: 3112345 - DNA, 25 bp, Homo sapien
cacaccccggaaacaagtgtctgag

SEQ ID NO: 3112346 - DNA, 25 bp, Homo sapien
gccgcggaggaggagaagctccaca

SEQ ID NO: 3112347 - DNA, 25 bp, Homo sapien
ccagcggatcgtcgcccgatcagtg

SEQ ID NO: 3112348 - DNA, 25 bp, Homo sapien
tcgtcgcccgatcagtgttttgagg

SEQ ID NO: 3112349 - DNA, 25 bp, Homo sapien
agctgccggcccagcggatcgtcgc

SEQ ID NO: 3112350 - DNA, 25 bp, Homo sapien
ggatcgtcgcccgatcagtgttttg

SEQ ID NO: 3112351 - DNA, 25 bp, Homo sapien
caagccgcaaggttacaaggcatcc

SEQ ID NO: 3112352 - DNA, 25 bp, Homo sapien
catgcttcgagacaacgtgacttta

SEQ ID NO: 3112353 - DNA, 25 bp, Homo sapien
tgcccacccctcttgagtgtcttgg

SEQ ID NO: 3112354 - DNA, 25 bp, Homo sapien
gccactgctatgctcaaggacctgg

SEQ ID NO: 3112355 - DNA, 25 bp, Homo sapien
gggctggtctttgcaccctgtcctc

SEQ ID NO: 3112356 - DNA, 25 bp, Homo sapien
cggcccagcgcttgggcttgtcctg

SEQ ID NO: 3112357 - DNA, 25 bp, Homo sapien
tggcagtgtgcgtggtgtggtcagt

SEQ ID NO: 3112358 - DNA, 25 bp, Homo sapien
gcttgggcttgtcctggacacctaa

SEQ ID NO: 3112359 - DNA, 25 bp, Homo sapien
gggccctcagtaggtgcgtcgtggg

SEQ ID NO: 3112360 - DNA, 25 bp, Homo sapien
cgtgcagccggagagatgccatgtc

SEQ ID NO: 3112361 - DNA, 25 bp, Homo sapien
tcagtaggtgcgtcgtgggcgctgg

SEQ ID NO: 3112362 - DNA, 25 bp, Homo sapien
ggagagatgccatgtccctgctcct

SEQ ID NO: 3112363 - DNA, 25 bp, Homo sapien
gcccatgtgtctcggcagagtccac

SEQ ID NO: 3112364 - DNA, 25 bp, Homo sapien
atgtgtctcggcagagtccaccagt

SEQ ID NO: 3112365 - DNA, 25 bp, Homo sapien
ccatgtgtctcggcagagtccacca

SEQ ID NO: 3112366 - DNA, 25 bp, Homo sapien
gtgtctcggcagagtccaccagtcc

SEQ ID NO: 3112367 - DNA, 25 bp, Homo sapien
tagatactgggcaaggactgtcaca

SEQ ID NO: 3112368 - DNA, 25 bp, Homo sapien
aacgttctgggcactacatcgggac

SEQ ID NO: 3112369 - DNA, 25 bp, Homo sapien
tctgagctagtcttggcacgtggca

SEQ ID NO: 3112370 - DNA, 25 bp, Homo sapien
ccattggtaacagagtagatcagcc

SEQ ID NO: 3112371 - DNA, 25 bp, Homo sapien
gacagactgaagaccactggaagcc

SEQ ID NO: 3112372 - DNA, 25 bp, Homo sapien
tcatcggtgcacgacagactgaaga

SEQ ID NO: 3112373 - DNA, 25 bp, Homo sapien
cactggaagccacccgaccaggaat

SEQ ID NO: 3112374 - DNA, 25 bp, Homo sapien
tgcacgacagactgaagaccactgg

SEQ ID NO: 3112375 - DNA, 25 bp, Homo sapien
ccacagtgacggtgctgggcaggga

SEQ ID NO: 3112376 - DNA, 25 bp, Homo sapien
agataccacagtgacggtgctgggc

SEQ ID NO: 3112377 - DNA, 25 bp, Homo sapien
ataccacagtgacggtgctgggcag

SEQ ID NO: 3112378 - DNA, 25 bp, Homo sapien
accacagtgacggtgctgggcaggg

SEQ ID NO: 3112379 - DNA, 25 bp, Homo sapien
cagcagaacgagtgacaggaagacg

SEQ ID NO: 3112380 - DNA, 25 bp, Homo sapien
ggctgggacacgtgctcagcagaac

SEQ ID NO: 3112381 - DNA, 25 bp, Homo sapien
agaggcatgcaagcaaggtgcccgc

SEQ ID NO: 3112382 - DNA, 25 bp, Homo sapien
ccgggctcggcagggtcgaaggatc

SEQ ID NO: 3112383 - DNA, 25 bp, Homo sapien
taatacagacgaagctgcgtggaca

SEQ ID NO: 3112384 - DNA, 25 bp, Homo sapien
cagagtgtggcgcagcaagagctta

SEQ ID NO: 3112385 - DNA, 25 bp, Homo sapien
gagaggcgactagaaaagctggcat

SEQ ID NO: 3112386 - DNA, 25 bp, Homo sapien
gaccgcagacaaggcaactcaagtg

SEQ ID NO: 3112387 - DNA, 25 bp, Homo sapien
cagtgctgccttccgatgggagacg

SEQ ID NO: 3112388 - DNA, 25 bp, Homo sapien
agtgctgccttccgatgggagacga

SEQ ID NO: 3112389 - DNA, 25 bp, Homo sapien
tgctgccttccgatgggagacgagc

SEQ ID NO: 3112390 - DNA, 25 bp, Homo sapien
ctgccttccgatgggagacgagcag

SEQ ID NO: 3112391 - DNA, 25 bp, Homo sapien
acttgccgtggtgttcgaaaggaat

SEQ ID NO: 3112392 - DNA, 25 bp, Homo sapien
gccgtggtgttcgaaaggaatgcta

SEQ ID NO: 3112393 - DNA, 25 bp, Homo sapien
cgtggtgttcgaaaggaatgctatt

SEQ ID NO: 3112394 - DNA, 25 bp, Homo sapien
ttgccgtggtgttcgaaaggaatgc

SEQ ID NO: 3112395 - DNA, 25 bp, Homo sapien
atccttgcctcaaccaggtccacag

SEQ ID NO: 3112396 - DNA, 25 bp, Homo sapien
caggtccacagaccgacaggtgcca

SEQ ID NO: 3112397 - DNA, 25 bp, Homo sapien
tgtgtcggctccatgtccagatggg

SEQ ID NO: 3112398 - DNA, 25 bp, Homo sapien
cctgactacctgtgtcggctccatg

SEQ ID NO: 3112399 - DNA, 25 bp, Homo sapien
tcctgggcaggagttgatcaaagcg

SEQ ID NO: 3112400 - DNA, 25 bp, Homo sapien
gacaaggccttcttctcaccaagta

SEQ ID NO: 3112401 - DNA, 25 bp, Homo sapien
cagcaactagatggcctttagggcc

SEQ ID NO: 3112402 - DNA, 25 bp, Homo sapien
tcatcgactgttggaatgacaaggc

SEQ ID NO: 3112403 - DNA, 25 bp, Homo sapien
caagaagcccgtggaggtccctacg

SEQ ID NO: 3112404 - DNA, 25 bp, Homo sapien
tcacaagaagcccgtggaggtccct

SEQ ID NO: 3112405 - DNA, 25 bp, Homo sapien
tggaggtccctacgggcctccatcc

SEQ ID NO: 3112406 - DNA, 25 bp, Homo sapien
cgtggaggtccctacgggcctccat

SEQ ID NO: 3112407 - DNA, 25 bp, Homo sapien
cctgtgaggtcggacgaggagatgt

SEQ ID NO: 3112408 - DNA, 25 bp, Homo sapien
gctctctctccatgccggagacggg

SEQ ID NO: 3112409 - DNA, 25 bp, Homo sapien
ggtgcagccgcatactcactttccg

SEQ ID NO: 3112410 - DNA, 25 bp, Homo sapien
cgagaggtatcttgtcggcctgtga

SEQ ID NO: 3112411 - DNA, 25 bp, Homo sapien
ggcatttctaaaggcgcctgggcag

SEQ ID NO: 3112412 - DNA, 25 bp, Homo sapien
gagcatcgcctgacacagggcactt

SEQ ID NO: 3112413 - DNA, 25 bp, Homo sapien
agggcacttagtgtccaccaccaag

SEQ ID NO: 3112414 - DNA, 25 bp, Homo sapien
gctttctatgagaggctgtggccag

SEQ ID NO: 3112415 - DNA, 25 bp, Homo sapien
tgcgctcccgctcggcgtcatcggc

SEQ ID NO: 3112416 - DNA, 25 bp, Homo sapien
gggttccgcgagtgtctcagccgct

SEQ ID NO: 3112417 - DNA, 25 bp, Homo sapien
gctcctctcggtccctgcgctcccg

SEQ ID NO: 3112418 - DNA, 25 bp, Homo sapien
tgtggaagggaggccgcgggtagcc

SEQ ID NO: 3112419 - DNA, 25 bp, Homo sapien
actctaatgccgcaggagggtcgct

SEQ ID NO: 3112420 - DNA, 25 bp, Homo sapien
aaaacgctggcctagcctgctctga

SEQ ID NO: 3112421 - DNA, 25 bp, Homo sapien
tgctgccatttacggaaaacgctgg

SEQ ID NO: 3112422 - DNA, 25 bp, Homo sapien
gagggactgatctgccctgccgagt

SEQ ID NO: 3112423 - DNA, 25 bp, Homo sapien
cgaacgtgctggcagtgcgacttac

SEQ ID NO: 3112424 - DNA, 25 bp, Homo sapien
cacactcagcgaacgtgctggcagt

SEQ ID NO: 3112425 - DNA, 25 bp, Homo sapien
tcagcgaacgtgctggcagtgcgac

SEQ ID NO: 3112426 - DNA, 25 bp, Homo sapien
acaccacactcagcgaacgtgctgg

SEQ ID NO: 3112427 - DNA, 25 bp, Homo sapien
ccgcaggtacgagtagtcaggcttg

SEQ ID NO: 3112428 - DNA, 25 bp, Homo sapien
tcaaaacgcaaggaacggcagaaat

SEQ ID NO: 3112429 - DNA, 25 bp, Homo sapien
cagattccggaaaagctgccgcagg

SEQ ID NO: 3112430 - DNA, 25 bp, Homo sapien
aagccctggcgatggaacagattcc

SEQ ID NO: 3112431 - DNA, 25 bp, Homo sapien
agcctttacacaacacttcgatggg

SEQ ID NO: 3112432 - DNA, 25 bp, Homo sapien
ggacattttcttctcgctaatcctt

SEQ ID NO: 3112433 - DNA, 25 bp, Homo sapien
agggtagcctttacacaacacttcg

SEQ ID NO: 3112434 - DNA, 25 bp, Homo sapien
ttcttctcgctaatcctttcgtatt

SEQ ID NO: 3112435 - DNA, 25 bp, Homo sapien
agtacattagcacgtagcccagaga

SEQ ID NO: 3112436 - DNA, 25 bp, Homo sapien
acattagcacgtagcccagagactc

SEQ ID NO: 3112437 - DNA, 25 bp, Homo sapien
agcacgtagcccagagactccaagt

SEQ ID NO: 3112438 - DNA, 25 bp, Homo sapien
gaagtacattagcacgtagcccaga

SEQ ID NO: 3112439 - DNA, 25 bp, Homo sapien
ttgatggaggcgtaccgcgccgtcc

SEQ ID NO: 3112440 - DNA, 25 bp, Homo sapien
ggttcttgttctcacgataggggat

SEQ ID NO: 3112441 - DNA, 25 bp, Homo sapien
ctggcttcacatcccggtggatgaa

SEQ ID NO: 3112442 - DNA, 25 bp, Homo sapien
gaatgaatgtattcgatgcgactga

SEQ ID NO: 3112443 - DNA, 25 bp, Homo sapien
agagcaagggcgcgagatggcaccc

SEQ ID NO: 3112444 - DNA, 25 bp, Homo sapien
gcaagggcgcgagatggcaccccag

SEQ ID NO: 3112445 - DNA, 25 bp, Homo sapien
agcagagcaagggcgcgagatggca

SEQ ID NO: 3112446 - DNA, 25 bp, Homo sapien
agcaagggcgcgagatggcacccca

SEQ ID NO: 3112447 - DNA, 25 bp, Homo sapien
gagactgaggaacccactgaatgga

SEQ ID NO: 3112448 - DNA, 25 bp, Homo sapien
tgctggtaccgagaaggtggcctcc

SEQ ID NO: 3112449 - DNA, 25 bp, Homo sapien
tcagccacagcagggtagtttaaca

SEQ ID NO: 3112450 - DNA, 25 bp, Homo sapien
aatggaaacgtgctatgctggtacc

SEQ ID NO: 3112451 - DNA, 25 bp, Homo sapien
acaagcgagtggctgattctatcag

SEQ ID NO: 3112452 - DNA, 25 bp, Homo sapien
tttcctctgtgaattaatggccata

SEQ ID NO: 3112453 - DNA, 25 bp, Homo sapien
aattaatggccataataatggcaag

SEQ ID NO: 3112454 - DNA, 25 bp, Homo sapien
cagcaagtgtgtgccaactgtcagg

SEQ ID NO: 3112455 - DNA, 25 bp, Homo sapien
caagcagcaggacggttttgaggct

SEQ ID NO: 3112456 - DNA, 25 bp, Homo sapien
agcaagcagcaggacggttttgagg

SEQ ID NO: 3112457 - DNA, 25 bp, Homo sapien
cagcaggacggttttgaggctgaat

SEQ ID NO: 3112458 - DNA, 25 bp, Homo sapien
caggacggttttgaggctgaatttc

SEQ ID NO: 3112459 - DNA, 25 bp, Homo sapien
cgttgtagtccccctctgccccgca

SEQ ID NO: 3112460 - DNA, 25 bp, Homo sapien
gtagtccccctctgccccgcaccat

SEQ ID NO: 3112461 - DNA, 25 bp, Homo sapien
ttgtagtccccctctgccccgcacc

SEQ ID NO: 3112462 - DNA, 25 bp, Homo sapien
gttgtagtccccctctgccccgcac

SEQ ID NO: 3112463 - DNA, 25 bp, Homo sapien
cttgtgaacggcctggataaacctt

SEQ ID NO: 3112464 - DNA, 25 bp, Homo sapien
tgttttcacagcactggatccgcaa

SEQ ID NO: 3112465 - DNA, 25 bp, Homo sapien
tacacatggctctacacacatacgg

SEQ ID NO: 3112466 - DNA, 25 bp, Homo sapien
cattttactggccacatgtatcgcc

SEQ ID NO: 3112467 - DNA, 25 bp, Homo sapien
ggcaagtatctctcagttaatggca

SEQ ID NO: 3112468 - DNA, 25 bp, Homo sapien
ttctagatactaaaccactgcaggt

SEQ ID NO: 3112469 - DNA, 25 bp, Homo sapien
ctgattcgccctcacaccttaagta

SEQ ID NO: 3112470 - DNA, 25 bp, Homo sapien
gccctcagcgtcaaaaagagatgct

SEQ ID NO: 3112471 - DNA, 25 bp, Homo sapien
caccaccagaattaggccttttgcc

SEQ ID NO: 3112472 - DNA, 25 bp, Homo sapien
tctcaaagtgaattcaagaaccacc

SEQ ID NO: 3112473 - DNA, 25 bp, Homo sapien
gtaccacccataacaggacaatctg

SEQ ID NO: 3112474 - DNA, 25 bp, Homo sapien
tctttacagtatctgacgggcgcga

SEQ ID NO: 3112475 - DNA, 25 bp, Homo sapien
ccatgggcaggaacatgaaggtgca

SEQ ID NO: 3112476 - DNA, 25 bp, Homo sapien
tttactctcttaagccagcggccac

SEQ ID NO: 3112477 - DNA, 25 bp, Homo sapien
aatgcgctcgaagcccaaatgggag

SEQ ID NO: 3112478 - DNA, 25 bp, Homo sapien
gaagacctgacctacattttggaat

SEQ ID NO: 3112479 - DNA, 25 bp, Homo sapien
tggacccaagactctctgaaggaag

SEQ ID NO: 3112480 - DNA, 25 bp, Homo sapien
gaaaccatgacccaatatgaagcaa

SEQ ID NO: 3112481 - DNA, 25 bp, Homo sapien
tgcgtctggcctattcacacacact

SEQ ID NO: 3112482 - DNA, 25 bp, Homo sapien
ttgtcagggtgtggagaacacttcc

SEQ ID NO: 3112483 - DNA, 25 bp, Homo sapien
agcaatgctgagttgctgttctccc

SEQ ID NO: 3112484 - DNA, 25 bp, Homo sapien
gcaatgctgagttgctgttctccct

SEQ ID NO: 3112485 - DNA, 25 bp, Homo sapien
aatgctgagttgctgttctcccttg

SEQ ID NO: 3112486 - DNA, 25 bp, Homo sapien
caatgctgagttgctgttctccctt

SEQ ID NO: 3112487 - DNA, 25 bp, Homo sapien
gcttgatggcaacctcttctcctgc

SEQ ID NO: 3112488 - DNA, 25 bp, Homo sapien
ggtgtttggttttgacacattcaag

SEQ ID NO: 3112489 - DNA, 25 bp, Homo sapien
caatgtggagctgagggtgtttggt

SEQ ID NO: 3112490 - DNA, 25 bp, Homo sapien
gttttgacacattcaagcttgatgg

SEQ ID NO: 3112491 - DNA, 25 bp, Homo sapien
gatccttcccaacagcgtggctatg

SEQ ID NO: 3112492 - DNA, 25 bp, Homo sapien
gtataagacactggaatcggccggg

SEQ ID NO: 3112493 - DNA, 25 bp, Homo sapien
ttccctcacgagtcccttcagagta

SEQ ID NO: 3112494 - DNA, 25 bp, Homo sapien
aggacactggatccttcccaacagc

SEQ ID NO: 3112495 - DNA, 25 bp, Homo sapien
caagcaggcgcagtgcagcctcgga

SEQ ID NO: 3112496 - DNA, 25 bp, Homo sapien
aggcgcagtgcagcctcggacagta

SEQ ID NO: 3112497 - DNA, 25 bp, Homo sapien
agtgcagcctcggacagtaccgcca

SEQ ID NO: 3112498 - DNA, 25 bp, Homo sapien
gcagtgcagcctcggacagtaccgc

SEQ ID NO: 3112499 - DNA, 25 bp, Homo sapien
tgagccctgggtgtcagattcaaaa

SEQ ID NO: 3112500 - DNA, 25 bp, Homo sapien
tcaccacaggttaaatccgagaagc

SEQ ID NO: 3112501 - DNA, 25 bp, Homo sapien
aaattacgtccctcaagttcagcag

SEQ ID NO: 3112502 - DNA, 25 bp, Homo sapien
tacacaagttttggcatgcaacagg

SEQ ID NO: 3112503 - DNA, 25 bp, Homo sapien
tatgacacaacccaaaaccttctaa

SEQ ID NO: 3112504 - DNA, 25 bp, Homo sapien
tgccagcatcttaatcctgtgtgac

SEQ ID NO: 3112505 - DNA, 25 bp, Homo sapien
gactgttacagtctaaaggacacct

SEQ ID NO: 3112506 - DNA, 25 bp, Homo sapien
ggacacctcatgagtacaactacct

SEQ ID NO: 3112507 - DNA, 25 bp, Homo sapien
tgtctccgaaggagccgctgccgat

SEQ ID NO: 3112508 - DNA, 25 bp, Homo sapien
gccggtacctgttcccgactctcag

SEQ ID NO: 3112509 - DNA, 25 bp, Homo sapien
cgctgccgatcttccggcccagccg

SEQ ID NO: 3112510 - DNA, 25 bp, Homo sapien
gatcttccggcccagccggtacctg

SEQ ID NO: 3112511 - DNA, 25 bp, Homo sapien
ggcggcggcccgattcgctcctgcc

SEQ ID NO: 3112512 - DNA, 25 bp, Homo sapien
cggcggcggcccgattcgctcctgc

SEQ ID NO: 3112513 - DNA, 25 bp, Homo sapien
ctgccctcccggccgcttcctgggt

SEQ ID NO: 3112514 - DNA, 25 bp, Homo sapien
ggcggcccgattcgctcctgccctc

SEQ ID NO: 3112515 - DNA, 25 bp, Homo sapien
gactcggatcttccgggcctaaatc

SEQ ID NO: 3112516 - DNA, 25 bp, Homo sapien
gggcggatgggacagtccgagcgcc

SEQ ID NO: 3112517 - DNA, 25 bp, Homo sapien
tgctgccgctactgcgggtccggct

SEQ ID NO: 3112518 - DNA, 25 bp, Homo sapien
gccatcgcgctgtgacgtcacttcc

SEQ ID NO: 3112519 - DNA, 25 bp, Homo sapien
ttctagctcttctcacccatagtgc

SEQ ID NO: 3112520 - DNA, 25 bp, Homo sapien
catagtgccccaagcttcatgcagc

SEQ ID NO: 3112521 - DNA, 25 bp, Homo sapien
tgtgtcttgactctataacccgtgc

SEQ ID NO: 3112522 - DNA, 25 bp, Homo sapien
tgcggcaggtactgtgcccgtctgc

SEQ ID NO: 3112523 - DNA, 25 bp, Homo sapien
acaccgggcgccgtcagtacactgt

SEQ ID NO: 3112524 - DNA, 25 bp, Homo sapien
caaatcgtgtatcccctagtcagct

SEQ ID NO: 3112525 - DNA, 25 bp, Homo sapien
agtgactgaagtccctgttccctgt

SEQ ID NO: 3112526 - DNA, 25 bp, Homo sapien
cagccctgggcaaatcgtgtatccc

SEQ ID NO: 3112527 - DNA, 25 bp, Homo sapien
gtgatgcccacacgagtgcagtgga

SEQ ID NO: 3112528 - DNA, 25 bp, Homo sapien
gcagagagctattcctcggcagcct

SEQ ID NO: 3112529 - DNA, 25 bp, Homo sapien
acacgagtgcagtggatgcggccct

SEQ ID NO: 3112530 - DNA, 25 bp, Homo sapien
tcacccaggtcgcagagagctattc

SEQ ID NO: 3112531 - DNA, 25 bp, Homo sapien
cacccagtgaatcggcagccatggg

SEQ ID NO: 3112532 - DNA, 25 bp, Homo sapien
ccccaagtgagcacggcctctgcag

SEQ ID NO: 3112533 - DNA, 25 bp, Homo sapien
gccacccagtgaatcggcagccatg

SEQ ID NO: 3112534 - DNA, 25 bp, Homo sapien
ccacccagtgaatcggcagccatgg

SEQ ID NO: 3112535 - DNA, 25 bp, Homo sapien
cccacccaacttagctggcagagct

SEQ ID NO: 3112536 - DNA, 25 bp, Homo sapien
tgtccaaggaaagctctagttacgg

SEQ ID NO: 3112537 - DNA, 25 bp, Homo sapien
gatgcacgacttactttcaccaggc

SEQ ID NO: 3112538 - DNA, 25 bp, Homo sapien
cagagttgattcttcacgtgcaggg

SEQ ID NO: 3112539 - DNA, 25 bp, Homo sapien
gacacgtgtgctggataaacatgca

SEQ ID NO: 3112540 - DNA, 25 bp, Homo sapien
cagaatctcgctgacttttgggtga

SEQ ID NO: 3112541 - DNA, 25 bp, Homo sapien
tttacaattggaaggctagtgggcc

SEQ ID NO: 3112542 - DNA, 25 bp, Homo sapien
gctcttctgttgaacggtgcagggt

SEQ ID NO: 3112543 - DNA, 25 bp, Homo sapien
tcttctacgtgaaacaaaggagcac

SEQ ID NO: 3112544 - DNA, 25 bp, Homo sapien
cgcgccgggactcggctgtttccga

SEQ ID NO: 3112545 - DNA, 25 bp, Homo sapien
tcccgggcgtcctttaggagactca

SEQ ID NO: 3112546 - DNA, 25 bp, Homo sapien
ggtccctccgggtcaggacgcagac

SEQ ID NO: 3112547 - DNA, 25 bp, Homo sapien
cattcgcagccgacgttgcggaggc

SEQ ID NO: 3112548 - DNA, 25 bp, Homo sapien
gcttccgcctgttctaagagttcat

SEQ ID NO: 3112549 - DNA, 25 bp, Homo sapien
ctaatggatcattgggtacatgtcc

SEQ ID NO: 3112550 - DNA, 25 bp, Homo sapien
tacagtagtgtaaccgaagatgcca

SEQ ID NO: 3112551 - DNA, 25 bp, Homo sapien
gattgccaagcagtccagtgtaaac

SEQ ID NO: 3112552 - DNA, 25 bp, Homo sapien
ttgaatgtggggtcatgaagatgtc

SEQ ID NO: 3112553 - DNA, 25 bp, Homo sapien
aatgtggggtcatgaagatgtcaga

SEQ ID NO: 3112554 - DNA, 25 bp, Homo sapien
cagaattgcgtctgaagatgtcaga

SEQ ID NO: 3112555 - DNA, 25 bp, Homo sapien
gaagatgtcagaattgcgtctgaag

SEQ ID NO: 3112556 - DNA, 25 bp, Homo sapien
ctgaggtttctgaagctcggggtga

SEQ ID NO: 3112557 - DNA, 25 bp, Homo sapien
atctcctggtgccgccccgggacct

SEQ ID NO: 3112558 - DNA, 25 bp, Homo sapien
aggcaggatcggcagtgaccatctc

SEQ ID NO: 3112559 - DNA, 25 bp, Homo sapien
cagccaggcaggatcggcagtgacc

SEQ ID NO: 3112560 - DNA, 25 bp, Homo sapien
atggccacggatggccaggcactcc

SEQ ID NO: 3112561 - DNA, 25 bp, Homo sapien
ctacaccgcggctttccctccatgg

SEQ ID NO: 3112562 - DNA, 25 bp, Homo sapien
ggctttccctccatggccacggatg

SEQ ID NO: 3112563 - DNA, 25 bp, Homo sapien
gcctctgggagccatttcccaaatc

SEQ ID NO: 3112564 - DNA, 25 bp, Homo sapien
catcttcctccgtggtctagggcgg

SEQ ID NO: 3112565 - DNA, 25 bp, Homo sapien
tctagggcggactttgatcttcaac

SEQ ID NO: 3112566 - DNA, 25 bp, Homo sapien
acaggacggcgcaggctgttgcccc

SEQ ID NO: 3112567 - DNA, 25 bp, Homo sapien
accaagagttcgtgcacaggacggc

SEQ ID NO: 3112568 - DNA, 25 bp, Homo sapien
tgagggagaggcggatgtgctcggg

SEQ ID NO: 3112569 - DNA, 25 bp, Homo sapien
gggagaggcggatgtgctcgggggg

SEQ ID NO: 3112570 - DNA, 25 bp, Homo sapien
gagggagaggcggatgtgctcgggg

SEQ ID NO: 3112571 - DNA, 25 bp, Homo sapien
ctgagggagaggcggatgtgctcgg

SEQ ID NO: 3112572 - DNA, 25 bp, Homo sapien
ttgagagtctcagcgggacagcagc

SEQ ID NO: 3112573 - DNA, 25 bp, Homo sapien
gagagtctcagcgggacagcagctc

SEQ ID NO: 3112574 - DNA, 25 bp, Homo sapien
agcttgagagtctcagcgggacagc

SEQ ID NO: 3112575 - DNA, 25 bp, Homo sapien
cttgagagtctcagcgggacagcag

SEQ ID NO: 3112576 - DNA, 25 bp, Homo sapien
aaatgtctccacatgttgccacgtc

SEQ ID NO: 3112577 - DNA, 25 bp, Homo sapien
tctagattgttatgtagattgaaca

SEQ ID NO: 3112578 - DNA, 25 bp, Homo sapien
cacccagcttgatttctaaacctca

SEQ ID NO: 3112579 - DNA, 25 bp, Homo sapien
tgtttctgacaggagaaatgtctcc

SEQ ID NO: 3112580 - DNA, 25 bp, Homo sapien
tggtggtctcctggtgccgagggcc

SEQ ID NO: 3112581 - DNA, 25 bp, Homo sapien
ggcccgagcatcaggttcagcgaga

SEQ ID NO: 3112582 - DNA, 25 bp, Homo sapien
gtttggtggtctcctggtgccgagg

SEQ ID NO: 3112583 - DNA, 25 bp, Homo sapien
agcatcaggttcagcgagagcagca

SEQ ID NO: 3112584 - DNA, 25 bp, Homo sapien
tgtccccacgtgcagcatgggagct

SEQ ID NO: 3112585 - DNA, 25 bp, Homo sapien
caggaggcaatgaagtgcagtgtgt

SEQ ID NO: 3112586 - DNA, 25 bp, Homo sapien
aatgggcgaatggtggctcctgtcc

SEQ ID NO: 3112587 - DNA, 25 bp, Homo sapien
ggcagtggctgagggccagtgcctc

SEQ ID NO: 3112588 - DNA, 25 bp, Homo sapien
tgggtgggccggcactgacaggaga

SEQ ID NO: 3112589 - DNA, 25 bp, Homo sapien
cctttatttctggtacggctgggtg

SEQ ID NO: 3112590 - DNA, 25 bp, Homo sapien
aggcccatcccacagaaaagccctc

SEQ ID NO: 3112591 - DNA, 25 bp, Homo sapien
gcttcctcccggtggcggcgtgggc

SEQ ID NO: 3112592 - DNA, 25 bp, Homo sapien
cacatgccgccgaattcttatcccg

SEQ ID NO: 3112593 - DNA, 25 bp, Homo sapien
tgcagcggctgtgcgacatgtcctc

SEQ ID NO: 3112594 - DNA, 25 bp, Homo sapien
ttcttatcccgccacgagcacagtt

SEQ ID NO: 3112595 - DNA, 25 bp, Homo sapien
gacatgtcctcgtacaccacacatg

SEQ ID NO: 3112596 - DNA, 25 bp, Homo sapien
tcaggtcgctttggtgctggtcccc

SEQ ID NO: 3112597 - DNA, 25 bp, Homo sapien
cctcaggtcgctttggtgctggtcc

SEQ ID NO: 3112598 - DNA, 25 bp, Homo sapien
tccccctcaggtcgctttggtgctg

SEQ ID NO: 3112599 - DNA, 25 bp, Homo sapien
cacacgcgggcccagcgcctgggct

SEQ ID NO: 3112600 - DNA, 25 bp, Homo sapien
ctcaggagagggaacaatctttggg

SEQ ID NO: 3112601 - DNA, 25 bp, Homo sapien
ctgctctcaggagagggaacaatct

SEQ ID NO: 3112602 - DNA, 25 bp, Homo sapien
tggggctttggcgccccccacgctg

SEQ ID NO: 3112603 - DNA, 25 bp, Homo sapien
gctctcaggagagggaacaatcttt

SEQ ID NO: 3112604 - DNA, 25 bp, Homo sapien
ggcagaggctgtctgcgggtcaggg

SEQ ID NO: 3112605 - DNA, 25 bp, Homo sapien
aaggagatcaccgccagggccgcag

SEQ ID NO: 3112606 - DNA, 25 bp, Homo sapien
tgtgtcctcgccagcacacacgcca

SEQ ID NO: 3112607 - DNA, 25 bp, Homo sapien
cccagcccgaggaggaaggagatca

SEQ ID NO: 3112608 - DNA, 25 bp, Homo sapien
cgtccgagcatctgtgccatccttg

SEQ ID NO: 3112609 - DNA, 25 bp, Homo sapien
ggtggggcgtccgagcatctgtgcc

SEQ ID NO: 3112610 - DNA, 25 bp, Homo sapien
gcatctgtgccatccttgggactgt

SEQ ID NO: 3112611 - DNA, 25 bp, Homo sapien
ctgtgccatccttgggactgttcct

SEQ ID NO: 3112612 - DNA, 25 bp, Homo sapien
gtgccggagccgtagacattgacct

SEQ ID NO: 3112613 - DNA, 25 bp, Homo sapien
cccgtcctcgtagtaaatgatgtct

SEQ ID NO: 3112614 - DNA, 25 bp, Homo sapien
ttgacctccgtgatggcctggcagg

SEQ ID NO: 3112615 - DNA, 25 bp, Homo sapien
gtgtaggtgccagtgtccgacagct

SEQ ID NO: 3112616 - DNA, 25 bp, Homo sapien
tcgccaaagacacggtgccttacgg

SEQ ID NO: 3112617 - DNA, 25 bp, Homo sapien
tcgtgttccgagactgtgggcttct

SEQ ID NO: 3112618 - DNA, 25 bp, Homo sapien
gacagagaatgtcctccctgcaggg

SEQ ID NO: 3112619 - DNA, 25 bp, Homo sapien
tgtcaccatcagtctggccagaagg

SEQ ID NO: 3112620 - DNA, 25 bp, Homo sapien
aggccgcgagccagcgccagaagca

SEQ ID NO: 3112621 - DNA, 25 bp, Homo sapien
ggcaggccgcgagccagcgccagaa

SEQ ID NO: 3112622 - DNA, 25 bp, Homo sapien
caggcaggccgcgagccagcgccag

SEQ ID NO: 3112623 - DNA, 25 bp, Homo sapien
caggccgcgagccagcgccagaagc

SEQ ID NO: 3112624 - DNA, 25 bp, Homo sapien
tctgggtctacaggaccccacagag

SEQ ID NO: 3112625 - DNA, 25 bp, Homo sapien
cagctctcccagccgggcgagtgca

SEQ ID NO: 3112626 - DNA, 25 bp, Homo sapien
ctcccagccgggcgagtgcagctga

SEQ ID NO: 3112627 - DNA, 25 bp, Homo sapien
ctctcccagccgggcgagtgcagct

SEQ ID NO: 3112628 - DNA, 25 bp, Homo sapien
gcgcgtgattccacgcatgtgtgtg

SEQ ID NO: 3112629 - DNA, 25 bp, Homo sapien
agagacgggtgtgcgtgactccaca

SEQ ID NO: 3112630 - DNA, 25 bp, Homo sapien
gcgcatggctccacgcatgtgcaga

SEQ ID NO: 3112631 - DNA, 25 bp, Homo sapien
atgggtgcgcatgactccacgcgtg

SEQ ID NO: 3112632 - DNA, 25 bp, Homo sapien
gcgactccatgcgtgtgtgcagaaa

SEQ ID NO: 3112633 - DNA, 25 bp, Homo sapien
gtgactccacgcatgtgtgcagagg

SEQ ID NO: 3112634 - DNA, 25 bp, Homo sapien
tgcagagaagggtgcacgtgactca

SEQ ID NO: 3112635 - DNA, 25 bp, Homo sapien
cagagacgggaatgtgtggacactc

SEQ ID NO: 3112636 - DNA, 25 bp, Homo sapien
agatgaagacatcaaagggccccgc

SEQ ID NO: 3112637 - DNA, 25 bp, Homo sapien
tcatctcgaggacgccttagggacg

SEQ ID NO: 3112638 - DNA, 25 bp, Homo sapien
catgcgtcctggtaagtcgggtgct

SEQ ID NO: 3112639 - DNA, 25 bp, Homo sapien
agatctgggtccaaagaggctcggc

SEQ ID NO: 3112640 - DNA, 25 bp, Homo sapien
tctgagggctgcgaccttcatctgg

SEQ ID NO: 3112641 - DNA, 25 bp, Homo sapien
tgagggtttgaacaccagtgccagc

SEQ ID NO: 3112642 - DNA, 25 bp, Homo sapien
gggtccacagttcagcggaggctct

SEQ ID NO: 3112643 - DNA, 25 bp, Homo sapien
tctgcggcatatggaaacaagggtt

SEQ ID NO: 3112644 - DNA, 25 bp, Homo sapien
cctgatggagaccacgcaccctgcc

SEQ ID NO: 3112645 - DNA, 25 bp, Homo sapien
aaactccaagttccgtccctgatgg

SEQ ID NO: 3112646 - DNA, 25 bp, Homo sapien
tccaagttccgtccctgatggagac

SEQ ID NO: 3112647 - DNA, 25 bp, Homo sapien
tcagaaactccaagttccgtccctg

SEQ ID NO: 3112648 - DNA, 25 bp, Homo sapien
tcccggcgttgctgggaacagcggc

SEQ ID NO: 3112649 - DNA, 25 bp, Homo sapien
ctcccggcgttgctgggaacagcgg

SEQ ID NO: 3112650 - DNA, 25 bp, Homo sapien
ctgtaccaggcgaacatgaccagag

SEQ ID NO: 3112651 - DNA, 25 bp, Homo sapien
aagacagcagtgaccaccgctggca

SEQ ID NO: 3112652 - DNA, 25 bp, Homo sapien
cagcagtgaccaccgctggcacagg

SEQ ID NO: 3112653 - DNA, 25 bp, Homo sapien
gaacatgaccagagcgaccaagagg

SEQ ID NO: 3112654 - DNA, 25 bp, Homo sapien
tcctccgtgtagctcccagcctcct

SEQ ID NO: 3112655 - DNA, 25 bp, Homo sapien
ctcctccgtgtagctcccagcctcc

SEQ ID NO: 3112656 - DNA, 25 bp, Homo sapien
aggagctgcgcgctggcccggtcct

SEQ ID NO: 3112657 - DNA, 25 bp, Homo sapien
ggagctgcgcgctggcccggtcctt

SEQ ID NO: 3112658 - DNA, 25 bp, Homo sapien
cgcgctggcccggtccttcaggcct

SEQ ID NO: 3112659 - DNA, 25 bp, Homo sapien
ctggcccggtccttcaggcctcggg

SEQ ID NO: 3112660 - DNA, 25 bp, Homo sapien
gtggagagcaaagcggaacccaatt

SEQ ID NO: 3112661 - DNA, 25 bp, Homo sapien
gggtggagagcaaagcggaacccaa

SEQ ID NO: 3112662 - DNA, 25 bp, Homo sapien
agcaaagcggaacccaatttgggtg

SEQ ID NO: 3112663 - DNA, 25 bp, Homo sapien
gagagcaaagcggaacccaatttgg

SEQ ID NO: 3112664 - DNA, 25 bp, Homo sapien
accactgctttctggttgaaccaga

SEQ ID NO: 3112665 - DNA, 25 bp, Homo sapien
gttgaaccagataagtagctggtgg

SEQ ID NO: 3112666 - DNA, 25 bp, Homo sapien
tctggttgaaccagataagtagctg

SEQ ID NO: 3112667 - DNA, 25 bp, Homo sapien
accagataagtagctggtggtgacg

SEQ ID NO: 3112668 - DNA, 25 bp, Homo sapien
tctgttatttctctggtgtcccacg

SEQ ID NO: 3112669 - DNA, 25 bp, Homo sapien
tatttctctggtgtcccacgaggtg

SEQ ID NO: 3112670 - DNA, 25 bp, Homo sapien
ttgtctgttatttctctggtgtccc

SEQ ID NO: 3112671 - DNA, 25 bp, Homo sapien
tgttatttctctggtgtcccacgag

SEQ ID NO: 3112672 - DNA, 25 bp, Homo sapien
gggagtcccgggcgcctttgatcac

SEQ ID NO: 3112673 - DNA, 25 bp, Homo sapien
tgttctcgccccaagacacagagac

SEQ ID NO: 3112674 - DNA, 25 bp, Homo sapien
gaaggcgttggagatgttgcaggac

SEQ ID NO: 3112675 - DNA, 25 bp, Homo sapien
cagccgtcccgggagaagtagcctg

SEQ ID NO: 3112676 - DNA, 25 bp, Homo sapien
cctggagccacctcattgaagatgg

SEQ ID NO: 3112677 - DNA, 25 bp, Homo sapien
gtttcctctgacgagcaggctggct

SEQ ID NO: 3112678 - DNA, 25 bp, Homo sapien
tgagtttcctctgacgagcaggctg

SEQ ID NO: 3112679 - DNA, 25 bp, Homo sapien
cctgcctggacgctctgagtgttca

SEQ ID NO: 3112680 - DNA, 25 bp, Homo sapien
tggacgctctgagtgttcagggact

SEQ ID NO: 3112681 - DNA, 25 bp, Homo sapien
cttcattctgagcactcaaggaggc

SEQ ID NO: 3112682 - DNA, 25 bp, Homo sapien
tcattctgagcactcaaggaggcag

SEQ ID NO: 3112683 - DNA, 25 bp, Homo sapien
ttcattctgagcactcaaggaggca

SEQ ID NO: 3112684 - DNA, 25 bp, Homo sapien
ctgggaaacgtggccagggaatgcc

SEQ ID NO: 3112685 - DNA, 25 bp, Homo sapien
tgggaaacgtggccagggaatgcca

SEQ ID NO: 3112686 - DNA, 25 bp, Homo sapien
gaaacgtggccagggaatgccaggg

SEQ ID NO: 3112687 - DNA, 25 bp, Homo sapien
cgtggccagggaatgccagggggca

SEQ ID NO: 3112688 - DNA, 25 bp, Homo sapien
cctggtccttgtcactggctcttga

SEQ ID NO: 3112689 - DNA, 25 bp, Homo sapien
ccctggtccttgtcactggctcttg

SEQ ID NO: 3112690 - DNA, 25 bp, Homo sapien
gtgacgtgcttttgcatgaacctgt

SEQ ID NO: 3112691 - DNA, 25 bp, Homo sapien
caggtgacgtgcttttgcatgaacc

SEQ ID NO: 3112692 - DNA, 25 bp, Homo sapien
gaccaggtgacgtgcttttgcatga

SEQ ID NO: 3112693 - DNA, 25 bp, Homo sapien
gtggaccaggtgacgtgcttttgca

SEQ ID NO: 3112694 - DNA, 25 bp, Homo sapien
gggcctgctgaggacctggcttgca

SEQ ID NO: 3112695 - DNA, 25 bp, Homo sapien
ttgcagacgggctccggccttctcg

SEQ ID NO: 3112696 - DNA, 25 bp, Homo sapien
ctgctgaggacctggcttgcagacg

SEQ ID NO: 3112697 - DNA, 25 bp, Homo sapien
acgggctccggccttctcgtcccat

SEQ ID NO: 3112698 - DNA, 25 bp, Homo sapien
cctggaggccatctgagtctgtttc

SEQ ID NO: 3112699 - DNA, 25 bp, Homo sapien
ccatctgagtctgtttcacaaatgc

SEQ ID NO: 3112700 - DNA, 25 bp, Homo sapien
tgagtctgtttcacaaatgcttcca

SEQ ID NO: 3112701 - DNA, 25 bp, Homo sapien
cctgccatgtgttaggggtgggaat

SEQ ID NO: 3112702 - DNA, 25 bp, Homo sapien
tccccactgagtgccctccaatgtt

SEQ ID NO: 3112703 - DNA, 25 bp, Homo sapien
tggagggtactaggagcaggtggcg

SEQ ID NO: 3112704 - DNA, 25 bp, Homo sapien
tgccctccaatgttggcgaccctga

SEQ ID NO: 3112705 - DNA, 25 bp, Homo sapien
atgttggcgaccctgacccttgtcc

SEQ ID NO: 3112706 - DNA, 25 bp, Homo sapien
ccggcaagtggcgggaaaggtgtgg

SEQ ID NO: 3112707 - DNA, 25 bp, Homo sapien
cgggaaaggtgtggaatgagtcagc

SEQ ID NO: 3112708 - DNA, 25 bp, Homo sapien
tgagtcagccgtggaggggagccct

SEQ ID NO: 3112709 - DNA, 25 bp, Homo sapien
acccctgtctttggcttgagaatga

SEQ ID NO: 3112710 - DNA, 25 bp, Homo sapien
tcagatgttactgggtatcctgcgt

SEQ ID NO: 3112711 - DNA, 25 bp, Homo sapien
aggcttcaggctgcggaccatgcgt

SEQ ID NO: 3112712 - DNA, 25 bp, Homo sapien
ctggtgaaagcttgtcccgtgggac

SEQ ID NO: 3112713 - DNA, 25 bp, Homo sapien
caggtgtcagcgactttgggttgct

SEQ ID NO: 3112714 - DNA, 25 bp, Homo sapien
tgtcccttcaagagtcgagcctggc

SEQ ID NO: 3112715 - DNA, 25 bp, Homo sapien
gctcatgtgcgtgtgtccaccagct

SEQ ID NO: 3112716 - DNA, 25 bp, Homo sapien
ggagtgtgcaacagtccacgcgtgc

SEQ ID NO: 3112717 - DNA, 25 bp, Homo sapien
cagcttgtgtgcacgcatatgagcg

SEQ ID NO: 3112718 - DNA, 25 bp, Homo sapien
gacgcgctcctctgggatgcagctt

SEQ ID NO: 3112719 - DNA, 25 bp, Homo sapien
cgggtccgctcctggacgcgctcct

SEQ ID NO: 3112720 - DNA, 25 bp, Homo sapien
ggaaaatgaaagacacgagagggag

SEQ ID NO: 3112721 - DNA, 25 bp, Homo sapien
aaaatgaaagacacgagagggaggg

SEQ ID NO: 3112722 - DNA, 25 bp, Homo sapien
gagctgggtttacgggaagcctcca

SEQ ID NO: 3112723 - DNA, 25 bp, Homo sapien
gcacccgcggttcacgctaaaggaa

SEQ ID NO: 3112724 - DNA, 25 bp, Homo sapien
cccgcgttcacaacaagcgtgacgg

SEQ ID NO: 3112725 - DNA, 25 bp, Homo sapien
ttattttcacgggaggcaccgcacc

SEQ ID NO: 3112726 - DNA, 25 bp, Homo sapien
aatgttacaattgttgagcttctta

SEQ ID NO: 3112727 - DNA, 25 bp, Homo sapien
gagttgctggcagcccgagaatgtt

SEQ ID NO: 3112728 - DNA, 25 bp, Homo sapien
tccaggtaactcaagttcattttag

SEQ ID NO: 3112729 - DNA, 25 bp, Homo sapien
aattgttgagcttcttatttccagg

SEQ ID NO: 3112730 - DNA, 25 bp, Homo sapien
atgcactcgcaataggcctccaggg

SEQ ID NO: 3112731 - DNA, 25 bp, Homo sapien
cacaaacatgcactcgcaataggcc

SEQ ID NO: 3112732 - DNA, 25 bp, Homo sapien
ccctgcacactcgtgagggcatgct

SEQ ID NO: 3112733 - DNA, 25 bp, Homo sapien
gcacactcgtgagggcatgctctca

SEQ ID NO: 3112734 - DNA, 25 bp, Homo sapien
agggatgccaggcgcctgccccaag

SEQ ID NO: 3112735 - DNA, 25 bp, Homo sapien
atgccaggcgcctgccccaagccat

SEQ ID NO: 3112736 - DNA, 25 bp, Homo sapien
gtgcccagggatgccaggcgcctgc

SEQ ID NO: 3112737 - DNA, 25 bp, Homo sapien
aggtgcccagggatgccaggcgcct

SEQ ID NO: 3112738 - DNA, 25 bp, Homo sapien
ttgctggggatcctgtgcccaggaa

SEQ ID NO: 3112739 - DNA, 25 bp, Homo sapien
ggacttgctggggatcctgtgccca

SEQ ID NO: 3112740 - DNA, 25 bp, Homo sapien
aggttggtagcaccttggcagccat

SEQ ID NO: 3112741 - DNA, 25 bp, Homo sapien
gggccccggatctgcgcgaggcatt

SEQ ID NO: 3112742 - DNA, 25 bp, Homo sapien
aagccggtgctcaaagagcgtgacg

SEQ ID NO: 3112743 - DNA, 25 bp, Homo sapien
gagacgaagccgcttgagctcggaa

SEQ ID NO: 3112744 - DNA, 25 bp, Homo sapien
agagcgtgacgtggcctcaccccat

SEQ ID NO: 3112745 - DNA, 25 bp, Homo sapien
gcttgagctcggaagccggtgctca

SEQ ID NO: 3112746 - DNA, 25 bp, Homo sapien
ggggcccctgagcttggccaggccc

SEQ ID NO: 3112747 - DNA, 25 bp, Homo sapien
ccagtggctccgggtcatggccttg

SEQ ID NO: 3112748 - DNA, 25 bp, Homo sapien
gggaaatgcctggtccttctggaga

SEQ ID NO: 3112749 - DNA, 25 bp, Homo sapien
tatggccacgtcctgttcctctggt

SEQ ID NO: 3112750 - DNA, 25 bp, Homo sapien
gatacaggagtgttggattccccga

SEQ ID NO: 3112751 - DNA, 25 bp, Homo sapien
tgctgctcctcggtcaaaacctcct

SEQ ID NO: 3112752 - DNA, 25 bp, Homo sapien
ctgctcctcggtcaaaacctccttt

SEQ ID NO: 3112753 - DNA, 25 bp, Homo sapien
tgctcctcggtcaaaacctccttta

SEQ ID NO: 3112754 - DNA, 25 bp, Homo sapien
gctgctcctcggtcaaaacctcctt

SEQ ID NO: 3112755 - DNA, 25 bp, Homo sapien
tgagaactgaggctgggaggggcca

SEQ ID NO: 3112756 - DNA, 25 bp, Homo sapien
gaggctgggaggggccaggtgggag

SEQ ID NO: 3112757 - DNA, 25 bp, Homo sapien
aggggccaggtgggagggacctcat

SEQ ID NO: 3112758 - DNA, 25 bp, Homo sapien
ctgagaactgaggctgggaggggcc

SEQ ID NO: 3112759 - DNA, 25 bp, Homo sapien
agtcaagctgccgtgaactttcgca

SEQ ID NO: 3112760 - DNA, 25 bp, Homo sapien
tccctgcgcagccatgagtgttcgg

SEQ ID NO: 3112761 - DNA, 25 bp, Homo sapien
gagtgttcggcctaaattcagcgtg

SEQ ID NO: 3112762 - DNA, 25 bp, Homo sapien
ttcatgtcacagtttgcctgccccg

SEQ ID NO: 3112763 - DNA, 25 bp, Homo sapien
ggagactccacgcttgacctcttgc

SEQ ID NO: 3112764 - DNA, 25 bp, Homo sapien
gctgtctttgtagagaagcaaaatc

SEQ ID NO: 3112765 - DNA, 25 bp, Homo sapien
tgctcgcgccaacatggcttctgcg

SEQ ID NO: 3112766 - DNA, 25 bp, Homo sapien
taaacatctgacagccagagctggt

SEQ ID NO: 3112767 - DNA, 25 bp, Homo sapien
tccacggatgtcagcacggggccga

SEQ ID NO: 3112768 - DNA, 25 bp, Homo sapien
ccatgcaggcatctacaaccacgtg

SEQ ID NO: 3112769 - DNA, 25 bp, Homo sapien
ggcatctacaaccacgtgtgtcctc

SEQ ID NO: 3112770 - DNA, 25 bp, Homo sapien
aggtgaccatgcaggcatctacaac

SEQ ID NO: 3112771 - DNA, 25 bp, Homo sapien
tttcacttagaaaccgcgcaggacg

SEQ ID NO: 3112772 - DNA, 25 bp, Homo sapien
tcaggcgtggatcaagacatatgca

SEQ ID NO: 3112773 - DNA, 25 bp, Homo sapien
cttaatgatccaaggcatgacggcc

SEQ ID NO: 3112774 - DNA, 25 bp, Homo sapien
tagcaaagctccgttccaaagtgtc

SEQ ID NO: 3112775 - DNA, 25 bp, Homo sapien
ttcgtttgaaacaaataagaatgtg

SEQ ID NO: 3112776 - DNA, 25 bp, Homo sapien
gcatttggagtgtggcttgtgagac

SEQ ID NO: 3112777 - DNA, 25 bp, Homo sapien
ctggaaagtgaaaccgagtgactta

SEQ ID NO: 3112778 - DNA, 25 bp, Homo sapien
tgacttaatccaggtttcgtttgaa

SEQ ID NO: 3112779 - DNA, 25 bp, Homo sapien
ttaagaagtttgaatgtctgaagcc

SEQ ID NO: 3112780 - DNA, 25 bp, Homo sapien
cctggtctattaagaagtttgaatg

SEQ ID NO: 3112781 - DNA, 25 bp, Homo sapien
accacgcctggtctattaagaagtt

SEQ ID NO: 3112782 - DNA, 25 bp, Homo sapien
tctattaagaagtttgaatgtctga

SEQ ID NO: 3112783 - DNA, 25 bp, Homo sapien
tcggtgagtgctgtgcgtctcctgc

SEQ ID NO: 3112784 - DNA, 25 bp, Homo sapien
tcaaacgtagtcacgcctggggtcg

SEQ ID NO: 3112785 - DNA, 25 bp, Homo sapien
gtcggtgagtgctgtgcgtctcctg

SEQ ID NO: 3112786 - DNA, 25 bp, Homo sapien
ggtcggtgagtgctgtgcgtctcct

SEQ ID NO: 3112787 - DNA, 25 bp, Homo sapien
ccgagggatcgctgccgctgctaag

SEQ ID NO: 3112788 - DNA, 25 bp, Homo sapien
gactccagtagtttgcagcacagct

SEQ ID NO: 3112789 - DNA, 25 bp, Homo sapien
tgggcagtcgctaaagaagttgctg

SEQ ID NO: 3112790 - DNA, 25 bp, Homo sapien
gcctgcggtcctgcatgtccggact

SEQ ID NO: 3112791 - DNA, 25 bp, Homo sapien
gaaaatccctttgtgagacactgac

SEQ ID NO: 3112792 - DNA, 25 bp, Homo sapien
tgtgctggatcagagattttgtaaa

SEQ ID NO: 3112793 - DNA, 25 bp, Homo sapien
tattaggtgcacttgggaaaggaat

SEQ ID NO: 3112794 - DNA, 25 bp, Homo sapien
tcataaaaggcgactgaaaatccct

SEQ ID NO: 3112795 - DNA, 25 bp, Homo sapien
agcccagagcaaaaatggtgaggga

SEQ ID NO: 3112796 - DNA, 25 bp, Homo sapien
agaaggtgtcctgggcgggccttgg

SEQ ID NO: 3112797 - DNA, 25 bp, Homo sapien
ccttggtcccgagaacaaggcagca

SEQ ID NO: 3112798 - DNA, 25 bp, Homo sapien
tgggcgggccttggtcccgagaaca

SEQ ID NO: 3112799 - DNA, 25 bp, Homo sapien
cagcaagttctgacccgggctgagg

SEQ ID NO: 3112800 - DNA, 25 bp, Homo sapien
tgggcggacagcgaggtagggatgc

SEQ ID NO: 3112801 - DNA, 25 bp, Homo sapien
gggatgccagcaagttctgacccgg

SEQ ID NO: 3112802 - DNA, 25 bp, Homo sapien
ggccagtgggcgagagcacgggaag

SEQ ID NO: 3112803 - DNA, 25 bp, Homo sapien
tcttcctgcctcgtgcttcgttgat

SEQ ID NO: 3112804 - DNA, 25 bp, Homo sapien
tatttccagtatgtgtccggcgtcc

SEQ ID NO: 3112805 - DNA, 25 bp, Homo sapien
gagcctcgggatccattttcactgc

SEQ ID NO: 3112806 - DNA, 25 bp, Homo sapien
acgacacggagatggactggcttgc

SEQ ID NO: 3112807 - DNA, 25 bp, Homo sapien
gagacgtgccaggtggcgagtgggc

SEQ ID NO: 3112808 - DNA, 25 bp, Homo sapien
tgggagacgtgccaggtggcgagtg

SEQ ID NO: 3112809 - DNA, 25 bp, Homo sapien
ctgggagacgtgccaggtggcgagt

SEQ ID NO: 3112810 - DNA, 25 bp, Homo sapien
ggtggcgagtgggcgtggcacacac

SEQ ID NO: 3112811 - DNA, 25 bp, Homo sapien
gctcccatctcggtgataagcacag

SEQ ID NO: 3112812 - DNA, 25 bp, Homo sapien
ccatctcggtgataagcacagcagg

SEQ ID NO: 3112813 - DNA, 25 bp, Homo sapien
cttggctcccatctcggtgataagc

SEQ ID NO: 3112814 - DNA, 25 bp, Homo sapien
tcccatctcggtgataagcacagca

SEQ ID NO: 3112815 - DNA, 25 bp, Homo sapien
tgagaggtggctgccacgtgggttc

SEQ ID NO: 3112816 - DNA, 25 bp, Homo sapien
gtggggtgagaggtggctgccacgt

SEQ ID NO: 3112817 - DNA, 25 bp, Homo sapien
gggtgagaggtggctgccacgtggg

SEQ ID NO: 3112818 - DNA, 25 bp, Homo sapien
ggtggggtgagaggtggctgccacg

SEQ ID NO: 3112819 - DNA, 25 bp, Homo sapien
cagtgacccacacaccacacagagt

SEQ ID NO: 3112820 - DNA, 25 bp, Homo sapien
tggcagtgacccacacaccacacag

SEQ ID NO: 3112821 - DNA, 25 bp, Homo sapien
gcagtgacccacacaccacacagag

SEQ ID NO: 3112822 - DNA, 25 bp, Homo sapien
ctggcagtgacccacacaccacaca

SEQ ID NO: 3112823 - DNA, 25 bp, Homo sapien
taaaaatagatcactcatcagagga

SEQ ID NO: 3112824 - DNA, 25 bp, Homo sapien
tcatctttgactttaatgaaacact

SEQ ID NO: 3112825 - DNA, 25 bp, Homo sapien
tttgaaaggaataatcatctttgac

SEQ ID NO: 3112826 - DNA, 25 bp, Homo sapien
aatagatcactcatcagaggacaca

SEQ ID NO: 3112827 - DNA, 25 bp, Homo sapien
tagcggaaccaatcacccctcgtgg

SEQ ID NO: 3112828 - DNA, 25 bp, Homo sapien
cctggaaccttctagcggaaccaat

SEQ ID NO: 3112829 - DNA, 25 bp, Homo sapien
actttcatcaggttcacgagcactt

SEQ ID NO: 3112830 - DNA, 25 bp, Homo sapien
tggaacagcctcacgtcggccacac

SEQ ID NO: 3112831 - DNA, 25 bp, Homo sapien
aaagcccagggtgtgaggattcact

SEQ ID NO: 3112832 - DNA, 25 bp, Homo sapien
cttgggcaaagcccagggtgtgagg

SEQ ID NO: 3112833 - DNA, 25 bp, Homo sapien
gcaaagcccagggtgtgaggattca

SEQ ID NO: 3112834 - DNA, 25 bp, Homo sapien
tgggcaaagcccagggtgtgaggat

SEQ ID NO: 3112835 - DNA, 25 bp, Homo sapien
tatcctttagacgtggcgagaagcc

SEQ ID NO: 3112836 - DNA, 25 bp, Homo sapien
cacctcgaggtgactgtgggcagaa

SEQ ID NO: 3112837 - DNA, 25 bp, Homo sapien
tagggaacatggatctatgccagac

SEQ ID NO: 3112838 - DNA, 25 bp, Homo sapien
gaagccggcgacatcatcatttact

SEQ ID NO: 3112839 - DNA, 25 bp, Homo sapien
gcctgaccatcagtttaatgccagg

SEQ ID NO: 3112840 - DNA, 25 bp, Homo sapien
tgaccatcagtttaatgccagggca

SEQ ID NO: 3112841 - DNA, 25 bp, Homo sapien
ccagcctgaccatcagtttaatgcc

SEQ ID NO: 3112842 - DNA, 25 bp, Homo sapien
accatcagtttaatgccagggcaaa

SEQ ID NO: 3112843 - DNA, 25 bp, Homo sapien
aaggcccatgggagccggcacagcg

SEQ ID NO: 3112844 - DNA, 25 bp, Homo sapien
ggcccacggtgatttgtgggccagc

SEQ ID NO: 3112845 - DNA, 25 bp, Homo sapien
ggccgtggcccacggtgatttgtgg

SEQ ID NO: 3112846 - DNA, 25 bp, Homo sapien
acagcgacgccaagagcctccttgg

SEQ ID NO: 3112847 - DNA, 25 bp, Homo sapien
ccacctgaatccagcagaactccca

SEQ ID NO: 3112848 - DNA, 25 bp, Homo sapien
aaaggaccccgttgctgcctccaga

SEQ ID NO: 3112849 - DNA, 25 bp, Homo sapien
ctgtgggaacggcagatgttcacct

SEQ ID NO: 3112850 - DNA, 25 bp, Homo sapien
ggcagatgttcacctccacctgaat

SEQ ID NO: 3112851 - DNA, 25 bp, Homo sapien
tgcggtttgctgatgccgagacccc

SEQ ID NO: 3112852 - DNA, 25 bp, Homo sapien
gctgatgctttagccagtctttgat

SEQ ID NO: 3112853 - DNA, 25 bp, Homo sapien
ccgagaccccgaacagaagctgctg

SEQ ID NO: 3112854 - DNA, 25 bp, Homo sapien
cacgtttgtccccatttatggctga

SEQ ID NO: 3112855 - DNA, 25 bp, Homo sapien
taacacgtcagcaaatcaaaatcag

SEQ ID NO: 3112856 - DNA, 25 bp, Homo sapien
taaggcactctgtgcaacaggagcg

SEQ ID NO: 3112857 - DNA, 25 bp, Homo sapien
ggttcccttcatttactcacagatg

SEQ ID NO: 3112858 - DNA, 25 bp, Homo sapien
tgctgaacctgggtggatgagtccc

SEQ ID NO: 3112859 - DNA, 25 bp, Homo sapien
tggtgatggcgtaacgggtgcccca

SEQ ID NO: 3112860 - DNA, 25 bp, Homo sapien
cctcgatgccatggtcggggttgca

SEQ ID NO: 3112861 - DNA, 25 bp, Homo sapien
tgtaggttctcggaccccgaggtga

SEQ ID NO: 3112862 - DNA, 25 bp, Homo sapien
ccagtggaccttctccacgcggtgt

SEQ ID NO: 3112863 - DNA, 25 bp, Homo sapien
gaggagaagagagagaggtggccat

SEQ ID NO: 3112864 - DNA, 25 bp, Homo sapien
agaggagaagagagagaggtggcca

SEQ ID NO: 3112865 - DNA, 25 bp, Homo sapien
gagaggagaagagagagaggtggcc

SEQ ID NO: 3112866 - DNA, 25 bp, Homo sapien
ccacagccttcagagggtctgcggt

SEQ ID NO: 3112867 - DNA, 25 bp, Homo sapien
acggccacagccttcagagggtctg

SEQ ID NO: 3112868 - DNA, 25 bp, Homo sapien
ccacggccacagccttcagagggtc

SEQ ID NO: 3112869 - DNA, 25 bp, Homo sapien
acagccttcagagggtctgcggtca

SEQ ID NO: 3112870 - DNA, 25 bp, Homo sapien
gagcaactataaccaatcaacacaa

SEQ ID NO: 3112871 - DNA, 25 bp, Homo sapien
agcaactataaccaatcaacacaac

SEQ ID NO: 3112872 - DNA, 25 bp, Homo sapien
aagagcaactataaccaatcaacac

SEQ ID NO: 3112873 - DNA, 25 bp, Homo sapien
agagcaactataaccaatcaacaca

SEQ ID NO: 3112874 - DNA, 25 bp, Homo sapien
gatagagatgacgtctgaacaggca

SEQ ID NO: 3112875 - DNA, 25 bp, Homo sapien
gggcctatctcaagagacgccagtt

SEQ ID NO: 3112876 - DNA, 25 bp, Homo sapien
ttcacattgaagtggcgctgcctac

SEQ ID NO: 3112877 - DNA, 25 bp, Homo sapien
agctccgggcatttgatctcctcag

SEQ ID NO: 3112878 - DNA, 25 bp, Homo sapien
aagcgttcaccgctggacacagcca

SEQ ID NO: 3112879 - DNA, 25 bp, Homo sapien
tgtggtaaagcgttcaccgctggac

SEQ ID NO: 3112880 - DNA, 25 bp, Homo sapien
gagtcctgtggtaaagcgttcaccg

SEQ ID NO: 3112881 - DNA, 25 bp, Homo sapien
cgtagagtcctgtggtaaagcgttc

SEQ ID NO: 3112882 - DNA, 25 bp, Homo sapien
cacctcttaatggaggccgggaagc

SEQ ID NO: 3112883 - DNA, 25 bp, Homo sapien
agagaagtccatcccgggtgtgcag

SEQ ID NO: 3112884 - DNA, 25 bp, Homo sapien
aaatcacgtggatgcaatggtcacc

SEQ ID NO: 3112885 - DNA, 25 bp, Homo sapien
cagggcattctagcttcaagaggga

SEQ ID NO: 3112886 - DNA, 25 bp, Homo sapien
ggccacctccagatatgcaggacac

SEQ ID NO: 3112887 - DNA, 25 bp, Homo sapien
gagtcagggcaccttctaaccttac

SEQ ID NO: 3112888 - DNA, 25 bp, Homo sapien
cagggcaccttctaaccttacactt

SEQ ID NO: 3112889 - DNA, 25 bp, Homo sapien
gatatgcaggacacgtccttttcca

SEQ ID NO: 3112890 - DNA, 25 bp, Homo sapien
gcacatcttgcaaacagaggcacca

SEQ ID NO: 3112891 - DNA, 25 bp, Homo sapien
ggctcgcgccatttgggacctcagt

SEQ ID NO: 3112892 - DNA, 25 bp, Homo sapien
ctgagacatcggcacaagcaggagg

SEQ ID NO: 3112893 - DNA, 25 bp, Homo sapien
gctctctactgctggcagacgtggt

SEQ ID NO: 3112894 - DNA, 25 bp, Homo sapien
agcaggactcagcacggcaaccaag

SEQ ID NO: 3112895 - DNA, 25 bp, Homo sapien
aaagcaggactcagcacggcaacca

SEQ ID NO: 3112896 - DNA, 25 bp, Homo sapien
ttaaagcaggactcagcacggcaac

SEQ ID NO: 3112897 - DNA, 25 bp, Homo sapien
caggactcagcacggcaaccaagga

SEQ ID NO: 3112898 - DNA, 25 bp, Homo sapien
tctctcccctctcgggcgggtggtg

SEQ ID NO: 3112899 - DNA, 25 bp, Homo sapien
ttaacttcttggaacccacaagaca

SEQ ID NO: 3112900 - DNA, 25 bp, Homo sapien
cactggctctcggtccattaacttc

SEQ ID NO: 3112901 - DNA, 25 bp, Homo sapien
gacatcatccggaaacaaaaacatc

SEQ ID NO: 3112902 - DNA, 25 bp, Homo sapien
tcaagaaaacgcctgtcttgtgctc

SEQ ID NO: 3112903 - DNA, 25 bp, Homo sapien
tgtgtaatttcgagtcccaggaggc

SEQ ID NO: 3112904 - DNA, 25 bp, Homo sapien
ttcagctgcttgacttctcaagaaa

SEQ ID NO: 3112905 - DNA, 25 bp, Homo sapien
tgtttgactcaagtatttatcatgc

SEQ ID NO: 3112906 - DNA, 25 bp, Homo sapien
ctaatgcagagatgactcagaacaa

SEQ ID NO: 3112907 - DNA, 25 bp, Homo sapien
caaacgcccccaatccacgccaggg

SEQ ID NO: 3112908 - DNA, 25 bp, Homo sapien
ccccaatccacgccaggggagactg

SEQ ID NO: 3112909 - DNA, 25 bp, Homo sapien
tcaggccaaacgcccccaatccacg

SEQ ID NO: 3112910 - DNA, 25 bp, Homo sapien
cccaatccacgccaggggagactgt

SEQ ID NO: 3112911 - DNA, 25 bp, Homo sapien
tggctacagcgggaactgtccagcc

SEQ ID NO: 3112912 - DNA, 25 bp, Homo sapien
gctacagcgggaactgtccagcctg

SEQ ID NO: 3112913 - DNA, 25 bp, Homo sapien
acagcgggaactgtccagcctgtgg

SEQ ID NO: 3112914 - DNA, 25 bp, Homo sapien
ccgctggctacagcgggaactgtcc

SEQ ID NO: 3112915 - DNA, 25 bp, Homo sapien
atctcaaaataaacaagctggagat

SEQ ID NO: 3112916 - DNA, 25 bp, Homo sapien
ctgagaaaggcaagtacaaataaca

SEQ ID NO: 3112917 - DNA, 25 bp, Homo sapien
gaaaggcaagtacaaataacaggaa

SEQ ID NO: 3112918 - DNA, 25 bp, Homo sapien
gagaaaggcaagtacaaataacagg

SEQ ID NO: 3112919 - DNA, 25 bp, Homo sapien
gactgcaaggtccagtgtgatgggt

SEQ ID NO: 3112920 - DNA, 25 bp, Homo sapien
actgcaaggtccagtgtgatgggtt

SEQ ID NO: 3112921 - DNA, 25 bp, Homo sapien
cacagcagatgctccgtgaactcag

SEQ ID NO: 3112922 - DNA, 25 bp, Homo sapien
gtcaaggtgacacacaccagggcgt

SEQ ID NO: 3112923 - DNA, 25 bp, Homo sapien
tgccgctgactgacggtgacctcag

SEQ ID NO: 3112924 - DNA, 25 bp, Homo sapien
ggtacagaggtgaacgcactccaga

SEQ ID NO: 3112925 - DNA, 25 bp, Homo sapien
gtgcttgcctgagccaggagcccca

SEQ ID NO: 3112926 - DNA, 25 bp, Homo sapien
cttgcctgagccaggagccccacgc

SEQ ID NO: 3112927 - DNA, 25 bp, Homo sapien
agccaggagccccacgcccaggccc

SEQ ID NO: 3112928 - DNA, 25 bp, Homo sapien
gcctgagccaggagccccacgccca

SEQ ID NO: 3112929 - DNA, 25 bp, Homo sapien
tccaggtagttggagaggtacagca

SEQ ID NO: 3112930 - DNA, 25 bp, Homo sapien
ggtacagcagcgaggtgtagtcgaa

SEQ ID NO: 3112931 - DNA, 25 bp, Homo sapien
ctccatgaacatgaaccgccctccg

SEQ ID NO: 3112932 - DNA, 25 bp, Homo sapien
tgtagtcgaaggagccgtaggtcac

SEQ ID NO: 3112933 - DNA, 25 bp, Homo sapien
gggcagcaggccagccagcagggtg

SEQ ID NO: 3112934 - DNA, 25 bp, Homo sapien
ggcagcaggccagccagcagggtgt

SEQ ID NO: 3112935 - DNA, 25 bp, Homo sapien
gcaggccagccagcagggtgtgcat

SEQ ID NO: 3112936 - DNA, 25 bp, Homo sapien
cagcaggccagccagcagggtgtgc

SEQ ID NO: 3112937 - DNA, 25 bp, Homo sapien
tgtgaacctggcgactctagggtcc

SEQ ID NO: 3112938 - DNA, 25 bp, Homo sapien
aatgcagaacctaagattttccagc

SEQ ID NO: 3112939 - DNA, 25 bp, Homo sapien
cagcttaactgtgtcttcactgttt

SEQ ID NO: 3112940 - DNA, 25 bp, Homo sapien
aggccgaagctccgtccccaggaag

SEQ ID NO: 3112941 - DNA, 25 bp, Homo sapien
aagtcatagcaaaatagctccccac

SEQ ID NO: 3112942 - DNA, 25 bp, Homo sapien
agcaaaatagctccccacagaacac

SEQ ID NO: 3112943 - DNA, 25 bp, Homo sapien
agaacaccacgaaaatcacccaggt

SEQ ID NO: 3112944 - DNA, 25 bp, Homo sapien
tcacccaggtttctaaacagttctg

SEQ ID NO: 3112945 - DNA, 25 bp, Homo sapien
cactgatcttcagacgccactttgg

SEQ ID NO: 3112946 - DNA, 25 bp, Homo sapien
ctgatcttcagacgccactttggtt

SEQ ID NO: 3112947 - DNA, 25 bp, Homo sapien
acactgatcttcagacgccactttg

SEQ ID NO: 3112948 - DNA, 25 bp, Homo sapien
tgatcttcagacgccactttggttt

SEQ ID NO: 3112949 - DNA, 25 bp, Homo sapien
gatgagcagacaaaattcggtcagg

SEQ ID NO: 3112950 - DNA, 25 bp, Homo sapien
ccttcactgttcctgttcccttggg

SEQ ID NO: 3112951 - DNA, 25 bp, Homo sapien
agtaagtgccgtgcagtcgtgaaaa

SEQ ID NO: 3112952 - DNA, 25 bp, Homo sapien
aatctgctgtctgtgccggcggaag

SEQ ID NO: 3112953 - DNA, 25 bp, Homo sapien
tcaccctgcccacgtgcgcactcac

SEQ ID NO: 3112954 - DNA, 25 bp, Homo sapien
acgagcgcgctcaccctgcccacgt

SEQ ID NO: 3112955 - DNA, 25 bp, Homo sapien
cttgtccacgagcgcgctcaccctg

SEQ ID NO: 3112956 - DNA, 25 bp, Homo sapien
gctcaccctgcccacgtgcgcactc

SEQ ID NO: 3112957 - DNA, 25 bp, Homo sapien
tgcccacgggcacgctcaccttgtc

SEQ ID NO: 3112958 - DNA, 25 bp, Homo sapien
ccacgggcacgctcaccttgtccac

SEQ ID NO: 3112959 - DNA, 25 bp, Homo sapien
cccacgggcacgctcaccttgtcca

SEQ ID NO: 3112960 - DNA, 25 bp, Homo sapien
acgtgcgcatgccagtactcgtcgt

SEQ ID NO: 3112961 - DNA, 25 bp, Homo sapien
gtcgtgcgccgtccgcgcttccgtg

SEQ ID NO: 3112962 - DNA, 25 bp, Homo sapien
tgcgcatgccagtactcgtcgtgcg

SEQ ID NO: 3112963 - DNA, 25 bp, Homo sapien
atgccagtactcgtcgtgcgccgtc

SEQ ID NO: 3112964 - DNA, 25 bp, Homo sapien
gcctcagcaatggtgagctggacct

SEQ ID NO: 3112965 - DNA, 25 bp, Homo sapien
tgggcttggtcagatgcagcgagga

SEQ ID NO: 3112966 - DNA, 25 bp, Homo sapien
ctcagcaatggtgagctggaccttc

SEQ ID NO: 3112967 - DNA, 25 bp, Homo sapien
tgcagcgaggatgcgctgatgccaa

SEQ ID NO: 3112968 - DNA, 25 bp, Homo sapien
tcctctgagaagatgttctgtattt

SEQ ID NO: 3112969 - DNA, 25 bp, Homo sapien
ggaagtcctcctctgagaagatgtt

SEQ ID NO: 3112970 - DNA, 25 bp, Homo sapien
gatgttctgtattttatccccgaag

SEQ ID NO: 3112971 - DNA, 25 bp, Homo sapien
cggtataaccggaagtcctcctctg

SEQ ID NO: 3112972 - DNA, 25 bp, Homo sapien
gcccctgagtgcaagtccagaatgg

SEQ ID NO: 3112973 - DNA, 25 bp, Homo sapien
aagtgcttcccgacagacagggccc

SEQ ID NO: 3112974 - DNA, 25 bp, Homo sapien
cccctgagtgcaagtccagaatgga

SEQ ID NO: 3112975 - DNA, 25 bp, Homo sapien
ctgtacaggttcacaaagtgcttcc

SEQ ID NO: 3112976 - DNA, 25 bp, Homo sapien
tggaaaagacgttgtggagtaaagc

SEQ ID NO: 3112977 - DNA, 25 bp, Homo sapien
ttgtggagtaaagcgtgcagccgca

SEQ ID NO: 3112978 - DNA, 25 bp, Homo sapien
gtaaagcgtgcagccgcagcaatgg

SEQ ID NO: 3112979 - DNA, 25 bp, Homo sapien
aagacgttgtggagtaaagcgtgca

SEQ ID NO: 3112980 - DNA, 25 bp, Homo sapien
tccatgcaggacaacttcccatgtg

SEQ ID NO: 3112981 - DNA, 25 bp, Homo sapien
agcttgggcccgctgaacagtaact

SEQ ID NO: 3112982 - DNA, 25 bp, Homo sapien
gctccatgcaggacaacttcccatg

SEQ ID NO: 3112983 - DNA, 25 bp, Homo sapien
caaagcagcggcccagccagctcca

SEQ ID NO: 3112984 - DNA, 25 bp, Homo sapien
ttgcaggatgcgttgcagcgtgtct

SEQ ID NO: 3112985 - DNA, 25 bp, Homo sapien
gcgtgtctgtcccacggaggccctg

SEQ ID NO: 3112986 - DNA, 25 bp, Homo sapien
cagctaggaagttgcaggatgcgtt

SEQ ID NO: 3112987 - DNA, 25 bp, Homo sapien
atggaggcgtccagctaggaagttg

SEQ ID NO: 3112988 - DNA, 25 bp, Homo sapien
cttgccggctccctgcttccgaccc

SEQ ID NO: 3112989 - DNA, 25 bp, Homo sapien
ccttgccggctccctgcttccgacc

SEQ ID NO: 3112990 - DNA, 25 bp, Homo sapien
cccttgccggctccctgcttccgac

SEQ ID NO: 3112991 - DNA, 25 bp, Homo sapien
ccctccgtcagatcctcccagggag

SEQ ID NO: 3112992 - DNA, 25 bp, Homo sapien
cctcccagggagagccccttttcag

SEQ ID NO: 3112993 - DNA, 25 bp, Homo sapien
agatcctcccagggagagccccttt

SEQ ID NO: 3112994 - DNA, 25 bp, Homo sapien
ctccgtcagatcctcccagggagag

SEQ ID NO: 3112995 - DNA, 25 bp, Homo sapien
tgatgacgacatcggtgacacctct

SEQ ID NO: 3112996 - DNA, 25 bp, Homo sapien
tgacgacatcggtgacacctctgcc

SEQ ID NO: 3112997 - DNA, 25 bp, Homo sapien
ggtgacacctctgccgcactttcgg

SEQ ID NO: 3112998 - DNA, 25 bp, Homo sapien
ctccctggtgatgacgacatcggtg

SEQ ID NO: 3112999 - DNA, 25 bp, Homo sapien
ggccagaactggctaatacgcccgg

SEQ ID NO: 3113000 - DNA, 25 bp, Homo sapien
catgcccttccagggaatcagggcc

SEQ ID NO: 3113001 - DNA, 25 bp, Homo sapien
gaactggctaatacgcccggtcaaa

SEQ ID NO: 3113002 - DNA, 25 bp, Homo sapien
acagccagggtgagacgcagtttcc

SEQ ID NO: 3113003 - DNA, 25 bp, Homo sapien
gactgtcgtagtcctcagagcaggg

SEQ ID NO: 3113004 - DNA, 25 bp, Homo sapien
agggcacctcgatgaatctccctgc

SEQ ID NO: 3113005 - DNA, 25 bp, Homo sapien
aggacctctgcgaccccgtcgtcgg

SEQ ID NO: 3113006 - DNA, 25 bp, Homo sapien
caggagtgcggtgagcacaaagcca

SEQ ID NO: 3113007 - DNA, 25 bp, Homo sapien
ttgcggccctccgctgaggagccat

SEQ ID NO: 3113008 - DNA, 25 bp, Homo sapien
ctgctccggttccggcgctcggccg

SEQ ID NO: 3113009 - DNA, 25 bp, Homo sapien
ggcgctcggccgctccgttgccctc

SEQ ID NO: 3113010 - DNA, 25 bp, Homo sapien
cctcgggcgccttggttgcggccct

SEQ ID NO: 3113011 - DNA, 25 bp, Homo sapien
agccgggccggacgcgggcgccagg

SEQ ID NO: 3113012 - DNA, 25 bp, Homo sapien
cgccgcggagccgggccggacgcgg

SEQ ID NO: 3113013 - DNA, 25 bp, Homo sapien
cgcggagccgggccggacgcgggcg

SEQ ID NO: 3113014 - DNA, 25 bp, Homo sapien
cggaccaggccgccgcggagccggg

SEQ ID NO: 3113015 - DNA, 25 bp, Homo sapien
cgcgaggcaggcacggcgcagggac

SEQ ID NO: 3113016 - DNA, 25 bp, Homo sapien
aggcacggcgcagggacgcgagtgc

SEQ ID NO: 3113017 - DNA, 25 bp, Homo sapien
acgcgagtgcgacgcgctcggccat

SEQ ID NO: 3113018 - DNA, 25 bp, Homo sapien
gcgctcggccatcggcccctgggct

SEQ ID NO: 3113019 - DNA, 25 bp, Homo sapien
ctggctggaagcgtttcccccgcgc

SEQ ID NO: 3113020 - DNA, 25 bp, Homo sapien
tggctctgcgcgctaggccgggcgg

SEQ ID NO: 3113021 - DNA, 25 bp, Homo sapien
cgcggcggcgcaggtgaggtgcggg

SEQ ID NO: 3113022 - DNA, 25 bp, Homo sapien
ggtgaggtgcgggtgcggctctggc

SEQ ID NO: 3113023 - DNA, 25 bp, Homo sapien
tgctgagagaggctcgcacagagcc

SEQ ID NO: 3113024 - DNA, 25 bp, Homo sapien
tgggtgtaaattgtgtgtaactggt

SEQ ID NO: 3113025 - DNA, 25 bp, Homo sapien
taactggtcgtatgtacaaactgaa

SEQ ID NO: 3113026 - DNA, 25 bp, Homo sapien
tacagagcccttagggtcagcagcc

SEQ ID NO: 3113027 - DNA, 25 bp, Homo sapien
gggctggattactgaactgagtctg

SEQ ID NO: 3113028 - DNA, 25 bp, Homo sapien
gaaccaggggctggattactgaact

SEQ ID NO: 3113029 - DNA, 25 bp, Homo sapien
tactgaactgagtctgtctcacatg

SEQ ID NO: 3113030 - DNA, 25 bp, Homo sapien
actgagtctgtctcacatgcaaagc

SEQ ID NO: 3113031 - DNA, 25 bp, Homo sapien
cagtgttctgtggaaacgggtacct

SEQ ID NO: 3113032 - DNA, 25 bp, Homo sapien
cagccaagatggtcatgacgtgcca

SEQ ID NO: 3113033 - DNA, 25 bp, Homo sapien
gaaatttagagcctgagacacacgg

SEQ ID NO: 3113034 - DNA, 25 bp, Homo sapien
gacttcgccataggagttcacagga

SEQ ID NO: 3113035 - DNA, 25 bp, Homo sapien
tcagctactcgggagactgaggcag

SEQ ID NO: 3113036 - DNA, 25 bp, Homo sapien
cgtggtgtcaggtgcctgtaatctc

SEQ ID NO: 3113037 - DNA, 25 bp, Homo sapien
gagaattgcttgaacccgggaggcg

SEQ ID NO: 3113038 - DNA, 25 bp, Homo sapien
gaggttgtggtgagctgagatcgtg

SEQ ID NO: 3113039 - DNA, 25 bp, Homo sapien
tcggagattcgtccacgctggtgcc

SEQ ID NO: 3113040 - DNA, 25 bp, Homo sapien
taggcctgcaggtcccaatgtagcc

SEQ ID NO: 3113041 - DNA, 25 bp, Homo sapien
gaagagccacttgctgtccgggtgt

SEQ ID NO: 3113042 - DNA, 25 bp, Homo sapien
gcatttccatgaacaccaagtcgga

SEQ ID NO: 3113043 - DNA, 25 bp, Homo sapien
tcttataggccgtgcagccatgggt

SEQ ID NO: 3113044 - DNA, 25 bp, Homo sapien
gctgacatgtccctcaactagagag

SEQ ID NO: 3113045 - DNA, 25 bp, Homo sapien
caggtatgtcactggctggttcagc

SEQ ID NO: 3113046 - DNA, 25 bp, Homo sapien
ttctgtattactgcaaagccgcccc

SEQ ID NO: 3113047 - DNA, 25 bp, Homo sapien
tgtcctgcaacgagggactggcagc

SEQ ID NO: 3113048 - DNA, 25 bp, Homo sapien
tttcaccgaggtcacagccagacgt

SEQ ID NO: 3113049 - DNA, 25 bp, Homo sapien
tgcaggtgacacgtgaagggttatt

SEQ ID NO: 3113050 - DNA, 25 bp, Homo sapien
tatttatggttatgatgaccctgtc

SEQ ID NO: 3113051 - DNA, 25 bp, Homo sapien
tgccaggtcttcccaggttcgagag

SEQ ID NO: 3113052 - DNA, 25 bp, Homo sapien
ggagaagtctgtagccgagagccca

SEQ ID NO: 3113053 - DNA, 25 bp, Homo sapien
gatggttggcgttcagctcctacgg

SEQ ID NO: 3113054 - DNA, 25 bp, Homo sapien
tacactcaggagaccaagagcactg

SEQ ID NO: 3113055 - DNA, 25 bp, Homo sapien
taagcactgcacgatactagaagag

SEQ ID NO: 3113056 - DNA, 25 bp, Homo sapien
tggagctcccggtttttaagcactg

SEQ ID NO: 3113057 - DNA, 25 bp, Homo sapien
agacctttctgtgacgaccgctggg

SEQ ID NO: 3113058 - DNA, 25 bp, Homo sapien
cagagtggtctatgcgccgagatcc

SEQ ID NO: 3113059 - DNA, 25 bp, Homo sapien
tgcccttggggaagcacctgaccgc

SEQ ID NO: 3113060 - DNA, 25 bp, Homo sapien
ccttggggaagcacctgaccgctgg

SEQ ID NO: 3113061 - DNA, 25 bp, Homo sapien
agcacctgaccgctggggatgtcca

SEQ ID NO: 3113062 - DNA, 25 bp, Homo sapien
ctgaccgctggggatgtccaccagg

SEQ ID NO: 3113063 - DNA, 25 bp, Homo sapien
tgtgtcggggacaacatgcagcatc

SEQ ID NO: 3113064 - DNA, 25 bp, Homo sapien
ttgctgtggcccaaagcaggagtcc

SEQ ID NO: 3113065 - DNA, 25 bp, Homo sapien
ggacaacatgcagcatcagcaccca

SEQ ID NO: 3113066 - DNA, 25 bp, Homo sapien
tccactcgcccgaggtcttgctgtg

SEQ ID NO: 3113067 - DNA, 25 bp, Homo sapien
aataggccaactcggctggaggcac

SEQ ID NO: 3113068 - DNA, 25 bp, Homo sapien
tgagcaggcaataggccaactcggc

SEQ ID NO: 3113069 - DNA, 25 bp, Homo sapien
aaagtctggatgtcctggtctggcc

SEQ ID NO: 3113070 - DNA, 25 bp, Homo sapien
ggcccaggcctcacgatggagaaag

SEQ ID NO: 3113071 - DNA, 25 bp, Homo sapien
tgtgggcggtgcacgggctcaggca

SEQ ID NO: 3113072 - DNA, 25 bp, Homo sapien
ctgtgggcggtgcacgggctcaggc

SEQ ID NO: 3113073 - DNA, 25 bp, Homo sapien
gtgccacgggtcctgtgggcggtgc

SEQ ID NO: 3113074 - DNA, 25 bp, Homo sapien
tgccacgggtcctgtgggcggtgca

SEQ ID NO: 3113075 - DNA, 25 bp, Homo sapien
gccacgggtcctgtgggcggtgcac

SEQ ID NO: 3113076 - DNA, 25 bp, Homo sapien
tgtgggcggtgcacgggctcaggca

SEQ ID NO: 3113077 - DNA, 25 bp, Homo sapien
ctgtgggcggtgcacgggctcaggc

SEQ ID NO: 3113078 - DNA, 25 bp, Homo sapien
tcgctgctctgagacagctctgtgg

SEQ ID NO: 3113079 - DNA, 25 bp, Homo sapien
ctggtgatgagcttggcgatggctt

SEQ ID NO: 3113080 - DNA, 25 bp, Homo sapien
aagctggtgatgagcttggcgatgg

SEQ ID NO: 3113081 - DNA, 25 bp, Homo sapien
tgtcgctgctctgagacagctctgt

SEQ ID NO: 3113082 - DNA, 25 bp, Homo sapien
agaagcccgtcgcaagccggagcac

SEQ ID NO: 3113083 - DNA, 25 bp, Homo sapien
cacgctcacatcacggacatcatgg

SEQ ID NO: 3113084 - DNA, 25 bp, Homo sapien
catgtagcctttcccgaagtaccgg

SEQ ID NO: 3113085 - DNA, 25 bp, Homo sapien
cacggacatcatggagcaggaccac

SEQ ID NO: 3113086 - DNA, 25 bp, Homo sapien
cagtggccgagccatccccgcccac

SEQ ID NO: 3113087 - DNA, 25 bp, Homo sapien
gtcagtggccgagccatccccgccc

SEQ ID NO: 3113088 - DNA, 25 bp, Homo sapien
cggtcagtggccgagccatccccgc

SEQ ID NO: 3113089 - DNA, 25 bp, Homo sapien
acggtcagtggccgagccatccccg

SEQ ID NO: 3113090 - DNA, 25 bp, Homo sapien
agcgccactggcatcatcgaaagcg

SEQ ID NO: 3113091 - DNA, 25 bp, Homo sapien
atcgaaagcgacagccacacttggt

SEQ ID NO: 3113092 - DNA, 25 bp, Homo sapien
ccacacttggttggcagcaaaagca

SEQ ID NO: 3113093 - DNA, 25 bp, Homo sapien
cacttggttggcagcaaaagcattt

SEQ ID NO: 3113094 - DNA, 25 bp, Homo sapien
ggcagccacctcttcgggtactggg

SEQ ID NO: 3113095 - DNA, 25 bp, Homo sapien
gcagcattgcggcactaaacccaag

SEQ ID NO: 3113096 - DNA, 25 bp, Homo sapien
tcagcgcgaggccatctttacactg

SEQ ID NO: 3113097 - DNA, 25 bp, Homo sapien
tgcagtttcccgtggcaactcaggg

SEQ ID NO: 3113098 - DNA, 25 bp, Homo sapien
gtcctgtgacctgccgctggggcca

SEQ ID NO: 3113099 - DNA, 25 bp, Homo sapien
ccagactgcacctgcggacaagtgg

SEQ ID NO: 3113100 - DNA, 25 bp, Homo sapien
cccactccagaacgcccacgggctg

SEQ ID NO: 3113101 - DNA, 25 bp, Homo sapien
tggggccagactgcacctgcggaca

SEQ ID NO: 3113102 - DNA, 25 bp, Homo sapien
ctgtgctcttgtcgaagatggcttc

SEQ ID NO: 3113103 - DNA, 25 bp, Homo sapien
caaaacaaccttccctgtgctcttg

SEQ ID NO: 3113104 - DNA, 25 bp, Homo sapien
cagcttcttgtagaggctgaacgtc

SEQ ID NO: 3113105 - DNA, 25 bp, Homo sapien
gctgaacgtcttcaaaacaaccttc

SEQ ID NO: 3113106 - DNA, 25 bp, Homo sapien
cagcctgtgacgtagaagagcttcc

SEQ ID NO: 3113107 - DNA, 25 bp, Homo sapien
caggcagcctgtgacgtagaagagc

SEQ ID NO: 3113108 - DNA, 25 bp, Homo sapien
gtgacgtagaagagcttccagccca

SEQ ID NO: 3113109 - DNA, 25 bp, Homo sapien
cacaaacaggcagcctgtgacgtag

SEQ ID NO: 3113110 - DNA, 25 bp, Homo sapien
tctctccgggaatatttgatgaccc

SEQ ID NO: 3113111 - DNA, 25 bp, Homo sapien
gcagggtgggaagtacacctcatcc

SEQ ID NO: 3113112 - DNA, 25 bp, Homo sapien
cagaggtgccgatcctaaaggccgc

SEQ ID NO: 3113113 - DNA, 25 bp, Homo sapien
cttaagaagtgaaatgtggccgggc

SEQ ID NO: 3113114 - DNA, 25 bp, Homo sapien
agcagccaggccaatcgacaagatt

SEQ ID NO: 3113115 - DNA, 25 bp, Homo sapien
cagcagccaggccaatcgacaagat

SEQ ID NO: 3113116 - DNA, 25 bp, Homo sapien
gcagccaggccaatcgacaagattc

SEQ ID NO: 3113117 - DNA, 25 bp, Homo sapien
gactgcctgcctattgatcccggta

SEQ ID NO: 3113118 - DNA, 25 bp, Homo sapien
acctccctggtgcagcgggaccagg

SEQ ID NO: 3113119 - DNA, 25 bp, Homo sapien
caataatgcagtatagctgggcgta

SEQ ID NO: 3113120 - DNA, 25 bp, Homo sapien
atgagcaggcccttcccactgtagg

SEQ ID NO: 3113121 - DNA, 25 bp, Homo sapien
tgggcaacataacgagacctcatta

SEQ ID NO: 3113122 - DNA, 25 bp, Homo sapien
aggccgaggaaggaagagcgcttga

SEQ ID NO: 3113123 - DNA, 25 bp, Homo sapien
ggaggccgaggaaggaagagcgctt

SEQ ID NO: 3113124 - DNA, 25 bp, Homo sapien
gctcaggagtttgagaccagcctgg

SEQ ID NO: 3113125 - DNA, 25 bp, Homo sapien
tgtcacaaaaaaggtgggccccagc

SEQ ID NO: 3113126 - DNA, 25 bp, Homo sapien
ccagtagcacgtggtgaggcctgaa

SEQ ID NO: 3113127 - DNA, 25 bp, Homo sapien
tgaggctccataactgacacgggtg

SEQ ID NO: 3113128 - DNA, 25 bp, Homo sapien
tgtcccgtcaacacaagtgcagctg

SEQ ID NO: 3113129 - DNA, 25 bp, Homo sapien
ggagacatgggaacccacgatcacc

SEQ ID NO: 3113130 - DNA, 25 bp, Homo sapien
gaacccacgatcacccatcacgtgg

SEQ ID NO: 3113131 - DNA, 25 bp, Homo sapien
gacatgggaacccacgatcacccat

SEQ ID NO: 3113132 - DNA, 25 bp, Homo sapien
ggaggagacatgggaacccacgatc

SEQ ID NO: 3113133 - DNA, 25 bp, Homo sapien
taaaaccaagtacaccagatagaat

SEQ ID NO: 3113134 - DNA, 25 bp, Homo sapien
gatcacccatcacgtggttcaaaac

SEQ ID NO: 3113135 - DNA, 25 bp, Homo sapien
tgaaagtcaggcttccggttctggg

SEQ ID NO: 3113136 - DNA, 25 bp, Homo sapien
gggacaaaacagacatgcattatct

SEQ ID NO: 3113137 - DNA, 25 bp, Homo sapien
ggaggcgggagctggtgcgggtctc

SEQ ID NO: 3113138 - DNA, 25 bp, Homo sapien
cacgccatcaggcccagtctggagg

SEQ ID NO: 3113139 - DNA, 25 bp, Homo sapien
ccccaactaagtcacctgcagcccc

SEQ ID NO: 3113140 - DNA, 25 bp, Homo sapien
ggtcccccaactaagtcacctgcag

SEQ ID NO: 3113141 - DNA, 25 bp, Homo sapien
tgcacacaggcaggcgcccacgcca

SEQ ID NO: 3113142 - DNA, 25 bp, Homo sapien
tctgtggttgggcacgtcactggat

SEQ ID NO: 3113143 - DNA, 25 bp, Homo sapien
gggcacgtcactggatcccccagag

SEQ ID NO: 3113144 - DNA, 25 bp, Homo sapien
tgtggttgggcacgtcactggatcc

SEQ ID NO: 3113145 - DNA, 25 bp, Homo sapien
tggttgggcacgtcactggatcccc

SEQ ID NO: 3113146 - DNA, 25 bp, Homo sapien
tggaaaccttatgtcctgaggccgc

SEQ ID NO: 3113147 - DNA, 25 bp, Homo sapien
gcactggcatggaccaacgatctca

SEQ ID NO: 3113148 - DNA, 25 bp, Homo sapien
taagcttctagcatctgtgggcacc

SEQ ID NO: 3113149 - DNA, 25 bp, Homo sapien
taatcttccacagcggagttccgca

SEQ ID NO: 3113150 - DNA, 25 bp, Homo sapien
taagggtgccgggacgcgcggcacg

SEQ ID NO: 3113151 - DNA, 25 bp, Homo sapien
gaaggaagtgcggagcccacccagc

SEQ ID NO: 3113152 - DNA, 25 bp, Homo sapien
cgagcgctcgtttctttgtccggat

SEQ ID NO: 3113153 - DNA, 25 bp, Homo sapien
gggccaacctgcagcggaacaggcg

SEQ ID NO: 3113154 - DNA, 25 bp, Homo sapien
ccgcagcagagagacgcgaaccggc

SEQ ID NO: 3113155 - DNA, 25 bp, Homo sapien
agagcacagcggtccccgcgccgca

SEQ ID NO: 3113156 - DNA, 25 bp, Homo sapien
ccgcgcgcacttccgggattggagc

SEQ ID NO: 3113157 - DNA, 25 bp, Homo sapien
gagcggagccgagccgactttcggg

SEQ ID NO: 3113158 - DNA, 25 bp, Homo sapien
gggattggggcggggccgcaagcat

SEQ ID NO: 3113159 - DNA, 25 bp, Homo sapien
tgcagaaaggctcccagatggggtg

SEQ ID NO: 3113160 - DNA, 25 bp, Homo sapien
accactccatggtcagtgtctctta

SEQ ID NO: 3113161 - DNA, 25 bp, Homo sapien
cgagggtcatgtcatctcaccagaa

SEQ ID NO: 3113162 - DNA, 25 bp, Homo sapien
gcttcaggccccttcacgagggtca

SEQ ID NO: 3113163 - DNA, 25 bp, Homo sapien
ggaatactggtcaattgggccgaaa

SEQ ID NO: 3113164 - DNA, 25 bp, Homo sapien
ggttggccttaataacaggtgtctc

SEQ ID NO: 3113165 - DNA, 25 bp, Homo sapien
tccgttaagctcttagccaagaaaa

SEQ ID NO: 3113166 - DNA, 25 bp, Homo sapien
cagcggtggagtctttcgaaagcgc

SEQ ID NO: 3113167 - DNA, 25 bp, Homo sapien
taatggtagttagccaagggttggc

SEQ ID NO: 3113168 - DNA, 25 bp, Homo sapien
tactttgtaagctgtaagggcccaa

SEQ ID NO: 3113169 - DNA, 25 bp, Homo sapien
gacacgacgtcaagtggcaatggcg

SEQ ID NO: 3113170 - DNA, 25 bp, Homo sapien
taaggcgagtgtccaacgccgagct

SEQ ID NO: 3113171 - DNA, 25 bp, Homo sapien
ggcttccgggtccatcacgtggtta

SEQ ID NO: 3113172 - DNA, 25 bp, Homo sapien
ggctcacgagagcttcaacctcttg

SEQ ID NO: 3113173 - DNA, 25 bp, Homo sapien
cctgagcacacacgggcgtctttat

SEQ ID NO: 3113174 - DNA, 25 bp, Homo sapien
acacacgggcgtctttataggtgaa

SEQ ID NO: 3113175 - DNA, 25 bp, Homo sapien
taggtgaaactttgattgttaaatg

SEQ ID NO: 3113176 - DNA, 25 bp, Homo sapien
tataggtgaaactttgattgttaaa

SEQ ID NO: 3113177 - DNA, 25 bp, Homo sapien
tgggagaaccacttgggcagtgtgg

SEQ ID NO: 3113178 - DNA, 25 bp, Homo sapien
aaaaagataaatcaggtcctgggag

SEQ ID NO: 3113179 - DNA, 25 bp, Homo sapien
gataaatcaggtcctgggagaacca

SEQ ID NO: 3113180 - DNA, 25 bp, Homo sapien
cacttgggcagtgtggtggccctaa

SEQ ID NO: 3113181 - DNA, 25 bp, Homo sapien
gggccatctgcttacgttgacaaaa

SEQ ID NO: 3113182 - DNA, 25 bp, Homo sapien
aaaacatgcgcggtgggctgtcaga

SEQ ID NO: 3113183 - DNA, 25 bp, Homo sapien
gatgccacagccatagttttagagg

SEQ ID NO: 3113184 - DNA, 25 bp, Homo sapien
ggtacaatggctcagacctctaatt

SEQ ID NO: 3113185 - DNA, 25 bp, Homo sapien
accactggactccagcctgggcggc

SEQ ID NO: 3113186 - DNA, 25 bp, Homo sapien
agaggttacagcgagacaagattgc

SEQ ID NO: 3113187 - DNA, 25 bp, Homo sapien
gcagaggttacagcgagacaagatt

SEQ ID NO: 3113188 - DNA, 25 bp, Homo sapien
tggactccagcctgggcggcggagg

SEQ ID NO: 3113189 - DNA, 25 bp, Homo sapien
ggcagattggaacgttttaacatga

SEQ ID NO: 3113190 - DNA, 25 bp, Homo sapien
ggaacgttttaacatgagaggagca

SEQ ID NO: 3113191 - DNA, 25 bp, Homo sapien
gtgcctggcagattggaacgtttta

SEQ ID NO: 3113192 - DNA, 25 bp, Homo sapien
gattggaacgttttaacatgagagg

SEQ ID NO: 3113193 - DNA, 25 bp, Homo sapien
tcgggccggtcaggctggaatttct

SEQ ID NO: 3113194 - DNA, 25 bp, Homo sapien
ctaattgtattcttagttgagacgg

SEQ ID NO: 3113195 - DNA, 25 bp, Homo sapien
gctaattgtattcttagttgagacg

SEQ ID NO: 3113196 - DNA, 25 bp, Homo sapien
ttcgccatgttgatcgggccggtca

SEQ ID NO: 3113197 - DNA, 25 bp, Homo sapien
ctggggggatggtgtgcccggccca

SEQ ID NO: 3113198 - DNA, 25 bp, Homo sapien
tggggggatggtgtgcccggcccat

SEQ ID NO: 3113199 - DNA, 25 bp, Homo sapien
ggcccagcacgcttccgctgcgcca

SEQ ID NO: 3113200 - DNA, 25 bp, Homo sapien
tgggcccagcacgcttccgctgcgc

SEQ ID NO: 3113201 - DNA, 25 bp, Homo sapien
gggcccagcacgcttccgctgcgcc

SEQ ID NO: 3113202 - DNA, 25 bp, Homo sapien
cccagcacgcttccgctgcgccact

SEQ ID NO: 3113203 - DNA, 25 bp, Homo sapien
cacacaccctgcaggaaccaccatg

SEQ ID NO: 3113204 - DNA, 25 bp, Homo sapien
tcacacaccctgcaggaaccaccat

SEQ ID NO: 3113205 - DNA, 25 bp, Homo sapien
tgacatgactcgctagccaggaaag

SEQ ID NO: 3113206 - DNA, 25 bp, Homo sapien
gcgtattttgcaggacagttttgac

SEQ ID NO: 3113207 - DNA, 25 bp, Homo sapien
gaaagataacgacatccagtcctgg

SEQ ID NO: 3113208 - DNA, 25 bp, Homo sapien
tggagctgctggttaaaaacgaacg

SEQ ID NO: 3113209 - DNA, 25 bp, Homo sapien
gtgagcatgggccactcgagcttca

SEQ ID NO: 3113210 - DNA, 25 bp, Homo sapien
gccgcgagttcgagtatctgatgaa

SEQ ID NO: 3113211 - DNA, 25 bp, Homo sapien
agcgctcggtgaccatcggccgcaa

SEQ ID NO: 3113212 - DNA, 25 bp, Homo sapien
gcatgggccactcgagcttcatctc

SEQ ID NO: 3113213 - DNA, 25 bp, Homo sapien
cctggagtgtactggtatgatgaca

SEQ ID NO: 3113214 - DNA, 25 bp, Homo sapien
cacggtctctgtgacctagcctgga

SEQ ID NO: 3113215 - DNA, 25 bp, Homo sapien
cacaacaaaggaagtttgcgtctac

SEQ ID NO: 3113216 - DNA, 25 bp, Homo sapien
taagttgacctttcagtgagggcca

SEQ ID NO: 3113217 - DNA, 25 bp, Homo sapien
gaatgagtcttgcagtagagatgag

SEQ ID NO: 3113218 - DNA, 25 bp, Homo sapien
ccaccgaggtgaacatgtatcctgg

SEQ ID NO: 3113219 - DNA, 25 bp, Homo sapien
tcagaccttttgaacagtaggaatg

SEQ ID NO: 3113220 - DNA, 25 bp, Homo sapien
gagtcttgtggccaccgaggtgaac

SEQ ID NO: 3113221 - DNA, 25 bp, Homo sapien
ggtgtagggcagtaacacaggttaa

SEQ ID NO: 3113222 - DNA, 25 bp, Homo sapien
gcttgaaagcacacgtaacttagag

SEQ ID NO: 3113223 - DNA, 25 bp, Homo sapien
ggcctgggactctctacccgtactg

SEQ ID NO: 3113224 - DNA, 25 bp, Homo sapien
gccaaagtattattacgagtctcac

SEQ ID NO: 3113225 - DNA, 25 bp, Homo sapien
tttggtagagatagcttttaaagaa

SEQ ID NO: 3113226 - DNA, 25 bp, Homo sapien
cttgagtgaactgcatgtaagtgtt

SEQ ID NO: 3113227 - DNA, 25 bp, Homo sapien
gctgaaatcctgtacacttgagtga

SEQ ID NO: 3113228 - DNA, 25 bp, Homo sapien
tgggctgggctgattcatctttaca

SEQ ID NO: 3113229 - DNA, 25 bp, Homo sapien
aattctgggtactcgataggactca

SEQ ID NO: 3113230 - DNA, 25 bp, Homo sapien
catgagaaaccggagcagtaggaag

SEQ ID NO: 3113231 - DNA, 25 bp, Homo sapien
tgagcagaggtccaccacagctgcc

SEQ ID NO: 3113232 - DNA, 25 bp, Homo sapien
gaaaccggagcagtaggaaggccat

SEQ ID NO: 3113233 - DNA, 25 bp, Homo sapien
tctgagaatggtcatgagaaaccgg

SEQ ID NO: 3113234 - DNA, 25 bp, Homo sapien
aggagcggttgcgtctcgatgcatc

SEQ ID NO: 3113235 - DNA, 25 bp, Homo sapien
ggttgcgtctcgatgcatcggcaca

SEQ ID NO: 3113236 - DNA, 25 bp, Homo sapien
cgtctcgatgcatcggcacaggagg

SEQ ID NO: 3113237 - DNA, 25 bp, Homo sapien
ctccgaggagcggttgcgtctcgat

SEQ ID NO: 3113238 - DNA, 25 bp, Homo sapien
tggatatagacccaaactgaaggca

SEQ ID NO: 3113239 - DNA, 25 bp, Homo sapien
aatgccaaaccgtgcagctgctgtg

SEQ ID NO: 3113240 - DNA, 25 bp, Homo sapien
acagactagcagttcctcacaaaac

SEQ ID NO: 3113241 - DNA, 25 bp, Homo sapien
gcagccttatgcacaatttccagag

SEQ ID NO: 3113242 - DNA, 25 bp, Homo sapien
tgaaaaggaagcttcaggtggagac

SEQ ID NO: 3113243 - DNA, 25 bp, Homo sapien
cagttgctgaagcacagtaggatgc

SEQ ID NO: 3113244 - DNA, 25 bp, Homo sapien
ggatgcgtgcactgtgatagactaa

SEQ ID NO: 3113245 - DNA, 25 bp, Homo sapien
caaggtgggccgagtgatgccatct

SEQ ID NO: 3113246 - DNA, 25 bp, Homo sapien
aaaacaatggaatgcggctgggtgt

SEQ ID NO: 3113247 - DNA, 25 bp, Homo sapien
tgtataaaacaatggaatgcggctg

SEQ ID NO: 3113248 - DNA, 25 bp, Homo sapien
ataaaacaatggaatgcggctgggt

SEQ ID NO: 3113249 - DNA, 25 bp, Homo sapien
agtttgtataaaacaatggaatgcg

SEQ ID NO: 3113250 - DNA, 25 bp, Homo sapien
tagatagacatcaggaaccccattg

SEQ ID NO: 3113251 - DNA, 25 bp, Homo sapien
ttgaggctgaagtactgaaactgac

SEQ ID NO: 3113252 - DNA, 25 bp, Homo sapien
ctagatagacatcaggaaccccatt

SEQ ID NO: 3113253 - DNA, 25 bp, Homo sapien
accccattgaggctgaagtactgaa

SEQ ID NO: 3113254 - DNA, 25 bp, Homo sapien
gatgcgcaaagattcacgcagagcc

SEQ ID NO: 3113255 - DNA, 25 bp, Homo sapien
cacaccagcgtgtgtgctcggggaa

SEQ ID NO: 3113256 - DNA, 25 bp, Homo sapien
aaagagatgcagatgcgcaaagatt

SEQ ID NO: 3113257 - DNA, 25 bp, Homo sapien
cacgtccacaccagcgtgtgtgctt

SEQ ID NO: 3113258 - DNA, 25 bp, Homo sapien
gctcgctccagaggcgtctgactca

SEQ ID NO: 3113259 - DNA, 25 bp, Homo sapien
ctcagaagctcctgagagaagtgtc

SEQ ID NO: 3113260 - DNA, 25 bp, Homo sapien
gggctcgctccagaggcgtctgact

SEQ ID NO: 3113261 - DNA, 25 bp, Homo sapien
ctccagaggcgtctgactcagaagc

SEQ ID NO: 3113262 - DNA, 25 bp, Homo sapien
ctttttctgctctgtagtccaaaac

SEQ ID NO: 3113263 - DNA, 25 bp, Homo sapien
ctagtcctcggccttctttttctgc

SEQ ID NO: 3113264 - DNA, 25 bp, Homo sapien
ttctttttctgctctgtagtccaaa

SEQ ID NO: 3113265 - DNA, 25 bp, Homo sapien
agtcctcggccttctttttctgctc

SEQ ID NO: 3113266 - DNA, 25 bp, Homo sapien
gttgaatccagaaatccgctccagc

SEQ ID NO: 3113267 - DNA, 25 bp, Homo sapien
tggtgctgtaatgtggtggtgaaag

SEQ ID NO: 3113268 - DNA, 25 bp, Homo sapien
tgctgtaatgtggtggtgaaagctg

SEQ ID NO: 3113269 - DNA, 25 bp, Homo sapien
tgaatccagaaatccgctccagcag

SEQ ID NO: 3113270 - DNA, 25 bp, Homo sapien
gagtttattctcttccgtgtcttca

SEQ ID NO: 3113271 - DNA, 25 bp, Homo sapien
ctgtaataactggaactcgttatcc

SEQ ID NO: 3113272 - DNA, 25 bp, Homo sapien
aactccaggtagtacttgtccatgt

SEQ ID NO: 3113273 - DNA, 25 bp, Homo sapien
taactggaactcgttatccatgata

SEQ ID NO: 3113274 - DNA, 25 bp, Homo sapien
ctgaaaggaacttgtcctgttcctt

SEQ ID NO: 3113275 - DNA, 25 bp, Homo sapien
ggaagcgttcctggacattagaccc

SEQ ID NO: 3113276 - DNA, 25 bp, Homo sapien
ggacattagacccatcctctgaaag

SEQ ID NO: 3113277 - DNA, 25 bp, Homo sapien
ttgcacttttggaagcgttcctgga

SEQ ID NO: 3113278 - DNA, 25 bp, Homo sapien
agtgcacacgggagcgcactcaggg

SEQ ID NO: 3113279 - DNA, 25 bp, Homo sapien
gcagagtgcacacgggagcgcactc

SEQ ID NO: 3113280 - DNA, 25 bp, Homo sapien
tgtgcagagtgcacacgggagcgca

SEQ ID NO: 3113281 - DNA, 25 bp, Homo sapien
gagtgcacacgggagcgcactcagg

SEQ ID NO: 3113282 - DNA, 25 bp, Homo sapien
caaaccgtccttgagaaacgtgagg

SEQ ID NO: 3113283 - DNA, 25 bp, Homo sapien
acagacaaaccgtccttgagaaacg

SEQ ID NO: 3113284 - DNA, 25 bp, Homo sapien
gacaaaccgtccttgagaaacgtga

SEQ ID NO: 3113285 - DNA, 25 bp, Homo sapien
cagacaaaccgtccttgagaaacgt

SEQ ID NO: 3113286 - DNA, 25 bp, Homo sapien
tttgcgtctcgtaagtgatggtggt

SEQ ID NO: 3113287 - DNA, 25 bp, Homo sapien
atggtggtggtgacgcaggggcagg

SEQ ID NO: 3113288 - DNA, 25 bp, Homo sapien
tgcgtctcgtaagtgatggtggtgg

SEQ ID NO: 3113289 - DNA, 25 bp, Homo sapien
gatggtggtggtgacgcaggggcag

SEQ ID NO: 3113290 - DNA, 25 bp, Homo sapien
tccacatcagtcagtacagccacag

SEQ ID NO: 3113291 - DNA, 25 bp, Homo sapien
tcttcagactcggatgctgcgtggg

SEQ ID NO: 3113292 - DNA, 25 bp, Homo sapien
agctctttctgagtccccgcttagg

SEQ ID NO: 3113293 - DNA, 25 bp, Homo sapien
cctaagagcatgcaaattaaatgac

SEQ ID NO: 3113294 - DNA, 25 bp, Homo sapien
tagaattcaattcgccacaatctct

SEQ ID NO: 3113295 - DNA, 25 bp, Homo sapien
caggcaaaggctcgttctggaggat

SEQ ID NO: 3113296 - DNA, 25 bp, Homo sapien
gcactaaaacgaggacacattttta

SEQ ID NO: 3113297 - DNA, 25 bp, Homo sapien
tatttcatcaaagtgccgcgttccc

SEQ ID NO: 3113298 - DNA, 25 bp, Homo sapien
acatgctggtcggtggctccccgtg

SEQ ID NO: 3113299 - DNA, 25 bp, Homo sapien
cggtccacggccaggtgaacaatgg

SEQ ID NO: 3113300 - DNA, 25 bp, Homo sapien
ccacggccaggtgaacaatggtaag

SEQ ID NO: 3113301 - DNA, 25 bp, Homo sapien
gtaagacatgctggtcggtggctcc

SEQ ID NO: 3113302 - DNA, 25 bp, Homo sapien
tattttcagtgtactactggactcc

SEQ ID NO: 3113303 - DNA, 25 bp, Homo sapien
agcttttacgggattattttcagtg

SEQ ID NO: 3113304 - DNA, 25 bp, Homo sapien
tccaaatacagacatcatgagatgt

SEQ ID NO: 3113305 - DNA, 25 bp, Homo sapien
gagatgtccacttgcccacgtgtgg

SEQ ID NO: 3113306 - DNA, 25 bp, Homo sapien
gcaaagccttttccggcagcccgga

SEQ ID NO: 3113307 - DNA, 25 bp, Homo sapien
aggtgcttctggagacaagagcaaa

SEQ ID NO: 3113308 - DNA, 25 bp, Homo sapien
agcaaagccttttccggcagcccgg

SEQ ID NO: 3113309 - DNA, 25 bp, Homo sapien
caggtgcttctggagacaagagcaa

SEQ ID NO: 3113310 - DNA, 25 bp, Homo sapien
tcggttgaggccacacctgcggcca

SEQ ID NO: 3113311 - DNA, 25 bp, Homo sapien
agtggccccggctgtctgcacattt

SEQ ID NO: 3113312 - DNA, 25 bp, Homo sapien
ttttttgtagacacattagagtcgg

SEQ ID NO: 3113313 - DNA, 25 bp, Homo sapien
cattagagtcggttgaggccacacc

SEQ ID NO: 3113314 - DNA, 25 bp, Homo sapien
ggtcacggggtttgcccagctcaca

SEQ ID NO: 3113315 - DNA, 25 bp, Homo sapien
gtggtcacggggtttgcccagctca

SEQ ID NO: 3113316 - DNA, 25 bp, Homo sapien
gtcacggggtttgcccagctcacac

SEQ ID NO: 3113317 - DNA, 25 bp, Homo sapien
gaggtggtcacggggtttgcccagc

SEQ ID NO: 3113318 - DNA, 25 bp, Homo sapien
tcgccttcagtagcctgagtccctt

SEQ ID NO: 3113319 - DNA, 25 bp, Homo sapien
tgcttcgccttcagtagcctgagtc

SEQ ID NO: 3113320 - DNA, 25 bp, Homo sapien
cctgcttcgccttcagtagcctgag

SEQ ID NO: 3113321 - DNA, 25 bp, Homo sapien
ttcgccttcagtagcctgagtccct

SEQ ID NO: 3113322 - DNA, 25 bp, Homo sapien
cttgcccagattcttggtggctgct

SEQ ID NO: 3113323 - DNA, 25 bp, Homo sapien
cgccttaattctggaacacgttcct

SEQ ID NO: 3113324 - DNA, 25 bp, Homo sapien
tagggcagttgttcgctgacgcctt

SEQ ID NO: 3113325 - DNA, 25 bp, Homo sapien
ttccttgcccagattcttggtggct

SEQ ID NO: 3113326 - DNA, 25 bp, Homo sapien
cctgccccaccggttgccctggtgc

SEQ ID NO: 3113327 - DNA, 25 bp, Homo sapien
gtggcgtcaggacgtgcctgcccca

SEQ ID NO: 3113328 - DNA, 25 bp, Homo sapien
ggttgccctggtgccctcgtcacgc

SEQ ID NO: 3113329 - DNA, 25 bp, Homo sapien
cgggaccgcgcacacgtggggactg

SEQ ID NO: 3113330 - DNA, 25 bp, Homo sapien
tatgtgtaaattggtcctctgctat

SEQ ID NO: 3113331 - DNA, 25 bp, Homo sapien
cagggctatgtcctgaattctaaaa

SEQ ID NO: 3113332 - DNA, 25 bp, Homo sapien
catgctggccagttcgagactggtc

SEQ ID NO: 3113333 - DNA, 25 bp, Homo sapien
gagaagggaacacgataaagtcaca

SEQ ID NO: 3113334 - DNA, 25 bp, Homo sapien
tgttgactcccgctcttcgtggctg

SEQ ID NO: 3113335 - DNA, 25 bp, Homo sapien
tgggtccccgtttgctgcttgagtc

SEQ ID NO: 3113336 - DNA, 25 bp, Homo sapien
atctctaggcaccagggcgtagcgt

SEQ ID NO: 3113337 - DNA, 25 bp, Homo sapien
gagtctcttcggagcccagtgttga

SEQ ID NO: 3113338 - DNA, 25 bp, Homo sapien
gacgaagctactctggcatctgcac

SEQ ID NO: 3113339 - DNA, 25 bp, Homo sapien
cttgagaacccagggacgagccagt

SEQ ID NO: 3113340 - DNA, 25 bp, Homo sapien
ggactcaccgagctgcacttaactg

SEQ ID NO: 3113341 - DNA, 25 bp, Homo sapien
gctgtggccgcatggaaccttgaga

SEQ ID NO: 3113342 - DNA, 25 bp, Homo sapien
agaaccgaacccaatcctgaggctg

SEQ ID NO: 3113343 - DNA, 25 bp, Homo sapien
tcaggaagaaaaccgctggcccttc

SEQ ID NO: 3113344 - DNA, 25 bp, Homo sapien
ggctgactcctctacggaaaatgag

SEQ ID NO: 3113345 - DNA, 25 bp, Homo sapien
tttgtggtaggaaatgtccctgacc

SEQ ID NO: 3113346 - DNA, 25 bp, Homo sapien
cgtgaattgtgtcggccctcagcat

SEQ ID NO: 3113347 - DNA, 25 bp, Homo sapien
caaagcgcagcgtgtggatggatca

SEQ ID NO: 3113348 - DNA, 25 bp, Homo sapien
tgcggtgacgcccattgaaaggtat

SEQ ID NO: 3113349 - DNA, 25 bp, Homo sapien
caaatgcatcgtatgtccccttgga

SEQ ID NO: 3113350 - DNA, 25 bp, Homo sapien
gactttcccgtgtaagctcagtcca

SEQ ID NO: 3113351 - DNA, 25 bp, Homo sapien
agatggaaggtgcacacgctcctgt

SEQ ID NO: 3113352 - DNA, 25 bp, Homo sapien
tctgatcctggaacgtggacttcac

SEQ ID NO: 3113353 - DNA, 25 bp, Homo sapien
gaagtgtgcctctcacagatggaag

SEQ ID NO: 3113354 - DNA, 25 bp, Homo sapien
tatcgaagcgagagcagtaacaaac

SEQ ID NO: 3113355 - DNA, 25 bp, Homo sapien
cactttagtagagtacgcggtggac

SEQ ID NO: 3113356 - DNA, 25 bp, Homo sapien
cactcagagtgtgtgcggcatgatc

SEQ ID NO: 3113357 - DNA, 25 bp, Homo sapien
ttgtcctccgctagaataacagagt

SEQ ID NO: 3113358 - DNA, 25 bp, Homo sapien
gaaaaccatgttgaggcaataaact

SEQ ID NO: 3113359 - DNA, 25 bp, Homo sapien
gattcacgaaggtgagtgaattcca

SEQ ID NO: 3113360 - DNA, 25 bp, Homo sapien
gaaaactgacttatccaggttgagt

SEQ ID NO: 3113361 - DNA, 25 bp, Homo sapien
ttttaacctggaaagcagccaaaga

SEQ ID NO: 3113362 - DNA, 25 bp, Homo sapien
gggttgtctgagagtgatcttctct

SEQ ID NO: 3113363 - DNA, 25 bp, Homo sapien
tggggttgtctgagagtgatcttct

SEQ ID NO: 3113364 - DNA, 25 bp, Homo sapien
ggggttgtctgagagtgatcttctc

SEQ ID NO: 3113365 - DNA, 25 bp, Homo sapien
agtccgccggcctagggacaccgtg

SEQ ID NO: 3113366 - DNA, 25 bp, Homo sapien
ggccttgtttcccatacactgcgct

SEQ ID NO: 3113367 - DNA, 25 bp, Homo sapien
ctctggagtcccttcgcacccacgt

SEQ ID NO: 3113368 - DNA, 25 bp, Homo sapien
aagctgctgagtaggcaccgtctga

SEQ ID NO: 3113369 - DNA, 25 bp, Homo sapien
cacgttgcgggtacggagaagacca

SEQ ID NO: 3113370 - DNA, 25 bp, Homo sapien
tctggcagacgaccccgaagttaaa

SEQ ID NO: 3113371 - DNA, 25 bp, Homo sapien
tgacggctcggcttctagagtggcc

SEQ ID NO: 3113372 - DNA, 25 bp, Homo sapien
tgcagactcagtaagaacgacggaa

SEQ ID NO: 3113373 - DNA, 25 bp, Homo sapien
tctctttaatactggaaatgggagt

SEQ ID NO: 3113374 - DNA, 25 bp, Homo sapien
tactggaaatgggagtccttaggaa

SEQ ID NO: 3113375 - DNA, 25 bp, Homo sapien
ggcttcgagaccaaggtccctgggc

SEQ ID NO: 3113376 - DNA, 25 bp, Homo sapien
ttcgagaccaaggtccctgggcagc

SEQ ID NO: 3113377 - DNA, 25 bp, Homo sapien
gcgtagacatctcggatgcactccc

SEQ ID NO: 3113378 - DNA, 25 bp, Homo sapien
tagaaactgcgcgtagacatctcgg

SEQ ID NO: 3113379 - DNA, 25 bp, Homo sapien
aactgcgcgtagacatctcggatgc

SEQ ID NO: 3113380 - DNA, 25 bp, Homo sapien
catctctagaaactgcgcgtagaca

SEQ ID NO: 3113381 - DNA, 25 bp, Homo sapien
ctgggatagaaggagaccattttac

SEQ ID NO: 3113382 - DNA, 25 bp, Homo sapien
tgggatagaaggagaccattttacc

SEQ ID NO: 3113383 - DNA, 25 bp, Homo sapien
ttggagaaactccacttggaactga

SEQ ID NO: 3113384 - DNA, 25 bp, Homo sapien
caatgacggcgtttggctctgttcc

SEQ ID NO: 3113385 - DNA, 25 bp, Homo sapien
acaaatgcacggagagcctgaggga

SEQ ID NO: 3113386 - DNA, 25 bp, Homo sapien
ccaaaggcacaaatgcacggagagc

SEQ ID NO: 3113387 - DNA, 25 bp, Homo sapien
tgcactgatttttaaaccccaacaa

SEQ ID NO: 3113388 - DNA, 25 bp, Homo sapien
cagcctgcactgatttttaaacccc

SEQ ID NO: 3113389 - DNA, 25 bp, Homo sapien
ctgcactgatttttaaaccccaaca

SEQ ID NO: 3113390 - DNA, 25 bp, Homo sapien
gcccagcctgcactgatttttaaac

SEQ ID NO: 3113391 - DNA, 25 bp, Homo sapien
ttcagctgcaaaaatatgcactgtg

SEQ ID NO: 3113392 - DNA, 25 bp, Homo sapien
atgagggacgcatcctgattgaagt

SEQ ID NO: 3113393 - DNA, 25 bp, Homo sapien
cagatgagggacgcatcctgattga

SEQ ID NO: 3113394 - DNA, 25 bp, Homo sapien
tgagggacgcatcctgattgaagtt

SEQ ID NO: 3113395 - DNA, 25 bp, Homo sapien
aaagccacagccacaatccagtgta

SEQ ID NO: 3113396 - DNA, 25 bp, Homo sapien
tttctttaacaagccgacaaccatc

SEQ ID NO: 3113397 - DNA, 25 bp, Homo sapien
tcacggcaagttttccttgggtgcc

SEQ ID NO: 3113398 - DNA, 25 bp, Homo sapien
gcaccacaggttgaagccacaaagc

SEQ ID NO: 3113399 - DNA, 25 bp, Homo sapien
cacagggcatgagatgctacccaag

SEQ ID NO: 3113400 - DNA, 25 bp, Homo sapien
ggaatcagacaaaccaacatggtct

SEQ ID NO: 3113401 - DNA, 25 bp, Homo sapien
ggcctctcagactgtaacaggctgg

SEQ ID NO: 3113402 - DNA, 25 bp, Homo sapien
aagtagggcttcagcactagacacc

SEQ ID NO: 3113403 - DNA, 25 bp, Homo sapien
agcccgaagttcttctccggtgaag

SEQ ID NO: 3113404 - DNA, 25 bp, Homo sapien
cacttccgtgctgtcagcccgaagt

SEQ ID NO: 3113405 - DNA, 25 bp, Homo sapien
tccgtgctgtcagcccgaagttctt

SEQ ID NO: 3113406 - DNA, 25 bp, Homo sapien
ttccgtgctgtcagcccgaagttct

SEQ ID NO: 3113407 - DNA, 25 bp, Homo sapien
gctgcttgagatcctcttcgcagtt

SEQ ID NO: 3113408 - DNA, 25 bp, Homo sapien
ttggctgcttgagatcctcttcgca

SEQ ID NO: 3113409 - DNA, 25 bp, Homo sapien
tattggctgcttgagatcctcttcg

SEQ ID NO: 3113410 - DNA, 25 bp, Homo sapien
aatattggctgcttgagatcctctt

SEQ ID NO: 3113411 - DNA, 25 bp, Homo sapien
tatcaaatattcttataagcgtccc

SEQ ID NO: 3113412 - DNA, 25 bp, Homo sapien
tgaagtatcaaatattcttataagc

SEQ ID NO: 3113413 - DNA, 25 bp, Homo sapien
ctgatgaagtatcaaatattcttat

SEQ ID NO: 3113414 - DNA, 25 bp, Homo sapien
agtatcaaatattcttataagcgtc

SEQ ID NO: 3113415 - DNA, 25 bp, Homo sapien
ttaacatctcctccagaacgaggag

SEQ ID NO: 3113416 - DNA, 25 bp, Homo sapien
cctccagaacgaggaggactcttca

SEQ ID NO: 3113417 - DNA, 25 bp, Homo sapien
tctttatatccttcaacccagcagc

SEQ ID NO: 3113418 - DNA, 25 bp, Homo sapien
aacactctgacaacatccaacaaaa

SEQ ID NO: 3113419 - DNA, 25 bp, Homo sapien
tggctaacccggagggcaccgctgc

SEQ ID NO: 3113420 - DNA, 25 bp, Homo sapien
ctggctaacccggagggcaccgctg

SEQ ID NO: 3113421 - DNA, 25 bp, Homo sapien
ggctaacccggagggcaccgctgcg

SEQ ID NO: 3113422 - DNA, 25 bp, Homo sapien
gctaacccggagggcaccgctgcgg

SEQ ID NO: 3113423 - DNA, 25 bp, Homo sapien
gcagagaagcatccacatttgtaac

SEQ ID NO: 3113424 - DNA, 25 bp, Homo sapien
gagaagcatccacatttgtaacggg

SEQ ID NO: 3113425 - DNA, 25 bp, Homo sapien
gaagcagagaagcatccacatttgt

SEQ ID NO: 3113426 - DNA, 25 bp, Homo sapien
aggaagcagagaagcatccacattt

SEQ ID NO: 3113427 - DNA, 25 bp, Homo sapien
ggacaatgtgtccaatacgtcaata

SEQ ID NO: 3113428 - DNA, 25 bp, Homo sapien
caatgaagacacgttactaagcagg

SEQ ID NO: 3113429 - DNA, 25 bp, Homo sapien
aagggttttgagctgtgtgttatca

SEQ ID NO: 3113430 - DNA, 25 bp, Homo sapien
cagttacaatctggtggtaattcaa

SEQ ID NO: 3113431 - DNA, 25 bp, Homo sapien
tgtgaagacaggagcacagaagttg

SEQ ID NO: 3113432 - DNA, 25 bp, Homo sapien
agcacagaagttgagtggttctgca

SEQ ID NO: 3113433 - DNA, 25 bp, Homo sapien
acaggagcacagaagttgagtggtt

SEQ ID NO: 3113434 - DNA, 25 bp, Homo sapien
aagacaggagcacagaagttgagtg

SEQ ID NO: 3113435 - DNA, 25 bp, Homo sapien
cccgtgtgcgtgcccggaaaggcca

SEQ ID NO: 3113436 - DNA, 25 bp, Homo sapien
gttgagtgcaatgcagctcaggaca

SEQ ID NO: 3113437 - DNA, 25 bp, Homo sapien
cacatggcccgtgtgcgtgcccgga

SEQ ID NO: 3113438 - DNA, 25 bp, Homo sapien
tgtgcgtgcccggaaaggccaggag

SEQ ID NO: 3113439 - DNA, 25 bp, Homo sapien
caggtttcgaagacgtgcaactgat

SEQ ID NO: 3113440 - DNA, 25 bp, Homo sapien
tagcaggtttcgaagacgtgcaact

SEQ ID NO: 3113441 - DNA, 25 bp, Homo sapien
ggttatagcaggtttcgaagacgtg

SEQ ID NO: 3113442 - DNA, 25 bp, Homo sapien
gtttcgaagacgtgcaactgatggg

SEQ ID NO: 3113443 - DNA, 25 bp, Homo sapien
aggcctggagctcggcgagtgcacg

SEQ ID NO: 3113444 - DNA, 25 bp, Homo sapien
cagaaaaggagtgttcctgaagaaa

SEQ ID NO: 3113445 - DNA, 25 bp, Homo sapien
aggcaggtagccagcgccaggcctg

SEQ ID NO: 3113446 - DNA, 25 bp, Homo sapien
cctgaagaaaaagctctggaggcag

SEQ ID NO: 3113447 - DNA, 25 bp, Homo sapien
gaatgggacataactcaccacggtg

SEQ ID NO: 3113448 - DNA, 25 bp, Homo sapien
tgagaccatggctgacagaaccacc

SEQ ID NO: 3113449 - DNA, 25 bp, Homo sapien
gaactctgcgctatcttgctcaacg

SEQ ID NO: 3113450 - DNA, 25 bp, Homo sapien
tcagctctgcacatgtcggaatggg

SEQ ID NO: 3113451 - DNA, 25 bp, Homo sapien
tcgccgcagcttgactgccttgact

SEQ ID NO: 3113452 - DNA, 25 bp, Homo sapien
tatctcgccgcagcttgactgcctt

SEQ ID NO: 3113453 - DNA, 25 bp, Homo sapien
ccgcagcttgactgccttgacttct

SEQ ID NO: 3113454 - DNA, 25 bp, Homo sapien
tcttcttcaggtcatcccagatcat

SEQ ID NO: 3113455 - DNA, 25 bp, Homo sapien
cacacaggcgcgctgagcgcgttca

SEQ ID NO: 3113456 - DNA, 25 bp, Homo sapien
tcgcacacaggcgcgctgagcgcgt

SEQ ID NO: 3113457 - DNA, 25 bp, Homo sapien
acacaggcgcgctgagcgcgttcat

SEQ ID NO: 3113458 - DNA, 25 bp, Homo sapien
tggcctcgcacacaggcgcgctgag

SEQ ID NO: 3113459 - DNA, 25 bp, Homo sapien
tgatgttaaaagtgctgcaaataaa

SEQ ID NO: 3113460 - DNA, 25 bp, Homo sapien
gcctgaccataggtactgatgttaa

SEQ ID NO: 3113461 - DNA, 25 bp, Homo sapien
ttgattccacccgactgagcccata

SEQ ID NO: 3113462 - DNA, 25 bp, Homo sapien
gactgagcccataggcaagcctgac

SEQ ID NO: 3113463 - DNA, 25 bp, Homo sapien
tctgggctatgctagcagccactct

SEQ ID NO: 3113464 - DNA, 25 bp, Homo sapien
catccccaattagccagggcaaagt

SEQ ID NO: 3113465 - DNA, 25 bp, Homo sapien
aaatggctcccttgttagcacctgg

SEQ ID NO: 3113466 - DNA, 25 bp, Homo sapien
tgctctctctgtggaacctccgctg

SEQ ID NO: 3113467 - DNA, 25 bp, Homo sapien
tccactgtttttcctaccgataatc

SEQ ID NO: 3113468 - DNA, 25 bp, Homo sapien
gaaccgctcaaaggccaagatctca

SEQ ID NO: 3113469 - DNA, 25 bp, Homo sapien
ttttcctaccgataatctcttccca

SEQ ID NO: 3113470 - DNA, 25 bp, Homo sapien
cttgtgagattacagaaccgctcaa

SEQ ID NO: 3113471 - DNA, 25 bp, Homo sapien
tctgacctgggctattctattccta

SEQ ID NO: 3113472 - DNA, 25 bp, Homo sapien
tccgcacattcacgttcacgcagtt

SEQ ID NO: 3113473 - DNA, 25 bp, Homo sapien
tccttttgtgcctgatctgacctgg

SEQ ID NO: 3113474 - DNA, 25 bp, Homo sapien
tgggccccaaagcttgtcacgagtc

SEQ ID NO: 3113475 - DNA, 25 bp, Homo sapien
ccatttggcatgcggcgcccccaga

SEQ ID NO: 3113476 - DNA, 25 bp, Homo sapien
cccatttggcatgcggcgcccccag

SEQ ID NO: 3113477 - DNA, 25 bp, Homo sapien
ttcccatttggcatgcggcgccccc

SEQ ID NO: 3113478 - DNA, 25 bp, Homo sapien
tcccatttggcatgcggcgccccca

SEQ ID NO: 3113479 - DNA, 25 bp, Homo sapien
agctaaatagttgcagcgaaataac

SEQ ID NO: 3113480 - DNA, 25 bp, Homo sapien
aaagctaaatagttgcagcgaaata

SEQ ID NO: 3113481 - DNA, 25 bp, Homo sapien
taaagctaaatagttgcagcgaaat

SEQ ID NO: 3113482 - DNA, 25 bp, Homo sapien
ctaaatagttgcagcgaaataacat

SEQ ID NO: 3113483 - DNA, 25 bp, Homo sapien
tggccaactcctccttctagaaatt

SEQ ID NO: 3113484 - DNA, 25 bp, Homo sapien
atggccaactcctccttctagaaat

SEQ ID NO: 3113485 - DNA, 25 bp, Homo sapien
ttcaacatggccaactcctccttct

SEQ ID NO: 3113486 - DNA, 25 bp, Homo sapien
aacatggccaactcctccttctaga

SEQ ID NO: 3113487 - DNA, 25 bp, Homo sapien
catgacaaaaggatgaccaatgctc

SEQ ID NO: 3113488 - DNA, 25 bp, Homo sapien
gaggtcttccatgacaaaaggatga

SEQ ID NO: 3113489 - DNA, 25 bp, Homo sapien
cagaggtcttccatgacaaaaggat

SEQ ID NO: 3113490 - DNA, 25 bp, Homo sapien
tcttccatgacaaaaggatgaccaa

SEQ ID NO: 3113491 - DNA, 25 bp, Homo sapien
cccaggaaataacaagtactggcca

SEQ ID NO: 3113492 - DNA, 25 bp, Homo sapien
caagtactggccaagatatgaagct

SEQ ID NO: 3113493 - DNA, 25 bp, Homo sapien
gaagctatgggaactctcatgcact

SEQ ID NO: 3113494 - DNA, 25 bp, Homo sapien
cactgcagaggatggctaatattgt

SEQ ID NO: 3113495 - DNA, 25 bp, Homo sapien
tgtgagaactcactgcatgctaagc

SEQ ID NO: 3113496 - DNA, 25 bp, Homo sapien
taaactgtaagctgccagacgcaga

SEQ ID NO: 3113497 - DNA, 25 bp, Homo sapien
cataagctggaaacgggagcacacc

SEQ ID NO: 3113498 - DNA, 25 bp, Homo sapien
cagatgagtctgtaagtgcagagcc

SEQ ID NO: 3113499 - DNA, 25 bp, Homo sapien
ccagtaatttgaattacaggtatgc

SEQ ID NO: 3113500 - DNA, 25 bp, Homo sapien
ccccagtaatttgaattacaggtat

SEQ ID NO: 3113501 - DNA, 25 bp, Homo sapien
ctccccagtaatttgaattacaggt

SEQ ID NO: 3113502 - DNA, 25 bp, Homo sapien
tcaacctccccagtaatttgaatta

SEQ ID NO: 3113503 - DNA, 25 bp, Homo sapien
tggtaaatgtgcttccccaagttct

SEQ ID NO: 3113504 - DNA, 25 bp, Homo sapien
ctctaggtagatggcgtcagaactg

SEQ ID NO: 3113505 - DNA, 25 bp, Homo sapien
taatgattcaacttggacaccaacg

SEQ ID NO: 3113506 - DNA, 25 bp, Homo sapien
ccgaaaaggctgcagaccgctgctt

SEQ ID NO: 3113507 - DNA, 25 bp, Homo sapien
caggtaagactttacttgaaaagag

SEQ ID NO: 3113508 - DNA, 25 bp, Homo sapien
ctttacttgaaaagaggtttctgct

SEQ ID NO: 3113509 - DNA, 25 bp, Homo sapien
tgttctacatcccagggttacaggt

SEQ ID NO: 3113510 - DNA, 25 bp, Homo sapien
catcccagggttacaggtaagactt

SEQ ID NO: 3113511 - DNA, 25 bp, Homo sapien
agactcggaatccattttccatccc

SEQ ID NO: 3113512 - DNA, 25 bp, Homo sapien
tagactcggaatccattttccatcc

SEQ ID NO: 3113513 - DNA, 25 bp, Homo sapien
atagactcggaatccattttccatc

SEQ ID NO: 3113514 - DNA, 25 bp, Homo sapien
gttatagactcggaatccattttcc

SEQ ID NO: 3113515 - DNA, 25 bp, Homo sapien
gatcagtgacaaacgtgaaggacac

SEQ ID NO: 3113516 - DNA, 25 bp, Homo sapien
ggacacttctagaggaaagccacca

SEQ ID NO: 3113517 - DNA, 25 bp, Homo sapien
cccaggcttggaggacgatcagtga

SEQ ID NO: 3113518 - DNA, 25 bp, Homo sapien
ttctgtggcatccccatggcccagg

SEQ ID NO: 3113519 - DNA, 25 bp, Homo sapien
catgtaaagcctcgcagaagcctgt

SEQ ID NO: 3113520 - DNA, 25 bp, Homo sapien
tccaaagccaacatgtaaagcctcg

SEQ ID NO: 3113521 - DNA, 25 bp, Homo sapien
tgtctcggaataacggacattcctt

SEQ ID NO: 3113522 - DNA, 25 bp, Homo sapien
cagaagcctgtctcggaataacgga

SEQ ID NO: 3113523 - DNA, 25 bp, Homo sapien
cggctgggagcggtcacaacccggg

SEQ ID NO: 3113524 - DNA, 25 bp, Homo sapien
ctggtccggaccccggctcgggctg

SEQ ID NO: 3113525 - DNA, 25 bp, Homo sapien
ccggctgggagcggtcacaacccgg

SEQ ID NO: 3113526 - DNA, 25 bp, Homo sapien
cgtggtcctggttgaagccggcgta

SEQ ID NO: 3113527 - DNA, 25 bp, Homo sapien
cgtgagggttacacggcaggaggtt

SEQ ID NO: 3113528 - DNA, 25 bp, Homo sapien
gagcagcccgttgccgtgagggtta

SEQ ID NO: 3113529 - DNA, 25 bp, Homo sapien
ttgaagccggcgtagagcagcccgt

SEQ ID NO: 3113530 - DNA, 25 bp, Homo sapien
tatggagcgccgagcgcatctaacc

SEQ ID NO: 3113531 - DNA, 25 bp, Homo sapien
gatgtgcgtgtgtgctggacgtgcg

SEQ ID NO: 3113532 - DNA, 25 bp, Homo sapien
ccggaagtgccggacgtacgtgcgt

SEQ ID NO: 3113533 - DNA, 25 bp, Homo sapien
tctaaccgaagcgaggcgagacgag

SEQ ID NO: 3113534 - DNA, 25 bp, Homo sapien
tctcctctgtgcacacgtaccggta

SEQ ID NO: 3113535 - DNA, 25 bp, Homo sapien
gttctcctctgtgcacacgtaccgg

SEQ ID NO: 3113536 - DNA, 25 bp, Homo sapien
gggttctcctctgtgcacacgtacc

SEQ ID NO: 3113537 - DNA, 25 bp, Homo sapien
ctctgtgcacacgtaccggtacctg

SEQ ID NO: 3113538 - DNA, 25 bp, Homo sapien
gtggcccacacggcgatcttcctgt

SEQ ID NO: 3113539 - DNA, 25 bp, Homo sapien
gacctggccccacggacaaggccgc

SEQ ID NO: 3113540 - DNA, 25 bp, Homo sapien
ccacacggcgatcttcctgtcacct

SEQ ID NO: 3113541 - DNA, 25 bp, Homo sapien
ttggacctggccccacggacaaggc

SEQ ID NO: 3113542 - DNA, 25 bp, Homo sapien
tcggtgaacacctccaaagagctct

SEQ ID NO: 3113543 - DNA, 25 bp, Homo sapien
gagcgtaactcacttccttgtagga

SEQ ID NO: 3113544 - DNA, 25 bp, Homo sapien
gaggctgccgtaacaatcgccacaa

SEQ ID NO: 3113545 - DNA, 25 bp, Homo sapien
tgtagcactttctgccgtgagcgta

SEQ ID NO: 3113546 - DNA, 25 bp, Homo sapien
tacccttcaccatcagcgagctggg

SEQ ID NO: 3113547 - DNA, 25 bp, Homo sapien
cgtgggtttcttcaacgtggactct

SEQ ID NO: 3113548 - DNA, 25 bp, Homo sapien
catctcagtgtccttgtgtttgcag

SEQ ID NO: 3113549 - DNA, 25 bp, Homo sapien
cattatcagtagtcccgaggagaca

SEQ ID NO: 3113550 - DNA, 25 bp, Homo sapien
gcagagagaagggtgcacaggtctt

SEQ ID NO: 3113551 - DNA, 25 bp, Homo sapien
aagggtgcacaggtctttgcagcgt

SEQ ID NO: 3113552 - DNA, 25 bp, Homo sapien
gtctttgcagcgtgcctgcacgagg

SEQ ID NO: 3113553 - DNA, 25 bp, Homo sapien
cagcgtgcctgcacgaggctggcca

SEQ ID NO: 3113554 - DNA, 25 bp, Homo sapien
gaattcctgacagcccctcggagct

SEQ ID NO: 3113555 - DNA, 25 bp, Homo sapien
gccctggaggtctttgcggtcagcc

SEQ ID NO: 3113556 - DNA, 25 bp, Homo sapien
gaaacgttcaacagtgtgaccaggg

SEQ ID NO: 3113557 - DNA, 25 bp, Homo sapien
gctacatcttcatgcggaattcctg

SEQ ID NO: 3113558 - DNA, 25 bp, Homo sapien
cgatatgtgatgtctacaccaggca

SEQ ID NO: 3113559 - DNA, 25 bp, Homo sapien
ggcgacaacagttcaaggattcagc

SEQ ID NO: 3113560 - DNA, 25 bp, Homo sapien
tctgcacttctgttccggaaaagga

SEQ ID NO: 3113561 - DNA, 25 bp, Homo sapien
ggattcagccttgttgccagtgtcg

SEQ ID NO: 3113562 - DNA, 25 bp, Homo sapien
gatcagttgcacataacctctacat

SEQ ID NO: 3113563 - DNA, 25 bp, Homo sapien
aaagacccctctcgtaatatcagtg

SEQ ID NO: 3113564 - DNA, 25 bp, Homo sapien
tgacatgtcgaaactgtgctggctg

SEQ ID NO: 3113565 - DNA, 25 bp, Homo sapien
gtgactctaaattatcccgctgcca

SEQ ID NO: 3113566 - DNA, 25 bp, Homo sapien
gagtcgagcagagtactaattttcc

SEQ ID NO: 3113567 - DNA, 25 bp, Homo sapien
tcgagcagagtactaattttccctt

SEQ ID NO: 3113568 - DNA, 25 bp, Homo sapien
gtcgagcagagtactaattttccct

SEQ ID NO: 3113569 - DNA, 25 bp, Homo sapien
aagagtcgagcagagtactaatttt

SEQ ID NO: 3113570 - DNA, 25 bp, Homo sapien
tgtttccatcacacggaaggcgtcg

SEQ ID NO: 3113571 - DNA, 25 bp, Homo sapien
cattcgccgagaggaaccgggatct

SEQ ID NO: 3113572 - DNA, 25 bp, Homo sapien
cacgtagaaattcgaagtccgacgg

SEQ ID NO: 3113573 - DNA, 25 bp, Homo sapien
gatctgagatgcatccaccagctgc

SEQ ID NO: 3113574 - DNA, 25 bp, Homo sapien
ttaagaaattttgcagctgtttctg

SEQ ID NO: 3113575 - DNA, 25 bp, Homo sapien
taagaaattttgcagctgtttctgg

SEQ ID NO: 3113576 - DNA, 25 bp, Homo sapien
agctgtttctggtgcagtttttggg

SEQ ID NO: 3113577 - DNA, 25 bp, Homo sapien
tttgcagctgtttctggtgcagttt

SEQ ID NO: 3113578 - DNA, 25 bp, Homo sapien
cggaggctgctccttttgtgggtgg

SEQ ID NO: 3113579 - DNA, 25 bp, Homo sapien
ggctgctccttttgtgggtggagct

SEQ ID NO: 3113580 - DNA, 25 bp, Homo sapien
gaggctgctccttttgtgggtggag

SEQ ID NO: 3113581 - DNA, 25 bp, Homo sapien
tttgcggaggctgctccttttgtgg

SEQ ID NO: 3113582 - DNA, 25 bp, Homo sapien
cgttggccatcgagaaggacttgag

SEQ ID NO: 3113583 - DNA, 25 bp, Homo sapien
gccgttggccatcgagaaggacttg

SEQ ID NO: 3113584 - DNA, 25 bp, Homo sapien
ccgttggccatcgagaaggacttga

SEQ ID NO: 3113585 - DNA, 25 bp, Homo sapien
ctctgcccacgtacagatcccagga

SEQ ID NO: 3113586 - DNA, 25 bp, Homo sapien
catgagctttctgacaaagctgtag

SEQ ID NO: 3113587 - DNA, 25 bp, Homo sapien
atgagctttctgacaaagctgtagt

SEQ ID NO: 3113588 - DNA, 25 bp, Homo sapien
tgcccacgtacagatcccaggagct

SEQ ID NO: 3113589 - DNA, 25 bp, Homo sapien
gcagaggtggcccccggaatagccc

SEQ ID NO: 3113590 - DNA, 25 bp, Homo sapien
ggcagaggtggcccccggaatagcc

SEQ ID NO: 3113591 - DNA, 25 bp, Homo sapien
ttgctcggccgccagagccggtcca

SEQ ID NO: 3113592 - DNA, 25 bp, Homo sapien
ggtccatcccatgccgcagcagcac

SEQ ID NO: 3113593 - DNA, 25 bp, Homo sapien
gccagagccggtccatcccatgccg

SEQ ID NO: 3113594 - DNA, 25 bp, Homo sapien
tgctcggccgccagagccggtccat

SEQ ID NO: 3113595 - DNA, 25 bp, Homo sapien
gggcacctgccgcttgaacgccagg

SEQ ID NO: 3113596 - DNA, 25 bp, Homo sapien
tgttgtcgtcgtaatgtgggtgctc

SEQ ID NO: 3113597 - DNA, 25 bp, Homo sapien
gagcatgggttacttcagtgagatt

SEQ ID NO: 3113598 - DNA, 25 bp, Homo sapien
gaggaaccccccacgagttcatgtc

SEQ ID NO: 3113599 - DNA, 25 bp, Homo sapien
tgggtgctctgggtcgaggaacccc

SEQ ID NO: 3113600 - DNA, 25 bp, Homo sapien
aaagccctatccagtgttgtgccga

SEQ ID NO: 3113601 - DNA, 25 bp, Homo sapien
catacagtgggcttagtgtcgacca

SEQ ID NO: 3113602 - DNA, 25 bp, Homo sapien
ttgtggtcgtcggttctagcagccc

SEQ ID NO: 3113603 - DNA, 25 bp, Homo sapien
taaatagttacggtgcggccgcact

SEQ ID NO: 3113604 - DNA, 25 bp, Homo sapien
catcgatctccttaatccatcgatc

SEQ ID NO: 3113605 - DNA, 25 bp, Homo sapien
gatcaatgccgtcaaaagaccagcg

SEQ ID NO: 3113606 - DNA, 25 bp, Homo sapien
gtcaaaagaccagcggttcgcaatg

SEQ ID NO: 3113607 - DNA, 25 bp, Homo sapien
taatccatcgatcaatgccgtcaaa

SEQ ID NO: 3113608 - DNA, 25 bp, Homo sapien
agtaggagcggaatatggtacaaaa

SEQ ID NO: 3113609 - DNA, 25 bp, Homo sapien
gagtaggagcggaatatggtacaaa

SEQ ID NO: 3113610 - DNA, 25 bp, Homo sapien
ttggagaccattaagaagaaaccag

SEQ ID NO: 3113611 - DNA, 25 bp, Homo sapien
agatgttggagaccattaagaagaa

SEQ ID NO: 3113612 - DNA, 25 bp, Homo sapien
agagccacagcaagtgcaccacaca

SEQ ID NO: 3113613 - DNA, 25 bp, Homo sapien
gcagccaccacgccgccagcgtgag

SEQ ID NO: 3113614 - DNA, 25 bp, Homo sapien
caccacgccgccagcgtgagacccc

SEQ ID NO: 3113615 - DNA, 25 bp, Homo sapien
agtgcaccacacacccgccagtcag

SEQ ID NO: 3113616 - DNA, 25 bp, Homo sapien
ggtgggacgcggcatggttttgctg

SEQ ID NO: 3113617 - DNA, 25 bp, Homo sapien
gcatggttttgctgtttgtgtcaca

SEQ ID NO: 3113618 - DNA, 25 bp, Homo sapien
gatgagcggtgggacgcggcatggt

SEQ ID NO: 3113619 - DNA, 25 bp, Homo sapien
gacgcggcatggttttgctgtttgt

SEQ ID NO: 3113620 - DNA, 25 bp, Homo sapien
gaccaccctcagcacgagagagaag

SEQ ID NO: 3113621 - DNA, 25 bp, Homo sapien
gggaccagcgacactggccattgcc

SEQ ID NO: 3113622 - DNA, 25 bp, Homo sapien
cctcagcacgagagagaagggcctg

SEQ ID NO: 3113623 - DNA, 25 bp, Homo sapien
caaagcctaggagtgagtgcctcat

SEQ ID NO: 3113624 - DNA, 25 bp, Homo sapien
cctactctggatgacgggggcccag

SEQ ID NO: 3113625 - DNA, 25 bp, Homo sapien
ggccacaggttctgatcccaaaagc

SEQ ID NO: 3113626 - DNA, 25 bp, Homo sapien
gctatgtccgttctggggtccccta

SEQ ID NO: 3113627 - DNA, 25 bp, Homo sapien
cgctgcatcggtcccctcttggcat

SEQ ID NO: 3113628 - DNA, 25 bp, Homo sapien
gctgtgccgacggtggtggtgggag

SEQ ID NO: 3113629 - DNA, 25 bp, Homo sapien
gatgggtgctccccggggcactgtg

SEQ ID NO: 3113630 - DNA, 25 bp, Homo sapien
ctgtgccgatggtggtgggggatgg

SEQ ID NO: 3113631 - DNA, 25 bp, Homo sapien
tgggggatgggtgctccccggggca

SEQ ID NO: 3113632 - DNA, 25 bp, Homo sapien
tggtggtgggggatgggtgctcccc

SEQ ID NO: 3113633 - DNA, 25 bp, Homo sapien
ctgcagcttcacccgccgcccgtcc

SEQ ID NO: 3113634 - DNA, 25 bp, Homo sapien
gctgcagcttcacccgccgcccgtc

SEQ ID NO: 3113635 - DNA, 25 bp, Homo sapien
tgcagcttcacccgccgcccgtcca

SEQ ID NO: 3113636 - DNA, 25 bp, Homo sapien
ttagagacggcttaggcctgaggct

SEQ ID NO: 3113637 - DNA, 25 bp, Homo sapien
tccaggtttacaaggcaggcggatg

SEQ ID NO: 3113638 - DNA, 25 bp, Homo sapien
gctgcagctaacaggacgctggaag

SEQ ID NO: 3113639 - DNA, 25 bp, Homo sapien
gaagtctcacgttcagggaagaaaa

SEQ ID NO: 3113640 - DNA, 25 bp, Homo sapien
tgttgagtgctttgacaagtatggc

SEQ ID NO: 3113641 - DNA, 25 bp, Homo sapien
tgatcggatgttgagtgctttgaca

SEQ ID NO: 3113642 - DNA, 25 bp, Homo sapien
gagtgctttgacaagtatggctgaa

SEQ ID NO: 3113643 - DNA, 25 bp, Homo sapien
gacaagtatggctgaatagggaatc

SEQ ID NO: 3113644 - DNA, 25 bp, Homo sapien
gaccgtcgtggagcacacggcctct

SEQ ID NO: 3113645 - DNA, 25 bp, Homo sapien
aagcccacgatgtagccagtgagtg

SEQ ID NO: 3113646 - DNA, 25 bp, Homo sapien
gaagcccacgatgtagccagtgagt

SEQ ID NO: 3113647 - DNA, 25 bp, Homo sapien
ggagaccgtcgtggagcacacggcc

SEQ ID NO: 3113648 - DNA, 25 bp, Homo sapien
tgacttagaaagtatcctcttgacc

SEQ ID NO: 3113649 - DNA, 25 bp, Homo sapien
tgtctttccggagattaatccactg

SEQ ID NO: 3113650 - DNA, 25 bp, Homo sapien
gattaatccactgcctgagcttggc

SEQ ID NO: 3113651 - DNA, 25 bp, Homo sapien
aggctcatatttgtctttccggaga

SEQ ID NO: 3113652 - DNA, 25 bp, Homo sapien
ttgtgactatcaacactggacaaac

SEQ ID NO: 3113653 - DNA, 25 bp, Homo sapien
agaaaacgcaacaacctggccaggc

SEQ ID NO: 3113654 - DNA, 25 bp, Homo sapien
gactatcaacactggacaaactaga

SEQ ID NO: 3113655 - DNA, 25 bp, Homo sapien
aaaacgcaacaacctggccaggcgc

SEQ ID NO: 3113656 - DNA, 25 bp, Homo sapien
aacgttcgtatggtttggagttgct

SEQ ID NO: 3113657 - DNA, 25 bp, Homo sapien
tcactctggcatcgcaggcaacgtt

SEQ ID NO: 3113658 - DNA, 25 bp, Homo sapien
ctgcgtcactctggcatcgcaggca

SEQ ID NO: 3113659 - DNA, 25 bp, Homo sapien
gcatcgcaggcaacgttcgtatggt

SEQ ID NO: 3113660 - DNA, 25 bp, Homo sapien
gcatcgttcaggcaccagaatccag

SEQ ID NO: 3113661 - DNA, 25 bp, Homo sapien
ctgggaaaagctacaaaggatgcat

SEQ ID NO: 3113662 - DNA, 25 bp, Homo sapien
gagataatcctgacggcatcgttca

SEQ ID NO: 3113663 - DNA, 25 bp, Homo sapien
atgtctggtagaaaacccacaaagc

SEQ ID NO: 3113664 - DNA, 25 bp, Homo sapien
tattcaccatcatgaccaaaactgg

SEQ ID NO: 3113665 - DNA, 25 bp, Homo sapien
atcgaactcagtgataatgatttca

SEQ ID NO: 3113666 - DNA, 25 bp, Homo sapien
ttcccattagcacagcccggatgca

SEQ ID NO: 3113667 - DNA, 25 bp, Homo sapien
ccacatcccggaatttcactaacaa

SEQ ID NO: 3113668 - DNA, 25 bp, Homo sapien
gaagttctagatcaaggtccaggca

SEQ ID NO: 3113669 - DNA, 25 bp, Homo sapien
gaatctattctgctcccgtggatgg

SEQ ID NO: 3113670 - DNA, 25 bp, Homo sapien
aacattcactctcttgcaggcgggt

SEQ ID NO: 3113671 - DNA, 25 bp, Homo sapien
cagtgccctccatctgctacgtggg

SEQ ID NO: 3113672 - DNA, 25 bp, Homo sapien
agcccctggtactctgagtctcctg

SEQ ID NO: 3113673 - DNA, 25 bp, Homo sapien
ggcctgggatcaaatccagtcccaa

SEQ ID NO: 3113674 - DNA, 25 bp, Homo sapien
tctgagtctcctggtacgggacggt

SEQ ID NO: 3113675 - DNA, 25 bp, Homo sapien
ctggtaaagcacagacgctgcagcc

SEQ ID NO: 3113676 - DNA, 25 bp, Homo sapien
atgaatggggaaccgaccgcctcgt

SEQ ID NO: 3113677 - DNA, 25 bp, Homo sapien
cgaccgcctcgtgggacgcactcac

SEQ ID NO: 3113678 - DNA, 25 bp, Homo sapien
ccgaccgcctcgtgggacgcactca

SEQ ID NO: 3113679 - DNA, 25 bp, Homo sapien
ctatgaatggggaaccgaccgcctc

SEQ ID NO: 3113680 - DNA, 25 bp, Homo sapien
gctgccagcagtccacgtcagctca

SEQ ID NO: 3113681 - DNA, 25 bp, Homo sapien
gcagtccacgtcagctcagcaaagg

SEQ ID NO: 3113682 - DNA, 25 bp, Homo sapien
agcaaaggctccaactcctccccaa

SEQ ID NO: 3113683 - DNA, 25 bp, Homo sapien
acctgctgccagcagtccacgtcag

SEQ ID NO: 3113684 - DNA, 25 bp, Homo sapien
cacagtgagggcacccctcaccttc

SEQ ID NO: 3113685 - DNA, 25 bp, Homo sapien
ggtcacacacagtgagggcacccct

SEQ ID NO: 3113686 - DNA, 25 bp, Homo sapien
ccacacacagtgagggcacccctca

SEQ ID NO: 3113687 - DNA, 25 bp, Homo sapien
ttcaacagcatctcccccacacaca

SEQ ID NO: 3113688 - DNA, 25 bp, Homo sapien
agcatctcctcacccacagagtgag

SEQ ID NO: 3113689 - DNA, 25 bp, Homo sapien
ccacacagggcacccccgaccttca

SEQ ID NO: 3113690 - DNA, 25 bp, Homo sapien
acacagtgagggcacccctcacctt

SEQ ID NO: 3113691 - DNA, 25 bp, Homo sapien
acagagtgagggcacccctcacctt

SEQ ID NO: 3113692 - DNA, 25 bp, Homo sapien
tgtcttaggacactaaactcccaaa

SEQ ID NO: 3113693 - DNA, 25 bp, Homo sapien
ctgcagaggccacgccaaccctgtg

SEQ ID NO: 3113694 - DNA, 25 bp, Homo sapien
tagcctgaaggacaccacaagcctt

SEQ ID NO: 3113695 - DNA, 25 bp, Homo sapien
caccttctccggtagcctgaaggac

SEQ ID NO: 3113696 - DNA, 25 bp, Homo sapien
gcctccaccaagcacagggcagggg

SEQ ID NO: 3113697 - DNA, 25 bp, Homo sapien
cactgagctgtcaccaccacaggac

SEQ ID NO: 3113698 - DNA, 25 bp, Homo sapien
ctgcaggtcaccgagcacagggcag

SEQ ID NO: 3113699 - DNA, 25 bp, Homo sapien
gcagcctccaccaagcacagggcag

SEQ ID NO: 3113700 - DNA, 25 bp, Homo sapien
aacacgaaggaacacggcccagaag

SEQ ID NO: 3113701 - DNA, 25 bp, Homo sapien
cacgaaggaacacggcccagaagca

SEQ ID NO: 3113702 - DNA, 25 bp, Homo sapien
aggaacacggcccagaagcagtgtc

SEQ ID NO: 3113703 - DNA, 25 bp, Homo sapien
aacacggcccagaagcagtgtcctg

SEQ ID NO: 3113704 - DNA, 25 bp, Homo sapien
ctgcggggtgaacgcagtcgtggga

SEQ ID NO: 3113705 - DNA, 25 bp, Homo sapien
tcgtgggaggctcacgaagagacat

SEQ ID NO: 3113706 - DNA, 25 bp, Homo sapien
gtgaacgcagtcgtgggaggctcac

SEQ ID NO: 3113707 - DNA, 25 bp, Homo sapien
aacgcagtcgtgggaggctcacgaa

SEQ ID NO: 3113708 - DNA, 25 bp, Homo sapien
tcctccacgttcctcccgtccagtg

SEQ ID NO: 3113709 - DNA, 25 bp, Homo sapien
caagatctgttacaatggcctcgtt

SEQ ID NO: 3113710 - DNA, 25 bp, Homo sapien
gttacaatggcctcgttgttctcca

SEQ ID NO: 3113711 - DNA, 25 bp, Homo sapien
aaccccaagatctgttacaatggcc

SEQ ID NO: 3113712 - DNA, 25 bp, Homo sapien
tgagaaaaccccaagatctgttaca

SEQ ID NO: 3113713 - DNA, 25 bp, Homo sapien
caacactgtcaaccgtctgctcccc

SEQ ID NO: 3113714 - DNA, 25 bp, Homo sapien
tgtcaaccgtctgctcccccaaaac

SEQ ID NO: 3113715 - DNA, 25 bp, Homo sapien
ctgtcaaccgtctgctcccccaaaa

SEQ ID NO: 3113716 - DNA, 25 bp, Homo sapien
actcaacactgtcaaccgtctgctc

SEQ ID NO: 3113717 - DNA, 25 bp, Homo sapien
tgtagctctggtagggttcatccct

SEQ ID NO: 3113718 - DNA, 25 bp, Homo sapien
attcctgtagctctggtagggttca

SEQ ID NO: 3113719 - DNA, 25 bp, Homo sapien
gttgttgggtgctttattcctgtag

SEQ ID NO: 3113720 - DNA, 25 bp, Homo sapien
ttaaagcgccatattcgtctgggcg

SEQ ID NO: 3113721 - DNA, 25 bp, Homo sapien
ccgagggcacagtgcagacaaagcc

SEQ ID NO: 3113722 - DNA, 25 bp, Homo sapien
ctgagcccagaccccgagggcacag

SEQ ID NO: 3113723 - DNA, 25 bp, Homo sapien
accccgagggcacagtgcagacaaa

SEQ ID NO: 3113724 - DNA, 25 bp, Homo sapien
agaccccgagggcacagtgcagaca

SEQ ID NO: 3113725 - DNA, 25 bp, Homo sapien
gtcctccaggcgctcaatctccagc

SEQ ID NO: 3113726 - DNA, 25 bp, Homo sapien
ctgtcctccaggcgctcaatctcca

SEQ ID NO: 3113727 - DNA, 25 bp, Homo sapien
tgtcctccaggcgctcaatctccag

SEQ ID NO: 3113728 - DNA, 25 bp, Homo sapien
tcctccaggcgctcaatctccagcc

SEQ ID NO: 3113729 - DNA, 25 bp, Homo sapien
ccctgtcctccaggcgctcaatctc

SEQ ID NO: 3113730 - DNA, 25 bp, Homo sapien
gccctgtcctccaggcgctcaatct

SEQ ID NO: 3113731 - DNA, 25 bp, Homo sapien
agccctgtcctccaggcgctcaatc

SEQ ID NO: 3113732 - DNA, 25 bp, Homo sapien
cctccaggcgctcaatctccagccc

SEQ ID NO: 3113733 - DNA, 25 bp, Homo sapien
aatctccagccctgtcctccaggcg

SEQ ID NO: 3113734 - DNA, 25 bp, Homo sapien
tcaatctccagccctgtcctccagg

SEQ ID NO: 3113735 - DNA, 25 bp, Homo sapien
atctccagccctgtcctccaggcgc

SEQ ID NO: 3113736 - DNA, 25 bp, Homo sapien
caatctccagccctgtcctccaggc

SEQ ID NO: 3113737 - DNA, 25 bp, Homo sapien
tcggactttgccacagcgacatccg

SEQ ID NO: 3113738 - DNA, 25 bp, Homo sapien
ggccctcggactttgccacagcgac

SEQ ID NO: 3113739 - DNA, 25 bp, Homo sapien
tttgccacagcgacatccgaactat

SEQ ID NO: 3113740 - DNA, 25 bp, Homo sapien
ggactttgccacagcgacatccgaa

SEQ ID NO: 3113741 - DNA, 25 bp, Homo sapien
ccgggtccccacagcagcggcccca

SEQ ID NO: 3113742 - DNA, 25 bp, Homo sapien
cgggctcccgctgcgcgcagactgc

SEQ ID NO: 3113743 - DNA, 25 bp, Homo sapien
gcgcagactgcggagaaggatggag

SEQ ID NO: 3113744 - DNA, 25 bp, Homo sapien
agaaggatggagactgcgccgcggg

SEQ ID NO: 3113745 - DNA, 25 bp, Homo sapien
gagcagaaagtcgtaggcccggacc

SEQ ID NO: 3113746 - DNA, 25 bp, Homo sapien
agcagaaagtcgtaggcccggaccg

SEQ ID NO: 3113747 - DNA, 25 bp, Homo sapien
tgagcagaaagtcgtaggcccggac

SEQ ID NO: 3113748 - DNA, 25 bp, Homo sapien
gctgagcgcagaggcggcggcccgg

SEQ ID NO: 3113749 - DNA, 25 bp, Homo sapien
ccggccccgagaggcgccgcgcggg

SEQ ID NO: 3113750 - DNA, 25 bp, Homo sapien
cgggccccgagtccttgctcgcctc

SEQ ID NO: 3113751 - DNA, 25 bp, Homo sapien
gcctgcggggctgagcgcagaggcg

SEQ ID NO: 3113752 - DNA, 25 bp, Homo sapien
ccgctgagctcatggccctgttgtg

SEQ ID NO: 3113753 - DNA, 25 bp, Homo sapien
cgttttgcacgtgcgtggcccttct

SEQ ID NO: 3113754 - DNA, 25 bp, Homo sapien
ctgttttgctgaggacaccagacga

SEQ ID NO: 3113755 - DNA, 25 bp, Homo sapien
tgtgagggcacagcccacgtctgct

SEQ ID NO: 3113756 - DNA, 25 bp, Homo sapien
gggctgaccacagggcaatgctgcc

SEQ ID NO: 3113757 - DNA, 25 bp, Homo sapien
gaaggtttgtagtgaacttgtagaa

SEQ ID NO: 3113758 - DNA, 25 bp, Homo sapien
tccacactgactgtgcagccctgga

SEQ ID NO: 3113759 - DNA, 25 bp, Homo sapien
ccctggaaggtttgtagtgaacttg

SEQ ID NO: 3113760 - DNA, 25 bp, Homo sapien
cagcctggcgtctgacttagcaatt

SEQ ID NO: 3113761 - DNA, 25 bp, Homo sapien
caccggctgcagaatcggggctttc

SEQ ID NO: 3113762 - DNA, 25 bp, Homo sapien
gacttagcaattctgtgtcactgct

SEQ ID NO: 3113763 - DNA, 25 bp, Homo sapien
ctttcaggaacgtctccagccagct

SEQ ID NO: 3113764 - DNA, 25 bp, Homo sapien
gtgtctgccgtagcccagcatgcag

SEQ ID NO: 3113765 - DNA, 25 bp, Homo sapien
tgcaaggcgtgttcccaaggttggg

SEQ ID NO: 3113766 - DNA, 25 bp, Homo sapien
ggctcccgccggcatctcctgggca

SEQ ID NO: 3113767 - DNA, 25 bp, Homo sapien
gcatgcagtggagaggatggccacg

SEQ ID NO: 3113768 - DNA, 25 bp, Homo sapien
agggtagcgctgatccctgggcagg

SEQ ID NO: 3113769 - DNA, 25 bp, Homo sapien
ggggagggtagcgctgatccctggg

SEQ ID NO: 3113770 - DNA, 25 bp, Homo sapien
ggagggtagcgctgatccctgggca

SEQ ID NO: 3113771 - DNA, 25 bp, Homo sapien
ctggggagggtagcgctgatccctg

SEQ ID NO: 3113772 - DNA, 25 bp, Homo sapien
tgtgggcgtcgcatgtctatacaga

SEQ ID NO: 3113773 - DNA, 25 bp, Homo sapien
gccatctgtgggcgtcgcgtgccca

SEQ ID NO: 3113774 - DNA, 25 bp, Homo sapien
cacgcagtgactgctccagacgggc

SEQ ID NO: 3113775 - DNA, 25 bp, Homo sapien
cacgcagagactgctccggactggc

SEQ ID NO: 3113776 - DNA, 25 bp, Homo sapien
tgtgggtgccacatgcagagtgacc

SEQ ID NO: 3113777 - DNA, 25 bp, Homo sapien
ggtgccacatgcagagtgacccagg

SEQ ID NO: 3113778 - DNA, 25 bp, Homo sapien
tctatgtagtgactgctccagacag

SEQ ID NO: 3113779 - DNA, 25 bp, Homo sapien
caggcagggactctgtgtgcacatg

SEQ ID NO: 3113780 - DNA, 25 bp, Homo sapien
ggactccgcggaaatgatggccttg

SEQ ID NO: 3113781 - DNA, 25 bp, Homo sapien
cagtcggcaattccatgtagacagg

SEQ ID NO: 3113782 - DNA, 25 bp, Homo sapien
gatggccttgagagagccctcatgt

SEQ ID NO: 3113783 - DNA, 25 bp, Homo sapien
taaataaagcatatcccggttacaa

SEQ ID NO: 3113784 - DNA, 25 bp, Homo sapien
taacggcagggccactgttagctgt

SEQ ID NO: 3113785 - DNA, 25 bp, Homo sapien
gcgtttgcaattacggaggccgaga

SEQ ID NO: 3113786 - DNA, 25 bp, Homo sapien
tattaactagggttgcagtccgtgg

SEQ ID NO: 3113787 - DNA, 25 bp, Homo sapien
gatatagacgtagatccaggacagg

SEQ ID NO: 3113788 - DNA, 25 bp, Homo sapien
tattttcttggaagcgtccttcaga

SEQ ID NO: 3113789 - DNA, 25 bp, Homo sapien
tctttgcgtatttaggatatgagtg

SEQ ID NO: 3113790 - DNA, 25 bp, Homo sapien
tgagtgttttaccagatatatgatt

SEQ ID NO: 3113791 - DNA, 25 bp, Homo sapien
tatatgatttgcgaatagtgtctcc

SEQ ID NO: 3113792 - DNA, 25 bp, Homo sapien
gatctttgctaacacagatgtttag

SEQ ID NO: 3113793 - DNA, 25 bp, Homo sapien
tttctggttggttaatgtagcagct

SEQ ID NO: 3113794 - DNA, 25 bp, Homo sapien
cctggcctcttgcttactttaggtt

SEQ ID NO: 3113795 - DNA, 25 bp, Homo sapien
cagctgaggtcattactgtgagatc

SEQ ID NO: 3113796 - DNA, 25 bp, Homo sapien
gaatggtccctctagggtttaggca

SEQ ID NO: 3113797 - DNA, 25 bp, Homo sapien
tggcaggatgactggccgacctttt

SEQ ID NO: 3113798 - DNA, 25 bp, Homo sapien
gctccgaattgcaacagtggcctct

SEQ ID NO: 3113799 - DNA, 25 bp, Homo sapien
ggtttaggcagcacttggctccgaa

SEQ ID NO: 3113800 - DNA, 25 bp, Homo sapien
cattggtccatggatcctcagggaa

SEQ ID NO: 3113801 - DNA, 25 bp, Homo sapien
aggactcaggtctcggacgtaccca

SEQ ID NO: 3113802 - DNA, 25 bp, Homo sapien
tactgatgaaatagaggacctcctc

SEQ ID NO: 3113803 - DNA, 25 bp, Homo sapien
tcattgctatcgtggaggtcagggc

SEQ ID NO: 3113804 - DNA, 25 bp, Homo sapien
ctcagaactattcagagatttgccc

SEQ ID NO: 3113805 - DNA, 25 bp, Homo sapien
gcacctcagaactattcagagattt

SEQ ID NO: 3113806 - DNA, 25 bp, Homo sapien
ttagggcagagcacccaggcggttt

SEQ ID NO: 3113807 - DNA, 25 bp, Homo sapien
gcagcagcacctcagaactattcag

SEQ ID NO: 3113808 - DNA, 25 bp, Homo sapien
tcagcaagagtgagcaattgtctga

SEQ ID NO: 3113809 - DNA, 25 bp, Homo sapien
caagagtgagcaattgtctgacgca

SEQ ID NO: 3113810 - DNA, 25 bp, Homo sapien
tgagcaattgtctgacgcagccggc

SEQ ID NO: 3113811 - DNA, 25 bp, Homo sapien
agtgagcaattgtctgacgcagccg

SEQ ID NO: 3113812 - DNA, 25 bp, Homo sapien
ggcttcattgtcatccacctgttca

SEQ ID NO: 3113813 - DNA, 25 bp, Homo sapien
tcctttgatgcacttggcttcattg

SEQ ID NO: 3113814 - DNA, 25 bp, Homo sapien
gtttcctttgatgcacttggcttca

SEQ ID NO: 3113815 - DNA, 25 bp, Homo sapien
ttcattgtcatccacctgttcatta

SEQ ID NO: 3113816 - DNA, 25 bp, Homo sapien
ccaggtcacacctgttgtaccatca

SEQ ID NO: 3113817 - DNA, 25 bp, Homo sapien
gatttctgtccttggttctcgagcc

SEQ ID NO: 3113818 - DNA, 25 bp, Homo sapien
gacccgttgggtacacgtgtgacac

SEQ ID NO: 3113819 - DNA, 25 bp, Homo sapien
cgtgtgacacttcagaacccgcaag

SEQ ID NO: 3113820 - DNA, 25 bp, Homo sapien
ggtgtctttgcttggctcgccggcc

SEQ ID NO: 3113821 - DNA, 25 bp, Homo sapien
cgtcctcatgcttgtttctgccctg

SEQ ID NO: 3113822 - DNA, 25 bp, Homo sapien
agcatatgtcagcagcgccgtccgg

SEQ ID NO: 3113823 - DNA, 25 bp, Homo sapien
tgggtaaagcgtggcctcggaagct

SEQ ID NO: 3113824 - DNA, 25 bp, Homo sapien
gtggttcacttttgcgagcttttgc

SEQ ID NO: 3113825 - DNA, 25 bp, Homo sapien
tgtggtggttcacttttgcgagctt

SEQ ID NO: 3113826 - DNA, 25 bp, Homo sapien
ggccttggaaggtgcgtgggctcgc

SEQ ID NO: 3113827 - DNA, 25 bp, Homo sapien
cttggaaggtgcgtgggctcgctgc

SEQ ID NO: 3113828 - DNA, 25 bp, Homo sapien
gatgtccctcgctttgatttttgca

SEQ ID NO: 3113829 - DNA, 25 bp, Homo sapien
gagcctcgagcgtaccagagttcct

SEQ ID NO: 3113830 - DNA, 25 bp, Homo sapien
gcctccagtagtggtgtggtgggaa

SEQ ID NO: 3113831 - DNA, 25 bp, Homo sapien
gcaaatgcactggacgttgtggttt

SEQ ID NO: 3113832 - DNA, 25 bp, Homo sapien
cacggatgcgattggttgcttccca

SEQ ID NO: 3113833 - DNA, 25 bp, Homo sapien
tgcgattggttgcttcccaagatac

SEQ ID NO: 3113834 - DNA, 25 bp, Homo sapien
ggcacggatgcgattggttgcttcc

SEQ ID NO: 3113835 - DNA, 25 bp, Homo sapien
cggatgcgattggttgcttcccaag

SEQ ID NO: 3113836 - DNA, 25 bp, Homo sapien
ggaacagactcgctctcctcatctg

SEQ ID NO: 3113837 - DNA, 25 bp, Homo sapien
gtcggagcaggactcgggatggcag

SEQ ID NO: 3113838 - DNA, 25 bp, Homo sapien
agaaaggggaacagactcgctctcc

SEQ ID NO: 3113839 - DNA, 25 bp, Homo sapien
gcaggactcgggatggcagaaaggg

SEQ ID NO: 3113840 - DNA, 25 bp, Homo sapien
caggtgatacggtggtgctctttgc

SEQ ID NO: 3113841 - DNA, 25 bp, Homo sapien
gcaggtgatacggtggtgctctttg

SEQ ID NO: 3113842 - DNA, 25 bp, Homo sapien
tgcaggtgatacggtggtgctcttt

SEQ ID NO: 3113843 - DNA, 25 bp, Homo sapien
ctgcaggtgatacggtggtgctctt

SEQ ID NO: 3113844 - DNA, 25 bp, Homo sapien
cagtgacagccgcactcttgcgtgg

SEQ ID NO: 3113845 - DNA, 25 bp, Homo sapien
gaacaacgtactccacagctggtgg

SEQ ID NO: 3113846 - DNA, 25 bp, Homo sapien
gatcgattctgtggcctcgcagggt

SEQ ID NO: 3113847 - DNA, 25 bp, Homo sapien
cagccgctcgcaggttcatttgttg

SEQ ID NO: 3113848 - DNA, 25 bp, Homo sapien
cggcaggggcccttgactgaagctg

SEQ ID NO: 3113849 - DNA, 25 bp, Homo sapien
ctctgccgagaagaccacgtggcag

SEQ ID NO: 3113850 - DNA, 25 bp, Homo sapien
caggggcccttgactgaagctggct

SEQ ID NO: 3113851 - DNA, 25 bp, Homo sapien
ctgccgagaagaccacgtggcaggt

SEQ ID NO: 3113852 - DNA, 25 bp, Homo sapien
gtctggcaaactctgttccccactg

SEQ ID NO: 3113853 - DNA, 25 bp, Homo sapien
ggtgagggacccttgattgtccgtc

SEQ ID NO: 3113854 - DNA, 25 bp, Homo sapien
cagttggaagcctaccaaggtggtg

SEQ ID NO: 3113855 - DNA, 25 bp, Homo sapien
tctgttggttgtggcagttggaagc

SEQ ID NO: 3113856 - DNA, 25 bp, Homo sapien
agtgtttttctccacgcagaggttt

SEQ ID NO: 3113857 - DNA, 25 bp, Homo sapien
gtgtttttctccacgcagaggttta

SEQ ID NO: 3113858 - DNA, 25 bp, Homo sapien
ttttctccacgcagaggtttaccat

SEQ ID NO: 3113859 - DNA, 25 bp, Homo sapien
tgtttttctccacgcagaggtttac

SEQ ID NO: 3113860 - DNA, 25 bp, Homo sapien
ctgtgtgtacttccatacatgtctc

SEQ ID NO: 3113861 - DNA, 25 bp, Homo sapien
ggtggggctctttatgtcctcacca

SEQ ID NO: 3113862 - DNA, 25 bp, Homo sapien
tttatgtcctcaccacacccgagaa

SEQ ID NO: 3113863 - DNA, 25 bp, Homo sapien
agaacgcgagcagccgttgccaggc

SEQ ID NO: 3113864 - DNA, 25 bp, Homo sapien
gacacaggtggtgcagtcagaagat

SEQ ID NO: 3113865 - DNA, 25 bp, Homo sapien
gcgctgagtccagttcttgtttgca

SEQ ID NO: 3113866 - DNA, 25 bp, Homo sapien
tcctcaggtgcctcgatggctgcag

SEQ ID NO: 3113867 - DNA, 25 bp, Homo sapien
agagcaaccagaccctgctgcggaa

SEQ ID NO: 3113868 - DNA, 25 bp, Homo sapien
gcagcatggaggtaggcaccatgag

SEQ ID NO: 3113869 - DNA, 25 bp, Homo sapien
tggaggtaggcaccatgagggcggt

SEQ ID NO: 3113870 - DNA, 25 bp, Homo sapien
catggaggtaggcaccatgagggcg

SEQ ID NO: 3113871 - DNA, 25 bp, Homo sapien
gaggtaggcaccatgagggcggtgc

SEQ ID NO: 3113872 - DNA, 25 bp, Homo sapien
aagcagcctgaggtcattgtctttg

SEQ ID NO: 3113873 - DNA, 25 bp, Homo sapien
ttgtggtgccgtctggtctttgtga

SEQ ID NO: 3113874 - DNA, 25 bp, Homo sapien
ggtcgggagggcatgtgtagaagca

SEQ ID NO: 3113875 - DNA, 25 bp, Homo sapien
tgcgcgcttgcgtgaggagaatggc

SEQ ID NO: 3113876 - DNA, 25 bp, Homo sapien
ctggggtgtgcctgctcgtggggca

SEQ ID NO: 3113877 - DNA, 25 bp, Homo sapien
tggggtgtgcctgctcgtggggcat

SEQ ID NO: 3113878 - DNA, 25 bp, Homo sapien
gcaggatctgtaggaactggtgacc

SEQ ID NO: 3113879 - DNA, 25 bp, Homo sapien
cattcgggaggcaggatctgtagga

SEQ ID NO: 3113880 - DNA, 25 bp, Homo sapien
aactggtgaccggtgagacgcagca

SEQ ID NO: 3113881 - DNA, 25 bp, Homo sapien
tgagacgcagcacctggtgatgaag

SEQ ID NO: 3113882 - DNA, 25 bp, Homo sapien
caggttctcccttcttatccggtct

SEQ ID NO: 3113883 - DNA, 25 bp, Homo sapien
tggcagtttgtgctgatggcactgc

SEQ ID NO: 3113884 - DNA, 25 bp, Homo sapien
gcagtttgtgctgatggcactgcct

SEQ ID NO: 3113885 - DNA, 25 bp, Homo sapien
agtttgtgctgatggcactgcctcc

SEQ ID NO: 3113886 - DNA, 25 bp, Homo sapien
ggtctcctgctgcacagagacagag

SEQ ID NO: 3113887 - DNA, 25 bp, Homo sapien
tccactgccctgttctcctcctgtg

SEQ ID NO: 3113888 - DNA, 25 bp, Homo sapien
acagagccatcagcggagcccctca

SEQ ID NO: 3113889 - DNA, 25 bp, Homo sapien
cttgcaggggtctccatccactgcc

SEQ ID NO: 3113890 - DNA, 25 bp, Homo sapien
tgccccttccccgtgtccgcagcct

SEQ ID NO: 3113891 - DNA, 25 bp, Homo sapien
agccctccctggttgcgtggtaggc

SEQ ID NO: 3113892 - DNA, 25 bp, Homo sapien
ggtaggcgcccgcatctgtgctggg

SEQ ID NO: 3113893 - DNA, 25 bp, Homo sapien
ctgccccaggttcattcccgtctcc

SEQ ID NO: 3113894 - DNA, 25 bp, Homo sapien
ctgctggtcgggctgaaggacaagg

SEQ ID NO: 3113895 - DNA, 25 bp, Homo sapien
caaggacacggtcgtgcggtggtct

SEQ ID NO: 3113896 - DNA, 25 bp, Homo sapien
cacggtcgtgcggtggtctgcagcc

SEQ ID NO: 3113897 - DNA, 25 bp, Homo sapien
ctgaaggacaaggacacggtcgtgc

SEQ ID NO: 3113898 - DNA, 25 bp, Homo sapien
ggagtcgacatgcaccctgcacccc

SEQ ID NO: 3113899 - DNA, 25 bp, Homo sapien
tgtgggagtcgacatgcaccctgca

SEQ ID NO: 3113900 - DNA, 25 bp, Homo sapien
tgggagtcgacatgcaccctgcacc

SEQ ID NO: 3113901 - DNA, 25 bp, Homo sapien
ctgtgggagtcgacatgcaccctgc

SEQ ID NO: 3113902 - DNA, 25 bp, Homo sapien
cagcgatacacgtgaagaagatgct

SEQ ID NO: 3113903 - DNA, 25 bp, Homo sapien
ggaggagccggtggccctgtgggct

SEQ ID NO: 3113904 - DNA, 25 bp, Homo sapien
ccttgaacacaacaggtggagccct

SEQ ID NO: 3113905 - DNA, 25 bp, Homo sapien
tgtgcagggacagcgatacacgtga

SEQ ID NO: 3113906 - DNA, 25 bp, Homo sapien
caggtgcgggggcagtaggtgttga

SEQ ID NO: 3113907 - DNA, 25 bp, Homo sapien
ggtgcgggggcagtaggtgttgagg

SEQ ID NO: 3113908 - DNA, 25 bp, Homo sapien
tgcgggggcagtaggtgttgaggtg

SEQ ID NO: 3113909 - DNA, 25 bp, Homo sapien
cgggggcagtaggtgttgaggtggg

SEQ ID NO: 3113910 - DNA, 25 bp, Homo sapien
ttccctgggacgtgtggtaagctgc

SEQ ID NO: 3113911 - DNA, 25 bp, Homo sapien
ccacagccctgcatggtggctgctc

SEQ ID NO: 3113912 - DNA, 25 bp, Homo sapien
tcagagcaggatgtctgaagacacc

SEQ ID NO: 3113913 - DNA, 25 bp, Homo sapien
ccctgggacgtgtggtaagctgcca

SEQ ID NO: 3113914 - DNA, 25 bp, Homo sapien
taagttcctacttttctgaagtgtc

SEQ ID NO: 3113915 - DNA, 25 bp, Homo sapien
tacttggagcgacaccactgtggtg

SEQ ID NO: 3113916 - DNA, 25 bp, Homo sapien
tatttctttctatgggagcgtgggt

SEQ ID NO: 3113917 - DNA, 25 bp, Homo sapien
tgctgggattcctgttttaagttcc

SEQ ID NO: 3113918 - DNA, 25 bp, Homo sapien
gaccaagacttgtcctcactctcgg

SEQ ID NO: 3113919 - DNA, 25 bp, Homo sapien
ctgggacggcacagacgggacggtc

SEQ ID NO: 3113920 - DNA, 25 bp, Homo sapien
gtctctttgtttggggactgaccaa

SEQ ID NO: 3113921 - DNA, 25 bp, Homo sapien
cggcacagacgggacggtctctttg

SEQ ID NO: 3113922 - DNA, 25 bp, Homo sapien
ctttgaaccaaaagctgacacgtgg

SEQ ID NO: 3113923 - DNA, 25 bp, Homo sapien
caggagaggcctgttgctgccgtct

SEQ ID NO: 3113924 - DNA, 25 bp, Homo sapien
gcagaggatatggacctgccaggct

SEQ ID NO: 3113925 - DNA, 25 bp, Homo sapien
tgagtagctgaagcacggtcagctg

SEQ ID NO: 3113926 - DNA, 25 bp, Homo sapien
tcacctggagtgacgtggtgctccc

SEQ ID NO: 3113927 - DNA, 25 bp, Homo sapien
tgcttcagttgtagaaccaggtacc

SEQ ID NO: 3113928 - DNA, 25 bp, Homo sapien
tcacgccagcgtgaaaccagggtgg

SEQ ID NO: 3113929 - DNA, 25 bp, Homo sapien
ctggagatgaggctcacgccagcgt

SEQ ID NO: 3113930 - DNA, 25 bp, Homo sapien
cccagaccagctcttgtgccgtggc

SEQ ID NO: 3113931 - DNA, 25 bp, Homo sapien
gccccagaccagctcttgtgccgtg

SEQ ID NO: 3113932 - DNA, 25 bp, Homo sapien
ccccagaccagctcttgtgccgtgg

SEQ ID NO: 3113933 - DNA, 25 bp, Homo sapien
gggtaaagctatggttcagaaactg

SEQ ID NO: 3113934 - DNA, 25 bp, Homo sapien
cacgtgatgtggaatacactggccc

SEQ ID NO: 3113935 - DNA, 25 bp, Homo sapien
catcataaacgaaaagggtaaagct

SEQ ID NO: 3113936 - DNA, 25 bp, Homo sapien
gatatgggtgttggcatcataaacg

SEQ ID NO: 3113937 - DNA, 25 bp, Homo sapien
tcagtgttcatcgaagacgtacaag

SEQ ID NO: 3113938 - DNA, 25 bp, Homo sapien
tcatcgaagacgtacaagcagcgtc

SEQ ID NO: 3113939 - DNA, 25 bp, Homo sapien
tacaagcagcgtcttacgacgatgt

SEQ ID NO: 3113940 - DNA, 25 bp, Homo sapien
gtcttacgacgatgttgctgcagct

SEQ ID NO: 3113941 - DNA, 25 bp, Homo sapien
ggactgtgttttctggcttccaaaa

SEQ ID NO: 3113942 - DNA, 25 bp, Homo sapien
tgtgttttctggcttccaaaagaaa

SEQ ID NO: 3113943 - DNA, 25 bp, Homo sapien
ctgtggactgtgttttctggcttcc

SEQ ID NO: 3113944 - DNA, 25 bp, Homo sapien
actgtgttttctggcttccaaaaga

SEQ ID NO: 3113945 - DNA, 25 bp, Homo sapien
gacgaaaactctgcacgtacttcct

SEQ ID NO: 3113946 - DNA, 25 bp, Homo sapien
cgtacttcctatgacaagtgcgatt

SEQ ID NO: 3113947 - DNA, 25 bp, Homo sapien
ttctctctggatgacgaaaactctg

SEQ ID NO: 3113948 - DNA, 25 bp, Homo sapien
tatgacaagtgcgattggcgcccac

SEQ ID NO: 3113949 - DNA, 25 bp, Homo sapien
agccgagcaggatggactcctgacc

SEQ ID NO: 3113950 - DNA, 25 bp, Homo sapien
gcaggatggactcctgaccgcagca

SEQ ID NO: 3113951 - DNA, 25 bp, Homo sapien
tcaaagaggaacgaaggctcgcacg

SEQ ID NO: 3113952 - DNA, 25 bp, Homo sapien
tcctgaccgcagcatctcaaagagg

SEQ ID NO: 3113953 - DNA, 25 bp, Homo sapien
ctttggaggaattgtgtcggagtgt

SEQ ID NO: 3113954 - DNA, 25 bp, Homo sapien
ttgtgtcggagtgtagaattttcac

SEQ ID NO: 3113955 - DNA, 25 bp, Homo sapien
tagaattttcacagtgtagctcgcc

SEQ ID NO: 3113956 - DNA, 25 bp, Homo sapien
tgtagctcgccatgcatcaggcaca

SEQ ID NO: 3113957 - DNA, 25 bp, Homo sapien
cttcagtagggtggcctcagtcctg

SEQ ID NO: 3113958 - DNA, 25 bp, Homo sapien
agtgatgcgttgacagccacctgca

SEQ ID NO: 3113959 - DNA, 25 bp, Homo sapien
cctgtgaagtgatgcgttgacagcc

SEQ ID NO: 3113960 - DNA, 25 bp, Homo sapien
ctgagcagcttcagtagggtggcct

SEQ ID NO: 3113961 - DNA, 25 bp, Homo sapien
tttcccagtctctggagcagttccc

SEQ ID NO: 3113962 - DNA, 25 bp, Homo sapien
gaagcatttcccagtctctggagca

SEQ ID NO: 3113963 - DNA, 25 bp, Homo sapien
gcatttcccagtctctggagcagtt

SEQ ID NO: 3113964 - DNA, 25 bp, Homo sapien
ggaagcatttcccagtctctggagc

SEQ ID NO: 3113965 - DNA, 25 bp, Homo sapien
cagttcagaggtgttgtagcttgcc

SEQ ID NO: 3113966 - DNA, 25 bp, Homo sapien
cagtaatgcactttccctagtggaa

SEQ ID NO: 3113967 - DNA, 25 bp, Homo sapien
gcagagtaagccagaacattcactg

SEQ ID NO: 3113968 - DNA, 25 bp, Homo sapien
tatcagtcttagagtcattcaggtg

SEQ ID NO: 3113969 - DNA, 25 bp, Homo sapien
ctctgagaagctggcggtttccgcc

SEQ ID NO: 3113970 - DNA, 25 bp, Homo sapien
cgggccctccttcgtagtgtgaaca

SEQ ID NO: 3113971 - DNA, 25 bp, Homo sapien
caccgagagattgagtggaaggtcc

SEQ ID NO: 3113972 - DNA, 25 bp, Homo sapien
gagggtctccgttcacaacattgag

SEQ ID NO: 3113973 - DNA, 25 bp, Homo sapien
ggccagcccgtgctctgtgtaaaag

SEQ ID NO: 3113974 - DNA, 25 bp, Homo sapien
tgtggaaagacacggccttggcagt

SEQ ID NO: 3113975 - DNA, 25 bp, Homo sapien
ttgggttccgtagactgacagcagg

SEQ ID NO: 3113976 - DNA, 25 bp, Homo sapien
tttaacctggaaggactcgaggctg

SEQ ID NO: 3113977 - DNA, 25 bp, Homo sapien
aagaggctggcttcgccgtggcatc

SEQ ID NO: 3113978 - DNA, 25 bp, Homo sapien
gagtccatttgcgacagacttggaa

SEQ ID NO: 3113979 - DNA, 25 bp, Homo sapien
tttagggcacttgggaactcgatcc

SEQ ID NO: 3113980 - DNA, 25 bp, Homo sapien
tcgagtcgaaggcagagagtccatt

SEQ ID NO: 3113981 - DNA, 25 bp, Homo sapien
gacttctcattgcaagtaaagggac

SEQ ID NO: 3113982 - DNA, 25 bp, Homo sapien
acattggaaacatttatacttgaag

SEQ ID NO: 3113983 - DNA, 25 bp, Homo sapien
tctcattgcaagtaaagggacattg

SEQ ID NO: 3113984 - DNA, 25 bp, Homo sapien
gcaagtaaagggacattggaaacat

SEQ ID NO: 3113985 - DNA, 25 bp, Homo sapien
tttttggcttccgctctttgaggag

SEQ ID NO: 3113986 - DNA, 25 bp, Homo sapien
cttttttggcttccgctctttgagg

SEQ ID NO: 3113987 - DNA, 25 bp, Homo sapien
ttggcttccgctctttgaggagact

SEQ ID NO: 3113988 - DNA, 25 bp, Homo sapien
tttggcttccgctctttgaggagac

SEQ ID NO: 3113989 - DNA, 25 bp, Homo sapien
tttcctccttatgccttggactctg

SEQ ID NO: 3113990 - DNA, 25 bp, Homo sapien
ttcctccttatgccttggactctgg

SEQ ID NO: 3113991 - DNA, 25 bp, Homo sapien
tgtcgacgccgcgtgcacttcgtgg

SEQ ID NO: 3113992 - DNA, 25 bp, Homo sapien
cgtgcacttcgtggtttctaaagag

SEQ ID NO: 3113993 - DNA, 25 bp, Homo sapien
gtggcgtgatcactgtcgacgccgc

SEQ ID NO: 3113994 - DNA, 25 bp, Homo sapien
gcgtgatcactgtcgacgccgcgtg

SEQ ID NO: 3113995 - DNA, 25 bp, Homo sapien
agcctccgtcatctggcggctggga

SEQ ID NO: 3113996 - DNA, 25 bp, Homo sapien
gatcacttctatcagaagccagctc

SEQ ID NO: 3113997 - DNA, 25 bp, Homo sapien
tttcccgatcacttctatcagaagc

SEQ ID NO: 3113998 - DNA, 25 bp, Homo sapien
agggtctggcgagagcctccgtcat

SEQ ID NO: 3113999 - DNA, 25 bp, Homo sapien
agccggcctcggctcgccacagtgc

SEQ ID NO: 3114000 - DNA, 25 bp, Homo sapien
gccacagtgccacaggatccctgaa

SEQ ID NO: 3114001 - DNA, 25 bp, Homo sapien
ggacagcgagtgaggggtcggcgag

SEQ ID NO: 3114002 - DNA, 25 bp, Homo sapien
tgaggggtcggcgagaagccggcct

SEQ ID NO: 3114003 - DNA, 25 bp, Homo sapien
gtctgatctgaaagagtcacctcgg

SEQ ID NO: 3114004 - DNA, 25 bp, Homo sapien
ctgctgactccccaccgtgttttct

SEQ ID NO: 3114005 - DNA, 25 bp, Homo sapien
gctgctgactccccaccgtgttttc

SEQ ID NO: 3114006 - DNA, 25 bp, Homo sapien
tgatctgaaagagtcacctcggggc

SEQ ID NO: 3114007 - DNA, 25 bp, Homo sapien
aggaggcatggccagcagcgcctgc

SEQ ID NO: 3114008 - DNA, 25 bp, Homo sapien
catgctttcacggtcacccggttcc

SEQ ID NO: 3114009 - DNA, 25 bp, Homo sapien
gaatttgtacatcctgtgagtgaca

SEQ ID NO: 3114010 - DNA, 25 bp, Homo sapien
taaatggttgaaatactgttggtga

SEQ ID NO: 3114011 - DNA, 25 bp, Homo sapien
cacccgtcccagaacaaaggctttg

SEQ ID NO: 3114012 - DNA, 25 bp, Homo sapien
agctgggcctggagcgactcaagca

SEQ ID NO: 3114013 - DNA, 25 bp, Homo sapien
gaacaaaggctttgagagtctggga

SEQ ID NO: 3114014 - DNA, 25 bp, Homo sapien
gcctggagcgactcaagcagcaact

SEQ ID NO: 3114015 - DNA, 25 bp, Homo sapien
ctgccaccttcgctgtgatgagttt

SEQ ID NO: 3114016 - DNA, 25 bp, Homo sapien
ggatgaggacaagatgtttgttacc

SEQ ID NO: 3114017 - DNA, 25 bp, Homo sapien
cagggacagcgaggcacggtttgga

SEQ ID NO: 3114018 - DNA, 25 bp, Homo sapien
cagcgaggcacggtttggatgagga

SEQ ID NO: 3114019 - DNA, 25 bp, Homo sapien
cgaggcacggtttggatgaggacaa

SEQ ID NO: 3114020 - DNA, 25 bp, Homo sapien
ctcagaggagcagatgattccctca

SEQ ID NO: 3114021 - DNA, 25 bp, Homo sapien
gatgattccctcaggatttaagaaa

SEQ ID NO: 3114022 - DNA, 25 bp, Homo sapien
aggacttcagttttcgaagccgcat

SEQ ID NO: 3114023 - DNA, 25 bp, Homo sapien
gagcagatgattccctcaggattta

SEQ ID NO: 3114024 - DNA, 25 bp, Homo sapien
cccaaaagagtatgttgttgcccaa

SEQ ID NO: 3114025 - DNA, 25 bp, Homo sapien
tgttgcccaaacagtgtaacccaga

SEQ ID NO: 3114026 - DNA, 25 bp, Homo sapien
ccagaaatctagctgtttacagtaa

SEQ ID NO: 3114027 - DNA, 25 bp, Homo sapien
ccgactttgtactctggcagctgct

SEQ ID NO: 3114028 - DNA, 25 bp, Homo sapien
ttcctgctcaacgtgcactgggccg

SEQ ID NO: 3114029 - DNA, 25 bp, Homo sapien
cgctgagctgagagctcgcttctct

SEQ ID NO: 3114030 - DNA, 25 bp, Homo sapien
ctcaacgtgcactgggccgggtgtt

SEQ ID NO: 3114031 - DNA, 25 bp, Homo sapien
tgagagctcgcttctcttcctgctc

SEQ ID NO: 3114032 - DNA, 25 bp, Homo sapien
ggcgttgttgcataactcaaggaca

SEQ ID NO: 3114033 - DNA, 25 bp, Homo sapien
cattgtcgcctacccactgtgatgt

SEQ ID NO: 3114034 - DNA, 25 bp, Homo sapien
tactccaattgagcttttccagtga

SEQ ID NO: 3114035 - DNA, 25 bp, Homo sapien
tgtgatgtcgcaagaacgagatttg

SEQ ID NO: 3114036 - DNA, 25 bp, Homo sapien
gtgctcaggaagcagtacctgttct

SEQ ID NO: 3114037 - DNA, 25 bp, Homo sapien
tgtggccggtcttggtgccggtggc

SEQ ID NO: 3114038 - DNA, 25 bp, Homo sapien
agtacctgttctcacgcttgctggg

SEQ ID NO: 3114039 - DNA, 25 bp, Homo sapien
ctcacgcttgctgggtgaaactgga

SEQ ID NO: 3114040 - DNA, 25 bp, Homo sapien
ggagggatttaagtgtaggagttga

SEQ ID NO: 3114041 - DNA, 25 bp, Homo sapien
cagtgggagggatttaagtgtagga

SEQ ID NO: 3114042 - DNA, 25 bp, Homo sapien
gggatttaagtgtaggagttgagcc

SEQ ID NO: 3114043 - DNA, 25 bp, Homo sapien
ctgttccagtgggagggatttaagt

SEQ ID NO: 3114044 - DNA, 25 bp, Homo sapien
cgactcccagcgctgtctccagact

SEQ ID NO: 3114045 - DNA, 25 bp, Homo sapien
cccagcaagcaagttatctcgccga

SEQ ID NO: 3114046 - DNA, 25 bp, Homo sapien
ctgtctgtgagtgcggcgtcggtgc

SEQ ID NO: 3114047 - DNA, 25 bp, Homo sapien
agcaagttatctcgccgactcccag

SEQ ID NO: 3114048 - DNA, 25 bp, Homo sapien
ctgccggagcttgcccgacaccagg

SEQ ID NO: 3114049 - DNA, 25 bp, Homo sapien
tgccggagcttgcccgacaccaggc

SEQ ID NO: 3114050 - DNA, 25 bp, Homo sapien
ccagttgtagcgaaggctggcatgt

SEQ ID NO: 3114051 - DNA, 25 bp, Homo sapien
tgcttgcttaatcggaggccgcacc

SEQ ID NO: 3114052 - DNA, 25 bp, Homo sapien
aggccgcaccccagttgtagcgaag

SEQ ID NO: 3114053 - DNA, 25 bp, Homo sapien
actgcttgcttgcttaatcggaggc

SEQ ID NO: 3114054 - DNA, 25 bp, Homo sapien
agagggcgatgagcagagttacacc

SEQ ID NO: 3114055 - DNA, 25 bp, Homo sapien
gatgagcagagttacaccagaggtg

SEQ ID NO: 3114056 - DNA, 25 bp, Homo sapien
aacatggccgaggtacccagcccag

SEQ ID NO: 3114057 - DNA, 25 bp, Homo sapien
ggaacatggccgaggtacccagccc

SEQ ID NO: 3114058 - DNA, 25 bp, Homo sapien
ctcttgcctggtgagtgtgaggaga

SEQ ID NO: 3114059 - DNA, 25 bp, Homo sapien
ttgtactgggcgcacagtccccggc

SEQ ID NO: 3114060 - DNA, 25 bp, Homo sapien
tgtggcctgtgggtagcctttgtac

SEQ ID NO: 3114061 - DNA, 25 bp, Homo sapien
ttcgccctgagcggcctcggaaatg

SEQ ID NO: 3114062 - DNA, 25 bp, Homo sapien
tgtgtcttcccccgctctgctgcgt

SEQ ID NO: 3114063 - DNA, 25 bp, Homo sapien
ctctgtgtcttcccccgctctgctg

SEQ ID NO: 3114064 - DNA, 25 bp, Homo sapien
cttcccccgctctgctgcgtcttct

SEQ ID NO: 3114065 - DNA, 25 bp, Homo sapien
gtcttcccccgctctgctgcgtctt

SEQ ID NO: 3114066 - DNA, 25 bp, Homo sapien
cctctgcctgctgcgtcttctccac

SEQ ID NO: 3114067 - DNA, 25 bp, Homo sapien
cacctcgatgttcccctctgcctgc

SEQ ID NO: 3114068 - DNA, 25 bp, Homo sapien
gctgcgtcttctccacctcgatgtt

SEQ ID NO: 3114069 - DNA, 25 bp, Homo sapien
cctctgcctgctgcgtcttctccat

SEQ ID NO: 3114070 - DNA, 25 bp, Homo sapien
ctgcctgctgcgtcttctcacctcg

SEQ ID NO: 3114071 - DNA, 25 bp, Homo sapien
tctgcctgctgcgtcttctcacctc

SEQ ID NO: 3114072 - DNA, 25 bp, Homo sapien
ttcagcttgtaccacgaatattcag

SEQ ID NO: 3114073 - DNA, 25 bp, Homo sapien
tgtaccacgaatattcagagccaac

SEQ ID NO: 3114074 - DNA, 25 bp, Homo sapien
gggtcgtattcagcttgtaccacga

SEQ ID NO: 3114075 - DNA, 25 bp, Homo sapien
tgtgtttcttcaggggtcgtattca

SEQ ID NO: 3114076 - DNA, 25 bp, Homo sapien
tgtcggtgtgaacgggccctgctca

SEQ ID NO: 3114077 - DNA, 25 bp, Homo sapien
cagccggtccatggctgtcttagga

SEQ ID NO: 3114078 - DNA, 25 bp, Homo sapien
gatcccgcttggtggcgaggagggt

SEQ ID NO: 3114079 - DNA, 25 bp, Homo sapien
ggctaccccgtgtagacttgctggg

SEQ ID NO: 3114080 - DNA, 25 bp, Homo sapien
ttgctctgtggtttccggcactgca

SEQ ID NO: 3114081 - DNA, 25 bp, Homo sapien
cctgttgggtgagcagacacacaag

SEQ ID NO: 3114082 - DNA, 25 bp, Homo sapien
ctggctttcagggagattgggcctt

SEQ ID NO: 3114083 - DNA, 25 bp, Homo sapien
acttcagggctacggaagttgctct

SEQ ID NO: 3114084 - DNA, 25 bp, Homo sapien
aattctcccgaatgcctgtttttgc

SEQ ID NO: 3114085 - DNA, 25 bp, Homo sapien
ctttcaagttgttgtgcttgagcca

SEQ ID NO: 3114086 - DNA, 25 bp, Homo sapien
ccagcgcacagtgttgagcagagcg

SEQ ID NO: 3114087 - DNA, 25 bp, Homo sapien
ttagctgtgggcgttccgagtgcca

SEQ ID NO: 3114088 - DNA, 25 bp, Homo sapien
tccttgtgtgctgtgtttgcaggca

SEQ ID NO: 3114089 - DNA, 25 bp, Homo sapien
tgacagtggagagccagcagacgcc

SEQ ID NO: 3114090 - DNA, 25 bp, Homo sapien
cactggctttgatggatgatggaga

SEQ ID NO: 3114091 - DNA, 25 bp, Homo sapien
tggagagggtcctggtgtcttctgc

SEQ ID NO: 3114092 - DNA, 25 bp, Homo sapien
accccagcgcccttgtcttgtttca

SEQ ID NO: 3114093 - DNA, 25 bp, Homo sapien
ccccagcgcccttgtcttgtttcat

SEQ ID NO: 3114094 - DNA, 25 bp, Homo sapien
caccccagcgcccttgtcttgtttc

SEQ ID NO: 3114095 - DNA, 25 bp, Homo sapien
cacataccgggctttttacgtctct

SEQ ID NO: 3114096 - DNA, 25 bp, Homo sapien
gcacataccgggctttttacgtctc

SEQ ID NO: 3114097 - DNA, 25 bp, Homo sapien
tgtggccgtggcacataccgggctt

SEQ ID NO: 3114098 - DNA, 25 bp, Homo sapien
gccgtggcacataccgggcttttta

SEQ ID NO: 3114099 - DNA, 25 bp, Homo sapien
ttaagtagggccaggtgtctgtcct

SEQ ID NO: 3114100 - DNA, 25 bp, Homo sapien
gtagggccaggtgtctgtcctctca

SEQ ID NO: 3114101 - DNA, 25 bp, Homo sapien
aagtagggccaggtgtctgtcctct

SEQ ID NO: 3114102 - DNA, 25 bp, Homo sapien
tagggccaggtgtctgtcctctcac

SEQ ID NO: 3114103 - DNA, 25 bp, Homo sapien
tggctgccggcgtgcgggtgtgact

SEQ ID NO: 3114104 - DNA, 25 bp, Homo sapien
gtgtgactgtcgatgagagctctga

SEQ ID NO: 3114105 - DNA, 25 bp, Homo sapien
ctctgagctgggatatctggtgacg

SEQ ID NO: 3114106 - DNA, 25 bp, Homo sapien
atctggtgacggctgcccctgcttg

SEQ ID NO: 3114107 - DNA, 25 bp, Homo sapien
cacaggaggtttgcggcatggctgc

SEQ ID NO: 3114108 - DNA, 25 bp, Homo sapien
tgctgttgacgctccacaggaggtt

SEQ ID NO: 3114109 - DNA, 25 bp, Homo sapien
tccacaggaggtttgcggcatggct

SEQ ID NO: 3114110 - DNA, 25 bp, Homo sapien
aggtttgcggcatggctgccatctg

SEQ ID NO: 3114111 - DNA, 25 bp, Homo sapien
tgcgaccctgcacagtgggtggtgg

SEQ ID NO: 3114112 - DNA, 25 bp, Homo sapien
tgactctgcgaccctgcacagtggg

SEQ ID NO: 3114113 - DNA, 25 bp, Homo sapien
tctgcgaccctgcacagtgggtggt

SEQ ID NO: 3114114 - DNA, 25 bp, Homo sapien
actctgcgaccctgcacagtgggtg

SEQ ID NO: 3114115 - DNA, 25 bp, Homo sapien
ctgtggaaagagcgggcttggggct

SEQ ID NO: 3114116 - DNA, 25 bp, Homo sapien
ttggtgcgtgatcccaccgaggccg

SEQ ID NO: 3114117 - DNA, 25 bp, Homo sapien
gggcttggtgcgtgatcccaccgag

SEQ ID NO: 3114118 - DNA, 25 bp, Homo sapien
gcttggtgcgtgatcccaccgaggc

SEQ ID NO: 3114119 - DNA, 25 bp, Homo sapien
tgccccactgtgcagcgttgcaggt

SEQ ID NO: 3114120 - DNA, 25 bp, Homo sapien
cgttgcaggtgcagcagacatgagg

SEQ ID NO: 3114121 - DNA, 25 bp, Homo sapien
ctgtgcttgccccactgtgcagcgt

SEQ ID NO: 3114122 - DNA, 25 bp, Homo sapien
gcaggccgagcaccaagtctgtgct

SEQ ID NO: 3114123 - DNA, 25 bp, Homo sapien
tagcaaattcaacactggcgttttt

SEQ ID NO: 3114124 - DNA, 25 bp, Homo sapien
ctcctagcaaattcaacactggcgt

SEQ ID NO: 3114125 - DNA, 25 bp, Homo sapien
cctagcaaattcaacactggcgttt

SEQ ID NO: 3114126 - DNA, 25 bp, Homo sapien
ttttttttctgagcaagttgagctg

SEQ ID NO: 3114127 - DNA, 25 bp, Homo sapien
cagggacggccacacggatggctgt

SEQ ID NO: 3114128 - DNA, 25 bp, Homo sapien
tgcagggacggccacgcggctctcg

SEQ ID NO: 3114129 - DNA, 25 bp, Homo sapien
tctcgggagccgtttcctgcgctcg

SEQ ID NO: 3114130 - DNA, 25 bp, Homo sapien
accggcaggctccacgctgagggtc

SEQ ID NO: 3114131 - DNA, 25 bp, Homo sapien
cagtgccgaaatgggaaggcctgac

SEQ ID NO: 3114132 - DNA, 25 bp, Homo sapien
cgcccagtgccgaaatgggaaggcc

SEQ ID NO: 3114133 - DNA, 25 bp, Homo sapien
cctgacagggcgatgcggtctgcac

SEQ ID NO: 3114134 - DNA, 25 bp, Homo sapien
gcgatgcggtctgcaccagctacat

SEQ ID NO: 3114135 - DNA, 25 bp, Homo sapien
ctgtgctggcgtgtggggccctgac

SEQ ID NO: 3114136 - DNA, 25 bp, Homo sapien
cttgcgggtgtcatggagcaggatt

SEQ ID NO: 3114137 - DNA, 25 bp, Homo sapien
gtctcttgcgggtgtcatggagcag

SEQ ID NO: 3114138 - DNA, 25 bp, Homo sapien
gcgggtgtcatggagcaggattgga

SEQ ID NO: 3114139 - DNA, 25 bp, Homo sapien
tgtcatggagcaggattggaggttt

SEQ ID NO: 3114140 - DNA, 25 bp, Homo sapien
agcagtgtccaggtgcatgcgttgg

SEQ ID NO: 3114141 - DNA, 25 bp, Homo sapien
gcgttgggcgtgcaggaggcctgag

SEQ ID NO: 3114142 - DNA, 25 bp, Homo sapien
ccaggtgcatgcgttgggcgtgcag

SEQ ID NO: 3114143 - DNA, 25 bp, Homo sapien
catgcgttgggcgtgcaggaggcct

SEQ ID NO: 3114144 - DNA, 25 bp, Homo sapien
ccacatttgggcagcgctttcctct

SEQ ID NO: 3114145 - DNA, 25 bp, Homo sapien
tgaaggtgccacagcctgttagttt

SEQ ID NO: 3114146 - DNA, 25 bp, Homo sapien
gttttgatgtgttggccacgaacag

SEQ ID NO: 3114147 - DNA, 25 bp, Homo sapien
agatgcccgaggctatggagttgcc

SEQ ID NO: 3114148 - DNA, 25 bp, Homo sapien
agtgcctcctgccggtgatggtgct

SEQ ID NO: 3114149 - DNA, 25 bp, Homo sapien
catttacaagaagtgagagatactc

SEQ ID NO: 3114150 - DNA, 25 bp, Homo sapien
ggtttgcagattgatggcagccctg

SEQ ID NO: 3114151 - DNA, 25 bp, Homo sapien
ctggcctttaccctcagtgcctcct

SEQ ID NO: 3114152 - DNA, 25 bp, Homo sapien
agtcagcactgtaggagccgtggcc

SEQ ID NO: 3114153 - DNA, 25 bp, Homo sapien
ccctgcatgggttattcttgaagtc

SEQ ID NO: 3114154 - DNA, 25 bp, Homo sapien
gccgtggccggctttgcattttcat

SEQ ID NO: 3114155 - DNA, 25 bp, Homo sapien
gatttctctgcgtggctgttttgca

SEQ ID NO: 3114156 - DNA, 25 bp, Homo sapien
tgactgcaatctcgaggtaggccca

SEQ ID NO: 3114157 - DNA, 25 bp, Homo sapien
taggcccattcgtcgaggtacatcg

SEQ ID NO: 3114158 - DNA, 25 bp, Homo sapien
gattcttgggcgcaggtgatcgaca

SEQ ID NO: 3114159 - DNA, 25 bp, Homo sapien
cagttgtcgccgtgatcctgaaggc

SEQ ID NO: 3114160 - DNA, 25 bp, Homo sapien
agaccgtgtgtttcccgaggcagct

SEQ ID NO: 3114161 - DNA, 25 bp, Homo sapien
ggcagctgtgaacacgcacgtccct

SEQ ID NO: 3114162 - DNA, 25 bp, Homo sapien
gagggtcctcctcctatccagggag

SEQ ID NO: 3114163 - DNA, 25 bp, Homo sapien
tgctcctcttcggaggagaacagcg

SEQ ID NO: 3114164 - DNA, 25 bp, Homo sapien
ctctccccagtggccactctggcag

SEQ ID NO: 3114165 - DNA, 25 bp, Homo sapien
agtggccactctggcagcgctgctg

SEQ ID NO: 3114166 - DNA, 25 bp, Homo sapien
agcggctgtggcctctgtctgctgc

SEQ ID NO: 3114167 - DNA, 25 bp, Homo sapien
gctggtggtcttcagggagcagtgc

SEQ ID NO: 3114168 - DNA, 25 bp, Homo sapien
gaggccgtggaaagaccctgaatgc

SEQ ID NO: 3114169 - DNA, 25 bp, Homo sapien
tttcatggtgaaaatcctcacggat

SEQ ID NO: 3114170 - DNA, 25 bp, Homo sapien
ccctgaatgcagacgtgtgacggct

SEQ ID NO: 3114171 - DNA, 25 bp, Homo sapien
tgtctaagagctgtcaacatcactg

SEQ ID NO: 3114172 - DNA, 25 bp, Homo sapien
cacgggcatggtcgtggtctgccca

SEQ ID NO: 3114173 - DNA, 25 bp, Homo sapien
cagcctcctgttggccccgtgaggg

SEQ ID NO: 3114174 - DNA, 25 bp, Homo sapien
tttgaagccccttgagccgcccctg

SEQ ID NO: 3114175 - DNA, 25 bp, Homo sapien
agctgccacgtgtggaccggcacgg

SEQ ID NO: 3114176 - DNA, 25 bp, Homo sapien
ccaagggtgcccttggagccgtgcc

SEQ ID NO: 3114177 - DNA, 25 bp, Homo sapien
caggcttgtccaacgggttcttaga

SEQ ID NO: 3114178 - DNA, 25 bp, Homo sapien
ttttggaggtcctgggtgcgtctcc

SEQ ID NO: 3114179 - DNA, 25 bp, Homo sapien
ggcttctgacgcctcagcctggagc

SEQ ID NO: 3114180 - DNA, 25 bp, Homo sapien
ctactgtgtagcacgctctgctgcc

SEQ ID NO: 3114181 - DNA, 25 bp, Homo sapien
tagcacgctctgctgccgtgcgtct

SEQ ID NO: 3114182 - DNA, 25 bp, Homo sapien
acgctctgctgccgtgcgtctgccg

SEQ ID NO: 3114183 - DNA, 25 bp, Homo sapien
tgtgtagcacgctctgctgccgtgc

SEQ ID NO: 3114184 - DNA, 25 bp, Homo sapien
tgcatctgacgtgattttggagctg

SEQ ID NO: 3114185 - DNA, 25 bp, Homo sapien
tcatgcatctgacgtgattttggag

SEQ ID NO: 3114186 - DNA, 25 bp, Homo sapien
catctgacgtgattttggagctgcc

SEQ ID NO: 3114187 - DNA, 25 bp, Homo sapien
tgacgtgattttggagctgccagcc

SEQ ID NO: 3114188 - DNA, 25 bp, Homo sapien
cactcagggtgggacgctctgtgca

SEQ ID NO: 3114189 - DNA, 25 bp, Homo sapien
tccccaggtctgtgattgttgcttc

SEQ ID NO: 3114190 - DNA, 25 bp, Homo sapien
atagcgttgccaggccatcgctcgg

SEQ ID NO: 3114191 - DNA, 25 bp, Homo sapien
tccgggatgcagacacgtctgccgc

SEQ ID NO: 3114192 - DNA, 25 bp, Homo sapien
tgggatgcagacaagtctgccggtt

SEQ ID NO: 3114193 - DNA, 25 bp, Homo sapien
cccagggtgcagagcgtggtggttt

SEQ ID NO: 3114194 - DNA, 25 bp, Homo sapien
ggtttgtggccatccttgcagtgtg

SEQ ID NO: 3114195 - DNA, 25 bp, Homo sapien
gagggactttgttgttgccgtctcc

SEQ ID NO: 3114196 - DNA, 25 bp, Homo sapien
gaggccgtgtactcccatagctctg

SEQ ID NO: 3114197 - DNA, 25 bp, Homo sapien
tgccgccgatgaggggtgcagagct

SEQ ID NO: 3114198 - DNA, 25 bp, Homo sapien
tcaggccgcttgccgccgatgaggg

SEQ ID NO: 3114199 - DNA, 25 bp, Homo sapien
cagcatcctggggaggtcccggaac

SEQ ID NO: 3114200 - DNA, 25 bp, Homo sapien
ccgcttgccgccgatgaggggtgca

SEQ ID NO: 3114201 - DNA, 25 bp, Homo sapien
gctcccagccgatacgggcctgctg

SEQ ID NO: 3114202 - DNA, 25 bp, Homo sapien
tgacagccccgcacccgctctggat

SEQ ID NO: 3114203 - DNA, 25 bp, Homo sapien
ttctcgctcccagccgatacgggcc

SEQ ID NO: 3114204 - DNA, 25 bp, Homo sapien
ctctggatggaagcttctcgctccc

SEQ ID NO: 3114205 - DNA, 25 bp, Homo sapien
agcttgattggggtggaaaatgcac

SEQ ID NO: 3114206 - DNA, 25 bp, Homo sapien
ttgatgtcgttgtggagcccgctct

SEQ ID NO: 3114207 - DNA, 25 bp, Homo sapien
tctgggcctcggcacgtctgagctt

SEQ ID NO: 3114208 - DNA, 25 bp, Homo sapien
tggtggccgtgttttgggctgcgtt

SEQ ID NO: 3114209 - DNA, 25 bp, Homo sapien
ccccacggctcaggtctgtcaactt

SEQ ID NO: 3114210 - DNA, 25 bp, Homo sapien
attgtcccccgtgcatgtccccggc

SEQ ID NO: 3114211 - DNA, 25 bp, Homo sapien
gtccccggcgtccttcatgttgacg

SEQ ID NO: 3114212 - DNA, 25 bp, Homo sapien
gtccttcatgttgacgcgggccccg

SEQ ID NO: 3114213 - DNA, 25 bp, Homo sapien
tctcgttagaaccagggtcggccac

SEQ ID NO: 3114214 - DNA, 25 bp, Homo sapien
gccctgtcctcgtggctctttgatc
